United States Patent Application Publication US 2015/0240253 A1 - sequence listing, part 25

SEQ ID NO: 117001 - DNA, 332 bp, Zea Mays
ctgggacctcacagttactagacattctgccttcctgtttggggaggaaaggagggacacggaggagggtttgggctcgatttcttttgaatcaccttttctccaagttcccttattgatggaactagttgtgcactaggtacctactaggatggatgtggtccgcaccggtgcgtctaacagagttgatgaagacgcgaccaaacttgaatggcagacaacgagcagctccggtgaagggagcggggaggatagttctagtgacgacaatccttgtcctcctatacctctaaggaagaaaaaaacatcagatgagcttgatgccgactata

SEQ ID NO: 117002 - DNA, 462 bp, Zea Mays
aggctttttaaaggggtaggagggtggacgtggtgaagaatggttttgattgaaaggtcggatcaccaacctttgtcgcttttcaggcccttggttggacctgtcacctccatagccctttgactttcctgggcctacatatttagcttcaactaccagcgcggtgctgacagccctactgtaggagaggttgaggtaggtagccatctttcgttgtagccggtcattaaggcccctcataaaacagttcctctttttcaggtcagtgttgacctagtcaattgtgtactgggacaaatgattgaacttgttgagatactgtgtaacaatatctccaccttgcttgagcttcatgaattcttcttgcttcatatggagcactccttctggaatgtagtgctcccgaaatgccaatttaaattcgtcccaggtgacttgatggccggcaggctgaatggccac

SEQ ID NO: 117003 - DNA, 773 bp, Zea Mays
cggatgggcaaactgaagttgtcaaccgtaccttgtcaaccatgttgcgtgctgtgttgaaaaagaatttgaagctctggggagactaccttccgcatgatgaatttgcttataacagggcagttcattccacaacaaactcttatccatttgaaatagtttatgggtttaaaccgcatactcccatgtatttttgcctttaccattactagaacaagttaacttagatgccacaaaaagatcagaccttatcaagcggttacatgcggagacaagaaagaatattgagcagaaatcagcacaatatgcaaagcacgcaaacaaaggaaagaaaaaggttacatttcagccaggagatcttgtatggttgcatctacgaaaggatcgctttccccaacagcgtaagagtaagttatctcctcggggtgatggtccgttcaaggttctccaaacgataaatgataatgcttacaaaattgagctgccacctgaatattccaatgtgagtacaacattcaatgtcaaagacttgcttccatttgttggtgagcctgagtcaaggatgactcctcaagagggggaggctaatgaggacacgcctagcattcactcatcttcaaatgaaactccacttgatattgttggtccaattacaaggagtagagctaaacaattgcagaaggaaattcattctcaggtgaacgctaaccttatgtttaataatcagtctatgttgaatgaacctatgcttttgagttcttgtttcaatgtcc

SEQ ID NO: 117004 - DNA, 518 bp, Zea Mays
gtcctcgtcggcactcctcctcctgttcatccttatgggttcgtctccgtctgaaggcgtctagttatgtctaagagctctctcctccgaccccccttgaccttgaggcgagtgtctctcttttataggccaggacaggggtcatctagcgatggcttcctcaggaaggagtcgtaagacagggtaaaaccaatgttttatcccgagtgatgccacgcgtactcgcggggctcggagctgcttggctgtcgcgtatttatagtggtggatgacgtgaggtgacaatggtcctaggtgccatcatttcggttacgccgacctcttgcttccgtagcctgggactcgacgcagcccgtcgtgtagtgccctatgggaggtctccgcactcatgcctagtctgatagaccataagtatgtcgtaggctgagggacgcgcgtgccattagtgtgccgcaatacaggggctcgtaggtcatgagagctatgcagcccgaggggtccgtatgtcatgagtggaa

SEQ ID NO: 117005 - DNA, 667 bp, Zea Mays
tgccattggttcctttggcagattactattatgggaagacgacagacataatgtttacaggaccatgcttagggtccgggtcacgtctcgcgaggaggtcccacagttcattgttttttcagaagctgatggctttattggtgactcgtggacagttcagtgcgaaatcatccagcaaaccttgctggggggtcaggcccaggacgaggacccagttccggtggccccggaggatggtcagtagcttcccctcgagttctttggtctgagtcaacctgtgcctgctgcggggtgggacctcaatttgccacctgaagacaatgcctaggccgagccagctgataatattcagggggacggggaccaatggattgtgaatgcatcgcctgtccagcagccccaacaagacctgccacctgacgagcaacaagtcagcaaccctcattttgacttgtcctcgaatagttcttctggtcccactctgggtgttccggtgcagaatggacagattcagaatgggcagattcctgctgacctggatgttgttgggacagtgcttccctttaatgcccctgcccttcctgttgtggatggtgttcccttgaatgaccttcaggagattgacgggccccctatccagggaggtccccatgtgccaggggatatt

SEQ ID NO: 117006 - DNA, 477 bp, Zea Mays
ctagatttgtggaaggcagcaagcctttgaccttagtaccagagcctttgcctcaattaatatagtgcctttatgaccgaggaccacgaccagaaaaaagtttgcgcttccgaccatggtgtagatttgttaagggaaagaaggagataggatcaaactcgggctctttaactgacaacatatccaagataggcaattatggctagtgtcttaggtggatcacacgacgtgattgagattgtgtacttgccaggcgatgtgtagcgcaacaaggcaaaagcatgagacgacgcacgagccaagctagcacgctcacgcagagcgaggtaaatagggcaaggctcgagggactgggcatggctaattgtgcaagtgtgttggcgaatgacagcatgagcttaagccgattccaatggttcaccctaacctttcccccaccctagatcagggaccttttgggggaaattgtcttctaat

SEQ ID NO: 117007 - DNA, 606 bp, Zea Mays
gttccacaatggtgctgtgctggtagtagtccaaaccgtaatatagacgcgagccgttacacaaatgatatcaccaaatactcaaaacaacaagctaacttataaaattgtgaaacggtggcacacaaactgtctttgttttgttgcacttggaattttatctcccaatattcttactacgattttttgctcttttttgtacgtgttttttttatgatcagtgcgactttttttgtgcacttgccttttcctttcccttgttttttgaactacagctagagaacagctagagaactaaaaatggtgatctaaacaagatggcgtgaactcgaaactctagcagcaagaaactttggaccagcaactcgacacaatgaagcaaccgtgaattcaacaagtcaaaaactaagtagcaaagcaaaggctcaaaatgtttttgggaatatttctgaactaaacttatatttggcaaaagtgtactgtaggtaaataaataaaaaagatggagatctctcaccgagcaacctgaaatttgataccacttgataaacccaacgggtagaagggtgcccgatctttcgatgagagatgatggaggtggaaaac

SEQ ID NO: 117008 - DNA, 492 bp, Zea Mays
tcacgagctatggtggatgatcgtgagtggggagtggtgcgctgatttcgtaacaagatagcaaagcaggtagggccttcgatttatagtgattggctatggtggttccaaattttggaggagagtgagactcatttccctggcggaatgattaccgagacccaccgtggagctcatgcactcaccggtcgacggtcacgactcaggggatgccacgaccacgacaccacggtgaatcagacgactacttgtctttcaccgggaacacggcgaacactggcgacgatatttaacctgaccgcaggggcaagtgggcatggcggtgatctagctcagggcctatgttcacctcacccagaatcttttcatccaccaagttatccactccagactatgcatgaatcttaccagtgacacgaatcatagtgcggagatcactggcgacgggtacactgcacctacaatattctttagacaattgtaccatggcga

SEQ ID NO: 117009 - DNA, 327 bp, Zea Mays
aatacttgatgcacaacttgagggggagcacacataacttgtgtcttttgagattaattgtatcttgagcgatcttgtgtagtcttaaggtggaaaagagaagatgagcaagaaatggagcaatcaggacctgggtacctctgtaaatcaagaaatgtgtatctcaagtcgtgagtaagtgcatatttttagattgctcatgctctataatatctggtgataatagatgcctattcttaaatatcatggagctatgataataaatgaacttgcaattggtatctttcaattggtagccgtgatagtttgcttcaattgacatctttt

SEQ ID NO: 117010 - DNA, 490 bp, Zea Mays
gttttggaccttcccgcttttctgctagccgctggtgctgactctgaggtgcacctctcctatctgcctggccttctcactcttttgactaccagcggcaggtatgttgaggaatgggtccgagttttctacgcgactgtatggatcgaccctgatcaccactagataaagtttcgttttgagcgagaggatgtcactattcatgccagccagatttgacaactctttggatttcacaagtcattgactcgtcttcacagcttatgctatggcacctctgaccctcctcgtcgccctcacggcggtgttgctcctggtacagcccacgtcgcagctctgttccgaccgcccttctcagatgggtcgcgacgctctccagtagacttcaccacaacaacaaagtttctatatcagcttatgagacggacacttctgccgcggatggggtacagggaggccaccactcatatccagctctggctccttggtg

SEQ ID NO: 117011 - DNA, 486 bp, Zea Mays
tgtctctgaagcagcaatggattccactgcgttagagacaactctttctggaacagcagcgccatgtgatcttagttgagcagacatcccatcaaccaaagcatgttatcaaaaacaagtgagtacgaagaaagtattttaccaggaggaacgatagaatgaaaaaagttgatttacctgaatattagaaaacaacgaaggcaatcccaagtcaggagaagttgtgttatgactcgatgaaggaagatcaactgggacaatctgaaaagcattgtcgggggttgattcagctcctccagcagatatcggaatcctgtcatccggtaccctgacctctaaggcgactccctcacttgaagttgaagaagtatgcatcactatcagtccatcagaatgtggtggagacgacccggcgtggacatccatggaggtatggcaaggagaacacgctcgaacatcctcgggggctgggtcacagctcgcacc

SEQ ID NO: 117012 - DNA, 668 bp, Zea Mays
ctcgcgagcctcgagcttattttccggccctatcctcaaccttggtcccttccctgcaaaagaactcattctcaggttggtcattgggtcgggccttgcttttcggaaagaaatgagaatcaggacaaattcaatccataagtgccctaggtactgtgctccataactcaacacgacagtagagcatccaggggaagaccgatgcgccgggtctccagctctccatcacaaatggcctagataaacacagctacacaggtgacagctatgttgaacgtgctgggggacattccaatcttacgcagcatggaatttgtgcgctcttatcatcctctgctcggcctccatccatcatgaaggcacgcaagatcacctcaccgaaatccaggaccagatgctcctcaactggctgcctacgtatagaagggaatgtcgtgcgggattaccagctagctggcctccaactccaatacaaacatttgcctctctctctctctcgcccacagccacccccgcagccagaaatgaggtacggcgagctggcgcacctgagccacccgcagcaccgtctccggctggagcacgcggagacgccgttccggtgcgatgggtgcggcgaggtgggcatcggggcgcgtttccgctgcccgcacccgggctgcgaccac

SEQ ID NO: 117013 - DNA, 349 bp, Zea Mays
agtgaggtgtgtcatggcgtcgccttgcaaggcctgcaagcagtacagtgctccagagtcaggatgcactggacggtgatcctcccaacctggtcgggatgcatggctcacacatcatttgcgtgactcactctgttgcaccacattgggtcatccctcttctcggcggggaagagtccaagtgggtgcatcatcatctctagggggtgatatccgcagaaggttgtcagagcttttagtgttgtggtctcagtggtgtcgtccgccctgaatctgacagtctcggaatctagggaacgccacccaggctacagaaggtgaaactccagggtcagccacaccctgcaac

SEQ ID NO: 117014 - DNA, 509 bp, Zea Mays
cgctgttgacaccatcacctgggcaaaattctcagccaatttcagaaactatcatattcctgctgggttgatgaagattaaggagttcctttcatttaggcagggaagcatgtctgtgagtgagtactgggataaattcatccagttgtccagatattctcctgaggaggttgctgaagatgaaaagaagcatgagttgttcttggaggaacacattgggccactccaatactagctgatgtctcattcatttccatctttctagagacttttggacaagaccatagctcttgcacacaagcgtgttcagctaggtgagatgaagaggactataactcagggatagggtgacaacaatagtcgtccttgttacactcagcctcagggtacactatctcgttcaggaggagagcaacagtcataccagtaccctgttcagcaaacaccgcaggccacacctcagacaccacgccctcatcaagatgccctagctagcacccaagcgagac

SEQ ID NO: 117015 - DNA, 1111 bp, Zea Mays
aggatttggattatttcgcagcattggatgtggctgcggcggagacttctctgcgtgtgatggatgctgttcccggtctgagtgttgggcgtaggcggcgaagggaggtggcgaagcgtagggtgagtgaggttgagggtggtcgtcttcgtgtggacagggctagcaagcggtaattgttggcttcgccggctggggtgagcgtaggtgagggggagttgcgaaatctttttgagggtgaagagctaaggataagctgtttaactatagggagatgggtatcatcccgaaagttgaaccaatgtaatgtgtgatgccctcgctgcacgtatgtaactgtaatttgtatgatgagtctgtgtgccttcgctgatccagccatgcccgtgggggacttgtgcatttgatctagcgcgtttattatgccggtccggctgcgcctgtaatcggtctttgcgcggatggtttttcgacgaagattttcgcacggatgtgccttcgattttgcgcacttgttgtgctagtccggctgcacccttaggtgactttttcacggagagtcttttggaaaaagacttcgatttttttgcacttgttgtgctaatccggctgcacccttaggcgacttttgcacggagagtcttttggaaaaagactttgattttttcgcacttgttgtgctaatccggctgcacccttaggcgacttttgcgcggagtgtcgcacgcgagggaagcttcgctgctcctcatggtgacttcgatgtggtcgaatgccgaagaccgtcgatgcggtctttttcgacattgctttaattttttgcgggggattttcgcgtgtatattacatggctccgcttcatttaaaacctcaccccaggaggaaaagagtgcgggccggaataaaactgtttggtgaattacaagggcgtgttagccctaaggatttaaacaaaaaatttacggagattgtcaatattccaggaatgttccaggtcttcgccagattgtgttgttagtctgtacgcgctgggagacgacttcgtcttgacgataaatggtccttcccactttggttccagcttaccccgtgactctgtccgggttgtgcg

SEQ ID NO: 117016 - DNA, 981 bp, Zea Mays
gtttttaagaatattcagcccttgaaggacagagcatacccagcttacttgtaccgtggtgttaccgactcgactcgggttaccaataggagaattcctgctgaggatctggtgagccgactagacatgatctcgagaggcaaagtatcaaatgttggtgctcctattgcctactctgcttggaatctaccacctcctaagtcctttttcaatttcatgtccaatcctcctgctggtgatagtggtctgggtcttagagtgtgaccctctcctgaagatattgaggtcctggttgcttctctttgtgatcttcccaatgatgagaggcaagttcattttgagatgccagcgagtccagatgatgcagaaatagatgctatactcgatatgttggctggagaatcttctgactcgtcccctgctgaaataatggacgttatggttataccagagcttgacaagataatggacacccgaaagcctgagggtactcgtccaaagcgtcctcgccaggtcagccgcccaactacgcctgttgaggagaagaagaacaaaaagagacggcttcagcgactgtcatgtttggaccaggatgctggcccttctgctcctgtttgtgaagaagtaccagcagaggtctttactgaagttgatcccaatggttgtgtacctgttgaagctgaccccaatgggtgtgaccgtgcactaactgaccccaacgagtgtatccgtgcatcagctgaccccaatgggtgtgatcctgttgaaactgaccccaatgggtgtaaccttgttgaagctgaccccaatgggtgtgatcctattgaaactgaccccaatgggtgtaaccttgttgaagctgaccccaatgggtgtgatcgtgcaccatctattatttgtatttttgatgaggacgaagaagaggaagaagaagttactcttattcgtaagaatagctggcgttacagagatagtaggggg

SEQ ID NO: 117017 - DNA, 601 bp, Zea Mays
gtaagggcggctgcctcactaaatccatggcaggctccatcgcgacatgatcatgcgacgaagcaagacgtctccagaccgaggtcttgcgcgtgccctccagagaatgagccttgtccatgccagacaacctctgccacaccggaggccgcaccggaatcctcagcctcaccaaggcatgctgggaggtttcctgtcttcccggaagacgctgcttgacgttgcccatgcgctgccacactggatgtttctgagattcgactagcagagacgagcagactgccacccgatgtccaaagttgagacaccgaaagcaccttgttggacgccggcaggtagcaacccggtgagaagtagagaggcagttgtaacaccgacctcggagatccacacgggaccctcgacgagggaggtgcacaccacgggtcctctatctgcgctcaaccacctgccagccttcttcaatcggaagggccgcaccagtcgacaccttggcggggaaagcaggagcagctaacgcagtaggggagggggagacatggcttgccaagggagagagaccggcggcgcaaaccgagctggagaggagtgcatctttaaa

SEQ ID NO: 117018 - DNA, 576 bp, Zea Mays
ctgtgaagaggaatccttgaaatgtactttgatgtgaggtatgctcgatgttgacgccaaagtacctatcatgaaggttgggggacaaactattgactctacagatcggcgatttcctatttgagggcctttgcttgttctttttcctcttggataaggtgttgtatcattgccttgacttcattgctttgtcttttggcttctaggtttcttttgcatctacaggttggaattgtgcatgtcgaggctcctgagcaggagttgttcttccgtgctgatgtctaggtctttactatcttgaagcatgccttcgtccactttagctaggtgggggtctagaagtgtgaatctaggggtacgacaggcatgtttcttgttagatcgggccatattttggcttggtatgggtggctttgcaggttgaaagggatacaatttgggtttttttgagttacatgtgtggatgctaccttccggggtaggttggtcttcgttgcaagggagttagtgggtttcgtcctacgacccattaatggtgaggaggcatgtaacgcccctggtgttacgattactaaa

SEQ ID NO: 117019 - DNA, 852 bp, Zea Mays
cttaactcgggtgaccactatgccctactaacggagcaatcggcttaagtcggcaatgacttaagacggtgcgacatgctcatgcttacttaactcggggtgaccactatgccctactaacggagcaatcggcttaagtcggcaatgacttaagatgatgcaacatgctcatgcttacttaactcggggtgaccactatgccctactaatggagcaatcggctttagtcggcaatgacttaagacggtgcgacatgctcatgcttacttaacttggggtgaccactatgccctactaacggagcaatcgacttaagtcggtaatgacttaagacggtgcgacatgctcatgcttacttaactcggggtgaccactatgccctactaacggagcaattggcttaagtcgacaatgacttaagacggtgcgacatgctcatgcttacttaactcggggtgaccactatgccctactaacggagcaatcggcttaagtcggcaatgacttaagacggtgcgacatgctcatgcttacttaactcggggtgaccactatgccctactaacggagcaatcggcttaagtcggcaatgacttaaaacggtgcggcatgctcatgcttacttaactcggggtgaccactacgcccttctagcggagcagtcggcttaaattgacgctaatttaaatgggcactgcacgcttggcacgttcgcaatcacccatcttagggcaatctctgtgccccatgatgaaatttcaaaaaccatcacgctgcattttacttctacaaatgtagatactgttgaattctaaacaataggaaaacaatagtagcattcagtactaaaag

SEQ ID NO: 117020 - DNA, 655 bp, Zea Mays
gttatcgactgtccattcggatgggacttcgaaccgatatacgatattctgccagaaatttttttgtgttgtcttggatgttattgtggagactgctctgccctcgatccagttggtgaagtatttgacagcgacgaaggtgaatttgagattcccttaagctatgggtattggtccaacaatgttaagcccccaccgttgaagcggccaggtgtgggcaatgagcttggtgagttgcgaaggggtgcctgttcggggagagaatttctggcatgctttgcacgatcaggttactcggttggccgtacatatgactgcaagggccttgggtcctgagtgtgatccgcaagtttcgatgtggattttgtggagaagctctaagccttcagtttcagttatgcatttcaacataggctggctgattccttttttgtaaagctggccgctgacgattgtgaagtctttgcttctgtgtttgagccttttggccttattgcgatcggatggatggcagtggccttggaggtatagggttattggggcccgccagtctttggacattataaggttaacaatccggtgcccgtcggcatcttgtgttatttgcaggccttcaggatttcggacagctagcgtaccgataacgtgatagaat

SEQ ID NO: 117021 - DNA, 496 bp, Zea Mays
attttatctctgctataaccattgttccagcttgtctagtatgccatggaatgaacagcccttcaaactctttagaagctactcagcttcgagctcagaggggaaaaaccggtgtggagctgtagtagcttgcctatctcggacgtcaaaggtagccccttctcaatttcgaaaatttcctgtttttcgctggggggccgaaattttttcttttacgaaactgtaaacccttctcggcgctcaatcaaggttggacaaaaactatctggcaggacaagccatcgcttgataaatttactggcatacatctgcctatccccatgtagtgtatcagcagtttagcacgcattcaattagcaagcaaatcattaaaagagcactgatacttgaaccagtacctggtttgattactccagttgtcaagtcgtatttttttcctattatctatatatcaacatttgctattactgtaccttaagccttaagataatgaacg

SEQ ID NO: 117022 - DNA, 500 bp, Zea Mays
ggctaatgcatgaacatgctttctcttccttttatacaagatatgcaaggaatgtataggcaaaggaagatttaggtacaagtttaaaacgaaaggaagttgttttacccttttgtaccttctcatagagatgctctcttcattgtgctttgtccttagtcttagtcgcttaggacctatactcatgacaatatgtggaaataatttgcacaagagagagttctacaactagtgatccttttctaagtcattgtttagcatatatcaaaatggatcacaaggtgcataattgtatcatgaattctccttttaacttagtgcatatcaagaaagatatcgattgatagaatatgcggcactaagagacataagtgttaattgaagttattcaatgatcaaacaaataccagatgtgatcaaaagaacaacatatgcattagattatcaaataagctcaaaaataggagaatccaataaatatgctactttggcaatgaaag

SEQ ID NO: 117023 - DNA, 960 bp, Zea Mays
aaactgacgcggacgacaagggagacagactggtggccgagtgaggtatgtaattgtaccaaaactgcgccacagaaagccagtagctccactgtgtaggacatgcgtgcacaaagcaatgaaagaaagtttccaaactttggttggcccgcttagtttgcccgtcagattgagggtggtacaccaagctcatgcgaagctgaacatcaggcaatctgaagagttctttccatagcttgcagagaaaaatcttgtcgccatcagacacaatagattgaggaagcccatggtgcttataaatgcgatcatggaatagccgggctactgtcagagctgtgaacgggtgtttgagcagaaggaagttggcatatttcgtaaacgaatccactaccaccaagatgcagtgcgaacgtggtagggcctcagtaaaatccatggaattaatttgccacaacgcaataggtactgtcaacggttggagtaaccctggcaactttgtccgatcagccttagcctgttgacaaagcatacactgactgacgaaagtgcttacgaagctcttcatgccctgccaagcaaacaaatgtttgagcctggcgtatgtgattggaaatcctgaatggccacccacagccgacgaatggaaggcttcgaccaactacgtttgcaacacttcactagcaccaatccaaatacaggcttcgagagctggttggcgattaacattgtagtacctttgatcttgtcataggtggtcttgggtgtagtcgtgtgatgtgtcaaggcagttgtaaacgttggtcgtagcctctctagaggtcaagatcggactatatttccattatctaaaaaaatacaggcttcgaccaactgcgtttgcaacacttcactagcgccgatccaaatacgccccttgtatcagagaaggccatcttgccaagaaaagtgaggcacaacttg

SEQ ID NO: 117024 - DNA, 288 bp, Zea Mays
cttaagtatagttacacaatagacgacgtgatggctacgtggtcatgccatcactacaccatacaattcacattaacaaaacaattctaattgaacttgtcaactagcaaattgcattccaacctattttccataccaccactacacctcatatcgcatacatggaatgactcattcacatgtcacatatatcattaccaaaacattctcgcatcgcttgcaacttaaacctaaggttcactacacaaatacaggacatctacttttaatcatgaatatcatcatcac

SEQ ID NO: 117025 - DNA, 729 bp, Zea Mays
gtcggggttagctggatcataactctgatcatcactatcaaccgtttcatagtcaacaccatctgaaggcgcaagttcgtcattaatgtcattgtcttcaaggattactaagtcattctcattttgcacctcgtcatcctcctcatcaacaaccatttcaatatctacttccatttcgatagcttcggttaagtctatctcaaatcgccttctagcccatcttcttggaagaactctccatcatatgtgtccgggtgtaagttataatcttcatcgttagaaacaggtaatctaccgtgcggcgataccttatacacaatatcccaacccttaagatgttctttcgtttggcacgcatatgggagataatacacttgtgtggcatgttgggccatgatatagacattgtctcctggtaaggtggaatcttgtcgaatttcgactatcccaaaattagaatgtgcccatctcatcacttgagggtcaaaccaatgacctttgaatatcactggagtaagaggtttggaaccatgaaaattgagttcatatatttcttcaatttgtccaaaataatcaacatcgtcaaggctgggcgtaaagactctagaacacgttgtttttggattgggccgactttggtcgtagtttgttgtgcgaaaatggtatccattgacgtcatacccagaatatttcttgaccctataagcaaaggtgttggctacttgtctc

SEQ ID NO: 117026 - DNA, 359 bp, Zea Mays
gggagatgggctgagagccgttagatatggacgggcggtccagattgactcagccatgcccttcgcctgtgtgtgattttgtgacgtaggttgtcggatctacggtcgggattaaaaggtgaacatacgtcgggattaaaaggtgaacataccactttgttcttttaatatgggtcgtggattatggatcaggcgaccaagatcacccgacaacccttcactgtggtaactttataaaagagccctcgggttttgatgaaattaacccgccgtccatcgccggtgttcacggtgtcttagaaaacttgcgctgagacccctgctgattttggtaattgtgcgcccagtcctgagatcag

SEQ ID NO: 117027 - DNA, 544 bp, Zea Mays
cgtttttcatggtttatggatcagaggcgataatgcccatcgacctaatctttggggcgccgacgttaactttcgaaagcatagccgaagcagaagagaccagactcgaagatatcaatgtactggaggaagaatgatagaacacactaattcagtcaactaggtaccagcagaccttgaggcgctaccatgacaaagttgtgcggcaccgatcctttgtgatgggtgacttggtccttcaccgaattctaacgggggaagggcggcacaagctatcaccactatgggaaggatcattcatcgtatcagaggtcactcagccgggatcataccggcttactcagatggatggcacagaagtggggaactcgtggaacatagaacacctaagaaaattctatccttagcaaaggcctcaaaattcttgaaggaacattgtactccgtaatctgaggacttcatcatcaataaagttttcattttctaaaggcattcagactcttgacttacagctgacttcaattgggattggcttgaaatcagc

SEQ ID NO: 117028 - DNA, 537 bp, Zea Mays
cacttttatcgagaaattatgtttatgcctattttatacatgcaccaagtatagatgttatttactatctagtcattgcaccgttgctagtcaaaccgatgtgatcaaatacatgttgcaaaacccgattatgagtggtagggttggtaagtgggcttatgcactcatagaatatgacttggcctatgaaccattgaaatctatgaaaggccaggtcgtagcagattttattgtagaacatcggattgatgatactcataaactagacatatcattactcattgttactccctggactttatattttgatggatcggtttgcaatggaggtcaaggaattggcattgtgcttgttttaccagtaatggacctctatttctctagccgatgaaagcttattgcactaacaataacgaatcaagctgaatcttcagacaagccgaatatgaggcctttttattcggcttggagcttttaagtggtatgggagtaaaacatgtgaaggcatttggtgattctcaactggttatccaacag

SEQ ID NO: 117029 - DNA, 791 bp, Zea Mays
ggggcggatccaaggggtgggcaaggtgggccatgaccccatctcaatttttcttaaccccctatacctaggtttaggtacacaccaaaataaacaaatttttgtatagttagcgtggacagatctaatgaaaacaaggttttgacctatttttctctcgatgcttcactactcagtccacttttcatctgagccatttgattctcttccctagcgcaagcccactcgtgtctcactcgcttcttcggtcatcgactgaccagtaagtaggtgacctaacccgcccgctgctgcgcactttgccttctcatcactcatcggctcgtcgactcgtcgggatcctacacacaacgttgatattttgcctcctagtatgcacagcacatgggcaagctgttggtgggatcatggcatcacctgtccctcgctaactcattagagtgccaccgcgccattgcaacacgacaatgggtgtcgcttgccgtcaccatcatctatcgctaccttgcctcctgcactcgctcctcctacttgtcgtcgtctcaccaacgctatctcacgacaaattcgatgactcaccggaacgacgcgctgatgcggctgctccgccctagtgcctcgtcctcagtcagtccacctattttctccctctagctctcctttcgggagccaaaaaggttttttggtattcatatccttttgggaacactagattatcatttaatattcatgttattatcattaatctaaatttatgatctagtctagtgttgcgctatcggccccaccta

SEQ ID NO: 117030 - DNA, 436 bp, Zea Mays
aaagtatggctgctatagcaaaatcaaagttggactatagaccaacaactttgttacaggtgggttaacaagttgttatatagaaatcagagatccaagcctaacaaaacgctcggtcaggcactctgaataagaatcccatggtacagtacacagaaagatctcaggttcagcccccctcgccgccgatgacctctgcgcaaggattcacgctgatcacggtgattcgtgcaggactcgggtaggatagtaccgggggagtgaaaagatcgggaggggagtggatttggtcgccgggtgaagcttatcaaccgtgcttgtagctgtgcgacgtggaactccggcgacctcaattatgccacgtcgtggctctttactgcgcagtagtaaccatggcacgcctaggcttaccatctcagaaccgctgtaccagtga

SEQ ID NO: 117031 - DNA, 606 bp, Zea Mays
aagagatagggctcaagtttgatctttggaattacttgagagggttagaagagatatgctcctttgggatacttcaatagagacgtatgtatcatgtggaaactgaactgtggtaaacaaatcatcatgcctttatatttaattgtttgagatttgttttcttccttcctccctaaattatattgaattaatcttcatttaaatcacttgtgttgctccaaagtttattccgtacattgataagaacaacacattgcaagaactcatctccctattttgattaacttatatcttgatttaacatctaatttgggatcaagttttgttttaagtgattaaatttcagatttttactattcaccccttctaggcgactatcaattggtatcggagctcaacacttcatttagagtctaacaagccgaagtgatgtttgggaaaggatcccacaagagcgagaggatgccatcgggatacaagcaaaagaagtgtgaggaataggttagctctagttccaagtcctacaagacgaaaaacaacaagaagaagatgaagaaggtcgattactacaagagcaccacatagaaatcaagctcaagtagtgac

SEQ ID NO: 117032 - DNA, 271 bp, Zea Mays
cgggtgaggaattgaggataatgttgttcaactatagggagatgggtatcatcccgaaggttgagccaatgtaatgtttgatgccctcgatgtatgtatgcaaccatactcttgtgcgatgaagttgcgcgctttcgttgatcaggccgctcccgtaggcttctgtacggagttctttagaaaagacttcgattttttcgtactagtattccggttgcacccgtaggcgacttttgcgcggaggctcttttggaaaagacttcgatttttc

SEQ ID NO: 117033 - DNA, 608 bp, Zea Mays
aagtttcacaaatctatcagtatctgataaacccgaagtttcactgattttatcaagggtgtcaatttttgaaatcagatcttttttcagcttcttgtagtggcccacaacattattattccaacctttgagcttttgtctcagtcgtttcaatttcagcttccacacatcaaggctatgagtagcacccaccggaagggaccaattacttctcactaaattgtgaaagtccggtctaagcttccaacacaactcgtatctaaaatctttacgcgtgatggggatagcatcagtttgaatacaaaggggagcatggtccgagaaggatctattcaaaccaagaacactgatattattataagcaagatcccagtcaggactggccaagaatctatctagcttttcaaacgtaggatcactacgattgttagaccacgtatacaatctgtttttcaattcaaattccactagaccatgatggtctattatactgttaaacaaggagctccacttgttgagaccgcccggtttatttttttcctcagcttttctgaggatgttaaagtcaccaccaataagcaaggggacctgacttctcgagcaaactg

SEQ ID NO: 117034 - DNA, 483 bp, Zea Mays
ggaaaagaacacgtggtaacctacttaagccgaatgttggtagctgctgaaacaagttacacctgcattgagaagttatgcttatgcctgttttatgtatgcaccaagtgtaggtgttatttgttgtctagtcattgcatcgtttctggtcaaatccatgtgatcaattacatgtttcaaaacccaatcatgagtcgtagaattagtaaatgggcttatgcacttgtagaacatgacttggcctacgaaccattaaaatctatgagaggccaggtcgtagcagcttttattgtagaacatcagattgatggtactcataaactagatatgtcatatcttactgttactccctggagtctgtattttgatggattgctttgcaacaaagggcaaggaattgacatcgtgcttgtttcgccaagtaatgcctccttcaacgtctctagccgattaaaaacttattgcactaataatcaagccgac

SEQ ID NO: 117035 - DNA, 316 bp, Zea Mays
agaggacatgaaaccctcccaaagggagctaggaacctgcaggaggacacaatgaatacatagagacatagccaaccacttggattcacagaattttgacaaaaaatgaaattgagtcaaagaggtggtttgaaatggaactgcactccctgcacagagatttgaaaggagagaggggaaggcagagggtaggctcactaggggagagggaggctaagtctatgttggaggagatcaccggagcatagccagagatggtggtcgctggcggtgagcagtggagatcgccagagagcagagagagagagccagagag

SEQ ID NO: 117036 - DNA, 753 bp, Zea Mays
gagaggtccgccctcaataaacccagtctgttggcctacactcgtgtatatccagttataaggaaggggttcgaccgacagaactgtttttatgttggttttattcctaaatttgcaaccattattactatcttaccacctatgcggtctccctccctggctggtatagcgacatccgaattgagtagccagacccgacaaccagacgatggggtggtttggggccgtaaggttgcttggtatggtgaagtaccgcaagcctacacgccccaccgccctgcagccggtcctgtgcgtaaatcaaaggataagaaataccagccagcggaccatatgggtgtgctgctaaaaatacctagcctagactgtgtgcaggtaggttcccagttgggattaccccttgggggtcatgacatcagtccctcctaaagaatcctggcatccggccccaacacatcgagcccatatcccaggggggccaagtaccaggggaggagttggtaacaatgcacacaacaaaggaaaagtggcatgcagataagttgtaatgtcaccgataagtagtacctaaagagtatcttacaaaaccaaagacatattgcaacccgctccccagcgggaccctcgtttttctccatgtaggcctggctactcatcatcagcaggatctcgctggaagcgcccgaccaccacgtccacagcatcttgtacgccctcccgggcagcatcttcagtgtcagccaccggacccgc

SEQ ID NO: 117037 - DNA, 574 bp, Zea Mays
gtcaaaaaagaccgcatcgacggtcttcggcattcgaccactccgaagtcaccgcgacaggtagcgcagactaccctcgcgtgcgacactccgcgcaaaagtcgcctaagggtgcagccggaatagcacaacaagtgcgttaatcgaagtctctcattaaaaagacactccacgcaaattcgcccatgggcgcagccgaaccaacacaggcgtacgaatacggcaaacaggccacattaccatacatattacaattacatacacatggcgagggcatcacatattacatcggctcaaccttcgggatgatacccatctccctataattaaacaggattatcctcaattcctcaccctcaaaaagcttccgaagatccccctcgcctatgctcgccccagtcagcgaggacaccaattctcgtttaccaacccggtctactcgaagacggccacgctccatccccatacgacggcgcctgccactccgcgaaaattcacccacactatgttttcccaccacccttcgcctcctacacccagtactcgcactaggaagatccctggcaccctccac

SEQ ID NO: 117038 - DNA, 427 bp, Zea Mays
tcggaaacgatggtcgaacgccttccggccgccgcaatggcctggagacctcctcctgtaacaaagccaacacacacgcagtatcgaaggacgaggaatgattaacaaacacagctgcgcgaatatcagcacgtaacccatccacaaaatgctgaacaaagtacaaaggatccatggaacgaccatacgccacaaaattatcacgcaacccagaaaatttctcaacatagtcggcaactgatgtggtttgttgtatgctaaacatctggcaaataaacatcacgtgctcatctctaccaaacctttccagcaaagcttgacagaacactgaccagctagccaattgggatgactcctctatggatgacaaccagtgagcagcagctcccacaaaatgcatggttgacacacgcacccacaacctcac

SEQ ID NO: 117039 - DNA, 313 bp, Zea Mays
tgaataaatacatacacaaagagatatggcacgagacgggacgatcgataggtcaaaagccgtgaaaacgacggttgacggacaaatagagacataggatgattggaattcaaattgaggcacaaaacgatatgggattgagccgatacttcacgaataggtttatataggtcaatatgagtgaagtgtgtgcttggtttgaatttaggcgaagaaatagggtttggggcactcggctcggaaacgatcgcgcaaatcgggaattttggtgaaatttaagcctgggatctcggattggcgtgaaattttgcaa

SEQ ID NO: 117040 - DNA, 511 bp, Zea Mays
ataaagtacattttccaagggccatagcttcgtgtcgcttagccttcgaagaaccttcgcacctccctctgtcaaggagccgaaggtatgcttgtaaatttaaactcaaacctgaatttaaactcaaaccgaacttttgcttgcgcatttaaacccaaacgtgaatttgaagtttgaatccaacttagtaaataaaataaggagaaggaaaaggctcacctatacttacctggaccgaatctcctctgtcctcggcccactctcttaccccatggcccatcccatctgacaccgccggaccactctcccttgctcagcccgctagcacgcccacgcctgcctaggtgccaacatgcgagcctgacacgtcagcctcgtgatcccgtacaggcaacatgcttgcaggcgtgtagtcactagcgtgtgggtcctctacacagaccggatctctcacttacacgtagggttggcttgtcaggcctaccttcttcctcacaacaaccccatgcgg

SEQ ID NO: 117041 - DNA, 666 bp, Zea Mays
cgttgatggcggcgccgatgacggggatcacggaggagaggggaggagatcctcggccaccttccgttgatggcggagccgcggaggagacgagatctgcgcgtattggctgggagaatcgctagggttgaaaacggacgggtaaaatcccgtcccgacccgtaccgttttctacatttgacccgaccattttcgtatttacggaaaaatatggaaactggacggaaacgggagatggtttattccgtccttttttgcgggatcccgtttttatccggattgaacccgtatttattccgtatttggtaaatacgagacgagcctaatatgcattagtatataaactaaagtcttgtgtatttaggtgacaaattatagcacaagtggccattataaccatcgtctctttttaatgacacgtggtctaaactcttaaacaacatcggatgtagctaaatgtatactattattaacaaccaaacaacaatacaatgttgcgtctctatatctatttgttttatgttattgtcctgtcaatcaatcactagtcaaacattaataccatatctatttgtattaaattatgagtttccgttagtatttccgtttccgttcgttttcgcaattccgtttatcccgctcccgtttccgttcccgactattccg

SEQ ID NO: 117042 - DNA, 344 bp, Zea Mays
aagtatggaatataaccacgggtgagataagtaagagaccacgcttgaacttaggtgggagattggaggtttcagatagcgaacatagcataatcgccaaggtaagattgagagatgagaaggataaaggcaataagaaacaaaacataacaaaggatgaggttacaaactcgcgagccaaagaagaggatacgaccaagagaaagaaggtatgagacggaagaggggcgattttaaagggcaggtatgagacaaacatcaatgtaggatatagaggtgtcaagggtgcatatgataataattaaaagcataacaaagtatatagttaaggcaagactcgcgaa

SEQ ID NO: 117043 - DNA, 458 bp, Zea Mays
atcacatgtaaacccaatgaagggatagacatcaaaaatgagaacaaagatttataatgagtcttctcaaactctccttaatcttgtcatgaatcttaaggaaggaaaactctcaaaccctaattaatcctaagtaaaccatttaagcataaagggtatttgggagaaatcttgggagaaaaatacaaattttggtaaaaaccaaattacaaagttttagttcactaattaaccaacaaatcatagtaaggaagttttgccatttgaacttttcaaaatccccaaaacagcccctaaactaatgcacttgggggaaattcagaaattcagaaatctgaatttcagcccctttccaaagatcaatcgcgttctctatttttcaaaactcaaatcaaacaagtccaaatatcaaagtggcaccaaattccattgaacacgacgtggcaaagtttggaaac

SEQ ID NO: 117044 - DNA, 403 bp, Zea Mays
ggcagggctgcgggcaaggtgccgcataagctgcgacgtcagccagccgtcagccgtgcagccagattctgagagctctggggagggattggtggcgcaggacgacgggccgcggcggccgccattcgacatcaacctcgccgtcgtgctcgccgggttcgcgtttgaagcctataccagtcctccggtgagcactttgctcccgtcacaacctactcgtccctatccttgaactggactagtccaagccggtggtggaggcaaccgccatggattagcttacgtggcacgattggtcgtcgtatttcacaggcagatgtgggctggcgcgaaactgatgcggctgactgtcagacagtgttcctgtccgagtaagtcctaggcccacccttctttacagagc

SEQ ID NO: 117045 - DNA, 507 bp, Zea Mays
ggcggatgccgaggtattcttggggccattcaccgagttggagtaggcgggtcctggtggcttcagctgcggacagttgttcttgaagtgactggggtcaccgcagtgccaacatgcattcgctgggggttggttgcttgccactgagggggcatggaaagagcactgactctgctggctgaaccgtgacggggtgggtccagctggtctactgaagtttggccccttgggtggaaacccaaatgatcgagtcttctggtgccggtcctgctgctgtgcccggagaacctggaactttcttttgaggtgccctttttcttcctcctttgccctttccacttgcatggctttgttggaaaggtgagagaaattgaggaagtcttggctagccagaattgtcttgagttctggcctaagtcccttcaggaaacgggccatcttctttccctcggtactgacatcatctggcgcgtagcggggtaactctgtgaacttgtgcacatattc

SEQ ID NO: 117046 - DNA, 388 bp, Zea Mays
cctgaatatgtgagtgtaaggttgttattctagatccaaactatatgatatagaacaactaaaataatcagcattaagaacatgtagagtcatcacctcacactttgaggaaaaaaagaagatgaagttccaagtcatcaagtcagagatagtatttacaactttgaaggctgacccctatcacctatttgattgaatatagatgcatcacaagaaacaccaaacacatgcaccaatgcagtaggcatcgtagctcacatcagcgctcgggaaatgacctcgtggagtccccatcacatatcacaagcactggcaaagttaatactaatgaagatgcagataaactgataatgaacatgttcataaacttattgctcacgtgttatat

SEQ ID NO: 117047 - DNA, 682 bp, Zea Mays
gctgaacacattttcgcccactgtgtactagccaaatacgtgtggggttgcatttaccttgtctttggtctgaacccccctccagatcggtggaagattttttttttggggaccaaaacctttatattttcaagtttgcagggctgttttgggccatgtggtgtaatcggaataggatggcgatggagaagcggtttcctaagagcccacatgagatcttatataacgccatatctttttctgcagaaatggaagtctctcctcaagcaaaaggatttagagaaggtgaggtgtttgatcagctccctgaagaattggttgtgtaatttccaaccagccttaggagaggtgtctgacatcgaggttatctgaggccgagctggtgttgggtgggttgatactttgttgcgtagaggctggaagggagtgtgggtgtttgtgtgagcttaacgctttttcctttgttatcctgtaactctctagtggtgtgtgttagtggggccaattcctggttcgtgttttgttctgttgaacctaggctttcttataagtaacactccttcaaaaaaaggttccttctattctcagtcctctcgtgcagataatttaggatgccaagatgcaatagctacttccaggtccgccctttcttggactccctctccctcaccgaaagtccaac

SEQ ID NO: 117048 - DNA, 702 bp, Zea Mays
tgctgatctatgtgctcaaactgaatctgcacagccccagtaaatcagtatttctgttgtctcttcacatatggatctgcacagccccaatgtgttcaaactgaatctgcacaaactgaaactgaatctgcacagcaccagtaatctcttgtctcttcaaagttcaaactgaatctgcacagccccagcaacaagttccatatggttcctccacattcggccagaatgtgcacagctccagtaatgaaactgctagaaatctatctgaacctgcacacatatcggcacgtctagaaacataatatggatatcaccaagtaaactgaatatggttcatgcatcataataggggtttcacacacccagtaagctaccaacacacatagctagaaatataacatggttcatacatggcatcaaccacagtatcataataggggtttcatacatagtactccgtcctaaaccccatacatcgcctcaaacagcaattacatggttccacccaatatgtcatcattaggaggttgagctctcttcttggatgtaatctttttaacccccaccctttgtggtgcttgtgaggaccgaggaggatgcttcaacatcgccaagtggtgtgcttggtccttcttcagacgggaaccatctttgaatgttctttcactgctttcttgacctatgttgatgaagacaaaaaat

SEQ ID NO: 117049 - DNA, 899 bp, Zea Mays
gaagaacttacttcaatgaccaaaagctagtcaaaagccagaatagggccatttgtagtgaacaaagcttggttcccaaagacatgggcaatggttcaacacaaccaagaaacaatggatagcccttaagaagaggcagaatggggctcaacaccactggctagaaatccgagcaaaaaccaaaaaagttaaaaactccaaaaaaaatagtccctctagaaagaggcaaaggctcaacaagactagcaaaagcatctcaaaatgcaattccccctaaactccccctaaataggcgcataaaatctcacaaataaaatgcacaaaacctttaacatgaatgcactctcagcaagatgtttctgtatataattctcctcttatgcacaaaaactgcaccccccgcaagatatgcatggaaaaaggaaaatataaaaaatacaggagcttcaagggtatagcaattagactgtaaatgtactttaaatggtgttgtgctatgtgtgcagcaatatatgcttgtgctagtagatgctcaaactaatcatatgcacaagtttgtgaagtggaataattttaatcagttttaaacatctcaaaacaagtgttcaccattaaaatattacttaacatatataagcttgaaatctacaaagtgctagtaaagtgtatacaaggtgaactaccttatgcaatggtcacccatcatgtaaaagataaacctacacttgtgtttgatcaaatttcattatattatcaatttatcggagtgtgcatattatcaatttcattataaacctacactcatttctaggatgcttgtggcaaaaaaatcagataaaaaagtgtcatgaaccagaagctggcaacattattcagcacatcgcttgttcactatcaca

SEQ ID NO: 117050 - DNA, 323 bp, Zea Mays
gagctgggcaaggcagggaatcgagtgcctggggcacccggctgatttgggggagtgggggtattgttggggcgaataatgattggctgcttaaaagggaatgcaagtggacgagaaaaagtgcgattttggctagaaggccggatgacaaaccgttgcctcttcgcctggccctgagtaggcctctcaccactgaatcccttgttctttctagaacttgcgtattttgcttccacagataaggttgtactgacagcctttccatacgtgagatctatacatgtggccatctttcgctgcaaccggtcatttagacccctcat

SEQ ID NO: 117051 - DNA, 853 bp, Zea Mays
aaagaggcacaacacctctttggagagaagcgaaataaggcaaggtagactaactcttagtattgccatcttgattgggtcgtctttaactctcctggcttggcttgggcttagttgatcttgttgtggattattgtggggagttatatgttctgaacttgaattaaatgatgctctagcatcccttttatagtccaaaggggaaataatttacatgtatatacctcctctggtccctacctgtaattaggccaatgccccttatcatatcgtagtcttgtgacacacaacacatatgcatcaacataatcattctagtggaggattgtagctttggttctatccatagtggataggtcctaacgggaggacgtccctgagatggatgaaggctagaaacccgtgttagtgagaatataagaacttatgggggctaggatctcgatatctgtgaccatctcacactttcaagcctagtggatcactctgcttcaaaggcataagaaccccatgtgagagtacaatgggttgcgaaatgagatgcaagttaggtctagccatgaaggagactttcttgttacaacccacaacaccttgttcgcctttgcgcgaccgcctacaacgatgagatgctctagctcctagcagtgatccatgccatcttccaaagcaataaggtgtatgaacgaactatagctacaatgttagacaaaaacacaagtggccttgcagccccaatgggaaggctattgtttgggccccttgaacatatcagagaacatgtacatagtcggggcatcaatcgggagcaaatagtcgttggagttgatgtgcaccattaggggcagcaggc

SEQ ID NO: 117052 - DNA, 1063 bp, Zea Mays
ctggacttgtcttttatactgctataagtggagagctgcaatgcaactaatggatgcaacttagctcatttcatttatttgttagccattgattgattcaaatatgcatgtcataaagtatggcaatgtgccaaatttcatctgattatatgtttcactgtggttgtgtgactggcattctggcaatattattactgtgcaatatatagtggtatgcactatgaaatttggttaattttgactatgctgttaagatgatctgctgctaaggttctcgtgttgctgtggtgggtgatgggctggtggcaactagggagctgtaagtgcctcaaggtactgctgtgcagtgctcttttttcctattattgtaaaccacatttggcacttaaatgttgcagggatgatttagcatttgtaccttttctttgggattctcttcaccatgtttagtgggataaaacttcgatgtttgattgggtggctaagaaaatttgtatccttgtttgcacttgtttttcatgtgaatattgtgttatgagtatggccattaatgtgttttgtttcaatggctgagtaagtcagcttaatgctgttcttggaatgtctctatatcggtgcgcattaatgaaaagggttaattagcaagtaatgtattactgtttttgttgaattcaatactttgtatttactgtatgctaagcagccaacattcatcttattgcttatgcatatattgaggagataggagaattaatttctctcatgatagatttgctttaccacctattaaaacatatccagtgatccagctgcctataatgaattcgatactctgtatttactgtttgcaaagtaacacatgttttttatgtctgtttatattgatcagactataggagaattagttacttaatcatctgccttccctgtgatttctgttgatgcatgtcaaatttgacaaatggattatggttgtgactagaaaaccatgggcgtcagggacggagccagaaaaaagtttagaagggactgaactaaactgttgtagtgtagaagccttttc

SEQ ID NO: 117053 - DNA, 366 bp, Zea Mays
gtcatgatgaatggtataatctatctatccccacctaacatcaaacaaacttttaacctacatcatgtagactatctcatcttgacaaaatgctatcctacctttggatattcaccttatacgactagttaccccaatctagacataaaacaaatattaagccctgctaaagaatcttcagatcgtaaccagctactggcctattcattctgcttaccaaatacttttcattgcaaaactatcctaccatatgcttctaactctcatggtcaataccagaaagggaagattatcaggcaatagcaaacataatgaatccttcagaccctccaccggttggaatcaatcaagtggttgctgccaaat

SEQ ID NO: 117054 - DNA, 725 bp, Zea Mays
ttccaccatacagatgataaaaagttggaatataaataattcaatacaatagatcaacttttaaaccacaaatgatgtttccctgatatcaagggcattgtattcggacgagagggtattagagtacaactagtggatgaagacattgttgggctagataatgaccttttgtgataccaggtttcctataatcctctctattcaaggcatacctagatggtgtttatgtccactcaagtaaaacaccgcacatcattatgccacatcatttctcaaaataaaataaaataaagaccatggaaaatttagccaaattgcgtgagtgaactgtccatacataggttaaggttgtaaggcaatttttttccaccatacatttgctaaaaagttggaatataaagaattcaaaacaatagattgccttttaaacctcaaatgacgtttctatgatattgagggcattgtaatcacacgagagggtattcgagtacaactagttgatgaagacgttattgggctagctaatgaccttttgtgataccaggtttcctataatccctttattcaaggtataccgagatggtgtttatgtccactcaagtaaaacatcacacatcattatgccacatcatttctcaaaataaaataaagaccatgggaaatttagccaaattgcacgagagaactttccaaacataggttaaggttgtaaggcacctttttcc

SEQ ID NO: 117055 - DNA, 631 bp, Zea Mays
tttttgaggtcgtaacagacatttttaaacttagccacaatcctcgatgaactagaagaggatcttactatcttgttccaagcattttggacctcattcatgaagcccagaagttcattccaataattttcaaagcgaaagcaactagctttaggaatggaagtgccaatatgtgccacacatgggatatgatcataagtagtcttggcgaggggaataacaaggtattggggtgagtggaggtctagttgatagaagtgaaacaccaatcaagctgaacaagaaaaggattcgactatatattgctccaagtgtagcttctacccttcaaagggatttcaatgattccaatgctgctgataattgagttgaagagattcatgtctgacacattcccacctaccttatttccatcctccaccgagcggcagaagttgaaatcaccaattagcatccaattatccaccgagaaatgtaaaagttgctaaaccagctgatgaaggccatccaattagcatccaattatccaccgagaaatgtaaaagttgctaacacaagtacaagggagatcccttgagggagaagcccaacaaagagcctatgaaaaaagaacaaaaaaggtgcaagcatc

SEQ ID NO: 117056 - DNA, 945 bp, Zea Mays
cgaggcgtctggtttcgatgggaaaggagggagggccggcttagggctttatgcagcacgggtcgcgttgctggggtcgccaacaggagctagaatctcggagttggttgcgctaggtggttgcggcgacgagggagagggatgacgtgtgggtcccaccagcagagacatgagagcacgacgggtcatagtgtacactgaaaagtggggccgccccgtcattgagggaaggctggagccgcgcggtggagagattttgggccgcgcaggagatttctctgggtgggccgaattggtgacagaggcccaggtaagcttctttctctttttcttttgttttctgttttctttttctcccttttcaatttctagaattcaaatttacattcaaatcttgtgccaaaatttatcttcaagttatattgtgaccttaaggtactaattttggaaatacacataaactttctttatattttatatatcttcttttcttcaaactctcaaattaggtattaaatccttgcttctgccactaatttatttctattagcggtattactcttttcattaaatgcacaaacaataaacgccagcatgttgcatgatttaatggtataccttgttgttatttatttatttgttttcaggtgatgttctcatgaaatgataaatatggacaacacacatatatacaaaggaatatcatttctccctttttggttatcctccacaattacaagttgggtattacacccggtctgctgctgatcccaatgggggtgctgcctgtgttgctaatgaagacgacggggaggaagaggatgaagttcctttgactcggaaaaacagtcggcagttcatcgctagtggtgaaagtagtggagttccttctcctgttttgtctgctctcattggtctgcaagaattgtccctggcgaattttga

SEQ ID NO: 117057 - DNA, 533 bp, Zea Mays
cacccaccagatgttagaaaggttttgttagccagatattcttgcaccaaatctcgagtactaatgtgctctgccatgactctgaattccacttcggctaattggcatggggagccgagctgtatgttacacaatggccttgtcatgccgaatcttaatttcaaaggactcattatcatgctcataagtttttcccttttcttctcatcagcttttacataaaaccattcatttgtccaaccggtaggccacttggtgtgatagccgatccctgaagcctttgtgtctttccggtatgcgaaattgtagcatccgaagtttttatgcaagccatctatccttgctttaggttgatagtgaagctcgtggactctgtagaaccctttggcattagcactttttccttgacttcgtaaagcccatatgtacacgctaagtctgactatagcgtttgaagttagttgatgaagatagatttcaaacatctttaaaacttcagcgatcatttcgtacagagggaaccgaagtcccgc

SEQ ID NO: 117058 - DNA, 503 bp, Zea Mays
cccatggccaccccgtccgacgggttaccataggagaatgtgaggtacgaccttggacgtgggcacaagcaaatgaccgatgggctggtgacctagcttgcggctcactgggagcttactcggtccacccctcgctctacgtgagaagttggggtgagtttcggtttttgatctggtcgatatgaggtagttattgtggcgcgtggtaaatgaggtgtccatcatgacgttgttcggcgcgggtggcttgatgggacatgaaacaacttattcactgtatcatgtgcaggtggcatgatgggtggttagctgccttgcttgttagtggtgtaccccctgcagtgatgcacttctgaagccgtgataataccagaaatcgatcgtgaacacaactcatgatcaatgcttagtactataccctcgaggctcctactttgttgtgctcaatctttcgaatcatgtaactggagcttgccaagcaaagttttgggaaccaaccctta

SEQ ID NO: 117059 - DNA, 532 bp, Zea Mays
aaaataaaaactagtttcgccaacgtgggcgcctactcttccgaagaaaacttcatacgaggcgaccccaaaggcgttattgaatggataagtggggaggctgaagccttcgaagaaattttaagtgatcgcggggatgtctgcgcgttcttcggtgtgtggggaatttcagccatcctggagaaggcgggatgcgaccatatcaagactatggcccagggcgaagctgccttctccgtggatgatacaaaggatcgttcagctgaagcaagtttaataggcggaaaattttacaatgacatttgggtaaatggtggtcgagagatggctcacgaaattatgaagaaaagtgaaaaagacatccatgacgcccgagtagaagcaaagcgagctgaagaagctacagagtgtgaaaaacgtataggtaatatcttttgatgttcggcttcggaatttgtttttgtggcttcggactaattaatttttttccgttgtagctgaattatcttcgccaccggaaccgttcgatccc

SEQ ID NO: 117060 - DNA, 431 bp, Zea Mays
cttttaaaagataaggggatagaaggattaaggattgtaacgtacaatttgtaacactggtactgctcctccatttgctagttgtctagcctgtgtatgcttccattgcttctgtttggtagggtcacttctctgaacagcaacatggcatgcctctcggatgggcatctacattttaataataacacgtgccaaaaaaagaaccaccatatcacatcagaaggcttagtgatcaattgcgcaaaggtgcaaatttactagggaaggtagtcctaggctcctaggtaactaagatttatgagataatcagtccctgtaataacataatataaacaatataatataacataaatgaatggtcgaagtataatttaggaaaccttgtcatgtgagattatgccttataaaccggatcagatgtgacaatacag

SEQ ID NO: 117061 - DNA, 1151 bp, Zea Mays
tctcctaactgtactaggaactagcctatgtgctcatgcgtgctcttgccctggtcaccaatttttttggaaagtcaggtgttctagtccctgtcatatggttttcgatacgactgccccttgtgagtcatgttaacttcgagtttatctcgaaatgccctagctatttcttctttcactatgtcaatagtagctggtgggagcccaccctataggtataggtggtcaggtttcactatattggcctcttgcccattgatattctaagtgtgtgtttggagcgcaactagtgccaccttccattaacttgtatccctccgactctttggggactaaagagtattcggtcctagggatgtgaggtggcattgtgtggctataatgtactgcaggtagagtggcgtaaaattgttaagataactgtgaaaactaagagttaggcgcatctccctgttctacatacatatagtcggatggtccgggatattgcgtcggacagtctgtctgtactctggacagtccaacgtgtcttgccggacagtcggagactgggttgagggctccggggttatacccggagtgtctttccatatatggtgtcacctgggcagcttgcgcgtagatcggtgtggggtcggattgtccagcaaaggatgtcggatggttcatgtggtggtcatacgtttcgagataagacctgaacagtctggtcatgcctagatccggtcgcgtgctaggtgtgagtggcggtggttgtgatgatgttgcgctcatgttcattggcatatcatacaatgactgaatttatgtggactcatttacagtcgatgtttttagtgaggtaggttttaccgcgacttcatgtgatgggaaactagagacaacaaatttttctattgtacgtgtgagtttcttagaggtttcctctatccccccctatgcattattgtaattgatttccatgtaaatctatatactatttaagggattggatgtcattagatttactcacattggggttttgcaatgaaggtaggagagatgtcatctcgatctccccttgctcgacaatcctcttgtgcctgtctaccttgaagtgcgccagatatatttccttcatcgcctcgtgctcttaggcttgccattgcttt

SEQ ID NO: 117062 - DNA, 289 bp, Zea Mays
agcacaccagttgtaacacgccctcaacaatactatgataagcactacactggactagggcgcaagcatgaaccagtataccccaccgtctcaaatccatcgcttgagccctagcggctcaccattcggagtgagttcgcgctaacttcccctccaaacacaaatcttaatgccacctggtttctaaaaccacgacaatagacatctcaaattcatgatctatcatttttccaaactcttcataaaattcttgatttgttgaaccaaaaaatatatcatccacataaac

SEQ ID NO: 117063 - DNA, 494 bp, Zea Mays
ctggaactgctggagctgtgattcaaagagagctctggagcaaagaattgttgatgaaccgagaaacgccacgtacgggaagagcaagaaatgagacggggaaatttccaaacaagccagagtggacgaagtggccaatgggcacgcaggcagtacaacagaaccgtaaactggctcgctcgctcgtcgccacggatagagctggacgacggcaccttgcagacggagatggagcaaagaatccatggaggtcaatgatggtggaggaggaggagatggacgtagagtaccataggctgaagctgacgaagctttgctgtactgctgtgctgtgtgatgctctctctgactgacggcggcctgcgacagcttcgtaatggcggcttcggttcgccgcagtccgcggtaacgggtccagcagaccagcgctagctccacctcctgcaacggtcggtgcaactgcaacggacacttaatttagggcgggaaacaag

SEQ ID NO: 117064 - DNA, 412 bp, Zea Mays
attggaagacaagtttgaaggtttggaattccatcacgtggaaagagaccgcaacgcagcagcagacgcgttgtcgaagctaggatctagttgggcctaggtcccacctggagtctttgttcaggaagtgccacacccaagtattccctcagatcaggctgaagaatgcaacaccctgagccaaccagaatcagccctaatgactgtagagagcctatcatcaggtacataaggaatgaagaagaactggaagataaggctgcagcagaacgcatcacaagacagtcggcccactacaccgtcatagggggcgcactgtatagaaggggtgcgacaggagtcctcatgaagtgcatttcctcggttactgggaaacaactattagatgagatccacgtcagacagtgtggaa

SEQ ID NO: 117065 - DNA, 482 bp, Zea Mays
atttggagataaatacacccaaagttaggctttcaggctgtttgaagtctgaatttggactaacagtgggtttgagcaaactttgagctcgattctaagcatgatccgttgaaaatttgtttggaatactataacaaagatgaagatggtatgttgggctacaattttgctgcagagccttggatgtgttgccatacaaaatttagagaaaatttgccctgaatttgatctgtcaggccaactgaacccacctcgccatggtacagtgcatcggggaaaacaagtttagaaactcgccaccgacgacccgcgcccggattcacgctcatgccgccgtgattcgtgcccagatcgtatggatagcgcctgggatcgagtaagaatcctcgccggccatttaactactccggccatttaactactcgggccatttaacaactccggccaccgtaccgatcttgccacagtcacttcggatatcc

SEQ ID NO: 117066 - DNA, 315 bp, Zea Mays
ttcgttgttcgtcaaaaagagaagctttggaatagaacagacaaggccaagaattcatttttatctaggaaaaatcatctgattcgtaagctttcgataaagcaaatggagataactgcttggcaagaacgaaagaaataccaatatccgcctcggactagtcttcaacaacagataatactgctctcatacgaaggagtcatcaagactagggagaatacctctggtctccataagatcttcatatttctatcacaatttaccatcactaatagcttagtggtcaagaattatggatcttccggtgccaaggac

SEQ ID NO: 117067 - DNA, 284 bp, Zea Mays
gcggcatcctggccacccaagttcctgccacacctgccggaaaaatacgatggaacatcaaacccgtcggagttcctgcaggtgtacgttaccgccatcacggtagcaggtggaaacaccactgtgatggcaacgtactttcatgtggccttgtctggacctgcccggacctggctcatgaacctcaccctgggatcagtctattcctgggaagaactctgtgcgcggttcgtagcgaacttcgccagtgcttaccagcagcacggtgtggaagcccacctcca

SEQ ID NO: 117068 - DNA, 440 bp, Zea Mays
cttaagggtatgcccttacggttgtagaaccaatttctctctaaggtatgccttaaagaagggtgcttgatgaagaatttgttgttgatgaaacgctacaacaggttgatgaagctcttctcgcgatgtgatgatgcctttttttgtatgtcactggagaacgcagcagcctgagcggaaacgatgtgagcagcagagcggaaaccaggggcgattccagggaggggcacaggggggcaacgtccccccttatcctccccaaattccataggagctactacctttttagctaatcaccatgtaaataatataaaatacctcttaatagtccccctcaatctgatttaccccctcaaactcaaattctggcttcgcccctggcggaaacgatgtgagcagcagactagtctgccagcctgacgtcggttcctgatctcgac

SEQ ID NO: 117069 - DNA, 786 bp, Zea Mays
gaccgaccaaaatccccaccgagcaagtcggcgaggcggagagatcgaccaagtccccaccgagcaagtctgcgagacagagatccaagtccagcgctacgagcccacgatggctatgacaagacgcatcaccctaggtcgtgactggacatacgcgcgacataacgagggtgcgtcgagaggtcgctatcaacatgactgcacatctccacgtacggtcccgggtcatggaggaccttagcaccgaagcttcgacagtgatccgtatattgcacaacacacggttgatacaccataccaggtgtacacctacgcatgtcggtgagtcatgcaggctcgtgacgacaggcgagaccgcacaacacacgactacaccatatgactgactcgtgggacccccacgcactactatgatgatgtcagtagaagactcgttacagggacccgtatgacaaatgaatgggatagtacgccatgccgggggtacgactacgcacgaccctgtggacgatgtcagaaggactatgccatctaggagtaacgaaccatgcccttgctagcagaatacaaagtctccaatgtaaggttctggccttgagctataaaagggtaggatcccttccatctacacacaagcacaccagttgtaacacgcatccaagcaatacaacgatcaatactacactagactagggagtgaaccctaactagtataagccctctgtctcaatcaacatctaattctccgcgattcaacattcggagtgagtccacactagcaccccc

SEQ ID NO: 117070 - DNA, 311 bp, Zea Mays
ttggattaccgcattcagtcgttcttcctcgagtatatcaatgtcttctagcctagtggcttcgacttctgctatgttttcgaagatcaacctcggcgccccgaatttgagatcggcgtgtaacaatgcctccgacccatagaccatgaagaaaggagtgtttccatgcagagctcggctaggttgggttcttaggctccagacgacatagggcaattcccttatccattttcctgcgaacttttcattcttatcgaagacctttttcctgagtgcctccagtatcatcctgttggctcgctcaacttgcc

SEQ ID NO: 117071 - DNA, 401 bp, Zea Mays
ctaatttctaaaagttcggggtgtgttatataactttgtggacctatttgttataccctcagcgaaggagaggatggcaggttgatttgttaagcttccgaggtctctttctcaaaaaggacgtggccgaaggggtataggcgtatcccacccgtccgattgaaatctggtgatccagattagaccggactcgagtacacaacccgagccacacaacctgagatcgacgtccaagatttaatctatttggattgattctcatgagtacgatctaccacggacgaccaagatcccgaacccaaaccggtatggtttagtctaatcatagtcgtcgatgaacagatcaacggtcaaggcgattcttccccaatcgagcctgacaacggcggcgccgccccgtg

SEQ ID NO: 117072 - DNA, 373 bp, Zea Mays
cgacttaagccgattgctccgttagtaggtatagtggtcaccctgggttaagtaagcgtgaacatgtcacaccgccttaagtcatcgccgacttaagccgattgctccgttagtagggtataatggtcaccctggtttaagtaagcgtgagcatgtcacaccgccttaagtcatcgccgacttaagccgattgctccgttagtagggtatagtggtcaccctgggttaagtaagcgtgccgattgacaataaacagttcgagtgcctttgagaatgaagtctttttattgatggtgtattttctaattacagaatacaacgttgttccgatagcttttgaaatctagctaggggtaaaacttcctgagatgct

SEQ ID NO: 117073 - DNA, 478 bp, Zea Mays
acggcggagggcgccttggggcggttgccgaggtattcttggggccattcaccgagttggagtaggcgggtccctgtggcttcagctgcggacagttgttcttgaagtgacttggatcaccgcagtgccaacatgcatttgccggaggttggttgcttgccactgagggagaatggaaagagctctgactctgctggctgaatcgtgacagagtgggtccagctggtctactgaagttgggccccttgggtggaaacccaaatgatcgagtcttctggtgccggtcctgctgttgtgcccggagaacctggaacttccttttgagatgtcctttttcttcctccttagctctttcaacttgcatggccttgttggaaaggtgagagaagttgaggaagtcttggctagccagaattgtcttgagttcgggcctgagtcccttaaggaaacgggccatcttcttactctccgtattgac

SEQ ID NO: 117074 - DNA, 503 bp, Zea Mays
ctaggataggatattggagattttagagaacggacataatgtagttaccaaggtaggataaagagatgagaaaggtaaaagtagtatccaacaggagcacaacaaaggatggagttgaaaactcgcaagcgacaaggaagatgatacgaccaagggaaaataggtaaaatacaactataaaattgagatggaagagagaaggttttaaaagacaggtataacataagcatcaaggtaagatatagaggtgacaagggtaaagaagataatcgtgaaaagcataaccaaggatagagttagggcaagactcgcgaagtggcgaagtggagagaataatcaagggtaagataggtatggttccatcaaaagggttgaaataaaaatccattaccgaaagaagttacaaggaattaacgaggtcaccaaggatgtgcaaaataaaatgactgctcatggatcattaagaaacaagggtggtcaagggcatgtagaatgaaatattt

SEQ ID NO: 117075 - DNA, 398 bp, Zea Mays
cagaccgaagcccagaaaacagaaattgaagatcttcagaggcagctggccgaagctaaggaaaaatgtgcagtcacacaaactaatcaagaaatcagcgaatattggaaaaattatctagagaaaaatgttgcagaacttcgcacatccaaggaaaggtgctttgaaaaatccttaaattgtgtgaagaaaataaaagctagtttcgccaaagttggtgcctactctgccaaagaaaacttcatatgaggcgaccccaaaggcgttattgaatggataagtggggaggccgagaccttcgaagaaattttaagtgatcgcggggatgtttgcgcgttttccggtgcgcggggaatttcagccatcttggagaaggctggatgcaaccatatcaaaac

SEQ ID NO: 117076 - DNA, 529 bp, Zea Mays
tgaaactagaatattttatgaatttttaatattgcggtgttggttctacaatgtccttgtaattagtaactttgaactgcatgatgtcaattttatcggtttcctttcctacatttgattatcatatacatgattatgtattgcttaatttatgtatttgttgggtggttggacaattaatatcatcgggacgaactacgcgacaattatccagtatctacccgagtagtatctgttatccatttcttacctgcccagattattacctggtcccgtcctgtatccgtcccgaatcttaactacccgtatcctgtctcgtatagtcgtatcctagagaaatacattagggtaggatatgggatgaccctgtatccggttgtatccatcccgttttcatccctattcctaaccatctcctgctcataagtctcctgcaatacaatatgaaggttcagcacacatgtaatgtatagctatatggcaagaaaatattaatcctaacaacaactaaccatacgctcaacggccg

SEQ ID NO: 117077 - DNA, 781 bp, Zea Mays
cattattgtctcttatctgccctcatgttgcgcttcacgtgcttgaagatttggtgtgagttccctcattggaaatcctcccgtccccccttctgacaaggttggttaagggttttagccctcaagcggtcggggcttgggctcaaatactcactacaatcgtagtgacccccacgcctaggatggtgaacatgcggtgcttcaggttgctccctcagcgtcacgcttggccttctactagtgtggggatcacccttaagggacacagccatgccgaccttcacggtggacatgccctgatcggaacttctcccatgtcgtctagtgaggagctccacgtgcttggccaaggcacactcaaagagcgggtgtgtttccttgcttgttttgggggagagatggttactttcctcatcaatggagtaaaatgactcgtaagcaaggaggtcatatataaattcgagggcatgcttggtcatacccacgaactcgatgttcgcggggagtcaccatgcatgcggctctcggagcaggaatgagctagggatgaccacatccttcattcgaggactccatgaggacatttacaacatgggccaccagactacaaagttttagcccttggaatgccttgatggaggcggagacaaagggctgtgtgggtgtcatgaccaacactagagaccctttgccttcggtcgtgatgatgatgtcaagagccccaaaacgcacgctgccgcctagaacccagttgttggcattttcagccatctacaccaag

SEQ ID NO: 117078 - DNA, 332 bp, Zea Mays
tattatcagaatggggatttttatttgggccatgaggagccacgggttagaaccaaatgcaagatgtttttgcaatattcacgaactgtcatacgagacgaaggatactggcaaagaacaataccacaataattttggttgctacagcttcgtgcctcgcactggtgcgagctatccagttccaatgtttcggaagaggtggccagggtcctggatgcaagagtggttttatgtgaaaaatgacctggtcgaaagagaagatattaagggtatcattcaacgccctatctggtcccgcttcggcatcagaaggccatctgttgctcttggga

SEQ ID NO: 117079 - DNA, 413 bp, Zea Mays
tattacatacttcaaacattacatagttttgttacaaaagaggcctaatcttccttcatttgttctatacatcaagcttttcaaaatgtttttacaaaaaaaacctattcctctctaaggactttctctgcaacttcgttcagcaatttattgacgacttcgtcaataatggattcagccatgcttatgatgtccaatgattccttcatctctagatcagctaggggatcgtatggctccggtggcggggatagttcagctgtagtaggaaaattgttaatacgaagcctcgaagcaagtactgaaactaaaaaaatcaaaagcaatacctatgcgcctttcacgctcggcagcctcttcagctcgctttgctttttcccgggcgtcgtgggtgtctttctcattctttttta

SEQ ID NO: 117080 - DNA, 574 bp, Zea Mays
tctacgctacctatcgcggtgacttcggtgtggtcgaatgccgaagaccgtcgatgcggtctttttcgacacgttgcgtctgagttttgtttttgcgggggcttttgctggtatattacatggctctgcctcgttaaaaacctcaccccccgggaggaaaagagtgcagaccggaataacattttttgctggattacaagggtgcgtgggccctgatggttagacaaaaaatttgtggagattgtcaatgttccaggagtgctctaagtcttcaccggagggcgttactagcctgtacgcgctgggggatgccttcgacttgacgatgaatggaccttcccattttggctccagcttgccccgtgattctgtctggttgttctggacgagtacgaggtctcctttgttgaactctcttgggacgaccgtgttgtcgcgtcaggccttggtttgagcctaatatttgttgagggcctgtagggcgaggacgcggtcttcgtcgatgagatctttagacgttggtttgtcgatgtcggggaccgctgaagtgcttgttcggggcgacccatgcttt

SEQ ID NO: 117081 - DNA, 336 bp, Zea Mays
gtcgtaggcatgattgtatgtccccttcttataataaacgtaccacgctgtctaaagggacgaggcagctctggtcagaggcgacctcagcaccggagcctctatagtggccaatatgacggaagcgacaaaacgaggcaccataccgaataggcaaatccatacacatggaaggaaaacgtagggcccacgatgatgggaggaagccgcgccatgtccgtcaagaccatggactagaccatgggacccgctgcgcatcatcgcagggacatcagccatgaacccgccataggaacaggagtaacgggcgacgccataccggaagcactactttac

SEQ ID NO: 117082 - DNA, 714 bp, Zea Mays
tgggaaatatatcatcaataaaaagacttcaagagcactcaagttgttcactatcaacctacattcttacttaactcggggtggccactataccctgctaacggagcaatcggcttaagtcggcaatgacttaaggcggtgcgacatgctcacgcttactgaactcggggtgaccactataccctgctaacggagcaatcggcttaagtcggcgatgacttaagacggtgcgacatgctcacgcttacttaactcggggtgaccactataccccgctaatagagcaatcggcttaagttggcaatgacttaaggcggtgcgacatgctcacgcttacttaactcggggtgaccactataccctgctaacggagcaatcggcttaagtcggcgatgacttaagacggtgcgacatgctcacgcttacttaactcggggtgaccactataccctgctaacggagcaataggcttaagtcggcgatgacttaagacggtgcgacatgctcacgcttacttaactcgaggtgaccactataccccgctaacggagcaatcggcttaagtcggcgatgacttaagatggtgcgacatgctcacgcctacttgactcggggtgatcactatacccctaataacggagcgatcgatttaagttggcaacgacctaaattggcgcggcacattcggcgcgttcgcgattattcatcccaggg

SEQ ID NO: 117083 - DNA, 510 bp, Zea Mays
gggggggggctcggctttaatctcaatggattcatcggctccccttctccatatatttgggagggggacacccttggctcttaccccacacccgcatttagctttgccatggccaaagattgtgttggagtgggaggagcaagagacctacatacctttccgttgttgccttcttgcttcgccatggccgagagagtgaatgtccttgctccccgtgactcatggccctactccactgtgactgaggaggatctgcagtctgctccacccctcaccttcggagcgcgccccaaatggatcgtgcctggggatgaggaggagccgactccgcccatgggctacatcgttagcttcatggcgttccacgagcgtgggttcacggtgccagcaagccactttatgcaagttctcctgcaatactacgaggttgagcttcacaactacaactcgaactccattgctcaggtggcgatctttgtgacggtttgcgagggatacctcgggatcgac

SEQ ID NO: 117084 - DNA, 968 bp, Zea Mays
tttggtttctctcacgttggcgaaggtctctgcgaggtctgcctagtggtccactttattcttgctcacgacaacgatgtcatcatcataagtgaatatgtttcagccaacctggtccttgagtattgactaggtgaggagggaaagtgtggatctagcgttcttcaggcattcaggcattctaacaaagcagtaggtgctgaagggtgtgatgaagttggcatttgctttgtcctgttcactgaggtatatcttgtgatagccaaaaaagcagtcgagtaaggacatgacctcgcagcctgatgcataatcaatgattttgtctatgcgagggagggggaactcacctttgggacaagccttgtttagactggtaaattctatacacatgcgccatttgttgttcttctttttgaccatggcaacattggccagccaggtggggtagtccattggttcgataaattttgcatccaggagccactagaccttggcttggccgcctctattttatcatccgacatcttgcaaagtatttgtttcttggggcatttcgagggatttatgtgtaagtagcactcagtgatactttgtcttactctaaccaagtctaatgacgaccaagcgaagacgtatttgttcctatgtaagcatttgagcaagctggccccctcttgcgtagctaggccttggtcgatcagtactacatgattggggagagcgatgttgaggggtactttcctgcccccttgtcgctttgaagagggttctgctgcttatcaaccttggatagtggctatggagtactgttccgcatgctagcgcttaggcaatgaacattttattgccccgggatgaagtccctctctatattgctggccacttgttggtctctaaataccgtgataactccgcgtagccctggtatcttcatacataggtatagtccatggattgctactttgaag

SEQ ID NO: 117085 - DNA, 491 bp, Zea Mays
cacaagtcaacaggaggacgagggaagagtctacccggaaggacccaccctggatagtcctgaggcatcgagcctgggattgggcgaggcggagccagaagaggggggtcgggcgaaccgagagaaagccactcgagtggattttgtgcttagcccgggactgacccaccataaatgattggctgcattaattgtgcatggcgccaagccagagtagggaggttggtcctccttccactcatgacttacaggcccctaggcatgcaacccactcatgatctatcaagcctagtcctaaatgcactggtcatctacaggacccgcaacacgatgagccacgtcgagacccaggctacgaaggttaggggtcggtgtggcgcagagagggtaacgatgatgccaaagctcctcgtcgcccatgtgcagctagtctttaagagcctgcccggagaagctccgatgaccgaggtgcatgccgacaagcatgacgt

SEQ ID NO: 117086 - DNA, 302 bp, Zea Mays
gttcagtggaaaccgtaatcctgctctgaaaaaacttttgaaacccaccacttcatcaactttcggtgtcggagtggtctcttccccatcaaaacgaatcagctttttctcggcttctccgaagtagcctagcttcatcatcatgggcatatcagcttcagaaacagtagatttttcaaaatccaagtgactaggttttgacgggatcaagatactataatcctcctcttcttcttcatcagcaatttcttcctcgacgccttgttcagtttcgacaataggtgcaccttcttcaatggctc

SEQ ID NO: 117087 - DNA, 498 bp, Zea Mays
gtttttgtctaaagggatcatattacacttgttttaacagaccagaagaccatccatgttttagttgaccaatttgctgttaaacactaggtaggatttaaatttgatctaaccttaaaccaatactaaagtttagggttttaattacttatacttagctaggttttagtcctttgggcaaatcaactccaaacaagttcaaattttaaccagaagctattctaagggtatataatcttgccacaaattcttatgatttttggacctagggttttatttctaaaattcttaaaggcttagtttgagcatcataaaagactaaataattccatgctcgagataaaaatcttgaaaccattttaataattactttgtgtttttaggaacccagcaaaattagtctcatgattttatcaattttctactattttctataaattgacaaagctaacaacaaaaagaaaaagaaaaacaatgaatagggttgggccgattctg

SEQ ID NO: 117088 - DNA, 535 bp, Zea Mays
gctcgatattccatgaattccccacttcgatgttgtccatctgagtgagccgataggaccctagtcatgtgacctctgcaacgatgaatggtccttcccatggtggtgacagtttgtgccatccctcccctgttagtactcggtggaggaccagatctccgactctgaaggatcgatgtcgcacaactttgtcaaggtagcgcctcagggtttgctggtatctggccaactgaattaccatatttaatcgttcctcctccagcacattgatgtcctctagcctggttgcttctgcttcggctatgctttcaaaggttaatctgggcgccccaaagatcagatcagttggtagcactgcctccgacccatacaccatgaagaataatgtgtttccatggagagctcggcttggctaggttcgcatgctctagaccacacatgatagttccctgatccacttccctgcaagtttcttgcttttatcgaacaccttctttctgagtgcatccagtatcatcccgttggctctttccac

SEQ ID NO: 117089 - DNA, 271 bp, Zea Mays
atttcatcaaaaattgtgaggaattcatcatcaaatggcaagggtatgttcctactgctagggttacacatgatggagaagaagctgaaactgttgagaccgctccgatttctgaagtgatgaaacagtcagggctagtagtgtcggaagatgtttctgatgaaggtgcacctgccgctgaggctgagcaggttggtgctgaggaagatgaatctgaagatgattatagtgtcgtgccatctaaacccagccacctagagtttgggaggtc

SEQ ID NO: 117090 - DNA, 389 bp, Zea Mays
ctgcgattattcagtacttgcgagcatgtgttttttttgtactagcactaccgtgtgtgcacgattcctatttttgtagaaggtggtgctgcaattgttcaggacttggttgttcatgttgtctcgtgcggagttgtttaggatactgatgtcatctcttcgtatattgcttgactaagatcatgctagttttgattaggtagcttgcatagaaaaagcttgagtatgtatgtactaatcaaatcgcgccctgtggcaatcccgtacatacattaatttcacttggcattgttcattggcatctttctttatgctatctgcagtaacgtagaaggccactttccgtttgtccttttctgcttttgtatggctttgaagttactcaggag

SEQ ID NO: 117091 - DNA, 284 bp, Zea Mays
aaaaaagagcccatgatcgctggggttcgttagtcagtcagaataggtaggtgcgccaaatttggaaggatctcccccggtcgaatcccacggcaccgagcctcgggccggacatggcggactatgacaagtgaggacgagcgtgtcggaaaagaaccactcgagtaaatcatgtgtccgtccccagactgacccaccataaatgattggtcgtattaaccacgtctagcaccgagccacagcgtaggcgccggtctgcttcccgctcatgacctacgtacccc

SEQ ID NO: 117092 - DNA, 672 bp, Zea Mays
ttctgtgggaggtcctgctccgccatgttggctacttccttgggcttcgcctttttgctgggaggcttggtgataaagcgctttagaacctcacactcgcacagtttttggtggacggggaagttgtggttctaacacggtgcatccattagtttcgggaagtggtcaccgccatgttctacggaagcttcattcccgtcgtgatgggcgatccgtagtggcgacttcattcatgttgtgtcaggcatggttgctcctatgtcgcttgtcggggtgctcctgatgctctttttgtacaccgcatgtgtcgtcggcgtcgtgtggggtcttccgcttgcggaatattgctcctactgcatcatctgtgtcagcaaacttggtcgcgatgtcgaggaggttagtggcagtttttggtcgtccgtcgcttagctcgtgaaccagtacctcgttggtggtgttgtaggtaaaggcactaaccacagtcggtgttagtggcatcaggtagttcgatccacttctaggagaaccactgaatgtagtcccagaggctttcccgctcttctggatgtatcgtttgaggtcccaagagatccttgggtgtttgtaggtgccatggaaatttccatgaaggccttcttgaggtagtcccagtcgtggatggtgaagctcggc

SEQ ID NO: 117093 - DNA, 472 bp, Zea Mays
ttcgggagttatctgatgaagaaagatctggaatatctttaatacttaaaccacaaatttactcaacggaaaccgaaggcccgccttcaaaaagcttcggtaaacaacaacttcattttcctcaagcgcaggagcggtgttgtctcctccaaccctcacaatagacatgtcgcgaaagtatcttcctcttatggcgtcaatatgactttgtttaatggtcgatttcccgaagatagtatggcttggccgccagggctggtcctcagaatcttcatccccgctttccacatcataatcatcgctgtcgtcggagtcgtcagacaaatctgccattatttcccttgtgattttttctgtgtttgtctttgccatagattcgtaaaacccagcaataaaaggatccataactttcttctcctcgtataccttctcttcctcagtcatcttcttctcctcagtcatcttctcccca

SEQ ID NO: 117094 - DNA, 523 bp, Zea Mays
gcaggatgcaataagccgaagactcgtaagcaaaattaggacgatgcaatcctataacaaaaacatcactcagaaaatgtgtagatctgcataactgtcatctccaagatttggcaggcgttcctcaggacttctttgtcctcctcacgcctctgcaactgcgttcagaaccggcaccagtgcgccccttaattaaaacacctgcatatatgttttaggcgaacatttttcaaagactatcatttctactaaaccataacgcccagcataacgtagcaacccctaccgtaataactgatttggctctgctattgagtccatgtagccaatcaccgtacatatgatttatactcgtcggggctgccatgccaaaggtaatatgaaccgctctccatacgaaattagcaaaattatagtcgaagaataaatgttgaatcgcttcattgcatgaacaaaaaacactcctcttatcttcgtgccaattcctacgccccaattgtcctttgttagcatcacctctttt

SEQ ID NO: 117095 - DNA, 367 bp, Zea Mays
aaattcgacttttctctcgggtggcatgcccgttagctcctcgggaaacacatctagaaagtccgacacaaccctgatagcctcaagcgggttggcctccttactatcaaccgaaatctggtgacaatctcctttcattgtcttaggcatccttagctcagccactacctcctctccaagcggggacttcaatgttacggtcctcttgtcacaactaacattcgcttcatacttcattaaccaattcatccctaggatgacatctaccccaggggtgtctattactattaggtcgctggggaaccctatcccccttatttccacccttatatttgagcatattttatctgcttgcactttaccaccg

SEQ ID NO: 117096 - DNA, 400 bp, Zea Mays
ggggagtagacgctatgggagcagctctgtgcatgtacaggaaacaaagaggagaagaagctgcaggtggcggctaggaaaaggaaggagagagtggcggctaggaaaaggaaggagagagtggcggctagggaggtagatggataaaagccaagcaaggaaggagcacctctatttatagaaaattgctagagttagggtttcttagtgggctaggccgggctggcccaaaacacttaatcaggctgcgctaattatttctcgaaataaaaatgctcctgcgaaatttgtctgtacgcagaacagagtgaactagacttcggacgaacggaagattgagtgagtaactcggccgagagtctgttctatcttctcccggaaataattcctcgtgcacaaa

SEQ ID NO: 117097 - DNA, 669 bp, Zea Mays
ctttgattaaggctaaaaggatttgcaatacacaatttatgcctgatattcttacaatgaaaaagatttagaatactcacaaccacaccattgatgttttgaaaaaattcattgtccaaataggtgttgttgcacttgatgtctttctctttcatgtaagtgtcctccctttgtagctgtttctttttccttcctcacttattgaaaatactcaagaaagatgttaatagtacaagggagtaaatgatgaatgatggtttctttagatagaaaataagaacaattcatcatccataagtcacatatacatgaagtaaacttcttaacattagtgcacatcaaaagaaatatgcactctttaaacattttgattaatcacaggaaatttacttcttcatattgaatttattaaacattacttggaagcaaatcaatatgagaacaaatatagcaaaggcatgaaatagattctaatggacaagtgcattttaattagaatgagattgagtgcacatctatccgactttggtccaataaagaatttattctttacataggtagaatatgatatattagagtaaacaaccattgatgggaactatatttgattgagaggatgagttcccatacctttgcttttacctttcttcctttgggtgaagagcaacc

SEQ ID NO: 117098 - DNA, 378 bp, Zea Mays
ggggagggcagtgtctgccattggcgacttctgtctaaaccactatgtagggctctaggattgatcatggtgaagcgccatatgtcgaggatcacgtgtgtcacggtggcaagcaggatgggtggtcggagctagagcaattgctcgatggagcaattggcgccgtcgtggatcgcaccgcaccgtggctgagggccaccccaacttcacccactggtaagccacatcgatccagactgcttggattcctgccttgcgttgcaccgacctcgagaggaaatggggtagtggagcgcggtggcgggatcacaccgttgaatccgtcgcggtggagctacgggcgccacccagcgttgtcctttgagaaagaagatgtcc

SEQ ID NO: 117099 - DNA, 495 bp, Zea Mays
accatcaactgcgtgagtgcatctgtgccgtacgtgcagtgcaggccgaggcaccctaaaatccaagctacctgcctactagtaggtgccacagctactagcagtaacgtccttccattccatcccatagcacgaagacactagctagggggggtctagctgtccggtaaaaaccgtggtttcacgcaccaacgcgtagggggggcagaacggtcatcagatgctggacagctttgggaattgaggacgctggggccccttccgcaaaacaccatcgtcaggccactccattggtgtgccatgggtctgccactaccattgtcacgccttcactttcaccccttccctagcgatctttattttcttcccttctggagtacgtattttgtttatttggcttcagatgtctagtcgcctcgtctacaagagaaaaaggcggttggcgagcgagtgtgccacacacgctgcaatttggcatgcatggcaagcagtgca

SEQ ID NO: 117100 - DNA, 1730 bp, Zea Mays
tggattgtattgttcaccttgataccaaataacaagagcattagcttacccgatcctctaagttcaaatctgaattttgacaggcgatcacttcagggctcatataaaggcttgactgcaatgtattgaatccaattcgaagctcacgtacagtactgtttgtctttagaacttctgacatcagtcttaacaaaacatttaactcttcatttttaagcttcccaataagctgttccttttcctgagtctgattcaataaatgagcaaaatgtatctttgactggtctaattgtgactccagacgatgaatctcttctcccattgccttttgtaaagaaacacaggtctgttgcagaacctccttctgtacaaaagtctcaattgattcatccaacaataggtttattctgtgaatttcttctagttggtgattgtttacatgtccttgttcagatatttgtgatcttagaaaatatatttctttttcttgatcacatttttcctgctgatgctcttcatttacaacctgcattgctcctcttaaggaccttaatttcaagtctaagtcacgtcttatatcatctgcctctttcaacctgttctgaagctcttcgagtagctcatctctttcagatataccactacacagctttcgaacttgtttctcgatccattttctttgagataaagatttggaaataaaggcaacctgatcagaagcttcacctaaagctgcatttccatccacaagacattttccaatgtcggcagctaatctgttccagtcattggacaatagttcaatttccttttctttttccttggtcacagaagaaaatatttcgttctctttcaacacctcaagtaacttatcattcaactgcttgatttctagttgaagttcatttatgctttgtttggctaacaagtcatttttgttgcttgcatttagttgctgttggactgatatcagatcttcttctaagcattgaatcaccttagctgtttcaacctcaacctgtttacgaacttcatccatttctttctcagcaaaacagtgtgatgcctgatctatttggtaccttgtatttaggttccgtgccttttcaagtgaagcttgcattcttttaaacttcctctgcaaaggtgaatcttctttaccgaaacacttaagaagttccgctttgggctcctctttggtcaagtaatcctgcctatggtggaggtcaagttcactgttcaaccttgagatttcgacacaccccttcttaagttcagctatttcgtttatcaatataatctgctgtgattcaagagcttcaataagagatcttgactcgttcaattctctttccattgcctcacaatgcttacacgattggaggatatgtatgtttgcttcttgcagtttgtcacctaaaccagctggtttttcctcagcttccgcatgggctgttttctcttccacaagatcagctatttccctgtgaagtgatttacttgcttcaataacagaaattccaaccaagaactttttttttgcaaatatgcaattaccttgttagtgctatgttcgattctaagcaaacttgacggttgcttctacatgtttctacttcttggctggtccttttcaactgaacataaaaatagaggtttaaaaaaaatctgtttgtagggagaacgaatgtgcagtgagaactaaatatgaatttaaccttagttttgtc

SEQ ID NO: 117101 - DNA, 395 bp, Zea Mays
gaaataattggttacaaagaactaaggcagtaatccaacatactgagagaaccatgtgtttggaaaccccgtctggagaaagaatagtagttgaagacaatcgacctccagctcagattggtacatctatcaaggaagaataatatattgtttagctagaagaaggagtatgtctcacgaaaaaagtgtcaagttgttgcccctttgagaaattgtaattgtgctaagtgatatatgaataaatttggagaatcccttgcacttattgtgttttgccttttacaaagagaataaagtatggtgtcatctgctatatgcaaacaatatgatgctctattctagttgccctaaagtcccgctcaagtctttctctcaaattgtgctcaaagaaatac

SEQ ID NO: 117102 - DNA, 525 bp, Zea Mays
caattttggtggacatcctcgacgaaccctggcaccttggtctagaaactctcaaagtggaagcagtgctttcctttagtttggattttaaggccaaggagcaaaggacagtggttcgagacagcagaagcagtgctttgcagcaccgaattagggaagatgttttccagtcctgacaacaaaacctctatcccaacggacaaacgtgggggatctacattcatttcaccaagtgtactttcggcccaaaagtggaacttccttgatttccatgtcatctaagaatcgatgaaatctgcccatcatagctctgtccacattgcaattattcttgtctggcgcctaatatatcatgttaaatctctggcgatcaaccacgacccatacacaatcctctaatgtcccttaattcctacaagagcatcactttctcctcatggaccataaactcctgtaaatcacaaattccgacctttaggtttagcaaagacaaccgaggccgataaattatccactctagaagcc

SEQ ID NO: 117103 - DNA, 356 bp, Zea Mays
cttagtttttgcgggggatttttgcgggtatattacatggctccgcctcattaaaaacctcaccccccgggaggaaaagagtgcgggccaaaatgatactgtttggtgcattacaagggcgtgttagccctgaggattcaaacaaaaaatttgcggagattatcgatattccaggaatgctctaggtcctcgccggatggcgttatcagcctgtacgcgctggggaacgccttcgtcttgatgatgaagggaccctcccactttggctccagcttgccccgtgactctgtccgagttgtccggacgagtacgaggtccccttcgtcgaattctcttgggatgacggcgtgatcgcg

SEQ ID NO: 117104 - DNA, 518 bp, Zea Mays
caaagacgcaattggcccaattgtagtcggacggcgaccgtgtgagcctcagaattatgccagctcgcttaacttgggagtaggaagctgccttaaaagggagactcacccttcccccattggactagtcttttggggcgattgggcctttccctgagtagggtgtgcttaatgaactgtagagctctgggcaacactaattggttgggcttcgtccaaccccacctgggctaggtgtatcatctggtatcagagctagggcccagttcaagaaggtgggaatgatgacgacatcttctactattactcattggcaaagacagaattggaccagttggcccaattgtagtaggatcgcttaacttgggaggaggaagccaccttaaaagggagactcacccttccctcattggactagtctttggggtgattgagcctttccctcagttgggtgtgcttaatgaactattgggctctgagcaaccctaatttgttaggcctcggctaaccccacttgg

SEQ ID NO: 117105 - DNA, 671 bp, Zea Mays
ttgttcatgcccgattatcatccgccacgaaagccgcgcctcgacgaaattggacaatttggtggcaaaatctctggtatggcgacccctgtccagttcgcttttgctccctccgtgcgtagcggttatctgtagggtaagaaactcaccggggcggcgttggagcgtactccgacgtcaccaccatcacgcggagagctctgctcgccgtggctcgccgtcgggaggatgatgacagcgggtggccgttggattaaaatgaacggttgtgatcaattgctacgtcgcgattcagctggatcgtttgggaccatggatcataggatagagggacgagattagaccggggatgtaacccttcagtcattggatctgggccgtcgatcttgcatcggacggatcaagtttcttaccggttcgtagtggccggaattctaatctgggcccttgggtctggatcggtcggctcttgtgacccgataccccttcgtggcctcaactttactaaagaacccctggcttttgcactactcaacccgtggtccccatatgtgtaaagattatcacgaatcagccctgttatttgcaaattaaaccctaggcttctggaaaatagtgtcccagtccagcagccgtaggaaatttagaatatatttagaaaaaggattttt

SEQ ID NO: 117106 - DNA, 462 bp, Zea Mays
cggaaagaaaccgacggctgcaactaactgcggggatagacggaagaacaaacgaaggcaacagtagcctaacctgcaaacggtgctgatacctgtcaggccggtcggagagaaagaagatagggcgagatcaaagagtggaaggagggagctcaccagtagatggagatgagggataaccgctttagctccccggtcctccgctttccataggggatcgaaacagaagaggggaggcatgatttgttttttgtgcctgcatgtgtgtatctttgtgtgtgtcacagtgtcagtacctgccttcactttgcgtgacaagtgttggtaggacaagcgggccatgggtagttgtggccctcgccccccaggatgccaacttttaaaacattttttattaaaattttatatttacatgttgagggaactattatcatactaccttcataagtcgttctaaaggag

SEQ ID NO: 117107 - DNA, 360 bp, Zea Mays
atggatacttgtttagagctaaccgcctatgcatcccagttggttcggttcgtgttttgttgttacaggaaacgcatggtggtgttttgatgggtcactttggtgccaagaagacggaggctgtgctgtccacacacttcttttggcctcgaatgcggcgtgatgttgagcactttgtagcaaattgcacgacgtgtcaaaaagctaagtcacgattgaacccacatggtttgtatatgcctcttcctattccttcagttctgtgggcggatatttctatggattttgttttgggattgcctaggacgaagagggggagcgatagtgtttttgttgtggttgatcgtttctctaagatgg

SEQ ID NO: 117108 - DNA, 372 bp, Zea Mays
tttagcttagacaccacatgagcactactaatttttactcgcgatcataaccatgcgcaattgggctacaacatcccaaacgggtgcaagaatgctagtttctagttttaaccccatgattattccattaatcattttaactacttaatcgacatcgaccgacttaaccttcatctcgatggtctgagcaccacaattcacgaaagtctacctagacatctagcgtcacatagagagcctactacttcacattgcaattcatacagaaccgcaaggtgacaataataacacacaggtaatcgacccttctctacgaccttcagttaggtcaccaacagacgacatgaagactacgaaggcatgtcaccattt

SEQ ID NO: 117109 - DNA, 305 bp, Zea Mays
ttttttttgttgtggagtgtatgtgggctccacagatagaaaccggatgcacatctcccgccaaaacagtgatttttgtgtcttcattgcatgtgtagacctaatttctcatataggaaaatatttcctcgtctttctcattaattttcttgacacgtcaacaaattgcttatgttgtagctaaattaacgttatatagaaactagatgacgtggagggttaggactgatctaactaaagtgcatgataacgtttgaagtttgctacgtacttggtgctaaaataacttttcgacagaagtaaaa

SEQ ID NO: 117110 - DNA, 365 bp, Zea Mays
ttcaacatttttccctttttgaaaatcttatttgtttggaacatgattctttagatatacacttagtagatcttttattcttaagttaatttgatgcttcatgctcaatttggctcacatgaaatgttgattcttgggttagcactgagagaaaccctaggtgacactagggtgtcacaggtggcatgcgtggtaactctttagggaatacatcagggaattctgacacaatcctaattgcctcaatcggattggactccttgtcatctactgataaatggtgacaagcttcttcttctagttcaggtaagtacaacttggttactacttcctttcctgatggggacaccaacttaactattctc

SEQ ID NO: 117111 - DNA, 429 bp, Zea Mays
aaggggtcaaacctcagcaagccagcaggatctgctctgccacgtttcaaccagcctggtcagagttcttttcacaccgagtccgcagcaatcagccaacctccagccaatgcttgttggcattgtggtgaccccagtcatttcaaaaataattgtccacacctgaagacaactgcacctacctactccgacttggtgaatggccccaagaatgtcacaacacctgcctccaaggcaccctccaccaacaatcagttaagcaagtcatagttccacggcagggctcgagtgaaccacgttgacgcccaggaagctcagcaagcccctggagtagtactcgatgagttcctagtcaaatttacccctgctgcagtacttttcgattctggagcatctcattcttcatcgccacttgttttgtggaaaagc

SEQ ID NO: 117112 - DNA, 310 bp, Zea Mays
ctctgggctggtaacaccggaggacgtccctgccgctgaagcagagcaaggtgatgttgaggagaccgattctgaagatgattatagcagcacggtgtcgagcaaacccagccatctggattttggaaaatccacaatctccgaaggtgacctacctaagatgttgaaattgggttattttaatgaagaaaagaaagagctggttcgctttggtggagaggaaactactccgaagccaggaaaagacgaagtagtagtttttaagagcttcttcaaagctggtttgagattccctttgaataagatgatt

SEQ ID NO: 117113 - DNA, 396 bp, Zea Mays
gggaactcacgaagaagttgtgtgcggagtcaattggaaatcggtgggcgggagtcttgggaatttctcgccacacttcatcctccgtcacggaaccgcactaccgcgtggccagagaagtcaccgccccgattcgaggtaaaactacccccatcctccttggttccctctccgctacacgtagcaccgttgggttcggagtttgaggcgctagagtgcgggtttggagctccctagtcatggcgccgccgtgccatgctattccgtcgccgcgtttcgtcgcctgggtggagtagatgatctcggtcgtcgatcctttggcgaacggctaggattagaacctcgaataccctttcgcgtgagtaaaccgtaaactgtcaagatccgatcgggcgg

SEQ ID NO: 117114 - DNA, 328 bp, Zea Mays
caaggcagcaagctttgcagtaaggtcaagtcttgttccccgcatctaattgggtatacattgcttttctggatattagttcgcaacccggaagcctccccaaagatatgaagaatgtccagtacagtactgatatccccgactgttggttggataaatataaccacatcatcagcataaatagagaatctgtgatggagagttcttgtagcaaggggccgaagcaacccttcattctcagccttggtaataagaaagcccagaacgtccatcaccaaaatgaataacattggggaaagcgggtcaccttgtctgagcccacgccgat

SEQ ID NO: 117115 - DNA, 665 bp, Zea Mays
ccgcctccttggccactcctgtctgtgcgccaaccgttcctctctcttgcgcatggggccccctcctactattgttcctcttccagtcaggaatctctgtgcgggaggttgcggccgccgcaaacccagcttgaacgaggattgttgtcgcgcccatccataaaaccctagccgcgggaccgcctcgcccttcaatacgccacaacgaaaccctagagccttgaaccaggaaaggaccgagagtgcgtgagtgttacactgcccgcgccatcgtgagatcctcggtctacaccgtcgtgtaggcgaggacgacggtactggggctttgtcattgcgtgggggatctacacgtagcataatgaccggagcctcgaccaaatccgaccagaattgctcaccggagcggttcgggcgccgcgcatctgcccttcatcgtggcgggagcgcgtcactgcatggattttggtaataccacctccatgtcattcgcgtcgttgtgtagtacgagtaggtgttttcaatatagctagaagggctctggcgcgactactagtatgttcgctggggagcctccgccgtgggcgggttgctgcagacgtcgccgaccgtcgggcgaaggagatgacatgcttgccatcggatttaaatggagggctaggattaga

SEQ ID NO: 117116 - DNA, 860 bp, Zea Mays
gttgtaaatgctattagggtgatcttctagttgctcattgatcatcgatccttcagctgcatagggttacagtggcgatgagtttttgtggagttgtatgtgttggctatttgcctctagattgttgatctcttctttactatttccattaactaggtccactgagtgaaaactaagggcctaaaacgtgtggactttaaaaaaaatatatgtgtacttatcagcctttcgtcctccatcttcgtctagttacttcaccgctaaaattgtggagcatcgaagcaaatagactagttcaaagcaacatcaatgtcgttgtttggagacaatatcatggcaacaggaggacaaagtaaaggacaaacaccatatggaggaggagcaccaaataggggagggaatggaggagcaccatgtggagtatcatatggagggggagcaccatacgatttatataaaggatcgccatatggatatccatatgggtatggaggaggatatagatacataaatggtggtggaggaggagcatcggtagtaggagattcaataggaggaggagcatcgatgataggatcatcattagaagaagaataattcatggaaggctggtatggatacaaaggacgaggatatgggtatggagacagagattatagagtgagagaacagcagaaacatcctcccaacaaaaatgtatgggagcaagaccgtcgaagaagaccttcctcccccactgacgagggtgttagaaagttgtaaagattggtcattgagcaagtcagtggaagtttgaaagttcagactccacctaggatccatattgagatagagagtgagaggctacaacatgaaggaag

SEQ ID NO: 117117 - DNA, 368 bp, Zea Mays
cttatccccactcctgaagaagtttgttatggatcccctggatctattatttgacttcttggttaggttgataggattgttctttagtattaagattttcgactagatcggtaatggcgatattatattatattatagtggttttctaatccataatattgctatataacccttgacttcttatactcttgttttcttgccattatattgccatccttgcgcaatatctaccttgatatactaaattctttgtctccctactcctacttgataatgcctctctattttgcctccttgataatgctttctccctaactcacttcatatccttggttgtatcatttatcctcactttaatagttcatggt

SEQ ID NO: 117118 - DNA, 735 bp, Zea Mays
cgcccttgtaattcagcaaacaatgttgctccggcccgcactcttttcctcccagggggtgaggtttttaatgaggcggagccatgtaatataccagtaaaagcccccgcaaaaacaaaagctcaagtgcaaccatgtcgaaaaagaccgcttcgacggtcttcggcattcgaccaattcaaagtcacagtgacatgtagcaaagactaccctcgcgtgcgacactctccgtgcaaaagtcgcctacgggtgcagccggactagcacaacaagtgcgtcacatgaagtcttttactaaaagacactccgtgcaaaagtcacataagggtgcagccggataagcacaacaagtgtgcgatacgaagccttttactaaaatacactccgtgcaaaagtcgactaagggtgcagccagataagcacaacaagtgcgcgatacgaagtcttttactaaaagacactccacgcaaaagccgcctacgggtgcagccggacaagcacagtaacgcgtaacgcgaagtctaccctacgagacaaccccgttcacggaatcgacaagggtgccgtcggacgcttacaacatcacaccgctaagcgaagagcaacatgccacatcacaatacaagttgcagattacatacactcagcgaagggtcaccgaacccacctcgcaaataaatacaattgcgacccctactaccataggacaacacgagggcaccacatactacatcg

SEQ ID NO: 117119 - DNA, 395 bp, Zea Mays
gctatcttgaaattcaaaaaacgtatttggtacgtagatgaccgccttaagctcatggtctagtttcttcttcactttagttttcatacattcctctttagtcttgccctaaaattcattggcacttggtccgatagtgaatgtgtgctcctcctcccatattatcattttaagcatgtggatattgaacaaaccacatcttttgggcttcatgttgcatttctgcaaagtgcagatgtacgtcggacatgtttatgtatgagtggcacctgcaagcaccacaccttcataagatggacatcgagtctgttgaggaaaaacatcaagtgaatgtccttgaggtcaacaataacattacttgggcactaagaaaatcatctcctagtacaattgcg

SEQ ID NO: 117120 - DNA, 642 bp, Zea Mays
cctaagtaagtgcaacccatcttaaatgtcatgccttggcttatcatgcacatataatggggagaattgcccaaaccctaatgcaaacccctttggacaattggagcactataagtgagtatgaccaaaaggctataaaaaccacatgatcatgacttgggccaattataaaaattgtagtacacctaataccctactaaaaatagtaagaatgtgaccccaaaaaggttttagaaaaaccctaaaaggttcaccaaagggagaaacctaagagaaaaatcagaattcttctaagtccaaaaccaacccttttccaaagatcaaacatgttcaccccttttcaaacttcaaaactacttggctcaattgacaaagtggcacctaaagacctctagaacaccctggaaaagtttgaacccaaccctaagtcgtttgacatgacttggcacaagttttgtctcggtgtggacagctaggacaaagacaacttcccacccccatatctctcaaaccccgaccacatctacccttggaactcacatgaactaggtagccctaggtgcagggaagagatctctcacaggtcttagggcaagattcgcacgttttggccgctcagcagaggatagaacaagagcaaaa

SEQ ID NO: 117121 - DNA, 807 bp, Zea Mays
ataggactggccgtaggtcgcagccctgaccctgaaacttgccctaaaaagaaaatacctctttccccaagaaaagtcttctctactcctccccgatttaacagacccttcttttcctattccagatggaagactctctggccattaggacatcctactgctcggaggtggaagggttcccacatcttttgcaaagttgtgcgcttcgcatgggaatccgcaagaagtcggaatacatctggaaggagtatttcgagggtggaatggagaaatgctctatggcagtctacctgggagaaagccgaaactatctaaaccatccttccttccaagtcacttttaccggataccgctttccagatacttgccaggatgttgaccgatcagccctccgacaactatgccagaactacaacaaggtgatctttgaaaccccccttcgctactttccacccagcaacaagaatacccccacctggaggaaaagacttcaggccctgtcaggaggagatcctattgagaatgatcccaccatcgtctacatggctggataccttcacacccttcataaccaatatgatgacctcaccctccactgcacctacctaacctcccgggtggaaagtctggagcaaaaagtcaaggaactttcaggggaaaaggcgtcccttcaagagagcctcgcaatagcagaaggcgaggaagccaatacccgtgaggcctaccgcaccctaaagatggactatgacaagaaactgaagaagctcgcccctgcaagaaaaagccgcaagaagaccaaaagccaag

SEQ ID NO: 117122 - DNA, 509 bp, Zea Mays
gtcgaactgaacatgagccattttagctttcgtgccctctgggtgaaccctcttcttcatcccccacatacaccctcccttcacccctttgccttgctcgacctccttcccttaacactagacactgaatatggcccatactctctatcctcatcaactcaaacacctagttcgggcgaatgtcgccctagcggatgtcctgattcctcaaaccctatgcctcgacatacttcccaacaagcttacaagtctctttgttgacttcggtgatgaagtctttgcctgtctcccctcagatcaacatcgaaggggggctccacacttaaccttcttgaacaacgttacacatcgccgctgacaactgacacccaacgaaatgtggcctcgtcctgatccccctccgcaaccacataccgaggaaaagatatttattgcatagacttcacctcgtgtgccttcgaccaataaattaaaacgtgtcttaaccatcaccaaccttaatatagaac

SEQ ID NO: 117123 - DNA, 1021 bp, Zea Mays
ctcagggtctctttattaaaataccacgcagttgaggactcagacgcgcctgggccataggatcaaagatccacggtccatatcaaatacgtgaaggggtatgaggaggttctaatcctgaacctacagctccaatccgatggaccctatatatcctcaatcttgttcgtggatctatcaatctacggctcagatcttatgaggatgaaacggtacccgaatcaatctcggtcgtcaacttagggatcaacgggacccaggatctattctacgcgagccaatcacggccatccgtgattcaatcgacgacccagatccaactatgaatgggggtacctagcaggtctaatcatggctgtctaaaaacagataaacggtcagggacttatccccttcccagccgatcacgacggccgagcagagtaccccatcgacgatagtgttatcggagtaaggctcttcccccgcccatggtgaacaagacggaccaaaacaagccccaaccagtgcgagggcgagtgcaaactagatagagaggaactcacaagctatccgggccgtgatgtcgtctgcccacagcttaccgctgatccaaggcgaagcgtccactccgacgagcaatttgtgtgcccccggtgaatattctcatctggaaagaccccaatggcgcgtggttagcaccagcgactctccctgaccacccatcggggactcgacgccacctttcatgaatcaccccatggcggtaccggcgcacaaggatccccaacgcgccgcccctctcgatatttcgaagatggctgctgtggttgagggccctggtatatatgcctagagccacatgacccgcataggaacgccagtacagggattgtcacgagatcggcgcgagcaagcgatagattcggatgtattcggttggtggagacggagctgaccgtttgaccccacatggtggtgggagcaggacacacaagcgctagcggtgaagaggatggcaagtggggcccgattatcggtg

SEQ ID NO: 117124 - DNA, 353 bp, Zea Mays
cgatccttcctaatgctttgtacctcaacaacatccttgttgcccccaacatcatctagaaccttctctcggtccgtcgccccaccactgataaccactgttctatggagttcgatccctgggggctcaccatacgggattttaccacttgtgctttggttgctcgatgcgatagctccagcctcctatatcccattcgctttcccgccctactttcctctgcccatgttgccacattctatgccctcacctccactgcctctgcctccacttggcaccgtcgtcttgactacctcggccacgacgtcctctccagactcttggacacctcggccatcccttaccccacgaca

SEQ ID NO: 117125 - DNA, 608 bp, Zea Mays
ggctgaaatgtatcgaagctacaagtgatgaactgcttgggtcatattccaaagcagaagataatgcattatccacatccttcggagcccggggaaaaaagagattgaacagagtttttgatgccattggttttgtttacctcgactaccgctacccgctgcgaggacggggaaagaagaggaaaactgctgcttcggccaaaactgctgcttcggccactccagatgagcctgcgccgaagagcaaaaagttgaaggtccttacccaccggccacgctatattgaaccggcggtggtaccagagtttggcggggaggcttcttcagctgctgaaccgaaagaacctgctcctcccacgcagaaaattgaagagccgactgtaatgccaaaggcaccttcgactgagctaattgaaacaaaggttgacaaagataaggctgaaaggtcaaaaactgaagaagtaacaaagatgctcgagattctaagtccttcaacagaaggaacagtgctgaaggcagaaaagagttctgcgataacccctagaagaaaaaggatggtaaatgtattagatattttggaaacaacggattccaaaagccccgctccc

SEQ ID NO: 117126 - DNA, 614 bp, Zea Mays
ccgggtttcaattcaatcacaaactccacatccctctccggaggtaatccaggtaaatcttcagggaatacatcccaaaactcacacacaaccaggatgtcttgtatctcttgcactacagcttcaaaaacttgtctagatactttaactaggacagatgcagggatggacaacttgacttcttcttgtccatgacttagctgaatagtcctttgatcagcattgataatagccttattctaggctaaccaattcatgcctagaattacatctacatcttgcctctttataactatcatattggtagggaactcatatccggctaaattcacgggtacgtggaagattacttccttagtaaaagtttgaccctcaggtgattgaataacaaaaccctcctttgattcaacactagctatgcaatgcttctcaacaaaagtcttgcccatgaaagtatgtgatgcaccagaatcaaaaaggatgatggcgggatgattggcaatggaaaatgtacccatcatcacaggctctccttccagttggtagccacttgagtatagtagacttgcctagtttttcttgtatttttacctacctgagtgcttgccacattt

SEQ ID NO: 117127 - DNA, 366 bp, Zea Mays
agagtttctgctacaacagaaacatagaaacagcctacttctgaattcaaaaaagaaaaactcaaccgcacaatttcttgatgaataacgacttcaaattcagaaaaggtagcaaccagttactgtatataattcataatggttacacaactgttaaaattatacacatggtccaaaattagtgacaatgacaacctaactatatggacactaaaagcaggggaacccttttctctaaaaaacaatatggacactaaaagcgaatataccctcagcagtacactcatgtgatttgattggtcaattcagaagtaaattaaacgtgattagagaagtgttcactgcaattgatccgatctacgatcc

SEQ ID NO: 117128 - DNA, 323 bp, Zea Mays
gagggatggtcctgtacttgttgttgacgtgtgcccgcttgattcctgctgagagacaggctgaggccgagggctcgtttaggtacctgagccccctagcgaggggtcgcccataacatagtggttgacacagtgctaagtatgggaaaaagcttcttaagtggtgcgccaactccacaacatctgatgatgttagggcgtcctctgtcatggatattgagatcagtgtgggtctcgggtgtggtggaagttcactcgaggttgcgaccaaacccatcttgagattcgaagacgtgtgtctcagttgaaggagtggcctccca

SEQ ID NO: 117129 - DNA, 813 bp, Zea Mays
ctgacaagtatacaggtgcatcatgaaaaccaaagattaagtgtgatcaggtagagctagagcaaatttgagggggtgtacttgtcttgcgggtgcatagctttttagtatgaaggtgcagatgaggtgaaaaattgatcataatcactgtttttcatttttgctgtgggtgcgctcgcgccacagttttatacatagtagctccgcccctgaatgagataaataattaaatcttagtttttctgaagagtatagtgcacattactatgccactaactaaaccctacattttgaacaggaagagcatagtggcacagtgctgtagtactaaccgttgttagaaccatcagtggcctagcatggttgctgcactttataaatgttatattcaaccacgcataatgcactcagcatgcaacatagtgacaggcttatagattcataataacatacatcttaggattagcgacgaagtgcaatcaattatattaagagagagtagcatagttacattctaataagttcttgaagttaccatggcaaggatgttgccaaaatgaaaaactgactattttgtaatatttcataatcttcatgtcagaatcaccaccttagttattccccaagaaaaagtatacattatagccagttcggtttgccatttagcaaaaaaaacagtgtggttctaagatatccctatattacaatctaagggttgagcaattcaagggtgctgacttctggcaagcgaccaaaatgttgaagcaaccaaaggaccttcctagttcacaacaatctctaattacccgtgta

SEQ ID NO: 117130 - DNA, 559 bp, Zea Mays
tctttcaccttatggacttgtcaacataattgttcctttggcacattgtatcactccatcacaacttttcaaccagtcatatccaaaaatcacatcaataccattggatcctaggaccactaggttgagtagaaaatctattccttgaatcttgagattaacatggaggcatgagtgtgtggccttcatatcacctcccggtgaactaatatgtaacatcttcttaagagggtactttggtatgttatgtttccacgaatgactcagttataaatgaatgagatgctccagagtcaaataaaactgaagcaggtatggagttaataagaaacataccatacaccacgtcgacatcctcaggaactgattctgctgtcacatgattaacccttcctctattctggttctgcggcgttttgttctgcgtagatccatgagcaggtgtgttctggtcagttctctggctgctgttcttctgaggtgtctgttggttgcgccttgggcagttgttagcatagtggccaagttcgccacacttgaaacagccattgggttggac

SEQ ID NO: 117131 - DNA, 530 bp, Zea Mays
agtacaatagcaatcatcctgttcagggggaaccttagaccagctttaagaaaacttttgaagaccactacctcgtcctttcctggctttgggatagtttcctctccaccaaaacgaattaattccttcttggcctcactaaaataacccatcttcaccattttaggaagatcagcttcagaaatggtggactttccaaagtccaaatgactaggtttacttggcatcccgcaactgtactcatcttcggaaccatcttcttcaacatcatcttgtattgcttcggcagcaggtgtgtcctctgatgaaaccagcccagaatgcctcattgcttcagaaatcggaacactttcagcggcttcggtctcatctccatcacgctcaaccctagcagtggagcgtactctggccatttgaatttaaatttcttgaaaattccttggaaattaataaccttttttccaaagctcttctcgtgacgaagcagaatttaaactggagcttcgtttgaatgcaaaagtcaagcttcg

SEQ ID NO: 117132 - DNA, 428 bp, Zea Mays
tcatctatatcccttgtaaaccagtgatactcaaatacttagcctcgataggaagtagggtgttacgcattccagcggcccgaacctgtataaactcttatgtgatccaacatgcatccacacgtaccatcgattcgcaataaacaacgtcgtcctgcccaaaaccatcacgtggggagttcgtggtgtgcagtcgagtcataaacatcgacaacttcttcagtaataacttctccagggactaggtggctttgttgcaaaatattatgttgttgggcttggatgaatccccttgaccattgcttcgacaacaatgtcatcttgcacgcttggtgcatgagtgcggagttagataaacctttgaacataggtctaaatatattcatccgggtctttggcacactgaacaaggattgagcagttatggg

SEQ ID NO: 117133 - DNA, 478 bp, Zea Mays
ttctcaatctacttcttcgtggtctactaatgctcaatctgagttgtttgcataccttgatagtgacattgtcaatcaatttgatgacagtttcagcatcctaggttggggggcatgggcataaacatacataccatgttctatctatacttgctaaggatatcatgacagttcctgcttctactatagcttcataatctacttttagtgtggttggcaggtgatcgaggagcgtcgtcgatggcttacatcggacatggtggaggtcttatcatgtatcaaagactaggagttagtagatttgcagatgcaacacaatcttgagaaggacacaatagaaatagaaattgtccttgaaagcatgaacaatgatggaggagaccaaggaagcctgtcaagggtgaatgcgtgaattattgaaacttgtaatctagtcctttgcctctctgtatctggtgaattctagtttgtatcgaac

SEQ ID NO: 117134 - DNA, 582 bp, Zea Mays
acagacacgttcaggtacataccatgtgtatagctctggaataagcttcccatcgaactccaagcatccaaagttgtttatgttacatttataggatctagcttttcaccattaatcgttagaacacatagatcaagctctattgccttcgatcatagatacgctaaaatccacgtgtccgcgtgattgcgggcttcgtccttgagccgtagatgtacaatgggtctgaggcttcggacaactacaccaaggccggtggtggcagcagtaagggtgcagaggcgatagcctttaccttactaactgtggataggatcttgtttaggtttatagggtcgaggaggtagtaccgaacattgatttgtgtgttacctcgtccccgttttatgtatgcactataaagggggtccgcaaccagctgtcgcgcttcctgattatgacgtgaaagatagagtcaggcttggttagttgattgagaccaacttgaaattaacccaagattctctcccattgatctcatgcttattcacttatacttagaactcaatttcttaattgctttatttttagcttacaatttct

SEQ ID NO: 117135 - DNA, 367 bp, Zea Mays
aggaatataagaaggacaagttcaaaaagggaggcaagaacaagggatatttcaagaagaagaaataaggtcaagcccatattggtgaagaatggaactccgatgaagagagttctagctccgaagaagaggaagtggtggcaaacgttgccatccaatctacttcaagctcgcaactcttcaccaacttccaatacgactcctacactccaacttgcctcatggcaaaaggagataaggtaactttatttagtgatgatttctcaaatgatgacgatgaacaaattgccatgaaaaacaaaatgattaaagaatttggcttgaatggatataatgttatcactaaattaatggagaagctagataa

SEQ ID NO: 117136 - DNA, 309 bp, Zea Mays
tattttaggtcaaaagaaaaccgacccaatagcccatcagtccatcaccatcgtctaaccctagcacaaactctcctcccctcgatcccctccagactagcggtcatggctcccaagtgaagtcccacacccaatctcccaccctcgttaatgtgaggcaatatattcaaaccaatatatggtcaagccaattcatgatttctcatatcttattcattttggcttaagcaatcctcttaatcacttcaatctctattctgatcatatttatgcatagtgatttctcaggtattgtccatatattcaaac

SEQ ID NO: 117137 - DNA, 363 bp, Zea Mays
gcagcctgattagcacaacaagtgcgcaaaatcgaagtcttcttcaaaagaccatccatgcaaaagtcgcctaagggtgcagccggactagcacaacaagcgcacaaaatcgaagtcttcttcaaaaagactatccgtgcaaaagtcgcctaagggtgtagccggactagcacaacaagtgcgcaaaatcgaagtcttcctaaaaagactatccgtgcaaaagtcgcctaagggtgcagccggactagctcaacaagcacgccaaaacgcaaagcgttacatccgtgcaaaagtctacaccaagaaactgtccgcgcacagaccaactacaaggcgcagccggaccaacgtatgaaatgtgat

SEQ ID NO: 117138 - DNA, 304 bp, Zea Mays
cttcaaccagaaatttgctcaatggaaaccgaagccctgccttcatgaagctcctgtaaacaacaacttcatccacctcgggtgcaggggcggcgctgtccccccagctctcacaataaacatatcacgaaaatatcttcccttcttagcatcaatctgactctgttggatggatgattttccgaagatagtatgactcggccgccagggctgatcttcggcatcttcattcccactttccacatcaaagttgtcgctatcatcagaatcctcagataactcagccaacattttattcgtaatc

SEQ ID NO: 117139 - DNA, 867 bp, Zea Mays
gttgtctcggcgagcgcgcatctgggggtggcgttgggcaagggcatggccttgactggtgtggtgatcccctcgggcgctgatggaaggggatggtggggggatgtaaagtgagttcgtcggttggggtttctgccttgggtttgaggcgttgcttcggcgctttgagtgtcggcaaggttacgtgatggagtagggacgcggggtaagaaagccttacagtgagagaagctccaggcagcagcggttgagatatctaggcggcgacctctccggactccaggctttcctccggccccctccgagctccacctacgcccgtgcttcttccctccagtggtggcccgctcgcgttaggtcccctctgccttgcccctgtgaactcccctccgccctgcgaggatttggtggcgctaatggtgcggtgtcgaccgaggatttggtggcgctgttggcggggcaggtttgggccatgagcaagggcgcgtgggggaggacgcaataacaacagaactctatcacaatgcaacactctgcatgatgatgatataatgtaattatgtaaaccattcagaattataactattagagttatggtggtttaattgtaatggagtctttgtgtaatgggcttaggcccaacaactttgttataaatatatcacccaaccctgattaaggttaggttttcagtctccaactataacaaatatattacagctatcctctaaaataaaacaactacaaatagaaatgtgattgaatgtcagtattcctgacaacataacagaaaaaatgttgttacatagcagtgctactgtgtctaggtgacaccaacctgttatacttgagcagctagtagggaat

SEQ ID NO: 117140 - DNA, 584 bp, Zea Mays
caggttgtagtcgtattccaccgtgaaggagtcctcgctccctgctgccaatgcttctccccagtcccagtgcgcgctctcgtcaaagacggcgtcatgtgagacatggacgcgcttggtgacagggttgtagaaatgatacgccttcgacccgtcctggtagccgatgaagacgaccttttgcccgcggtcatcgagcttgctaaggcgtggacgtaggttcttgatgtaggcaacacacccgaacaccttgaggaagtgcacgtgcggcttcttcttgtaccatgcctggtacggtgttagcccgtcgagcgcgctggtgggcgcccagttgaggaggaagacagcggtgtgcaccgcctctccccaaaggtaccccggcatgctccacacacgcaggatactcctcgtcgtgttcactatcatctagttttggcgctctacaacgccattttgttgtggcaagtacggcgctgagtagtgtcgttgaatgccttctcctgcacagtatttgccaaactacacagatgtgaactcaccaccattatcggtacgaagtaccttcagcttcttgccggtttcac

SEQ ID NO: 117141 - DNA, 807 bp, Zea Mays
agcatgtcacatcgccttaagtcgttgctgacttaagtcgattgctccgttagtagggtatagtggtcaccctgagttaagtaagcatgagcatgtcacactgccttaagtcgttgccgacttaagtcgattgctccgttagtagggtatagtggttaccctgagttaagtaagcatgcaggttgacagtaaacaatttgagtgcctttgaagtctttttattgatgatatatttcccagtttacagaatacaatgtcgtcccaatagcttttgaaatatagctaggggtaaaacttcttgagatgttcaatgatccatgagttcctaatttctgtgccgtccatttgagtgagacgatatgatccaggccgagtgacttctgctactacgaatggtccttcccatagtggtgataatttgtgtcgtccctcccccgttagaattcggtggaggacgaggtctcccactgcaaaagatcgatgtcgtatggccttgtcatgatagcgcctcagagcttgctgataccgggccaactgaatcactgtattcaatcgttcctcttctagtacatcaacatcctccagtctagtagcctcagcttctgctatgttttcaaagattaaccttggtgccccaaacttgagatcagcgggtagcactgcttccgaaccatagaccataaagaaaggagtgtttccatgcaaagcccggctaggttgagttctcaggctccaaacaacatagggcagctctttgatccactttcctgtgaacttttcattcttgtcgaagactttatttctaag

SEQ ID NO: 117142 - DNA, 541 bp, Zea Mays
ctaattcaaatcccttataggcaaatggagccctagaagggattatggcaaaaagtctatgtaaatcacattgtcttgacttggactaattataaaagttgtagtacacttaataccctacaaaaatagaaagagtgtgaccccaaaaagattttagaaaaaccccaaaaaggtcaccaaagagaagaacataaaagaaaaatcaggtttttctcaagttcaaaaccgaccctctttcaaagatcaaacatgttcaccttgttcccaacctcaaaaccttatggcccaattgacaaaaaggcacccaaagacccctagaacaccctggaaaagtttgaacccaaccctaagccatttgacatgacttggcatggcttttgtctcagtttggacagctcggatatagccaacttctcgcccccatatctctctaccccgaccatatctttgcttggaactcacatcgaaaaggtaggatttggtgcagagaagcgaccgtacatgggggttttgctaagatctgcacgctaagtcgaccaaa

SEQ ID NO: 117143 - DNA, 329 bp, Zea Mays
gacctccaggtgcagcaggcggaagcagccgtgtccgaggagctacagcagcaacagagcaatgtggagactggtgggcctcaagaggagactactacagctgggctgagaaggggaacacgccagcgtaaggccaatgtgagattccagggcccagaatggagaacctgaagatatacgctcgctgagacctacggaggaggcaggatgtaacagaactacgtttatcttcttcctcaagtttcttcttctcctctcgctactgtcttccctgctactgctactctgtaattctgtttccaccaagcgaatacatcctcgcagcaaat

SEQ ID NO: 117144 - DNA, 672 bp, Zea Mays
gctggttctgtcagctggcccaaggtgcgccaggacgaccaaggaagctctaccggccaggtaaaacttcttttgataaccctaatacaaactacatcaactcctttatagattaggcaccactttattctcaaccacctctaacaactgagagctaatctctccactaaaataggagggctaactgactccctctttatctcttcttatcttctaaacaaatagcccagttaggacttatcctttgtggcgcctggcatactgccggcccacaaaggtgtctacaacatttccccccctcgccgacaaagagctcgtcctcgagcgtcatggtcgggtatctaagcttgaagtcttccagctgctcccaagaagtatccgtctctgctcggcctgtccacttgatcagaacttcccacacccccaattcagccttgcatggaggactttttctggtgtagggatgactctgccgatgaggagctcgggcagtggtataacttgggttggagcctcccctatgaatttcttaagtagagaaatgtggaacacatcatgtattctggccctaggaggaagctggagcttgtaagagacagtgcccaccctcgatagcacttgataaggcccaaagaactttgagccaagcttgtgaggtgtagcagaagtgac

SEQ ID NO: 117145 - DNA, 700 bp, Zea Mays
attaatcaaggactatgatttggaagtgcattaccatcctggcaaggccaatgttgtggcagatgccttaagccggaaagaccagtgcaactatgtgattatggactccaagatcgccactctgtgcgacgagttgtgcaagctgaacatagaagttgtttcctcaggtaccgtgagttatattttagtggagcccactttacatgagcaaatagtcatggcacagatcggtgacaagggtattcaagtcattaaggaaatgatcagacagaaggtggacaaatacaaatgcttccgtcaggacagcaaaggaattctatggtttggagactgattggttgttcctaaaaatcccgagctcagaaagaaaataatggatgaagctcacctttccaaattctccatgcaccccggcagtaacaagatgtatcatgatctcagatccttgtactggtggaccagaatgaagagggaaattgctaagtatatatctgaatgcgacacttgccaaagagtcaaggctagtcatttgaaggtggcaggcaccttacagccccttctcataccatcttggaaatgagaggattattgcatggattttattgtagggttgcccaatacctcccggcaccacaatctatttgggtcattgtggataggttgactaagacaactcatttattgccagtgcataccaccc

SEQ ID NO: 117146 - DNA, 980 bp, Zea Mays
gaaagatcctggttacatcaacaagaatataagagattcacaaaatcaaagagacgatgtaagctcgaaagttctactatggcttgctgttcatttctttataccctatttcattttaaactgccactttcagaaagttgaaataatatcacagaccgaaatgtatgctcatcttttctttttgctcctctaggaacctttgttgaagatgggtttggacagtcctgaacttcttgatggtaattggtctcgcctatgtataacatgcaaagtaagtttttctttattaagtaatctgtggggtttccccttaaattagcatttttctgaagtggcctcatttgcctagtattaatagattgtcaggcctgtacgctcaaaacattgctctacatgcgaccgctgtgttgagcaattcgatcatcactgcccttgggtatcaaattgcattggaaaggtactatttcattttatatgttggacatcttatttgcagttgatatatttattgtacatggttagaaagctaaatatggattcattctaaaagaagaacaagaaaacattattctgcctctagttgatgaattacatctttctcttttgttttcacatgttgaatggtaatgaaaaattctgaaattcttcagtctaagctacagtggtttgaaattgcagcggaacaaatgggacttctttatgttccttatcctagaagtttctgcaatgattattactggtgtaatggccatcataagtacgcttacatttttctgttataccaagacttctattgtattgagaaaactttatttattattttttcttgttgcaggaagtgtaggagacccagcttccccagcatcatttggtggatggcttggctatacagctataaaccattcttgggtggtgtcttttgtcataatggacctcctccttttccttggtgttataactctaacagtaattcaagcatc

SEQ ID NO: 117147 - DNA, 438 bp, Zea Mays
ggaatgtgcggcagcagtttcacttaatatggctccattggtcgtaccacgacttattccgattcggacaccttcctccccccgggctccactcttcggaaatagagcgtgtcgaccaaactaccaaggcaacctggtctccgtgctcggctcgcagggctagaaatagggaacacttccccaagaaaggcacataccatacgacaaaaggcctagagtgacctcaataacgccaggacaaaaaaatcaagatagaagcaatattcacacaacagtttcatatagtcgttcaaaggaattattacaaaacatctagataggcaaccattcaagcattagcgggcggatcaccggaggacaacgcaaggctccaaggatcagtcaaaagagtatttagatcaacccgacccacgagcgatcgagcatgaggcggacctg

SEQ ID NO: 117148 - DNA, 313 bp, Zea Mays
tctcgtgtgttgcttcttgtgattgctttgttcgcatgagcgtgttccatagccacttgatttcactaactccttaacaatcaagtttgtggctatttagtcgttgattttacaggatcacatattcagcccgccccctctaggtgatctcaaggagcaggtaccccgtattgagggtacctacagcggccccgagcccacctcgggtgaggcggtgaatccgcaagtggggccatactcgcgtcttgttcaaaaaatgcaagtcttatgcaacaacatcatgcatgtagctttcatgctaagtgagttttgc

SEQ ID NO: 117149 - DNA, 417 bp, Zea Mays
ccgatttgggggaaaacagaattactcgggctatggtggattactggccgaggttagagttgcactgggctcatgatgaggagacgaaagcaagggaggcgctcaatttatagagatcggccatggttattccgaatttgggaagagagtggagcacggctgcgacaagacattgtactggcagccccgttgtggcgccagccggtggaacgacttcgaaatggcaagtccgggtgtgccacagttactactacgtgctaaagggctacgacatggcgtaattgaggtcgtcggagtacaatgacgacaccggcggtccggccacgtcgcacgactacatgcgcagttgataagtttcacctcgtgaccaaatccactccccgcgagatcttttacttcccctactgttatccacta

SEQ ID NO: 117150 - DNA, 714 bp, Zea Mays
aaaaggggggctgaatagggaggatcaggctagctaaagcaattcagtgcttccaaaatatctgaagaagatttttttccctgcagaaaatatcaaacctttggatgtgtttgagcctgccgcagtggaatttttttatccgtccttcctctgtctgtattactggacagtggatatttgtgggcagtgaaccttatctgctctattccctatttgagtaattggacaagttgatattttgggctgaaagtgctgactaggttcagtgttatgggtgtgtctgtgcatctgtgaggaacttgagcatgaaagacacgtaggggatgtccatgtactgctggcaccctgggaatacatttgcactgaatttgtgcaagtccagggacacctgccccactttagctgccataaaagacatggttcagtgaacttctttccctgagttccttgcagcgtgtggtccctatgccttcaggttcgtgtagcttctcctttccccagccatcattgtgctctatccagagctgcacgcgccaaactcctatgagttgtgaccacgcctaccaatttgtcacctcgccgtggccaggctaactcaggcaagtattggtctttgttgtgcttgttccatgtcccccttagatcagtgaagctcaccgagctgttatccctaacgatactgtcatgttttggccggaacaagagcgcaccgcc

SEQ ID NO: 117151 - DNA, 474 bp, Zea Mays
tggcaatcttgaataacatgttaatgttggaccctccagtgctatgatggaaaacttcgccatcgcatttatcatcccctcctgacaaagccactatcacttggtaactcatgatgtattgcaaagggtccgagctaccattgtatttgggtcaattgcaagagcggtaattctatggctaggatgtggactatgatctatcgaggagtgggtgcctttcatatatgaaattgaaaatctgaaagttgtcgtgttatcacgcttgactatcatggtccttgaagtccccttgatgaaaccctctaaatgagagttgtgggatgtggccttagtgatgttgcaggtctgctatttcttgctacatgagtatagattttctttttctttttgagtaaggcattggagctccgcttggactataccgtgacgtctctttagtgatagagtctctttctgtgtttgcagatttttatt

SEQ ID NO: 117152 - DNA, 542 bp, Zea Mays
taaactgccttaagtagcttgttcatctcctgagacactaccccagtgaaagccacgacagctcgcactagtgaacttcccctctctccggccgccagcacgccttcttcaaattggacacccaccgccgatagattctataaattgctaccccagtgagctccgctaggttattatgcacctagtgaaccagccctcgcctccaatcgttcaccatagctcctcaatttggaatttcccccaaatcgggttttctgcgccgccgagagtctctcactgtggccagccctcctcaggttggttcatgcttctctgttggatgttctagcatcccttaggtctcttgttgcttgtaggctcggttgattgaactaaactgtgctgaattgccaagaacatcatagtttctcctcagatcttgtcgtcgtcgtgggcagacgaactccgagtcggattcgtgcaattaatgaagggatagtgtcgctgagggtggaattaggtgtcagccaagttagggctctggtcgttgagtatctcggtcg

SEQ ID NO: 117153 - DNA, 826 bp, Zea Mays
aaagaaaatgaaattcctggttgattttgggatgaaaagataggtctgcatgttatcaattactacattctaaaatatgttggtttagttttgttctaaataaatcttctttaactttgattaggtttaccgaaaaatatattccatctacagtaccaaataaatacaataatacattatcaagacacatttcaaggtggatttaatgaaactaactttatgttggatattggagcatttttctacaaacttggtagaaattagagaagttatacttaagacaaaactaaaacaacctacattctttaacacattgattaccaaacaagaaataataaaaacacatactcaatgcctcaacaagtgtcgtattgttgaacatgcacttctttggtgcatgttctccagcttttaagaatgacaggtggcctatgcaactcaatactccggaattgaggatctggtagatctcaataatatgtcaacactgataatgtacttttctttttcttactttatgtcctgtgtaacctataagcattaactccctggtctcaatgcccaagaagaaggaaaagacagcactaattcaaccacttcaggtttctagtcgataaattgataaactataaggggttcattttgacaggagccaaacagagtaagatatcaagccaggtagaaatcactagttcttcatgttataaaaacatgtgaatatgtgatgatgttgaatgaatttgcgaaagccttttctcattccatttcctctcaataaaatgtactgtctaaaagaaagtataaagttggttaaggcaccaacagt

SEQ ID NO: 117154 - DNA, 586 bp, Zea Mays
agaaaatcagagtatcatatttgggagaacttacatggctctgaagaatatgaggtgtgtcctgttcatgcgggccaatatgtctcatggggatgtgcttatctgcaccgactacatctgccctttttgtgtgctcatcgatatgtccaggtgccctcaatgctgccgggggagtaacggagacaccctctgtgtatggggcgatcgcagacgctacaggattcatgtccattgaaatagacgtacctgctggcgtatgcacagatgatacaggtggcatgtcatcgccagctccagtgctggacattttctcgccgtcggccgtatctctcacttccgccgccgctaaccgccgcaaatacctcagataaagatgtggacgagcgaacgtggacaggcggctgtaaccttgtattcgtttcctctcgtaactgcgcctatatttatgcgcacaaagagcacgtctttccttacctcaaaccggttggagattttaaatgttgcatggtttacgctatcatgtctcacagcgttatgcaatcgtaaaccggcatgcacatgcaaatattcgttcccgtgattcgtg

SEQ ID NO: 117155 - DNA, 423 bp, Zea Mays
gctatataagtccaccaaatacatggtaaagtgaataactgataaagtttaaagtggtagctaataaatatgtgcatatggcatactgccctaagtcccagaagggctaaagccttaggcctaatgtcctaaccaatatctggccaaaatccatacttccaagttccaaccaggatcctttgacttcaccttcctcttaggatcattcgatggatcaagtgaaacatgtatctcttcctgtctaccttccgctccagcatccatgtcctatctatactttgctctatggtgtatcagcaagacaagtagacaacaacatatatcaatcaagcaatactaggaactcagaggaggagaggatcagagaaacaatgccagcaactcagagtcagaggagaagagcagatgaggagaactgaagag

SEQ ID NO: 117156 - DNA, 814 bp, Zea Mays
tgactaccctacggagttcacagtggtttcaatttatactgatcgatcgcgagcacagcgaattcgagcggtggattgtgatcggtacgaactgggtgagtcactggtggccgcgcaacgtggcttttaccgtggcggcacctccggcggtcatcggacatgcgtagcatggttagccgcgacgtggtaaagcgtttggacacacggaggatgatagtgatggctcaacagtggtgagaatctattcgagtgattgatgagcaagggggggggggggtacggcggctagccggaatagtttactggccgggcttatccacgacggcgtgactccgagcatcatttgatcaacccgagcatgaatcgagacgacaacggcatgaatcgcggcggagatcgttggtggcgagctgagctggtgacctgatctatttcagagcactgtaccatggcgaagcccattcagtgcacttgacagtcaaagtttagggccaaatttctctcaaatttctatggcaactcgtccaaagttctgtagcaaagttgtagaccaataatttagctacaatattgccataacaactatagccaaattcctactaaatcatgtttgaatttgtgcccaaagttcctgcagttgcactgtcagtctgaaattcagacttcaacagcctgacaacccatttttgagtgcatttttctccaatttcttcataacaaccatgcttacactcttaagcaaagttattctccttccatagagctacaaagttgatgtggtgacctagggcaaaaaccttataatttgaaagtt

SEQ ID NO: 117157 - DNA, 674 bp, Zea Mays
gaggtctgactgctgaagctgtggtcactgactttgttttcaagaacattcagccactgaaagacagggcctatccggcatatctgtatagagggctagccgactcgactcgagttaccaataggagaattccttctgcagacttggtgagccgacttgaaatgatcctcaggggtaaggtttcaaacgttggtgctccagtggcatactcggtctggaacctacctcctcccaaagctttcactctttttgtgtcaaatccgcctgtgactgatagcaatttgggccttagagtgcgaccctctgctgaagaagtcaatactttggttgcttcgctcggggaaatttctgatgatgaacggcagatttattttgaagtgcctctgaaccctagtgatgcagacataaatgacatgcttgatctgttagctgaggattcgtccgatgctgctcctgatggtacgttggcagtggtgccccttccagaggttgatacaactttggatgtcccgaaacctgtcagtactcgcccgagacgccctagccgaaccagtcagcccgagccttctgctgatgagcaaaagaagaagagaagacgcctccggcgagtatccagttttgatgaggacgccggtaccttagctcctgctgctgaagaagtgcctgcaactggc

SEQ ID NO: 117158 - DNA, 339 bp, Zea Mays
cccttcggcacaggttcgtctggggtgaccgaagtagcagctttcctctttttcccttgcccccacagcgggtagcggtagtcggggtaaacaaagctaatggcatcaaaactctattcaatctcttttttccccggcctccgaaggctacggatagtgcattatcttctgccttggaatatgctccaagcagttcatcacttgtagcttcgatgcatttcagccagtcatcgtttggttcgtcgaatttatccccatacctgaatgtatacttcagccggaccagttcaccttcgctagacttggtgatggtctccttcggcatttcctagctctcta

SEQ ID NO: 117159 - DNA, 325 bp, Zea Mays
cgcgaacctgctgatgtcgagtagctcatacctgtagaaatgaggctagggctctgcttgaaggcggatgtaataacttttgggtttgtaagatacttttgagaactatcaattaaacagttcttatcttgtatggtatttgttcttgctgtgtgtggcgctaccaactccttttctggtacttagccccctgggatgtaggctcgacgtgtcgaggctggatgccagcatacctaagagagagttggtgacatggccttcaggaggtagcctcgactgggacctggacctgtacacagctttggctaggaagtgttagtagcac

SEQ ID NO: 117160 - DNA, 682 bp, Zea Mays
tcgagttcctcggctggggtcactgtcatggtgaaattaccatcgggaatttcccagaatccagagggtgacgtgtcggacggggccgggtggttgttcctgtacatgaggttatctacctgctgcatctgcttcactggtcatcagccactgccgctaacctttgtgtcctggcgatcatccggtaaggatgatggataagtaaatacgtgtggaactggatctcgaactggagccgattggacgtttgacagcgatgttctactcctgttctagtatatttcccccctctttaagaagggcagtaggaaggttggtattgtcattctgacggctcgcgttctgttcttttgatgattgttcctggtcgctcggagggttgtcatcattcatcaatatcgtggcggcagataattctggtaactctggatcgtctagttttcccgaaagcatcttaatcgttcacaatgacctaatagcaattcgttccacagtgatgaggaatcttataaatacatgggatgggacgggtggtgttttcaaataaacttgaaacgtgatgcctcaatggcatacatcttatgaattgaggtaaaagatagtgataacttgttagttcatcgttcacaattgacgaaaaaacataataatataggcaggacaaagaaacaaaccactttga

SEQ ID NO: 117161 - DNA, 326 bp, Zea Mays
tttcgggcccctctaaggagagggtcgccttacccgacctagtcggcgtgagggaaggggtcatcgagctacgaatgggttatacaagtgagatttgaccgctcctttatagggtttggtcccgacgagcggtcccactagggggctcgaccctctaggggcatctcatttagtctttccttattctatcccgtatcgaccctccggccagtctagccaaccggaggtgggtcccatggccaccctgttagccgggttgccataggagaattgagctacgaccttggacgtgggaccgagcaaatgacctatggaccggtcataag

SEQ ID NO: 117162 - DNA, 488 bp, Zea Mays
tgaagcattttttccttctttcctctgtacttcctggtgaatcgattctaagtcccagatctcctggtccagttcctcctcatgaagtgttgggctagtagcctttctcttctggcacctagcttctcgcagggagagtgtatcctgatttgtgtccagtggctgcagagcagcccctggcgctgtcgtcttttttagcggcatgacgaaggtggatgcttgtcgaaggtggtcgtgtaggtttaccggaggtgggcgccaatgttgtccacttgttctcaaatcgataaagattaaggatcttcgtcttccaaagcattatctccacatcaaggactaagtagtctttgtcccttttcggtcgacatcgtgctcgggccttcatcattacatcgaagccaaagctccttgattacagcttcatcgttcattcttaatacatttgagctttatcttcaccttgttatataaaagaaaccttgatcccg

SEQ ID NO: 117163 - DNA, 562 bp, Zea Mays
ggacagcacaaattgtcaccactatgggaaggaccattcatagtagcagaagtcacttggcctggatcatatcgtcttactcaaatggatggcacgaaaatagggaactcatggaatatagagcatctcaggaagttttacccctagctagatttcaaaagttattgggacgacattgtattctgtaattggaaaatacaccatcaataaaaagacttcattctcaaaggcactcgaactgtttattgtcaaactacaagctcactcaactcagggtgaccactataccctactaacggagcaatcgacttaagtcggcgacgacttaaggcggtgtgacatgctcacgcttacttaactcagggtgaccactataccctactaacggagcaatcgacttaagtcggcgatgacttaaggcggcgtgacatgctcacgcttacttaactcagggtgaccactataccctacgaacggagcaatcgacttaagtcggcgatgacttaaggcggtgtgacatgctcacgcttacttaactcagggtgaccactataccctacta

SEQ ID NO: 117164 - DNA, 840 bp, Zea Mays
acgcaatacattatgcttaatcagtcagctggcataaaagtgcctccagaaattgacaataaccttcaggtgtgagctttgttccccacaacgactcggctagcatttgaattggtcattatacaaagttttcaaacctaaactactatgtcatacttgatcttcggatacgcacattaccaaacagaggtccgtcagaccatcatcacacaatctaaaccactgaacctaaacttgaccaatgcagcactttcttaaaaacataaatctggatgacattgatgtgatcttcatagatttaattgaatagggaatgaataaccaatagtaacaccgtttctgattggttcaagagtggtgggttcatgacatcaaccttctatctcattatgaaaccagtaggacgcagagtttggcatagatgtgcttccctactcccagtttgaagtcatgaaatggcaatgcactttagtacatggcatatactcatatagcaagtcaactagagatacacattgtatctaatctatccatcaaattccaaaccaagaggcaaataattggcacaaagaatctccaacaatagtatcaccgtgatatctttctgatgcagtgacaatgcacttccgtacatgactctagagatagaatagcacacgttgctgatataattttctagtatctcactgagttcctatgtgacgtccaattgattagcagtataggtgttcatctagatctattagcataggggccaaggtgcagggcggcactgttcaccgccgtcgagtcgggagttgtagcgccagcgtccagacgttctcctcctccctacaggtt

SEQ ID NO: 117165 - DNA, 370 bp, Zea Mays
tctacgtcactcggattcaaaggcatctcaaaatgaaactgcctctcctcatcggggatttcaccaagcgaaacaaccaaggcctcaatctcttcgggagaaggtcacactctaaggcccaaaccactgtcacgagcaggaggatttgacacaaaattgattaaagccttggaaggaggcagattccaggctgaatatgcaacaggagcatcgatattcaacaccttgactctaagaatcatttcaagccggcttaccagatccacagcaggaatccttctgttggtaacccgggtcgaatcagtgaggccacgatacagataagctgggtacgctctatcttttagtggctgaatgttcttaaaaacaa

SEQ ID NO: 117166 - DNA, 709 bp, Zea Mays
tgaactatccggtgcgacccctgacagtggagctaggctgccccaggggcagcctctctgtccccgagaaaacccgagagcagcgagttcgcgaagtcgaattttagcgtgagcaccggactgtcccgtgcacaccggacagtcaatgttcactgtctggtgcgctgtcagagcaacggctagctatcggaactagccgttggagcacaccgttggcgcaccggactgtcctatttataccccctccaccagccacattaagtgtcttgctgcccacattcgcttgtattcattgctagtgcattgcaagccgacaaggcctggtgaggtgattaggaaaatcataatcccatgttaggacctcatcatttaaagtaaacttcgtcagacgagttagcttcgtcaagttgttaaaaacatccaaatggccagagtgcgatcaactgcaagggtatctcgtgaaggagaagggaccgatgtcactgagacaacgccaattttagaagtcatgtaacgatcaggactagttgtgacagagggagctattgacgaaggtactcatgatgctgaagctgaacatgctgttgctgaagaagaaaatgttgatgaagttgagacgattacagtattctgatccccacaaaacccaaccatctagattttgagaaatctactatgtccgaagacgacatgcccatgatgatgaagc

SEQ ID NO: 117167 - DNA, 1001 bp, Zea Mays
cattacctattttcattgttagttcagctcggtcacaaaaaggacggtggttcacgtatctcttgctttaacaattattttgttgttcagctcgttaatgcagttaattctacctgatctcaagaggatgaggtgaccacacaataggctatgttgggaatcatatagtgcatatgtatttagcatcttgtaaaattcattataaaataatcatagtgcctaaaaatacgattcatgtcttgtccattcacatatgccaaatgttggttgcttaaaatattgttgtacatgcttttgggattcttaaacttgtagttccagtaagttggctatgcataaaagctgatttgctggcaaccaatttttatcctagaggaaggctgccattgatgatgaaactttataacaactcagcatttctagtgaatcacttatgctctataacaatatagtgttacgccatatgtttccgtatgtagcttttatgcctactgaactactatgcattgcagttcatgatctaaattttctaaaacaaaacagatacaacatgagttgaaccatttggaaagttactttagggagtgttacaacggaaaccaacgcccaagtatgtgttttctgaattacaattactagggaaaggtaaattgcaagaactacttttccctacgtgttttactttaaaaaacattttttcgtgctggctacaaggtttggcatgctctgatggtgctttctactcaggtgtaatttgcaatccaaggcttcttagtcacaattctgtcaacttctatctctaaggtagctacacgaatcctagcagtccaagcatacaccttagagcttctgcttgccacattgtgtcccctttgattctcgagacctcccagtcctaatgaaagaaacaatactctatgtggtctgttcgcacgcacatgcataagcacatacttcctccttctccttctcttttctatttctatccgctatggttttac

SEQ ID NO: 117168 - DNA, 441 bp, Zea Mays
cggcgagagcacacacggaacctttttttgttaattattattccgccatgggtggcgaagaacgaacggatttggggtggagggcagttccattcacctcaccccgagatgcttcatgctcgtcgtcaaatggagtggagccgtatgcttcccggcttaatcctgtcctcggaattttgaccgcattaaccccatctatctacttgtgcggttgtgctcctccacgtacgccggccccgatgccatcagtcgttttgtgcctttacctgtgcatgctgtgtgcactccagcaccagacgcatccaagcccatcatcatccatcgccgatgaagaaccattgctgcgttgttgctccgactccgagcaattccctcacgtggttccagccgctggcttcccgatcacgagagcatcggagtcgccagaccaaattgcgcggc

SEQ ID NO: 117169 - DNA, 679 bp, Zea Mays
cgccgatccatgtttttttggtttatattttttctgcattttttatttttcaaactagggttattgccaaatgagatgctcccctcgtatcgtgaggaacgttataagcgacatgtttgataaaatgaaaaaaaggattgaagatgctatttttggttctttgctgggtatgaatattgataaacttgaagataaagttttgagtatgtttgtaatggatagtatcagagaagatcctttgcgaattgaggttgacagtaaaaaactggcaataactacacaagttgggcacattgtctttggcctacctactggtgcacgaaattagacgattttaccgaagaagagaagaggagagctcacagaggtctgagacggttaattaatgcaaggccgtcaggcaattatggcaacccgggagtggcagaagtgcctcgctatgtcattgagcactttccaaccctcgtggtgtagaaatggcaaggggatccgatcctcgattcaccacggagaatttccttattaggggacggatataagactaatttaatccccgtggggatctaaatggggggaatttaatccccgtcgggttcgtgggaaaccatcccccgtccctgttccccgtgtacccgcgccacgaaacttttttattcaagttagttaatttatttgttag

SEQ ID NO: 117170 - DNA, 375 bp, Zea Mays
gcgggatattaccaccgttttattccagacttcttgtaggtatctaagcctattacagagttgctaaagaataatgtgaagttcaattggtctccggaatgcaacgaggcttttaagaagttaaagaagctgttgacaactgcacccgtgttggctcaacctgacattgacaaatcatttgatgtttattgtgatgcttcaggcatgggcattggatgcgtgttaatgcaggaaggccgagtgattgcatatgcttcacgacaacttcgatgccatgaggagcattacccaacacatgatttggagttagctgctgttgtccatgcgctcaagatttggcgccattatctgttgggtaatacatgccatatttat

SEQ ID NO: 117171 - DNA, 461 bp, Zea Mays
gcgaccacatagtcatcccgaaggaattcagcgaaggagacctcatactcgtccggacggctaggacggagtcccggggcaagttagagccaaagtgggagggccctttcatcgtcaagacgaaggcgtcccccagcgcgtacaggctagcaacgccattcggcgaagacctagagcattcttggaacattgacaatctccgcaaattttttgtttgactcctcagggccagctcgcccttgtaattcacaaaacagctttattctggcccgcactcttttcctcccggggggtgaggtttttaatgaggcggagctatgtaatatacacgcaaaaaatcccccgcaaaaattacgtcaaaacaagaccgcatcgacggtcttcggcattcgaccacaacgaagtcaccacgaggggcagcgctagctaccctcgcgtgcgacactccgcgcaaaagtcgc

SEQ ID NO: 117172 - DNA, 429 bp, Zea Mays
atttggcggaggacaagatctcccactgcgaaggatcgatgccgtatggccttatcatgatagcgcctcagagtttgctggtacctggctgactgaatcactgtattcaaccgttcttcttctagtatatcaacatcctccagtctagtggcctcagcttcagctatgttttcgaagatcagtcttggtgccccaaatttgagatcagcaggtagcactgcctccgaaccatagaccatgaagaagggagtgtttccatgcaaagctcggctaggttgagttcttaggctccagaccacacacggcaactctctgatccattttcctgcgaacttttcattcttgtcgaagactttctttctgagtgcttccaatatcattctgttagctctttctacctgcccgttggctcttgggtgtgccactgat

SEQ ID NO: 117173 - DNA, 405 bp, Zea Mays
ttacaatctaaggatgttagtttatcctctctccttatgaggacaatcaacctaactagtgttggccattactacacgttactaattgagatttcgtcgaggattttttacagtgaatttatggggtaggtcatgagatcgaaagttgaaggtaaagacacaagagatatgaagattttgacatgtttagtctttcgatgtgagataataccctacatcctatatggggtggatttgttggtgtatgttgtgacgtgagatgcgacctgccgctgagggctcccctaccccttctcttatagtccaaggagggggtggttatatggtggatagcgtgttggttacctagtccatcacggtaccaactcggttacctagttctacatgaatctaactctatgatta

SEQ ID NO: 117174 - DNA, 528 bp, Zea Mays
attgaaagaatcgaaagttgaaaaataggatgtggctacaaataattagaaacaatcctagcaggtcaggtatttggaggtttatcactacaatagccgctctattgcccaaagggaatgcagcgaggctgaggaaaaaatctagggaaaaagaaaaccaaaatatgcacatcctagcttagattgtagagcatagaggaatcgaatgtagaatcgattgggccaagggaatgcagtgagttttctattttaaaaatggtgaaacactgaaaaagaaaataaactctgcacatcatagattcaaggccataaaaaggaacaagagtggggagcacaatgttgaaggggcgcccaaagaaaaaattgacttttccagactctatttccatataaagtggactaaacaagaaacacacacttccatgttgcaaataaagatgcggaagcctcccatgttgtaggaaaaaacctaaacaaactagcagtgacaagcctttccacctcatacattagagcacagaaagaatc

SEQ ID NO: 117175 - DNA, 738 bp, Zea Mays
cctgaagcggggttgccgcactattcctcgagtcactgacagtttacaaaaacatcctcctagttctatttcttcaccgcccgaagtccacgacggcgaacagcgcagggccgagctccgatgagcctgtaccggccggattacttgatgacaggtgctctactttagttgaaaccaaattcaaggcctaacgatcgtttcctctcaactaatttcacgaacggcgctctaaccaactttgtccacggtgaccgtatggtcaacagctaaaccaacgcgttcccgacgatctaaggtaacttagcttaattgaataggtcgaggagtactaggggcacacgagaacactaaaacgagagggcagagggtatgagcggacctaagatgagcagaccacgacgaggcctctttctcggtggcggaaagcaggtttgggggaaatgagaaattagcgagctctagtggatgattcgaggcacgatttgcttcactggttgcacacctacctagcggagcaggcggggtcggcaatttataggctcccacaacgatggccggtgaatttgagagagacgcgcggcggccggagaaagaagaaggttactggcgctcgaggttagtggctttcaccgtggcagccctccagcgatcaccgggcatgcacgatgtgattcacagcgacatggtcaagtgctttagtacgtggcgcacgacggtaagtggccaatagcggcgagg

SEQ ID NO: 117176 - DNA, 625 bp, Zea Mays
gctcaatataacgtgtccggtgtgtcagaaccttcacctttctgctttttgactcaggctcagctggggtgactgaagcggcaatcttcctctttttctcttgccatcgcagcgggtagcggtaatcagggtatacgaagctaataacatcaaataccatgttcagtcttttcttcccccgacctctaaaggctgtggatagagcattatcttcggccttggagtatgctccaagtagttcatcactggtagcttcgatgcacttcagccagtcgtcattgggctcatcaaacttctccctgaatctgaaggtgcacttcagtcggaccagaccaccctcactagaatcagcggtggtctccttcggcatatcccagctttccacaactagccataccctttaggatatatgctcttgaatcagatcccttgtgccaatgaaggcacacacagtgctaaaagccctctgacatgcttcgacattgctatcaatttccaccttcggtctttggaggccgaagcgagaccagatgggtcgctgaataatttctttgatgtcttcccttgcctttaaatcatttttaacgtaaaaccactcccatccaggacctaggccatcttttcc

SEQ ID NO: 117177 - DNA, 832 bp, Zea Mays
gttaaatctcgaggcttgtgaattggatgtatagcgctaccccatatgtgatcaacatgaagagaccattgaacatctcctagtacatcgtgtttttgctagatagttttggtttgagctcggctgttcggtctccatacccttgctccacagcaaggtgattccttataggagtggtggactcaaaattcaaagctagctgttcttctcaaaatagttttaattctttggtagctagcttttcttctcaaaatggttttaattctttggttattcttggtgcttgtactagtggacacaactgctttgtcgagtatttcaggcacttggcaaagcctaaaaaacactcgcaaacaaggtctgagagtcttagttcgtcgagagtgacatttaataaagaatgctttgcgagtgtctaataaataatagtcggcaaagagccggtttcgatagtgttgggtcctttggaagcatacaaatatgtgtgtgtttcaaggaaggtttccaagtctcaatgttgctctctgtaacgctagagaaaaagatatcaatgttaaaaacatacacaatacatccaataagatgttttttcacttgcatttgtggtgaagatgcgcgataattattattttccgattcggttaacccataaagctatctccattagatctatgtataagatattgcaaaacacatctttgtaccgtagacgccactatttatagttaggtttcacctggcatggcactggttttttttctttcgtatatttagtactcagacaagttgccactcgctgctgcaaactctcatatcatagtacaggtacaca

SEQ ID NO: 117178 - DNA, 544 bp, Zea Mays
agaaaacccacccacccctgaaagcaccattcgcacgtgctgctctgaagacctccctcgagatgccgtgccaggctttaccccccgggaagccaaagacatcatagaagatggcgaagtcttgggcatctcggccgaggaccaactcaaactctgagcacttcgcataaaaaacaaccacctgcagaaacaaagggagcaaaaggccagggaactggaacaagaaattgttgacatgctagatgaagaccctcgccaccacaagccgatcggcgaggtcaatcaaataccaactgccttccaaggactcaaatacctcgacgagtgaagccctctcgccccatagcttcagacctccccttggccacaaaattacagagcaagtgcttatccaaagtacaacggtaacacagacccaacctagtatataatgagctatcatgttgcagtcgcatcatcaggggggacgatgccaccatggctaagtcgttcatcatagcccttgaaggcccagctctaacatggtactcaagattaccaccac

SEQ ID NO: 117179 - DNA, 1091 bp, Zea Mays
ctcctttgtacaccaaggatcatcgaggatatttcagttccttggcataatattgggcctcggcaatttgcctctgtgtcagctgctttcccgaagcatgacagataataaaatcaagatcttcggctgacgccgtttcgggtatcagcagtgttaatttctctggcagaatttcctttacttgctctattggcttagttttcgaaggtccggccttagtgcgggtgggagaagcgcttgcagcaacagcttctcccaattcttcaattttgtcttcgaaaacccttgtaggagcaggagtagccacctttgaaggtttcataacagcgtctagaacgctggccattctcctccctctcctaggattcgtcgctggaatatttgttgtccttggcaactctagcagtactggagaaactgcagcttcggttgctggtcacttttcaaactttcttattttaacttctccagttgagcggtggtagcttcatctgtcgcaaagggtattacctccaaatttgagagggtagctttggtagattcaacagcctctacctttgaactttctacagcaaacagtgcagcagctctctccaaaacaagactttggccgatgagttacaatcttcattcttttgggtttcggcgcactagaaggcctagttgatgcaatccttctcttcgccccttgcttccgagctggaaagcagtaatcggggtacgcaaaaccaataacatcaaaaactctattaagccttttcttcccacgggcaccgaaggcagtattcatggcttcgtcttcaaccttcgtatatgctcccaacaaatcatcagcggtcgcctcaataacctcgagccattcgtcgtctggctccccaaactaacttctgtagcggtatgtatatttcaaataaaccaggccaccttcgcttgagctatcagtggtttccttcggcatttcccattcgttaacaagggggcatactttgaaagctatatggtcttggaccatgtctctggtgccaatgtagttgcacacagtgttgaaggctaccaggcaggcctgagatttatcattattcacaatcgag

SEQ ID NO: 117180 - DNA, 708 bp, Zea Mays
tcggcatgtggcatcggcccagcgccagccacgggaaaggctcacctgttcgcaatatgcattgtctggcgcgcgttggtgccgcttggaacagattcctggtgggcgttccttggtacgttcaccttcctcgtggtttggccggttcctcgcgctcgcgcaagacttcagagttttggcatggcacaacagggctacgtggtgtggtcacaaacttcattattgctgatcttcatgaattgcccacgactcgtatatagtcggtgagtgaggagtacttcacgtaagcaggttacttgctgttatgcgttgggggggcgcatctagattgattctagttcgttccctcgtctcgtgttcagacagcaaaagaaaaggtttcagaaccaaacacagctagcctcgctcgtcgctcgtcagtgcctgccgcccaaacgccctttacacaacgtgctgtgctgggcttgcactgccctccggttcatgtcatttagcgcaataattctcgaaccctcactatagttctgaccaaactcgatcgatgtgacatgggtggataagccaggttacagtagaggcagaggcagaggcagagcacatcccacgccgcctttttgactccatttgtccttcgtctccaatccatgccatcccacatgcccgtaacaggagggaagccattccatatctattgaccccacatgccat

SEQ ID NO: 117181 - DNA, 275 bp, Zea Mays
ggaagtgaggatggcacttccctagggtgatcctcggtgtcggttaaatataaaatggataggtcaagaggtggacacctagcttagttaacttgacatgatgggccccatagagggtgtggatagttggtgatattcattgctagatccaaggaacagagccaaatccaagagctcattacacatctaatagatattagccttttcataatgcactaggatgatgatccaatccttttatggaacttggcattgaacaagcaaaaatatgaaag

SEQ ID NO: 117182 - DNA, 605 bp, Zea Mays
aaatacccttgtccgaatgggatgagaaccattgtttcacatttgttgtccctcttgtttggatccccggtgcaagatctcaacacttgtttatatatagggcaggtataacgggagccctgggcttcggatattaaagagagcccgagtcggttacggggtctggaccgctgaaccaagcacgcgtgagtataatggagacgagatagagagcatgcaggacagacggcgccgtgacgcggttggttaatggctaggcggtaaacatatggtagtgggcggaattatagggattagattccacatgcaaacgtgcttactctgatacgtgggcgcggaatttatggatcttgcatggggtataatggcaagagttaaagataatatcgaataagatgttgaaagatatggcataaaacagatacgctataaatgttgcatatatagtatataccgtttggcgtaaaacattgagtcattgtgcgtaagtagtgtgttagggatatttgtattacatgtacattgctataatatcggtacgatttcggaaataatggaaataccctggaaacatggatgcggttacttgtttagtatagcatccg

SEQ ID NO: 117183 - DNA, 274 bp, Zea Mays
gctggttccagtgatggcgcctgttacgctactacaagtcctcccctgccatggtggatttgtcgtcagagacaacatcgtcttccactcccccgttgatgacgagctcctcatggaagtagaggggtggttctggcaccgtagccatggtgaccacatcagtagacttggtgatcatgatagcttcaaaaatcttggagatcttgggtaggcatgatccgcatgagcgtgaatccacgcgggatgcggcgctctgggctccgacataatgtca

SEQ ID NO: 117184 - DNA, 730 bp, Zea Mays
gtctgagaccaatgacttaggagtgccatgaagttttaccacgttgtctaaaaacacttgtgccacagttgctgccaaaaatgggtgtttcaaggcaaaaaaatgtgcatacttagaatatctatccaccaccaccaaaattgtatcacacccttccgacttaggcaggccttcaataaaatccatagtcaaatcttgccatgcaccctggggaacaagaaggggttggagcaatcctgggtaaaggactccttcagacttagcatgttggcacaatgcacactgctacacaaatagtttaacatccgacttcaatcctttccaccaaaatagcctcttcaccctctgataggttgccagacagcctgagtgacctactatactgtcatgtaatgccacaatgatcttagttctaagggctgagttctgagcaatccaaatctgagaacctcttctgatcacaccctgctgcacagaaaaaccttgttcattgggactgtgaagcaccaattcagccaatgacctttgagcttcttcatcagtcacataggaattaagcacttcctgtacccataaatcacctctgtcaaggtttgtaatgccataaaatgacccaccttgataatgcatctgcagcaatgttctccttcccttgtttataaacaatcttgtattgcaatcccattaatctggccatagctttcttttgtagatctgattgcaacacttg

SEQ ID NO: 117185 - DNA, 526 bp, Zea Mays
gacactccttactgccatgacgaagtacttggccatgatggttgtgttgcctctgtatgatgatattgttgcttcataactcatcaggaattatttcggatcagagtgacaatcatacataggcaattggggtggtttgtacgaaggtgggcatggtattgcctgcaactctgtagctaaaggagaagcatcatcataaggaaaattgtcatgattaaaggcttcataccacacatcttcatgattttggccttcatgccgaaggtctttctgattctggtgatgctcagtattgtgtgaaatatttcgcatctcttcagtcgcatcatcaatcttcttctgtagttcagaaagtcaattatcttttcgtttttaacttgctgatggatggcttcgaggttactgatttcatggtccaatgtgtcatcttgtggagttcgactggtggcctttcttttctggcttcatgtctctcttaagagaattccatcttggttaggatccaagggcgtgaggacaggaccgg

SEQ ID NO: 117186 - DNA, 809 bp, Zea Mays
ggcagaaattattaaaacgtgtgaaggctatactgtgcatactcaaaattactctaaatatttgtgttgcgttgaacttttgaactcacgccgagtgattaaattgtatagtgggtactcggacacgctgatcagtttgcgttggtaatcggctgagttatggcattagctgaatattggctgcgccctggcaacacgacgcagtatttgtgccgttcgaacttggctgcgtcatgtgattgctatgtcgcgctctcgcttaatcggatcgctcccgttgagttggaccgccatcgctgagtcacacatttttcgagggccctgaaggcattgcatgtgtgtcgcaactattgagttacaattgcgcttgttgcgtctgttgtgtctgttgcgcgtacttatcgtgtacccctactaccaagccacagttgtgtctgttgcacttattacgaaggatggatgtgttgtcgtagccctgatggctgcacacgcgttgacaccagacgctagagcttgtactcgtgtggattgtggtgggttgttcaagcccctgaagccacatcatagcgcgaccttcataaacaattttatttggctctatattttatttgattgtgttgtgtgacatcatatatttatatatatcgccaagtggccacaacaactatatcaagctctataatgcttggaaatctgggaaattaaattgaaatacaatgaaacacagataagttaaatatctgctctctcctcatgcataaagttttacccgaagtaacctgaagaaattcaatattaatgcatgaaag

SEQ ID NO: 117187 - DNA, 445 bp, Zea Mays
attgaatgaaactcaaaagaaatttgtcggggcgtatccttcttagtgacatgccatatcagaatctaggtatagtgttaaatgtgaatggttggatgaacaccctcttggtgtcatgtcgtgtcacgatctagacatggcgtcaagtgagcaaggattaggtcgctacttcctcattggtgtgctacattgggcttggctatagtgaataatatgcaagattcttcacatagccgacgagtacgaaaggtaacgaagctagccgaacaaactagaatccatttagtttgttgaaatctaggatcacttacatataagttaagggagttaattagttgagacaacgattaggtagcgtgtaaatatcttgtgcgtccaagagactaaatggaagggtccgaagacgaaggaggtgaacaataccatcttcaagctttggtacaca

SEQ ID NO: 117188 - DNA, 608 bp, Zea Mays
gtgaccttcaagaatctcgggatcttcagctctcctggtttgaactgggttggatggagcgggctcttggattcgcagggctctacgttggttaagggttaccaagtaggcctccatcaacttttggacatgctcatccttggcttgcttcagggcttcaacagcaatgacttcacgactttccaaggcagctacacgggcttgaggtgaggtgagatccacatggagcttacggttgcacttctctgcatcttctgctcgggcaatcatctgacggtggtgccgagccaagaaatcatactgctcatctagggtgagcaggtatgcagtgaggtacacggctgtggggtcgtcctcaagcaactgctgcgcttccaatgcacgcatcctggccatccaaacgagacagtttctctgaaagggcggaaagaatctgagcggggtgtcggccacttcttcttcataaatctgacacagggccctcaatgccttgcgagcgatgacttggcaggtgtctttgaatctgtgcccagcagcagtgacactccattccacatggtgcggactagatccaatgtatacagtcacgacacacttctctgtgccat

SEQ ID NO: 117189 - DNA, 651 bp, Zea Mays
gaagactgacagggagagaccggcaacgttgcctcgactacaaggcatggttcgtcttctggtggttccgtaagttgtgcttttaattgtcatccttatttgcttgggctcctaccaatttgcacgttgctcgataagagtgcaaagtgcactgttgtcaaacaccaagtccatatgaagagatacctcagtgagcctgtggagtcatagggtagagtgtacctaaagttgcccaaaatgagccccatatcataattgagctaatctgatggccttgacaagacaccctattgccagcgtcgtttgtcgtcaaaaggaaccaggtcgagtgccctagagactcccatgatgacctcggtctagccacctacgcccgactcatgccacacttcttgcctagcatgtgcaccacgatgccgcgttggtcatggtcatcctcgtgctcgccgccttttctcttcaatgtcatgtggtcataccagtacaccacgtcgccgttcattgcatctaaatctactgatgagcttcaattaatcaaatcaaacaaaaaataacaataatggtacgacgtgatatatttgtatatttttattattatacatgtatgtatggtgtcttaggctatataccatatatctctgtcgttctgca

SEQ ID NO: 117190 - DNA, 316 bp, Zea Mays
ctcgcctgagctcggcttcggtcaactgcctcagcaacaactccccacaaatcccacaggaggccactccgacagctgtactaacccctccctatacgactgcatgcctcgaggtaggctcgaccaatgcctcgagaggaacctccatcttgcccgagcctggtctcagcctagataacatcgaccaaaggacgtcaccaactcctccatgaaggctgttgacaacgggatggctacaggactgatgtcaagtctgcttgacaccataaggggagaattaccgcacgcttttcaccatacttgtcactgtttcaat

SEQ ID NO: 117191 - DNA, 431 bp, Zea Mays
tttaggcttagcgtcttcatctgggcccttcgaagccaaggaatggacccaaatgctgaagctttctaccgagtgcatgcgctacattactagacgaaggccagagaagatgggctacatgaaaattttggctgttataacttcgcgtatcgcaaggatacgaaggctccggtgctcagctatcgcaccaagtggccaaccggctggaaaagtgagtggttctatatcaaagctgatgagaagaagagggagaagttgaagacgatggtcatgagcccactgagtttaagcttcggactgactaggcccctgtgccgcatgatgtcggggtcaccatgccaacaagttgtagcagaattcagggtggtggctgaacagatcagcactagagatctagtgcaagaatacctggccaatagggtatctccaac

SEQ ID NO: 117192 - DNA, 420 bp, Zea Mays
cattatcttgtaaagtcagggtaacagagtgcaatatataggaagttggggatcaacgaaagttgattccataattatcaggttatgcatgcatcattttaagaatatactaatatatcttcccctcttatggagatatggcgcgtactaggaaaacaacgtgcaaatctactggaccttttggtgtgccacgacatcagctagcttccaggcacgaaggaagtagtagtggcagtaatgacccaattggagacctggaagccagggtggaacaacttcggtcagagttacgtcacaggaatagggcacgggatcaggacagtcactgtatagctgaattgtcagccgaagtcagccgcttgcagtatgagatatcagaacgggatacgaccattgattgggccgtcaactcgcgttcgt

SEQ ID NO: 117193 - DNA, 417 bp, Zea Mays
tctagtgtgctcatgatcatattcatcagggttaacaataatagatccatcagttgcagtaaatgtgagagtaccttgaggaagttgagattttgccttagccaatttgttctgaaactgtgtgcacttctgtatatgacgatttaactgtgaagttgccccctggatggtatgcatagcttttataatagaatttgcatttggcttttgtcaccataaccccaaactccttcttggactgaacatggatctccttaaaatatttccagcaaccagcacgctttcctctctttgacttatctttggaaggagacggctgactaccacccttcaatctttttatgcctcgatttgtcttctgagcctttgacacatgattgcccttcgattcctccccctcctcctcctctgcatcat

SEQ ID NO: 117194 - DNA, 402 bp, Zea Mays
gtcatataaaaaatcttgaattaactagtctaaaccaacaaaagtgattcgtttcccacttattttagcattttttttgccatatgtacttacctgatttgttggattaaaaaaactaactagaaactttactcccggctagataaccggctgatagtgatttaattatgattaataggtcttttcgagttacatgggttaggaaccgaactcgaacccgaaacacaaactagcatagactgtggtccaaatccgggttctaacacctaaatagaccacaatagatcgggtcggttttcgagttgtgagtttatacggctagacttccgagatgtagcgtgccttctgccaccattcctgttctgtcatttcctaaaattaaaaaaacatatatcctcaagg

SEQ ID NO: 117195 - DNA, 396 bp, Zea Mays
cccagcttcgacaacgcgtctgctgctgcattgcggtctctttccacgtgatggaattccaacccttcaaacttgtcttctatttttcggacggctgcacagtacctgcccatagaatcagtcgagcaatcccagtctttatttatctggcttatgaccactagtgaatctccgtataccatcaacctcttaacacccagtgacacggtgatgttcaatccatggatcagtgcttcatattctactgcattatttgatgctgggaataagagctgaagtgctattctactgcattatttgatgctgggaataagagctgaagtgcatacttgagttgttcacctcctggagcaatgaagaggatccctgcgcctgctccctgcagtttcagcgagc

SEQ ID NO: 117196 - DNA, 297 bp, Zea Mays
gcgttgcgaaggatgcgtcgaggcgaagaaactttatgtggagcgcatggccatcagatcaaaatgtcaggagttggtccatttaacccccggctaagtggatagactctatgtatctagggctagtttagactagtgaaataaccctctatagatagatggggtgtgctattgtggacaaccatctctttggctatctcatttgtgttttgtttagaaaaccctagtttcaatttcccttgtttagcctgagacccatagatgctttgaactcgacatttgtgcttttgtattctt

SEQ ID NO: 117197 - DNA, 518 bp, Zea Mays
gcaagagcatggttcgttcgctagcatggttcattgctcctggataatgtagtccttctgacgtcgtctgtaaggccgtgcgtagccgtactcccggcatggcatactgcccgttcatttgtcatacggggcgtacacccggtatggtgtatctactgtgcattatccggtatacgggtcattgtagaagctctgatgctgagaacccccatgaccagggtcgactggactctcgaggcagtgggggcgcacctaggaccgtacgtggggatgtgcaatcatgttgatagcgacctcctagcgtgtccccggtctgctacacgtatgtccggtcgcggcctagaggtgacacgtcttgtcacatttagcgtgggctcgtagcgctaaacttggatatctaccttgcaaacttgttcgacggggactttgtcagccgtttcgtctcgcagacttgctcgacggggacttggtcgaccggtccgcctcaccgacttgctcggtggcgacttggtcggtcg

SEQ ID NO: 117198 - DNA, 816 bp, Zea Mays
ccctgagacatttcttcagctgagatacatgaaagacatcatgaacatccgcgagatgatccggtaactccaattgatatgccacctctcccactcgctttaaaatcaagaagggtccaataaagcgaggggacaacttccctttgactttaaatcttctcatatcccggagtggtgacaccttcaaatagacataatcaccctccttaaactctagcagtcttctctgggtatcagcatagcttttctgtcttgactgcgcagttctcaaattctcccttatttgatggacttgttcttctttttcttgtataatctcaggcccaaacaactgcatttcaccagtttgatcccaatacagtggagtcctgcactttctgctatacaaagcctcaaacggtgacatcttcaaactggccagatagctattattatatgagaactccgcacaagctctgaacatatcttccagcacttggttggtcctctcagtctgcccatcagtctgaggatggtaagtcgaactaaaattcaatcttgtatccaaggactcgtgcaacttcttccaataccgagaggtaaactgtgatccccggtctgacataatcttctttggcacaccatgtaagtagacaatccgtgccatgtacaactctgccaacttggcacctgaatatgtggtcttcactggaataaagtgggctactttagttagcctgttcacaatcacccatatagaatcatatccagcagatgtgcggggcaatctagttatgaaatccataccaatctcttcccacttccactcaggtatct

SEQ ID NO: 117199 - DNA, 460 bp, Zea Mays
cgcgatctcgtcagttgccactgatgtggcggccatggcacggaacaacatcctcttggcggggatgatccccttgagcgctctctggttcttcatctctgcaccaagcacgaaacaaaacataatgacattaaaccattttggacactaatcagtagctagctacaaaaaaagagacatactgtttgttgttttaagcaatggatacggcttcaaatgacatggttgttgtgtgatacaatgtgcagtaaagaagagccatactgaccatgtatagcccagagaaagaaatcaactgataaatagataaacgaacaaaagcttaacaggtcaataagtacattaagatgataaatagactgccaaatagatagatctattcatagacgaaattaccgaacaattaaatagccgtacgtgagtagtgacttactgatatgcaagtacgaccttagagatg

SEQ ID NO: 117200 - DNA, 409 bp, Zea Mays
ttttgatgagacttcacctagtctatcctctattttgagcatgcaggtctaaattagatgggtgagaccatctttgtggatgaggagcacgacgacgttggttggggtgatcttgagctgactccaccgactaccctagttgagcctatgtccacaactttggatgatagacccaacatgactacttccacaacttggggtccgcttaaggcaaagagcaccaagagtggtggacttgtggctactattgaggggaggctatctctgtaagagatgctccatgccatgtccagcatgatcattctcctcaacaaatgattgctgagcttcatgagtgagtcacttgctccaggtatcagcagatgtcccacttcactcattctacttttgttgccttgtttgagcccca

SEQ ID NO: 117201 - DNA, 698 bp, Zea Mays
tggtctgcaatgtaggaggtggatctgaagcagaagattgctctagggttgaaggtgattatggtcttgaaggtgactataattgagtcattgtatatcaatgtcacaccccctacctggcgtgccagttgtcagtgtttgtgatctgaccgcgtaccacggggttacccatgtgatgcttttgggtaggacgacgtcattgatcgcgactcgatggttcatgctgtaacacaacggagtgacgtgcagacttattcaggttcgggctgtgtggagttgcgtaataccctacttcttgtggtggttctggtattgatgtgaggattacaagctgagagttgggggtgttgtaggataagatgagatgaaatggtaggggattcctcccggccttatatatgcgaccagggagagttatcccgtacaagtgataactactatctacttgcttatctcatggtttgtagcaggctatatccctacatattcggagtccttctcgcccattcacccgagctatcactgagggcttatcatgtaaggtgatcccaacagtaccacctgatacatccgtgctcctgtagcacttaactcgggtatcgatttctgtcggcttagatcgggcctgcccagcctggctatgtttagctagcccatcccgctggacgacctaggagaggacctgccaggcggtccat

SEQ ID NO: 117202 - DNA, 635 bp, Zea Mays
tgaatcatataccacttcttttatcaaaatttgaacttcaaatttacttgttagatgacatttctgttaaataaattacttgttggatgatatttcttctaagtaaattagttgttggatgagaataatgtatgtgaatcatgtcaggttgcagctcatgcactgtatgataataatgcaatactgaatagagtttatgatcaataactaaagtttgagataaaacacaacctccgactcgacagacaaatagctggtctggcctgattccattacctttcttctggtcatacctgcttgcagtcacataacctcagactcgacagacaaatgaagaggagctaggtggtaatgtggtatgcctgtacagcctggtgtacatgtacttcttcaaacctgctatctgaatcagcatggtgtctgaaatgccactctttcttggagcacgcctctgttgtcaccattaaagtaccagttttgacatgtttgcagtttagggactatatgagttacccttctacaccccgactgttttagttttagttattgtacttttgctattttgcttgtatattgtttattaggaattggagagagaaccgtgaaagaattattgtttattaagaattgaggag

SEQ ID NO: 117203 - DNA, 472 bp, Zea Mays
tttggcgtttcgccgtcgactgagaaaaccctgacctagaacctttccatgcctgcttcatattttgatgtactcgtgccttttcttccacagctatagccacacttattgatcgattgaaggtaagatcatagcaagtggccatcttcttttgcaattttgagttgaggcctctcataaaacaatctcttttcttgatatccatgttcacatgctcaatagcatactgagaaaggtggttaaatttcccaatatactgcatcacagtatctgccccttgcctaagtctcagaaactcctcaagcttcatttgcaaaaccccatcaggaacatgatgagcacggaaagcttccttaaattcaacccaagtaacctggtgatctggaggttgtatggcgacaaagttggaccaccaagtgttggcagctccgcgaagtttttgtgcagcaaatagagacttttgtaccttagt

SEQ ID NO: 117204 - DNA, 333 bp, Zea Mays
ggcaccaagtagccaaagctagatatgagtagcagcctccctgtaacccatccgtggtagaagcatccgtctcatgagctaatataaaaacttggtcactatggtgaagtctccggagaacgtcgcgacccatctgagaagggcggtcggaacaaagccacgacgtgagctgtaccaggagcaactccgccgtgagggcgacgaggaggatcagaggtgtcgtagcacaagctgtgaagacgagtcgatgactcgttgaatccaaacaactggcaaatctgactggcatgaattgtaacatcatctcgctcaaagcggaatctcatccagtgg

SEQ ID NO: 117205 - DNA, 424 bp, Zea Mays
tcatcatattgttgttactcatcgaccgacaggctttcaacaaccgatctaaggatattgtctgaggagatttcggtgcgatctttagaattggccatctgcggcagactataatagatttagaacacacccttccctagtggagtcgccaaaagtgtgttggctccaatttgggtgcaaatcaagcgctctctgagctcgaacggttctcgactggtgtataggtcttcttctttgtaggaaacttagacctcgtctcccatcggggtggagagatcctagatgtgttttggggccgacagaccatccaagacatctctagacgatgtcggtcgaagagaggagaagaaataggtcgagaaagactaatacaaggactaaactaaggttagattacttctactcctaaagaatgtaaagaaga

SEQ ID NO: 117206 - DNA, 339 bp, Zea Mays
gattcaattaacgtgcttgtgctcttgtaactagaccttgtaatgtatcatgaaagattataagctgactaaatcctaaggtggaggagtgagaagaaacgagagataagaagcgggttgtaatcttacagccaacttagatacaagaaccaaaaagctttgtgagagattagtgtgatcctgcataaacagtgaagagcttactactatatagatggactaaatggtagtatgcagtcggctgtattattaaacttgttgtaatttcttgcgtttgggattgttagtgagcataattttgttgtatgcagtcctgcttgcatttgtcgatgattggcc

SEQ ID NO: 117207 - DNA, 304 bp, Zea Mays
ctgtgatttgagcgcagagttttcatacagttgcagtgaggtttgaatgcaaacttgttcagggttttgccagttgtgttcatttctgtcatgaccgtcttagggtcagataattcttaaacaaattttcaggcgttgtcgcgataacaccttgtacacctttgcaacccatactcaaaaccttggcttattttctggtttattatacatctctgcaataactttttcttgcattcacaagggaagagattatttcagttggtattattccttctacccttgctcttgggaaagcaaagctgaa

SEQ ID NO: 117208 - DNA, 469 bp, Zea Mays
gctactaatatgaatatcataagtcaatgtttgaagccaagtgcggcttcactaaaagcaagatcattgacctggcctgagagagcagtattggtgctgcaccatgcatgggcaaagtcattaataccttcgacatgaagataagtttgtctgccataaacgggccataacagatccacacacatacacacaaaaaaaggttgtgcacgacctatggaagaggctccaacaggctaggtgggtaaccactaggtgaggtttatatacctaggatagcacatgtaagcacagctgcacagatatgtggtatccacgaatgtactaatctttcttttataatccgaaaagactgaacgtcatgggtatgatcccaccacatttcattcacggatatgttcattcaagttcaactgcagctcaaaattggactaaaaaactcgacatgagggtaagaccgtcctcacggcat

SEQ ID NO: 117209 - DNA, 530 bp, Zea Mays
cgacaaacattttgtagaagtgaacaaaggtggctaggaggaggatggagttaggagagaggtgtgttagtttgatcctttagaactctagaaccatgaatgggaatgtcgaggctacgaaccccaacctcgctagcaagtacacgccaaagacgttgtgcttccccggctttggccttggctccatcggccatgtagctggcatttggttgccacacatttccaaggatatccacccaagcaagttgtggtacatccctagcacttagtcattagacgcccttgacttatgcatcactagcctcctaccccttggaaccatcgtcgatggcaagaaggatgatggtgaagggcggttggagcgctcaaacaaaaggtgaatagtcaggaggctaagggattgcatgtatgaagatagcaagggctcaggcacttggtaattacatgcaccaaacccgacactacatgtatttcccactcaccgtacaggccccaagggcatcgcacacgtgtccaaaactattgtgcat

SEQ ID NO: 117210 - DNA, 502 bp, Zea Mays
aaaatattggagataatcaggcctgaaatcaagctgtcaggctgattcagtctgaaattcagatgttccgtgcaaaaacacaactttgagtatgaattcaaccttgatctagtgctcaaatgagttcaagccctatagtcgaattattgctggtttatagctctacaattttgctgcagagcttgggaggagttgtcattggaaattgagagtaaatcatgctccaagttgctctgtcaggttgtctgatggagcactcgccatggtacagtgctaccagggagatcagatcgccagcgcagctgttatcaccgccggtgacctgccgccgtgattcgtgccattgccgtcgcattttgtgctcggctgggttagataacgcttcaggtagaaagatcttcgccgccgtcaagctggaagccaccccggtcagccgcggtactcctcccctggctcaccgcctgcgggtaaagttgctcaccgtcatcgtgccatcgccgtt

SEQ ID NO: 117211 - DNA, 480 bp, Zea Mays
caaatttgacgataaaaagtcctagttcggcctaatacgactgataagggcaagggcaaaaagatcatcatcggtgacccacgagaggcccatgaaaacacaaaaattctcgcagaaaagtgattgcagagaagaccccgaagggagggaagacattgaagatcaccatcacgacctccaactctagggggcaggcgcagtcgggtggccaagtgcagcgccctgttctgcgtactgtggatggtccaagacactactggacagttcgaacgtgtctagcggatggttcgacaatacccagaagcagcgacaaccacataccttcaagacacgatggccagaaataggtatatggacgacaaatgcatttaaagcgccaggacgactagtcaaagttggtccaacctttgatcgattattatccaaatatgtgaaaaagaggatcggtccctacaatcggccaacaaaacaacctcattc

SEQ ID NO: 117212 - DNA, 549 bp, Zea Mays
gaacgatgctcctctgtctgacacgatagtccttggtattccatgcaaacgcactatttggtcaatatagatttctgcatacttttctgccctgtgggtggtatgtactggcaagaaatgagttgtcttggttagcctatccacaatgacccaaatagaatcgtggtgccgggaggtgttgggcaatcccacaataaaatccatgcaaatatcctcccatttccaagatggtacgggaagaggctgcaaggtaccagctactttcaaatgactagctttgattctttggcaagtgtcgcactcagctacatacttagcaatttccctgttcattctggtccaccaatacaaagatctgagatcatgatacatcttgttactgccggggtgcatggaaaatttggaaagatgagcttcatccaatattttcttcctgagttctagattcttaggaacaaccaatcggtcttcaaaccatagaactcccttgtcgtcctgacaaaagcatttatacttatccaccttttgttcgagcctctccttaatgac

SEQ ID NO: 117213 - DNA, 630 bp, Zea Mays
aaaatataacctaatatcagactcgaaatccattttccaaactgactcacctgttgtcgtcctaggctcagcgcctcagtgagctcaccgccgctagaaatctcacgccggagtgggaatcatctcccacggatagggggtcatcacatctggtatcaaagccatcagagctggcgatcgttgaagagaagacgcaacggctccccctgcaaaaccattcgtgcagacccggtttctactggaagccatggatgagagagatcgagcagtgcaagggaattgggaccgtatgtttgaatctatggagtttgtgactgaaagactgaaggaggtggagagagtccagtagcaattgttgatgcagtcagagctggcggcagtggtggctgaacaagctgctgttgataggaatgatctgtaccggaagttggaggaaacaggacaagaagtgtctcagttgaggttggaacatatgggaagagagctgggcgaaacatcaactactactcaggaacaaggcggagatgtccgaaggaatcaacaacagtctcatggtgatcagaatcgtggaaaccaacagcgaggcatgagaggtgatcctcgccagtttactgattcaggtaatcaagc

SEQ ID NO: 117214 - DNA, 491 bp, Zea Mays
tgaaatgtgaccgttgatggacgtgttactattggactgcgtgtttcctgaagcgccatgtcctatctataaaaaggcagccgtggtcgggactatttcttatccttgcgtgcgccgtagaaaccctaacttttgcaaaccgctcgcctgccctccttgctctcccgcttcagaaatctagcccgtgtcaagcagtccacacgccaccgccgaccgtacgtagcaatgccttcttcctcatctactgtgagtacgtcgtcggccgatccgtcgtccgaggataccttaagtgatttggtggcgacggagttgcaaccgggccacaccgtggagttcggcacatcgaggatttcctcagtccgcgtgcaggagatgcagcagcttggatactttggtgacggtgtcgggtgggttccaggcgctgaggagatccctgagcctgagggcgaattggttgtgtttgaggcatttttcattgccgaccttcgtct

SEQ ID NO: 117215 - DNA, 493 bp, Zea Mays
gccggcccgcctcctcgcgcctcgcggttatttccagccctcttcctgcctagcctagtgctagatggtctcccgagtttctcgaaatgctcgtcctgagtcctgagcttggttgttgctgaagctagtgatgcgtcacctggcattgcttttgtatatgaaatttgtctcggtatcagaaaagggcgtgtcaagcctcaacagtcaacagatatgtgcatttgtggcctgattggcttttcttttgaaaagcaagtggtcagtctgattgtcttactgctgagagttgaagcctttagaacttagaagtgtgccttggcatacttgaattcaatcagctcgacttagttgcattctcatgtgttagaaatatctgtctggacttctggggaatcgcatgtgtttgtgtttattatacccgtgctgagtgtgacccataataaaactcatcttgtgtttcaggttttacaaggtggctgtgaatgattccata

SEQ ID NO: 117216 - DNA, 818 bp, Zea Mays
attttctatgaattaaaccaattctaggggtttatttttacattgaaaatccttttctaattaattttcctgatttttctagtttcctgcactgggcgcattaaaacagagaattgcaggggcctttgtgcaagtattattaatacttagtgaacagtcccgtggattatgggtttaatctaaaataacataggggttctttaataaaattgtcgaggccgaaggggtacgggtgcatttcggccatctgattagagatcaagcgtccaaattagatcggacccggttacatatactgctacgcctactaccattggatcccagatccgtggtccatgtcaagcccttgctctatcaaatctgggtcctacgcagcatgatcaacgccctagaattccacctgccgcctagacacctaccatctaatcctggccgccgttttacgatcggacgaaccacatgccatcttcttcctttagccgtgaacttggaggagcaaacgccccagcggtggtgccccgcaagtaggccacacatcgtctgattcctaggtgttttgcgcgatgatcgagcgacccactacaatctatatcccgacgataccttgtgcgaaattcatagcggcaaagatagcggaaagattcaccacacaaagacgaggaagaggatgggcgaaggtggcgcttcaccacgcgacgcgagctccacgaaagatcactgccgaggaccccccccccccccgcacagatggtttcgtcccgcccgaaggtcaccaccagcagtctcccaatccacaagcaatccctcttccctctcgg

SEQ ID NO: 117217 - DNA, 390 bp, Zea Mays
caaaatccatggtgatatgctcccatttccactctggaatttccaatggcttcagcaaacttgtaggcctcttatgctcggccttcacgcgttgacatacttcacaggcagccacgtacttagaaacgccaaccttcatccgcttccactagaagttttgcttcagatcttggtacattttggtttcgccagggtgaatggtgtaaggcgttttataagcttctctcaagatatccatcttcacctctgatttttgaggcacacaaaggcgacccctgaaacgaatcaaatcattctcatcaatggagaactcccggggtttaccatcgccaaccctcttttgagcttcctgcaataaacgatcctgctgctgagccgcacacactctct

SEQ ID NO: 117218 - DNA, 294 bp, Zea Mays
tttggataacgtttgaattttataaattcggactgtgcgtataactgcgaaatcatgcgcgagtgggataatggagtttggtccccagtagattgtgccgggcagagcaataaagtattcaggtcattaacggacgaagtttgcctcatttcgatcgactcaaacacgacctataatatcaaagacgatgctgtttggtttggtctgtttgcttttggcccttatccgagtatttggttagcaaatgaatttatcgtatcttagtcatgttaagagttgtctcatttatcgtcg

SEQ ID NO: 117219 - DNA, 506 bp, Zea Mays
caatgcacaatatttgggtttgctttactaggagacgagatagttgataccttcgagtgggtcttcaatacgttcaaaaacatgcatgggatgtgacggaccacgagtgatgttgacaggtatgttgaaataaatggctcgtattgttgaaataaatggctcgtattgattaaacacgtactatatgatatcatactgacttgccccaatgttatgtaaatttatcgatttcagatcaagaccctgctatgccaatcacactaggcagagtattcccaaacacaatacatcgattgtgtttgtggcatgtgcaaaacaggtatatgccccacttgaatgaattgtatgtaagatttgaggaaatggatttcaaaacaaggttccaatctataatacatcatccattgaatgaaatggagttcgaggctgcctggcaaatgatgctcaatgatttctagctacacgagaacaacacccttattaaattgtatgaaatatgtaaagat

SEQ ID NO: 117220 - DNA, 597 bp, Zea Mays
ggatatcgaggacaaaatcctccaagacaattaatgcaaaccagccccaagttggtaaacactcagtggatactcatccacaacccatatcaacagtgcactctattacttatactgagacatcggaacaccatgactccatagctttgggaaacaacgagccatcaaaagggatgtaagaagtttccaccaattatattgaatctggaaaatcatatgaccataagactacaattgttgacacttacttctccacaaaaattgcaaataaaccttctcgatgattaagatcccaaaaccatggcagagtacaaaaagtgctcggattggatccaatggaaggaagcaattcaagctgagttagcctcgcttactaaaagagaggtactaacatctgcaatacctacacctccaaaagtcttccctgtgggattcaaatgggctttcatctggaagcagaatgagaacagtgaggtggtgagatataaagcgagacttataacacaagggttcacgcaaaggctcgatgttgattttaatgaaacatattcaccagttacattctgatacttaatatccttggtagttcaaaatcgt

SEQ ID NO: 117221 - DNA, 397 bp, Zea Mays
gatgtttatgaactctacttgagtgcatgtgatgtttatgaactctacttgagtgcatgtgatgtttatatttgatctcgttgacatgttctgaattacaatacgctgctgccaatttgtataattgtaatcaattttctggtcaatttgctagtgatgcatgacagggtaaatattcaggagatatcatactagctgctggctactccttggctaccagtttcttgtagcaggggagggtatccttggctgttggctgccaaagagcaataggggaggacagccccatcggacggtgctcacccagggatcttgggtagcacggattatgctccctgggtgctgactcccctggctcctctaccacagctgccaaaggaggcctccgggaaaaatc

SEQ ID NO: 117222 - DNA, 2914 bp, Zea Mays
ctggcgggtcccgttggtggcgccgtggcgtcggcgtgatctgagatgagattggacccggctgcgcggtattcgctgcggaggtagacggccatgacgaccaacaccaagcgcgcctacaagctccgtatcctcgtcgcttcgtttgcgctatttcgcttcctttttttaattccttgtcggggttgctgcatagtggtttttgtatgaccgatccatcgctgctgccgcggtcgttcaaccagtagaggggaacatttgggtcagcaagtttgagaaggagctcccgactcttaattttctgtttctgttgagttgttaaataggtattttgtggttgcgagattcggcaggtcacatttagctgttggtgattatcgagtagtcgttactgatttgtcgtttattatcctagaagtgcgattgctggcattccggcatgtatgtgaaaatgtctgaagtggtacattgatgcaaataatatcagtcatcgagggagattgggctgttaaattcgcacacattggaatgccttgacttgcatttggtgtagaggagtttgtggcgcactcgtccaatgttaactgcctcaagattgggaggaagacctcgcgggttcttgtcacaggaggagaggaccataaggtcaatctttgggctattgggaagcccaattcaatactggtaagactgtttttctagttctgtttctacgtatggactgattgtaaactgcggctccacagttgggtaggaaaacaaaactcttaactcacttgaaaaactattggctgacctaagtggttacaagatgagaacttcaccttttcaaccgctaacagatttttatgtagcacagttctccttatgccagtattcaattaatagaaagatacttttaagttagttatatcaacctaccgcacagcaatgcgttttgaggatggttcgtttatatagttaaaataggtgtcatgaataatgtttcttaaggacggagtactttatttaatccactttaactttttggtggccgtacagagcttatcaggtcacacaagtgctgtggagtcggttggttttgattccacggaagtgtttgtggctgcaggagcagccagtggaacaataaagctatgggatttggaggaggcaaagagtatgcagatatgaatatttaacttactatatgtgtatatgtatgaatcgttcagtaattgcatctcttggctcattttctatgcagttgtccgcactcttactggacatagatcaaactgcatgtcagttgattttcatccgtttggggaattctttgcctctgggtcactggacactaatctgaagatatgggatataagaaggaagaattgcatccatacatacaaaggtcacacacgaggggtgaacactattagatttacacccgatgggcggtgggttgtgtctggtggcgaagataatatagtaaaggtaagaatttgccaataactctatgctgtgtgtgttcaattgctagttcttctgctggaatttgatttttcttttgccttaatatttctaatgaaaaaaatcctttttttcccgaacatattacaatatgtttttctttggcagctctgggatctgacagctggaaagttattacatgaattcaagtgtcatgagggtcagatccagtgcatagatttccacccccacgagttccttctggcaacaggttagattcagaatttacaatgcttatctgtttcttgactgttatcttttctttgtcccttttggttgtacaatgtagtatgtacttgtttatggtaaaatatcagacttctgtcttggtatttgcttgaagaaaaaactcttctattcgttgagctagtaaattaatttaagtatttaggtgctctctaaaaccaagcttggcatttgtccgttaagtggagaagctgtttaaatatgatttcctaactagacctgaaccaaactgtaatggctgttcctttgatgttttaagtggtaaagtgtaatggatcatactatcgctgtaattgttgtctgccccaccgcacctcataataactttttgattgtttaccaaaaaaattcctagtagtcatatcttggcatagttcagcttgctgtaagtaaatcactatacatgtattgtgtaaaattttcgttatgagatatcatgcttgttttcgttggtgacatctgtaagagatgcattgaaattttgtacgatacgttctatataaactttctttccatgtcatcaattaacacatttcattttttgttttgttgtgagacacattctctcctgtcaggcagtgaagaatgtattcatatgtttgtgtgggagctcagaagactgtattccttttgaaactatatctctcttatgtaaaacttgttgcttcattcaggttcagctgataaaactgtcaaattctgggatttggagacatttgaattgattggatctacaggacctgaggtacatcggtatttggagctgatagttcacaattgtttatttcctttgcatttgtaatcctcagaatttaagcattatttccttaataagtagcttgggtggggatcccatctctaatgttacatcgaaaaagaaatggaaaatgaacataaacttagatgtccctgtttgatgcttctttatacaacaaacagtcatatgctaatgttttgcagcataattcagttcaatttgggcacctatttaattcatttggatacctcttttgtttccatcatttaattcatttgaatcacttcttggaatcacttcttgtgtttccataaaaaatactagacaacaggtgtccgatccatgacattcaatcctgatggaagatctttgttatgtgggctgcacgaaagcttaaaggta

SEQ ID NO: 117223 - DNA, 396 bp, Zea Mays
gctgcagccatgcaaccagagtgtggaggagaagacccgacgtggacatccatggaagtatgagaaggagaacccgcaatgacaccctcgggggttgggtcatagctcgcgttgcccacctaagccggatcatcaccggcaacaccctcgggggctgggtaaacgccagcgccatactcagggaccgggttctctgtagcaaccacctctaaggctgaaggatctccaaccacttccataggaacgaagcaatctagatcagcctcttgactcttaagaccgcgccccaaagtcgatgaggcacaagacgctgctcgggataactctaacccgacatcaggcatatcagcgcaaacttccatcattccaccatctatcagcttggacagcagatcc

SEQ ID NO: 117224 - DNA, 425 bp, Zea Mays
caaagttgtttccaaaaatctattgtaatttcagttttctgtcctttacttttctatcccaagaaacatcaggaaggtatatccttcgtcactctgtaataaatctgaggttacaccatcgtgtgtaaaaagctttgaagtcgttcctaaggggatgtagagctccaaagaaacacctagtaaaggtgtaaaagctcaaaagtcgttcctaagggggtgcagagctccaaagaaacacctagtaaaggtgtaaaagctcaaaagtcgttcctaaggggatgcagagctccaaagaaacacctagtaaaggtgtaaaagctctaaagtcgttcctaaggggatgcagaggtcaatcaaaacacctagtaaaggtgccaaagactcaaaagtggttcctaagggaatgcagagtcatgatacaaaag

SEQ ID NO: 117225 - DNA, 541 bp, Zea Mays
cacacatcaatttgacccgaacgcactgagaatggcatgtccacatgcacggcggaaaccgcggtgtcgattccgtgttcttaattatctacgcccgaattggtcaaacggatgctacggtgagctttacgtgcctacatagctgctagaacaacacttgagagatgcagagctttaccagagtggtctggccacggacgagctgttcttggcggcgcggcggactgaattgggggaaaacggcgtcgcggcggctctgggtgaaattgggggtggagattgaggcaaaacggccgtaagaagctgtgctttcaccgtgcacaatcgatttgggagaaggtggagggggcggtgtgaatttgacttcgatcaagtcactgtgtttgcgatgatcacacctcgccgtgaacccaatggctatttatagccgtggcggtccggcgatcacttcgcggccacggacagcatcactagcgcatgccgaccacgtcggtagaaggtacagtgtgggagaactacgacatgagcgccaccgcggcgg

SEQ ID NO: 117226 - DNA, 530 bp, Zea Mays
accatatgagcatatgtaagcagaaagaggaataaaaagataaactcactcaaacgaccaaaaaccagataaaagtcaaacaagtcatttagagtaaccaaagcttggtccacaaagaaatgatcaatggctcaacacaaccaagcaagaaaaggctagccctcaataagaggcaaaagcaggcctcaacaccactagccagaagccaaaagcccataagcaaaaaaaatctttatcagagcataaaaaccaatttagagcataaaattagcacaaaagctaaaatcaaagctagttcctccaaaaagaggcaaacgactcgacacaactagcaaaagctctaaaaggctcaattttcctccccctatcacaatactctaaaaatctctcccagagaccaacaactccaaataacacatctcccccccttggatgagaggaagcccgaaagaccaaatttctcccccttgatagaggaaccaggaaatctcaaaatctctcccccttgttgacaagtgaactcattaagc

SEQ ID NO: 117227 - DNA, 314 bp, Zea Mays
tttagtttatgagtatcatcaatccgatgttctacaataaaatctgctatgacctggcctttcatagatttcaatggttcataagccaagtcatattctatgagtgcataagcccatttaccaattctaccactcataatcgggttttgcaacatgtatttgatcacatcggtttgaccggaaacggtgcaatgactagatatcaaataacatctacacttggtgcatgcataaaacaggcataagcataacttctcgatgaaagtgtaccttgtttcagcatccaccagcctcggacttaggtaggttaccac

SEQ ID NO: 117228 - DNA, 973 bp, Zea Mays
tgcggctcccactcaggacctagagccctcgctgccaaagtaattcctcaaggattttactggcccgcaataatttgcactaccaatcgagtcacccaatcatgcgaagcttgccaaaagttctctcccctcttaggcagcccttcgcaattcaccaagctcgtcgcccatacatggccactccaacgctggggcctggatatcgtcggaccactgcctacagctcaagggaacctcaagttcaccttcgtcgccgtcgaatatttcacaaagtggattgaggccagggcaatatccacaataacatcaaaaaccattcaaaaattcttctggcaaaacattgtctgccgcttcggagtcccgtccgaactcacagtcgacaacgacaaacaatttgatagccaagacttcagggatttttgtttttccattggcaccaagcctgtcttcgcctccgtgtaccacccacaatccaacggcgttgttgaacgcgccaatggcaagatttttagtgccataaaaaaggcttcttgatgataaaaagggcaaatgggccgaccagttacctaaagttgtatgggccttgaacacgacagagtgccgggcaaccgggttcacacccttctgcctattgtatggatctgaggccatgacaccgcaagagttaaagaataggtccccccgaacaaacaaatcagccatccccgacgtcgacgaaccaacttccaaagatctcatcgacggagaccacgtcctcgccctgcaggccctcgacaaatatcagattcaaaccaaggcctggtgcgacaacacagtcgtcccaagagaattcagcgaaggagacctcatactcgtaagaactacccggacagagtcccggggcaagctcgaaccaaagtgggagggaccatacatagtcaagacaaaggcatcccctagcgcttacagattgacaacaacatctagcgaaggc

SEQ ID NO: 117229 - DNA, 445 bp, Zea Mays
aaccatatctcacaagtcaccaacaacattaaggtatatatagtctcacaagtgacaaacccaaaaaggcgtcttgatgcttgctttattgtgcatagcactatatcgtgcgtataggacaacactagtcatcaccctaggtgataatcatccacctgaaatgacttaatttttctatataaaaatcgcgaataacttaataatttgttaagtcattccacccgggtgggtgatcatcacctaaagtgacaaacaacatctctctctatctatcatgcacatgtcctaaaataggacaactaaaaccaactaaagtcagcaacatatgtatgatttgaaactcttctctgatcttatatgaattagcggtgctcctgcttttttttcaaaaaaaaggactttgacatgctatcgatgtatggccgagcatgcccttgtagtagtt

SEQ ID NO: 117230 - DNA, 332 bp, Zea Mays
gaaaaagggaaaagggactaccatgaacaaccatcaaaacgaccgaataaaacaagaaaaagcgatcggccaacaaagaaaccacgatcacccgctaaaacaaaacgaccaaataaaacgacctgaaaggcgacgcaacaagcatcacctattcatccagtgatgccaagatactttctacgtgcctactaatcgttggtatattgttctattcaaatgtggaatggtatgacgataaacccgtggtacatacatagtccatttgcctattcatgatggggcaccaccattctataatccttgatcctttgatcagatagtcatggccgaga

SEQ ID NO: 117231 - DNA, 435 bp, Zea Mays
aaagtcctgtgaagccaaaaaagcggagaattattcaagtaacagatgtgatccatcagacgccgccaccggcaacggtgtcaaaaattgtttactgaaactatcgaagccgaagctactgaaatgaaaactgctgaagctgaatccggcaaagccgaagctaccggggccgaagccagagccaccgaagagtcggacctggaaaccacacttgaggttattgacaacatactgctgaaaatggctgaagaggaagctaccgtggctacagtgaatacgacaacggagaaggggaaggagcaaattgatgaaatttcagaagaagaagattttaactttcaagatttgctcggacaagaattaacggacgccgaaaaagaggagttgagaagatatgccatatcctgcggatacaaatcgggggctatgcttttc

SEQ ID NO: 117232 - DNA, 356 bp, Zea Mays
gtcctgtagttgttggcctgaagagagtagcggtctcaactctataaccctaatcctatcaagtatataaggcaaaataaggacccctacaaaacatttggacccctcttttaggcatagctagaacattaaactcgtctcctttgtaaaactcaaatccaagaaaaatttgactccagtagcacacatgatgtagggtattatgcacatcagtgatctgaacctgtatgaatccccatgttttttgcatttgtcatgcatcgcacgaaccattgagctaactgttgacattacaaaccacaaaagaactatgtgggacatcctatagtgcattgtcagtgctaaacaatgactgc

SEQ ID NO: 117233 - DNA, 490 bp, Zea Mays
agaaccctgcacaccagtggtaacctttagaattgaagaatatagtggactatatcatcattttacacaacatgggtattgaatatggggtagggatggatgagaccaagctagaagaatatgatggtgcctcctacccagcacttgatgacaacaggaatgtccctgagatctagcagttaatccaatatcacaaccagaatcaaagcaaataagtccaccatatccgacctcatagagcatgtgtggaatttctatggcatggagcaagtattagttcattttgtttgccactctttattatctacacaattggatttatgttgtcatgaccttgtaactgtaggtaaagaacacccttggatgctggctagcttaacttgtcatagcctgtgaaccattaagtaactagttgtaggaccacttgaacgtagccaagtatatataatgtagtaggtgttgtagaattgcaaatggttaccacttttgt

SEQ ID NO: 117234 - DNA, 432 bp, Zea Mays
cgagctctgcatggaaacacccccttcttcatggtctatggttcggaggtagtgctacctaccgacctcaggtttggggcaccaaggctggtcttcgaaagcatagctgaagcagaagctatcaggctagtagatattgacgtactggaagaagagcgattgaatacagtaatttagtcagctagatagcagcaaaccctgaggcactatcatgataaggctatacgacattggtccttcacagtgggagacttggttcttcgccgaattctaacgggagaaggacgacacaaattatcgccgctatgggaagggccattcatggtgtcggaggtcactcggccaggatcatatcagcttactcaaatggatggcacggaagtgaggaactcatggaatatagagcacctcaggaagttttatccttagcaa

SEQ ID NO: 117235 - DNA, 501 bp, Zea Mays
tctgggtttgcttcaatggcccggtgtgaaactaggaaccccagcaacttcccggcagagacaccaaagacgcatttgtctgggttcagcttcgtgagggttgcacgcagcttgtcgaagactagggttaagtcttccactaagttcaaccctctcttagtcttgactacgatgtcatcgacgtatacctctactctgtccctaatcaggtccccgaaagtcttactcatcgcccgaacaaatgttggcaaggcgtttttcagaccataaggcattacgacatagcagtaaagcccatccactgttacaaaagcagtatgcttcctatcttccctagacatctggatctaatggaaaccagagtaagcatataagaaggacaagaggtcgcactaggaggtagaatccacgatttgatctatgcgtggaagtggatacgggtccttgggacaagccttattaaggctggtgtagtcgatgcacatccaaagcttcccgttc

SEQ ID NO: 117236 - DNA, 281 bp, Zea Mays
ctgcttttggttgtgctgcaaattttggtggaggtgcagcttttagatcacatggtgatgagggttatgatggtagaattgatgtcgcctttgaaggaggtgcaggtggttgaggagttgaacgtgggcgctcgtcgcatccatgcccccgcctccaccccagctcgcctccaatcccacctccaccacatcactgccatatttcctccaccgcacatcgcctccaatcccagatgcccgccaacgcctaccacttctcgagctccaatcccgctagccat

SEQ ID NO: 117237 - DNA, 642 bp, Zea Mays
tagcacgctgaagttcaaacagcctgggatccacagcaagtggtcgaacctcagtctcatcgcgctcccgaaagtgggaaggtgggataggaggagcagaaaggggagcaggaggagcagtggaagctagagtagtggaggtggtaggaatggctgaggtggtggatggcgtaggagtgactagagcgggcgaagtgggtggtggagtggtagcagtgacgggagtggtaggtgtggaggagcgaggccgagaggcaaggcgacgaactcggtaagcaatctgatcggaaggaatctgtagctaagctcctcgctctgcctactcaatgactgtcgctgctgctagagctgctcaggttgctctatctagacgccgcttcttgtggccttcctgctgctctaagtaaaccgtcttccccttgacctgcctaaaggggcgaggagggtcctcgtcatctcctccccctagcgctgacacattcttcgtgcgcggcatcctgactgacgactacaaatgagagagagagagagaggctaagcaccagaagataacagtcgataggatgacaaaagaacgaatagctacctggaaatctcacacgagagggagagaatccaggcaggacaggagacggctcactg

SEQ ID NO: 117238 - DNA, 560 bp, Zea Mays
caggaatcactctgtctgtgaattgctgttaatactggcagaagaaatgtcaaacagtgttagtacttgcccttagatattttgtgctagtgctgtttattttattattgtattccttttttcagataccagtacagaagaagaaaaaaaagtgctggtgagtgatgatgtagagaggaatgcttaaagaatagtaacaaggggagtgggtcccacacttgggaaaagggggttctcacacagccatatgtacacaaggtatcttctccggtggaggggggaaataggagtgagaggaacctttttatggctgatgctgtgattttaaccctaagcattattgcatgggaaattcctgatatgtccctggcatttggttgttctaacatcagcaccaggttacccctactgctgtgattttacacaatagcccctgataaagtgtcacgtacactcgtatataggactagtatatcacatatctgtacgcaagcaaattacctcctgagtgccttttgtatgtccgaagtgatgtgtcccgtggggcccaccaggaggac

SEQ ID NO: 117239 - DNA, 276 bp, Zea Mays
ggaaaaggggatggtggtcaacgacaaggaggagtccctcttcaacgagccaagagacgacaagcccactgactctggctcgagtcacaagaagaaggacgggaagaataagaggcgcatcaataagatcatctactacgacagtgatgcctcgtcttcttcaccacacgacgatgacgatgacttctcgtcaaagaagaaaccggtgaatcaaaactattcatttgattattctcgtattccatttaattctaatgctcatttgctatcaattcc

SEQ ID NO: 117240 - DNA, 415 bp, Zea Mays
tcgtcataatagggtagccgagtcaagctagacttatgtgtccacatatgcttctcaccatatcccacaaaaccaccttctatattggccacaagcccatctatctgttgacgaatttcggcaccagtcatcgttgcaggtgggcggtctatcactacgacacctttcgtaaagttcttgatgtctaggcggaatggatggtcaggagggagaaattgtcgatgtttatcgaaggaagaatatttgccaccctttttcaaccaaatgaacctgagagcttccttgcaaactgagcatgggaacttaccgtgaacacaccaggcgcagaatagcccatacatcggtaagtcatgcatggagtactggtaccaaacatgcattctgaagtttgtcttcgtaccttggtcatacgtcc

SEQ ID NO: 117241 - DNA, 284 bp, Zea Mays
gtcggtaggtgtggctgagggaccacagagttcgcctagcagcatcgctgaccgaagtagcgtaggtggatagcggcgtcagagactcatgagctaatagagtcctaaaccctctatgaccggcatccattaccctgacatgaatgcgagtgatatagtagcaagcctgagggggttcgcacactcgccttgtctcatacaggggtcggatgtaggttcccaacgcatgcagaacatcctgcagcaggttagggaagtgccctgtctcgatcattgatgtataa

SEQ ID NO: 117242 - DNA, 300 bp, Zea Mays
taaggatcagatggaacagttcaagaaggcacatgcacactttctgcaagcaacatctcaagtggtagctagactccaacaagttgatttagcagaatttataacacatgagcagactaccgataaccatatgacatcaaccacaacatcaccctcaataggtgacttagaaaagctgttacaggcataagctctgataatacagaaagcatctcaactcacctcctcataccaacaagtgttggcaagtcgaaacgtcactagaaatgaaacaactaatgaacagacacaaaaggatgc

SEQ ID NO: 117243 - DNA, 309 bp, Zea Mays
aatttctcctagcagttttttcttgtgttttatgagttgcctattttctgtatatggaatcaccagcaagtatgaccattacttctgaaacaacaaaggatacacatccattttgtcttgaacgtccagcctgaactgaaatcgtggaggctgagtgaaggatgctttaaagaatttcaaggttacaatgcttagttaaattgccctactgcatccaaactagatttgtttgacatgagaatttttctcaacatgatgattgcacttgtacattaaatgtttcaattggagtactcaaatctcttttcc

SEQ ID NO: 117244 - DNA, 279 bp, Zea Mays
gagttggccgatggatggaaagctagcggcctggatttggtgagagtacctgttcgtccggagtgtatccgagtcgtcgatctcagtctgatcggtcgggattagatcactgggactgcttcggggaaatcgcatcttgtacgtggatctcggatcagacggatgtgaatggggcttagtgtttaaaaatctggacagtcgatctttgatcctacggttagcgtgtcataccgcttcataagtgatgacgatctaatccggaccctcggattaaaatcc

SEQ ID NO: 117245 - DNA, 453 bp, Zea Mays
caaggacatggtcatcatttccttagtgatgtgctacatccgcgcccgggtgtagtgaaaagtgggcaagggtcttcacatctctctcgacgggtgtgaaggataaggaagctagtcgaaccaactacgtttcgtgtaggcagttagaacatacataggtcccctataggtaagttaggagtgctaactgatgtagcaattaagaggcatgtaatataatatcctatgcgttcaagggactaaatggaagggccaaaatacgaaggaggtggaggatattggctccatgctttgcaacataggagcaacttcgagtaggaatggtgttggtaccttgattggcaagagccttaaggatggagtcgctgatgttaagaatcaaggtgactcgattaccctagtccggttggtagttggagattcgactatgaatgcgatcagtgcttatgcccc

SEQ ID NO: 117246 - DNA, 467 bp, Zea Mays
cgccatcgtcgttgcggtagcggtggcggaacagaaggaggcggaggtggcaagggttagggttcaggtgaggactgcaatttagatgttgaatttcctttgttgagtccaaatatctaaggctatcttcagccgatctcctatcacatcctctatttcaaacttcactctacaaatagtatcaaataatattatcaatagtcacgcatccctattttactctactcgtgggagacagtttgaagccaccgagtttttaaagtttgacaatataaatgtaaatgtactgatatattcaacataggataggtatagcttactaaagcccttgatgcgtgaatgataggaattaaagcaaaatatatgttgtgtgacattaatgatcgaatcacatgtgggtctattttaccatctgtatcaagttacaaagataagttttacattttatatatatcatgaaactaagc

SEQ ID NO: 117247 - DNA, 544 bp, Zea Mays
aatcttctcttgtgaacataatggaagatataagtttttttttaaaatgtatggtatggctaaagctacactaagccataatggctcctccgccactggctggcggcagaggtctttgccctgtatttcagcgatttgttgctccagctccctagatttttgctcttcttctatgttcatctggcttactatggcctgcatgttggttcgctgcctcttggctgcgagtatatctttatgtttttgtagatgattatttttaatgcgaagtgctcgtaatttgagctggtcttcagcttagatgccaggacctcgttgtccttgatgacgtcatcagcctataggtgggtgaaaccttgggggtgagggaggccctcagaactgcacgtgtgaatggtgccttcggggttggtgggttctcggtttggagacgcttgctattgaatgctccgtcgtagtttttgagtgcatcttgggtaggcctcggcattcggttcttcggttcgttcggttcggttcggttcctcggttcttgtagaaattc

SEQ ID NO: 117248 - DNA, 310 bp, Zea Mays
aaaccctgcaatctgtttttggacagtagcatacccggattcaaacagcgatatctcctaaaatataactccgaatcgagcgcataagtactcgttggaaaggtatgacaaagctctacattattatcatactgagtatcactaattacccacgaaaaatccccagaaactgctaatactactgctgttcgcccacctgcaaatctgtttttttggacagcaacatatccggattcaaacagcgatatctcctaaaatataactccgaatcgagcgcataagtactcgttggaaaggtatgacaaaactc

SEQ ID NO: 117249 - DNA, 497 bp, Zea Mays
gttggaatgtcttatgatattttgtattttactcataaaagagagcgtattcatatatgtgattaatctgtccaggaagcacattaagagtgtttcacaatatcacacaaaagttttggtgggcctttaatttgcttcagtctaatcaaaacgacagctggatgcattgtggtgttcacgtcgccagcgaaaccaagttagtctctaattttcgtgtgtgtatatgggttccagttggcccgagcttacacacaatccaaaagggatgatgtatgttttactcgaagaaagcaccaatgctgaaaacaacagctgaaccaaaagttagacctctgatacaaactgaagacaggtcactatccaggtttctattgatgctttctctttggccacatcccaggtacaatatatattccattaattcagcaccatagtcaaagatgaaatattacgaatgtatatgcatgctaaaatggcctgtttgcagggctgtggac

SEQ ID NO: 117250 - DNA, 641 bp, Zea Mays
aggagagaagacactgacatgaagatgcatgccgcaatcatgtcagctgcagcgctggtggcagcgtcatgtgctgaggtggcgaaatctgccggagctaccagggagcaggtttcatcagtcattaatatgggaatggagactagggcactgggagatttgctcacactaactactagtgcggcagcttgtaagatcatgaaccagaccagctcattttctccggataacataacacgaaaccatggttcttgcttctgtaggtctaagaggggttgagggtcttaagatgcggataagcaactgttccttggaaggccgcatgaacaaccagaaagatgccacactatttgttcgtacacccaagggtatagccaattaactcacagtttacagattgtttatccaattatattactgcattttcaataatataatgtttagagagaaaattttgtgaattcatgcaggaaggttccataagaggattgtttccgtgcactgcaagtatgacaatataatactaacattaggcaagaagggtcatttcaaaagctctgaaaaatgtgagtactaaatgacattcatcattgtttgtacataaacaaatagaattcatactaagatagggttgaaataat

SEQ ID NO: 117251 - DNA, 503 bp, Zea Mays
ggaagaggttggagatctacgtcaggcttatatggacgattctaaagatctcaacagggcttctccaaatagcagcataaggccgattaatttatcggtcgctgagcataaaagattaaaagatgacatgaagaaaatagacgatgaggtccagcgacaaaaagatcaggtgctcaaggtggcggataagtggttcctctcgcacttcagggtggattgccaccagaagaccgtccaagagagggagataaacgccgagtacatgacggtcgtgctgcaacaactccccacgataggtgatgtcaggtcagccgatgatattccatcaattcaaatttcttttgataatcggattaaaagtatcacagaggatatagagaggatggcgcatgcattaggaaaaactcacatgcctaattttttatcacataaattaggcgccaaaacaattgtgccaaacacatcggcaacaaatgggtttccccagccatattctagtatac

SEQ ID NO: 117252 - DNA, 348 bp, Zea Mays
agaagcagtgtccaaatggaagcaaccatccaacgttagtgaagttcgaagcttcttgggaatggcgggatattaccgccgttttatcaaaggattctccagcatagcaagacctatgaccgagctcctcaagaaagacaatagattcgtgtggaccccaaagtgtgaggaaagtttccaaatcataaagaagaaactcacgaccgcaccagtattgacactaccagacatccaccagagtttcgtcatcttctgtgatgcttcaaggcaaggtttgggatgtgtgcttatgcaaaatgagaaagtcatcgcctacgcatcacacctactcaagcctcatgagcagaa

SEQ ID NO: 117253 - DNA, 563 bp, Zea Mays
gtcgggatggccagaattgccgcgcgctggtggagagccgccgcaggcaggtcgtgcgccgtcgtcatctgtctcgtttgggggagatgcacttcggccgttgattgttctctggacggctgagattagacagtgagataccctttcgcgcgagcgaatctgggtcgttgcgggggaatcgagcggaggagaatagatcgtagatgttttaaatcatggtcgttgatactcgatcgggcggtcgcgggggcgaaacgagaggtgggacgcatgatttaattgtggccctcggttgtgatccgacggctggaaatacaccataccccttcgctggaccttttacgtatgagccctcagagaaaatggaattcaacccgtagtccgagtagctaaagctccgtgtcttagggattcttacactagggtccctggacttttgtttattcatgcacccagtccagaagtttaggaaattcaggaaaaataatttaggaaatggtttttgtgtatgaaaatatatccagaacttatttaaatcaaagaaattccatttttactccttt

SEQ ID NO: 117254 - DNA, 540 bp, Zea Mays
gctcgactaggttgagttctcaggctccaaacaacatacggtagctctctgatccactttcctgcgaacttttcattcttgttgaagactttctttctaagtgcctccaatatcatcccgttagctcttttgacctgcccgttggctcttgggtgcgccaccgaggcatatttgatctgaatgctcttttgctcgcagaaatcgaagaactctaaacttgtgaagttggatcccaggtcggttatgatgctattccgtattccaaacctgaatattatgtcttgtatgaattctacggccttagctgaagttagagaagcaatgggtttgaactctatccatttagtgaatttgtcgatagcaaccagtacatgagtgtatcctccttgagctttcttgaaaggtccaatcatatccaatccccagcacgcgaatggccaagttacaggtatggtttgcagttgctgtgctggtagatgctgctgctttgataagtactggcaggcttcgcacctctggactaacttggctgcatcactc

SEQ ID NO: 117255 - DNA, 351 bp, Zea Mays
caccgaagctgaaagtgccgaagctaaaaccgctgaagatgtaaatctagaggccacactctctgaaattgataccatgcttctagatacggctgcggaagaagctgctgcagtcgctgaagagatcccgggcacggtggctggaaaaggaaaggagaaagccaaggatacttcggaagaagaggacttcaatttccaagatatacttgggcaagaattgtcaaaggctgaaaaagaagaactgaaagagtatgctatatcttgcgggtacagaccaggtgcgttactctttgggggagtcaacgaagaaagcttaggatgccttcgggaccacactggggctaaggttgt

SEQ ID NO: 117256 - DNA, 632 bp, Zea Mays
gcctccgatcatccaccgtagcgcctcaatttgggatttcccccaattcggttctccgcgccgccgtgagtcactgcgccatggaccgccgtctctaggtacgctctcatcctcaccctcgtttcagaacccatgcacgctaggaatgcttgtcggctcaaccaattgagctagaccgcgcttgatcaccgggaacgcctcggtttgtctttggtattcgtcgtcgtcgtgggcagacgaactccgggccggattcgtgcgattgatagagggattagggttgccaggggtaggattaggtgtcgaccgagttagggcatcggtcgttgcgcatcccgactggtacaagctcgccggagggcgcggtcatcgccgttcaccgtcggggacctgggtatgtgaagaaagataagtacgggggcttaagtgtgaacgttagtgagacagatgaatagtgcgtagggattcttaaccagttattcgaatagctagggtcctctgtgcagagtcgccagcgcgggcgcgtttctcctgttgatgggccgatttgggctggtttcagcccagcactattccttcttttaccttttctttttactgcgaggcttggagatttatagtaaattctataa

SEQ ID NO: 117257 - DNA, 616 bp, Zea Mays
tcaccctccttaaactctaacagtcttctccgggtataaacatagctcttctgccttgattgtgcagttctcaaattctcccttatcattcgcacttgttcttctgcctcttgtataatttcaggcccaaagaaatgccattcaccagtttgatcccaatagagtggagttctgcattttctgccatatagagcctcaaacggggacatcttcaaactagcctggtagctataattgtaagagcactctgcatatagtaagctcttatcccaactaccaccatgtttaagagcacaagctcttaacatatcctccagtacttggttggttctctcggtctgcccatcagtttgaggatggtaggccaaactaaaattcaactctgtgtccaagcactcgtgtaaattctgccaaaaccaagaagtaaactgtgatccccggtctaacacgatcttcttaggcactccatgcagacaaactatccgagccatatacaactttgctagcttggctcccgtgtaattagttctcacagggatgaagtgagccacttttgtcagtctgtccacaatcacccaaatagagtcataccctgcaggagtgcggggtagaccaa

SEQ ID NO: 117258 - DNA, 534 bp, Zea Mays
gagcattgtgatagataatagtcgatgactatcaatagcgtggtcgatagtatgatcgattgatgatgtgatggttgataaaattcacttgcactagatcgagcctaagtacccatgcaccttaggggtatgtctgagtagggtcctgttatggattgaacatgtgggcactatgcacgatgctgactagggtcgcacgagtagggatggcagtgtggcgagtttagggtgggtcctggtggggccagggacgagtctgatatccctccatgggaccgtgactttggggacccaaattgttgcaggttcccggcgatttttgtctcttactcgcgggtgctccacgagccctgaatccctcttaccctagctgtcgcagcctctaacctatcgacttttaacttgcagaggtgcacagactgtagacgatattctcttctcccgctcccatccagggtctcccctctcctaccgcctctcctcccaccctccctacttccctcactcgtccgcttcttctctcctcctcaccca

SEQ ID NO: 117259 - DNA, 835 bp, Zea Mays
ccagcattcgacgccttcaggtcatcgatctgtttctagagcagcaatggattccactgcatcaaagacagagcttgttcgggaacagtggcaccgcaggatttcagttgggcagatattccatcaacaaaatcatgtgatcatagacagatgaacataagaaagataatttgctaatatgaacaacatagagcaagaggtcgactcacttgaagattggagaggaatagaggtagacccagggcaggaggaactgaggcatggctcgacgagggaatgtcagcaggaacgatctgaagagcactatctggggtgacctcagccccaccagcagacaacaggctccttgcatctagctccccgacctctaaggcgacttgtccagttaaaactgtggaagcacgcaccgccgtcgctccatcgaaccgaggtggggacgacccgacgtggacatccatggaggcatgggaaagagagcacacctgaacaccctcggtggttaggttgtagcttgcactacccacaagagctagatcactaccagcaacaccctcggtggctgggtagctaccagcaccaccctcgggggccgagtcttctgcagtagccacctctaaggctgaaggcccctcagccacctccatgggagtcggatgactcagatcagtgtcttagcatggaaggctgccctccaaagtcgacgatgcacgagacaccgctcgagttacctcttgcctggcggaatcgagcatggaaagcccaccgtctgggacctctgaatagacggtcgggatatcatcttcaggaggctctaatagcatatctttggggacga

SEQ ID NO: 117260 - DNA, 557 bp, Zea Mays
cgttgggccttgattgagggactggagaagctggaggatcagatgtagtgactaccacttgggacatacaccgacgagtagatgtggtagagcggatcgtgtcaccggcgcgaccaaggactggcgggacacatgtccaagacgtgggggggcccgtatgaggtacactactcactacgtttttggtggttgagcctcaataccacgagcgcaacggagggctggattcaccgagtttgggcctcaaaactcagcggtgcggttccgggggaatcgaaggcggcacatggtgtcatcgcgaagggtacgtcgaggcgaattaacttcgtgtgaagcgtgtggccgtcagatgcatatttcagtagttgatccatttaggccctggtacagtagatgagcactatgtatctagggtagtgatggcaatggggaattccccatcagagaatagctcccaatatcagtccccgcgacgaagaaattccccgtggggatccccacgaaaacttaggggggatatttctttcccatccctgttccctatggagataaatccc

SEQ ID NO: 117261 - DNA, 931 bp, Zea Mays
cagcatccctgctgcatttctgctccagcagcaaagccatgcatgcatgagagctagcgaaaatgggcggcctttattaattaccgttattaaaagaatacaatactccatactagtaagagggcatggattctggcagctagctagcggcatcaggtcgcccaccgccagctagctagcgcacacgcgtgatgcatccatgcgctaacgaccgatcactgatccaacgttttccacagggttcctgatgcgcgcgcgggggacctctttaatttcctcgcgaatggcggcgttttgagttggcaagctaggtatatatacccacatagacacatagtacatggtcatcgttgcacgcactgtgaggatgattcggaagcaaacagtaggcgtgattcgctgtcctttagctctcgccgacttgctgctcctatttcagccacagcgctgctatagctagctgcatgttcttatccggtacagatcatatcgagcaagaagtcccaagaaatcacgtgcgctgttccccaggcatcttgcttatacattattgtacatggaaattaattaaaagatgcattcagttatatgtctaatataattttgaagtatttcgttcttgtgtcgcatttcagccaatatcagcgtgaaaccagaaaacatcatctccactagtacacaaaagttttatagtgacggtcttaaagttattttcactaacgttttttagtgccaccaatgttagaggtcataaaaaatcgacatacacatgtagaagaccgggccgaagaggagaattggtggaattcgttccttctaaaggcttccgccgcgcggcgcatgcgtacagcgtacgtacgtccagaaattgctcataacgaatttgtctacgatcgaattgacgccacatgcatgagaataactaaactca

SEQ ID NO: 117262 - DNA, 287 bp, Zea Mays
tgcagaagtcgcctaagggtgcagccggactagcacaacaagtgcgaaaaaccgaagtctaccgcgaagactatccgtgcaaaagtcgcctaagggtgcagccggactagctcaacaaaagcaaaaacgaccacaccaaactatccgcgccaagaccgactatatgcgcaccagcacagcataacaaaatacaccagaccaagtacataacgccttcgcaagcatagccaggtgtgtgggggcacaaaaccttatcatacaagcctttacacatgtacaagcgaggg

SEQ ID NO: 117263 - DNA, 644 bp, Zea Mays
gtggaaatgtgcacttatgtcgagctaaacccttacaatccgtctaggcagtgataaggcgacgccataccgatctagaaaattgcgaaacaacagggtggctgagaaaaaaagatgaaggagtaagaaggggctggcccagctcgtcagccagcccacgttaccctcccctagtgtcgtgacctacatctacatggatacatcagatggagtcatggagacccccgattcccagagctgctgctcgccatctgcctagtgtgagtgctccccatccctcctcatagattgcttctctctctcaatctccagatgtgccaccacccaaaacttctccctcctgctttttcctcactgctctacaccctcagatcaaccattgctgcagtccccttccatttgactgtgatgcagcaccggagacagcagggatcgcaacaattgccctctaccctctcgttctcccttcatccctctctttcactgatttttggtcgtggcaacccgggcgcccagatttccagcacacctcatcacctagtgtgacgccttaataccgatggcttttactatgtatctatagacagtgtatatctaagttacgaagtacatagcaaaacctacgtatataaaaaaagccagtg

SEQ ID NO: 117264 - DNA, 644 bp, Zea Mays
cttcactagagcttcaccatggagtttgtagtgtttggtttacaaggtaacttccgcgttcgagccccaccgtgacgatgaggtttgggatgaacttgggcggggaaacgagcaaaagaaaacagaatagaacaaacgaaccggtacgttgtgtagtcatgtaattagtggcatggtggctaatttggtaccaatacaaaggacggcggaaacatgaattcgtgaacccctcttttgctgctccaccaaattggagttgaggtaaactccatgtttttttccaggagcggaacggggtggagttgggagtgtttgaccactaatttatgcagccgatcagtcccaaacaactccttagtaaacgaggcttcatgactggttaagcttctaatgatggtttctcagggtactgcgttaatgcttgtgagtttggtaccttggctgcagtccattttctcaatatcgttttgtggagtgatgattagggtaagacctctatgcgtgaaaaaccatgtgcgtcccattttgggtggttatacattgtgtctggagtgtagtatgggatttatgagatcatttccttgggattttaactcttcattttgttcctggtctggttgtccctgaactccgctgcatttgaa

SEQ ID NO: 117265 - DNA, 435 bp, Zea Mays
cccattacaactgtaatacacccttcgcattcacagctctaggcagagactgcaccgaaactccgagaacaccatagaaaagagtcccttagttaagatgtcggtgaactgcgaagtggccgagacgcggaggacatgaacatcgccgaaagtgacacactcgtggacgaaatggagatcgatctccacgtgcttcgtgcacttgtgttgcatgtggctagtggagaggtagacccgtagactttgtcgcggtagacgagtgtggcacgcgcgagggattgtagagctccttgagtagctcatgaagctaggacgcctcgaccacgacgttggccatagtgcgatactcgggcttagcgctggagcgagagataacgggctagcgctgcaaggacaaagagatgaggttggcacctagaaacacatcatagcaat

SEQ ID NO: 117266 - DNA, 273 bp, Zea Mays
gtttgttgaaatgaggagaggaggcgagaccgagcccctatagcagcatgaccgtcggaatggcttcggtctttgcagttgtcttggatcaggggaaggacgttcggccctgtatcccgcatcttgaccgagcagagagtcaaggctaggatcgggggctcgtacgcgtaaccgagcctatcttgtggatgtgttgtccgagttgtagttgttggaatagtgataaatatggtaaaaagcacatggtaattcatcttgtatggcgtaaagtag

SEQ ID NO: 117267 - DNA, 2443 bp, Zea Mays
cttcttggattccccttctctttagacagtgttgttgctgctgataaattccgagggtgtcgtagtgcaaattttattactgtattagtgtggttgtttcggcggcgtatggaattctcctagaacatagtacttggtgtctgtgattatctgctgagtgttggcataccaccaactttaggtagaatacaaatctggcatttaattggtcttattctgtttaccaactcttgaaagtactactatggtcacagtgtgtcaatgtttgatttagctgagataagccgtcagtagtcgttgagtttaaagtgttatgttttcctgatggaattctagcagtcttttaaatagcgggctatagtggcattatagcggagatatagcgagctagcggctcaggatagttgccactacaacacggttatactaaatagcaggctatatggggaattattctagagaagtatgcttgttctttactgtcttgcatttatgcccacctgggctgcgtctttgtactgtaatgtaatgcatcactttcaactttacatatatgagatgttcacagcacacattactttccttgttttgtatacataaaaacaatgtgtcaattgttaacaaccgtgtaccttatattccatatgttctatcaggagaaccaaatataaattgaattacagtgctactgttttttttttggtaaactagcacaagtagatttttcacgtgactgtgacttagagacccaaatatgtcagcctatagaccttcagtgaatttgtgagttccttcattcacgagatatttataggtcgtgatcatgaccttgtataaatgacaatcatgcgcttgggtcaatgatgtaattccttcgcagtccagacctcttgaagcacatgacttgagggtctcctgataagtgagttgtcaaggcttcagggttttttgtcatgcgttatgagggtccctatatatgggttttagatacatcatggggcaagtcctccacacctttagggtgtaggtattagagcattttggatatggatccttcaagcacatagatgcacatatggttattgtcgcttattcccccaggttctcagtgaggctgagtttgagtctgcttaagtgcttaggcaggactaaatctacagcatatatgatgtactgtcaaagttattttaagcatgcttggttggaggcttaggcattctgcttggcaaaaaggcttcctacgagtagctgaaaaattgatgtttttttgtatggccaggcaagtgtgcagtgtttggttggaagtctgtgaggctgtttggttcctggtggctgctagccatgcaggctgtggcgcactggcgccaccaaagaagtgtggtggagaaaaaggccaccagaagtgtgtcgtatatttgtacaaaaaatgaactatgaaactgtgtggctgcctcattttatttgggaaccaaacaacagccaatttatatgtggcagccacatgtaaggcgtggcaaagtttagcctggaactaccccccccccccccagtgtatgaggatggtaataatgaaatggcatatcataaatacttgtttaatcacatgtcttattaatgacactgtcataatatggactacccgactaattgatttatattaattttcagtgaattgagttattaacaatatatactttaaataaaactcccatattatttagttaaatatgttgcacgagctatacaaaataaacagatgaaggtaaggacaaaccaaaatatttataattttgcggtctatttacatgccatccaaatgaacagaaaaagaaataaaatgctataacaccctagaaggtaggttccattttaaacaatcacgattatgtccagatacccatgttgtgttagccaggcactggttttcggtggctggcctggaactactgctgactggaccagtcttgatatcagggctgcaactgaacagataggaggcaggttccaggaccctccaagccaggcaatttttcaccagggtctcaaccaaacaagcccttgctttttgaggacttctagtccctttcgttgttggttggtttggtatgtagcagataatctacaaataaattactacaagacaaatcacggatagttacgtctgtatcttaaaatgtaaaatacaggtgccccctctgttctagttcttttttttagatcaatacctgtgagacaagaaagcatttgtgttcgagttttggcatagattaactctactgataccaataagtaatttatatgtgggcatttagtggcaaagtttgagtgaaaaccccaaaaggattccaaagtgaatctagtctgcatatttttcacactggaggaatgatatgtaagaaaatattgaatacagtgatattaaagtcttaaccaaactatcaat

SEQ ID NO: 117268 - DNA, 367 bp, Zea Mays
gatgatactagaggcactcaggaaaaaggtcttcgacaagaatgaaaaattcgcaggaaagtggatatgggagttgccctatgtcgtttagagcctaagaacccaacctagtcgagctctgcatggaaacactcctttcttcatggtctatgggttggaggtcgtgctacccgctgatctcaagtttggggcgccgaggctaatctttgaaagcatagcagaagttgaggccaccaggctggaggacattgatatacttgaagaagaatggctgaatgcagtaatccagtcagcacggtaccagcagactctaaggcgctatcacgacaaggctgtgcgacagcgatccttctcagtaggagatctc

SEQ ID NO: 117269 - DNA, 322 bp, Zea Mays
cttttgttatccaactctgtataaacttcgagtatcttctctgttgtctgttccagtcatgttgacgagggtgatcagggggtaaatgccacacagtggctgcataacgaacatgtacttgttactgtaagtggtgatggcacgtgagtaactagcccaatgacgtacacattctgtcatcaatcaatctgcatttaagttatgaaaaatgcttaactaatttactatgcttttagtgttggaatgtgggacgttactttaggtcaattttgtgtcagacatatcgttgcccatactcgatgtgctaatgtggtgagcctat

SEQ ID NO: 117270 - DNA, 289 bp, Zea Mays
cccacgagcccaatctctacacgtattggtgcatggtggtgcacttgtgcatgctgatatattaccaaacttgccatctttttccaatatataagacacttttatactatagtctgcgctcaatacaaatgttacgatttttgctcatgcattaattcccatattattttctacattattgcccctgctattcctagggccaaataattagatcaccgtgtatgggctcctgtacccggttaaaacagttttgagtcatatgcctcgcatgcaaattgagatatgtttg

SEQ ID NO: 117271 - DNA, 664 bp, Zea Mays
ccttaactactaaaacccttgctatattatacatattcaaacttaatttaccaaaagttttgtgcttcttatctctttgctccatttgcaatttgcgtaaatagtatttttcatgcctggcaacataagttccattatacacgctttaacttaataaacaaaaaaggaacccttctttgtttggtttgttcttttctttgtaaacctaacagtaacacgaatccatacataacaatgacaagactgttaataccattaccacatcacatgtcataacttagctactataagtctttctaatcaattcatctttttttcgtgatgcagtcctatatacagtagaattccagaaacgtggattacctcacgcacatattattttctgggtgtcaactgatacctcacagccaaatgctaaccttatagattcttacataactgctgagataccagatccagctactgatccattaggatatgccttacttgcggaacacatggtccatggaccatgtggctattacaatcaaaattcgccttgcatgaaaagaaatcaatgctccaagcactatcctaagctctttaacagtgaaactgtagttgatatgaatggatttgcagtttacaaacgatcaaacaatgatagattcgtcatgaaatctaa

SEQ ID NO: 117272 - DNA, 633 bp, Zea Mays
cggaaagcagtttcaaactctgtccaggtagcatctctgatggcagcgttgaaggtatcccaccaagctaaggccattccggaaagttgatgagcagccaattgaacacactgattctccgggcattcgatggcttccaacttccttttaatcgtgcgtagccaatcatcagcatcgagaggattgctagatccagcgaatgtgggaggcttgagcctcagaaaatctcccatcctgtcttgtggtcttccaccattcgggcattgattttctagacttctagtgaggacctcaatgagtcgggtttggttggctagaacttgggctaaatctaagggtagctctggaggtgcggggaggtgggtctcactcccttctctatcggcttctcattcagctcttaggggaaaccttgctccaatcccggaggtggtaggcgtggttttattcgaagccatctaccagggggagacagttactattatgcatatgccaaactttttttcaaccaagtcattttattcattacatcagttcattacaagcatacagctactacaagtcgcactacacgtgagcgctctctgaggtacttccgaactccttttctaaagtgtccccaaattccttgag

SEQ ID NO: 117273 - DNA, 897 bp, Zea Mays
gcggaaggccccaggacaggatgggagaatttttgagactcaagcctcccacgttcgcggggtccagcaatcccctcgatgcagatgactggcttcgcacgatcaagaggaagttggaagccatcacttgtcccgagaatcagcgtgttcagctggcagcccatcaactttcaggaatggctttagcatggtgggacactttcagtgaagccgtcagagatgctacctgggcagattttgaagcaaccttccgtgagcaccacgtaccccaggggatagttcaactcaaggaggatgagttccgggagctaactcaaggcgggagaacagtcagtgagtatgtgcacaagttcacagaactggcccgctacgcgcctgaggatgttagcaccgagtccagaaagatggctcgttacctgagaggactaagacccgagcttaagaccatccttgccagccaagacttccacagcttctctcacctctccaacaaagctattcaagtggagagagcaaaagaggaagaaaaagggcacatcaagaggaaattccaggtcctccgagcgcaacagcaagaacgtcaccagagagctcgaccctttgggcttccacccaggggtccaagcttcaataagcaatctggaccctctccatcgcgctacagtcagcagagtcagagctcccatcaggcaccctccgttgcaagcaaccagccgccagcaaacgcctgttggcactgcggagaccccagtcacttcaagaacaactgccctcagttgaaggcatccggaccaacttactccaactcggtgaatggccccaagattccatcggcacctacctccaaggcacttcctccaaacagccagcagagcaggactcagtatcagggcagag

SEQ ID NO: 117274 - DNA, 668 bp, Zea Mays
cgagaagaagagggagaagttgatgaccatggttatgagtcctatgcgattaagcttcagaatgacaaggccattgtgccatatgcaactcggctccccgtgccagctggccgaggttgaattcagagtggtggctgccgaaatcagcaccagggatttagtacaggaatacctggtaaacatgacttttccgacctctagcggttgggggatgccgaagaagaaagaagggggaaagaaatatgaacttgttcggttcccctaccgttttaaatttgagaagcaattcaagaaatcgtgcactgaatggctagagatgatcgaaactatgtgcaacgagattcttggcaattacacaaagaaagaggatcaactaatgactgttgccttcggcacccgaccgaaacgaaggctaaatcgagtaatggatgtactgaactttgaatatccagattatgagagacttgacaaaggggccgagggagcaaagagaaaaagagttgtcagcattctgagtagagaaactgcccggtccgtgaaagcagacgaaaaggctctgaagaaggcgaaagtggcaccgaagccgaaggcgcaagcccctaagaaaagaaaacttgatgagataccttctggccaactgaaggtagatgaagcaccgaaggagacct

SEQ ID NO: 117275 - DNA, 362 bp, Zea Mays
gcctgggtctacgtgtcggaaccttgattttctttgacctcaacacgccagtaaatgccgacgcaacggttttccttttcctcccttgcttccgggtgggatagtagtagtctgggtaaacgaacccaataacatcaaacactttgttcaacctctttttgtcacgagcgtcgaaggcagttgtcgtagctttgtcttctgccttcgaatatgctccaagtatctcatcacttgttacttctatggcatccaaccaatcatcatttagctcatcaaactagttcctgaaccaaaaagcgtacttcagattaaccaggccaccctagctagagccagcggcggtctccttcggcatttcccac

SEQ ID NO: 117276 - DNA, 382 bp, Zea Mays
ctttcttggtatagtttcccagtatttcattacacatagtttcaatcatttctagccattcttggcaaggctccttgaactgtttttcaaatttgaagcgataaggtaatcgaacaagttcatgtttcttcttcgttcccttcatcttcgacatcccccagccacttgacgttggatacgtccggttggccaggtattcttgcaccaagtccctggtgctgatttgctcagccaccaccctgaattctacctcggccagctggcatgctgaccctagttgcatgttccacaggggcctagtcattccgaagtttaaggataccaggcacatgaccatcgtcatcagtttccccctcttcttctcatcagccttaatataaaa

SEQ ID NO: 117277 - DNA, 1240 bp, Zea Mays
ctgggggacgccttcgacttgacgatgaatggaccttcccactttggctccagcttgccccgtgactctgtccgggtggttcggatgagtacgaggtctccttcgttaaattctcttgggacaaccacgtggtcgcgccagaccttcgtttgagcttggtatttgttgagggcctgcagggcgaagacgcggtctccgtcgatgaggtctttggatgttggctcgtcgacgtcgggggtggctgatgcatttgttcgaggtgacccgtgctttatttcctgcgaggtcatggcctctgatccatatagtagtcaaaaaggagtgaatctagttgcccgacatttggttgtgttgagtgcccagactacttcgggtagctggtcggcccatttacccttcctgtcgttgagaagcctcttcttgatggcagtgaaaatctcgccgttggcgcgctcgacgacgccgttagattgcgggtgatatactgaggcgaacgcaagcttggtgccgatggagaagtagaagtccctgaaatcctggctgtcaaactgtttgccgttgtcgactgtgagctcggacgggactccgaatcggcaaacaatgttttgccagaagaacttctgggcagtcttcgacgttattgtggatacttcccttgcctcgatccacttggtaaaatactcgacggcgacaaaggtgaacttgaggttcccttgggctgtgggtagtggcccaacaatatccagcccccagcgttgaagtggccatgtgtgggcaatcagctttgtgtattgcgaaggttgcttgaacggggagataacttctggcaggcttcgcacgacctcgtgatttgattcgcggcgcaaattatagcgggccagtagaacccttgacggatcaccttggcagcaagggctctaggccctgagtgagagccacaagttccgctgtggacttcgcgcaggatctggatgccttcggtttcggtgacacatttaagcatgggttgactgacccccttcttgtaaagttggccctcaatgagtgcgaagtaccgacttcggtgcttgaggcgcttggcctcgttgacgtcgcttggatggtaatatccctgcaggaacagggtgattggtgcctgccaatcttcggtcatgatgaggttgactatgcgatggccctcagtgtcgttggttatttgtaggccctctagactgcagacggctggcgtgccgatgacgtg

SEQ ID NO: 117278 - DNA, 985 bp, Zea Mays
tgactattggcctcatttacccttttctattatgttattaaaccgtgaaatgactgtcacgaggtttagctttctgcctttctgatcacttaactggcactgagccactgttaccagtactaaaatcagacctgtctcggagcccgagaaaaggcttcagctttctgagacggactctttgcttgtggtttggtgcgctgaaaagactgtggggggtggcatgggaggaaagactttataaatctggattgggtaagtgttttactgccatgagatctcattgctatgattgttgatctgaattttgattctcatttgtggttggtgtatatgcttttatgtagtagcagttgcttgcacacaaaatggcactaggtgtgggggctataaaattgccagtgtgtattatgttggtgttagatcgttttctgcatggacaatttattgttttcatctactttttgtacgaggtgttttaatctattgtaccttctattatttgcacagttaacctaatcggtcgtttggctaaacgacaggtgatcgttggttcgacgtttaatggatcaggatatgtactatgcgattctgcacttgtatcgtcttgtgtaacttgtggacatattattcacataaaatacaaacacattcctgatgtgtttttatttatccagcatatatcaaccttggaacgtaggaagactactgcagcgagacagaatctctgttcccttcagttggacattggagtattctagtattcattgtgcattaattttggaacaggtacgaatgtacaacgatggaagctgcgcggtgctgcacctacacaagcgcaaacaagccccaaccagaatccaattcggtgacgatacgcctctattggctacctctgtcaggcaggaagcactgcaggatgtgatacccctgctgcatgctagtcttcgctttgactgtattattcggcgtccagccccctaccagc

SEQ ID NO: 117279 - DNA, 559 bp, Zea Mays
gcgtctggcagggagcgcggtgccgagccaagaaaatagagaggggagagagaaggaggtgccgccatcgctgggctctggggaggggcatcgtgggagattatcggacttcatgtggtatgggcgcatcgtttgtaggcgattgggagcaccagggggattggaattcgtcgttggggcctcttcatccctgcagaactaccatgcgccagcgaggctgggcgacgggagctggaagatgaatggtggccctcgatcctgatttggacggatacagctgcgacacgcttaccttgtgccacaaccataagtcttgatccctcggtcccgtcatcatatcggttcgcggtctaatctggactcttgattcttcatcggacgtccgggtagtgtgcgggattcttcattgcgcccgaagtgcaatcgtggccgcatataggtgatcgggcgaccacggtgtgttggtaccccttctgtcgcaccgatttacaaaagagcccctcggctttcacagaatcaactcgtcgttcgtgccctgtgtaaattatttacattcgtg

SEQ ID NO: 117280 - DNA, 444 bp, Zea Mays
gcagccgaagctgctcctaccgaagcttctactttcgaggctgcagcagccaaagccacagatttggaaaacacacttactgatattgatgaaatgattttgaatatggctgaggaagaaactgctacagctgctgaggaaaccccggtcgtagtgcctgaaaaaagggagaagatgcctggaaaagagaaggagcctgccgaagatgcttcagaagaaggaaatttcaactttcaaaacataattgggcaagaattgtcaaagctgaaaaagaagagctgagggactatgccatatcttgcgggtaccagccaggggcgctgctcttcggtggtgttgccgaagagagtttaggatgccttcgggaccgagttggggcgaaggttgtcagcactttatcgaaaagtgttggttttccaaagcttgaagccgatctcagcagat

SEQ ID NO: 117281 - DNA, 304 bp, Zea Mays
caggcctgataagggcaaggtagtagttatcgagtagcagcgcaagaagcttaagaggctcgatcacggttagtaggaggcaatcattgtcgcaaccaacacaaagcaagctaagagatggattggttcatatgcccctcccacataggcaccaccgacagagactacaccgcttaaacggatgatacaccattgtgtcctcatatacccttcagagagatagcctttagcacatcctagagtcacatcataaccatagccatagttcagtgagaggatgattttgaggtggagtaggtctagg

SEQ ID NO: 117282 - DNA, 657 bp, Zea Mays
ttttaaataaatgaataattaatttgtttaccctatgttcagtggattaacttttctaattaaagttaaagtaatgttttcagtccctagttataatttgactaatcaagttttaacttagattaaagttgaattagtgtttctttggaatatctttctcacatgatttattaatcgacatagacataattttcatatttaaccacataaaactttggaaaactatatctttttaaccgtagttcagattttagtagttctcgaacctgcgatctcatagcggcgtgtagaatacccttacgctatttgttcatatgcttggtgtaatgttaccatatccattattttcttgattgtatgtattgctacgagtacaagcgaggtctcattgtggatccctagccattcaccttgggagtttctaagggtcttgtaagccctggttaacaggaaactgagagcacgtagagggggggtgtttggtgatactgtaaaattcaacacttaaacaacacaaacttggtttatggaatgttagtgaagtcaaaaccaaggtgctatgaatatagagagaactcttcacttgattgttcctttagaatgagtattgaacttaggaacaataacacaagtgattaagtgagaactctaagaaag

SEQ ID NO: 117283 - DNA, 318 bp, Zea Mays
tttgtttcttcatttcctattgcaggagaccgttcgtcagcaaggttcatggaaagagggggcctaaaaaggtccaattccccatcaggtccttcacttgctgttctcgacggtccggctcccattgcagtagcgtcggaaggcacatccgggtgcagtcgagcatacagtacatgtacttcctcatgtaaagtattacagtatacttgcaggctatcgagggtcgcactcagctctgccacacaagctcgagcttttgcttcacggtcccaagcgatcgaacgtgagtttatggcccaatcaatggccgaatcccgt

SEQ ID NO: 117284 - DNA, 385 bp, Zea Mays
cttcactgacctaaagagaactaggaacaaccattaatttgacaggaaacccactgggagccgtctgcccacgatcacggcggacaccaagcttgggagcacacgttcccgcctcaccatggtcgactagagcaaacggacgccaccgtgagcttcacaagcacacagaggcacgaaaacaacacatggattgaatagggacttaccagaacgagctggccacggagcgcagagctctgggttcgccggagacaaagaaaggggaaattggtgtcgcggcggctctgggtgaaatcgggagatgggatttgggctactcggccgtaaagaaccactgattccccgcgtacaaccaatttggagagtgggagaggagacacgacga

SEQ ID NO: 117285 - DNA, 743 bp, Zea Mays
ctgcctccttaacaaaggcaggcccttccagtgtcttttcccctacgttggaccacatcagaggggtctaacactttcgttcatacaaggcttcaaatggtgacatcttgatactggcctggtagcttttgttatacgagaactctgcatatggcaaactggactcctaattcctgtcaaaagtcaacacacaggctctcaacaaatcctcgaggactttgttgaccctttctgtctgaccatctgactgagggtgataggcggtgctgaagtctagcttggtgcccatagcttgctaaaggctcatctagaattttgaggtcaactgtggtcccctatctgaaactatcttccgtggaataccatggagtctgactatttttaagatatatccgggcaagggtggctcctctgaaggtagtttttactgggatgaaatgagctaccttggtaagatggtcgattataacccagatagaatcgttccctttttgggtccgaggcagtccggttacgaaatccatgcctatttcttcccacttccatttgggtactgggaggggttgcagtagacctgcaggcttctgatgctctgccttagttcgctggcaagtgtcgcaccaggccacatactgtgctatctcctttttcattcctctccaccagtatctggtcttgaggtctaggtacatcttggtggtccctgggtggatagagtaggctgagttgtgagcttcgtcgag

SEQ ID NO: 117286 - DNA, 382 bp, Zea Mays
gccaatttcaagttgagcccgacctaggtcagttgttgatcaagaacttgtatgccttggaacatggaagatttattgataatgaaaccttctgcttacaaagtacaactcattcccgagagctttgaggcatcgctatggatagaattttctgaggtgctcaatattccatgaatttcccacttcggtgccatccattttagtgagccggtaggatcctggccaggtagcctcttcaacgatgaatggtccttcccatggtggtgataatttgtgtcatccttctcccgccaacactcggcggaggaccaaatctcccactgcgaaggatcgatgccgcactgctttgtcgtgatagcgccttagggtctgctggtatctg

SEQ ID NO: 117287 - DNA, 502 bp, Zea Mays
tttaaaatattaaattgatcctaaaaattgtgatatccacttacatctctccttcacttttatagttttatgtaatttacattgatgtttttacatttctagaattgacacgatacaatatggttggaacctagggtataagacattgtgcatagaatagaaatcacactaggggtaaaatgggctaaatgatagcctttaattgttatgattagcccaattaactttctcttgggcatcttaatctttttagaggtatattaataacttatgtcacaagctatgatacttaattgttatgattttgctcccactaattttgatgttctttaagaacataatcccttgtacttattaattcgtaatgtagataactcatttacttagaatccaaattcctatccttagctagattgtacttttgtcttgatgaggttatagtcaaatattcatcaatcggtatgagccagaatgataaaaaatgaggcatacgagtttctaa

SEQ ID NO: 117288 - DNA, 632 bp, Zea Mays
cactgatgctcttcggcacccactccgcccgccataaagagcgaccagggaagcctagacgaccgaggtacatacggacaaacacaactttaccaaggtcgaacaccccagtgtaccacaacagagtagctccttcctttggaagctaccggtattcgacccccaccttggcctataaaaaggaagaggtcaccaaaacatagaggacgaaggggacacacatacatacatgcacacggacgacgagaccaaaagacctagaggccgaagccaagggagcctaggcctaagagcactagtcgcctacaggaccctcaacacgatgggccgcaccgagaccgaggctacgatggccaggggtcggcgcgacatagagacgtcaatgatggcaccgatgctcttcggcacccacgccgcccgccataaagagcgactagggaagcctagacgaccgaggcacatacggacaaacacaactttaccaaggtcgaacaccctagtgtataacaactgagtagctccttccttgggaagctaccggtattcgacccccaccttggcctataaaaaggaggaggtcaccaaagcatagaggatgaaggggacacacatacatacatgcacacggacga

SEQ ID NO: 117289 - DNA, 352 bp, Zea Mays
ctgcagtatggctcggacgaaagccgagtcattagatccccggtagaagtcctcgatcactgctgcttctgcgacctcggggatacgttttctcatggtctgaaatcttttgaggtatgactggagagtctcgtcccctcggtgcttgatggatttgaggtcccacggttgcgctagtttgtcggagagagactggaagttggcggtgaagcatcgactgaagtcgctccagtcgtcaatgcagtgttggggtaggtgtcgcagccattgcagcgcatcctacccaaggatgataggcaagtacgcggtcatcacatattcggtttccccagcggctcgggcggcagtggtg

SEQ ID NO: 117290 - DNA, 721 bp, Zea Mays
acagctgcgtcaaaatttgacaaaagataactacgtcaaatccatgtacccggcccttgaagcggactgccttcagcaagtgaaactgtgcatagaaattgggctgaactgcgtggagaaggaacctacaaagagaccaactgccagggaaataatctctatgtttaatcaaaaaaaggattcgagcagatctggggtatctaactgcatcgttaatgtgatagaggcgtggctatcaaggcttccatggcatccttggcctctaactttgctccgtcagacttaagcttgatggcaacagcggtatttgaaagatttgcaagggtgtccgcttgagttcctgcgatgcagcggaaggaagaaaaaaactagcagattaaaaatgagaatggggatcttgtatatctatttatgttttatccttttcatagaaaaattacaagctatgattttgatggtatagtggcaatattatgtcaatgtaacattcaatgggcatcgaattaaaatataatctaagtattttttttcctagcattgtaaggcgtagaaatatatgtcaatactcctttcattttaaattggaagtcgttctggatttgtttttacatacatgacttttagtttttggtatgtactccaaatgggtgattaaggtgatcgacaaaataaggagagggtttatttggaagggttgcaaggatgtgaaaggctgacattg

SEQ ID NO: 117291 - DNA, 510 bp, Zea Mays
ctttgataggaactgacatgcttcgcatttctaaaccaggtctgccgcatcctttttgctgttggccaataaaaactagacctgaaggctttccctaccaatgtttttgatgttgcatgtatgctgcattaccctgtgtggatttcatccagtagctgccttcttgtagccgagtgaataaacttcatgagaatccctattgcacctcttctgtatagtggaccccctatgatggtacagtgggtcgactgagttgcgatgcattctgcagctgtcttgttgtccgattcttcctcatttttatgtacctgataattggctccctccagtcattgggatctgtctatgcctaatctatagcattgcattcttcagcatgccctgcggtgatgctcggttgctgcacttcttcgacgaaaatcctaggtggaacctaggcccaactggaacccagttttgataatgcgtctgctgctgcattgcgatccctctacacgtggtggaattcca

SEQ ID NO: 117292 - DNA, 725 bp, Zea Mays
tttaagtcggcttatctgctactgtcaccaccacgtgtggacaagctcggtgccggttctgttgatgattaccgcactctagaaccacgtgctccttccactgaagataaatgggctgctctacgggcttatcaccgtgctaaaggcctatgttagagctgtgtagaaaaatggcctaaggatcatcattgtgctgagtctatcttactacatgattgtaatacccaacttgcaacatgtggaagatagcctaagaggagaaatgatattcctttgtatataggtgtgttgtccatatttatcatctcatgagaacatcacaggagaacaaataaataaataataaaaagatatactattaaatcatgtgacatgctggagtttattgtttgtgcatttaatgaaagagtaatgccactaatagaaataaattagtggcaaaagcaagatttaatacctaatttgagagtttgaaaaagagaaaatatataaaatataaagaaagtttatgtgtatttccaaaattagtaccttatggtcatagtataacttgaagataaagtttggcacaagatttgaatgtaaatttgaattaaagaaattgaaaaagggagaaaaagaaaacagaaaatagaaaaggaataaacactaactgggccggctgctaccatttcggcccaactgaggaaaccactcacgcggcccacttcacccgcgccgcgcca

SEQ ID NO: 117293 - DNA, 466 bp, Zea Mays
gggttatcaaacatgtgtgccgaagtgcgttgtagtagtgattgtttaagttgaaccgaagtgtcccaagtacatgccgggatatggttgtaattgagctaataaattataagtgttgcgtgctatgagactcgatcgatgtagttaatattgattgggcctgtagagaggtggtgacatgctgaagtaaccatcgcttcctctacggttaagtaggagtcatgtgtgatgatgttacttatggggtgaatgcgtattgaaatattttatgtcgtgtaatatgattagaaatgtgaaggatagatagggtttttcggaaatgttagccaatagatttggacaagcgtgatagaggttgagtcacttatgttataaaattgatgctcgacatgttaggtctcctaaaatgtggcgttttaggtgactcgtgtgttatccaatttaagttgagcaacggttaagaaac

SEQ ID NO: 117294 - DNA, 883 bp, Zea Mays
catgtgacatggtaatctaatctaaaaagtccctacatggacactcacatcgaacttaaaaaggcagcgacgatggtacatggagtgcttagtgtggagagtcaaggaattgggatgaccacaggcgtcccaaccagtacatgaggatgtgtcaggtcgagtggttgactaggcccttgggtggtagcgctggtgatagcattgcgaccgtcaacactaatgttggtgtcatgattgcggtcaaaggatctgagccctcctcctatcatggaggtagccgaaatcgcacatgaaagtacccctacttggtgcaccctgatgacattcgttagttgggggtatagggtgtaccggtaggggactgtgctgactttatactcacaatacttgtcggggcctaacacgattatcagcaggatgaatgtggtgaacatgagcaaactaatgttgtgagtcaagaacttagcgaggtttatctcgctagagcgtaataacatgtgtcctcttgtcgtgagatgggttgcttgaattagttaagtgattccttcatgttgtccctcccctacacacggggacaccctctgccttttatagaccaaggggagagggttacaactaataggtggggctaagacataacttatcctatcttgaagttgattatttccattatttgatgccactccaaactcctatagctacacatcctaggctagagatgatgggatctgtaggtatagatcgtacaacacgtacacatacttgaaattgtggtaagtgagaatgttcactttccatgttgctataggatacttgggaggccatgagcacatcccatatgactgcaggttgtataaattagggcatatgtcctagaagtcca

SEQ ID NO: 117295 - DNA, 406 bp, Zea Mays
cagcaaattcagcaggacctgccacctgaagagcagcagatcagtaatcatctctctggcttgtcttcagatagttcttttggtcccatccagggcgctcctatgcagaatgggcatattttggatgacctgggtttggttgggccggtggtgcataataatgttcctgttattcttgctctgggtgctgctcctcagaatgggcctcaggaggttgacgacccaatttatcagggggaccaccaagaattggaggatatccttctcccagatgcccagccaggggagcaaataaacaatggtcttaacaatgtggagatgaattatatgcttacccaggattggcagtcagaccctgtttttctaatccacatggaaaggaaaaggagtgctcaattatacagga

SEQ ID NO: 117296 - DNA, 297 bp, Zea Mays
ccatgcatggagctgctgaggaagcccaaggcctggccaggtcctctctcgtctcctctgtccactcccatggtaggagtcagtagatggataggacagtgtagagcaggattagatggatggatggatggatgcatgctcagagactgaaaggatgacagatgcgagagatgcttgatagatgtttggcacttataatggcttgcttggtgttgccttgtcgaggtgacagcatgatatttaagtgtgccatacaacttgattcggattgattgcaactttggagactcccttttg

SEQ ID NO: 117297 - DNA, 359 bp, Zea Mays
gtccagttatttcttacgtcaaattattttttgtttttttcaatgaccttcaagattgttcttcttgattttacttatcaactttttcttcaagactattcttcaaatcaaatgtagaatgacacaaccttcagcagctgaacctcaaacaccagtggttccttggcataagacctcagacttcgcctcggtctaaattataatttgaacaaaaaacaagcataagagtaaccataaataagctgtattgtataaaccatcacaattatgcatagtttacattttggagtaatgtactaatgctccttcaaatcaaatctagataaagagtacaacatcaagatcaagctcctcttcta

SEQ ID NO: 117298 - DNA, 309 bp, Zea Mays
aacttaaggcggtgcaacatgctcatgcttacttgactcggggtgaccactatgccccgctaacagagcaatcggcttaagttagcaacaacttaaggcggtgcaacatgctcatgcttacttgactcggggtgaccactatgccccgctaacggagcaatcggcttaagttagcaacaacttaaggcggtgcaacatgctcatgcttacttgactcggggtgaccactatgccccgctaacggagcaatcggcttaagttagcaacaacttaaggcggtgcaacatgctcatgctgacttgactcggg

SEQ ID NO: 117299 - DNA, 562 bp, Zea Mays
gcttagctcaaggacggtagcggaggcttagctcgacggctagatgtgacggtaagtcaccccgtgaaggtatgtctgctcaaagctcccttctgtgctatgctcctcagatcctctctgctcctttatgttttcttaaagcagtatgacaatgctaatggtggtgttccatattgcagtaccaatgcaagatatcactgcaaggagcaggcagcaggcgtgcagacttcctccactggccgccggatctagcaccctagtgctcgcagcgccgaccaacaagcagtacttgaatccttgttggtgatcagtcttcgcaaacatatgttcgcttatgacaaagactctatcatggcttcacttgattgtacgaagatttggtatttcttggtcaagcttcataggtcttgagacttcataaaaagtcatcataggtgaaacttcatgtcctaagactctgtattgtgtctttgttggtgaagcttttgagcgtaaaatgatgatgattgaacaactttgacattcatatgatcttcttatcacttttattgctttattcaaa

SEQ ID NO: 117300 - DNA, 670 bp, Zea Mays
ttctacaataaaatctgctacaacccgacctttcatagatttcaataattcataggccaagtcatattctatgagtgcataagcccatttaccaattctaccactcataatcgggttttgcaacatgtacttgatcacatcagtttgatgacaatggtgcaatgactagacagtaaataacatctacacttggtgcatgcataaaacagacataagcataacttctcgataaaagtgtacctcgtttcagcatccaccagcctccgacttaggtaggttaccacatgctcctttcctccggtttcttgcgtcagaacatctccaataaccttatcttcaactgcaatgcataatatgaacggtactccaacctatggcgcttttaacacggcaaccgaagacaaatactttcaaatgagatcaaatgcttcccgttgttctgctcccaagtgaattcgacatcattttaagccgaaggataggagtgaaggcatcatttttcccagctaggttagaaataaacctccgtaaataatttatcttgccgaggaacttctgcacttcaaccttacaggtcggaggtcccacattccaaatggatttaattcggtcagggtctatctctataccatgttcatgaatgatgaatcctaagaacttaccagccgac

SEQ ID NO: 117301 - DNA, 486 bp, Zea Mays
ctgacaccacgtgcactcgtgactaggttggtcgtgtgacggtgggtggttgagataaggttctcgtccttcatatttattgctaggggtgactttgtgatcataaggcgttaatatagccacaactgaggtcacaagcatacccgtgagcgctatgcaaggtgtgtgtggctataatgtctaccaacaatgctggactcgatggtgtggagcatcaatgtagccacgtctgaagtcataggcatacccattaggattatacaatacatggctacaatctacgatgactatcaactacaccgtactcgatggtgtgggctctcacactcgccactatggcgcgtcacactcgccactatgacacaccaaaggagtgcaccatgtacgacataatagctacaaccaaatagaaatagttaaacctctgctagatagggctcactgtccatacaaggctataactatcgtcttacttgtagtgtaaaa

SEQ ID NO: 117302 - DNA, 438 bp, Zea Mays
atttaatcaccaaaaccctcagtcggggttgattgcacttacaatctccccctttttggtgagtgataccaaaacaaactggagtagagataaaaacaaaattactggcgagattgtaaatacttgtgtatgtgtggctccccctaaatatgtgcatgagttttgtgatcttcatattgacttgatatatcaattatgtaacatatttggagaaagttaataaacaacacattacacaatcattgagggatgcaacaatattatataagatatgatgatgtaaaaatgacattactctaacaatttcatcattgcatagcataaaatatatgatggaactagctattacaataatgatcatcaccacataatattgttcatggccctaagccatcatcacaagcatagacaaatgctagagttattacagtccatagt

SEQ ID NO: 117303 - DNA, 438 bp, Zea Mays
cacaagatactgtgggggccattaggtatcgatcgagagagcgcgagttggatcgatcgatcgccgtctgatcgtgttattacccccttcatcgtcatcgaacttagtcagcttgctaattaaccgtgtttgcgcgtgacaaatagtaagacgtgtttccatggagaaactgatggtggatggctcagaaatggaacgacgcggcacgtagcattcctacacgtccgtcaagtacaactacaggctagcttgttcgttcggtcgttggacaaatggctgcatgcagctggagggcatgcacgaaactagctagtacctagtagtgcgtatgccctggatcatttcgcgacgtgcactgacatgcatgtacaccgagcggcggcacggtcgatgcaggtgtgtgtgttcattacaggctaccttttattttgatgaaac

SEQ ID NO: 117304 - DNA, 757 bp, Zea Mays
gacgctttggcgtctctcgctggagacagccttagaacacacacatttcagaacttttagaagtgaactcattttatttatgtgcttgtgaacaccttatgtgcaactcagatttcagaacacatttttgtgcaactcagattttcagaacacgtgtgtgcatcacagaattcacatttcataatacatttcagacagtttattaaatataagtctacaatttaataattgttaaatagcctctaaatttttatgcccgccaaataatcacaccaaatcagccatcccgccaccaaattctagcgtaatctatatacaccatcgcctttaactctagacctaaaagaaattctacaaccaaccgcatccaccgcgccatccgtccacctcgccgccgcatccaccgccccatcctcgtcgccacagccccatcgtccacctcgctgctgcatccaccgcctcatcctctcgtcgtcgccccatccgtccacctcctcgtcgtcgccccatccgtccacctcctcgtcgtcgccccatccgtccacctcctcgtcgttgccccatccgtccacctcctcgtcgtcgccccatccgtccacctcctcgtcgttgccccatccgtccacctcctcggcgtcgccccatccaccgtcgtcgtcgatccgctcttcgctgcctggccgagattaagatgccccctggaaggatggttggagaaacaacacgcacagaccttgctggtggtaagtgacaaaat

SEQ ID NO: 117305 - DNA, 366 bp, Zea Mays
tttgagaaatatagctcgagatatcatggcaattcctgttacaactgtggcatctgagtcagtctttagcactgggggaagggtaattagcccacatcgtagtagccttgctccaaaaacagtggaaggattgatgtgcatgcaagcgtggtcacgtgctgacatgctaggtgataaatcttgctttattaatgcattaatggctcgtttggaagatgaggaggatgaaatggtaagaacaaacacttactctttagcatcttttattgttacatttgtttgttaaatattaacatggatttatctattttcactctttttactgttaggatgatcctaatagtatgataactgactgaaaattgg

SEQ ID NO: 117306 - DNA, 336 bp, Zea Mays
gccgactatctcgtgatgtgttccatcgcagccttgtcatctgattcttcctcgtttcttatgtatctgatgattggctctctccagtcattaggatccgcctctgtctgactcagaacgtggcattcttccatctgatttgtggtgacactcggttgttgtatttcttggacgaaaaccctaggtggaacttgagcccgactggaccccagttttgacaatgcgtcagccgctgcattgcgatccctttccacgtggtggaattctaatccttcgaacttgtcctccagcttccgcaccgctgcacaatatttgtccattgagtcagtcgagcaa

SEQ ID NO: 117307 - DNA, 1017 bp, Zea Mays
gtctcttgcgtcagaacaaccccaataaccttatcttcagttgcaatgtacaatctgaacggtactactacttgtggtgcttttaagacaggagccgaagacaaatattttctgatgagatcaaacgcttcctgttgttctgcccccaggtgaattcggcatcatttttaagccaaaggataggggtgaaggcatcaatcttcccggctaggttagaaataaacctctgtaaataatttatcttgccaaggaacttctgcacttcgaccttacaggtcggaggtcccacattccaaatagattaaattcggtcagggtctatctctataccatgttcatgaatgatgaatcctaagaacttatcaatctacactccaaaagcacatttacgtgggttcattttcagaccatactgacgcattttatcaaaggttttgcgcaaatcagctatatgagaactaaactcagccgatttgactacaataacatcaatgtagacttccacagtgtttcccaacagctcgtgaaagatcaaactcatagccctctgataagtagcaccaacatttttcagaccaaatgtcatgacaacccactcaaataaaccaatgacgcctggacatataaaggtcgttttagacgcatcttcttctgccatgaaaatctgattatatctcgcattgccatcaagaaagctaataattctatttcctggcgcattattgatcaatgtgtcggctatgggcatgggatattcatctttaggagttgctctattcaaattgcgaaaatcaatgcatactctgagcttacctgattctttattctctactggcacaatattgaagacccactctgcgtatctgtaaggtctaataaaattagcttctagctgccggtgaatttcgtcctttattcgtgggagaaggtctggatgaaatgttccagctttctgcttgaaaggtctaaaaccggacttaatgggcagtcgatgctctactatctcacagcttaaac

SEQ ID NO: 117308 - DNA, 929 bp, Zea Mays
gtgaggtagacaagacaaaggaaaataagatgcaaatgattcggcagatacaacggatggatgaagcaacaagaacttattatggtgaagaacagggtgatgattatgatgctaaacttcaggctgctctacattagtctcgataggagcatgaatttagacaaagagctggtgcacagtatgataggggtggtgcatcttggtcaagtcagcgggcaccgcaagtgtttggccctgaaagtgaaatgagcttaaccattttctaggtggcatcaaactcctgctgctgtgtagtacaaaggtggcaaggagggcactagaatcgaaggtagaggccttgtcaaccatggtgagctcctcaagtagaagctcattacgaatggtctaaaacagtgggaacgatgtggtgcacttgatgaaggtcttcatgtgctcgaaccacttattgagactatgaaagaggttgaggacaagcgtatgatcgggcatgacttcgacaaggttctctagggcattatccatgcccttcatcttgtggaagtagtcactgatggagatatcaccttggatacaggcgcaaaaagtgtgttgagatggagggcatgagtctcctggttgcctaggaagtggtgctcggtggcgaactaggcatcctaggccatgccatcatcaaggagaaccatatcttgtatctcaaaggtgattgtgccaaagagtaaagatagtacaatgttctccatgcaccataatacaggagtggaggccttagcagtgtcaaagtggatgtggttgtcaagggcataacgttttagggtgaggaggacgaggtcgcgccattgagggtagttggtggagaggggttcaggacgacaacgacctcaaactttaggacaatagtggtagattgttccttctctagggctttggct

SEQ ID NO: 117309 - DNA, 851 bp, Zea Mays
ccgacgcctccttctatcccccgcaatgagctagcatcacacgagtgggtataccttccattgccgccaccgagcttccatagtaggtggctgacctccatagtatgcggtaagtttccaatcagcgcctccgccccccatccatatataataccccattccaaccttggcgcaacctttcaacgacgatgcctaccttccactcaacatgcccaccattactgcttttaaaggaaggacacaggtgatgccgccaacccacccccattccccatgcatcttccctgtcatggatccacatgaacaaggtactgccagtttgttttgaattgtgttctactttctgcattttagatctgatgcacaaacctgattttgactgtcccctgcgcagctaagttcaaacctgaaaagctagaggggtggatgataatttgatgatagctattgaaactggtggatgatagttcaaacctgaaacgagacaccaatttattctacactgcaatgaaattttaacatgtggttactaaattttgttggattcatcaaacaaattatatgtgaatccctgtaatgcttcgtcttaattggtcactaagatgaaatgcctaattttttggtttgagtactttatattgttctcctgagatgttttttagttcctgtcccagagtgtctcgatgtattatgaatttgtgttatgccagaaacatgcattgtgttgaaactgtgttatgccagaaacatagcagtgtgatttgcttccagcctctatgcttaacctgtgagatgaacatgatgtttgtctctctcactctctccgtctctttgtcacaatagttataatt

SEQ ID NO: 117310 - DNA, 408 bp, Zea Mays
tatccactgatctgaatcattcgttttgatggtgtgtgtagtctgggtgtattttgtttggtggatttagtggaggttatgggtgtggaggtgatttgattgtgtgggttttgcaaagtttaaacttgtggattatatagtggtcggtgtttcaaacatagctccgacaagtaaatttgttcatgcatattctaggttccggatggtgtgctcagaggatgcgagatttatattgcttcgagcagaacatccctacatccagttttctgaggttcacgctacaggcactgttgttgctcaatactcatggtaggggttacaagcgggagagagggaaaaggagatcttaagtatctaatgcatggctagacctaagaactacgggactagagctcttcgctaagcctt

SEQ ID NO: 117311 - DNA, 372 bp, Zea Mays
atcgatgtggtagatgttgccttggaaccagatttgacttattcagaacatcccattcgagttttagaccagaaggacaggatcacccgaaaaaggactcttaaattctataaggtacaatggaaccagcatatggaagatgaagctacctgggagactcaagacttcttggaaaagaattttcctaggtttttagcttcatgtaacctataagatatgtgcattagttgtaaagttggaataaatcccctaccaccccctgctctgtaagacaaaataaggaaataaagatgtgacgtgtttccttttccattaattaccctaggaccttaaatctcgggacgagattcttttatgggggaaggatgtaac

SEQ ID NO: 117312 - DNA, 324 bp, Zea Mays
gccgtgattccctttcttcccgaggagtgctactccccattgatcacttcctaggtggtctggtaggtcatcgctatgtggcttttccctagggtcctcactatgaggatgttggaaatgaccactgcatagagaccatctgacgtacccaaacctataccctctgctctcaggaaaaagtcgtgggacgacgcccgtacctagatccctgagcgagaatataggagccataacagatgtcttcttccccaatgaccaaaaccaacacccaacacaagacttccctaattacttggccaagggcatcgcataccaccctcatgg

SEQ ID NO: 117313 - DNA, 941 bp, Zea Mays
gtttgtggttactcttgttgatcctgaaaagaaggagaaagaaaggtcttcccagatcctatgtcaggccatttttcagtactacacgaaagacatttctcacctgctcatattaatccttttcaatttatagggtggagagagagtacaaaatcacaattcgaattgccgggagaacagatttctaccaccttcagcagtttctgcttggaagacagagggatatgcctcaggaaaccatacaagtacttgatgttgtcctcagggagtcgccgtcttggaagtataatacctacactcaagttcttgctctgaattttgtttgagtaatcttttacccagggtactgacaactctttggtaaaaaaattgtcactgcagttatgtcacagtgtccagatcctttttctctacaacttttggtcacagaggtgatatcggtgaggggcttgagtgttggaggggttactaccaaagcctgcgcccaacacaaatgggcctttcgctgaatataggtaataccctgtttatgtcgttgttcctcagcaaaaaaatgtttttgttggtctatgccttttgtttgatatattttggtaattaactttggttataatgttgccttttcagatatttcagcaacatccttttttaagcctgtgacaattatcaaatttgtggaggagttcctgaacctgcgtgatacatctcggccgttgtttgacagagatcgtgtgaaggtattttttacacaatgacaatcgcgataacttcttttatagaacttgtacagcacgccatcctagagaaatcttgtatggctgtaactgtgttcagataaagaaagcattgcgcggtgtccgaattgaaacaactcaccaacaggaccaaatcagaagatacaagataacagggattactcccatccctatgagccagctgat

SEQ ID NO: 117314 - DNA, 397 bp, Zea Mays
gctcacaaaagcagaaaggctgaatgagcttcgaaggcagaaaattaatggtagcaggttggtacaagtagtaaatgtcatgcaggtcagctgggaccgtgtccaacgtatatatagataagaaggcgtgggagccaaggagtcgctctacttctacttgttgtcttgtggaccacccatttttgcattttttgtattcaaacaatgtgctcaaggaaggtgttttttggacatttggcataagacctttgttgattctgtggcccaagctcattatggaaaacgaactaattccatgaggggctacttttgggagtatgccttagctgaaggtccttagactaacatgtttttttagttgtcataagaatttccctcaaattaaccattgtcaaag

SEQ ID NO: 117315 - DNA, 635 bp, Zea Mays
ctcttacatggagtgtttggtggtgagtgagccccaccaacagttgatggttgcagagcatcgagtataatgatgtaagaatgagcagcggttggatcccctcgatgaaggttgaggtacaaattagggtcttcaagtgagtcttgcctaacatttgtgccttcattgattatgtcatgatgcaacttctcctccatttcacgatgatgtatcttagcatgattccaatgataaatatgtaaaactaaaggaattagggtttaggttgataacaagttgacatgtataatatattatgtggattagatgttaatcgagagataagattgagtgtacatagatagagtttagggcttaggttttagtcatgaggtttagttgacatagatcgagtttacggtttagggtttagtaacgagattgagtttaggttttagggtttagtcatgagattgagtttatggtttagttgtgagattaagtttcatgtcaattttgtttcacatatatattcaaccacaaaaaatgatccaagggtaatatttacatataacaagttgaaaatggagagacaaaatgtcgagtacaactaatacttgtttaacaacattgacaaactttggatacaattcttc

SEQ ID NO: 117316 - DNA, 741 bp, Zea Mays
accccgctcgggcaccctcgggggctgggtcatagtctgcactgcccacttgagccggatcatccccggcagcaccctcgggggctgggcagtggcttacacttcccacccgaaccaagtcatccccggcaacatcctcgggggctgggcatgtgtcaacatcgccctgggggtccaggttctctgcggtagccacttctaaggctgatgggccctcagttacttccatgggaccagaacgatccaattcagtctcccgaccctcgagatcgcgctccaaggtcgacgaggcacgggatgacctcaacccagcatctggcacatcagtacaaacttccatcacaccatcatccactggctccgataacaaatcctctggaaccatatcctcaagagcctgatcaaaattggccagggacagttcttgcaggccaatgagagcagacaaagcaggagagggaactccactgctttcaccgctggcgatgaactgtcgactattttttctgagtcaaaggaacttcatcttcctcctcctcatcgtccacattggcaacacaagcagcacacccattgggttcagcaacagaaggagcacccacattgggatcagcagcggattgggtacacccattgggttcagcatcagcaaattcagtcacaggcatttcttcagcagcaggaactgaggtaccaacatcccgatccaaactagatactcgccgaaggcgtctctttttc

SEQ ID NO: 117317 - DNA, 373 bp, Zea Mays
aatgcgaggctgaaattctatatcatgagctccgagttcgcatgcccacttggttgttctcccaacagcttccttgttgtggagtatatctcctattgggaatcctgtgactactatgactttgtggtcgtcaaagtagtgtcgaagcttgcgagcagttagaagtactgcgtataatagcttctgaacttgagggtaccttatcttcttgggaccgaggacttcactaataaagtaaactagatgttgtactgtgtatgcgtgcccttcttcttcccgctcgactaccagcgtagtgcttactacgtgagtcgtgcaggagatatatagtagcaggtcttcagccagctgattggaggtagctcggtgtggc

SEQ ID NO: 117318 - DNA, 306 bp, Zea Mays
agtcttgaataatagatattacaataccaaaatgcaagctctagcgagtttggaagcatagcacagtggaataaatctagcccaagccacaggcacactgggtgcagacaaaacccccttctagtcgaacatagaggaaaggaagtctttagtagttgaaaaacataattaaatatgggtgaatacttaacgtcttctgcaagcccatcccgcccgtaaggaggagagacctgtacagtacatgcttaatatggtggagttgaggtcactctttttttccagagaaaggtgatacttgatgttttt

SEQ ID NO: 117319 - DNA, 342 bp, Zea Mays
cctaaaggtgtaaatgaaccaagaattgtttcaaaggcgcctaagagtagaaccaaattaagaaaacgatccaagcaaagacacctcttgatgtaaatgaatcgagaaatggttcaaagatgcaaaagtgtgcaaccagattaagaaaacgatctgagcggagacaccgcaaagtataaaccaatcaagaaatgattcaaagatgtctaagggcataaccggatcaaaaagacgatctgagtgaagacacctaacaatgcaaacaaatcaagaaataattagaagacctattgagcgcaaccatccaaacaaagacaacaaatgacaactaaaaccaccgac

SEQ ID NO: 117320 - DNA, 796 bp, Zea Mays
agagaagtagaggctccgaagtctcttttttggggtggaagtggagctttagaagctacaaggtggagtcctaactaagtcttggctcagcggcggggctccggcctcatggttcgcgtcagcgctcctcttcctcatgtttgtccttgcgggtgtgtcatctgaaggcatccaagattgtctggttgtcctctgaagtgtctgatagaactccctccaactcccttgcctagagggaaacccctcccttttataggtcgggagaggggtcggccagcgatggcttccatgggaaggagccgtaaggcaagggtaattccagcgttctatctagggtaaagccatgtgtactcatggggcccaggcttgtctatttcgtatttaccatggtggatggcgtggggctgcgatggtctcagacaccatcattttagctatgtcgacccctggcctttgtagcctaaggctcgacatggctcgtcatgtggtggactgtcagaggtccacgcactcaggcctaggctgatatgccatgaatgcaccacaggcggaggggcgcggggggctttaatgcaccgcagtccgggaggctcataggtcatgagtccaacgcgactagaggggtcatgagtgggaagtggatcggtgcctgctgaaagtcacctagaggggggtgaatagacaaaacctaaaaattataaactttgagcatggacttcacctagggttaggattagaaatgagtaatgacgaaatcatagtgcagaagagagttcttctttctatgagttgctca

SEQ ID NO: 117321 - DNA, 288 bp, Zea Mays
caaaattgggacaactagtatctcgatcacaaaatgcctttatcaagggaaggtgcattcatgacaattttttatatgtccaaagagtaatccagaagctgcacaaatccaagaagccatctctcttcatcaagttggacatatcaaaagcttttgactctgttagctgggcatatcttttggaggtgctggaagcttttggtttcggtagaaaatggagaaattggatttcagctatccttgcttcctcttcgtcgcgtatcttcatgaatggcagactaggaagaa

SEQ ID NO: 117322 - DNA, 350 bp, Zea Mays
cgagaatacattttactctagaaacatcgtttgatctcgactcttttctacactctcaatataactagccacaaaatatgtacgtgtccttggtcatcaatttcttgcaccggtttaatgaatgttaccaattttatcttataactaaataaaggcaatgttcgatgaagttagtaggtatttgtacattcagcttcaggaaaagttgcatttagaaataaaggtacaacgagggcatttggataattcgttttcttattgggcatgcaattatatcaatacctagatcttgaacataggcatctatcaccgctcgaggtagtaaacacgagtacaatggctcattctta

SEQ ID NO: 117323 - DNA, 417 bp, Zea Mays
tgacctcgtgctggcttggacgtcttcggagcgtggtggattcctcgccgtagtaaagctccaccgcggaagcccctgttccacgtggtcgggcctcgtcgtcgcgccaaactcttggtatgatccccgaccacttttaccgtgttgttaggagtgcattgcacctgtccgtagtgattcagagtagcgtaacgccgagttgggggaactcgccggacttctcagccgtagaagcggcggcgctgccatcgcggggtaggaggggaagggtgtatcattcgaccgttagatggccgctgattcacggtgttgatcgggtacgtcggttttgaatcgaacgctcgtgcttcgatcgggattcgtaaaatactggccgctgatctttgatctgacgattgcaatcgcataccggttcgc

SEQ ID NO: 117324 - DNA, 765 bp, Zea Mays
tctcttgcctcgatatctagaaggtatggtaattgtccattttgcctttaaccaataaaaattgttgcatgttctgcccataaaaagacccttttctccaaacaaccttgtggttaacaagtgaaacccaaaaaaaatcacatacttgtgttggtgtttttatagcccttgtgtgtttcacccttgaatttacacttgcacagcttacagcttgtagatctctatagcttgactaccagatcgacccaagcttccttgtgcacatgtttatgtcaaaaaaagaaattttgtttggtgtctagttgtgcaaaccatgttcaagccatgtttctctccgtaaatccttgccccaaaatttcatagcattctgctgatcatcctagctgatcttgtttgcctacctctccttcgttcggatctagtaatcttttcccttgtggatcatgttgcgatcttatccgatgaatctctacatcattcgtcaagttcaatcgagtcatctggttatctgctacaacccctttctcaagtaacgggtgttgatcaatctaaacctctcattccggtagttctcatgacgtcgtttaccaattctatctatcaacggtgtatctgtttagttcaatggattttgctgttgtctttggttctctcatgtctttacaagtttatcagtcttaatctcatagttgagtccctcgatatcccatctcgtactagtctcttgccggataatcttcatggtgatcatggaatagttctcag

SEQ ID NO: 117325 - DNA, 448 bp, Zea Mays
ctcagattggaccagcggcgatccaacgtggatgtccatggaagcagcagaaagggagccagaggaactcctgacatctaggtcactggcctctagggttcagaactcaagaagacacgtcgacataaatataagatttgctccataagtcgggcgcaaagagtgccagatcataactcggaaaagcaagaattgcaatcatcactcttgcattacctctaaaattcggcaagccttcaagcacgcgaacaaaaagcatgcaacagtggttaagtgaaataactgtgttcttcattcataaaggggaattcatcacaaacttgaagccgtatcattatgagtcggcctatttcaccactggtcactacattacattacactactctactacttacactacaatatactaatactactctaatccactactacttactactacttattg

SEQ ID NO: 117326 - DNA, 832 bp, Zea Mays
tgcctcccaaagtattattcaaaatattaaattcaccttcggtggagttgatggaaagggccattttaacagtctcccccacatacaatgaagattggaggacatatatcataacttttcttcaagtgaatcatccaactggtgacgaagtatatgccaaaagaatgtaagctagaacaagaccatacaagatgataatgtagaattatggggaggctacactagcgcaaaacaaaatttctggccccataaaccacaaactactgcttttataggtcattgaattaccactagatgtgcagggcagcggatggtcttgatgtagacggatgcgtcaagcagtgtcgtgcaatcatcggtgtccttcacgtcctcgcgcggttcgtcctagtgctccagatgcagcacctccgaggtatccacacgtacaaggaggaagcgtcgcgtatcaaactggtaggctttgcgagggcgagaggagagtgactactagtttgctggcgacgaattaggttaaccctaactatgccccacgccttattatataggcgttttggttagcttctgacttcgaggcccatcaacaacccgaaaatctagtctaattttagatccaatccgagttaggcttccttccccttaagtgtgtgaccctataggttcacgtacacatagagatggctcgagtactcttacttggtccaataatggacagctgcctctagcaagacatgtcaactccaatgcacacgtaaagttcatatcagacgaacctttgcaacattatgtacatcttgttccctttgtatcacgataattggtctgactcgaa

SEQ ID NO: 117327 - DNA, 786 bp, Zea Mays
tccataaaaataatagtatcatctgcatattgtaaaatagataaaccatcttctactaaattaggaatgacacctgaaatttggttggctaattttgctctctttactaagatagctaacatatcaactacaatattaaacagaattggtgataatggatctccctgtctgacacctttctttgtttgaaaattggagccaatttggttattaacttttatagccacatgccctccttgcatgaaagatgctacccattgtcaccatttttgagtgaagcctttcattcttagggcctgttgtacaaaagaccaatttatcttgtcatatgccttctcaaaatcgatttttagaatgactccattttgtttcttcctatgcaactcatgaattgtttcatgtaaaactatcactccttccatgatattcctgcccggcaagaaggcagtttgtgtcggactaattactttttgagcaattttagtgactctattcgtcgctactgctagttgttacacatcctatacctaccatcggacaaacccaatgataccacatggactatccacttgaaaactagccgctttacaccttttgtgatcactagattggtttggcggtcatagagtagaagcacaaatctaaggtgtccctatgcctttttagcacaaagttagttcagtgaccaccagattaatttagggtagcaccagactatgatagtgccatgtggttagctgttagcatgacacatttttcgtattttgagtatatcttttagctctg

SEQ ID NO: 117328 - DNA, 610 bp, Zea Mays
attttaataaggtttgaaaatggtttgaatcaaatttcatagagaagcttgaaggcgtgtttggtgcaccatcggattgtttcgattgttgaagcattagattataagttgcggtgaaggaggaatttgtagcaagattggtgtggtgctattgtgcctaatggtgggacctctggccctgatggtgtgactactaggggcatcggattttgcagatgttcctctaggttttggcattggatgttgtgatgtcactatttatgcgactactctagtggctttgatggtggtacgaataacttaggtagtccaaccatggagtaggaaacgtgtgaaagttctctagtttcatatgtgcatagcatatggttcgattctgagggtgctcggatcattccgatggacccctagacatctagtggtgaagattgaacatggtggtcggactagtagtagttgtggttggactaccaatggagccacgctcccactaacgtgtggaacctgttggggcaggtagatattggaggagcacaggcgaccattagcaccctgatctagaatcgtcgactgtgcaaggctacacaaggaagtcctaaacaactagttt

SEQ ID NO: 117329 - DNA, 555 bp, Zea Mays
ttggatgtggctgcggcagagacttcgtcgcgtctggagggtgctggggatcttcctagtgcgaggactgggtgcaggcgtcgaaaggtggtgggaaagcgtagtgtgggggaactttcgcgaagtggtaggcgtcgtcgtatgggaatggagcgtggccgtctctgagtagaccgggttggtaaacgggaattgttgacctcgccgataggggcgaaggccagggcgatctacggaagctttttgagggtgaagaattgaggataatgatgctcaattacagggagatgggtatcatcccgaaggttgagccgatgtaatatgtgatgccctcgttgtgtgtatgtgactgtaatttgtaagtgatgtggcctgttggccgcattcgtacttctgtgttggtttcggctgcacccgtgggcgagtttgtgcgaagtgtctaaataaaggacttcgattaacacacatgttgtgctattccggatgcacccttaggcaagttttgagcgggttgtcttttaaataaaagacttcgattagcgcacttgttgtgct

SEQ ID NO: 117330 - DNA, 610 bp, Zea Mays
cggacctaaaagcctttcccaccagggtttgtgacgctggatgtacgccacattgcccagcatggatctcatctaacagcttcttcatagtagccgagttgatgctcttcatgagtacccctcctgcacctcttctatacagcaggccccttataatggtatagtgggccgactgtctcatgacgctctctgtcgcagccttatcatccggtttttccttgttttttatgtatctgacgattggctctctctagtcattgggatctgcctctgcctgactcagtgcgttgcattcctccatctgatctgtagtgacactcggttgttgtaaatcttggatgaagaccctaggaggaacctgggcccgactagatcccagctttgatagtgcgtcagccgctgcattgcgatccctttccacatggtgaaattctaatccttcgaacttttcctccagctttcgcaccactgcacaatatttgttcattgagtcgatcgagcaatcccagtctttgtttacttgaattatgaccaccagtgagtcaccgtacaccattaatttcttgatgccgagtgaaacagtgaactggagtgcatacttgagttgttc

SEQ ID NO: 117331 - DNA, 595 bp, Zea Mays
taccatccaaccgatcgcaatgaggcaaaacaactaaatcataggagcacggacttcgcactaatcgagggtcagctgtacaaaaaggggatcagtcagcccatgctgaaatgcataaccaaaacctaaggcatagaaatcctccgcgatgtccacaacggaacatgcggctcccactctggacctagggccctcactgccaaggtgattcgtcagggattttactggctcgcaataatttgcactgccaatcgagtcacacggtcatgcaaagcatgccagaaattctctcctcgctcaggccacccttcgcaattcaccaagctgatcgcccatacatggccgcttcaacgctgggggttggacatcgttggaccactgcccacagctcaagggaatctcaagttcaccttcgtcgccattgaatatttcacaaagtggattgaggccagggcagtctccacaataacatcaaagaccgcccaaaaattcaactgtcaaaacattgtctaccgcttcggagtcccgtccgaactcacagtcgacaacgacaagcagttcgactgccaagactttagggaattctgctgttcca

SEQ ID NO: 117332 - DNA, 533 bp, Zea Mays
ccatgtttggagaggttttggaattatgaaccggttgaggtgagtgagagaggaggctctaaacactgcggagagactaaggcgagaaaggttggagtgagggaatagaaggggagcgacatataaataggcagttgagctggtccacaggaccggttcaaccgccctccaagggccggttcaaccgcttctgaccagtgcggtcagagtgccagaaacggtcagagggaaaacgccaaaaatttaaattcctgacgcgactgcgcaataaaaagcagattcttcaaacagtaaaagctgaaaaagtaatgcataagattctgaaaaggtgttccaaaaagtgactgacgcgacccgacatggcattaattaaagctgcagagattccaagcgccacaaaagtcaaaaggtgctgcgcagatgtgaccggacgaccaaaaaaatgctgcacggctgagaaaaaactgttgcgcgacctgacactgcggcgcggctgaaaaagctgcagcgtgacctgacacggctgacacggg

SEQ ID NO: 117333 - DNA, 516 bp, Zea Mays
catgaacggtggaatagaaaacttaatcttagcaaatggatcatagtctggttcaggattatgatgacgatgtctaccattaccttccataccttgtcgattacgtgcgaggcattgtcgcagtggtgcataaacatcgtcgtcatcgtcgtcgtcgtccacaagagagtgagctggggctagagttggtggtgggggacgagcctccagtacgtccatgcgcgtaacaagtttagcaactcgtcgatcaagctgctcataggatgtcgaggtagagtcctggtattttttaaaagcttcagtcatcgcgtgcatcatctccttcaattccatttgagagacacactcattgtcgttaaatttaggccccttatccttgtccatttgattctttggtcctgtcattgttagcacaaaacagagacaaaaaggcaacaaacaatgtgaaccctacaactatctctcagggtggtggtggaggtggtggaatacaaattatgaagcgtcttaccgcgc

SEQ ID NO: 117334 - DNA, 492 bp, Zea Mays
ctatctttcagcttcttggcacaatccaaggattttttcgtaatatctctccttcgatttccgaagctcatctacattcttttgcaatcttacgctagtccactcgcttatttcctgttttgctttagccacttcaaaatcttcattcttctcggcaagttttttctttaagtttttaatttaggctctatgagcttcggactgcatggcaagattggcttcactagccttgactctgtctaccaaggaaagcataattttatccttttctgtagcttcattcctcagtttgataaactctgatcgaaggttaccaagggctatttggcagctttcatcctcagcaatcttctgcgctctcaaagcgttgctcagaattaagccctacaaaaaagaggggagacaaaggatcagcacaagaataaaagacacaaaaaataatctgcttataagtccataacttttgtaccttcagactattgtacgcaaggc

SEQ ID NO: 117335 - DNA, 560 bp, Zea Mays
caaccacataaagaccatagcttagtaaattaaaccaattaaacaataagagcatcattgaatcacataaagcccaaatatcataaccacataaagtccacatcttactaaattaaataagttaaacaatataggttttactaggccgtgtcagcccaagcccatggtgggtctgacgggccaggatatgaggtccgactaaaacccgtctcggaccgtgctagtttggcttatattatttcgtgctaggccgtgttttggggttctgtttttagaccatgcttgtgttgccccaaaaagtccaacctatatttctagcactagtcacagacaccggagaaccagctgcgaacgagagaagtgttctgggaagcaagtgggctagacgtcgatcgacaccaccacaccgccctcgcagctagaggctgttgtcgttgctctccgttgggactagggatgaaaacggacggaaaaacctctctcccgtttacgtatccgcattttatcatcgtaaacgggatcgagtccggaatagccgggaacggaaacgggagcggaat

SEQ ID NO: 117336 - DNA, 803 bp, Zea Mays
aaaattataggaactataatgaattaatttggagctagaatggattttctatgaattaaataagttcttggaattattttaacactaaaaatcattttccaaatgaatttcttggttttaataagtgtctggtctgcgctctaaataaacagaagcacaggggctaactcgcaagattccatagactcagcgaatagtgaatggggacggcgggtggttttctggaaattgcaagggctctttaagaaaagtgttggccgaaggggtatggagagctctaggccatccgatctgcatcccgcggtgcagattagatcacgcaaggggggggggggttcaccaccgatctttagatcttgatccaagggcccagtactaaacgtgaagcggtacacagtacgagccgttagatgggcgatctagggacatgatgtaatggagacgtgcacaatccagaccgcccgaaccggatccgacggactagccttaatctaacccaaccggtatcactcctttcatcctagccgttcgtgccgaatcggacggcgtggaccccatctcccccatcacctcactctcctcccaacggcacggcgcgccaccgaggaacaaacgccaacgatgaggtcaatcaagcccgctactatgctattcctcaattaccaggttctacgcgctcgcaaggagaaaacaggtcggatggatgttacctcactagcgattagccgtcgcttgcagcagcccacgcaccgggtgattttgtgcccaaacgcggacaacggcgagcaatcaccgacggttcg

SEQ ID NO: 117337 - DNA, 507 bp, Zea Mays
gaaaggacttggaattgatctgatacttcacgagtaggtatatatgagtacatatgggtgaagtgtgcgcttggtttgaaatttggcgaagaaagtgaatttttggcactccgctcagaatcaatcgtaataaatgaaaaatagtggtaaattggtgtctgggatatcggattgacgtgaaatttggtgaatatgttacttgaggtgtcatgaaggtgctggaaaaaatctggagtcgatttgagcaaatttagctggtttgggtatttcaccgagcaagtggcgtgcgggggtttaggttttgaatgaaatggctatttggataggtcaaatcctccataaggagatgaaaacctataggaaaacaccaggggacacacaagcacacaagggttcacaggatctcagggatctttgattgaatttaggggatttctacaaaggggtggtgtggatgttccttactgagcagggacaacagagagaacagagggaggggaggaagtg

SEQ ID NO: 117338 - DNA, 572 bp, Zea Mays
cagaaaactacctaactaggttctgtcttgttctgtgttaattaattatatgtcatagtctgttagtttgtctgattatggtcttcattttcaccagggcttttgatcaattgatagtggttctgggaaggtttcaaactaagatcaagtctgaaacaagcaagaaaagttctgagattcttgcagctactagagagactatatgtcagcaccttgagggggttgaggcgcagatgcaggctgacgtgtaagaccttgtcccagtgctacactgaaatcaaaccctcatatacacatatatacagggtccatatatgaattcaaatatcacaaaaactataggcacagttacttgatacatgtcgttttgactgttattttagggacaaattggtcaatgcaggcaggtctaaaaggaaacgcctagaatctacatttgaaggtacaacttccagtcatattaatgcttccaagccggaactgaaattttatttgagaattatcatgacaggattcttttggctgtactcgatcatagagcagtttatctctaaagatgtgcattgtatcca

SEQ ID NO: 117339 - DNA, 539 bp, Zea Mays
ggagccctgggcttcggataataaaggaagcctaggtcggttccgaggtctggtccgctgagacaggcgcgcctgtgtttaacgtagtgcagagaggcgacatgcaggacagacggcgtcgttacgcggttgtttgaatggcaaggcggtaaacataaggtaaaggcgcggaattatagggaatagtttccacatgcaaacgtgattactatgatacgtgggcgcgtaatttatggatcttgcatgggaagtaatggcggcaggtaaaaataatgtagcataagatgttgaaagctatggcataaaaccgaaacgacataaaagttgcataaatagtatataccgtttggtgtaaaacgttcagtcattgtgcgtaaatagtttattatggatattagttttacattgacatcgccataatatcgggacggtttcggaaataatggggagaccctgtaaacgtggatgcggttacttgtatagtatccgtgatttcctttcattcgaaaaaagaccactaagcctgcataactaattgg

SEQ ID NO: 117340 - DNA, 341 bp, Zea Mays
caccaatcaggagatgctctcactgagagaagctaggagctagaagagaaaggctaccagcccaacacctcaggaggaggagttggaccaggaaattagagacttggaagttatacatcaccaagtacagaggaaaagggaaaagatgctttggctagccgaacttcaaaggaagacgaagccgctgaacaaatgcgccacatcgggcaggatgaccaaggatgagagccgcaacatagagagcttcgtcaaggaactccaatcaatgacgatggatggtatgatgacctgtaccatggtaattttgcttttgatgatgcttctcccctggcagcaaagat

SEQ ID NO: 117341 - DNA, 303 bp, Zea Mays
cttggcagctgctgattcagtagatttggcgttggagagctgaatctggtggtctggggactggttgctttatgtggatctgaaaagttcctgcaaataagaggcgccttagtgtttaggccaactccagcaacgccgtgtgcgtgtataacactgttttgcactctagatgcactgtttggagagaggagtttgaaatagggagtgagtaaggagtctgctggagatagtttagtttggttaatcttggtagctgttgcgagaataattggccccgatatctccctctcactctggttgagc

SEQ ID NO: 117342 - DNA, 302 bp, Zea Mays
cggtgctagaggcatcgcaatacacatcaaaaggcttgctgctgtcgggttgcgccaatactggtgctgtggtcagatgccgccttaatgcatggaaggcatcttcgcacttctgactccacacaaacttgacttctttcttcagcaactcagtaataggtttcgcaattcgaaagaagtctggaataaatcttcggtaataaccagctaatcctagaaaactccgaatctggcgaacagttgttggtggcctccagttcatcatctcttgcactttatcaggatcaacgactattcctgcc

SEQ ID NO: 117343 - DNA, 421 bp, Zea Mays
ggcttggcatgagcgtgtggctccgtgcccaacaagctggggtgaaggggcgtgataaggggaacacacggcgtgcggcagtgcacgacagacaagctcaccaaagttggccataacggggatccaggggcctatcatgctgggagaatagctcaggagggagcgggggtgaaggcgaacatgattagggcctcaccaagggggtcgaggtagcagagagggtcggcgacgagcgatggcggggagcgtggagagaggtagcgaggcttgaggatggggagccagtgcttggaatcaaaggtggggcttcaggtgatacttataggagcgagaccgaggcatgacaggcaccaaatcgatggaaatcgatgaggagatcaactctgcctggtttccataaacagcaaccacaaaaggaatg

SEQ ID NO: 117344 - DNA, 492 bp, Zea Mays
gaacatctgggtaggatgttgcttcagccgcctcaagcgagctcgcgccaaagaagaaacaggtgaaggttcttactcaccgaccgcgctacattgaaccagccatagtgcctgactttggcggtgagacctcttcggctactgaagccaaaggacctgctcttacgcagaggattgaagagccggctgcaatgcccaaggctgacaaaattgaagaaccaagactcgaagagacaaaaacatcagagattctaagcccttcggtaggagtggaggcgtcgaagatacaaaaagatctggcagcaaccccaatgagaaaaaggatggctagtgtgttagatgtgctggagacgattaaaacttcaagctctactccaggaaaaattgccaaggcttcgaaagcacaggttgaaaccaagacaaagctgaccgaatccgaagctacaatgagctgggccaatgctgaaacttggccttcagagcccatcaaag

SEQ ID NO: 117345 - DNA, 455 bp, Zea Mays
tttatcgtttttatttttgattcagcttgttttagctatgcagcttttattttcaattcactaacatctagatattaactgacagcaaattagaaagtcaccactcacgagcacaacaccgagaaccctggtagacgctccccattgcttgcataagcatcttcacttttcagatccagcaactgtccatacttgacggttgacacagcttcttccagaatgcttgccatggcagcattgttttggtcctcgaagtattctgctacagatggagcacactgcacgcgacgacatctctcgcctggcacgaggtggtgtcagggtgaacagcgatggcgaactgcgcatctcgtgtttttcttttctctgaacacaatgaatccttgaccaaaggaagaaacaaatagagcctaaatcaagatgccaacgcagatgctctccaacgcctcctcatc

SEQ ID NO: 117346 - DNA, 362 bp, Zea Mays
gttgtgaggggcttgctgattataccaaagtgtgccacaaagtttctataataaccggccatgcctagaaaactcctcacctccttcacacatgtaggtgtaggccaattctggattacttccacttttttgggatctgtagttactccagcagcacttacaatatgtcccaaaaattccagttgcgtttgagcaaacaagcatttggattgtttcagatataactgttgttgactgagcaactcaaatacttgccttagatgcttaacatggtcatctaggttggcactatacaccaaaacatcgtctaggaataccacaacacacttccgaagtagtggtgccaacagtttgttcatgaa

SEQ ID NO: 117347 - DNA, 276 bp, Zea Mays
aatgacctattcattggtggaacgacgggcctgcgctctgtgaagcactaacccttggataatgggtgcattggcaggagggagatcaacatcatcatcttttccttcctcatcatcgctggtagcctcccaggcttgtggattcgtcgcgagacgagaccgaccagagggattccgggccattcgtccgcgagctccatgagtccctgaggcctcaccacctggcaggacattgccagatccgcgcccgcgcttggatctggaccgaggaggagt

SEQ ID NO: 117348 - DNA, 333 bp, Zea Mays
atgagatagatattctatactaaagagggtaaacacttaaagcatggcattaaaactcttaggggaacattagatacatttcactctacctcaagcatgactttttaatcaaatggacctacactaaatattaagcaacattaactaaacaagttctaacatacttagaatataacaccgatggcttgcaatacttaaaaacaagaactagatgttgatctacctctaagtaccacaaacacacccttttccacttaaatagatccaactcaagtatcaggcacttataacacacttataaacacaagacacttataacacacttataaacac

SEQ ID NO: 117349 - DNA, 372 bp, Zea Mays
gcagtcaaacagatcctccatgtgttcagagctgccacgggtctaacaacaaattttgagaaaatctccatccaccccatctgttgtgaaaatgtggatttgtccaacatccttcagccgttctcgggatgctgcaaaaccttctcttccaatacctcggccttcaactccacacccgtccgctccaaaaaattcatgtccaaccactagtggagaagattggacagcgacttgccggatggaaaggttgactacttaaccatgtaggatgcctcaccctagtatcttcagtgctctcctctatgtcgatctaccacctaaccatatcccccttgcgaaatgggctagaaagcaaattgataagatttggcg

SEQ ID NO: 117350 - DNA, 467 bp, Zea Mays
atcttgttggcatggacgtgacatcacgccgatcattgtaacaacatttacgctatttctaatactatttacgctcaaacttgggagttttacgatcatggatacaacgtctcagagatttccacgtctctcacgttggctctgtatttacggtaaccacctggattcatacacgtctgttatgtttgggtcgtaagcaacatcacgttgaccgttgtgccaatatttacgctatatctgacactatttacacttaaacttgagagtatttaacgctcaaacctggcggtgcggccaccagtatgccgatcgggccgattcccacccgattgaaccaaaaacacacatcggtgctcctagtggggtcagggatggctggtgcgactagaagcacgaattggttgggactttctgtaactattggaagccttgggctcccaacaacccctccctatatcacgtacaca

SEQ ID NO: 117351 - DNA, 593 bp, Zea Mays
cttctgttgaagggcttaaaatctctagcatctttgatatttcttcagtttttgacttttcagccttatctttgtcaaccttcgtttcaactagctcaaccgaaggtaccttcagcattatagccggctcttcagtcttctgcatgggaggaacaatttcttttgattcagcagccgaagaggcctccccgccaaactcaggcaccacatctggttcaatgtaacgcggctggtgggtaagtaccttcatctttttgcctgcagcctttggcacaggctcagctggggcggccagagcattagcttttctcttcatcccttgtccccgcagcgggtagcggtagtcgggatagacgaagccaatagcatcaaaaactctgttcaatctcttctttccccgacttccgaaggttgtggataatgcattatattctgccttggaatatgatccaagcagttcatcacttgtaacttcgatgcatttcagccagtcatcgtttggctcatggaacttatccccatacctaaatgtatatttcaaccggaccagttcacctttgctagacttggtgatggtatcctttggcatttcc

SEQ ID NO: 117352 - DNA, 279 bp, Zea Mays
aattattatgttttaaacagagtcattctatatgatgctagaagtcatagtgaatgtatgtgtacttaactagtataataatggaggaattaatgaaagactagaacaaatgagataaatgttgatccttgtgatgttgtgtttgtgttggttaagtatatgtagtgttggtcgtgttctagtggtgttgaattcgtgtgctgatgatgagtagatcgctagcgcttctatatggtcgtttactttatcttgctagtcagtgtttagttggctaccatg

SEQ ID NO: 117353 - DNA, 741 bp, Zea Mays
cttatctcgaaacgccctagctatttcctctcttactatatcgatggcagccggtgggagatcaccggctcttgggtccaatatgggtgagtttgtttggatgttggtatgttgttttcttccccattggtttgggttttgcggcgtgttaatacatgccctatgaggctcataggactggccattcctttctatccttctgggggccggaaagtactcactctcacggttttggtagattatattatggtgctggtgtatcgtatggtgatatggggagtctagctgggacggatacggagttggatatccatcctcctcaaaaaactctttgccggaccgtccggttaaatacgcggatcatccggctccgtgcgcggactgtccggccatgtggctggaccatccgacattatattcggactgtctggcgccatatgtagacggtccgaatgggttatctagggtttgcacggcatgtggcggcttgggtgcaggtctcggtaattcgcttctaaaaaagggatcggccgccgttggcccggacggtccgcgctcgcgtgcggatggtccaaacatgcccagatcggcaaatttatcgccgatgtgcttgggaggctgtcgttgcccaaggtacatgtttatcggcatcccataaaggggttgtgactggtcgtgacaacctgtagccgatgaattacgtgtgtattaccttaattcaatctcgtgcgaaggaagatt

SEQ ID NO: 117354 - DNA, 390 bp, Zea Mays
acagaaggtagtttgctcattcaagtacctgctctggtcaaggcaaccggaagagattttgcagttgtagtacaagaattacatgacattccagtagtgtgtgaatttttggacgtgtttccttaggatttgcccggattagctcctgagagagacatggagattgtaatcgagttgaagcttggtatagctcccatctcaagaaggccgtatcgcatgcctcctaatgagttggcagagttgaagacacaactgcaaaacctgctagaaaagggctttataaggccaagtttttcaccttgggttgtccagccattttcgtaaaaaaggagcaccaaaactctacgaatgtgcatagagtatcggccccttaatgaagtcacaatcaag

SEQ ID NO: 117355 - DNA, 776 bp, Zea Mays
gttgggtcccttgatcgatgctagaattcatgaataaattgctccatggatggtgtcacatcttcaaggttgttcaatacatatagcatgatatggcgccactcttcttgtcttagggtcttggtggtcgaaccagttgccctttcgagtttccctcgagaaaagttgaggtggtggattatgcacactcggaagtttgtcaccatagtaagatgttgtgaagtttgacacctcctccaatacgtatgcctctacaatagaatcctcgattttgcatttatgtctacatttctttcgaatagtctttagaaatccctcgattggataacaccaacgtccctgcacgggcccccccattcatgcctcatacgggagatgaagaatcaattgttgcatgggattaaagaagtcaggtggaaagatcttctccagattacaaagtaacacgagtgccattctttccaagtctgcaatcatggtccgagataaatcttttgcacaaagttgggggaagaagtagatctactatacaagtgctagccagaaatgctcagggacatagccttgaaccatcgccggaagaattcgttcaatccatatgtcgaagtcatgactcttcatccctaagactcgcagagtagataaatttatcccctactcaggttagctgcatacccatgtgtgttcttcccttggtcactcgaaacttttgaaaattcgggtatccttgttcccttgggatatgggttgtaatcaaatcggttgtcatagggttt

SEQ ID NO: 117356 - DNA, 311 bp, Zea Mays
aacatcctgtttatttcatcagtgaatccctcgaagaagaaataccctcaagttcagaagctattatatgcagtacttctaactgcacgcaagctctgtcactacttcgacgaccacaaagtcatagtagtcactggatttccgataggggatattcttcacaacaaagaagtcatcggaagaatagccaagtgggcctgcgagctggggtctcatgacattgaatttcgacctcgcacagccatcaaaactcaagcactagttgactttgtatcggagtggaccgaacaacaagtaccagataacccaga

SEQ ID NO: 117357 - DNA, 483 bp, Zea Mays
gtcgcttgggcgatcccttcgtgacgatggtgcccttcctaaactcctttctatgccttatgaaggggtgattgaagggtagaaaacatatatggcaatcaaagtaacatatcttgccaccagcactaagacgaaaacaatttgtatctttagcacaataaggacacgtcaatctaccatgcacgctccatccagagaaaataccatacgccataaaatcatgaactgtgaacagctacgcaacacgaagattgaatttctgcttcttgaagcagtcataggcttccactccttgccatagcttctttaactcttcaatcagtggttgaagcatcacattgaggcgtacgccaggatgctcaggcccaagtataacaatacataggaacataaactcatatttcatgcaaagagcaggtggaaggttgtacagtatggcaatgacaagccaacatgaatacgacgcagcggtcgtattgaaag

SEQ ID NO: 117358 - DNA, 691 bp, Zea Mays
cctcagaaagttttatccctagcgaggcctcaaaaattctcgaagaaacattataccctgtaatctagggacttcatcatcaataaagtttttgttttcaaaggcattcagactcttgacttacaactgatttcgattgggctgggcttgaaatcagccgcttactcgacttagggtgaccactataccctactaacggagcaatcgacttaagtcggcgatgacttaagtcggtgtgacatgctcgcgcttactcgacttagggtgaccactataccctactaagggagcaatcggcttaagtcggtgacgacttaagtcggtgtgacatgctcgcgcttactcgacttagggtgaccactataccctactaacggagcaatcggcttaagtcggcgatgacttaagtcggtgtgacatgctcgcgcttactcgacttagggtgaccactataccctactaacggagcaatcagattaaggcggaaaacgccttcaaaaccagcatggcacatttgctttcgcgttgttcagggtgaccactataccctaacatcgaaataattagctcttcaggaaaaagaacgttttattcgctggcaccaggggcatgttctagcaacctgttcacaaaatatttgagttctaacacaactgtcacatgcacataagaattcatataacatcctcta

SEQ ID NO: 117359 - DNA, 324 bp, Zea Mays
aggaaagtggaataccttgacatccccctcaaggacagcatcaagggatggcgcctcaagtggttcaccatggagaatcacaacaaatcgctccccctcaatcagggaggcaaccagatgttcgcacgcccagctgggtagaatcccccacctattaagaggtagccgaagccaaggtgttgcttgctgaaatttgctcgctgaaggacagaggactgactgccgaagtcatggttgctgactttgtcttcaaaaacattcaacctttgaaggatagagtctaccctgcttacttgtatatcggtgtgaacgattctattcaag

SEQ ID NO: 117360 - DNA, 402 bp, Zea Mays
ggtgctggcggaattaccagatcctcatcatcatcggaagaagtatctgcaacggcaccctgatcctcaaactgtatgatggcctcatcctcaacccggatatctgatgctggagctgtgtcctcagaagctaggcgatagaagccgaactgcagtctagaggcctcgagggtgacctagaactgaggagcccggatcagctgagcaaatatgtcatagagatagtgagcgtacggcagctgacaccgagacggaggccatcaaaaactgtgtcctcaatctcacaaatcagaaaatcgaccacgtcaaactcatagtgtgagatcaaggccccaagtagctagagctagatatgcatggtggcctctctgtatcccatcatgggtagcaaagtatgcctcg

SEQ ID NO: 117361 - DNA, 286 bp, Zea Mays
tttgcattagatggggaagtctggcaaagtgattgcaaagtgggacacaagagcaacaaagatttacacagaaatttgtgtagaagaggtcaatgcaggcaataggccgcataactttctaaatgcaaataggtatgctaacctcattaggaagtttaaggaaagcactggccgcacgtacaccagggatcaaatgaagaataggtgggactctttaaagagaatgtacatgcaatggaaaacacttaatcaaagggcaacaggtcttggtcgataccctcatact

SEQ ID NO: 117362 - DNA, 816 bp, Zea Mays
atgtccaggcttcattggtttatttgagtgggttgttatgacatttggtctaaagaatgctggtgctacttatcaaagggctatgaatttgatctttcacgagctgttagaaaacactgtggaaatctacattgatgatattgtagtcaaatcggctgagtttagctctcatatagccgatttacacaaagcctttgataaaatgcgtcggtatggtctgaaaatgaacccacgtaaatgtgcttttggagtgtcggctggtatgtttttaggattcatcattcatgaacatggtatagagatagaccctggtcgaatcaaatccattcggaatgtgggacctccaacctgtaaggtcgaagtgcagaagtttctcggcaagataaattatttgcgaaggtttatttctaacctagccgagaagattgatgccttcacccctatcctttggcttaagaatgatgtcgaattcacttggggggcagaacagcaggaagcgtttgatctcagcagaaagtatttgtcttcggctcctgtattaaaagcaccacaagtaggagtaccgtttagattgtacattacaactgaagataaggttattggggctattctaacgcaagtgactgcaggaaaggagcatgtggtgacctacctaagtcgaaggctggtggatgctgaaacaaggtacacttctatcgaaaagttatgcttatgcctattttatgcatgcaccaagtgtagatgttatttactgtctagtcattgcaccgttgccagtcaaaccaatgtgattaaatacatgttgcaaaacccgat

SEQ ID NO: 117363 - DNA, 474 bp, Zea Mays
catgcttggaccagggtgcaggtccttctactccggtttgtgacgaggtaccggcagaggtccttcctgaggttgatgccaagggttgtgatcatgcacaagctgatgtctgcatatttgatgaagatgaagaagaagaggatgaagtcccagtgatccgtaagaacagccggcactatagaggtagcgaggggggtagtgatattccatctccaactctgtcagctcttgtcattctttagggagtttcaatatcgaactttgatcaagcactagaagaagtcgtccctgaagatatgctatcagagccaactgctaatgatatcccggccgtctgttcagaggtcccagacggtgggctttccttgcttgactctgctgggcaagctgcgacccgagcggtgtctcacacaatcatcaactttggagggcaatctgcaatgtcaagacgctggtctgagtcacccgactccc

SEQ ID NO: 117364 - DNA, 2392 bp, Zea Mays
cagcaactaattgatgtgataattcaaaaaaataaaatggttctaacagacacaaacagtcttgaactcgtgacctgtagttagtcccaagcaaccgtagaccaccatggcacaagcacgttttgttagtagtgggatcaaaatacatatatgtactgaacaatcgcgaacacatcaaaacacctcttcatcttctttctgcagatgtgccgccgccagtgctctattgtctctgtagatccgcccatcgccccgtcgccgtatgaagctgctgtggccttcctcctactctgaccctacgctagctctcgtcggccgtctgatattgtggatctcgcctccctaatctgctacagtgttctctttggttgttcatccttagattcagcaatcagcagggactgggagggcttcaggctttcacacattttctacagcaggttactcttatctcagcctctcactcttcccttctattcagatttgtaagtgcaattgaggattagccgctgcagtatgataattagttgatttgtataagcactttcatatatgagcagcagcggagctgaccaatgctatcaatttattatttaatgggtactatctatctcataatcacctcttagcactgttttatatataattcgcctaaaattatggctgtccacggacagcaccaaaatgacctggctccgcccctgtatatgagtttgttctgtatttcattgttagattggtattctcttaatttacttgttactgcattacttaacaactaacagacctatgtgtgatatggtacactaagtgtttactacaatagtgatatttgtatgtccctgtacttatttcagcatctgtgatggacaagagttgggtgagcaaaccaagaacaagtgatgactataagattggtgtgacccaattccttactttcgcatttcataatgttcgaccgggtggcaaggttaattgtccatgtgttcagtgtaaaaacaagtcaacaaaatgttatgaagaaattagaacccatttgagatgcaacggcattctgcaaggatatactatatggaatcgacatggagaggaacacggttcaacaccagctccatttgctcacatatcatcaagcacacacaaccatgctccatttgaacgtccttgtacttctcctgcacaaactggaagcaagagaaatgatgacatgcaagggctcctaaatgcagcatttcctatggctgataagtatgatatagtgtccagttcagatgaagaaatggatggtattaataattactatacaatgtccagttcatcagatgaaccaatagatgacaatgcatttgagtttgctaacacaaatggtagtcaacaagatgttacatcagaggaggttgaccatgaaactaaagatgacattatttccatcatccttaaagatgctaaggcaaagctacatcctgggtgtgatgcattcacgaagctttcctttcttgtaaccatatttcatttgaaatgcttacatggatggactcaggagtcatttacatcacttcttggtgttctttctgccgcactccctgaagaggcgaacttaccaaaaaactaccatgcagcaaagaaaataattcgaggactaggtcttgattatgttaagattcatgcatgtccaaaggattgcatgcttttctatggtgaccaggcgaaacaagaaacttgccatatttgcaacacttcacgttgggcagaaagaaaaaagaagggtgaagcaacaaaaacaaagggatataagaagaaaccagcaaagatcttgcggtattttcctttgataccgaggctgaagaggttgtatgctaatgagcaaacagcaagcgacatgcgttggcatgatgagggtcgcacaaaggatgggctgttgaggcatccagctgatgggcaagcttggaatgattttaatttgagatatcctaatttttctgctgattcccgcaatgtgaggctcggtctttctagtgatggagtaaacccttacagaaacatgaatattagtcacagtacatggccagtactgcttattccgtacaatctacctccctggatctgcatgaagcaaacatcttttatactgtctatgatcattccaggaccagatagcccaggaaatgatattgatatatttctacaaccacttattgatgaattactacagctgtgggagggtgttgaaacttttgatgcctcttcaaggaagaagttctctctcagagcagttttgatgtggactttaaatgatttccctacattaggtaacttatatggttggagcacaaagggaaaatatgcatgtccatcttgtgctgatttgacgaggtcaatttatttgaagaag

SEQ ID NO: 117365 - DNA, 646 bp, Zea Mays
gaaaaggtgaagtaaagttcgtctactgaaaatggtaatttatcccttcaccagtataatttgcaatgaagtttcgaatgctagagttgagtatgtcttacctcgctatcactttgttcactagaatcaagatgcgagtaaaaggaaacaggcgaatcagactgcgactcctcgagcatctcatggaggcacctgctgtcagagctccccttggtatcttcctggaaatcttgatctgcgatgctgaggaaatccttcagctcggtgaaaccgtcatgggcaccaaattctgatgcagagaccgtggtaattccttcaggatcaaccgaatggttcgttctatcctgcaacgatgccagattcaccttcagttctcaaatggaggccagatcaactcttgtatgcacatacaacaacgtgtgaagacaatgtatacatcatatggcacttacctccgaagaactcaaccatctcgaaatgacagagcttccagatcttcctgcctgaagatacctgctcatggaagtatatatcttcagagttcttagagtcacacaactgtgtgcctttcttttctatatgcctacagatagtagcagcaactagcaagcactactatagacagggtgtattgagtactgacaat

SEQ ID NO: 117366 - DNA, 413 bp, Zea Mays
cgcagataatagaagaagaccactggaatttgaggaaggagattatgtgtacctcaaggtgtcaccacttcgtggaatgaggagatttaaagttaagggcaaattgtcccctcgctatattggaccattcttgatctttaggcgagttgggaagatggcataccaactcgaactacctgctaatctatcggatgtgcataatgtgttccatgtatctcaacttaagaagtgtctccgtgttcctgaggaacagttaccaatggaagagctcagtgttcaaggtgatctaacctacacggagtatactatcaagattttggatacattgactcgagttacgagaaataaggtgataaagatgtgcaaagtgcaatggagtcaccacggtgaagaggaagcaaggtgggagagag

SEQ ID NO: 117367 - DNA, 920 bp, Zea Mays
ctcattcgaagaaggtcgcactctatggcctgggctcccgtcttgaacaggtggattggacacgaactctgaaaagggcctatgcaataacgaaatgacacatgaagagcactacaagtgacaatattgaaactcgtacacattagcacttaccattgggggaagattccaagcagagtaggaagggggagcaccgacgttcgaaattttactcctcggcatcacatcaactcgactcagtatgttctcctcagatatttgcttattggtaactcgagaagggtcattcaccctggtgtacagataatacgggtagactctatccttcaaaggctgaatgttcttaaaaatgaagtcgacaatgatagcttcagcagccatgtgacaccctagtgtcacctagggttcttctttaagctaaccccaacctattatcacatgtaaacctagtaaaggaatgaacatcaaagattaagaacaaagatttataatgagccttctcaaactcttcttaatcttgtcatgaaccttaatgaaggaaaaatctcaaaccctaataaatcctaagtgagcaaattaagcataaaaggaaattgggagcaatcttggggaaaaatgcaaatggtagaaaagaccaaattacaatgttttagctcaccaaataattaacaaattatagtaaggaagtttggccatttggtttttccaaaatccccaaatcagcccttgaaccatggtcccatggggaaatttagaattcagaattctgaatttcagaaccctttccaaagatcctttgcgttctctgtttttcgaaactcaaaaccaggaagtccaaacatcaaagttgtgccaaattcccttgaacacactatggaaaattttgaactcaaaccaaattcatttgacacggttttggc

SEQ ID NO: 117368 - DNA, 606 bp, Zea Mays
gtgccaaattagtaaccacgacgataaaaaatcaaccgatcgatcaccatattttatttgtaaacacaaatactgcgtaacatattcatggagtgtatgtatatcataaaatatcctattttttggttgagtcaggttacaacacaaacgtacggagcaaacagagaactgaatgcatatgttgctagaatacaaactaagggtgtatgctatgtcataggctcatggtttttcttccctttcaggtgacaatatcgtcatgcatctggagtcgtcgatcttctggcagcgacgacacaacaacttgctcttcgtctcgccctaatcttctggtagagaatcgtcgttctctccattatcacctgcctgcctccctcctccatcattccatatcatctaagcccctaaccagtcactaccattggcgtttattttcttcctccgctatctactgaaaacttcctttgacaataatgacacttcgtcacttgccacccttgaaatattggcttagagaagaaatatccttgcctaaggcaaagacgtctgtacattaaaacctctcagttaatttgatagatcgcttctataatgtatttcattttc

SEQ ID NO: 117369 - DNA, 346 bp, Zea Mays
gatttgatgtccataaatcagtggttagggaaatgtactccacacctttaaggacctttgccagagaatctttttcagactcatacacctttaaacattcagctcttatggtcttcctaccaatgaactcatatgaaggattcaaatatctcatgacaatgttaaaccaagtatgctcaaccatcctaaatggatactcatgaactattatcatcttagcaattaattttttaacttgctcatgattataatctttaggagaagtgataggagggaggccagatccagattcacctgccgttgatggagcaaagtttagaagagattgatccaacttctgtgccac

SEQ ID NO: 117370 - DNA, 351 bp, Zea Mays
tgattcttcaagcccttgctaaattatgtctgctgtcaatgtctcagtcttatattcaccctagccatttcaaaatggttgcctacatattctagaggtattctttttttcaatcctttagccttgcctttttggtttggctctacctctttagttcctttttgttactaggaaactttgtgacttttaactctttttattagaaggtaagcatgttaatctggcatgttgttagaaatgcaattcatatcctgcacatagagatgtcgaatgaagtgcccttaggctattaactagatctgcagagacaggcagcagaggaagaaatttgaatgtagaatgaggcgttga

SEQ ID NO: 117371 - DNA, 364 bp, Zea Mays
ctggcaatcacgttagtcgttagcgtattccgaggttttaggcccgatttgttccaactggagtagtagcatgataccatcgcgtcgacatgttgcttttgctcatggctcatcctcatccaaatgtgctgtcagacagtagtaaagtagctcgattcacgcttggtcagggatcacttagggtggtgaggttctcaacggacaaggagatcagattaagctccaacgtacgtactgctggtggcgcttctgtgtcatgtgtgtatacttgtcggttttgcatgattatcgtggctgcctggaatcatgagggcagtgtattttacgtacgacgttccagcacgctaatcattacttgtttttt

SEQ ID NO: 117372 - DNA, 361 bp, Zea Mays
gaaatgatgagctgttcatagacatgacacgagtgttccaaatcagtgcgtgaggcatagataccgggagacacatcaaaaaagatttggatagagtttagcaggcatatttcccaaccagcatgcatggatgcattatatttacgacatatatcaatcaatcaatggtggctatgtcatgtgcaccaaatccaagtgcacgtacgaaataaatgaactatccactacacaagctagcggctaatgaatgaacatgatgacttgccagcgaacaaaatttcagtattaagtagggataatcaattgcaaaaattatcaatttctcgatttaccctagccaacatgaattattagatcatta

SEQ ID NO: 117373 - DNA, 460 bp, Zea Mays
cgtggagagtgggaatgaagatgtcgaatattgaacgtggaggacgagccatgtagtttttgggaagtcaactatcaagcaagggaaagtcgaagcaatgaagggaaaatattttcatgatgtttctatagtgatggtcagggggaagcacggttccccttcccaaagctgacgaggtggtggtctttaagagcttcatgaaagctgggcttcgctttctgctccacaagatgttagttgaggttctaaagacattcgtgatatatcttcatcaacttacccccgaagctcttatcaaagtgggggttttatatgggctatgaggagccaaggactagagccggatgctacgtgcttctataatattcatgagttatcttaccagacgaaggcaaacggaaaagaacagtaccataacaactttggctgttatagcttcgtgccccgctctgaggcaaat

SEQ ID NO: 117374 - DNA, 764 bp, Zea Mays
cgtgccgccggtgagctccacgccgtgatcctcgctgacgtcgcgattcgtgcgctcggtgtgcagatattgctggtggtgaaaagatcttggcgctggataagcctaggcgcggtcatcgggctggccgccgtacccacttgcctcacggccggtccagatagcctcgccggagttggccgcctgccgcgtgatggccacatgccttgaagctttaccacgtcgcaataagcctctttagatagctggttcgtcgctggtaagcttgccacggtgaaagccacgcatcccttgcgccagtgaccttcttcctctccggctgccagcacgccatgcctaaattaggagccaccgctctgggatactataaattgagcgcacctgtagctccgttaagtcatcatgaagccagagcacccgctactgcctccgattagccaccagagagctccaatttctttctctccccaaattagttttctgcacccgtgaacacctcgccgtggccagacgcttacaggttagctcatactcttctgcgtgatgttctagcctctctcaagtcccctgatactcatagacccttttaattaaactagatcgccctaggtaacccagaacacgtcggtgtgttctcagtttccgccgttgtcgtggacagtgaaatcccaacccggaattgtgcaattgattgaggggtaatgatcgttaggggttgaattagatgtcagccgagctaggggtccggtcgttgcttattttgg

SEQ ID NO: 117375 - DNA, 733 bp, Zea Mays
accatccattctgcctagacatcaagaactttacgaaaggtgtcgtagtgacagaccacccacctgcaacgatgactggtgccgaaattcgtcaacagatagatgggctcgtggccaatacagaaggtggttttgtgggatatggtgagcagcatatgtggacacataagtctggcttgactcgactcccctattatgacgacctgctccttccacacaacattgacgtgatgcacactaaaaagaatgttgccgaggcactatgggcaacaattatggacattcttgataagtcaaaggataacgtgaaggcaagagtggatctggcagcgttatgtgatagaccaaacctagagatgaagccgccaagtggcggaaagacgtggagaaggcctaaggccgatttcgtcttaagcagggcccaaaggaaggaagtacttcggtggatcaagatgttgatgttccctgatgggtatgcagctaacctgagtaggggggtgaacttatctactatgcgagtcttagggatgaagagtcatgacttccacatatggattgaacggattcttcctgcgatggttcgaggctatgtccctgagcatgtttggctagcgctttcagagttgagctatttcttccgtcagctttgtgcaaaagagttatctcggaccatggttgcagacttggaaagattggcacccgtgttactctgtaatattgagaagatatttcc

SEQ ID NO: 117376 - DNA, 573 bp, Zea Mays
gcgctgctctttcttacccgagccgtgagccgagagcgcggcgatccagaagatccaggtaccccttcttggaccgcccctgcgctgctctttctcggctgtgtccgcgtgtcgcgtcccctgagacgtcaccggcgtggagtgacaatccgatccggttcctcgttttctccgcagaatgtctccccccttagtctgttctgagccctaaaagttgaatacgcgctgtttcccccaatccatccagttgtcggcttgtttgttgcgtggtggagttcgtaccgacataggtggtttggtctagttttccgattttatttgggtgttcaactgagccccatgaccctcgttttatccgcccgccgctttggaatggagtgcactgctaattagatgcgaacacaacctctgaattcttacatgtatttagtatttacgaaccgttttatgtcagtgttcgggctgccgtatgcaatgaatcagtgatcgggcagagtaacgcaaagagggagggcctgatcatttgagctgcttttgttgacaatgtcaggtatggccaggtgctcgttgtcg

SEQ ID NO: 117377 - DNA, 617 bp, Zea Mays
gaaacgccgacaataagtcacttgttttccttttggaaaattgtgtgctatgtcttagggctgactcaaattagtggcagggaagatcgctacattttaggccatgtatttgcttgctgctaatgcagggtcgccctagaggaacgatgtcattgggcaaggtcgtagggacccactgagtctggagcggaacaggtctgtgaggtgcggtgttaccctcgagtcgacgtgatctgctgtagcggacgaccatggtggctatgtgtaggagggtgcgaagggtagggtggctcaccgagacatgtatgttcgcgttgtcccgcccacgcagaagccgcgcgttgtcgctccagctccaaaggtgagcgagaaagttagcagtcggaagggtagtggacacgcgagcttcttagctggggctcaactcttttgtctagagggggctcgtatgggccgttggggtgtttgtcgcgcttgtaagcagtcgaaagggtagtgaacacgcgagcttctgagttgaggctcaactcttttgtcttgaggggctcgtatgggccattgaggtgtttctcgcgcttgtaatgggctttgttgtctttattcgttgtaaagaagag

SEQ ID NO: 117378 - DNA, 660 bp, Zea Mays
aacaaatgcatatggatatggaaacattacctgaagataaatctaagctagaggaacaggaacccaacatagtgggcaaatgagatacttcctatccttttagagaaaaaggaaacatttatagcaacatgttaacttaggggcggagccacactgcacttagtggtgtcttgtcaggctgtgacaaggttacacgcaggaggcaaagccggacaaactgatggaccctttagtgaccgagacaaagtagcaggttgtacataagcgtcatctgtatcagaagtagaggcagtagcattccctctctgaaatggtgaacctggcgagcattagctctgtgattattatccgtaaaagattcattttcatgtggttcctttgaattgagcagaattcacaagaatgagtaggtaagattcaccatacatgccatattgacagactaagatcacacgtaagtctgaagggaggtggtttagttaagatcacacgcaagttctaactatatataatgagttggcttcgaaatctcaacagaaatcatgtttaagtgatgggctaagcggtcaccggtcggtgctactgaagcatacttttagaaatgaataccttagaaggggatgatatatttctagtcttctgggtagcaatagcttcata

SEQ ID NO: 117379 - DNA, 402 bp, Zea Mays
agtcctatagccccacgcctgggattctgattagagcctttcttagctaagtggcactagactatcccagtgcgccatcagactgtaggccatgtcacctagtcgttgctccgcccacacgctattggagatgatctggtggcacactagactgagtgttgttcacggtccggtgaattataaaaataattcacgagatctccgactttggccgtataggtggtccggcgcgctaccggatggtctggtgacccaagtcgtcgaaggaccaagtcctgggcctttgtggacgcggccggtacaccaccggaccagtctggtggggcccagaataggccatacttgactcttttgagcctatctcctccaactcattttgattgtccttggtagcttccctac

SEQ ID NO: 117380 - DNA, 468 bp, Zea Mays
taagcgtgagcatgtcgcaccgacttaaggcatttctgacttaagtcgattgctccgttagtagggtatagtgatcaccctgagtcgtgtaagagtgagcatgtcgcatcgacttaaggcgttttcgacttaagtcgattgctccgttagtagggtatagtgatcacccttagtcgtgctgtgctgatttcgaattgagttcaaccttggtcagttgttgatcaagaacttgtatgccttggaaaatggaagctttattgataatgaatccttctacttacaaggtacaacttgtcctcaagagttttgaggcattgctaggggtagaatttcctgaggtgctcgatattccatgaattccccacttctgtgccgtccatgtgggtgagccggtaggatcccggtcatgtgacttttgcgacaatgaatggtccttcccacggcggtgacatcttgtgtcatccctcc

SEQ ID NO: 117381 - DNA, 473 bp, Zea Mays
ttctgaagctgatatgcccatgatgatgaagctgggctacttcggagaagctgagaagaagctgattcgttttgccggggaagaaaccactccgacaccaaaagatgatgaggtggtagttttcaaaagtttttttagagcaagattacagtttccactgaacgaaataattggagatattttggataattatgaaatattccttcatcagctgacccctaacgccatcgttaggctcaacattttcatctaggccctttgaagccaggggatggacccaaatgccgaagctttttgctaagtacatgagctacattaccaaacaaaggccggagaagataggctacatgaaaattttggctgttataacttcgcgtatcgcaaggatacgaaggccccgatcctcagctatcgaaccaaatggccaactggctagaaaagtgagtgattttatatcaaggctgatgagaaaa

SEQ ID NO: 117382 - DNA, 339 bp, Zea Mays
gcatactgtacttcagagaccgcgtgaccaccagttgtatgccaaattgtctaaatgtgagttctggctgagggaaattaaattcttgggtcacacaatttctcaggatggggtatctgttgatcctgagaaggtacaagaagtaatggattggaaacctcctaccacagtgcggcagattcggagttttctgggattggccgggtattatcgacgattcattccggatttctccagaattgccaagccaatgactgaactgttgaagaagggagtcaagtatgattggagccagaagtgtgaggatgccttccatacactaaggcagcatttgacaac

SEQ ID NO: 117383 - DNA, 823 bp, Zea Mays
gtggcatatacaaagcctgccacaacgtacaactctatttgtttgacaagataggagtagtgagcctctactaggcagggcctatgtgtcactctctcctccctcgagtaataaaatgaaggggtagaataatatagaacgggcttttcacttctagactttatctcgctctaggtttataagatacacagaggtgagttcgggactagaggtgagttagggactagctagactaaagcccactaaaataaaaaggaatggagagctagtcagacaatcaacttaataatagatacctgagcttgtaatcttctttaccttggcatttatcaattcactatatacaaagaggatgtagaatatcacatattttactgtccaaatctctataaattactcatatgctagtagctcaaacaataattagaagcaatatgactacataacgtccctcgctatatctctaactctctcgaagtacccgatgcactggtatactaccgcgatgacactgttcgtttgggattaaagcgttggccgtcgctgccaccatctgagcacacaaaacactacacgaaccgtagaattcaacatgagcagcattgtaagactatccatagtggttccctctaaatgtacccttctatatgtcactttttcctccacatcggcaatctctctccccctatttcactatctctcgcaacagttctcctttctcaccccctaaaacccaccaacacaataaattatcattttcctttcaaccaccataaattatcgaacgagaagaagacaaagaaggaagcaacctactacgagc

SEQ ID NO: 117384 - DNA, 398 bp, Zea Mays
gaaaaggaatatgttgccatacaagatgctcgatcctcttacccgggccatgtgctggaactcagcccacatctcctgctcttccccgtcgtcaaggatgaacattggctcgctatcttcatccagccacaaaaggcatgggcctccccactcgaaagggaagatctaccgccttggcgctttctaggcaagctgctcgtttgaatgatcaagcaagcccctctagcacagcagcgcatcccagacaccgcgctcgcgacgaaggaatatgaacttggccatgaatttcaccatgagacctagagaaggaagtggacaccatcaagacacgccctacgaaaaggaatatgtcgccatagaagatgctcgatcctcttacccgggccatgtgctggaac

SEQ ID NO: 117385 - DNA, 394 bp, Zea Mays
cgagcccagagagcaactttttggactgatacatgtcctttggcatcttgtgattctccggaagtacatcactgatcaagttcaaaagctccttgtagcagttgtttgagaatgcaaacttagacttaatagccataagttgagtaacaaatacaagggcgatcacttttgtgtgctcatgcaacggctcttcgacagctttaaggagctcgaagaacttctgaacctcaggtgtagctggatcctcataatcggtggattgaccggggttctccgaatcgacagttagaatctcatggcgtacatcatcaagcatctcttccatcctatcgtagtccccctcttcatgtgactgaaattccgatacaatacgaggaggtgggtcctcaccgtg

SEQ ID NO: 117386 - DNA, 449 bp, Zea Mays
ccggggttcatactaacactaagtaactaacttatagcttgataaatataatatcatacacaacatcaataatttataaaataataagctacatattatgacaaaataagattttacaaaaataattgcataccttttatatttttcctctacggttacggtcctccatcttatggaagcgaactatcacatcatcaattggaattgtggctagaaatcctgattccacgaagcatatgatacaatcattcataaatccatctccaatacgatttctcaacatcgtcttcacaattttcattgctgaaaagcacctctccactgatgcagtggcgattggaataaccaatacaagcttgacaagccgatagaccaaaggaaaagccatatgttttgttgtatccaccatcaactttgcaagcacagaaatagagatcaagctagaaaat

SEQ ID NO: 117387 - DNA, 604 bp, Zea Mays
atcgcctccgctccaacaacagcaaggagggaggtggtcatccaggtggtgttttcaagaacaaggcgacagtgcgtcctgacggtgagtcctcggagttacgaaaattgacttccgagggaacgccacggcgaaagggtctgtgccgcaactgtggcatatacggccactgggcaatcgactgcaaacgccccaagaagggcaagaaggaggcacctccaccggaggcgaacctaacaaccagggtcgtcgaacaaaatggtgcattgatcctggcgacgtgcgacatcgcacattcgtcagttccgcaagttcacctgacccaagacattgttccagtcacatcacctgatggagtttgggtgctggatactggagcgagcaaccacatgaccggaaccagatcgctgctaacacatcttgatcagggagttcggggttcagtcagttttggtgatggctctcgggtgaaaatccaaggtatgggttctgtagtgatgcaagatcacagctctggtcataaggtacttactgatgtttactatattcctaagatgaaaagtaacatagtaagtttgggacaactagaggaaaaaggttttac

SEQ ID NO: 117388 - DNA, 697 bp, Zea Mays
gcttatgttgagcaaccatgtctgtaggcttgtggtatggagcataggaacggtggtcgacgacaaaggtgaaggtcatgtgggttcgtgccgatggaccgggagcagccaagaatgagtattgagacttgactgaggggctagacaagcaaggtgactagctgtggtggctgacacctgggacacacactagcgctaggacgtggcagagtgtatcgtgtcaccgatgcggtcatggaccggttggacacgtatctggggcatggggggacacgtatgaggtacgctactcacgacagtttggtggttgagcctcaaaactaccaagcactaaagatggagggtgttgccgagtttgggcataaaaaatcgatggtttagttccgtcgagaaatggaggcagcatgtggtgtcatcacgaagggtgcgtcaaggcaaagcaacttcgtgatgagcgcatgaccgttagatgaaagttctaggagttggtcattttgccccagctaagtggatagtctctatatatctaggggtaatttatactagtgaaataatcctctataaatagatgggtgggctattgtggataaccgtgtctttgggctctatctcattagattcttgtctagaaaacctagttctgatttcctaggttgctctagttcttagctttgagatccgcgagtgttttgtaaac

SEQ ID NO: 117389 - DNA, 516 bp, Zea Mays
taagtaggtttcttaatggtgagagggaacctagatatgtgcaagaaaaactactaacaacgtaggctagttctcccgaaacaagggctatgccctaagatgaacactaaatgggtgctgctgagcttttggacaggttgcatgttagactagagacatacccaaaacaatccaaaattacttaaccaaagcatagatcaccgctggccggcctcacaaacaacatcacatcatccacaaataacgataatcaatgtaggttatgactgccatgaatatgttgtaacatattctcccagctagcagctaacacaagggaattcaggatgtccataacaaggataaatagcataggagacaatggatccccttgcctaagcccacagaggtgcaagattttactctataaattccaagatatctttgttgttcccaaagagctgccaccttctagagtcttcaatcatcatattcccctattgctaggttctatactagtaaattcttgaccctata

SEQ ID NO: 117390 - DNA, 344 bp, Zea Mays
cggccacgagtagcgaggttttgacgatgaggcacaacgggttctgatgaggcgcataaccatggcgaagcagttgcagagcaggggctggcgctgggacagagatcaggcacaacgtcggcgacggcgcgagcagggcgactactccggtgagctgcggcactagagcctggtgacgatggcaagaagcagcagtgcacgacgtgtgctaccatgagcagcaacaagccgcgaggtgagcgagcagggaaatgagggagagctcacagtgtggcacgttttataaccgagcgaggggagccaaggcgatgctgggaaggttatacacagatccagcgacgtta

SEQ ID NO: 117391 - DNA, 386 bp, Zea Mays
gggctgcaaaggtttgaggagaatgaagatgggagaggggaagaggggtgacgtccaagaggaaggggagggggcggctgcaaaaatcccaaatggaaagggggggcggctagggttagcggagactaatgggccggatcaaggttcaaggcccaactcgcccatgtgacagctcccgaccccgtcgcaaacaactaactaaagaaattctactgtcttacaggtgaatattttccacaaattccaaattcccaaagcgcatcacccgaatgaggaaaaagaacaaaaagaataacttccacttctcctctttgcaaaccgggtatcacaactttacttcagttatgccatatttactttgtctaatcccactgttgctatcaaac

SEQ ID NO: 117392 - DNA, 288 bp, Zea Mays
cttgaagccgccaacgactgtccgtctaattcgaagttttctgggattggccggttattatcgaagattcattccagattactctcgaattgcgaagcccataactgaattgctgaagaaagaagccaagtttgtttggggtcagaagtgcgaagatgccttccatgcattgaggcaacatctgaccacagcaccggtgttagcgcaacccgacagcagcaagccatttgatgtgtattgtgatgcctctggcactggactgggttgtgtcttgatgcaagacaaccg

SEQ ID NO: 117393 - DNA, 359 bp, Zea Mays
tattctaaattgaaaactcatgagttaggtatcgattataggaagcatggttcaaagttgattgcgttaacttcacaatctagcaagtcacatgatgataggaactaactagtttactaagttatgattttaggaactcagaaaacacttcaagaaagttcaaccctcaaaacaacgcatcacagatcgtctgagcctccaatgcggattgtccacgagctcttttcggaaatatcacatgtgctcgaatcatacaggcccttctgacagaccgtccgcgacactccaatgcacttcggacaagaacattgccaaatacacatttctactatagaccgtctgaaagataagtgaatact

SEQ ID NO: 117394 - DNA, 414 bp, Zea Mays
acattatttaatactagatcgatggggccacctatcgggaacttgggacccaacacccctatatgtggccccttggactataaagggagggcacatgcgatatgaaggggacaatgacttattcaccctcagcaatacaactcacaagtggacatagggtacttcgctctagcggcctgaaccactctaaactcgtgtgtgttcttgtgtttatgcaccatctctgtccaaccctaggcaacccctttgttcttaggattaagtgagtgctctctgccatccagctggagtttacctccggcacttggagcgtcagttaggggtggttgaaggtgtatgtgtttgagggcatcttcgaaagacgtgggacgacatcttcaagaccaaatacccatagtgggtaattgccatgaa

SEQ ID NO: 117395 - DNA, 448 bp, Zea Mays
taggatctaaaactataaaagaccttagcatgagtctaatgacatcatgagccgtccatctcttgctccatagtttcacacttggttcaccaaggtcttgagccaattgtatgtatcttatggctcttctcctctattcatggcgaacctcccaagttcatctttgacgacctccatcttggtgatcatggtcatgtcgttgcctttatgagcgatcttcaaagtatcccaaacttctttggcattatccagaccacttactttattatactcctccctgcataaagaagctaacaagacagtggtagcttgggcatttttatggatcatttcttgagcatcaatagcactatagtttcatcatccctttctagcatatgaattccattttatactacatccaaaatactagggtggagagaaaaaagacaacacattttatggctcc

SEQ ID NO: 117396 - DNA, 434 bp, Zea Mays
gctggggccgaagctgggatcacggaaggttcgaatctagaaactacccttgaagttattgacaatattctcctgaaaatggctgaggaagaagctgctgtggctgcggtaaccactgcaactgggaagggaaaggagcagatcgatgacacttcagaagaagaaagttttaactttcaagacttgcttggacaagagctaacagttgccgaaaaggaagagttgaaaaaatatgccatatcttgcgggtataagccaggggctacgctatttggtggggtcaacgaagggaagttaagatgccttcggaaccgcaccgaggctaaagttgttagaaccctctccaaaagcgttggcctaccgaaactagaagctgacctctgcagatatcaacgacaccatatcaccggaagcctgctttatgctaattttaa

SEQ ID NO: 117397 - DNA, 594 bp, Zea Mays
gatttatttaggtgtctttggggtatttatttaattgtgtaagtggtgtgttcacatatgatagtaagtagaaataacacacatatatagataaaggaattaattcctcctcttttattatatgttacaaactaggtgttacaactatagatgtcatcctagggatgaattggctaaccaagtatcaagccagccttagttgtgacaagagaacgatgaagctagtgtccttatcaggagaagaggtgttagtagagttggtcttatcaggaccaaggaaagggagttgtcaccaaatcaccgcctgtattgaggagattaaaccataagaggctatcaatgtagtgtcagaattcccagatgtgtttcccgaggagttaccaggtatgccacctaaaaggaaggttgaatttgccatagagcttataccaggcaccgcccctatttccaagagagcctatcaagtgtccggaccagagttggtggaactcaagaagcagattgatgagttgtgagagaaaggctacatcagaccgagtacctcgccttaggtagccccagtgctatttgtggagaagaaggatggaacaaaga

SEQ ID NO: 117398 - DNA, 571 bp, Zea Mays
atgaagtgtcgcgatggtacagtaactggattggatcaccagctcagagacctcgccgccggcgaccccacgcgtggattcatgctaacgccgtgattcacgctaaatcaaacacggataacaatcacgaggtgaaaaatcttgctaaggatgggctggaatgtactgtgggcttgcttgttcatcagtacacaccggcgacgtggccgtgcggtactcaccggcgggttcgccattcattgtgaggacgccacgccttaggaagttatcacgacagtatgagccgtagtaaccatccaatgaccaccgtagtttagtcgccctgctattgccacggtagatcgccgccgtgactcattcccctctcggtcgccagcacaattcgtccaattcactggtcaccgctcaagcccgctataaattgcgcataccctcggctccgttaaacagtcaagcgcctcatccagcaaaccgtgcctcgaatcatcccctagagctcgccaatttgggatttcccccaattcggtttccaccatcgtagaaacaccctcgccgtggctagcctgttcca

SEQ ID NO: 117399 - DNA, 362 bp, Zea Mays
ttcattcattcgcacttattcatatttcgtataacacctgtccgtccatgaattggagcaccagggacgcctctgcgcatcgcaccgacgagctcagggagcccctgttcttccgttgtgctgcgttgcaaggggtagaagacaggatcgcagccgtagatttaggtatgggcggtttaagattgaatcgcgccctgatgaatctgtgtcgttagatcttagatcggatggcggtgggtagttcagatttcattaaatatgggtcgtcagatcgtgatccaagcacgggcgtagcgtaccagttcatgccttggtacatctaatctgaaccgttgaaacccgatctgacggctcagccaacc

SEQ ID NO: 117400 - DNA, 529 bp, Zea Mays
ttttaggctctgactttgcaattatccttttgatagcagccatggtagttccatcgacacatccactatcttcagcttcttgacccgcttcaatagtcacactcactccaacgttctcctcaatagttaaagctttttttcattacctcagccagtggagttttgcagataggcttcattattgtcttgatttagcgcttcttctgcaaagcactttcgacatgcgttgttgggcactgacacacgtggatgtaccgtcaggtggacccatcccgctatgtggcttctcgttatatgtgacccatccaagggcaggtggtccaaagtacggccctgtccctggctaccaactatattcggacgatatcccatataacaaagtaattacagtgctgcccatacaacaaacggtgtgcactagacaatgcaaccacacactacgctcactggtgagccctcgcaaacgtcttctgatggactagtggcgtactgggccgaattgtagccttcgtctctagccttcgcatca

SEQ ID NO: 117401 - DNA, 423 bp, Zea Mays
gcaatttttcaaggacataaatggtaagaaggttaggtatgccgccaaatgcctttactgcaagtctcaacttactgcttcttcaactgctggtactggtcatttgaaatgacatcgtagtacttgtgcatctaaagctcaacgtgctgctacgactcaatctttgattcagtttaatgctgatggttctgttcgttcatgggactataatcctgatattgctcgtactgagttgtgtcgattgatatgtactttagatcttcccctaggtattggttccactgctgcatttgaacgttatataaaacatgctcataatcctaggtttactacagtttgtagacaaacaaccactagagattttgtaaagttttataatcaaagtcgtacttcactaatagatgtattgaaatctagtgtttc

SEQ ID NO: 117402 - DNA, 802 bp, Zea Mays
ttaaaacagagataacagggtgataaacaacattattaagaaattgtaggaactaatgggtcaatttggacgaaatatgaattttctagggattaaataagattctagaattgtttttatataagaaatttattttatacatcattttctctgattttctactcccctggaccgcgcacaagattaccgagaaaggcaggggttactatgcaaaagaccttaagactcaaaacttcaggcgcgggactgcgggttaatttatatctttcgcgggggctcattcgcaaagcaacaaccgcgaaggggtatcagcaggccagagccgtccgattaaaaggtgacgacgcggattagatcatggctttaaacgaaccggtatgcgactacaaccgcacgatcgcgatctaacgtacaggattcattggaccgaaacgttatcccctggtttaatccggcccgttcatcagtcaatcaatggcccacagtaattccttccccagatctaatccccctcatccattcacgatcgaacgacagggagcctttcttcctcccagagaccgaacaacgcggcgcgaagtgcccagcggctgcgaccggcccttcttccccaacccgctggccgagagcggtgacgccccggggctctgcgtcccgctcccgccgatgcaagatgcctgatgccatggtgggaggttctttccccaaacacgaacatgctccaaagaaagtgggatggagggcagagtcgagtgaacatacctctcaaccagcgatgacaagcagcatagagccacccatg

SEQ ID NO: 117403 - DNA, 759 bp, Zea Mays
gcggttgtttgaatggtaagggaatgacgcggaattaaagggaatagtttccacatgcaaacgtgattactatgatacgtgggcacgtaatttatggatcttgcatgggaagtaatggcggaaggtaaaaaaatgtagcataagatattgaaagctatgacataaaacaaaaacggcataatagttgcataaacagtatatacagtttggcgtaaaacgttgagtcattgtgcgtaaatattttagtatggattttagtttgacattgacgtcgccataatatcgggacggtttcggaaataatggggagaccctgtaaacgtggatgcggttacttttatagtatccgagatttactttcattcgaaaaaaagaccactaagcctgcataactaatcggagttggagatggccggctctggagagtcgccggcgatggaaggagatggcgttcgtcttgatccagagacagagggaggagttggtggtaactcactggtgacaccacctcctgctctaatgggtcatgagatcgccgagatgagcataggggaagaaggagaacaaagggttcgacctcctatgtccaatattagctccagggagatggatacgccacaaatactgcattcacatgtaagtccaatcgctgtatttgattattgattgaatatattgttgtgaacatattccatggtacaaacaacaatgacaatgaaatagcaggcaaaaaaacattgatccaactatagtgccaac

SEQ ID NO: 117404 - DNA, 816 bp, Zea Mays
gaaaaataggaactcgcgctcgtcgccttcctccaagcaaatgccgacatcttcacttgggagccgtcgcagatgcctgggatccccagggaggtgatcgagcaccaactaaaggtctacccggacgccaagccggtaagccaaaagccacggagacagtccgtggaacgacaggacttcatccgtgaggaggtccggaagctgttacatgctggctttatcgaagaggttcatcacctcgtgtggtggccaacccagtcatcgtaccaaaggcaaatgggaagcttcggatgtgcatcgactacaccagcctgaataaggcatgtcccaaggatccgtacccactgccgcgtatagatcaaatcgtggactctacctcggggtgcgacctcttgtctttcttggacgcctactctagtttccatcaaatccggatggctaaggaggataggaggcataccgcttttgtaacagtagatggactatactgttacattgtaatgccctacggtctaagaaacgccttgccaacatttgttcgggcgatgagtaagaccttcggggacctgatccgggacaaggtgcagatctacgtcgatgacatcgtggtcaagactagggaggggtcgactatagtggaagacctgaccctggtttttgacaagctgtgggcaacccgcaccaagctaaacccggagaaatgcatcttcggtgtctctgcagggaagttgctggggttcctggtttcatatcggggcattgaagctaacccggagaaaatcaaggctattcaggtgatgaggcctcccgcccgta

SEQ ID NO: 117405 - DNA, 312 bp, Zea Mays
gtttaattcctataccttcaggctgttgtacgcaaggctgtctgcgagatcctctttcgtcatggcacttaacccagcttcaagcttcggaaagcctaggcttctagccatttctcggcagacggatagctctttgttatcaggcaggcagtataagaagtcatcttcatttgttccattgaatattactgcccccttcggatatttcagctcctttgcataatgattagcttcatgaatttctccatcagatagcttttttcccgaagcatgtcgtatgatgtaatcacacatgctggcaggcgcttcggg

SEQ ID NO: 117406 - DNA, 530 bp, Zea Mays
caataaacctcaaagggcttggtgttgtcaggttgagctagcactggtgcggttgtcaaatgctgcctcagcgtatgaaaggcatcttcacacttctggctccattcatacttaactcccttcttcaacagttcagtcattggcttggcaattctggagaaattcggaataaatcatcgataataccctgccaatcccagaaaactctgaatctgccgcactgtggtaggaggtttccaatccattacttcttgtaccttctcaggatcaactgataccccatccttagaaattgtgtgacccagaaattttatctccttcagccaaaaaccacatttggacaatttagcatacaactgatggtcacgcagtctctgaagtacggtatgtaaatgcttactgtgctcggcttcatttttggaatacaccagaatgtcatcaatgaaaaccaccacaaatttgtccagttctagcatgaacactgagttcatcagatacatgaaattagtgtggatcgggccgcaccgccg

SEQ ID NO: 117407 - DNA, 420 bp, Zea Mays
ttcagaatatggccacttttagagaagtgggaaatgccgaaggagactgtcactaaaactggcgaaggagagctggttcgactgaaatacaacttcaaatatggagataaatttgatgagccaaatgatgactggctaaaatgtatcgaagctacaagtgatgaactgcttgggccgtactccaaagcggaagataatgcgttatctacggccttcgggagccggaaaaagaagaggctaaatagagtttttgatgctattggatttatatatcctgactaccgttatccgccaagggggcagaagagaaagagtgcaacttttgggaaggatgttacttcagctgctccgagtgagcccgcgccgaagaggagaaagatgaaggttcttactcaccgaccgcgctgtattgaaccggcc

SEQ ID NO: 117408 - DNA, 570 bp, Zea Mays
tgcggtgggtgtctttgggttgctgctgctactgaatattatggatttgggtctatgatggaggctattgcatttgcacccaagtgttggagctccctaggtgtgaagggccctttggcttgcgttgtgctttgaccatgcggtagtggaggtcttcagaccaggcatacttttcaaacagctaatataactcctggagggttgccagggggtccctggtgcagtgattatataaatagccggcgtgctggctgttgatggcataatggattgcgattccgtcctctactaacggcagctgagacttgagggataagaacttattatagtaatcacgaaagctttccttttctagttgttggcataatggtagttcaccgagggcgtcggtctacgacatgtacccctagaagttaagtaggaatttctcccaaagtgttgcccatgcatcaattgtcataggaggcagcctggtgtatcaagttagagcaaagccctcctgggcaatgatgaaggattttaccattgtgttgtcatctccgctagatgaggccactgcgacttggtagc

SEQ ID NO: 117409 - DNA, 1137 bp, Zea Mays
tatccctgcttgtcatgctcgcaaaagccagactaaaatatgacatgtgaatgcatttgtgggcgtggcagtgaactttgatcgaagctgcgtatccgtcgtgtgagcttgctatatgttttgtcttcagcttggcactgattttggaatatgcatgtttttgcctggctcattgatttttcaaagaaatttaagttctaaatttctaatggtcatagcattgtgctgcttcttctctgagtcgctagttagtttttataagtatttggcatatgtctcggaagcttctacttgcgctctctcacatgtttttctctaaattggttctttgcatttatcttgatggagtgctttgtcaacaagggggagggtgagtagcgcacaaattcattttgcagggggagtttgattcgtttttgctgagacttgacatgcttgttttgagagggagttttgctgaattttgattcactttggagaaagtgattttttattttcttgattgtgtcgagcctagctattttttgctagcccatgtatttggggatcaagatatttttttacttacttatgttcgaataaatttgtgcggtgtggtgttgtcaatgcactcatcaagggggagattgagatgccggtgggctagcaccttggtgatgagcgattgacaacacggtgtgcgtgtgacgttcctcttggcaggctgtggttgcaggtgacaggtggagataaggtacgtgcggcgacgagtgaagaacgaggataggatgtcgtgccgaagaaccgctggggcggagaagggcggatcgaggcctgcgtttgagggacatgcgatcgtgcggtgtatgtctactgtacctggctacacggcgggaggacatcgggggaggtttccagattatgccacaaaatccggggttcgctggttaagccacaaagccatgcatcgtaccgggacgctcgtgcggcaggcattggctgaagatggaaattccggcgatcgcgatacgatttcggatggtcatgcggtgacatcgtgaggatcacatcgcggagatggagggatcgcggacatcgcggaatttaccatggaagattagacataattagaatttacgctcctacgttaaatttatt

SEQ ID NO: 117410 - DNA, 385 bp, Zea Mays
ggggggtatctgagatctccatactaatacatcaaattttccatgtctcttgatgcttccatacatcacatcttggattcttatctctggaacctcttcttgggaagaccggtgatactgatcacaaagcatgaaatcttcagaaggcgcagccattctaccaagctctacaggtacattttgactaaaaagaacagaaggatgcaccccaaatttggagatatgcttctggatgcaccagctcaaaaagctcagaaccttacaccaaaagtgtacgttaaaattgtccctcaacaaataagaggtgacatatgcaccattaattgaacaatttagctttctggctatctccatggccagttgggcaagccttgggtgcgtgttg

SEQ ID NO: 117411 - DNA, 773 bp, Zea Mays
cacaacaatgacgccgagtaggagtggcaatcgatgaacgagcagagaactcggatggcagcctgcagcgcacggcacgacaataaggaactcagagcacgaagggagagaagcgaggcgagtgacttagcagctggagcaagtgtcgagcagggagaaaagggatgaagctcagcaccatttataggctggtagaaggaaatcatggcctcgaatttgattgtcgtagagaaacgtcctcacgaaatgccattaatggcaaggagaaactgtcatcgcagagaagaggagtggtggcggcagtggtggagagtacgactgggttggggagatgaatcggacgagcggtggtgagtgctccataacgccgggaggtgaagcggtgacggcataaggagcagggcgcgctagacggcggcgagatttatagagcacgaaagggagccagggcgtcgacagccattaatggaggtggagctatgtagaagaaacggttagcagtagtgaaagggagaggagcggacgacactcgggggaggagaatggccagtgcgcggtggtgttctatggaggtgaggtggaatccgcggggagccgaaccggcgttcactatcgatggccttgcgtgcaaacaggcagaacgaatcgagagagaaagagagtcgtgtgggagaaagaaaagaaaaggaataaaataaagagaaataaaggtggcatccacgtgcaagagagagaagagagagatgcatgcgattggtcggctaggattttgg

SEQ ID NO: 117412 - DNA, 537 bp, Zea Mays
tgttttggtagtagtggtggtggtatgggtgtggttgctatgtatgagcgatggatctttggttgtctgctcgggcggctttggccattcggtcattggttactttagtctccaggcagttcattgttgggtgatctgagtcttcaccgtggaaaacatagtaaaatgttcttggctatagatggccctggcctctgcctcttcccctggttgggttgctgttgcggccttgttgcagagggtagttttggcatctggatggacctctcctggttgttgctggtttgcaatgttgttgacttgtacctggccgtgctcgtggttggctatgtcttgctgcgggggcctggtccatttcctgctggtctgcggagtctcttttggcttctaaagtggctcgactttgctttggtggagctcctctagacgggcatatttctcgaagagttgatatagctcctgaaggttggtcggagggtcccttgtgcattgactgtataagacacctgcccgaaggccactgattgcataatggat

SEQ ID NO: 117413 - DNA, 477 bp, Zea Mays
aacgcaaacacgatgtcacgacggggtaacccacatggcggtcatggcatggtctgtgcgcgttccagccacccatgaaactacgccaaacaaaactgaaagcataaatactggttccaacaagattacatggtgctcagcactttatttgtctaacaaaacacccccttaatcttgttgaacttgaaccactcccagcctggttctcagctcgacaaactaagccttgcaagtggctttgtcaatatgtctgccagctgattgtctgtacccacatgttctacatcaaccacttctttctcgatgcaatctcggatataatgatatcttgtatcaatgtgcttactcctatcatgatgtactggattcttgcttagttcaatggctgacttgttgtctatcaacaacctgaacttttggacaatgcggtttagtatatctgccactagcatgctcagccagactccttgacaggct

SEQ ID NO: 117414 - DNA, 575 bp, Zea Mays
tggatacttatgtttgtgttggatacttatgtcaaagcttgagacttatgagacttatgttcttgatacttatgtttgtgttgagaactttgatacttatgtttgtgttgagaactttgatacttatgtttgtgttgtatacttatgtatgtgatgatatctgtgatgtatatgtgatacttgtgatgtatatttggtatcttttgtttgtttggatggaatatgaaaaacaaataaaaaagatgtatactggtgaaagttgcctagaggggggtaaataggcaagttaaaactttttcaacaaaaactagaaacaaactgggtaaaaccagttcaacaggtgtcaaaaccggttcaactggcttgcatgagctcaactaaacgatgagatataaaactgaattgatctcaaaattcacatagttaactttggaaatgagatgttctaaatgatccacaggattcaaagtagtagatctgagaagggcacttatcaaaatccacacaccaaaaagatatgaacaaatcttccatggaagggtgagagaacgaagaacacaagagacacaagattt

SEQ ID NO: 117415 - DNA, 564 bp, Zea Mays
gtgcagagcgacagatagagctagtggaccacggtcttctctggcgtgaccaggtgcttctcttagttgttgtgcgggctcctctggccaaacccgtcttcgtctcgtcaacgtgtgggtaaatgctctagcgtgtgggtagatatgtcaacactgaaagaacatgtccccggtcgaaccctacgccaccaagcccggggtcaggtgtggcggaacctgatagggggggacgagtcagagggaaaccactcgagtggatcccgaacccggccccagattgactcgtcgtaaataaccggcctcattaaccacgcctggtaccgagccatcgcgtgagtgtctgcctgcttcccactcatgcctatgaacccctcaggcctcatatcactcatgacctatgaacccctcaggccgcatagcactcatgatcgacgaaccctcctgactgtgatgcatttatggttcgcatgcccctcggcctgtggtgcactaatgacctatcagactaggcatgagtgcagaaactaatggcagtgtgcatcacgttgagccacaccgtccggg

SEQ ID NO: 117416 - DNA, 1272 bp, Zea Mays
gaatgggatgctcctgaatcaaaaagtacagtagcgggagtaaattcaactaggaactcaccgagcactactcccggagcttgctgagcctcttgagcatcgacgtggtttactcgtgccctgccatgatactgggtcttgcctgctggctgatggaggagggtgccttggaggcgggcactggggcattcttggggccattcactgagttggagtaagtaggtcctaatgccttcaactaggggcagttattcttgaagtgactgggtctccgcagtgccaacaggcattagctggtggttggttgcttgcgactgagggggcctgaaaggagctctgtctctgctgactgaaacgtgacggagtggctccagctagcttattgaagcttggtcccttgggtggaaacccaaaggatcgagttctctggtgccggtcctgcagctgagctcggaggacttggaatttcctcttgaggtgacctttttcttcttcccttgccctttccacttgtatggctttgtttgagaggtgcgagaagctgaggaaatcctggctggcgaggatagtcttgagttctggtcttagccctttcaaaaagcgggccatcttcttggcttctgtactaacgtcgtcaggcgcgtagcgagccaattctgtgaatttgtgcacgtactcactcacagattttccaccttgagttagttcccaaaattcatcttccttgagctgaacgatcccttggggcacatgatgttctcgaaaagcagtttcaaattctgcctaggtagcatctctgacggcagcgctgaaggtatcccactaggatagggccatcccggaaagttgatgagcagccaaataaacacgctgattctcagggcatctgatggcttctaacttcctttttatcgtgcgcagccagtgatcagcatcgaggggattgctggatccagcgaatgtcggaggcttgagccttagaaaatctcccatcctgtcctgtggtcttccaccagtcgggcgctgattctccagacttctagcgaggacttcaatgagtcgggtttggttggctagaacttgggctaaatctaatggcagctctagaggtgcggggaggtgggtttcactcccttctccaccggcttcttcttcagctcctaggggaaaccttgctccaatcctaaaggcggtaggcgtggttttatccgaaaccatctgccagggggagagaattactactatgcatatgccaattttttttcaaccatg

SEQ ID NO: 117417 - DNA, 1254 bp, Zea Mays
ggggaaaatcctagctttgataccatgtgggaaaccctaaccctgaaatagggtggggtgatgtattaatagactaggagtgttgggccaggcccattacagcgggggcgagagggtaattacatagggagagccccaaaccctaatagttacgctaacaggtggatcaaggcagctttccaacccgggagacggtcagcaatcttaccgatgagggaaataatatcagccttagtgatcttccgcactgagagtggtaacccaaggtaattgcaagggaagtgtaccacaatacaaggcagcaattcttgttccgttgataaatcttgctctttacaatgcataggagtgacagagcatttacttatgttggtcacaagtcctgcggctacgccaaaggttcttaaaatctccttcaacaagtttaactcctccacacaaggcttaagataaaggacgacatcatcagcatagagagaaattcttttcgcccctcccctcctaaggagaggctgcaaaagaccttgctcaatagccttcatgaccaaagaattaaggacatccatcactaggatgaaaagcatgggggataggggtctccctgcctgagacccttttggtggcaaatcaggtcccccgattcaccattgacaagcaccatggtggaagacgatctgaggagcttgcaaaggatattacaccacgcaggacaaaccaaggtatctcagtacttccagaagaaagggccacgaaatagagtcaaaagccttgcttatgtcaagtttgattaggatacgaggttccttctggatgtggagagctttagcagtttgttgcacaagaataaaattgccgtgaatgcacttgcctttcataaaggcactctaattttcagaaaccaactgatagagcttgggcgccaaccgggaagccaacaacttggttacaatcttggcaaaactatgaatcaagctaataggacgataatccttgacagccatcgcctcaataaatttcggcaagagaattacagaagctgaattaagcaaataaagcttgttgtcatccccttgcatcagccttccaatagcagccatagaatccgatttgatgatctgccaagccaccttgtagaatctccatcaccggagctgctcctgtcctcgtcggcgttgcagaccagttgccatcgggtcccagcacgtcgccacccacccctatagtcagtccctctgccaccggcgttggcagggc

SEQ ID NO: 117418 - DNA, 343 bp, Zea Mays
tcacttagttcattgcttattttatttgtttgttggatggttgtgaaattaatattatcggggcgaactacccgacaaatatctgttatctacccgagtaatattcgatattcgttcttacccgcccgaattattactcggtcccgtcctgtatctgtcctgaatttgaactactcgtaatcggtctcgtatctgagataaatacattagggtacgatacggggtgaccctgtaagcctgtatccgtcccgttttcactcctatagcccgatatagaagaacaagaggccaaggtcgctcgtccaaaacagacgatccatttgctccttgaacacttcgatgt

SEQ ID NO: 117419 - DNA, 378 bp, Zea Mays
aagccatggaaaagcaagtcgcggatctgacgactctcctccagtccttcaagtcggcgttggaagaaaacacaacggtggtcagagatctatcgaactggaagccttctatcgaagctgacgtgagtcatcttcgcgcggaggtgggcaagctgtcgaccaaagttgatgacctggtggctctccgtgaagttcatcagcatgcgcccaaggtgtttgatcaaatgccacaggagttgggcggttccagcacgcctccatatgtcaatcgcgcagcacctgatggctttggccaccgttctgcttaccagaaccggggtgatgggttcggggtggtcaccaccttgtccccacctccggtcacaggtattaatcagc

SEQ ID NO: 117420 - DNA, 458 bp, Zea Mays
cagaaacgcaagtgttctgtgcacctctgtgattattttgccccaagcctattttcttgctgcacccatatacttgtacctcctttcttgtgccttggtccaactgttctattacattttctaggccagcaactagaatgagtacttggaacacttattcagcattgctatctattactgacttgtgtgccacatatatatatttagtcagccttcccagaactctagctttctctcgagcagaataggtactcctttgcaatcacacccacactagttggacagtcacaccggtcaccgtttgccacctgcagtgctggtaagaacgttgtaagagcggggtaagacgcttcataatttgtattccaccaccaccaccaccccgagagatagttgtagggttcgcattgtttgttgcctttttgtttctgttttgtgctaacaatgacaggaccaaa

SEQ ID NO: 117421 - DNA, 588 bp, Zea Mays
atagaatagaagtgaaaggcaaatgtcatgacaacttgacaaacatcgttccaaagcaaaagaggacaagaagtcgacaggatggtctctaaacagttaacactggacctaatgaccttccttggattttgttggaccaatagaccacccaaaaaatagacatgcatcgtcggtagtactcacttttccatagccatagatggtaatggtatacatcgatctggattgtttccaagtcgaagtcgaacaccatggcaacatgcattatcaccaaatcaccacatggcctggtgccctcgtcaaagtgtagccttcaaccaaaatgcaggattaaggagcttctccgtcatggatcgcgatctcttggagattcttgccgtgatacaaatgcagctgccaagagaaagagatcggtatgccatatcaaaacggtggccttataccaccgctccaggtgccgaagttctctccgggcaactcgtagccagccgcgttccctccaagatcatacagtgacatgccatgaccaatgccgccgacatcgccacccgtcactccagaagactgcgacgcctcctgttgctgtcc

SEQ ID NO: 117422 - DNA, 490 bp, Zea Mays
gcatcggtgcttgggtctgttcgctcgccttggttgggatggcacccaggggtgtctcctatccattctcagatgctccctccggcccaagcccaggttctggagccttcccctcatttctgcgctcccgtggatacttaacgtaggttagggtttccttccgatcttgttggggctcataccttccctcgttgtgccacttttctcttgtgcctctggccgctccgtgtgtcgtctcgatccagcctcaatggtgggtggtgtgtaacccctctttgcccttcgtctggagaggaagaatggtcgtgtctgggtactgttgataccaggtgctcttcactacctggctcgaaggatccgaaaaacaaaaatccccagtgcgatcgttggggccatagatagaatccccaggggtgcaaacctggaacagaagcaggaatctcagctggaggttgaagccgtcgcctgggaagtcagaacatcaggaaga

SEQ ID NO: 117423 - DNA, 352 bp, Zea Mays
ctaaaaccctaactccccgctcaccatgtgctcggtgaaatgcccaaaccacccaaacttgctccaattgaacccaaatttttcaggcaccttcaccacacttccagtaacctacttgccaaatttgacaccaatccgaggtcccaggcttaaattttaccaaaattcccgttttgagcgatcgtttccgagccgagtgcccaaattcctatttcttcgcctaaattcaaaccgagcacacacttcactcattttgacctatataaacctattcgtgaagtatcggctcaattccataacatttcgtgcctcatttcgaattccaaacctcctatgtcactatttatctatc

SEQ ID NO: 117424 - DNA, 533 bp, Zea Mays
aatgttctcccaatgtattagagtagagttagcatttttcaaagtgtttttcataaacattttctcttgtttcagaatgtgttaccaggtttatatgtaatgcacataattcgaacacctagtagcactagatgatcgagttatccaattaagcttttctcttaatactataattatttatcaaaaaatcgatcatgtactctattgtatcttgactggtaaaataaagtaccctagctatacatttgccttgagcttttgcattctattttcctttgtcttcttttcttatttgaatactagattcacatttatgaccatggcattatttccatggttgccattcttgttcaattttggatgtcgacttaaccttgcttatacacaacaactcacaagttgtctcaactatcaaaaccaaatgtgggattttcaatctctccaatataggactttcaatcttccccacatataggactttcaaatgtgagtagaggatcatgaatcgttactactagatgcgcagtgcggca

SEQ ID NO: 117425 - DNA, 495 bp, Zea Mays
cctctctcgtctccctatttctctctcactccccacctcccgcgcattccgcaccgataggtaggctcacccggactcgtctcccgctcccccctcccttttcccaaaaccctagcgggtttcgacctcccaggccaatcagatcgaccgctgccgcgcgcaattgttgagccatcgaggtaacgtctccaatcgaatatctctacctggatgattttcttgttttctttctccgtacttcctttttccgcgtcggacgatttcttcttagttcacttgatgcgttggacttcttcaacctgttagttgtttgtgtgaattactctatctagtgtactagtagtgtttgatgggatgtggttggatggtccaactgttcataccactgccaaaaaaaggagagggggagggtgagctatcggtgaccagtgcccgcccaatcgatggccttcttggaataaaaaaactcggtttatctgtctgtggtatcaggtt

SEQ ID NO: 117426 - DNA, 854 bp, Zea Mays
agtgagtacatccataaattcacggaacttgctcgttatgcaccagatgatgttagcacggaagtcaagaagatggcccgtttcttgaaagagttaagaccagaactcaatactatccttgccagccaagacttcctcagcttctcgcacctctcaaacaaggccatccaggtggaaagatgccaagaagaggaaacaggccacctcaagagaaagtttcaaattctctaagctcaacagcaggacaggcaccagagggttcgatcttttgagtttccttccaaggagtcaaacctcagcaagccaacaggatccgctctgccatgtttcaaccagcctggttaaagttccttccacacccagtccgttgcaagcagccaacctccagccaatgcttgttggcaatgtggagacctcgaccacttcaagaataattgtctgcacctgaatacatgcgtacctgcctactccaactcggtgaatggccccaagaatgttacgtcacccgcctccaaggcaccctccaccaacagtcagttaagcaagactcagttccacggtagggctcgagtgagccacgtcgactcccaggaagctcagcaagcccctggagtagtactcggtgagttcctagtcgaatttacccctgctgctgtgctttttgattctggagcatcccattctttcatcgccactagttttgtggaaaagcatggtatccccactacaccattagaagtccctctggtcactcggaccctagggtcagaccttctctgccacctcaaatgctcccaagtcagaattcttttaagtggggtagtattcctggcagacttagccgtactaccatc

SEQ ID NO: 117427 - DNA, 436 bp, Zea Mays
tttctaaatatttttcctggttttatccattatcaggactgggcgcactaatacagggaaaagcaggggtctcggtgaaagaatcactagacacagaccccatccatgtggactgcgggttgattcttaaaactacggggtctctttagacaaatgcacggccgaaggggtaaggtaggttctcggtcgttcgatcaggagcctgcggttcagattagatgagctctataacgaaccggtacgcatctggggtcactggatatgaaatctacgatcacgatttaacatagcgaagggatatccgcgacccgatcacagccatccgtggatcgatcaacgtcccaggtccttctcctagctccagctgcccaggcacagacaccgcgccctccccagtgcactctttctctctcccgttgctccaccgacgtgcaca

SEQ ID NO: 117428 - DNA, 535 bp, Zea Mays
gtgtctaaggagatcgtatcggactggggatcacagtttacttcttggttttggcggaagttgcatgagtacttggatacacggttgaatttcagttcggcctaccatcctcaaactgatgggcagatcgagaggaccaaccaagtactggaggatatgctaagagcttgtgctcttaaacatggtgttagttgggataagagtttaccgtatgtggagttctcctacaataatagctaccatgccagtttgaagatgtcaccgtttgaggctctatatggcagaaaatgcagaactccactgtattgggatcaaactggtgaaaggcagttctttgggcctgaaattatacaagaggcagaagaacaagtgcgaatgataagggagaatttgagaactgcacaatcaaggcagaaaagctatgctgatacccggaggagactactagagtttaaggagggtgatcacatgtatcttaaggtgtcaccgatccagagtatgaggagatttaaagtcaaagggaagttgtcccctc

SEQ ID NO: 117429 - DNA, 409 bp, Zea Mays
ggtgaaggttacttgccaggcagatgaccaagcgctagtggcattcggctacaccagaagcaacggcaaatacagcgtggtcctcaagggactgccgattagtagcagcagcagcagcaactacggggctgctgactcgtgtaaggtcgagctacacggagcgccaggaggatcggactgcaacgtgccgatcgagctaaacctgtcagggctcagcgtctactcccgatcaagcgaggaggtggtcttcaaagcgaaccagataatggcgttcgcgtccaagaacgcgtttggctgttcatcgaaaccacagacgcagtcgtcatcaccggttcatccctactacagctccccaccactcatccctcaccagtacccctcgcctccggtgccggcggctacccacagg

SEQ ID NO: 117430 - DNA, 645 bp, Zea Mays
cattggcttccatagcctggggctcagtgcagcccatcgtgtagtgccctgcgggaggtctatgcactcaggccaagtccgatagatcataagtgcgatgtggtccgagggcgcatggggcattaatgtgtcgtagtctgagggctcataggtcatgagtgctatacagccagaggggctgtaggtcatgagtgtgaagtggaccggcatccacgctatggctcaatgccaaacatggttatgctgtcattcatttatggcgggccagtccatggccgagctgggatccactcgagtggttcccttctgacacgctcgtcctcccttgttaggctttgccacacccggttccaggttcgatgctgcggggttcgaccgggggcgtgtccttctagagttggcacacttgcctcttctgactaactaacgggcccaacgatcagaggccctttctttagcgcgttcagtcgttcactgaccaatgggtccagggaccgaggatcatttcctcgatagtagcccttgagcctccagtgggagagtgtctccctttgggggctgataacgggtcggacatgcgtcatatctgttcattccccgagcaactgtggtgttccctcggaaattggtgccactgtcgtccgc

SEQ ID NO: 117431 - DNA, 442 bp, Zea Mays
cagatggaactttcacatcatgtaacagatcaaaaactttaattttttcctccttggtcagagtataccattcctggggtttttcaatgttcagctcatcaaggtcacactgggcgttggtgttgtccttagttttcccttttatgttaaaaattgtaccaatcaaagcttcacacacattcttctcaatatgcataagatcaagacaatgacgcacacttagatcgcgccaataaggtaacctccaaaatatggattttttcttccaaattccagacaatgctaaattgtgtttcccgaacttattttcaatgtccttcacactctcataaaccacatgtccaggcctgcgtgatggagccttttattttcaatactcccatcaaatgcatcaacattctttcggtatggatgatttctgcgtgtccacctacgatgtccc

SEQ ID NO: 117432 - DNA, 528 bp, Zea Mays
gccaaaactctaaactccacctcagccagttggcacggggaccccagctgtatattgcacaagggtcaagtcatgccgatgttcagtctcaaatgactcattaccatggtcatgagtttctccctcttcttctcatcggccttcacataaaaccactcgtttgtccacccagtcggccatttggtgcagtagccaatcaagggggggcttattgtcctttcggtacgcaaagttgtagcactcgaaattcttgtgcagaccatcggctcttgccttcgtctgataatgaagctcgtgcacccgatagaaccctttggcattagcactcttcccttggcttcgaagaatccaaatatacacgctaagcctaacaatggcattgggggtcagctcttgtaggtagatttcaaacttttttcaaaacttcaccaatcatctcataaagggggaaccgaagtcctgccctgaagaagctcttgaagactacaacttcatcctcttttggctctggaatcatctcctctccag

SEQ ID NO: 117433 - DNA, 698 bp, Zea Mays
ttcagatgataaaaaatctagaaaatctgggatatgtgaaaattttggatactctttttgctaggatttcaaatttttaaccgtgaatctagctaaaaaagctgaaccaaatataatcaaataatttattcaatttttatcgcaagttattggcgtgaccctcggtatggaggaatttggcaaaatgggtcgttctatcttgccgctctgcaaaacacaccgtcacgggtaattttggggcacctggcaggtgggcccacgaagccttgtgccgattatgcccttacggcctcaacgcacgccgtctgtttcccatttccctttcttctctggaggcctctcgtctctgtcttcgcacgcaacgccatttccttcctcctcctcctcctctgtccaagcggtggccgtcggaggctaacttttccggcgacggtgacgacgtccaccaatcccctctgtaagcgaggctcctctgtaagctttcccctaacttcccccaaccctctgtaacattttccttcccagccggatgtgcggcgaacgcgagcaggtggatccaggggtcgtccaatcctgtgatatctggtgacgacgacgtctaccactccctcctcccccattcaggtaacctttcccctcccctctgtcgcggcgtcgtggtgcccctcaattatggcggcgcccaaggtctatccccg

SEQ ID NO: 117434 - DNA, 1331 bp, Zea Mays
cctggtcgccgaggagagttcctcgacgacgtgatccgcacacacgactaggagaactgtctccaggtacacgagaggtaagaagtgtttgggatttcagtttctgttattcgatacccctggtgcttacagattgttccatttatatcttactggccataagccaaatctccaactactactgccataggcctaaaaacatcaactagattacaagcaggacacacctagatatagctcagaattaatactaagcacttatcgactcaggtgtcactagagatcaccacacctgccccctctttagattgtgcatgccctcatggagtaagctcaggaaacatcttaaccagcacattccaatcttcccaagaagtggcttcatctttttttgtccactgaaccatcacctaggaaatggcatgattccccttcttcacaagtcgtcggtccaagatcttcaccagcctcagtgctccttgctccagatttagtgttgttggtaattcagagaaaactggtcgataattgggtgtaaagggattcaaccgtgaaacatggaaaactaactgtattgaagccccctcaggcaactccagctatacacttcactatcttgaaagggccaaagtaccgaaaagaaagcttaggacaagagcgaaacacaaccgaatgctgcacatattgttgtaacttgagtaagaccatctccccaacttgaaaaattcgatcagtcctcaatttatcaacctgttgtttcattcgattttgagctcaggccaactacactttcaacatctccatatgacggaatcgagcctctagcatttcagacacctgcacatcactagaattatgcactgctagagcagcagccactaatggctcataaccatataccactttaacaggagaacaacctagagatgtgtgataggaagtattataccaatacttagctaaaggtaaccaggctttccacttataaggtgaagcatgcacaaaacacctcaaatacatctccaaacactggttaaccctctcggtctgcccatctatttagggatgacaagcagtggacatcagcaacttggtttgcatcaaagtaaaaatttgcttccagaatgcactagtaaacaccttttccctgtcagaaacaatacacaaagtcatcccatgtagcttgcaaatgttatccactattacttgagccacttgttgtgcagaaaatggatgtttcaaagggaagaaatgggcatatttggaaaagcgatctaccaccaccaagattgttgtatatccctctgacttaggaaagccttcaacaaaat

SEQ ID NO: 117435 - DNA, 1023 bp, Zea Mays
aaaactgtttcttgtagcacggtagtacctttacattcccagttgtcacacaagacatcaaagcctgcaccattctttcaagccacacaggatctccataaaaaactgaatcactgttactaaaatcttaaaattgtgagttagagtaaccagtaataagaatagtcatagtcactgatccatacagaatgttctgctaccttgggtcatttattgtgccggcgtggtaattgaatctgataaatcttgaaagataaccaagagctctaacagcgtttgattttacctgaatgaaaatcaaacaacttttttcaccacacatacaagcaggtttgcttagtttacttgtttcacaatgaacatcgttctccaactatctctgtatctgtattccttgtggataaaaccaacagtctgctatggatgacggcgaacaaacaaaaacaagataaataaaggcaacatatctagtgtaaaataatgatgctaacatcaaatcttatctatcggatccaccgttgagtgcaatcccacctgaggacagtatccttttctgcgaaaatgtagggggggggtctttagaaaatagtctgaaaggaggtaggattgcactcacccgattctgttagcatgttaacacactaatcctttttacactatatatgttgccatacataaattggctaaagcaagcttactttttcactatctttggccagacgcaaagcaacttcaaccaaaagagatatgcttgatttgctcaatacacctacacctgacaaaaagataataaatacataagcatgctctattggaatatacactggcactgtaaccatcaacatgaaatatgtacctgcatagggatctgtatgcacttccagtgctctaaaacgaatacaagaacagagatttgccaaagcccatgcagcggtgacacgaacctaatattaacatttacaggtaagtactacctccgttcttaaatatatgatgccgttgacttttaaaaaaaactttgac

SEQ ID NO: 117436 - DNA, 273 bp, Zea Mays
tggacaattcggtggaaaatctctggtatggcgacccctgtccagttcgcttttgctccctccgtgcgtagcggttatctgtagggtaggaaactcaccggggcggcgttggggcgtactccgacggcaccaccatcacgcagagagctcttctcgccgtggctcgccgtcgggaggatgatgacagcgggtggccgttggattaaaatgaacggctgtgatcaattgctacgtcacgattcagctggatcgtttgggaccatggatcatagg

SEQ ID NO: 117437 - DNA, 1489 bp, Zea Mays
ccacagtccaaataaacagcacattcttctttaacagatcagtcagaggacgggatatcatgccaaaatgccttacaaacttacgatagaaacccgcgagtcctagaaaactgcgcaactctttgctatttgctggtgtaggccattgttgcaccacagttatcttgtcgggatctgttgagacaccttgtgcactgattatatggccgaggtaggaaatactggtttgagcaaattcacatttggacaactttactttccactgatctttccaaagcaattgaaataccgatgacaaatgagtcaaatgagaatcaaaagtggggctatatataagaatgtcatcgaagaataccagggcacatttacgtaagactggtgctaaagtggtattcatggcttccagaaaagtgttgggagctctagtgagtccgaaagccatcacccgaaactcaaattgtcccaaatgcgtttgaaaggctgtttttggttcttcgcctggtctcaaacggatttgatgataaccggccttcaattctagcttgctgaaccacttagcttgagtgagtttgtcgattaactgatcaaataccggaactggatattttccttttactgtgatagcattgagataacggtagtcgacacaaaatctccatgtccgatcctttttcttcactaataaaactggggatgagaacggactatgacttttctgaattactccttggtccagcatttgtttcacttgcgtctcaatctcatccttgagcgctggcggataacgatacggacgcacagcaaaaggattggcgcctggcaacaatggaatggcatgatcacactgtcgggtaggaggcaagccaaccgggtcatcaaaaacttctgtgaattgggagagcactgcctgcaccctgtcgtcggcaggaatttgttgctggtcactggttggtgttggagagtcagaaaacagcctcagttcaatcaccgcgcccactggtaacgtcgaccgcattccttgaagacagactgaggtgccctgataaggaatagtaatccacttgtgataccaatcaatatgcatgggactataatgctgaagccaatccatgcccaccactaaatccactgagggaagaggtaaaaaaatgaaatcggaaatgaactggaaagtggccatagaccaagtggcctatggtagatgttgagaacaagtaatgagttgtccattagccactctgactgccattggacgatgcaatggttggctgcccgtcaacagtgacaaaaatcggttgctaataaatgaatgggtcgacctagaatcaataagtatcatcaaaggttgctgttgaatattgccctaaaaacgcaatgtggagactgcctctttccctgtccacgctgcatcagacagtgtcatcagcaattgaggttgactgtcttgcacggctttactgtcggctggctcatccagcaaatcccaaac

SEQ ID NO: 117438 - DNA, 521 bp, Zea Mays
aagaatacttgatctgaatgctcttttgttcgcagaaatcgaagaactctgaactcgtgaagttggatcctaggtcagttatgatactgtttggtattccgaatctgaatattatgtcttgtatgaattccacgaccttagctgaggttaaagaagcaatgggtttgaactctatccatttagtgaatttgtcgattgctaccagtacatgagtgtatcctccttgagctttcttgaaaggtccgatcatatccagcccccagcatgcaaacgaccaagttactggtatggtctacagttgctgtgctggtagatgttgttgctttgacaagtactggcaagcttcgcacctctgaactaactcggctgcatcacttttcgctgttggccagtaaaatcccgacctgaagaccttctcggtagtgtcctggatgctgcgtgtattccgcattgcccagcgtggacctcatctagaagttgcttcccagtagatgggagaatgcatttcatcagaacgcccg

SEQ ID NO: 117439 - DNA, 310 bp, Zea Mays
cagaacaagcggtagccttcgcatcactcaagcaacacctgtcagaattggcaatccttaccagccccgactccttgctgcctctgctgctctatgtcgcagcctcgccacacacagtcagcacagcgttggtccaagagcaagacccgatagtgtccagtctactacgtctccaaagtcctcacgacttccaaatgcaacatgacagaattagaaaaaatttcctacgtagtcgtcatggcatcgcgcaagttgcgccactatttcgaggcgtttaaggtacgggtcacctcggataggggactgggcg

SEQ ID NO: 117440 - DNA, 501 bp, Zea Mays
ggcttacttgtggggtttgacgctgttattttcgatgtgagagaaaaagaattgggagagttcatgatccgaatcttggtggttcataaagaaacatgtttttatttggaacttcataaacgtgtatggggctgctcaaactgaccagaagcaaaaattcctgagtgaattgtcttctgtctgttccaagttcattcacccaatgttgattggtggtgatttcaatatcctaaggaaagattctgataaaaataaacttggaggtatgaataagtggagttctttatttaattctattattgattttcattacttgattgagcttgagcttagtggtagactttttacttggtccaacaacagaaatccccctacttatgagaagttggacatatttcttgttagcccagagtgggatcttcattataataatgtgagtgtctctggtctaagtagatctttctctgatcatgtgtcgttatgtcttagaactgattttgc

SEQ ID NO: 117441 - DNA, 409 bp, Zea Mays
atcccttcatgtactttggccatggctaatatagcatcacctgagcctaagcatttaagcaggacatcgttgactattcgacggtagagttcatcactcattaaaacatacttgaaagttgtacgccgaacgttcctatccgtcctaatactgggattttgtagataattaattatgggtgtcctccaatcgcttgcatcggcttcattaccagccgaatcaatcaggagaactttcctggcaacccggacggtccggagccttcacccggacggtccgcgacctggggaattggccctgtactggttatcagattttcggtgttgtgaaatttccctcgctttatccgataacctgatgcatcttgtgccaaattgttagctctatggttattaactctagagatgtg

SEQ ID NO: 117442 - DNA, 337 bp, Zea Mays
tttagatttgttttggttcagtttgattctgtccatccgcttccatcctacaaaaccgatcctatctacaaaacagatcctatctctaaaaccgaccatatccacaaaacagatcctatctctaaaaccgaccctatccacaaaatatatcctacctctacaaccgaccctatccacaaaatagatcctacctctacaaccgaccctatccacaatatagatcctatctctaaaaccgaccctatctacaaaaccgaacccccacccttccaacacctcgctagaaaccctgattcggagtgtaaacttaaaacggccataactttcgcctcggaac

SEQ ID NO: 117443 - DNA, 417 bp, Zea Mays
gtattggctgcttctcagaagtttagcgcacaaaaaggtgcctctcaggagccttgtccacattatggcaagattggtcatactccaggtaactgtttttttgcatagtccagagaagttgcctgaataccatgcttgtcaagctgccggtaccactcgggatcgtggtactgcttccactcctagaggctctatgtcagttgttactgcctctcctgagaataaactaatcaagaaccctgctgaaattgtttgttatattgtgctcatatgtgctactggagaggtctgtacccaaagaaaaagcaagagatgtggtggaaggtgtcaataatgtgctaaaggtggccacaagactgcttgctagttgctacagctgctctgacaaacctggctggctggctcccctacaactgg

SEQ ID NO: 117444 - DNA, 439 bp, Zea Mays
cgaacgacgtacacctcgacgacggccgctcggccacgtcgccggcaagtggatgaggcgacatagcgaaacagtgccccaagttcatcctcggcgaagatcttttcaccaggagtcattatctacgcgttactaggcgcgaatcgtggcgctggcgtgaatccgagcgtgggtcaccagcggcgaagtgcagtgaacctgaagatcttttcgtgcactttaccatggcgatcatcatcagttgttctgacagcacgatttgaggagccttattctccattttccatgtgacaacttactaatcggtctgtaacaaagttactgatctataatccagctacaattcaactatagaagccttgagcgaattctgactaaatcacacagaattcagcctccaaagttcatccgacctcactgtcagtccaaccctaacccc

SEQ ID NO: 117445 - DNA, 406 bp, Zea Mays
tagtcatttaccttttgtgtgcgaattgtcgcgcgaagatgctcttcgccatttaaaagtgctagtatccattgaactgtatcaaaaagcggcaataactaggcatgggttaattatgcttagataataactatctttacacctatgttaaatatcagttagtataactacatgaaatgaagtggctaagttcatcccttctcttaacatgaacataacgagttgtcaattgtagtaatggttatgattctattagcgcatgtgactaatccttattattggaactaagtggaactagagcacgtaatggctagttatgcgtctacccgtaatacgccttgagtatagctttaaccactgcgagacctttcttctctttctagccatggcatatgcaatatcgtat

SEQ ID NO: 117446 - DNA, 569 bp, Zea Mays
gctgtggacacacaaccgagccagctgtgactgcgcatcagaattagtcacataggaattcgtaacttcttggatccagagaggttgaacttcactgattgttgtcaacgccatcacacagcccacacgagaaagagcatcagcgactttgttctctttgccctgcttgtagatgactttgaactgcatccccataagctttgccatggctttacgttgcaactccgaatgaagctcctgactacccaagaaactgagagccttgtgatcaatccggatttcaaactcgctccgttggagataatgacgccaacgatccacaaccataatcagggcgatgaactccttctcatagattgaaagtttttgattggtaactcccaacgccttactcaagaaagctataggtctcccctgctgcatcaacaccgctcccaccccgtcatcataggcgtaagtttcgacagcaaatggtatgttaaaatcaggtaatgccaataccggagtggaaaccatagcctgcttcagacgttgaaaagccagttcagcttctggtgtccacttgaaag

SEQ ID NO: 117447 - DNA, 531 bp, Zea Mays
aagagaagacgaggattcctttggaagggataagagagggctaatgatgacaattgtttggtagcttgggaaagggtacaatcacctgttgattatggcggccttagtattatcaacttggatcttctcagttgcgctgtaaggattcattggctttgggaagaaagaacttatgcctctagacctggcccaccttcttgtacaggtccctcgcaatgcttaaaccctattcagcattgcactggatgccatagaagggaatggagagcacattctattttgggtagatggatggatgggtggtcacaccatgcctgagttagcccccaacttattcgaagttgtcccaaaacgaatagcaagaagatgaatggtgtcctaggcaatctagaacaaaagatgggtggatggcatcaagggagctctcacaattccaattcttattgaatatctgtagctatgctgtttggtggatggagtggttctacatcaagaggtgctagatcaatatgtttggaagctaaaccaatc

SEQ ID NO: 117448 - DNA, 585 bp, Zea Mays
acccagcgtcgaacacatcagcacaaatatccatcgcgtcaccatccgctggctctgataacagatcctctggaaccatatcttcaagagtctgatcaaagttcgccagagacaattcttgtagaccaatgagggcagacagagcaggagaaggaactccactactttccccactggctacatattgtcgactgttcttctgagtcaaagggacctcatcttcttcctccccctcgttttcattagcagcacaggcagcacacccattgggttcagcgacagatagagcacacccattgggatcagcgacagatggatcacacccattggggtcagcgtcggtaaattcaggcacaggcacttcctcaacggcaggaactgaaggaccaacatcccgatccaagctagatactcgccgaagacgtctctttttctttttctgctcatcagcatgagaatcaagttgattggctcggcaagggcgcttcgggcgaacactgacaggcctctgaatatccaaggttgtactagcttccgggagaggcaccaccaccaatgtcccagcaggagcagcatcagaagagt

SEQ ID NO: 117449 - DNA, 302 bp, Zea Mays
ttccatcctactcattagtgcattatagtcaatattacaaataatgtataaatcatcccatgtgtttgcattatacataaattccattgttttttgccataatattacctgttgccgtgaatgtactgccacatgctcctcgttatcacattgcgatacatgttcaccttcatcatttccaacaacatcctcttcgccctggaacgtttaatttttacaattagcaataattaagttctgaataaaatatacaacaattttatataaaacaacacccacatggttgccctctccagtacttg

SEQ ID NO: 117450 - DNA, 480 bp, Zea Mays
ggactttgttcttctccaagccccaccacatgacatttctcggtactttgtcatacgtcgtcttgagatcaacaaagactatgtacaagtccttctgctcgctatatctctccatcaaatgtcgtatgagtaaaatcgcctccatggttgaccttccacgcatgaacccaaactaatttcaggtcacattgtcactcttgttaggtgatgcttgataaccctctcctagagcttcatcgtatggctcatcagctactaatcccacagtaattagtacaactttaaacatctcccttgtttttaaagatcagtattaatatacttctcctccattctctaggcatcctttttgtctgaaattagaaagctgagttaaccatactatcgctctggtacctaggcatctccacacctccatagggatgccatcagggcccatcgctttacctccatactcttcaaaggctcaacgatttccac

SEQ ID NO: 117451 - DNA, 653 bp, Zea Mays
tcttgaaatccctctcaaggatagtatcaagggatggcgcttggagtggtttattgttgagaaccacggaagttctctccccccacggtcggggagacagccggatgttcgcactccaagttggaccgaatcccccactgatcaggaggtggctgaggcaggggctttgctagctgaagttggactgctgaaggagaggggcctgactgctgaggatgtggttgctgattttgtctttaagaacattcagccgttgaaggatagggcatacccggcttatctgtaccgaggtctagctgactcgactcgggttaccaacagaagaattcccgctgtagatttggtgaaccgacttgaaatgattcttagaggcaaggtatcaactgttggtgccccagtggcatactcggcctggaacctgcctccttccaaagccttcactcattttgtgtcgaatccacctgtcgctgatggcagtttgggccttagagtgcgaccctctgctgaagaagttaacgctttggttgcctcgctcggggaaattcctgatgatgaacggcaggtccactttgaggtgcttttggatcctagcgatgcagagataagtgctatgcttgatatgttggctgaggactcttctgatgctgctcctg

SEQ ID NO: 117452 - DNA, 550 bp, Zea Mays
ccctggcaatgatcaacgtcctatggtaagatcctctgatacccaagtgaaagcagaccctagttgcaatcggcccccacccattgtagtaatcatagcctctgccaacttgcaattaatcatatattctgaacagggagcacctgatacagaagaggagcctctgagcagggacactgggatgcagcatcctactgcccaggtatgttcatgcaattcgtgtctttttttataatataaatgattcactttcataatacaaatatgttaatttggctattctactcaactgcaccaggatcatataatttactcaaggaggagcgacagggccattcaagttgccaacacacagaaggcagaggctgagaagaagaaggctgagatcgagatgaagaatgctgggatggagaagaagaatgttgaagctgaggaggctgagaagagaaaggctgaagccgaacaagctgataagaagaaggcaaaagaagctgagaataagagaaaggccgaggccgaagaagctgagatcaagagaaagtctgtagct

SEQ ID NO: 117453 - DNA, 417 bp, Zea Mays
catgatgtcatcgacgtatacctctactctgtccctgatcaggtccccgaaagtcttactcatcgcccgcacaaatgttggcaaggcgttcttcagaccgtaaggcattacgacgtagcagtaaagcccattcactatcacaaaagtggtatgcttcctatcttccttagacatctggatttgatggaaaccagagtaagcatctaagaaggacaagagatcacatctggaggtagagtccacgatttgatctatccgtggaagtggatacgggtccttgggataagtcttattaaggctggtgtagtcgatgcacatccgaagcttcccattcgccttggggacgatgactgggttggccagccacactaggtgatgaacctcttcgatgaagcccgcgtctagcagcttccggac

SEQ ID NO: 117454 - DNA, 721 bp, Zea Mays
gtggatatggactaaggcaaaggagtgatccggacgatcaacacctcaaacaagatattagaaaacatgttgaataactacaagcacatacaaaagtccaaggcacgcgaagagaaaaaaatgttgctcggtagcatcaaacatgttcgttagtgctctaaatataacattgatacaacaccactgtgtcaaagaagggtaactgcaactaagggcactgagcatgtaggtgtgcactgaatctaggagaatgcttccctgcacgaccttaagaagttcgcctgctagggttccaagctaggcgcataatcaggcctcttcccaatatatctcgagtgttcatatgcacaagtggtgagagagggaaacatgacatggagaagagaaggaggaggcagctggaagaggcgccaggaagaatggatggaggaggaggacctgcttgaacccgatttgaacaaagaacatgatttactctccaagttgcataatagtctagtggagaaatccgattcagacttcatggatccagttggtaataccccaggtaatagaaattctgcagggtccgctttgtcgagagagagagatagggtggccagtgactttatgctttgaacaagagcggatatggtggtcgtaggggttttgcttgtactacgatgattggccttagaggaagaaattctgaaaaaaagtacaaagagcaaggagctgcctt

SEQ ID NO: 117455 - DNA, 546 bp, Zea Mays
gcctatgatactggatgcactcagaaaaaaggtattcgacaagagtgaaaagctggcagggaagtggatcagagagctatcatacgtggtatggagcctgcgaacccagccagtcgagctctgcatggaaataccccgttcttcatggtgtatgggccggaggcagtgttgcctgccgatctgatcttcggggcgccaaggctgacctttgaaaacatagctgaggtagaagcaactaggctagaaaacatagctgaggaagaatgattgaacacagtaattcagtcggccaggtaccagcagaccttgaggcgctaccacaacaaagttgtgcgacatcgatcctttgtagtgggagacttggtcctccgtcgagttctaatgggggaggggcgacacaagctgtccccaccatgggaaggaccgttcatcgtagcaggggtcacacggctgggatcatatcaacttactcagatgaacgacatagaagtggggaactcatggaacattgaacacctcagaaagttctacccttagcgatgcctc

SEQ ID NO: 117456 - DNA, 597 bp, Zea Mays
ttttccatttctcaattttttctatctttatcaaagtctacacatttagtgaacccttctatgttcttttctttgctaccttattccttagacttgtgaccatgcttcttctcttctctttgagatgtcataccttgagcattatgatttgaaccatctcatcacatatgagttaattccatggcttcaaatcacttcttctatctatttgattctcagcacaacatgactcttcatagattgattagttcctcgactctatgcaagtactctcttcttcaccttagcatggtccttcggtccccaagcctctgcctgaccttcaccatcgcttagtcccttgaagccctttccttctagtctccactctatcaagccattgacccctagggcacctcgagcatcagccttgtgacacctcttgctctaaccttcggagaccttgtgcaccagcctttggtgcatctattaccctcggggcaccccacagaatggtccacccaaacaaatcctcggtccaacacacatgtatgtgaaaaaataatatgaggtggaaagtctagtattgtaatcttcttccaactattgtagacatgc

SEQ ID NO: 117457 - DNA, 411 bp, Zea Mays
tggggcttgctggagaaaaagggcaggtcctgcctttgtcatgttgtgtagaatgggacaatagtggacacatgtatggagcgatggtacgatcgtctagccccgagaggccctatctaacctgaccgatcctctcctatccatctagagtaggcataattgcatcacagtagctcacctgtaggtacctctaagcttatggcgacgacatcaactcgactggcgtgatgagaaaggagatgctcatgttctgctcctctagccctagtgtgcccagcatctttgtcggcgacatcgcgtttggctatgacgtcgacaacggtgacctctcgtgtaattccactggcacggtctgcctaggccgtgggagcatgtcccttatggtgcagcttgatgggtttagcgtttgag

SEQ ID NO: 117458 - DNA, 785 bp, Zea Mays
gtaaaaggactcctaggtgcgggtgctaaagagaggagcgactgctggatctcactgagcaagtaaccatgactccactggtacatgacggaaccatcgaaccctggcagtagtggctctctaaagatcaaacaaccgaggatccgcagcaagaggtcgcacctcagtcacgtcacgctctaggaagcagggtggaggaactagtggaatggaagagggagcgggagcgggagcagtggaaccatgtgtggtggaggctgtaggtgcagtaggtgtagtggtaggctcgggagtggcagaagctggcagagtggaggaaggtggagtggtagtggtgactggggctgaaggattgaaccgagcaggagtggagcgagtctgaggcgaggggcgacggaccctgaaggcaatctgatcagaagctatcctcagctgacctccctactctgcccgatctgttgctgctgttgttcgagtagctctatccatcttcctcttcttcttgcctccctgctgctcaaggtacacatacttgcccttgcctgtctaaaggggcgaggagtgtcctggtcatctcctccccttatggtgcgacattcttcgtcctcaccatcctgcactgactactaacacgctgcacgagaaatagagaagataagcaagagcagcaaagcagtagataagagagaaataggaaagttttgctacctgagcacgtctctcaagagaaaaaaacatacaggaggggagtctcgcaagcgggcacacaagcacactgaaatgac

SEQ ID NO: 117459 - DNA, 409 bp, Zea Mays
ggggcatctcatcagcaaccaaggtattgctacagatcctgccaagatttcggccatcatggagtggcctatgccaactaatgtcaagcagcttagaagatttttgtggctagctagtttttaccgcaaatttgtttggcatttcgcaatcatttgtaaacccctcacacagctactaaagaaagatgtagtgtttatgtggactaatgatcatcaacaggcttttgtggctctgcagcttgccttgagttcagctccagttttggctattcctgatctctctaaagtattttgtattgaaactgatgcttgtaagtctggagttggggcagtgctattgcaagatagtcatcctctcgcttatattagtaaaccattgggtgcgaaaactatgagtctttccacatat

SEQ ID NO: 117460 - DNA, 407 bp, Zea Mays
gtccacttctcaatagcaccaattgtggagccaagttcgcaaatagcttgatagttttgtagttcctctagaacattttctgccataatccaaacagtatgtaactttgactttggtttagcctgtgaactccaaggagtcacatcaattttagctccataaacttcatttttagttcagagaaatttatcatatcatccaacctctcttgagaggggaattgcataaggaaaccgaaatgacatttaatggccttccaagttttccccaaggaaaatgaatctcgaaatctttttcaagctcttcagcagagaccaatccctctacaaccttaactaggccgatgaagcttcttttaggctttttagacaaaggtttcgcaaaatgagatgagtaaaaccctaaac

SEQ ID NO: 117461 - DNA, 411 bp, Zea Mays
cttcatcgttaggaacaggtaatctcccgtgaggcgataccttatacacaacatcccaacccttaagatgttctttcgtttggcacgcatatgggagataatacacttgtgtggcatgttgggccacgatatagacatcgtctcctggtaaggtggaatcttgtcgaatttcgactatcccaagattagaatgtgtctgtctcatcacttgagggtcaaaccaatggcatttgaatatcactagagtaagaggtttggaaccataaaaattgagttcatatatttcttcgattcatccaaaataatcaacatcgtcaaggctgggcgtaaagactccagaacacgttgttttccgattgggccaactttggtcgtagtttgttgtgcgaaaacggtatccattgacgtcat

SEQ ID NO: 117462 - DNA, 698 bp, Zea Mays
atttcatatctttgctatatatgttctcatattgacttgcttctaagtaatgattaatgaattcaatatgaagaagtaaatttcctatgattgatcaaaatgtttaaaaagtgcatattcctttttcttaatgatgtgcactaatgttaagaagtttacttcatgtctatgtgacttatggatgatgaattgtctttattttctatctaaagaaatcatcgttcatcatatactcccttgtgctattaacatctttcttgagtattttcaataagtttggaaggaaaaagaaacaactacaaaggaaggacactcacatgaaagagaaagacatcaagagcaacaacacctacttggataatgagatcttcaaaacaaccaatggtgtagttgtaagcactctaaatctttttcattgataatactaggcataaattgtttattgcaaattttataagtcttgatcaagatgaatgatgcttctccctattcgtctctaaagttgaatgcatctattcttttcatttcaattctttgatgcatatctctagggggagcctatttctatgtcttgatcatatcgagactattgctttttcctagtaatctcatatagtctcttgcatgagaataagtttctcttgatgtatgctactacatatatccaacttgttaaaataatgtcgctcttatcaagg

SEQ ID NO: 117463 - DNA, 800 bp, Zea Mays
aaaaaagaagagactaaacagagtttttgatgctataggatttgtgtaccctgactaccggtacccactacggggtcagaaaaggaaaggtgcggctcttgtgaaagatgttgctttggctgcctctagtgagcccacgccgaagaggaagaaagtgaaggtcctcactcaccgaccacactacattgaaacggccacagtgcctgattttggcggtgagacctcttcggttaacgaagccaaagaaactgcgcttacgcagaagactgaagagccggctgcaacgccgaaggcaccattggccaaattgggtgagccaaaggtcgagagaacaaagatatcagaagttacaagtccttcagcagaggtgacagtgccgaaggcacaaaaagatcttacagttacccctaaaaggaaaaggatggtccacgtactagatgtactggaagaaataaagacttcaagctctactccagggaaaacaaccgaagcttcaaaaacgcaaattgagacaacagcctctgaagccgaagctacacagcgccaggctgagaccgaagctgggcctttagagcccgccaaggagaaatccttgggaaccagagaaaaggaaacagaagcggcagagcaaatttttgctgaaaaaactgccactgccacccccgaagcatttgccgaagctctcaattatattttatgacatgcttcggggaaaaagttgactgaaaaagaaaagcgagaagctcagttctatgcccaaaaattgaaatatccgaagggggcattgattttcaacggca

SEQ ID NO: 117464 - DNA, 435 bp, Zea Mays
agacaaattcagtgggggacttcaaacagcagtttgaagacttggtctatcatattaggttgtttgacaagtcgattagtgacacatttttggtcactcagtttatgttgggtttgaaaaatgaaattaggatgctggtactggtagaaccctattttcctgattctgtacccaaagcaacagggttggttcttcttcaagagaagatgttagcgaagaatactaatgccaaaccctccaatttcaggcaacatgtttctggtaaatctgacacagctacaacacctggagagttgtggaaagtaaagcagctgaaggaatatagatgtgctaatggactgtgttacaagtgcggtgataaatatacacccggtcataagtgttagattgcagcaactactcagcttaatttcattaccacagaggaagctaatg

SEQ ID NO: 117465 - DNA, 720 bp, Zea Mays
aagagaaacacactcaaatgaccataagccagataaaagccagacaagtcatttagagtaagcaaaacttggtccccaaagaaatgggcagcgactcaacacgaccaagcaagaaaaggctagccctcaactagaggcaaaagcagggttcaacaccactagccagaagccaaaatctcatcagagcacaaaaggctttatcagagcataaaaaaccaattcagagcataagatcagcacaaaagctaaaatcaaagctagttcctctagaaggaggcaaacgactcaactcaactagcaatagctccaaataacatatctcgccctcttgaatgagaggaagcccgaaagacaaaattctccccctagatagagaaaatgggaaatctcaaaatctctcccccttgttgacaagtgaactcatcaagcacggataggggtagaaagaaaaactcccccttgacaagagaacctcccctaggagaaaaaaaacagaaatgcaacaaagagtatgaaatagagaaaatgcatgagcttcaggagtataccagccagagtgtaaaaaatgctataagtgatgctgtgctaagcatgcagcaataaatgcacgtgctagcagatgctcaaactgggcatatgcacaagatatgtgaagtgtaagtattttgattcagttttaagcatttcaaagagatgttcaccacaaagacaacactaagc

SEQ ID NO: 117466 - DNA, 1564 bp, Zea Mays
acaactgagatttgagtaaacagtaacttgtatgcagaatagaatatatgcatagtatatatagtttgtatgagaaaacttacatcatctgatactttgatatgatcagtaggaacatggctttcctgatcatgttgttgtttatcaggtgttggaacagttggtgtgatactggatcatttgttggaggcattgaggtagtggggggttatctacatttggaacatataataatttagtagttgttactgaaatataactgcattataaatgtatcgttataaaaaaatggttaaacatacacatttgcaaactacatcagtatactatcaggatgcataaataaaatacagttttcaaaaatgaaatacactgaaaaaatatgttgctgcttgtatgagtataaattaatatatatattattttccaggaaataattggtgaacttgattagttttaaaaaataaacataaatactaaaaccttctggttgtgaatcgcgctgcgttgcagctctcagaacttcatcgatcatttcaccaaatgtttcagagagttcaatctgcttcgaaacaatcatctgatggctcagctgtagggaatcacagtatttatccacctctttgtcatgagcatcaaacaatgattgaaacattggacgctgctgggagggcaaacattgcaacttgttgccaatcaaattattgatacgtggcacatatatgttgaaaaacggcagaagcaggccgttctggagcaatgagtaacacgtttctgaacggctacgaaactgtataaagtaatatagaacaattagcagtaataatattttaacatctccacgagccaactcttttatggtctcattgtcaaaaaacttaatgtgtggagtaccatatttgttaacaggagatgcagggtgatgtaggtgatcaaggtagtaaatctgaaaaaaggaatgcacaaatatataaaattagtacataacaactatttgcatatcatatatatgcaaagtaaacaaaaaaaatacttaccagcacaatgagtgagcatccatatattgttgctgtgatgtttgttttgttccttttatgccaacgtgcggcagcatcacacaaatccgtgtaaactagttgacaccagtcaatatcagacattcgggccatgtttgaagtcatgagtacctcattgtttgtaatgccccaagaagcagaaggaaaaagaagccgattgaatagaatcagaaaaaacatctaattgatagctcatcatcgttgccaagcactatcttgtcttgaagcttgacaacatcaaattcttctttaccaacattgagatcacgtctcagttttgcagcagcatccacttcgccataccaatcagtaaactccctgcctcctccagcacatggcaaacccaaaatcagatgaactgtatcttttgttattttcagttccttgccagggtgtatggtcatgtcatgaggatccaatttatccatcaaccacctgatgagtgatcgactctctaaggcatcagttcgcaaatcaaatatgcttga

SEQ ID NO: 117467 - DNA, 360 bp, Zea Mays
ggagggggaaaaagctcagctgcatcaaaatacaagtatctgttagtatcgaagctacaataatttacgaagccaagctgtaatggatatacctataagcttggcgtgttcaacagtttcttcagctctcttagcctcttctaaggcgtcgtgagactctttctcatttcttctaatagcttcgttagctatctctcggccacccttcagccatacttcggaatagaactttctgcttaatgcagtagcatcggccgaagggtttttaatgtcatcagctgaaagcgagaatcctggctgaaccacaaccttagcatgttcgcagtcgactttttctaggaccaacacggcccctcgaac

SEQ ID NO: 117468 - DNA, 474 bp, Zea Mays
gctcctatacatcttctgcacgactcacgtggtaagaaccacgttagtagtcgagcgagtggaagaaggacacgcatacccggtgcagcatccaatttatttatcaacgaagtcctcgtgctctcaaagataaggtatcctcaagtccggaagttgttgtacgtggtacttctaaccgctcgcaagctccaacactactttgacgaccacaaagtcatagtagtcacaagatttttgataggggatattctccacaacaaagaagctattggaaggatagccaaatgggcatgcaagctgggagctcacaacatagagttccggccccgcacggcaataaagactgagacgctggtcgacttcatatcagaatggactgagcactaggtcccgaatagcccggaagttactgaggtgtggagaatgtactttgatggctcactaaagctgcaaggagcaggtgcagggattctc

SEQ ID NO: 117469 - DNA, 516 bp, Zea Mays
tcggatcactgcaattcaaatggagttccatgattcgaacaacaaagctcaaaaagctttgttctcgtgtctctcatttggtgagtttgagcaagttggacatctgactacgactgatcagatctggtctaccatctagagattccatgagggcaacgatcatgtgaagaccacactgtttgagacatacatgcgagagtatgagaacttcacatagttggctggagagaccatagatactattctccaggttctagttaattgtgaacaagatgcatgccaacaaggcacagcttccctataacgatcatgagagagcactgaaattactacatgctctagatcggagggtttgagaggtgaaggtcttggcgatcatcgagtcacccaactatgagactcccaccgtggacgagctcttcagcaagctcaagtccatagagattgacaactagactcgagccaaaattgagaaccctagtgcacccaccatggccctagtctctggaggtggtt

SEQ ID NO: 117470 - DNA, 794 bp, Zea Mays
tgggcatcaaacaaatcaactgagactgtacctgtcaccacgtctccctgatctctgccatccacagagggtagcacatatgctccagaaacacccgcagaagaggaagctccaagagtgaaattaacagaagaacccaaaggagtcgcaggatgaggcagacgaggagctccaaactgaggtggtataggagcgatcggtgcaggagtaggcatggccaacaactgagggaaacctggcataggcaagaactgaggagtcccaggcatataaaactgatgctgaggggcggtagagaaaattttttctcagcagttgccatcatgttgacagtgccctgcgaagaggaagaagtcactagctcccattaaagtttcccattgggattcctcctacacaccacatccctgtgatcctggctgcagatacagcacctgccactccactgacactcggcacgacgatgcgcttcaccacaacggaaacacaccaaccccaaccaatgcttaggaatagctcgatacctctgagtactccctcctaaagtacccaattcagaggacttgccacgataggggtcgtggcgctggtgttgggactttcccttcttgtgggctggagccccagtgtagcccttcctcgcatcatggccacatggctgatccacacctgaagacttctgagattcaattgtgtactgaggctgcatctccacgcccaatgcctgctccaccatagttcgaaaatctactagtggaaaggcgcccagagcatgcctaatggagggtttcagg

SEQ ID NO: 117471 - DNA, 1072 bp, Zea Mays
atattacatggctccgcctcgttaaaaacctcaccccctgggaggaaaagagtgcgggccggaataacattgtttgctgaattacaagggcgcgtgggccctgagggttaaagaaaaaatttccggaggttgtcaatgttccaggagtgctctaagtcttcgccggaaggcgttactagcctgtacgcgctgggggatgcctttgacttgacgatgaatggaccctcccatttcggctctagcttgccccgtgattctgtccgggtggtccggacgagtacgaggtctcctttgttgaactctcttgggacaaccgcgttgtcgcaccaggccttggtttgagcttgatatttgttgagggcctgtagggcgaggacgcggtctccgtcgatgagatctttggacgttggctcgtcgacatcgggaactgctgatgtgcttgttcggggcgacccatgctttatctcttgcggcgtcatggcctcggatccatacaatagatgaaatggtgtgaatccggttgcccgacattctgttgtgtttagggcccagaccacttcaggtagttggtcggcccatttgccctttttgtcgtcgagaagtcttttcttgatggcagtaaaaatcttgccgttggcgcgctcaatgatgccgttggattgcgggtggtataccgaggcaaagacaggcttggtgccgatggagaaacagaaatccctgaagtcttggctgtcaaactgtttgccgtttgtcgactgtgagttcagacgggactccgaagcggtagacattgttttgccagaagaacttttgggcggtcttcgacgttattgtggatactgctctggcctcgatccacttggttaagtactcgatggcaacaaaggtgaatttgaggttcccttgagccgtaggcagtggtacgacaatatccagcccccagcgttgaagtggccatgtatgggcgattagcttggtgaattgcaaagggttgcttgagtgaggggaaaatttttggcatgcttcgcaagacctcgcgacttgattcgcagtacagattattgcgggccag

SEQ ID NO: 117472 - DNA, 427 bp, Zea Mays
gttaaagtctaaaggtcgagcaaggtgggaaaccataagaaggatggtgatgtccacaaagattaacaaatagtcaacatggaaagagggaggagaaaatcaaaatacaagagctcaagacaaatttataagctaattcattttgttttactggacaagacacaatagagtgtgtgatcggattttagatagatggtcatactattaagagagaaatttaattggacaaatcaatcgtctagtacccaccaagtttggatttatatgcattgcatataggactaagtgacacaagtgtgagcaagtgaaaaggtttattgaaaacactttggaaaatataactagtctctaacatgtttgacaaaaaacatttaagagttagctcgcttgaaaatagagaagaaaacatactaagtgcagattttta

SEQ ID NO: 117473 - DNA, 822 bp, Zea Mays
ggtgatgtggccctcaacttcagaaccagctgctgtgcgaagtgctgctatatccaatcgtcggtgagtcctcaaggctatctgggctgtctatcgagctttattgaaggactcctgtatccatgtgctaaacagaggagcagctgctagatcatgctgagctgataaccaagagtccactggtatgtgcctaaagcgatgaactctagaggcagtggctctgtaaagatcaaatggtcttggatccaccacaagtggctgaacctcagtctcgtcatgctctatgaaatgggctagaggaactagtggagtggtaaaggtagcatgagcagtggaagtaggcgtggtggaggttgtgggtgtagcgagggtggtggtaggcactggagtaacggaggctggcgtggtagaggagggtggactggtagtggtggttggagcagaggggtcaaatctagctggagtggagcatacccgagactagaggcacctaactctgaaagttatcttgtctgagctaatcctcatatgacctccctgctctgctctctcaactactactgctgttattgttgctcgagtagctctatacagtctatgcttcttcttgcctccctgctgctcaaggtagacttccttgcccttgtcatgtttgaatgggcaaaggggatcctcgtcatcaccccctcttgctagagtgacattctttgtcctcaccatactgagtgctagaactgcccacgaactactgacacgttgcgcgagaattagagaagataagcaagagcatcaaagcagtagataagtagagagatagaaaat

SEQ ID NO: 117474 - DNA, 649 bp, Zea Mays
ggaatattgaattattgaatataacttaaatttgactacacattcaaaaataatattttcctaaaataaataatatctgtgttttgcataattgaaacatttacataaataaatgaataaagtaattatacaaatatatattgcatcatgacggaattctgactgtacatttaatttagagttcaaaactctatttgaatttagattttagaaggaatatgtttatatataacaagaaataaaaatggaaaataggaaactaatcgaaaagagggaagaggaaacgcacttacctagctccctgtttcagccattttctacccacggtgagcccaattgttcaccacgtttttttttcttttgtttattttctagccgcaatgttacatcgtgctgaggtaagggatgacatcattcgatatttttttcacgtatggccagtttcattgcctagctcacgctggatcaaaacgacgaggagttcatccggtgcccttctcactcagactgctcttcgtcgtggactcctactgttggcacgcgcatgtgtccacgttggccatgcatgggctccagacggcgaggctatgcttccttaggattgttgcaaccaaagctttgacataatcatggaggtctgttgtgatcg

SEQ ID NO: 117475 - DNA, 392 bp, Zea Mays
gaattaggacctgtttggatctcacgtgctaaactttagcattccttaaagagctaaagtactaatatgtgttgaactttagcacttcatttttaacatcttttagcatattttagcactcgtgtttggatttacatgtgctaaagtttatcaaaagtgtagtgctaaatttcgcaccatgagtccaagcagacccttagttggctaaaaaataactgactatttatatatgattttagataggttgaactaactaataactaatggatagttgagggatagttgagggtgtagctaataattggatgaactattagatgggatgtttggatgtctatacctaaaagcaactatagttaaactattagctgaggtgtttagttgtcttcagc

SEQ ID NO: 117476 - DNA, 684 bp, Zea Mays
cgtgaatccagggaagtttgttgagcttgctttagtttgttacgagtcgagaaaaaaatatattgactggtttggttgcctagtatcggaaggtggttggttgtcctgtgtagctggctcatgcggcgtttgcagatcgcgtctagctagggggtctcgtgtgtatggctgggcacaagcagcgtagacccgcccgatgtgcatgtgcatggcccatgcaacagagacatgcacggataaacgcaagcgcggggtgcggctgatcagctcaacgatcccaagctgaaagacgtagctgacggagaggctccacaaggcagtgtctccaagcgcaaggaagcaagcacgggttgcacgatgtggaaattggcttacctcagaattatgatgacatcatttgtggctagtgaaataaagaaagaacaaaactagaggtggaagtggctatcacgagagattaattgggacaagtctgaaaggagtggccgaggcaggtttgtttattttttttattttatgttatctttaccactccctagtttcagttcaattttaaatttgttttgaattgtcaaacttaagttcatatgcacaaacaagaagtccagcatgtacgcaaggtataatttatttattggcatatataaatgagtttattcatttatttagtctaaatgcctcgaa

SEQ ID NO: 117477 - DNA, 579 bp, Zea Mays
ctttttatgatctagtaaagaattattatcttttaattatgtttagtcacatgactcaaaaagtagagggcaaatcacataaggagatcaactcttttataagttttataatttgggtattacaaatcctaccccccttacattgaatctcgtcctcgagattaggatggactaggaaagaggtggggaaaatctactcgtagctcttcttctctctcccatgtagcttcatcttctccatggtgactccattacactttgcacattttaatcgctttactccttgcgacacgagtcaaagtatcaagaattttgatagtatattcagtataagttagatcatcttgaacactaaggtcctccataggtagctgctcctcgggtaccctgaggcacttcttcaattgtgatacatggaagacatcatgtacatccgcgagatgatcgggtaattccagttgatagacaacctctcccacttgctttaggatcaagaagggtccaataaagcgaggggacaacttccctttgactttaaatctcctcataccccggattggtaacaccttaagatacacg

SEQ ID NO: 117478 - DNA, 377 bp, Zea Mays
aactgatggtggaatggattgacacaggaatggatagacttgggcccagatggctcactggagttaagcattatccgcagcattgatccgattctcccgcgcagcaccctcagacgtcggaactaaatgaggacaagtcggcaggattatagaaagataagttcagtcggttcactattactaagggatacgtcgtcatcatgtaatgccccacaattgattatataaggcctaggggcaccccatcaaaaggcaggtcactcattagccatctactccattctctagcatccttcatactagagaatccccctgtaacacaccacgtaaaagatccacaccaggaagtagggtataacgcctctccaagcgggacg

SEQ ID NO: 117479 - DNA, 356 bp, Zea Mays
aaaagaggttggtttgtggtttaggaagggtttgcgagttgcgaacacgcactgcgtgttcgttcctcggctgtttcggctctttcgctggtcggtgcaccattctgggttctgcatagaaatttcgacaagttattttaggatgttgtccttgtccaggtcctccaggataccaattgaattgggctcagatttcacgtcattttaggatgttgtccaggataccaattgggctcggatttcacgcaatttaggacccctagcgacttagtggcagaattgctgtccgtcagcagtgacacgggtgttgcttctgaatactccactgttcctaatatttattgagtatgtgtctg

SEQ ID NO: 117480 - DNA, 617 bp, Zea Mays
gaagacttgaagcaaagtaggctccactccatttcgagcctcctgcaacacatgattagaaagtctagacaagtctatgcaattaacaattgaccaggcaattttacacacaccatacgtgcagccttgccaacgtgtccatctgccccgaagaagtggacccctggcttgctcaaccgatttatacgatttctattagatatggacaggaactccttagaagcccaatactcacacatccacgcccaagcatctgaatggtggctcaaccaatccacctcactctctttgtactgctgagccgtcaggtggatttcctttgccatattcgcgtcacaatagttcccctgacgcttttggtacaccgtgacggccctcaatcgtgctttatacatcatgccctttactgctctatctgctgagccattgaatacctcacgtacatatggatcatccaaggtataggggtcgcacatgcgaaattgggccctgcaaatttgaagatcactagagacttataaatgcaaaatctgaattaaatttgaatatcacaagagacttacccaaaacaaatccgacactttgcttgtgtgtgtcccgtcattcccgtacggctt

SEQ ID NO: 117481 - DNA, 822 bp, Zea Mays
ctcactctccaccagtcagcagaacccgcttccttcaattctcgtgattcatgaaaacgcatttgtgaagcttccacaattgagtcaattccataatcttcataagctgttactagctcttccagcaaaagagatcctgaaaaccagcaagtgaggaagtaatgcaaccaagcgactaacaaattccaattcaagggtaggttataagggtctcataaaccaaaacagaactcaaagaaagacatctttgaacacttaggctccaagggagtcagtaacaatagtagcagaaattccgttcattaatactagctcctgctgttctgccaattgtacggttcttaaagaaaaggcaatacactggttaactgaattgcactcttaataagcctaccaagtaaacaaaaaagtatcagtactgcagtttgtaccagacacacgacagctataggttaggtcatcctcatcagcaacatactggttagcatcgcgtgaccagttttgcacctagagaaaacaaaacatcaatgcatgatcattacatggataacaaataaaaagaaaaaagaaacatgaagagtgactaatagacaaactatttgcaaggagtatattacatttttttcttaaatggcatgtcaagaagaaacataactcgaaatcgactcttaacttgttggttgtgctttgcactgtacaaagctcagttttccccaaaataagttgggaaaccaaaatgtagctgacaaagacacaatttaatgtgtatgtggttcacttctgtttatccttaattaattgcataagtccaaacaatgattc

SEQ ID NO: 117482 - DNA, 540 bp, Zea Mays
cgaggagtctgcgcacaggcgctggactgaggcgctgcatgaggactttcaaggtttcgtagcctccatgggtcatcccttgcctccgtgctctcctccgcatccggcccctgcctaccttgagaaccttaacgagtggcaccaacaggagtatggtgtgccattcattaattactcctaaggatgaggccgaggagtttgacaactccttctaaacatctgctcctcctcctccctacctgagtctgggacccactcctggtgaccgtaggtcgtccggctctagtcaccatcaccctcctcctccataccagggtccttcatcttcatcaggttttccttctagtgatgagccccctcgggaatcatcatttggggaagatatgatgtgtgctttcttttcggagtacccttcctaccctccctatccttcatatcctcctcctttgggggactattgagtattgtgctctctctttttttggtacttgctgccaaaaagggggagaaaatatgaggttgaggatagctacgttgttt

SEQ ID NO: 117483 - DNA, 1064 bp, Zea Mays
ggactcctcctcgacgccgtctggacccacttgtaagcccccttgtggagtagattttatagtacgtccagattactctgatcactgtaatgaccccgtcgagagaaatattctgagaacgtaacaggtaactaggggtataactgtacttagaggcccattatcctttttggttacctataaataccactaacctgtatacaaacgggtcacgcataataaagctctacagttccccgctcagtgtcttcctgtgcgcctgatcttacttatccactgagtgttgggcccacctgacatacagttccaacactgagacccaattcccatcagcaattgttgcagagtggaatactgcaaaaacttctctgagtgactggtgaccattatttttgggggcactttgtgaaggctggccaaaccttccgaaccatacaactccatgtcataacactgctagacacttctctagacactatacttttctatcttcaacaacatattcactacctccctcatggaaggcctagactggcaagccacctgcgtgcatgaaaccccaaggtccagcaagctcagagccttttcttgctcatcttgagaccaacacgtcatctcctcatccatgaggcttatgatgctgcggcgatctccatgctccaggttagttctcatccatgtcacaatgtcaataccatctccgaacgatgagtccacaggcgtcttcctgcataggagctcaagtagcactactccatagctgtagacatcactcttctcggttaatcttgtagcgtatccatgctctgggtacatacaatagagaatgtgtcaaccctgaagttcattcaagtcgccatggtgatgtgatcgaacaaattacagtatgaatctgagagaacctacctggagcaatgtagccaagggtgccaatgatggcagacactgttgcatcggcgttctcatcggcgacaatcttccccatgccaaagtctgtgagtttgggtacaaactctgcatccatcagtatgttgcttgacttaacatccctatgaacaatcata

SEQ ID NO: 117484 - DNA, 635 bp, Zea Mays
aactgtttgccattgtcgactgtgagcttagacgagactccgaattggcaaacaatgttttgccagaagaacttttgggtggtcttcgatgttattgtggacactgccctggcctcgatccacttggtgaagtactcgatggcgacgaaggtgaatttgaggttcccttgaggcgtaggcagtggtccgacaaaatccagcccccagcgttgaagtggccatgtgtgggcgatcagcttggtgaactgcgaagggttgctcgagcggggagaaaacttccggcatgctccgcaagacctcgttactcgattcacggtacagattatcgcgtgccagtaaaatccttgacagattaccttggcagcgaaggccctgggccctgagtgggacccgcaagttccgctgtggacttcgcgaaggatttgaatgccttcggtttcagtcacgcattttagcatgggctgactgatcccctttttgtataactggcccccgactagtacaaagtctcggcttcggtgcttgaggcgtttggcctcattgacgtcacttgggtggtaatatccttgcagatatagggttattggggccgccaatattcagtcctgatgaggttgatgatgtgatggccttcg

SEQ ID NO: 117485 - DNA, 507 bp, Zea Mays
cttcctgagatgttctatgttccatgagttcccaatttctgttccgtccatctgagtgaggcgatatgatcccggccgagtgacttctgctactatgaatggtccttcccatagaggtgacaatttatgccgtccctcccccgttagaattcggcggaggacgagatctcccactgcgaaggatcgatgccgtatggccttatcatgatagcgcctcagagtttgccggtatcgcgctgattgaatcaccatattcagtcgctcttcttcgagtacgtcaacgtcttccagcctagtagcttcagcttctgctatgttatcaaagattaatcttggtgccccgaacttgagatcggcaggtaccactgcctccgaaccataaactataaagaagggggtatttccacgcagagctcggctaggttgagttctcaggctccaaactacatatggcaactctctgatccattttcctgcgaacttttcattcttgtcgaagactttctt

SEQ ID NO: 117486 - DNA, 804 bp, Zea Mays
ggagaattcaaggtgatttttgtgattatctcttgtttatttgtgctgcaattccattgaatagatgttacgtatgcgcattggtagaggtggtgtccagaaatttagtgggtggacgaacaacagtagttctagtgatttttgggcatttttcgtgggtaattagtggggatcagtgggagaatcatgtagagctttgtcatacctttccaacgagtacttatgcactcgattcggagttatattttagtagatatcgctgtttgaatccgggtatgttgctgtccaaaaaaaaacagatttgcaggtgggcgaacagcagtagttctagtgatttctgggaaattttcgtgggtaagtagtggggatcagtgggagaatcatgtatagctttgtcatacctttccaacgagtacttatgcactcgattcggagttatattttagtatatatcgctgtttgaatccgggtatgttgctgtccaaaaaaacagatttgcaggtgggcgaacatcagtagtattgacagtttctggggttttttcgtgggtaattggtgataatcagtatgataatcatgtagagctttgtcacacctttccaacgagtacttatgcgcttgattcagagttatattttggtagatatcgctgtttgaatccgggtaggttgcggtccaaaaacagattgcagggtttatcttgtggactgtgttgggctaattagatgttggaatttaattataaattgtatacaaaactggtgaggaattttatgtagatgcttccagagtttttgattgata

SEQ ID NO: 117487 - DNA, 756 bp, Zea Mays
cttgttttagagtaggaaaacaatagtcaggaaaaacaaactcgatcacatcaaaaactctgttcagtctcttttttcctcgagcaccgaaggcaatgatcatggcttcgtcctcttctctcatgtaggctcccagcagctcatcactggttgccttaatagcctctaaccaatcgtcatttggctcgtcaaattggcttatgtattggaaggtgtatcttagataaaccaagccaccttggctagagccagcagcagtttctttcggcatctcccaatcattcacaagaggccacaccttgtaagcaatgtgctcctgtaccaaatccctggtaccaatgtaggtgcacactgtgttgaaagctattaaacacgcctgcacttcgttaccaattgcaatggacagcctcctgatgccaaacggtgaccatatgggaccctaaatagtgcccctcacatcttctctctcactcagatcattcttcacatagaaccgttgtttcatccaagagcccggccatttcttttgaaatgttggcacttgataacttgcctcagagtggggcacgaagctgtaacacccgaagttattatggtactgctccttcccagttgcctttgtctggtaagataattcatgaatattacagaagcacctagcatctggctctagcccttggctcctcatagcccaaatgaaaatgcccactttaattaaagcttcgggagtaagctgatgaaggtatatttcaaacg

SEQ ID NO: 117488 - DNA, 614 bp, Zea Mays
acacttcgcagcaagaggctaagtcggagcattaagaaaagagcataaaaagtaaaatacgaccacataaatagagacggtaatggaagagtaatattaagctaaaatatgcagatttgaagcaatattcccatgtataacataattcttacaactaatgaatgcaattgtaaataggctttgggtggtatacatattgaagacctataaaaggcaattggttgtatcatgtaaagcgtgagtaaagaaattttaagaagacaatacaataagatgaactaaaatattccatgaatacaccccaaaataacatatactgtagaaaaggtccaaaaaaataagaaaggttagattgaagtctacatttgtatgttggacccctgaccatgccttatattagcacagagcgaatcaccttttattttagggaaatgcaataccctaatcttgtttgtaaagggggtaaaaaaaatgaaggagcatagatattaggtagcagtccaaatgcacgaacgcgtttgtggatgcggggcgagcagtaaaaagcaaaggcaggtccatttcaggggaaaacacatttcagagaaaaacacatttagggtttctaatgtggc

SEQ ID NO: 117489 - DNA, 723 bp, Zea Mays
ttattacaacaaatcgaaggttgcaccttctcaaattgtttccgaagcaaggacatgaaatgagagaaattaaaatttgaataggtgtatatgaagtttttagcccagcccctctgtagcttcagtatatgtgcctcaactctggaacagtgctattaactgcccaagctttagattcttttcttgcatcgtgttgttgctgaatgtggtgctgcccttcaggctgttggttgtgggacgaagttggagccatgaccggtggttgtggtagggcccacgcagctagagagtggcttgttgaagctactgaaactgtaggttgtgaaaatggttgctgattccccacatactttggaatgtatggggaataacacgaagcagtatgtagaacttgctgcgactgattttgccacgcttcggcctcagctatctttttttgtttctgtattataacttggcaggttctagttgtgtgccccttatcctctccacagaacaagcagaacagccttcgtggttgtgagttgaatcttcctacaaagcttcatcctcctctgcctcttggggctagcggtctaaaagagctttgttgcatcccagttgactgggaactgtgctggtgcccttggttgtgattgcctctgtcttcactttggctgggattgtgtatcgttctgacaaaccttgggtggagccttcctctgaagcccctggtcatcttag

SEQ ID NO: 117490 - DNA, 563 bp, Zea Mays
cgcgtgtgcaaatcagggaaataactgagttatgttgattgcacgtgatgtgtaaatttaaaaatagtaggtttgtgtgtagagtgtattattgaacatgtatgtcgatgtattataatagtgattgcgttaaagtcgtttgaagtattttgaattcatgacgaagatggttgcattcgacataggaaaagagacaggttgtgcgataaaaaggctagattgattttataggtcgtatgaaaaacgttctattaagtgtatacgtcgagtatgttaaatggatcctatgtatgtagagtgtagtgtattggttaggcgaagaatttttgaatagacgagtatgaggcgtgcagttaagtcgagattgaagtgcaaatcctactcaatgtgatgggattcatggttatataggagttataattgttgatgtgacgagtagtttagcgaatgctcgtttgcgtggaggatgtatcgttaagacatgagtgtcggagttcatttatattagtggtcgcgccacattgattgaagtgtcccgagtacatgccataatatggttgtat

SEQ ID NO: 117491 - DNA, 305 bp, Zea Mays
ctcattcccagatagcttcatcttctgtgtgatgaatccactctactttgcacattttgatcactttgttcctggtgaacttggtcagggtatcaatgatcttaatagggtactctgtataggttagatcaccctacacactgagctcttccataggcaactgttcttctaggactctgagacacttcttcaactgggaaacatgaaacacatcatgtacatctactaggtgacttggtaattccagttagtaggccatttcccagcccgctttaggattttgaagggtccaataacacgagggg

SEQ ID NO: 117492 - DNA, 488 bp, Zea Mays
ataagttgtaatgctatcacattacagttgtgtgtaaaggttacgctgaataccaccgtcagatgaatgtgaaataaaagtggtagagaaagcgcaagttatcttctatgggttgtattacactaaaattaaacccctctaaatttgttgtcatgtggttttggcactgcaaacacccccaccattatctatgaagataatgcagtatgtgttgcacaaatggaaataagctatattaagagcaatattactaagtattaagtatttttgtcctcacgaactccagaatgagggtggggtgaaaatcttccaagtcaaatcttgtgataatttggctgatttattcactaaattcttacattcagaaaatatgtagagttataggatgaaacacttgaggggcctgcagggttcagggagagatcacctctggacttcagcccttgctattcgaaccagaagattgtatactatacaaccttcaggtt

SEQ ID NO: 117493 - DNA, 502 bp, Zea Mays
agtacacaccgaacgacaggtttcagtttggcttttgtgcgtttaatagaatattgaggcattatactatatgggcattcctccccctaatgccgagatgttctaaaagcatacagataaaatccccaaccacaatcagccagttgtggccaatgtatgctatgtggtgatttatttgggaaatcttacgcacattacagataggggttttatgcagtgagcattggacttagattaatgtagtggcatgaatactacatgtttgtccttcacatgaagggttagtctcaacatccagcgagactcgcaacaacaagttgcttcatggttacaattctgcaaacttattgttattattaccaaatgcatagtcaatcattaagatttagactgatatacgcaacactattttatgcataagggtccctcagaggctcatgcacaccattcgtcgtttggagctagtagttgacttcagatcaacaactaaaatgaccatcag

SEQ ID NO: 117494 - DNA, 421 bp, Zea Mays
gccactttacgatatgccgatgaatacatctccctaccaaccacaacctcctacataaatcggggtaaatccaccgatctgcgcgcggttagaccgttcgcgcatgaggacggactgaccagacaacggtgactggcctcgtttttcgaatcgagccaccaaaatccgagccagggcttccatattctacgcaaaccctaacaaacacatacggaccgtccgactacagaactaaatactccgtgtacatagtcggactgtccgcgcgttacgccaaacaatccgacgcatagtatacaaaacgtgatgttaattttcatcggccatctacacacctatctcagccaagcttccccttactccctacaactcctcaacatcatagcatcgccgcatagatgcatggaggcgagcacttttt

SEQ ID NO: 117495 - DNA, 777 bp, Zea Mays
ttatgatccagcatgaatcggggtgaggggatagtgctcggggtctcggaaatatcaccaccgtggataagtccggccggtaaaacaaatccgaccaccgtactagcttgtcgcggtggaacccgataggctcgccggtgaaccgccgtcgcacggccttgtgccacatatccgagtacctccaccgcatcgcaatgattcgttttagcttcccgtcgatcaccggagtagtcgccacgacggttgacacgagttcacttgcaccagtaacctttccccaatccggctgccaccgcgccatcctcaaattcaagcgccaccgtccttggaagctataaatcgagcccgccgttagctccgcaacctcattacacatcacaccgtccagtatcgcccccaagcttgcaaccgtgagctccaatttcaagtttccggtcagccgcagggtcgagctaaccgcggccagcccctttccggtcagttcatccccctctctccctcgtttgagcactcttatagctctgtgatgcttgccaagccaccaattcgaactaagagatcaccaatcaccgggaacgcgatcaaatgttcataaccttcgctgttctcgtgggcagaatagaataggtcaccattcgtgcaattaagttatgggaaatactctttagatcgtggatttggtttagtccgaagctgagcaccagtcttgatcttctccgaccggtctagctcgccggtgttgggtttcccgtgtggagcgtcgtcggggaccggccg

SEQ ID NO: 117496 - DNA, 540 bp, Zea Mays
tgcatatgtacttggttgtatcccaaacataggaccccatcccaatggtcctaaaacctacaacgactagagccttgcatgtctccttgagggaatcccttgccaggttgcactcctcattctagtacattcaaatcatggtgagatcctcctgtagaagcaccattttagtttatagggctttagaagattgtgctagaccttgcatggccttttgggtaaccatcctctcgctaggatcctaaggctatcctccttggagaggcatgtactctaactcagttgtaggttccctttgtcctactctagctccttttgtatgttgtggagttcatgggcattatatagtagaagcttcttgcaaatagccatctcttcattgaagacctatagcatgaaacacattcaacgtgttaaggggtaggcctccacggatgaaagcatttgcccctaggttgcaatcccgacaacgtccgtctccactcctttctatcgaatatggaggtcttcttacttcatggcccttgcaacctcctattc

SEQ ID NO: 117497 - DNA, 1092 bp, Zea Mays
ctcaatcgctggcttccactgattatacgaccgtcccaagctctatcgcgtcaacgggaaataaggtctgttatccagttgataacatcacaaggcatgtggcatgcacactggttataagatatggtattaacaatcaccatacgaagaaagtaggcacatgccttgtgatcccaggaggcaagttccatggaagcgacattctagatgattattgtagggtagaagtgacgatggtcgtccaaggatttgaggatgatatgctagacatccagatatccctgggaccgatggtatcgagaaacttggataagccatcaagaatttcatcctttggccttaaagggatgtcgaattgtttgatccaccaccgccgtcgacatcacatctccaaccatctccgcctcctcaaactgtagttactattgtacatccatcatcacctcctcaaacttcatatgttgctcctcatcctctttctgacccaccgtctctaccacaagaatcgccattcagggctccaccaccttctcctcctcatcctcttggagacccattgtctacaccagtagcaagggacccaccttctccacagacatcaagggatccatggccatcaaagaaatctaaatttcctatagcaaaattggtgtccacgttcgagaaaaataagagtaaaactactactgctggcacaactcgatttttgaaagggattgcacgggacctcatgtcgcatactattgatttggccgagcatgaggagtctgcaaaaaaggctgaggcaatgtccgcaaagataaagatgccaactaagacagattataaaaatgcgcctaaaaatatgtgccgggcaaacctctactaccttttgagaaactaaggaaggtcccagctagtattaaaagtttgcttgactggtattgacaccattagtgtgcatataccagaccatgcttttattggttcagatcaaaaggcctttgcattcgaggacatgtgattaatgatgaaccttcagagactcgacgtgcaacttgtgacagtgtttgcattgtaagtgttgctcatacttccacatatatgtgttat

SEQ ID NO: 117498 - DNA, 640 bp, Zea Mays
acccccaagggagaatattccagggataacataggtaaccgagggcacaatcgtctttgatagggtagagttgtccctcggttacctataaatacccccgtacagtccattgcgggggacggaaaaacagtgttgccctaatactctgtgttaaacggcatcaaactttttcctgttctcccactgtttgagcttggctgaccacgagttagcgagttctaacagggggtcatggtctgaattattggagctagagtccaagagctctagtttaggtgactaaaagttaggtgatgctatgatgacagaacgatgctataggtgccaaacttcccacgggtgtcgtaccaaacacactaggatatcaaaagtacttgacgaaagattgtttagggagcgaggagtgaaccctaacaccgtgaagtatgcctactaggtcacgacattttgagcctaacacatagatttttatagagtttcgagtcgtaatatacgtcctcttactgatcatggattagcatatatatagatggtatgtaagattgcaagcctaagatcaggacagatagctcctctttggaggggagtagataaggcaagctactctaacacttttgttgccgcctttgtccgattgtct

SEQ ID NO: 117499 - DNA, 424 bp, Zea Mays
agatcatatgatgcttaccttgaccctatggttccatgacaagagaaaagtttccaaaccctaagtccaaaccactcgggctatgtgaaccaaaacaaaaaacgtgaaaacaaacgatgaatcaaaccttatcatcaattgggctaattacacaagttgtagatcatcaaaatatctatcagagatagtaaggaagtttccccaaaacaggtcttaaacaaccgcaaatcgatcactaactaaaagaaccctagaggggaaaccagattttctctaagtctcgctaacccgaattgaaaaacatgtcgtgttcacctagcttctctactcaaatccaaatggtccaatggacaaagtggcgcctaattacctcaaacacgccctagtcagaccaattgacatgccttggcacaagtttttgtcg

SEQ ID NO: 117500 - DNA, 602 bp, Zea Mays
gcaagagtggttcttcgacacaggtgcctccagtcacatgacttccgacgctggtatactttcccacctctcctcttatcatcatctaccctctaacattgttgttggcaatggcaaccttcttcctgtcacttccactggcaccactcaactttctcacaattttcgtcttaacaatgtccttgtttcaccgtctctcattaaagatttaatttctgttcgccaattcaccactgacaataattgttctgtggaatttgaccctcttggctgctctgtgaaggatcttcccactcggcgcatgatccttcggtgtgatagctccagcccactctacccactcaggagcacaacatcttctctccatgctaccacctcttcattgtggcatcaacgacttggacatccaggatctgcagtcctcactcagctagctcagtcttctgtcattccttgtaccccgaataaaaacacccccatatgccatgcctaccagctaggacgtcacgttcgtctaccttttcattcttcatcacatgccactcgcaattttcaattaatacattgtgatctttggacttcaccaatcactagtgtttccg

SEQ ID NO: 117501 - DNA, 882 bp, Zea Mays
ggtgcagttggatggttcactcggcgtgaacgtttccgacgagcaccctctggtgtctgaatttcctcgtcttcgccaaactcttgcctagtcacaattgtcgtcggctcagtgcgggcagagttagatgattctccggccagcaggctaagaatagcatccatttcagcatcatcggtagtggacgccatctcaaagtgagtttgcttctcagccttgggaagattctggaggggagcaattaaggcctcaatgtcctctgaggagggtcgcactctatggcccgggctaccatctcgaacaggaagattggagacaaagccagagaagggactatgcagaggcaggttccatgcagagtaagataagggaggaccagcattcgaaatcctgcccctcaatatcatgtcaagtcgccctagcaagtcctcattggggatttgcatgttagtgacccgggtagaatcgttgacgctagtgtacaagtaagctaggtagactatgtccattaaagtttgaatgttcttgaagacaaagtcagcaaccacggcttcggcagtcagacctttgtccttcagcgagcaaatttcggcaagcagcaccttggccacctctgaataagtgggggactccacccagctgggcgtgcgaacgtctggttgcctccctgatcgagggggagggatttgttgtgattctccatggtgaaccactcgaggcaacatcccttgatgctgtccttgagagggatatcaaggtattccactttcctccccccgcgaagctccaaactagcaccaccaacaagctgatgctgccctccagccatgccgggtcaacagtggtaaaggtacctccagagtccaaagtgggggaggattc

SEQ ID NO: 117502 - DNA, 282 bp, Zea Mays
gttcaaatacttagttacattcttcatactactttgttgtacctataactaccaccaacaaagcaatcagcttaagttgggatccgactaagtcgttgttagatgctcacacatatataaaagggtgattactaaaccccgccaacagagcaaccagcttaagtcgcgattggacttaagtcggtgttacatgctcacacatatagaaaagggtgattactaaacccctgccaacaaagcgatcgacttaagtcaagatccgagttaagtcggtgctacatg

SEQ ID NO: 117503 - DNA, 402 bp, Zea Mays
aaactttgaagcaagagagcacacatcattaattttcaatgagttgaatgaattcttaggatctaaagaagcacataatatcagaagttctgtaacttgttcactaaacctgtggtttagttcttgagcttgttgatcaactgcactagtgaaaatatcatatctatagtgatgttcaattgtgatctcattccctgcacgagatcgaatgtagtccacatataattcagtcatgtttggaacaatgatttcgtgcttattgcaaaatactgtcacatcattaataagtctatcccaaccatggtctctcatgttctgaatcaaccttttggtagtggcaacatcatccatagcattcacaatgtcctgagatttatgttgtagctttttgcagagtaaatc

SEQ ID NO: 117504 - DNA, 399 bp, Zea Mays
tatcttgtatgaattccactaccttggctgaagttagagaggcaatgggtttgtattctatccatttggtgaatttgtcaatggcgaccaacacgtgagtgtagcctccctgagctttcttgaacggtccaatcatgtccagttcccagcacgcaaatggccatgttacgggtatggtctgcagttgctgtgctggcaaatgctgctgctttgataaaaattggcaagcttcacatctctggactaactcggctgcatcactctttgtcgtcggtcagtagaaaccagacctgaagaccttcccaaccagagttcaggatgttgcgtgtgtcctgcactgtccggcgtgaacctcatctagcagttgcttcccagtaaccgaaggaatgcacttcatga

SEQ ID NO: 117505 - DNA, 490 bp, Zea Mays
gacaaatcaccaaactagaccactagataaatgtagactgatgataataacatgaatgttaaatgataatatctagtttttccaaaatgatatgaataccaaaaaaacctttttggctacctaaaggagagctggagagagaaaataggtggactggctgagaacgaggcattggagcggagcagccgcatcggtgcgtcattgtggcgagtcgttgaatatgtcgtgagatggcgttgatgaggcggcaacaggtgggaggactgagggcaggaggcaaggcagcgatagatgtcgatggtgacaagtgcagccagtgtcgtgttgcgacggcacgggaccctagtgagttagcgagagacagatgatgccacggtcccaccaattgcttgcccatctattgatgtggactaggaggcaaagtatcaacattgaatgcaggatcccgacaaggcgatgagctgacgagtaatgaggaggtaaggtggcg

SEQ ID NO: 117506 - DNA, 664 bp, Zea Mays
ggccattatagcttccctgtcttgaaatttaagcattgcatttgctatgtaggtggcgtatcttgcttcaaaatccttcttcatagtatttatgcgatgctcaacttcttcgtccgtctttccctttaactcttcattgtctttgccgattctgaaagtgtggctttcctcacatatcagtattgtgttcagatacccaatccttttaccggcattagcatcgggcttggtaccgtacaggatctcttgttggtcatgttgcattctacaagtcacacgtgcatgtgtcacatattgaaaattaataacacacagatgtcgaaatatgagcgacacttacagtgcaaacagagtcacaagttgcacgtcgcgtttctgaaggttcatcattaaccacatatcctcgaatgcaagaaaggccttttggtctgaaccaataaaagcatggtctggtatatgcacactaatggcgtcaatgccaactgatgatgcacgcatgtaccaatcatgcaaccttttaataccagcagggaccttcctcagtttctcaagagttagtagaggtctggccgatacataatgtttaggcacatttttataatctgccttagttgggatctttatctttgtggccattgcctttgccttttctgcagactcctcg

SEQ ID NO: 117507 - DNA, 631 bp, Zea Mays
gagatttttggtcataaattatttggtaaggtcatattgcttactaataaaatcccaatttgtgatgtcttatgccaaaaatgctttcatgcattatattttatatcttcaggttacttcgggtaaaactttatgcatgaggagagagcaggaaattatttatttgtgtttcataggtatttcattaacttcccagatcttacaagcaccatagagcttgtcaaagttgttatggccacttagtgatatatataaatatattaagccacacaacacatgtcaaacaaaatatagaaccaaacgaaattatttacgaaggttgcgctatgctgtgacttctggggctcagataacccaccacattccgcgagtacaagctccagcgtatctggcggcaacacggttgcggccatctgggctacgatagtatagcaagccttcgtaataagcgcaacaggcacaattatggctcggtaattggggtacacgataaatccacgcaacgtgcgcaacaagcgcaatttgggctcgcgtcagacagacagtgcctacagggcatacaaaaatacgcgactcagcgatgacggtctgactcaacgggagcaatccgattaatggagagcgcgacata

SEQ ID NO: 117508 - DNA, 508 bp, Zea Mays
gctgtaacacccctggtgttactgttactaaaatttgagcataacatcataagcattggcatatcatgtgtttgtcacacctagaatgcattcactaggcaaaagttcaaacaagttgtattgatgtggcatttcataagtgaaaccctagggtacagtgtttaaccctagattgggcttaaaggggtaaccaaagcctaaacaagaggaaacttcaaaacttgataatcatgatcataaaataccaccattaatgaagttaagggatatccaaaccctagaatcctcaaaaaccctaaaaagaaccctagaaagccctagacttaaaccctagggggctaagtgcaaaactagtgcacttttggattgaaatgcaaaaaccatgaaattagggcatcttaactcatgtggttgacaagtatgtggatttgcaacttaaaccctaagttttgggcctatttgcaaaaaggccctatttgaaccctatggagttaagtatggttttagt

SEQ ID NO: 117509 - DNA, 370 bp, Zea Mays
acaaattctagaaattgttttcctattaaaaactcattttctaaataaattctatagattttagctctgtctggaccgcgcaccaattaactagaagcacaggggcgccaaggtaaaaaccccgagacacagagaacagtagttatgtacggtgggttaattactgaatggtccaggggctcatatgcaatttgtatcgaccgaaggggtatcggtgaattgcagccgcccgattatcattcaaccacccagattagctcggtgccctcgcgaaccggtactggatcacagccgctagatcacccatcggcggctctgatttaaaaatcctatgatgtaacctcctacgctcatccgccgatcgacgacc

SEQ ID NO: 117510 - DNA, 309 bp, Zea Mays
gtttggagctccgcgtctgcctcacccgacggctcagtggggttcttctgttaacttcactccgggagcttcctcttctgcgggtatttctagagcttatgcgctaccctcggcagatggcatggagcaaggatacgtggtgataggtactatctcagttgatttgtttgtggcccatggtctttttgactctggagctagctatttgtttgtttcggagaattttgtgtcgcgggctggtctttcggtgcagaggttgggtcacccaattttggttagttctgctaatggctccattagtagttgttc

SEQ ID NO: 117511 - DNA, 381 bp, Zea Mays
tgtttttgagcatagcaatggcaggtgggcctatggcagtattagccatgttatgcgtcagcagccagccagcccttcctcattagctagagatatagggtaaattagggatatgattaaatacaatttgttagagcacttccaggattccacctaaattagatctattttgtcagagtgtatcctgaatataatccaccctaaattgttttctctcacaacagtccccctcaatttcaaccgctatcttttaaacatatctggtcccagtttctgtatttatctagtcttcatttttctgtcagacgccgatcgcctcttgttgagtcctacacaacggtggctgatcgataaggatcccacaggtcctgacaacatttt

SEQ ID NO: 117512 - DNA, 496 bp, Zea Mays
ctaatgactgctaaactttagcacaatactttagtcagtctgtttggttctccagaaactaaactttaccacaaaatgcagtgctaaactttagtaaggaaacaaacaaggcctaaacctcgatctactaaattgtggcgccgaactttgtgagcgcattgaacggatttactatgagataaaactttacgtgaatcatgctcgcattcaccaagtctaaattgtgtcctacatactcaaattttaccatggtaaagttgatattaacttagacatcgaaaattttccataaggggctatttggatttttcattttgaaggatttgcaatctgcttaataaagtatactatttggtgtttcactacttttcaaagtttagatataagtatcactagtctatgtttctaatctgcaatttataacatgctttcttggctcgctcctctataataaaaatatagcacataaatatctctctcatatagctaccagtag

SEQ ID NO: 117513 - DNA, 401 bp, Zea Mays
ctccaatctactacgattacccccaatgtaagtaacaccaacgaactccaatctcttaaagcttacatagacgagcagcgagaacagttgcaacgtatcgtaggggacactactacaaaacatgttatatgagacggttaattttcagttcttaagacgcttatgaagtgtccaaatttgatggagtcgtaaaagatgtcccacatttaagatgtttaaaaaccgtcttaaaagatattatataagacactttttaatttataaccgtctgaaaaaggtatttgtttaagtcatttgtccgataaaccgtcttaaattaggtttttgtttaagacactgcttctaaagaaccgtagagaatacaaacattataagtcataaagtatttatcaaactgtctc

SEQ ID NO: 117514 - DNA, 593 bp, Zea Mays
cagccctttttatttaagataatatatcgagtttagaattgctagcgaataagtagcgaagcatgtagcaactgagcagtaaaacccagcagttgagtaagtacacaattgcaatctgccgccgcaatttctcacctgatcgatgtccaactcaaacactacgacgggtgtttcttagccttgaacccaaaggattatgaatgaattccataaaaacgcccgcaggcctctctttttaagttacagggcacttgtcatgcacgtccacatccctcgtctgaaaacccattctccgatctccagtccacacacatgggcgaccgatcgagctctaccatttatacccaccactcctcgtcgatcggatgaacgccggggaagaaacagctcgatccgtagcttagctgcaacacatcggtgatcgttccatgtgtgtgtgattattgatcagggagcaatacaatacaatgccttgcttggcgcaagagttccaccccaagctgccggcggccagtcactactgcaagtccttgtcgtcgctcatccgggagacctacgcgcactgccatgtcccctgcgtcaggacccccgcc

SEQ ID NO: 117515 - DNA, 401 bp, Zea Mays
tcttcaggggtagctatagttgtttctatgctgcttttcatagatttttatgggttgtttcaaaaataaaaaaatgactgccacactgactgttctaatgtctatacaaatttcatgtgatgtgactggtcatcgtatcaataatgaacaatctggatatcatgacattggtttattgcttatatttatttatctgaatggagacttggactcgctatagcttttagtagacttgtcgaggagcgatctatccgattatcagtcagtgtcttcatgccctgctactttctgataccttttgttttagtatattatttgtgactagcagcttttagattgcatgggattgtggaggcatctatcttactacttacagatggatctgctgttggtttgcttgt

SEQ ID NO: 117516 - DNA, 481 bp, Zea Mays
ggcgtagtcagcagatggtctctctagcaagcaaccatggctttaccgatgaactcactgattgtagatgtcagagtgaccctcagcgtcaagaggggacctcgccatagtttcaacctagatgtatttgtgaaaggacctataaaaccagcaagcgaactaacattcattcaggtcgacattgacccaaccagtcgatagatctccagttcttccttggagtacccagcggccataagaatttcactaccctctctgacatctttcttccttgaggatttgtcgatcagctaggggcacttttgattgacatgaaacttctggaagtatgtaatgctcttcctggcgaaagcttcatctttcgcatgttgctcttcttgccgaagcaccacaagtcatattcacgctacacgttgtacctcaatccatcagaaccacaataaaggtcccgatggaacaccacgaggggtttgtatcatcc

SEQ ID NO: 117517 - DNA, 355 bp, Zea Mays
attcggtgtaagttgatgaatccaaacttcgatgcgtcgcagcacttcgatgacaaaccaatgtgtgggcaagcgaagtccgacagtaaaaacgcttcaaaaacaactaacccccctacggctctcggacctcttcagctcccgagcgctccccacaccgtacccaaaataccctaaacgttgcatctcttgcacatgccctaagtaaatcctcaatgtcccaaactcaacagtatgccctggcaataactcaactaccgccgtcgaatcactaattttcttctccgatgatgacgcgttcaatgatgcagtcacggcagacagtggtgaagaagaagacgacataacgtaccat

SEQ ID NO: 117518 - DNA, 470 bp, Zea Mays
ttggatagttcgattggatgggctcacgtgatagcctgctgggttggatagttggagaacagattgacatatgacatttacgttatgtgggctgactgacttatggttacatgggctgttcggttttcttggtaattcagtttggtatagtgtgaaaaccgaatacaataccatataccaaacttcatagttttaaaaaccgaaaccgaaccgaattaccataaaaatcgactttttggttcggttcgattcgggttagtatggtttttggtatacggtaaaaaaagtgcccagccatattcatactattggcatcaaatggcaattgctttgctggcattaacgctctttgagcatttggcatcgtatagtgctaatcgttcattgttattgtgttcttcccttcctaccccttgctacgttctttcatttactccgtcttcgagctccgttctcccatgcttaaacaa

SEQ ID NO: 117519 - DNA, 476 bp, Zea Mays
ttggactgggcctcattttctgtgaagcgcaggggtctctgcgcaagatatcctagactcagtgcatattgaaaatggacggcgggtttatttcctagtttgtcgggggctctttagctatttgcacacgcgaaggggtatcttctattgtgggccagacgatccagattctgcggcctagattgaatctagtcttaatgaaacggtacgcgccgaggatcgtcgatcacgaaatcgacggtcacgatctaatgcgcgaaggaggtatactaccgtttgatctgaaccgcacaacatccatcccacggtccaaaccccatctgaccctaggccgttcatcccgagaacaacggcactggtgcattctcccttcttccgcaccgcggcgaacaacggcgaacagggccgcggcgccagactacactccggcgagaacaactccgaccccggagcgcccaatcctcaatcactaccgc

SEQ ID NO: 117520 - DNA, 426 bp, Zea Mays
gcaatgagcaggacggcaggttgagagagagaagggtttcctaattcctattataataaatatgtaaccactgtatgtatgggaggaagcagcaaagaaggctctggacagagaagatgaagcttagcaacaaaatggaagaagagaacagccaaccaatcaatcagcaagcagtgcacggctactgaataatccacgagacgcactgtgccaaatgcccagctcacgctgaagctggctggagttcgtggaacctcaacatcagcgagtggctggtagggtctggtcggtgctaccgtgccacaactttccacacaccttgattatagctacctagctagttcatttcagcacaccacaacacaggtcaagtctctatctccttgtgtccatattttccttctctctctttctttcccagatcaa

SEQ ID NO: 117521 - DNA, 300 bp, Zea Mays
gtggaggtagaggcagtggaggcgagggcatagggtatggaaatgtgggcggaggaaggaggggcgaggaagcgaatgggatataaggggtcggagttgtcgcatcgaacaaccacaacacgagtggtaaggtcccgtatggtgacctcccagggatcgaactccttaggataacaattgtcagttgtgaagcgacagattgagagaatgttctgtatgatgttgggggcaacaaggatgttgaggtacaaaggttcgggaaggaccgtgtcacctactgaggtgacagtcagagtcgac

SEQ ID NO: 117522 - DNA, 426 bp, Zea Mays
ggatttttagaaatctattttgttgtatccgttttgttgggattttagattttttacaacaaatttggtttagaaagttaaagtagacacacccaaaagtaaaaatattctcccattgttcttcattcattcactattagaatcacttctcacctagataattcaaaagtaaagctcaataattaggatagctttaccaaactagcgcgctaaatgaacacgttgattccacgaacacttttctcgtatgttacttgttaaagataaaaacaaatgaacaagtaactggaatacctatcaatttcattgatctcttggtgtatatatacatgtgaaaatgtgtatctttattagtgaaaagataattaatcattaaacaattattgctgaaggatatgcctctttgataacatgcctaactactaa

SEQ ID NO: 117523 - DNA, 313 bp, Zea Mays
agatccttgctggaagctgcgccgtcgcacctgtggtcaaggtcgagtctgagccggttagtccccttccccatccctcgcatctgggctgttgtgattgccaccttcgtttagggttttcatagggaatgggtggacattgcagattttgtggggtcctagatccagacgtcggtcgacaggtcgctggcgtcagtggaccacgtcgcctatcgcggttgtggagcggagctgtgagcagatcccaagtccaatgacgaagagggagtctcggtagggtgcgataaggcgcgatgaggtcagacacggagca

SEQ ID NO: 117524 - DNA, 611 bp, Zea Mays
ggcctatattacaacttgcacttaattccctccaatatgtatgttggttgttggtcatagatcgaggggatgtcgtgcaatgctctagggaggtaaacaatgaatttcgccttcattcctttaggtgcgttgatctgtgctggctccattggatgagtgtaaaacatcttctctccttcgtgtgacctaaaggtgggccatggtgtagtgtagtttctagctaaaatggatttgacgactcatgcaatgacccctccatggagttgaggaggatatctggctgccactccatttcttgatgaatcatgtagttcatcttgtgtcagagggcaatgttgtgcttctttgagggcttagcaaggttgacttgcttgagcagcatctccggccatcgaacgaccttgacatcgacactataggtccatgtgaagtggctaaggggttcattggctagggtcttgaggacccattcatagtattactgtagctcctagttgacgtccttgagctagggtggccctgtcttgccttacggccatcgctccagccatcactgatgaatcgactgagtccttcctttgagtagtaatattgatgaagaaatgttgtag

SEQ ID NO: 117525 - DNA, 715 bp, Zea Mays
ctgacaaatgctcattttgtttgcctttgttacatttttagtaactttgtcatattattttttggtcccatagaagggcacgtgtgagtcttttacataaccttcctaataaaatccctgacctcgaccttcacctgatgccttccttttgacaatttctgtaactgtgcagtctgtggcatgacaatttctaccataattctttagatttaattctgaactgtgagtccaagaagtaccaaagaaaaggtccaagctataacattacaaaatttactgataatttgcagaatcatgacaatctggagacaattttcaaactataacaaatcatgaataactatagaatatcttagggtccataagtcatgatctgtaaaaggacaagtataaaaacccttttttctaaacttatgtattatacaatctatgtactaacaaggcaagaacaatagagcatggtgggcgggaggaggcaggaacgagcggcggaggaggtgaagctcgacaccgacaagggtccttagtgttttcttgaaaatttctgactgaattattgataagtatgcagctcgacattcctatatatgcatactggtgaattatagattgtatcatacataagtttagaaaaatgcgctcacgactatgtaagctgaattacaacataaatacaccttgttagcaatatatgtcttattcctaatagtcagta

SEQ ID NO: 117526 - DNA, 537 bp, Zea Mays
tgtataggggacacttcaaaaaaccaaccataatcttagaagcatttgccagctatgatctttgaatatggcatgcgttcttcgggctgcctggcttaccgaacaacataaatgttcttcatcgatcccatgtatttgagaacctagccaaaggggttcggccctctgtcaattacaccatgaatggcaaggagtacgacatgggatactaccctgcaaatggtatttatccttgttgggcttgtttgttttcttgtctaccttcagattgagcagcttcttctggatttgcactttttctgctatcatggactcgaaatcctctccctcttttttggatgcctcggcctgggccatgtcgaagttcagtctgtccattgacatcttctgcaagacctccaaacaagttgtggactgagaagaagaactaggcatgtttcgttgttttttgctttgtcgcgtccaattgggcattctagtggagtaggcatgtcgtctgcatcagtggtctcaacatctggggatttgttgttgttg

SEQ ID NO: 117527 - DNA, 343 bp, Zea Mays
tgctgatgaagtgcggaatgtccgcttcggtttggcaacagatggtttctcgccattcaatgtaactgcaacgtcgtactcatgttggcccgtctttgctgttccatacaagttttttggagataaacaactcaaagtggtgttcttcgattgtgattggttttccccaaatacaacgcgagaaaatcaatatggcatggttgaagtcaaacacaacgatagattaaaaggccacgacactataatccttgcccaccaatgcgagcaggtgtattatatgacatatccatctaagaaaaacggtttggttgattggagggtagtgtacaaagttaatcctcgt

SEQ ID NO: 117528 - DNA, 757 bp, Zea Mays
tggttttccaaagctagaggccatgcttttaactatgtcttccaaagagttttcggactgccttgcttacacgcatcttaaggtgatttctatcgacttttcctttatggttcgggttaaattgctacaagacttgtgctgattttgacttctagtagggcctattcttgagcaaggctctaaagaacaagaaaaatgttgagggtgaagctgcccaaaaggaaatagttaaacttagattcgaagtatctgggctcggtacgactgcaaagagaaagaaaaactgtttaagatcttggagaatgattttattgaaagtcaagtcgaagttcaagctatgtctaaagaagagaataaacttaaggaaatggtgagaaagaaaatatcaatgctcgaagcttcaaatgttgaaatggacaggtgcatcgcaacactcgaagttgagctaaagcgagcaaaggaagaatatgaggctaaaacttctaagataaggtgagcatccgtcgaagcaactgttgaccttagtgctgctcaagtgaaggtaggagacctcaacgatgaaataaaccatacaaggtaactcaatgaaaaactattggatcttgatgaccaattactacactctaggcaactggtgttgcaatgaattggccaaaaccttctcctctgcttgagcaaagtcttgggagaggaactttgtggatggagacttagaaggaatgatacagtggatacttagcgagactcgcacttacag

SEQ ID NO: 117529 - DNA, 553 bp, Zea Mays
gatttgattcaagagcacatatccttcagggtatggccacttgtggaaagctaggaaatgccaaaggagaccaccaccgactctagtgatggtggtctggtccgactgaagtacaccttcagatttagggagaagtttgacgagtcaaacgacgactggctgaaatgcattgaagctactagtgatgaactacttggagcatactccaaagccgaagataatgctttgtccgcagccttcggaggctgagggaggaaaaggctgaacagggtatttgatgctattggcttcgtataccctgattaccgctacccactgtgagggcaatagaaaaagaggaagattgctgcttcagtcaccccagctgagcctgagccgaagagtagaaagttgaaggttctgacccaccggtcgcgttatattgaaccggccgcagtgcctgaatttggcgcagggtccacttcagcagccaaagcaacacaaactgctctgattacaaagagcgctgaagagccgaccataatgccgaagacgcatgcattcgagctagtcg

SEQ ID NO: 117530 - DNA, 534 bp, Zea Mays
tccatcaataagttcgaggcagcaatacacggactctacctatgcattaaagtcctaggccctcaaggtgtaatcacaatatatggagatcaacacgtagccaagaacatagaaagagacttcgtcccaagccagcgcaatgtgcattgcctcacgacagaatgtgaagacaccaacagtcctcgcacaaccaaaaacaaaaaagttaacacacaactgcagagtaacactggaaccaagacagtccccctcgaccctgcaacccccaagaaaacaattttaatcagtgaagacctcttgccaaacgaagaagcaagacttctctcctgccttaaccgcaacaaggatgtcttcacatggtctgctttatacctagtcagggtcagccacacaatcattgagcacagtctggacatcgactcctccgtgcgcccaaagaaacagacactgcgaaaaatgtccgatgaaaagacagaagctgcgaaagccgaagtgcaccgtcgattataagtgaaaattatcgagccaattgct

SEQ ID NO: 117531 - DNA, 361 bp, Zea Mays
cgagggcaccatatactacattggctcaaccttcggaatgatacccatctccctataattgaataacattatcctcaattcctcaccctcaaaaagatttcgcagctccccttcacctatgctcgccccaatcggcgaggatagcaattcttgcctaccagtccggtccacgcgaagacgaccacgctccatcccaatacgatgaccacttcgcgatgattcactaactctccgtttcgccaccgcccttcaccgcctatacccagtactcgcacccgggagcccccggaaccctccacgcgcggcgaaggctccactgcagccacatctaatgccgcaaaataatccaagccttcatccg

SEQ ID NO: 117532 - DNA, 363 bp, Zea Mays
ggtctagatcaattcacagagtgggcagtcgcgtgaacaaattaggaccgtaggattgagatcgtaaagcccagattagatcgtatctatttaaatctgtgccgttgattcctaatctagcgctcgatatcgcgtaccggttcatcacggcgcggatgtaatctggaccgtagggtgtggatcgaacgtctctgattaaaagataccgcttcggccgtgtagttttacacatgtgcccctgtgtttttcctatatagaacccttcgtccacatacattgttcactgagtctaggattttatgcgagcagccccctgacctttctagaaaatgaggccctgtccagagaagattaaaaacagag

SEQ ID NO: 117533 - DNA, 433 bp, Zea Mays
tgggttctgcgccttgtgggtgtcggatgcggccggcttggaacgagtccgtctccgtggcctgcgtgttctgtcctagttccacggccggcattgcaatttcggcgccgatgcaaacgacgaattccgcagcgttttaaataccatgttaaataccatggtatagctaaaatcccaatatttttagagtcttggatactatggtctagaccatagtttttgccgggcgcgtgcccttcacgcctcactctcgccatctcacgtcttctttttcccactcctggacacacaccacttttcccgtttctctttgcatctccatcctctccgccgctaccacttccgtcgtcgttgccgatgttgacgacgcccgcccatgagctcaaaaatcggaacagcaaagtcagggatggtcgctcattccaaacaaaat

SEQ ID NO: 117534 - DNA, 473 bp, Zea Mays
cccaaaccttaaacctttccattgcggttatctccaaaagtgatgctatcataatttgaacaaccttcctaactcatttgggtgaacatcctcatatccccggtcatatgttgagtacaaccactatccaacacccaatgatttcctccgccttgtaatttacctacaaaaggaaatcaatctcttttaggtacccaaatttgtttgggtccttggatgttagtgaccaaggtctttggcacccaaatggctttctttttggtaccaacaattgaagtgccaacaaacttagcatgaacaccttttgcattatgtgaaagaacatagcaatgatcaaaacaagatgaggatacattattggatttgagacaattcttcttgacatgtcccttcttgtgacacttgtgacacactttgtcacattctttcacaaacatggtcttttgcttcacaaaggcattctttcctttctt

SEQ ID NO: 117535 - DNA, 418 bp, Zea Mays
tattgggctgtcggcccattagagttaaggttaagtctctctctatatatacccccttctctatgcaatacatcaatacttcacagtccaatataaacttgcatggcaaacaagctccacgtgaaaactccatcttcaatcagctcacagtaatttccaaagactcttgaactcgggatcaatgagctaacaagaaccatccccatgatgataaccgaattgagttccattgaactagatcataactatcttgatgggtatattccttcaagcatcgaaaatttggaatgttctgcagtttcttttatctttcaaacaaaaaattatcaggtcaggtaccgtcctcacttgcaagcctgcaaatgttgacacgtttcctttcttacaggttaaggtcacaacggactctcaggactag

SEQ ID NO: 117536 - DNA, 586 bp, Zea Mays
tgaaaaataatagatgctcaaagaggtatccaaaagaattccatgaagaaactaacttggacaaacaaggatttgctacatatagacgaagaaacaatggacgctacgtcatgaaaggcggttataaattggataataggtgggtagtgccatataatgagattctgttgaagacttatcaagctcacatcaatattgaatggtgcaataaaactatctttgtaaaataccttttcaagtatgtaacgaaaggtccagattatagcaaagtatatttgcagagaataagaaatggcgaagacacaccttacgacgaagaaactaatacaagaaacgaggtcaaagaatatttggatactcgctatctatgtgataaggattcctgttggcgtgtgcttggatatgagatacacagacactatcctgcagtagaacaaatgctagtacatttacctaatgaaaattacataacatataatgcagcaagtaatatatcaagtatattaactgaatcttttcttcggaaaacaatgctcactgagtggttcagtaccaattcaaatacaaatgcagcgcgcaatctaac

SEQ ID NO: 117537 - DNA, 450 bp, Zea Mays
cgagaaggtcctgaaggaagactagaacttttatttttgctagtttaatatcgttgaacatgatctctagtcttgcaagaaacacttgtaaacaatttgtgtgtatattgatgtaatatatttctttgtgatgcatgaaacttccatacaaactgtttttgagccgctggtgaaaaacaccttcccttcttttcatgcttcacgaagaaaaaggttccccttctgttgattcaatagtgcgtattttgccacgattgttgtatagtattactgctggcgaagattcttctcctgtgtaaaaatatatctgccgaaggcatattttgtgctacaacacattctttcatgatccgacaggtattttcgaaggagcaattttccttattctccacgaccttttgctgatgcaaaatgatgtatgatatgatgctacgcgatattatacgatga

SEQ ID NO: 117538 - DNA, 317 bp, Zea Mays
aaatgtttcattatgaacaaagatgcttcgttataaatgaagatgtttaacaggaaaagaagggaaaacacttcatcatgtacggggggtgggcatcctttgattttggtccaaaggttctttgatttaaacgaaaagaagggaagttgtttttcgcctttggctcaaaaagctgggagcatcggtttcatccacatcaaggaaagcaacagtgggataaaaggtaaagcaacattacgaggtattcatagatatttacaaaatattttatattcaatcacaacttttcactgagtacaatgttttcttgtacaaag

SEQ ID NO: 117539 - DNA, 332 bp, Zea Mays
gaggaggagaacatctacaaggaagccaacggtgaatagcaggaccactttgtggggatatgacctatcaccgaacattatacatcaatgttcgagacagggcacttccctaacctgttgtaggatattctgcatgcgttgggaacctacgtccgacccctgtatgagaccaggcgagtgtacgagccccctcgagcttgctactacatcactcgcattcatgtcagggtgaaggatgcaggtgatagagggttcaggactttattagctcatgagtctctaacaccgctatccacctacactgcttcggtcagcgatgctgctaggcgaac

SEQ ID NO: 117540 - DNA, 478 bp, Zea Mays
cgaagcaatcaatttttgcttgtggatagtgtggaggcaggtccttgttgtatgacctttattctcaccataaaacagatagaatggctctcttttgggtgcattgaacctgccactgaagcctcgacctcctcttcccccgtcttggagctggtgggcggaatgtgctctaaggaatgctggtgatggtttgcatgctattgttggcttgattgcccctgagattgggttgtcttctcttcactttgtgttgggttgtggatgcttcggacatgatacacctagctctggtggggttggccgaggcccaacaaattagggttgctcggagcccaacagttcattaagcacacccaactcagaaagaggcccaatcaccccaaaagactagtctaatgggggaagggtgactctttctattaagatggcttcctcctcccaagttatgaaaggtgggataattctgaggcttacacgg

SEQ ID NO: 117541 - DNA, 345 bp, Zea Mays
cataaattcacttgttggttaggaccctcaggtcaaaacactaacagttagcgcgccatgtaggggctcgctgcgtgtttatgacacattcccattaaggatccagatggctaatcctgaacaccctttgcagctcggcacagtgatttagtttgggagtctcgagttcatgtcccttggctttgattatgacatggtgctcctcccacctatacaccacaccgactccaactaccgtctctcctaggcaggggatcatgaccacgcttgctcccctggccagaggaggggcacccagacctccaccaccgtccttctcgctggagaagatggagatggaacaac

SEQ ID NO: 117542 - DNA, 496 bp, Zea Mays
gcaacagcgacaaccctgtcatattcccactacatggaagagaaagcatggcagagtaccaagggcgacggcgactagtggtcttcaagcgggccagtgtggtggagcttgacgtcgtccttgtcgccggtagcgcagcgctcgacgatggaaagaacaacaacactatgcgcgacgatgagtaatagtaaccctaaaagcgacacatcagcaatctagtgggagcggaaatttatagttgtgcggtcgtgctagcggccccctccagacggttcaccagatgatcgaggacatcgttcgtccctgtctaagcaaaggacttcgggattggcccatcaggatgaaccattcccccgggggggctactattggggcagaggccgaacttgatctcgatcaacgatgtgaagcctcgacacctcattttcaactaagcacacttacacaggaccatgggcggatcagagacttcgctacatagcaattctgatggaac

SEQ ID NO: 117543 - DNA, 677 bp, Zea Mays
taaagaggaaggttgctgaagcaactaaaaaattcgaagttgaagtggtgaagcatgagatatgagagatcaaaaaattaagagcgcaaaagaacaccgatgatcttcgtgctgccaaagaaaaatgttatgaagtatccttggaatgtgctaagagtttaaagaatagcttcgctaaggttggagcctattcctcttagcaaagatttatccacggtgaccttgatggagttatccagtggattagcggggaagctgaagcttttgaataaattcttagtgatcgaggagatttttgtgcctttgctggtgctcggggggccacgtccatcttggagaaggctagttgcgatcatgcaaaggctgttgttcagccagagtttgctctctcagtcgacgacatgaaaaatccatcagtcgaagcttttgcgctaagtggtaaattttactccgaggtatggctgaagggcgggcgagaagccgccgacgaagccatcagaagaaaagaaaaggaaactcatgatgcttcggaagaggcaagaagggctaaagaagctgccgagcgggctaggcttataggtatgcatctgctgtggtttagcttcgtaatccgtttaagctttggaactaacaaacatatacgatggtgcagttgaactatctccgcctctggagcc

SEQ ID NO: 117544 - DNA, 943 bp, Zea Mays
tagccaggatgccacaccttccctagtgttgcacacttctggctatatattgtactcccttcttcatctaatgaagcattccattcagccccatttaacttgtctaacagccctaatatatgcataaaaatgtcttatcgtttagcacaacttaaatctataacaatttaactttataggggactgcgatgtacgctgaagttcctcaagaagctatatatatacttcaaccacgactacagaaaagtaagattttaatcatgagaaaatttatgttgacaacgcaaagctgtcctacaaacctatgcatggaaagtatatgatcaggctacatccaaagactttgcttgaggaagtaaatgaggatccacaaggttttccaaaaaatacattccatctaacaccattcccagaactaccccaacttgaaggaaacaatgagtattttatcgatactgttagtttcaatccattttcctattttcaaaaagacaataaacacttcgtcaaattaacattgttgtaacaacaacatgcagatgtcattggacgcattacagctctttctgatgcaacaccatttcatactagcagtggaatagtttgcatgaaaaggctgatccaccttgtggatctaaggtaaatgctcgttgctccattgaaacatatgtataaaatgttatgttactgttgtaacaaaattctaatttaatgaaggggaaataaaattgaggtatcactatggagacgtagagcagaggaattcccaggacaacaagtctttaaagccagtgaaatgaatcatgtaattgttatctttgttggaacatcagtcaaatcctatcgtggatcaccaccttttcttagtggcacagctgcatgccgctggtatataaatcttccggagatccatgaaatcaatactttctatgcaaggtaaatt

SEQ ID NO: 117545 - DNA, 855 bp, Zea Mays
tgcagtgtgatggttttgaaatttcatcatggggcacagaagttgccctaagatgggtgattgcgaacgtgccaagcgtgtagtgccaatttaaatcagcgtcaattaaaaccgactgctccgctagtagggcgtagtggtcaccccgagtttagataagcgtgagcatgtcgcaccgccttaagtcattgccgacttaagtcgattgctccgttagtagggcatagtggtcaccccgagttaagtatgcgtgagcatgtcgcaccgccttaagtcattgccgacttaagccgattgctccgttagtagggcatagtggtcaccccgagttaagtatgcatgagcatgtcgcaccgccttaagtcattgccgacttaagccgattgctccgttagtagggcatagtggttaccccgagttaagtatgcgtgagcatgtcgcaccgccttaagtcattgccgacttaagccgattgctccgttaatagggcatagtggtcacctcgagttaagtatgcgtgccaattgacagtgaacaatctgagtgcctttgaaacctttttattgatgatatttttctcgatttacagaatacatcatcgttccgagagcctctgtgatgtagctacgggtagaacttcctgagatgttctatgttccatgagttcccaatttctgttccgtccatctgagtgaggcgatatgatcccggtcgagtgacttctgctactatgaatggtccttcccatagaggtgacaatttatgccatccctcccccgttagaatttggcggaggacgagatctcccactgcgaaggatcgatgtcgtatggccttatcatgatagcgcctcag

SEQ ID NO: 117546 - DNA, 1199 bp, Zea Mays
gggctggcctcaacgtcttgtgatgtatgcctcaacaagatgcacatcacgcaagcagaacccaccaaaacacgcccattcttcaccttagacacctcggggtgataagaaggctatgagtgctcgaggtaattcttccctcgagcactaacatcacatagacacttaaggccctctaccggtcgtgaggtccctaagagtcttcgaactcatgtcgtgagagcggccaagctccagacatttgggacctagagccccatgggagtaaagaacttggcacaactaagtataatcatgtcacaaaaacagaaggatgtgactagacccaccaaggatggtacagccctaggaaaggggtcccatatctaaaggcctgcacgctactccttagtgttagcttcatgaataggactaaggtacaacaaattaaatgtgtgatgggcaacattacaggtctgacgagcatgttgttgacacgaattaggttgcagggtacttaaaactactatacagtatgtgcactgatcctatagccacacgtgcacacgcgtggtgtaccataaaatataattgtacaaaaggctacatctactaccaactacattgtactgaacagcacagaccctgatgttcgtagatgtgacgtatcatacctgcccctgtggcaggtatggctaccgcctggaaaaggatatctctaacactggtagtctaggaaaggatacctctaacactgcgacactatgccatgaacagggaattggccctagtacaacttcacggacaggataagaacagagtagttgggttttagccagtgagatctgaggttcatgttatatctctcctcccttgcactataaaaaggagtggttgagtaacgttttaaggcgtccattcgattggattcagactgattccaagccaatagaatttcctctacaaagggcaagcataaaggggggttaggatcagtaggctagaactcccacaaccaagagatgagagggagctaggtcttgatgctcactggtgttcaagctcgtaatattttccttctttatgtttatcaatcgatgagtagcaaaagaacataggatatgttgttagaattagaacatttgtaatggacttttgtgcataatgcagatataaagcgtgtgggtgtgtgctggtgaggcaacacacagaaaagtaaa

SEQ ID NO: 117547 - DNA, 402 bp, Zea Mays
caaaaagcacgaggttataattgaaaacttagaaaataaaataaaagatcaaacaactgcctttgagaagaaagagttcgaactccagacaactgaaggtttactgtcggaagccgaagctaaaataacataactgaatacgaagcttctcggttcggaacaagaaaagctgaagcttaatgtaaaacttgaggctgaaatccagaatggtttagctttgaaaaaatcattgatggaccttcaaaacaaatgcttgaatttcagcaatcaatgtgttcaacgactgaagaaggtgttttattcagtcggggccagtagtgaagaatttattccttcggttgaagatctgccaggagccttcgaacaaatcgaaggtgagattgatgacctcgatgatgttat

SEQ ID NO: 117548 - DNA, 375 bp, Zea Mays
tttacccagtttgcttctagtttttgttgaaaaagttttaacttgcctattcacccccccccctctaggcaactttcaatctcccactgagaaggatcgttgtcgcacggccttgtcatgatagcgtctcagagtctgctggtaccgcgctgattgaattactgcgtttagtcgttcttcttcgagtacatcgatgtcctccagcctagtagcttcggcttctgctatgctttcgaagaccaaccttggcgccccgaacttgagatcagcgggtaatactgcctctgacccataaaccatgaagaaaggagtatttccatgtagagctcggcttggctgaattcttaagctccaaacgacgtagggcaattccct

SEQ ID NO: 117549 - DNA, 431 bp, Zea Mays
gtcgtcatgcatgtggccgtccttaatgagtttgtcttgtctcgattattttatgtacggtggtggtaattaacacgcatcaagttaccccacgcacagcagccagtcgccagtgattattaataacttaattactgctccgcggtcattaatgatcgattcacacgtgtaataagtagaatcagagcgatgatgtttactcctgtctgtgcgtcgtcgtcgttccagttcgacacatgtcaatcggttaagttggaaagagttagagacagcacgcacattttcagttatcatcaacggctgcaacgaggcaaaagtgcgtgagaccatgccgccgtgcggccatcggaaaccagaatctttccctggagagagggacggaatatatataattaatacgggcatcgagttattccgaaaagtttgatgaa

SEQ ID NO: 117550 - DNA, 527 bp, Zea Mays
tcactgatgaagtagactggatgctgcatcgggtatgtatgtccttcctctacccgctcgactactaatgcgatgcttaccacgtgagtcgtgaaggagatgtataacaacagatcttccgccgactgattcggcgtagctcgacgtggtggcttgagtactggtggtatagtcaaaaactttttcagtgcctctagagcttcctgtgcctctgtgatccactgaaacttgtccatctttttgagcaacttgtagaatggcatgcctttctcgcctagctttggtatgaacctgctcagggctgccatgcatccagtaagccttttcacctttttctgtgatcgtggcgcttccattctcatgatggcctcgattgtttccggattagcttcaatcccttggtggctgacaataaattcgagtaagttccctgccggtacctcgaaaacacacttttttgggttgagcttccaccggtagtgcctcaggctattgaagacaagctgcaaatcttcgatgaagttttt

SEQ ID NO: 117551 - DNA, 333 bp, Zea Mays
gctctctcaactccaatggcacgtcgacagcgggatggagaagacgaaggcagtgcaacacgctaatgtgaggaggagagagtatgtattgaggacgacgtctcgccctcaatttgtacacatgacgtggcaaaatagacaagtaatcaaccacataatcacaacactaacgtgacaatcaatcataattaatgcgaaaataattacttaccaaagcatgtcagcgcaattttctccatgcatgcaaaaataccaagtagcaaatggaagtcgtgcacccgcaaggtcggaagcgagaaatcaccaaccattcacgtgcatgtcatgcacccg

SEQ ID NO: 117552 - DNA, 288 bp, Zea Mays
agaaagaaagggtcactcgtagaaggactatcaaattctataaggtacaatggaatcaacattctgaggatgaagctacatgggaatccgaagattacctaaatagtcaatttcctaagtttttagaatcctataaatcctaggtttgttataatccatcactaatgtaaaccaaccggggcacccacaccccttccttgtaagagaaataagaaataagtttgtgacgcatttccttttccattacttagcctagagctttaatctcgggacgagattcctttttag

SEQ ID NO: 117553 - DNA, 322 bp, Zea Mays
aaaaatgtaaaggaaaaaaatgaaattacaatagatattttgaatagctttggttgtttgatccagtccctcaggcatttcagtagatgcgctttgattctggcacagtactattgactatgcttgcctcatattgttcccttatgtcttgttgtggagtgttttgcacagaaaattgctgctggatctgaagtggccctggatgttgttgctcatatgacgaaggcgctggtgtaaatggctgaggcaaaatccaaagagccaaagagtgacttgccgaagcaactgagcctgagggttgtggacttggttgttggttatg

SEQ ID NO: 117554 - DNA, 890 bp, Zea Mays
gtatggattatgaaaagattgatgtgtgcaaaaataattgtatgcttttcatgaaggagcatgcgggagagaaaaatgtctgaaatgtggacaatctagatttgtggaagttgttaatgatgagggtgacaaggtgatgacatatgttgcacataagcagctccgttacttgccactaactcctcgagtgaaaaggttgtttctatctaaaaaaccccgctatgcacatgcgatggcacaaagaaggtgtccatgataacgatgacctaatcgtgcacccttcagatggggatgcttggaaggctctcgacacgtttgattcagactttgcagctgatccgaggaatgttcgcatcggcctcgtgactgatggcttcacaccttttggtcaaatggcatcatcatactcatgttggcccatctttgttattccatacaaccttccaccttctctttgtatgaaatatgaatttatatttctttgcttaatcattcctggcccagactatcctggaaagaaactcaatgtcatgttaaaacccttgattgaagagttgaaggagctttggaaaggagttaaagcatacgatgtttttaaaaaacagatattcaaacttcaagttgcgtatttgtggtcggtgcatgactttatggcatatgctatttttaccggttggagtacacatggtagattgacatgtccatattgcggttcagatacagattgcttccatcttgttcatggtggaaagatcacttactttgattgtcatcgacgctggttgcccaagaaacacccctttaggagcgataagaactttataaagaacatcgtggtcaccaaaggaccacctaaacgtcttaacacagtagaaatatatgctcagctg

SEQ ID NO: 117555 - DNA, 403 bp, Zea Mays
attaggagtgacgatagcttaactggccctggtggaggtggtgatggcgaagatgatgatggtagtcatgacgatagtggaggtgatggaacatggtgctagaggtagtggtggtggatggagcgataacggagggtacgatggtatgggggttggagaatttttggaaagattaagtttagccatgccacacaagatttaggtcatgcagcacctcaatcacaatgagagacgagaaacaatcgacgtcgatcggttttgcttcctattgatgatggtagccacaactctgctaactacagttataagtatccgactccacgctttgaccgcgccaacaacacttacgcgtgaccagcatctccaggtgaagtaccaccatcagtcatgtatgggttaggac

SEQ ID NO: 117556 - DNA, 528 bp, Zea Mays
ctttaaattgcgtaacaccctacttcctgttgtggctaggtattgatttctagagtatggggattacaaataagctttatgatcgctcagctgttgttgatgagggtggagtgagatgatgtgagatggttttgtagggtcccccctcggccttatatacacgaccagagaattatcccattacaagttgtaatcactatctacttcacttatctcctttgtcgcagcttgcagtctgatatatctgaagtcttgatcatcttctcgtccgagttatcgcaagatgcatagctccttaggtccttacaactgcaccacccaagatatcagttcctcggtagcgcctaactcggacatcggtcttggtcttcttggatgaggctcgcctaacccggctataacttgccagcccatcccgtaggacgacccaatgggaggcccattaggcggcccgtgatacgttttagtgttcatgaggacccgggggatatctatcctccacaagccctgaggctcaagccaactttt

SEQ ID NO: 117557 - DNA, 457 bp, Zea Mays
cagggtcagaccttctatgccacctcaaatgctcccaagtcaggattcttttaagtggggtagtgttcttggcagacttagccgtcttgccatcccacgaaattgacgtgatcttaggaatggattggttaaccaagcacaatggtgtcataagttgcgcagataagaaagtcagtttcatgtcaagctcagccacccgcccaagattcaatggtgtttaatctagcagcagaaagcatatctgtagtagaagaattcatggatgtgtttccagaagaattgccaggaatgccgccagaaagagaagtagagttctacattgatctaattctcggcaccgcaccaatcgcaaaaagaccataccgcatggctcccaccgaatttgcagaactaaaactccagatcacagaacttcaatagaaagggtacattcgtcccagctcatctccttggggag

SEQ ID NO: 117558 - DNA, 336 bp, Zea Mays
ggacgaataaagacaggctgcttgaatggatatgaaggtgggcaaggcgaagaacgattttgattaaaaggtcggatcaccaacctggttctcttctcaggcccttgatttgacttttcacctccaaacccctttgattttccatgtcctgcagttttagcttccactgccagtgctgtactgacagccctactgtaggtaaggtccaagcatgttgccattttccgctgaagcctgtcactgagtcccctcataaaacaattctttttcttcagatctgtattcacttggtcaatggcatactgggagagatggttgaatttgttgagatattgc

SEQ ID NO: 117559 - DNA, 528 bp, Zea Mays
taactaggatggcttacctccaccccgaaaaagaatgcgggtctatgcgcttcgacaagcattccttttgcgacagtggtacctacaagtaaccagttatgtggggattgattacattgtgcttccactataaactgcacttgttatcttgataatggttaaatccgagccactaaagtgacctttttctcttaggaccactatctgaatactcctgcccccttccccccaattcccatggtggtttttaaaggttggttttgctgctgttgcaggtaacgagacaactaatgtactctttgaattggttaaagcttttattctgttttgtactcgtgtgctcttatctgcttgttgttactgttccgtaagaattttctttatccacaccattgtcagataagtcatgaccaagaccaaaaaacaaccagataatatatactaatagggtcatcatatattgatgaacaatggcacatgaatatatcacttctgttgctagagcaattgaattaacttacataaact

SEQ ID NO: 117560 - DNA, 433 bp, Zea Mays
atttggtttggttcaaaatttcctagaaaaatttcaaaattccctctgtctgggctcaccggacactgcactgtgcaatgtccggtgcaccggctgggcgcgtgcagaaccccttttgtgctgccctgtctggtgcgcaccagacaagcactgtagactgtccgatgtgcccatgaaacgttttaaaaaaatctctccctacccgagcctgtgaccatggctcacttctcccgcgtggtcacctgttctctatgtgtctggcgatttccccttcctttcctcgctgctggcgatcaccgttgaggacctctggccgtggtccagtgtagtgctcctccctcatccttcacctggtgagcagtcctcatctcttttcccctctctcttctattctcagtaacctagaggagctcctccaccctttgtgacaatc

SEQ ID NO: 117561 - DNA, 296 bp, Zea Mays
ttcatgactgtagtgataatgcagaactgtatgatatgtgttacatgtttttcctttattgactcacagatttttcagcatcctttgagtgacaaagttcctaaaacggtgccatcatgtgctgttagccttatagaacctccggttgctagcgtaaagcgcatccgtacagataagagaactggagacacttctgcgattgctttagctgttcatttttctacatgttgtaggggcttagcacgagtaggagggtgcgctcgcgacgacagcttgcacgggaatcactggaatcg

SEQ ID NO: 117562 - DNA, 609 bp, Zea Mays
ttcaaatcagccctgagattcccaccgggcaaggaatctccctccacggaaggtcggagtggccggaggggatggcaggagcgcgggagacggagcgagcggatgaagagggaagggggacggctcgcgggaatgggtcgagatagactgatgaagacagcaggcagatgcgtcgatactctcgatgcccacgatggcgatcgatttgcctccgtgtgtgcttgcacgcgtcctcctcgatacattaaaaacatcagtattgttgctactctctcgtttcctgttagtctgagaagaggaaatggaaattttgaaacaaaaacacaatgttatttctatttttgatatttatgaattaccgactgtttgtcgactgtttgccgatcgtttccgagtgtgttcacccataacaatcaccaaattcatggattcttgctctacgataaaaacaagaatacgagtttgcataacacattctaatagttcttcaaatggacttgctaaatttagttacttactatccagtgtgctctttttagtaatttagtcaggtccggtgtgctcttttttagttcccttgctacgaggcagccagatccaatacgcgtg

SEQ ID NO: 117563 - DNA, 362 bp, Zea Mays
gagtattgtagcctgggtgaatcggtgttgacttgcaagtgtaataaaccataagcgagaaccagctagcagattttaaaaatagtggtagcacagctagatggatcaaactaattcttttccataaaataaccattcagctcacctcttaaatcgatcaacgtaaacttaaaccaaagaactcaaatataacagcttactatgttaactcaatgcttaggccatttggctttcaaaatttagccccacagcctggatgcagatcttttatgaactggtgggaatagatctctgagggtgtgaatggccttgctttgaagggcctcaactctctgaatcgctatgttttttatggctggact

SEQ ID NO: 117564 - DNA, 368 bp, Zea Mays
tctaaatctatgaggtttcatctgcaaattatccaggtgaacgggtatcggatagcactggccgctcgatcaacaacgtgcggcatagattagatctgatctcctctgaaccggtactcaatgtggagccttggatctagatcctacggctcatatttgctccgcaaacataaacgccagagcacgatctcacccgctcgtgctccgatcaatggctgagatgagcagggggcgaatcggtacgcacttgtaatcctaaccgtcgatgatcaatcagacgaccgagattatccaccatccctggcgacgaaacgcgacggcggcgcggacagcacccacgacggcaaggcatgcctggcgaccccaag

SEQ ID NO: 117565 - DNA, 342 bp, Zea Mays
ctttactctgtctaccaaggaaagcagaattttattcttttctagggcttcattccttagtctaataacctctgtctaaaggttcccaagggctatttggcagctttcgtcttcagcattcttttgtgcccttaaagcattataggggggatcagtacaataataaaagatgcaaaaataatccgtttataagtcaaaacatctttacattaagactgttgtaagcgaggctgtctgcaaggtcatccttcgacattgcggagaggccaagctcgagcttcagaaaccctatgttccttgccatctcccagcaaacagataactccttgttgtccgaaaggc

SEQ ID NO: 117566 - DNA, 911 bp, Zea Mays
cctggctcaccgcccgcgggtaaagtgctcaccgtcgtcgtgccatcgccgttggccaccgcgtgtcctaaccgcgccatcgcatcgccgtgactccctccaaactccccgtcgaccaccggagttactgccacggcggtgaacacgtgttcactgcactagcattcttcctcacctccgaccgccgtgtgtctcgtccaaaattcgcggccaccgctcgctccgcctataaattgagccctcccctagctgcgcaacatcattgcgcacccccacacctagtattgctcccagccgatcaccagcaagctccaattttaaacttcccccaaatcagttgaagaaaaccgtgaactccagctcttcgtggccagcccaaatcaggtccccacttgtcctctgcgtgcttgtttcaacgttcttacttgctatggatgatcactgacccgtttaattaagttagaacctcgtagatcgccgggaacaccttcatccgtccgccttgctctcagtcaccgtggccagagctcagtagttggttattcgtgcaattaagttaggggaaacgttctccaggtagtgaatttggtttaggccgaagctgagcgccggtcacggccctgttcggctggtctgctagctcgccggagctcggctgggcgtgaacgccgtcggggacctagcgcggtaaagcaatagaacctcagggacttttctgcaaactgtcagagacttgggaaaacagtaacagagcccacttcgagttatccaaaacgccgagggcctctgcgcaaacctgccccgcgggcgcgggcgcgcgcgcgattctgcgtgaatttgggccgctgggctgaaatcagcccagtactattcaccagtttgtccttttctttttattccagagccaaaac

SEQ ID NO: 117567 - DNA, 512 bp, Zea Mays
cctaagttttgaccagtgaagcaacaaccacgtcgctttcgtcctgagctgcaggacaacatcatcgcagaagtagaaaagttgatcactgctgggtttatcaaagaagtgcaatacccacgatggcttgcaaacattgtccacgtaatgaagaaaaatggacaagtacgagtatgcgttgattttcgtgacttgaatcgtgcttgccccaaagatgactttcctattcccatcactgagatggtggttaatgctacaacaggatatggtgttctatccttcatggatgggtcgtctggctataatcaaatcaaaatgaatgaggatgatgcaatagatactgcattccgcacccctaaagggaatttttattacatagtcatgtcgtttggcttgaagaatgctggtgccacatatcaacgagcaatgactgttgtgcttgatgatcttatccatcactctatagaatgctacattgatgacatagtggtgaagacaaaagaatgtcaaag

SEQ ID NO: 117568 - DNA, 328 bp, Zea Mays
gagatatcaaggatgggcaaaaggatgatgagaagatcaatgaaattcggcaactaatcttagatgggaaaggcaaggattttcggggagacgcagaaggcatagtatggtttgaagatggttgtgtgttcatgacatcaaatcgatttgggagctaatccttaaggaagcacatgagacaacttattccatacaccctagcagcgagaagatgtaccaagacctgaagaaaagattgtggtggtacggtatgaaaagggagatcgcggaatatgttgccatatgtgactgttgtcagagaattaaagtggagcctcaaagtcccgca

SEQ ID NO: 117569 - DNA, 693 bp, Zea Mays
caagaggaaagagactacgattgctaagttttgagaggctatagagaaggctaatacaacaaagactatcgatgaaatattggtcgggctatcagatgactctgaagacagcgaagattttgattttgaaggggatgttgatgatgcttaagaacgtccttggaaaccaagtcacgtcgtttttggaaagtcgaccatgaagaaaagtcatattgaagctatgaagggtaagtattttcatgatgtttcccttgtgaggcctggtggggacgctactttcccgcttcctgagaaggacgaagtagttgtttatcaaagctttttgaagtttgggctatgttttcctctttagaaaatgttagtggaattccttaaaatatttgaaatatatcttcatcaccttacccccgaggctctaatcagagtgggtttttttatttgggtggtgagaagttagggcgtagagctagatattgattgcttttgcaacatgcatgagcttcattactagaagaagctaccaggaaagaacaataccataataacttttgttgttatactttcatatatctgtcagacacactagatgccctgttccaaattttcggcaaaagtggccccgctcctggatgaagcaatggttttatgtgaagaatgacttgcacaagaggaaggttgttaagggtattatat

SEQ ID NO: 117570 - DNA, 487 bp, Zea Mays
tacaaaggtgctgagccccgacatgtgggccaggaatataatggatgtaatacttagagttgctggagcaatcttcttgcaccctgacatccacgatctgcgtggtattggcgtgcaggggaagcttccctggcaatgcataagtgatggtggacacagtgcaccttgcagcatgggcgtactgtttggcaatggactggacaggcacgccgcctgcaggatggcatggacgtcgcctgccagctgagtggacaggtcacaataaatgctgaggtggcacatcgcctgtcagcagagtgggcaggcgacgcgtcttctctgcaataaatgcagagaccgcgcgacccagaggccttacgtcaggctccgcccactgacttacgtcacgggcaacaagccatgtggcagcatcgggcctccgcttaagcggggagcgtaagcgcacatgataaagcctggacacgtgtcagttccagacccttgctta

SEQ ID NO: 117571 - DNA, 307 bp, Zea Mays
cagaaaacggttgggactgcgactgatgttgaacaagttgccttagaatcttgttttgctgggcaaagctcttgtatcgtacgaggcggtggtggcgacggcggagcctgttggttttgtccgcgacattgccatcctgccatctgaaattgggtatccttccattattcttatgatccaaatacccgaatgaaattcagagtcaagcaatatgtggaggaaactcaaggttcatttacggaaggcatgacaaagagaatttccaacataaggcaatcatgagacttgcattagtgagagcataacg

SEQ ID NO: 117572 - DNA, 390 bp, Zea Mays
tttcatcaatagttgggcaaaattttatttgcctaatgttgcacaattttagactttcttatggtttaattaaaacatggccaaaatcaagtgtttaattgttcaacccacttgttatgatgggttggggtgtttattatttttgtagtggtgttctagtagttaggagtctactgaatttttcttaccatttttgaaacggttcttatatttttaaccatggttttccttggttccttgttgcctaataaattatttaaccctggattagtcttggactagggttctctgtatttttcctaggttcctcattacttaagtaggctaggaaaaatatgttcatcctctgttcattaatttctattgcctttcttagtttcctaagttttg

SEQ ID NO: 117573 - DNA, 1076 bp, Zea Mays
tgcatatttgatctgcaggtctacgtgatcgactcctactattctctactggggtgagcatcggtattctgtcaaataagaaggaatttgatacattgaagggcacactgaaacaaatggagaacttagttcaggatttacaagatgagctggagatgaaagagggtttaactgtgaaagaattacttaatgaaacatctatcgaacatgatggtaaagtatcactttataatattcttacaacatttttaacacattcagaccaattgaccaaaagcttttgtatcttatctgctgataatagatgataatagcaaactacacggagttgatccagagccaatgagcaaaattgaggctgagcttgaagctgagctagcaaggctggaactgaatatcacttcgataagtttagaagaagaaacatctgaaatcaatggggtaactatttttcactgaaatattttacatacgtatcctttgtagcctacaattctatttattgaaattctgcatgtataggccgacgatgattccattggtgacattgtttgcggggaactgaaagctgatacggtccctcgcgacctcacagagtacagcagtgaatctgaccatcgcagggacagcagggaaagctccccaggttacacatgtggagccaactgtcctgtctcgccaagagatctcagcatccgtcttcacaaggtgatccaacacaggctcgaagaccgaatcaaggagctcgagtcagcaatcgtgcacggacagaagcagacgcaactgcagatgatggtgactgaccaaatggtctccgaccgaatacgctcgaacagcgagtcaggttcttcttcaggccagggaagtcccattttcatacaagaaaccagctcgctggcagaaccgtaccgtctaaacctatctggagacgcgctcgaagcttacgatgaagcttacgaagagttcatgaggatcgcggactccccttacaccacaagtccaaacgggaagccacaggcaaccgaagattgcttggcagaccgtggtctagtctggggaatggaggacagctctag

SEQ ID NO: 117574 - DNA, 373 bp, Zea Mays
taccctgtacccatcattgatgagctacttgatgagctgtttggtgcctcctagttctccatattagatctcagagcgggattccaccagattttactcaaggtaggagagttacacaagactgctttccaaacacacacgggccactatgagttccgggttatggcatttggtctcaccggggcaccgggaacatttcagaaggctatgaaccacactctaacacctcttcttcgtaagtgtgctcttgtcttcttcgatgacattctagtgtacagtgcatctctggatgatcatacccgtcatctgaagcttgtcctcgaattattggctcgggatcagtggaaggtcaagctatctaagtgctcttttg

SEQ ID NO: 117575 - DNA, 343 bp, Zea Mays
gtgtcttcttgtctccatttagaaacttgacgcttgtaaccacctgtgcctaagtggtgatggtacttgttctttttagatagttctgaatttgcctcgcttagacatatgaattcagggccgctcctctgctctagaaatactgcccactgaccttctgagattttatatttttttgtcaggtctagcctttctttgcaaattttgtattcatctcagacctccagtttcgaaaattgattgcaagctgcttcatcgtgtattccttcacgagttcttctgaacccagaggtagaacaaacctcgttaatagcttattccatatttgattcttgacatcaac

SEQ ID NO: 117576 - DNA, 292 bp, Zea Mays
gaagtgttactcgatactagagcaacacattcattcattactgcatcatgggtagaagtacataatcttccaataactaccatgtcaacacccattcaaattgactcagtcggtggtagaattcgagccgatagcatttgcttgaatgtaagtgtggaaataagggggatagcgtttcccgctaatctcatagtaatgggtacttagggaatagatgtcatcctagggatgaactggctagataagtatcaggcagttatcagttgtgataagaggacagtcaagttgatgt

SEQ ID NO: 117577 - DNA, 1022 bp, Zea Mays
gacagatatttctttgttgtccgggagacagtataagaaatcatcttcgtctgtaccattgaacactaaggcccccttcggatatttcagttcccgggcatagtgtttggcttctgcaatcccctcttcagatagtctttttctcgaagcatgtcgaataataaaatcaagattttcagacagtacatcgagagaaggagatttagcttcttcggccacttccttctccatagctatgtcaatatctggatattcttgctcagccctttcctaagttatggcaggcttcgtctcagcaggcactgaaggcccagcttcgtttcagtatgagccacagcagctttggcaaacttttttacagaagtaggagtcaatgctcttgttgtctccatgatggcgtctcacacgctggccattcttctcctcttgggagttgtggcgggagctttttcaaccttcggcaattctgcttctaccggcgggcttagaatttctggcagcactattattttttctaactctggctttttggtcgccccatcttcggctttgactagctcaactatagacaccttgcacactatagtcaattcctcagcgctctgagcggcgggagcagcttgttccgcttcggcagcagaagatgtctcttcaccaaattttggcactatggtcgtttcaatatatcttggccggtgggtcaaaacttagattttcttgtccttcagcacaacagagatggccaaagtgacagttttcctcttttccctgctttcacgagggatagcaataattaggatatataaaaccaattgcatcgaaaaccctgttcaaccttttcttgcctcaacccccgaatgctgaggacaaagcatcatctttggctctggtatatgccccaagtaactcgtcgctagtagcctcaatgcatttcagccagtcgtcatttggttcgtcaaactggtctctgtatctgaaggtatatttaaaatgaattaatccaccttgactggacctgccag

SEQ ID NO: 117578 - DNA, 288 bp, Zea Mays
gacgaactatctggtcaatgtagatctctgcatacttctctgtcctgtgggtggtgtgcactggcaagaagtgagcggtcttggtcaacctgtccacaataacccaaatggaatcatggtgcctagaggtattgggcaatcctacgataaagtccatgcagatgtcctcccatttccaagatggtatgggaaggggttgcaacgggcctgctgccttcaagtgactagcttttatcctctggcaagtgtcacactcggatatgtacttggcaatttccctcttcattc

SEQ ID NO: 117579 - DNA, 292 bp, Zea Mays
gtcaattggggaccttgttctactcagtggactaaatatgtcacataataccctcattggaccgatcccgtcccagcttggcatgctacatcaacttgaggcactagacttatcttcaaataaactttctggggagattccattggagttggcatcattggacttcctttcagtattggatctatcctacaacctgctacagggaagaatacctgagtcttcccacttcttgacattctctgctctctcatttttgggaaacattggcctatgtggatttcaagtgtccaaa

SEQ ID NO: 117580 - DNA, 481 bp, Zea Mays
ctgccatcttgctagataaagaatgtgacaagtactaaaaaatcttctcagcactaatgcttccaacaacctatctatttatactaacacagctgcacacgcgcgccaaacacttgtatgctaccataccgcatagaccatgttatttgatggaaagcaaaataaatctacatgtgataatcatgtgacgaagccgatcgatagacgatagataccataccacacgtgcagcctgccagcctagctattcctatccggtggtagtggcagaaacgttagaacagctgatgtcatggatgactcactcaaggaatccgccgctgtgcactgctgagtgctgactcactcgtctgtacttttgttctgtgtcccggcccaaacaataataaaagcatttgcgctcatgtgatatatttatatcgaaatcatatagttagatcagaggcaaaagaaatacttgaaatgtcgattgaggtcccca

SEQ ID NO: 117581 - DNA, 628 bp, Zea Mays
gccaaaacacaggtttccattcagtcccaaaacaatcagtatcctccaacctttctgcgagaatcatactactgcctccaaaaagccttattattctgccgcataagaccgcgccatatgtatcatcagcgtcgtcggcattatgcacagcagcactggtaggggtagcacgacacgagagaatgtactgtacagcggtagtccaaatcaccacaccacacacacacacacactagcaagtagatgtactatagtgtagtccgaggtcccaatcggatcgcgatccattccatggctggtctgttgggctggttggtaggctgcccgtcgccgtaccccgtgcgacagagcgtgcgtgctgggttgaaaatcaggcgcttgcctgctcggttctctctctatccgcgtgattggatacctggccgcgtgcgtctgggctctccacattccgttgaccgcatttaaccagtgattggtgggctgtatgtatggagacgagcttgtacgcaccgatgcaacttagtggctttttattatgtcaatttgcatgtgtggagatacggtgggggagcatccctgcgcatccaggccaccgcgagccttgcgcccacgagctggacgtccaatc

SEQ ID NO: 117582 - DNA, 316 bp, Zea Mays
ctcaaggctcggacggtccgcgcatccaagtctttgcatttttcaaacgcgcttttgaaagaatttttaactcaagaaatttggagcgttgttagtcctcatgcaaatgcaaccactagatgctctatggggcactaagttttacacagatcaaagtcattgacccctcttaatagtacggctatctagcctactaatccggtcaagtatcttctctaaactcctcaagaccggcaaaaacgaaacctatattatacctttgccttcatttgatccacaaccaatgcttatgattctccaatatttcctgttctat

SEQ ID NO: 117583 - DNA, 438 bp, Zea Mays
tgacaatggcacataattcaaaaatactcaatttgcaaccttttgcgcttctttgggactcgagcatcacttttcctctctatatgtgccccagcagaatggtattgtttaatgcaaaaatcggatccttcttgagatggccaggacgatgcttgatgagcataggactcctaggcgtttttgggccgaagcgatcaacactgcttgccatgtgtccaatcgcatctttcttcgggcttttctgaacaaaacttcttatgagctgcgatttggacggccacccaaggtcagccatttggagtatttggctgcagatgctttgtgctaaaacagggtaatctgaacaagtttgagtcccggtcttctgatggagtttttctgggttatgcattacattctcatgcttatcgtgtttttaacctagagacgaacatcatt

SEQ ID NO: 117584 - DNA, 766 bp, Zea Mays
ccacacccgcgaaatttcaagtcgggtgggggttacacccgtgggtcaaaatcttcacccatacccacacccgtcgggtcaggtacccatcgggttttggatttatgggttgaattgccatatctacatgagggcgcactccatgggagcagcatagccctagggcagatggtctctcactctgatgagatcgatgcagccgtgatcacggaggacttcaccgccagatggagtgacaaggagctagaccgtattgaagaacaagttcgccctcacgcccgattgatcgtgagctaggttgacatgaagttcctcctggcgggcacttggagtctagggccgcccaccggcgtctagacaccgttaattcattgtcttgtaacaaactttgtttgaatgatgagaccaaacatatgttcatgccttttggtgtgatgttgtttcttgcttaagtactgtgcccccatcatttcctcaagtcaggggtcctgtggcacgttttcacagagtgatccctgtttcccaccccctgagcagagtgtgctgacttggttgccatgttctgcttactcgggcgtgtggacgaggacgagatcccgaaaagacttgcaaccagtagcgtatcctcagacctggctgatgcacaatagaggaaaagagctcacatcccgccgctctcactctttttcttgataagtacatgattcatgatccacactgggtgtcacattttttttggttacgaatcctgtttctaagatctttt

SEQ ID NO: 117585 - DNA, 408 bp, Zea Mays
tgatacccgaagaagactactggagtttaagacgggtgatcacgtgtatctgaaggtgtcaccgatccggggtatgaggagatttaaagttaaaggaaagttgtcccctcgcttcattggacctttcttgatcttaaagcgagtgggagaagttgcatatcaactggaactacccgatcacctgtcagatgtacatgatgtctttcacgtgtcccaactaaagaagtgcctcagggtacctgaggagcagctaccaatggaggaccttagtgttcaagatgacctgacttatgctgagtaccctatcaagattctggatactttgacttgagttacaagaaataaggtgataaagatgtgcaaagtacaatggagtcaccacggagaagatgaagctacttggcaaag

SEQ ID NO: 117586 - DNA, 570 bp, Zea Mays
cttatggtatgggctgaaaagagatgttgctgcacacgtggctaagtgtgatgtgtgtcaaagagtcaaggccgaacatcaaagaccagctagactattgcacccacttaagatacccgagtggaaatgggaagaaattggcatggatttcattgttggactactccgcacccctgttaggtatgactctatttgggtgattgtggacagattggcaaaagtggctcatttcatacctgtgaggactaattacacgggagccaagctagcataattgtatatgattcggatagtttgtctacatggggtgcctaagaagatcgtgtctgaccgaggatcacagtttacttctcgggtttggaagaagttgcatgagagcttggatacacagttgaattttagttcggcctacctcctcaaactgatgggcagaccgagaggactaaccaagtgttggaggatatgttaagagcttgtgctcttaaacatggtggtagttgggataagagcttaccatatgcggagttctcttacaataatagctaccaggccagtttgaagatgtcaccg

SEQ ID NO: 117587 - DNA, 276 bp, Zea Mays
caaggcctgagagctgataactgaattggtcctccacattattatcatttggcactggctcaggaggttgaacttgttgggcttgttgaactggccaggcatcccagccatcatcagcgttattagcattgatttcttcctcttcaatccctcccatggggggatatttagatcaaactagaagttggccacaggctgccccatcccaaagtactccacagggagctgatgaccatcatgtgggtaagggggcacagggtcttcatcttgtggctg

SEQ ID NO: 117588 - DNA, 1151 bp, Zea Mays
atctcaatggctctttgaaactacagggagtcgaggcaggaatccttttcatcacccctagggcaggggcaggaatccaataggagatatactacacgaaagcccgtgatattgcactcttgggatcggcgaggtaccagcaagcaagaagaaggtaccacagccaccacattcaaaagatgaccttgcaagtaggagacttggtactctagagagtctagaccaacaaagaccaacacaaactatcccaccatgtgaggggtcattcgtagtcggagaggtaatttggccaggcatctacaagttgaacgatgagaaggggaggacgctcgccaatgcaacaaacatcgagtaactgcggtgagtctacccccaatgctcccaaaccaacctgcttctgacccaaggttggatacttaagggctcaggagcaggaggggagcaatacctaagaactagcctgtattgctaacatttttctccttgcagtaggtgtgacgtttatacccttctaagccaatgcagccacactaatacctcttttttctctttgttgtctacccgactcatgcagggtctcgagaaatttgaagggggcctaaaccgaccgagccacccttcaagaacaccctaacctaaggaactagactaacaccaagggatcactttctggaaaggacccgaacccattcacgaacgtcaaaggtccacttttcaataaggacccaaacccattcaaattcctttggcaaggactgaagagaaaaaactcatggcaagatagccatgaattatggagttcgaaggtcggtccgtgaagggcttgtagtcgctctagcgaaaattgagtaaggggcaaccagagatgggcatactagtggcgaggaccctagcgtatgaaacgggtgtcaccaactcgtgtttgagtcctgggagagtctgactcatggtttattgtgaagagaggcagcgattcatcattccggtcaaatggaatcgaaaattatatgagtcgatgcctgggagtacgaggatggtccccagcggaccccgcgcttggatcctgcgaaaggaagtagggcctcactcgaattacccgcttgtagctcactgagcaccattactagcccatcgaggaaagcatggtacag

SEQ ID NO: 117589 - DNA, 306 bp, Zea Mays
gcgaatcactgaggatccacctatcgagccaaaaggaaagtattcttgccattaccaatgacaacataggaacaagttctaaagaggtctatgatagagctaacttttttcccaaaatacgtggggcagaaggcatgggcactatgtaaggatcgatgcccctgaagcaccaacgaatccagggaacatcaacaccactgaacgctttgttgacaagattaaggaggagggaatggttatggagaacaaggtttttgagaccgagaccaccataggttttgggacgacagacgtcatcctaggaga

SEQ ID NO: 117590 - DNA, 524 bp, Zea Mays
attttgtatgccgtcgcaacgcacgggcattctactagtacatttaaaaaatatgcaagtaagattaagaatattaacatataatcagtgtttattaacaggtaattagcatctaataaacaaatcctaacatataattggtgtcttttaatagatttaagatctatttaataatttttagcccatgcaaccgatactcatgtaaaaaaactaaataacatctctaatgaaccatgctacataggaaagtgaaccaaacaagcgcatgtgcacctcctcaacttggctccgtgtagctaggtagggaagtaaaccaaacatccccatatataattattgaagaacaatatctatactacaaactagagtggaaaataaaacaagtatgattacctcaaataataaaaaagccccagactccatcaataataatgcatatacccaatgtataacaccaataaacaaaatatcttgtttgcaagattttgctatatcgatccataccatgacatgcacattgacat

SEQ ID NO: 117591 - DNA, 483 bp, Zea Mays
gggattttatctgtatgcttttagaacatctcggcattagggggaggaatgcccatatagtgtaatgcctcaatattctattaaacgcacaaaagctaaactgaacctgtcgttcggtgtgtactcctgtgtatatggagtctgccagaaatcgttgaggagtaaccatattggtttgaatgcttctacctgatgtagatgtggatatacccgggattaatatcgtatccacatttgacttattggtatttgatctattctcggggacgcctgcgaatatgatccatcagccttagtcaaagcatatgttctgattgcagattcacgtgttctgtgataactctccttcgattaatccaccctgatggtgatttgcctcacgaagaggttcatcttgatgatgaagttcctagcaatgcgcgcaatatcattgtgctaggaatacgaaacaatgaatctttcgttttgggaaatgacgaagat

SEQ ID NO: 117592 - DNA, 352 bp, Zea Mays
gccaaacatacaccacctttattacattatgttgaactaataataattatacatactcattagtacaacccaacttccttatttactttacataaggacactacttaaactacactactctaattatcttcgtctttggccgctccactgccagcatcgggagaacgttcatcagcgaggttcatggaaggaggggctccaaaaaggtccaactccccatcaggtcctccattagctgctccagatggtccaactcccattgctgcaacttatggtgacatatttggatgcagccggtcatataacatatgcaccacttcatgcagggtgttacaatacgcttgcagatttt

SEQ ID NO: 117593 - DNA, 463 bp, Zea Mays
tcttcgtgtcatccttcttctccataaacaacactggggctgcccaaggcgaggtactcagtctgatgtagcctttctctaacaactcatcaatttgcttcttgagttccaccaactctggttcggacactcgataagctctcttggaaataggggaggtgcctgggataagctctatggcaaattcaactttcctttcaggtggcatgcctggtaactcttcagggaatacatcagggaattctgacacaatcctaattgcctcaatcggattggactccttgtcatctactgataaatggtgacaggctccttctagttcaggtaagtacagcttggttactatttcctttctggatggggacaccaacttaactgttctcttatcacaactgacagtggcttgatttctgtgtagccaattcatccctaggatgacatctaacccttgagttcccatgac

SEQ ID NO: 117594 - DNA, 545 bp, Zea Mays
aacgccaagaaatgcacctataaaggcaagatatgtgggaggagatgcgttaggagagaatggagaaacagcagcaagccccattgccaccacctacaccaccacttccaccccgggacaagcaccaggaatttatgagccacaagccgcctaccttcgccagctctccagattctctacacgtcgacgactagttgaagttagtagagaagatgctaaacattgcccaatgctccgaccgggagaaggttctctatgcttctggtcgtctgactggtcctgctgctgattggtgggattcttatgttgctgcccatgacgctactgatactattacttgggtggaattcaccacactgttcagaaactaccacattcctgctgggctgatgaaaattaaaaagaaggaatttttgtgattgacgcaagacaacatgtcattcagcgagtaccatgatagattcattcagctatcaagatatgctcctaatgaggtggctgatgataagagaaagcaagagcacttcacagaaggactcaatggg

SEQ ID NO: 117595 - DNA, 459 bp, Zea Mays
aattaaaattgctaatgagggtattgacgaagctgttgaacgaagctaccgacaaagtcctgaaagaagactgaagctatgtatttttgatagtttagtgtccttgtacatagctttggtttttgtaagaaacaactaacaacaacttgcatgttgatgtaatatatttctttgtgatgcgtgaaacctttgttcataccgcttttgaaccggcagcgaaaaacaccttcccttcttttcacgcttcagaaagaaatcccccttctttgccaaagcaactgtgtaattcttgctgtggacgttgcataagaatacctttgtcgaaggcataaagtccgtatgacaacacctctgtcacaagcatgatcatgccttatgaacacgctttcatgagtccttgtcgaagctgaaggagcgatcttccttgtttcttcactgctttggtcaatgcaaaatgat

SEQ ID NO: 117596 - DNA, 288 bp, Zea Mays
aaaggaagtcagaactgaaatgagtgtctcctccactggcgggggtgggtgaattcatctgcgaaagggaatcaaaggtaaagattatggtggaaggaaaaagaaaaagagagcctggatggttctaaagaaagtgggttagctcaagtttttaattcctctttgtgttcataatgcatgcatgctggaagtaacgttgcctctccaaaaatagggtgctttctagggcatccttagaaatataagtacgggcccacggggcctaattagttagccacctatttctcc

SEQ ID NO: 117597 - DNA, 379 bp, Zea Mays
ggagtcccaacagtgacccatatactgggaaagacaagacaatgcgccataccgagcatacacctaagtatgtgggttagtgacgcggtgttcgtgacgatgatcagagccgtgccaagcacaaccgcactgaaagactaacttcagtgacccgccacacactactacaaagacattagcaatagactctgtcggagagaaaaatcctctaattgggtggcggagtgcacccgccctgatcctaagatgaggagggggcttagggattttcctgactagctagaacaacacgagaacacaagggttagagtggttcgggccgctggacgtaataccctgcatccactgtgagttgtattgtgtcggtgggaaaatcctc

SEQ ID NO: 117598 - DNA, 392 bp, Zea Mays
ctgcttccaaatgtagtcattggctaagccaaaatttgtatttcataaagtaactaagatcagtgtttgtctggatcgtgataaggctgtagcatttcccataatcgattagaccatatcctaggattaaggatgtgcaacagaacccttttgttgtcgacgatatcaatgagcttcagtttttttcacatccataactatataccaagccactgtcccagcttgcccttaattgcccacatcaaacaatttggattccaattagtgcttctagttcagttgggcggttatttggcttcacatatgtttttttggcacgaattcaatcgtgttctaactgtttagttcagtgtaaatggaggtggttatacttactgataggataagctggc

SEQ ID NO: 117599 - DNA, 439 bp, Zea Mays
ctctgaaaataaccaaacttacttgtcactgaaaattcttgtccttggcgtatttattctgtgcttttgccgcaccctgttctcttttcaaactcataaaatctgacgtagtttcttcaaaatggcactggctttgcatcgtttcttctctttgatctgcctctacttggtccagtcgtcccagatcttggactttcgttgttctcttgctcatcttcattgttgtctgaaagattaaatgttttaccatgatcttgttgcagttcagtccctagaccctgcctgccactttttaccaacctttgatgtgaggatcttttcttctgccgatcacgttgtacatgctaacgagaagaatgtttctccattccttgagtttgtatatatagtttcggttgtcccatccatgtgttctaggctcatcagatctcaatggatg

SEQ ID NO: 117600 - DNA, 352 bp, Zea Mays
cttcctcctctctacaggatctcttcacctcggcttgggcacagtcaccatgagctctccctcctccacctgctttgtctccacagacaggctccgtcggtcgccagagaaggtttgctcattgccttctctggcttcttcgccatcacgttgtcgccgcctagttagatgtccttctaccttccgccacgtcacctaacccactaggtcaaggtaggaggcatgtacgtgctgcaaggactcatgcacggagatgccggtcaccgttgcttccttctcgctccactccagttcacccccacgctgtcaatcctagctctggtaccatgttaaagcttttggaatacactat

SEQ ID NO: 117601 - DNA, 388 bp, Zea Mays
aaatagttaccttgaaaaatgctggggtataattcattcttttgatgaattcagtattcggcatatctctagagttgagaatcatagagctaacaatttggcacaagacgcatcaggttatcggataaagcgagggagatttcacaacactgaaaatctgataaccagtgcagggccaattccccaggtcgcagaccgtccgcgtcgagacgccggaccgtccggggttaccaaaaatgttctcttaattgattcggctgataatgaagccgatgcaagtgattggaggacacctatacttaattatttaagaaatcccaatatcaggacagataagaacatttggcgaacagctttcaagtatgtcttgatgagtgatgaactctac

SEQ ID NO: 117602 - DNA, 907 bp, Zea Mays
agatggcttcccatatggttgaggcggacaacagtagtcgtgcgcctccgttgcaagtggagcagctacaacagcgcctggatgtgtccttcaatgagcagtgtctcgatgcagcccatattcttgagctgctagcagagaagaaacaactttagaaggaagtagctgagcagaaggaacgcctggtagcaacgctgcggtcaggggaggcgtcgtttgctcgtgaaaaccatttgatgggccgtttccgggacatggtgctagtctataatgatcttgaggattatgcccatgagctgcatgagcaagtccaccagctttactaccagctgcaccccaacgccgtgcctggagccgtagaggcagaaggtggtgtggtgttagctgatgggggtgagcctgatgctgacttagacatagaagcaactcctatgcttgtgctaggtggtgagtccccaagcgatagtgatgtttctgaggtagctactgatactgagggttagtgtggcaggtgtactaatgtcgtgacctctgttgtaggcatagggttgtaagctatgccaattttggtattgtaatgaataatgccccatgtaccagttctatgtaatatatttcgtggttatggatgtatattcatgagctttgttttactccagatgcctatgtgtactcgcagttcgaatggggctggaacattgcgtggtgatgcagaagctaatctcaatcctcctccaccaccagtttcgcctacgctagcagacaccattgctgccctagtaaatgccacaacagataatgctaggattctgtgagaacttgcccatcatcaaaacaatcaggctagggtttgtattccctagaatcagcaaaggaacgcaacatatatggagtttatggagactcg

SEQ ID NO: 117603 - DNA, 753 bp, Zea Mays
cctctttggtcggccagaccgaccaaagggccgacacaggattgaataaggaaggactcaatgagatgcacccagcacgtcgagtcccctagcgggaccacttgccaagacctgaccctaccagagggaggttggatcttacttagataacccgttcgcagctcgattgctcttttccccgtgctagcaaggttgtaggagggcgactctccccttgaagaaacccgaaagggcttacagagggtagatgcttgaatgacaaaaattggatgaagggtgcgcttggccctgacaccatggacccacgctcagcgcatggcgaccatcgcaggaggtgtccatccccaaactaccccatcaccaagcaaactcccaggcgatccacatggatcactcgtgggctacatctaacagatgtgctcgcgcgcatgggaagtcacgaacaccagcaaagtacagaatagcaatggactcgcgcttagagtgcgacaaccatcgtagcaagggtctgttcccaaacttcattgtcacccagtaaacctccaagcaatccacatggattactcggaggctcgagggctacatccagaagatgcgcttgtgagcacctaagtgtataaggtaccgagcgtaagcctccatgcgactcaaaggagttgcccgaaggcttgagggttgttgtcgagtacctaagaacggggtacccagggtaaggcccataacctctttctagctcatttgtcaagctagtct

SEQ ID NO: 117604 - DNA, 545 bp, Zea Mays
ttacatttgttgggacaaacatgtacaaaacaacgtaaataagtctccagacattggttgacacgctcggtcttgccgtctgactaaggatgctaggctgaccccatttgcaattgtgttcctgccagcttgaacagttcctgccacagagaactggtgaaaatacgatcacaatatgatattatagcttttggcattccatgtaatttgtaaaccgatgacataaatgactgggcaaccttgaaggctctgtaaggatgtaagagaggaatgaaatgggcataacgacagaacttatccacgaccaccagtatgctgtcggcgttagcagagcgtggcaatcctttgatgaagtccatcgatactacctgccaagcttggtctggcacatgcaagggctgtagtaggccagggtatttggacctgtcgggcttagactgctggcagatcgaacaagctgccacataatctttgacatgttgtttcatataagcaaacaactgatggagccggcggtaagtaactggaaacctcagagtgtcccc

SEQ ID NO: 117605 - DNA, 350 bp, Zea Mays
acggaccgcagccacgcagagactgcctaattcttctgagggaggcataatagaggaattcagagatctcgacaagttaggacaggggtttacatcggccgatcccttggaggagatcgacataggagatggtaaactccaaggctgacttttgtaaacaagaccctagagaccgatcctagagatgaaatgatcaacccattaaaagggtattctgattgttttgcttggaattacactgagatgctaggattaagccaagagatagtagaacatcggctgcctattaaatccggttctaggcctttcaagtagaaaccaagatcatttcatccagacttactcccacg

SEQ ID NO: 117606 - DNA, 822 bp, Zea Mays
gataagcacaacctttgttctgttttttctattcttcctgataggatcagttttcacatatacaggtggaagcaacagttaaggtttttagttctacttcttgaaaagattaagctctttagttctggtatgggttcatctagagctatatgattcagttgttcatcgtttgtttacacctggagagcattttttctattataacaaggtagagcatgtttccttttgtgaaaaaaataaaaaataattaattctaataaatgactttgtagcagactatatatgcaaaaatcaattggtcagtgttttttattctctagaagcttggaacatgtgaacatatagtcacttgtataagttgcacatgagcaaatcatagcagactatttataagggagttagttgacgtcatctctagtagaactgtataataatggcaaatagttcttgctcaaataattgaaacacgtgtatttaaccaagtcatgtgttaaatcaaaaattattaactagggcgttctccaagaagagatgagatctgtatcaagacacagacatgaatattgtgcctcttgggaaggaatattgtgaagttattgtgaacactgtattgaaaagggatgccatcttgccttgtccttatggttatgtagagatgatggctggtgcgcatcaaatgtcagttgcttggttttataagagggtaatgaactactctagtactttgcttctttttttttgcatatgtgatgagtgactaaacattctaaaattgtattcatgatagataaagattagcaaggcatcggggtcatcccaagg

SEQ ID NO: 117607 - DNA, 528 bp, Zea Mays
ctttcgcgaggccttccaaccttctagtggacccgggggatatctgtcccccacaaagagggactcatactcggcttgatttttagtacaataagtttttaatcggctagataagtcaaaagaggtgttacttggtaaaacaagcacgaagtcaattccttgtccttcattacaaaccaatccatcgaaatacaaagtccaaggagtaatagtgagatatgtcatgtctagttcatgtgtatcatcaaatctgatgttctacaataaagtctgctacgacctggcctttcatagattttagtgatttataggccaagtcaaattctataagtgcataagcccatttaccaactctaccattcatgattgggttttgcaacatgtatttgatcacatcggtttgaccacaaacggtgaaagactagacaacaaataacacacacttggtgcatgcttaaaacatgcataagtataatttcttgacaaaggtgtatcttgtttcagcatccactagtcttcgttttaagt

SEQ ID NO: 117608 - DNA, 413 bp, Zea Mays
cagatgcactatcagtttcgtttgcatgttcagatggagtacctgtagatccaattggatttgcattcaatcctcggaacgaatgtccactacagatgctctcccatttgggttcgcccttgagttggtgccagcaatgcatgtaatggaaaggtttgttctcctcgtgtgcaaacattgttgccgccttcgatgtctgtacaaattttggtttcattttaaaaatgtgtcaacatgtatactttagtatggacatgattgaaagtctgtaaaaatgggttaccttgtcgtcatcagttaagccactttgtttctctcttagaactcttgcgtagtagccagagaacttactaacatctgctctaatcttgtcccatctgctgctaagggctctgttcactctacaaggaaac

SEQ ID NO: 117609 - DNA, 398 bp, Zea Mays
ttcatgtgcacattttctgttctacacagaactgaaaccaaacacacacggaccttctcacacacacaaggaatacactgaaacaagcatattgttttagtcctccggcacactaaaacaaacacagatcttggtggagctccgttcttcagttctactgctgcctgtgagcactgatcttcaatttcttcctggggaatacacatatcttggtgcacattttccggtcggctccagctgcaatgcaggggatggggaatggggagaataggtcacaacagctagtactcctagccgatctccacccagccagcactgcaatgtggacggcacctagcatctattggagagaatgggaaggaagaagagagaaggagagctgatcttcaggaggaact

SEQ ID NO: 117610 - DNA, 590 bp, Zea Mays
ttttgttagccaaatattcttggactaaatctctggtgctgatctgctcggctaccaccctgaattctgccacagcttgttggcatggtgaccccgatgtcatgcggcacaggggcctagtcaacccgaagcttaagctcagcggactcagtactagcgtctttagcttctccctcttcttctcatcggccttgacatagaaccactcactttgccaaccggttggccacttggtgcgatagctaagcaccggggccttcatatccttgcgatatgcgaagttataacagccaaagttctcatgcagtccgtcttctctggccttcgtctggtaatgaagctcatgcagtcggcaaaaagcttcagcattcgagtccattccttggctttgtagggcccagatgaagacgctgagcctaacaatagcattaggggtcagctgatgaagatagatttcgtaattatccaaaacttccccaatcatctcgttcaagggaaaccgcaatcccgctctgaagaaactcttgaaaactacaacctcatcatttttcgatgtcggagtggtttcttccccggcaaaacgaatctgc

SEQ ID NO: 117611 - DNA, 541 bp, Zea Mays
ggtgattgagcaccatctgaagatccaccctgacgccaaaccgatgagtcagaagcctcggagacagtccgttgagcggcaggacttcatccgtaaggaggtccggaagctgctacacgctggcttcatcgaagaggttcatcatccagtgtggctggccaacccagtcatcgttccaaaggcaaacggaaagcttcggatgtgcatcgactacaccagccttaataaggcttgtcccaaggacccgtatccacttccacacatagatcaaatcatggattctacctccgagtgcgacctcttgtccttcttagatgcttactctagtttccatcagatccacatgtctagggaagataggaagcataccgcttttgtaacagtggatgggctttactgctatgttgtaatgccctatggtctgaagaacgccttgccaacatttctacgggcgatgagtaagacctttggggacctgattagggacatgatagagatatacgtcgatgacatcatggtcaagactaagagagggtcgact

SEQ ID NO: 117612 - DNA, 699 bp, Zea Mays
cttatgtagagaggtgatgacatgccgtaagtagtcatcacttcctctataattataagtcgagtctttacgcgttaggcgttccttaaattgtgcttcgcaaataagtgtatgattgtgtttatgacttgaatagatgtcttcgagtgaactaataggttcctaaggcaattatgtgtaaggtgtttatagtgacgctttattccgaaaggtgttaagtctgcgcatcaataagagataagtgtattttgtgtagtgtggattgattttgagtgcatggtcgcaagaaacgaattagtgcgcatatagacgatgaatgagtgtgatgaaatagtgacatgccttcgtagtcatcatgtcgtctgttggtgaactaactgaaggtcgtagagaagggtcgattacctgtgtgttattattgtcaccttgcggttctgtatgaattgcaatgtgaagtagtaggctctctatgtgatgctagatgtctaggtagacttcatgaattgtggtgctcagaccgtcgagatgaaggttaagtcggtctatgccgattaggtagttaaaatggttaatggaataatcatggggttaaaactagaaactagtgttctcgcacccgtttgggatgttgtagcccaattgcgcatggttatgatcgcgggtaaaaattagtagtgctcatgtgatgtctaagctaaa

SEQ ID NO: 117613 - DNA, 357 bp, Zea Mays
ctaatctaccgtgaactgaccctatgcgacgagggaaacgaggtggtcgagatggttgagtcctcaccggcgcaaacgacgagtttcggtcggtccacgacgcgacgagatcttgcgacgacagtgaggttcggtgaggaatttcgaacacccgccacgacccccgatcctgatacttctccccacacaatcctcgcacgatgccgaacacctaggttccttcctcggccgcagagcgttggtgctggcgcggaagcacgacgacggcggttcactcaacttcctctgctcatggcgactctcgcgtgggacaaggcagtagaaggcgggtgtgcacaaggaccttatacatgggtg

SEQ ID NO: 117614 - DNA, 421 bp, Zea Mays
caacttcagaaggaagtcctttttaaattttgttccatgattacttcattctgatttaagatcatatttctgaattttagattcgaagggcaggaggaggggttgggtgtgattacataccaatttccttaggtaggcaatcggggaagttggatcgcaagaattcctcagtctcccaagtagcctcttcctctgagtgattactccattggaccttatacatcttgatcgatttagcccgagttgatctttctttgcaatctagaatcttggaagggtactcttggtacgatagatctggctctatctccaattctggctctgctatgatctcagtcggcaatcgaacacacttcttcagctgagatacatggaacacactgtgaatggcacacatttttgaaggtaacttgagtttata

SEQ ID NO: 117615 - DNA, 377 bp, Zea Mays
ggggattagggggggttagggtttcaaacctgggttgggattttgggatgttacaaacctaccccacttaaaggaatctcgccctcgagattagactggatttgggaaaagataagggtattccttcctcaagaagtcctcactctcccaggtggcttcctcttctccttctctgctccattgaactttacagagctttacttctgaggtgcgggtctttctgactgctgaatcaagaatcttcactggtttctcacgatattgaagatctttctgaatctgcactgtctcttcttcgaggtgactttctggtgcttgcaggcatttgcgaagctgggatacgtggaatacattgtggatgtcggacatggattctg

SEQ ID NO: 117616 - DNA, 562 bp, Zea Mays
tgaaaaacccttaaagagcccgcaacactattgctttgtctcactgacattagcatcgaggtctttcccctttctatgtcttcacaacctgagatccccgaccgtggacgacagagcagtggctccggcgatcccgtaccggtcgaaaaacgcaacgaccggtgcttcggtgtggctgacacctaattctacccctaacgaccatttcccctcaatcaattgcaaagttctagctcctaatctctctgtccatggtgatagcgcaaactacggctgaaccgaggtgttcccagtgatcctacgtgttctagttcaattggctgggtcgagatgcatcaagaacacataagagtagtgaaacaagagcgaggagggcgtgatcggacctgtggagagctggccacggcgagctcacacacggtggggttcttgactgatttgggggaaatcccaaattggggagttgtgagggacgattagaggtgagggctggttcactgggtgcacaattacttagcggagcaggctggggcaccaatttatagtttccaagggcggtggc

SEQ ID NO: 117617 - DNA, 571 bp, Zea Mays
aaagaaaagcaatggacctcaggatctaaatgaagggaactatcatctttaatacaactctaaaacccaagcaataatttgtacatcaattatcgtgccaagacaccacaccacgtatacatgtctatcacttaaaatctaaagggaacgactggacacaactactgatcctccaactggtttccaaaaataacagtattgtatgtttcagacatatttgaaataaagaaataaaaaaatttgagtcgctatagcattctaagatttagtttaaactctcaagctaaactcacacaacaagaacagaagctaactgtattcctcatttatttggcagaaacttgtcttcaagtggttggtcggtcctatcactacctattttggagattatactattcaataagagctatgggttctaaatagtcttgcagagaacaaatgcaattattaagggcccaacattatacattttagtaatttaaaagttgttatacattttagtcattgaaacgaaagtaattgaataaaaaaacaagggccaatggaaaggaagatgacctctcgatcaaga

SEQ ID NO: 117618 - DNA, 1028 bp, Zea Mays
tgatcaagcagtgccagcagaagaacagtatatttgttttagaaacggtctagctttgtttttccagctattttgaccagatttttgcaccctgcacatatttgactgtaacttcaaacggtacaaatgcagctttttaatgtatatgcgccaaagtatgatactggagggaaattttggcccgttgtgcacaacacaacgatattctctctggttgttctgcatataattgctattggagtatttgggataaagaagcttccccttgcgtccagtttgctacttcccctaccaccgctgacccttctgttcaacgaattctgccggaacagatttctgcctatctttgaagcatactctaccgaggtaccatttcctgtccgtttgtagacatttactaacactgaggcctattctctcacaatgcccttgtgttcctattctatggttgtaacttagcaatgccctcattttttttgtgcatgcagtcattgctaaagaaagatagagaagaacagagcaaaccagatatggcggagttcttcagtaatcttgtaacagcttactgtgacccagctctgaaacctttccaacgggcttctaactccgacgaacgcaccgcgccgctcttggcctctctgtctagctccagataagctgtggatggcagctgactccgctgtgtgaatttcgatttgattttggtgtttagatacggctagtagcataggtataattttatgctacattgtaagagtagaacttttgacagacatatagtttcttattgttgttgtctgttgtgcaattttttgcccttctggtgtgggggggagttcgttgtacatatgtgaatgtacatgatattttgtgcacttctcagagatgaattgctcgttttatgatgtgttggcaacgcaaacttatgcatcgttcgttcatgggttgtacggtaaactgcttgtaccttcagaattttcatcaacttcatttttaattcgagtaaactgctatgcatgtgaacatgt

SEQ ID NO: 117619 - DNA, 322 bp, Zea Mays
ggccgatcgattggaaatctgaatggttttatgttaaaattgatgaagaaaaggagaagctagttcagagcccgatgaatctaatcttcgggctgactaggcctcaatgcaacatgacaccgggggatccatgccaagatgctgtgtatgagtttagaattgtgtctgaacatattggaactagggacctagttcaggaatacttggccaacagagtatttccaacgctgaggaagtggggtatgccgaagcttgaagaagagaagaaagagggtgaactcgttcggctgccttatcactttaagttcaaaaaacacttcaa

SEQ ID NO: 117620 - DNA, 1216 bp, Zea Mays
atctgaagtgatgtgtcctatcatatctactacaaaatagctagataagctcagtctttttggttatatttatacttaccatttgtatctgatatcaatatctgttagatggactgctcccaagagatgttgactgttcacaacattcacttaatcctgcagggcgtacttgggcaaatagattcccaaaaggtgcttcttcctcgtgacttgccacggactccaattatgacaacaacttgttttgagcaactcagatgttggttctcacttgtcgatgatttcactccttggaggaaaagagtgagatgtattaaaccactcagccattgatgggaagataagacatagatactcctcacatttatatttctccagcaatggtacctcctttgaacggacatgacaagacagttcagttaaatatttgcatggataatccaagacatctttgtcaggtttgtccctatcaacacgacttctccattgtttggtgtcataaaaaagttacagcacaaattgaacaatgtgaggagaattctccatatattaaaactggagatttctagcatggatgaaagaatgcatgctttaactgtacaacagatatcactattgcaaacactaagattttgcactacctgtaaaaattcttccagtaactacagtaaggtagtgccaacaccatctatagaaaaagactctgtcatgattagagaacttgaactttagtctgaacaagactgaaagactaccagcacatcttgctgcttccatggagatatatacctttcgcaagctgggcaaggtacccgtacccctaggctttgggaggcagggaaagcgacgaccaaccaacgatggataatcacatttaaaggtttgaatcaacaccgacatcatggttcaatcacttttgagtcttcagattccgagtcctagacttgaaatgcaactcatagcagttgctcacaaattaaaatacagaaaacaatatccagctaaatgtttacattgagtagcactaaaacaatatccatatgaacttctgttatatagagtggtagcatatttacaatatgataagaactagaaactactaaatgcgtcatttcttcttgccctataaatactacactttcctcatgcgtaaacaatccaacaaaaacatttaactgatattcatcatcccagcttgcattcatgcaatcatgct

SEQ ID NO: 117621 - DNA, 664 bp, Zea Mays
tcttgggatgaagtataagaagattgatgtgtgcgaagataattgcatgttgttctggaaggaatatgaagcggccacccattgtcagatatgcggtaaatcaagatatgcggaggtactaaaagaggatggagctacttttgctacaaaagtggcagttaaatagcttcgatatatgcccatcaccccaaggcttaaacgtctgtttttaaccccagaaactgtgaagctaatgttgtggcataaggaaggagacagtgagagccaagatccagacattatgatgcatccatcagatggcgatgcttggaaggctctggatcattttgacccataatttgcaagagaagctaggagtgttcgtctaggcttgtccactgatggtttcactccttacgacaatagttcaacttcatactcttgttggccggttttcatcatgccctacaacccccctcccaacaaatgcatgaaagaagggttcatatttcttgcccttattattccagggcctaaacatcctggaaagaagatcaatgtattcatgcaaccattgattgaagagttcaaagagctatgggtaggggtaaaggcttatgatggtcatctaaaacgtgaatttaccttacgtgttgtatatttgtggtcaattcgtgatttgcct

SEQ ID NO: 117622 - DNA, 320 bp, Zea Mays
gtttgagcagggtgaatggtggtcgtcaatctttgatcgggtgggtctgtgatggcaccaaccattttgaatcctaaccgtgaatccaagatccgatggtttgcgtcacgtaccagttttctggggcgaggttatgatctgggtcgtcgatgcctgattgtgtggcccaagacgtacgcgcgttattcggaccgaagcaaaattgttaaagagcccctctattttggaagaattgacccgccatccacccagttcatggaagataatagtggggccctcggtttttacaaaacagcccttggtatttgcaaataggtccc

SEQ ID NO: 117623 - DNA, 738 bp, Zea Mays
cccaagagagctggccgagctcaagctgaaggtgtattctcaagcaaagccgatctggcagaagctacattgtttcatgctcgacaaaagagaatctatacgtgctgagttagctcgtctagtagcagcaggcttcattagagaagtaatgcaccccgagtggcatgcaaatcatgttcctatagtaaaagataaaaagttgattggcgcatgtgcgtcgactataccgatctcaacaaacattgcccgaaggatcccttcgggctccctagaatagataaggtagttgactctactgccggctgctctatgctctcctttctggactgttactcgggatatcaccagatcagtctcgcgaaggaagataaagaaaaaactacactcatcatgccctttggggccttttgctatacctccatgttgtttgtcctaaaaacgatgaagtgacttatcaatgagctatccaaacatgcttagccaaccactgtggcaagtgggtggaagcttacattgacgatgtggtgatcaaaaccgtgaacctgaataacttcatcaaagatctccagtaggttttcaacagcttgaggcgctaccgctagaagcttaacccagagaaacgtgtattttgggtaccagtcgggaagctactcgaattcatcgtcagtcaccgaggaatcgaggccaacccagagaagattgaaaccattctaaggatggaaccaccgctatcacaaa

SEQ ID NO: 117624 - DNA, 530 bp, Zea Mays
aaataggaattagaaaataaaaagaaaaggagaaaaccctccccccttgctgggctggattcagcccataccgcggccgcctcccccccctcgcgcccgcactcccccccttacggcccgtcattaaccgagtgggacccgcagcatatcgcttggagctaccagaatccatgtcagatattcacaatgtgtttcatgtgtcccaactccgtaaatgcctgcaagtaccagagaaccacatcgaggcagagacaattcagattcaaaaggatctccagtaccgggaaaagccagtgaagattctcgactcagcagtccgaaggacccgcacctcagaagtgagactctgtaaggttcaatggagcagagaaggagaagaggaagccacctgggaaagtgaggactctctgagtagggaatacccttaccttttctcgagccccgtctgaatctcgagtgcgagattcctttaagtggggtaggtttgtaacatcccaaattctaacccaggtttgaaaccataatctaac

SEQ ID NO: 117625 - DNA, 274 bp, Zea Mays
agtttcactcactttccactgtgaatattgtagatttgatcactttgttactggcgcatgaatgaatgcttgttagctgtgctcgtttctgatctctttctctagacaatccttacaaagcctagaaatgcattgattgatttgattctaatactttaataacagcttgatgtcacaattttacccaggagtgatgataaattcatctgcattatctgtactagcaggttgaaaggttttgaacatgtacagttgtgtgctagtctgctagtac

SEQ ID NO: 117626 - DNA, 563 bp, Zea Mays
ccttacctcaaggtgagactcgggatcccctctgaggcagcgacgacacgacgacgacttcaaacgatggccacagttctagggctgcacggggaacgacgattgaacgcgggcagagtgaagtagagggatagagagaaattgagggtgagttccaggctattggcaccgagacaaagcttaccgtggcaagaaaaacgacagggcctcgacatcggtgagagaatgggtgtggggcgatgatgagcggtggcggttctccctcagcgtgtgtgcaatgtggaattgggagggtgagagctctcagagtgtatgagtgagagagggggagagcaggtgggggcactaggggttcaaatggccgagagtggggcggttttgggtgagacctcctcggcgtgcgcgctgtccacgtaggcgcgcggttgaaggaggggacagaactgacaggtggggtcagctagtcagcgggccagcgctaggtgtacccaatggatgggaaaaagagcgccgacaggtggggctagcattggagagagagagagagagagtgtgtgggtggg

SEQ ID NO: 117627 - DNA, 647 bp, Zea Mays
ccggacgagggatctagctcgcgcagataaacgcctgtctgcgtgcgtttgtagaacgtgaagccgagctcccgtgccgcgacgacgaaggcagcctcgtcaggagactctgcctcgtacgagatcttgcccgactcttggtcgacctcgggtatgcacgtgtggcagaccgccagcagccggaagaacatctcgatggcgtcggagcggggctggtgaacccagttgccgcccatgacacgctcgtccacgaagttgaatcccttggtggctgctggtttactgttgttgtcaccatcatcattatcatcagacgacgacgacgacaggaaatgctgctgctgctgaatgccgttgtttttggccttgtctgtattgtcagcggcggcggcggagcctttcttcctcgccattgctcgctcgacctccgtgacgccacggccatacgcggttccggcgatggagcatttgatgaactccatggagttgcaggtgagagtgccggttttgtccgtgaggatggtgtcgacctggcccagctcctcgttgaggttggacgtcctggcgtgggctggcgtgtccgtctcctcgtggtacatgtggatgtcgtggttgatgaacagcgcctgcagcagcttcacgatctc

SEQ ID NO: 117628 - DNA, 399 bp, Zea Mays
cgacgctgctcctgttggtgcgttggcagtggtgccccttcaagaggttgatacaactttggatgtcccgaaacctgtcagtactcgcccgaggcgccctagccaaaccagtcagcctgagccttctgctgatgagcaaaagaagaagagaagacgcctccggcgagtatccagttttgatgaggacgccggtaccttagttcctgctgctgaagaagtgcctgcaactggccttactgacgctgaccccaatgggtgtacccaaactgttgctgatcccaatgtgggtgctccatctgttgctgatcccaatgggtttgctgcttgcgttgttactgtggaagatgaggaggaagaaaatgaagctcctttaactcggaaaaacagtcggcagttcat

SEQ ID NO: 117629 - DNA, 443 bp, Zea Mays
cgtcagttggtgaaggcaatcgcaggctgaatagcatggtcaatctggtcgccgtgctcaacacagagttggaccacacccttgatgagttgggcaaggtttgggcagaggttgcggaattgcatgctgagtgcgctgcacgccactatcttgatggtggtgctcccgcccctgtcgggattcagcacccttaccgttcaccgccctatggtcgcttcgactatggtaccccagactgcaggacctggatagatttggatccctagatcgatagagtcagagtctataataatgcttagtttagtgtcttagcctaagtcagttttagttagtttgcttatcttttgttggatgcttgttatgatgacatgtactgaagttggatctttgtaatgattgtcatcaagctatgggtattccctacaacttggtgtagttattaa

SEQ ID NO: 117630 - DNA, 461 bp, Zea Mays
tgcaaaatgaatgatacactatgcatgacatgccaatataattccacatcatttaacatgcttcaaatagatacttcaacttcatcaagttacgaatcaaccactataacattctcgaatcattatcctcaacatatttaaaacagtagaacatgaataatttcaaacaaacaaacctcttaatagaattcaatgattaacacattcgatacttatgaaaattcaatgacagggcacaagatacaaccaaacggtataaaaccaccactgcatttacttgccttcgccaggaatttgaaatggtattaagtacgatccgaaggtccaccacctattgcggcataaaagttagtacacacattcacataacattcgctaataactaacaccgctcctacgcacaaaccccaaaaccgacgtgaacaacacctctccctaccacccaccaaactgcagcagcg

SEQ ID NO: 117631 - DNA, 641 bp, Zea Mays
gaaggcaacttgcatgatctacaatcttgtgtagtgagctcctaatctggaatgagcaaccactgccagctaattgaatgcagcattgacagtgataggttggtggcttcagtttgatagtgagttcagaccaatactgagttgattgctcgacaacaactaaacatcaagctgggtttctctattgttggggaaaaaatcccttccattcttgcactaagctgtccatagcatggcggctgagaaagggaatgtgtcatcatcattggaacaaaccaatgctctcatgagcaaaggaaaccaggcaggttgctgatggagaatggatctactttgcatcatcaaatcaaagagagaatagatggcaagaaccaacgaaccattattccacccacaccgccaatgtacggtgggtgacatacttccgcagcaggggataatcgtaccgaactagaattaaaccaaccaaacctgccctccgcatgcatttcaacagtactgtgctcccggacatggaaaagaaaaactgccgccaccgctggtgctccagagtcaaaatccggagagtacggttaactgaacaatactagtactatattatactatactcaaattagcagtactgacagtttaagtaggag

SEQ ID NO: 117632 - DNA, 398 bp, Zea Mays
gcgaatgatgtcaatggctgcacttcagttggtgactgttagcgttttttttacaggatttgcattacttgtttggattgagcacttgggaatgcttcatctttgctcacttaagtccaggatagtcattgttcagtcactcttttgctatatatgtcaccattatgtgatcagaactaataatggttatatgttgagagagatatacaaactatgtcaatgtttcctgctgtctgcatttgcaaccttgtgcgctatgctcagcatttctcatgtcattggttagttattgtagttgtacttaaaaattaccattttgtccatgaaaaatcatctgattatatgttcaggagttctggtcccgttttaaggaatgtaaaagaacaagcatgagaagc

SEQ ID NO: 117633 - DNA, 440 bp, Zea Mays
tggcgaactcttcgaagcaaccaaacttgggaggagacccaactgtcagagaccctggggtagggcgaaaccaggaactgtaatccagaaaatttgacatcccttccaaaatgcaactgttctcaaaggaagggaacgaagaaaggggaaatctgaaatccgttttcttaaaattgcagaataattccaaatgtccctgaactttacaaaaatggcattgaaaagccgagggaactgcaccagacgaaccagtcgtcacagagatgttagaggccgaaaacccaggcccagacgagaaaggcccattccgcaaaatgggccgccattgaagcttacgggccgcagatagaccagaatttgaatttgaaaaatggcgaacatcgcgcccatgacgaccgcgtctactcatgcctccattatgattagagtaactcaccgag

SEQ ID NO: 117634 - DNA, 290 bp, Zea Mays
caaacatccccgagtcccacgctggttttacacatgccttgcggctcattctcatggaagtcaccgttggtcgacccttctcctagcctataaagggggaggctggcctcatggcaagggaagaatcagagagggtcgagaggagagagctcttaggcaactggacaccattagacgaacacgaatccacaaggacgaataggaggaagaggatcaccaacgaggacatggaggccggagccccgttaaagccaagacctagttaggactccacccagcagcttctaagc

SEQ ID NO: 117635 - DNA, 301 bp, Zea Mays
tttcaaagcttccttgattgtgttttttgccacatccatggctgcaagaatttcaggagctgctggtgtctcatctccatcagctatcctcaaggcaacaagtagtggttgtgttgctttaaggcaattttcaactttattccaaaatggggccgacaggacaatattttctgcttgttgtccttctgtggtagtagagaaacgactagcatgtcattcttcacaataaaataaagctctcagtccattcctatgcctatacatgcttgccaatgtaaggaaggaggtagcaaatcgagtc

SEQ ID NO: 117636 - DNA, 931 bp, Zea Mays
gtcaaagagtcaaagctgaacatcaaagaccggctgggctactacacccattaaaagtacccgaatggaagtgggaagggattggtatggacttcattgtcgggttgcctcgcaccccaaaagggtatgattccatatgggtgatcgtggacaggctaaacaaagtggctcacttcattccggtcaagactacttacaagggttctcagttggcaaagttatacatggctcgaattgtgtgcttacacagtgtactgaagaagattgtttctgatagaggatcacagtttaccttaagattttggaagagctttcatgagaacatggataccaagttgaacttaagctcggcctatcacccacaaactaatggctagaccgagagaactaaccaagtacttgaggatattttgagagcttttgcccttaagcatggaggcagttgggacaagagtctaccatatgctgagttctcttataatactagttaacatgccagtctgaagatgtcaccatttgaagctttgtatggtagaaagtgcagaactcctctgtattaggatcagacgggtgaaagacaattttttgggcctaaaatcattcaagaggcaggggaacaagtccgtatgatccgggagaacttgagggtagcacagactcgatagaagagctatgctaataaccggagaagaccactggaattcaaagagggtgaccacgtgtacctcaaggtgtcaccaatccgtggaatgagaagattcaaagttaatggcaagttatcccctcgctttattggatcctttagaatctttaggcgagttggggagatggcctaccaactcgaactaccagatcatctgtctgatgtacacgatgtattccacgtatctcaactcaagaagtgtctgcgtgtcccggaggaatagttgcc

SEQ ID NO: 117637 - DNA, 648 bp, Zea Mays
caagagtttagattagatgtttcacgttgattttggatggtttcaccaaaacggctctcataaaaacagtataaaaagctaaacgtttggcagtccacaacagcttccgactatcagaaattggaaagaaaactgaaacaaactccataatatccatctagatcagggcttgtacaagtttggagttccttccctatgatgtcatctctagtaaccgtgtgcatatgaacgtacataatactgttttgcactgtatatgtactgtttacaaagtagagtttgaaatgaggggtgaaatagggcatgagatagtcaggatctgaatccaaaaaacctttgtacactactttgcgatgatggcaatgacggtggcaattcaaggacgaaagcaagcgactgcaggttgccgttgtccgcgatgtgggaagcaaaccggtgactgatttggctcgctgcagtccagagtccagactccagagctcctgatctgaaatctcaaccaccagcgaccaagcacatctcggccggcacagtaacatgaagggttgagcagactgaagtccatttttccatcataaagttccttttcttgaacctgaagcgtcaagaatgaggactatagctataggtcgactgggactctgggag

SEQ ID NO: 117638 - DNA, 455 bp, Zea Mays
tttttgcgcactcaccggacatgttcgatgcattcaacggacatgtctcgtgagtccacatcagctagccattggtcatctaactgttgctaaccattaaatattaggtgcctagtgtttatacggtgtgtcaccagacatgtttggtgtcttatgatgttctccaacttacattgcaacatctacgagtaccctctcaagtgtggtatctggtgcaccactagacacatccaaagcctagtatttggtgcacatggctatagtttcccttcttcacactgcatcgatgtcatccggtgctttatccagtgtaccacaagatatgtccactgttgctgagcaacatgtgtttattcatttcttcttgtgtcttcatccgtgcttcttccatcttatgcttgatgtgttgatcatctgagtcacccctttgccttagtccaagtccatttatgcac

SEQ ID NO: 117639 - DNA, 287 bp, Zea Mays
gacagatatctctttgttgtccaggagacagtataagaaatcatcttcgtctgtaccattgaacaccaaggccccttttgggtatttttagtgtttgggcataatgattggcctctgcaatctctccttcagataacctctttcccgaagcatgacgaataataaaatcaagattctcggatagagcttcgggaccaggagatttagcttcttcagctatttctttctccgtagttatgccaaaccctagagattctagttcagccccttcctcagttgcagcgggc

SEQ ID NO: 117640 - DNA, 541 bp, Zea Mays
gcatttttaagcaagtgcttcgtcacctgagatcagcttcggcttaaagaacctgaacacacaaatggccagggtaagatccactgcaagggtgtctcgtggaggagaggagaccgaaattgccgaaacggcaccaatatcagaagtgacgaagcgattgggtctggttgtgttagaggaagttactgtcgaaggtgcctccaatgtcgaagctgaacagattgtagctggaggcgaaactgacaatgaaagtgaagaagataacaatattctgagcccaacaaagcctagccactttgaatttgggaaatctactgtaacagaggatgacatggttatgatgacaaaacttggctatttcggggaggatgagagcaagcttgtccggtttgctggggaggaaatagttccggagccaagagaggacgaagttgtcgttttcaagagcttcttcagagtaggacttcggttccccttaaatgacatgataggagaagttttaaagaactttgagatatactttcatcaattgacatccaat

SEQ ID NO: 117641 - DNA, 975 bp, Zea Mays
acgatgctgtcaagctattcgatgaaatggccagggccagggtcaagcccgacgagcgcgtgtattccctcacaatcagggccttgtgcaagctgcgcgatgcagacagggcggtccaggtgctcggggagatgatggaggtcggctttaggccatgggtcttgacattgacatacaactttgtggtggctgtgctcgtgaaggcaggaaggatggaggaggcactaaaggtgaaggatcagatgttgttggttgctggaaagaagatggatgtggttctcgcgacaacattgatgcatgggtattgcttgctcggtgaagttgggaaagcgctgaatttatttaacgaggctgtcagggatggtgtgacagcaaccaatgtgacatatgcggttctaataaaaggttgtgatgcagaggggatgacagataaggcatatgagctatgtcgtcagatgatagagcagggattgttgtcaagcacacatgggttcaatttggtgataaaaggtctgttaagagacaagcggtgggaggatgccatcggcttgcttgaggttatggttgatataccttctgccggtactgcgactaagtgtgaagagcttgatatcatgacagaatgtgttgctcaatgcaatcttgtcactattgtgtcctctgattttcatcctgaattcatcagtctgtttgtcaaaaaatttggtggctctgtggcagtatcaagcaagagagtattgtttctcagttggggctacatggaggagtatgaggttctgattccatttcagttccttcaggttcgtgagagccaagtaaatgatgtttgccaggacatgggtgtgggagataagtgcttggctgccattcatgactttggcgatgttcagggtgtagatgaagcaaaggaggagcttgttgagatagtgagatgtctgcatggttcactgaactccaagaagcttggagcaaaat

SEQ ID NO: 117642 - DNA, 652 bp, Zea Mays
accacaccaccatggtccccgttggctggaagctgggatgccaacgccctcgccctcgcctacagcacatggcgttggctccaccttcctctgactgggtcatcgactctggtgcctcctaccacaccactcccactacaggcatgctatctcactctcaccaacctccttccacacaccctacctcgatcgtcgttggcaacggatcaactcttccgatcacctcagtaggtgcctcggttctccctggaccgttctacctcaacgacgttctcgtagcccctcacatcactcacaatctcctttctgtccgtcggttcaccaccgacaattcttgttccattgagtttgaccccaccggtttttctgtgaaggatctggctaccaggaccccactcgcccgatgtgacagcgtcgggcccctctacacactccgggcgtcgtccaccggcgtgtctccgccctccgtcctggtctccaccgccacctccaccacttggcatcgtcgtctcggccacccaggacctgacgtcatgaccaagctctccagcactttagattcttgtaatcggggacattttgagggcctttgtcatgcttgtcagcttgaccgccatacccgtctcccttttactacatcttcatctagggc

SEQ ID NO: 117643 - DNA, 301 bp, Zea Mays
cggactgaaccaaacaagatcagcttcgatattgtaaactgtatttaatttgaatcaattcgaaacccgataattttatccgcagtctgaacaagaaaacagattaattatgaatattgggtcccggctgtaattatctcagctcgatttaattttgcagcacttctatcgtcgagttctaataatatttacttgggccaaaatcacaagagtgggtcgagattccaaattcatgttctcttaatccataaattttaaatagacacaaggctcgacatttcgcgaaataaatacgcgagat

SEQ ID NO: 117644 - DNA, 468 bp, Zea Mays
tcttcgtccaccaataatgttgtttcagatcttgatacatcttagtgcttccgggatgaatagaatagcgactaagatgtgcttcatctaagatttgctggcggacctcttcatttttaggcaccactatgcggttgttaaaccataccacaccttgatcatctcttcggaagcagttggcttttccagcctctatcttttcatggatatgtttcataccctcatcattcttttgtgcgtcaattatcctttgcaagatgactgactccagcttcaagtgatttgaagttccatgctgaatcattcccaggttcagattctccatctcctggcataatgtaatgtcagaagtcctcattgttagacaatggcaggaagccttgcgactaagtgcatctgccactacattagctttgcctgggtgataatggatctccagttcataatccttgatcagctcgagccatc

SEQ ID NO: 117645 - DNA, 575 bp, Zea Mays
gtaaaactcagattacatcatattttatacaagttattacaggagttttttgagctacttttacaagactatgcaagcttcgacactatctccggagcttcgttcttctactctgcagctgcagcttcagcctggtcaatctgtacaaaagtattataagccaaattcaaaaattcaaaggaaaaggtaagaataaggtatgattttgttaccagcttgaggtgactccgagcttcgtcaccagctttgctccgaccaccctttgtccatactaactttataaatctgtttgcaatacttcgagccagattcgaaacatcatctaagtctgccggtgacaagctgaagttgggtctattaacaattttgccgtgttcacagctagatttcaaaaaagcaacagttgtaccccgagaagctgccagggcacaaaagtcgctatgcccagctataacttcgtcaagatcattaatatcaccttcaatgtgctcgaaggcaccagacaggtcttcgaccaaaggagtaaactcttcactactggctccaacaaaatggaacacttgctttagttgatg

SEQ ID NO: 117646 - DNA, 428 bp, Zea Mays
tgttcatctatttataggaaagacgaaccactttcgtacaaaattacaatcatgcccccttaaggctttacacttattgtttacaaatgatgtagggatattgttgtcttttccttttcttccttgacgcgccggtcttagacttctttcctttcgtcagcttgcgctcgaagcttttcttcatgctgaaactaatgccttcagctccttctcccaccatttctacaaacagacgaagcttctgtttgcgttgcttcggctgaaagtcaacttcgtccagtctttgttattcatctaaaacatactttattataccgaaatgcaggtgctttgaggaccttcgataaggcaggccccaacatcattcacctcatcaatgttgtccatcattagatactgatagtgaccaatagttagatcattctgcc

SEQ ID NO: 117647 - DNA, 1072 bp, Zea Mays
ggctgccacggattgatcacgctgatcatgtctgtgatagctgtctcgccgggaagcagcgtcgactttccttcccaggagaggcaggctatcgtgcgacgagcaagcttgagctgatccatggggatctttgcgggcctctgaccccatcgacaccgagcggtaacaggtttttctttcttttggtggatgacctgagtaggtacatgtgggtgtctcttctgcgttccaaggatggagcgatgtcggcgttcaagtcctttcaggcaagagctgaggtggaagctggaagaaaggtgggaactttccgtacggaccgaggcggagagttcacagcacaagccttcatcgagcattgttgcagtgaagggatcaagcgacacttgacagcaccgtacacgccggagcagaatggagtggtggaacggagaaaccaaaccatcatgggaatggcgcggagcatgctaaaagccatgaatctccctaactggttctggggggaggctgtggcaacggctgtatacatactgaacagatcacccactcaaggaaatgaagggagcactccatatgaggtatggcatggaacaaaacctaccgtcagtcatcttcgtacattcggctgtgttgcacatgttaagcaaggcaacaagcgtctaacaaaacttgaagatagaagtacacaaatggtgttcattgggtatgaaagtggcagcaaggcctggcgtttttataatccagtcacaaaacgcgtacatgtgtcgcgtgacgtcgtgtttgaagaggatcgtgcctgggactggaatgaggaggagaagactgggacagatgtcccatttggtgctgagttcgtgcctgtcgagagctccattcgtttgatggacaagccgggttcttcgtcctcgtcaccaagcatgtcaagtagtggtcgttctgggcctcccactcatcctggtggccagtgggatgttcaggatgaacagcaggtgcccacacctgagataatgggtaccgagtatgccacacctcccactgaaaccccagatcttgatgctgaccatgaagatgatgc

SEQ ID NO: 117648 - DNA, 463 bp, Zea Mays
cggccgagttattattggctatgttggcgctttttgaagtaatggctgagtgatagcgggccacatcggtgttttagaagtaacgaccgagcggttactgatgatgtcggcgatttagaggtaacagtcgaatcctttggagccacgtcaccgctttaggaataacaaccgagtgactgatggcgacatcggcgttttagaggtaacagccgagtgatcgatggcgatgtcggtgttttagaggtaacaaccgagtgataacgggccatgccggccgctttggaaacaatggccgggtgaagtatggtaacgtcagcgtttttagaaataaccgctaagttaaaatgggccgcgtaggccgttttggaaataacagccgagtgatgatgtggcacgcccgcgttttagaaataacatccgggtgatgacatggcatgccaacgttttggaagtggcgcctggc

SEQ ID NO: 117649 - DNA, 532 bp, Zea Mays
gacttttagctaaccactgctaatctttgttaaatatttgtatttatttttacccaaaccttgctaaggtgtttattgcattttgtttgcagaaatatctccttgagaagcgtgctgttgttgatgttgataatggcaagttattaaatgaagatagtgatatcagatcggtaagttcaaaccccattgatgcacttattctttacatttatctgccaaaaaaacttagtttggaggttgtgctccgaggaaaattatttcaaaaattctagctgtagcatatacaagaggttatatcagtttttgttggataagtgcaggtccttcagtttttaatggatgatgtgtctgacttcttgtcaacacatttttctagttcaatggagagaagcaagactgatgagaaaggctgtgcttctacacttaaagctttcattgattatatatctttgagggaaactgaaaattttcgatcccgaaaggaggaaaataagaattctatcacattaacaactattcatcaggtctgttc

SEQ ID NO: 117650 - DNA, 310 bp, Zea Mays
acatcccttcgcgtgaatgaggggaggtgagtcataccacgctttcctcaatgggttacaaatggcacttggtgagttacaaacgagtaattcgagtggggctctaattcctttcgtaggctccaagcgtggggttcgctaaggattgtcctcatattctaggcaccgactcatatagttgccgattccgttcaatcggaaccgatggcttgctgcctctctccgtgataaaccatgagttagaccttctcaggactcgaacatgagatgtagattcccttaacgcttcatgcatcagggtattggccgc

SEQ ID NO: 117651 - DNA, 373 bp, Zea Mays
gataatttggaaatttgtcttcatcagctgacccctaatgctatcgttaggctcagcatcttcatctgggcccttcgaagccaagggatggaccccaaatgtcgaagcattctgccgagtgcatgagttgcactatcaaacaaaggccagagcagacaggttgcacgaaaattttggttgctataacttcgcgtatcgcaaggatacgaaggctccggtcctcagctatcgcaccaagtagccaaccggctagaagagtgagtggttttatatcaaggccgatgagaagaagagggagaaactgaagacgatgatcataagcctgctggctttaagctttgggatgaccagacccttgtgcaacatgaagcca

SEQ ID NO: 117652 - DNA, 322 bp, Zea Mays
gttgaagcgtaataccacgccgctggtctcatgtttatatagcgccaaaggccaggcgatcgacatgtacaggatctatctatagctaacaaactagcaactacctgaaggtattcaatggataatcatcgggaatggataatcactaggagcatctatatatcaccataacagacaggaacatcttccatcttcaattccaacaaggacgacgggacaccgggctttatatccatcgtcacgaacaagaatccaactgatgaggagattggttgttcgattcgaacgcgatcaggcattcagttatgcccctctcggtgat

SEQ ID NO: 117653 - DNA, 588 bp, Zea Mays
accaactagtaagcaccaacgtgccaactcactaattacattttcaaatcaattggagcaccggagttacaaacatacaagtaacaagcacattcaccactctttcctatctaacacgacatagctcatgaattaagaaaacactaaacacgttgtcagtttatatttttcctagttagggaatgacaccaaaaggttaacaaagcttaggctcacattttaggactcctcaaacttagactatggataacaataatttaactagctctctaggttctttttttatatgagcttgtataccacaccaactaaatagacatcacatctttctatgatttaaaacatagagcattagcacatatcatagaactccacaaggctacaacttgaacacctacggacttaaagcactcacacacatatttcctcggattgttctccgatttcaacagaaatcgacttacgaatgctacttgctttcaaatgattttgggcagcgataaacattcctatcacatttcattgctccaaaaatatagcaggtaattaccactaatgcaatacaccacttcaccatatataagcaaa

SEQ ID NO: 117654 - DNA, 557 bp, Zea Mays
gttcgcttaaagcaaggaggagactctgtgatgcaataccttgccaaattcaaccatttctctcaatatgctatagagcaagttgacacggacctaaaaaagaagaattgtttcatgagaggtctgaatgattagctacaacagaagatggccacctacctagatctcacttacagcagggccgttaacacaacactttaggtggaggcaaagaattcgtggcagagaaagacaaaaaggtttggacgtgaaggtggtgaggtatcctctcaaggatccaagaagcggtcaatgttggtgatccgtccctttaacccaaaccgctcttttcctcgtccatcttcctatcctttcaagcaaccggtcttcatccatcccactgctacccctactccaaatattcagtcgagtgcccctggtacttgtttcccagccttacccagttcatctaacaactgcttcaactgtgggaattctagacatttcatcaaggattgtccctatccaaagcaaaataaatcaaacttccaaaaggcttctagaagcacatctcaagg

SEQ ID NO: 117655 - DNA, 489 bp, Zea Mays
aggagggcagccttttatcagggttccttttagttagttcttgcttttgttagtttcagtttacttgggtgattggtgttgtacctagacttaagattaacattgttctgatctctaaaaaaagattactattgctctgttcaatggttctactgattagcaatgacatcaagaaggcaaggaaacgaacttttttacctgtgaaaatccaggattaggtggtgtcttgttagagcacctccaagagaaaatgtaaaacaacccccaaaagattttataagatcaaaaacactttttagccatccaactgaatcttcaacttttccccaaaacattcgcatcccgaatccacagctccctctctcgcaaatattctccctctctcgcaaatattcgcgtcaaccaaatctccccaatcagacacttcacgcgcagagaaagttgtttcgcgccaagattttgcccgtgtgaatgtcttgttgatttctg

SEQ ID NO: 117656 - DNA, 2034 bp, Zea Mays
tgtgcatatacaaactaacatgactatgtgagtatacagtagttcatcaagaaccggatatagtagtgccatgatctacaactagtgtatatattttttctaataataataaactaacttctaatgcttataacatacgcatgatggcttaaactaggatttttattctataaaataaacacctatatagttgtgccataagctaagaaacaaaaccgatcttctttttcgttgatgcgacgggcctgaccagtcttaaacctaatgttgtatacatatttgcttgcaacttggcatatatggagtggttaataatggaagaccaagatggaatcgtgtatagaggagatcgatcgaatcgatgatgggtatatatcacaccttgttgtgcgaatgatagttgtagagtagcgtcggtggcgagaacattgtatggttgttttccaacagcagttgggacctgaagccgctatcgtcatcttcctcctcgtagtagtccctaccgtgtggcacgaccttattgctaggcctggggcttgcgatgatggttttcgatgacacgtccgcacccttagccctagggctcagtccctaggcggtggcggcggagccaaggtctatataaaacattagcactagaaaaggtcaggcccaccacatcaaaggaaaagaagactattttgtttttagttagctcgtgataccaatatataagtgacttgttttacaaaataataattttagtctaaaccaacatcaatatgttatgaagcacaactagttagtttaccattattaggaaaaatatgtacactatttagagatcccgacgctaccatatctagttgttgatgagctattgtatactcacatagtcacgttagtttgtacatgcacaccttttaagtttacttctatttattttgtcattttattatttacatgaactaatggttgctgctcttgttccccattggctataatctgatgtctttgacgtttcttcatgcaattgtcttttgttaatttgatgctttccattgaaaataacttataaattagaatagggagagtattttttttgttgattcgtttgttgattcatattaggtttagtttatcattcctctccttttttcgatttatgctttcatttgtttgacattatggttcatagacctagtttagtaaggacggatctagcgtggaggctagggatgctccaacacccttacctccttgcactgttatcgattatttagttggttgtttgttgttggtcccaaattatttggacgatagctacacttaaaaagggtatgatatgtgacaatttcaataatgttgcacttttctataataagactagtgctatatgtattgctaaatccacacctactaaactaggctcatgaaccaataatgtcaaacaaatgaaaccacgaatcagagaagggagatgaatgataaaccaaccataatatgaatcaataaaaatagaatcaagtactctcacctattttaatttataagtcattttgctttttaagtacatgatttttattatgtatatatatgtgtagatatgtagcaagcataaattagcaatagaaagcatcaaataaacaaaaggcaattgcttgaacatcgaaaacatgagattatagccatcagggaacaacaacataaaaaattagcttatgtgagtgatgaaaggacaaaatagatagaattaaaaattaaaaggtgtgcatatacaaacaaacatgactgcatgagtatacagtagttcattaagaatcagatatggtagtgacatgatctacaactagtgtacatgttttttctaataataataaactaacttctaatgcttataacatacgcatgatgacttaaactaggattgttattctataaaataaatcacctatatagttgtgccataagctaactaagaaacaaaacgatcttctttttcgttgatgcgacaggcctgaccagtcctaaatctaatgttctatacatatttgc

SEQ ID NO: 117657 - DNA, 306 bp, Zea Mays
caaatggatcatggtctggttgaggattatgatgacgacgtctaccattacctctcataccttgtcgattatgtacgaagcgttgtggcagcagtgcataaacattgtcgtcatcgtcgtcatcgtccacaggagagtgagatggggctggagttggtggtgggggacgagcctccagtacgttcatgcgtgtaacaagttcatcaactcgtcgatcaagctgctcataggatgtcgaggcagagtcctggtattttttaaaagcttcagtcatcgcgcgcatcatctccttcaattccatctgag

SEQ ID NO: 117658 - DNA, 1115 bp, Zea Mays
cagccattgtgtgtgcagccaacagagtggtccgctcgtgcgaggtgtgccaggaattctcaccaccaacggatgtcccctcgcaatttacaaagctcatcgcccacacctagccactacagcgttggtgcctcgatatcgtcggaccattgcccaccgcacacgacaacctcaaatttgctttcgtcgcagtcgaatacttcattgagtggatcgaagctagggttgtgtcaacaataacagcaaagacatcctagaagttcttctggtagaacattgtccgtcgcttcagaattctgtgactccatcggcacgaaggcagtagacaacgacaaaaaattcgacaatcaggactttggggaattctgcgactccatcggcacgaaggtagtgttcgcttctgtctaccacccacaatccaactgggtagtagagcgcgccaatggaaaattttttagcaccataaagaagagacttctagacaacaaaaagggcaagtgggccgaacaactactcgaagtcatctgggcacttaacacaaccgaatacctagccactggattcatcccattcagattaatgtacggatccgaatccatgactccgcaagatctcaagaacagatcaccgcgaacaagcaccacggccacaccagacatcgatgagtcaacaacaaaagacctcctagatggggatcgtgtcaccgccctttaagtattgaacaaatatcaagcacacacgaagacctagtgaggcaacactgttactcccaaagagttcgacaaaggggacctcgtcctcatcagaaccagcagaacagaatcctgaggtaaacttgaacctaaatgggaagggcctttcgtcatcaagaggaaaacatccccaaacgcctacataatcgcaacacaatccggcgaagacctcgagaatttgtggaatgtcgataatctgagaaaaaaattatgtgtaagccatccaattttagggcctccgcacctttgtaacatctacaaacacattattccagtcgggcccgcactcttttcctcgccggggggggtgcggtttttaacgaggcggtgccatgtaataaagcaccaagaacccccccccaa

SEQ ID NO: 117659 - DNA, 668 bp, Zea Mays
ggggaatgtgctgggtttggcgggttagtagctgctggtggttgtatttgctggtgtccagcagctattcagctctgcggagccgcgtgccggctgatctcgggcctgtttggaatagattctgtgcagcttctggtgggaaaagctggatctcggtgccaaacggctggattctccaccagattctcctggaagcgcttcttcccaccacaccgtttcaacgtagatggagaatcggctctatggccgcgtcgcgaggaagcgggtgattcctgcagtacctcttcatattctgcacactagtgtgtgatgttgttcgtatgttttaggcttgagtctagcatggcaaaaggcaaggaacgtgttcgtttctaacaaaggtttaactcacgtaaattcaacacagtctatccatgcgctgctgccattgcagttgttaagtgtacctttaatcctcatgttcagatgttaacaatacgataatttggacatttaagcatatagactttagacactgatatttaataattcggtcagtcccgtaatgcactagttggttatctgtatttatcagttttctttttttaatcggaatctacaaactcataatctgtgtatccaaacactcatattctacccaccagcttctctccacagcagccgaacca

SEQ ID NO: 117660 - DNA, 421 bp, Zea Mays
ggatttgatgcggccagtggcagtgacactaacgaaggcgacggtgacgatgaaggatctgcaatttcttcaacttctactctatcttcttcttgattttgttgtcccacagtagtttcaaccggaggtgacgcatggtccaaaggagcactggccgccttctttgctgctttctcaaaaagggatcatatgtctccgcttctcttcataattaaaaattctgaacaagaacactatcaattagtaaaacctccaagacaacagacaagtagataatgagcaaaacagcgaacaaaaaaatcaaaaccagtagacgaagaacctacgagaggtcatgagtatacctaataatctgatatatattgaagatgatataatctgatttagagaaggactgaagggtggcagaggcagggcatta

SEQ ID NO: 117661 - DNA, 595 bp, Zea Mays
ttccaatcactaccatgtcaacccccatccaaattgactcagccggtggtagaattcgagccgatagcatttgcttgaatgtaagtgtggaaataagggggatagcatttcccgctaatctcatagtaatgggtactcaaggaatagatgtcatcctagggatgaattggctagataaatatcaagcaattatcagttgtgataagaggataattaagttgatgtccccactaggagaagaagtggtagccgagttaatctcacctgagccaaggaaaggatgttgtcatcagatggctattgatagcaaggagccagattcactcgagattatcaaggttgtgtcagaatttccagatgtgttttcggaagatttaccaggtatgccacctgagcggaaagttgagtttgctatagagcttcttcctggcaccacccccatttctaaaagagcctatagagtatctggaccagagttagttgaactcaagaagcagatcgatgagctatcagagaaaggttacatccggccaagcacctcgccttgggccgcccctgtcctgttcgtggagaagaaagatgacacaagaaggat

SEQ ID NO: 117662 - DNA, 861 bp, Zea Mays
ctcaatttagcatcttttaacttgcgaatacttgcagggccaaagagatccgtctatgagtgccgagttgagacaagtagccaacgacttttcttatagggtcaagaaatattctgggtatgacgtcaatggatactgttttcgcacaacaaactacgaccaaagtcaacccaatcagaaaacaacgtgttctggagtctttacgcacgaccttgacgatgtcgattattttggacgaatcgaagaaatatatgaactcaatttttatggttccaaacctcttactccagtgatattcaaatgtcattagtttgaccctcaagtgacgaggcggacacattctaatcttgggatagtcaaaattcgataagatttcaccttacgaggagacgatgtctatatcgtggcccaataggccacacaagtgtattatctcacatatgtgtaccaaacgaaagaacatcttaagggtagggatgttgtgtataaggtatcgccgcacgggagattacctgttcctaaggatgaagattataacttagacccggacacatatgatggagagttcttccaagaagatgggctagaagggcgatttgagatagacttaaccgaagctataggaatggacatagatattgaaatgattgttgatgaggaggatgatggggtgcaaaatgagaatgacttagtaatccttgaaggcaatgatattaatgacaaacttgcgccttcagatggtgtcgactatgaaatggttgatagtgatgatgagagttatgatctgggtaaccccgacacatatgaagattatttttaatcgatgtaatgctatatgactttttatttcgcacatgtttt

SEQ ID NO: 117663 - DNA, 505 bp, Zea Mays
gactaaacggtcttcgacattcgaccgacagacaagtcaccgcgaggggcagcgacggccacccctcgcgtgcgacaatccgtgcaaaagtcgcctaagggtgcagccggactagcacaacaagtgcgtaaatttgaagtcttctcaaaaaaagactatccgtgcaaaagtcacctaagggtgcagccggactagcacaacaagtgcgtaaattcgaagtcttctcaaaaaagactatccgtgcaaaagtcgcctaagggtgcagccggaccagcacaacaagtgcgtaaattcgaagtcttctcaaaaagactatccgtgcaaaagtcgcctaagggtgcagctggaccagcacaacaagtgtgtaaattcgaaatcttcctcaaaagtctacccatgctaaaccctacaccaaactgcccgcgccaggaccgaccacaggcgcgccggaccggcataataaacatactagaccaagcgcacaacgcctttacaagcacagcgc

SEQ ID NO: 117664 - DNA, 284 bp, Zea Mays
ttttgtgatgattgtgttattaatgacacagaactgtttagttgtttatgtgaagtgtaaacatccaaactgcacaccccaagatggatatgcatgcccaatcttctattaggtgaactcttggtagtaattctgacttgtgtgtactttactgtgatggtatctatcatttcatcatctaccttaagttttttacatcgtagctaaaatggaagtatatactatataatatgcaatcatgttgccacatctgcctatccttcagtaaaaagaagtatgtttcg

SEQ ID NO: 117665 - DNA, 494 bp, Zea Mays
agatagagaagttgcgccatcgcgtggcccagcttttggattacattggggtccacggtacttccttggtagaacatctagataatgccccgtgtcgttttcagaacattgttgactttggcgttcaatggggagctgcggtggcgctgttcatgggggagatttgctccgactacagtctccaagacatcgtcgaccctcttttgtcccttttggatgaatggttggaagatatgttggagggttttgacatggtggccagtttgtgtcatgccatggtcaccgaacgacccaccttacaccatggtgtcatccacctcaccatagaatactctgctggtgctagggtttggtggcatggatggggttgagagcgtcaccattgtgaattgggtgtgtgtgtcagggcaagtgcgtatgatgggatgggtgagggtgatggcgacatggataggaggtggatggggacgggggcgcttagtggacggatcaag

SEQ ID NO: 117666 - DNA, 356 bp, Zea Mays
ttcagatatggtgctcgactgctcgtaaaacagatttcttagaagtttttaccacatgtggaaaattcatgctatagttaaatcacatcggttaaagagtagccttaaatgttgtgtcatttcagatttagcggtggagcacccaagtctcgttggtcttgtttatcattgaaaagtttgcccttctagggacccacatgtatgtgggttattttatttttccatcctctccaccttcattgagcatatcctttgcatcctagttcattgtcggccacccctcatcagcctcgccttccttaccctgctaaatgcacctctccctagagccctccatggaaacccttgacatcgat

SEQ ID NO: 117667 - DNA, 510 bp, Zea Mays
taactgactttattaataactacaccaagttgcaggggtacccacaccttggtgacaatcattacaaagatccaacttcattacatgtccatcataacaagcatccaacataagataagcaaactaactctaactaaaactgactagactaagacactgaactaagcattattacagactccgactctgtcaatctagggatccaaatctatccgggtcctgcagtctggggtaccgtagtcgaagtgaccacggggcggtgaacggtaagggtgctgaatcccgacaggggtaggagaaccaccatccagatagtggcatgctgcacactcagcatgcaattctgcaaccttcgcccgaaccttgcccaacttgtcaagggcgtggtccaactctgtgttgagtacggcggccaggttgaccatgctatgtagcctaggatttccctcaccaactggagagacaataacacatctagcattgccggtcgaacggcgagggtagtacttt

SEQ ID NO: 117668 - DNA, 661 bp, Zea Mays
atggtacagtaaccggattggatcgccagctcagagacctcgccgccggtgaccacgcgcgcggattcgtgctaccgacgtgattcacgctgaattaaacgtggataacgataacggggtgaaagatctcgccgcggatgggctagaatgtactgtgtgcttgatggttcatcagtgcacaccgacgacgtggccgagcggcaatcaccggcgtgttcgctgttcatcgagtggacgccacaccttaggaggtttatcgcgtcagtatgagccgaagtgaccatccaatgaccgtcgtagttcagtcgctctgcggttgccacggtagatcgccgccatgactcattcccctatcggccgccaccgcaattcgtccaaattaagcaacaccactcacggactctataaattgagcacgccatgagctccgtagggtagtcaagcacaaagccaccaagtcgtgccctcaattgatcaccagagctcgccaatttcccatttcccccaaacctgctttccgccaccgtgaaagaggcctcgccgtggccagctcgtctcaggtccgctcataccctctgccctttcgttttagtgttcttttgtgcccctgatgctccccaaccccgctaattagactaagaccccttagatcaccgggaac

SEQ ID NO: 117669 - DNA, 486 bp, Zea Mays
atcaaatagaggccatgcagagattcatgatgcagcatgcatgagccatgcatgagttgagcggtgtccagtattgtcttacgtcatgcacgaggggtggttaattccgatccagctacaataaacatatgagctaatgaaccaaatgcctcgaacagcagcaatcaactatgtatctatcgtccatattttgcatcggaaggccaccaaccatctctatctcgttcccaactgacttagatctggcgaaacagtacacgctcagcttcgattggagctacaataaaatgctcgccaaggacccgtcgcaagcgcgtgacgaccttgtagcttcttactcataaggaagcacttctcctagccactagcaatgacttgtgatgctttgtctctcttctctgccacgacgttcatgacgatggagctcatcatgctcatcggttatggcagcactacgtgccacgccgtgcggcatcttgctcacgc

SEQ ID NO: 117670 - DNA, 484 bp, Zea Mays
cataactctcatcatcactatcaaccatttcaatctcaacaccatcggaagacgcaagttcgtcattaatgtcattgccttcaaggattactaagtcattatcattttgcacctcatcctcctcctcatcaacaaccatttcaatatctacgtccattccgatagcttcggttaagtctatctcaaatcacccttctagcccatcttcttggaagaactctccatcatgtgttcgggtctaagttgtaaacttcaacgttaggaacaggtaacctcccgtgcggcgataccttatacacaacatgccaacccttaagatgttctttcgtttgacacgcatatgggagataatacacttgtgtggcctgttgggccacgatatagacatcgtctcctgctaaggtggaatcttgtcgaatttcgactatcccaagattagaatgtgtccgtctcatcacttgagggtcaaaccaatgacatttga

SEQ ID NO: 117671 - DNA, 434 bp, Zea Mays
gcaaggtagaaacataggctaacctcatatgcctatagaaaatgaatgataactgccagttatttattttatcaataataaataaaaacatgaagtaaagactcctaagcatagaagatgatgaagatttaggattcaaggttacttacattagcaaacgcattgccgagttgttgcagcaggcccaccagggagcgcctaacgttgtgtggcttcactgacaagtagaaaccctttaatgaagtgataacgtgtagaagcttcccgttgcaaaccttcaactgggcacataatggaaaactcctttattacatgtatgcccatacccacacacatcaaattgaatagctactacaccaatgcgaacgaactccaattttgctagcgcatccaaatgtgtggttgaatttcacttagcaagctgtgaaccagac

SEQ ID NO: 117672 - DNA, 539 bp, Zea Mays
caaatatgatggacgatattgtggttaaggatgtgcactattaatgtggtataggcaggaagcgtagtcgagagcactatttgatacgtgccatcgctcttatagccacacttaaataccatcaagcattacaaagtacaaactggtacaccggttaccaactatgttgtatccaacgacgtggactccatcgcttgtgactataacaaatatatctgccactaaagcaggatatactcaacattgtggaatgatcgagacatgccacagtgtacgactccacgactatggtaagataagagttgttacccctttgctagatgggacctaccgtccaacagacatgcaagtctccctcctttcttgagctataaaagggtctctctcgctccgacctagtagatcgattcatttaggttcgattcaaagagaagaactaaagaactaggactcggacaaagatactaaatggtatacatagggatgaactagaggtcattagcatagaactctcacaagaatgaaacagaaggggggag

SEQ ID NO: 117673 - DNA, 545 bp, Zea Mays
ctgtgtattttttgcaacaacagggtcaacttcaagacggggagcaaggttggacgatgtcaagacctacaacaacaccttatgcaggcaccaactactttgagtcgaggacgactcaaaaccaagaaggggagaatgatgagtacatggacgtcaactatatggtcaatgcacaatcaatcatagagtccaagctcaaggggagtcaaagtcaagtttattcgcggatctggatcgaattgcaagagtgggtctcatgaaaacggacgcctaagccacatacatattctgttttcgattttctagatatcgttggaaatccaaggagataagatttcaaacccaactagtcccacataaaaatatactaggagctgatgggaatcgtcgtaacaagatggcatccagaatctgctagaaatcagcaacgcctgttttggccctaaaggccttgtacatcctaggattgctcagccaccccattagccaccacctgagtcgaggacgtctccaattcaagagggggaggatgataagaacatcac

SEQ ID NO: 117674 - DNA, 678 bp, Zea Mays
acttgccatgcacctttggaagcccttctatgaagtccatggatatgtctgaccaaatctgggagggtacctcaagaggttgcagcagcccagctaggtggagagcttcagttttgttttgttggcagactgaacatgccctaacccaatcccttaccaaggatctatctttgggaacaaaaaaatcggcccgtagtcggtgtaatgttttctggattccaccatgaccagctgagtgggctttatcgagtatggctggcagcagggatgaattaggcggcacaaagatttgtcggccatgcagaatgagcccatcgaccatccgccatggttcagtgagggtgccatctttgatctgagtacaaatgcattgatagtcttggttagaggtgctttcctgacacaactcttcatacaaatggaaggtggggctagacaacatggcgatcatgtcgtcggtagtctaccgtcgtgacaaggcatctgccactgtgttgaatcggcctgctctgtattccatggtaaagtcaaacccaaatagtttgttgatccactgatgccgaggcactgttgacaatctctggtcgatcatgaattttaggctgaagtgatctgtgcgcactgtgaatcgatgaccccagagatatggtcgctagtgatgaactacctgaacgagac

SEQ ID NO: 117675 - DNA, 462 bp, Zea Mays
aaacaagaagcacaaaggaccacaagctacatacatgcatgcactatatattagttaaattagttagaacttcctggaaacgtcgtgggagctagctgcaatggatctatctcgttccggtagcctatagccattagctgatgtctcaaagtcagaagacatggaccatttaccgttgcattgtattattctggccgagaaatattgaccatcgcaatcgcaagcatgcatttttcactgtcgtcgtcgtttactacttctctctcgatccataatgaaataaagctgacaattagcttgcaccatatattctactgtattactagtcagtagtctccgtcgttgtctgtgtaggcaagtctacaaatgcaactatgcaagccttataaacacaggaaagaattaaagaaggttttatattaaccgtgtgctagagtttcgttgattcttcgtataggtgct

SEQ ID NO: 117676 - DNA, 1296 bp, Zea Mays
ttcctgtaatcttttacgactcatactccttacattctccctttaattaatctcttcaagaagagttaattaaagggtaaagtgaaagattaattcatttgtgttgccttgttttttatatcccttaggagtaaaaaatcagtgaccaacagtgaggctttgcatgccttgaaccgaggcgtacttggtcaaaggggttgtggatgtcgaagtccgatgcacttagagttgtgtggggtagacgttcttgtgagccctcaagagagggtgaacttcttctttgcgtcccctctgcctccgactggtctgagtctagactcgagtaggggaagtagggagtagagtgcgccatgtcggagatgtcatgacgttagctcatggaggagggacaagcgttggcctatgttcggtcagtgcgacagctattcatcatggttgaatagttgattgggacatttgaacccattgttgggtgggtgtagctcgtgccaacggtgtttgatactatggcttcactgtggatgtcgctagagttattgcggacctggacgatggacccttacaaatcacaacagttgataacggtcttttgattttctccttcacatcgacgatgcgatgcacgagatggatccaaaatggaacatctcacccggagcgaagttgatgatggtggcaaaggtaacagccatggagctatccattatcgatgttgcactcgctacctggcacacaagttgttggtgtttagcatcagtaacatactatgggatgtaccacgtagtgtttttgtgttcaccgaagtcgatgatagctcaatggttcgtgtgaggcacgatgggacttaaatatctaaacaagttttggacgctgagatgcataataccctatgtcatgtgttctactgagatggtattgctcttttattggaggttaaaaagtagattagaactaatcttttgctgtgtctatcagtggatccaatcgtttggtaggggtccctaaccaaccttatagatttgatgagattagggttacatggttcaatagatcactattgctatgcttacaactatggagccaactacgactagcacgcaagcgtgtgattctatgttggcttatcttcgcctctacatgtgcggaaattggttatgacgccttcatgcccacgtcttcgagttccatatcatcctctagtcggggctggctgattagtccacgaagcccatttgtccgacccattgaagtcctttaatcgacccatagtctgaatttgtgtcacggggccctagc

SEQ ID NO: 117677 - DNA, 1591 bp, Zea Mays
cgagaactggatcgtcggcctgctccagcccgtcatcgacaacctccacaagcccgattacgtcaacagggtcgaaatcaggcagttctacctcggcgaggagcccctctccgtcaggaacgtcgagcgccgcacctcaaggcgggccaacgacctgcagtcagttccccttccccaccacttagtatcatagtaatgttgtttatcactactagtgtctctactagtatcttctctttctctccaatggattagctattggttccacccaggtaccagattggcatccgctatgccggtggagcacgcatggcattggcactctacttgaagttcaccaaagtaccggtcgtcgtgccggtctgggttcgagattttgatatcgatggggagttgtgggttaaactaaggctcataccaacagaaccgtgggtgggagccgtatcttgggcttttgtgtcccttcccaaggttaagtttgagctttcgctgttccggctattcaatcttatgggtatacacctcctcctccaaactgttagcatttctagttgcaactaaaatttcatcatccctgctgttggaaactgagcatagttggtgccttctagcttgaatgtacttatgaatttggactattgattctcttatgcgagatgcatgactttggtagactgttatatataaacgtgtccttgtaaaacaccatattactttgttctgcacgtaggtctggagctatttctgggatactatcgggtgtttcaggtttataagcagtttttgtaaaacaccatatacttgtgagcaattggtcatgaaactatcacataggttccattattgttacatgtcattatggtcacatagtttttaactattaaatgaaattacaacataaaaggtgcttcttatattaagatcaaaatagtatcaatatcctccatttctctagtatttggatggttggcgaactccttgcaaagtcagaaacctgttaccctttaccaaaaataaatctcttcccaaattcaaaagccactctcaatcataatcagcccgttgataagccacaaataaaattttttaattcaaattgactctttttggtcaacattcagtttcgtgtgtagtagctagtaggtgttgttattatttgtttctgattgtggaccttttctgttctttcttttattgatatttctacagcatcatgtgttacaaatttgacacttggctaactatatgctcacatcttttgcatggacatggtgcttatctccaccagcgattcctgttctgtctatgtaagcatgtttgtctttaaacgttatcactgttcaatgctgtgcattgtgctggtccaacatttattcttagtaatcaaatgttccctacaactcgcagttactgttggtgcatttattcttatcacagttgctatttaggcttttttttttgcaactacaagattattgttgttacacctgtccccatctttgatcctcctaacatggttattctaggtcatgcttggttgcttaattggatatcacctagttcctttaatgaatacgactcatggattcct

SEQ ID NO: 117678 - DNA, 561 bp, Zea Mays
caaagagtgggaaatggtctacggaatctcaacaacataattgagaataagttgatcatccagccttctaattttgttgaagaacgaatgacctaatgactcaggaatggaactttagaaactttctgccacaatgagtgcaatcacagttggaacaacaaaaggcttatcagaaataaagaggcaatattaaataggccacttgtggtgacattggaaccaaattcttccatgccaacgctattgtgaagctcaggcaaaacacaactgtgacattacgcaacccctcaggctataaaattttcagtcatgaagaaaatcaaggatattgtatgaaactttcaaggaaaggctgggaacttctaattatacctaaatggcttttgacttaagcacacttcttcaagcctagtagacctatcatgtctcgaagttcctttcttcgaggaggagatcaactctattgtcacatccttgccatctagaaactcccatgggttggatggtttcaatactaatttcatgagaaagtgttggccaaatatatcattagacttttag

SEQ ID NO: 117679 - DNA, 284 bp, Zea Mays
ttcagattgtgttcaacgccgggtggctgtgcctgccgaatcctaacaacctcgagctagtcgagcgcaggtagatgaggccccacatggtggtgccccgagccaagcgcgtacaatctgcaggaggagaaacatgcctaggctattgttcggctaggcgcgatccgcgtagttgtggagctccacgcgcgcgacacggggttctattgcgttatactctagcggctggttccaagaagaggatgaccctggtgagtggggtccaccaaccagtgaaacggtgc

SEQ ID NO: 117680 - DNA, 567 bp, Zea Mays
aaccaaattaaagatagaatatgttgatttatgatgttacgtcaatgttttcgagcagattttacttaaaaggaatttacaccgctctagcttcaaaagtcgtatctcacttaattgtgttgatggaatgatagaccaatatgtgcccctttgatgccatgtgtatatatttagacaagtgtctgcaatagttgactctaaattaatctgaacatgcacacatgtggcttatgcaaagcatgtggcttcctagtggaccctttaaagaagagagagtaactacgtaacttacaatagaatgctcatttagataagccaaaatgatcctaacaaattctccttttttgacatattcctgccacacacccagaaactaaggattgtgattgatctagattcgaacatttgtggtctttgcattcaagagcacaatagcttcagtttaatcatcattcattccaggcaaggatgctgctggccaccagttgtcatcttttttatgcttcagatgtactctggtcttttaaaagtggcacactcagtagtcagtattgttttagtcatttg

SEQ ID NO: 117681 - DNA, 394 bp, Zea Mays
cggtccaagcctgttcccattttttcaatgtaccagtcctgaagttccagataatcaggtggtaagatgttgtcggtgtttgtttgattgaacaggctatagctgcacgcctagactgtcacactttcggacgacccatattgtactgctgccagccaaggtgagataaaggcctgtacacattggtacggtgatatatgcgacgattcctaaacagagaaccatttgtcgcgctgtgcccgagccaccgcccacccagacgatgctggcccattaccccatgtgtaaatcccatttgctcgctttatcagaacaaaaaaaaagttggccaactgctgaggctcgatggcataagctccatagtctactgacaaacaataaatgctcccataac

SEQ ID NO: 117682 - DNA, 502 bp, Zea Mays
gttgagggtgaagatgcccttctggctgctgatcatgacttggggcaggcgccagtggtgggggtggtgataattatgcccaggaagcttgagagtgacttgctgaagcagcagaagtcgtaggctgttgattgcctacatattccaggatatatggagagtagcacgaagcagtatggcggacctgctttggctgattctgccgtgcctcggcttcagcgatttccttttgcttttggatcatgacctggcatgtccttgttgtgtgacacttgtcctcaccactgaaaaggcagaacaacttctagggttgattactgtaccttcctccactgaagcttctccccctctgcctcttggagctggtggtctataataagtttgttgcatgcccgaagactgtgagctgtgatgactgctctgagcattgttggccctttcatcgttagcattggaattgtggattgacctgacatgcctgggatgaagtcttcctccgatg

SEQ ID NO: 117683 - DNA, 985 bp, Zea Mays
aaaaacattaggacataaaaacagcttatgtcctaaaccctaaatattgaagatttcaatagaagtgacactctgcaagagaaacaatcgttcttgtgtgcacttacatcaatcaggatgtttcaggttattcatgaataaaaggatgctatcgacaccccttctctggttatttcagctctctagataagaaactggtagcaataaagtttatagatataaggagtaaatcaaccttactttcttacaatcggcagtagagattgtaaggggatggcttctctttatttatcagctaggataatatgaggacattgcctggctacccatctcatgtcctactgcaattgtcttagattcacacctgacaccacttattttaataatttgacatgctagagaaagattctgattccagatccagctacagcttccatgttgtctacaacatcacaacctgactgatttggacaccttccataaacagcagtgggtacatataaattcaccaaactccaagacccaactcgctaaagcacacttctacttgggccaaaataggagactgaaaagaactcgccctactcgctccttcttcccctctcctgtctcaacccttgatctcaacacagttgacaccagtacggtgagatgaaggtcatcatgaagatgctaagggctccagcttccagatcgaagtggaccccaccaacaaggaaccaatctatcgctatggttctagttgaacattaatagaactcctggcaagtgattgctagaatacctaaatggtttcctcaaacttagattacagttaagattatattcttatgctaaacaatttggttattgcggccctttgttttgaaatccctactactattaagaaagcatcgtggggttacaggggttcaaacatgcatgcatgaagttttccttttaaatcattttacaaaatgacataaaccatacataaattgatagt

SEQ ID NO: 117684 - DNA, 274 bp, Zea Mays
ggaattctggcacaagatttgaatcaggggctgacgacaccgaggtttcccccaccacaacatttgctgtcttaggccctaccccaccaccacgcactgcacaaatgggcgttggggcaataacatcgccatcaactccttcgccagagccgccgcacgccccaggtaaggagaatggccacactgctgctgggggtgagagttactatctgacgttggggaggaagaagaacccccggtgccaccgcggatgggcaggagattacagccacag

SEQ ID NO: 117685 - DNA, 563 bp, Zea Mays
aaggtcaagtttgcaatgagctcaagaacaaagagaatgggagaatcaagatgaaattgacagcgcgttagatcgacttcacctcacaccaaggatccttcaattgattgaaggagatgcaatttcgggtgtgagatgtgaattgaatgcctttgtttggggtttggtcagctgagaaatcgtggagagagcagaagtaatgaagagagagagtgtggggggtatttaaaggatcccccaaaagctggcagccgttgggagaaaagagccaaaaactggttgaaccggtttacaaaccggttgaaccggtttccaccaggaagatctcgattcactgatctactcagccggagactcgaccggattcaaaaccggttgagccgggaaaaattccggttgaaccggtttcacaaaaatatctgcaacgatttttttgacagctctgactgtcagacatgttagagcaggggtggcagagaaacagtccagaaactggttgaaccggtttcaaaggctgaagagcaagttttgtacattttgaagtgaacaaaggtggaactctt

SEQ ID NO: 117686 - DNA, 737 bp, Zea Mays
ggcagttactgcgtcccggccaccctcgcatctataaagggagctgtgaacctgggtttgttccttccttcccctcctttttactttcgcaaccatcaccgtacggtggttcggcgccgggaggatttgcgccgtggcaagactaccgccagcctctgcatgggatcgtcggcaaagtgttgcgggagtccaccgaagcactgtgagggtttaacatctcgatgtgggggaaatctttgaccaagacatcgggagtttctcactgttgggtggtgccgtttctttccgtggttggagtatgacgcagttccaccgtgggtaagtaactgtgtgacctgttcatttttgccccccgtgcgtagaccgtactggtagtcggtagggattctccggtgggcgctgccgccataggttgggcgcaccgctgtgacttgtaggcgcgggattgaagattacccgtgactcgttaatctgacgatgaacgatggtgattgaatccagggacctcccccctcgttcgcttttgcttcaaaagacgggggcggtggaatgggaatcgaactatcagggattggtgttggctcgcggtccttggattcacgatccaatggccgatgttggttatgggttaagatgtaatctggtgtgtcagctagtgatcaaacgaccgtagttttgagataccccttcgctatggcagatttgcatatgaggccctgggatttttattaatcaac

SEQ ID NO: 117687 - DNA, 1993 bp, Zea Mays
gcttatgctgccaaatgcctcatacaacttaaaaaaagtgtcatcacagcttatgctaccaaatgcctcatacagcttatgttacaatacatggtatgcactaaatgtgatactggcccctgttctcccacatctgatttgcccacacatccctgatagaagcccatgcattattgtcctccatggccactccatgaccattgtttccatggttgtttggctgccaggtagactctagaggtattacctcatcaacaccatgacttaggatccaattatgcaatatgcaacatgcaaggacaagttttacttgagtcttgaatgggtggaaaggtttattgtcaattattcgaaatctattcttcaaagccccaaatgctctctcaacagtcactcttaagcttgagtgcctaagattgaacaactcttttgcatttgtggggtggttcctaccaccatactcctttagatgatacctagtgctcctgtatgggggtaagaatcctgggcgacatgcatatccagcatcaactaggtagaattttcctagaaaaaagtatgaattagatgctattgtctgttctttaagtatgaattaattgatcctagtagtattgttaccttcaggaacttttaacccatcctgcctctcaagtgcatcagcaaggatagtggcatcatgtgcagacccctcccacccagctagtacatatgtgaacttcaaatcaaaatcaactgcagctaatacattctgtgtaggataatgcttcctccccctgaatgcagattgcatgctctctggaactctagcataaatgtgagttccatctattgccccaatgcagtcctatgtgttaacaaataaggtgagatcattgtatcatgaatgcatgcctatgtgttaacagaatcctaagaaattaccttaaaatatgggtaccatcttggactgtttctgattttaagtggggtttcaccagtgggtgccttaatcatgtcagcccttaattcaccaatggcatacaaaacttctttaaaatacctactaactgtctccacagacctcctccaactttggtgtatgaccctaaaacgctggttgtggccaactacatgaaggaacatggctacttgttcctccacactgctgtggatactatctctaagcaggctcctactcttaagcaactcacagagctggaaaaagggggttcttctcatgcgcaacatgttaacacactccacatcattgaagttgtaaattctattcaagttcctgtgcctctcttcatccattgcactcattggggcataagtgatcctaggtcgtgccatttgacactggacaagtctagaaacaaaatatgcatacacagcagcaacaagtccagctgccctcactattaacatgcgcctctcatcatcatcatccatctctagatgcaaaggaacagagccaagtatcacataacagctcaccagcagtaacatgatgcagtactagatcataggcatggcaacaaaataagctcagatctagggaccaaatcataggcatggcaacaataagctcagattaaatgctataaaatcacaggcatggcaacttaagctcagaccattcaagaaatgaagggggaaaggggaggggaaggaatggcgtctgttataccgaacaacaacaggaagaaggacgaagcaccgagaggaagcagctacaaggcgtgaggaagcagcaatccggatgccctgtcaagaaatcaaaaggggattagaaaccctaggtcgcgaaatagaacaaaaaacgaagctccaaacctacaaagcacgaatccaccacggatctgaacaaagaagaagaaatagggggaggatgggaggaactcggcaccagtcaccggcggcgacagcagagcagggcgcgcggaggaaggggaaggaggtggcggtatataacagcggtcacggcgggaaggagggaggtaaccacaac

SEQ ID NO: 117688 - DNA, 467 bp, Zea Mays
aaaaaaaaagctcttttccgcgccaaagttccgctcgctctgcacagcatcccatcccactcccacctcaggcgacgaatctttggtgcccagcgcacacaaacgaacacacaaatcgaccctccaccgctacagagagctagagtggtatgtaagcgtgtaaggtgtaaccttcgtcgcttgtttaataaagctaaagaagacaagcaaggagtaaccgttaaataataaaagccatcatcttcgtcgctcgcttgacgctcgtctcgccacaaaacgacggcgggcacatgcacgcttcggtgtccgatgccgctcgctgtgtagtgtgtagtagtacgcgaactcgtgagacattggagacctaaaacaaaagctgagctccatatcgggttcgtggacgccattattgccgtagcctctacttgccacgctccacctacattcccaaggccaaagaaccccag

SEQ ID NO: 117689 - DNA, 985 bp, Zea Mays
cgggttggacattgtcttattcctttttgtcgcttgtcgttgtcgaatgtaaccagcaaagtccactgttggcttcagttggacgctataaataggggctcgctccgtgcttacccccaacagacttcagtcgttgctttgtgttttctaaaagcggtatttagttgggatggttttgttgcctccaacctctcggggtctcatcggctggtcatggatcacggtaagcgcctagcttcggagtgctcttactagggccggtctaagcaccgcacatcgtaggaaaggtgggtagtgaccaagcactcactcaactcccgcccctccatcgtatcggtgactaaccttcctcacagggcgatgggctcaagcgtcagaggagagatcatatcgctttcgttttctagctcgccgaacggggagtcgaaggttggcccttatggtggcgaacttgcatcgctggttccgtcggccggtgttatcgacacctcgatcattgtcggtcgtcccataacggtcgtgaggttggtttgtgctggcccctaacctggtcgtgttatcttatgccggagagtcgtagctttctcctccctcgtccctcatgtgtcgtcttgcgaggttggtccttgacccttccactgttagcgatggccgagctgcggggtcgactggaaccatctcgatcagtcgtacgaacatccgacgctcgtgacgcaggtcttcaggtgcgactggcaaggtgaaggctcgtgcggcgagtacgccactcgccctaattctcaatccctttcttactctcgtggacgctcagacttatgtttctttttgtcttttgagaagggcatgaaatcgagtttgcggggctgcaccgggaggtcaattcggtgacccgttgcattcgtgcacgtgaagcaagtcgcctatagcgtttgctcgatatttcgagccatgctcggaacatcgtggacctcgacatccatcgtgg

SEQ ID NO: 117690 - DNA, 415 bp, Zea Mays
ttgcgctcgggtttggtttcttcgccacatcacacacctcagtgcttaagcaattgactcagtttcacctgaaaccgtgggcagtacacaaattttcccctcccgtgttcttagctccgccgtgaagaacccctttcgtggccagcgctcttcgggtcagtatttatcaaattacttcttgttctagtttgcttttgatctccaattgctctcaatgccaaccaattgaaattcggccgaagcccatcactggaacgcacacttgctctgtaaaacgccgccatgactaccccctctgtcgacccactctttgattcctattttgccaaaatccaagtgagtacctaacctctggtgaacccgtgaacctttccccagcctcaatttggttgtccacaccgtggtttggtcggaa

SEQ ID NO: 117691 - DNA, 523 bp, Zea Mays
gtgcttcctctgtcgtcgccttgtgcccatcacgatagccagcaaagagagggagggaagagaagagagaaatcgagcagagagcatcgcggcaacctctcactgccactactgtttggggtcgatcaactgggtggggaggttcgcttgaaggggaagatcacgtacgtgggggatttggtgcttgggtgaccgcagtggtgtggtgattgctcatcggaggtcttgcgtcgtcgcaacacccctgtgcgtcgtgggcagcggtcatcctgacctaatcgcaggtaatgtcaccaccatggaatttgccctcctctcctcgttgcgtagcacgttcccgacgtctggtcagaatacctaggtgctgggttggcgaacaacggcatgcctccggcgctcggttcgaacgcaccgccgccctccggtgaggttagacacgaatggatatgcactgtcggtttgtggatgtgcgggtgtgattaagtctagccataccgcttcgacgatttgatctcggtcgtgg

SEQ ID NO: 117692 - DNA, 509 bp, Zea Mays
attaatgatctctagtgtttccttcgtttctggatcggtcaggggatcgaacggtttcggtgacggagataattcagctacagtggaaaaaattaatcagtccgaagccacaaaacagatgccaaagctagatgccgcgaaacaatacctatgcgtctctcgcgctctgcagtttcttcaacttgttttgcttgtactcgggcgtcatggatgtctttctcacttttcttcataatttcatgagccatctctcggccaccatttacccagatgtcattgtaaaatttcccgcccattaaactcgcttcagctgagggatcctttgtatcatccacggagaaggcagcttcggcctaggcagggtcttgacatggtcgcatcctgccttctccaggatggctgagattccccttgcaccggataacgcgcacacatccccgtgatcacttaaaatttcttcaaaagcttcggcctctccacttatccattcaataacacctttagggtcg

SEQ ID NO: 117693 - DNA, 380 bp, Zea Mays
ctattaacccccacctgaccaaccagattttgacctacatcatgtagtctatctcacccataaactattctaaccacattgccccaactccgataatatacactaacctcgaatcaatgagctcaagaccagagaagaaaagatcaacctcgtcgaaaaaggagagaagtcaaactcaaccttcggatgcattaccacctagcaccgagttcttcctcaccataaactttcttaccctggctattcttacccaaacctatccatctcttatatcctacataataagtggctggatacctatgctctacaaatcacccactattgactataaaaaaatatgtgaccctggatttttgaaccaattatagactaaaagccga

SEQ ID NO: 117694 - DNA, 343 bp, Zea Mays
atgtagctgacagtctttattcaagatctagctatcaaaaagcagttgcctattgttttttaatgaaatatgttgcagctttacttccagtattctatcaatgtctgtaaagtatgctaattcaggctgtaaagatgaatgacttattaagaacaaccaaaatttcattttcttatccttcacatatcataagtctctggaattagacaacaagtactactaatgtgcgacccccactgtgtacttatatagagtagaatttccctgaggctctgtgaagtacccaattagccagaagtattgtatactggtgttgtttttcttttaagtgagtgaatgccac

SEQ ID NO: 117695 - DNA, 487 bp, Zea Mays
acatcattggatcttggtttggcggccgagctttacacgaaaccgattttccttggtggtcggtgagaagaatagtcttatctgcgcaccttatgatgccattgtgctgggtcaaccaatccattcctaggatcacatcaattccgtgggatggtagtatggctaagtccgccaagaatactaccccacttaaaataattctgacttgggagcatttgaggtggcatagaaggtctgaccctggggttcgggtgaccaaagggatttccaaagatgcagtggggatgccatgcctttccacaaaactagtagagatgctccagaatcaaaaagcacaacagcgaaggtaaattcgactaggaactcaccgagtactactctaggggcttgctgagcttcgtgggcgtcgacgtggttcactcgaagccctgttgtggaactagttcttgcttaactggctgttggtggagggtgccttggaggcggg

SEQ ID NO: 117696 - DNA, 522 bp, Zea Mays
ctacagtcaagcacaggatcacatagattgaccacaagcacctgaacctaaaaggaattatttcagctaatcaacatcaaccaaacttaatgctaaatatattaactcacaacataacagaagcacaaaaaggcatggccataacaaacctatgatcatgcatttcgtgagaagcaaattcagagtgcaaactttacaggtttgttgtatcacgagatcaaaacatttcccatgattgctgatataccattgagccgatgatggaaatctaagctggataaatacagaagcaacggggtgttaagaggattacctgaacctcaggcaatgggcgttcttggatcagggaatcaggcaacctatttccccaaaccaaaccagcaaccaaatatgggggctgggttgggaggtgggacacatatcagaatgtgcagattaggacagaaatccacctatgagaatggcatgatttaaaaataaaaggaattatttcagctaatcaacatcaaccaaacttaatgc

SEQ ID NO: 117697 - DNA, 925 bp, Zea Mays
gttgggacaaaagctatcatggccgataccaacggtagcaggccacaatcaaatggtaactatgtactctacgtctctaccaatataggcaagcatctaaagaagagtataacacgatctgcaggataaaccatgggtgggtagtgcacacaaagggtgagttgctccatcaactaccttctttcttctgtttcgtcctttgttatttgctttttcagcatctcaagtcctcaaggatacttgcgatttcatgagtaggttgacttgtggctaagaggaacgggtgtgcacatccatgcttcgcagaagcgttatcacagcacaagagggtatggacaggcagggcatatcgcccctgtataaccatgaaaatggctggcaacgtgttatctcctttatggacgcttgctaggccatgcatacatacatcattattcgtggaaattattttagattgcgctatgattttcaagctcgaatttcagttcatctagcatttggttggcagccaagaccgcattatatgttttgtactctactactctgttttactctcgtgacaagaaatgagatccccaatcgacatcagtgaacataattttacttttattattatactaagatatcatcgtataacataaataatacagctaatgttatcctatctggtgaagcaaagctttccaattcgatcacgatgaacataactgctgacaatgtttctttcatgtagatgtctgttgcagtcatgtagaatggtcaatgatgtctgtgcgctgtcagtataataaccctagtgttgcatgatcttagctttcttgcatagagttttatactattaatgtgagcagaaaagtaacgctcttcaagacaccaaagcatcgtgacgggttttctaatttcacaatgtaactgaagggacagg

SEQ ID NO: 117698 - DNA, 775 bp, Zea Mays
tgcttcgattgggctgggagcgcgcgaggggaaaaggggtagtgggccaaaatctatccctggcggcccagttaggtttccttttattattatttttttgtgtttttctgattttttattctctcatctctatttaaattcaaatacagtttgaactctcaatttaattacaatgcatagtcaataaattctagcatggcttgaatttatttattccatttatattagttattcatttgtttgggcaaatgcaacacacatatatttcctttgatgacatgtcccaaatcaaataataaatagtaactcatatttttttcatatattactttatcctttaaaatatatgttcccagatataatggtaaaacaaataaaacaatatttagtttgggagaatatgccaaggtatgtttttagcgtaaaccttttagagagtacttttaaccttatagtgggatgactaatttcatgtgggtctgttttaagtaactatttattaggaaggatatttattttaagggatatgacttcaaaagtttctttaaaaaatattctaactcaaaatctttggaaaattttaccaaattctcaaaatgagattttgaggtgttacaatttccaagatggtatgggaaggggttgcaaagggcctgctaccttcaaatgactagccttgattctctggcaggtgtcacattctgatatatacttcgcaatttccctcttcattctggtccaccagtataaagatctgagatcatgatacatcttg

SEQ ID NO: 117699 - DNA, 788 bp, Zea Mays
caagaatcacaagactgagttacgataatttcatttgctaatcaaatactcggatcagggtcaaaagcaaacagaccaaatcaaacaacatcaactttgatattataggtcgtgtttgagtcgatcgaaatcagacaaacttcatctgttaatgacccgaattctttattgctctgcccggcacaacctgctggggaccaaactccattatccctttcgcgcatgatttcaaagttacacgcacagtccgaatttataaaattcaaacattgtccaaattcacgttcgcccactcaaacgatccaaccgccacagagcctgcatgccaagagattactaaagtcggatcttggtgaattattattattattctttttttaatcttgagacacaaaagcacactggatattatttacactgacattccatgcttaggtccatacatgttgtttaacttaaggcaaacacctggggtgttacaataccctagcaagccgtctgcatcaaagttactcccctacacaccagctttaactttgttacagaggttttagttaaacacccatcaaatcgagttccacatggtcccaaagtcggccctatacaactgttcttttgagagctacagaaccctagtctgatagctcaactttgaaggggtttttcgttaaattcctctaggtttttgggttaagccttttaatcaaacttatcctcctatcatggctctatcatcttgatgtactgatccaggacagaatcctcatggatttaaagatataaggctc

SEQ ID NO: 117700 - DNA, 422 bp, Zea Mays
atcatcaaccttcactcacaagtcgtcgctatccagaacatccagagtctcgtccacatcgtcctcgacctcacctccaacaactactctcgttagcgcgatgagattctcctcgtcgtcagcaagtactccctggacagccacatcctcgacgatgctcccgcgcctaccttccctgactgggcacgcatggattgcgttgtcaagtcgtggatctccagttccatctccccggaacttgctgagatggtcatgcaatgtggagccactgcctgcgtcgcatgacttgcccttgagaatcagtttctcggcaatcgggagactcgtgccctccatctcgacacccagttccggcacttcgtccaaggtgatctatccatctccgactactgtcgtcgtttcaaaactatggcagatgctct

SEQ ID NO: 117701 - DNA, 686 bp, Zea Mays
ttccgccaaatgctgatggagatggagaagtcggcgctgcgtgatgagacgatatacccagaggacctacaggagctcggcctctcgcaccattggtacatgtcgtgactcgcacgagcaagcacgcatggttggaaccagaagaccacacaccaagaccttctaagttcatagttcaaagagagagaaaatctgtttaggatataaaaaaagttgtaaacaaggttatttcgttattttatgtcccattttgtatatcattttgtatattatgggatacaacctctcaccacgatttttttgggtgcgatgtgatagttttagttcttagattgcaaattgcatcaacttgcttttgcctgttgtatgttgtctgatcttcaagtaactgtctcatagctgactcgttcagttacttgaagaaaaaaacaacagtcatttttcatttacccacatgcatatgtttactattcggcatatatatgtcaggaaatctcgaaggacaaaaaattgtgtaagatataaaaaagagttataaacaagcagctttttcgttatttcatcgatcaacaaagctacaaaagttcctattctttactcctttaaagcctcggtttatccataccctagattccactcaccagcctccagcactggttcttcccaatagcctctcaccacgagtt

SEQ ID NO: 117702 - DNA, 385 bp, Zea Mays
tccataatctttttattaaggttgggtacatctaggtgaattaagccagtgtaacgtgacttcacaaagaattgtccatctactcacatattacatcgaaatccatcttgttcatccgatagaactacatcagcaagtcgtggagttagatcgttccacactactaatttatgtcctatcagatctctacaccaagacaaattcaaaggcgaagtgttgaagatgtcagccacactcacatgtttatgtctagctatatggtacaaacaagggtattggtcacgtaggctcgatgtacccaaccagatgtgctcccagaacctaaactgagaaccattccttattgtgaaagtcccaaacctcaaaaagtaatctttcacttcca

SEQ ID NO: 117703 - DNA, 457 bp, Zea Mays
gaaagggggaaaatggtgtcgcggtggttctgggtgaaatttgggttggagattggggctatacggccgtaaggaactatagtttcaccgtgcacattcaatttgggaggagggggcagaggcaacgcgaattttggattgcgatcaactcactgggtggaggtgtgcataccccgccgtggttcatagcgctatttatagccacggcggtctggctagcgttctctggccatggataacttcgttagcgcatgcttaccacgtagggaagagacacagtgagggagatcgaggcatgggtgacaccgcggtgaaagttatctgagtcatggtggcggccggtgattaactccggccacgctcggctcagcacgcggaatggtgccacgtcccgagttactcccttgcgatcatatccccaccgattcatccgagctcatccaatccaacagtgccg

SEQ ID NO: 117704 - DNA, 481 bp, Zea Mays
caaaacgatcggaagccctccaccccttagttgctgtacctaatttcctcttcttggcggccgctctcggcgtagtttcccgtgaagggccctcgtcggccgttgtcatcacctttttcccctggcggacagcagcatcggcatcatcgtcccccgggtagccagcatacggcagacggttcaactcaaagacgcggttcaacctaacatttgaaccgcggatatcccaactcctcagagtctccgtcttcggcacatactttcctacaatcttcgtggcctcggcctccacttcacgcacaaacgcggccgggttgcgacctcgtaaatccaccacaaaggcaggacttcacactagctggccgcccagggtttgcatccgacggggggtcaattcgcccaatacccagccgtgcgccaagggccacactccataggcgataaattcctcaaccaagtcacgcccacaactcaggcgggc

SEQ ID NO: 117705 - DNA, 757 bp, Zea Mays
gagggcttcactcgccgaggtagttgagcccttggaaggcagctggtgcgagatggtgtaataaggtttgattgaccatgcaaatcggctggtggtggcgagggtcttcatgttgcatgtgagcaatttcttattccagctccccggccttttactccgcatctaggatcatttgcctagctctggcctgcatattggttcgttgtctcttggctgcgagtatctccctttgtttttgcaggaagtttttttatgcgaagtgctcagagtttgagttggtcctcggtcgagattcctaggacttcaccatcttctatgatgtctttggctttagggggttaaagcctggcggggcatctcgagggaggtctttagagctgcacgtgcgaatgatgccttctagggtgggtgggttttatgttcgaggatgttggctgtttatgactccgtcgttcttagcggctgcctgaagggcgtcatcagcgagggttgccttgcctttcttgttagagagggtcgccttcgcaacatcttccactgaggtgttggctctggttgtcactttctaaggggccatcgcgggtttgttcttttgtagcacgaacggtgagcataaaatgttggatctgtcctgacacgtggtcaggtgggcccaacagttaggagacaagaggattcagctgcacaacgagacagtaggcagagaactgtagcgtcttgttatgcaggtctcgtctgtgtatagggtaggagtatt

SEQ ID NO: 117706 - DNA, 960 bp, Zea Mays
gctcgacgagatcgtcgctggtatccgcggtgaggttgcaaattttccttcgctggctccccccgcgctaacgaacgcagactgctccatcaccattgacgatgttggcaataccaggttggaagcatcactagcgcctgatttattcctaacgcccttctcgtgaacccccaggtatatttcaatttgatgttcacggactatactttgttcttgcgctttgtactgcctggtttcagtcactatgggatttaggcagatatgaggttggcagcttatatgcatctatgattgaattcaggcttgcaatgagacaatttgccatttatttgttaacatctttacatttatttattaaatgtgttgtgacctttgaaggtatatcttagagaatgttcatgccaagagtggcaacatatcgagaagccatgccaccatgccttatgccaagagtggcaacagacctattgatcattcatgtgatgcacctgctgctattccaactgaggtgccaacaccagtgttttcttcagctgaagttggtttgttgatgtccaccccgaggaaaattaggagagctgtcaataagcttactcccaagaagaagatgcatggcatgtagacagcttcaatggtgaatgtcgactgtattttgtttcagaatatctatggcatgaagacagcttcaacgcatgttaactgaatgtatctgtctttcctttcagttatgtgttgtttcagaaacaaatgtgcatgtgattatgtgaactgaatgtatctgtgaaccgaatgtgcctgtgcaatgaatgttcgtgttaattgaatgtgtctgttacctgttatgttgtggcgtggtaactaaatgtattaactgaaattacagactacatgcagatttaactgaatgtgcctcttactcctatactacacttcaattcggttaactgaaacttatgcttc

SEQ ID NO: 117707 - DNA, 535 bp, Zea Mays
aaaccattgataatagcaaaaaaggaccgcaaatagatgactaaaatggtatcttgctgttgtagtcagcctcattctttcggccctatccatgtccgccaatcattccatatgcatgcatgcatgcatgctgcctttcttcgctacaatgattaggttctgatttgatagatgatagatatattcatgggtgaccgtgtactttaggatgcatgcacgaagcaccagagatttcagagggagtactggatttttcttcccctcaacattcgtgcactttatttatttcccatctctctgtcatctgccgcctctcaatgtgcaagtcgatctcgtgtcccaatcctgccttggtatctgcacacagcaagcacacgatgctgcactgcaccacgtagtactgtactagctagtagtaccaaccaaccaactgcttgcacgtcctactcgaactcgggacacatacgggatccggcctacaatgcccgcccggccaccttcgattttgtttccgtccagccatttgctgcctcct

SEQ ID NO: 117708 - DNA, 407 bp, Zea Mays
tttgccatttcaaccttccttgcttcgttgagtttaattgaattttgagcttcaacattttggcaaccattgtctaaatggctgaggagaagaagatcattgaccccgcgttggccggattttacgaagctatggaaaaaaccaacatggagaaaatcaccaatgagatgctggctggattatctgaaaactccagcgatagtgagagtttcaacgtaaaaagtggaaatgaagatgccgaagattggccatggagaccgagccatgttgtttttggaaagtcgacaattaaacaagggcagatcgaagcgatgagagggagatacattcgtgatatttcaatcgtgagggccgtaggggagaatattgttcctcttcccgaagctgacgaagttgtaatttttaga

SEQ ID NO: 117709 - DNA, 376 bp, Zea Mays
atgcttgtccgaagggctgcgtgctatttaggaaagaatacgcagaggcaaagtactgtccgaagtgtaaatcgtctaggttcatggaggtagactctggtgatggatagaagaggcagctcgacatccctgtgacaatcctacgccaccttccgttcataccgaggatccagcgtctatacatgatcgaggaatccgcccatcagatgacatggcacaaaaatggcaaacaatacaatcttgacaagatggtgcacacatccgatggtgaagcatggaaacactttgatgccattcaccgtgagaaagccgaagaggctcgtaatgtacgtgttgcgctagccacagacaggttcaatccctatggaatgtgcaa

SEQ ID NO: 117710 - DNA, 903 bp, Zea Mays
gttcgattacattgatatcagcagtgactaccataaagatgaatgttttgatgctctttgagtaaaattgggtcaagagctaggggattgtctcaggaattgtctgaaaaaaatggacaacctacctcgtaatgacaatcattcctcctctgtcttcccacatattttattgtggcagagacatcgaaataatctacctgatggaggagacattaaagtattcgtggcataactgttctttctcgtcgaatgtctgtagtacgtacggtgttcaggttgtttcgataaggcatcttgttgttgttaatatttaattttatgatgatattttgtggctgagatttataattgacttgtactagatattggtatcatctggctggtgtggccacagcaagtaggaggcatgctgccaaaaaggcaaactttaggctaccgttctggtggtctccaaaaaatggaaccatgacattcgatgaattggtctgcattttccttgttgatcctcggatgaaatcatgaaagcttatcatttgcaactctctacgttcaaaaaaaaaatcatttggatctctcactaaatgaagcacacatcgtgatggctactggttaacctctgccactttgtagtttgtagtgctgaatatattcaaaggcaatctgtattggtagtctagtacatcaacggatgttgatgtgagggcacttggaaaatggttatcatggtccacatgcggctaggaccacagtagcacacatccctttcagataacttgtaataaaccattggtcaatgctagtgcttgttgctgaaacgtgtggcatttcaatcttttatacagcagtggtcatcgctgtggtgtgccagttcatactctcatccttacaatcagcaaaatctag

SEQ ID NO: 117711 - DNA, 507 bp, Zea Mays
ttggtgtctccacaggaaagttgctagggttcctggttttgcaccggggcattgaagcaaactcggagaagatcaaagcgattgaggcgatgaggccttcgacccgtatcaaggacgtccagaagcttatggggtcattagccgcttcattttaaggctggctgagagggcgctgcccttcttcaagctgttgtggaagtccggctcgttctcttggaccgaagaggtggaacaagcctttcaaaagttgaagcagcacctggtgtctctaccaatactggtagctccagaacctggggagccgttgtatttatacatcgcggcggctgcagaagcggtgagcatggtgctggtcgtcgaaaggatggcacaagaaggccaggaacctgagggctcgggaccggctacaggggtacggaccgttcagaggccggtctactacgtcaacgaggtcctccatgaagcaaaggccaggtaccttgaaacgcataaactgctctatgctgt

SEQ ID NO: 117712 - DNA, 714 bp, Zea Mays
tgagcgctgatgatggcaatgtcgttctgggtgagggctccggtgttgtggctggccggcctcgtcggtgtcgaccacgcaaacgacggcgtccgactagaaggcctagaagcccaacgttgggcaactccctggaaggcgatatgcagcaagatcgggacattattgatccataggcccccaccagtgctatctcaccctgcattatgggttggagcaacaagctatcggcttctgaagatgatctcaggactgcggtggtgttaaccattatcagcgaccttgtgattcctccgatggagattgctgcgcttctggctccaagattgaatatcaatgaaacttcactggtcatccgcaggatctctgcaagtagtctgctactgattcttcctgatatggccaaggcagacctcctagtcattcgttggcctctcatcagaactacttctttttctgttatctgtaagcgttgggcaaggtttcttggcgcctcgggagtcgccttgccattcttggttgatctggagattgaaggcatccctgttcatgcctgggaaactagtacggtggaacatattcttagcccctatgcttggattcatcaggtgcatcaggagaccttggcactgcaagatttgtcctgctttcgatgctctgcttggtgtactgatcagtctactattcctgcttcacgtgacttgtggattgttg

SEQ ID NO: 117713 - DNA, 347 bp, Zea Mays
ggaaagacaagaagtggttggagaatcttaaaaagtgggatgcagaggacaaagagaggatggagaaaagacgagaggagcttgctgccgagcaacaacgtgaagacgaacatgaaatgaggcgtgttgctgaatgcagtgaagagaaggagaagaagcttgagcgtgcacgtcgtgcaaaggaagcaatggagaaccctaatgcattgcgcaagggcaaatggccccgttgcactcaatagtctaggtgttttatttgaagttatgtaataatgaacttattattcggtattatgtattgccaaacaatgatatttggtaatgaattaccttcaaattgatgaaaa

SEQ ID NO: 117714 - DNA, 275 bp, Zea Mays
tgaagatgtggcatttgttcccgatcagataatgcctccatatctttagggcgtgcacgatggctgccaattccaagtcgtgggtagggtagttctgcttgtgtggcttgagtaggcgggatgcataggcaataactttctcattttgcatcaagacacaccctaagccttgccttgaagcatcacagaagatgacgaaatcctggtgtatatctggcagtgtcaaaactggcgcagttgtaagcttttccttgatgatctggaaacttccctca

SEQ ID NO: 117715 - DNA, 524 bp, Zea Mays
tggattgggttgggtaaagccccagatttcacggaagatgaacaaggcacattatggtttaaaaagtgaatctatgtacccaaaatcgaacacctacgccaacttattttgagagaagctcatgattcggcttactctattcacctgggaagcacaaagatgtatcaggatctaaaggaaaagtgttggtggtacgatttgaaaagagatgttgctactcatgtttcattgtgtgatgtgtgtcagcgagttaaagccaaacaccaaagaccagtaggattactacaacctctcaaggtaccagaatggaaatgggaagaaatctatatggatttcatagttggactaccccatactcgggatggctatgattcaatatgggtcatagtagacagattgactaaagtggcacattttgtacctgtgaagacaacttactcaggagcccagttagcagagttatacatgttgaggattgtttgtctgcatggagtaccaaagaagatcgtatcagaccgaggaac

SEQ ID NO: 117716 - DNA, 439 bp, Zea Mays
attaggtggttagtatttagttattagtatctagctagttattagtgggttgtggttaggcaataaccatccatagtggaaattgaatgtttaattcgtgtttcaaatagatggacaattttttgagcttatatcatggaggcaatgtggaagaagatccctatggaaatgccaagtttattgacatgagacacgtgcccgtgctatttgttggtagaccctacttgagtgatgtgtttacaaaggctaaacaaaagctaggttaccatgaagatgatgacattgcggttgacgaagtgcttaattaacattggtcatccaccaaatgtcataagacgagtcatcccaattgattctcaactagattgggagaattatgttacttcggctatgaagacccagttgcaactcatggaggttgtggtgcagtgggttgtag

SEQ ID NO: 117717 - DNA, 295 bp, Zea Mays
gcaatgccaatgcttatgatgccatgctcaagttttagttatagtaacaccaggggtgttacatttcgtcctcttcttcatcatcctcatcaacaacacggacagcacacccattggggtcagcgtcagacgggtcacacccattggggtcagcgtcagtaaaatcaggcacgggcacttcctcagcagcaggagcagaaggaccagcatcccgatccaagctagacactcgtcgaagacgtctcttcttctttttctgcccatcagcaggagaagcaggctgattggctcggca

SEQ ID NO: 117718 - DNA, 493 bp, Zea Mays
catgtaatctgtttgcgttacatttcgacgaaccaaacaccatcttagtgtaatagaaccatttcttagatttcgtggttgtttcccatcatgaagcttagtgcttcctgtggtgtcatggtttcgtgctgtttgtcttttgcatagagtagtagcatgattgacaggcctgattttgcggtgtgctggcatcaaggcacatggggacatatgtcagctagtattttactgcacttgattggcttgactctatcatttcggtggtcagaagaccactggtttgggaatattcaaactgtttgggatctttcaggctcccggtagttgccaataagtttggtcctacaaaaaatttcatatatcaatccaacattatctatcaacacaaaatggagcagtgtaatggcaagtcaacccatgtcggaatactcttgtgatatttcagttctacactatgaatgtagagtattatagtttctatattaaacattcc

SEQ ID NO: 117719 - DNA, 375 bp, Zea Mays
ctagtcagggaacgatgcctcgttgcctcgaatgaggtttgtcgtcccaaaaattgtggtagctttggccttcctacagaatctggtgattcaacaaggttcttagtggctctcatgttcgttgggtaaaatggtgcttcggtggttctgatcccaatcagtttccttgccctgttgctcccatatacattgggcgtgtcttcaattccctcgtcgatctccttaggtcatgcaccttcgttgttgtgacttctttctggcttgatagttggattgttagcgacccttgtgtgtctccttctcctccctcttttctcattctgtcgagcctaaactatcggacaaaggtgtccttagtaataatcttgatttgca

SEQ ID NO: 117720 - DNA, 350 bp, Zea Mays
gtaaattttcagctttgaagaagaaacccgaagcgaaggttgttcaagctttggaagagccaagctttgttgaattacctatttcttgagggaactcccctggcaaagattgcctataagccgaaggaggctccaacttcagagattttttggagcacgtggaggaggatgaacacatagctccagtgatgagcgtgttctttttttatggagaggaggaggacgacgaagatgtatctgagacgtagggctcagagggtgcgatgcgtctttaggggacggtccctttgacaaggaattggaggccaatggtatagagttcaccactcgaccagaaaagaaatgcgcgc

SEQ ID NO: 117721 - DNA, 387 bp, Zea Mays
tgacgatattctggtgtactcgaagaatgaagcataacacgctaaacacttgcacatagtactccaacgcctgagggagcaccatctttatgtcaaattgtccaagtgtgatttttggctgaaggagattaaattcttgggtcacactatctttgagggaggaatagtttttgatctagataaggtgcaagaggtgatgaattggaagccgccaacaaatgttcgtcagattcggagttttttgggattggccgggtattatcggtgattcattccggatttctctcgaatcgctaagcccatgacagaattgttgaagaagggagccaaatttgaatggggccagaaatgtgaagatgccttccacactttgaggtaacatctaac

SEQ ID NO: 117722 - DNA, 442 bp, Zea Mays
agtgctacaattatgccatctcacttcgttttctttttgtggcctgataataagcctagagggcatgttgtacttgttcaacatcatcactttaacgacgttgaccacgatagggcattcgtaagggcgccctatgttctactttgtttaattatgaaatcggctctatttttattataataaaacgtcatttttatctcaactaggagtatgtaaaaaaattaatatatcgctgaattcgtaagatgctaacggttgtgtaatagtatttatagtacgagcagcgaccaaatgattgtcgataatagtatttatagtacgagcaacgaccgatccgtagttcccgttacagaagcaaaagttgaagagcgttttgtgtggtaaagtgactgtatactaaatagcagctgacgctcaacattaatagtgccaacaaattagg

SEQ ID NO: 117723 - DNA, 633 bp, Zea Mays
ctagacttcacagaagatgagcagggcatgatctggttcaagagcaggatttgtgtccataagattgatagtctttgtgagaccatattaaagaaagcacatgactcagcctactccattcatcctggcagtaccaagatgtaccaagacctgaaacaaaaatattagtggtatggtctaaaaagggacgttgcttcacatgtggcagtgtgtgatgtttgccagagggtaaaagttgaatatcagagactagctggattacttcacccactcaaggtacccgagtggaagtgggaataaattggtatggacttctttgttggtctaccccgctcttctgctgggtatgactctatttgggtgattgtggatagattaacaaaagtagctcacttcatccctgtgaggactaattacatgggggcaagctagcagagttgtacatggcccgaatagtttgtctacacggagtgcctaagaagattgtgtcagaccggggatcccggttcacttctcggttttggcagaagttgcacgagtgcttggacacaaagttgaatttcagctcggcctaccatcctcaaaccgatgggcagaccgagagaaccaaccaagtgctagaagatatgttaa

SEQ ID NO: 117724 - DNA, 356 bp, Zea Mays
gacggtgcaagcatcgaggttgatgaaacactaataagatagttttataacagagtgtattcaattgcatacttttcagtactttctaggcttaaaccaacaaaaaaacattaatagtctaattatagcagtagagcttgacgaaactccaatccacaagcatccacaagtagtgaaaaataaagtaaaagggatatagtagtttgcatccttaacacatgcgaaatagcaacaaatatcataaatattctcaaacccaacccgtccactcagaatcatatcttatatctcaccactcatcatcccttacaacatcctctgtctcttaagtctaagcgacgatacagtcttttcgc

SEQ ID NO: 117725 - DNA, 388 bp, Zea Mays
tttagagctctgtagatccaaaaatattaagaatttgcctagggtcagcacatcaaatttgtagagctatgtaagggtaataagtttgctatagggattaagccttggtcccatgaaaaatttggagttaaatgagcccaaagtcgagctgtcagactgccctaagtctgaattcagactgacaatgggattggatgaacttagggctcaattctaagcaagatcccgtgactttttgtgggtgcacaatgtagcaaagttggagctggtctattaggctacaactttgctgcagagcattgatctagttaccatataaaatcgggaggaaagttcgccccaaacatggtctgatagactgactgaagaagaatctgatggtaaagtg

SEQ ID NO: 117726 - DNA, 886 bp, Zea Mays
taacttgtgattattatgtatttaaccctggaaatctatagtaaagttgtaggcctatagttagtgaacaaaattgtttaagtaaggtggacatgtccatgtttggaaattggagaaaagagggggttaagatggtcctgcagtcgactgaacaagttctgggcagtccaaaagatttgagaaaaatatcccagcccactattttttctagctagttctcagcgatatgcaggtaggaatgatctggtgttagaaggggagtaacttggggtaaaattttactgcccaggggaaataaagaaaacaaatttgaagcctatcaagggggtgactcagctgtgttattgtggccctgctgtccaacatgcagtgggggtgtagaaattccccctgtgccttgtcctgcatggtggccatgcagagggagttggggaacatattagtcatgagttagccctgtgtatgttgctgtgaaagcccagaaagctccggtccttggttgcttgccatggatgtttgaagcccaaagactgaaattttaacatgccctgtcggttctatagtttcttcaccataccctgctaatcttctacgcttaggccacctcctcaaccttttccacacctctggttcactatgaaagtttaaaactgaagcaacctctgccagtggttaccacaccagccgattgtcctccccaccgtagctagcttcccctagaaggtaacaagctcgattttttcgtctttcgtaatccctatgtggttgtgaagctcatagcgttgtccttttgaacgctaccgtagtgctccgtccagaacatcgtccaagtcttgtcccgaacgccgccgcggaccatcttcacgtcaaccgaccgaaccaaccc

SEQ ID NO: 117727 - DNA, 547 bp, Zea Mays
acatgagagaaccaaggacaacaatcaaatccattgaaccaaatggatatgccatttagagataagttgataaaacaagcgtcatgaccctcggagaaggggtacgagaatgaccagaaatgagagattttaagcgaatcaacatctgatacttgagaacgggttgtagcagataaccagataacggggcagaatcaataggggatcccgagattcggatgataaaacaaacatgattcacaacaaaaaggattaccagatctaggtgaaaacagaggtagtcgcatgagatcgattaggatgagcagcagaaaggttatgaagattcgggacaggatctatggaaagaaacatggccttgatagggtttgtgcgactagacaccaaacaaccattttttgacacaacaagtgcacaagaagattggggttggtctagcggtcaagctgtgggggtctataagctgtgcaggtgcattaccaatagcgcaacacacaggggctagaaaacaccaacacaagcatgtgatttgatttttttagtgttt

SEQ ID NO: 117728 - DNA, 1028 bp, Zea Mays
tatccactgacccacgtgcacttggggacgtcggtgatgctcgggttcgtcttggggcctcctccttgctcctcgagtatggcggcatcagggtcgaccatagtcgcgtcggtggcacctggactatcgcctccctaggattcaacaagcgtcgggaacaactcggagctgccacgttcgaaggcgtatgctgccatgaatgaagtggtgtccgtgatgactctgcatggccctggaatctttagctttacgtatgtatagttgggtatggccatgaaattagcatagcatggtctcccaaggatagcattgtagcatctcaggaaatccaccacctcaaattgcagttgttcagtgcgaaagttgggggtccctgaatgtgacgggcagagtgatctacccaagggggttggcctggtggttagggatgacgccatggaacaacgtcgagctagggcgcaacgctgagtgcaagatgcccaaacaatcgaaggtcccgatgtacatgatgttgagaccgcttcccacgtccatcaacaccttggtgaggcgctttgatcccacgatcggtttgacaatgaggggttaggtcctgagatgtaggatcatgtcagggtggttgtggcggttgaagactgtcgggattctgaccaccagaggtatcgtgggacgacgggctccacggcgaacacctctcgttgagctgccttgcggtggagtctgtcaccttatgcttctcccccactaaagatcatgagacatcccgtgatttcggggatatcttccatgggggtttcttgttctactggctttgtcggctcttcctgcttcgccttattggctgacggcttggagatgaagcggttttggagttcgcactcccagagtttgtggcagacaaggaagtcgtgattttgacatggtgaatccgtcaacttctagaaatggtcattgttgttctttgttggtggcctgggcggcggatccactgcagcaacttctccgtccttgatgcgcgtggggtgata

SEQ ID NO: 117729 - DNA, 707 bp, Zea Mays
gtcggggaagtggagagtggagtgcgtcgtgttggagacatcgcgtagctcgatcggggcaaaggtgttgtcgtagatctgcgcccgggcgatgtggcaatgacctggcacagtttggtcgtcgatcgggatgcttggacccaaggatgatacagtgtggctcgttctagcacaacagccaactgagatctagccgcagctattgctggagtcattgcatgcttggatatataaggagcctttcaaagttagggcagcaaccacctgcccctctgtccttttcctcacatcgatgatgcggtgcgaggttccgctctgatcgacaaagtaggagattgatccaaaatggaacatctcatcaggagtgaaattgatagtgttggtgaagatgatggccatggagctatccgatgtcgatgtcgtcacccctacatagcacgccagttgtcggtgtttggtaccgataaaacactacgtgatggatcatgtagtgcttttgtgcttgacgagatcgaatgtgactcgatggttcgtgcttaacacgacgcttgacgaagatttatacaagttcgggccaccggaatgtgtaacaccatacatcttgtgtgctgagtagatgattttgctacgagttcgagattacaaagtgtttaaggagtgaaaatgctctctcgtactatcagggtgctaatcattttgtaggggta

SEQ ID NO: 117730 - DNA, 455 bp, Zea Mays
caggtactcctttgcaatcactcatgctcgttggacagtcacatcggtcactgtttgccacctgtagtgctggtaagaacgttgtaagagtggggtaagacgcttcataatttgtattccaccaccaccaccctgagagatagttgtagggttcacattgtttgttgcctttttgtctctgttttgtgctaacaatgacaggaccaaagaaccaaatggacaaggacaaggggcctaagcttaacgacgatgagtgtatctctcagatggaattgaaggagatgatgcgcgcgatgactgaagcttttaaaaaataccaggactctgcggcgacatcctatgagcagcttgatcgaagagttgctgaacttgttacacgcatggacgtactggaggctcgtccctcaccaccaactccagccccagctcactctcctgtggacgacgacaacgac

SEQ ID NO: 117731 - DNA, 559 bp, Zea Mays
aaattatcttatcctcttaaattgtttataagataaactagaccaactaaaagtacccccactagaatatatcaaatagatccatttttatcttaaaagattctctcttatcttaaaagaatctctcttatcttaatagatgatagatccatcttatcttaaaaaaatactctcttaccttaatgaattcattccatctcgaaaagattttcatctcatcctaatagatctaattaatctcaaaagattctatctcattcttagaaactcatcttgtcctaataagcatacttatccccaccactttgcttatctagtgacagtgtaacaaacatgatctattccaaaataaattaagtagaacttatctagtctaatctgactacaccaaattaattctgatcccatctaatttggtcagatccaacctaatggacattacatgttagataatactgataaaataagattggatcatactcttgtaaatacgttttaatccaaattggagccttagtccaacctagccagatgcaactaccttaaccacccgatagtt

SEQ ID NO: 117732 - DNA, 1085 bp, Zea Mays
atccgccccatccagccaccagtttcgcggcggagggtggaggtggaggatgtcggcgacggtggaggagcagatggtggtgaaggcgatccgggaggagtgcccctgggagtcgctccccaagcgcctccagtccacgctccagaccaaggacgagtggcaccgcaggtactcacttctttgctcttgccctctatggatttgctctgctgcatttctgatgtaatcagctacgcttagttttgagctctgatagtcctagtactagtagacgccaacgctgtgtgaaatggctgctcttgtggcacttatttggatctcgttctcaactactccctatctaaaaaagtcaaaacgtctaataatccggaaccgagggagtagctgttttgaggtcctcaattttggccgggacagttgtagtcgtcgtctagcaggtcatacggtgattcattggctcgtttgattactaggtctcttggtgttactctttcctaacaaggacactgttggagtagccgaattgaactatgagcgccttgattggataattctgcgacttgaagtgacttaatgtttcctaacaagtgacttgaaagcaaagtttggttaattgtgcaaccttagttcttactgttttgttacatacattgcttgctagcctgctgggtgctggctactagtgatgttttactgcttgaaacataggtggcacaacatttcttaacaggaaagtagttctatagcgccaaacgatttccacctcggggaaatacaattaaagattcactgtttcataaaataccactgaaaatcaatccattctcgaaaataccactccgctaccttttgcagttaactggaaatcttcctctctattgtctaagtgaattgtcatttctacctacatcttccactcattctccatgcagcagcagcattgttggccacacgggtatgcttgtggtgcactctcactgccggccacggtcacgttgctttaccaggtattggcactcacatagggatcaaaacagttggtgaaatcccctcacccggtctcaatttcatatttttatgtggaa

SEQ ID NO: 117733 - DNA, 363 bp, Zea Mays
aatgaattaatctgttataagcaaactcaatatgtggcaaacattcctcccacaacctcaaattattcttcaaaatagcccgcaacatggtagataaagtgcgattaacaacctctgtttgcccgtcagtttggggatgacaagtagtagaaaacaacaactttgttcccaatttaaaccacaaggttctccaaaaatgacttaaaaacttagcatccctatcagaaacaatagtatttggcacaccatgcaaacgcacaatctcaatgaagagcaaatcagcaacatgtggagcattatcagttttatgacagggtataaaatgtgccatctttgaaaaacgatagacaacgacaaaaacac

SEQ ID NO: 117734 - DNA, 994 bp, Zea Mays
catcagacagtctgtgggcaataatgtgtcatggtgtagtgagaccttctcaaatacatcgtgttaagttagcaaaggcgaggttttaaatgaggcggagccttgtaataaagtagcgaaaatcccccaaccaatgccatggcctaaaggctccttaaagctaacagtcagcaccaaaggcagtcactgccacgacaggtagggcccgttcacggtgtgcgacaagatggatctgggtgaaaaaatcgcctctgggtgcaaaaccgcctcagggcaacaccagattaaaataaaatgccatgtgcaaaacccgctcagggcaatgctagattaaaataaaatctaagcaaagatgcctcagtgctcaaatgccgcctccaggtgcaaaaccagctcagggcaatgccaaatttaaataaaatctaggcgacgacacctctaggcaaaaaagccgccagagggcaacaccagattaaaataaaatctaggcgaagacaccttcgggcgcaaaaagccacctcctggtgcgaaaacacccaatgtgcaactaacacgacgccatattaaataaaatctcgacgaacacacccccatgcacacaccatactaaataaaatcattgcaaaaatgcctctgcatgcaaaatagatgcccacggacgacccttgatcaaaacaaaacatttacaacaataatcagaggtatgaagtctcttaggagcacagaaatgaattacagccaaataacacctgcgacgtgggggcgcccatgaacatagagaaatgagtctactctaaggttggcacctgtccccaatcggcaaaggggggagagggcaagatttcacttttatttttgtctatcggagacaaccgcaagcgttaccagaatacattcagtacaaattgctcttagccttgacaatcatcattacatattcacgaggccccgcaatcaaggactcgggggatcctccttcggtataagaccagcc

SEQ ID NO: 117735 - DNA, 638 bp, Zea Mays
aagaaaaagaaaaggtaacgcccgaattttggcgagtaaagaaagaaaaaattcaactgcaaaaattcggggcgttacacatacaaacccccttgtctgtttccaaataggcaattgtgttcttccttctcctcccattagcatagagatgaaaaaatcttgagttggagtccccttcaacagtccattttctaccagccctttgctgccagaacacctcatctgaatggtaaatatggtcaagctttttctccaccgcgaatctttttgtccagttctcccagagatttacctgatcctctatcaatacatctatctgatctagctcctggataagctcatttttctctttatttttacccccaagcagcatcctatgccaccatttgaggaacctcctcgacaccgttaagctcttgtgccacccttcaatcgaataaatgccccaggccggttccctaccttctcgatccatttttctttgactaactcttcaaacccaggctgcaaaaaccagttgttctcaaagtagaagtaccttggtttggtatgggcttgatccccggaatcaataataataggattatgatcagaccccaccctagtaagtccacgtgcagaacaagagggaaatttct

SEQ ID NO: 117736 - DNA, 446 bp, Zea Mays
agacaactggatgaatgtatattttcattttatatttatgtatgccgacatctacatttatgtccttgatgttcactccaatgtaactgaaataattaatgaatttgtcagtataacttatacacttggattgctttttatatataacgttttggttgttagatcatacctgttttaaaggtgacatatatttcaaagattgtttatatcattcatgcaaagttacccttatcctcactgtattcaacataaagtatatcgaccatcctcctttcaatccaaagaaaataaccatcgaatcaagccaggaagtcttcactgttgagatccctcggtttgggaataatgccaaaaacccaagtgaggcccctgctccagctgatgatgacccaaaacaaatgaagcaaacttatgttaggcataatacaaagcgggctacaggtcgt

SEQ ID NO: 117737 - DNA, 540 bp, Zea Mays
ctgttggcctacaccagccatgatgagacatgtcaccgcagaataccatcccgtctaacatcacaacatgtcgggcgaacatcgaggggccagcttagataggatgggacacaccctcatacggccatgaacatctccaacactgcgatatggggcctgctagggtctacgacagagttagagtccccaaatgagacacgacagtataacccaccataccgcgtgtgtgctcacgcaagcaccaaaagacgacgtcaccagaagaacttctgtaaatgacagaccccactcctatcggctgcaaacaacccacctctttgtaaaagtccttccccttgaactataaaaggggtggctgaactggaaccagggcagagggtgagctaaggaacattcaatagaagccttcgtgttcctcgctctttcagtctcacgtgtaccccttataacacatcctcgggcctccaaccccaaagagcaatacaagatcggtgctacaattttgaagcgagtccgttataaaccctaacgagtccgcac

SEQ ID NO: 117738 - DNA, 365 bp, Zea Mays
cagccatttagtgcggtagccaatcacgggggccttggtatctttccggtacgcaaaattatagcatctaaagttcttgtgcagaccatctgctctagctttcgtctaataatgaagttcgtgcacgcgagagaacccttcggcattgtcactttttccttggcttcagagagcccatatgtaaacgctaagcctcacaatagtgttcggggtcagctgatggagatatatctcaaatctctttaaaacttcccctatcatatcataaaggggaaccgaagccccactctgaagaagctcttgaacacaacaacatcatcttccttcggctctagaattacttcttctccagcaaagcgaatcag

SEQ ID NO: 117739 - DNA, 444 bp, Zea Mays
cagaagagctccaccagagaaaagtcgagtcttagcaaaaaactaaggagactccacaatctagaagaacatggaccaggcctttgcaacctgactcagcttggcaagaccgtgcccagtcccaactacacaatattgcaaatcagctgcaaacaggagataacccccctcgtcgtcaagattacccccacaacaaggtcacggtggcaacacgaccaggggcaggggccgaggacctcaacaacagaaaagattctattatcttttccgtgacgaagacttagcacacccaaccaaggactgcccagagactaaagcaacaaaggaccaaatggctagggccatgctagctgatgaccaaagagtcattgctcacacctaccaaccccatcaatacaaccaacatcaatttcaaaacgaacaccaaagagtcgtcgctagaaa

SEQ ID NO: 117740 - DNA, 333 bp, Zea Mays
gcacattgcgctggcccccgtccggtactccgacaaccctgctccaccaatggcagagcagggcggctgggatcaggctggcctcatagccgcactgaaccagatgtccctccaggggtcctctccttgggtcctcgacaccggcgccacaactcacatgtcgtcttcggctggtatactcctgtcccgtctcccccctccctcattaggcatcacagttggaaatggcaccaccatacctatcaccagtcgtggcacatccacactctcctcccccacctctacctatcgtcttaacaatgttctggttgcacctgcatttgtgcgcaatct

SEQ ID NO: 117741 - DNA, 272 bp, Zea Mays
agcacaacaagtgtgaaaaatcgaagtcttcagcgaagactatccgtgcaaaagtcgcctaagggtgcagccggactagcacaacaagtgcgaaaaatcgaagtctttcgtgaagactatccgtgcaaaggtcgcctaagggtgcagccggaccaggcacaacaagtgcgaaaaagactacaccaaactatccacgcaaagaccgactacatacgcgccagaccgacataacaaatacaccttcgtgagcatagccgaatgcacgaaggcac

SEQ ID NO: 117742 - DNA, 275 bp, Zea Mays
gcgctatcataattgtagatccttggacgaaggtgcttgtgttgagacatccactttgctcttgtctttgttatagatcttcttcccttctcgtatgataaagcactttagagtattcatctgcctgtctccgaagctgagcagccaaaaacagcttctgcttttgtatctccatctgcctttgtatcgcttctagtccctcaatctttgcatcaacatcatcctactgaaccaagagcctcatatcttttctcttctcctgtcttaagttgcta

SEQ ID NO: 117743 - DNA, 342 bp, Zea Mays
gcagcaggtcctatggtccacagagcaattgtctgattggtttgtcggtgacgatggctacaagctcttgcagtatgtacactgttcaatcaggcatgagacggagaggcgttgataacaagcaatgccttgttggaattagccttgtggtattttcatcatggataactgcagtggatggaaaaagctaggtgcgctagaaatctgaacattggaaacttttgggtgctattaaagtgtaccaaaaccttttggtgctattttgctgaagtcaggaactttgggtactatagaacatgtatgtcaagctgcttacaagttatatttttgtttcttgttata

SEQ ID NO: 117744 - DNA, 461 bp, Zea Mays
cctttcctctaacagctgtgccacatcaactacatcatcagatagaatttgagggactgctgcaaacggagggtcataaccatacatcactttgaaaggagaacaagctagggaagtgtggtatgtggtattgtaccaaaattctgccaaaggcaaccaattcttccatttagtaggttgggcatgaactgcacaccgcaggtacatctccacacattggttaacccgctcactttgaccattagtctgtgggtgatatgccatgctcatattcagcttagtgcccaacaacttgaataattgactccagaaaatacttgtaaagattttatccctgtcactaacaatagacctcggaagaccatgcaatcggaccacctgatccaaaacaacttggtccacctgtgcagcagtgaaagtgtgtttcagagctataaaatgggcatacttcgagaaacaat

SEQ ID NO: 117745 - DNA, 693 bp, Zea Mays
tttaatagttgcattcagcaaatccaagaaagttgaatgtaacgatggaagatcaaaacaaataagctcttgatgcaatgaagttgtagaagggaacagcttgttatgcaatgatccatcaactaacagcactcttcgcatcaaagctatcaaagcatgaattggaacattgacctttttgacaataaaagagtagaacttagaaattagaataaattaaatttataccttacactagtaagttatgagcattaggtgatatacagaaatgttctgattttgacaaaacctgaactggataataactagtcagcatcacgctgcagcaaagcgtaagagctgaaatggtaggaacagtaaagacacgaaatttcttcatgatatgcacattgcctccaggcattacttcatctcccaatgttggtagaggatcagttccaggtggaactagcagcagcataatatcatggcctttcttttctgtaacagtagaatgggtaaaaattaacctgaaatggtagaactgaaacaatattaggagcaaactgctatagtataccttcttcaagcccaatgaaagcatcattcaaaagattgtttaccacaatcagtatcctccgaatcatcagtgaccaactgtcctcggacactcggacagaaggtaacaatgctaaggttctcgcaaatttctgg

SEQ ID NO: 117746 - DNA, 644 bp, Zea Mays
ctatttcaagcccatgttgaacgccttcttaatacaaaaataaaagtgtccaatctcactggggtggggaatataaaaaattgcacacccaatttttcacttccttagggatttctcattgtgtttcatgtcctcacacccatcagcaaaatggcagtgatgaacgcaaacatcgccatattgtagaaaccggtctagctctcctagcacattctagcatgcctcttcgtttttgggatgaagcctttttaacatctgcctatcttgtcaatcggcttcctacccgtgttattgacaacttgtcacctcttgaacgtctttttaacgtgcctcccaactatttgtagcatcccaaaaatcctaacccaggtttgaaaccctaatctaccctttcccctcctttcatcctctaattccaaaaactcccctagattttctttcatcatatgcatacactttgtttgatcacaagcacctcacttagactctattttctaacacctagactatctacaaaataaattgttcaaaagaaaaagatgcaaaaagggaaatgggaattagaaagtaaaaagaaaaagagaaaaaccctcccctccccctgttggaccgaatcccggcccaaacccgcggcctccccttcc

SEQ ID NO: 117747 - DNA, 478 bp, Zea Mays
cctgagccctgctctgattagacggggaaatggtacgacaagccaggagacttacacaaagaccaagagaagatattcgttctccatgaaccgccgctccacttactccatatctagcaatagattactgggcccacttatcggggctcagtcacatgtacgtgcctcccttggactataaaagggagggcacccacacggtagacaaaggaggaaagaggacctgaggagactctcacacggactgacagagactcccaagcaatagaactcacgatggatatagggtattacgctcgacggcctgaaccattctaacccatgtgttctcgagttcatcgaactagccaggcaaattcctaagcccccctcctcatcttaggatcagggcgggtgcactccgccatccgaccagaggattttctctccgccaagatgattaagtaaacaaagagaagactctaatagacgaaaactt

SEQ ID NO: 117748 - DNA, 464 bp, Zea Mays
gtcaaacctccccttggacgtgtgcttgtaggaggtgtactcgtgctttcccttgcaccaaccagagtggtggtcacacttggaggcctctagcttaccattcatattggggcagttggtgttgaagtggtcagagtcactgcagttgaagcattcatccttgcaccctccacgccaccggttcaggcggttgttgtggaactatgtgaactaactggcaacaagcgccagctcctcatccctaaggctctccacctactccttcgggatggtcaacaaagaagacaaagcaaacatagcatgtgaagtgttagaagaagagccacctatagacactagggccatggtaggtgcactaggggtctcaatcatgccccgggtctagtagtcaatctgtgtggacttgagcttgctgaaaagctcatccatagtgtgagtctcatagttgggcgactcgaggatcg

SEQ ID NO: 117749 - DNA, 702 bp, Zea Mays
ccacaattacgacatctttccttcggcctcggtgttccctcggatgtcaggttgacgacaggatcctccttgtcactgcacccgctgcccttcggtttggcctggttagatccaccttgtttcttgcctcctcctgtcaaggatgactcaagggtaagtctctggcagtactttgacagccactcctcctctaacagcatgaggtgccctatcttttcgttgatggagtcgatctcgaatcgatcttcaatggcatgctactcctcatttaggatgagacacccccatcttcttggtgatggagtcgatctcgaatcgatcttcagtggccttcaagcttccgaccaagtcttccaccgtcaatgtctttagattgagtagaatctcaatcgagaatgcgataagggagtagcgcttcgtgagcacgcgtaacatcttcataacacaggtgtcattgaccgtttccccgagcccgtgcaggtccttagctagcgtattgatacgtagcacgatgtcatctacacgctcgacattcttgaaagagatattcttgaactcatgccataggcactaggcatgggcttcctttacacaatcagcccccccacacacacacatgtttttcatcgcctcccacacctccttaaccgttttcttactccccagcgtcgcccgcatcttccttggcacagaacacaggag

SEQ ID NO: 117750 - DNA, 567 bp, Zea Mays
gccggaatcaggatttggggagaaaacgccccgtatccaaatcctgtccatccgatcataatgaatgaccctgattaagtgttgaatgccttcgtctggattagatccgtgccgttgaagttagatctgaggggtgagtgttgatcgcgattcataaaatctagaccgctgatccccaatccaacgtgcgttgttagatgccagttccgtgattcacagcactgttttgggccgcctgtttctaattagacggctgtgagcccatcgtaccccttcgccatgcccgtttcgctaaagagtccctgaaaaatttagtaataaacccgccatccaccacgggatacttctaagtctcgggaaatcttttggtttagcccctgcatttctatttaattgaggcacagtcctgagggcagggtaaatcatataagtagttatagaaattgaattttagtgcaaaaataaatttagaaacttgattaactcatagaaaattcgtaggaactccaaattaatccattctagtttcaataatttgtaagattattgtttatcatctattaccac

SEQ ID NO: 117751 - DNA, 506 bp, Zea Mays
taatgtttgcttcatacaacattcagttatggtgttgtgccttgactctttgtttttgccaattgccatctagaagagctgaaggggctccctatttctaaaacatttctttagcgatgtccactgatattgacagaggagtatgcactctgtgatcgatttcagagatggactgaactggattggactgatgccatgccacatagccatagatatatgcagatgtcaacttataatgagactgttcgctgaggtctgaggcgtcgttttctgaacttgtgattgcttggctgagtagtatatgtttggtgttaagagattgttcagatgtctatgctaccatagcctgatatatgtcttcgtaacctttttgtgtctgtgtgtggacatttctgttgccaataacatcgcattgtttctgcctctagacgtcgaatttacgtatggtttgcctgactgtattgactcattttttgcctgactgtattgactcatttttgggtata

SEQ ID NO: 117752 - DNA, 425 bp, Zea Mays
agggcctggtcatttcgaagcttaatttcatgggcttcatgaccatagtcatcagcttctcccttctcttcttgtctgcttttacataaaaccattcatttgtccacccggttggccatttggtgcgatagccaatcactggagcctttgtatcttttctatatgcaaagttgtagcagccgaagttcttatgaagaccatttgccctggccttcgtctaatagtgcagttcatgtacccggcaaaaagcttcggcattagcgtttataccctggcttcagagagcccatataaaaacactgagcctaacaatagcattgggtgtcaattgatgaaggtgtatctcaaagttctttaaaatttccctaatcatgtcatttaagggaaccgaagtcttgccctcaagaagctcttgagaacgacaa

SEQ ID NO: 117753 - DNA, 343 bp, Zea Mays
agaccacaaagtccgtctggtagcattgctgaccgaagcagcgtaggtggatagcggtgtcagggactcatgagctgacagattcctgaaccctctatcccctgcatccatcaccctaacatgaatgcgagtgatgtaatagcaagcccagggaggctcgcacactcgcttgtcttgtacaagggtcagacgtaggttcccaacgcatgcagcaggttgggggaagtgccttgtctcgaacatcgatgtgtaatgttcgataactggcccaaaccccatgaagtagtcctgctgggcatagttggcctcctcgttgatgttctcctcgtcatcctcgtcgtcg

SEQ ID NO: 117754 - DNA, 745 bp, Zea Mays
aaagaatcctcttatgattgcccccaattaaatgaaacacccttcttggtcaactcatgtaatggggcagcgatcgtgctgaattccttcacgaatcgacgataaaatcctgcaagtccaagaaaactccgcacttgtgtcaccgtcgatggcgttggccaactctgaatagcatgcaccttggcctcatcaacctcaataccctgtggagtgacaacatagacaagaaacgatacgcgttcggtgcaaaaggtgcatttgtcaaggttagcaaataagcacgcggcgcgcaaagcatcaaaaacaacacgtagatggtcaagatgttcagataaacaagtgctgtagatcaagatatcatcaaaataaaccaccacaaattttccaataaatgggcgcaaaaccttgttcatcaaacacataaaagtactaggggcattagttaatccaaaaggcatcactaaccactcatacaagtcaaacttggttttaaaagcagttttccattcatcgcctaatttcattctaatttggtggtacccactacgcaaatcaatcttagaaaatattttagaaccacttaactcatcaagcatatcatctaatcgaggaataggatgacggtaccggatagtgatgttgttaatggctctataatctacacacatgcgccaactgccatctatctttggaaccaaaatgacaggaacagaacaaggactaaagctctcacgtacatagccgc

SEQ ID NO: 117755 - DNA, 652 bp, Zea Mays
aacataccttggtcaaggcatactctatcactttcatcccaaagagatatcaattaaataccaaattgaaagccacttaatacaaattgaaggctaaatgaaaggttgactaaatacaacaatgcatgcctcaggagcacctaagccaattgaatactcacaggaagtctaacatttacacgcaacttagacatgcttcatacttaactatcattgcatcacatataccaattgaaaaacaacacgatcatgtcttaagcacatcatagttaagaaggttctttaggtacaccagaagaaaaaacattttaaggcataagtctcctaagccacggtactaccagagaaatgcaagaacacagctatgatcacaatcaatggaacttcaagatattcaataaaattgcacagttccattttccatagctttgccttttaccagtatggccatgagagcaccagttattaccacaaaccaactgaaagttccctattatttatgcacttcatagctcgagagaatgcattagaggcataacacatagtgccacaatagggtcatcatataaactaagcaatatgtcatattttcacacaggctaatcataaaaccatatagcataactcacaacgggatgcaggtttattcacg

SEQ ID NO: 117756 - DNA, 297 bp, Zea Mays
acacgaaatggaccatcccctcgtggcatcaatttggatttgcgctgctcaagaaaacgcttcttgcgcaagtgaatccaaaccatgtcccccggttcaaataacactttcttcctatgcttgttcatgcttgtagccttgcgcactgctttgagctcaattgcttccttagtcttctcatgtatcttttttatgtatgcagcacgctcagaagcttccatattggttctttcctgcaatggaaggagcaacaaatctatcggagcaataggtttgaacccatatacaattttgaag

SEQ ID NO: 117757 - DNA, 576 bp, Zea Mays
gtaaatcgttagtgaaagtaggacctccttttgcaagagcacaaagaatggggctgtggtgtttctcacttctctcagatcactcttgctcacaaagagacactcagtgtggcgtggctgtttaggattggcatgaggctttacatggctagatgggttagaactctctcccttacttgggttgggggtctcactcaattttcttttgtctgattcctctcttttcttatgagccatatctgaagtatgtatctcctctggagataatggaacaagaaccaccttcttgtcattgtgaatgaaagtgtatttgttagaccgtccaaaatgcactgagtccacatcaaattgccagggccgaccaagcagcaaatggcatgcttgcatgggggcaatatcacaatccacctctccatgataatcaccaatggaaaatgacaaatgaatcatggctgaaaccttaactgtcccagaattattcagccattgcatatggtacagatgtggatggcgacgtggctacaaaccaagcttctcaacaagcaaagcactaacaatattattgcagctcccacc

SEQ ID NO: 117758 - DNA, 965 bp, Zea Mays
ccggaatagcacaacaagtgcgttaatcgaagtcttttatttaaaagacactccgagcaaaagttgcctaagggtgcagctggaatagcacaacaagtgcgttaatcaaagtcttttatttaaaagacactccgatcaaaagtcgcctaagggtgcagctggaatagcacaacaagtgcgttaatcgaagtcttttatttaaaagacactacgagcaaaagtcgcctaagggtgcagccgaaatagcacaacaagtgcgttaatcaaagtcttttatttaaaagacactccacgcaaaagtcgcctaagggtgcagccggaatagcacaccaagtgcgttaatcgaagtctcttattaaaaagacactccgcgcaaattcgcccatgggcgcagccggaccaacacaggcgtacgaatacgacaaacatgccacattaccatacaaattacaattacatacacacggcgtgggcatcacatattacatcggctcaaccttcgggatgatacccatctccctgtaattaaacagcattatcctcaattcctcaccctcaaaaagcttccaaagatccccctcgcctacgctcgccccaatcggcgaggacaacaattctcgtttaccaacccggtctactcggagatggccacgctccatccccatacgacgacgcctgccacttcgtgaaaattcacccacactatgttttcccaccacccttcgccgcctacacccagtactcgcactaggaagatccccggcaccctccacacgcggcgaagtctccgccgcagccacatccaatgcaacaaaataatccaagccttcatcagaggactcctccgtccaagaaaacaaactcccagattcaccatcagactcaaaacactcagacacagaaccaaacaaactatcatcggtaggcactacggttgaggccaccacaaaatcagtattgtcagc

SEQ ID NO: 117759 - DNA, 283 bp, Zea Mays
tcaacaccatctgaaggcgcaagttcgtcattaatgtcattgccttcaaggattactaagtcattctcattttgcacctcatcatatcctcctcatcaacaaccatttcaatatctacgtccattccgatagattcggttaagtctatctcaaatcgcccttctagcccaacttcttagaagaactctccatcatatgtgtccgggtctaagttataatcttcatcgttaggaacaggtaatctactgtgcggcgataccttatacacaacatcccaaccctt

SEQ ID NO: 117760 - DNA, 328 bp, Zea Mays
gccgaagacaggtattttttaatgagatcaaatgcttcctactgctctgcccccaagcgaattcgacatcattcttaagccgaaggataggggtgaaggcatcaatcttcccgggtaggttagaaataaaccttcgtaaataattcaccttgccgagaaacttctgcacttcgaccttacaggtcggaggtcccacattccgaatagacttgattcggtcagggtctatctctataccatgtttatggatgacaaatcctaaaaactcagccgacactccaaaagcacatttacgtgggttcattttcaaaccataccgacacatttt

SEQ ID NO: 117761 - DNA, 640 bp, Zea Mays
cgcatgcatacatttagaggaagaatcagtattagacatgctaccgaaagagacatgtgctttggtaattcagttagcgcatgcagtcggatgaagctgccgagcagagctcataaaattcgatccgagacgacgacgacgacaacaacaataacgaacgaacaatctagctagctagcactctagcagtagcaccttgcatctgctgccacgcaagcaagctcgaaacgacatggatcaagccggagagcaggcatggcaagcacaagcacaagctaagcccaacgggagcgggaaaggagggtggtccagctcacagcctcacacacacacacggatgacgacaaggagaaggggatctccaaatctcactctgtgagtagtctgactgtcacttgacatgactgtccagaccattcattcattcattcatggactgttaagctgtcgagatcacaaaaagtcgaccagggaggaccacgaacgaggagtccgatcgatcgactgactgactgattgagctgccgcatgcccagcaggccggcccaggcccagctgccaggcctggattagattggacacgacacacgatcgacaaaagtgcgtgggggccggggatggatggacatggaccccgacc

SEQ ID NO: 117762 - DNA, 644 bp, Zea Mays
ccgagagcaagcttgtctggtttgctggggaagaggtgattccagaaccaaaagatgatgaaatcgtagtctttaaaagcttcttcagggcaggacttcgtttccccctgcatgagatgattggagaagttttgaaaaatgttgagatatactttcatcagttgacacccaatgcaatcgttagacttagtgtctacatatgggccctccgaagtcatggtatgagtcccaatgccaaagctttctgcagggtgcacgagctgcactatcaaacgaaggccagagcagatggtcttcatgagaacttcggctgctacaactttgcatatccgaaagatacgaaggccccgtttctcaactatcgtaccaagtgggcgaccagttggaaaagcgaatggttttacataaaggcagacgagaagagaagggagaagctaatgactatggttatgagtccattgaaattgagcttcgggatgacaaggcccttgtgccacatgcagcttggctccccatgccaggtagccgaagtagagttcaaagtggtagcagccgaaatcagcactagagatctagtgcaagagtacttggcaaatagaatatttccaacctctagtggctggggaatgcctaagaagaaggag

SEQ ID NO: 117763 - DNA, 500 bp, Zea Mays
aaatgtgtgttccacactctttgatttcgttttcctaaagctaaataaataattgtccataacgagtgaaccatgaggcatcaaaaaacaagtggttagttgtctcgtttttatgacagaatgatatgataatacaagtgattaggttggttacccgcaacaagtcatgcacataatgatataaaattgaaagtgattaggttcgttacctacatgaaaatattatggacaaagacaagtattgcaacaagtcatgcaacacatgagagaaaaaactaaggatgagatgcatgatagtgctgactatgtactcatataaatagtatgataaatgcacaactattgcaatgttagattgaaaataaagagtgccaaggcaggttatataatgtatgagttggaatggaaaactctaaccctaatagggtggcagtgtattaatagaccaccaaacaactaggccaggcccattacaagtgaacacgagacaggtatctaac

SEQ ID NO: 117764 - DNA, 650 bp, Zea Mays
gatgaccaaggcgactatgccaccgatctgtggatgttttgacaacactggaaacatgcttgctactgttgtgctccaaggatgggatgggatatagtccgttcctacacatgccgtgtagcagtgttcgcctcgtgtgacgatccttgacaagaaagaaatcagggtgaagttcaagaaaaacatcattatcagacgtgagacgatgaacagaagctaagtttcgagtagcttgaggaacatgcaagacattatttagagatatgttacgatagggggtaataaccgtagattggcctatatgctttatcgtcatacctgctccattggccgcatgtacttgatcattaccattgtagtcttgccgcatggtcaatttgtcaagatcgccagtaatatgatccgtggctgcactgtcggcataccacgtcgtgtcaacattataggaggtgacagcagcagaagctgttttctcagggccattgaaattcttgtcaaaccgcttccagcaccgaagagcagtatgaccagttttaccacagacttgacattcatgatctctgtaaggattgttgggattacctcctcgaccaagattgccacgtccagaaccattgcggcctccaggatatccacgaccagaatcaaaa

SEQ ID NO: 117765 - DNA, 492 bp, Zea Mays
gtcctaaccgcgccatcgcatcgccgtgactccctctaaactccccgtcgaccaccggaattactgccacggcggtgaacacgtgttcactgcaccagcattcttcctcacttccgaccgccgtgtgtcttgtccaaaattcgcggccaccgctcgctccgcctataaattgagccctcccctagctgtgtaacatcatcacccacccagccaccaacaatcgttagcaaccgtgcctccgagagcttgaattttggtttctccccaatccgggtttccgccaccgcaaaactcacctcaccgcggccagcccctttccggtcagctcatccttctctctctctcgtttgagctttctcgcaactccacgatgcttgccgacccacgtaattgcgctaggagctctctggtcgccgggaacacgacgatctagccgccatgctctcggtcaccgtggccagagctccttagttggtcattagtgcaattaag

SEQ ID NO: 117766 - DNA, 398 bp, Zea Mays
ggaacagaagtttgggttaattcattcacagaaactcaaaagcccctattcgccgcacaacagctaagagggcatgccagtacatggtgggcaaatttctcagcaatctagcctgttggacatcagattacctgggatgagtttaagttggcattccgagagcattatgttctagagggagtactccagatgaagctagaagagtttatccggttgaggcaaggaggagatacggtgatgcagtatctcaacaaattcaaccacctctctcagtatgccattgactaggtggatactgacttaaagaaaaagaattgttttatgagggggctcaatgacaggcttcagcggaaaatggcaacatgcttggaccttacctatagtaaggctgtcagtac

SEQ ID NO: 117767 - DNA, 321 bp, Zea Mays
cccaattcaccccataagcatcctcattcctttcaacatttgtatgtgttttctttcatgttcgccatatacaccaatctttgtggctgtatgttctgattgaagcgacctctgaagctttgacctcccctactgcctctatgtgctggaggacgagtgaaattagcttgtgtagtttgttgtccacttgatggttcagctagatcatgatgttgggtatgtttcccttgggactgactttgtttgtcttcatgctagcttggaatttgaatacttcagacatgttgtggatggaaccttcctatgaagcccttgggtaac

SEQ ID NO: 117768 - DNA, 385 bp, Zea Mays
ctggtggctagatccttcacagaaaaaccagaggggtcaaactcaatggaacaagaattgtcggtggtgaaccgacggacggaaaggagattgtgtgtgatgtgtggggctacgagaacgtcgttgagatagaacggtctagggagcaccaaggcacctactgaggtgactggaagagtggaactgtttccaacgacgatcgaggtagggtgtgtggaaggaggtgggtgtgagcgagatagcatgcctgcgatgggggtggtgtggtaggatgcaccggagtcgatgacccagttagaagatggtggagccaacgccatggtgttgtatgcggcggcgagagaggctgggtcccagcctccagcgaatggggaccagggtgtcg

SEQ ID NO: 117769 - DNA, 2006 bp, Zea Mays
cctgttgatacttgagtttgaaggcctgaatactcccgaagtgttcaaacttgacaagttcataccagaaagactcaataacatagatagtgagagcttttatattttcctgcaggttagtatccagtgcataaggcagaattcatagtggcaaagtaaaagccagaattcaaattgacaaccaagtaaaacacaaaatgcaaagggacaacctgaagtcatacctttcgtatgtattccaacaattcaagtactcctgaatgtagcatgttgtacctctccccattgtcaacaaagatatcaattattggtttcaacaagttgaacttcacaacatggcgaatgagatgctcatcctacaaaatgtaaaggatacatcaagtgggatacaagaatgataactagctgcttgtttcaataacatacacaatggagctcagttagttagccatatatctgcattgtagttagcataaattaaaaaaaaaatgccctgatagttgtattagagaatccagcaaataaagcaatcaaacaatgacaaataaattgtctggaaactatatctaccataaaatgagctctgcaagagctaggatacaaaggaatacttcaaccatgatagtgcataacttcaagggaacttccaatgttttaacaatgtaaaaagaagaagaaaaaaaccaaaagtcttacatttctggatataatagtacgcataaacctaacagctgctacaaccaaaaacttctccctccgttgagtcaatgtaaggattttctcgatagcattattcataagaaaattgcacctatacaagattaacaaacattcagaaacatgcatataaagatcatagaagtatcatggtacaatgaaagaagtttgtacagagtagtacttaattctgtagggatgatgaactacacaaaagcacagtagttcacaaacatttaacaaaatctcaggcttgatatgatgtccttcagcgtttccaccaacacgtacagagttagatcttggtcgagacaagctcctcgggggacaagaggatgctattacatcaaccaaatagtcaagatgcctttcgtagaaaatctcaataattacgtctctctgcagaaagtaataaagacttattgcagctaaatcaggtcagaagaatctgtgagtttcaaatatttgtaacagatttcaacatttcaacacaagatgctgaaaaatgaccatgatctaccaccacgaaagttacaaaaaaaacaatggccgcttcttttctcaaacatacagtagagctgggtatccttatattaggaagaaaaaacaacaatggcaaactatccatcagagttcagagataagcaaagtggaaggaatgacgaatgggtagcctagaagagacaagcaatccataatgttttataatttcacatcgcataattagcaacagaaccgttcaacagattgtaccctaggtggcaaatggtagagatgtgcaatactgcagtactataaacacagtacacgtcaccatactgaaattaaaaattagaaacttgaactagcatgggaaaatctataccatggttgtatagtagtggacttccaaataattttatcaattaaatatcaaagattacaagatatgtgagccaatttgtaagactcaaactcaaatgaacaactcaagaggtaatgtgacttcagagtgaaagtcaatatgtaacctaaactcagttcggtcgaaaacaacttacatgtgctccagacatagtgaaagaatccatcaatatgcgcaagatttctagaaactggcagtgcatttcctcaccgaagtcagttaccatgcctttaacctaaaaattagcattgaaattatacacaaacatgactaggaagaaataataatagtggcattgagaatttgagggcaagttgggccatctttcatttcactccaagtcaattgcaaccaagagtaaatgagctatacatgaataagtcag

SEQ ID NO: 117770 - DNA, 542 bp, Zea Mays
tatgtgttatatatttagggaaggcatatgtggtatatgtggttcattaatatattagtggtatatgtgtttgttgattagtgcgtgtgattagcattattatttagttcgaggcatattgtatatgtggtatatgtggtttagggaagacatatgtggttccgatgaattttgatgtgcaatgcataatttaattttatgtgatgtattatttgatttttattaattcacttaattttatggagctaatacctttaatgtttttctattgaatagaatgagtggtaggaaaacaaagcacactgctagggggtttcttaatgcggctagcaggatagtccctcgtgcacgttccctgttccaagggagttcttctagccagagcagacagtaggcgttgctgagacaatgccaccttctcgtaggtcaacctgtcccaccaccgccttcaaccgcttgttgtggcgcgtggtcggtgacgaggccgtagtgacggaggcccttgtcatgcacaacgccacatccaggagatattcgaggac

SEQ ID NO: 117771 - DNA, 467 bp, Zea Mays
ttgtgcgctgcgttcgcctccacagcttctacaggtttgtccaacaccttatgaccttttcttcttcctcagtagcgcaaaccggtatctaggagtttccagtctctcgatcttcgcggccgtcaatgtcgcccttgccctcgctcttctccctgacccagacaacagggagtcatctcgtgtcggaagctggttcttccagcaccttattatggcattttcttcttcctcggtagcgtataccgatatctagggtttcccaatctctcaaatatttgtcgtcgtgaatgtctccttcgccctcgctcttctccctaaccctgacgataggatgtcagtccatatcggatctgaatggtggagctacggcaaggtgaatggcggtgagctcacatgactcctaatgctattggaagcgagttattgctggtgttcaccatgcgagcaagatgttcgatcaaatgcct

SEQ ID NO: 117772 - DNA, 658 bp, Zea Mays
gtgaaattgctgaagtgtcttttgtatcccctcatggctgatggtatgggccaatacaagcacctgtgaacacaagttaggacacaacagcatgaggacacacttactatgaaacaagaagtcatcgatggtctaccatggtgccccaagagtagcatcttggagcatctagtgaaggcaaccaacatcctaattgttagcagtcgtagcatagatcttgtcaagtaggtgcaagaagggcctagagagggcgggcaaccatgtgtagtccacggaggtgttggtgtcacaacacgagatggtgtctatcgttgtgttgaggaatagttgacaccctgttgatctactaatgttgtagaatagttgatattcactggaccaagagaaacttgaggttatagttgtcagtgtgaacaagaaagcggtaaccctagaggtatgactaccaaggtcgcacaacctaaaccaggttgatgagtttacactcatttgttgtagcttatgatgatgagtgacaaagggtcaactaaagaaggccaggggactagtttcctcatggaggacgacactaaaacctgcacccatagcatcgtagttgatgataatatatcgaagtaagtctagcatctatagaactagccccatggagagggcacac

SEQ ID NO: 117773 - DNA, 703 bp, Zea Mays
aaatgaggtatgtgacaaataaggctcacacgtcatgcacgcttttctttttttccgcacatcactctatgacactgccacccatgttccagctcgcttcatctaccaatgttccatgtcgcaactcgcttgcttacatgtacacttctccacctaattaagtaaagcacctcgcctatgcccaccacgctcatactagcctgcaacacgatgcctccgtcatcacccacgcacacctatgcgccgaagtcggttggttcggtctcgatcttaagtagtaatcgtttggactcgtatctataaggaatattcctttaaaagatagaatctgaacctctcaaaagcaaacgcctccaaaaggtaaagcaaacatatatctttgttgatttgtacaatctgtatcaattaatgatatgaattaagtgatgaaacaaatcctccaaagatgtgctccattaaacttcatgcatccatgtttctcaaatcctccaagatgatgtcgccagtaataggcgcacccaaattaagcaccagtaataagtagtaccttagggtatgtataacactgagaaggtggaacaattttttaagtataagagacaataaaaaaattgtatgatataaacatgagcctctaaatcataaatgcagttaagagacaatgcgtatgcagaatcatgtagagatgggctcttcacgattt

SEQ ID NO: 117774 - DNA, 688 bp, Zea Mays
aatttcagtccctcagctatttcatctgcaacagcacgagcagctatggtgtgttctccacttgcaggcagtggatcaaatggactcatcaccacctcagagcgctctctcggtggaaattcagagtttaattcaggagttcgcctccctgtttgacaaaccaagtggtcttcctccccccagatcccattgtcacaatattcctcttattcagggagctacaccatttcggttacgtccatatcgctacaaccctgctcaaaaagatgaaatagagcgccaagtggcaggccttctccaatcaggaatgatacaaccgagcagcagtccattcacatcaccaatcattttagctcgtaaaaagactggagactggagactatgtgtcgattacagacgactcaatgccctcacagtgaagaacaaatacccgttgccggtaatagatgaacttttggatgagcttcacggggctgtctggttcacaagtctggatttgagctcaggatatcaccaaatccgaattgcacctcaagatattcacaaaactgccttccaaactcacaatggacattatgaatacaaggtcatgccttatggtgtcacgggtggtctcgcaacttttcaattggcaatgaattcagtgttgtccccatttctcagaaagtgtgtagtcatttttattgac

SEQ ID NO: 117775 - DNA, 404 bp, Zea Mays
ttaagtcgttgccgacttaagccgattgctccgttagcagggcatagtggtcaccctgagttaaataagaatgtcggtcgatcatgaacaaactgagtattcttgaagccttttttattgatgacatatttcccattttacagagtacattatcatcccgatagcttttgaaatacagctaggggtaaaacttcttgaggtgttctatattccaggagttcccaatgtctgtgccgtccatttgagtgagacgatatgatcccggccgagtgacttctgctactatgaatggtccttcccataagggtgacaacttgtgccatccctcccccgttagaattcggcggaggacgagatctcccactgaaaaggatcgtcgtcgtacgaccttgtcgtgatagcgt

SEQ ID NO: 117776 - DNA, 819 bp, Zea Mays
cgcagagctacagccttgccatgtttgcaaacagccttttccaagatggacgtggcccccgcgcaccagcaaaagcgcaaaattctcctcgatcacttagaatttcctcaaaagctttggcttccccgttaatccactagacaactccatcagggtcaccgctgatgaatctctgctcagaggaatatgccccaaccctagtaaagatgtcctttagtttcctggcgcattctaaggatatttcataacacttttctttggaagcacgaagctcgtcagcgttcttttgtgctcttgatctttcgatctcgcaaatctcatgcttcagtacctcaacttcaaatttttcggttgcttcagcaaccttccttttagaagtttagctttgttagatctcagcctgtcaactaaggaaagtaatatcttatccttttcaagagcttcgttccttagtgtgatgacttctgagcgaagattcccaagagctattcgatagctctcatcctctgcttcattctaggcctttatagccttgcttagaattaagccctagaaaacaaagagtaagcgcataacgatagcaaggaaagccataaaaatattttacttcacacaagtcaaagtatacacaccttcaaactattgtaagcaagactaactgcaagctgatctttcgacattgcagataggccaagttcaagcttcggatatcctacattgtccatcatttcctgggagacatgtatatctttgctgtctggcagacagtaaaggaagtcatcttcgtcactgccaccatataccaaggcccctcggggg

SEQ ID NO: 117777 - DNA, 354 bp, Zea Mays
acccaatgagccgtctgggctcgagtctgtccaatcttgcgttgatccattctgccagcggttcctcccctggcccacgaagggatggccttgcgaaataatgggcccaaagtctttcgcgaggccatctaaccttctagtggacccgagggatatttgtcccccacagtcagctcctcaaaaggaaaagggaaaaaagaaccacctcaatggatgaatatgctagtgaactaaacaagcaaaatgcattggtcagctatatagtgtgaagctagaaacttatagcttcactttcctgatagttattacctgacttatatggtccctggcattttgcagctgaattctagtcct

SEQ ID NO: 117778 - DNA, 586 bp, Zea Mays
ttttgcataaagcgggaaggggaagggtgacccacgacgatcgtgggatcgtgaaaactggcactttatatagtacatagaaaagatataataaataaagaaaaaattaaataaagaaagaaaattcaagagagagtgacagagatgcatgaaaccactgaatcaggacatcgatatggttgtatgcacacatatgatttatagaggttcaggccactatcgtaataccctacatcttcaatatcctaagtgcggcgtgagtttacacgctcagatgatgtctgacctaatgagggaggaatgccctagttgtcacttgcaatatctattactgatcgagggagggagttcaaactcgaacgagggcattttccatgtgctagctcctagttggtaaggatgtgaagtctataaagctaaagactccaaggccaaagtcccctaggcttaagctaagtgaaatcctttatatgttgcactacatgtatcttttataacacaatggatgagagagttacacccttacatacgcaacaggtcctacctaacaaatgtccaactacttctaacttatcgtagttatcgc

SEQ ID NO: 117779 - DNA, 973 bp, Zea Mays
ccgacgcattttatcaaaggctttgcgcaaatcagctatatgagaactaaacttagccgatttgactacaatatcatcaatgtagatttccacagtgtttcccaacagctcgtgaaagatcaaattcatagccctatgataagtagcactagcatttttcagaccaaatgtcattacaacccactcaaatataccaatgaagcctggacatataaaggccgttttaaacgcatcttcttcggccatgaaaatctgattatatccggcattaccgtcaagaaagctaataattctatttcctgacgcattattgatcaatgtgtcggctatgggcatgggatattcatctttaggagttgctctatttaaattgcgaaaatcaatgcatactctgagcttacctgattctttcttctctaccggcacaatattggagacccactctacgtatctgcaaggtctaacaaaattagcttctagcaaccgataaatttcgtcctttattcgtgggagaaggtttggacgaaatgttctagctttctgcttgaaaggtctgaagccggacttaatgggcagccgatgctctactatctcacggcttaatcctagcatctcagcgtagttctaagcaaagcaatcagaatattcattcaatagaccgatcatttcatttttaggatcggtcttcagggtcttgttcacaaaagtcggccatggagttttaccatctcctatgtcgatctcttccaaaggatcggccaatgtaaacccctgtcctaatttgtcaagatctctgaattcctctattatgtctcccacagaggaattagatgatctttgtgtgacagcggactctccggtctcgggggctggattgtccgtaatactgattttatgctgcggtggatgttcgatcttaaaagccgaacaattctgtaaaagatcggaccatccggccttagaagccggatcg

SEQ ID NO: 117780 - DNA, 555 bp, Zea Mays
gctctccatatttttttggtaagtcacatgctggtgacctagtgctcgtgtttggccaccgaccgatcatggcgccgttgtggtgcctcggttgtcgcagccgtcgcagtcgggggaagggatgatgcgtgcaccgttggatcgggtgtctacgactgcgattagaagtcatgtaccaattcggtggttgaatccatgtcgttagatgatgatcggatgcacacgcataggcttcgattattttaaatccatgccattgatcgggcatcctgcgtctgcgagtgaatacggggtgagttgagggcctgatctaatccggaccgctcgtcgttgatccaacaaccgggaacacgtaccatgtcgcagagggctcgatctaaccctggccgcgtgatttagatcttacgaccaacactgcttcagaccccttcggcctaggaatctttctaaagagacctctatttttaggatatcaaccgtcgtccaacttaattagaaaataattacagcggagccctggatttacagtgaagcccctgtagaacatctgactta

SEQ ID NO: 117781 - DNA, 326 bp, Zea Mays
ttgcagaggcctttacagctaaagagatcacaatcttctcaagtcagtatttatcacacactaacaacgtgaatgctcagtcaacacggtatcatactgaagaagaaggtccttcgaccgaccttagtgtttttctctggaagaggaaagggtttgattccatatatttagctggttacaaacctacaccaaaggaactggataatctacgtatgaaagggataaacggaggtccatgtttcgttgaatggttccacgagcatgtaattatctctttataattttcctttgtgtacttagtttgcacatacgacttgctatttaac

SEQ ID NO: 117782 - DNA, 416 bp, Zea Mays
aatccttttgacctctaaaatgctgggattcatttttcaatactctcatcgattcacatcgtgcagatgagatgagacatcactgccctcttctcaatggtgcaaactcgttggtcttccatggtttgtgctacagctacctcatatgttcgtcagcagccaaacaattttttgatccgcgaattaactggactcactttggctaaagacttcaggggtttcgaatcttccgtgtatgtttgtaacttattgctatatcgttgtggcaaactgtgagagtatggaccgtttctcgcattgtgaactttgcctcttccaagcttgtgagctacactgccgaatttgctttccaagacttccactggaggtgtacatcctactttacctgatgccctcaggtttcttgttaaaaaatg

SEQ ID NO: 117783 - DNA, 538 bp, Zea Mays
gtgacgggtgaggatattccttgtgcgagtgctgggcgtaggcgtcgaagggcggtggcgaagcagagagtgagtgagttgtcacaaagtgataggcgtcatcatggcgaagtggagggtggtcatcttcgagtggacgggactgccaagcgggaattgttgtcttcgccggctggggcgagtgtaggtgagggtgagctgcgaaatctttttgagggcgaggagttgaggacaatgttgttcaactacagggagatgggtatcatcccgaaggttgagccattgtaatgtgtgatgcccttgctgtatgtgtgtaactattatttgtatgatgaggctgcgtgccttcgttgatccggccacgcccgtaggcggcttgtgttcgggtgcttttggggaagtcttcgattttgcgcatttgttgagttagaccggctgcacccgttggcgacttttgcacgggtagtctgttgattttttgcacttattgtgctagtccggctgcactcgtaggcgacttttgcacggagtcttttgg

SEQ ID NO: 117784 - DNA, 534 bp, Zea Mays
gcacaagtaggaggtcgtgcatgcttctactgtggagaacaaaatcactgggcgaagaactgtcccaagaaagcagctaaacatccgccagcagtcaatgccccagcaagacaaggagcgccacaacaagcaccaggagaccgtggtcaggcctacaaccgtggaaaggtgaatcacctggaggccgaagcaatccaggatgctcaggacgtggcagtaggtatgtttccagtcgaatcctatccaacaaaagtactatttgatactggtgccacacattcttttgtttctacatcttgggtagaatcacataacatcccccatagaaccaatgatcccacctttaagagttaattcagttgggggaaaagttcagtcccataggatttgtccgaatctaaggattgaaataagggggatagatttccccgctagcctagtagtaatggaactcaagggttagatgtcatcctagggatgaattggctacacagaaatcaagccactgtcagttgtgacaagagaacaagtaag

SEQ ID NO: 117785 - DNA, 1198 bp, Zea Mays
tgatagaaatagaatccctaaccctaaccaaggttgggagtggtattaatatttgagttagatggaccaaggactcatacaacaaggggccaaaatagaacccctacacaacacacacaatacatttcaacaattatcaacatcaacttcttgtacaaactagcattgatatagtctggaaaaatggcgttgggcaagccggcctatcccattttttatcctcgtaggtcgcccgttgccaagcctagactgcacgctagagcaaggaacacaaaggctgaggtcgcagtagctgtcaatggaaaagcttgaggtcacagtggcctttgctagggaaataacgcacgcgtggacccaacctcctttgccatagatatgctcaccactatggatctaacgagaaaactaatcattggagggcgcgaagctttacaaagccaccggagagggcgaggagagaggaggtgaaaggaatccagagatgaggggatgggagacggggcgaatttagtggttggtccatatggaccatgacacttcataagaatacaagagagcagttagcgtagtggtctaaatgatgtgttttaaactaaccggttaccgttcatagtttaaatcttgatttatttcttttccaaaaaatttcccgccacattctagacatgggttcaccacttatgggagagaggtgtagtcaggataatcagagaaagagagggaaggcgagagtgggaacataggctaggattttctgattatatagtcctaggttgttcgggggttaagatgaaatatgctttttacacagacgatagcaatacaaatatttttattttaaaaatacatttacatagtttaactatttaacttactatatgttaaatactcttccttatattgtacgtgctttcgctaacaataaatacaagggtttaagagaagggaaatgataagagatgtagagtaagaattgatcgatatgtacaatgcaataaagaacaagaaagaagatcactgttaatctatgaaccgtggtatgtttgataaactctaaaatcatcgcatgctcacaaaaatatgtccactttgtcccccctccctgaaaacagaacaaggtagtagtcacttgtttaaattaataggcatttataatggcatgcataaacggattgtttaaaatttaattggaattgat

SEQ ID NO: 117786 - DNA, 407 bp, Zea Mays
tttgatgatagttttgttcttctcttcttcgagatcttgttgcattttcagaaccttactcaatagtatactctgccaaaacaatcttcgtcagtaaatgacctaaaaaactaaataaaataataataataaaatttgttaccttaaaattagcatagagcaggcttccggcgatatggtgtcgttgatatctgtagaggtcagcttctagtttcggtaggccaacgcttttggagagggttctaacaactttggcctcggtgcggttccgaaggcatcttagctttccttcgttgaccccaccaaatagcgtagcccctggcttatacccgcaagatatggcatattttttcaactcttccttttcggcaactgttagctcttgtccaagcaaatcttgaaagttg

SEQ ID NO: 117787 - DNA, 546 bp, Zea Mays
agaaaagctgctgccttggtcgtcccagttgaacctgtgccgaaggctgcgggcaaaaagatgaaggttcttacccaccggccacgttacattgaaccggccgtggtgcctgagtttagtggggaggcctcttcagctgctgaaacaagagtgactgctccaattgcgtagagcactgaagagccagttgtaatgccgaaattacctttagttaagttggttgagatgaaggctgataaggataaggctgaagggttgaaagttgaaaaaataacaaaaatgccagagattttgagcccgtcaacagagataatagtgccgaaagcacaaaagggttctgccgcaactcctaagaggagaagaatggcaaatgtgttagatgttgtgctagaaacagcaaaatccttgagtcctgctccttcaggaaaatttgccgaagcttccaaagctctacccgaggctgaaacgaagcaagcaaaagtcgaagctacaaaaattcaagctaaaaccgaagctgggccttcagagtccactgagacagagccg

SEQ ID NO: 117788 - DNA, 637 bp, Zea Mays
ggaccttggacgctcaagagggataggtgagaggagtatcatgtcatactcgatgccaagagacatgaactcgagactcccgaacctgatcactatcacaagcctgagtgggtggtggaaacctgccatctagagttctggcgagaactggaagtgtttcacgtgacaagcccctacctgacatgccaactatcggtgtttggaccatgggtccttgaccaactaataaattgtgccacgtggctagactctagatggtgtgcgagaagacacaagcagttatcctagttcaggcagcataaggccctacttccagtagagggggatgaggcttatattactcgaactgaggtgcctgtagtaggggtttacaagcacaacggtagagggaaagtctctaagtccttagagatgactgaggcaagttccaatatctaagacaaagtggaggaatgaatgttcgtctgcgtgttcctctctcttttgccatggagggaccacttccctatttatacatgaaggggagcgtccacagtgaagccgagtgttgtatccggaggagagatgtcctagcgtctacaagccgatgtcatagtgaaatgtgttgttgacttgtgcctgctgatttcgcgtagag

SEQ ID NO: 117789 - DNA, 328 bp, Zea Mays
caagaagggtattgacaatggagcgattgatgcattgtcacgacggccatcatctgaattatttagtctgtcttcagccactcctcaatggatgcttcaggttatggaggggtatacgggagatgatcaggcccggaaattgctggtagccttaacagttagtcccaatgactcgggacattatacattgaattcaggcatcatcaggtacaaaggtcgtgtatgggttggcaataatatacatcttcagcagcaaattatgttggcattacacgatagccctgttgggggtcattctggttttccagtgacatatcccaaattaaac

SEQ ID NO: 117790 - DNA, 1668 bp, Zea Mays
taattaagtcttcatgtcgtcatgtggagttggtgctactacagttctttcgcaattttggatgggggtcttcgttgcatttaactttgtagtagctttgatttagttggtgttctttggtgaggtcgtgtgatgggtcaaagcaatatgctgccttcagttgtaataattggtcgtaacctcgtttgaggccaaggtcagactatgtttccattatctaaaaaaaccgtaccataggaaccactcctctccagcgggaagctatacttcatcgaggactcgaggagcaatgtctcgctcgggtaataaagaggtcaaaagttgacggtggcctcaagactgccaagtatagtggcaatgcgcagcggcgtccgcgcagtccccacaagaagcaggggcaacaagacaatgccaagggtagcaaaaaccatgaagaccacaataaatgtagagattttggtcggtttgggcattgagcaaaggattgccccaaacccaagaaggcgtaggctcacctcacccatgcatacgaggaggacgatgaaccgacactactcatggcgcaagtgtgcacactctcggtcgcaccagaatgtgttcgcctcgatgagccacacacacaagtgttccttgtagcaacagaggacgatgtcaagcgtcttgaatgatggtacctcgacacaggtcttcttcatctccccctgcgcaactgcatcattagcctcggcacatcaatgacgacgagctccatatttgggggtccgcaacaatgctcctcaacaaggtgcaacacggtaacatcgcctctacattctgcgccacaacaccacgcgctcgatgtgccttgccgcccaccacgttaatgttgtctcctagtggtgtcatgatccactcaaccacatctctttcaactacctgcaacgcatgtccaaggatgacatggtgtgcggaatgctgacgctcgagcatgtcaatcaacattgtgacgccggcattacgacaaagaagagatgtgtgcccatcctaaagaaggccaagtacagcgtgcagcaatcattcgatcttgtccatggtgatgtctgtgggcccatctctacacctactcccgatggacgtcgttacttcgtgctactcgttaacgaccacattcactatatgttggcggtgttgctctctatcaagggtcgtgcgggtgactcaatccgataagttcaaacaatggcaaaagcaaaatgcgaaaggaagctcgagtgattcacctccaccaagttcgcgaaacactgcagtgaccatgcatcttgcatcagcttattgtgccctacataccacaacagaacgatatggtggagtgtccaaaccagtcagtgttagcggtagcacacgcactgctgaaacggagggatctgtcggccaaattttaggggggagtcaatcattgcggcagtgtacccgctcactcgcgctccaactaagaatcttgatggcattgacgtcgtatgaggaatggcaagagtggaagccgacaatcgaccttgatatagtgacaaaaaatccacttgtaggtgacaatgttagtgccaaggggacatggcaccaagtcttaggtgtggttggaaaacagggtcgcatactcctttatagcacgacgccagtgcggatcggcgagcg

SEQ ID NO: 117791 - DNA, 692 bp, Zea Mays
ttaggctccaaacgacgtagggcaactctcttatccactttcctgcaaacttttcattttgatcgaagactttttcctgagtgcctccaatatcatcccgttagcccgttcaacctgctcgttggctcttgggtgtgccaccaaagcatatttgatctgaatgcttttttgctcgcagaaatcaaagaactctgaacttgtgaagttggatcctaggtcagttatgatactatttggtattccaaatctgaatattatgtcttgtatgaattccacggccttagctgaggttaaagaagcaatgggtttgaattctatccatttagtgaatttgtcaattgctaacagtatatgagtgtatcctccttaagctttcttgaaaggtccaatcatatccaatccccagcatgcgaacgaccaagttactggtatggtctgcagttgctgtgttggtagatgttgttgctttgacaagtactggcaggcttcgcacctctgaactaactcggctgcatcactttttgctgttggccaatagaatcccgacctgaaggccttcccaactagtgtcttggatgctgcgtgtattccacattgcccagcatggacctcatctagaagttgcttcccggtagatgagagaatgcacttcatgaggatgcccgatgcaccccttctgtatagtgtttccc

SEQ ID NO: 117792 - DNA, 671 bp, Zea Mays
cccctggccacgtgtgggtgattagctttgtgaattgcgaagggcttcccgagcgtggagaaaatttctggcaggcttcgcaggaccttgtgacccgatttgcagcgcagatcatggcgggccagtagaaaccttgatggatcacctttgcggctagggccctaggccctgcgtgagagccgcaagtcccgctgtggacttcgcgcagaatttggacgcttcggtctcggtgacacatttaagcatgggttgactgacccccttcttgtaaagctgaccttcgattagtgcgaagtcccagcttcgatgtttgaggcacttggcctcattgatatcggttggatgatagtacccctgcaggaacagggttattggtgcccgccagtcttcggtcatgatgaggttgactatgcggtggccctcgctatcattggttatttggagcccctgtgggctgcggacggctggcatgccgatgacatggtagaatacatcggagggcagggcctcgcctcgggcggctgccttggccaaagcgtcggcctcctcattcttggctcggtccacatgctgtaaggtaaaacctttgaattgtcttttgaaactacggatagccgcgaggtactgcataagtgcggggtccttcgctgtgtagtctttcttgacttggc

SEQ ID NO: 117793 - DNA, 481 bp, Zea Mays
gccgtaaggaactctagtttcaccgtgcacactcaatttgaagagaggtggagaaggccgtgcgaattttgggtttttctcaagcttgcggttgaggctgtgagtgcctcgccgtggtccatgccgctatttaaagccacgacggaccgactagcgatcagcggccgcggatagcattgctagcgcatgttcaccacgtagaagagaggtacagtgagggaagagcagggtatggatgacaccacggtggaggtgaccgagccacggagaccgtcggtgagataacaccgaccacatgcggctgggttcgcggagtcgtgccacgtccaaggttatccttctcgcgatcaaatccacaccgtttcatccgagctcatccaattccacagtgcggtagatcttttccccctgcgttcttcagatatttcagtgcacgggatcttcagagttcgcctgaaccgacctcctttctctccccttt

SEQ ID NO: 117794 - DNA, 436 bp, Zea Mays
cgggattggcacacagttacagaggtactctctatttgtttattaatactaatctagccacttgttgtaactaactgtctataataggctacaatcagtggagtgatctttctccattctgaatttcatctattctttacacggcaaaagggaactcctagctacccatttccttactctctgttcatagttgggtttcctgcaagaatcttcatctgctctggtgtgcattttccatttaatccttaagccaaaacaatggcaactgataactctcgatttcactgctcatagataataaatcatacaccttgtccatacaactcatagtaactcgtaatgcaccaaattaaatgttctattttaccctgtaatatcctatttgattaggtctttcaaaaaatttagcttgatccaaacaatggaaacttattgt

SEQ ID NO: 117795 - DNA, 440 bp, Zea Mays
actttgcctactcggtgcatgtttaccagcgacatgcacaagagggtgcaccgcctcgctctcgtgctgagccaacggttcgccatgcccacctgatggtgacccatcaggctactagcgttcttcgtcctatggaccgctttgtcctctctgtgacatcctcctcgccagtatctgcatggtacacttgactacatgcttcttcatcgtcgctcctctacccacgagctggttgtttacaccaacactgattgggcgggatgtcccaacacctgtaggtccacctctggctacattgtgtttcttggagacaaccttatctcttggtcctccaaatgtcatctcgtagcctcccgctccagcgccgagaccaagtattgtgttgttgccaaaggtgtggctaaggcatgttggctcagtcaacgcctccaggattcacg

SEQ ID NO: 117796 - DNA, 570 bp, Zea Mays
atgagaacgatcataatgagatattagactgatccatatttaatacttgagagtgggttatagaagataaaaatatgacggggtagatctcgatgaatgatccagagattcggatgataaagtcacaacatgattcacaagtaaaagattaccagatccaggtgaaaagagaagtcatcaacccagatggcttctaagttgagcagaagagaatttaatgaggattttgggacaaggttttccaagaagaatttgggactagatattgttctgcgcaatagacaccatccaaagttttatataatttttttaacataaacaagtgcacaagaaagctttaggttcgactagcggtccaactatgaggttctctaagttgtgcaggtgtaaattcaagggtaaacacacgagggctagaaaatactatctcaagcatggtttttttagaggtttcgcttgctaaccactaggttggttaaagtgggggggtcttttcatgagcaaaacagacaacattttttttgctggttgggggcaaaaagggttgaacaactaaaacatttcctagat

SEQ ID NO: 117797 - DNA, 562 bp, Zea Mays
ctatgcaaacttcatggttgccaccaactcccggttgactatgttactttttctacttggcgtgccaactgttgatagtgtttatatggggtagatcatgtgatcgaaagctaaagctaaaggcacatgagacacaaagatttatgtaggttcgcactctcgacataagataataccctacgtcctatgtgtgatatatgctttgatacgatataagatgtcttctgtcctcatggggcttcctgtccctccttttatattccaaggtgtggttgtggtttacaggataaacaccgagtcagttacctggttggagtcaggatcgagctgatatcgagttgtataagagtcaaactctatgtttacatgagtaccttccttatctgttggcatatttgacatttcttatatttcaataagatctttgccatatctatgtttttagaatcctcctagttgtaggttttcttctggtcttgatcgttgagtccttggactcgtggtagagcccatgtgcccttctatacagattcttcaccatggaacttgatttaggtatcta

SEQ ID NO: 117798 - DNA, 635 bp, Zea Mays
cagctttgtcggggttaaaaaccccaggcctcgaagcccacgggtcatgatgagtaaacccgacccgaagaggcccgagcaaggcccaactaacctccaaagcgcgagcggaccactatcacctctagagggtgacatacgcctttagccccggcatgaagcaggagtgcctatgggtcgagcgaaccactatcacctctgttgggtgacaactaaccgaacccgatgccggtcctatggccgggtgaatcgcatcccgcctgagaggtcggtcgaatcggacacgagcggatgaacaaactcatcgatttgctagcccatcccagaagtgagaatcaccgccagaggcggcactatactaccaactctggcatgggacctccacttgaactagtgacagacactggtctgaaccaccgcgctcccacgagctccatgctacccctttgatcaagatgagtcaacaaggtcatggctataagggaatggacgaggaggaggaatgacgtcaacggagcgagcatgatcatcctttcaatacatttcatctattcttcgtcttcacgtttataactgatccctctcttggcatataaaagaaggacaaccgacacactctcgatcttggactctca

SEQ ID NO: 117799 - DNA, 591 bp, Zea Mays
gaaagaaaataagaatgacaaacataaagaatacataaggttaaattggttattcagctatttgacttcattgaggagagtagagacttaactatacaggaatggaacttcaaagaaattcttatcctccatctgcatgatcttttgtctaaacaacgaacttattggaaacaaagaggtcaaattaaatgggttaccctaggtgatgctggcactaagttctttcatgccaatgctactgtcaagcatagacacaaccttatttcatcactaaaggatgacaatggaaatatggctctttctcatacagacaaagaatctgtgctttttaatgccttcaagaacagattggggacttctcaacaaacatccatggtttttaacttaccatccttgattcagccgattgataatttgtcagaacttgagcaccccttctcttgtcatgagattgatcagatcattaaatgtctgtcctcaaataaatcgccaggtccagatggatttaatatggactttgtgaagaaatgttggccggtgattgcccctgacttctatgaattatgcaaaaaaatttgaagggtccctctg

SEQ ID NO: 117800 - DNA, 373 bp, Zea Mays
ctggtatcggagcaaattccatcacagagaagtcaataagtcatgaataccaattttcaaaatctaaaacttgcctagaaactactacggatcgtcaggactagatcgctagacctaggacgaaaggccttaggcatagagggagaaataggtggctaattaattaggccctgtgggccaatacttatatttttaaggatgccctaaaaaggcaccctattttcttttgagaggcaacgttccttacagcatgcatgcattataaaacaccaagaggaattaaaatttgagctaaccccttttctttaaaatcatccgggctctctttttctttttccttccaccataatctttatctttgattcccttccgc

SEQ ID NO: 117801 - DNA, 297 bp, Zea Mays
ctcctatggcactttttatcgttcaaacgtcgttttcacgtcgtttgacctatcgatcgtctcgtctcgtgttttctgtgccatatctctctgtgtatgtatttattcacatttcatatacttatgactatgtgactaatacgtgctcacctcttctgtcatttcagtgaccttgattgcccgtgtgccgtctcccgtcctgcctggatcgtcacctctcgtgtgagctttccaggtagtcatctcatcttttgctaatctatcggacattttcgctctatgcttagtcactctctc

SEQ ID NO: 117802 - DNA, 377 bp, Zea Mays
ccgccgtgggccatggtgcatcgtgtgcagacggttgtgccgcgctagttcatgtaaggatgattcgttcggatccgccatgatcttctgcccattctgcgcttactctcgtatggattggggcactggggtggctgatgcttctcctcgtcggcgtgccatgccgtgttgggcggcgcggctgccaccgccgtggagcttgggatggcgagtgggcacgatggactgtgaccgttgatctggccaggaccggcagagatcaagtcatgggataacgataaagcgttctgaatctcgaccgtccgatttggattgatcgggtgagatctggtcttaggggttttaaatctgggacgttgcttttggatccgagggct

SEQ ID NO: 117803 - DNA, 779 bp, Zea Mays
ctttaataaaaatgccaaactaagggggtatcgggttgtctcgaccatcagatgtcaggtcaatggccaagaaaagatcccagttcttggctatcgatggtggaacgacggaaacaaagggtggctagggtcgtaacggagaggcgggactgagcgtaggctcaatttaaaggaagtcaccacgacgatggggggcggcggcgatagcctgaggagctccacgttagcctcaagggtgtccacaggccagtaacgtggcagacttaacacaaacccattatggtggttcaatactcgagcctccaaccagctgcatggatggccagagcgtccggtggctggctacggcggcggtggatgattcatggtgaggacacgtggtgtcagtggctagagcggtaattcgatcatcgaatccgagcgaagatctttttaccacgcattgatccacatctcggcggctccaatcatggcgcgagctcgaatcacggcggcgggacgtcgatggcaagcacatggcacttaatcttgttcattttcactgtaccatggcgatgttcattagcgcatctgacagagccattttgaagagtcatttccctttggctttttgttcaacaacctaccaagtcgaccatagcaaatttgttgtccatcatatcagctttaattttgttatagagttcttgttcatacctccactcgatcaagcacaattcagctctcaagttgatctaatgccactgtcagtctaacctttaggccaacccccgactgac

SEQ ID NO: 117804 - DNA, 418 bp, Zea Mays
ggtgcaagcggttacccagcccctgagggtgttgctggtaatgatccagctcgggtgggtagcgtgagctacaacctagcccccgagggtgctgccggtggtgatccggctctgatgggcagtgcgggctgcgacctagcccccaagggtgtccgagcgggctccccttctcatacctccatggatgtcctcgtcgggtcttctcctccacattctgattgtatggcagcagcacgtgcttcaaatcaggaagtcgccttagagaccggcgcacctgatgctagagttctgattcctgctggtgatgttgagttgatccctgatgatgctcttcagattgccttagttgatattccttcgtcgagccatcaactggcttctcatgatttggggcttccttcattcttctccaatcttc

SEQ ID NO: 117805 - DNA, 610 bp, Zea Mays
gtcgcagccctgaccctaaaacttgccctaaaaagaaaatacctctttccccaagaaaagtcttctctcctcctccccgattttagcagacccttcttttcctattcagatggaagactctctggccattaggacatcctactgctcggaggtggaagggttcccacatcttttgtgaagttgtgcgcttcgcatgggaatccgcaagaagccggaatacgtctggaaggagtatctcgagggcggaatggagaaatgctctatggcagtctacctgggagaaagccgaaactatccgaaccatccttccttccaagtcacctttactggataccgcttcccagatacttgccagaatgttgcccgaacagccctccgacaactgtgccagaactacaacaaggtgatctttgaaaccccccttcgctactttccacccagcaacaagaatacccccacctggaggaaaagacttcaggccctgtcaggaggaaatcctattgaggatgatcccaccatcgtctacatggctggataccttcacacccttgataaccaatatgatgacctcaccctccactgcacctacctaacctcccgggtggaaagc

SEQ ID NO: 117806 - DNA, 541 bp, Zea Mays
gaggagtgcgtgtgggagtgggatgtgggcgaggctaggtggtagtggaagaggtggaagaagagatagatggacggcgagttgaatttttgagaagccaaagggctgatttgcaaaatacacagggcacgtgtcatcgctgaaacggctgtgcctccgcaaaatgcggtcgtgcgtgggaggtctggtccttgagagaaagaacaaaaaagaaaagaaaccaaatgttattctataatagataacagaactgattaagaaacaaagaagcaacctaacatatattcagatgaatattttctaggtcaaaccactggtaaaaatagtagctgataattgtgtgacatgttagtccactatcgaatgaaattgcattttgcacaaattgtagcctcctaagctcctaccatgaacgaaccacaatgagctaagcaatactctgatctctcggcaaaaccaaaggatgcctggaacacaaaccgatgaaaagcacccaacaaccagatgataagatgcactggcagaggtcagtggcaaaaca

SEQ ID NO: 117807 - DNA, 660 bp, Zea Mays
ggcatacctggtaattcttccggaaatacgtctagctattcacacactattctgatgtgctccaaatatttttcttccaactaatttaccattgcctctgttgttgatgggcatactgacattgacttcaattctttctccttgcggactagttaatgtaaccatcctcttggcacaagatattactccatcatacttggtcaagtagtctattccaagtatcacatcgatcccacttgattccaaaattatcagctctacaagaaagcttaggcctctaatttcaatcttagtctgagggcatgagtgagtggctctaagttcacctcccagtaatcgaattaataatttcttcttcaagggatagtttggtatattatgtttttccacaaatgactttcttacgaaggagtgagatgctccagaatcaaataaaactgatgcatgtatggagttaataagaaacataccatacaccacgtcgacatcctcaggaactgattctactgtcacatgattgcctcttcctctactctggttctgcaaagtcctgttctgtgcagatccacaagcatgtgtgttctgctcagtcctctggttgctgttcttctaggatgtttgttggttacgccttgggcagttgttggcatagtggccaag

SEQ ID NO: 117808 - DNA, 319 bp, Zea Mays
gtcgatttccgacagggtggttgcgagattctcggctttggctgcggtggtaacttcggcatcgacgggtatagtagctttgtccgtcgaagctaagggcggggtctattcaatagcttccattatgttcatcatacgccgcttcttttgccccccattttccccctcggcagccgcagcgatttcctttgactacaagaggctagtcagatccaacctcagaggacttagcagggaaaatgggaaaggttaagtcattaccttcaaaatatccgagacctcggcagcagaagacgaagaagggctcataatcttcttc

SEQ ID NO: 117809 - DNA, 517 bp, Zea Mays
aaggaatggatcatgaccctgggagcaaggcagggaacataacaatgaatgtcgacacgaaaagaggtagcagagcaccatgcatttctaaaacaacccttaccctgactcaagtaaatgtcagtgtttagatccctgagtcctaggggccatgagtcagcggacggatagcatcgagtttgtttgttgcgactcaattaggagtccaccctggccacaggatgaccccctcagcccctcgcatcgacccaaagggttggacgaggcagaagcagacagaaggggtcaaatgaatcagtcaaaacctacttggatgggttttgcgtattcgttaaactagccacaccattagccttgtgtacgtctcattaactacgccaatcgacaaggtgcgacacaaatactatcggtctcctcccactcatgacatatggatcttaggtttagactatctccagtaacgtcctcaatatctatcctctatattcgtcctttacagtctactctaaaagatttc

SEQ ID NO: 117810 - DNA, 364 bp, Zea Mays
cacgagctgcactatcaaacgaaggccagagtagatggtattcatgagaacttcggttgctacaactttgtgtatcggaaggatatgaaggccccggttctcggctatcgtaccaagtggccgaccggatggaaaagtgaattgttttacataaaggcagacgggaagagaagggagaagctaatgactatggttatgagtccattaaaattgagcttcgggatgacaaggcccttgtgccacatgcagcttggctccccatgccaggtagccgaagtagaattcagagtggtagcagccgaaatcagcactagagatctagtgcaagagtacttggcaaatagaatatttctgacctctagtg

SEQ ID NO: 117811 - DNA, 276 bp, Zea Mays
gttttgtagtcccaaaatctctctccgcggagaaatttggaatcatgccattatgaaacttgggtttcgcccaaatgccattatgtacaaggtcttcgctagttcgccattctcacacgctgtttacagacaaaatgccattgaagagctatttgatacatcaacagagaaaagatcacctgcttggacttttttgcccctcttcgaaatcagaacgtggccaaacagacgagacagcattgcacttggctgttgcgcccaggatgcaaacttctg

SEQ ID NO: 117812 - DNA, 506 bp, Zea Mays
gaagtgggagcatatcaccatggatttcgtggttggcttaccccgttctcctcgaggcagggatgctatatgggttgtagtggatcgcctaactaagtctgagcactttattccaatgaagaccacaaattcagcttcagagttggtccccttgtatatgaaagaggtaataaggctgcttggtgtgcctaagtccactgtttcatatcgggactccaaatttatatccaaattttgggagagtcttcacagtgctttgggtaccaagctttctcttagtgttgcttttcaccctcagactgatggtcagtcagagaagactatccaaactttggaagacatgctgcgtgcttgtgttctttcatggaagggtagctgggaggatcatctcgccttggctgagttcgcttataacaacaactatcaggctagtatcaagatgataccgtatgaggccttatatggcagacggtgtatctcccctttgtgctgggagactttgggag

SEQ ID NO: 117813 - DNA, 491 bp, Zea Mays
tgaagatgctctgtcagaacaattgaagaagaccctaatggtacagtaacaaaaagatcttctgattcagtgtatctcgccgctagtgaccttccgccgcgattgacgtcggtcatcgcgatttgtgtgccctagcttgcggataacgactggcagtgaaagatctccacgcagggaaggattggagccttatcaccggactattccctgagccacttactgcgtgattgactgaggtgtcctcgctggagttcgcggtcttttcatagccgtgccacgtacttagaagagttaccacgtcgtagtagacaaccgtaagtagtcagtccatcgcctaagacgttgccccgatgaacgccacggtagctcgcgccggtgactcacccctgtcttcgaccaacgatcttcccctttcaaaattcggagccaccgcctccagacactaaaaattgatggtgttgctagctccgcaaggttgtcacgaagccagg

SEQ ID NO: 117814 - DNA, 1572 bp, Zea Mays
attgtggcaatctaggtgtgaagattattttcacatgtacagtgttgacccgagcctctggatccaggttgcaaccatgcagtgcaccggacccgcagctcgctggttgcaatccgtcaaaccatcgctatacaatatgtcgtggtcccaattcactcatatgctccttgaacgttttgggaagcatgaacatgaagtcctgatccgtcgtcttttccatttgaaacaatccggttcggtgtcagattatattgaccagtttgcccaattactcgaccaacttcgagcataccaaccagtcaccgatcctctctattataccatgaaattcatagatggcctgaaacatgacgttaaatcagttgttattattcaacgtccccaagacttggatactgcctatgttttggcttcattgcaggaggaggtgggcaactcggctaagaagtgggacagtcgacgttgggagcctgtccttcaagcaaaaccatatgctaagggacctatgcctttaccaccaccaccaggcaaatcttcgtcagggggttccgcgccatcatatactgagaggcctcaccaggacatgctcaagcatcctccattagacgattgcctggccaatgtgtatgcttacaggaaggcaaaagggttgtgttacaagtgcggcctcacttactccaagggtcacaaatgtgccgacattgtgcaactacactgggtggaagaaatttggaaccaattcaccccatccgagtctgaagaacctgtggatacagtgcctgccgaattgcatgttgtagtcatgtctcaagccgctcatggcgaagtctctgcaactaaaacaatgaagtttctgggttccattcaggggatcgacctgctgattttattagactccgggagttcccatacattcatcagtgcagcagtggcgtctcagttaaccggttgttctcagctttgccagcctttatctgtacagattgccaacgggacgcgtctcatctgctccacagaattccctaatgccacttggtacctcaatgactatcagttcacctccacactgaaagtgttaccactatcctcctatgatatgatagttggtatggattggctacaattacacagccccatgttcgtccactggaccgacaaatggcttactgttccctatcaaggcaccactgttaaacttgtcggtcttcaacccgggggtacccaatgctcagttatggagatccttttggggcagagcaatgaggcagttatggaggtatattcagctgaacacatctcagagaaggatcagtctattattcattccctgctggtgcccctgcaggacctacttcttcggttctctcatgtgtttgttgtcccccagggtcttcctcccgagcgtgactgcgaccatcacattccactaattccaggcgcacgcccagtccaaatgagaccctgtctctatgccccagctctgaaatcagaaattgagaaacaagtggctgacatgttgcaatctggcatcatagaacgcagcaagagtgagttctcttcgtccgtaatttt

SEQ ID NO: 117815 - DNA, 522 bp, Zea Mays
gagaaagacagttctttgggccagaacttattcaagaggcagaagaacaagtccatataatccaggagaatttgagggtagctcagaccaggcaaaagagctacgttgataatagaagaagaccactggagtttgaggaaggtgatcatgtgtatctcaaggtgtcaccacttcgtggaatgaggagatttaaagttaagggcaaattgtcccctcgctttattggacctttcagagtttttaggcgagttggggagatggcataccaactcgagttacctgataatctatctgatgtgcataatgtattccatgtgtctcaacttaagaagtgtctccgtgtccctaaggaacatttaccaatggaagagctcagtgttcagggtgatttgacttatacggaataccctattaagattcttgacactttgactcgagttacaagaaataaagttattaagatgtgcaaagtgcaatggagtcaccatggagaagatgaagctacttgggaaagagaagaag

SEQ ID NO: 117816 - DNA, 473 bp, Zea Mays
gttagaatcttgtttgaaatagattgggggcgagaaaggttatggtaagggaagatttcatcctggatggtggatcctgacttttgaagatcttttctggcttatgttcttcattgccttgatgaggtcgatcaccttcgatccctagtcttgacgtcatcatctcagctagggacatatagttaagatagcttgtagataagaacatatagctaataggtagatggcataggacgagtgtgctatggccaaacctggtctagttgctttgttaggttggctaggtacaaatctttaggaacatgtagattaggtgggtaggttagaatattttgttgtgaaatagatagtttaggcaacctaacaagaatatataggttaggttgtttgtgtattggtcgacttggcctaaggcaccaatttaggttaggagtaggatctaatctactttaccaatatcaactaacatgttt

SEQ ID NO: 117817 - DNA, 720 bp, Zea Mays
cgaggatttcctcgttccgcgtgctggagatactgcagcttggttactttggtaacagtgtcggacgggccccgggtgcagaggaggtccccgagcctgaaggcgatttgatagtttttgaggcttttttgttgccggtcttcacctcccgacacattgattcgtggtggaggtgttgcaaaggtttgaagtgcaagtccaccagttgacgccgaacgtcgtggtggcactaacgaagtatgtctgggcagttacttcctacggcgggcagctgtctgtggagatcttcaccaaaaattattgcctgcattggcagagaggaaaataggaaataagatagcacaattcggatcgtgcaccttcacaccgaggactgggaagacttcggctgaggttgtggagatagtcccctgcgctaggaacaaatggggtaactagtgggatttttggttctatgtggctcccggtgacgtcgaaggcctgccgagcttgcctccggccattctgtgctcacactgctatgtggcgtttcctcgattcgaggtggcagaggaagacgaagacgaaggggcccttcgacatgctgcccacctaagtagcgggcgtgacttggttgaggaatttattgcctatggagtgtggcccttggcgcacggctgggtattgggccaagtgacccccgttggatgccaaccctgggcgaccagctggtgcgaagtc

SEQ ID NO: 117818 - DNA, 516 bp, Zea Mays
gtaaaagatctcgcgtgagggatgagcttggggactgttactgctcagtcgtcgtacccacttgtcggcgacgtggccgagcggccatcgccgaggtggacgccgttcttcgcgattgcgccatgccgtgaccgtttcaccacataacaatgaccatggcaagcttagaattaccatccttgagccattatatcagtgagtgccacaatatttgctccggtgactcctcctatcactatgagcacttctccgttcaaatttgtcatactcgtggtcgctctctataacttgagtattcggcctactccgttagcttgttacgaactcagagcaccgctcctcgcccccgattagccaccgtagccgcgaatttggtatttccccccaaatcggtttgctgcgccgccgtgaggcatctcgccgtggccagctgatttcaggttcgttcatccccttctatgccgtgattaagcatccttgactattaacgctgctcatcgacccaaccacttgaac

SEQ ID NO: 117819 - DNA, 688 bp, Zea Mays
atcttagtaatttcatatagtctcttgcatgagaataatgttcctcatatagtatgctactacacatcaatccaacttgttaaaataatgtcgcttttatcaaggattgttgctttcatttctaaagtagcatgcttattggattctcctatttttaagcttgattgaaaatttaatgcctttgttgttttcttgatcacatattggttgatcattgaacaacctcaattgtcacttatgcttcttagtgcctcatgaaatttgaatttgatttcaaatggtatgcactaaggaaaaaggagaattcatgattcatttatacaacttgtgatccatttgatttatgctaacaataacttgaaaaagatcactagttatagaactctctcttgtgcaaaatattttcacacacttttattaagcataggtcttaagcaaacgagaccaaggacataagcacaatggagagaacgtctttatgagaaggtacaaaagggtaaaaccacttcctttcattcaaacctgtacctaaatcttcctcctatatacactctttgcatatcaagcatgacctttgcgtttatccctgcttcatacctagtttaacctcttaaaatttcactcatgcattattacatctttgctaaaactagatgaagtaattctattgtcaaagagcttaaagctt

SEQ ID NO: 117820 - DNA, 407 bp, Zea Mays
gtccttatcacgtgtgtggttatcctaacaaactcgagtgaagcagttggatctcacctaggaacgggtccagaccacccctatacatatgaaggggctcaaccgattgagaacacacacaatccattcgaaccaatctattgacattatcttgccttaggagtagacgcaacataggtctagttatagttttgcaatcctaatcttcacctctctttcactctatgtcatctagaggcgctttcgttggcatgttactatctgtcctcctcgatagggtatctcccgagaggcaatatctaggtttaacgtgaagccctctctagacactcctcttcctgcatgtgaactgtccaccccatagagaagagtgtaattatctgctcgatgatgacatacacgcggat

SEQ ID NO: 117821 - DNA, 308 bp, Zea Mays
cgggtgagcagggtggcgccaccgcggtctggcttcgggaggggggagataggcctctagccgtcgattcaccattggagggtggcgatttgttgatgtgtacctcttcggcctaggtgcgcgtggtccatccgatcggaaatcgagggtcgcgatgggatctcgccttaataaaatcatggtcgtggatctaggataggatgactgaggttttgtaccgtttccttaaaccaagatctaatctcgcacgtctaaattggatcgtgcggttcagacgcgtccatacccctttggctcggctgtttcgc

SEQ ID NO: 117822 - DNA, 271 bp, Zea Mays
ccctgtggagcgtactgagctgggcgtggtcctcctggacgagctggcgtaccctagggcggcacgtagcgaggacgaatactactgctaccttgcccctaggaaatggccttcctcttcaaatctcccaattgagcacgcttgtgttcaatagctagagctttatcaagaagcctctgaaatgatcgaaatgtataagcaaccagtgcatactgtagtggcccattgagtccttctgtgaagtgctcttggttcctttcatcatcagcca

SEQ ID NO: 117823 - DNA, 689 bp, Zea Mays
taattgagacaactaggtatactaacttgtttttttgagtgttatgaataagataggtagaagttcacaaagattagcaagtgctccacaaggatgcatattgataaaagttaggtaaacaaagtatctggcattattggatctaaagaggttatttatgttgtagaagcggaaacttgaagaaaaatataggaaaataaggtgtctggcattgttagatttggattaagactcgtgagaagtcataaaagcaagatgcaaggcaaaggtataggcaagagcattttgttttatggatcaagacacaattgagcgtgtgatcggattatgtgcttcaagtcggttgcttatgtgccattaggtgagaagaaaactcatgcatgtgcattaggatctaatggagttaagagaaaccaccttagatatcactaacttaagctaacttgtgattcatagagtttaaaataagttggagttagcacatgtgagaaaatttgagacaaatagagggcgtcgaaccctaactgctcaagggcgttggactgatacaatgacaatatgatgcctaattgtagagtcaccctggtgtaggattcgatggtgggggttggaccaatttgacaagctgagttgctctctagtcactctctcagtagcgtggggcccattatctttggtccgacggttga

SEQ ID NO: 117824 - DNA, 444 bp, Zea Mays
gatgtgcgcagtttcctgggcatggctggctattataggaaatttgtgtctaattttgggatcatcagtaaaccgctgaccaaccttttaaaaaaggacactttattcgtatggactgaaacagcaaaccaagcatttgtggctctaaaaacggcacttgtgcaagcaccagtgttggcaatcccaaacttttccaaacctttcacgattgagaccgacgctagtagaggaggtattggagcagttctgcaacaagatgggcatcctatagcttacatcagtcgggcattgggaccaaggaatttggggctgtcaacatatgaaaaagagtgtatggctattctctttgctgtggaacagtggcgtccgtatctgcagcatggtgaatttatgatacagactgaccaccagagtttaactcaattggatgaacaaaggttatcg

SEQ ID NO: 117825 - DNA, 472 bp, Zea Mays
gttaagagcttgtgctcttaaacatggtggaagttgggataagagcttaccatatgcagagttctcttataataatagctaccaggccagtttgaagatgcacctggcttaaagtgcaggactccactgtattgggatcagactggagaaagacaattctttgggcctgaacttatacaagtggcagaagaacaagttcgaatgataagagaaaatttaagaattgcacaatccaggcaaaagagctatgctgataataggagaagactactggagtttaaggagggtgatcacgtgtatctgaaggtgtcaccgatccggggtatgaggagatttaaagttaaaggaaagttgtcccctcgcttcattggacctttcttgatcttaaagtgagtgggagaagttgcatatcaactagaactacccgatcacctgtcagatgtacatgatgtatttcatgtgtcccagctaa

SEQ ID NO: 117826 - DNA, 286 bp, Zea Mays
ttctctcgttaattggtcgtaggtcatagttagttacattcatcttttgaggtagcttcttcatcaccattcgttttttgaacatgatcctcctcgtcccaatttgagtattctggatgagcggtatcatcaccaatcttgtcctcctcctgttgctcccactcaccactcaaatgaaggcacatccaagttcttgttcacagtgacttgtaaatattgcacaaattcactgacttccatcagaatcatactgaatcagctcctgcatcaactaactacacaaaac

SEQ ID NO: 117827 - DNA, 599 bp, Zea Mays
cgatcggaggtacgaccttcacccctgagtaccctcaaatgtttgttgattggggttcggttggcatgaattcaaggggcaattagtcacagtggtcggggtatgctatgcctaacatgaacttcccaggttttgatgggtcaaatcccaagttatggaaacatagatgtgaaatctactttgattactattttgtacctgttcaacgttgggttaggatggttgtcatgcattttgaggggtctgctcagtattgggtccaagctatggaatctcgggttagggaaatgaactgggagtcattatgtgctgctttaaacactaggtttggtagggatcaacacaataccctgattagacaattttatcatatacgccaaaccaattcagttgttgattatgtagagcagtttgatcagttgatgcatcagttgttagcacatgaaaaccagctgacctcggctatgattaccactagatttatagatgggctaagggatgatgtcaaaagtgctataattatccaacgtccacccgatctggatactgcttgtgctctcgccattttgcaggaggaggtgttgatgcacatggggcgt

SEQ ID NO: 117828 - DNA, 275 bp, Zea Mays
atcgcgactcgatggtacgtgcaggggcacgtcagaacacatgaagtttatacaggttcgggttgcgtgaatgcgtaatactatacgtattgtgtggtgttgagtgttgaattgccttgatttcacatattacaggtggttcgtggttggtggaagacaagatctcatatcaatctattagtgggcgaggggtagccagagtgttttttggtaggggtatctctacagccttatatagccgactatagagatatccctttacagatcgtggagtc

SEQ ID NO: 117829 - DNA, 378 bp, Zea Mays
gttctgaataagggataattgtatgactgacctgctgaatcagtcgaattccccggatgctgtggctcatcagtctcgttttctaaattatcagactcggcacgtagtacctcgtcgatcaattctataaacttgtctgctatggcgtattgcttctcaataattttgtcaatgctgtcttttatggttatgcatgacttgtcaacctccaagtcatatgcagcaagaatgtctgtgaatttagatcgatgacgatgtgggagatcgttgatcttacttgacatcatctctttgatagatggaagtttgatgttaaaagtgggtcgaggcatgggggcagggcgcggtgcatcaaaaatgttggtcctgcactccggc

SEQ ID NO: 117830 - DNA, 707 bp, Zea Mays
tgttttaagacagttacatagtaagaaatgtcttatattgatttaagacggattgttattgaaaaccgtctcaaataaatataccttttgagtcattaagattgcaagaattgtcttagattttggttagtatattagacacttttgtatatgaaaccatctcaaataaagatattattggagtcgtttagactataacaattgtcttagatgttagtgggtatactagacacttctaaatatgaaactgtcttcatataatattctgataagacatattgtgaaaaatgtagtaaataatgaatttgacttagtttgatgatatatctcttcaggttttttaaaacatgaaccctcctccctccacgcccacatttggcgtgtacgatgacacaacgtcgtgttgacgtgtgaaacattatttatcattttctttttgtatcttcactttctctcctgaccacgagccctcactagagactgcccctcgacccgataaggtttggacccagcttccctccttaattcgtctgccacatggcaactcccaaaccctaactcgtgggcccctcctcccctatgcccccgcattgtcgtcggtcctactggtcgcggctcacccatactctcgcgcgcctgaaccctaggcatcctcctcgcccctggtaattgctgccatgagcatctatgaagggcatgctacgaac

SEQ ID NO: 117831 - DNA, 761 bp, Zea Mays
gtgcattttttttcctcaatctcaaatattcgccacgaaatgcatcttttcattagaaatgtagtacttgtataaatatatatcgctaatagtttaagttattcttgcgctgtgtgacacgataacaaatgatatcatagcatttttgacacgcacacagcataatatcggctctggtcgtgtcacacgtacgaaatgcttcgattgtgatgcgtgatgctgtgcatctgtccatccaggccccagcaaaggaacgacgtgtgcagagacatgctcccccacatttgtaatctctttgcacaagttttttttttctttttcttcttcccacttcatttttcgatcatgtgaccgatgttgattttataaccaaatggttcttaaaatagtatattgtgctcgaatcgtctgtgcttatatattagtgtgtgtggtacacctattttatctgtaaaaaacaaaattaacaaaaaaacaaatttgagcaaaactaaatcagatctgtcgctgtcttggcatccggctggttcaacgaacgcgagcctgacctgaccagttctgaaacggccaagcaaaaccttgctctggctggctggctggcagtgtggcggcgtcatcggcacgcgcagacaaggacctgatgagaatgagcttctccttcatcgtctctcgcgtcgcgtggactaaaatattgcaacctgcagcttgtacgtctctttcttcgactatcagctgatggcaacactgaatgcatgtagagt

SEQ ID NO: 117832 - DNA, 409 bp, Zea Mays
gcaactcaaattgatatgagatcaaatgcaagctagtaagagaacaagagagatgggcgagaaagaaccaaatcacaaagcaaaggttgtcacaatgaacatgagtgatttgttcgttgagaagtccacataggacgggtctcttttaaccctttccctctcgtggacggtccgcgagcctcatcttctttcaacagctattagagtttagggtctagggtttagagtttagggtggtatttatatccttcaaccacaccacatagatgttgtctcttctctgccactcgtggacggtccgcgagcctagtccgggcagttaacacctgcaggatcaaggactagatcgcaacagacagttacaatggctataatcgcattaaatgcgccgccagatatcaaataaaac

SEQ ID NO: 117833 - DNA, 494 bp, Zea Mays
aacacaaccaacgataatagtaaacatgtacgactcagttgtccgacgtccacctgctagttgctctttttagtttctaactcgtaagcattgcgaagccaagcgattcttccttcctttgtctccaagtttgcaaaaacatctctatacttcttatgaatcagaagatgcgtggcaaacaaatgtatttcgctcccttcaggtgatccatcttccttcacttgcatcagctgctttttaatctctaagcgaaccgggtcattgtcagaagaggtaatagacttgtttgtggtcactgagcgggactcaaaagccgccacaagtcttttcatgtactcttccctcgaatcttttttcttctttggtttaggggaatcatgtcgcaacttacgcttgccagtagcattagtgcaggggtcaggtgtgctgttttcacccccacctaaagtgtattccaaatgatcatcagacgaagaattagcatcctcgacgcc

SEQ ID NO: 117834 - DNA, 618 bp, Zea Mays
gacccgaggccctgtagatcttcctcctcctcgctcgtaacaaccctccgccgagtttgccgccagccagatcgcagctggcgcctcaaccaacctccctagaggccataaaacgcgacaccgtaccctagccctcctcttcttttcaccgcacataacccccacgccacccgagaatgcaaggttgggtgattgccgttgcagtcaatcctcagcctcgttaccgttgaagcctgacgggccgagaagcttcaccgtaacacaaggagtctgctcgtggcagcgccagataggatcgaccatcggggcggcttcaaattactcgttgtacttaaccttctgccatcgcgcgtgatcggaggtcgtcgcggtgtaatccatagtaaaattgcttctatcaagtttgcagtatccccagtcctggatagcagtgtttagaatagagtttcggggcaccaggtcatagttggggatcgcgccggcgatgtgccatcgttggtgcgggcgacgccaccgctttggcatgtcggaaggagggagatggtttctggccatcggatccaaatctgtggctacgaattgaagatgcttaccggttcagtagttggatccgggtcg

SEQ ID NO: 117835 - DNA, 579 bp, Zea Mays
ctccaggtctggacgagccctcgggtccccagggtaagccatgggcggcgaccaccctgtgagcgcgcgaaggtaggaggtggtgttgagcttgcttgactgccgtgggaggggaggcactggccttggctgaaaggagcgtgaagaattgtgaggagaggatggccttttaagcttggggcacagacgagctcgatgcccaaccccaaagcaacgccagcatcttgttggattggtgcacaccgccactctatggtcttgggcaaaacaattaaggcacctcccatctgcatgcctgatgaatttccttctgctctcctccctgtcgaccgactggagctggcctgaatactgatttgatgacctatgcctacgccaccaatagggagggcggactacctcccagccatgagttaaatcctcgcgagcctgggcatcggagagatcttgttgctgctggatttgaatcgctggagaagatctcgctgacagcttggttggtgagcttgaatgctcttcacttgcctttcctttccccttctcatgctcgctgaacctcgatgagcgggcttccgccgc

SEQ ID NO: 117836 - DNA, 471 bp, Zea Mays
tccaacacttgatttgttccttctatttgtccatttgtttgcggatgataggctaagatgaagtttagcttggtatccatggactcacgtaatctttttccaaaagcatgaggtaaattgggttcctcgatctgatacgatcttcttcggtactccatgcagacaaacaatccttgacatgtataactctgctaactgggctcccgagtaagttgtcttcacaggtataaagtgtgtcactttagtcaacctgtcaactataacccatatggaatcatagcctcatgagtacggggtaatccaactatgaattccataccgatctcttcccatttccattccagtaccttgtgaggttgtaagaatcctgctagtctttggtgttcgactttaacttgttgacacacatcacatagtgcaaaataagtagcaacatcacttttcagaccgtaccaccaatacttttccttt

SEQ ID NO: 117837 - DNA, 368 bp, Zea Mays
ttccataggaataacattgcaatcagcataatcagaataagaacccagcgaaaaggggacacgtaccgaacatgttacctttattttaccaccatcattaagccattgaatgtgatacggatgtgggtgtgcgcgagtgggcaaggataatttgtctaccaaagctgtacttgccaaattgttgcagctgccactatcgatgatgatgcgaatcgaccgttcgtgcacaacgcccttggtatggaatagagtgtgtcgctgatttttttcggcctgggcaacctatgtgttgagaacacgctgcacaacaagactctcatacctttcggcgtcgatgggatcaacgtggatgtcctcattttctgcat

SEQ ID NO: 117838 - DNA, 488 bp, Zea Mays
cgcggagcgccatcacctagcggatggctctcccgccccctcgggactcagcacacttaccgctcgcctcggcgtgggcgccatgtctatggcaaccccgactgcaggactaggataaatttaggaccatagatcgtcagtgttggatcttgtaattaatgtttaaaatagaagtcttagtcttagtcttattctcagttagtcttagttagtcagggtagtttgcttatcctgtgtttttatgcttgtcatgatgaactatgatggatttggatctttgtaatgattgtcgcagagtgtgggtaccccctgcattttggtttacctgttaatgttaataaaattagttatttagttgggaagcctctttatttctactttcctctttatctgaggatatgtgtctgcctgtgttggaagtcagtgaagatgtttatctgttcagtgttgtggaagaattctatactcttttcttatgctgcaagatt

SEQ ID NO: 117839 - DNA, 339 bp, Zea Mays
atcaaattctgtaaaagacaggggcaacgacgcaaaagtttctaagacacagagaacctaggctatggactacgggttcattacccaggactgtagggtttcatatgcaaattgcacaccgcgaaggggtatgatcgcagcacggtcgtccgattagagtctaacgacccagattagaactaatcccctcccgaaacggcactgaatcacagtcgtcggatcctgaatctgcgcccagacactatccatgtttctatacaactctggcccttggatcactaacctgcggcacagattcaatacacaaagcggtacccatggatcaattctggatcgccc

SEQ ID NO: 117840 - DNA, 512 bp, Zea Mays
ctatcttgaaatccctctcaagaatagtatcaagggatggcgcttggagtggtttattgttgagaaccacggaagttctctccccccacggtcagggagacagccggatgttcgcactccgagttggaccgagtcccccacggatcaggaggtggctgaggcagggactttgctagctgaagttggactgctgaaggagaggggtctgactgcagaggctgtggttgctgatttcgtcttcaagaacattcagccgttgaaggacagggcatacccggcttatctgtaccgaggtctagctgactcaactcgggttaccaacaaaagaatccccgctgtagatttggtgaaccaacttgaaatgattcttagaggcaaggtatcaaatgttcatgccccagtggcatactcagcctggaacctgcctccttccaaggccttcactctttttgtgtcgaatccacctgtcgctgatggcggtttgggccttagagtgcgaccctctgccgaag

SEQ ID NO: 117841 - DNA, 756 bp, Zea Mays
ctccttaaatttgtttttatactaaatcagttttctctatttatttttacatttaactgatttttttggaccgagggcattaattccagagagtacaagggtggctttataaaattctagggcttatcctgtattattctccactgcatacggatggcagcttaatatgacaaaaggacagtggttcatatgtaagtatgctcagccgaaggggtatctttggtttctggccgccagatcacgcgtggacgaccacgattaaatcggcgaggttatgaataagtgtgcgttttcggccatccgatcctacgtgggtggttcatttcaaaatgcaagggcgacgaaacggtacgccccatggttcattggatcgcaaatcagtgatccacatcaaccgtgaccatgtaagcgatcagggtcgtctatctctagatcaatgccccggtatgattaagccggaagggtattcgaagatctaatcctggccgccccatctaaatccaacgactcaagatactcctacccaatttgccaccggcgacgacgatgagacacgcgcccatggtggcgccattgatgtgcacggcgcgccgacatcctgatgccaaatttctttcctgatagtaatagaaatcgtttaggagacccttacagaccaggggcacggctggttaccccgtattattgtggctatgacccgatccaggcgacaccgcggcacagcgacagtggccgagcgccgatgagaaattcccg

SEQ ID NO: 117842 - DNA, 329 bp, Zea Mays
tgaatttcgttctaaaccttgtgtctttataggctatagctcccttcacaaaggctacaagtgccttgatatggaaaccggacgtgtctatatttctcgggatgtaatttttgatgaggctgtttttccattctctaatccttcatccaactctgctgagcaaccgggtgatagcagttttaatttgaacactaatcacttgcacaatttgcttcctgttaactctatgcctgtagctccgtccaatgcagcagcttcggccaccggtacgacagcaccatctatggagtgcacaccctgcgtgccagcactaacggcgacccagccgc

SEQ ID NO: 117843 - DNA, 471 bp, Zea Mays
accaggacgcctgccggacctccacgaagaggaactaccagcgacgcaagaagcagaagattcgacttccatgtgcggaaaaaggaagcagagctggagggaagtaattgaggttgtttcaggcggctgttgtcagcgacggagaggaatggcgattggacgcaacggcggccacccataggtcgtaggtgtggaagaagctatgggggcaaagcttcacagcaatggcggccacgagcgctaggggcctaaatgcaaatatgccggcgccaggggcttggcctgcatatcaaccaaagcactgaactactaatcataaatgaaactaaaatgcaaatgaactaaggaagaggcaagaaacaaatgatgagctgcagtatgggagggctgcaactgcagaacctaaatactagcaaaggatcagcaggggaaaaatatgctagcaagacattggcttactagcatgcagac

SEQ ID NO: 117844 - DNA, 413 bp, Zea Mays
agcggtgtcgcctacgatctcgtacgaatgaagtactctatacggcctcttacgtaagactacgtaatgctgcaaccacctcttcaaggtagataggtccttgaagaccctacccttttcaatcatcatgctaggaccggcctcaggagcatctagcagctcatcatcccttccttctgcatttgcctgatgagaaagactaagatcgctgaactcatgaactcttggatcccgaccgtctggaaaaacacgttgcaacatctcaatgtcactctctgtgagttcaccaaccgggcgatcatcatctgaatcggcaaccatagcaaacgcatatggctcctcttcattcctaaactcaggactgttggaggcaataaatccatcaccgaagcagccacgtgccacggtctgag

SEQ ID NO: 117845 - DNA, 525 bp, Zea Mays
cgagcctgtactggccaagacacgcaatggacggtgctctaactttgttgatacctaatttaacatctaacaaatgtttcccctcgatcatttgtacggttcgagctcccaacctctctgctgacgatgaccgtgtgaataacgaacaatccgacgcgttcccgtggacctaatgggttctagctcactcggtcaggtcaagaagctagcttcaagggcacataagggtactgaaacaagagagcatcggacatgaatggacctatagcacgctggccacggcgaggtcactccgcgcggtgctctggaccgatttgggggaaatttcaaattggcaagctctggtggatgatttgaggcacgagttgatggattgggtgcttgactacttagcggagccgacagcaggctcaatttataggatccctgagcggtggcccgtgaatttgagatggcgcggtggcggtccgagagagaggagagcactgtcgcaagaaattggtggctctacaagtttgatgtgtc

SEQ ID NO: 117846 - DNA, 392 bp, Zea Mays
ctcacccaatacagctcggaatggcgcacactattccctgctcaccctacggcaacctccacttcaaacttcatcttctcgctccactccattgttctctgtattctgcgctatggcacccgctggcgtgacatctgcccccctgcaacgcttgcttggccccaagcaagagcatccggatagcgctggcgcagaacatagtaatcttcccatgttgttgcgtccactagaacatgactccacctgaccagcacctgtggcacagcccgattcccttttttgatcaatctgtgatccagtatctccaaaggctggacattgtgaccactcagatctgaggaattaggaagagtagcaaagacaggagtgtagtctggaatatatggtttcag

SEQ ID NO: 117847 - DNA, 454 bp, Zea Mays
ttcactttcatgttcataatcagactcactttcattacaataattctcactgtcattatcagaatcaaacatattgttaccagtcccagtcccattgacctttgctgccatttttttcaatacttcatcgaaatgctcatcttctaagtcatctacaatacctcgattgttagtaaattgaaattggcatgcaaaaaattactgtaaaggaatacatgaatgcaatatcaattaccatttgctgcagtattcggatttctataagacctcttcttatgttgattcatggctgccttcataatagagctgtcattgttgattgttgtggtagtattgggttgtgaatggtaccttctcgctggttttttagcaatactctcattgttcaccagtatgttggtaattgggtttggataggacctcctcgcatgttgctgacgaagcaatcctgggc

SEQ ID NO: 117848 - DNA, 406 bp, Zea Mays
attttctagcccttgagtgttttacccttgaatttacacttgcatggcttatagacccccacaacttgaccgctagaccaacccaagtctccttgtgcacttgttccgtcaaaaaaaatttgtttggtgtctagttgcgcaaaccctatcaagaccattttctttccatggatcctgtcccgaatcttcataacctttctggtgctcatcctaattgatctcatgtgactacctctcctttcacctggatctagtaatcttttcctttatgaatcaggttgtggctttatcatctgaatcttgggatcccctattgattctgcctcgttatctggttatctgctataacctgttctcatgtatcggatgttgatctgcctaaatctctcatttttttatcattctc

SEQ ID NO: 117849 - DNA, 405 bp, Zea Mays
gtttattccaaaaatgaagctgagcatgctgagcatctacacatcgtacttcaccgactactcgatcatcgtctatatgctaagctgtccaaatgtgatttctggttgaaggagataaaatttttgggtcacaccatctctcaggatggtatcagttgatcctgaaaaagtacaagaagtgatggattggaaacctcctaccacagtacggcagatccgtagttttctaggattggtagggtattatcgacgatttattctggatttctctaggattgccaagccaatgactgaattgttgaagaaaggagtcaagtatgaatggagcaggaaatgtgaggatgcctttcatacacttaggcaacatttgacaacagcacccgtgctagctcagcctgacaacac

SEQ ID NO: 117850 - DNA, 550 bp, Zea Mays
ttgcttagctggctgttggaggagggtgccttggaggcaggtgctgaaacattcttggggtcattcaccgagttggagtaggcaggtacggatgtcttcaaccgaggacaattattcttgaagtgactggggtctccacagtgccaacaagcattggttggaggttggctgcttgcaacagatggggtgtggagggaactttgacccggttggttgaaacgtgacggtgcagaccttgttggcttgctgaagttcgaccctttggaagggaacccaaaagatcgaaccctctcgtgcctgtcctgctgctgagctcggagaacttgaaactttctcttgaggtggcctttttcttcttctcgtgctctttccacctggatggccttgttcaagaggtgcgagaaactgagtaagtcttggctggcgaggatggtcttgagttctggtctcaaccccttcaagaaacgggccatcttcttggcttccgtgctgacatcatcaggtgcatagcgagcaagttctgtaaatttattaatgtattcgctgacgg

SEQ ID NO: 117851 - DNA, 1078 bp, Zea Mays
agcacaaattggaatcaacagcaaccaggtcactcgggagaattacagcttcaactggattagcggatccaggcgccgtcaactctacaaccgcaacaccaggaataaatggttcagcagatccatccaagtcatttgggagaattgtagcatcaactggttcagcaggcccaggagccaataactcttcaaccaaagcacatgggaaaaattcagcgtcagcaagggcatcagacccaggcacagccaactcatcagccaacacaaccgggggtaatgcgtcatcgacaggttcagcagccgacgaagaagaggttcgcggcccaagcctcgaatgcaccgagggccgagctgaatgatcatgcccaagaaggcgccgcctctgctgaaactaatccatgtcatcttcatctttggcagcaggaggcaatacctcagacatgtcccctcccggccaatcaccaggagtaatcaccctcacagaaatgggtaaaccaaggtgcgagggacaatggttccatcctccccaacaacaagaggttcctgaacatgtagatctaataccgctggcaggctatccggagagaaacaccacgctctgagcttgagaacagacatatccacactgtctattgaatctgggtgaagtccctgaaccatgcacagaccatccaacaggagctcagcagttccaaccccccagaggtgagcagggaccccttccaactcgatatccatgagcaatggcaggctgctcccgccagaggccaaggcttgacgagaccaacgcctgaggtgcagccggacggggggaacgaaaagcgactgcccaacattgatggcacgtgaagccagctcctccgaggggaagaagacgaggaaagagttcgacgcagcacgccgtaggtggagcgcgtcagcttcaagcgaaacccttgaggcgagctgctccaacaccaccgcggcgcaatcagagctccccggaccaagaatagtgacaatcagcacccgacgaaggtcagcctcagcatgctcaacctccctggagcgacgaaggaacttcacaatacgagcaggc

SEQ ID NO: 117852 - DNA, 418 bp, Zea Mays
atatatatgatccggagacagccttaaagaattctatcggaaagaccagcttctgatctatgtatgtgattcaaaatgtgtcctccttgttttatgctaacccagagcagcatcaactttgatgacggattcgaagcctgatccagtgatcccagatacaaattccaaatcatcgttcacttttaaaagaaagttatacacgggtcaggggaagagtcagtctgccacaagaaaagatgatgattctctagcgcatgatgtgcatcctggcttttacccaataatgattctcactgatgggttagaaagttggtatgcacaagtagaaaaaagaggtggtgttgattcaggtaatactgacgtgataaagggaaacagggaaacgatcggtgtacgttcatatgaaaaggctgaaaag

SEQ ID NO: 117853 - DNA, 589 bp, Zea Mays
ataataagcacaaaaaatcgaagtcttttccaaaagactctgcgcaaaagtcgcctacgggtgcagccggaataacaggtacgaaaagtcgaagtcttttctaaagaactccgtacagaagcctacgggagcggcttgatcaacgaaagcgtgcagcttcatcacacaaaattatggttacatacatatagcgagggcatcacacattacattggctcaaccttcgggatgatacccatctccctatagttgaacaacattatcctcaattcctcacccgcaaacagacttcgcaactccccctcacctacactcgccccagccggcgaggacaacaattcccgtttgccagtcccatccacacgaagacgaccaccctccatctcaccacgatgacgcctatcacttcgcgacaactcacccactctctgtttcgccatcgcccttcgccgcctatgcccagcactcgcacccggaagattctcagcacccatcacacgcggagaagtctccgccgcagcctcatccaatgctgcaaaataatccaagtcctcatccgaagactcctctgtccacacaatcaaactcc

SEQ ID NO: 117854 - DNA, 724 bp, Zea Mays
gacactggttaccaatgacattaaacctagtggcctgagccacgatgtccatagacacggatatcatacttccccggccctagacaactgatatgatgatcaccttaagaacgggtgagtgtggatagagcccatgtaccgcattatgttcatattggagcaggtgtacttgataaaattatataggtggtgctatcatgtttaagacacaatccaaacatgcaatcatgccacttactagggaatggtaaaatcactatagacattaataggtactatgatggtgaatttatttagttgtatggcgtgtgtgtgcgcgaatatctcgcttccagtataataataagacgtttctacagatattatggccatagtttgtttggaacggaaagcatttggagttatagatagaagaatcgaacaatttatggcggggggagtcatttttatgctttatgtaggggggggagtcatttttatgctttatgtatactctataaaataagaaaggaccacaacaccacggtgcggcccgcctcgaggccaaatttcacatcatgaaaacggcaggcttctcctcgtactggtgggcttgaacgtactcagtaagcccaactaaggccttattggctgtctgcctgaaagcggaccaggccaaactcccaatctaagatgcccaattctctgatctcggtttgtaaggattttttttcatacactgctg

SEQ ID NO: 117855 - DNA, 536 bp, Zea Mays
ggaaattatatctcaaaatgaaaaaatgacagacaagtgattaggagaaaagaagacaaagatttttaaaaagaaccgtacaatttcagtactctagcacaatccttcatcttttgcatattctcactttgatacgagttgttggctttctagtttctataaaatgttctctttactgtgccattatggtggaggcaacaggattaaattctcgagcactcttcagttcatggatacgatcaacacaatcttgcactcacgtctgttccactgtacatgtgcaaactgaggggtgtttactttcttgtgtgtggacatattattcacccctgttttcatttgggggtcattgcatttatagatgtgtaattgatatatgatttatacctacaggaatgggaatgacgttgactttggatgacctcaaaaccacattattgatgcccaaggagttggctgctggatttatactgcaatacacggtcaggtccccccatttttgttcttcatatgtctgaattcttgtaaccatattc

SEQ ID NO: 117856 - DNA, 436 bp, Zea Mays
tccgcaacgctagacccccctaggaggcctagggcccgttccctctctcgctcagcttgtaccccctactgcaagcacccccggtgcaagataatataagcctcatccctccacttgtgttccatcttgcattaacccatctggacaggggcacgcggcacaaaattcactagtcggtccggttgagggtcccccgggtccgaaacaccgacatgtagattgtagcggaaaacgtgaaccagaacagcgtaaatggctatgaattttagcttaaaccgtcgatttgtttcgtaatgacctatgggactcgaactacatcataaaaatcacgcgcctggtcgtgcgcgagttctggctcgagtggatttaagtgtaaaacatggactaaaacattataaatgagtatgaattttagtgtaaatcatcaatcagtttc

SEQ ID NO: 117857 - DNA, 567 bp, Zea Mays
ttgttagcagatgcaatgggcggagcaatagaatcaaccatgtgagcaacaaacatgtaatccagttgtactaaagaatacgacaaccacaaagcactcaatacttaatctgcaactaaaagtggaaaccctgacagcggttcgggaactcatgtgaaggcctagtaaaacctgcattctaaagacatgaataatcaagacaagatattccaaaatccaaataaccaagctaagaagttgcaataataacatcctcaaaaatgacatttgtttgatacaacaaaaacatattgcgaagggtggacaagctcctagtccatctctatctgcttcaactaaaagaggtgcatgcttctatgggtgcagtgctactccagcaaactaaaccacttatccttatgttatagttttttgcttgatttcctgatgcaatcgtctacctaatatggttgctcaagtgcttaacaaaacaaagtttagagtcaatttctgcattcccaagcatcttgtacacttctgtcggtgtttcggacccgcgaggtccgtcaaccgaccagtgaatttgtt

SEQ ID NO: 117858 - DNA, 674 bp, Zea Mays
caggataaaataagttgatctatcaccacctcgtttctcacgaagaaatgtggtcatcccaccaaatttgagaaatgatctcaccttatcttggagggtttgaattcccaaaccaaacaccccgtgaatatgttatatgtctacttgcgtccttctatttttatctatactgtagccgtgtttggttacgcaggattatcgtaatctgataaagtttatctgctattgatccaaacagtttggattctttgtcttgaatagtgtgctgcaacaaagaatctccatggagtattaaccttacgttgaattttgttggatactgtacacggtacaaattttgaaaatctccgggttcccaaacgccacctttgttgattgtgagatcagatgaggaatgtcctgagacgttggcgcatcatgtgttggtgaaggttagaggagaggaagatctctgagtaagaagaaacaccacaatagaaaaatcagttgtctccacaaaacgctcggactcgtatagccggtccttctctctgcgttctcccttgggctcccacgtccgcctaacaagccgccattctcccctccgtctggagagaaagagagattcacctctcttcccagggccgccagacgcaagaagaacttctaacggaggtatggcctaatcgattggt

SEQ ID NO: 117859 - DNA, 293 bp, Zea Mays
tctccgctatgttccgccctagggtacgccagctcgtcctagaggaggaccacgtccagctcagtacgctccacaggggactcctcagacaccccacactcgtcaggatgcccccactggcaccccggcgaggcctacaggacagaagataggccccacatgcttcaagtgcagtcaggttgggcactatgcaaatgcttgtccggcggggaattccagtgcaccagctcagaacaagcaacagactcctggcaagggattcaacattgccagagttaaccaagtcagtgctg

SEQ ID NO: 117860 - DNA, 306 bp, Zea Mays
cgtggaaaccctatttgggggaaagggaaattgggaggctatggtggacgatcagaggcaagagctggtgcactgggtgcataataacctagcggacctggttgatcactcaatttatagaagccaacagtggtagtgtccaatttggagaaggtgcgctggcggccagagagaggggaagttcactggcgcaagctgtcgtggctttcactgaagtaatgacttaggcgatggactggctatctactatggtctattgcaacgtggtgaaacggctgatgacgtgtcatggctgcgaggaacagc

SEQ ID NO: 117861 - DNA, 362 bp, Zea Mays
aaagaatgtgtggcaccagtgtcaaataatacttttgctggatgggattcgactggaaacatacctactgccacgtcctgagcatcctggattgcttcagcctccaggtggttcacctttgcatggttgtaagcctgaccatggcctcctggtgcctgctgtgatgctcgttgtcttgctggggtattgactgcttgcgactgctgagttgcctttttcggacagcgcttcgcccaatggttttgttccccacaatagaagcatgcgcggcctcctacttgcgctagagctgcttggttgttctagttggttgctggggcaggaaggcgagctgcctggttgttctgacaccgatactaaat

SEQ ID NO: 117862 - DNA, 326 bp, Zea Mays
cttataaataggtcagcgaaagatagtacagatcaaataagagttgtagtagtccaaggagggtttggcttcgaggcagattagtattgttggtccttataattataatatagatcaaatattgttctttttaggacgaggattagagtagatagaccataagagtagatctatttgagatattagtctaggttttttgagagttcgttagataactttctagtgcttttggagagcactcattgtatacaaatcttgatgattaaagagttgattatgcaagattagtacgataacattattcctctctctttgttgactaattg

SEQ ID NO: 117863 - DNA, 409 bp, Zea Mays
cccggataacgccccgaggtggaaagatcttcactgctattgagcttaaggcattgttccgcccggtcgccgtgtccgcttggctcatggccgaattctgataagttcaccggagttagccgcttgctgctcggatgacacgtgcctagacgcagtacttcgtcgtagtgactcgctctagcacatccggtcatcgccggtgagcccgccacggtaaatgccaccaatcgcttgcgccaatgctcttccccctctccggccgccgcgcgtctccttcaaattcactagccaccgctcaggagacctataaattgagtacgccatgagctccgtagggtaattacccatccaaagcaccagcacttgcctccaattgttcaccagagaccacgaattgctcatctccccc

SEQ ID NO: 117864 - DNA, 385 bp, Zea Mays
ctgtcctggatggttgatgcaagaagatacacaaggtttatcctagttcgggcaagagaaggccctacatgcagggggagacttgtattatcttgcatctaagtgctcgtaggggatacaagcaagtcgagagagggagtgcctcccaattctctgagtatgattgaggcgagtgccaatatcagaagtggggtgcgtagtgagcggtgaactgtccctcacatagaaggccccaggctcctcattttatagtcgcaaggaagaggcccagaagtataacggttgttatgttgttgttgtggtcatagtagatgtgtcctaagcctatagcggtatggtcggcgggatggccctcgtccttgttgtcgtctttggttaggagaag

SEQ ID NO: 117865 - DNA, 430 bp, Zea Mays
actagataacctaagaactttcccctatggacgtggaaggcgtacttgtctggatttagccagagtctggtttctctcatgttagcaaaggtctccgccagttctacaggtccacttcgtttttcctcgcgacgacgatgcaatcgacgtaggtgaatatatttcggccaacctggtctttaagtatggatagagtgatatgggagaatgtggactcgacattcttgaggcattcaggcattctcacgaagcaataggtgccgaagggggtgatgaaactgtcattcgccttgtcctcttcattgaggtatattttgtggtaacaagaaaaacaatctagtagtgacatgacatcgcaacatgctgcagaatcgacgattctgtcaatgcgagagaggggaactcgtctttagggcaagctttgtttaag

SEQ ID NO: 117866 - DNA, 707 bp, Zea Mays
tgtagtagtgggccgtttgggccgtatggttgtaaagggtggtggagtgggcctgtatgagtgaagtctttaaaaggattgtaatcagcagacttggaggtcacgaaaagaaataatacagaaactcatatccagccacttacttgcgtcttcccggttctcaccgacgatctctgcggctactcacgtcgacggcggcgcaccgttcggccacgggtgtcacactcccatatcctggaaacccttttgcacgatcctcacaacccagcgatgctcccaaaccaccccacctgttttgaatggccccataggcgagattccacggtggcggtcatcttctctgtgttctctctctccctcggtccctccctcacgactttactccggtgactttgaggtggcacatatatggctcgagggtggcaaggctcccacatatatactctagggcatcaatgaccgagacctcccaactaaatgactgatttcttcgtttgatgatatggcgaaatccattccgagtgcgagggggtcctggaaggcgatactaccctggcgctctggccccacgtggaagcaaacgcaagcgtgtgggtgttgttgaggctttggcgagatcgcgacacttgttgtgttttaactgattctgatatcctctattgcagtgactttcaacaaagaagatggacattagcaacgaggatgac

SEQ ID NO: 117867 - DNA, 478 bp, Zea Mays
gggcatgccaaacccgcgctcatggaacaacacgaacgagcacctttaggacgaggcacctcacccttgccttctagtctccacctcgaaaccacttttgcaaggatgaaccctctcttctctagaccaaggaggcgactctcctggatcaagcatgctagaacgatgccatgggagcaggaagcgagctggagaaacatagtggatcgatggcagggaggcttctaggcgaaggaggaggcaaatgcttgaacgtgagaatgcggtaagcgaagctggccccgtgcgctttccttccctatttatgcataggcacaaggagccataacgacacctaaatgatgggtccacgacaaatggcacgtgggatccaccgcttcgaccgtataaccgccttgagcatcgaatagggaggactgtgtgctttgcagattttacaccacctagggcaaagcgctagaggggtgtgctgtcacac

SEQ ID NO: 117868 - DNA, 535 bp, Zea Mays
tttagaggtgtatctgtttgggaatagcctcaagagagactgatcatcatttcctttcaaacccagctatatttacaccaattcatgtgaacagagacaagtttcctattgctccacctacctatacatcatgctactccaccccacccacccccacgacagagttcaagttcacattcaaatagtaatgtactcaactaggtaatgctgtgattttatcatctgcatttacacataactgccattcaaatagtacacatgttgctgcatctgcacctcaccactctagggaaatcctcttcacattatgcacatatagaagctcgccttttcacctgtagttaaagctcaaaaaacctgataacaatatgatcatcaggctcagtttcttcactgtcacaaagtgctccacccacagatcagataaggtgcatgatattcagtttgctgcccaaagcatttagtgtttttaaattcttcacacaaaaaatgtaccatgtcggtttcaaagttcatgaaaaaatatgcaagacag

SEQ ID NO: 117869 - DNA, 380 bp, Zea Mays
ctcatcttatcataactgatgaagatcagagtatgaaggctgctattagactggttgtaccagaaactaagcatagacattgcatgtggcatatcatggacaaggtacctgagaagatcggtccatttataagggaggaccaacaattttggaatagactaaacttatgtgtttggggtactgaaactgcagaggaatttgagactgaatggaattacctcattgttgattttcagctgactagaaatgaatggttcatcaacaggttcctgatccgtgaatcatggattccggcatactttatggacataccactagctggcgttcttagaactacatcgcgttcgaagagtgcaaattccttttttaaccgtttcatc

SEQ ID NO: 117870 - DNA, 452 bp, Zea Mays
ggcgaagacgccaaagaggaggacgacgctggagagccagctgatcaagtttgaggacgaggacagcgagaaggcaagagcagccgcggatgcgatgagtcctgtgcaagtaagtgggtctctggggagttctttagagcttttcctcgtttggattcatcatcattgggttgctttgtttcatcttgtgattgctaaagaaagagggcttttgtcatacaaagaagattacaaaatagaaaggggcaaagggagcctaagttttatctgaatgatactaggctgtatgttacttttttttagatctgaatttctcatgcctgtagactgtagatgagaacattttagaactgaacaaaaatgctagacgtggtttaattttcttgtgtacttctgatggttgatatcttccttgtacaggatggattgttgataagaaaaccaccaggcat

SEQ ID NO: 117871 - DNA, 301 bp, Zea Mays
catgaaccttggcaagacttacgagaggctggatcgacgattgtaccagatcgtcgacagacttgctgtgttggagacgcaacaacaagcaccgccaccaccacctcctcgtccacgtcttcccaatgatgcggtgtttgatgaagaaggtaattacactactaaaaaatcaccttcttgcaatgggcaaaaatcgttgcgatagaccataaatcgttgcgaaaggcaccaattgcgatagaacaactgctgttgcctgctgttgcagaaaacagagtggcaataggctatagcaacaatt

SEQ ID NO: 117872 - DNA, 832 bp, Zea Mays
cggcacctgggcagcacgcaagccccgataggaaccggtgatcgtgctcgccagttccgtcgtctctctccgactgaacaacaagaacgtaggcgtcaaggactctgctacaactgcgacgagccatacgtccacgaccacgcctgtcaatgcctcttctacttggagtcggccgacttcattgacaacgatatcccgaccaacatctctgctgcaacatgtactgatccgggtggatgaactttcgtcgcctctatcccgacttccagctcgtcctctcgagctgtttgtgcagacggggagagatgttatggttgggcaccactataggcaccgaccacaagtcacgggcgggcagagagattagatagggcttatctaatagaagagcgattatctcaggttagttagatatagatgagagattatctcaagttagttggatatggattagaagagatctcagatctcttatccttagatcaagataagcattggcagggatataaatacttgtaagtggtcgtctaatggaatcaagcagaagcaaccattgttgctacctgcgcccagcagcccctctcgcctcctctctgttctgtgcagcacccagcagtacctgcgcccagcagcccctgcctcctctctgttctgcaccaggaacgccccattcacggtgtcccgacgccgggatctccagcccactccatcatctcacccctattctctacgagacatccccggtaggatccacaatcctatcaataggcttcacttgtatatcccacactcttgttcgaaggagaccttactcacttgtataatccccttg

SEQ ID NO: 117873 - DNA, 308 bp, Zea Mays
gcatttgcggcggtcgatcgagacacgtagtacagttacctacctactagctctcccgagggtagctagttgtctcgtctcgtctccctctcgctagctaccatgcaagcatgcatcatctcgtctcgtcattgtatcgtacgccacatcgttatcgtttgttctccgttcattcatccattcattcggcggtgcagggtacttggtacgtagctacgcctagcctcgctcgtagtagcgtcaccgggaactgggagtgcagcgcaatgcgtgcagcagcaggttcgccaaaccatttttccataaca

SEQ ID NO: 117874 - DNA, 502 bp, Zea Mays
ttatatgtccgtgaacttcttgtcttctgagaccctttcctattccgttgtgaagtcgttatcttttagctttttttgttcccttggtcttggtacgcttgtattattggaatcttgcatactaatatttttatatgcttaccttcatatcccaatgactgttcaaaaccttttagttaatatgcccttgatcacccttgcttcttgatggtccatgagcgaccattctattttgcacatccttgatgatctcaccgtttcctcataacttccctcagtaataatttctgttacttcaaccattctgtggggaccttacctatctcaccttgattgtcttatccacttcgccacttcgagagtcttgcctcaactctatccttggttatgctttcacaatcatcatctttacccttgtcgcctctatatcttaatgtgatgcttatattatacctatcctctaaaaccttctctcctccatctcaattttagagttttattt

SEQ ID NO: 117875 - DNA, 275 bp, Zea Mays
tcgtttgttctgctctgcaatctgggtatctttcttcttgttcagcgggcgagcttcggcagaaccgcctcggtcgatcaatctggcatatttctctttcaacaaattctcaagatcctcaatcttattctctaggccagtgattacaaactcaattttccggtcttccccctcctgttgtagcttcaaagctttacttagcaagaaaatctgccataatacaaaaggtacataagattgtgcatgcctcaagatagaaagcaacagcgaattaa

SEQ ID NO: 117876 - DNA, 514 bp, Zea Mays
gccaccccgagttaagtaagcgtgagcatgttgcaccgccttaagtcgttgccgacttaagtcgattgctccgtttgtagggcatagtggtcaccccgagtttaagtaagaatgcaaatcaatcgtaaacgagccgagtatatttgagatctctctttattgatgacatatttccacttttaaagaatacactgccgccccaactgttttgaaatacagctaggggtaaaactttctgaggtgctctatgttccaggaattcccaacctctgtgccatccatttgagtgagacgatatgatccgggccgagtgacttctgctactatgaaaggcccttcccataagggtgataacttgtgccgtccctcccccgttagaattcggcggaggacgaggtctcctattgaaaagaaccgctgccgcacagctttgtcgtgataccgctttagagtttgctggtaccgtgctgattggattactgcattcagtcgctcttcctcaagtacatcaacg

SEQ ID NO: 117877 - DNA, 376 bp, Zea Mays
atgatattatgatttattcaaagaccgggctgagcatgagcagcatctccgtctcgttctgggtgcccttaggaagaatcagttatatggcaagttaaagaagtgtgccttttggctgtccgaagtggctttcctggggcatgtgattaatcagcagggcattgcggttgatcccaaaaatgttgcggctgtggtggagtggaagagaccctctagtgtctctgaaatccgaagtttcttggggctcgctggatattatcggcgcttcgtaccaaatttttccagcatttctaagcctttgactagactcttggagaagggtgttctcttcgtctggtccaacgattgtgaggtcagttatcagacattgaagaac

SEQ ID NO: 117878 - DNA, 524 bp, Zea Mays
acattcttgtaccaggtcccgataactgatttgttcagtgaaaaatctggagcgcacttcagccatttgggacgaggaacttattttcataaagcacagaggccttgttataccaaagctcaacttcatagggctcatcactatattcttaaccttgtccctacccttgatgtcagctttcatgtaaaaccacttgttggtctagccagctagccattttgtatgatacccatgcataagagccttcgtatccttcctgtaggcaaaattgtagcacccgaagttcttatggagaccatttgctctggccttcgtctgataatgcagctcatgaactctgcagaaaccttcggaatttgcgctcatgccctggcttcgaagggcccaaatgtagacactaactattgcattcggtgttagctagtgaagatatatcacaatctttttcagcacttcaacaatggtttaatgaattgggaatcgaagccctgcccgaaagaaactcttgaataccatgacttcat

SEQ ID NO: 117879 - DNA, 400 bp, Zea Mays
gccccaagtaactcgtcgctagtagtttcaatgcacttcagccaatcatcatttggttcatcaaacttatctccaaacctgaaggtgtatttcagctggactaaatcaccttcgctagaatccttggtggtttccttcggcatttcccagccttccacaagcggccacaccctgaaggctatgtgctcctgaactaaatctcttgtgcaaataaaagagcaaacattgccgaaggcctactgacacgcttccgcagcatcatcaatttcaaccttcggccttcagaggccgaagcgggaccaaatggggcgcataatgacttccttaatatctttccttgccttcaaatcattcttcatgcaaaaccattcctccatccaagctccaggccaccttttcc

SEQ ID NO: 117880 - DNA, 342 bp, Zea Mays
tacatttatctttctctccttttttttctttccttttggtaccatgtatttatgatagacttgagagttccttgagatgatccgattgcacgagcaaaccaaacactcaaatcatctaacttttttccaattccttgtgtatcctgataactgaagatggtcgtttggttttcactttgtcagttatatgttaaagtgaattggttctcacgcaacatgccaaggccaagatgaactctgttctgcaaggaaccctaagaaaaaccacatgcaagtttatctgattaacaacatccaactcatctgatgcacatcaacagatgactccacgtattcattcgc

SEQ ID NO: 117881 - DNA, 801 bp, Zea Mays
atcggatccctaggaccctatgagcccacgagtcagaaggaaggtcaatgagagttttgccctagaagaacccacccccggatggcataaggcaccgatctcgggggttgggcaaagcagaatcaggagaaggggcaagaaggaccatcaggaacccactcgagtgggttccgcgtccgactgatggactgccccaccattaaagaccgactgaattgatggcgccttgcaccgagccgtggcatgcgaaggagtcagtccttcttccactcatgacctatgcgtcctaggccacaaccccacttatgacctaagagccctaggcatgtggctcatttatggcatgtgcatgagccccccatgccctatgaagctcacaacatgacgagggatgcctagagtctggctatgaggactaggggtcggtgtggagcaaagggagtaattttgacgcctgaattctctgccgcaatcgcacatagtctcaacaaacttaaagaagcacgaccagagagcctagacgacaaaggtgaataatgtcggacggacctttaccgagggtaaaatgcctcgttttaccacaacgcagcgatcccttccaagggaagccacttataaccgctcatccttggtctataaaaagaggagggtcgactcgaaccaaaaaggaaggacacaaagagaacaacactcgacgacttagcctagcgaacacccaatacgtagatctctagaaccaacatcgcttagatccttctctctcttgtccgcttgtaacccctactacaagcatctagcaac

SEQ ID NO: 117882 - DNA, 298 bp, Zea Mays
ccaaacctctgcactcctttggtgggggataccttgagataaatgaaatctctcacctcgaactggagaggtttccttctcttatcatgttaactcttctgcctggcctgagcaacttctagattcttcctgattagtctgaccttcctttcagcttcagtcactaagtcaggtctgaaaacttctctttctccaggctgagaccaattgagtggtgttctacaccttcttccataaagagcttcgaaaggtgccatcctgaggctggattgataactgttgttataagcaaactctg

SEQ ID NO: 117883 - DNA, 351 bp, Zea Mays
atcacacacaatgtttttgtcttgacagagacaagcagctgagcacatgaactcaccaaaaaggtacatgtcagcctgacaacaagcatattgcgaaaatatagagcctctccacacaagaggtcagcaagactaggaccacattgctccagccattctactgtgacttactccgaggctaggcgtagataacggagcaggaaaagagccacaaagtgagatccatcgtcagatctgtgcgaagatatagggtgggtcgagggatccgtccatgtctaggtggtgtttagggtggaatggtggttgacgtcgtcgaagaagaccgctcctctggtggcggcagcggggact

SEQ ID NO: 117884 - DNA, 347 bp, Zea Mays
gtgactcagagccgtagaggtcgccggcattctcgacgtgggtggggagcagaggcgacgcgggaggggagcggcgtcgtcgattgaaggaggcgtagggttgtaaggcgccgttcatatggactgctggaatcgcgggatgcggtagctgagggcaggggatgaattcgcgaggggaaggagcttatggcgggggctggaatcgtgggaggaaggaggtgagggaagggcacgatgggagtcatggtagtggcacgagcgagagctgagggtgggggcacagtcgggtgtggacgacttccttgctctctaaataggagtagtatagatttaaccccttccacccg

SEQ ID NO: 117885 - DNA, 504 bp, Zea Mays
ggaggaaggctctttggccagaccaacacttggatacatggtggggctaatgcccctagagtgctacgtttgaagtagtgtgtggagagatattatggggtattgtctccaaatattttgtcattgaactaatacgcacaggggatccattgtaaaggtctcatagtgaaccctgccttacatccttgaaagaggtatataggtcttacaaaccctggcagttgggtaacacgacttgtgggtaaagttgtacagcctctacaaagtctaaaactaattaatcagacgtgctcatgtttaacagcggccttgggatcctcatagattagtgtttagaaaggcaaaacattgaggggttgatacccgcaaaagattcaaacagttctccatgagacttagtgtatggatgatcatgggatgcaatggatgatttttcaaagatattttactataatggttcaccatgattattatttttatttataaagtattgtgcttcaatat

SEQ ID NO: 117886 - DNA, 1001 bp, Zea Mays
atcaacaacacggacaacacacccattggggtcagcgttagacgggtcacacccattgggatcagcgtcagtaaattcaggcatgggcacttcctcagtagcaggagcagaaggaccagcatcccgatccaagctagacactcgccgaagacgtctcttcttctttttctgcccatcagcaggagaagcaggctgattgggctcggcaagggcgcttcgagcgaacattgtcaggcctctgaatatccaaggctttactagcttccgggagaggcgccaccaccaatgttccagcaggagcggcatcagaagaatcctcggctaacatatcaagcatggcacttatctctgcatcactaggatccaaaggcacctgaaagtgaacctgccgttcatcatcaggaatctcttcaagcgaagcaaccaaagcactaacttcttcggcagatggtgcactctaaggcccaaaccgccatcaccagcaggaggatttgacacgaaatgagtaaaggccttggaaggaggcaggttctaggccgagtatgcaacaggggcaccaacatttgataccttgcctctgagtatcatttcgagccggctcaccaagtccacagcaggaattattctgttagtgacccgggtggagtcagctaggcctcgatacagataggccgggtatgccctgtccttcaatggctgaatattcttgaagacaaagtcagcaaccatatcctctgcagtcagacccctctccttcaacaatccaacttcagctagcagaacccctgcctcagccacatcctggtctgtgggggattcggtccagctcggagtgcgaacatccgactgtctccctgaccgtggggggagagaatttccgtgattctcaacgataaaccactccaagcgccatcctttgatgctgtccttgagggggatgtcaagataatcagtcttccttctgcggcgcatctccaagctcgcgccccccaccagctgat

SEQ ID NO: 117887 - DNA, 377 bp, Zea Mays
gagggtgaggaattgaggataatgctgtttaattacagggagatgggtatcattccgaaggttgagccgatgtgataggcgatgccctcgccgtgtgtgtgtaattgtaatggtgatgtggcatgttggccgtattcgtacacttgtattgttccggctgcgtacgtgggcggctttgtgcggagtatctttgtaatgatagacttcgattaacgttattccggttgcgcccttaagtaattgttgcgctatcttttgaataaaagatttcgattaaagttcctgatgtgctgttccggctgcacccttaggggacttttgctcggaatgttctgtaaagaaaagacttcgaataacgctcttgttgagctattccg

SEQ ID NO: 117888 - DNA, 296 bp, Zea Mays
gtctcctgcgtgtctgataaaaatatgtacttcggtttgaattgtcaaacttttacactatatatacccctccctgcatacctaaggcctaagcataaaatcagtttccctaaagtgcgctggacctgtgtttattctccattttaaagttgtcattttaattctttttttaccctttcatagtgacatgtagcaattgataatcaaatgtgtgtttcagcgtggacttacttttccaaaaaagaactatgtgtattgcactatttgttttctgatggagtttggttgacctgctg

SEQ ID NO: 117889 - DNA, 649 bp, Zea Mays
tttaagcaacatgtcatccaaatataataaaagtatagtgcgacctttgggaggtatgaataactactgctagatcatgatcagtagaagaaaaaccaacaaccttgattacagaaatgaatctctcaaaccaggcacaaggggcctattttagaccatataaggcacgtcggagacgacaaatatgcgctgagggagcatcaacactaggaggcagatgcatataaacttcatgtagatcaccatgaagaaaagcatttttgacatccatctgagagatagtccaagaggagtctacaacaacaatcaaagtacgaacaatagtcatatgggcaactggtgcaaaagtctcatctttttttcgaaaaacataggagaactgcgcatcatttcattaagaagaaatagaagagggtttacccccacaagacttacaacacaaggccctattacatgaaaatgaaaaaacacccacaagaccaggccattagcagattagccgagagttcctagcctacatcgtgccccctctagtaggaaccgaaggtccatggctccagttgcacaccacagaaagccttcgttggcaacattttgaagaaccactaagacctccgaaatagatctatcaaacaaacccccaagccac

SEQ ID NO: 117890 - DNA, 362 bp, Zea Mays
caaggtcacatccattgggttcaactcttgcagggtcacacccattgggatcaactctggcgccattgggttcagctctagattccaccggtactacttcaatggcaggagcagaagggccagcaccctaatccaaacacgacactcgtcgaagccgtctctttttctttttcttcccctcggcaggcgcagttggacgactgacctggcagagacgtttcggacgagtaccctcaggcctttgagtatacacggttttttcaggctctgggatagttgcaacagccatcggctcaggaggggccgagtcagaagaatctccagccaacatgtccagcatagcacttatctctgcatcaccc

SEQ ID NO: 117891 - DNA, 455 bp, Zea Mays
cccagatgaagatgctaagcctaatgatggcgttaggggtcagctgatgaagaaaaatctcaaaattatccaaaacttccccaatcatctcgttcaagggaaaccgcaatcctgctctaaaaaagcttttgaaaaccactactttgtcatccttcggctttggagtggtttcttctccggcaaaacgaataagcttctttctagcttctctgaagtaacccagctttatcatcatggggcacgtcggcctcagacacagtagattttttaaaatccaagtggctgggttttgttgggatcagagtgctatagtcttcctcttcttcatcaacattttcttcctagatatcatcctgttcagcttcggtagtaggtgtaccttcgtcaatggctccctccgtcacaactaatcccgattgtctcatgacttcggagatcggagctgtctcagaggc

SEQ ID NO: 117892 - DNA, 300 bp, Zea Mays
gttttggatgctgttttgaaatctacgaagatgccaactcctgttactactgaagcttttgaggacaaaattgaagatctaagagaagtagccgctacaagcgattctcctattcacgttgaagcaggaccttcgggaactaagccagtagagctggcgaaggaatgtcttccaaaaaagacaacaccacctctacctgaagcatcttctcaaggtgacttagaatatattgttcgacatgcttcgggaaaacaactatcagaagagcaaattgttgaagtacatcattatgcaaaggac

SEQ ID NO: 117893 - DNA, 834 bp, Zea Mays
aaaacggtgtacgcccgagaggccataagagcaagacggcagctcaggtctgcgtcgacgactctgacgtccccgatcctgcgtctgaaccgaagtgtccagacacgtcggaaagattgccggaggctgaagtcacagaaccgcaagaaatttctgagccccctgcgggacgacatgagcgtgaagctcagaaggtgttagacggagaggcagaggtagcagacgacagcgcaatgcttgaagagactgaaaccatctacaacgctagacttacggagcaccaggttcctgctgccaatgaaacagagcatggcgagtgcttggcaaatttcgatgctagcatacctcttgctatgatggatctgaatgaagtgagcatagacgatatatttctgtcggctgatacgtacgaatttggaagtgacatgtgtaacccagaaccgttttctgttggtctgaacatggaaggcaccactactggccaaaactcgggattcagttgccttgaggagctggataccccacagaaccacctttcttccatgggagatggccattgttctctggttccagaagcaggaccatgtaccgaaaacaacaaagagaaggctgatgcactagaaacgggagcatcgtatttctgtgactcctcgtttcatgatatagacatcaacgcgttgcccgctaaggagccgccgtcgtttggagaggatagcccttctcctcgagctggcgctgaaatgcatcctaatgaatgtggattaagcagctgtagtcaggatagaggcaatagttccctccttatcatcaacaagcaagctgcacataaagaat

SEQ ID NO: 117894 - DNA, 686 bp, Zea Mays
cccttaaatcattattttcagcaacaaaattagaacaagttaagcatggaagaagaactggacaagtatgttttcccaactcaacaatacgtgattcaacaacatttaatttagattgtaaagttggacaattcgagcaatccggcaaatcaggacaaatgtgttcttcaagattttttacccgacataaagcattatccaagtcaactttcaaaagcgggcatgaaacacaagcaccaagcaaattcgaccgagaacgaagttcatttaattcaacattaagtttatctcgatcatcaacaatggaagcatacttggtttgcaattcagaaagcgaaatcatatgaattgagcattcttcacattaaccaggttcaacaggagtagatgtagcatttttcagagtagctaattcagcacaagttttatcataatcagctttaagtttagccaacactttattttgcttatgaacaattttagttaaatcaataattctttgttctgtagaagtatctacctcatcatcagaagtttcgtcgtttttgtcggcttctacatcgtcctccaaggccatagtacatatcccaccattgttgtcggcgtcagtgatgaagcaaagtccatcggtcttcttcttgggtgtctcatcctcagagtctgaatcactggagtctgacgagcca

SEQ ID NO: 117895 - DNA, 453 bp, Zea Mays
tgagttcccaatttccgtgccatccatatgagtgagacgatatgatccaggccgagtgacttctgctactatgaatggtccttcccatagagacgacagtttgtgccgtccctcccccgttagaattcggcggaggacgaggtctcccactgagaaggattggtgtcgtatggctttgtcatgatagcgcctcagagtttgctgatatcgggccgactgaatcaccgcattcaattgttcttcttctagtacatcgacatcttccagcctagtagcctcagcttctgctatgttttcaaagattaaccttggtgccccaaacttgagatcagcaggcagcactgcttccaaaccatagaccataaagaaaggtgtgtttccatgcagagctcgactaggttgagttctcaggctccaaacaacatatggcagctctctaatccactttcctgc

SEQ ID NO: 117896 - DNA, 302 bp, Zea Mays
cctactttcactctcctccaagctttgatggccttggccatccgtgccaggcgcaagagtggttgctggacagagggtaacggcttattccaggccgaatagaccgcttctttgaatccatcaatgcgtgcccagaagttctcgaagcggaaggagttgtttgttttgcgcattatctccccctgtaagagcagaggggtgtggtccgacatgagggagggtagggagtggatgtagcaggttgggaagagaagctcctaaccgggcggtgcacttaatttctcacttggtctaatgtatgt

SEQ ID NO: 117897 - DNA, 1316 bp, Zea Mays
tgtctcaagtcatatggttcacaattatgaagatttgcaacttaaaccctaggctttgggcttatttgcaaaaacaccacttttgtaaccatatgactaagtctgattttcagagaataggttcaactttggggccttgtaacttccaaataaaaaggattttgccctaggtcaccacatcaagtttgtagagtcttagaaggggaacaactttgttataaggattgagccttggttacataagaaagttagagataattagacccaaagttgctcggtcagactgcttagaatctaaattcaggctgacagttgcttggaacctggattgagagccatttcgaccatgatctagtaagaatccatctagggatgctatagcaaagatgaagagggattattgctctacaacttcgctaaagagaaattaacaaggcatcatatgcaaaatcgagattcgggcactataaaatggtctgtcaggaaaactgatagtgtcacgccatggtatagtgcaccgggggggatcaggttcagaacctcgccgccgatgaccgatctatgccggggtcgggctgagctatcgataggcatctcctcacgacgatattcttgaagcaggataagatcgccgtggtaggggggggtgattattccggccgccacgcggtcactgatctttccggccatgcttggtcactagcgctgctctcctctgttcatccacaccatcaccgatttgactgctttacggtcacggttgaacgtggcaagctctaagagaagtaccgcactcggtgtcgtcgttgatcgccagtagggtctagtgatggttatcaccgtgaccgtcgcgatactcacgaagcctataaatccaccctgctctcacttcgttcgtctcaaataaaccaagcccaactcttcattcctcagttgcgaatccaacaagccactagccatcacgttctgtcccccatcctctgtgatcaacggaattccactaaaccggtttctttcaccgccgtgaagaactcttccatggccagaactcctcgggttagtgcatacccaattgattcgagttcttgcttgtttttagccccctattgctctcggagccggccaattggagtttacctgagtctcatcaccggaacacccctctgctccgtagagcgccgccgcgacgccctctctgtcgacccgcttttctactcttgcccatcccaaattctagcatgtacgtaaactctggtgaacccgtgaagcttacccaagcttcaatttagtcagccatgctttcggttatccggaac

SEQ ID NO: 117898 - DNA, 957 bp, Zea Mays
cttcggcgctcttctgagccctcaaggcattactaagaattaagccctactaagaagaagaaagagttgagcatggcaataaaatacttcattttctagcttcaaaattaacctctatacctttatactgttgtacgcgaggctatcagcaagatcatccttcgacaaaaccgaaaggccttcttcaagcttaggaaatcccatactcctagctatctcctggcacacgaatatttctttgttatcagggagacaatacaagaaatcatcttcgttggtaccattgaacactaaggcccccttcggatatttcagtctttgagcatagtgtttggcctccaagatttcttcttcagataattttttccccgaagcgtgccgaacaatgtaatcaatatcttcaactaaggcttcgaggacaggggattttgctttttctgccatgtctttctctatcgtcttgccggtatctgaactttgctgactcatcttatcttcaggcacgacgaccttcgtctcagtgggcgctgaaggcccagcttccgcttcgacttggtttttggcagcttcggcagctttcttggtaggagcaggagttaaggtcttcgtggtctctatgacaacgtctagtacgctggccatcctcctcttgggagttgcggtaggagccttttgcaccttcggcagttttgcctctgctagagggctcagaatttctggcattttcattgtttcctccacctttggctcttcggccttatcatccttagcttcgatcggctcgactgtaggcatcttcggcactacaatcggctcttcaacgccatgcacaatcggagcagcttgtcttgctttagcagttcaagaggctccttcgccaaattcaggcaccacgaccggttcaatataacgcggccggtgggtcagaaccttcacctttttgcccttcggcacaac

SEQ ID NO: 117899 - DNA, 288 bp, Zea Mays
aaattctttcagtcgtacatgatgtgttccatgtgtctcagctgaagaagtgtttatgagtgccagaagagcaattgccaacggaggacctcgaagtccaagaagatttgacatatatcgagaaaccaactcagattctggagacagtagatagagtcacccaaaggagcaccatcagaatgtgcaaagtcaagcggggccatcatttagtggaagaagcaacttgggaaagagaagattatctgagagccaaatatcccgaactctttgctagccaaccctaaatct

SEQ ID NO: 117900 - DNA, 538 bp, Zea Mays
attttaatcagtaaatggacggtgggttgtttttaagagaacttggggtttcttttgcaagatgtttaggccgaaggggtatcggttgatctgcgtcgtcagatcgaaaactagtggcgcatattagaacgtcccacttaataaacaggcacgtgaccgggaccgccagatcctagacctacgggctacggcttagatcgatagctcacatcacaccagaccaaaccgattttctatttctaatctcaaacatccaataccagatcaacgatcacgacttcacctcctttattctctctcatcgtctaccccatacacagcggtgcggcgccccttccacgacagtgccatgcatagccgggggttggctatgagttccccattgaaccaccttcgaatctaaatcgtgctacgcgttgttgagactaaggcaagtaggtctagggccttcttaccggagtcaggatgtcagggtaccccgctgacgtgttccgcggctcgacggtgaaaagcatgctccgtcgagcaagtgctccac

SEQ ID NO: 117901 - DNA, 343 bp, Zea Mays
cgtttgacagacaaatagagacataggatgattagaattcgaactgaggcacgaaacaatgtgggattgagccgagacttcacgaataggtttatataggtgaatattagtgaagtgagtgcttggtttgaatttaggcgaagaaatagggttttgggcactcggctcgaaaacgatcgcgcaaaacgggaattttggtgaaatctaagcctgggatctcggattggtgtgaaatttggcaaggatgttgctggaagtgttgtgaaagtgcctgaaaaatttgggttcaattggagcaagtttggctggtttggccatttcaccgagcacgtggtgtgcgggg

SEQ ID NO: 117902 - DNA, 520 bp, Zea Mays
cttagatccaaacttcattggttcgattcgtgttgttgcggcctggatctttagatcttcaggtgcgaacgtgttcttctttctcctcccagttacttcattgttcctttatattcgaacttgtacgtttgagttccgtagtttaccgaactcatgtgaatgaacggattcgaatagtacgtgcaccacaagtgaccttggatttcctctatcggttagggtttccataacacagttcatccacttttgactttagtctaaatgaatgtggtcccgtgtttcattaaggttacttagcgtcgatttagatgatgcgtggggggtgattcatatgacaaccaccataataccaaccatagatttgggggcacaatttgttttctcagttcatgtctcgcggcataatttaatggttacttctgtgattacatagtgaaatttgaagttggtgcaatgtcattttcggtttagggtatgcaaccttttatgactcctttttttgtgtgccaaatgttctgtt

SEQ ID NO: 117903 - DNA, 419 bp, Zea Mays
atgagatcggcgggtagcactgcctccgacccatagaccatgaagaaaggggtgtttccatgcaaagctcggctgggttgggttcttaggctccaaacgacatagggcagttcccttatccactttcctgcgaacttttcattcttgtcgaagacctttttcctgagtgcctccagtatcatcccgttggctcgctcaacctgcccgttggcccttggatgtgctacagacgcatacttgatttgaatgctcttttgctcccagaagtcgaagaactctgaacttgtgaagttggatcccaagtcagttatgatgctgtttggtatcccgaatctgaatattatgtcttgtatgaattccacggccttaccagaggttaaagaagcaatgggcttgaactctatccatttagtgaattt

SEQ ID NO: 117904 - DNA, 429 bp, Zea Mays
ggcggtgtcaggtataagctctatggcaaattcaactttcctttcaggtgccatgcctggtaaatccttgggaaacatagttgggaattctaacactgccttgatagcttatggtggctcaatttcctcaatatgggcggtgacttggtgacagcttcctttccttggtccagacaagaccaactccactaacacttcctctcctaataaggacactaacttcacagtcctcttgtcacagctaaggcttgcttgatatttggttagccagttcatccctaggatgacatctatggttacatcccgggtacccattactatcggatcataggggaactctatccccttatttgaactcttgcactagggcaaaatctatctgtttgggtcctcccaccaattgaactaaccctcataggtggatacatg

SEQ ID NO: 117905 - DNA, 453 bp, Zea Mays
gcgaaggagacctcatactcgtccggacagctcggacagagtcccggggcaagctagaaccaaagtgggagggccctttcatcgtcaagacgaaggcgtcccccagcgcgtacaggctcacaacgccatccggcgaagacttagagcattcttggaacattgacaatcttcgcaaattttttgtttgactcctcagggccagctcgcccttgtaattcccaaaacagctttattctggcccgcactcttttcctcccggggggtgaggtttttaatgaggcggagccatgtaatatacacgcaaaaaatcccccgcaaaaaattacaacgtcgaacaaaggccgcatcgacggtcttcggcattcgacaaacacgaagtcaccgcgaggggcagcgctggctaccctcgcgtgcgacagtccgtgcaaaagtcgcctaatggtgcagccggac

SEQ ID NO: 117906 - DNA, 272 bp, Zea Mays
ctttatttaggaattatgtctgcaacaagaaggtttctgtgtttatcaacaaatgattgattcatgtgcatttatttgagaatttatatggcccatacaggaacaaatagttgaagaagatgcagtgaaatttgtttgccgagaagctaagcagatgcactgaagtcatcttgtgtcattccatatcatgctacattgccctaacctgcactgctttcattgaacaacgcacatgcatttacctatacatcattatatgtgtagagtgacgt

SEQ ID NO: 117907 - DNA, 384 bp, Zea Mays
tccatctgaacagtcttttaatgagagcctattacacctgaccatcctgggtcctcctcctgttgcacttgacaacccattcctagctgggcacaacacggcgctcactctagaatctagatataccaaatcttttgcaggattactgttgtgtaatactgttcagagggcccaagactcgatcacccacaatgattggccaccacttaggccaaggagaaggagccatggactgattgtgtggctggaaaccatgagctctcttgcagctaacagggcaagggtgactgaggacctacttcatttgtttattcgggatggaattcagagaccaagagatccaatcatcgtctaagcgaaaacaaaatcccacctttttctttt

SEQ ID NO: 117908 - DNA, 764 bp, Zea Mays
caaagggattaattagcctttttgctaagatagggacgagggtgggtgttcctagggcaccaatctcttgttctcctttcccgcacactgcgtcctacgctcaagtcctgtcaaagccaatggagggtggcggtgataaaggaaggaaaaagtccttattgttatagatgtatcacaagggtcattctatgcaagcatgtgcgacacgcaaggttttaaagtcgtccgactagtcgcgattagttggccttatcgctaatccaagctcgattaaggtcttcgacttgactagagcgactaggtagcgattagtcgttcctagtcgtccgactaggggttatgatcgactagttatgcctgttttgggccactaatacgacctttattatgggggtcggcccaccatctgtacacagcatacactattttgccctaccctcctctcctgtcgccctgttgtgctctggcggccctctgatcgagcagcagctatgccccctccatcgtgcggccgctgtagtctgtagagaccctcctccagcgcgctcccgtcctcctctgttttctgttcagcggctgaacaggcgagtacacgaccactcctctatttagaattcagagaccgagatgagcacctcttcagacggtaattactctgatattttggttgatcagtgttctctgttcacttactgagcagtgttgtgcccgccttggcctcctcttgagttgctcttcacttgattgttgtgccactgcatatg

SEQ ID NO: 117909 - DNA, 736 bp, Zea Mays
gtgggaatggacctgtaacgcgctggccacggtgaggtcacttcgcgcggtgctttggaccgatttggggaaagtgagcaattcgggggctctggtgaacaattgaaggcatgagttgatggattgggtgcttgactaccttgcggaatcgatggcatgctcaatttatagaatccccgagcggtggcccatgaattttacatggcgcggtggttgtcggagaaagaaaagagcactgtcgcaagagattggtggctttcaccgtggcggctcaccggcgatcaccggatatgtgtaatatgagctactgcgacgtggtaagacaccaaggcacgtggcgcacaatcgttgagcggcgaactccggtgagctcatccgaatcggccgtgagttaggcggacacggcggccggagtgaacagtggctcaagttcatccacacggcgatatttactaccccgagcaacaatcaatacttacttgagcacgaatcgtagcgtttgtcgcaaatccgagcgtgcgactcactggcgacgaggttctctgaacctgggatatttccagtacactgtaccatcgcgctgcccattcagttagtctaggagaccactttgcagagcctagatctcaaatttttatgtgactactcactaatctgtattaaacaaagttgtagctcaaccaatcagctacaaaacgactacagtaattatcctcaatcgagcactaggtcctac

SEQ ID NO: 117910 - DNA, 376 bp, Zea Mays
catatgcaatgggaaggtcagccggggcgcgcaattcatgaggcataggctacgtggatctgttgtccatggtccccaccaccgattcatcgtctccttttttccctccctcctcctcatgcctccctcttgcctagacactgccacctcagtccacactccacacttgaccaccatcgttgctctgtgctaggacgctccgtcggaggacaagaacaacccgctggcagtgaggttgtcgcccccacctagagcatcaacaggtcgctcaccctctcctccctgcaccgctgccgagcctgccctgtgacatgttgcgtcgacatctctaaggaggtatgcatgtcatgccgcgtcgagcccccgcactgctgac

SEQ ID NO: 117911 - DNA, 318 bp, Zea Mays
catcctttcctggcttcggagtaatctcctccccgccgaaacgaaccagctccttcttcgcttcactgaaatagcccaaattcatcagcttcggcatgtcaccttcggaaatggtggatttcccaaactccaggtggctgggtttagttggcactgtgctgtaatcatcttctgactcaacttcctcagcatcagcttgctcagcttcagcggcaggtgcatcctccgatactaccagccctgaacgcttcatcactttagagattgtagcagtttcggcaccttcggcttcctctccgtcgtgagtaaccctagctg

SEQ ID NO: 117912 - DNA, 603 bp, Zea Mays
gccgagctctggcgagcttacaccagccaattcacttaatgactgacgccctactttggccaagaccgaattcaagacccaccgattgtttccccccactcaatttcactaatgagactctaaatcatcctgtccacggagacagcgcggacaatggatgaacatgggtgttctcggtgatccagggcggtctagttcaattgaattggttgaggagcttgaggaggacttaaggatgcttgaacaagagagcagggagtacgaatagacctggaatacattgaccgcggtgagggctcttttacggtggcggagaacaatttggggagaatgagaaattagcgaactctggtgaacaattggaggcacgacttggtggcttggtgcgtgattaccctacggatccgagggtgtgctcaatttatagcgtccgcgagcggtggccggtgaattggacgaagacgcgcgacgaccggagaggaagaggggcactggcacaagcgcttagtggttttcaccgtggtggaccctccggcgatcaccggatatgcttaacacgactaaccgcgacgtggtaagatgcctgggcacgtagcaaacgat

SEQ ID NO: 117913 - DNA, 509 bp, Zea Mays
cgtcgacataagcttccaccctcttgccccagtgatcgactaagcatatctggatggctctttggtaagtcgctccagcgttcttgaggccgaatgacatgtaggtataacagaaagctccaaatggtgtgatgaaggtagtcttctcctcgtcctctttcgccagactgatctgatgatacccggagtagcagtccaggaaggagagcatggagcagccagcggttgagtcaactacctcatctatcctagggagtccgaagggatccttcgggcagtgcttgttgagatcagtatagtcgacgcacatgcgccaatcaactttattctttttgagtataagaacagggtttgctagccacttggggtgcagtacttctctaatgaatcctgctgacactaagcgagctaactctgcatggatagcttctctcttatcgggcatgaaacgacacagcttttgtcggatcggtctcgcctgaggatatactttaagtttgttctcggcc

SEQ ID NO: 117914 - DNA, 438 bp, Zea Mays
ctcatattttgaatataaattaaagtttcactttggtcaaagtagtatcattataaagctctcaattatatttttaaggcaatcggactattttcttgacattttcttggcatggaccctcaataacttttattgtaaagtttatatagagtgttttgggaaggttgacataacttgtttgaatttataaatttgcttttacttaatcgagcagtctcaagcaagcgtgggatttataatttcgtacaaatatttggttcaaactttgagaaatctctagaatacacttgatagatagagatgaatgatgacataaatataacaagcggaattgcataagaaataattagaggttgacactacagagattccgctggagaatgcagatttggattaagtatttagacgtagaccgattatcgagaaagcggattcgga

SEQ ID NO: 117915 - DNA, 365 bp, Zea Mays
aagggaaaatattttcacgatacatccattgtgagggctagaggagagagtaccgttcctcttcccgaagcagatggagtggtggtttttaaaagtttcatgaaggctagcttcattttccattgcacaagatactagttgaaattttgaagacatttgaaatataccttcatcaacttactcctgaagctttgattaaagtgggggttttcatttgggctatgaggagtcaagggctagagccagatgctaggtgcttctgtaatattcatgaattatcttaccagacaaaggcaactgggaaggagcagtaccataacaacattgggtgttacagcttcgtgccccactctgaggcaagttat

SEQ ID NO: 117916 - DNA, 531 bp, Zea Mays
gtggcacctcttggacgaaaactccaggtgaaacctgggtccgactggatcccagtttcgaaaacgcgtctgctgccgcgtagcgatatctttccacatgatgaaattccagcccttcaaatctgtcttccagcttttggacggctatgtagtacttgcccatagagtcattcgagcaatcccattctttatttatctgacttatgaccaccagtgaatctccgtataccatcaacctcttaatgcccagtgatatggcaatgttcaatccatggatcaaagcttcatattctgctgcattattggatgctgagaataacaactgaagagcatatttgagttgttcacctctaggtgcaatgaagaggatccctgcgcctgccccctgcaacttcagcgagccatcaaaatacatccgccatacttctgtagtctctaggttatctggtacttgttgctcggtccactctgatatgaagtcaactagtgcttgagtctttattgcagtgcgaggccgaaactcaatgtcgt

SEQ ID NO: 117917 - DNA, 345 bp, Zea Mays
ttcttcggtactccatgtagacaaacaatcctcgacatgtataactctgctaactgggctcctgagtaagttgtcttcataggtataaagtgtgccactttagtcaacctgtctactatgacccatattgaatcatagccatcccgagtatggggtagtccaactatgaaatccataccgatttcttcccatttccattccggtaccttgagaggttgtagcaatcctgctggtctttggtgttcggctttaactcactgacacgcgtcacacaatgcaacgtgagtagccacatctcttttcaaaccgtaccaccaatacttttcctttagatcctggtacatc

SEQ ID NO: 117918 - DNA, 564 bp, Zea Mays
atagttatgatgataaacatatagacatataaaatattgctactcacaaacttagcaaacatatacataaaaagtatgttgaccataatagaaaatatattgaattttaacaaatttagatataaatttataccctacagagcggcccatgcttaaggaattgatggctccattcacacgagtcgatatcatgtgttttttgaagtaatatactgcggccaatgcaggcagatgttcatagtaccacctcctttgcatccactaagaaggaaatcaggcctccactaggaaggacatgaagaagatgatcttttgatctgattagtgagcagtcacggtgacgttgtctaaaaaaaggatcacccacacacccaagcaggtgccgcaaatacatatgacgatttttggtgccctaatctcccaatacaccacaagtgcataggattagagtgaggagactcaaatacaactcgactgagtgatgaggggttattatgtgttgtactttaattcgactactcttgccaaagacaaaaatataatggtaggagttttgggaatatg

SEQ ID NO: 117919 - DNA, 405 bp, Zea Mays
catagaaccaccatatcctccaaaatcaataatggacctgccaaaaaaatatatcaacttgaaggtcgaataattatggatactaaatagaggatgggataaggggtgcatacatgctctgctccatttgttgggaacaaatgaacttaagcaattggcgagtacattgttcacgtgatacatgacgaggtttagcatcaattgtttgactgtcaatagttcttctaaccacttcattagttgcctaatatgtatatgtgttagtatacaatggcataaatttgtatgtaatatggtatacatatgtgagtatgatatgaaatgaaagggacataacttacttctgtcaaaggggttttgtcgaactttggggcaccagtggtgggaggatcctgcacaacagga

SEQ ID NO: 117920 - DNA, 309 bp, Zea Mays
tagagatctccgttagacatgtccaaaccatctcaaccggtgtttgataatcctgacacatgattcaaaaatatttatatggcaaccagctgttatgttcgaccctagttcaatgccagaagttagcatttgtgtcagtattctgaacagtttgctctagctctattcagtcactcagacttccatttagaaagctacagagcaagccatcaacccatcttacctcttcaccgatttcaatccggagcattgagcagccatccaacagccccattttaactcatgtctttatcagtgcctaagtgtgct

SEQ ID NO: 117921 - DNA, 411 bp, Zea Mays
caagcctccggaactccggagtagtaataattaccgagttactactgtgccactctgcatgaggaattacagcggccaatgatatgcaggctactgtgcttttgttattgacgcgcggacagcttggttacagagcaagtactcctacagtaattaatcctttcttttacataaatgtggtgagatgaaaacggacaaagaatgtacacttatatatatagaaaaaaggaaaagtatgtttcggggccttcaattcaaactcctagcatcgacggctccgaaaaatcaaatggaatactaggaatatagtggcaggagtagatgctagagtcgtggaagcaactagctcaactggtacagcctatggccctttttcgttttaggttttttccagctttgctattagaagtt

SEQ ID NO: 117922 - DNA, 651 bp, Zea Mays
acattgtggtcaagactaagagaaggtcgaccctagtggaagacttgaccctggtcttcgacaagctgtgggcaacccgcacgaagctgaatccggacaaatgcgtttttggcatttccgccgggaagttgctgggattcctggtttcgtaccgaggtattgaagcgaacccgaagaagatcagagtgatcgaggcgatgaggcccctagcccgagtcaaggacgtccagaagcttacgggatcattagccgcccttagccgcttcatttcgaggttggctgagagagcgctgcccttctttaagctgctgcggaagtctgggcctttctcttggaccgaagaggcggaacaagccttccaggagttgaagcagcacttggtgtccctaccaatattggtagctccggaaccagaggagtcgttgtatttatacatcgtggcggtcgcagaagcggtgagcatggtgctggtcgtcgagagaccgacaccagaaagccaggaacctaaggactcgggaccggctgcaggggtccgaaccattcaaaggccggtctactacgtcagtgaggtccttcatgaggcgaaaaccaggtaccttgagacacacaaactcctctatgttgtgcttgtcgcgtccaggaagctgcacc

SEQ ID NO: 117923 - DNA, 307 bp, Zea Mays
gtttgcacggattgcctcggaccattgtttctgaccgaggagccccttttgttgccagattttgggaacaactgcaagagtctttgggaaccaagctaatcaggagttcagcttaccacccatagattgatggtcagaccgagagggcaaatcaaattctggaagatatgctgagggcttgtgcaatcaattgtggcaagaactgggataagcacctctccttggcggagtttgcttataacaacagttatcaatccagcctgaggatggcaccttttgaagctctctatgggagaaggtgtagaac

SEQ ID NO: 117924 - DNA, 345 bp, Zea Mays
ctaggacatgccaagttacactacataagcaaaaggagatagctaaggccaaagcactgcagaatcagctgaagcaagtcctacatattgcttcgtgttattcctcgtacattcttgagtatgtgggcaatcaactgccattttcacaacccacaattttagtagcttcggcaaaccactctccagctgcatgggccttgccacaaccaccggtcatgactccaacttcgtcccacaactaactgccagaagtgtagcgctaaattcaacaacaacgtgatgcaagggaagattctgaagctcagacagttaatagcactattcgagaatcaatgcacatttact

SEQ ID NO: 117925 - DNA, 770 bp, Zea Mays
cgaatgtgtgggaagtaaggaggttgccatgttatgtatctgagtttagtacctttttctggtggtgattcaaaagtttccaggtcctggtcttcaattctaagattgcctttgcttgtatgtataattatgcgttagaacggaacatataaatgtaaataaattggtaaacaaaatgaactcgaaatagtaaatacattgaagttgacttacatttggagaaatgtttattgacagtttgcacattgttgtagaaggtgaaactgattggtttgtaaatatattgaagttgacttatatttggagaaaccttagagtgacttgataatagtccataacatagaaaagggtttggctcatttttcttataatgaaaacgatagcaaaaagaaatcttgcatagtcacatgagaccttctattcttatctgcattctccatttcaacatatggaacaccaatttgaaatccacgctcaccaaaagtaaatatcacaatggatattgcagtggcatataaactggacatatggaacaaatacgtttaaggtctttgttgtgtttttgaatgataatgtctcttttaaatgtaccaaaagatagtctccgtaaactattcagtaaatgcatgtaaaaaggaatatactccgtagaagaccaaaataagaaaggtgcgcaagaactgttccctttttctagggaaatattgcaatcataaaacagaaacacagctttgctaacgcgtgagcagcaaaaggcaactgcaggtcca

SEQ ID NO: 117926 - DNA, 310 bp, Zea Mays
aatttatacaagaggtagaagaacaagtacgcttgatacgggagaacttgagaactgcgcagtcaagacaaaaaagctatgcagatacccagagaagacagttggagtttaaggagggtgatcacgtgtatttgaaagtgtcaccgatctggggtatgagaaggtttaaagttaaagggaagttatcccctcgctttattggaccattcatgatcctaaagcgagtgggagaagttacctaccaactggaactacccgaccatcttgcgaatgtacatgatgtcttccatgtatcctagttgaagaattg

SEQ ID NO: 117927 - DNA, 475 bp, Zea Mays
agacaaacttggagttagcatgaaccttggaggacaaacatatcagaaaccttatgacaaccgatttgactatcacccatacccctagggaacaaggatacacgaatttccaattttttggggttactagggtaagagcacacacaagcacataagccagttcctaacacaattagaagaattggccaacacagatgactctaaaccctaaaccatattcatatgggatgccatagtaccccacttggggacaccccaaactttcgtatctgataggttggtgccacgagtgcaagaccgattgtgtccgtctcaatctggtcactagacacaggtccagcaaggatgccagactactcggtcacaaaggccgaccaattcggtagggggcatggagagaaaatatccacgagagccaagagaacaacaaatggagatatcatcaaaataggcacaacatatgtcatcatacaaa

SEQ ID NO: 117928 - DNA, 1608 bp, Zea Mays
gctgcatccctggaggcgccgccgccgctccacaatccctcactgcgaaaatcctcccttgacgatgagacccgcgccctcgtcgtccccgacgccgccgccctcccggcgtctcccccctccgccgtcgaggctaacttcgcgcgctacttcgtcgcaggtaaaaagacccgggcttttgtcatagccaccggattagagtagaggaagctttgagcctttcttgggttcgaggtgcaaacgcttgacccctcttagagagagtggatttcgtaaggctatggaagctcagggatctcatctcgagactcgaggagcttacttctttacagtattgtcttttgagccaagtgtttagcaatctcacgtatgattgagtagggaaaataattcgttgtattcatattccggacgtactgtgcattgattatttgaaaccgccctgctggatacatcggcgctcatgtcatttttctaagtgtattcttgaaaaaattgttgtttcattttttgttgtaattagggttacatatcttcacctcaatgttaagcaaatgtaaaatgaattaagcactccttgatttgttgggtgtacatttctttactcgatcactgtgggagtgtcagtaactcagtatcagcattcaacttttattttttcctggcccattgacccattccaacttccaggtaggatgtaaaagatcctggattccgttgctggaaattttattttcagcctactgtgtctgcaaatgtgcagcgtggttctcgagtattagtgatttaacatactagaatgtttgacaagtttatgctgttatatgttgagccaggggaagaaaatgtttctactggtttctagacgtctgcctcaagactctaattccactgtactgctttattgagcagattttctgaatccagggtatgatcagtatgtgtatcgccatcctaacgggtaggttttcaatttcgacacgtcaatatcagattttttttaggcttttggtgaaatctgtattttcacaatatgcatctaaggctgacaataggtcgctatgctgtctctcctcaaaggggattatttgtagatagtaagaatgctaaatgctgggtaattaagaaagctgaatgtgtgcttcataacataatcgttggactgttttatctccaaataaatgatctgttcttgtgttatgtatttattttctacagtaactctggttgacaagtgccagccaatgccttcctgttctctgattagtgcacactgggatttctaatgagacttaatatttagtctcacggttgctttgttctgttgaaaaacattagattgtgtgtggttggtttagctccagcccatgttgtgtttaaagaggaaggagtcatatccactgttgacttcaatgtcggcaagtcagatcgcagtgagatgaaagtcacaggaaaacggaaaagggtaactagattgttttttctttaatgtttggttaaataaagggcaacaagaattgatgctcattttacattgcagaatgcacaacacttgcaagaaaattcggcattgtgcaaagtttgtgtaaatgataaatcttttattgt

SEQ ID NO: 117929 - DNA, 432 bp, Zea Mays
ctcattggggaaacattatacagaaggggtgcatcaggagttctcatgaagtgtattctcccgttcactgggaagcaacttctagaggaggtccatgctgggtaatgtggaatacatgcagcatccagaacactagttgggaaggtcttcaggtcgggattttactggccaacagcaaagaacgacgcggccgagttagttcaaaggtgcgaagcttgccaatacttgtcaaagcaacaacatctgccagcacagcaactgcagaccatacctgtgacttggcctttcgcatgctggggactggatatgattggacctttcaagaaagctcaaggggatacactcatatactggtagcgattgacaaattcaccaaatggatagagttcaagcccattgcttctttaacctcagctaaggccgtggaattca

SEQ ID NO: 117930 - DNA, 457 bp, Zea Mays
ctaagttaagcgaggaactgaacgaagcttgaacgattttggatgaaagttcacggcgcttcaaccaagagacgaaggaacttaaaacaagggttgaagccaaaactaaaaagaatacaaagttgtacgagtctattaaggaccttcggaacaagtgtgtagactttgccactcgatgtgcacactggcttaaggggatattcaactcggttggagctgcttctgaaaaagttaccccttcagccaaagacatccccggggcctttgttcatattgaaaacgaagttgaagccctcgacgaagttataagggggcacagagattactgtgctctggtagcttctcgaggcacagctactacatttatgaaggctggatgcactcacaccaagacggttaacaagccaactttcaatcttttgacgtcagatatagttgatatcctagctgaagcccg

SEQ ID NO: 117931 - DNA, 582 bp, Zea Mays
gttggataggatcagggaatcaagtcacagtgttctcgtagttcgagaatttttagtggctcccattcaccccctttggtcacctcaccggtccttcaaaaaccaatagcatttgtgactctgttcagccttcgtttcccttgggtctcgaaggcatatgtcaaagatttgtcttccttagtaagataatttccacaaatctcattacattttgtttcaatgagcttcagccaccctaacaaaggagtttggaacgaagcttgctccttgaattgtaaggcaaaagttacaagctcaccttctctagatttcaccaccttcggcaatttccacccagtgtgtgtaggataagtgttgtatgcaagaaattcttggattagatcttgagatatgatcttctcagaaacatcattgaaagctttgtaacaattctaagcagtatcattcatttcgtattttggtctcttcagaccgaaactaatctgcagcggactcatcaccatatccttgaagtcctctcgttgtttagaatccaccttagcatagaaccactctttcgtccagtcaccatgccattttgtt

SEQ ID NO: 117932 - DNA, 836 bp, Zea Mays
gcccatcatgggttataagatatttgtgtactaataaaaatgaaaaaaaacaaatgttataatttaatgatgaaaggttggtcgtcgtcggttctataatggaacatgttttcatcacaaaccatgatttaacttgcactattggtgaaatttgatttttttggtcacacaagcatcatatattttataatgttagataatttccaattttagtggcataagcagattgtcacataaggtcatgtatattcttatgcactaaaatcataatgaatgacttcacaaagaaaagcttgatctaatagatggcaatagaaacatgtttgatgttgaggtatttgtaattgaatttacttttcggggtatttttttgcctaattatgttggttatcattaatattaattttttcttggatctatttatatatgttttacatttattcttttgctatgtcaccttttgtcaacctactcataacaaataacattctttcataagcaactaaatgacacgtggtggacatgcaaaaatttattaaggcacttgttttctccatctaccttcttataacaagtggcttcctttcatcataactagatggcacgtgttggacatgcaaagattgtttacgacacgtgttggacatgcaaagattgtttaagacacgtgtaacttctcgttgcagtggatgggtataaataaacatcttgtgttgatgtagagaacaacacatattgccatagacaaaattaaggcctgcaatcgtcggtatggtgcagggaggtactttcttttcctatctatgtaccttatgatgaatacgggcgtaccagag

SEQ ID NO: 117933 - DNA, 529 bp, Zea Mays
aacatcacggacgtttatcgaacgtacagtacgcctctatagttgccagagacatccgctattttagaggacacagtagcagatcttgttagtgagctgacggacaacaagaaacattaaatataccataccgactccattagcgtgtgctgctgaagggagtctaaatattaaagatattttatcgtaacaatcaacttgtccatggtggtgaaagctcagagactgcatccgcaatccagattcgacatcgatatccacgcttcagaaaaggtatccaataattgaaagaccaaccaacctgcttcgagatactggagctgatcaaagcattctgagctctgtgccggctggtccatggaagatagacaccatgcggccactccactgccactcctcacggaacaacagcagagcagcaggtggaccatggtcggcacgatcgcttgctcttgctctgctgccactgctctccctgctctctcccaccgggtgtgcgagcagcacggagcaggacggggtctccctc

SEQ ID NO: 117934 - DNA, 573 bp, Zea Mays
agtcctactttaaacatggaatagcctaattttaaaacctaactaggtctactttgaacataagctagcctactttgctgttttcaacaccctgcttccaaacttctaaaaggaaaattttgatcaaacaaagtccaatttgtctcaaatccaccttaaccagttttgtgatcaacgacggagataatggatcatggtaataggaaaccaccatttttatttgacaaatttaacatactagtagttatgcatgtatgtgtatttctagagcatttgttccaagtttgagatatttcgttgtatttggaccacatggtcttaggtgctcgtattcatcaagatgagattgaccaacatgtgaccatcaataatgctaataaaaatgccttgtcttcctatctttcactccctcattataactatgttttttccttgatgcagctcatgagatatgtacaaatttagagaagtaaattattttaattctgtaattggcaagagatgatataattattttttgcttccacaatcattcacactcctataatatatattttatagtcctaaattttc

SEQ ID NO: 117935 - DNA, 475 bp, Zea Mays
cttttctagtcgtcggcaccatgcaatacagtagtagcttgctggtggccatctgctgctggccaccgacgccatgctggtagccgtttgctcctgtccattggtgaaccttcacgtcaacgatagcggaccaaagaagttcgttagacttagcgggcgctgagaacctccgctattatagaggaccgtatagcgttcgttgttggagcaataaagttggtagagaaatgctaaatatagagttcagaacgctttagcgttccttgttggcgacagtcaaaggaggtaagcattgttgtcgtcgtctgcacgcctttaaggagaaaaagactcccttttgttaacatgagcacgccgtctctcccgccattcccctagtcgggtgtttttgttcactcaaaggagattgtcatttttcggtattttgtggtcgacctgtctcatacctcccttagtcctcgtccgtgtttacatg

SEQ ID NO: 117936 - DNA, 953 bp, Zea Mays
gtatgatattagtatcgaaaaaacatgaatctagattaggtatggatgactgaaatgttttgtcaggcctaaaacagaaatcaagcggtaagttctgattttgcaccatctaagtgtagcctttaatcatgtctcagaagaagcccagccatccacattatttaaaaatacaaaaaaaatcaatgcaaacaatggatgatatgaacgcagaagaccaggatgtcgtaggaagcatcctataagatcatgtctttagtctgtttatcctcttccaaacttcctcattgtaactgagagaccagacagttatcagacacctgagtaccactgagctaccgaaaataaatgttactattggaaaacaaatcttgaccagaccaccaaaatccaaatgataccctaaacgttagaggagcacatcatcaagacctaagtacaaaaacattagttaacactccaataatacatgatgacagctatcatctctccttggtttgtgtacgcttctttctaaccaatttagacctagcaatgaatgtgcctcgattgccttaagaaaaaagtatttacttagcacataatttctagctgggatgaaagaaacccatggccaactcactggtcaaccatagcattgttgtaacatagtcttggctgacgacacatttagtattaaagctcaacaatcacaaacagcggaacaaatcatgcaaaaagatcatacatattccaagtaacaaactgtgtgaaccaaagatgtagtatgcatagcccgtccctcacaaatccaggtatctggaactcatgccaacacagacacacgcaccaaagagtaaaaattcaccaaccacacacggattctgcaccggatgatagacggtaacacatttcgtgcaaagaacaaacatcctaatgcagatgcagacggcatgagggggtctagcagagcaaac

SEQ ID NO: 117937 - DNA, 924 bp, Zea Mays
caggaaggcagagtgattgcttatggctcaaggcagttgaggaagcatgaggggaattacccaactcatgatcttgaattggccacggtggtttttgctctaaagtcgtggaggcattatctttatggcgaggcttgtgacatttacaccgatcataaaagtctcaagtatatttttactcagaaggagctgaatttgaggcagcgtcggtggcttcaattgattaaagattatgatttgtccatttattttcacctagggaaggctaatgtagtggctgatgcccttagcaggtccagggttccaaaagtggccttgccgttgatccctgatctagaccgtttggggatcgctttgtgttatgtcggcaccgcttgcgaggagactcggatgcttattcaatcctccctcatggagagagtgcgtgcagctcagcagcaggatcgtctattgcaggaagctcgaaagagggttggtgatggtaaaccacgggagttcaccattgatgagaatgatttggttcgtttcaggggccgtctttgtgtgcctcagaaatcagaggtgaagatggatatctttagagaagctcataaaacgccttacaccgttcaccctagcgaaaccaaaatgtagcgagatttcaagcaaaacttcaggtggaagtggatgaaggttgacgtttctaagtatgtggccacctgtgaagtatgtcagcgcgtgaaggccgagcataagcggcctgcaggtttactgaagccattagaaattccagagtggaaatgggagcatatcaccatggattttgtggtgggtctacctcgttcccctcggggcagggatgctatatgggtggtagtggatcgcttgactaagtctgcacattttattcccatgaagaccacaaattcagcttcagatttggtt

SEQ ID NO: 117938 - DNA, 812 bp, Zea Mays
caaagatgaagatgatctataagtctacaactttggtgcagaaggatgatgatgttgccatggaaaatttggagaaaacctgccctaaacctcggctgtcaggctaactgaaaaagcttccaatggtacagtaccaaaatatcaacagaagcagatccccctcgccaccggtgacctcgcgcgtagattcgcgccgatgaggtgattcgtgcccacttaagcctggataacgccgcggggtaaaaagatcgtcactactgttgggctatgtgtactaattcggctagccgccgtgctcctttctgctttgtgacccgtccggataagtcaccggagttggctgcccgtcgaccgaacgccacgtgcctcaacaattaccacgtcgcaatcaccagtgttatgcacgtccgatgatcgctagggaggccgccaaggtgaaggccacgaatcaccatgcccgtgacttatttcttctctgaccgccaccacgctcaatccaagttcactagccaccgcttagcaatcctataaattgatggccgagtctgttgtgtgatgttatcacgaagccaaagcacccagtcccaccttcaattagtcactatagccgtagaatttctttcttcccccaattctgtcgactacaccgccgtgaaccgcctcctcgtggttagctgctcccaggtccgccctcgctcttgttgctcgtgttttagcgccctcacgtgctcgtgattgttatccacgcaacccagggagcttgaccttacgtatgcaaccggaacatcttgatcggtgctcggtgtccgcca

SEQ ID NO: 117939 - DNA, 360 bp, Zea Mays
ggagacagcggttcaggggagaggggacctcggccggaacgaggattctcccaagaacataccctatccaagggcaggctcgggggaggcggaggcgcggagctatggtgacccctgaggggggtctcgggcgaagcgttgtttgtgatcctttatcctcggggaatgtgtcttgatggtggtcttggggttaagcgtgttttagaggcataatttaggtacccctaattacgataccagacaaatatgtttgcatttatgccttttgggatagacctaatacccatctcactccatctcggttaatcttaatttctaggacatgagatgtctctccaagatcctttatatctaattgtg

SEQ ID NO: 117940 - DNA, 849 bp, Zea Mays
aagagattaccgaaaaagcaagaagtgacaggcaactccaaattttagagaggaaagagacagcaaaagcggcgagaagtgaaagacaacttcaactcatagagaaacagacaaccgcaacagaggcagatttacctacaagaaatgatgatgaggaatcagcgggaggacaaggaggaaaggtttatgtgttctgatgttgataagattataccatgggtcagggactactacatcaggaaacagaagcaaaccagtgctaaatcagctaacgagggaactccctgaaacgaacacaaagaagtactggtcattgtcgacaatgttgtttagggtcttgataaatgtggtctttcacttggcgaactgagtttaaaagttaattgtgttgtcctggtctttgtttcaatactattgtcatggttgatctagatttggattggttgagaacaagtaatccattcgtttgtttggttgttctattgttggagaacttgaacgcttgattttgcttaagaacttttgaattatttgttgatgtgtgcacaatatttgttgatgagatttactatgtggtgccattgtagttgttgaacgaatgagagttactctgatcatttcttttatcacaactttctttcactccattcaagagacagaaagacacccacaaatctattaactaatgctgtagcagttcgcaaacatgttcaagtgcacaagtatcctggtccgcacgacgtgtagttagctggggctacacaagacattcacaatattatacgcccttgttcaagtgcatagacttctactacacgactactagttatataggtctacataaaacat

SEQ ID NO: 117941 - DNA, 424 bp, Zea Mays
aattaatggtaatgcaactatatgcatgccgctaattttattttattcccaatataccctcgacgacccagcaattaatatatatatatttcatgtgttgttgtgttgaatcattaagctgctacgtatgtgttgttgataacccaagggtgcaataacgactaatataatgcatttgtgtcaacgtaaccactaaagatgactagctagcgtgcatgattagctagctagctaggtcgccgccgcatacatatatggatcgataagggcagatgtgttgaacctgctgctggcacctaaccatacccttttctgtcctaaagagagtcctacaagtttgtctagcgccgtggataaatggagtaggcctcaccacacactgcacacagattagtaaagctagctactcctgccttgagctctt

SEQ ID NO: 117942 - DNA, 470 bp, Zea Mays
ccctcagcagccgtaccttgaggggaccatctccctagactgggagttagagtgatggcacaagctcgcccccataggctgcccttagggcaggggatcttcgattgggaaaggctgcatgaacaataaaataaactcctcatgatagcaagataggaaaagagacatgtgggatggcacaagaggcttatgaactcgatgaagcctaggtcagggcacatgggaggacactcggggatagaacgcaaggacgatcgtaacgccccatatgcctacttctgaacctctagggcctggctaagccatcatgcgatgtccgagtcgcttgggaggatcctagtgcctagggagaagagatccttccccatatgatctagaggcacaagtcgggcctttagaggagccaccccttgttgaagatagacattgatagtgcccactcctgtaactcctttctctcagaggataag

SEQ ID NO: 117943 - DNA, 371 bp, Zea Mays
gcaggatctgggaggctggttggccgtctacaccaccgcggctcgagccgctggggcaaccgaagatgtgatgaccgcatacttgcctattgtccttgggcaagatgcactgcaatggctgtgacacctaccccgacattgcatcgacgactggagcgacttcagtcggcgcttcaccgccaacttccaatctctctccgacaaaccggcacaaccatgagacctcaaatccatcaagcgccaaggggacgagactctccggtcatacctcaaaagatttcagaccatgagaaatcgtatcccagaggtcgcagaagcatcagtgatcgaggacttctaccgaggatctaatgactcgaccttcgtacgag

SEQ ID NO: 117944 - DNA, 397 bp, Zea Mays
aggagattggctgaagcgagaggaagcccaaatgtggttactgaagagcaagtccaatcaacagaagcattaaagtacagggcagagtggtgtccagccgaaggccctctgcctcaaccagcgagatgtccaacttgtgatcgatcaaattgattctagacctaacaaggcgtggacagatggcatcgcctggttattctgaaaatgatttcaaaagcatgaagatgaagacctttgaatggattacttctaaaatccacttaaagctcgggggctacacctaatagattcacaataccttgaagccaaaatgctcatctcaaaagcataaagatgaagacctttgaatggattacttctaaaatccactcaaagcacaaagctcaggggctaaacc

SEQ ID NO: 117945 - DNA, 757 bp, Zea Mays
tgtgcaacctcaagatccctttaggcctctttggcagcgagcttcccgcttatgggagctctatatctagattgccttgcccatctcctaggcgggtgatggagaatggttgtttgtcactatcatcgtctcctccaccactaacattcttggtgcgagtcatactgaatgtcggggatacgatccccggtctcttggacccatcggtcagcgagcacactgggtaaagtgccctggcatccagggcccatcggtcagctggagaagataggtgacatctaccctggaagaacctgtcgcgtggtggatcctaacaggagggccagacgtggcaaagggaaaccactcgagtggatcccacgcttagcctaagaccaacccgtcataaatgactggtcgcattaattgtgtctggtgccaagccatagcaaaggcatcggtccgcctcccactcatgacctacggacccctcgggccacatagcgctcatgacctacgagcccctcggactgcgggacatttatggttcgcgtatccctagccagcggtgcactcatgacctatcaggactaggcctgagtgtgcaggccgctggcagggcgcaacacaacgaaccacgtcgagccccaggctacgaaggccaggggtcggtatagcccgattgatggtacttgggccccacgccatccgccataaagaatacaagacagccaaacgattgcaagcatgcgtggcattaccccatggtagaacaccc

SEQ ID NO: 117946 - DNA, 300 bp, Zea Mays
ttcgggaacaattactcacaaatatgagagaatcatgggcacatgacagcagacattcagcactcagcacacgacgctcaccgctcaggtggtcgttgcccattggacaggaagacgcttcgccctcgcctatgaatataaaaagaaagggaatttgaggaagttctatagcttgagagaagatgtaatggtaggggtggatttgggcggtggtggcgccagtgcagaccgcgtgcaacactgctacagggtcgcggggagactggaggcgaaggccaaactgtcggtggcggatgccca

SEQ ID NO: 117947 - DNA, 382 bp, Zea Mays
cgcagccttcgacacaggctcagctggggcggccaaagcagcaacttttctcttcttcccctgccccacagcgggtagtggtagtcggggtagacgaagccgatggcgtcaaaaactctgttcattctcttttttccccgacctccgaaggctgtagatagcgcattatcttctgccttggaatatgatccaagcagttcattacttgtagcctcgatgcattttagccagtcatcgtttggctcatcgaacttgtccccatacctgaatgtatacttcagccggaccagttcaccttcgctagacttgatgatggtctccttcgacatttcctagctctctacaagcggctatactctaaatgctatatgctcttgaatta

SEQ ID NO: 117948 - DNA, 709 bp, Zea Mays
attatatatatctgaaacgttattgcaaagtcaacaaatgtagtgtaccaaacggtttttccttttcaggctcgagtgcttccttcactgcctagtgactaggatgacctcactgacaagtgactaggatttactctccatagatactcctaccggttaatagcctgtgaattgctacgggcatatattttgatgaaaatgataatcaagcactcactccgataaaacattgacaattaaggtagtcttgcacagtattgtcaaggacacacatggagtttcttttctatttgtgagacaatatagtgcctaagatatctcttatcaaacaaaaatacgtctaaaatatagttacctgaagcgtagagatataaagaatattattgggtaaaataagaggttacagaagaaaatcttttagaggagcctgtaaatgacatatacggatgagagatatagatgatgttattaaagacatccttgaaggtttagcacgaacgagtagcatagatacgaatctataagttgctaatttagctaagtaaactccactctggaatctagctctctataagaaggtatttccaatgagactagtttatcgaaggggccctctatctgaagattgtagtcctgatttcttggaacggaataaatgaatgagtaggtgcaaatggtcaatctccatctcttttatgacagatttttt

SEQ ID NO: 117949 - DNA, 372 bp, Zea Mays
gcgatacagggagagtacataaaagaatccatcgatgcatggctttggttaaagaatgtgacgcgcctacaagaagtgaagagcactttatggctagtaaattatttgttaagcttgaacatcgagaggttttcctcaccatagaagaaagtgcagaaatgttagcttggttaaagaggtggtgtcaaggtaaaaaaatctattagttttgtgtgttcagtttgtcacagtttatagacatgaactagtgtttttgtgtgttcactttgtcaaggtctacatacttgaactagtgtgagttgcttgttcagtgcgtaactgtcaagaataatgaacttttgtcatgtgcatctgttatgtcgagtggtactc

SEQ ID NO: 117950 - DNA, 425 bp, Zea Mays
taggaactcacgctcgtcgccttcctccaagcaaatgccgacgtcttcgcttgggagccgtcgcaaatgccggggatccccagggaggtgatcgagcaccagctaaaggtttacccggacgccaagccagtaagccagaagccacgaagatagtccgtggaatggcaggacttcatccgagaagaggtctggaagctgttgcacgctggctttattgaagaggttcatcaccccatgtggctggccaacccagtcgtcatgccaaaggccaacaggaagcttcggatgtgcatcgactacaccagcctaaataaggcatgccctaaggacccgtatccactaccgcgtatagatcagattgtggactctacttcggggtgcgacctcttatccttcttggacgcttactctggtttccaccaaat

SEQ ID NO: 117951 - DNA, 629 bp, Zea Mays
gctaaccagggccgggcgtcaagcacggcgcggccaattgctcaccggagcaacgatgaccgcggaggacggcacatctccgtgggcggggatctctacgcaaccctcaatggtaagaaccccaccaaacgactcgtgtctgtttccccattgtgttgcgtggccggattggggtatggtgcgcccagggttggatcggtcgctcgccggtgactttcggtagtggtgtagtcatgagcgccgccgcttggtctggctcagggaagaagagaacatcgtggccgttgatggggttaatcaacggtgtggattgggggctggatatcgggccgcgggagccgttggatctccaaccgatggtggagattggattccaaggtacgccctctcgtcaaatgaataggggccgctgatcggccgatgaacaaacctaattgagtagtggcgctgattgtcttgtgccgtggatctctaatcccttggcccagattagatctgtgattcattaaaccatgaccgtaggattttgatccgagggatagcgtacacgtaccggttcatatcagggctgatctaatctggtcggttagattgtgatcgggcggctgaaaatcaaagataccccttcg

SEQ ID NO: 117952 - DNA, 1250 bp, Zea Mays
tgcgatagcccctttcagcaagattgttacatcacagagtttccctttatgctgatgatgtggttattttccttcatcctgctgcttcggatttgaacctagccctggatattctaaatctctttggtgaagcctctggtttgaagaccaacttgcaaaagagtaatgtttttccgatacaatgtgcagaggcagatgcggctgtggttcagaacagtttgccatgtgagctgaaggatttcccctgtaaatatcttggtgtgcctctttctccgtgcaagcttacaagggatcaaattcagccatttgttgatcggattgcagaccgtctccctggttggaaagctgacttgttatctcgggaaggtagaagaatcctagtgcaatctgttttgacctctatgttggtgtatttgctaatggctgttgagtttccaccgtgggcaatcgaagaggttgacaagatcatgaggaggttttgtggagaggaaggaaacatttcagcggtgtccattgtaggcttgcttggccaaagtcctgccgaccttgggagtttggtggtctgggcattactgatcttcaaaggatgagctgagtgcttcgtatgagatagctttggcttcaaaatacagagcctaataaaccttgggcttcacttccaattcagatccccaaggtggtgcggtccttctctgttgctgtttacagcgaggttggaaatggagctcatactcttttttggacagataaatggctacatggacagtctattgctgaccttgtacctcagctctttgggatgattcccaagcgaaaggccaacagacgcacggttcttgacgctttgtgtggatatccaaggggcccttgcttttgctgccatcctggaatttctgcagctttgggatactctttcttagattgtgttggttctggaggttgaggatagacacatttggcgcttctcaccctctggtcagtattctgcgaagtcggcttatgaggggttcttccagttccagggagggatcctctttggatcttgggaacgtatttggaaatcctgggcacctggtaattgtcgcttcttcatgtggttggttgcactgcagactgtcttgcccgaagagggctgcaacatcatcctagatgcctgttttgtgaccaggggtttgagttcattgatcatttgcttccagcctgtgttttctcccggcaattctggttccagcttcttcagaaggtcagtc

SEQ ID NO: 117953 - DNA, 489 bp, Zea Mays
gttcgttcgggggggtcggatagccgtctccggtgagttctccaccgaggggatcgacggcgctgcagtactctgcgactaggtgaagaagacgggggcccagccgtctgatttcgcaccggcggctgagattagcttagcgaacccgttagagtagattagatcgggctgtagattttggatcctacggctgtgattacgcccaacgaaacggttcgtccagtgtgcaccaggaccgttcgatcgcgatcgggcgattcctattgaataccagttcgagatgttaagcgatctaatcggggccatctgacggagatccaacggtccgaaacacttgataccccttcggcctcggctttttattaaagaacccctgggtttattgagattcaacccacagtccatatagcagtaatctgagtctaggaatttatgcgagcagcccctccgcgtttcgataaatgtggcccagtccagagaacatgtaaa

SEQ ID NO: 117954 - DNA, 357 bp, Zea Mays
tgtcgggggatatgtgcaactgaaaatggcagcctctaaaatattcagtgagctaaataaatcttttgtgagaagttcagtctgttgaacccttagactgaatgaaagaacaaggcataagccattcttatcggtactttctctgagcaagcgtccaacaaacctggtcgatctgatcgagccaaatgacaggttgaatgatcaccaaggattaatacttctgattagaattcagaaacccttagactgaatgaaagagcagtagtcgagcgatcctatctcaagcagtagtcgagcaatcctatctcataaacctaggattaatacttctgattagaattcagaaaccagcttctc

SEQ ID NO: 117955 - DNA, 529 bp, Zea Mays
aatttggctgttgcagtgcctaagaaaattttcaagactagatcgctgtgtgatgccttgcagcaattttgttgggtcagtgatatcagaggaaatttaactacagaagccttcggggaatttttgggatttagctcaagatgtgcagctagaacctggggtgcccgatcagcactactggactccagcagcctctggtatatattcttcgaagtctgcttataattgtttctttcttggctcgattgcttttgaatcagctgaccttatttggaagaattaggctccttcgagatgaaaagattttgcttggctagcttcctcaaatagatgttggatgactgaccgcttagcatggcaaggattggaacatccagaacaatgccttctttgtgaccgccgaccagcaggatgaaacagcgcaacacatctcagtctcttgtgtcttcactagagaaatctggttcagcactttatccacagcagggctgcatcgccgtaccccaagacttcaatgatgaagtttttc

SEQ ID NO: 117956 - DNA, 274 bp, Zea Mays
ggcactgtcaacatgatgtcaagcgttgagcagcaattttcagttccacctcctccacagcagttttatgtgcctgggacttctcagttcatgccggtgcagggttttcctcagtatctggctgcgcctactcctgcaccaactacccctatgccatctcagtttggagctccgcgtctgcctcacccggcggctcagtggggttcttctgttaatttcactccgggagcttcctcttctgcgggtatttccggagcttatgtactaccctctg

SEQ ID NO: 117957 - DNA, 884 bp, Zea Mays
aataatatatttggaggtattctaaaaaaagtgctggttaaagatcttttaataaataatattagaatttattaagatgaatatatttgtgtgtgtgtgtttaagagtatttgcataaatgaataagtaaataaagaatactaaataaaattacgtcattgcattcatgctggatttattgtttgtgcacttaatttgaagatttaatttcgaacttagatttgaaagaaaattgaaattatggataagaaacggaaaaaaatagaaaacaaaaagaaaaaaaggacatacctgtcgactgtcacctagagctaaagccggccagcaaaaaaaaaccccaccctagccccgtacgtctaccacccatgtcccatctctatttttttattttctctgctggctgcagcagacaacaccgtgacggtagcatgacgatatcccgaaccagccactccgatcaaagcaatcacgtgtgtgtcgctggtgggtggtttcctgctttttctacgccgaaaacttctgccagacagcgcaacaaactcacagcctcgtatctcggggttggttgagtcccagcccggagcatatatgccaagccaccccagagatcgagagcgtttcgtcgaagcaatagagagaagaaacaccaccatcgatgctcctcgtctgcatagctgtgcaatcagatgattgtctgccgaagctgtgcagtttccatcaaaccgtgctacgacaaggaaaggattcctgcgtcaacatatcacataccaggaaggtagaagatggccacacatacatcttatatattacatctatttactccgtaattctttatgtgacctcgatctaaccaatcagatcacgtcatgttccctatttccgtg

SEQ ID NO: 117958 - DNA, 379 bp, Zea Mays
gtgaattaatcagaggagagttatcacagaccacgtgaatctgcaatcagaacatatgctttgactaaggccaatggaccatatccgcaggcgtccccgcagaatagatcaaatgccaataagtcaaatgtggatatgatattaatcccgggtatatccacatctacatcaggtagaagcattcaaaccaatatggttaatcctcaacgatttctggcaaactccatatacacaggagtacacactgaacgacaggttcagtttagcttatgtgcgtttaatagaatattgaggcattacactatatggacattcctccccctaatgctgagatgttctaaaaagcatatagataaaatccccaaccacaatcatccgg

SEQ ID NO: 117959 - DNA, 523 bp, Zea Mays
gctggtacaacacaatacgactgtaggtatgtaaaagaggacatctcagaattgttgggatattcagacagcgaccatgcaggtgatcttgaaaaaaggaaaagcactagtggtgtcgtgttttttctgggaggaaatataatcacttgggcttctaaaaacaaaaggtggtttctttatcctcatgtgaagctgagtatattgttgttgctacagctgcttgttagggtgtgtggttgagcaggctgctcagtgatctgttgaatgagaagataagaaggttcaagcttctgatcgacaacagatcagctcaagaactcagtaaaaatcctatgcgtcatgatcacagcaaacacatagatacaaggtatcattatattcgtgaatgtgtcagcaatggggtggtggatgtaaaccatgtgagcactgatagatagatagctgatgctctgaccaagccacttggcagaatgaagttctcagaactaagaaggcaactgggagttgtcagaattcaagaatg

SEQ ID NO: 117960 - DNA, 1025 bp, Zea Mays
aaagcacatgctcatgatgcttttagcaacattatgctcctgatgcatcaaatctatgttatggggtaagatcaatgccttcacgtcagttagctaccagagaaaggagatgtgcgtccagttgtgttctttaccgtacccttcaaacccacctccttctgttggttttaggtaacgatgttgtctcatgatatcttcacatgtttgtcgctttggaggcccatctctaaccctatttcctttctgaaatgactttgtatctttcctaaaaggatgattagcgggaaggaaacgtccgtgcatatcaaaaaatgtttcctttttgccatgctttaacccatatgtttgcaactcatacatatcaaaaaacacatcctactgtggacacaccactcgcaccaaatgccatatttcaacagatcatgaattgaccatagatatgccgctcgtagattaaatttacaaattagatggctatcataagcctccaccccttgccacaacaatttcagctcttcgatcaacggttgcataaatacattgattttcatacacagatccttagggcccacaataactagagcaagaaacgtgacctcttctttcatgcatttggtaggagggagattgtaggctataatgaacaccggctaacatgagtatggagtagaacttctactgaaaggaatgaatttgtctgccgacaaaccaagacgaacacttctagggtcccatgcaaattctggatcaaaaccgtccagtgactgaaatgcctcgccatctgatggatgcaccatgatatttgaatcttgtcttgacgatccccttcgttatgccatctcatttgcttcgttgtctcctgatttagaaacaagcgtttaagccgcggagtaataggcatgtactagagctgcatgacccggacttttgtagtgaccacagtgccttcctcatccaccaccactgcataacttcacttcttacagtgcatgcaatgcgtgtcattttcgtgatccctccaaaac

SEQ ID NO: 117961 - DNA, 355 bp, Zea Mays
tctcaattggtcaaaattctcttggcattcctcagtcaacttaaactccttgcccttctttaacaatgaggtcataggcttagcaatcttggagaacccttcaatgaatcgccagtaataacctgcgagtcccaggaaactccggatcttcgagactgtacttggtatcttctaatcaactatcgatgttactttagccgaatccacaacaattccttatttggagatgatatgcccgagaaaatgtacttcatcaagccaaaattcacacttggtaaatttggcataaagctgattatcccatatcttctgtagcaccatccacaaatgctcctcatgctcactatcattcttg

SEQ ID NO: 117962 - DNA, 480 bp, Zea Mays
cggacgaagacatcgtctccccaagagccgcgcacgtctccaacaaatccacaacaaaatgatcggaagccctcatcccctcagctgttgtacctaatttccttttcttggtgggcgcactcggagccttgtcccgtgaggggccctcgtcggtcgtcaacatcgcctgtttccccagacgggcagcaacgtcggcatagtcccccctgggtaaccatcataaggcaaatggtttaactcaaaaacacggttcagcctaacgtttgaaccgcgaatgtctcaactccttaaagcctctgtcttcggcacatacttccctacaattttcacggcctcggcctcgacttcacgcacaaacgcggccgcgtcttgaccacgtagatccactgcgaaggctagacttcgcaccatctagccgcccagggtaggcattcagcgaggggtcacttcgcccaacgcccaaccatgctccaaggccca

SEQ ID NO: 117963 - DNA, 579 bp, Zea Mays
gagttgagtaagatgaagatcgaagtgatttcttctggtaccttgtcttacatctccgtcgaaccaaccttgttagaccagattattatggccccacttggtgacaagggagtgcaaatcatgaaagagaatcttaatcagaaagtggagaagtataagtgctttcgctaagacagcaaggggatactatggtttgaagacagattggtggttcctaaaaatagagacctcaagatgaaaatcttggatgaggctcatctctctaaattctccatgcacccgggaagcaccaagatgtaccatgatctgaagcccctgtatttgtggaccaggatgaaaagggagatagcccaatatgtatcggaatgtgacacatgtcagaggataaaggcaagccacttaaaaacagctggtgccttgcaacccctatcaataccttcatggaaatgggatgacatcaccatggatttcattgtgggtctgccccaacacctctcgacatcatgattcaatctgggtcattgtgaaccgattgacgaaagtggcacattttcttccagtgcacaccacctataaggc

SEQ ID NO: 117964 - DNA, 448 bp, Zea Mays
gtactgctgtccacacaaacattgtattcttctttaacaaacttgttagtggtctggcaatcaccccaaagtttcacacaaactttcgataatagcctgctagacccaaaaacccctgcaactccttgtagttagttggaataggccaagttgaaactgtagacactttagaagggtcagttgacactccagctttactgataatatggccaaggtatgctatctcttgcctgccaaatgagcatttggtcagcttgacttgccacagatcgttagatagcagctgcatgactaattccaagtgatgcaaatgagcttcccaggtagggctataaaccaaaatgtcatcaaagaagaccaacacacacttcctaagaagtgaggacaatgtcttgttcatggctccttggaaggtagctggtgcaccagtaaggccaaagtacataac

SEQ ID NO: 117965 - DNA, 457 bp, Zea Mays
cgcctagcaatgcccttctgactgctgattatgaaccaaggtaggtgccaatggtggtggtggtggtaactgagcccatgcaacttgtgaatgacttgccgaagccattgatgtcgtgggttgttggttgcccacacattcaaggatatatggtgaatagcatgaagcggtgtgcaagacctacttcagtagattctgtcgtgcttcggctttagcgatttctttctgcttttggatcttgacttggcacatccttgttgtgtgtcccttatccaccccacataataagcagaacaatctcctgggctaagtgccaaaccttcctccgaagcttctcccccctctgcctcttggggctagtggcctgtaggaagtttgctgcattcccaaagattgtgagctttgctggctgctctgggggtgatttgccctgtaatcatttgtgttgggattgtgg

SEQ ID NO: 117966 - DNA, 322 bp, Zea Mays
tgtgaccaatttagcggtgtcggtgtcctacaccttctcccatacaaggcctcgaaaggtgccatctttaggctggactggtagctgttattataggagaactctgccaatgaaagacacttgtcccaatccttaccataatgtagcacacatgccctcaacatgtcttccaaaatctgattcaccctttcggtctgaccatctgtttgaggatggtatgccgagcttcttattacatgggtcccaagtgatttttggagctgctcccaaaagcgtgccacaaacagtgctcctctgtcagacacaatggccttcggaattc

SEQ ID NO: 117967 - DNA, 367 bp, Zea Mays
gaaggagtgcttggcgatactttttgcagttgatcattggagaccttatttgcaacatgctcagtttctcattaaaaccgaccagcaaagtttgactcacctggatgatcaaagggtcacaacaccttggcaacaaaaggctttgactaaattaatgggccttaattttcaaattatctacaagaaggaggtagagaacaaggtagctgatgccttatccagaagggcagatttacaatccgatgacactaccctgcagctgcatgtcctgggtagttcctctatgatccctagttggctaattgaggtcacgaaaggatatgaaaatgatgaagttgctcaaaaaattcttagtgctttatcaaca

SEQ ID NO: 117968 - DNA, 545 bp, Zea Mays
ttgaagccgctttcaaaaagcgaggaagaggaagaacagataactctagtaatgagctcgttctttgatatcgaggaaggggtgtaagaagaaaaagatattgctagcacaattcttgcaccagagggtggtacactgcctactgtggatgcgactatacctataggtccaagggttgattcgacggttacagtggtgacacctttggcaattatggtaccgaagagaaaattggctcttcaaatcccgcaacagtagaggataagggcaaggggcctataaggaatgatgaggccaagaaggccattgaaggagacacgcctcttagtgaagagccctttgatcaagaatttggttgccgaaagtacagggttcatcaagcggctaggaaatctatgggtgccaagcagctagctgaacctattggctttgctgaacaacttgggtacccttcgggggctacaatcttcagaagagggccagatgattacttgcattgctcctggatagcatggaaactggatcatgtcgctacatggcgaaca

SEQ ID NO: 117969 - DNA, 518 bp, Zea Mays
aaaagttgaaagtcctaactcactggctgcgatacatcgaaccggccgtgatacctgaatttggcgaagggacctcctcagcctccaaaacaaaagaagttgttcctcccgtgcagcggactaaagagccggctataatgccgaaggtgcctacagtcaaggtagttgaaacaaaggttgataaggctgaaaagccagaaactgaagaaataacaaagatgccagaggttttgagccctctagtaaaggcaacagtaccgaaggtacaaatgggttctgtcgtaactcctaagaggaggagaatggtaaatgtactggatgtgttggaaacaaccgactccataagtctcgctcccacaaggaaggttgccgaagctgacaaaacgcaacccatagttgatactaagcaaatagaagttgaagctacaataacccaggctgaaaccgaagcagggcccacagtgcctgctgagacgaagcttgccacaaccgagcagagggccgaaggaataactcca

SEQ ID NO: 117970 - DNA, 995 bp, Zea Mays
ccagtattgaaaccgtcaggactagaacgctagacctaggacgaaaggctttaggaatagtggggaaaataggtggctaattaagtaggccatatgggccagttatagaattgcaaggatgccctaaaagcactcttctaatcggagaggagacgttctttcaacatgcatgcattataaaacatgaaaggattagaaattaaaggaaaatgcatctaagcatgaatgtagcaaatagggatagtaataaataatctaaggagtaaaatctaatctaacccacctccttttaacaactcgggcacatgtttttcctttccactaccataacatttgcatctaatcctcttccacagatgacttcacccacccccgccaacggaggagacactcgtttcagttccgattttctttcccacatgggtttcccttccatcttgtgggaggtgctcagctccgtcggttaccctacaccccctctatacacggtgcagctgtacgaggagcatcgggtgccacgttgtcgagtcttgttgactctggaggctcacccctacagcctggttggcttcccttgactccgagactattggattcaggtcagacgacaccactgaggctgcggctatgaagacactgacaactttctacggctaccatcccttggagatggtaatgcacccactgggactcttccccgctgaaaagagggatgaccccatgtggtgcaaccgtgtgagccatgtgaaggacgtgtgggctatgtatctcgaccaagttgggaggatcactgttcagtgcttgagcgcactgtaccaccttcaggctctgcagagcgtcgccatggcacaccttgctaacctcgctcagaccactaagctcaccctcgacagccaagaggactttgtggtcggcttgtcttcagaattggtggagaaagacctacaggtggaacagttgagccagcgcattaccaccctggagcagcaggtgga

SEQ ID NO: 117971 - DNA, 581 bp, Zea Mays
ccttggccgccatgatgtttgcgtagtgacgaggaagaaggaggcgaagaagagggagaaggagaggatttgtcacctacacatgaagaacagtcgagcaggcacgcaatgaagaggaagacgacgcgaggaagacgatggggctgctcttccgacgacgcgaggaagacgacgaggcggccccttagaccatgaaggcacaatgcatagagaggaaaacgcgtgggctgctcatgtgtgagaaggaagagggaaggggttcatggcaggggtgtacgattgtatagaaaggagagggtatgtatagaaaggagagggcgcgagaggtggttgtcaatttcacgatggctcttgtcctggccgagcgagagagacagctgcgcggcgagttgcacgagatagggttagacagagttagatgggtggtagacagggttagataaaattagacgaagacggtcagagtcggcccgtgggcccaagatgatgaggtggtcgccgaagggaaagacgaggatagaggaggatcgccgaagcgagcagcatgccgttcgcgagaagacgcggttcagtaatctcgc

SEQ ID NO: 117972 - DNA, 401 bp, Zea Mays
aaactggtgagattatcctttggcctcgaagggatgtcgaattggttgatccaccacgacagtcgtcgtcgcaggcccaaccgtctccgtcttctcaaattgttattcctattgtacatccatcatcacctcctcaaacttcacatgctgctcctcatcctctttctgaccctccttctcctcatcctcatggtggcccaccgtctccgccacatacatcgcccttcagggatccaccttctccacagccatcaagggatccatgaccatcaaagaaatctaaagtttctataccaaaattagtgtccccgttcgagttgaaaaagaagagtaaatccactgctggcacagctcgttttttgaaagggattggacggagcctcacgtcagacactgttgat

SEQ ID NO: 117973 - DNA, 540 bp, Zea Mays
acacatcaatgttcgagacggggcacttccccaacctgctgcaagacgtgctgcacgcgttgggaacctacgtccgacccttttacgagacaaggcgagtgtgcgagcctccccgggcttgccattacatcactcgcattcatgtcagggtgatggatgcaggggataggggattcaggacactgtcagctcatgagtccctgataccactatccacctacactacttcggtcagcaatgctgccagacggactccgtggtctctcagccacacctaccagcagcagctgcatgacataaggtttaggcatttgcctctatgtctgagtggaggaagccagaccagcattgttccaggtggagctggtgaggatcgcctcaacaccctagctagtgtagtggccgacctcaacaccgacctggacagtgccaccctggatctctctagaaggcacttggagctagaggatgtccatgtcgggattgcacccctagaagccctacttcaaggacgggatccgcctgaagcccaggtcctcg

SEQ ID NO: 117974 - DNA, 415 bp, Zea Mays
gaggacgtcacaagctcactcttccctgggaaggacccttcatcatcaccaaggtgctaaagccagggacatacaaactctgcaacgaggaaggagaagtctacgataaagtgtggaacatagaacaactacgtcgcttttatccataggcatacatgcctacttgtattatgattctcatgattaataaagaatagctttcaagagaggctcgaccttgctttcaatatcgagccccctcgggggctagcagggggaacccctcctctgtgttgttttttccttgcagttttaaaacagacacatttcgtacctcgccctagttgtaatgcgaataccgtcaagaacaagggacatcccaattaggaaagatagacgagccgcaggaacacctacgcctcagggatatggtttc

SEQ ID NO: 117975 - DNA, 411 bp, Zea Mays
ggtatatgggaccactttgtttgaacaactggcccggtgagggctacatgattgacccttcgatagtggtatttcttctgtcgttttgtgtcgaattcggagctggatcttccggtaatcatgtgaatgaccccttgaaagggttgatcagcgaagtcctcttgctttggtgggggtggtggtggtaattgttgatttggatgccgtggtggtggaggcggtagagctaggattttttggtgttgttggtatatattgtggttttgttggtgaggatggaaatgttcattatggaattggtgctggttatactgatggggatggtaggtgcgggcgataactctttagctgtcagtcggatggtttccggcaatttgatcttttgttgccttggttttaggacaatccctg

SEQ ID NO: 117976 - DNA, 449 bp, Zea Mays
gggttgcaaagctccaactgatttcaagtggcttgcctttatcctctggcatgtgtcacattctgatacatatcgggctatctcccttttcatcctggtccaccaatacaagggcttcagatcatggtacattttggtgctccttggatgcatggaaaatttggagagatgggcctcatctaagattttcttcttgggatcctcttttttaggaaccaccaatttgctttcaaaccacaatataccctttctagcttggcggaaacatttatacttctcggtcttctgatggagattctccttgataatatgcactcccttgtcactgagctgggccatgatgatctggtcttgccaagctggctcaacggaaaggtgagacaaagcaccagaaggaatcacttcaatctgcatcttgctcaactcatcacacagggtgtcaatacgag

SEQ ID NO: 117977 - DNA, 631 bp, Zea Mays
gtgagattgacctgccccatcctaggaacagtcctgtttttctttctagtattctgtcggatactctgagatggagtcgttagcgactgttgctccgccactggtttaggcaaacgacaatcttgggtagtgtttcctgacttcctgcagatatcacatgggattctgttgaccaaatggtttttggaacaaatgcctggggcatccgactgatgtgggagaaaaggaacaacggcgtgtcggacacataactgtgaactgggtaactgggatggaggatcaagagaacaaatgataggtttataaacaatcctctgacgtcgactactgctacttgaggattcttcagcaaatttctttctcttagactcttgatgaaggcgaatcttatcatcacccagaatggcctgactgactacatcattataactttcagccacattgggtgccatcaagcgttggagcttcatattaaggccacgcatgaaaaagaacttcttcgtggcttcagtattgacataatctgcagcatactgagataactgattaaacctctctaaatactccataacactctccccttcaccttgcattaggttaaaaaactcatcaacttttatactcatgatac

SEQ ID NO: 117978 - DNA, 300 bp, Zea Mays
catatggaggggtgggatgaatgcaagaattgcccctttgtgagtggatatttgaatataaccccctggagtccgtagtaattcctgatatccttgaggatgttgaacgtagttggccccctttagcagcgaatttgcacatttggccttgtttcagtttgtgctgcctttctggctagacaggagcttttaaatttcatcacttggaatgagggctcctctacctggactacatgcattaattataaagcttgaaaatccctgctaagcttctgtgtctcaccataaatataagttgcc

SEQ ID NO: 117979 - DNA, 319 bp, Zea Mays
cacctgggtggccaagaactttctgatgaagaaaagttagagttaaaagaattcgctatgtcttgtggttaccaaccggggtccatactcttcggtggggtcgatgaagaaatcttgggatgcattcgcgaccgcgccgaggcgaagattgtaggcaccttatccaaaagcgttggattcccgaagttggagactgacattagctgctacaggcggcaacatattgtcggtagtttgttttattccaatttcaaggtgaggtttttctctaaactttttaatattaccttcgtagcggtttgagtattctaattttaac

SEQ ID NO: 117980 - DNA, 274 bp, Zea Mays
ggccgacccaggaaggcgatgggctcacgtctggattattcgtggcttgggcgtgatcccgttgatgctgttcgcttttcccgcgcccgacgtccttgaacgccagggatggctcggaacggaggcgccgggttttcctcgggataagtgaagtctgttcactattagctaagagataagctggaagagtgtgatcagcatgtgcgcgggaagtgccctatggtcgtgtatataaggctaagggggatcctcatcactttcatctcattagcac

SEQ ID NO: 117981 - DNA, 312 bp, Zea Mays
gttggatcctagtgacggccgagattagagcgcaatcctgaggaatccggatcgtaggatgcacgattgggggttgcgattgaattccgtctgcataaaatcttgaatgtaggatctagatccatgggccgcgatgggatctcgcttaaataaaatcatgtccgtagatctaagatcggatggctgaggcttcgtaccgtttcgttaaacctagatctaatctcgcacgtccaaattggatcgtgcggttcagacgcgcccgtaccccttcggtggccgatttgctaaagagtccctcagattagtagaaat

SEQ ID NO: 117982 - DNA, 344 bp, Zea Mays
caattagtgtgtgaatcacctagtttggactcgctatatcaaggatgtaggttgccgacaagtaaccaaatctcatggataaatattgcgtcatctcttgccctgtgtggtttgccctctaaattatccttgctaattacatatagttgttactagttcatacatttgttatatatatgttttttgttttatttcccttgtttggaacatagcttgtcgtagtcatccatttatttcacaatatattagctactttagagaagtagtctagaacaaaaatagtgcaactaatcgtttgcgtacattcttttatattggctctagttacatttgttagatttgta

SEQ ID NO: 117983 - DNA, 403 bp, Zea Mays
tgtggcatggttgttagcatccatgtatttgtctgtgagtaagatggttgaagccatgcgcactgctgcacaaatttggaagaccttgagcaatatgtattcaagaaaggggaatgtgatgatgatgatggaaatccaaagtaaggcagatgcagtgaaacagacagggagaccagtggaacaatatgctagtgaacttcagtacttgtggggtgaactagatcattacgctcctctacaaatggtttgtcctcaggatgcacaggttgtccacaagtggatagaggacaggagagtgactcactttctaaagaatctggatccagagtttgagagcaggagagctgccttttgtcaccaagagagtcttcctaccatggatgaggctgtgtcagcaatgatt

SEQ ID NO: 117984 - DNA, 713 bp, Zea Mays
aactataggtgggcctaattacttgggaggttctgtcacaataggcggtgctgaaatctaacttggtgcccatagcttgctgaaggctcttccaaaattttgaagtgaactacgtccctctatctgacactatcttccgaggaataccatggagtctgactatctctttaagatatatccgggcaagggtggctcctccaaaagtggttttcactggaatgaagtgggccaccttggtgagacggtctattattacctagataaagtcattccctttttgtgtctggggtagttcggttacaaaatccatgcctatttcctcccacttccattcgggcactgggaggggttgcagtaggcctgcaggtttctggtgtttggcttttgttcgttggcaggtgtcacacggggccacataatgtgctatctcattcttcatccctctccaccagtatctagttttgaggtctaggtacatcttggtggttcctgggtggatggagtaggctgagttgtgagcttcattgagcaggacttctcgtgcctccccttttggtacacacagatggttcttgaaccaaaggactccttgttcatctgtcctgaggtccagaagttgttctttgtgagctttttccataagtctcgttgtctccgtgtctaggcgttgagccttgcatatgaggtcttatagcattgtcttgacttctaag

SEQ ID NO: 117985 - DNA, 462 bp, Zea Mays
ttcctccggtactcttaagcacttcttgagttgtgacacgtgaaatacgtcatgcacattcgacaaactatcgggtagctctaactggtactctacttcaccttttctctccaaaatcatgaatgggccaatgtagcaaggagataatttttccttaaccctaaatcttttcattcctctcatcggtgaaactttaagatatatgaagtctcctactttgaatatcaactctcttcttctattatcagcatggcttttttgtcttgactgtgccgtcttcaaattctctctgataatctgtacttgcttttctgcttcttggagaatttctggaccaaatacttgactttcttcggtctgattccaataaagcggtgttctacactttcgtccgtaaagtaattcaaatggtgccatttttagacttgcttgataactattgttacgagaattctgcataag

SEQ ID NO: 117986 - DNA, 367 bp, Zea Mays
gagtcctttggttcaagaaccgtctgtgtgtaccaaaaggagaggcacgggaagtcttgctcaatgaagctcataactcagcctacttcatccacccaggaaccaccaagatgtacctagacctcaaaaccagatactggtggagagggatgaagaaagagatagcacagtatgtggcccggtgtgacacttgccaacgaacaaaagccgagcactagaaacctgcaggcctactgcaacccctcccagtgcccgaatggaagtgggaggaaataggcatggattttgtaaccggactaccccggacgcaaaaagggaatgactctatctgggtaataatagaccgtcttaccaaggtagcccactt

SEQ ID NO: 117987 - DNA, 474 bp, Zea Mays
gggttatactccttgccgactttcggtggcagatatgttgaggagtgggttagagttttctatgccacagtttgatcgacctagaccatcagtggatgaggtttcagtttgagcgtgaggatgtcactttgcatgctgctcagatcagagagctatttggattcactgagtcatcgacgaggcttcacagaatgtgccacgattcttcacaccctcctcgtcgccctcacggtggagtagctcctggcaccgctcgcgtcgcagctctattccgacctccattcacaaacggttctctacgttcccctgttgacttcaccccagcggcgaagtttctgtatgagctcatgaggcgcaccctgctaccaaggatgggctacaaagaggctaccactcatatccagctctggctccttgatgccctggtctctcactcagtattcgatgtggttgattttctaatttgtgagatcg

SEQ ID NO: 117988 - DNA, 426 bp, Zea Mays
tcaaagacaggtgaaattgggacaacaaggtggaaatggtagggtgtaaggcattatcagataaactagagccaggcacactaacatgagaaatatgcaacattatatttgtaggttgctgatcagaataacccagcaagaccacttgtttccccaagtatgggatactcaaccacttgtgctgccaatggaccctcatggggctaaattgttcaagccaatccatgcccaagataatgtcaaaagtggataatgacaatacttgtaagtcttggacaaaatgacatccttgaacacaccatgacgccaggggtacctttgtggaacaagccagtatacctccattagccacctgaatctgaatgggagtagcaacaacggtgaccaagcccaacctgatgacagtatcttggttgatgaatgaag

SEQ ID NO: 117989 - DNA, 339 bp, Zea Mays
catatttggcttcaactgctagcgccgtgctgacagccctgctataggagaggtcgaggcaggtggccatcttccgctgtagccgatcattatggccctcatgaagcaatttctcttcttcagatcagtgttgacctgatcaatggcatactaggacaaatggttgaacttgttgagatactgtgtaacagtatctccaccttgttaagcttcatgaattcttcttgtttcatatggagcaccccttctggaatgtagtgctcccgaaatgccagtttaaattcatcccaggtaacttgatgacaagtagtctggatagccacatatattccccaccag

SEQ ID NO: 117990 - DNA, 631 bp, Zea Mays
acgtaggacaactcccttatccactttcctgcaaacttttcgtttttatcgaagactttcttcctgagtgcctccaatatcatcccgttagctcgttcaacctgcccgttggctcttgggtgtgccaccgaagcatatttgatctgaatgcttttttgctcgcagaaatcgaagaactctgaacttgtgaagttggatcctaggtcagttatgatactatttggtattctgaatctgaatattatgtcttgtatgaattccacggccttagctgaggttaaagaagcaatgggtttgaagtctatccatttggtgaatttgtcaattgctaccagtatatgagtgtatcctccttgagctttcttgaaaggtccaatcatatccagtccccagcacgcgaacggccaagttactggtatggtctgcagttgctgtgctggtagatgttgttgctttgacaagtactggcaggcttcgcacctctgaactaacttggctgcatcacttttcgctgttggccaatagaaccccgacctgaagaccttcccaactagtgtcttggatgctgcgtgtattccacattgcccagcatggacctcatctagaagttgcttcccagtagatgagagaa

SEQ ID NO: 117991 - DNA, 551 bp, Zea Mays
gtcgtaccattccacatttgaacaggataacatatcgacgatgagtacataggtggaaagtatcctggcatcactggagatggatgaataggcgatgcttgctacactgcctttcgggctgttttattcggccgttttgttttagcgggtgaccggggtttctttgttggccaatcgcgtagaacgaccttcttgctagcgtatttggagagcaattgatcaaaagtaggacaaactttgaccatccgaccatatgtgttacatgtgctttgcccttgcatccccttccttgctttgtgtggaggccgacgacttttcccatgggcgaactatccggctgagttagccaggccatctgcttgagcgccggactgtccacgtgcaggtgtcggaccgtccatgatgcccgagtcagggagcttcgctcggctggtcaattgagcctgcccctgatgcctccggacttgttagtctttctgtccggagctttccgagcaatccctccttctcatatattctacgtgcgaggtccccaatgatgacattttttc

SEQ ID NO: 117992 - DNA, 507 bp, Zea Mays
cttgtaggtgtggtggaaggtattaacattgacctagacagcgctaccctggatctctcaagggtacatggagaacttgaagaagcacatgccaggattgcagccctcaaagctcagctcgaaggaagaaatccacctaaagcctaagtccctgctatatctgtgtccctgcctcgcaagaggatttgctatggagacccatgatctatcgccaggctactctagatttataagtcatagtgtaataagtttgattttgcgattagacgatgaaactctttatgatattatgattataataacaaccatgtgatggtgatgtttgcataatgtttgatttggatttttgcttgagtgcaatgatcttatggaatgatggacataagaacatttaaaattaacaaataatcttaacattagttgaaagcaattacccctataatttttctctactcttcacttatctaaaggatgcactttctaaccaaccagatggtgaacaatctc

SEQ ID NO: 117993 - DNA, 602 bp, Zea Mays
gaaaaagaaataagcattttggtgagtattccagcagttcagataatcgctcattgatgtaaataggtatttggacattgctggtgttttgtataggatggtaattttttgtgaccttgttggcatttggcgttggtctccgccgccggcccagcctcccctggcaccaaaaggaggataagaaaccgattagttgcgacccataatcctaaaatacaatatcaaactgctccaaagaataggcctcatactacactgttgcataaaactaagaaataacctctgtgttccaaagataatatagagccatgggacccttgaatccatgcgtttctaaatatgagatttggtgttgtaatgatatatgataggtacgaggacagtctatgttagtatcatcgagcttaacgtgtgccgctagttaatccatattagaacattgaagcgcccttacggacgccctaccaggataaaatatagaatttggaaggaacatgataggaacggggtgcccgatcttacgttaggtgaaggtaactatcaatttggtggagatgtcacacaaacgatccgacttccaatcaacacgactagaaccccgc

SEQ ID NO: 117994 - DNA, 1027 bp, Zea Mays
aatggagcaccagcttctttgatatgttcttcagctcccacacacttcaaatggccaaccaaggggcatgggaggggggggggtatatatagcctccaaacaaaatatagctgttggagactgcacaacctttctatgtaggcacagaagagttcgatgcacccacagaacacgtccggtgcgtccatggcagctagtcgttgagcttctagccattaccaatcgttggagattgagtgtccggtgagccactaggcatgtctgatgctttatggcctttctccaatacggctgcattcctcgctgagttccctattcggtgtgggaattggtgcttcattggacccgtccagtgcacacctgcttgtcccgtgcgtctgattgcagttgcccttctttgacatagtgttgtgctattaagtgcccttctcaacattgcaccgagcatgttcgatgtcactatgcaacatccgatttattctgtttcttcgtattgagttattgcaccaaccagtttaacccaaaagcttaagttgatggagagatgaacaattcacttgtattgcaacacttcccctcacatggaggcttcctgaggtctcagatgtggaacaggagtgagcaactattacttcattgaattgctctaatcgggattgggactcgagacctttagctccgataccatattgagttgcatgtatcaatcaattcagcccaaaaggttaaactgatagaaagaggtgaacattcacttgtattccaacacactttgtatgtcttcatccaggcctgttccatcttgtatcttatcttagactcttatatgtactaataggtcttcaacatgtcttctaattcttgtttgaggtgttgatcatccagatcaccacttttcctaagcccaagttcacttgtacatcttttgaactatatctaagaacactaccaaataatgctagttgaaatggttatgttgatcatcaaacaccaaaattaaactgtaaatgggccgaagttcattttc

SEQ ID NO: 117995 - DNA, 923 bp, Zea Mays
aaatgttttatccgccgaagctaggggcgacatttgttcaatagcttgcatcacattcatcatccgtcgtttcttctacttcccggccttctcttttgtagatggagcgatttcctttgattgtaagaggctagtcagatctaacctcattggacttagtagtgtaaatggtatggattcagtcattaccttcagaatctctgaaacttcagcagcagagggtgaaggaggactcatagtcttctctagcacatcatgtacctttgtatcagctgaagatatcatgacgagttttcgctttgtgggagccgaatccttcggctccgaaagagtcttctgtttcttcgaagttttctggtcctccttgacagaccgggcagcttgcctacccagaatactgacaatcctttttcttttgccccctctggccccttcgtcaagcctttcatagtcagtatattcaaagttaagagcatccataacatggttcaaccttcgtttcggccgggagccagggcagtagtcatcaactggtcttctttcttcatattatttctgaggatctcattgcacatggttcctatcatttctaaccattcagtacatggctctttaaatttcttctgaaatttgaagcggtagggaagtcgagcaagttcatatttttcccttcttccttcttctttggcatcccccatccgctagaggttgagaaagctttgtttgctagatattctgcactaagttcttagtgctaatatgcccagcaaccaccctgaattctacttcgaccagctggcatggggagccgagttgcatgttacataatggcctcgtcatgccgaagcttaatctcagaggactcattaccaaagtcatgagcttctccctcttcttcacgttagtcttcacgtaaaaccatt

SEQ ID NO: 117996 - DNA, 384 bp, Zea Mays
tcaacataaacacctactagcagaaaaccatctctatctgacctcctgtaaactgcatgctctagtggatttctcacaaaaccaagcttcatcagttcactgtcaagttttgcattccatgcccttggggcctgacgcaaaccataaagagccttttttagttttagcactttgtcaactccacttttgacaacaaatcctggaggttgttgaacatacacctcctccctcaactcaccattcaagaaagctgacttgacatccatgtggtgcacttgccaacccttctgagcagccagagcaatcaacaatctcactgtctcaattcttgcaaccggtgcaaatacctcatcaaaatccaccccctcacgctgagcatatccc

SEQ ID NO: 117997 - DNA, 524 bp, Zea Mays
tgtgaatgggaaaacgtcgcatgaatagcgcccctcggaccatgagagagcagaggaccaatcggggtctgagggacccaatgaccatgcacgttgtaggaactaacgggccacaaagcaagactataggagatcatgaattatttactccaccgacaccacctagagcatggagtttgtcacgacatcaaagctatttgttaggtgatccaagttcgctgaccttgtctcggcaagtaggacgacaacctcatttacgcagccacctcagtgaagctactcaatggtgaagcccgtcacgacgccatggtgactcccaaattccacagcctcacaaacacgcattggaatgtcaatgagatgcgacatttgattcctcccccatgcatgaatgaatcttccagcctgatctacgcataggaaaaaggccagcgctttaggcctaggacctacgacgaaccaccagttagttagaaaacatcgagaacctagaggtcggaccacgaacgtacctctagtcgtga

SEQ ID NO: 117998 - DNA, 440 bp, Zea Mays
atcagatcggatttctgcgggcatgattagattaactaggtaccggtttgtctgggtgatcggtgttcattggatcgagaaatgtggataggaatagatcacgcttcattaaaaccgcaatcgttgatctacgatttgacgggtgacgatgcgtaccgattcatttaagggtcacatccattctgatccgctgatttgtgatcgaatggttaagaataggtcaacatgtgaatgttccttgggccgtggatctcggatcctagcatccagagtgcataccgatttagggtatggggagatctaatatggaccgcagaattctaatcgtgtggtagggaatggtcgtccccctttggtcggtgcagattaataaaagagccctcatgttttgtggtaaataactcgcgacccacactgtgtatagagtagtttaatccaag

SEQ ID NO: 117999 - DNA, 594 bp, Zea Mays
cgggggcacatactgcgctatctctttcttcatccctctccaccagtatctggttttgaggtctaggtacatcttggtggttcctgggtggatggagtaggctgagttgtgagcttcatcgagtaggacttcttgcgcctccccttttggtacacacagacggttcttgaaccaaaggactccttgatcatctgtcctgaggtccagaagttgttctttgcgagctttttccataagtcttgttgtctccgaatccaggcgttgagctttgcatatgaggtcttctagcattggtttgacttctaggctgccgttgtttcccaaacatgcattcagctgagctgattccttcttccaatcttctaaaaagttggttccctttatcctgaaaggttttcggctgagggcgtctgctaccacgttggcctttccggggtgataatgaatctcaaggtcataatctttgatcagttctagccatcttctctatcggaggttgagatctggctgagtgaagatatacttcagactcttgtgatcgacgaagatgtgacatttgttcccaattaggtagtgcctccattttgatattgc

SEQ ID NO: 118000 - DNA, 509 bp, Zea Mays
ctgccttcaaatgactagcttttatcctctggcaagtgtcacactcggatatgtacttggcaatttccctcttcattctggtccaccagtataaggatctgagatcatgatacatcttgttgctaccagggtgcatggagaatttggaaaggtgagcttcatccaatattctctttctgagttcagggtccttgggaacaaccaatcgatctccaaaccataaaattcccttgctgtcctgccggaagcacttgtatttttctgccttttgcttgatcatttccttgatcacctgaacacccttgtcttcaatctgtgccctaactatttgctcttgcaatgtgggctccaccaagatatagtttaggtcaccagaagaaacaacttccaggttcaatttgcacaactcatcacacagggtggtaactctcgcatccatgttcatacaattgcactgggcctttctgctcaaggcatctgccacaacattggctttgccaggatggtaa

SEQ ID NO: 118001 - DNA, 289 bp, Zea Mays
acattacccattttacaaaagtttaacctattatacaacagtacaccctacaatacactactctacttttattacaccattagtcctgctttccattgcttttggcggcttcattgtcaggtgtgggagtccagacgtcaaccaacctcaaggaaggagggggttcaaaaagatctaactccccacccaacgcgcgtcccgcaacgtgagagggtccggcttccgcctcagcagagtgtgcaggctcactagggtgtagttgcgagtagagcacatggacttcctcatg

SEQ ID NO: 118002 - DNA, 907 bp, Zea Mays
agaaatacatggagatactcccccacgctctagatccaagcgtgggcgaggaagcggaaatgtcatgcaaggtgctgaggcctccgggtctcaaagtgctcgcggtcggacaacccggaatccttccgggcggtcccgacccgcgacaaatccgcaggcgtgggaggctacgagtgatgatgaaggcgggaaggatgatgaaattgatcttcccccggcccacgcccctgtgattcgtgggttggtcctccaccgggcggaggctcggcgtgctggcaatgagccagtaactgatttcactgccagtggaggctctgctctccttcaggatctccgtttccaaaatcccgcattgcgcattcgtgatgccaggattgatggaaaccgcttttggacgcttcatcatgtggatttttataattccgtgatcctccccaagaagcatcaacctattctgcttcaacgctatatcaactgggaaggttgtgaggccattggggatccagagatgacacaggcattgagggcctgtgaaaggaaaaagatgaagagtatcatgacattccaatatgattggaatgatgaagttattgcccaattctactcatctttgtggatcaagccagctgacgaggagagtccatacaactacccttatctgaacttctacattgaaggtagttggtataaggtgagctaccgtcggtttgctcacattcttggtttttctgacaatgatatctctggcgacaagatcaagatacatgatttccgccagcctactagagatgaagccaaagatcttcatctctccgagtctgggaagtattgggagtctacaaacatgcataagtattatcgatacatcaactccctctgcaggatgaccctcattccaaaagggggt

SEQ ID NO: 118003 - DNA, 672 bp, Zea Mays
ggaggtgatgccgtggaatggtgcagcgccagctcggatttaggacttgctgatccccatgagctccagggtctcgacatagatgacattgaggcttctgcctccatccatgaatactttggtgagtatggtgttaccgatgacagggtcgacgatgactaggtactttcttgggttcgggatgtagtctaggtggtcgtcttggtcgaaggtggtgactttgttagaccggtctaggtagaccgcgcgctgctacttcgaccgagaagacttcccggtgttcttgtttccgttgtctcactgagaggttcactattggtccaccaaagatcatgaagcagttgtggacatctgagaactcctcgtccttgtagtcgcccttgtcactagggccctcttattgttgtcgcccaccgaggggttgggtttgttgaagtagtgtcagagtaggtcacactcctcgagggtgtgcttgattgggcccttgtgataggggcacgcttccttgagcatcttatcgaagacattgagacccctagggggcctcgaagatttatttggtatgtagcgatgacaagatcagtcttgagtacttcgtgcttctcccgcggcactttcttcttgttgttcttcttggagttgtgttgggtggacgcctcgggggcgtcctcc

SEQ ID NO: 118004 - DNA, 446 bp, Zea Mays
tttggcttcaatagctgaagaagtctcaccgccgaattcaggcactatggccggttcaatgtagcgcggtcggtgagtaaggaactttaactttttcctctttggtgcgggctcgcttgaggtagccgaagctgcagccttctcaggagttgcaccctttcttttctgtcccgcggcgggtagcgatagtcagagtacacaaatccaatagcatcaaaaactctatttagccttttcttttttcggctcccgaaggccgcagatagtgcattatcttcagacttggagtatgttccaagtagttcatcactagtattttcaacacacttcagccagtcatcgtctggttcgataaattggtctccaaacctgaaggtatatttcaatcgaaccaaaccaccttcactagggttagtgatagtttcctttggcatttcccagttgtc

SEQ ID NO: 118005 - DNA, 479 bp, Zea Mays
gtgcctggtgcgtgcgtgctcgagacggtctcggttactgccggagctgtgtgtgcgagtgtggtgccatggcatgtaacgaacgcggtcgtgcccacagcctgttcgtggaaacgtcctcaagcagaagcagtcctagggatggacggttaacgtgttcgacgttgacatgcacgtacgtattgctggatgctctgtggcgctattgctggagaggcaggaggagagcggcgcctgtattttcagctctcgtcaccccactctggaaacaaacaagaatttgcaccaaccgagcacatacgctggttgtggttgaattcttcaatttgttatttgtcttaaattaacacggtgtcgtttcacccaattcattattgagactgggacatctcaccttcttcttttgtctttttagttgacctgactcttctaactcatcgcccatccctttctggctttttcgaattcttgtcgctaag

SEQ ID NO: 118006 - DNA, 477 bp, Zea Mays
gatttaccaagctattccaagatttgtgctgagcagagaactccacaatgaaaaagtcgcttttatttaccaataaaaaaagttatagtacccaaaaaagagataatttgaaatagtgaacacatcaccattttcaggaccgcaatccacatgatgacatgaactgatcgtttctgcatgaaccagaaatcttgcggtgtcaagtggggatgaaagagcatgcatgcacttgtgacggagaagtaattttcagcttgcttcacgggaaagttccccactcctagcttgcaaattcaccaaataagagaaactaacgtgttagtttgtcttcgttagcactagccaacaattgatgaacaaccaactagtttgtcttccgttcttggcggtagtggtattaaagttctggatcgacatatgacaaaagcatgtcaaaaagatataatttaaaagttatataacaacgtaatataaaat

SEQ ID NO: 118007 - DNA, 598 bp, Zea Mays
aatagatgtcatcctagggatgaattggctagataagtatcatgcagttatcagttgtgataagaggacaatcaagttggtgtccccactaggagaggaagtggtgaccgagttagtcccgcctgagccgaagaaaggaagttgttatcagatggcttttgatagcagtgaagcaaacccaaatgagagtatcaaggttgtgtctgagttcccagacgtgtttccaaaggacttaccaggtatgccaccagaacggaaagttgagttcgctatagagcttcttcccggcaccgcccctatctttaagagagcttacagaatatccggaccagagttggttgaacttaagaagcagattgatgagctgtcagagaaaggttacattcggccaagcacctcgccttgggccgcccctgtcctatctgtggagaagaaagatggcaccaaaaggatgtgtatcgattatcgagctctgaatgaagtcacaatcaagaacaagtaccccttgcccagaatagaagacttgttcgaccagttgagaggagccagtgtgttctccaagatagatctgaggtcaggttatcatcagctcaggatc

SEQ ID NO: 118008 - DNA, 791 bp, Zea Mays
catggaatatagaacatctcaggaagttttacccctagctagatttcaaaagctattgggacggccttgtattctgtaaattgggaaattcatcatcaataaaaagactccattctcaaaggcactcaaactgtttactgtcaacctgcacgcttactcgactcagggtgaccactataccctactaacggagcaatcgacttaagtcgacgacgacttaaggcggtgtgacatgctcacgcttacttaactcagggtgaccactataccctactaatggagcaatcgacttaagtcggcgacgacttaaggcggtgtgacatgctcacacttacttaacttagggtgaccactataccctactaacggagcaatcgacttaagtcggtgacgacttaaggcggtgtgacatgctcatgcttacttaacttagggtgaccactataccctactaacagagcaatcgacttaagttggcgatgacttaaggcggtgtgacatgctcacgcgcaactcagggtcaccactataccctactaacagagcagtcggtttaagtcggtaccgacttaaatcagcacggcgcgctcacgtccacttgacccaatacaagcacgtttgcgattactcatcttagggcgatctctatgcctcgcgagaaaagaagaaatttcaaaatcatcacactgcatttgcctctgcaattataactactgttggattctaacaacaggaaaataataataacatttagtactgaaaacactttctgatagaatattcaagcacac

SEQ ID NO: 118009 - DNA, 760 bp, Zea Mays
caaaaaaaatcattttaaaagcaacccatggaatatttatccgcataatataccataccagccattcagatgcgccaagaaaacaaggtgttgaattgcatatgtttgagccatgtaaacactcagattagacttgcttcttttcgaacacataccgcatcatattgcctaaatagcatataagcatgcaaaaaggaatctttttctaggcacaatcggattaaaaaaggtgaaaacagaaaagagatgacgactggatgaaattggaactaacaaagttagagaatccatgcgcacaagtaaataggacaaacaagaaagagacgatcatatgttgattgtgatgtgcacttgtagttcagaccaatagcaatagggatatgcatgttcatgtaccatgctgtgcctatgtctgtgtgcggtgcacagcaggatcaagaaagaccatcctgcaaaagcatttacaatagtcagtggccgcccatccatcatgataccatgaccggaatatttgacttgcaattttcttccctcctttacttgtctagtataaactgcaaacattttagttttccgacatacataacttttgatgcgatatacacgagggccaaagcaaacattacatcatcttgcatattgtggtgattcatcatattccatagtgcagaaactcaccactaaaaaggtaaacagttctcccaacagatgcactcagctgacattgtagactataaaatatatacaatctctggtcagc

SEQ ID NO: 118010 - DNA, 583 bp, Zea Mays
tgagattttgacagagaagcacgatttcagctgagtcactggtttggggagattttcttttcttcttttgacgccaccgtcttcagaggttgtaccgctcacccttatccctttcccaaatattaatacatattcacatgctcatttcgcatagaaacacattaccacagcgaccgagatctttaacagggtttcatctaaaaatggcaccctctgaaattaccaaaatatctgccagggatggatttgttctcagagttttgcacatacctgatctgcctcagtcgactgcagacttaatttttatctttacttttctctaatttctccataagaacagagctacctccccacatcaaacttgcttactgaacattggtctttcacttttctgtacacttctagggttaatacttcataggtcacgagctatggtgccgcaaagtagagcaagcagactgaaacacccagtttcagctaactgaaacagctcacccttaacctgacatagaaaattgcaacaccttttcctccacattttactcagtagcaagcccaactcttcacatgaaactgtttcacc

SEQ ID NO: 118011 - DNA, 422 bp, Zea Mays
tgcaagtcaaattggcagtgatggaagtttcttcgtttgaagccggttgcttgaaaagcaaacattttgatggggttgagggaatccatttcctacgttaatggcctcaggggaatttaattctgcatgaatggttgacatgactacgggagcattcaaaggttttcacaggtacactagaaagacgaccgcctcccctaagcttggagccacgggcattaaatgtctaatacaagtagaaatggcgcctcaaattcctcaaatgaatcaactggagccattgaaaagaagttccttgccttctatttcacctaaccccactaatcatatcctcatagatatttctgtccgccagaaacaatcaagcccaaatacatgccactacaaaccgtgtgaccaccaaaaaaacatgtaagctcttc

SEQ ID NO: 118012 - DNA, 542 bp, Zea Mays
gtcaactcggccaaggtatgtcgtcaactcatcattgttttttcagagaaatgacgacctctcatagcacagtacggagagtcggagactgtcgctctatcacgtctggaccaagtccaaaacaatccatttgctgttgctagatgaagtagtatgcacacaagatatgctgctcttgctgtagatgaaggtataggattgggacatgggcttttactgctaatgtcaagttttgtgcttggcttttgcgtttgctttaatccgcgggttgcacattccatgatcattctttgctttttgcagatagcaatgctttgcataaggctgtgagctctgaccaaagcagcctgttgtactgttttgaaataccctgttggacacttggactacaaatagcagctaagcgtctgtaaaagttaaaatttaagattgatatgctgaaggttcaagaacaaaattgatatgtttttgaatcaactagaatttaattttgtgcactctgtttgtacatctgcatctacatcgattggcgtgcctggtta

SEQ ID NO: 118013 - DNA, 373 bp, Zea Mays
caaagagatccgtctataagtgccgagttgagacaagtagccaacaactttgcttatagggtcaagaaatattctaggtatgacatcaatggataccgttttcgcacaacaaactacgacaaaagtcgacccaattggaaaacaacgtgttctggagtctttacgcccggccttgacgatgtcgattattttggacgaatcgaagaaatatatgagctcaatttttatggttccagacctcttactccagtgatattcaaatgccattggtttgaccctcaagtgacgagatggacacattctaatcttgggatagtcgaaatttgacaagattccaccttaccaggagacgatgtctatatcgtggcccaac

SEQ ID NO: 118014 - DNA, 795 bp, Zea Mays
gctgcccaaacaacatttctcttcattcaaagcgcttagttttgctaagggtagaaaatagaaatattgcaatagccacactctagattttaggtctcttttggaatgcaggaattacagatgaatcaatataagaattttataaaaatcggtttgtttttatagaaaaagcacaggaaataggggggaaataaaatatgtgttccaaaggggagacattttgagaatatctccgcgccttagagaagtgtagcaaaacaaacactgtgtaccttttttttagctgaatcaagatcaagctcgaaaaaggtattgaggtatagcccgaacataataggcatataatatcttttttatcgaattttcatatgtatcctcgtagattatagaagggtagcattatcttcgttggaggagaaaacaggcaaaagtgccattcatagaataatgaacataaacgaattagataaggtagaatgtggaagacaagatagacactgattcctcctgtgtattggtattattatatatacgtacgtacaaacaagtcttcgctgtctcgccacacggtgatcattagtagcaccacagccaccaccaagcaactgttttcaactattatattctcagatcccaatttctgggagagaaaaaaaaacggtgtccctacagattggagctgagaaagcgactggttgaagagtcggggcctctcagattaatgaggcatttataaacaaaacaaaagcatacaggtcccagaagcttacttgtagggaagaaagcgcagctttt

SEQ ID NO: 118015 - DNA, 439 bp, Zea Mays
cgatatttgaactaattacgcttggccctaacaacaagaggttttctaaagaactaacaacaactgcacataattgtacaccatggaatcatgggtaaattctatagaaggtgggggaaaaagcatacaatgtgtttaagggaacacaattgtacattaccctgcaccagaatatatatcattacctgttttaaagtatttactatttggaaagaaaaccatcttactagcagatgggaatgtgcaaaatgtggcctatcaactttatttgtaaaatctcagtggatgctcaacccgcagaaacaaggcacaagattattactgatgggcaccaatgttcctatcatctctatatattcaagaaaagtattgagtgtgaagtcccagtgattaaatggtcatgtcagtagaagcgcaacagactgacctcaccattttg

SEQ ID NO: 118016 - DNA, 597 bp, Zea Mays
gatctttttaccttgccatggtggatacacatggaagttgctgggccaagctcgcgcgagtccggccgcacgtaccaaggcatccaatcaccgcctgtgtgaatcctcaaattcatcaccccttgccctccactcatcttttgatgtttgcttgatccaaaatgagatgggagggttttagtgcattttctttggagtttttgcatctagctagtaggactagttcatcatctgggctatggatttcttcttactcttggtggttaccaccatctagatggcttggagcacttgtggtcattgaggaagagttggttattgtcctttgcctctgactagtgatattgtgagaggtcatgatcccacctcacatattgcaaagggatactctagtggaatgcttgtagctacttggagtgaaccatttgattgattcttgcagcatccaagttatgggtctagcttttcatgctaattagcatgtgaaccatcacttagagactcactacaacgaggacttaggtttccagcaagtaaacaaaccttataatatatcttgtatgtattcacttgcctagtttggtataccacttctac

SEQ ID NO: 118017 - DNA, 541 bp, Zea Mays
gttgtgtcgcgaatatttttcgtgtgatatagttgtttgtgttgtgtttgccattctagccttcttctcttttgcgagttcgattgacttttgagcttcggcatctgctcaaccatcacctgaatggccgaggaggaaatcacagaccccgcattgtctaggttttacgaagctagggagaagaccaacacagagaagatcaccaatgagatgttgggtgggttgtctgaggactccaacgataacgacaattttaacgtggagagtgggaatgaagatgtcgaagatcggccgtggaggccgagccatgttgtttttgggaaatcaactgtcaaacaagggcaaattgaaatgatgaaaggaaaatattttcatgatgtttccatagtgagggttgggggagaaagcattgttccccttcccgaagctaatgaggtagtagttttcaagagcttcatgaaagctgggcttcgctttccgctccacaagatgttggttgatgttttgaagacatttctgatattccttcatcaacttaccc

SEQ ID NO: 118018 - DNA, 328 bp, Zea Mays
gaagaagttgcctttaacaaataatgttgtaggggatagtgtgcagaggacagtttacatcaaggtaccaaaaaacaacagtcaacaacctgagcttcttgattccaacagatggaagaaagataagaagcactggatccttggaagttcattgtttctaggaagctctatcttgctgaacattgtcctgatctctgttatactcttcggtacttactgtactataaccataaatgaaagcccgtctgtgcagtcatcaaacaatctaggattgcccctgaaagccttcaattacactgagcttgagaaggcaaccagtggattcacg

SEQ ID NO: 118019 - DNA, 307 bp, Zea Mays
ggttatacggtatggcaatgataggccaacatgaatacgatgcagcggtcatattgaaaggtgtgaaaccatcagttgccaagccgatacgaacgtttcttgcatcgatggcaaactctggatccaagttgtcatgagccttccatgcagcaccatctgacgtgttcaccattaacccatcttgtctgtccgtacaatctttatgccacctcatgtgcatagcggtcgtcctcgagagaaacaaatgtttcactctaggagtgagaggcatgtaccgaagctgtttatgtgcaacctttgtcaccac

SEQ ID NO: 118020 - DNA, 376 bp, Zea Mays
gcaatctaaaattactgatttctggggtcggtggactatccgggctaggaggccggaccctccgcaactctaccagaggggtctactggcgtatatgtccccgtgttcttgtgcggaccgtgtggccagggttggcggactgtccgcatgtgccaaaatggatttgagcagggacaatgtgtttttaagtctttgtactacgtattgtccggggcttttgcgtggacattacatggtccagggatggatagtccggccatggttgacgcacagtccgcccgtgttgttcaatatgatcagtgcactgtcatttcatgttgacaggtcccggaccgtcctgcctagcctggcgaaccgtccagggttgatttcttct

SEQ ID NO: 118021 - DNA, 500 bp, Zea Mays
cactgttcgaagcattgtatggacgaaaatgccagacccctctcatgtggtccaacgtaggggaaaaggcactggaaggacctgcctttgtcaaagatgctgaggagaaagttgccctgatccgcagaagattacttgaagctcagagtcggtagaagagttatgcggacaacaggcggagagaactcagatttgaggaaggagacttcgtctacctcaaggtctccccgatgcatggtgtcagaagattccaggtgaaagggaagctagcaccgcgattcgttggcccctatcccatcattggcagagtaggacccgcagcataccgtcttgatttaccagaatccatgtctgacatccacaatgtgtttcacgtgtcccagctccgcaaatgcctgcaagcaccagaaagtcacatcgaagaagaggcaatatagattcagaaagatcttcagtaccgtgagaagccaataaagattcttgattcagcaatccggaag

SEQ ID NO: 118022 - DNA, 599 bp, Zea Mays
cttgtcattgataattcctggacacctgaggaataaaatgggtgtctacatggagcctttgatcaatgaattggtccatgcttgagaggaaggggtatggacatacgatcgagctacaaagaagagcttcagattgcatgtttggttccagtactccatgcatgacttttcggcgtatgggctattcttcgcctggtgtgttcatggtaagttcccaagcccagtttgcaaggaagctcttagattcatttggttgaagaaaggtggcaaatattcgtcgttcgataaacatcgacaacttctccctcctaaccatgcattccgactagacattaaaaactttacgaagggtgtcatagtgacagaccgcccacctgcaatgatgattggtaccgaagttcatcaacaaatagatggtctcatagtcaatacagaaggtggttttgttggatatgatgaacaacatatgtggacccataagtcgagcttgactcatctcccctattacgatgacattcttcttccacacaacattgaagcaatgcacactaaaaagaatgccatcgagtcatttttagcaacaatcatggacattcctg

SEQ ID NO: 118023 - DNA, 358 bp, Zea Mays
ggtacatataatccaatctacgtcgtgtgatagtcaagaacacggtaagtgtacccccccgtttaggttcggcacgggtctagacgcaccacgaaatcacctatcgactaccacgacatgttgaatctaacctaggtaactcaggagagatcgcaacaaacgcaagagcaccgtgagggagacaaaatacttacagagattcgggtcgtcgcagcacaataccctacgtcctctttagagtggattgtattgtctggaaacaactaagtgtcgagcacaaaggtgactatgagagttatgtgagtgagaaggttttcatgtgtgagaagagtcctgccagggggccaccctatccctt

SEQ ID NO: 118024 - DNA, 581 bp, Zea Mays
ttcccttattcctttctaatcttcaggtgagttgattttttgccctgcgttacttatgttgacaaacaggctcttttgctaactttcttgtctgcagaatgttctaaactctgtgtcgacccaattgaagtcttgtggtgctcctgttcccgatcaggttttgtccttgatgcagtggaatcctctcctgctctagaggcaaatagatgatctaaaagccttgaactttggttagtgggtctgtagctttcttttgttgtttattgcttctcttgttttacctcttgcattttttctattgctttaccagctcatactcaatggtgttccgatgcaaaggaaaagtatgcccagagtcaggttgatctgaaccaggtttctgcattcttggatggcgctcggaatctgaattcttccttgaacgctcaacttgattcagagaagagggcccatgaggtagattttcctaactgctcctgtttcacgcctttgcttcgatgctcagtgctcttcttgcctgtaggaggagaggcgaatgctccttgattcccatgacaatctcgatagattgtaccgtgatg

SEQ ID NO: 118025 - DNA, 549 bp, Zea Mays
cttaccccaaatgctataatcagactcagcgtgtatatatgggctcttcgaagccaagggaagagtgccaacactgaaggattttgctgggtgcatgaactccactaccagactaaggccagagctgacgggctgcataagaacttcggatgttacaatttttcatactgaaaagatactaaggcacctgtgattggttatcacaccaagtggccggctggctggacaaatgaatggttttacgtgaaagctaatgagaagaagagagagaagcttatgactatggtgatgagtcccctgaggatgagctttgacatgacacggccattgtgcaacatgcaactcgggtccccctgcgagttagccgaagtggaatttagagttgtggcagagcatattagtactcgggatttggtgcaagaatacatgtcaacaaaacatttccaacgtctagtggttgggggatgtcaaagaaaaaagaagggaataaatatgaacttgtacgacttccctatcgctttaaatttcagaaaagcttcggcaagccct

SEQ ID NO: 118026 - DNA, 423 bp, Zea Mays
cttagaccttacatagatgaataacaagaatagatgcaacaaataatagtggtatgcaagatgattacaagaggctagcacgggcatttgataaatccgttgttgctattttccctttgcacgaggttgaaactaaggaaaatacacatgattcatcggctgcaaatcgacacgatcaattccaaccactttacgagatgtcgatgaacacctctcctgaacaaccacatcctcctacacagatcaggggtaaatccaccgatctgcgcacggtcggaccgtccacgcatgagcatggaccgtccgtaccagcgacggtcggcctcgtttttcgaaccgaaccaccgaaatttgcaccagggccaccgtatttcgtgcaaactctaacagacacatacagaccgttcgcctacacacttggac

SEQ ID NO: 118027 - DNA, 478 bp, Zea Mays
cgcgagctacggtggctattcggaggtgagggctggtgtagtgggcgcgtaacaacctaacggagctagccaaacgctcaatttatagtggttatcagcggtggcacccaattttggtgaagacacgcgggcggatagagatagagggaggtaacttgcacgagttaccgtggcattcaccggagcaatgactcagccgatagacagaccatctatagcgacctattgcgacgtggtaacaaggtaggagcgtggcatgctcgggttaacggcaatcatcaccgcgacgaccgcgcggccatgttgtggcacaagttggtatggcaacatggcggccacagtgccccgaccttagccacgacgaagatcttttcaccccagtcattattcgcgcgttcaccgggcacgaatcctagcgccggcgaggatcgtagcgtgggggtcatcgacagtgagttcagtgaacctacgatccttt

SEQ ID NO: 118028 - DNA, 339 bp, Zea Mays
ggattgcttagttaaactcctctcttaatagtacggcagttcattctaaacaacacaaactttattgcgtcttgaccgacgatagatcaaaattcgctgaccgatggtcaacactcaacggagcacacagctgacgcgaggtccattaccaacacaacgcaaaaaggcatccattgagaagccggaccggagcatgcaaattaatccgtcgtctagtctacggctgcccatggttacacatgtatatctatactactatataatgcaccacaatgcaatattaatttaaactttgcaaaacacatccaacaaagtttccgcacgctcataacctcaaat

SEQ ID NO: 118029 - DNA, 300 bp, Zea Mays
aattttcttaggggcagggctcaaggcctttgtagtctctatgacagcgtctagtacgctggccatcctcctcttcttgggagttgcggtaggaattctttgcatctttggcaaatttgcctctaccggtgggcttacgttttctggcacttttattactttttccacctgtggctccgcgaccttatcatctttaacttcggctggcccaactgtaggcaccttcggcactatagtcggctcttcagcgctctgcacaatcggagcagcttgctttgattcggcagctgaagaggtccc

SEQ ID NO: 118030 - DNA, 490 bp, Zea Mays
cttttcctccaggtaggggtatttttgttgctgggtggaaagtaacgaaggggtgtctcggagacttccctgctgtagttttggcatagctggcgaagggctttttgggcaaaattttggcaagtgtctgggaagcggtgtccagtggcggtgacttggaaaggagggtgatttgggtagtttcggctttctcctaggtagactgccatagagcatttctcaattccattctcgtggtattccttccagacatactctggcttcttccggatccccatgtgaagcgcgcaactccataaaagatgagggaatccttccacctctgagcagtaggatgtcctaatgacaaaggagccttccatctggtagcaagagaagaagggtttgttaatatcggggaaaggagagaagattcttttttagagggcaagaggtattttctttttaaggaaatcttttaaggtcgggactacgatctatgaccaatcat

SEQ ID NO: 118031 - DNA, 896 bp, Zea Mays
taggtctttatgttgattttatgggataaagatatttaaggaataactttaatctatattatactattgcagaaataatattttagttacattataaccatagacaaactaactttgattagtaggaataatgtactaagcatggattaaatgaatatttatttttgagaacatgctattagctaaaataatgttacggaagcataggcaaaattattacgaagataacgcaacttgaacggattgaaacggacttaaaatgagaaagttatagattatacaaatttgtttggatttatttgtctattaaaaataattttcgaatttaacttctaggtttacagcgacctaaggacctcggacacaaatttatggacagataggggttagactgttaaaaaccggacgcatacgtaatattcttagaactatagaggacggcgggttagtttcaagatttcctgaggactctttagaaagtttgcctcggcgaaggggtacgagtcaatctttgtcgtccgatcaaaagccgagggcccagatttaaaacaaccccgagtcaaccacgtgcgcccgatcacgaatccatggaccagattggatcacgcgaagggatacattctgatctaatctcggccgtctcctggccagatcaacggcgcacaagcccccgagccaaacaggtattcaatactcgatctctgtcgtccatctgtgatcaacagctcataaccaatctggacgaaccagcatccatacctaatcgtggccacacgcttgggatccaatgcccagggatccatcgacttgaatcgctttcacaacgtttaatcctggtcgtccgttgctggatcaacggagtcagcgcccatcacgccatcacccatcgtccccag

SEQ ID NO: 118032 - DNA, 346 bp, Zea Mays
ctcacaatatactgctctttaaatatcactcactgttcattacaaaattccctcctacttaaatattcctaaaagcaatgacaactcatgttcatcccctcccacccaaatatttgtatctgcactgaaatactcttatataccatgacaattcatattcatcccctcccaataaaatacatgtatctacaactagttttataacttgataagatattggagacaaacaaaacataccacagttgtcttagataatcggatcaattgtccgtacataagaagagtggagatgtaattagagtggacatggcgttgctaatatgatcgtttgcagcttgcggtcact

SEQ ID NO: 118033 - DNA, 514 bp, Zea Mays
cgtatgcgtcattgttctaaacgacttataatttggacctggagagagtatatatatatctagggacaaaccctaacctaatgatctcttctaattggcaccaaatcatatggaggggtagcctaagaccagagaacaaccatattccaagctggactactctagctaggtagacaggagtgacactactttggaataatctccattcaagccatgccatgcaccccatgtacctgtgctatgaaggcgttgagtagtcccacatgctccccacttaaaccgaaaattgtctcaatgcacgcacacccagtgtccttagctcaccactttggtctagggctaatataataatcctcggcttgcccccaccaatactataaactaatcccctctcacacccacttgcgtgcataagcatcaaccgtatcatccttctctctcaaggaagttaaagcaggcgggcacgctcatgtatactttctcggttataaaataaatactagcaaattgtccg

SEQ ID NO: 118034 - DNA, 403 bp, Zea Mays
atcacatcgtaagttacccacttcatcaacaccaagcttgctacatgggacccgtatactggacggatgaagcggtacgccatactgggagcacgacagtgtatggcctcacagacgacgtcaggagggctcctgactacgccacccaagggcaacatgccgaactccctctagtagaatgaaagtcccaatgtagagtcatgcccttgaactataaaaaaggcaggggcccatatttcttcgcacgcaagcacacctgttgtgatacgactccaaacaatactacgatcagcactgcactggaatagggcgaaagtctgaaccagtataacccatcgtcttaaatccattattgagtcacagtgattcaccattcgaattgagtccatgttagcatcctcac

SEQ ID NO: 118035 - DNA, 466 bp, Zea Mays
aagggcacaagctctcaacatgtcttccaatacttgattagtccttttagtttgtccatcagtctgaggttggtaggccgaattaaaattcaacttcgcatccacattctcatgaaaacttttccaaaatctaggggtaaactgtgatcctctatccaaaatgatcctcttcggtacactgtgtagagacacaatccaagccatatataactctgccaattaagatcccttatacgtagtcttaaccggaatgatatgagccactttggtcagtctatccacaataacccatatcgaatcatatcctttcgaggtgcgaggcaatctagtaatgaagttcataccaatctcttcccacttccactagggtatctttagtggatggagtagtccagttggcctctggtgttcagccttaactctttgacacacatcgcgcatagccacatgtgcagccacatctctc

SEQ ID NO: 118036 - DNA, 990 bp, Zea Mays
tatcatgattagtgtagggaattctagaaggctatgtacatcatggttatccatagttgttcctagaaagttgtcttgcttatgattaaggtttatcatgaatattgtagaagcttctagaaacttggttatgtttattatatgacaattgtttaagagaggttttccttgcacattttcaatgggcaagtgatggccatgggaaaagttgtcttaatcgatgctaaggtcataacttctgtagtttaacaatgacttcgggggaggaagaggtagaagatcatggcatgctcacctatggctcaaatcgacggtgagggcttgtcctttggtttgaagagtaaggcacgcattgttcagatgtgggggtgacaatgagatggtggctggactgtgaggttccgcggcaagggcatccgtatttataggcggaggaacgacgatttataatggagggagtcttgagcggcgtactgtgattggtgacgttgccacagtgcagtcgcaacatcctgaggttggcagggtaacttggctcatggtggggcattcatttagttgtgattgtgacaagtgactggcgtgtgctcaggcgggtgcacgaggtcttgctggagtgactttcttcactgaggtatcacttcaaggtctgcaacccgacactttaatatagcagctcggcgtgcacgacaaggctgtctaagggcagagggtgtaggtgtggcttgctaggatgcacaaatgccaaggcggctagaggcaggattacaatttatttacgcatgtgttttgccacaggtggttgtgggctccctctgtctagtgtgggtgggcattagacattttcaagaatttaccacggtgaaagaaaagcttagtctataatttagaagaatatcgaggaataacccatagaggcattggtttgcatagtttggattaggctaacatagctatcaataattttgaacaagttttattccatagttg

SEQ ID NO: 118037 - DNA, 278 bp, Zea Mays
tcgtctcctgtatcattcctttagcttgcggaggccaggttgtaaaaaccaattaattgctttagcaaagagtctggctcgacttcttaccttgaaatctggaaacttccatctagatcgtcgtggcaactccacttccccactctttccgctttgaagcgtttctcttaaagacaaatgggttctctttttgtcttcatatccagaagctagagataggttcggtagtagggcatggttaagtccgtgtcagaatgaagtcagggtttccgggtgcc

SEQ ID NO: 118038 - DNA, 425 bp, Zea Mays
ggatcaccttgacctatgtggtcggcaatgaggaacggggttgagaaagacctgacctttttgtgggcacctcaatgaggagtagggaaccttggtggtgtgaccgaacctcggtaaaaatcgtgtgtcttgtgtgcttttgtgggtgtgattttgtctctcatcatctcaaatctttaatctatctagttggttttaattcaactcttccgctgtgtttattgttgttagacctgagtaatttcatttaagttcgtagttgaataggtaggttgaaccgacctcaagacctgttgaatcggctcccctgctgaactgtcatttctcacaaaagttcgaagtttgtattgagaattgtaggtgtagccttttcaccccctctaggttacttttatcattcacatggaggtggtgtattatccacg

SEQ ID NO: 118039 - DNA, 1009 bp, Zea Mays
gacggtgtgcttggtgggcgcaagatttatactggttcaagcagaatgtccctagatccagtcatcaacgacttgttctaccagcaccattgatgatcaaaagctcctagtatgggttataagcgagcaagagaaggaggagaggctcccaagtatcttgttatggaggaggtggagctaagggttacaaagtggtgtcctaactaagtcttggcttagcgatggggatccggccactaggtcctcaacgatgtgtcctccttcctccgttagtccatcgtcttcacgtctagggtccgtgtgttgtttgtgtaggcatccttgtttgtgtgcccacttgttcgttaaagggacaacctcttccttttataggtcaaggaggggttggccagtggtggcttgcttaggaaggagtcactaggcgatggtaaaccaagcgctctaccctggtgacaccatgtgtgcctgtggcgctcgggggttgtatggttgtctcgtattctttatagcggatggcttgtgcaacctgggacgtgagcggcatgatccgagtatactgacccctggtcttcgtagcttagggcttggcgcgcctcgtcgtgttgtgccttgccaacagtctatgcactaaggcctagtctcgataggtcatgagtgcactgcaggtcgggggagcatgagccataaacgcgctgcagtcccgaggggttcgtaggctagctatgagtgcgttgtagcccgaggggctcgtaggtcatagtgggaggcggaccaatgcccctgctatggcacaatgctaggtgtagttaatgtgaccggtcactcatgacgggtcggtctcgagacgagcgaaggatccactcgattagttttccttcggcgcacttagccccctgtttagttccgccacgttcgaccttggtcttggtggtgtggggctcgtccggggcaagttcttccaggaccgacattacctttctcctcctgctaaccgatgggcctcggtcac

SEQ ID NO: 118040 - DNA, 533 bp, Zea Mays
atggcctcgacctgaagtactaccctcgctgttcgaccggcagtgctggaggtgtgattgcctcgccagttggtgagggcaatcctaggctgaacaacatggtcaatttggctgctgtgctcaacacggagttggaccacgcccttgacgagttgggcaaggtttgggctgaggttgcagaattgcgtgctgagtgcgcagcacgccactatctggatggtggttctcccgcccctatcgggattcagcacccttaccgttcaccgtcccgtggtcgcttcaactatagtaccccagactgcaggacccggatagatttggatccctagatcgatggagtcggagtctataataatgcttagttcagtgttttagtctattcagtcttagttagagttagtttgcttatcttacgttggatgcttgttatgatggacatgtactgaagttggatctttgtaatgattgtcaccaaggtgtgggtgtcccctgcaactttgtgtagttattaataaaagtcagttatttagttg

SEQ ID NO: 118041 - DNA, 1016 bp, Zea Mays
gccactgtcggtcgattccttgcccgaagtggagcatgccaagacccccttccttttctctgcaattgccctcgatcctttcctccacccgatgcgaatttctttccccattcacgagcgctgtctatggtaggtggctggatcttcaatcatcggagatatccgttgttctagagtcgattcgccccagctttgtccctataagaaccacccaatcccccatcgtcgatcacacgcattgacaccctctcccgtgctctcctgccctctgctcatgctcaccatcgccgccgcaccgccattgctcgtggccaagtgcctttgaagcttctctacccacgctaaggctactgtggtggagcccaaagattgttgctgcttctccgcatcttccccgactcggtccagccctacagcatcgcttcgacctcactggagccccaccggccgtcgttcctcattgtcagccgtccccaccgcctcagccccccttggtaaggcctcagtcgcatttgcctttaccccttgctgctacctaagccatccccagtcaatctagcctcccggagctccgtatcgaccaactctagcgagtcgttggccgtgtgccaccgtgcgccatgcctcctctccctcccccgctcgttggcttgtggatctgttcgcgcgagctgagtcatgcattctggcctgtcggatctggattgtgcgcttagggtttaatgtagtttagttagccggtcatttaagtcgtggtcctcggatttggatcgagtggccaccagtggctgatacctcttcaactaagctgacctgccctttttaattttagcccttagatcaccctaaaatggctaacctttggaagccattcaaatcgtaactcataagaagttttgttcaaaaaaatacgaagaattgattgaacacatggcaagaagtgtttatcgcttcggcccaaaaacacctaggagtcctatattcatcgagcatcgtcctagccatctcaacaaggg

SEQ ID NO: 118042 - DNA, 496 bp, Zea Mays
acagaagaaggaggagccttcggcagccaagaagtctgctgggccaaaaaggcagaggattattactgtgattgaagccattgaagaaacaccaccgccggcctcggcgtcaaaaacaccagctgccgaagacgctacagctaccgaagttgcccctgccgaagctgcaactgtcgaagctgcaacggccgaagatacaaatctggagggcacattttctgatatcgataaaatgcttttgaatattgttgtggaagaagctgctgcagccgccgaagataccctggccatagtgcctggaaaaggaaaggagatcgctaaagatacttcggatgaaaaggatttcaattttcaaaacataattggtcaagagttatcgaaggctgaaaaagaggagctgagagattatgctatatcctgtggttacaaaccaggagcgttgctcttcggcggtattgacgacgaaagcttaggatgcctccgagaccgaactaga

SEQ ID NO: 118043 - DNA, 660 bp, Zea Mays
ctgttgtcggtgtttatgacctgactagacaccacggggtatcccatgtgatgcttttaggcaggacaacgtcgttgattgcaacttgatggtacatgtggatgcatgtcggaacacaaaagagttatacaggttcgagctgttggattgtgtaataccctatgtcttgttggtgttgagtattgagttttgctagtgtgtacgagttatagatgagttgtgggcggtgatggatgaattctcctatcaatctaataatggcgtggttgctatgagtgggttgacgagatgatcttgttttgtagggtaccccctcggccttatataggggaccagagggatatcccttacaagccatgaagtctatttgatcctacctaagtctatctttgacgtgacaggtgctcctgctcatccagagttcggtcgcctttcctccgagttatctactgagtatctagctcttcacgtacatgggaactgtgcgcgcgaggcattagcgctccttctatgtcagccgcgtataaattgaatgttctggttgtcacccttcttggtcgaactcatccaatctggactagagatggcaacgggtacccaaaacccgcaaacccgatgggttttacccggtatagaggcgggtgtggaagcattttgtca

SEQ ID NO: 118044 - DNA, 780 bp, Zea Mays
tggcgatctactgggacacactaattcaacccgaacaccactcaagggcttggttcacgcatacccacagagttggtgacattcttaatgcgttcctagtgttctagcgcagtatagcttaatcgaccaggccaacaagcatcacaagcatgtgggagtactgaaacatggacaacgcggacgagagtggacctagaaatggttggccacggcgcgaggtcacacgatgacgcggaaaaccaatttgtgggaaatagcgaattgaggagctacagtggatgattggaggcgaggagcgatgcactgggcgcataacaacctaacggagcatgctcaacgctcaatttatagtgtccatgaatggtggctccgaattgaggagagaagctggcgaccgagaagaggggatgagtcactgtggcgatttaccctggcattcactagacaaaggcgtacggctatcactggttaacttccatggctcaagacgacgtggtaaaacaacctaaggcttggcgcgaccgagtgaatggcggcagccaccgcgacgacaacgcagccacgtcgtcggcaagtgggtacagcgtcagggcagcaacagtgccccaacttcatcccttgcgtaagatctttaccctgagtcgttatccgtgtgccattgggcacgaatcacagggccagcgtgaatccaggcgtggggaacgccggcggtgaggtgcactgaacctggcatcttcttcagactactgtacaatcagagtcttcatcagagcgcttgac

SEQ ID NO: 118045 - DNA, 388 bp, Zea Mays
cagcgttcaagggtgggagggaggaaagtagaggaaagaatctagacctagctcttgtaccaagttggagaatggaaaccctaactcagggttgggagatgtattaacaggctcaggttgttgggcttggcctattacacaggggtataactgtaattataaggggctaaccctaaaccctaaacgagtactctaacagaaatatctagctattggtgtttgggctaataaagagataaactgtttacctatgattcatttatactctctctggtttactattgttttggacatggaatgatcttttgaatagccttttccaaattagcattttaccgaagttttacatgtaaaatgatttaatgtgcttatgtctcatgatatattt

SEQ ID NO: 118046 - DNA, 300 bp, Zea Mays
agcacttcttacagtggaatgcaactgcaactggttgtagtcaatgcagtgacatggtgctgttagcttggcagggacttcttgatattattatcgtcggaagattcgacaacagttccttggtttcaaaatcgatcgctactgtcgatggaatcagtgccagtgctgatgcggggttgtgcaaataactggagatagatttgtatggtctttccattaccggggaatagcttgcctatcaatgcatgctgccttctgttggatcccagcagaatttcgtaggcatctgtgaagtgtgaa

SEQ ID NO: 118047 - DNA, 365 bp, Zea Mays
tacattggaccattcactatcttggcccaagtgggcagcctggcttatcgcttgctactgccggattccatggcaggggtacacccgatttttcatgtctctatgttgaggaagttcttgcgggatccggaccatcagattgagatggaaccaattgttgtgcagcaagatttgactttggagtgtcgtccagtgcgtatattggaattctcgaagcgtgtattgaggaagagatcaattaagtatgtcaaggtcttatggactaatcagtctgagcgcgaggctacgtgggaacttgaggagctgatgcggcagaagtatccgaaactttttgttgtgggtaagtgttgttgattcattaattt

SEQ ID NO: 118048 - DNA, 475 bp, Zea Mays
ccataggactggtcgtagatcgcagccctgaccttaaaagtttgccttaaaaggaaaatacctcttaccctctaaaaagaatcttctctcgtttccccaatattaacaaacccttcttttcttgctactagatggaaggatcctttgtcattaagacatcctactactcagaggtggaaggattccctcatcttttacggagttgcgcgcttcacatggggatccgcaagaagctggagtatgtctagaaggaataccgcgagaatggaattgagaaatgctctatgacagtctacctgggagaaagccgaaactacccaaatctccctcccttccaagtcaccaccactggacaccgcttcccagacacttgccagaatgttgcccaaagagccctccaccaactttgccaaaactacagcagggaagtctccgagacaacccttcgttattttgcacccagcaacaaaaatac

SEQ ID NO: 118049 - DNA, 278 bp, Zea Mays
tctaaattgacttgttcagtacctagggttgggaccaagcgaccgaggtgactcaattcgatgtctttagggttatgtttgacccaatcaggggtttgggctagaaacacttaagataggtctatcccggtcgaggttacctggtcgtatctacggtggcaaagattggcttggtctgcttttcgttggggagttagcttggatccatcaaggttgggtcctactcggttgggctcatcttggtcaaggagttaggtcagggttgatcttgttcaggg

SEQ ID NO: 118050 - DNA, 358 bp, Zea Mays
cgatgactgaagcttttaaaaaaaataccaggactctgttgcgtcatcctatgagcagcttgatcgacgagttgctgaacttgttacatgcatggacatactggaggctcatcccccaccaccaactccagccctagctcactctcctgtggacgacgacgatgatgtttatgcaccgctgcgacaacgcctcgcacgtaatcgacaaggtatgggaggtaatggtagacatcgtcatcataatcctgaaccagatcatgatccatttgctaagattaagttctatattccaccgttcatgggttcttatgatgctgaagcttacttagaccgggagatgatggtagaacaaaaattt

SEQ ID NO: 118051 - DNA, 595 bp, Zea Mays
aaacatctgagtcagctagaagatagatttttcaccttctcaagtttatccctagtgatgtggaactagaacaggtgaaaccccctagccccatctcgagtcacagctagctgttacccgtcagatgtcactagaaacaatagtggaggaacatatttccttttagacatttgttcaactctgatcttcttcagcttgacaacaggaccagattcccctcctcttttctcatattttctcaaagggacagacctacctcatttacacatttttgttcaataactatagaccttcaactttactatagtcttctagggtcaaggatacaagaatcacaggttaggaggccgaaaagccgaccccaattcacagagaccatattcagtggtatgaaactgaatcagaactcacagtttgatagttccacctttgtgcagtcttctcttcacattttgtgtgaaatcaaaccaaactcacttaaagggacttgttcattaacatatgatattcaaacttgctataacaatcctagtgcaaatccacctagaacaggcaccacacaactccaaagttgagccaaaaactgaaattcagc

SEQ ID NO: 118052 - DNA, 618 bp, Zea Mays
tatccatttgagtcggatcatctccggcagcaccctcgagggctgggtaaaggccagcaccgtcattgagggccaagttccctgcggtagccatctctaaggttgaaggtccctcggccacttccatgggagcaggggaatccaaaccagcctcctgaccctcaagaccgcgctccaaggtcgatgaggcgcgggacgctgcccgggaggaccccaacccggcgtcgagcacatcaacacgaacatccatcgcgccaccatctgccggttctgatagcagatcttctggaatcatgtcctcgagagcctgatcaaagttcgccagagataattcttgcagaccaatgagggcagacaaggccggagaaggaacaccgctactttccccactggcagtgtaacgacagctgtttttccgaattagggggatttcgtcttcttcttcaccaccatcatcagcaagacggacgtcacacccattgggatcagcttcagtgaattcaggcactggcacttcctcagcaacaggagcagaaggaccggcaccttaatccaagctagacacccgacaaaggcgtcttttcttctttttctccccctcagcaggaaaagaggctt

SEQ ID NO: 118053 - DNA, 298 bp, Zea Mays
aactggcctgatagctattattataagagaactccgcatacggcaaactcttatcccaacttccaccatgtttaagagcacaagctcttaacatatcttccaactcttggttagtcctctcagtctgcccatcagtttggggatggtaagccgaactaaaattcaatcttgtatccaatgactcgtgtaacttcttccaataccgagaggtaaactgtgatccctggtctgacacgatcttctttggcacaccatgtaggcagacaatccgtgccatgtacaactctgctaacttggc

SEQ ID NO: 118054 - DNA, 477 bp, Zea Mays
ctttgctcatcgaacaagggttggcacagacagtggtcatagtcttccttctttttcacttagggcgcctccagaagctatccaaagctggatctaggggtccccgaaagcgagaagaaatgggttgtcgggtccatatccaccgtagagatcctccacgagaagagagtgacgattgcggggataataggcaattacctccgccaagggtggcccgcttatggtgagaaaacttcccctattcgcgatgatggttgacgccctttcggagggcacaaagctagatgcagcagatccaagtgatgcagacattgcccataaggatgtagatggggccaccatcctatatgtctttccggtccccgagtgtccttttatgcgcacggcccaggcttcgttgagttcatgagtccattcgtctgattcgcttttggtttcattttcctttgctattgttgacatccccttcttcttcca

SEQ ID NO: 118055 - DNA, 277 bp, Zea Mays
gttcacttccatgagtttgattatttatgttttaataaatacatgatacgtggtatggtgctatagattctgccactctggacctatctgaaattcaatgctgtcaaggtgtctaaagttggagacagaaccatgttatgcaggttgcccaatttgtttaggaaatgctttattgtaatgaatgatgaatcatattgtatgctcaatggtttgctattatgccatggcttcttatcattattttaccatttccattcgtctagttctatgcatgagg

SEQ ID NO: 118056 - DNA, 397 bp, Zea Mays
cttgcccttgcgacaagctaagtatggtgatcacctcgagaagggatgaacgtggacaaagtctgtgtaccgcattaaatatgatagatgaccttatgatcatgtcttcccttgacacattcactagagacttgtgtacctaataccactgtgcaagtgtgccttcacatttaagaccatatttgggccggcaatcatgtcggtaaccgaagaatggtaacaattactagagccatgactaggtagtatgacaatactttcatgtaataaaaagtacagagaaccgtactaagctcctattacagcgcactagtgccattaaggcaccgatccttgctctgggtaggaccttagtaggtcacctcaagaggtatgattagaccaacgcacacccgac

SEQ ID NO: 118057 - DNA, 327 bp, Zea Mays
gttttatgttaaggttgatgagaaaaaggagaagctagttcagagcccactggagctaaccttcgggttaactaggccccagtgtcgcatgacgccggggtcatcatgcccagatgctgtgggcgaatttagagttgtgtctgagcatatcggtactagggatttggttcaggaatacttagccaatagagtatttccgacgttaaaggaatggagtatgccgaagcttaaaggagagaagaaaaagaatgaacttgtttgactgccctatcattttaagttcaagaaacacttcaaagaaccttgccaagaatggttggatacaat

SEQ ID NO: 118058 - DNA, 516 bp, Zea Mays
caagaggatatctacatcaaagttgttctcctataataggttaacaaaattgatgtggtgacctagggcaaaaaccctagaatttgaaagatacaaagctcaaaagttgagcccatagcactgtttttcagacttagtatagaactcatttgaggtctattttgcaattaagtccaaaactcagggtttggcttgtaaatcttcccaaatgtgaaccatgtgactttatatgtttaaacatagtagtttttacactttagtccaaatgtgcactgtttttgcacctaagcccctagggtttggatttaggcttttctagggttccaattgggtttttgtatcccaggggtataaaagtgatttcatttcattcttgggaacattttatgactattcccctaaggtttttatgttttctcaatttgggttatgttttacctctttaatccctatttagggctaagttccctatccagggttctatttgcaaagtgctataacaatacaacttatttg

SEQ ID NO: 118059 - DNA, 585 bp, Zea Mays
cagactagcacaacaagcgcgcaaaatcgaagtctttttcaaaagactatccgcgcaaaagtcgcctaagggtgcagccggactagctcaacaagtgcgcaaaatcgcaggcgcattacatccgtgcaaaagcctacaccaagaaactgcccgcacaaagaccaactacaggcgcagccggaccgacataataaacgtgctagaccaagtgcgcaacacccctatggacatagccggatgcgcgaaggcgcatagcctcatcatacaaactatagttacacacgtacaacgagggcatcacaccttacattggttcaaccttcggaatgattcccatctccctgtagttaaatagcattatcctaagctcctcaccctcaaaaagacttcgcaactccccctcacctacacccgccccaaccggcgaggataacaattcccgctttccagccctgcccacacgaagccgaccgccatccacttcactcactctacgcttcgccaccgcccttcgccgtctacgcccagcactcggaccaggcaaaacttcagcatccataacacgcggagaagcctccgctgcag

SEQ ID NO: 118060 - DNA, 426 bp, Zea Mays
tgccttattcttgacttacagcatccgagaacaagaccaacagtggtgatcaccagtggtttgctttggggtgctcctcctcagcctcccactttactctctggttagcagcccgagctcctcccccttctcctctctgttttttcatccagtgagcactcccacttccactcctctcccaccctttgattcaactccaaattctatgaaattattgtgaatgaaagtacttgtgagtgcccctagatgtatgttcatgctcccctataggtgttgtgctccttcgggaggttttaaaccctcaaatagccatttcacccacaattcaaaacctcgcacgctacgtgttcgatgaaatgcaccaaccagtcaaaatagctcaaatcgaccccaactttttccagcacactcctgctactaccaata

SEQ ID NO: 118061 - DNA, 378 bp, Zea Mays
gtggtgtgggccaaccttgtcaggcttatccccttcgttgttcctgcacgcccggtaacagaacgcacgtagctcgtgcaatctcaaccacatcccgctttgttggcttcgtggcctggtgcataaaggcggagtcttgctcccctaactcgtccatcgggtctagaaatagatggagttctcgagcccctgcgaccgtgaacaatggcgggtatggtgggaatcactgctgaaccttgggtcaatcccgaacaaatcggtggccataacagacctccgctccggctcggactccgggcgccgcctgggtataaaaatcgtgtcgccgcttctttcccctggctccttggattgcagcagataggcgagggcgatcgc

SEQ ID NO: 118062 - DNA, 495 bp, Zea Mays
cttattcggcccagacttctacagaatacagacgcgcccgcgaccgcgccgttatatttgcgcaaagacccttactggaatacatatccaaaagaaggtcctcatccgatcttaacgtgtcactgacatattacatcttgccccctccacgttcttcgtcttttaaaattgggtccctgacgtcgtccggcggcatggacgagttctccccgtgaccccacggtggaggagagcccgagcagtcatttagatagcagccagatcaaaccctaacctgatccgagcagctatgggcatggatttggctcatagactcacagagtgacttgaccgcgctcatgacgggagcccggtatcgcggcgcttgcccaactggcttaagcatgggatgtttcaaactaagggtacagggagcacgagcaagacactggcaacgcgatgcttatagtaatttacattggatcaactaggttctggtgggtcgacactaaggca

SEQ ID NO: 118063 - DNA, 359 bp, Zea Mays
gtcgcatcgacttaagatgtctccgacttaagtcgattgccccgtcagtagggtatagtaatcaccctaagtcatgtaagcgtgcaggtatgttgtgccggttttaagtcatttccaacttaaatcgcttgttgattgagagtttgtatgcggtagaacatagaagctttattgttaatgaaaccttttgcttacaaagtacaacttgcccaccagagttttgaggtattgctacggatagaattttctgaggtgttcaatattccacaaattccccacttcggttccatccatttgggtaagtcggtagaatcctggccgggtaacctctactatgatgaatggtccttcccatggag

SEQ ID NO: 118064 - DNA, 307 bp, Zea Mays
aaaccttccagtatctctttagtaatcttctcggtgtttgtttttgacatagactcaataaaccagaagataaaaggacttgcagctttcttttcttcgaacatctttgtctcctcagtcagcttcgtctccgcagtcatccttttttcctcagacatcttcttttcctcagtcatttttccccagacatggtgaaagcacgtctttaaaccgaagctcgaaaagcttgaaaaccaggcgagagctagtgagcaagagttaaaaagtttgagaaaataacgcgaatgctagaaatggcgtatcaaat

SEQ ID NO: 118065 - DNA, 977 bp, Zea Mays
gcatgcagcatgcagtagtagtggtgacatgtgtacaagatagaggggtgacacatgtaccagcagtcggatgaggactccacaacaatctcactatattttacccacacttgttcccaatctacatgacagaacaaattcatgcacgtacaatatcagcttacagtgacgtctctacccgtgcattaatcttaactaatttcctgctactatgaaaatggaaaatcaaacggaacagaagtacagaacaaggtctctgcgacgattgatctttcggacaagacgccttaattgactccctgtctcttacagagcatcggctttctaattttctcaccgaacgcatgaatccatccatgagacggaatggcgtacgacaccacatgatcaagtgacctccatagtccagaccaggaggcaggaattctaaacagaggttgcagccatgcgtgagtgcacatgcgactgctgtcaaaagcaaaccttcccgaggtttgattggtccctaatatggacggatgccatgccattcaagtacaactgcggctgccctgcccagcccaggcccctaccactacaacattaagctctgccgacagtgttagtttcacagcctgtgtaaaagtcttcagatctttccaagtcaaaattcgaacggccaccgagtgctcaccgacatggctatgaccacccacatctacccttttacattagcatccaaagtctcctcgctggaataagcagcgggtgtccttttttttttgaaacacgacaacgtgatccccagctgagcactttagactcagatggaggatccaggatcaactctaccaggatagacctgggcaagtaacaattttcccgtagcatgtgctctgggatcatagtcagaatattccactgccacatgttaagtagctgacgttcaaaggtataaagccaatgcttattacttccagctacagaccttctagatt

SEQ ID NO: 118066 - DNA, 370 bp, Zea Mays
caaaacagcaatcaataaatttcagcttctataattcatgaattgccacattcgagagacttgaattactctaacgctttactatttattcgagttaagacaatcacttagaaccaacaagtcgacttgcaaatttttattcaagtcatttagtgcactaaaattactacatccaattaacaacgcattcttcacgataatcccccaacaatttgcgttttaatttagacatcacatgagcactactactctttacccgcgaccaaaaccatacacatttagaccccaacaagtaatttaccgtgattatgagctaaaccaagtcatctaacaagtcggctaactagagcaacgacacggtccgctcgac

SEQ ID NO: 118067 - DNA, 607 bp, Zea Mays
gcgagctgtcagctggggacatggcgaggccatggcatggcatgggggagctccaccgcctgcttgtccagtcgttcttgcaccttgcattgtagttgtactgacaaagcctccttttttttcttccattttcttgtttttttgttgctcctaattacgttccatagttgcctcgagattcccgcccagttgagttgacagagtgaaagattcctgttctccttgagtttttttatgatcggcattgccgcattggtaggaggaaaatcatgtcctcctcattggttcctcgggtcctcgcaccccaaaaaaaaaagatcctgattggctcgtgcaagagacctgtcttctgtttgaatttcctcctgcagcttcgaggttctaggccacaattgtcaacacaacaaggccacgagtcagtaaaataggggaacggcaattcggcatgttaattatactttcttgtgaagtatgcgcccttagttcaacctttctatgctttctttttgtacgtgaactcagtgctagtagcggtcacactccgcagaattgctgcaaaactgcaatgatcaacatgattttcattttaaacaacccagcagctgcg

SEQ ID NO: 118068 - DNA, 493 bp, Zea Mays
cctcctgacagggcctgaagtcttttcctccaggtgggggtattcttgttgctgggtggaaagtagcgaaggggggtttcgaagatcactttattgtaattctggcatagttgtcggagggctgttcgggcaacattctggcaagtatctggaaagcggtatccggtaaaagtgacttggaaggaaggatggtttggatagtttcggctttctcctaggtagactgccatagagcatttctccattccgccctcgatatactccgtccagacgtattccggcttcttgcggattcccatgtgaagcgcacagcttcgcaacaggtgtgggaacccttccacctctaagcagtaggatgtcctaatgtccagagagtcttccatctggaataggaaaagaagggtctgttaaaatcggggaggaggagagaagacttttcttggggaaagaggtatttcctttttagggcaagttttagggtcagggctgcgac

SEQ ID NO: 118069 - DNA, 744 bp, Zea Mays
aaaactcaactatgtgatcgtctctatagaaatattcacagtggtacctcacctctctcttaagtgttcttttgtgggtatggttcactttaggttgatacggtggtctagaaagaggaacactagagatgttggagagaatactaaatgggttctttaggtgatttggttttgaaatccatacttgtttttaaggtggagctctgggatgttcctcgaacactccatctctcatagctagagtggtagattttggtggggtgacttttatggaattgggagtggatataggtttttcagaagatgtcaagggactacacccatcaaccttgccataaagatcatcactcacacccttagcagcaaaacctaaccctggtccactaaatctcctcctaaattagccaaccatcatacccaactagggctcactactagatacccagctcaagactgatcgaatgtatgtgttttcttcttttggagtcttactacgccatcaagagacaagctccaagtacaaaacctcacaaagcacactaagtagggacatgtgcactcactaagctaaccttctcaagaaaggctattctagcattcttctctggtagcttagtttgcaaagtaggacacatctgacatgcacccccaacaagttagatctagatctcaactcattgcactcatctagttgggtggcatatttggtctatactacggtaatgtttgttatgtgaagggcac

SEQ ID NO: 118070 - DNA, 522 bp, Zea Mays
ctggacttctcatgctcgaccaaatcaacaatatgtgacgtgcggctccatgcaatccttgacaaaaatctcgctttcccaacaacaattttagtcttcttctcgaacgggaaaccaattttggtataggaaatttatgcttctttggctgtggagaaggtgaatcccttaatggttatggagaaggtggatcccttgctggtggtcacgaagaggacaagctggtggagccctgaatggcaatgcttgtggcggagatgatgggtcagaaagaggatgaggagcaacaggtgaagtttgaggaggtgatgatggttgtacaataagaactatgggttatgactcttgcgttatgggttgggcatgcgatgatgatggtggtggtggatcaaccaattggacatcctgtcgaggacatagaatgaaattcttgatagcttgtccaagtgtcttaatacctttgggcccatggatgtctagcatgtcatcctctaatccttggacaaccattgtcacttctac

SEQ ID NO: 118071 - DNA, 620 bp, Zea Mays
tgtctactgaacccaatcaggaccaactagagatctctctcccatggtctcccagcacagaggggagatacaccgcctgccatataaagcctcatatggtgccatcttgatgctagcctggtagttgttgttataagcgaactcggccaaagtgagatgatcctcccagctacccttccaagatagaacacaagcacacaacatatcttccaaggtttggatagttcgctccgactggccatcagtctgagggtgaaaagcgacactaagggagagtttggtacccaatgcactgtgaagactctctcagaatttggatacaaatttggagtctcgatctgaaacaatggacttgggcaccacgtgaagcctgattacttctttcatgtacaagggaaccaacttttaagcagaatttgtagtcttcatgggaataaagtgtgcagacttagtcaagcgatccactaccacccatatagcatccctgcctcgaggagaacgaggtaagcccaccacaaaatccatggtgatatgctcccacttccactccggaatttccaatggcttcagcaaacctgcaggcctcttatgctcggccttcatgcactgacatacttcac

SEQ ID NO: 118072 - DNA, 1114 bp, Zea Mays
cgccgaatcccgcatttatattgggagttggaagctaaagaaaaactgctcctcgttgatccatgttcagaaggatgatgatgcaccaaagttctctttatttcttccttactgtaatttctgatggtctaaatcctaaactgaaaataacagccaggatggcgtgtgagtccggctagaccgaggagtgaccaactctgaatggtcctctgaattcccaagctttgacatctcacacatttgttcttccaagtcggaccacactgctccttttgaaactgcagggatccttccggtacgagatgatgtgggcgcgggcagagccgcagaggggactagcagccgtgttagaaggcacatggaacaggacaatcattagatgactagggtgttgaaatagtggaccaaccgagcaaggatgacttatgagcagcttcaggatctcacccaactgttctaggtgtggagattctggccggcaacaatattgcagccctcttatctatgtctagattacaagttcgagctactggtttatagcatagtaagtacaaatcatctcgtgaactcatacctcttgatgcaaaaatactgaaaacacacctggtttttatgggactgccagcggttgcagatttatgtcaaattgtaaacttgtttgataaatagtagtagaagaaatttcaaagagctatacttgggttctcaaaattatcagaaaactatgcattttagaattattatcatatgtaactatataaatttgcatgctttgcagttttagcatgattattgcatcgcgccatgttttatgaaccaatttacagtgacacagcccttcatttatcgagtgcccataccatgttttgactactgagatatcaagcatatatgaaccacagtgcacttctcagttctttcaagtgcacttataaacttattatgtgtatatgattatattggagatcaggcatataagcgagagaggacatttactttgataactatatgaagtatgtttctgcaatcccattcttttagttattaagctagctaggtttaaaaattgcaagatgattatgagaaattttgtctcgaatgcagtgacccaaag

SEQ ID NO: 118073 - DNA, 457 bp, Zea Mays
caatggatgaaaaggtatggaatggaggtgcccctagcctgaatagtcaaagggactatgtatgtaccatgggttcatcatcgtaccattccacatttgaacaggataatatatcgacgatgagtaggcaggtagaaagtatcctgtcattactggagatggataaataggcaatgcttgttacatcgtcttttggcccgttttattcggctgttttgttttagcaggtgaccgaggtttctttattggtcgatcgcgtagaacgaccttcttgcaagagtatttgaagagcgattgatcaaaagtagggttggctttgaccaaccgaccatgtgcattatatgcgcttcggacttgttagtatttctgtccagagctttttgaccaatctctccttgtgatatattcgatgtgcgaggatcacgaatgatgatgttttttcctttgactttatcag

SEQ ID NO: 118074 - DNA, 442 bp, Zea Mays
tgcctagtcacattgagttcggtaaatcaaccataaaagccgaagatttagacgtgatgagaagagttggatatattgggcataaagatgataacatgatcagatttgctggtgatgaaatcatcctagagccgaagaatgatgaggttgttgtttttagaagcttcgtccgggctaggctttgtttcccgatgtacgaggataggtttgaaatatacctacactagctgaccccaaatgtgattgttagaatcatcgtttacagatgggccctccagagccaaggtttgagtccaaatgccgaaggtttttgtaggattcatgaactccactatcaaaggatggcaagctctttgaataaactccataaaatttttgggtgttataattttgcatatagaaaagatacgaaagctctcgtgttaggatatcagacaaaatg

SEQ ID NO: 118075 - DNA, 395 bp, Zea Mays
tgatattctttatccagccctgtctgctcttgttagccttcaggatttatctataacgaattttgatgagacccttgaggatgtcattcctgaggatatgttgttagagtcgactgatggtgatatgatggatgtttgttctgacattccagatgtgggattagaggtatcccgggcagcatctcatgcgtcgtcgaccttagagggtggtcttcagtgtcaagaagttggtcaagattgcccgactcccatggaggtgactgaagatccttcagccttagaggtggctgttgcagaaaatctagtcctcaagggtgatgttggcggttacccagcccccgagggtgttgccggtaatgatccggctcaagtgggtaatgcaagctataacccag

SEQ ID NO: 118076 - DNA, 320 bp, Zea Mays
taatgagacactaatcacagtattatgattttctaatcacctcactatgcaaatgggtcttgcacccttaatccaaagaatgatatatgttgaggcagcaaaacgatgaatgtggctcgtggagggggtataaatacaccaataacccaaaactagtcattattgtgcaggttgtcggttggtgcaccaaaccggtctggtgcgccaccgatgtgccaccaacggctaattatcggaactagccgttacacagacctgatacagcgtgccatcaggccggtctggtccgctaagctggcaggcgtcgtctgctgtgctct

SEQ ID NO: 118077 - DNA, 424 bp, Zea Mays
tgagcatgttgcaccgtctcaagttgctgctaacttgagccgattgctctgttagcagggcatagtggtcaccccgagttaagtaagcgcgagcatgttgcaccgccttaagtcgttgccgacttaagtcgattgctccgttagcagggcatagtggtcaccccgagttaagtaagcgcgagcatgttgcaccgccttaagtcgttgccgacttaagtcgattgctccgttaacagggcatagtggtcaccccgagttaagtaagcgcgagcatgttgcaccgccttaagtcgttgccgacttaagttgattgctccgttagcagggcatagtggtcaccccgagttaagtaagcgcgagcatgttgcaccgccttaagtcgttgccgacttaagtcgattgctccgttaacagggcatagtgg

SEQ ID NO: 118078 - DNA, 353 bp, Zea Mays
catacctgaatcctgcttctccaccggcataatattagggacccattccacatatctgcaaggcctaataaagttagcttccaagagctagggaatgtcgtccttgatcctatggagtaagtccgaacgaaacgatcttggtctctgcttgaagggcctaaaaccaggcttaataggtaaccgatgctccactagctcttggcttaatcctggcatctcagtgtagctccaagcaaagcaatcagggtattattttaataagccaatcatttcattactaagatccacttctagggtctagttcacaaacattagccttggagtttccctttcccctatgtcaatctcctcca

SEQ ID NO: 118079 - DNA, 329 bp, Zea Mays
atcggttttacttacattgggggcggcgtggtgtgtagaagagatgccatgttaaactccacttgtcggataatttcctgatgctattccaccttcaagttcaccaagtgcttctattttgcctcctcgatctcttgttcttgtcaccgcaatgcctcttatgttcgttgtcttgcgtagtcctcgaaatgttgcttatctttagctgacagactctcaagagtcggcttcatgaatcatgatattgcttggggaatctttggtgcgatcctttgaaccggcaatctgtgaccaatcttattagatcttggaacacatgtgtccctaac

SEQ ID NO: 118080 - DNA, 353 bp, Zea Mays
gggacatggatgacttcccgattagaatacgactatatcaagggtcaactttgagtcctagtccttacctttttgtgttggtgatggatgaggtcacaagggacacacaaggttatatgccttggtgtatgtttcttgcagacaatgtagtgcttgttgataaaagtcaggtagaagtaattaggaaactagaattgttaggagactctagattagttatgacttcagcccatctgttcttctttagtatcttgtagtgtagttctctagttgcatgcctgttccattagatgtcctacataacatgatatagaatcctatcacacacttcagtcctgcatcagcaagattgt

SEQ ID NO: 118081 - DNA, 441 bp, Zea Mays
gttcatcgcaaatggacatgacgagcgagttatgcggccgtgtctgtcaaagagaaggataaaaagagaaagcttcggcgctcatccagcttggagctgggggttaactctgtcgctccagaccatggtggtgacccggcgagtgccgatctcgaagatgatattgagagttgtggtggcatcagagccggtgggtctgtatctgaggaggaggaagaggatgcggaagaagtccccctttggttcgcaagaatcgtcgtagcaaagccagcaacgatgccccaattcaggctctgtcagggctggttaatgttgagaggatgacgatgtctgctattgatcatgcattggaggagattgtcccagaaggtcttttattggaacttcctgaaactgggggtgctggcatccgtgcagaggtctcggatgacattccctcag

SEQ ID NO: 118082 - DNA, 535 bp, Zea Mays
tcagtatgttcaatcatgcgacatctgtcagcaagcaaaacccgacatagctcaatatttgggactactagcaccattaccagttcctcctcatacttggcactcaatctcgatggattttatcgagggattacccaagtctggtactatggactgcatattagtggtggtggacagattctcaaagtacagtcattttctaccttcaacacatccgttttcagcctccaaggtcgctaagctgtttctagacaatgtctacaagttgcatggaatgctagccactatagtctcagaccgcgatagagtctttactagttctttctggcaacaattgttcacgatgataggaacacaattgtgcatgagtttagcataccatccttagtccgacggacaaacagagcgggttaaccagtgcatcgaaacatattttcactgttttgtgcatgtctatcctcgcaaatggattcaatggttggcagttacggaattttggtataatagcaattttcattcaaccataggcacttca

SEQ ID NO: 118083 - DNA, 283 bp, Zea Mays
ctgggctggaaagcaccaaaagatgtctggggaaccaagagtttcattggaatggttggttactatcggtgtttcattgaaggtttctccaagatttcccggccaatgccagccttgctggcaaagaaggttgagttcaagttgacccccgtgtgccaagaatcatttgagatgttgaagcagaagttgacaacaacaccgatattggttctgccagatgttcacaagccattcccagtatattgtgatgcttcgtacaccagactaggatgtgtgttgatgc

SEQ ID NO: 118084 - DNA, 585 bp, Zea Mays
gcggtttcccttgaatgaaatgattggggaagttttggataattacgaaatctatcttcatcagttgacccctaacgctatcgttaggctcaacgtcttcatctgggcccttcgaagccaaggaatggacccgaatgctgaagctttctgccgagtgcatgagctacattaccagatgaaggccagagaagacgggctgcatgaaaactttggctgttataacttcgcatatcgcaaggatatgaaggccccggtgcttagctatcacaccaagtggccaaccggctagaaaagtgaatggttctatatcaaggccgatgagaagaagagggagaagttaaagacgatggtcctgagccaattgagtttaagcttcaaactgactaggcccttgtgccacatgtcgtcggggtcaccatgccaacaagctgtagcagaattcagggtagtggctgaacagattagcactagagatctggtgcaagagtacctagccaatagggtgtccccgacgttaagtgaatggaatatgccgaagttgaaggggacaaaggaaaagaatgaacttgttcgactgccttatcg

SEQ ID NO: 118085 - DNA, 298 bp, Zea Mays
cccggcagaaagacacaggacagtgagcgcttcaatcagctcctctagctcatctgcttgttctttagctgaagagagcacacagtgacacaatggaacttggaacttggcaggctactccgctactgcctactgtactgggctgctggcagttaatctctgcgtactgctagtgctagtagtactatgcatctagctcagcaagaaatttaacttgctgctattttaacagtatagtttcatttagagttcaactctcttgtgccgattgagacatggatatatatgattaccgcgg

SEQ ID NO: 118086 - DNA, 454 bp, Zea Mays
taaatttatagatgcgatacttgcactgtcccttcttcaccacattgtcgtcatcctttattttgatgaaatgttgccacgttttcggatcagggagccatcacttttcttccacttcctttattttctccatcactaacttaaacaacctcaacagaaccaccggtacctcccacgattgaagcgtaagcaccatcaccacacatgtttcaatatagatgacatctaaaaaataaaccagcaacacatttatacatcaataatcatataccacatgagttgcaacagagagagcataaacaagggtgggggagcaaggaaggggagactagaaaaaatgttagaaagtgtaaccttaattgaatcattcgattgttggctaaccgaattcacaaattgtaaccctacagataagtccctacttcctatgttatttagggagaggaggataatc

SEQ ID NO: 118087 - DNA, 854 bp, Zea Mays
gttgcctgtcacgataacgtggttcaatcgggaatttaacttcaactcgagcgacaatactatacttccgttgtaccccataaaaatcgtcatcgctatagtcgtcgaacaacctgaaactatattaaacatgcgactaaatacgttcataaatttgatagcgaaatcttgtgttaactattgtttataatataacttacacaggcatcctatttttcttgtccaatgcaactctttcacggttcaatacggctggctccatcaaaaacctattatcatttgaaaatattttaaactaaactgtaaaatagtccaatgcattgatatagcacgacataggagcagtgtgggttggttggttgaacacttattttggactgtaggtgcgactgtgattaaggcttgtagttcacgagtatgcagctcatgtagagttttgtgcttcagagagtcattccggctgtcagaccgccaaacatgaacagtcgatgtataactcatggtggtgccgagcgtcttcaggtttatctaaagacgagaaggaagggtccgattccctagtggtattagttgcttgggagccttggaaaacataagaatgcttgtgtttttcagggtataaggcctgctgtccaaaaagttgtgcttgctataatgactgagagacagatttggtgcctggctggggcttctgccctgcatgacttggtccttaagctggaccactttggttcgtttctggaagtcagtgctagaagtgtgagttgtattcaacacccccgggtgtataatctgtgtggggggcattttttattctttatgaattgacacacagctctcctgcgtggttcgag

SEQ ID NO: 118088 - DNA, 392 bp, Zea Mays
cgaagcgattagatctgtttttccttcacgtgatttcttatcttctgcatacacaaccaaccatacaaccaccacaaatgtttcatcctcctcattgttgtcgttgtatattaaccctcaacttcacgtctccttacccatctctgcttacctcgcctagattattcctcacaaccataaaaaacatcgagcaaaccatcctgctggtcttcgtctcaccagtcgccgctacgacgccccacctgtggcgctgcctttacctttccctcgttggcaggcgccttgaaccactatcgtgactctccgctaccatgcgtctctataggcgtggctgaacagccaagtggagaggaggcgctctagatatcgagtttagttttatattggttgtg

SEQ ID NO: 118089 - DNA, 970 bp, Zea Mays
actagtcggtccttgatttcagcaagaaattcatccctgtcctgcaactgggcgtcaatcgcagccacctttgagtcccctgcttgataggagaccattggaggagggtcccgtccgtagacaatctttaatggagaacatttcagtgtcgattgatatgatgaattataacaaaattctacccatggtaaccatttcagccatgatttaggacggtccccagctagacagcgcagatacatggtgattattctgttaacaacttctgactgaccatcggtttatgggtggaatgccgagctcatttgtaacttcactccagccatggtaaacagttcaggccagaactggttagtgaaaattgtgtcccgatcactgactatcgagcatggcagaccatgaagtttgacaatttcgtcaaagaaggcctttgcaactgatgccgctgaatatgatgccccaaagcaataaaatgaccatacttagagaaccgatcaaccactgttagaactactgacttgccaccaacctttggaaatccttcaataaagtctgttgacaccatagagggaattggcaagggtaggccggctgggtgaagatgttgagtcttatgttgttggcaaactgcacagctgcgcacaaactccctgacacgttggagagctttagaattgtaaaatgatgtgcgccacctgtgagctgtcttctgcacgccttcatgaccagactcatgtgcttgggcaagaagtacaggccacaaagtggatgcatccgggatgaacaccttgccttcgaaacgtagtaagccatctgccattgtccagtcaggacttgcttttccctctgctagctgagcgcggactgcagccacttgagggtccgagtcaacctccgtttccaaagtagagaagagatcaaaggaaggggaagaaagggtatacacaattcctgtatcttcctctcggcg

SEQ ID NO: 118090 - DNA, 339 bp, Zea Mays
gtcgctttaggggtgatggccaagctattattgtcaacatttacgcttctgaagtagcgcccggatgatgacgaagccacatcagctttggaatgactgatgaccacgtcggcgctcttggaggtaatagccgagtgacttatgacgacgtcggcgttttagagataactgccgagtgactgaagacgacgtcggcgttttagaggtaactgccgagtgactgaagacgacgtcggcgttttagagataattgccgagtgactgaagacgacgtcggcgttttagagataactgccgagtgactgaagacgacgtcggcgttttagagataactaccga

SEQ ID NO: 118091 - DNA, 646 bp, Zea Mays
gatatacgcacgcataaatatatgtagaaatgtgcataactcatgcataaatagaatcttttatgccacgaatcacgggaacgaatatttccatgtgcttaccagttacgactgcataacgttgtgtaacatcatagcgtaaaccatgcaacatttaaatctccaccggtttgagataaggaaagacatgctgatcgttcgtgaaaataaaggcgcagttacgggaggaaacaaatacaaacttacagccgctcgtccacgttcgtatctgagatactgacggcggttagcggcggcggaagctaagtgagaggaccggccgacgattagcggcgagaaaatgtccagcaccggcgctggcgatgatatgccacctgtatcgtctgtgcataagccaacaggtacgtctgtttcaccggccgtgcatcctgtagcgtctgcgatcgccgtttacacagagggtgtctccgttactcccccggcggcattgagggcacctggacatgtcgatgagcacacaaaaacggcagacgtggtcggcgcagagaagcacatccccatgagacatattgggccgcatgaacaggacacacctcatattcttcaaagccatgtaagttctcccaaatatgatactcttattttc

SEQ ID NO: 118092 - DNA, 468 bp, Zea Mays
gttatatcgtgtatactcaaatcgctctaaatatttgctatgtgttgagcattcggactcacatcgagcgattaaattatatagtgggtactcagacacgtcgatcagactacgttattaatcgaccgagttatggcattggctgagcactggctgcgccctggcaacacgacgcaatatttgtgtcgttcgaacttggctgcgtcatgtgattgctatgtcgcgctctccattaattggattgctcccgttgagtcagaccgccatcgctgagtcgcgtattttttgcatgccctgtaggcactatctatctgccgcgagccaaaattgcgcctgttgcgcatgttgcgtggatttatcgtgtacccctattaccgagccataattgtgtctgttgcgcttattacgaaggcttgctatactgtcgtagccctgatggccgcacacgcgttgacgccagatacgcta

SEQ ID NO: 118093 - DNA, 386 bp, Zea Mays
aaaatatgaaaacaaatatggaacgagtaacacctgtctgtatctgatccaattacatccctaggtggatcattcatgacctaggtatggcatgtgcacaatgttcaaaatgaagaaaaaaagattgggtattacacaagaatcgtatcattatgcgctaatcggcggtgggggcattcctagcctgcataggtgtcatattgttatgtgctagttgggaggttgggatgcctactctataggctgtttatgcatcatgtcgttatgtgctagttaggcatcttggtggtgcctagttcctaggttgctactgtgtagcctgttatatggatgttagtgcaggcgagcgaggtgaggaagagggggcatggaggacaaggtggtgg

SEQ ID NO: 118094 - DNA, 450 bp, Zea Mays
tgctttggtgctggtggtgggggggttttgatgtggagggtttggatgatgtggtggtggtggtgggggaggacttggacctcttgacgatgatggtacgcgtggttgggttggtgatggatttgctcgttgtggtatggttgttggtggtattgctgggggtgataggtttgcgcgacgactcattggttgttggctggctggggtctagccattctgtccttggtggccttggtctccgggcagtccctggtggggtgtgcgcagtcttcaccatgaaacaggcagtaaaatcttcatggctgctggggccggcctctgcctcttcctctcgtgttgttgtcgtggttttgttgagaggggtactcatgatggcgaactgtgtctccagcggggtgttggttggcgatggtgtgcacctgttgctggttgcaattttccctgccggag

SEQ ID NO: 118095 - DNA, 536 bp, Zea Mays
ccactccgccagtgctcaagccaccacgctgagctacgcccggtcagccggtagaagatccgctcctatatatctcctgcacgactcacgtggtaagcactgcgttagtagtcaagcgggcggaagagggacatgcatacccggtacaacatccagtttacttcatcagcgaagtccttgggccctcaaagataaggtatcctcaagttcaaaagctactatacgtggtacttctaaccgctcgcaagctccgacactactttcacgaccacaaagtcatagtagtcacaggatttccgataggtgatattcttcacaacaaagaagctattggaagaatagtcaagtgggcatgcaagcttggagctcatgacatagagttccgaccccgcacggcgataaaaactcaggcactggttggcttcatattagaatggactgagcaccaggtcccgtaaagcccagaggtcgctgaaatatggaaaatgtactttgatggctcgctgaagatgcaaggagcgggggcaggaattctc

SEQ ID NO: 118096 - DNA, 431 bp, Zea Mays
gtcaccgtgggtagagagactaggagctagaaccttgcaattgatcgaggggaaacgattgtcaagggtagaattaggtgtcagccaagctagaacaccggccattgcgtatcttggccggtacatgctcgccggagctcggcttgtcgccgtccactgtcgtggacctgacattgtaaagaaaaagaaagggaagggtctcggtgtaaatgttagtgacacaagcaaatagtgcgcgggactctttacgggtttttccaacgactagagatctctgtgcaaaatggcaccgcaggcgcgcgtggacgcgttctacctgtcgtgggccggatcgggttagattaagcccattactgtttgtacttttcctttttctttttctgtcagaattaggaaatccatagaaaattatagaaaaatgataaaaagat

SEQ ID NO: 118097 - DNA, 570 bp, Zea Mays
atgcaatctacttcaaaatttatcgatatgttgtcttgatcttctgattatattgtgtacacgattagacccgatggtgattccatctggtaggggcaagttgcgcacacaacggagtcatgacaaactgatcccatcagtaatatacaatgcaatctatttcaaccccttacgaccaattaatctaatcaaaccacacatctaatagatccatctcatgagcctagatccagaccaaaaactacgcaaaatggctctgataccactgaaaaggaaatgtgctagacacatctaccacgtcacgcaggaaacttgcaagtaagacatcatggatcgttaccactagatgtgcagcgcagtggaaaacgaggtggagcgggaatccaacgtaggcgcgcgtcgatggagaggaagtagccgatcatgatcgtcttctcttccgcagactgtcagcttagcaatcgcagctacgcctccacgttgtccatacgtactgggaaggaacaccgtgcaccggtgtgctagcaccacacgcgcagcgagggtctcacgactaggtatgaggaaggc

SEQ ID NO: 118098 - DNA, 606 bp, Zea Mays
gtcgaagctcgttctcagaatcaaaaattgagcagagagctggacgaagctcgaataactttggaaaagaactcagatcgcttcgattgcgagtccaaagcattgagtgcaagagttgaagcaaaaattgaaaagaacgttaaactgagcgagacaatcacaaatcttcgggatagatgcttcggcttcgctactcaatgcattgcttagttgaaggggatattcaattctgtcagagccgcatcttaagaagttaccccttatttcgaagatattcctggggctcttgaacatattgaaaaagaagttgatgccctcgacgaggtcataaccagccacaacgatttttgtgcgctggtggcctctcgtggtatagctgcagctttcatgaacgccatatgcaaccatgtgagagccgtcaacaggccaaacttcggcctgtcaccatctgacttagttgatattccggccgaagcccggagcatagggaacaaatttatcatccaaatctaggcaaagggcggccgagagctggctagagacgaagctcgaaacctgctcaacaaagtatagaaaaattctttaccattaggcttttattttata

SEQ ID NO: 118099 - DNA, 482 bp, Zea Mays
ctcgctcggtgtgacagccccgggcccctctacacgctccgcttgcctgcttcccctacatcgacttctgcatcgcctatccttgcagcgaccgcctcctctgtgacttggcatcgtcgtctcggtcaccccgggcatgatgtgatgtccatgctctccaatagtacctctatttcttgttgtaggggatcttttgagcacctctatcatgcttgtcagttaggtcgccatgttaggctcccgttccccacctcctcctctcaggctgcaggcatttttgatctgatacactgtgatgtatggacatctcctgtaatcagcatttctggctataagtactatttactcgttctcgatgacttctcgcactatttgtggaattttcccttacgtcagaagtcggacacctttcccaccctgtctcacttcttcgcttgggtatccactcagttcggtcacaccatccggagttttataacaat

SEQ ID NO: 118100 - DNA, 468 bp, Zea Mays
gttgttattgtcaaatgaagttgtgctcactttatgttaaacttcgctgtgacaggtttcaaatgtgcaaggcaatgttcattgacatatgccatgaggtagcgtaaaacaacatgtattttatgaggacaaatgcagctggcgtgactggatttagcactatccaaaaggtaacagctacactctgcatgctagcatacgatggggttgtcgataggttggatgaatacttccacatgggagagagcacaatactagagacattgagtgagttcatccgaactgtagtgaatgtcaacggggccacatacctccaagctcccaatgcagaggacatagcaaacctactagctaaggctaatgatagtggattccctggaatgctcgggagcatagattgtatgcattgggagtgggagaaatgtccaactgattggcatggaaaatatagaggacgtttcaaaaaac

SEQ ID NO: 118101 - DNA, 409 bp, Zea Mays
atcatgcaccatggttctgccctgccccacacccctagtgctccccacgcgcatctccctctctacctcctaggccccctcttccatgcgccaaaaaatggcatccgctctcctagttcctgtctctcggcctccagctcaaaccaacacacatccacatcgtgcaccatagttctgccctaccccatgccatccacatcgtgcaccatggttctaccctgccccatgcccctagcgttcccgacgcgcatctccctctctaactcctaggcccctctcctaggtcctgtctcttggcctccagctcagaccaacacacatccacatcgtgcaccatggttctaccctgccccacgccatccacatcgtgcaccatggttctaccctaccccatgcccctagcgctccc

SEQ ID NO: 118102 - DNA, 281 bp, Zea Mays
ggtttcgttgtctaaattttgaagtatctggtgatagaattaatagactaaagaacttatgaaataaagaatgtgttgatctgttctccgacgggatgaatacataaacagagaggtagtcataccttcttgcccttgattaagggcaagattagccaattggttaacgtcctgggtagaaggtgctcctgcatcttatcgtcctagctcctggtcaccaccactctgcacattaggacttcgtggaggagtgttagggatctgtgccgtgggtacaccgg

SEQ ID NO: 118103 - DNA, 598 bp, Zea Mays
ctaattttctaatatgggtaacataccaaaacttagcactcaaggtttattttcaacatgtccatgtgaacttgattaggctaataaagggattttgggtctttcgtttgggtgaatttagaatgaggtggtcttggagtatttggcctacaattaagcatctttgtgtgagtttgtgctgttcatgggaggttttatttgattcctttggggattatggaactctgtattttgacatggggaagatttggattgagccatattgtttgaataatgattgtctaacatccatccttatcctctcctcctagttgcaggtacaaccgtgaataccgacatccctgttgtactcacaggcatctccatcaacctttgttttcttcgtgatgtgtgtgctaaatatttttgtgttcagatgatccattcacattgtactgactgagtcaacacactccactctagcatgatattggttcttccgatgtggcagctcagttcaaagtcatctcgatgctactttgtgtgcttgctcacatggagagtgctaaaatatgtggttttgagttattataaatgcccatgccaacgtttttttttt

SEQ ID NO: 118104 - DNA, 404 bp, Zea Mays
ggtgtcaggcattttaatgaatccctgacccaacgtcgtacactcgccggaagttaatcaccactaactacactcccgggccggggggcccagctagcagacctgacctggatgtcgatctcatcctcatctctccccggcccggctgcatgctacacaggaggccggccacacgcaaaaccactgtatggctgcactgcagcaggccgccaagagcttgtagcagcagatgcatgcatgatgcatcgatcaatcaacagcttggactattatatataacccggcctatcacgtacagtaccactaccacacttgacactgcagctaccttcgctcgtcttgcattgtgtgtacgccaccccagaccagcagccatcttctctctctctctctgccaatctctc

SEQ ID NO: 118105 - DNA, 519 bp, Zea Mays
gagcaaatagtcatggcacagatcggtgacaaaggtgttcaagtcattaaggaaatgatcgaacagaaggtggacaaatacaaatgcttccgtcaagacggcaagggaattctatggtttggagaccgattggttgttcctaaaaatcccgagctcagaaagaaaatattggatgaagctcacctctccaagttttccatgcacaccggtagtaacaagatgtatcatgatctcagatccttgtactggtggaccagaatgaagagggaaattgctaagtatgtatcagaatgtgacacttgccagagagtcaaagctagtcatttgaaggtagccggtaccttacaaccccttcccataccctcttggaaatgggaggatgtttgcatggattttattgtgggattgcccaacacctcccgacaccacgattctatttgggtcattgtggatagattaaccaagacaactcatttcttgctagtgcataccacccacaagacagagaaatatgcagag

SEQ ID NO: 118106 - DNA, 345 bp, Zea Mays
gaaatagaattaaattcaagtcaaaagaatgtttttgttggtccttgttctcaaatgatatacatcaagaacaaagcaacacaattgttaatgattcaagaccttcgcccttcgatccattatctcccttcgggtataatgatcttcagacggaagtcatgagggacacaccttcatcatctcagtaaacaaatatgaacgaaagtatatgaaatacaaaagaatataaataatgatgatatatcagtagattatttatattcccatttcataaatatgaataaatattcatattacttatattacattgataccttcggcttgctagaaggtgaagtgcgagag

SEQ ID NO: 118107 - DNA, 370 bp, Zea Mays
taacgcaacaaaggatcgaatggctaggaaccaccgattgacaaccagagactcgtcgcccacacctatcatccccatcagtacaaccagcaccaattccacaatgaacatttccatcctcaccagcaaaaccataatatatacccgcaacaacagagacttcaacacgaagaaatcctagctctaccgcctccacctccacaacatccaaaccaaccattaccacccccacccccaccgaagcaagaggacttcgccgattaaccctttcgaggggtaatccacatgactaccggaggatccaactccgaattcgacacaaaacggcagaagaaagaccactatcgaagtgtcaatcatgtcgccctca

SEQ ID NO: 118108 - DNA, 587 bp, Zea Mays
ctttggtataagcttaccatatctattatttgcttgattgtatatattgctacaagtagcagcgaggtcatgagaaaccagaagaccaacttctggaactactacattcttgctggtcttatgaagattaagaagaatgagtttctgtccctcaatcaaggaagcatgacagtaagcgaatacagagacaaattcatctagctatctcggtatgctccttgggaagttgatgatgatgagaaaaagcagaaactatttctggagggactgatcaggccactccaataccaacagatgtcccactcattcccatccttccagaaactgatggacaaggctatagctctagagcacaagcgagttgaactcggcgtgatgaaaaggaaggctactaactagggacagggtgcaagtagtactcgtccccgttatgctacaccccaaggcacactaggtcatagcgattgtggacaacagtcccaacagaactaagctactcctcaagcaagcactcctgtgggaccagttgctctgaatgcatccacaaacaggtcatgctttaaatgtgagcagtccggacattatgg

SEQ ID NO: 118109 - DNA, 483 bp, Zea Mays
cataaacacaatgatgctctcgtttatacaatggatcaatacaagtgacggagcaagagcttatgaagattcttcagaagtagacttggattgtgagtatgcaaattgaagacctccgttgaccgtggctctctgagcatgaaccattttccaggttgccttgggattcttctctggtcgctgttttttaatagaattttgtgtcgcgaggtcgcttctgagaactacctgaactaaaagcttcacgcgattcaagattactaggaaattttgattgttcagtgtgtgtgagatgatattttgacagttagttggaaaagtgaagtgtggcattcgtttcggctcaccctacttcggcatcatcgttgcaagttgtaacataaatctagcttctttacttagtgacgactccacttgcttcgtcggtacatacattctccattgctaggtctctttcacaatctgtcggtccatggggataac

SEQ ID NO: 118110 - DNA, 594 bp, Zea Mays
cgcccgtgtgatgtgttgtcgaagcaaggaacgaactttgctttcacgaagcttagtttcgagctggattttacatttgtttctaggttgcggaggagactttcccatctgtgtatactttcacgaagcataatttcgagctggagatgaacttttacatttgtttctaggttgtggaggagactatcccgtatgtatagcacgtcggtaacctcatgggttgtggcagtgacacagtttgttacaaattaccctcgtcattatgtgcttttctaaaatccgagtaagaagcgtgacactctggcaaggctgactaacaggttgcactgagtgtggtacttcctgcttctgcccacacacacagcatgggttttgattgcaacttctgccttgaaattccgattgtactgtttctacatgcgaaattgcaaactgaccccctagatatgtttttaacactgactacaactgaatgagactgtggcattgacgcaaggctaattggatatagctggatgttcagagctattgagtttttaacctagagagtttgtagtgccgttccagtaatccataatttgttcttcctagacg

SEQ ID NO: 118111 - DNA, 322 bp, Zea Mays
gtaatcttggcatgtcaatcacgacattgctgccatgtaatccaccctgctgtacgcgcatatatatacatgcctatagccccaagagggcagtgtcttttgcaccattaacaacagttattactagctatacgaccggttttttatgtcaagcaatagttgtcagctgctcgctgaaacctttgaattggctccaaatctttggttgcatgttcttttcctcgaaaaatacctgagcatattcatgttgtgcagcaatgtcattatcaggagcttgctccagtatgccaggaattttctgttagaattcggctcctttagc

SEQ ID NO: 118112 - DNA, 710 bp, Zea Mays
ttccaatggtacaatagcagaaaaatctctggtaccacacaccttgccaccggtaccgatctacaccgtgatttgcgctggggtctggttgagcattcggcgagcatctcctcgcgacgatattctagaaacaggtaagatcgccttagtggagggtaattattccggccgccacgcggccattgatccttccggtcgtgcctggtcaccggcgccgctcctctctgtccatccacgccatcaccgatttgaccgctttaccgtcgtggcggaacatggcaaactcttagaaaagggcagcgcccgacgtcgttgttagtcgccagctaagtatggtgatggttatcaccatggccatcgcggtggctcactgggcctataaattcaccgcgctctcacccccttcatccaaattaaccaagcacagctcttcgtcccttagttacgaagccaacgaatcactagccaccctgttctgtccaccaccctcaaagatcatcaaaattccctagaatcggtctcttccgccgccgtgaaggacccatccgtggccagcactcctcgggtcagtacataccaaattgcttcctattctagcttgactttggccttctattgctctcggagccggctaattgaactttaccgaagcccacactccggaacacccagtcctcccgttgaacgccgccacagacaccctctctgtc

SEQ ID NO: 118113 - DNA, 543 bp, Zea Mays
atcaaatgttttcgctgtactcagtctggacaccaccaatctgagtgtagtaatgaacctctttgctacaaatgcaagggatttgggcacatggctgcagagtgccacatgcagaggaaactgaggttgtttggatttggtatgccagaacagggtttctttggtattgatatttctgaaaacaaagagcagatggcgggtctggtggcttctatccatgttttggagggggaacctaatgaggaaaaattagaggaggaactaaaaaatttagtgcaagaaaattgggaattcagggtgagaagggtggataagtttgacttcattgcctccttcccagataaaggatcccttgagacttatgctaagctcaatagcctggagatgcctatctataggttcagagttaaaattggaaaaaccagtgtggatccaaaagcttcagcagaattacagagtgtttgggttaagattttcaacataccagagaaagcacgtgagaaaattattgtgaaggaagtggctagcttagttggtaaacct

SEQ ID NO: 118114 - DNA, 614 bp, Zea Mays
aggtcattttttaattttgtgtccaaccctcctgctagtgatagtggtctgggtcttagagtgcgaccttctcctgaggtcattgaagctctggttgctcctcttcgtgatcttcccaatgatgagaggcaagttcacttttcagtgctggcaagtccggatgatgcagaaatagatgatgtactcaacatgttggctggagaatcttctgactcggcccatgctgaaccaatggttgttacggttatacaagatcttaacaaaacagtggacacccgaaagcttgagggtattcgcccaaaacgtcctcgccaagttagccgcccaactgcgcctgttgaggagaagaagaaaaagagacggcttcggcggctgtcatgcttggaccaggatgctggcccttctgctcctgtttgtgaagaagtaccagcagaggtctttactgaagttgatcccaatggtggtgtacctgttgaagctgaccccaatgggtgtaaccgtgcagaagcagatcccaatgggtgtaaccgtgcagaagctgaccccaatgggtgtaaccgtgcagaagctgatcccaatgggtgtgaccgtgcagaagctgaccccaatgggtg

SEQ ID NO: 118115 - DNA, 472 bp, Zea Mays
aaagattccaagttaaagggaagctagctccgcgattcgtcggcccctattctatcattggcaaaatagggcccgcaacctaccgctttcaattgccagaatccctgtcagatatccacaatgtgtttcatgtatcgcagctctgcaaatgcttgaaagtaccagagagccacctcgcagaagaaatagtccagattcagaaggatctgcagtaccgagaaaagccagtgaagattctcgattcagccatccgaaaaacccgaaactcagaagtaaggctttgtaaagtttagtggagcaaagagggagaagaggaggctacctgggagagtgaggactctttgaggagggaatacccttaccttttctcgaacccagtctgaatctcgagggcaagattcttttaagtggggtaggtttgtaacatcccaattttgatcccaaggttagaaaccctaaactcctaaccccc

SEQ ID NO: 118116 - DNA, 385 bp, Zea Mays
cgcgcacatattaaatttaattgtcaaagatggtttggaagtaatgggtagtgggattgaaaagattagaaatagtgttgcattttggtatgctactcctaaaaggcatgagagattccaagaaatagctgcacaagttaatgttgaatgcagcaagaaattgtcacttgattgcaaaacaaggtggaactctacttatatcatgcttagtgttgctatttgttacaaagaggcttttgatcgtttggctgaatgtgaaggagcttatgatttttctccaagtgaggatgaatggaagtttgctagtgaagtttgcgataggttgaaattgttctatgaaattaccaaattgttttctggaacacaatatgtaacagctaatgac

SEQ ID NO: 118117 - DNA, 434 bp, Zea Mays
tgaggttgtgtgcccccgcacacttggctatgcttgcgaaggttttattcctctggtgtgttttgttatgttgtgctggtgcgcatatagtgggtcttggcgcggatagtttggtgttgtcgtttttgcttttgttgtgctagtctggctgcacccttaggcgacttctgcgcggatagtcttcgcggtagacttcggtttttacgcacttgttgtgctagtccggctgcacccttgggcgacttctgcgcggatttgtcgacgatggggtggctagcgctgagcctcgcggtgacctcgtagtggtcgaatgtcgaaggccgtcgtcgtggtcttttttcgacgcatgtttttgcgggggattttgcacacatatattacatggctccgcctcgttaaaaacctcaccccccaggaggaaaagagtgcgggct

SEQ ID NO: 118118 - DNA, 926 bp, Zea Mays
gtgaaaattttgccgttggcacgttccacgactccgttggattgggggtggtacactgaggcgaaggcaagcttggtgccgatggagaagcagaaatccttgaagtcttggctgtcgaactgcttgccgttgtcgactgttagtcggacaggactctgaagcggcaaacaatattttgccagaagaatttctgggctgtcttcgatgttatagtggatactgcccctgcctcaatccatttggtgaagtattcaacggcgatgaaggtgaacttgaggttcccctgagccgtgggcaggggcccgacaatgtccaggccctagcgctgaagaggccacgtgtgggcgattagcttcgtgaattgcgaagggcgcccgagcgtggagaaaatttctgacaggcttcgcaggacctcgcgacctgatttgcggcgcaaatcatggcgggccagtagaaaccttgacgaatcacctttgccgctagggccctaggccctgcgtgggagccgcaagtcccactgtggacttcgcgcagaatttggacgccttcggtcttggtgacgcacttaagcatcggctgactgacccccttcttgtaaagttggccttcgatcagtgcgaagtcccggcttcgatgtttgaggcgcttggcctcattgttgtcggttggatgatagtacccctgcaggtacagggttattggtgcccgccagtcttcggtcatgatgaggttgactatgcggtgaccctcactgtcattggttatttggagcccctctgggctgcggacggctggtgtgccgatgacatggtagaacacgtccgagggcagggcctcgctcctggcggctgccttggccaatgcatcggcctcctcattcttggctcggtctacgtgttgcaacgtaaaacccttgaattgtcttt

SEQ ID NO: 118119 - DNA, 685 bp, Zea Mays
aaaaagcatcggctttagtgtgaaccccttgacttctcatggcccatataaatacaccaagtctaacgacagcattaggagtgagttgatgcatgtatatctcaaatttcttcagaaccatcgcaatcatcctatacatcggtagctgaagacatgcaaggaagaagcttctaaaaccacaacttcattatccttcggtttcaaagtcgtctcatcgcgagcaagacagactttaaccttatcaccaaaatatctgagatccttcatagcttccatatcctcaaccttcaaagtagattgacccattttaatataacttagcttcattggccgacctttgtattcttcttctgcgacctcagaaatcttctccaccgcatcctttggatcccctttggatcttggcactgcataagccctcgtgacttcagaaatttgtgcagtatctaaagcaactttatccctctgaatggccttcgatgatgtaggcatggctagtccagtggttgtggggattctaaccattcaaaaatgtccctcgaagctcattttgcgagcgaaggttagtggagagctttagaggcagaggaaaaagcagcaggtggatgcgggggcagtaaaatattgtcccactatacaacactcccccatttttatacaaagaccaagcgtgggagccaagaag

SEQ ID NO: 118120 - DNA, 589 bp, Zea Mays
cttagacagaggactcctcggatgaaggcttggattattttgttgcgttggatgtggctgcggcggagacttcgtcgcgtatggagtgtgccgaggatcttcctagtgcggatggagggcgtaggcggcgaagggtggtggggaaacatagtgtgggtgagttttcgcggagtggcagtcgccgtcgtatggggatggagcgtggccgtctctgtgtaaaccgggttgataaacgagaattgttgtccttgacggctagggcgagcatatgcgagggggatcttcgaaagctttttgagggtgaggaattgaggataatgctgtttaattacagggagatgggtatcattctgaaggttgagccgatgtaataggcgatggcctcggcgtgtgtgtaataggcgatgccctcgctgtgtgtatgtaattgtaatttgtatggtgatgtggcctattggtcgtattcgtacatttgtattggttcggctgcatacgtgggcgactttatgtggagtgtctttgtaatgagagacttcgattaacgttattccggctgcgcccttaagcaactgttgcgctgagtgtcttt

SEQ ID NO: 118121 - DNA, 497 bp, Zea Mays
atttttctttcattctgattcccatcagtgtttgcaaatcatctgtactgtccatccatgattgaatcaatgcatgcacttctccaatttcatgaaaaaatgtatgtgcagtgacatggagagttgtagagacacgaacagtcagatcataaaagtgctctaaaaattctgccatcttccttgcgttttcccaatctatctcatcaggatgaccaaaaccaccccttccttcagataggtccataacataactcatgtcttcatctgctagttttgtgaacaccttctcatacacaattgcagatttaagcataatatatgtggagttcccatctagttgggacatcagccttaagatatggattgttggttagcttctcttcctctataatttccttaaatttgagcattcttgaaccaccatttctaatgtacttcacagctgccctaacacgcttcactgataggtctacttcttttaggccatcgtgcacaat

SEQ ID NO: 118122 - DNA, 1734 bp, Zea Mays
ctgaatattatgtcttgtatgaactcccctgcctgggctgtggttaaagaagcaataggcttgtactctatccatttggtgagcttatcaatggcaaccagcacgtgggtatagcctctctgagctttcttgaagggtccaatcatgtccagcccccagcacgcaaatggccatgttacaggtatggtctgcagctgttgtgccggtaaatgttgttgcgttgacaagaactggcaagcttcacatctctggactaactcagcggcaacactctttgctattggccaatagaaaccagacttgaaaactttcccaaccagagttctggatgctgcatgtattccacattgtccggcgtggatttcatccaatagctgcttcccagtagttgaggaaatacacttcatgaggactcctgtcgcaccccttctgtacagtgcaccccctatgagggtgtagtgggccgactgtctcgcgatgcattctgctgcagccttatcatccggttcttcttcattctttatgtacctgatgataggctctctccagtcattagggtccgattctggttggctcaaggtgttgcattttttcgcctgatctgagagaatacttgggcgtgatacttcctggagactccgggtgggacctgggcccgactggatcctagctttgacaacgcgtctgctgctatgttgcagtctctttccatgtgatggaattccaacccttcaaacttgtcttctaattttcagacggttgtacagtacttgcccatagaatcaaccgagcaatcccaatctttatttatctagcttatgaccactagtgaatctccgtataccatcaacctcttaacgcccagtgatatggcgatgttcaacccatggatcagtgcctcgtattttgctgcattatttgatgctgggaataatagctgaaacgcgtacttgagttgttcacctccaggggcaatgaagaggatccctgcgcctgctccctacagcttcagcgagccatcgaaatgcattcgccatacttcagtagcctctggattgttaggaacttgttgctttgtccactctgatacgaagtcaacaagtgcttgagtcaaagtagtgaaggatatcccctattggaaacccggtgactactatgactttgtggtcgtcaaagtagtgacggagcttgcgagcggttagaagtaccgcatacagtagtttttgaacttagggatacttctttttagagggtcccagaacttcgctgatgaagtagaccggatgttgtactggatatgtgtgcccttcctctgcccgttcgactaataacgcggtgctcaccacgtgagtcgtgcaggagatgtataacaatagatcttctgttggttgatttggtgtggctcggcgtggcggcttgagtgctggtggcgtggtcaggaactttttcaatgcttcaagagcttcctgtgcttctgtggtccactaaaaattgtccaccttcttaagcaatttgtagaacggtaggccctttttgcctagccttgatatgaacctgcccaatgttgtcatgcatccagtaagcctctgtactttcttctgtgatcgcggtgcttccattctcatgctggcctcgatttttctgggttggcttcgagtcctcggtggttgacaatgaatccgagtaacttccctgctggtactctgaaaacacatttctctgggtagagcttcc

SEQ ID NO: 118123 - DNA, 1888 bp, Zea Mays
cgttagaattgtgggttgtgcagaaatctttctacttggcccataatgccatgaggccccactatttggcctagcgtggacccctatcattgtcacttgccttggccccacctaggctaggagttaaagcaatgatgtattggttgcccttctttttgttgtgggtagggctacatgttgggcctttgccatagatgcctggattgatggcgcgtggagcagagtttagcaacgtcatggacatcgctagtggccaacttatctacttctcctcatcgtacaaaccctacctaaaggcgacgatgatagaggcaggggtgatgcataggatgatgttgtgaacctagctggctgatgtgctggatgaagtcacacaacatctccctaggctactactgaacaacattgttgttaccctctgtgccacgttgatggtaggaatcgtagaagtttgctatgaattgccaatagaattcttcccacaaactaatatagttgatggtaaggctcatgagccatgaccaggtagacccagccaataccagatggaagtagttgaccattaccacctcactacctcctataccgaggatggtagtgttatagatcaagagaaattcggtgggttgatggacccatcatacttctcggggatgtgtgggcaaaagttgtgggggccatgaagcttgacatagctctaataaaataaagagttgctttctctaaactccaatctaggtggtgcccccagctaaagggggtagtacctaggagacgagggtgctccatacctgtcctctttgtgtaagtcatggtttcaagttatggcgacatccatgtcctaggatgcacacaacttgtcgtgcacacgacaaaggccgagtggtgcccacgactagtcagggttgctgaaggctagggcatctgagctcttatgggcaccctcaaccttgtagctagggtgtgggacaacgagtgggagcagcacaacgcctcatgagtgtattgcaccacgaaaatgaagataatgatatcaagtcaccactgctgctctacgtccggacctatgctaagcatgaggagttatggagttatgcttatgctatcgaaagggggcctaactgctagggctctccaaagtcaagacaacaatgaatattatcgaatgagtaggaagggcccacttctgctgctacaggggacgtccgctgcctagccatgaagcttggctttggatcatcggagcttggggcatatgagacgacctacatatgaagaggtatgtggcagaatgccatcgcatctgagtgacacacccccagctatgaagtagtattctagctccactatggcagagaccgaggtgttgggcctataggaggtaggctcctagatgtctgagcgcgggcacaacgaggatgtagctcaggagagtgggaggcgatgtctaagttgacgctacacacctctatatctagagtgggctcatgggtcaccatgttggtgttgcaacgacaagccaatcccccaacctagcatgccatctaacgacaagtgtcagttgggggtatagggaagaccccttttaggttcggtaagggttagagaatcactacaatatcagagccttgattgtaactcaaagatccgcagataaacaagtgagggtgtagagtaggaatgatggtgatacatggagacaatgatctagcgaggttcgggctctcggagcgtaatactctacatccttagggtggctagtttgtattgcttggatattgaaatggctaagtgtgtgtgtgggtgagaagggtccgcctctaaagcggttgcctgcttcctttatacaataagggagagagagttacaagatgcatggggtcatcct

SEQ ID NO: 118124 - DNA, 497 bp, Zea Mays
gagcctcttccttcacatcttggagaggctgggtgagcactcccccacttgactctttgaaccgatgcaatcaaccacaatagtttccccccaccagaagtgcacaactgccgcttgcgtaaggtagcgttgcccactccatcaatgagtacatcaaaatagagaaaagttctaccttagagtatctcgaacgtttctatacatgtgttattgcttgtttcgggggtggagtacatgtgtcattccactactgaagactttaggcgtctattagctaaggaagaggaaatgggatttccttgtatgatagggagtatagattgcatgcattggaaatggaaaaattgtcccattggatggatagggaattcacaagaggggatattggatccttgaccatcaagctcgagcaattgcctcatatgacttgtggatctgtcataccttttggggtgggaggatcggacaatgatgtgaacatgctcaaccactcactg

SEQ ID NO: 118125 - DNA, 351 bp, Zea Mays
cagatataccgaagacaacattcatcaccaagtatgggctatatgagttcatggttatgtcattcggtttgatgaatgcgctagcctacttcatgtacctgatgaacagtgtgttcatggactacctcgacaagttcgtagtggtgttcattgatgacattcttatatatattcccagaatgagcaagagcatgaggaacatttgaggaaagtacttcagaggctacgagattgccagttgtacgccaaacttagcaagtgcgagttctggatcagcaaagttctgttcttgggtcatattataaactgagatggactagatgtggatctaaagaaggtagcagcgattct

SEQ ID NO: 118126 - DNA, 343 bp, Zea Mays
aaggaagttgttatcagatggctattgatagcagtgaagcagatccactcgagattatcaaagttgtgtccgaattcccagatgtgttcccaaaggacttaccaggcatgccacccgagcgaaaggttgagtttgccatagagcttcttccttgaaccgcccccatctttaagagagcttacagagtatccggaccagagttggttgaactcaagaagtagatcgatgagctgtcagagaaaggttacatccggccaagcacctcgccttgggccgcccctgtcctattcgtggagaagaaggatggcactagaaggatgtgtatcgactatcgagctctgaa

SEQ ID NO: 118127 - DNA, 336 bp, Zea Mays
gttcacctccaggtgcgatgaagaggattcctgcgcctgccccctgtagcttcaacgagctatcgaaatacatccgccatacttctacaatctccgggttgtctggcacttgttgctcggtccactctgataagaagtctactagtgcttgagtctttattgcagtgcgaggtcaaaactcgatgtcgtgagctcccagctcgcaagcccacttggctattcttccgatggcttctttgttgtggagaatatcccctattggaaatccagtgactactataactttgtggttgtcaaagtagtgacggagcttgcgtgcagttagaaatactgcat

SEQ ID NO: 118128 - DNA, 496 bp, Zea Mays
cggccatcaagttacctgggatgaatttaagttggcattttgggagcactacattctagaaggagtgctccatatgaagcaagaagaatttatgaagcttaagcaaggtggagcagtatctcaacaagttcaatcatttgtcccagtacgccattgaccaggtcaacactgacctaaagaagagaaattgttttatgaggggccttaatgaccggctacaatagaaaatggccacctgcctcgacctctcctacagtagggctatcagcacggcgctggcagttgaagccaagtatgcaggcccaggcaagtcaaagggttatggaggtgataggtccaaccaggggcctgaaaagagacaaaggttggtgattcgaccttttaatcaaaaccgttcttcacctcgtccaccctcctaccactttaaacaacctgtattcatccgccctactactgcccccacctcaacaactcagccgagtgcccttggtactcg

SEQ ID NO: 118129 - DNA, 471 bp, Zea Mays
ctgccccagtgagctccgctaggtaatcacgcatccagtgtacccgcccgtgtctcagattgcccaccagagagctctaatttagagtttccccccaaatccattctctgcgccgtcgtgaacgccgtgtcgtgaaccaccgactccaggtccgttcataccccccttgcccttgttccagcacccttggatgctatagatgcttatcggctcggccaattgaactagaccacgttagatcaccgagaacacctgggattgtcctcggtttgcgccatcaccgtgaacagagggattctaacccaaatttgcgcaattgattgagggatgagtgtcgccaggggtagaaataggtgttaaccgagttagggcttcagtcgttgtgcatcacggccgatactaagcacgccggagggcgcgctcaccgccgttcgacgtcggggacttgggtttgtaaagaaatagaaatag

SEQ ID NO: 118130 - DNA, 394 bp, Zea Mays
aaattatacaaccaaggatatgagaaagtttttttaggatacaaaatataaaggcattatcaaggagagaagtagagagacaaagggttcaatatattgaggtagatattgtccaaggatgacaatacaatggcaagaaaacaggagtagaagaaatcaaaggttatataataatattatgagttagaaaacaaccacaatataacgtcgtctttaccgatctagtcgaaaacttagcactatagaactatcctatcaacctaaccaagaagaatggcaatagatccaagagatctataatgaaaacttcatgcggggcggggataagacagagaatggggcatcttcaatagcttctaaaggatttcttcaggtagacttcacttcaagttcc

SEQ ID NO: 118131 - DNA, 282 bp, Zea Mays
attccctgaagtctttgctatcgaacagtttgccgttgtcgattgtgagttcggacgggtctccgaagcagcagacgatgttttagcagaagaatttttgggcggtcttcgatgttatggtggagactgctctggcctcaatccactttttgaaatattcaatggcaatgaaggtgaacttgaggttcccttgagctgtgggcagtggtccaacgatgtctagcccccaacgttgaagtggccatgtgtgtgcgatgagcttggtgaattgcgaagggttgc

SEQ ID NO: 118132 - DNA, 1714 bp, Zea Mays
agatttggcttcagacgacatatatgctgtattggttttgctagtattctatccagtttttttcatgggaaaaaagttaggttgttgtatatactgaataaaagaagatcatttgcattgcattacgccactaccccaatccaaatggcaacggccctaccgaaactgactaataatagagtgtttcttctgggttgctccattcacggactgacaggccatgggggcctcaggtaatctctagtcttagccaggccttcgccgtgtcatcaatttcacctctgttgcgtcctcttcaagttaacaggatactataagttagctctgtggcctaacgcacattcaccagaagtcttcacaagaacaagagcctccactgaaatgatggaacctgttggcatctcggaccacaatatcccgttcaaacagcttggaaaccagcttggtgaactcgtggcagtccccgcacaccctgaggttcttggctatccttataggcatgcctgggcgagtgctgatcaagccaaatgctattgcgatcctctcgctgtgcttatgtagcatatctatcttctcctcttcgctcgtatcgtgaaggacaaatcttgtgtcctccacgtacccaccttctctgcgcagcatttccgttatctcggaaagcttgagatggattgcctccgagtctcgatggcagtaatctcctgaggtgaaagtgtggatgttgttccctatctcaatccaactgcaagctggattttttctcaacccccgttctgccatcctggttctagtttccttggcattgttccacttgcccatctcagcaaaaacatttgatacaagaatgtagttgcctgggttgtcaggttccagctcgagaagcttattggctgcaaccacggcgaggccatagttcctgtggacacggcatgcgccgagcagcgcacaccacacagctgattttgggtccataggcatagtcttgatgaactcgtaagcctcctccgtctggcctgagcgtccaaggatatcaaccacacaggcatagtgctcctgccatggttttaacctgtacttgctcaccattatatccagatagtgtttaccctcctcgacgagcttcgaatgactacaagcatacaacagagcaagaaaagacacatgatcaggagtcagaccagtctgcagcattctcttgaaaagatcaatggcttgcttgccatgtccatgcatcccagtagcattaatcattgctgtccaaagaaccacatctttacatttagcccgttcgaatactctgatagcatagttcatgcttccgcaacctgaatacatgtccacaagggaactaacaacaggaccttctataggaaaattccttctgataaggaagccgtgaacctgttttccttttgtcagcgatgacaaaccagcaatagccaccagaatactgactagtgccacagaatcaggttgaatatttgccttttgcatctcagtaaataagaaaacagctccatttaaccgtccgttatttgtgcaacagtttatcatactagtccaactaacaatgtcctttttctctactctctgaaataaatttagtgaatggtcaaactctccacactccccatatatatctatcagtctattctccagtatcaaatcaagcaacccatttctaatggcgtaacaatgcacttgttttagcagc

SEQ ID NO: 118133 - DNA, 286 bp, Zea Mays
cctgggtccattttccttacacacgggacgccttgcttcagacctgtaaacgatggtataacatctgaagtttttatgatactgctctttcctagtggccttcgtctgataagataactcgtgaatattgcaaaaacaatcagcatccagttccaatccctagctccttattgcccaaatgaaaaccccaaccttaattagtgcgttaggggtgagttgataaggaaaacttcaaacttcttcaaaacttcaactagaaacttgtgtaaggggaaccatagcccag

SEQ ID NO: 118134 - DNA, 886 bp, Zea Mays
gttccttctccagctttgtctgctcttgttggtctgcaagagttgtccatagcaaattttgatcaggctctcgaggatatggttcctgaagatctgctatacgagccaacagatggtggcatgatggacgtttgcactaacattccggatgtggggttagagttatcccgagcagcgtctcgtgcctcgtcgaccttggagtgtggttttcagaatcaagaagctggtctaggttgctccattcccatggaggtgactgagaatcctttagccttagaggtggctgctgcagagaacccggtccccaaggatggtgctagcggttacccagcccccgagggtgttgccgataatgatccggctcgactgggcagcgcgagctacaacccagcccccgagggtgctgtcggtggtgatccggctccgatgggcaatgtgggctacgacccagcccccgagggtgtccgagcgggctccccttctcatacctccatggatgtccacgtcgggtcttctcctccacattctgattatatggcagcaacacgtgcttcaaatcaggaagtcaccttagagaccgacgcacctgacgctagagttttgattcctgctggtgatgttgagttgatccccaatgatgcttttcagattgcttcgattgatattccttcgtcgagtcaccaactggcttctcatgatttggggcttccttcattcttctccaatcttcaggtaatttggctttttttcccgatctggctatactccgggcgaaatactgtctttgcactcattcgttttcaatatcaggctttggttgacgagatggctggtcagctgagatcacagggtgcctctgtcccagaaagagctctgtctctgacgc

SEQ ID NO: 118135 - DNA, 522 bp, Zea Mays
gggaaatgactcaatatgggtgattatggatcgactcaccgaatcagctcactttatgcctgtcagaactacatatcgaccaccaaagtatgcggacatttatatcgcagaaattgttcggttacatggaattccgagaaccgttgtgtcggatcggggacacaattcaccgctcacttttgggaacaattgcagaaaggtttgggaactaagatcgtgcacagcttagcttaccaccctcaaacatcagggtagactgaaaggctaaaccagatccttgaagatatgctaagagcctatgtgctatcatcaaaaggatcgtgggaatcatggctaccattggccgagttttcctacaacaacatctaccaaagcagcatcaagatgtctccattcgaagcattgtgtgtaagaagatgtagaacacctctcatttgggtcgaagccggagagcgaaggtttaatggcaatgacttaattgtcgaagccgaagacaaggtttgagttattcgtcaaaatatg

SEQ ID NO: 118136 - DNA, 443 bp, Zea Mays
tgttttgtatttggtagtcctttgtgtggacgtattctatttgagattctgtggttcaataatgaacactatttgcccatgaacgatttcaaaaaaagagtcaaacagatcaccctgtggcctgtgcgtgtagtacatagtatacataacatgatggagccctgaccgtaatttgtttcacaagtggaagatctctctctggtcatcatcatatacaataaaacacaacacgattgcttcggtaagtggtgtctatatccgagtgatcgcctcaaccaagagaggagtagaagctagtaaagatcttggcattgattgtgactccgagttcatatgtatatcttcaatggatggaccagggcgctatgcgcagtgttggtatttaagcatgttcataccaaatctctagcgctgctaaacttaattgttgggctatatacgga

SEQ ID NO: 118137 - DNA, 355 bp, Zea Mays
gtaaatactttgtttaattatgataataacgtcttatagggaccaaggacaacagatacattgtataggttcgaagtaagagtgtctagagcatacgccagagctatatgaatagatttgaggaatcaatgaaatacgccactgcatacaaaatattaaaggacacagacggttgtgataaagattggatcgtacaacatacaaaatggtctaataaaatcgtgtggggacaacatcaattcaagataacagcggacatagaagctggggagtatacatgcgagtgcaaacagtgggaacatacaggtttgtacatattgtgttgagtaaaatagtaaatttgcatgctaaataa

SEQ ID NO: 118138 - DNA, 651 bp, Zea Mays
gacgaaattgggtggccaagcgggagcatacgagttaggtggcctactaatctacctgtggtgtggtgcaacagctgacatgacttgccctatgcccctattgcgctccctcgatcgttcggcttcgagcgcgatggataggatgaggctatggatctgtgatggagcggtgcagcattggcatgggaaaagggccgggcggggaggcggtggagagtgcgtcactatcatgaagcgatagttaattgtgaggacgaaggagatgtggccgtatgagatggtgtggaagtacgtagaaacgatgctaaaaccctcaacacaagaaattattcctttggcaccgaggatgggtgtgaggatggcgacacgacgatcacctcctccagcggagggaggggggtgagctgctttccgttgggatgcacgaggacgacaagcacctccccgatcgggcattttactagtttggttaattgtccagtaacaagcatttacctttttttactcttggttaattatttggtcattagtatgttttcatccctgacagtacaaattcaaccgaggattcaaaattgtaagtagacctaaagattcgaggttccgacactcgctttggtgatgctgttgttggcagacattaaggatttt

SEQ ID NO: 118139 - DNA, 475 bp, Zea Mays
tgggcagacgaaaatgaaacccgcatgtgtgagagagcatgaacaaatgtgtgatgagtatcaatgtgaggaaaggagaggtggcaagagctccagctaggccacccactttttaaaaattttttgagcatgaagtgttcttttttggggagggtgggggggcatttcatgcttggaatcatgggatcatgagtgaactgagctgacaggcacatgatgtgcacttgggagtctaggaaccggtgctgggaatgtggttgccgccacttgggaattagaggtggacttagttatgatgcgtcgtcccaaagcccagttgctttgttcaaggtgcagtgctgctggattgtgaagcaaccttgaggaggagtactgctaaattttagtagcgcttgctgggttcacaagcatgtgcgtgcagttcagactcagctagctagacctgcgctgctacgcacacgtgagtgggtgggta

SEQ ID NO: 118140 - DNA, 523 bp, Zea Mays
ctgaattgcactagccatggcgagggtgttcttgcggtgggttagagcagatttgggcgaaattcgaaattcaagctctcggttgcaagattggaggcaatgctgggaggtgtggtgcgtgatgatcttgcggagcttacggagggctcaatttatactaagcgagagcggtggccgggaattggagcgatgacgcgcggcggtcggaggagggaaagttcactggcgcgtgtgattggtggcaaaccccatggcaaggccttaggtaatagaaggatggtttgttgcgatcgactgagacgtggtaagatggttgacggcgtggcataactgcgaagaacggcggcacgccggtgatggacatgcgaccacgtcaccggtaagtggatgagcgacagagtggctactgtgctccaagatcatccacggtgagatcttttctccaaaggattgttatctgtgtttagctgggcgagaatcatggcgccggcgtgaatccgagtgcacgatcgccaacggcgag

SEQ ID NO: 118141 - DNA, 572 bp, Zea Mays
ggacgttccagcccccgagggtgcggctaaagatgatccagccgtcgagggtgtagctgaagatgattcggtccccgagggtcctaggaccgggtctccctcagatgtctccatggatgttcatgttgggtcgccgctggttcggtctgaggaagctgtggtgatgagttctagttttcctgctagcccaactggcccggccaccttagaggtcggtggtcctggcaccaaggatccgatgggcgcttttggagccgagatcccactgggcgtcatgcttagcatgaactacaatcttcctttgaagtctaaccctgctcctgatactgcttctatcagtgctttttcgtctgatagtatctcgatgcccccggccctaggatttcccttgttcctttccaacctttaggtacgtgcacccctaatcatctacccttatcattggatgttttccctgttgactttcatatttatagagtatcctagactcagtatcggctcagctgaagtcatgtggcattcttgttcctaatcagatttcatctctatcctagtggaaccctcttcttctt

SEQ ID NO: 118142 - DNA, 301 bp, Zea Mays
tttttccttctaatctatttccctctctctctcgtttgcattgaccatgtctcattgaagctaagatttctcaccattgcatgtgttccttctccatgcaccttcatgcactgaaatttttgagcggtttaagtagttgagcaatattttatcattcacatgcctcaactggagcactcatgcatgcagcggtcgatcgaaagtgctgaacctttccatcaaccatcatgaggtcatggcttgcatgagatggagcgccttggctgtttctttttttattacagcttcagctaggtgcggg

SEQ ID NO: 118143 - DNA, 467 bp, Zea Mays
agccactagaggtcggaaatattctatttgccaggtactcttgtactagatctctaatgctgatttcggctgccaccactttgaattctacttcggctaactggcatggggaaccaagctgcatgtggcacaagggccttgtcattccgaagcttaacttcaatggactcatgaccatagtcattagcttctcccttttcttctcgtctgcttttatgtagaaccattcgcttgtccaaccggtcggccacttggtacgatagccaattaccggggccttcgtatctttctgatatgcgaagttgtagcagccgaagttattatgaagaccatccgctctgcccttcgtttgatagtgcagctcatgcacttggcagaaagcttcgacattaggactcataccctggcttcggagagcccatatgtagacttgtgtaacgattgcattaggtgtcaactgatgaaag

SEQ ID NO: 118144 - DNA, 409 bp, Zea Mays
gatggagttatccaatggattaaaggcgaagccgaagccttcgaggagattcttagtgatagaggggatttttgtgcttttgccggtgcccgtggggtcatgtccatttcggaaaaggttggttgtgatcatgccaaggctgtagctcagccagattttgtcttttcggccaacgatgttagaaacccttcggtcgaagctactacactaggtgggaaattttattctgaagtatggctgaagggtggccgagaaatagctaattaagccactagaaaaaatgagaaagaatctcatgacgccttagaagaggctaaaagagttgaagaagctattgaacgagccagacttataggtatatcctttataggttagcttcataatttttgtagcttcggtactaacacat

SEQ ID NO: 118145 - DNA, 819 bp, Zea Mays
ctgggatgctagagacctaccccacttaaaagaatctcgccctcgagattgctgagcttgagaaaaggtaagggtactccttcctcaatgtgtcctcactctcctaggtagcctcctcttctcctctcctccactggaccttacagagccttacctccgagtttcaggtccttcgaacggctaaatcaagaatctttactggcttttctcgatactacagatctttctgaatatggactgactcttctgcgatatggctttctggtactttcaagcatttccggagctgggatacatgaaatacattatggatgtgtgacatggattttggcaactgaaggcggtaagcggctggccatattttgccgatgatgggataggggccgacgaaccacggagctagcttcccttttgcttgaaatcttttgactccacacattggggagactttgagatagacaaaatcaccttcctcaaaactgagttccctcctcctgttgtctgcataactcttttgccgactctcggcttcgagtagcctcttgcggatcagggcaactttctcttctgcctctttgatgaaggcagacccttctagggtcttttctcttacgtttgaccacatcagaggggtttgtcatcttcttccatacaaagcttcaaaaggtgacatcttgatgctagcctagtaactgttgttataagagaactctacatacggtaatctggactcccaatctctatcgaaagtcagcacacaggctctcaacaaatcttcaaggactttattgactctttctgtctgtccatctgactggg

SEQ ID NO: 118146 - DNA, 360 bp, Zea Mays
attttgagttgagccaattataagaattaaagtatgttttttaagcaacaagaaagattgagaaggcttagccaaaataactcaaataaatccccaaattagcccttgatctatgaacccttggagaaattcagattactgaatttctgaaattcagacctcttcccaaagatcatcttcgttctctgcttttcaaaactcaaagccaggagatccaaatatcaaagtcgtgccaaattcccttgaacacattctgggaaagtttgaactcaaaccaaattcatttggcatggttttggcgcagtttgaccttgggaccaggcactctgacactggcaccatggtgacgctacaactccc

SEQ ID NO: 118147 - DNA, 573 bp, Zea Mays
aaaaaataggatgctccccccagagactttggagagatatgcccacacaaatctgcatgcacaagttctaagcccttttctgccctatagctggacatttttggaaatggagatctgtgtagcttcccaagagcacacccatcacacactttctctacccttgttactgttggcaaaccagtgaccatgtttttggattttagatcactcagggctttgaaatgcaaatgcccaaatctagcatgccacctccaggaaacatcatcaacttgagcttgcagacaaactggtgagtctaacccaaacttagctaggtacaatttgttcccaactctaggtgcagagattagcagtgttttctcctgatcatacacacacaatctcccattctccccaacatatttgaaccccttttcttccagctgtcccaaactaacaatgttacttttcagttcagggatgaaatacacatcagtgaggaccttgtgacccttttggcgatcttgaatcaccactgaacccatgccttggattctaaccttagagccatccccaaactttactgagccttta

SEQ ID NO: 118148 - DNA, 886 bp, Zea Mays
aaaatatgttacttggtaaaataatgctaccatagcataggcaatattattgcgaagctaacgcaactggaatggagtaaagcggatttaaatcgcaaaagttataatttttctaagcttttagaatttcttttatactaaaaatcattttctttcattaatccgtgaatttcctagggttgtggacggctggaaaacatattcaaaagcttggggttccatgtaaaaaacaaaggatcagtttgtgattatgtttgaactagatagggatggccggttgataatagatattcatcagggtctctatagcaaaactacaaggcggcttaacctggacttggttcgagccatccgatcctgatcctaaagcccagattagatcggaccagatctaaaatggtacacaatatcagccgctagattatgaatcgtcggttcagatttaaatatacgagatcaccacggatccgtccagtcgcatcgacggcctagattccatttcacgaagagttacgctaacacctaatcatatccgtccgcttcaagatcaaaggctccctgaccaaccctggataacacctccctttccccaacagctcgaggtggcgccgcctagggccatggcggaggttcgccggagagtggcgatccagcctccaaataatccctcctgaatccgaaaaggtgtagaagatagcagagacagtggggaacatgatggagacgatcttacaggcaatagagttctggggagccggcccacgacgacctgcggcttcacggtgttgaagggacttcgatgagcaattggtgtatctccggtggatctcctcgcttggaaatgccacaacaactggcggataatactggcaatcctccctaatcg

SEQ ID NO: 118149 - DNA, 342 bp, Zea Mays
tcgagaattcagaaaacagagaagcggcggaggagaaaagtgagatttagggttcggaactcaagaaggcacgtcggcatgagtataagttggttccttaattcgggcattacctctaaagtgccagatcataactcggaaaagtaaggatcgcaatcgtcactcgggcattacctctaaaatgtcggcaagctttcaagcacacgaacaaaaagcaagcaacggtggttaagtggagtaacttcgtccttcattcgtaaagggggattcaacacaaacttgaagtcgaatcattatgagttggcctcttctacccctggttactacattacattacattac

SEQ ID NO: 118150 - DNA, 410 bp, Zea Mays
atcaactctgctgccaggaatcaaagagctggtcgaagagccagcaacagaaaagatagaagaagcaaagactgaagaagcgaaaacattagaagttttaagtgcttcagcaaaaattgagtcagaaaaaagccagaagggtccaacagcgaccccgaaaagaaaaaggatggttaatgtgttagatgttttggagacaattaaatcttcgagcataactccaaagaaaaccattggaacttgtgaagtgtctactgaagcctttgttgcagaaacttcgaagcaacaactcgaagctgaagctgggccttcagagccctccaaggaacaacctttggaaaccgaagaaacaaaggttacaaaggcagcattggaagccgaaaaaataaaaatgtcagagccaatttcgg

SEQ ID NO: 118151 - DNA, 696 bp, Zea Mays
gtctgactgttgaagctgtagttgcagactttgtttttaagaatattcagccactgaaggacagagtgtacccggcttatttgtatagtggtgtcactgattcaacccaggttaccaacaataggattcctgctgtggatttggtaagccgactagagatgattcttagaggcaaagtatcaaatattggtgctcatgttgcatattctgcctcgaatctgccaccttccaggtcttttttcgattttgtgtctaatcctcctgctagtggcagtggtttgggtcttagagtgcgaccctctcccgaagaagttgaggctctggttgcttcacttggtgatcttcccaatgatgagaggcgagttcactttgagatgcctataaacccaagcgatgcagagataagtgctatgctggacatgttggctgaggattcttctgactcggtccctgctgaaacaatagctgttgcaactatcccagagcctgaaaaaaccttgaatgctcaaaaatctgatagtactcgcccgaaacgccttcgcctggcctgtcatccaaccgctcctgtcgaggggaagaagagaaaaagagacgacttcggcgagtgtcgtgtttggaccatgatgctggcccttctgctcctgccgctgaagaagtacgagtggaactttttactggagctgaccccaatgggtg

SEQ ID NO: 118152 - DNA, 285 bp, Zea Mays
tatattccatgaattccccacttttgtgccatccatttgagtaagccgatatgatcctggccgagtgacctccgataccatgaatggcccttcccatagcggtgacaatttgtgccgtccttctcccgctagaattcgacgaaggaccaagtctcccactacaaaggatcgatgtcgtatagccttatcatgatagcgccttagggtctgttggtatctggctgactgaattactgtattcaatcgctcttccaccagcacgtcaatatcttctagcctggtagc

SEQ ID NO: 118153 - DNA, 812 bp, Zea Mays
ttcagttactgaatttgtgaaaagcataactcctaaacgatcagacttacggctgtcaaattttaacaccagcaagataataaagttatctaccacttttctatagcacatatctacagaaaatacaatttagttcatcaaacatacagcacagggaaatcactgcgtgcagtccagaacagcaattaataaatttcagctcctatacaattcaagaattgccgctttctagatacttgaattattctaacactttgacaattgttagagttaaaattaccaagtgagaactaacaagtagacttactaatttttatacaagttatttcgcgctctagaattaccatacataatcagcaaacacattcaccacaataatcaaacctggtataaatttgtatatcgattgcgcccttcacacactaatttgtatttttacttagacatcacatgaacaccactaattttacccgcgaccataaccatgcgcgtctagactgaaacaagcaaatcaccgtgattacgagcttaaccaaagccatctaacagtcggctaactagagcaacgacatagaccgctaaataacatacacgtcggcttgcctattattatcgcaatccgagactcaacatacactgccatatttttataaacacacatactcacaagtattttcgcacatcgaccaatctatacgaatcgtaaaccactgatccccaaatcgcaatcaccatgcatttatttcccaaatcacgaacgcatacatgtttatcacacgagccgagtatttcaataattatcctaaaataac

SEQ ID NO: 118154 - DNA, 549 bp, Zea Mays
ggggctacacacacgttctaatcgctgtcaaaaagttaaccaagtggatcgaggtgtggcccatcgtgaagatcacctccaaccaggccgtcaggttcgtcaccagcatcatccatcgcttcaggggacctacacagtttactgggaacacattcctagaattttgcgacgaataccacatccatgtagactgggccgctatggaacacattcctgtacttccatggacgttcacgcaggatctcctccacactctggctgcatggtggtatcccaaactttgggtcaggaggtcgctttagagggcagcgtccctgccgaccgagtgctgggctctgttgaaggcgctgagctgatttctgttggttcattgcaaactgctccgggtggcggtcttacatctgcctatcagctgatttctcctgacttgggaataccttcgttcttttccaacctccaggtactgtgatgtgttttagcttgatttttacgttgtatgaacttctgtcattatactcacttgttctccttatcaggctttggtggatg

SEQ ID NO: 118155 - DNA, 521 bp, Zea Mays
ttcaagacaggggtattatagggccgttcgggggtaggtagtccaaagtacagtccagccccctttcaccaaccagttccgaggaatattctatgtaacagggtaattacagcactgtgatccgtataggtggcacatactaaataatacacacatacattacactggtaggtgggcctcgtagacgtgtccttcggtggaccaacgacgagcttgtcacctcgtagccttcgctgccacctccggagtcttcatggctcagcgcccttcgctctctcccgatgcacgcatggcgtgggttagtagaggctttgtggcgaaggccttggtcgatgttgattgtagcagggcctccgtgtgacttcatcctccgctaaggtcaggcgaagagtcataggcctcctcgatccaagatcgtggtcctgcatataggttagtaaaggtgacgcaagtcaaaggccccttcgctctatgatcggggtcatgtccggcctatgcccaacaatgatgacgacggctcc

SEQ ID NO: 118156 - DNA, 637 bp, Zea Mays
accgaaggagcgatcaagttatgaatgggctagctataggggagggaagcgaacgactcaaatggagagtgagctaattagtggatcgttgagaaaaagttagatcaaaactatatttttattagatttagtcgtacctactatataagattttttattttgatgtatatttaaacctagaggatataaaaattaaggtgggccatgggcccatggccctctttgcccaccccttacatctgtcactggtcttggtcaggattagggacaacaacgaccacattttagtattattaaagaaatagatgaaataaaggtgaaatattgttttaaagaagttgttcatataagcttaatcttttaataccattatgaagaagccactctaaatgagtactataatagcaaataacccattacatattaccaagtattttatgtcgtcacatacctactcattgtacacttttaagcaaatcctagtgcatattttattttttattaaataggatgtcatgtcagcattgttgataagttgacaaataaatatggaagaggtaagacagtttcatttgaatggaactagtattttgcaaaggggaaggaactacatttaatctagacaactataacattc

SEQ ID NO: 118157 - DNA, 1975 bp, Zea Mays
cggggaggtgcacaggaaagccacggtggtcgctcttctggccaagggcagttcgcggggcgctatgggtacaggaggccgctcggttctttcaatggccatcgtggcggcttcgatcaggctgggagaggccgatccaattccaacctggttggtttttctgctggttcgcgtggtcgcttttctggaactggaacttcatcgcatctggggggcagtatccggggtggcaggggcctcaatcagccggtctctttgccatcagtttcagatgcgcagaaattggctggggtagctgctccctccactgaccttttggctcaagcagtggcgctgttgagccaggctattaacccaccgacgcctcagatttcctcggctgctgcttccgtggtgcctggtcagtcacatttttctttggaagataaaggaaaaggagtgtcggatgagcatcttgtagccaagcctcctgggacagtgaaaccagcagcgaaggagggcaaggcaccatactgctacaggtgccttactaaggggcatgtcatgaaggtttgcacagccaaactctattgtgacatatgtcgatctgaagcacataatactgagagacgtccgcagtttcggggagataaaccatctgcattaacgtgtggttacgctgtggatggtttgggttttttctacatcccttttgttcatcagcagattcagaaggtcgaagctcaggctgcttctgtgagggtctctgatggcacgctttctgaggctcagatcatttctgaattggaaaggctggtctccagcaagtggaattgggaggttgtgaaagccggtcctaacttgttcaggacatttttcccgtctcatgatgatctagctcatatgttagaatggggagcggtgcataccagatacaatgcagtgatgaaaattgaagaagcatcggggaagtctcttgccaagtcggaactcaagaaagtttgggttcagttcattggaattcctcctgatatgttgcagttcaagttgatttgggcggtaggttcagttcttggggtgaccaaagcggtggatatgagttttacaaacaaatataatgttggccgtcttcaggtttgcgtgcttgatcctagcatcattccacaatttgtggatgttgtgattggtgattttctatacgaactgcagttccgggtggaagagaaaacgttggagaataatcctgtgccgatggatatggatgattatgatagtggagaaaataatgcgaactcatcaaataataatgccccagataatcataaagggggagctgctcctaatgtcattcggtcagctagcaacattgaaggggaaccaaagaacaaggatgtgaacgaaaagaaagtggggctgctaggagggcaagagacagaggtactcatggacagtgagatagagggatccgaactggtaccaggctcaggtgctccagatttgtcttttggtgatggggccgtagttagcaagatttcaagtttgttaactcctgaaggcttagcacttgcggcagtgccggaggcagtggttggctcctctgtcatgaagagaagtaagaggagagcagcatcaagcgcaggtgactccattgtgagagcttccaagcttaaggctgcatggaatttggacactgcgttcagtgaaggtatggtgcactcatcttctgttacaaattttgatcacaatgaagttctttcaaacctacagtcattaggcttttctttccataatgaatctgttgggttacgcaagtttgtagaatttctggttaataataaaaattctgggcctagtttgcaggttagtcatgatgtttttagtagagctatagaaaaaggcgagagagagttgttagaagaagcagagcttgataagctcatgttaagtaatctctgtagcgtggttttagaggaggtgatggacgcacacagtgagc

SEQ ID NO: 118158 - DNA, 466 bp, Zea Mays
gggacacacaaggacactgaaacgaaagagcagagggcatgagcggacctggagtaggatggccatggcgaggttgtaaggtgtgggattttggaccaaattgggggaaatccgaaattggggcttgctcgtgagtaattggaggcacgacttggtggatcagtgcttgattaccctacggacccgtcagtgtgctcaatttatagtgtgcttgagcggtggtgtttaatttggacgaattgcgctggcgaccgagaggggaatgagtcacgacggcgatctaccgtggcaatcgcagagcgactgaactacggcggtcactggatggtcactacgactcataccgatgcgataaacttcctaaggcatggcgccctcacggtgaatggcgaacacgccggtggtagccgctcggccatgtcgccgatgtgcactgatgaaccatcaagcacacagtgcatcccag

SEQ ID NO: 118159 - DNA, 444 bp, Zea Mays
ctggtgggtcagaaccatcacctttttgctcttcggctcagctggggtggctgaagctgcagtctttctctttttcccttgccctcgtagcgggtaatggtaatcagggtatacgaagccaatcgcatcaaataccctattcaatctattcttgccccgacccccgaaagctacagacaaagcattatctttggccttggagtatgccccaagtagctcatcactggtagcttcaatacacttcagccagtcattgtctggctcatcaaacttctccctaaatctgaaggtatacttcaatcggaccagaccaccctcactggactcggcggtggtctccttcggcatatcctagctctccacaagcggccaaaccctgaaggctacatgctcttgaatcaaatcccttgtgctaatgaaggcacaaacaatgttaaaggcctt

SEQ ID NO: 118160 - DNA, 572 bp, Zea Mays
atcagacaatggcgtggtcggcgacgtgctcgcagtagacaaagaagaggatgacattgcggtggcgcgcggttttcttgatatgagctagatcaccggcggagaaggagcaaagagggtaggcgagcagatgtaaaactagggttttccagcgcgagctcgagcaggcaaaagccttggtcgaggccagcgttttatatatcacctatttttctcttctgccagtgcagacagtaattcttcgcaaagacccccacagatggctgcccgccgtatgaggagacgaccgagacatactttgcgagcgctgccacaacatttggtgtcaactgatgaacttgtacctcgaacctccgcaacacctctactacaaaccaatgcgttgacatgcgaagacaagcaatgaaaaaagcttcaaaaacaaccaattcaccctctgtctcaaagacctcttctgcccctggagctcgcccgacgccattcccaaaataacctagctgctgcatctccaacacgcgacctgaaaatatcctcgaggtcccgaactcgacggtgtggccgggctgcagttc

SEQ ID NO: 118161 - DNA, 932 bp, Zea Mays
aaaagagtgcgggccggaatgatattgtttggtgaattacaagggcatgttagccctgaggattcaaacaaaaaatttgtggagattatcgatattccaggaatgctctaggtcctcgccggatggcgtggttagcctgtacgcgctgggggacgccttcgtcttgacgatgaaaggaccctcccactttggctccagcttgccccgtgactctgtccgagttgttcggacgagtacgaggtcccctttgtcgaattctcttgggacgactgcgtggtcgcgccaggccttcgtttgagcttggtatttgttgagagcctgcagggcgaagacacggtctccgttgatgaggtctttggaggttggttcatctacatcggggacggctggagcgcttgtccgtggtgacccatgtttgatttcctgtggggtcatggcctccgatccgtatagcaggcgaaagggagtgaattcagtcgcccgacattcggtcgtgttcagcgcccagactgcttcaggtagcaggtcggcccatttacccttgtcgtcgagaagcattttcttggtggcagtgaaaatcttgtcgttggcgcgctccacaacgccgttggattgtgggtgatatactgaggcgaaggctagcttggtgccaatggagaagcaaaagtccctgaagtcctggctgtcaaactgtttgccattgtcgactgtgagctcagacgggactccaaatcggcagataatgttttgccagaaaaatttctgggcagtcttcgacgttattgtggatactgcccttgcctcgatccacttggtaaaatacttgacggcaacgaaggtgaacttgaggttcccttgagccgtgggtagtggcccgacaatgtctagcccccagcgttgaagtggcgatgtgtgggcgatcagctttgtca

SEQ ID NO: 118162 - DNA, 1098 bp, Zea Mays
aaccttattaaggaattttgcccggttattcacaagaatcatgagagctagtcggtggaagggggacggttcaggcgactgacgaagatgtgccatggtacagtgccccgatggatcagaccgccagctcagctcgccaccgttgatcgccgcccggattcgtgcacggtatagacggataacgccgggaaaagggtgaatcgtacgtggcgccatctcctgtgctcggccggagtgattcaccggcggccatcgcgtcaatccttttctgccgcggtgtcctcggcaccgtgattcttcctcactgtaccagttctctacgtgcttggcatgcgcttgtgatggtattcgagccgtgaggtgatcgccggacctccgcggctataaatagcccatggttcgcggcgaggctcggtcatcacacacatactagtgaaccaaatcgagtcaaattcgcactgccctctccacctttgcccaaatcgtttgcgcacggtgaaagcatagtttcttacggccgtgtagcctcaatccccgcccccaatttcacccagagccgccgcaacgccgtttttccccaattcggtcgactgcgccgccgtgaatcacctgctcgcggccagatgattccaggtccgtccacgccctcgttgttcgtgtttcagcacccacatgtgcttgtgatcgttacctgcccagcccttggagcttgacttcacctaatcaaccggaacacctcgatctgagttctgtacccgcggtcaccgtggtcaggcacatcctggcccgaattagtccgattagagcatgttctagggtaaccttgggtcggttatgcctcccctatagctagacatgacgaccatcgccggtcatggccagcccgtgcggcgtctgtgatgaacgacgagcgcaccgtggcaagggacgttgtggagaagaaatagaagtacgagggtatttctgcaatgtgtcagcgacttagtgcaatagtaaataaacctgcttcggtttagctaaaaagacgagggcctctatgcaaagtagccagagcgcgcgggcgcgcgacccttttcctgtgtcgttgggccgtctggg

SEQ ID NO: 118163 - DNA, 881 bp, Zea Mays
cggtataagcattcttatatttatgcccggctctaactataaggatactttaactctgctactagcttcaaatttcaacataccccctgccagacgctaggataatattttttcagatacttgccgttgagggctttagataactttttcccttgtaaatcttcaacaaaatatgcgtttccatgtacaatgcctaccaccttgaatgggccttcccaattctacgaccatttgacgaatttattattcttatatcctataggcaaaatcgttttccataccaactctccaatctgaaacgatttcttcttcacctttttattataagctctcgccactctcagcttttctttttctatttcccttaaggctgttaatcgactttcaatatttccatcaattctgtctagcattagctcaccatatacctcagccgataaagaattctgacaagctactctgcaagcctgtaaattcacctcaataggaagcaccgcctcttgtccataaaccaattcaaatggtgtcactttagttgctccatgctgagatactcgatgagcccataacgcctctgacaacacttcatgccacctcttcggctgatctgcaattttcttctttatcaacctgatcaacaccttgtttctagattcgacctgcccattagcttgcgcatagtacggcgacgaattcaataacttgatccgcaaagatttgcaaaatctttaaattggtgagacataaaagcagctccttgatctgttgttaattttttgtggaatgccaaatctgctttcgctgtccagcaagcgacgacttaaataagccaccacactctccttctcgctatgttcttgtataagaacagcaccaatcac

SEQ ID NO: 118164 - DNA, 402 bp, Zea Mays
ccccagtctggagacaattctcgctatgcaggactggaaacaaactgccccaagtgtatatgaaatttttggtactactacagttcccaatgatgctcgtatcttctttgtaatgattttattcaagaaacttgcgtttcataagcattttgcggaaatttcataggtcgttacaactgatatctgacagtaccgaactagtaaattatcattggctagggtggtggcttttggtgccccgtcgggttgctaatcgtcgtctggttagtgaagcttttactcggccgataggggaaatacattgtattaagaaaagcttaatcggagtcttgattgagcccttttgaatatttactcttgttttcaacctctctagctcaatccatctcatgtgcacacgac

SEQ ID NO: 118165 - DNA, 934 bp, Zea Mays
ttgcaaaagggtcagatccagcacgtaatcattgttgtcgaatgacatcaatgaaccgtcgctaatactattaagcgttttatttaaatagcaagtagaacttgtagtatttagctggctttcctgtttaatatgagcgacatcagttgcaactggcaacatcttgttgtccccaaatgatttgcagtttattttgtgcaaaatggtttatatttttccaaagtctatcaaccagttttatgttaattgctggcaggaatttgatgcggtagtaggtgacataacaattttggccaaccgttctctatatgtggactacactcttccttatactgagtcaggggtacgcatgctggttccagttcgggaccagagacagaagactgcatggacattcctagaacctttaacagctgatctatggtttggaactggatccttcgttgtcttcacaggttttatagtttggtttatcgagcacagaacgaatcaggaattcagaggaccgccagccagtcaaattggatcagtcttctacttctccttctcaacacttgtatttgctcatagggagaggattgtgaacaatttatcaagaattgcagtagttgtttggctttttgtggttctaatattgcagcagagttataccgcaagcttaagctcaattctcacggtagaacagctccaaccaacagtcaccaatttagatgaagttatcagacgaggggattatgttggctacctcaatgattctttcatgcctaaccttttgaaaaggttgaaaattaacgaaacaaaaatgagggccttcagctctcctgaggagtacaatgacgccctatcaaccggaaaagttgccgtcattgttgatgaaataccatacctcaaagtgtttcttgcgaagtattgccacaactacactatggttggg

SEQ ID NO: 118166 - DNA, 360 bp, Zea Mays
gttcggttccacggatgcctacctgaattacgtcactgccatgggggctctcatgctccaatcttcatggagtccactccacaggatcagaattttcgtcatgaaaaacctgcaggtggtggactcgattcagccataatcagttcgggcacatttatctccttgcgatcatgccttattaagaatctcatgtccagatccatcgatgcctgcacgcatggggcatggcgtgtctgcaagcatgcacactctactgcgcatatctgctgccaaccaaactctcccgcgttgttcttcttcacaagcaacgcatgcagctctcctcagcgcgcctatataaacggccgtgggcatgcagct

SEQ ID NO: 118167 - DNA, 484 bp, Zea Mays
ggggcagcgatggtgctgaaatccttcacgaaacgacgataaaatcctgcaagtccaagaaaactccgcacttgtgtcaccgtcgatggcgttggccaactctgaatagcatgcaccttggcctcatcaacctcaataccctgtggagtgacaacatagccaagaaacgatacttgttgggtgcaaaaggtgcatttatcaaggttagcaaataagcgcgcggcgcgcaaagcatcaaaaacagctcgtagatggtcaagatgttgagataaacaagtgttgtagatcaatatatcatcaaaataaaccaccacaaattttccaataaatggacgcaaaacctcgttcatcaaacgcataaaagtactaggggcattagttaatccaaaaggcatcactaaccactcatacaagccgaacttggttttaaaagtagttttccattcatcgcctaatttcattctaatttggtggtacccactgc

SEQ ID NO: 118168 - DNA, 474 bp, Zea Mays
caaatgtttcactctaggagtgagaggcatgtaccaaagctgtttatgtgcaacctttatcaccaccttctccccatcttcatttacaagctccacgcacctcgacttcccacattttaagcatttctgctctcttccatgttccttccaaaaaagcatgcagttgtcctagcaaacatcaatcttctcacactccataccaagaccttcaagcaatttcttggactggtacatgtctttggacatcatgtgacccgtaggaagaacctcgctaatcaaatccatgagctctttgtaacaacgaatagagaatgcaaacttggacttgattgacattagtcgtgtcacgaattcaagaacggtcacatcggtgtgcccatgaagaggctcttctgatgctttgaggaggtcgaagaacttctgaacctctggtgttggtgaatcatgatgatctggggccaattcaggctacag

SEQ ID NO: 118169 - DNA, 792 bp, Zea Mays
tagaagtcctttaatctacttatattctggtaaaaaatatcatctacttatattaccaaatttgcagaaaatgacttgctgcatccttgtcaatgtcatcattgaatatatatctagtgctggaatttcatttggtttcacctgtgtggatttatataattgtgctttttttttgttttgcagaaaccaataggcatagtttcacttttggatgaagcatggtaggattttcatactgtgttatcaaacacttaagagttcaaaattctaactcctttctagtcttgttaaacagcatgcttggaaaatcaacacatgaaacttttgcgatgaagttatttcagaacttaagagcacacccgagacttgaaaaaccaaagctctcaaagacggatttcaccctgtcccattttgctggaaaggcatgtcctgtgaatcacatttcttgtaagctattcttagtattttgttgctctgactaggttagagcatgtggcaatcaatggcctactttttgtaggtgacctaccaaactgatttatttttggagaagaatcgagattatgttattgcagagcaccagaatcttttatcttcttcaaaatgtttatttatttctggtctctttgcttcacaccaagaggatccattgaaatcatcttataagttttcttcagtagcttcacgatttaaggtataatgctgcacattactgtttcctttatttcctctgggcatattttttttgtttttctagatttttcctttatttactgtttctgggttatttat

SEQ ID NO: 118170 - DNA, 567 bp, Zea Mays
cagcgaatgcccttgtattttcatgaaggggactatgtctacctgaaggtttcaccaatgaaggggtatcgcgtttcggggttaaagggaagcttgcacccaggtacattggtccattcttagtacttgagcaatgtggaccagtggcatatcgactccaattacccgaaaccttgtctgctgtgcataatgtgttccacgtgtcgcaattgaagaagtgtcttcgggttcccgatcgaaccattgaagtaacagatgttgtccttgaataattcgaattgcgcgaaatcttgcgcgaggttttgatccactttattcttcggcacactctgtaaaataataaaatcaactgtgtttaggcatcgggtaaatttttatccgagttcgactaaaccagtattgtctcagaataatgtatacgatatctagttcgtttccgtgttgcccgaaacagtcacgaaaactatccgaacgagaattagtcagaactcgtcgactacggttttcggtgcaaacaattcggctcacactcgtcaaccgtgaaatcgagtacgaggatccaaaaat

SEQ ID NO: 118171 - DNA, 502 bp, Zea Mays
tgaaaacgaaggccatctccattatccagttggcaaccgacaggtcctgttccctcgccgcccgttgtcacctgtaaagacggcgctgcgtgcgtagaaaaaaaaaaggcctgggagggatgcccttgcatcgcagagaggatctttcgacggccatcgaggtatcatcatgcctgggatgcccttgcgcgtcggtgtctgaaagcgcaagcatgtcgagcctggagcggatgattccatggaccttttacccatgcaggaggtgacctgtgtgtgattatactaccccgctcgctggttgtatgttacatgttccttgacgatgattgcaagcaaacgttctgaaaaatctttggtgagcgttgcccgaagatggcttcgtcccgtaatcggctatagcgcacaccgaaatgcttacattctgaatcgtgacagaaacatcaaaggcataaatgatctcagcttgcagcgggcgctcgctgagtgccagtccagttagtcg

SEQ ID NO: 118172 - DNA, 1954 bp, Zea Mays
gagaaagcagagttgggactcgtgtgtgcatctgggagatggtggagggataaggtgggggtgagtaagatgggctgggctctttaatgggcctttttgtctaactatagatccacaagtctcatacttattttatttaatgtgatacatgtatacatataaaatacataggaaccgccttgaaaacacctaggtgcgcctaggctcgcctaagctcaaggcgaatgatcagtgcctagactgccttatgcaatcttgactgttagcatgcagtgcactatttttctgtatataagtgctactaatgtgtcaagggtcacatgcatcttacttttatgtcttgtagtgctagctctagttgctatatgtgtcccactcatttatagtttgggcatggaagttttagggtgtgattggttgccggatgagcccaacctggctcggcccccagatccaggctcatgggagcctggttccagtggtgcaagggggtcgtgattggttgccggatgagcagaaccatgcccaacccagcagttgattggttgcacagttgcattagcaaattcaaacacacagatgcaagtagagtgattggttgcagctgcatacaagtggtatggtcaccactgcatacaagtggtgaggttacccaaaccaaatgatcaacaagagcacaactatcagtacaaactgagagagaatcaagccatctttccaactgaaaccaacacgatcagtcttaatgactgattgtttaaaagcagcaacaacttcatcttttgagcagtagcttttgtagcatgctcctttgaaaccatgaacttgagcatgacaagcatcccaggaatcaaacacaccaacttttcttccatggtgaacaacataccacttcatgttggctatataggaagaaaaaaacatcattgacattgcacatttgctcagatcataagtagtataatgcagcaagtcattggcatatgggcatttgctcagattaaagaagcaagaaaagcattcataatagttcatcatcaagacagcaagccaaatggttcatacaggcacaagcaaaatataaggtaagtgcaagtcagcaggatcaggttatcaacaagcaaaatataaggtaagtgcaagtcatcccttaattcaccaatggcatacaaaacttctttaaaatacctgctaactgtctccacagacctcctccaactttggtgtatgaccctaaaacactggttgtggccaactacatgaaggaacatggctacttgttcctccacactgctgtggatactatctctaagcaggttcctactcttaagcaactcacagagctgaaaaaagggggttcttctcatgcgcaacatgttaacacactccacatcattgaagttgtaaattctattcaagtttctgtgcctctcttcatccattgcactcattggggcataagtgatcctaggtcgtgccacttgacactggacaagtctagaaacaaaaaatgcatacacaacagcaacaagtccagctgccctcactattaacatgcgcctctcatcatcatgatccatctagatgcaaaggaacagagccaagtatcacataaaagctcaccagcagtaacatgatgcagtactagatcataggcatggcaacaaaataagctcagatctagggaccaaatcataggcatggcaacaataagctcagattaaatgctataaaatcataggcatggcaacttaagctcagatctagtgctaatcaatcatagacatggcaacatataagctcagatcattcaagaaatgaagggggaaaggggaggggaaggaatggcgtctgttataccgaacagcaacaggaagaaggacgaagcgccgagaggaagcagctacaaggcgtgaggaagcagcaatccggatgccctgtcaagaaatcaaaa

SEQ ID NO: 118173 - DNA, 407 bp, Zea Mays
gccaaaagcaagtagtttttccattgccgatatttgtcactatctggacccgaaggtctaaccaactagtgaaataatgctgcatgtccttaacttaaacgtgtgatataagatgacacaagtctttattctggtttaggcaagagaagactctacttctagcagggggagatgagacttatattacttgcacctaagtgcttgcagtagggaatacaagctgagcaggagaggagagaatccgaagtccttggggctgattgaggctaatgccaatatcgtggtggaggggaaaccgtgaagtgttttgcctgcccttctaaagccgtagactatcctatttatattctcaagagtagctgcctggagtactggagttggctgcgcattatgaggaggtgtaaccg

SEQ ID NO: 118174 - DNA, 507 bp, Zea Mays
ctgaaatcaatttgatcggtgacagattggacgtctggctagttgaggcagatggttctcagttggacatcaccctgctctgtgcttcaaagcttctgtagattagacttgcgcttcagtggccacatttggacttccttccatctcagccgatctccttcttttgtcgtggtacattcattgtgtatattttgtggatatcacttcttcagaaaatctttgaaaattctgggtaacacacccaatgtgtgtgcccaaggggtgtcttggtacgcagagtgtttatcgcgctatcctagagtagtaacttgatgtgactgagaggtgtaatcatttgcctgagcagttgacttaggtccaaccggtgccatgttacgcgaagcggcgcctgttgcctgactcattttcaggcggcttgaattgcttattgaattcttgcgactattcggcgagcggggtaggaagtggacggtcacccctggcctctataaatagcctgcttgccct

SEQ ID NO: 118175 - DNA, 316 bp, Zea Mays
cccctctagttctaagaaagctagaatgtgcaaagtgcaagttattcaaatacttgatgcacaagtgtagggggagcacacataacttgcgtcttttgagactaattgtatcttgagcgatcttgtgtagtctcaaggtggaaaagagaagatgagcaagaaatggagcaatcaggactggggtacctctgtaagtcaaggaattggtatcttaagtcgtgagtaattgcatattcttagattgctcatgctctataaaatttggtgatactagatgcttatccttaaatatcatggagctatgataataaatgat

SEQ ID NO: 118176 - DNA, 279 bp, Zea Mays
actaggggtcggcttccataactttagtggttcagaacaggctagaccatgtctgatcaactgattaagtttagtccgttgataaataatacctccctccgttcagatatacgatgataaatctagatacacctataaaacacacatattaaagattatatgaatcagccactttcccaaaacgaacagtaaatcaggacaggggagtagaatatataagccggctggcacttgcaccgatatccccgcccgcggctgctcttgcacggccctgttcca

SEQ ID NO: 118177 - DNA, 336 bp, Zea Mays
gcggaaaaacgtattgtggttgagtgcatcaactttgagagtgaaatagggggaatgttcacccaatctctaagatttaaagaaagagactcctctacatgcggtagagaggagggtaaacacatagatcattgaagtagccttacatgagtgggttgtggaaatattcacaatcccaatcaatgtagatccactcttgtgtcattcgcccccctctcgttgaagacttagaagcaagcttcaccaccgcatccatcatagtttggtgtaacttgtggtagtttctacattggtagttgcttagtcagaaacgacttcacctagccctttgggctt

SEQ ID NO: 118178 - DNA, 363 bp, Zea Mays
gcttgcagtagggagtacaagccggtcgggatagggatggatcccaacttccctagggttgattgaggcaagtgtcaatatcattgtggaggagaaccgtgaagtgttcgcccgccttcctgaagcccctagacgcctatatttattgtctcaaggagggcctccaggaccaccaggatttgtcgcgtaggggagaggaggtgtgaccaagccccatgtagccggtacagtctgtggtatggcccttttactcgttgttgacttatgccgtgaggggatgtctggttcctgtatttgcatctttaactacgtagggcgctgaggccagagccggggctcggtcatgtacccaagcctgtctgt

SEQ ID NO: 118179 - DNA, 294 bp, Zea Mays
gaatctcaggtctgggcttaggcccacatcctctggccgcattccctctgcacttgataggagcaggagttcagatttcagcaaacccatgcacgaaacgtgtgcatacatgctgttcttcagagcggaacctcgagaatgaaatcgtccatgtcttttgtgttgtattcgattgtgatttgtttcttcctcaccctcactctaaagttctcttgcttgcgcttgattctaactcatttgtgttgctcctgaagtaatttcacaatcatatttagcaactctaacaagaacttc

SEQ ID NO: 118180 - DNA, 411 bp, Zea Mays
gccagacaacggctctggccacgatgagccgacagacgacccctcgatggaccccatttggagcaagagcctaaggatggagagcctggaagtgaagacaggagaacactcacttaatcttttgaaaggaagggaaagcacccatccccaccttaagtaggagtagaccacgcccaaatatggcatgcctcgtcaagagatagccaccacaggggcttgaaaggtggaaggacaaacatcgcctgacccgagaaaagcccccagggggaaaaactcttccccgggggctcagggctactgtcgaagatacgattcccggtccctagggcctgtcaatcagcaatcacactagggaaagggccctgacatctgaggcccatcggatagctggaggacaataggtaacgtcta

SEQ ID NO: 118181 - DNA, 603 bp, Zea Mays
cccaaggttcttccctatctccggccgccgcacatcttcattcaaattagtggccaccgcccgctagcactataaattgagccctccccaagctgcataacatcatcatcccacccagccaccgttaatcgctggcagtccttcgctagaactcgcgaatttttgattcgccccaaatccactctccgccaccgtagaatcaaactcaccgcggtcagccctttccaggttagctcatcgctctctctccctcgtttaagtactctgatggctctgtgatacttaccgagtcaccaatttgaactgagagaccaccaatcatcgggaacgcgatcaaacgctcatggccttcgcggttctcgtgggcaggatagaataggtcaccatttgtgcaattaatttaggggaaataccctctaggtcatgaatttggtgtagtccgaagctgggcgctggtcatcgcctcaatcggccggtgcagtggctcgccggagctcctccgcgcgctgccgtcgtcggggacctagcgcggtaaagagatagaacctcagggacctcggtgcaagttgtcagtgactgatacaaatagtgtctgaacccatt

SEQ ID NO: 118182 - DNA, 755 bp, Zea Mays
ggttgcgatagatgaactctgagtcttccgcttgggcgccatctcaatcttgctggcgagcggggcggaagcaatatcgcaagaaagcagagaaggtctggattcaaaaaagcaagactagggctcagaataaagaggcatgcgacggcgcagtacaaatggggttttcccgggccacatgccatttctaaaaagtgcccagtcatcactcagtcattacttctaaaacattggcgtgtcatgtcatcactcggccgttatttccaaaacggccgacgtggcccaattaaactcagttgttatttctaaaaacgctgacgctaccagtcttcacttggccgctgtttccaaagcgaccgacgtggcctgttatcactcggctgttatctctaaaacgccgacgtcactagtaaccgctcggtcgttatttctaaaacaccgacgaggcccgttatcactcggctgttatttctaaaacgccgacatcaccagtaatcactcggccgttattcctaaagcgacgatgcggctccaaaggactcggctgttacctctaaaacgccgacgtcgcaaaaaaggaaaaccactcggtcaccacctctgaaaatactaacagtaaataagtcgttttttctctacgaatatgcaggcaaatctaaaacgcgactcggcgattctaagtcgttactcaagcattacatccaagaacaatagctacattaagcataaatacgatcgaccgatcgatgggaaag

SEQ ID NO: 118183 - DNA, 534 bp, Zea Mays
aactcctaggaaggcctcgcataggtgaacaaacatggcaatttgaagcacagagttgggattcagatgagtcaagttgagagaatagaagttaaggagtctacgaaaaaagggagaaattggcaaacccaaccctcggatcagaaagggcacgaaaacaactgcttcgtgggtgtcctctgtcgagacagtaatcccccaccagatccgccaagagcataactctttgggcaaaataacaccgacctcgatgaggtgaagaagatcaagttctgagaaaatggaagcataattacagtagaaagggagttggctgttgggaccaatcagagggatatcaggcatggcgaccccctgtttcctcatcttgggcgccatctcgatctcacaagcaagaaggctcaggaatagtgcaggaacgagtgggagctcgagaggctagaatgtggcggaggagaaacagagttagggttcacgcaccaagaaaccattgatagagatatatgtgcacacgctaagtcggggcaacatagc

SEQ ID NO: 118184 - DNA, 510 bp, Zea Mays
ttaggttgttatgcaggtacttttgtgaacattagttggtcggatacttctggttaggctgcgacgatgcttttatgtcttgtgaacagcagatgtttttacgttagtgggcttaaatatgatcttttatatgttatgaagttcttcttttgttaattgcctacattatttatgcataccacatttcttaatattccgccaattcatttaagtttatacttttggttaatatgtctataaacttattggtatcctgatcatttttatactctttgttattctgttattcacgaagcatattgctcattcatcatatttctggtcatatagtttacatattatacgattatcatacaggttatatacgatgttttattactatcaattatgcaacattagtaatgaatatacgctatatttaatagatttcaacaaccaactgtatataaatcatttgtgactcatgcaatgtttattgcaaaaaaagaattattcgtatcacatacaaca

SEQ ID NO: 118185 - DNA, 447 bp, Zea Mays
gggatagcgaaaatcggctcttgtagccgcttctcttgaggaagcgctgggagtatggatgattgctttggcaggccaggcagagatggattggtctcgtcgttgagctctgtttgttcggaatcagggcgttgcgcagtgataattccgtcgcatttgttttcttcacggtaatgcaaatcagtcggcgagcacgtagatattttgggcaaagttctgcactactagtttctccacttcacagaagttttctaatagcatgtctgcatatgtggcgttcccgtctactaattatctaaccaagatactgatttgggggaaaacgatatgtagccttgtggcatttttacggctttttcaatttgatgactgggccaccatcccatccatttggtactctaattaagagactagttcagggaaaacgacaggtagctttgtggctct

SEQ ID NO: 118186 - DNA, 1368 bp, Zea Mays
cggcttggcccatcctcattatttagcgggtaacacaagtcatcgtttcttatggcatttgaatcatctaaacgacaacctgacaaactccgagttattgggcgatgaccagaaggaatttgcttgcggggcttatttcttttgaaatgagttgaagcagaggaagactggctagcattgctatacttttcagtgatccctatcggcatgtcagaaaggacttcgaatggattagaagaggttctcttttgagttgagaagggagcacgtgatgatgttgaccttctcgaccgtccaaccaacctttcatgaatagggcgagcatggttggatgtcgagttactagtacatcccaccctactagccatagagtcagctggaagtgccaactctcttcgtttgttggcagcacgactagcgcgcacattaacagcttgtttgacatacttcttgcgttgtgggtttctctttacccaatcttggtactctagccattgtgcaaatgcttcagcacatcgcatgatctcaccattaatatcatctccagacattgatacccccgggagtaacttattcaaatcttggcatatggttctttccaaggaagcctgcatggctcgtcttgccgcatcttgaattctacgacaactttcttggtgttgagttaaaatcatatccacaatggatgaacgatgtgcatttgtcaacgcggcactgtcaaccacaatgaggttagctcgcgcacgacggttatttcgacggtggcggcggtgccttttcggtgacaaggaaccttgcacagaaggttttgaaaccataatttctgatgatatgggatcagaaagggttgtagttgggtccacatgacctttcctgatttcatcattggtgagaccaattccttgccacctaagcacacgtccatgttcaaccaaaccgggattatagaccggagatgggatgaactcaggagcctcaactcgtagctgagttctagtatgtgactcattttcagaggatgatgtattatattccatcaccacttctttccctttttccatggactgttgaagaacctccttttccaccatggcggcctttcccttattacagagctatggatgttgatgttgatctaccaataccacctcttcatttggaccaagtgtagttgttattgtcactgttttttttggtggtgccccaagtatgcttggagcaagtttggttgaccgcacccccatcatcttgggaggtgtcaaagtaggagttgtctcttttggagttgatgtagaggaaacccttggctctacaaacttggttggaggcgcttgcttgatgcagataggccactccccaagggtagtt

SEQ ID NO: 118187 - DNA, 722 bp, Zea Mays
gctttggacacttattgaactttgctaatctacactcgatttttgctaatccttgatattaatttttggcctcccaagctccacatactttcttctgatcaatacagctttgaccttgcaatcgcggtttcactccctcttggtaagtatcacgaaccagccttcgattgtaccatcctttgctttgtatttcctcagacacttgtaagagcttggtaagatacattagagcgtgttcctgtgttccacctgagaggagcgtgtagtgaaattattagggataaccttcactgtttgtttcctatttttgtgtttcgatggcaggcgacgaagaagaagcaaggatccctacagacttcgatgaatgtgttagccaccaagatcttgaggcaaacaacaagctcctgaaggagcaaatggaggagacggtccacaagtcagtgcatgatgccttcattgacatggaccttggcaagacttacgagaggctagatcgacgattgtccgagatcgtcgacaaacttgctgtgttggagatgcaacaacaagcactgccaccaccacctcctcgtccacgtcttcctgatgatgtggtgtttcatgcagaaggtaattatgatgaagcggccaccagagatttatgcctatgtcaccgtcttcatcaaaacacagaaggtatgccacaccgccagcaaggtaataacaatcgtgctcccgacgac

SEQ ID NO: 118188 - DNA, 533 bp, Zea Mays
cttggacctgatgcgacgacgaggctgaaactgtgtgcaagtaatagtccatccatcaatgtaacactcatgtgtttcttcatggggctgggcatccttgtgatgtttcctttttggaatactttgcaattcatcgaatgacagtgcattaggtatgagagactctgctattagttgttcagggggagacatctgtcttttaatgccagaaaataaaatctggttcttctgttttgtagtttcactttcgtttgtactgatctggcgacaaggaattccatagtactcacaacaacatgttccaaggtcacttgtcggttggtttggttgtgcattcttttgtgtcttgaatgtctgttcatcaactgttttatttatagtgttgttttgacttgccaacacaccacattctttgcatttagtgacatcacttgtagttgacattccaaggtctgacatctgtatgggtgtggaagaatggaagagacaaaagggttgagcacagacagattatagagagcagagaaaaccca

SEQ ID NO: 118189 - DNA, 361 bp, Zea Mays
taagcataatgtcattgactgttcggcggtaaagttcatcactcatcaaaacatacttgaaagctgttcgccgaatgttcttatctgttttgatattaggatttcgtaaataattaagtataggtgtcctccaatcgcttgcatcggcttcattgtcagccgaatcgattaagagaacatttctggtaaccccggacggtccggcgccatcacgcggacggtccgcgacctgggaatttggctctgcactggttatcagattttcggtcttgtgaaatttccctctctttatctgataacctgatgcatcttgtgccaaatcgttagctctatgattctcaactctagagatatgccgaat

SEQ ID NO: 118190 - DNA, 379 bp, Zea Mays
cagcgataactcctaatttataattccgaattgagcgcataagtacttgttagaaaggtatgacaaagctctacataattatcatactgtttatcactaattaaccacgaaaaatatccaaaaactgctaatactactgctgtacgcccacctgcagaaatctgtttctttggacagccacatacccgggttcaaacggcgatatctcctaatttataactccgaattgggcgcataagtactcgttggaaaggcatgacaaagccctacttgattctcactgtttatcactaattacccacgaaaaattctcagaaactgctagaactactgctgttcgcccacccactaaacttccggacagcacctctaccaattc

SEQ ID NO: 118191 - DNA, 630 bp, Zea Mays
ggcttatatgctctaggaaggtagagtccgcgaggaaggtggcaacacgatcacacgcggattccggactggttgcaataaacccaggtgagaacgacatcggagagccaagcgtgttatgcgctcagggccccacatgtcaaagactgagacgacgacgtgcatgatgaaaaacaaaaaggctagcgcatggggtgaggccgacaagttgcttaacttttgttactctatcactttgttgtatacacttttgactaaaagtgcatagaacttgaaatcacccaatagggcactatttagggttttagggttctatagggttttgagtgttcttgggtacatgtagcacttaagctctctaagcttaacttttcttgaacatttctaccaacttgttgagatcatcctttagtgctcatctcacaagaccacaagcttctaatccttggaggatgacactcccacctagggtcaatgacctcttttaccacatccgatcatcacccatgcatcacatcacatgtttgttttgaaattttagcctagtggatgcatcctaggtgtatgatacataatgaaatgccaatgcatatgatgtcatgctaaagttttagttctcgtaacaccagg

SEQ ID NO: 118192 - DNA, 1058 bp, Zea Mays
cgattggccagatatttacgtctcaataatgattgccacatcccttcttcattgagaagtttatacaaccatttgcttaagaggcatttattatgaacctctaaattcaaaatgcctagcccgccaacctccttaggttgacaaattacatcccatctagccagcctatattttttcttatggccctccccttgccagaaaaaacgcgatctgaaataatctatcttctccagcactccttttggtaccttaaagaaagacatcataaacatcgctagactggtcaacacagaattaattaatacgagacgccctcctactgacataagttttcctttccagctgctgagctttttctcgaatttggcctccacggttttccaatcaccaattgtcaacctacggtggtgcataggaatcccaagatatctgaagggcagacctccacaactacaaccaaacaaccgtgtgtacctcccttcatcctcttttgccttcccataacagaatacctcactcttgtgaaagtttattttaagaccagataactgctcaaaggcacataatatgagcttcatattcgttgccttttccagatcgtggtccataaacaaaattgtatcatcggcgtgttgcagaatggaaagccccccatctaccaaatgcggcaccaagcccttgatctggccattttcctttgctctattaatcaaggtagcaagcatgtccactaccaagttaaagagaataggagacagcgggtcgccctgcctcacccctctttgagtctggaaaaaaggacccatgtgatcattaactctaaccgcaacatggcccccttcatgaaagaatcgatccaactacacaaggtacttgaaaaacctttcatacgaagggattgttgaacaaagctccacttcaccttatcataagctttctcgaagtcaattttgaaaatgaccccatctcttttcttcgtatggagctcatgaatagtctcatgtaagaccaccaccccctccatgatatttcttcctggcaggaacgcagtctgcagt

SEQ ID NO: 118193 - DNA, 686 bp, Zea Mays
cagatagaatccatgagccacgtgttctctaggcctctatcctacatcaatagaaagacatgaggtgagcaaatggcacaacactggggttacaggttaggatactaagaataataatagtcatgtgacatttgccctaaaaagggttagggaaaacaccaaatatccctagtcccgaaggggaaagtgatcaccacgagaaggaaattgtggttcgctggggaagtaagaaccaaagccactaccacaaggtccttggccatatgacacatgactagcacctcgctaggcacgaccaccctgtggcctcactacatgatgcctagcagcaagaggcaaagcacctctaggcctcacaggacatctctgagcaggacaatcatgaacaccatgagagggacgattcatgttccttctgctcgactcagaaccccccactcatctctcttactcctaaagcaaaaggcaaccaaatgactctctctctctctcacaatagtcacagtgaaatctaaaatctcacctctctcttaggtgttgtctatttgtgagttttgggctttttgggtggctgagggccttttggagggggacactagacatgtcgagaagggtgtgaagtgtgttcctaagatggttaggttttggacatcacacttatttctaaggaggggctctcacaggct

SEQ ID NO: 118194 - DNA, 601 bp, Zea Mays
gcacactagcacaggactacatgttgtacaacacaagtgcacaactccatgtctccataccatagtccatagtccatacatgtattgtacggtgtacctgttcaacagcaaaaggcagacaacactaattcagtctagagatttcagcagaggaggtttgatgtaagcgctactaatgaaagtttagatggtaaaaatattagcagatggtcactagtcagaaattcagaatggtgagcaaattggcgcagaacaaagaccaggtgatttcaatcaggaatatctaaatgaaatccctaacgaaagagaaacacacatctcaaaccatggtcgacacataacaagtgattctgtttcataccaggcttcagttcctgcttcataccagcaaccaaaaaagatgtagatgaactaataaatagcacacagacaacagcaaggtaactaataaatagcaggactataccagcatgaagccaagccatgaactaagatgtagatgttccatggatggtgttgcttcctgttcctgtacctgttgttgttgttgcttcttgttttccttttcctttaccaccaaattcttcttttagttctgcaa

SEQ ID NO: 118195 - DNA, 564 bp, Zea Mays
tttggatcatcacattttgacacataggtcattacatcaaattaggaaaatacatatggctccagtcgtattgccctggtcatgacacgcaggtcatgaataattcattaatatgcatcatatacacatgatagccataccgatcacaagatgtccagcaaaaacaggttagacaaacacatttctatatgttcgccactacagcagatagccacggcggtcccagggcggcgccctgaaaacctcacaaaattccatgcattgtatgtatggaaattccactaaaaatctcatgcgattgatcaaaaatcaacccaaatccgagactttcgacccaaagaagattacactcatgacgttgatctgttacgtcaatctactggttgtgcatgcagttagccccgatggtgattctagccgataggggcaagttgcgcacataacagagaaggacgaactgatctcttcggtcataactgaggcaatctacttcaaacccttataaccaattgatctaatcaaaccgtgcaacaagtagattcatctcatgaacctagatccaga

SEQ ID NO: 118196 - DNA, 624 bp, Zea Mays
atctttgaaataccgccagagaccatgtatccaagtatgccatcaacaacaacgagaaaaaatcaagcaacatggtgtacttcctacttcaatgcagctacaataatcagcgacctagatccaagtatgtttctgatctggactctgaaagtctgaacaattccaagtcgtactcttacaccattcactcaatgccatcttgcaggctataagtcttgtattttgagtgagcagtgtagtatactaataaaaaaagcacaaaaaaaggaaatgtgttactgtcttcctgggtatcctccattaattcagaaaacataggaaagctgctttcaacgcaagcttataccttctggaagcatattgttacttgggagttgtggaaacatggattggctacagaatgcaatagctgacatgttgctctgtatctgattttatgttaatgtgaataattagaagagcttctattaatatatagaagtggggaacagattgcatcaaccaataaccagtttatacagtacagtgctacatcgttgtgttggggccagcaacacatgaggaagatgttaacaagatactggtaaccataatatcgtcaaagcattgttatactaaatagtc

SEQ ID NO: 118197 - DNA, 327 bp, Zea Mays
gtcgttgcatagtgtttatgagtgaaaagtttttcgaactgtatcgaattatcttgaccatgttttcggatttttttcgggaaccttcaaaacgtttcttcaagtactaaaatatgaattttagtttttctaataataactaaatacctaaaattcaatatttgcgaaaactacaaaatcttggaaaaactcgattatatatatgtgtgttcctttcgtcgaactcgttctatgatttgtgtcattttcgcgaggtcgtcaaaccgcatttcctcctcgtgaacgtttgctgctcgcacacctgttacccctttatttcatctacca

SEQ ID NO: 118198 - DNA, 486 bp, Zea Mays
gttacttgcccaaggggtatcatcaccttcctaggtacaatgtcgttgaggggtttgcctattattgtgtgaagattcatgataacaagttccaccatttctaatgtgtgggtaaatataatatagagccccacatcaccatctatgagaacttcgataagttgaacttctactactattgggtccatgactaggagtgttaccttaggtaaaataaactagtccattgatactcccttgagaattgaattagaacctcaaaccatcttaagtaagttagagttacgagctttggagccatgatctcatggagggtaatcatggtatgcgacttggacattatgtgattactctttcaaagataaggttgatgacataattggcccgctaaaactctactctttctcgcttgtcctagtcttcatcttcatcttcatccatcttaccttttattttagccatgtcctagtatatggtagggtttag

SEQ ID NO: 118199 - DNA, 301 bp, Zea Mays
tcgctttcggtagactcatcctgagaattttcctggcacgctcgcttgtgacgggcactctcagaactacaaattcttctctccccgccaactgagtgcctaggagcgacactccctgactcaactcgagcagacctagatgactctctagcgaatgcactgaggatagcttcaatttcagcatcatcagcggcagctcacataaggaagtgggtctgcctctcctcctcagacaaacccctatgtgcagcaagtatgacctctactttatcaagagaaggtagcactctatgtccaagac

SEQ ID NO: 118200 - DNA, 606 bp, Zea Mays
ggacaggatgacgcaggaagggatggtagggggagatcatggcggacaaactcacaggataaggcacaataaactcaatggagaaagaactcgagatcgaaaaaagaaaaggaaaacattaccttgtacagattggacctgctctcgcctcggattcacctcctcgcctcgcgctccgtcaaccacaccggcacacatctgatggtattcatgattcaggccctatgaacgacacctcttgcctttgattcgccgtcccgcctcgcgggctcgaaacctccatcgacggtgatggctatctcgggcaggcgggcgggggtgcatgatggcggctatatcgggtggggcgactcacggttggagcctagacatcgcgcggggacaaggacacaggcacgcggggacgacgatcaagagcaacggagttgatctcgaagaggggcgggtcacggtcgagagggggcccgactggcgctacgagcagggggctcctacgcatcgtggagtcaccttccatggagagagcggacgtggacgcagatccggagcggaggtgcctgaacctttcatggagattgggctatcgcagacttccatggagagagc

SEQ ID NO: 118201 - DNA, 650 bp, Zea Mays
taattttgctcatgaggcctgagtgctcttgatgcataagaaatgactcggttgtcttgcatcaagacacaatctagtccagtgccagaggcatcacagtacacatcaaatggcttgctgctgtcgggttgcgctaatactggtgctatggttagatgttgccttaatgcatggaaggcatcttcacacttctgacccaaacaaacttggcttctttcttcaacagcttatttatgggcttcgcaattcgagagaaatccggaatgaatcttcggtaataaccagctaatcccagaaaactctgaatctgacggacagtcgtgagtggcttccagttcatcacctcctgcactttatcaggatcaacagctatacctgcctgagagatagtgtgacccaagaatttgatctcctttagccaaaaatcacatttggacaacttggcataaaggtggtgctctcgtagacgttgaagtactacatgcaaatgcccgacatgttcttcttcgttctttgagtacaccaagatgtcatcgatgaaaaccactacgaatttgtccaatttaggcatgaaaaaagaattcatcagatacataaaatatgctggtgcattagtcagcccaaatgacatcaccaagaattcatacagc

SEQ ID NO: 118202 - DNA, 490 bp, Zea Mays
cttgtgaaatagactagaccctatccacatgttttagcttagttcacccaacactaaataaagaatgatagaccaacccaaccaatagagtaatgatggattgcataatctatctgtgcctaccaaacatcaaacaagattttgacctacatcatgtagtccatctcacccataactacttcgaccatatgccccaactccgatgatatacactaacctcgaatcaaggagaccaagacttgagaagaaaagatcaacctcgtcaaggaaggagagaagtcaaacttaatcttctaatgctttaccactcaacacagaattctttcccactataaactttctcaccctaggctatgattgccctaacctatctttcaccctacacaataaggtgaccatacatatatatacccatgctttcataaccactttctaaataacatgacacttcttagaagttaaaagctaaactataaataaagtttttttt

SEQ ID NO: 118203 - DNA, 452 bp, Zea Mays
aatggaacgaacaacgtgacaaggaggaggcggaattgctgcataaactctccgaacgacacaaggaggcggcagaaaagtatttgtcacacttcacggtggatcgccaccaaaagataatccgtcaaggggagatcgatatgaaagctctcctacctccacttcagggtcctgctgtaagtactccagatctatctcttatgactttcatggatcaacgaggagatcagttaaagcaatacgtagatgaatctattaaaatgcatttacgttcatacgagaaatcaactgctcctagttttccatcgcgtgaatctaatacagagccacccgcgccaagcgcatcggctacaaatgggtcacccttgacccaaccatcatgtggtatgccgatgcacgctttcgtgtcaccatcacagccgctaccattaggcacgcggcaagtactggac

SEQ ID NO: 118204 - DNA, 660 bp, Zea Mays
gtaggggcgaaccatgactggaggagtgcttggaagaagatggatgcggtggtcatatgggtaaggtgggggcaaccttgtaggttcagtgaacaccacctcaaattgttggagcaggtggtccatgagcgattagctaggtgttgacatatggcgtagacggccagtggacgcgcccgatcctagcgtgggctcaacccagtccatcgcacagaccgagatgccctcgtgaacgacatgcacatctccttgaaattccatagtatgggtcccaggatgtggaggaactcaacgccaaggataacaccgaactcgccaaggttgatgccatagcagttgacgtggaattcttcggcttctatcatgatgtccacgtctcgtgccacgccaacacgcattccccattagccaccatcacccaaagagtggggcagggagtagtggctaatttgaggcgatgcatgatgtcgacgttgatgaagttggtcgtcgagccagagtcgagaaaggccaccacacggtggccatgaatgatcatgataggagcatgtcatgcttggtgcggacccccacgatggcgtgaagagacaccattggtggagggtcggtgtcctgctcggcgtccgccccggtactctcgtggggtctgttctcaccgtg

SEQ ID NO: 118205 - DNA, 822 bp, Zea Mays
agagcattggtctagttgccatggaaaattgggaggaaattcgccctaaacattgactgtcaggctgactgaagaacaatcccatggtacagtaaactgaaacagatcgcagattcacccccccccccccttgtcgccgatgatcttgcacctagatccatgtcggcatcacgattcacgcctgaccgaattcagataagcgctcctcggtaagaaatatcacgctggagataaactccagccactgttctcaccgtcgtggtcagtcacgctggcatcaccggagttctccgttaccaggcctagcaacgtgcctcaacgttttaccacgtcgtagtgagtcaccgtaagccactctctgctactggttcgtcgccgatgaggccgccacggtagatgccaccgagctctcgcgacagtgctctcttcactctccgaccgccaccgcgccaactcaaattcacgagccaccgcccccaagtcctataaattgagcacaccgtcaggtccgtagggtagtcacgcatccagccaccaagccgtgccctcaattgatcaccagagctcactaatttctcatttcccccaaacctactttccgccaccgtgaaagaggcctcgttgtggccagcttgattcaggtccgatcttgccctctgctttcttgttttagcacccttacttgctcctgatactcactaacccattccatttagctaagcgccgttcgtcgtccagcgccgttcgtcgtcgtggactgggattgtgaagaggagaaagcgcaggggtgtttcagcaaatgtcagcgagacagcggaatag

SEQ ID NO: 118206 - DNA, 320 bp, Zea Mays
tgatattcttctaatacctcttggacaaccagctgagaatcaccaaatgcctttacatgttttactcccatacaatttaaaagtttcaggccaaacaaaagggcttcatattctgcttgattgttagtgcaataagttttcaatcggctagagaagtcgaaggagacattacttggtgaaataagcacaatgccaattccttgcccttcattgcaaaccgatccgtcaaaatattaagtccacagagtaacagtgaggtatgatatgtctagtttatgagcatcattcatccgatgttccacaataaaatccgctacgac

SEQ ID NO: 118207 - DNA, 547 bp, Zea Mays
tactttagagtatgatgtagtcataagctggttcattcgtggttacttgtccttgatgagaattatatcatactagtatgattcattttgtattgatatatctcttttgcttctgcgatggttataattacaaaggagacgctgccaaattttattttgcttagtgttcggctgttggtagtgaagtccagtagcatctcggggtgtttgtggatctcggggtgttatagttggtatcaaagcttaggctttagattctaggtaaattgaacctgaaattgcacacatgcacatataggaagggcatgggttcaaatatatttgatatatgttaatgtctttgaagtgcaggtgacaataattttaccctccctatttctttacaatgatgtggtaagttgtttatgaattaatgcctgatataatttatttctaaattttgatattgttttattaatgcgattgatatcactggtcttttgtgagattgaagttgttattatgcttgtgatatacaagtatgcctatgttgttttcaccatgtttt

SEQ ID NO: 118208 - DNA, 949 bp, Zea Mays
cctggcaacatcctcgggggctgggcaagtgtcaacaccgcccttgagaaccaagttctccgcaatagccacctctaaggctgatgaaccctcagttacttccatgggaccaggacgatccaagtcagtctactgaccctcgagaccacgctctaaggtcgatgaggcacgggatgacctcaatccagcgtcgagcacatcagcacaaacctccatcacaccatcatctgccggctcggataacagatcttctggaaccatatcctcaagagtctgatcaaaattcgccagggtcaattcttgcagaccaatgagagcagacaaagcaggagaaggaactccactactttcaccactggcgacatactgccgactgttctttcgagtcagagggacctcatcttcttcctccccatcgtcttcaccagcagcacaggcaacacccctattgggatcaacaacagatggagcacacccattgggatcagcaacagatggagcacacccattgggatcagcagcagatggagcacacccagtggggtcagcgtcagtaaattcaggcacaggcgcttcttcagcagcaggaaccgaagtaccaacgtcctgatccaaactagatactcgccggaggcgcctctttttcttcttctgatcatcagcaggaggatcaagttgattgactcggcaaggacgtctcaggcgaacactgataggcttctgaacatctgaggttgtaccagcctctgggagaggcgccaccaccaatgtcccagcaggagcagcatcagaagaatcctcagccagcaaatcaagcatagcacttatctctacatcgctaggatccaagggcacctcaaagtggacctgccgttgactatcaggaacttcctcgagcgaggcaaccaagacgctaacttcttcagcagagggtcgcactctaaggccc

SEQ ID NO: 118209 - DNA, 381 bp, Zea Mays
tgcgactggcagaaggaagtaaccgaagctggaagatggcggcgccatggggtaaaaggccgatcagagagtacagaacgccgacatcagttcatcgatcaaatccatgcttggagatcgtatcaatggtgcaggaagatcaaccaggaggaaaccagtttggctcggatgcagatgcacataggcaaacaaaaactaccggaggggcaattactccaccagcaacattgagggcgccgggggttgatgatcccaacacattagatgcgtcgaggatggacacaaatcaaggaggacagtagctgactacaatgcgaactattggtgagcatgaacaggacataccagtgattctgcagagacatgtaagtactttataac

SEQ ID NO: 118210 - DNA, 378 bp, Zea Mays
atggaagttgccgaaggaagtgaaatgcaatgacgaaggacttattactttagcttttgatttcaaagagcagtccacatatgaaaccccttcggttggatggttgaagtttgttgaagagaaatgcaacgaaatgtgtggtaactatcttgcaagggagcatgaagacatgcaatctgccttcggaggccgaaggaaacttctactcaataggattatggatgccttagggtttgaatacccagactatgaagaatctccggccaatactagggctagcgaaaaaaaagagggctgtgaagaaagaggccgaagagctgtctctgggacagataaagaagaaagccagaattattcagaaggatgccaccgcgaaaa

SEQ ID NO: 118211 - DNA, 446 bp, Zea Mays
aaaactgaatatcaatcactcatgagttggggttcactaggttgtccacaggtggtcgttgagcacaattgtaacacggaaagtttgcatgatggctaaaaactataaaaaaaccaactctaggaggaggcgcagcccctagctaaatagagaggaggaggtgggcgactagcctccctacaatgcaggaaattaggcacacaatcagccaatcaatctcctgcccacaaggcagggaataggcaccaatcaaccatgccatctctttatgcccattccttatttaggtggtgtagcaccttcttgattatttctttccaaactaaaagatagataggtggtgcagcacctagactttattctgggcagattcatcatgagcatagatggtgcatgcactttagaaaacttttagtccttcattcttcggaatcatcatgaagttt

SEQ ID NO: 118212 - DNA, 384 bp, Zea Mays
gttagggttacgtgctcacgacgacggagtgagagactgagaaaggaagacggctcatggcagcggagcgaaagaacgagaaaggaagacgagacctagataccgagaaaggaagacgacacacaccgactcatggcgacggagcgagaaaggaagaaatgaccgagagaacgagatttagggttacctgcaacaccggagcaccggatccaacaaccacaaggcagacggcagagccgcagaggtagaggagcgagcttggcgcagatcgaggtttagccgtttagggttagggttagggtgcaccgttatagtgaacaagcggagcgagaaaggaagaggataggacagaccgagagaggaagaggaagattagcgtcggcc

SEQ ID NO: 118213 - DNA, 601 bp, Zea Mays
ccgtggtctggctgccgtgatgactccatggtggttcccggggacctcgcaaggcttcgggagtccgctcggcgcccaatcaaactggaagcatgggcatggcgcgtaccttgctagacgacacattccatggcggatctgtactgcgctgctgtcgactccaccggccggtgagtctttacacccataaaattcgcctccatatattctcatcgtgggggccgttgcatgggagaattgggggctgtgggcgagcggggctcaactaaattctcgccggagcgctgtcgcttccgtggaactgccctcttcgtagacatcaccccctacgtctgcattgccggtaagaagaagtacctcctggagttcgcttaactcccctcgtggatccgtgcgtgtccactctagagctggggcaccttggcgccgggtcgatggacgccggtgtgttcaccgccgctgggcactcggtaccgcctcatgcggccactgggaggaagaagagtccctggtcgtttgtcttattttgaacggctacgattaaatcatgtcttcactgaaccctgaccgtagatccgtgatcgaaggaacgttatcgcgg

SEQ ID NO: 118214 - DNA, 798 bp, Zea Mays
ttcggggttccaaaagtggccttgccattgatcgcagatctggaccgtataggggttgctttgtgctatgtaggcaccgctagagaggagactcagatgctcattcaatcctcccttctggagagagtgtgcatggctcagtagcatgatcgtttgttccaggaagctcgaaggagggtcagcgatggtaaaccccgtgagttcaccattgatgagaatgatttggtttgtttcaggggctgtctttgtgtggcacagaaatcagaagtgaagatggatatcttgagaaaagctcataaaacgccttacaccgttcacgctagcgaaaccaaaatgtacagagatttgaagcaaaacttatggtggaagaggatgaaggttgacgtttgtaagtatgtatccacctgtgaagtgtgtcagcgtgtgaaggccgagcataagaggccaacgggtttattgaagccattggaaattccagagtggaagtgggagcatatcaccatggattttgtggtgggcttacctcgttctcctcgaggcaaggatgctatatgggtggtagtgaatcgcttgactaagtctgcacactttattcccatgaagaccacaaattcagcttcagagtcggttcccttgtatatgaaagaagtaatcaggcttgacggggtgcctaagtccattgtttcagatcgagactccaaatttgtatccaaattctgggagagtcttcacagtgcattgggtaccaagctctctcttagtgtcgcttttcaccctcagactgatggtcagtcggtg

SEQ ID NO: 118215 - DNA, 729 bp, Zea Mays
gcgagatgtttacagatgtcgttggaagcccatattatgttgcacctgaggttctgctaaaatactatggccgtgaggttgatgtctggagcgctggtgtcataatatatatcctgttgagtggagtccctcctttctgggatggtgaggttatatgtagtcgtttcagtgaaatattgcatagcaattttatatgacattgacaaatggcactaaatcgatttatctattgatttttgaggcagaaagtgaacaaggaatatttgaacaagttttgagaggtgacctggacttttcgtcggagccctggcctagcatctcagagagtgcaaaggatttggtcaggaaaatgcttattcgtgacccaaagaagagattaactgcccatgaagccttatgtgagtagaatggatgcatgtaccagcttaagtaacaattctttcctaatttatgtaagcacatttcaaccaaattggttacagtgattgacctgggttttcctaggtcacccttgggtttgtgttgatggtgttgctcctgacaagcctcttgattctgctgttctaagccggttgaaacaattttctgcaatgaataaactgaagaaaatggccctgagggtaagtattgataccaatggtctatctctgcattataccgatgctattcgtggttcattttctttgtgcttgtaggttattgctgagagtttatctgaggaagaaattg

SEQ ID NO: 118216 - DNA, 547 bp, Zea Mays
ggaaaaggtgatgcttcagttgctctaagtgaggccgcaccaaagaggaaaaaggtgaaggtccttactcaccgaccgcgcttcatcaaaccagcctcagtgcccaaatttggtgatgagacgtctacggctactgaagccaaaggacctgctcctacacagaagaatgaagagccggctataatgccgaaggctaataatattaaagaaatagaggccgcaaaaacaaagatagtagaagttacaagcccttcggcaggaataacagtgccgaaggcacaaaaagacctcacggcgactccgaagagaaaaaggatggtcaatgtattagatgtgctagagacgataaagtcttcaagtaccactccgaagaaacctgctgaagctccaaaaacgtaaattgaggcaaaaccatacgaagacgaagctacaaagagccagaccgaggccgaagctgggccttcagagcccgccaaagagaaatccttggaaaccagaggggaaacgaaaaaagaggctataaagcaaattctacctgaaaaaattc

SEQ ID NO: 118217 - DNA, 453 bp, Zea Mays
ggcagccaaccgcgtcatcatcatgtacttgtggtgcctcacgggggacaggcctcaccagtggctacgttggctgccctgggcggagttcgtcttcaacaccgcctaccagacttcactgcgggacacacccttccgttgtctacggacgcgatccgccaactatccggtcatatggaccgagggacacgagggtggctgtcgtcgccaaaagcatggaggaacgagaagagttcctagttgacgtctgataccagttggaacaggctcaagcgacgcaaaagctgcactacaacaagctgcactgccacgtcgcataccaggtgggcgactaggtgctccttcgcctacgacagcgtgcggcgtcttcgcttctccaaactgtcgtcggcaagctcaagccacgcttcttcgggtcataccgtgtcaccgagctgatcaacgacgtcgccg

SEQ ID NO: 118218 - DNA, 366 bp, Zea Mays
ctttcctgagtggtcgaagttgagccactaatctgcccgggtgaaggtgatcgggtgctcagaccatcggtacggggcgggtggactggtagccgccaccagtatctgacgatcgttgagcttttgttgtctcttgctttcctgcaacccgtgtccgccgaagatgacattgacttctctgtcgatgtgcgggaaggctccacctcctccctcctcctattactggggttatcacggttctcctggtcctcctcgcggcgggggtggaggtagaggttggaagggtcgaccgttccccacggagttcttgaagtctctgcagttctggagggtgtggcgcatgtccttgtggtacgggcactgggc

SEQ ID NO: 118219 - DNA, 642 bp, Zea Mays
ctcagcgtgagacgcaattaatatgacgtatgcagtattgatgaagagagcagttctttgtcaaacacggaatccacttgagtggcttcctgacgtctcgtatgacccctgggctaggctcctcctcgcctaccctaggcgtggtggagggacagactcctcctagtaccttctctgacttgtgtaccttggggactcggggatccatctgatttttttttttgcaatttaatcattttttgtatttttttacgtttggcccctacacgacttcctctcgttttgaaccctttgttcggcgtcacaacccatgacgcctaggtaacaagtgtcgacgctatgagttatggtgccgaggtcccaaccaacagtgtcgcgctggtctccaacgtgttggtctagcgtacgacgtggcatctaactcggcaccacagaccttggcaccgagctaggcaataacgcctcgcatgagcttcctcttccctgcgacacattctcaaaccgtgctaacctcccccaccgttgtgataacctccaccgccatagctccccgccaacacgccttactcttcgccccgtcaccattcttcattgccaccctccttggccctagagttccccactgctgcgccccgattctcc

SEQ ID NO: 118220 - DNA, 795 bp, Zea Mays
caattttcagtttgatctcaacattcctcccatggaagggaacaatgttgaggaagatgttgccatcaatgatgatgcaggttgggacccttggccagttcagcaggcacaaccccctgagccagtagtcaatgcaaacaatgcaaacgttgcgatcaatgcagaagagcagttcagttatcagttatcgggtcttgaagaccttccttctgatgatttggtgggctactttaacaatatcattatccctcagggagtccagttccagcaggaagaagccctggtgccagctgaagcagttctcgccttgccagctttccctcccgaaaacatgattttggagggaaacaacgaccagggagaagacgacatgcaaattgaagagagcatcaatgtgggcctcatgctgcatttggagcagtccaaccctgatcctgcttttgatgaatacatggccagaaagcgttcctcttcttgggctgatttattccctgataatgatggctcagtctctgttccaaaagtttgggttgctttcttcatgggccttctaatcaggccggattcttttgactgggccaggaaatttctgttgtcaggagctatctctgccgtcgtcatgcccaacatggacaccatttcaatcaagattccttccaagtgtctgctacctcccagtcaggacacccatgttgagccacagtcccctccccgacaaaggcagctctcaagaaaaggcagcctatcctggttgacacggcagttagaaggagtgctaggcttagggcaaaggcc

SEQ ID NO: 118221 - DNA, 764 bp, Zea Mays
gcaataatgggatgattagtgtaaaacatgccatatagtacttacaataatttaaagcatgtagattaccataatattgaaatgatgaaaatccaatctaccatatgagaggaactttctccaaagaacggtgacataatttgataatattgttaagtgcttcctttttctatgtgactacacaagacacaagagaaatggtaattgaagatacttgcacttaaggacataagtgttaccatcctttggctttcctccatgttgtaggctttggtttttccacacaggataatcctttaattcctacaacttcaatatcctgctcgagatgatatgagtagatataataactcaaaataactttgggtcaatcttaaagatatagatcattgtaaggttgatagcttgagttaatatgaattgaattgatcctctcaagcacatccatagcttcatatcatctcctttccttgcaaagcttggcatgcatattttggtccccatctcttgatgggtccatcaaggttagtcaacaaagatctatgaacccaaatgtcctttgtgctagcacttggtaaactcattacctttctagcacaagttgcaattttggattgcctagttacatatgaatcaattgacaagttgggggcgagatagttactaataggacaatccttacattgatgtcctttctttcggcatatgtagcaaaggcgatcttcatgtcttgaagatttcttgtttccttgtttcttgcttgc

SEQ ID NO: 118222 - DNA, 657 bp, Zea Mays
gcgcttatcagtccaccgatcagtcagtacaagcgtcttggcggtttgccttcttctcctgcgcggctatataaacagacaagttggcgagaagttaccacaacattcaatgctattgcattgttgtgctgctgaaaattttcaccaaagtcgaagcttgttggattgtacttcggacaaacatttcaccgctcaaatgcaacttcgtctgctagggtctgaacaccgaaatggccagagtaaggtcgactgctagggtgacacacgagggagatgaggctggaaccactgagacagctcccatcttagaagtgatgaggcgttctgggttagttgtgcaggaagaaactattgccgaaggtgttggtgatgccgaagctgaacagactgctgccgaagctgaaagtgaaaatgaaagtgaggatgacgatagtatcctaagcccagcaaacccagccatgtcgagttcagaaaatccacagtaaaggcagaggatctagttttaataaagaaattaggatactttggggaaaatgatgatgaactggttcattttgctggagaggagacgattccccagccgaaagcggatgaagtcgtagtcttcaaaagcttcttcagggctgggcttcagttcccttttatgagatgatcggt

SEQ ID NO: 118223 - DNA, 829 bp, Zea Mays
tcatagagtatcttgtccgcatacccaccagcaaaatggagctgctgaacgcaaacatcggcatattgttgaaactggccttgctttacttgcccatgcctccatgccccttaaattctgggatgaagcttttctcactgctaccttcttaatcaaccgtttaccaacccgggtcattgataataaaagtcctcttgagcgcctcttcaatatttcacctgattattctacacttcgtgtctttggttgtgcgtgttggcctcatttacgcccttataataaacataaactttcttttcgatcaaaagaatgtgtttttcttggctatagtcctttacataaggggtataaatgtcttgatttgtcatctggccgtgtttatatttcacgcgatgtcatttttgatgagtccatatttccttttgctaagcagctgacgacttcatctcacattgattcatcaggcagcagtgttaatagttctgttgatcgtttgtgttattctctgcctactcacctcttgtccacagaaaattcccctgctgcagaaccatcttcgggatcgacgctcgtacttctcccgcgcggattgccttcggactttgagctgcaattgcccccaacaaatcctgccacatctggggtcgtgcatgctacggctggtactgcgctggaaaccgcgtcggattctcttgcgcccagtagcacacctgagtccttacctgatggacgcattcatgaggaagcgaggaccgccgcgcctacggggaccgctggacccgactcgtcctctgcaccaacaactgctgctgcttcttctgatccggtg

SEQ ID NO: 118224 - DNA, 311 bp, Zea Mays
ggcatgtatcggagtcatcggcagctcgatgttggtccattcggccagaaagtcagccaagatctaggacttgatagcctttctggaggtgaacaagagagtttctcccatgagtttgactgtccatttggctaccttgcctgaggcttctctgttctggacgatctcccctagagggaaggacgacaccaccatcactgggtgggactcgaagtagtgtcatagttttcgacgagccaggactaccacgtataatagtttctggacttgtgggtatcagacctttgtctcagacaatacctcactaatga

SEQ ID NO: 118225 - DNA, 808 bp, Zea Mays
gcgcgagggacgggattgatggtggtggcgcgagtgaaggagagcggcagcggagacccgagaggtagggagagaggggaggctggggttgtaattctgggacgggattgacgatggtggcgcgagtgaaggagagcggcagcggagacccgagaggtagaaagagaggggaggctggagttgtaattctgggacgggattgacaataatggtggcgcgagtgaaggagagcggcagcggagacccgagaggtagaaagagaggggaggctggagttgtaattctgggacgggattgacaatggtggcgcgagtgaaggagagcggcagcggagacccgagaggtagggagagaggggaggctggggttgtaattctgttgtaattttgtacacgtgacgtgcgtacggcgtcatcaggcaggcaggtagccggtttcgacgtggacgtacgtccacatcaattcttgtgtggcaccgttggcgccctgtacgtacgtaccttcctctagctagcgatgttcaacgtgcatccttgtcgtatggcatcatgataaaccgttaatgcgtatggtgcaccggccggcctttacgtcgtaccttgtcatgcattgtcccgcacctagctagctattagctagtcgctgaattcatggagagtaggcatgtgctgctagctgcttgtcctcctactgcaccactcgtcattacatgctgccgctgtgtccgatcgatccatccgtccgtgtagccgtcgtatacatgtactccctcccctcctcgattatctgtcaacgcattcgtgtacgc

SEQ ID NO: 118226 - DNA, 370 bp, Zea Mays
ggggtcgagaacttttagggccccacggcctatgaagttcctcgagtgaccaaatgttacaagaacttgggggggccattctaccctgaacacttattattacttcggttcatggggggtcctggggacccacaacatttggtgtcttaaggcatatgggcccactatgcctatactaaccaatgtctgggtcatgaaagcccaccaagacatatatttcacaggtgccttagggtgtgagagcccctaggggcttatactagctagtgccttggggcatgagaggtcctagatgcttatactaatcattgccccaggacgcgaggggccttatggcttatatcaaccattgtcccgagcgtgaggtgac

SEQ ID NO: 118227 - DNA, 341 bp, Zea Mays
gtagaatacgagatcatactgtaaagtcctcccttgagttataaaagggcagggcaaccttctttctacacacaagcacacaagctataacacgatctattgcaattccagcactatactggactagggccctggcctgaaccagtataaccctgtgtcccaagggtgaccgccctggccaccagggcccctcctgggatggacgcatacggcgatgaatcgagaaggacaacctccggggtggccacacccgtcacccttaggatgacttgggtcgacggcgtcgccaccctggggggacgggatgacacatcacccagcggaacaaccccgacagccgg

SEQ ID NO: 118228 - DNA, 947 bp, Zea Mays
aaccactggtgctgaatgaaaactgaagataaatgagtttgaagttggactgtcagattgcttggagtctgaaattcagactgacagtggaactgcatgaacttagggctcgatttcaaccatgatccagggggaatttggctatggtttctataacaaaaatgtagctggatcatagggctgtaactttgatacagagtgatgatcgcgttactacacgaaattgggagcaaaaccccctgcaaatcgctttgttaggtgttctaaaccacatgctgatggtacaataactggattaggccgccagctcagtccctcgccgccgacgaccattgcatccggatttgcaccgtcgccacgattcgtgctcacctgtaccggataatgctcctgggtgaaagattctggcgatgaataagtttggattggatcaacggggagttcaccgcacccgctcggattgcagctggccgaattggtcctcgccggcgttagccgtttaccaaccatgctccacgtgcccgagcatctacccacgtcgtagttagtcatgttaagcgtatctggtgatcgccggagggcttgccactgtaataggacaccaatcgcgcgcgccagtaattcctgttttctctggccgccgcgcgtcttcgcccaaatccccagccaccgcttagcgatcctataaattgatggccaggtctgttgcgccatattatcacgaagccaacgcacccacgcttgcctcgaatcgtcccctagaactctccaatttctcactctccccaattcggtttccgccgccgtgaaagcatcctcaccgtggccagcttgctccaggttagttcaagctctctggtcatttgttctagagtccttaagtcctcctcaagctcctcgacccctctgattgaactagaccgccatggatcaccgggaacatgttg

SEQ ID NO: 118229 - DNA, 529 bp, Zea Mays
cgattttagtgagctgattcacgatatttatgttttagttaatccattgatggatagaactattagtggcaataattcttttaattgtagcataagtgtgttgtggtggtctactgaaagtctatgatctttaataatgttttaactactagatcaagtaaatgtgttgttttaactagttcgtatgatatacaagttagttcgagaaagaagtttagaaaattaattaaatagttgttatccttattataaagtttggtgttaattagtggtaaaatatgcaagtgagtctcgaatagaagtttagaaaattaattaaattgtttctatccatcctatgaatgtttgttttggcggtaaacattttatgtattgctcgtgtcaaatgatgttgtagtagcctaatgacacttaggatggtcatgcgtttaaaaaggatatggagtctagaattaactcgccctcacatgcttgatttccttatcaaattgcctcttccggtgtaagtaatatatatagagcatgatca

SEQ ID NO: 118230 - DNA, 330 bp, Zea Mays
gcattataaaacacgaaaggattagaaattaaaggagtaaaattttgatctaacccagttccttttaacaatctaggctctctcatttttctttcttctaccataacctttacatctgatcctcttccacagatgacttcacccacccccgccaatggaggagacactcgtttcagttccgatttcctttctcacgagggtttcccttccatcttgtgggaggtgctcaactccgtcggttaacctacaccccctttgtacacggtgcagctatacgaggagcatcgggtgccatgttgctgagtctggctgactctggaggcacacccc

SEQ ID NO: 118231 - DNA, 444 bp, Zea Mays
gcgggaccgctcaacgatctcctatggagatcaccgtagtttgtctgtcgggaggtaggagataagctcgcggccctcggattttgaggcgacggtggagatggtgtctggggaatggctcgaacaggaagtgttgtaggccgtagatcaagggagggacgacacggattaaatctcacgtaccggttcggccaagtcggtagtggccattgatccttgatcgaatgactggaagatctcgcagttcaggatcttttatgggccgttggatcgggatccgatgaccccggtcgcgtaccgatttgagttgagcgtgatctaatctggatcgtttaaattggatcggatggcttaggtttcggaatacccttcgcccgagaacacttgcaaaagaacccctctgttttatagtaatcaacccgcggtctgcagagctgttttctg

SEQ ID NO: 118232 - DNA, 1491 bp, Zea Mays
attgattcaacacttgattgagaagtttcattggatacccaaaatattatatgagcatgtggtaaacctctcttttggaactcaatagtgtgaagaactgtgaaaaacataggtgtaaaccaaaaaatttaaaaggaatataaataaatgacaactaaatgatagatgttagtgaaaaggtacctgcaacaaatagcccaaatatagatccagatctaatgtcttgtaataattcattgagttttaaattgaaaactcgtacaatgacgtctgatctatcggcaggagcctgtccaggctcaaggctttcagtgatttctatccaatttggattacacgtgaaagtgacaaaaaaatcaggaggtccatataatttacaaatagctaagccatcatgataattttgaagcatatatcgtcgtcctccgacatgtgaagctagaagaattactctttttcccatttcttcaccgtttatacagccacgactaacagcatcagatattccttgaatactttccattctaagttttgtttgattttgaacaatatattgaaggcgagattcatcgatagctgcgcgcgcatcaacctttgcttggcttgatagcaatccatagcataaaaaggggtttggctgatttcttctatagtgaaattggtagcaataatattcttgcatagtcatgtggcaacgttttggtttgttagccagatttactccattatatagaacaccaacttgaaaccctcgttcaccaaaagggaataaaaggggatattgcaatgccatatatgccgggtgcaaagaggaaatacgttttaattctcggctatgtgtttcaatgatgatatctcgcttaaatgtatccaaagagaaatccccaacaactaacaatgcaagttcatcagttgttggtagattgtattgaaccgagtcaccttcttttgcacctattattctaataatgaaattttcgtcaccatattcagccatacgatccctggccattctaaacgttttagcaaatggattgcattcatctagcattttcatgagttcctctataatcgaaggatcaagaacttcagcggtcatattgtttgaattgagacattttaatctgttttgcacttcatttgcagtatcatatatgtaaagttgtaaatattttggagatgagccatcacttggtaaaagagaaccaattcggtgatgaacctggccacatattttgaaaagtggaggaccacgaccatcattcatagtattatcgatttgtgcacccatggatgtaaaagcaaataaacaattgtactggcgtatgcttctcataaatctttttgatattgaatcaccgtggaacttagacaatgatgctaatggctcaggtctaggtgtgtaagaaggaattgatagctttccacccttgcaacaattataatattggacaattccatatctattactggaattgtgttccgcatgcc

SEQ ID NO: 118233 - DNA, 991 bp, Zea Mays
ctactaacggagcaatcggcttaagtcggcgatgacttaagacgatgcaacatgctcgcgcttactcgacttagggtgaccactataccctactaatgttgcaatcggcttaaatcggcgatgacttaagacggtgcaacatgctcgcgcttactcgacttagggtgaccactataccctactaacggagcaatcggcttaagtcggcgatgacttaagatggtgcaacatgcttatgcttactcgacttagggtgaccactataccctactaacggagcaatcggcttaagtcgacgacgacttaagatggtgcaacatgctcgcgcttactcgacttagggtgaccactataccctactaacggagcaatcgacttaagtcggcgacgacttaagacggtgcaacatgctcacgcttactcgacttagggtgaccactataccctactgatagagcaatcggcttaagtcggtgacgacttaagacggtgcaacatgctcgcacttactctacttagggtgaccactataccctactagcagagcaatcgacttaagtcgacgacgacttaagacggtgcgacatgctcacgcctactcatcttacggcgaccaccatgccttaccagtcaagcgattggcataagtcaggaaaaactccaaaactagcacgctacatttacttccacaattattcaggataattgttacatcctgacaacagaaacaaaatattatagttgtcagcaccaaggacacattctagtgccctatccaccgaatattcgaacacaatgatcacacgcacatagaatttacaagtacattcagtgtctcttagaatgtcactacatcggaacgtctctatttggcaatatctttcacaggagcaatctaggaagaaggtcgactcgaggcatcaagcgcagccttaacgtcggcaacaatgtcatcaggaaccactactccgggcctcctcatcaagatctg

SEQ ID NO: 118234 - DNA, 1129 bp, Zea Mays
gggtggccttttgggccttcccatcgaactgctttgtaggcgaactgttttttggaggtctgccttctttgggtaccctgttttgtctcttaactaaggctgatgaagatgtggtgaatgtcgaagaattggcattctgcatcattgaagagagactactcatgcaccatgtttttagggcactcctaggccatcaaggatgcttgttagcaagtgtgtggaagttaatcactaggagacgaagttgttagcaaggagggactctatgaggttcgatagtatcacatatgaagttgagggttaggcatgtcaatcaaagtagatgatgttgccatccatggatcatccttaggtggttatacttttgtatggagtaagtgatgaaatgtagctctaacacctcttgcaccacttgtctgtcaatatgagtggtgaggtgtagttgatgttgaaggcattgagtcatcaccatactgatgagctttgttgcgtttagagttgttatagtgttggtgcacctgtcacacacatgaaaactggttcgaaggcataggaaaaaaagacatggatggttgaagcatgtcacgtccctatgtgcacacatgtcagcagggatttgaagtttagcttcaagtaagagagtggatgagggaacgaggaaaggtaagtatgggtagttctaaataggaaagagcatatagaaagggggagaaagagtgactaagggttacctatctatgggggatgactacataactatgactacataactcttggaggggtgagatccacctatagtacttaccacctaggccaatagtggggcagcatgtggtgtctactacaagtgatatgaggaaaggacaaggtggatgatagaagggaagatttgtaccatctacatttgtccaaccatgaggcaccatgtgggcatggtgtggctcgcttggcgatgacgtggaggaatccaaatgaaggggcaatttgggttgtggcgttgggttggaaggatgatagaagggagagtatgccagggccaaaaatggattgtagtgatttttcctcttctctcacttgtatatatatatttggataaactattcctaggttgtaaacgacccatgaaaag

SEQ ID NO: 118235 - DNA, 368 bp, Zea Mays
ggaaaatagtggcagtgtgtcttatcggtggcggtagaacttcggcaaagggtcaagtgaggtcagggagtttctggcagtcacgtcgatgtgtgggtcggtgtcggaggtaaccggaggtgttctagccacgagcacacgcgacggtggtcatcggcggcacttgctctggtctaaccacggtgatagcagtcaatcaaatagctcggggagcttcactaggtgatggagaggctatgtgaggagttaatcgaacaatggcttcctggtttaccttggccacgtgcaccagtggccaggtgaagtatggcgatggcggacaggccactcctgtattggagtgctcgattcatagctttggggaggtt

SEQ ID NO: 118236 - DNA, 325 bp, Zea Mays
gagccgatctccaactgtaccctcgtactcaaccttctttgcggccttaatgagtgctacgacaacctaaagacttggatcatgtggtccattatatacccctcctagacggcccggaacgacctcatccttgaagagctctctatagcttccttctatcatcgtgatggctctatagcttcggtcctggtgggccatctcagcgcaccaagccctccactcctatctctaggaccccgtcgcctcgttcttctaccagctttggtggggtcaactattgttggcatcaacatggtggtggcggcagcgctggaggaggtagtgg

SEQ ID NO: 118237 - DNA, 748 bp, Zea Mays
gaagattgcttgtgttggactcttgttaataattgattaataatttccaagatcgtaatcatgcttgcttaatcatgattgtgtgctttaaaggttatgtcttttgaatcatttaataggtagctcttcattagatatattcaccacaattaactctttttatgttcgtgaataaacatgcatcctgttgtgagttatgctatatggttttaatgattagcctatgtgcaaaaatgacatattgcttagtttatacgatgaccttatccgggcactatgtgttatgcctctaatgtattctctcgagctatgaagtgcataagtaatagggaactgtaaattggtgctctcatgaccatactggtaaaagacaaaggtatggaaaatggaactgcgcaattttattgaaaatcttgaagttccattgattgtgatcatagatgagttcatgcatttcaatcagtatcttggcttaagtgatttatgcctttaaaatgttgtttcttttggtgcacctaagaaaccttcttaattatggcatgcttagacattacgttttatttgcatgattgtgttgttcttcaattggtacatgtggtacaatgattgtcatgtatgaagcatgtctagattgcttgtaaaatgtaatactacttaaggcatgcattgttggattaagtcaatctttcacttgatattcaaattggtatctttgtgtgatgaaagtgatagagtatgccttgaccaa

SEQ ID NO: 118238 - DNA, 412 bp, Zea Mays
tggcgatgacactggagtatgctcatgttgggtaggtgcaacaccactacaaggatttcagtggtcgtcaccagtgttgcgaatgtcttcaaacattatttctagtttatcaaaatttaaaaggcctctatgcctgaacttggatgaacctttcactatccgcatatattgtatgacaatgataatgtgcgaggactattatttgcaaattaatggaacaataagaaaatgaatgagagacctacactagacatcttcttccaccatgactcaggcatgataatatgtgtgtgagatgcatcccatcctatgacagtttccctgatagatagttgcttccaaattccataatctattttcaacttgtcccacttgttcttgaacttttttcggtcatacaaaataccggttc

SEQ ID NO: 118239 - DNA, 1050 bp, Zea Mays
aacaaccttacctctgcactattatgatagccaaccatcacaaacctcctcccataaacttctatatataacaacatgccataatggagtacaacgccccaaaatacaggcatcacatagtttctcggggattttgacgaatatcgccacggtgccacctcacaaccctccaacgccacccctcaaccccacccactcacataccaccaacaaccacccccataaatctcattatataaatcaatatgcatcgttagatcaaaatgtccaaccctaatagtctcacatttttcctaccaaactcattgatcgctgctgccccacaaattcccttccaaaaaagaactaatcgaccaaatctcgtagtccaccacatccatcgtccatatactcatttccatagatcaacttacaccgttggattaaagtcatgtgtcgttagattaaaatgtgcaaccctaaatagctttatctttcttttctagtccatttattcgccgccgccgccgcaactctcacctctcctacatctctacttataaccacgacacccacagacacccttcttcatcccacgccttcatagatcatcgccggatctcattcgattctttcttgtctccatatctaactagttctagagtccgccatggcccccactacctccacccccttcaaatctagggtttgaggctacaagcggagagggataagtggtggaaacttgatgtccaaatcaatcatgagcccggggtacgggccatggaatcacttcatcgatcgaacacacgacgaatcaggtaaatatacatgctcaatcatatctcacaccgaaaactctcgagatatgcatcgcccaagaccaagaatagtgctcatgactttagcgtggtctaaaattgggtcgctaaattttgcgagaacaacacagatgttgtcgtagaattgacttttctcttaaccatggataccacccggacctcaatttctaggtttgacctctctctcttttttttcctcgtctgagtcatcccccatctatcgtattcg

SEQ ID NO: 118240 - DNA, 547 bp, Zea Mays
ggccgaagaggtatcgattaattctggcgttggatcagagatctaggattcagattaaaataacccagatcgattcctgatcgctggatacgagatccacgatccagattagatggtgcaagaggtaagtgcgcaccaatctggaccacccgcagtccgatcaacggtccaagattaccaaacagaatcagacatatctatgagatctggtccgcctatccatattttaacggctgcgatcacaatacggaaaggcgagttgacgtttaaatcgtgatcgtccatttgaatcggacggccactagcgtgcttctatacccggtggcaactcatggtggagccactcaccacccgcggcgggccatcgccggagcaatccccatcaagagtccccaggcacaaaacgttgatcccgaccgagctacgcaaggcgagaatcaaggagtgtattatgaagggccttaccagcggctatgtcgcagtgcggtcagcttatagtgtaggggtgggttcccggtggagttttgctccgatgagtaatcaggag

SEQ ID NO: 118241 - DNA, 410 bp, Zea Mays
ttcgggggagttaacgaagaaagcttaggatgccttcgggatcacactggggcgaagattgtcggcactatatcaaagagtgttggcctactgaatgttgaagcagacctcagcaggtacccacggcaacatatcgccggtagcctattttatgctaactttaaggtaaaattcttaacttttcattgtttttaatatgaagattgttttctgatgaagcttatgttatcagagcttactgctaagcaaagtcctgaggatgcaacaagacctcgaggacaaaaagaacgaagttataattgagggcctggagaagaagataaaagaccatgagactactctggaaaataaagacttcatacttcgaactatggaaggttcattggcagaagcccatgccgaaattgcta

SEQ ID NO: 118242 - DNA, 312 bp, Zea Mays
ataaaacacaagtcaacataacatctaatgatattggagcacaaatcaacatagtttctttatccttagatcgtagaacaccattgatcgtggagtgcaaatcaacatagttcaatgcgtcaactagcaactagcatgatgtagatttttagattcagaccaacggtgctacagaagtccaaactgcaaaacacgacagagaagaaacaatgttaatcaaactgtccatgtgggttaagtgagaacacagagagcatcttgggagcctttatcacacatgaactccattggcctaaatgacatggatttgtt

SEQ ID NO: 118243 - DNA, 401 bp, Zea Mays
agaccgaagctgccgaaacagcgcccatttcagaagtaatgaagcaatcaggtctagttgtgccaggggcagttactaacgaaggttcctcaaatgttgaagctggacaaactgtggttgagggtgatagttgtaacgagagcaaggactacaacattctaaacccgacaaagcctagtcatcttgaatttgaaaaatctattgtatcagaaggtgacatgactatgatgaaaaaactgggctacttcggagagtctgagagcaagcttgtttgatttgctggggaagagataattctggagccgaggaatgatgaagttatcgtctttaagagcttcttcagagcagggcttcggttcccgctaaatgacatgataggggaggttctaaagaactttgaa

SEQ ID NO: 118244 - DNA, 378 bp, Zea Mays
catggacaagcaaaaggagcattcattcgatattaacaggtgctcacaagttatattgccataagaacgaacctcatgatattcagacaaatattcaaggtggaagagggaagttgagcaagctgtggagcagtctggatttgggtacctctacagatttgtgtaattggtatctaaaaattgtgagttattacatatttaaagattgctcttgctcattggttaacattgatttccatgatagttggtgatcactatagtaggagttttctcttgtgccataatgctatgacttgttctatgtttggtgtcttagtaataagaaaatatcaagttcaaggattaggcacaagtgtggagaagctccttggaattgga

SEQ ID NO: 118245 - DNA, 614 bp, Zea Mays
gcttgtcgaacgatgtagtcgatattttcaattggagcttcgggagcagcagtctcgaccttttcaggtgcaatctgccctgccatcccttcctcaggcgcggtaggcttcatcgtggcgggcgttgaaggcccagcttcggtttcagcctgagtttttgtagcttcgacttctgcttgcttagtttcagtttcggcttgcgctttggcagcttcagcaactttccttgtaggagcagggctcaaggccttcgtagtctccagcacagcatccagcacgttggccatcctcctccccttgggagtcgcggcagaagccttttcaaccttaggcagttttgcctctgttagagggctcaaaatttctggcattttcattattttttcaatctttggctcttcagccctatcaaccctagtctcaactgtaggcaccttcagcactacaatcggctctacagtactctgcacaagcggagcagcttccttggcctcgtcagctgaagaggtccccgcaccaaatttaggcaccacgaccggttcaatgtagcgcagccggtgggtcagaaccttaatctttttgcccttcggctcagctacagtggccgaagcggc

SEQ ID NO: 118246 - DNA, 631 bp, Zea Mays
ccgtcggccctaccatgccccatcatccatggagcgcagaggacatcagagcgcggagagagagaggaccagtgagagaaactagaagccggccgccgctgcggatcctcgcaggtggtgggaatcgacctccccgaaggccggcaccgcgacgttcagggccctggcaaggttgctcgggtggttgagaccggcggcaaatcgcgccatgaactccggggtagaccgaactccaccgccatatcctggggctcatctctataaaacccactgatctccaggaatccgccgttcgtggtcgttctgtgggaagcaagcaagaactctccccccatagccaaagtaagatcaagcctgcgcctcatcgcggatccgtgcgacgtcattggccagctcgctccaacagtggtgacagctctttctttccctcgtaccttatcgtgtttccattgttgcgcgtagaccatgagatgtagttgctcggtcggcttcggaggaagacgaattcggggggggctggggcaaggttccgtgagcgccgccgtcttgggagcttacttcgccgtggagagacccgaggaagaggatgagtgccaaccgttggatctgtgttatccggctcggattagat

SEQ ID NO: 118247 - DNA, 419 bp, Zea Mays
cagcgctgccgtcaaagatgctacatgggcagaatttgaagccgctttcagagagcatcatgtgcccctagggatcgtccagctcaaagaagaagaatttcgggagttaactcaaggagggagatctgtcggtgaatacgttcacaaattcacagaattagctcgctatgcgcctgatgatgtcagcatagaagccaagaagatggcccgtttcttgaaagggctgagaccagaactcaaaaccatcctcgccagccaagatttcctcagtttctcgcacctctcaaacaaggccatacaggtggaaagggctagagaataagaaaagggtcacctcaagaggaagtttcaagttctccaagctcagcagcaggacaagcaccagagagtccgatcttttgggtttcctcccaaaggac

SEQ ID NO: 118248 - DNA, 572 bp, Zea Mays
tgggcagtgatgaggaaatcagatctgctttgttccttcagattagcacagtaaaccaggctattgcactctttgttcattctgatggttgctgtatcataagatggcctggaccttttgtcacatttgcctttgttgtttctcaaacggtgagtggttgtttccttctcttcgcttctttgccacaattcctgtttttttccatatcttgtttcagtcaccatgacttttgttccacagatggtgaattgtcatttccttctctttccttctttgccacaatccttggttttttccatgtcttgttgcagtcaccatgatttagcactgggccattgtgtctgttgactgtagttagcaataatgctctaacagttacatatcttcattgtttgattcattctgtcaagagtagtagaaaatagtgaaatttactggttgacatttatatggtcaataaccactaaatgatttattctttttcaggtggcaacacaaaaagttgtccatggcgacttgaattttgcactaacaaagggtattggctgtgttagggccggattgatatggtt

SEQ ID NO: 118249 - DNA, 496 bp, Zea Mays
tagtcccttgtgggtatggcataatatcaaatttgtggtcagaagtatttcaacatgatatcccatgtcagacatgctaatgccgaatttgtccctgaataactcagccacctcttatctaactttattcactatgttcggtgaccatccctcgaccatggggatgtaggtttcaagttgtcaggcatcgctatgcctgccctctgcctaaggatgatcaaaatgtgtgcttggtgcatgatctcatggtgcataggtgcctcctcccattatcatatagtgctcgttgaatgtttctggctccctagaggccaaagagtttttggacctatgggcaagaggtggtatggcatggttatggtgtgtcgtaggtgcgatatagtcgtgcttctaggatgggtgtggcaattgttcataatgtgtagctccatgttctgcatacacatagctggacagtctacctagggtggtcagatggttcgactagaccttggac

SEQ ID NO: 118250 - DNA, 421 bp, Zea Mays
tttttggtgacttcattgggtacgaggagaccagatctattatatcggccacaatggtcggttccaaaggtcgctttgatgtctcctaggataacatccttaggccgactcttgagagtttgtcgaccgagaatttgaaaaccttatgaagcaatgggatgaacattcattgtgacaacgtgcctagtgctcaaggaagtgaatgagaggttcttgtcacacttcatggtggattgacaccagaagattaccaagcaagggatcaagctcgcttccctcgtgcctttgctccaaaatagcaatgtaagtaattctaatgataattaatctattaagaattacatagatcaacttgagggaataactgaaacggtacatggggaacaattaaaatagtatatagatgaattctttaaaaaaa

SEQ ID NO: 118251 - DNA, 481 bp, Zea Mays
gaaaggctgaacatcaacatctcaagatgctcgctgttgatctcaagcggtgccaaaacagccgcaccgacgccatcaggaaggcggcgggagcctcaagaactttgcttgaggttaccaccataggctcccaccctggctccatcatgcccggggtcgaagccaatatccccaaccaggcaatgctcacctctcgaagtcagaggcgaggaggagctcagacggtttaggttggccctaaaccttacgtgtgaaaggtagcattacatttgtccaaatcctagtctggtaaggttagcccccatgaaacctagtttttggcgccatccaaggtccagcctggttagagttgcccttatgaacacgatctcgggtaatacatgtaccccatcgcgaaggaaaggtaagttctcatccattgatttcttttcctttttatgcatgttaattatttttactccttttaggattcaagcttgtg

SEQ ID NO: 118252 - DNA, 580 bp, Zea Mays
gggaaattcacagatttcattcatattttgatacatatcatttgcaaaacaaaatatatcatgttgcaacatataaagtgtttgtaggtgtttagaaccagctctgacaagtaaatttatatgtgtgtgttatgtatctagatgttgccctcactgggtgcaagatctatactggttcaagcaaaatattcctacattcagttttcggcggctcgcgctatcggcacctagttgctcaatgctcatagtagaggttacaagcagtcgagagggaggaactctcatgtctctgtgcatattaggttttaagggactgtgtatcaggtgtttgctacctagctaagacgtgagcgtcgagtgtatcgtcctcctggcttcgctctccccttgggccgctgccaaccctccccttttatagaccagggggcggatacaagtggcttctagtggaaggaatttactgcgtcatggtagaacgaagcgtttaccccagatagaaacgtgtctgtcggtattcaccttgggcgtctgagctctctggtcaggctcattaagttcagttgtgcgtgagcggcaacga

SEQ ID NO: 118253 - DNA, 299 bp, Zea Mays
ctaccctttgactatctttgttctcttaatattaacatgctcgtactcatagattcttcaatactcttgtttcaaatgcttatatctgaatttctcctgtctacttaaacactccaatttatatgtccacgagcttcttgtcttctgagaccccttcctattccgttgttaagtcattatttatcggcaatttctattcccttggtcttagtatgctcatatccttggagtcttgcatactctcatattttcatgtatgcttatcttcataccccaatgtatgtttaagacacttcagt

SEQ ID NO: 118254 - DNA, 293 bp, Zea Mays
tggccgaccaactcctaattgagcaacttggcgaggcggaggtcccaatccagtactgctgacccatgtctactacaacaagaagcatcatccacatgtcacgtctaggcatacatgtggcacacctaaggcgcatcgggaagtccctgtcgacacaaatgtacgcccccacgtacggtcccaaatgtacccacgctgccttgttgggccagtcaaacccggtcatgggggatctctgccctagagtctctatagtgactcgcataccgcgagggacgcgacaatacactgca

SEQ ID NO: 118255 - DNA, 314 bp, Zea Mays
cttagtgtaaaaagggacggtaagttattttatctaaactccgagggccattttgcaaaacgggatccgtcgaaggccgtaacatggagccacaacctttggatctaccacccgtggtcgagattagatctctttaaaattgaaccggtacacgctggcaccccttagatcaataaccattggcttagattttaagcacccaagatccattccgctccgttcaatcagaccaaccggtcaggattttatgaattgagatcttataaggatcgaacagatcgcctctaatggcccgaatttccccgcccgaaacg

SEQ ID NO: 118256 - DNA, 399 bp, Zea Mays
acaagttcattacagcatacaactaccataagttcattacacacgagtgctatctagggtactcccaaactccttctctaaagtgtccccaaattccttgagaaggtcatcaaggctagctagggacatttccttggtgtcggacgagttccctatcctggtaggaggtagggctggaggggcttcttccttctgctcagtctggcatccttggcttctggtcttcttgcagatttttcttgcgggggcgagcttctttagcttcttgtcgtaatccatcttcagagtttggtaggcctcacaggtgttggtttcctcgccttccgctatctcgagactctcttgaagggacgccttttcccttgtaagttccctgacttgttgctccaggctttccac

SEQ ID NO: 118257 - DNA, 323 bp, Zea Mays
gtctggtgcaccaactctgaatgtctcgagctctctacatgtttggtctagtgactgatccgatgcctagcggacctccttattgtagttctagtgcatctacaaccagcctgacttattcgaacttggcaccctttcctttgtcttcatttggctagtgtctttggcacttctatgactcagaaaaatgtctattgagtccatccaaacattctaagtcataggtcttggttcaaatcatcctctaaatccatttgccctttcccttcgagacttaggttcaaattgtcccagtaactccatattctatctgaacttcttag

SEQ ID NO: 118258 - DNA, 305 bp, Zea Mays
ttgaaacggccacggtgccgaagcttggtgaagggaagcttggtgaagggacatcttccgtcacggagccaggacagtctgctcctgtcggccgatgcgctgaagaatcggctgaagtgccaaaggttccggcaaccggatcggctgaagcactgaaagatactgccgaagctaaaggaaaggcagccgaagagcgagaccgagaggaaacggcaggaccaccaaaaatcttaagtccgccaccggagctagaattgccgaaggtgtcaaaagctcctgcaataactcccaagaggaggaggatg

SEQ ID NO: 118259 - DNA, 404 bp, Zea Mays
tgtagatcatttctgattcagtattcctacactgattaacttgccatctgatttttgttgttaatgtgtacacaatatatcttgttaatttttatacctcaatgtagtcttaattaccatgcttgttagagctgaaatgacacaaaaagctgtgatgttatcaacacttcaattacgagggtctaataattaaaatagtaatcaggtatttatctgatattaggctgtgtagaataggatctactaatgctccttcgcatgtggatgctacttaatttgctactaactgcaggctcagaacattcttacatgatcttgaagagcctgattaacaaccattatgtgtcactttcattatgtttagtaaatcagaaacgaagagtcgaagaatctagtcaagacct

SEQ ID NO: 118260 - DNA, 554 bp, Zea Mays
caacatttctttatcactgcctagcttagtaaaaatacccttctgtttttgtttagtatctgccacctgaaagtatccagatatatcatggagaacactgtcaaatttacaacagaccaggtaaacaaaaaacaagctaagaaaagtaaaagtctgaagactaatgtcagtgtaaaaagcacaactgaaattatggatggccaaccctttccaagatgctaaaaatttcattcaacttttgcatcctcttaaccacttctgaaagaggaggtaagggccttcagagccgcaagtctccatgcatgaatatcaactggatttgcatgactacgtcagcatccctttctttgacttctgcaggtggtagatctctgatgagcaacatgcttgtctatttggtgggagatctccaatgtgccaccggactggccgtggcagggctgcagggtagagattggggcacaatgagccagtgacttggggagagggagccagagaggggcagcactgagagattcagagggagtggcagcggggggcagcaagcactagag

SEQ ID NO: 118261 - DNA, 471 bp, Zea Mays
aaggtcaagaacatggtgatgagtcctatgaggctaagcttcagcatgacgagacctttatgttttatgaagataggctccccatgccaactggccgaagttcactttagagttgtggcagagcagaccagcacttgagatttggtccaagaatatttagtcaatagggttttcccaacactaagtgggtggggaatgccgaagcttaaaggcgaaggaaacaagtttgaacttgtgagactaccataccactttaaataccaagataccttcagcggcccctgtgccgagtggctagaaatgattgaaacaatgtgcaacaaaattattagtaattatacaaagaaagaagaccaactgatgacttccgcctccggcacccgggagaaacgaaggttgaatcgagttatggacgcattgggcttttagtacctagattatgaaaaatttgaagaagaagctggtgggatg

SEQ ID NO: 118262 - DNA, 421 bp, Zea Mays
gtccaatgcaccatttgtgttacactagacttgtccggtgcacctccacgtcagctagccattgctgctctgacagattctctacgccactctagagttctagtgcatcgtcagactggtccggtggccgcatgtcagatagccgttggaactagccgttgtcgatcgttgagcatttggtccgctggctgtcgatgcatcaccagaatggtctagtgtggcaggctcagtattgctgtagaatatatatctatgtactcggtttagcgtgccactagtgctgctccggactggtccaatacgccagcaacacagggtttcagtgcactaccagactggtctagtgcaaagaaacaacccagtcataaatacttcaagtttcttcactttgggcttttcttgtcttgtgtctagaactttc

SEQ ID NO: 118263 - DNA, 699 bp, Zea Mays
acatcaatcccgtggatggtagtacgactagatccgccaagaatactacccacttaaaagaattctgacttgggagcatttgaggtggcatagaaggtctgaccctggggttcgggtgaccaaagggatttctaatgatgaagtggggatgccatgcttttccacaaaactagtggtgatgaatgaatgagatgctccagaatcaaaaaagcacaacagtgggggtaaatttgactaggaactcaccgggtactactctaggggcttgctgagcttcttgggcatcgacgtgattcactcgagccctaccgtggaactgtgtcttgcttaactagctgttggtggatggtgtcttggaggcaggtgctgaaacattcttggggccattcaccgagttggagtaggcaggtacggatgttttcaaatgtgagcaattattcttgaagtgactttggtctccacagtgccaacaagcattggttggaggttggctgcttgaaacagactgggtgtggaaggaactttgaccaggctagttgagacgtgacagagcggatcctgctgtttgctgaagtttgaccccttggaagggaaccgaaaagatcgaaccctctgatgcctatcctgttgttgagctcagagaacttgaaattttctcttgaggtgacctttttcctcttctcgtgctcttttcacttg

SEQ ID NO: 118264 - DNA, 669 bp, Zea Mays
ctttggaaaagctagattttaacttcttcacgcaatccaaggatttttcaaaacatctttccttagattcgtgaagctcctcaatatttttctctagtttggtcttccaccattcactaatctcttggctagcctttgcgactgcgcaattttcattggcttcggcaagcttttgtcgaaggtcttcaacctcagctttatgagcttcggtctgggcattgtatttcatctcatcttccttcactttattcaccaatgaaattagaattttgtctttctccagggcttcgtttctcagctgaattacctctaatcgaaggttgccaagagctattgtgcagctttgatcctcaaaattcttttgaaccctcagggcattgctcagaattaagccctgtgaaaaagaaggataaatgtttagtatgagaataaaaactttgttcccaaattcataaactagtttataattcctgtacctttaggatgttgaatgcaaggttgtccgcgaggtcatcctttgacatggcggagaggccaacttcgagctttggaaatcccatacttttagccatctcccggcagacagatatctctttgttgtccaggaaacagtacaagaaattatctttgtctgtaccattgaacaccatggccccttttgggtatttc

SEQ ID NO: 118265 - DNA, 614 bp, Zea Mays
caataaacccaggggttctttaataaaaagctgaggccgaaggggtatcaagtgtttcggaccgttggatcaaaactatacggtgccgattagatccctgctacccagaacaggtactccatcgtggcccttggatccgaaatcaatggcgcggccgatcctcaacagaaaactctatacacaccgcctgatcccgatctaagggaccagatcgcccccctgcgaaaggctacttcctagattgatctgcatcgttgactgctaatccgacgacgcctagccttcttctatctcccaactcgtaccatggtgacccgatttcagccgcggcggcgccccgacggtgaacccgggtcctgcacctaggtgtcccatcggggtacggagcgagtacaaatcaagagagggtaacggagaatgcaaaggttgcgttcataccggaagccgagcagtagagccaactgctcacggagcagtgcgattatgcgacggcgatgaaatttcggtgagaaattaccaccacccgagtggcccccttctccctcgaaggcgatcaacagccacaggaagacgaagcgaagctccatgcccgtccaaggaacccgacgcgggcg

SEQ ID NO: 118266 - DNA, 850 bp, Zea Mays
attagaaaagaaaaagaaaaaggtttcctacgctgcctgggccgaaatcaccctcccagcccagctccacttcaacccttctggcccaatctgcacacacgccgccctcaccgactaacctgtggggccgcgcttcagtatggccaacacatccagcctctcgctcgcgtttggttcactgttggtgggcctcgcgtcgacagttctatcctccccaattgaacggacctgacgttgaacgaactcgcgcccaaaactcggctatcgttcccaaccccggaacttatcaactggattctcgggccgttgagcaactgggcatccccgttgcccataaaaccctgaccgagagctccccttcgtattctaccaccactgccaccgaaaacgggagatgggcatcggctgtgggattggtgtgtgctgggaagaatggggcccgctgcaacggcattgatggccgcaccaatgatggtggggcatcgtagaggtggatgcatcgtggcccagaagtaacaagattgcccacgtcatgaggttcgccgagggtaaccctggcatcgccgcgggggaacccaggacgtcgccatagaccttcatctatggatccatttgtgacacaagagcttgttgggggcttcgcttggtttcaacgaatgtaagcatggcctctccggtggcgattctccactggaaccaccggaattgctcaccgatgctcctgctccgccgcgggttccctgtacaccgggccggggatcgtcgcggcataatcacaggtaatgttacattccatggcatttgcccttttatccacaccgcgtagcaccttttcgaagttcgattaggg

SEQ ID NO: 118267 - DNA, 434 bp, Zea Mays
atcgcgttgaggggcggcgccaccatgtctagtgtggttttggggaagaagtcgctcggccgttggatggacagcggatacccgagattaggtcaaggataccccttcgtgcgatcatatcacaaccgttggatcgctggcaaacgacttggatcagacccagaagcccttttatgtgatcgaatccaatccttaggttttggatccgatgaccgggatttcataccgattcgcgcggatgttgttttaatctggtgcgtgcatctcagatcgggtggccgatattaagcgataccccttcggccgtgtcaaattctaagagtccctgagttctaacaaaatcaacccgttgtccagcgcctggcgctctgtgtctagggtttacttgcgccaaggcccatgacttttctggttattgaggcaccatctagaga

SEQ ID NO: 118268 - DNA, 388 bp, Zea Mays
gttctctccacgaatacgtagaggaagatgcctatacttcgtattgtgcagctgctgccggtaggtgtggctgagagaccacaaagttcgcctagcagcatcgctgaacgaagcagcgtaggtggatagcggcgtcagagactcatgtgttgacagagtcctgaaccctctatcacctgcatccattaccctgacataaatgcgagtgatgtagtagcaagcccgaggaggctcgtacactcgcttggtctcgtacaggggtcggatgtaggttcccaacgcgtgtagaacatcctgtagcaggttagggaagtgccctatctcgaacattgaggtgtaatgttcagtgataggccataatcccacgtagtggtcctgctgttcttcg

SEQ ID NO: 118269 - DNA, 382 bp, Zea Mays
caaggaaatcatccagtgccccatctggtctcgcttcggcctccgaaggccgaaggtggctattgaaggtgacatcgaagcatgccagaaggcctttagcaatgtttgtgccttcattggcacaagagatataatccaagagaacatagcctgtagggtgtgaccacttgtggatagctaggaaatgtcaaaggaaactactgctgaatccagtgaaggtggcctggttcgattgaaatataccttcagaatcagagagaaatttgacgaaccaaacgatgactggttgaaatgcattgaagctaccagcgacgagctgcttgggacatattcgaaggccgaagatgatgccttgtctgcagccttcgggggtcggggcaag

SEQ ID NO: 118270 - DNA, 708 bp, Zea Mays
ctagaggctgaagccctgccgccaagccaagacttagctaggactccactctataactacctccaccatgataaggtacttgggagtctctcctccctctttcgctcgtttgtaacccctactacgagctttgatcatcaatgatgctgctagtgcaagctaccaatgaataggaggaatgttatgcaagatctagtataaattttgcgcacactgtgcacatcgtccgaacctcagaacgcgcataacaaatttacttgtcaaagtgaggttcaaaacactgacacccttactcaaatctagtggacaatattatttagatcatccaccatcacccctctccctcctagtgaccaagctgccctcagcccttctcctctctgagatcatagtattagcactgactatattctagtttagactaaatgtaccataatctgacttgagacaaatttagataggacgaggaaaaaataagtaagcagtagtattacatacaaggccatagcggtatcccaacctgttgtctttgtctctttattacataaccacttgcctgcatgtccaggccaatcctctacctcagaatgcactactcgattggacttatttcattgttttgaggtgtcctggtgcctcgtgcacgtagtggtggattttggtactaatagtagtagcatataagtattttggacaaatggtgttctc

SEQ ID NO: 118271 - DNA, 380 bp, Zea Mays
ggagaagcatgcaagcaaaagaagatacgtgtagaaggaatattgcaaaagaagggaaaagaaacaatcaacgaggaaattttggttggacttctttaattctaaagtagcctagtgtatgcattattcaaagtaaactccctatgtaattgatataaatcaataaatggctcacccaaaactgtatagttcaataaagcctagtatatgtttgcatacttacacaaataatcctggtacaagatctcatcagttgaaaggaacagtcacacaccatgtcccaaccatcactatagctgaaaagaaaaaattctcagaacaccaggtttacccataaacaaaaacttagaacaaaaggcccaaataaaacctttaaaagc

SEQ ID NO: 118272 - DNA, 273 bp, Zea Mays
cttttttcgatttatgctttcatttgtttgacattatggttcatagacctagtttagtaaggacggatctagcgtggaggctagggatgctccaacacccttacctccttgcactgttatcgattatttagttggttgtttgttgttggtcccaaattatttggacgatagctacacttaaaaagggtatgatatgtgacaatttcaataatgttgcacttttctataataagactagtgctatatgtattgctaaatccacacctactaaac

SEQ ID NO: 118273 - DNA, 427 bp, Zea Mays
gcggctggcattgttgcttattcgatatccatacaaactcgtgttgagatactacctgagtaaatcccaccctcgctaatcgtctgattccagcctcagtggtcgtgatcctaacatctggtatcagaggcaagtttggatccatctaacagataccggacgaggttgcagactaagggttaagagatggcaccaccaaaaggagattatcctatgtctcagatcctcgctcggattgaggaaggcaattgggagacccatcgaaggatggaggagatgaaggtgtcgatgagcgggatggagacaactgttcgaagtgtgttgatggagcaatgtgaattttagaagtggcgccctgaagtggagcacaaggtgtcacagatcagggatgctctcgtggggattcaagccaaggtggacaagttca

SEQ ID NO: 118274 - DNA, 470 bp, Zea Mays
ggggcatacaggctttgatgtgaggaaaagatactcaaatgtcagcagttatgatggtaaggttacttcatgcagatttgtttgttctaatgagggccaccgaagaaaagggcaaactgatcatgtgaccaagtgttttagagctgaaacaagaacgggctgcacatcccgaatgactctcacattggatcgaggggcagaaaactatgaagttactgatgttatgcttgaacacaactacaagcttcacttgccagaaacccgccacttgatggcatcacagaggaaaatttcagaagtgcaagcctttgaaattgaaactgcagatgattctggaatcaggccaaaagctgcacatgatttggcttgccgtcaagtaggtggaccacttaatcttagctacacttgtcgtgataggaaaaattatttacaaagcaaacggcagagggagttggcttttgggcaagccg

SEQ ID NO: 118275 - DNA, 404 bp, Zea Mays
tttggagatcgattggttgttcccaaggacccggagctcagaaagaagatactagatgaagctcatctttccaaattctccatgcaccctggtagcaacaagatgtaccatgatctcagatctttatattggtggaccagaatgaagagggaaattgccaagtacatatccgagtgtgacacttgccagaggataaaagctagtcacttgaaggcagcaggccctttgcaaccccttcccataccatcttggaaatgggaggacatttgcatggacttcatagtgggattgcccaatacctccaggcaccatgattccatctgggttattgtggacaggttgaccaagacttctcatttcctaccagtgcataccacccacaagacagagaagtatgcagaaat

SEQ ID NO: 118276 - DNA, 350 bp, Zea Mays
gagaatttgatgaatccactgtcggatcgttgcatcatcgggtggttcctgtaacaattgaggatcagctggcagaggatgtgccaaatggtactcaatttgacggtacgaggccttcactgctatgttggtccaactaatcaattttatcctgtgtgttcattttgcataaacatatgtattacatgaagttgagatacctccatttgtgttatgttgacatggtacttaatccaattatgtatgctgaaactgacattttaagaattgtgatagcttcatatggtaactacaatgaattaaataacattagtacatgcttgcaacttatttcagaacttgttctcttg

SEQ ID NO: 118277 - DNA, 319 bp, Zea Mays
aaccgacggtaagtccgtgggaaagacatcagcatactcctgcaaaaggttaaccacaataggggtatatccaaagatggtgcatcatcaagcggaacaagcatatgtgtgcatacaagtgcataacagggcatatgagcctcatgtaaatcatcaaaatctgcatgtgtagcaagtaaaacaggagcattcaactttatttcagatgtaacaggtgcggctgatggagatttgacttgttgtgcagttttagcagccctactaagatcatctttcagaatttggtcaggggtcattggatgtataactattttctggc

SEQ ID NO: 118278 - DNA, 480 bp, Zea Mays
gcggaagaaagcaacggtgccaggggctgccctacagccactggacacaaatcaggatgcactctctctgcgagaggccaggagccaaaagagaaaagccaccagcccaactcttcaggaggagcagattgaccaggaaatcagggatttagaagcaatccatcaacaagtgcaaaggaaaaaggagaagatgcttcgtctggctgatcttcagaagaagattgatgaaaccactgaggagatgcgtcatcttactcaagatgatcaggaccgaaggcctcaacacagggagcttcgtcaggagagctcattcaaagaagataaatggtaccattactttcatcatggtaactttacttttgatgatgcttctcctctggcagtagagttgtaggccacctcatggccacaatcctataagccacctcagttgcccatgtatgatgggcattcagatctaaagcaattcttgatgagtgg

SEQ ID NO: 118279 - DNA, 2601 bp, Zea Mays
gatgtggtgatcacggcttggttcggcatctcggaggttcctattaccgcggtattgtattcaccaatgctactcattctacaagcatttactttttaattgtgctttcacttaaaatgtaattttgtcagttcacagtaccctgtactaccacactagcgaaaagggttttgctcttctttgagtgatggcatttacttgagtatgtagtgtacacatttttgtttatgtttcagagagatttattcatcagtgcttcacgtatttgattctgctagtccttagcttaaaacggtattgctgtttggaagttaatttgggaagccgtcctggaaaacgatacttgcgagctctacggcgatgcacaagagtgacatgagtcacatgaccacctcatcttccactgtaccgtcgcccgctccttctgggaacacatcggctgggcggctggcaacttgaccacttgccacccgtcaccccggctgtggcctgtgggagatgcctagtcctgcacacgccccttcagaaattttctcaaccttgttgctgctatgctgttggtggcgtatataaaaccaccggaatgacgtggtcttttgtcactagcaaccttgcctgcggagactcttagtggcctgcagagatgattgtcgtctctggcgttatcggctgcgtttacatgatagctggatcgtcgacgattggtgtcaattgtttgtcatggcctacaggcctagtcctcccctcacctctgcattgtattcccatggatcccaacccaaaacaactgcaggtgcctatgaaccctccatccctaacataccagcatcaatagaaagtatttagggaggggggggggggtatttggaatttttatttttggaaaaaaataaattcgttcgcactagtctatttggcttggaatttattattccgtaaccttttgaagttcacatacaagcttatcttaaattcgtggggtgtgatatgaaaattgattacatagattcttctgctatgtttctatgctgtaatttactgcacactcttcatcttagcttcctgtagcagaagtgaacacataagtatctcctccatatgagtatatgaccattgatgaaatacaaataaattttgcatagaactatattagcttaattcatttatgcctatattatgattaaggacagacccagtgctggcggctctcatgtaagtggagccttttttcgataagaagcgctgtattaaattcaagagttagcatcacgccgatacaacatcgaagagttcatgcccgacctctgcataactagggtgcacacaacctgatataagtggagcctagagaaggaataatcaagacaagtcttaaccctgcattttgcatagaggttgcatcaaacctaggaccttagtagaaagacttctcattgtgtcaggcctatcattctgtgcttaaactatggttattggtatgaaactcattccaaggacccaaacggtacctacatgaaaaagaagaacaatttccatctacattctgtacaacgaattgctttcttttgctactactaattttaattttgttccatgattcctacctcttttcttgtagaaaactgttagagatgagaaagaagtccttaaagctgttgagtatgtgcatgaattgatagacaaagaagtagctgcgggaacgagcccgtcaaacatattcgtttgtgggatgagccaaggaggtaaatcaatgagcttaatctgcattttatttagtattctaggccataagatagtaccaatacagatacttctgtttattttcgcaggtgctctagctatagcgagtgctctactctacccaaaaactctgggtggctgtgctgtcttcagtggctcagttccgccgaataaatcattcgccgataaggtgtcacctgaagctagaaaggtaataagctgcagctatgcttatgttttcagaactgcatcttgttgactcttgttacctaaatacgaactcttgtttcagacaccggtgttatggtttcatgggatggcagatggggtggtcctatttgaagcaggacatgctgggtgtgcatttttagaggagcttggcatgtcctgtgaattcaaggtaatacaggaagctgtagtcaatgctcacttttaaaacattttgcctccctcccaacaagtggctctgcaaacatttgagctcgttttcaaacacgcctgacttcagctatatgtctgttttcccaattgattttttgaccagttttcccaatcatctactcaggcttatcctacccttggacattcattggttgacgaagagcttcaatactttcagcaatggatcctgattcgtctagggatggctgcatctggagcggctgaaaccgcaaggccatcatcgtcatctaaccacaacgaccatctccaatagctgttttttttgtcattgcttagtttctagtacaattcattgctgctatctttgcgtggcacatcagttctcgttgtgacgaacataaacatctttcttaatctccttcacattatttttttataatagcagtaattgacttaaca

SEQ ID NO: 118280 - DNA, 351 bp, Zea Mays
gtgcccccccaagcggggtactgtggcatccaaaatggatatggtggcatgccgcacatttaatttgggacatatggtggaggtaaatatgtgtatggatatggcataggtggataagggggtggaggtgtccatgtaggtatgttaggtctcaattggacaatatgaccttctatttcttccgattggtggggtggtccaatcggtcttacctgacattgctcacgaatgggcgagcgaggtcgctttgctggccggtcactggggtcggccttctttttcacatatttggacaataattgatcaaaagttgggccggatttgaccagccgaccagctgctttaaatgta

SEQ ID NO: 118281 - DNA, 341 bp, Zea Mays
aaaacaccccctttgccctaatatttgataattttatacagagagaacccctcactttttaagccccaaattttgagacagagaattatacaccagtaagaagccactgtaattgttgcagaatttttggaaatttattaagttatctcgtagttcaaacccaccttaaaagcataaaagaaatagaaagaaagagagggaataataaatctcactccaatgaattcagctataaatcttaataaaccttcactaagacattaaaaagaaatcagtggaacatccaaaatgaacttaccaattagcttaaccaagcttgaccctaatttgctaagtgtacc

SEQ ID NO: 118282 - DNA, 774 bp, Zea Mays
caacaaggccatgcaagttgaaagggctaaggaggaagaaaaaggacacctcaaaagaaagttcctggttctccgggcacagcagcaggaccggcaccagaagactcgatcatttgggtttccacccaaagggcccaacttcagtagaccagctggacccactccgtcgcgattcagctagtagagtcagagctccttccattccccctcagtggcaagcaaccaacccccggcaaatgcatgttggcactgtggtgatcccagtcacttcaagaacaactatccgcagctgaagccaccaggacccgcctactccaacttagtgaatggccccaagaatacctcagcatccgcccccaaggcgccctccgccgtcagccagcagatcaaggctccgtactaaggaagggctcgagtaaatcacgtcgatgcccaggaagctcagcaggctccgggagtagtgctcggtgagttccttgttgaatttactctcgctaccgtacttttcgattctggagcatcccactctttcatagccactagttttgtgaaaaagcatggcattccctctactcctctggagattcccttagtcacccgaaccccagggtccgacctcctatgccagctaaaatgctcccaagtcagaatccttttaagtggggtagttttcctggcagacttaaccgtcttgccatccaaaggaattgatgtaatcctagggatggattggctaactaaacacaaaggcattatcagttgcgcagacaagac

SEQ ID NO: 118283 - DNA, 473 bp, Zea Mays
ctttctcttcacaactctaagtccccgacggtgaacggcggcacgcttcggcgaacctgtatcgaccggactacgcaacgaccagtgtccttacttggtctacacctaattccacccctggcgatccaaatctatcactcaattgcacaagtctggcccggagttcttctgctcatgacaacgacaagatccgagaggtgttcccgacgactaggcgtggtatagtttaattggcgaggttgccgagtatcacaagcatactagagtacggaaacacgaaccaggagggcaagagcggacctgtagacggtcgaccacgacgaggtgactcgcggtggagcggagagtggatttggggggaacgaaattggggcgctactatggatgatcggaggcgagggctggtgctctgggtttgtaacaagtagacagaataggccgaggcatcaatttatagaggacggctgcaagga

SEQ ID NO: 118284 - DNA, 485 bp, Zea Mays
tggttagtgtggaccaagggtataataatcttctggagactgtttcccataagctttgtgatgattttaagtgctgaactgctaagggaaattggtctgtagtttccaatagttgttgggttgctgactttggggatcagggttatgaaagagttgttaagagcagtcaactgaacttggccactgaaaaatttatcacacaattggtatatgtcatgattaatgatttcccaacaactcttgtaaaaggcactgttaaattcgtctggaccaggtgctttatttgctggcatttccttaaccactttgtctatgcaggtaatccatgtttcattaattcatttctcatctttccatttatgaagtgcggttagttttgttctaatgtaggagaattatattgatgacccaatgaaatttttattggtagaaaattttatcaaaagtaaatttagaaacagcctttataaaacattggttcgtgg

SEQ ID NO: 118285 - DNA, 462 bp, Zea Mays
gtttgtttgaaaatacagaagttttttcaacctaatgatccaattatgcttcgaccctcactcactttttcactttatttgtcctctttgattctttgctctacagaaaaacagggtaagtatctaagggagttcataaaaaagtttcgacaatacaagtctaaggacgaaccttccaggtatattcttcagcttccaaggcagctagctatcgaccaactttgttccataactcaaagaaaaatctcttcgtagcgtcgagtacgcttttcaaaggactcttgatatcctcaattgtcatgtcgaaactagtttctcctatgtctttagcatggttgcagtcagctttctcgagtactgaagccacaccacgcgacccaatcatcgcagtaatctctacgggtgttgattatcgacccgacttctcccaattccttttctatccaaccgagtgctccctcg

SEQ ID NO: 118286 - DNA, 465 bp, Zea Mays
ccaaccaagcgacatcaacgaggccaagcacctcaagcaccgaagccgggacgttgcagtcattcagggccagctttacaagaagggggtcagccaacccatgcttaaatgcgtcactgagaccgaaggcatccagatcctgcgcgaagtccacagcggaacttgcggctctcacgcggggcctagggccctcgctgccaaggtgatccgtcaaggcttctactggcccgctataatctgcgccgcgaatcgggtcacgaggtcgtgcgaagcctgccagaagttttccccccgttcgggccacccttcgcaattcacaaaactgatcgcccacacgtggccccttcagcgctggggcctggacattgtcgggccactacccacggcccaagggaacctcaagttcacctttgtcgtcgtcgagtattttaccaagtggatcgaggcaagggcagtatccacaat

SEQ ID NO: 118287 - DNA, 537 bp, Zea Mays
ccagcgctgaagaggccatgtgtgggcgatgagcttcgtgaactgcgaagggtttcccgagcgtggagaaaatttctggcaggcttcgcaggaccttgtgacccgatttgcggcgcagatcatggcgggccagtaaaaaccttgacggattacttttgcggctagtgccctaggtcctacgtgagagccgcaggtcccgctgtggacttcgcgcagaatttggacgccttcggtctcggtgacacacttaagcatgggttgactgacccctttcttgtaaagctgtccttcgattagtgcaaagtcccggcttcgatgtttgaggcgcttggcttcattgatgtcggttggatgatagtacccctgcaggaacagggtttttggtgcccgccagtctttggtcatgataaggttgactatgcggtggccctcgctgtcattggttatttgtagcccccctgggctgcggacggctggcgtgccgatgacatggtagaatacgtcggagggcagggcctcgcctctggcgactgcctt

SEQ ID NO: 118288 - DNA, 484 bp, Zea Mays
tggaaattctctcccttcccgctcagggagacaggcagacgttcgtactccgagttggactgagtctcccacggaccaagaagtagccgaggcgggcgtgttgcttactgaggttggattactgaaagagagaggtctgactgccgaggccgtggtcacagattttgttttcaaaaacattcagccgctgaaagacagagcttatccggcatatctttaccgagggctggccgactcaacccgagttactaataggagaattccttctgtggatttggtgagccgactcgaaatgatcctcaggggtaaagtttcaaacgttggagctccagtggcatactcggcttggaacctgccttcttcccaagccttcactcttttcgtgtccaacccgcccgtgacagatagcaatctgggtcttagagttcgaccttctgctgaagaggtccgttccttagttgcttcgctcggggagatacctgat

SEQ ID NO: 118289 - DNA, 555 bp, Zea Mays
ctggaatagtaaatggaggatcttatggggggattgacctttttggagcccctccttccatgaatcttgcagatgaacggtatcctgaagccggcagcggaacagctaaggacgaggaagactagagtagtatagtctaagtaatgtacttatgtaaaataagtaaggaagtcgagttgtataatggagtatgtataattattactgttccacaatgaaataaagatggtgtatgtttggcatgttatatttccaaatgtttctttgtctcagatgtcatcccggacccgtgcacatgatggggcatgtacatctcgcggcgaggaggacactcccaatccgccactggtacctcctaccctggccgaggctatcgctgccttggtcaacaccaccgccgacaacacgcgctttctgcgtgaaatggcgggcaaccaatttcaacaacacggagggagagttccccctcaaggaccatgagacactacctatctagagttctccgaaacccgcccaccgctcttcgtcaaggtggaggaacccctggaagctgac

SEQ ID NO: 118290 - DNA, 410 bp, Zea Mays
gaaagcagagcaagcatgagtgagtgtgcgctgcaacttgggactgttccgtaagcacatcttttctgcatcaaattggcgtttgcatgcttacttggctgtcagggttctgtggttcgttaaccggaatgcaaccgtaaacaaagtcaaaattcaggtcaagttggagtgtcgcaggcaaggccttaataagttcttaaccaggagtacatacagaacaaaacctcatgccattcgctcgctgacctggtgcagctaagcacactgcactgcaagatctgtgtgaccatgatgtccataaccataaaataatataagcccatccagcaaagcaggctattaaacaagcgatccaggacctcggctcaaatctaacaccatttattaccctttatttttctttctaaaat

SEQ ID NO: 118291 - DNA, 640 bp, Zea Mays
gcagcagcagttgtttgcttacaggttataacatctggcgagtggtgaatggttattggtgggtgacagggcagaatcgagtggcggtgagggtgccaggtcagagtacggtggtcggcgggttggtaggcgaaactcgacacatcggcatgatatggatgacacttggcctcggcgaacggtgggacaggcagatggcactcgacactagcggaggctgggtggtcatggcagcggtagtgagctagtgagggtgagggatgaattgcctaggagtcgcttgtgctaggccggtggatgtgagacctgctaatttttcaggtatggcttgggccataatgggccctccgcccttggccctagtgatggcccaccggttagatctaggcctacctggtggtcatcattgttgggcctatcatattcatttcttatcttgtatgcaatggtttattgtactacactcctacctcaaaagaaaattagtgcaactctcttcttcggtttggtcagatctagttttgaccatctaatccgactaccggcgtaagcctatcttctaagggcatgttggctctagaacaaggtttataatatagccaaatgtaggctataagaatctttacaacctagcttatag

SEQ ID NO: 118292 - DNA, 446 bp, Zea Mays
cggagaggatcctgctggcttgctgaagttcgaccctttggaagggaacccaaaagatcaaaccctctggtgtctgtcctgttgttgagctcgaagaacttgaaattttctcttgaggtgacctttttcctcttatcatgctctttccacctggatggccttgttcgagaggtgcaagaaactgaggaagtcttggctggcaaggatggtcttgagttctggtcttaaccccttcaagaaacgagccatcttcttggcttccgtgctgacatcatcaggtgcatagcgagcaagttctattaatttatggatgtattcactaatggatcgccctccttgagttaactcccgaaattcctcctccttgagctggacgattcccaagggcacatgatgctctcagaaagcagcttcaaactctgcccaggtagcatctcttactgcgc

SEQ ID NO: 118293 - DNA, 414 bp, Zea Mays
attaaatggtaatttgatgaataaattttagaaaatctctttgaacatgctcttacattccttccataccgaagtgtgcacgtgccacccacgcagttcgcttgataagaaaagctgaaagcctgaaacaacatcatcctcgcaaagcaaagcaaaacagcacgacaagaagatcctgacgttatccatcggtccgtcacagtcaacagccagtcaacagtagaatcagcactgatactgctggagtcacagctcacgagtgacaagtgtagcttgaatctaccaaaatatcacaaactaaccgagtactactagtctgcagctgctgctagtgctaggttcattgattctaaacaaaattcatttaaagatgaactaccagtaggctaaaattccgtccactaattgctagat

SEQ ID NO: 118294 - DNA, 381 bp, Zea Mays
gggaaaaccaattttggtaccgtaaatttcttcttttgaggcgatgatggctcggtcgtttgttcaagatctttgggtggtggggaaggtgaataattgaatgcatggtgatgctagtggcagagatagtgagttaggtgatgacggattgtcaagagctggcacaatcgatgatgatggtaggttagaaagagactaggtaggtgaaggtaatgggttagaaagaggatctacaggtgatgacagttggttagcaacaagatcggcaagtagtgactgctgagttagtgacatggcttgagaggatggtggtggctcacacaactagacatcccgtcgcggccaaaggatgaaattcttgatagcctttccatgtttctc

SEQ ID NO: 118295 - DNA, 299 bp, Zea Mays
gaattacggtgttcaatcgttcttcctccagtacatcaatatcttctagcctggtagcttctgcctcggctatgctttcgaaggtcaaccttggcgccccgaatatgaggtcggcgggtagcacttcttctgaaccataaaccataaagaacggggtatttctatgcagagctcgactaggttgagttctcaagctccaaaccacatatggcagctctctgatccactttcctgcaagcttttcattcttgtcaaacactttcttcctgagcgcttcaagtatcattctgttggccctt

SEQ ID NO: 118296 - DNA, 500 bp, Zea Mays
cagcatactgccatggtcaccacattggttggcaagtggggtcaatacaaggtgatgaagctgttagcaagcaatcgtcagtggaaagagatgaacaagacaacagaaacagacgcgacagaagagaaggcacaagcgcagcggaggagatcagagtgcgccaggaagccaaatatgaatgtggttgggccacattgggacatgtaatatagacctcaatactgatacacttgtgtgaccgcgtccatatataaatggcgtgtatctgtacagaagagggtatcgaagaacaaaaataacaattctattatcgtctaccctgctatcttcttcttccccatgtcatatcttcccgttctccacacctctagcgactgttgttcgtgccctagccgacagagttgttaacaggaggggaggaggagagagtagatgcgctagggtttggggcctcccgtgtcgctcgagtggaagacgacgcgagggtgttactatccaac

SEQ ID NO: 118297 - DNA, 310 bp, Zea Mays
gcctagcatggagagaacgaagtgagccacgcacgaagaaattgtcagagatatgggccgccccagtactttgctcgctctgctctatttggaccgcaataagacatccagcccacgacgtatgtgacttcgtttttatgggtgttgcaactttaaattagtaccatatgaactaccaaatggtgcagaaactggcttataaactcaggtgcggaggatgtagtactgtttctcagttcgtcgtgtaggcgccccgaggaggcaccaagacagtctgcaacgccgcactcctaatctgtgtttgtttttg

SEQ ID NO: 118298 - DNA, 730 bp, Zea Mays
gaaaaaattgtgaaaggggattgtgttgcagtgtgttgctgaaaatttcagtttacattgatttggtgagaatctttctagcaatgatttcatatcatttagcacgtcaacacacttggttgatagtaccagagcccaccttgatcagcctcctatagctccactaaaaacctgaaccgggacgtttgacttgtgatcctttcgaccgctctaccacctctgtagaagctatcacaccggcaccatcacggtcatagatatcaagaaagagcttggataagtaagaggtgagatcgagtgttccacaaatactttcatattctactttctcttgcttccctctaacatggtaggatccaattcaagtgttcatggtggaaaccatggagacggagagccccctgtctctcgggctaaattgcatcaaatggccgactcactcgtgggggccatggaaaggatgttaaatgaatgtctgcccacgacaggaggttgaaggctacatcatcgtgatccagaagaatttaaccgcgaaacatctgaagatgagaattctgttttcggcaatgaattcgatcccttcagcgatggtcatagaggttatggtgatggtcgccacactgatttcgataatttgcatggaaggcgtcgtgcacacggatgccgagtaagatttgaagacgaggagtctgaagaccatgatcatgaggaaggatctgatgaaaatcct

SEQ ID NO: 118299 - DNA, 293 bp, Zea Mays
cattagcatgcaactcttaggtgttgaagatttgcaatcttcggatagctcgttgggacaggggtttcagattttcatgcctgtgcaccctcccaatcctattgctgaagcacaagaggggtttcacatgatgattaaacaagaagtccatgaagtccaaataccgacggtcttggctctacctgctgctcctttcgaaggtaatgtaaaccttccagaagtggaccaggccctagtggcccaggaacaggtacctgtcaatgggaataatgatctacaggtgcaagttcttc

SEQ ID NO: 118300 - DNA, 343 bp, Zea Mays
ccatgcctggcacctagccacaccgcgtccgccagtccacttcccactcataacctaagaacccctcgggccacgtagcattcatgatctacaagtccctaggaatgtggcgcatttatgctccgcgcgcccccgacctacgacacactcatggcctatcgaattagacatgtgttgtcattggcgatgtctgcgttctctgcgtcccgaccatttcgtaattcgctgatatattcaccaaggggctcctgtctattgttttcactgcgatagagttgtgtgcgggagtgttagagtaaatgttagtgttttctatatattgttagggtttccttgtacaccc

SEQ ID NO: 118301 - DNA, 1611 bp, Zea Mays
aatcaatccacattttggattacataaatacctatatcatgcaaatcgggtatggtgggcgactagcatcaggtagtcgaggggggctagtctggcactccgtcgagatcgaaaagctgagtacctagatattcctctaaaagaacacataaaagggtggcactatgtgtggtttacacttgagaatcacaataactcccttcccccctgttctagaaggcagccagaagttagggtgcccagctggatagagggcccaaacgatgctcaggatagtgaagcaaggattctactaactaggatcgctgggttgaaggacagaggcctgatcgtcgaggcagttgtgatttattttgtatttaacaatatctagcctctaaaagatagagtgcatcctgcatatctatatatcggggttagagatcctgcccgagtaactgacagacgtatcttggaggaagatatattgggccgagttgagatgatgctaagaggtgttattgttaaccatagtgcccctcagtcttactctgtgtggaatctggttcctgctatgagttctgaccgctttgcccttctattgttattcgccgagttattctatgggtttttgtgttagcattagcgttttctcgttacgaagttctttctctgagtttgtgtccaaccctcctatcactgatgattacggtggctctgtttataaggcacggccgtctgctgctgaaattgaggccatagttgctgctcactagggtctgcctgaggaagactaacagacccacattttcatacaatgcccggatgatgattatgaaattgaagatgtctttggcatgctagctggggagtcttttgagtcggtggagctcgtgttagggagtgcagcccccgagcaatcaggcattgctacaacgaaagtgtatgtacttgtaagtcctcggcgcaagcggcatagttgactagatgcccaggtcgttgtttcgaaggctaagcaaaagaagaggattcttcggcatacattagatatccaacaagtgtctgctcaaaccgagtcagtcactactgatgaaattatggatgattatctggttgatcaggtgggggtggtggtgcgtttaggtcggcttggtatgttgtggaggaggtggaggaggaagaagaggaggaggaagaagaactcccactggttcgtcgtgagtggcaatccaaagcttgaagtgatacttccagtcttgctgccctaacgaggatggtgagagtttaggctctagcaatatccgttgtggagtgccaccttgaagaagccgttctagctagaggcgttgctgtgcgaactacctgagatcaatgttgtcaatgttgatgttgttcgttcaaatgaagcaccttctattggtttgttggctgggccagaggtaagcctaccaatacctcaagaagttgatgcattagtcgaccgccctattgatccagctccagccctagagggcgctctagcccctaagggtgctatagctcctgagggtgtagcggttggctcctctcctactattttggtggaagtccaggttgggtcgccattacctcgggttgatgatgttagggcaa

SEQ ID NO: 118302 - DNA, 375 bp, Zea Mays
tggcttggggaaaagtatgtcatccgttgcagcttggaggtctaggtattgctagccttcctgagctctgttggtccctccgcatgcgatggctttggttgcaaaaaactgacccaagacgcccttggtctagcctgtccattcaagttcctagcacggcccgttccttcttctccaaggtgttgatctctgatgtggggaatgggaccaacaccatgttctggatagataaatggatccatgcaaaagggtatctgatattgctccaagattattcagcattattccaaaaagaattattaacagaagaactgtgcagcaggccctattgaacagacgatggattgcagacatcaaaggggctcttacagttgg

SEQ ID NO: 118303 - DNA, 553 bp, Zea Mays
cagacgatgtgcgcggtggacgcagaatttatactagttcgggcagaatgtccatacttccattcatcggtggcttacgctaccggcaccattgatatcaaagctcgtagtaagagttacaagcgagcaacagagggaggagaggctcccaagtctcttatcgtggtggaggtagagctaagggttacaaggtggtgtcctagctaattcttggcttggcgacaaggcttcggtctctgggtcctcgtcggtgcgtcctcctcctgttcaccggaccttctgggtgtctttttgtctaggagttgaagctctcatttagttgtaaagcgggcaagagctctaagttgtgtggagaaccttgcgagacatatgtcccagcattgagcaaggtaaagactcaagtttgatcttggtgatcacttgagtgaggaaaggattgaaagagaccctatcttttaggaactcctcaacggagacatggatttctttgtgaaatcaaacttcgataaataaatcattatgtctctttatgctttctctttgtcatttgttt

SEQ ID NO: 118304 - DNA, 531 bp, Zea Mays
atgcttttgtggtttcaatgacagcgtctagcacgctgatcatcctccttctcttgggagttgtggcaggtgcctttgtcaccttcggcaattctgcctccattaatgggctcagaatttttggcagcatcattgtttttctaattctggctctttgacttcggttgacccgactataggcacctttggcaccgcagtcgatccttcggcttcagcctcagcagaagtagcctgttttgcttcggtagcggaggaggtcccttcaccaaatttaggcactacggtcgtttcaatatattgaggcctgtgggtcaaaacctttattttcttgcccttcggcacatcagtggtgaccgaagtgatagttttcctcttttttccttgccttctcaaggggtagcagtaatcaggatatatgaagccaattgcatcaaaacctctgttcaatcttttcttgccccgacccccgaaggctgaggacaaggcatcatcttcggccatggtatatgtcccaagcaattcgtcgctagt

SEQ ID NO: 118305 - DNA, 518 bp, Zea Mays
agctttccactctccgtttcaatatgaactccacgtggagtcccaattttgatacattcatcgacttgctcaacaagcaatctctgcaatgtcccaacacccttgtcggtacagagcaagtcttctttgacggtctttctctcacccatcatcgacaagaggacatttctactcgtcctcgttccctaactctacaacctctctttccctatagctttccactctccgtttcaatatgaactccaggtggagtcccaattttgatacattcatggacttgctcaacaagcaatctccgcaatgtcccaacacccttgtcggtacagagcaagtcttctttgacggtctttctctcatccatcatcgacgagaggacatttctactcgtcctcgttccctaactctacaacctctctttccctatatgtatcgtccacctccgtatccataccgaccaaatgatgatgctcctcctcccactactaagcttctaacaatcgacactcctaccactgaag

SEQ ID NO: 118306 - DNA, 515 bp, Zea Mays
ctttgaaagagggtcggttttgaactttagaaaaacctgatttttttcttttatgttcttctctttggtgacctttttgggttttttctgaaatctttttggggtcactccctttatattttttgtagggtattaagtgtactacaacttttataattagcccaagtcatgacaatgtagtttacatagcctttttgctaaactcccctctagggctccatttgcctaaagggatttgaattagggttcgagcccttctctcctctttaggtgcatgataaggccaaggcatgacttctaagatgggttacacctacttaggattttgatccccaagtttggtgtcttttgctcaaactaaacaacatgtgttgatgggttcaatagtgtagtcttgagtgaaaaccctaagtaagacctagggtgttacacttcaccccaggcatgtcagaacgatccacaatcccaacacaaatgatgacagagccaatcatactcagagcagccagcacaaa

SEQ ID NO: 118307 - DNA, 550 bp, Zea Mays
cccttcttcttcctattcttaaggactagcttctcttgctttgctatgttgagccgttgcccatttctttggagaccaagctttgcttgctctaaatgatatatttttggtttttgtctgactttggtcattcgagtgagttctctttcctcattctctttctgctaatctttgagtccatatgatggtggtgttgacaatacattcatcaagggggagattgcaaacataaggttgacttgtcctttgtggttcgggttgatgatgagtgattctttgttaccaacaaccacacaacgtacaccgtcttgctaggaaggaacggtatccatgccaactactacatcccatcaacaatgcacctgattcagtgggacaaagacaaagtggaagtagtccctgcggatgactcatgcaaaattttactcgccgatatgaacgtgtgggatgcagatgaacaagagccaatatcaagaattgacttggaaggttgtgactgtgtagaagcatcagaaactaggcttaggctggtcttatccactagccctac

SEQ ID NO: 118308 - DNA, 413 bp, Zea Mays
caacaggcatttgctggcggttggttgcttgcaaccgagggggactgaaaggagctctgactctactgactgaaacatgatggagtgggtccagctggtctattgaagcttggtcccttgggtggaaacccaaaggattgagttctctggtgtcggtcatgttgctgagctcggaggacttggaatttcctcttgaggtgacctttttcttcttcccttgccctttccacttgtatggctttgtttgagaggtgcgagaagctgaggaaatcttggctggctgggatggtcttgagttctggtctgatccctttcaaaaagcgagccatcttcttggcttctgtgctgacgtcatcaggcgcatagcgggctaattatgtgaatttgtgcacgtactcactgacagatcttcc

SEQ ID NO: 118309 - DNA, 283 bp, Zea Mays
aatacacctgctcacattggtgagcaatgattatagtgtcgtggccatgtattttaccctcgtgtttgacttccaccatgccatattggttttttcacgttctactattgggagtaacccaatcacaatcaaagaacaccacttttagttgtttatccctaaaaacatgtactccaatatttctttaatgactacataataattagtcaccttcccttgatcatcaatagctctagttataattctagaattagttgcggctacaagaggatggacattttta

SEQ ID NO: 118310 - DNA, 706 bp, Zea Mays
aggtttcatttggaaaccaaactccgataaatgaattgtagtgtccttgtgctttgtctttgcaatttgtttctacctttcttccttaagttcacacttggttattcttcatattgctgctaagatcacattatgcacatctttattggtaacaacttgaaagcattgaacttatattcgccctagactaaccatcttgttgtaacacttaaggttacttatctcagaccaagtttggattattttgaactaaattttcgttttcgcccattcactccctctaggtgactttcaactagtgtaaaccagaagcatggggctatgtacctgttggcggtcgacatcatttccacaaccttaatgcgcttgtgcttgcctgcgagactatacacctacacccatgtctcccctcaagatccacaacatagtacactatgttggcctcagccagggccacaccctgatggatgggccatgccgcccaccgcgtccacagcatgatgttatcgttgatgtcttatgtatcctcccacgtctccctgcttttgtccggcacacgcacgacaaacccttctcctcctgcagttgtcatggggtgcggcaattcccacctacatcagcttgacgcaggggactccattaggaagctgtgctccatgtatgtgttcaggacatcaggtcatggatgggatgaggaaggcagaac

SEQ ID NO: 118311 - DNA, 353 bp, Zea Mays
gtttatgagagcatacaaagaaaaggataagagtctagcaagaatgataagggactgtgatgactaaggaaatgacacctcaccaactatttgcaaagattcaacaacatgagtccgaagaagccccaatcaagacaagagacacttatgccttgatctcaaatgaacaagattcctccaagaagaacaaagatcacaagacaaagaaagtggtcgaaacatcaagtgatgaagacagttcaagtgatgaagacacaactatgttcatcaaaaccttcaagaagtttgtgaggaaaaatgataagtatcaaagaaaaggaaagaagagggcatgttatgaatgtggccaaacc

SEQ ID NO: 118312 - DNA, 490 bp, Zea Mays
aatgcttcgtaatatttgtattaaaggatgatatatcctgaccaattccatcaagaaagccatctccagatcgtcttcttcagaaagaaggtcttctactgtgtaaacatcatcagccattttgcatggtcaaacgtcaaaccattctgccgcagtggggaattaataatggtgctcggcaacatgcaaatgatgaattgatgacgacgtacgtaccctattgtaggcttttgcggcgtcgcggatcttgcctttcccggcctggatgcgtgtatgtgtggttacacgcaacgcaaacgacgtactacacctgttcaacgaaatcccaaactcaaatctgtcttggctagaaactttaattggctctcgcttgtttacttacgtatacacgtacgcgctctcgaagattacgatgtgttgagagcccagcttcatcgacgatacatgcagtgagacgtacgtacgatcgacagcgtgtgctgcaaccggc

SEQ ID NO: 118313 - DNA, 411 bp, Zea Mays
agctagcccactctgatcctgcgcaatttcttcagatttgtggcaatcgatgtgtggagctagtagctggctagactctagagtctacagctagagctagttagctaagcaagccttccgcttaagctcgccgtgcctaggggtgtgcttatatatgcaattctcgtactgcatttggactgattaggctgcatgtggcttacaaacaaagccaaaacaagtaacgaattatatatacaatgatagcctaatttgctggaatagtttaattttgacttggttcggtagtggagtgcgtcgtcgacaagatgcatgctaccctcgtacacggccgggggatcggccggacagccacgctctcgctactccaaatattatttctaaaatgtactcatagatgagagatattcc

SEQ ID NO: 118314 - DNA, 594 bp, Zea Mays
gctgaaactgagcaggcagatattgaagagggtgatgctaatgaaggagagattgattataacatcattatgccatcgaagcccagccatctgaattttgggaaatcaactgtgtctgaagctgatatgagtatgatgacgaagctaggctacttcagagaagccgagaaggggttggttcgctttggcggggaagagactatcccgaaaccagaagatgatgaagttgtagtttttaagagcttcttcaaagcagggttgagatttcctctacacagaatgattgcagaagtcttggaaaattttgggatttaccttcatcaactgacccctaacgccattgttaggctcaccatgtacatctcggctctccgaagtcaaggagtagagccgctcgccgaagcattctgccgagtacatgaacttcattatcagacaaaggctagagaagacggattgcatgagaacttcagctgttataattttgcttatcggaaggatatgaagacactgatggtcagctatcgtactaaatggccgaccggttggaaatctgaatggttttatgttaaaattgatgaggaaaaggagaag

SEQ ID NO: 118315 - DNA, 335 bp, Zea Mays
gtgagtttaaatcctaaataaattaaaaaattataattcattcaatcttatccaattcatatgggacagaaataactgaactagccctgatgtttttttatgggttcactcaaatgttgggataataagtctatttggtgattgttgctgtcgtttgtgtaattgtgttttcatccgtttcgtgaggccgagatatatggcgcagtactgcagtgctctttatgaagttgtggtcatgtaattattctttgcgattgcagttttacccgtgcacatgcgagcaactcagaaatgttgtatgacatccattttgttgagactaagctctcagtgta

SEQ ID NO: 118316 - DNA, 886 bp, Zea Mays
agcgctcacaaggacatccactggttgtattttgctttgaggcacataggaaaaatgtgtctgtttatattggtagtaaagtgtacgacatcaggcaaatgctgccaagcagagattttttatatgcagaaatgtatagtccaactcgttttatcattgcccatggtttacccaattactcataccattctgaaattgggtatcgatttatgcaacatttctaggtataataattttgagagaaaacttataacaacaattaattatttgtggtgttgccagtagggcaaacatttctcctcatattatataccaaattgttctataaagcattatttcgatctcttcattgttcagaaaaaaaagagaagctttggaatagaacatacaaggccaagaatttgttttatccgggaaaaaccacctgattgctaagctttcgattaagcaaatggtgataactgcttggcaacagcgaaacaagactgttatccgtctgggaccaggcttcaacaacagatagtagtgctctcataagaagaaatcatcaggagtagagaggatacaataggtctccacaagatcttcatatttctatcacaaattatcatcactagtagtctagtggtcaagacatatggctcttctggctccaaggaccaaggacatattaatgtctaatttagcttcaagctcagtggtgatgtgggatttcatagctagtttctactcttcttactcctagtagatcagagatagattacggtaagcatttcaaaggtggaatccaatgtagttctgctacataaattccaggtatatgtccattcaggactgacctttaccatttggctgaaaaatatatcataccaatcaaaggactata

SEQ ID NO: 118317 - DNA, 392 bp, Zea Mays
gcagattaaagactcacatacatacaaatagaggtgtgggttagaaagacagataagaatgtgtacaggtggtccttcatcttgtgagcggtgttgtcgagggtttaagcctgataaacatgcactattgtatcctacagtcaagaaaccaaaccaaatgatctgcagcctttgcagctcgcatctagcgcccgaacacgtcaaaaaaggaaaattgactacaaactgagagaagggtaaattgtctatagtctgcgtctagctcctttgcatgatttcaatcaatattcacgggtctttcaaattaaaagaagggaaaactgtctacaaaatggtatatcagaatcaccctctcatagcaaacaaggcattagcacttgttctcccacttg

SEQ ID NO: 118318 - DNA, 451 bp, Zea Mays
ggaaagtctacatatagttcttcttctctttcccatgtagcttcatcttctccatggtgactccattgcactttgcacatttttatcactttactccttgtgacacgagtcaaagtatcaagaatcttgataggatacttagtataagtcagatcatcttgaacactaagatcctccattggtagctgctctttaggtaccctgaaacacttcttcaattgtgtgatacatgaaagacatcatgtacatccgcaagatgatcgggtagttctagttgataggcaacttctcccactcgcttcaagatcaagaagggtccaataaagcgaggggacaactttcctttaactttaaatcttcgcataccccgaatcggtgacaccttcaaatatacgtgatcaccctccttaaactcgagtagtctcctccgggtatcagcataacttttctg

SEQ ID NO: 118319 - DNA, 556 bp, Zea Mays
attgcatgcaatggcaatggaggaattgtccggtcgcctatgtcggtcaattcacaaggacagatatcaaacatcccactatcatcttagaagtcgttgcatcgtatgatcgatggatcttgcatgcatttttgggcggtcgggtccaacaatgacattaacgtactcaattagtcgccattattcaaggatgtccttcaaggtcaagcacccatagtgaacttcattgttaatggacacaaatacaatatgggatactatcttaccgatggcatatacccttcctggccagtgttcatcaagggtattcctcttccataaagtgagaaacatcagttattcacaaatgctcaagcaacatgccgcaaagatgtcgagtgcgcttttggggtgttgaaatctcggttcaacattatagcagttcctggacgttcatactctcaacatactcttggtttgatcatgtgtgcatgtgtcattttgcacaagatgatcatcgatgacgagcgtgataccgatttggatgagacatatgagacagttgattctaccgtcg

SEQ ID NO: 118320 - DNA, 336 bp, Zea Mays
taacgattgagtgcacaacaggaatcgagatgactctcattggccaaaataatcctcgttggcaaacgcaattggaactgcttttgttgaggccctcttctcataccttcctcctggtggtggcagtggccaaagctcaaacgatccaagtggtggttgtccctgcgtatgctacttttgtttgtctttggttcttaacttgtggacgatgtccctgagtatcttaaaccaaactatggtggtctttttgaatgatatgtgttttggtgaacaaaacacttaacttatctcgttcttgtgatttgaaatggtgatctatgttggtgacatgaagtt

SEQ ID NO: 118321 - DNA, 526 bp, Zea Mays
gagatccttaccgctatccgtgcggtggcgatggctggtcacggtgcagtgacccagcggcaaagcactcgatgccggagaggaattgtgccaactccgagggtctccgctactcgccgaggtccccgaaagttgcaacacaaactggcgacccttctgagcaactctccaaggtccaggcgatggtgattcatgagttcgacgatgccgaacacctcactgctcccaaccgatcatgcaggcgatgcacaacgccactacggtgatgatctttccccgcttttcctctctaagtgcgtggacgtagaagcaactccctcggcgcccgatgaagactaaaggatatcatatgtgtggatcgacgccggtggcttgtggttgaccacagaggaagtactcttctctcccttctctctcggtgttcaatgatgttgtgctagggctatgcgaaacttgcatttatagccacgacgaaaggtccggctggtgatcgatatgtggcgagattctaggcgtatatgtggag

SEQ ID NO: 118322 - DNA, 387 bp, Zea Mays
tgtccctctcctagcaaggtgtgagcgcaccctatgctcacatgaggtgcaggtttgggatgaacttgttcatgtccttcctcttctccatccttggtgctatagtttttgcttcattcttctccttcgtccttggtgctactatttttgcttgattcatgtacatttctgtttatgcaaagttggttttgtataaccttgttatctaactactatatgtaatgcactctagttcttgctgatgcttttaaactttgcttcatatctagggtttcacatgtttcattatgagttggtagacatctgttcttggtagatctagatgttgcatacttatgttgtggaggctagggataatggacctgttgtgaatggtgaggttttcca

SEQ ID NO: 118323 - DNA, 315 bp, Zea Mays
tataccttcgatcagtcttgagctaggtttctagcaatgtgccctagatgggcatgaagatcatctagtttaggagggaaattggcggactagggtttggtttttcaactagggacaagagtgatgcttgtaacaacaaggttggtaaatgtagtggtttgacaccttcaacaatacctagaaccacttcctagcccattaaattcactccacccaaatttgccacgctaggtgagaaaaagagtgtttaaggaacctccaacagccccacctcaaaaccactacagattcccaagcgcatctaccttaagaacc

SEQ ID NO: 118324 - DNA, 290 bp, Zea Mays
ttagtatgcaggatccaagaatcagaggtcaaagaagctttaaataggatgaaagggggcaaggcgatgggcccagatggtatcccgatagaggtgtggaaatgtcttgggatattgctatcgtttggctaaccaagttgttcaaccatatttttcgatcaaacaagatgcccaatgagtggaggaggagtacattagtaccaatcttcaagaacaagggagatattcaaagttgtgccaactatcgagggattaagctcatgagccacactatgaaagtctaagaggaa

SEQ ID NO: 118325 - DNA, 937 bp, Zea Mays
gtggctgccgtcgtttgttgatcaccggggaggatggttcggtggtgctgtcagatctaacgcatggttggtcactgggccagcagtgcccagtggcaactggcaaggcagcacgtacacgaggtggacttggaggttgagagttgagacgcgtcgtcgaaatgctagctctgctagtctctggttcaggatcgataataataagcttccgagtgaagaggaaactgtgtgccaacactgttatgaattcagcccatgggctggttgggcaaccaaaagcctcggaggcctgctgacatgggcggggccaggccgttaggcgttagcctatgcgcagattggctggctgctcatgtacaaagtgtcccccagtggggtaactgggtactgggctaattgagcttgaaatgtcgttcgaaaacctggttttcaaacaacagaacaagtgaggggtggtatagaattgtgaagcttctggatccaggctgcagcgccccagagctgacatgtctcactggaatatgcaatatagtttaaacatatatataccactcttgacagagttgtgagagagaagtggatgaactcacctttctccgatgcccgccgtattcatcctgacttgttcggttacaaagaatccatttgggatgctgtataatttgtacggagtataatatttaatcatctggaaccgtcccagctgctccattccatccaagcttggctgatgcatgcgtggctagctgctccgatgcccgcgctgccgatcgaattagcgacgagcagtggcggagcatatatatatatagcattgacagagcttgaagcacagacaataataagcagaagaagaaacatgcatccatgagatgcaaccaggattcagtagagtagaacaaatctgatgaggtctaagctctacctagcgctccgc

SEQ ID NO: 118326 - DNA, 456 bp, Zea Mays
atatattgcaaccacttttaaaggttgtggcaataactaacatctaatgcaacaaaaatattgttgttgcaatatctgtcgtggcattagggtgattttttagtagtgggaccctcctcgccccttgaggcaggtcaaaggcaagacagtttaccttgagcagcaggagggcagaaagaagggacgcatggacagagccgctcgtgcagcacttgctgcagcaacagagcaggctgagcagggaggctagctccagatttcctcagatcagatagcctatcgagttcgtcgccttgtgtctcagcctcgctccagtgctccccccactccttccgccatagcttccactcctcctcccacttcaccagctcttgttgctccagagccatccactacttccgttgtacccaccacctccaccactctagcttccactgctccctctcccgctcccgt

SEQ ID NO: 118327 - DNA, 482 bp, Zea Mays
gacgaatgaaaataggctgtttgaacggataggacggtggacgaggcgaagaacgattctgattaaaaggtcggattaccaacctggttcgcttctctggtccctgattagacctgtcacctccaaatccctttgattttccatggcctgtgttcttggcttctacggccagtgtcgtgctgacagctctgttgtaagtaagatctaggcaggtagccattttccgttggagcgtgtcgttaagtcccctcatgaagaaattatttttcttcaaatcagtatttacttgattgatggcatattgggacaaatgattgaacttgttgagatactgcattacagtatatcccccttgcttcagtcgaatgaacacctcttgtttcatgtggagcactccctctggaacatagtgctcatggaaggccagcttaaattcttcccaggtgatctgatgtccagccggttgaactgctacaaaattc

SEQ ID NO: 118328 - DNA, 341 bp, Zea Mays
tcggatatgggcagtctttgataaaatgtccagacttcccacaattgaagtagcccgttgaggaactagggagggcggggaaacgagcactaggggcactcggctgagttgttgaagtgggggcagtggcagggcggatgaagacaggttgtttgaaggggtaggagggtggatgaggtgaagaacggttttgattgaaaggtcggattaccaacctttgtcgcttttcaggtccctgattggacctgtcacctccgaatcccttcacttttctaggacctgtatgcttagcttcaactgccagcgctgtgctgacagccctgctgtaggagagatcaagg

SEQ ID NO: 118329 - DNA, 287 bp, Zea Mays
aaaagaaagacagcctttcaaacatagttcgaagtacaaaaataaatgttgttatcggttgctacaagctaagcaacacccctatccttgagaaactgtagcggtagtgtcactggctgtacaactgggcaaggtccatctcgtatgccttcttgatgaccaccctcttaagctcgacgtccatggctgcagtgtcaccttgattttagatgggatctcaaacttctccggtcgtgcttgcttaccagcctgaagaacaaggagtatcagtaagatcaagtaattat

SEQ ID NO: 118330 - DNA, 1068 bp, Zea Mays
ctggtttgatgaagttgaagaaggaactcctctcactcaagcagggagggatgttagtatgagtgtacagagacaagttcatccagttgtctcgctacacacctaaggaggttgtagacgatgagaagaaacatgacttatttatttctaggagggctgactgggccagtccaatatcgactgaggtcccacaccttcccttccttccaaaggctaattgatatggccatcatgttggagcacaagcgtgcttaacttagagggatgaagagaaagcccaccacccaagtacgagtaggtagcagcacctgtcctttctttgctacacagcaggggacaccacttgctcaagaggtccaagtggtggtttttggcacagtcttcccaacacacaacctagcagtttttcacaccctactcaatagtcctagtcatccatacttcatacacaacaccatcgccatgtggccctgataggcaccctagcaaggcctgttgcccctactaacccggtaggcaacacttttttcaaatgtggagagattggtcactatgccaacaattgtcccaagaagaatgtgtacaccactcccgcacgaggcagcaacactactaggcagaatcaaacatggggagtgggagtcaggctccaccaagtaaccaagggcagtagaatttcgtacatggtagggtgaaccacgtggagacagagactatccaaagatttgctaggtatgccacccaaccgagacattgagttcgttatcgatctcatacctagtactaccccctatttccaaacacccctacagaaagttagtcgaggaattaaaagagcttaagaggcagctaagggagttgttggacatgaaatttatatgccctagatcctcgccttcgggagcatcattcccattcgtccacaaaaaggatgctcccagaggatgtgtgaggattaccggccgctcaatgaggtaagcatcaagaataagtaccccttacctcgtatagaagatatgtttgatcaaatgagaggagccaaagtattttctaagtttgatatgtgat

SEQ ID NO: 118331 - DNA, 370 bp, Zea Mays
gatcattaatgaccatcagtaatgaattgtcatttccaactagttatggttggagtcaggaagttttgcacgctcctgacttgtgattaactgcatgtataagttcccctatggttttagtacgtgggaatccatgaaagatttcccatgcgtacattgggtatgttcccaatctcaccaccacagcgtacatgtatgggcacacagaaaactggggatctatgtgagaattcattctccgtcgatcattaagttttagaatctcttcatgagaatctatttatggcccgtacgcttgcttgaatcatgagcttttccaggcattagggggagatttcaagtaccaaaaatgaatgccaggaaattataa

SEQ ID NO: 118332 - DNA, 539 bp, Zea Mays
ttagttatctaattcctctggtctcaggactgcgcaccaaaaatagagaagtccagggtctaacgtgaaagaatcccaagactcagatctaccccgcggtggatggcgggttgattttttttccagggtctcttatgtaaaatgaaacggcgaaggggtatcattaattattggtcgtcccatcagcacacaacacgccagattaagtccaaacgatcacgaatacgtgaccgactccgactatccgatctagatccaacagctgatagtctctactgcaccgagccgttcatcatcgagtcaatgacccggatcgaacctcgcgaaacgatatgtcacggtctaatctgcaccgttggtctaccgatcaacgatacctgctcacccctctcgtccgcggtcgcccaagcgacggggcgcgcgatgacgcggcggaacatcgctggagcattccaattcacaacgccaacgaataattggcgcccacaactacgcaaaaaccaaatttgccactacctgaaccgattggggttgttaac

SEQ ID NO: 118333 - DNA, 523 bp, Zea Mays
gaccttgccagcaggatcactagaggaagaaggtttgctcacaccagcggacgcagcaagaacgtcagcaacaatgtcctcaggcaccacaacaccaggtcttttcattaggatttacccagcatgaacaactttgtccatcgctttgtcacacattgctttcttgataccatggtcatcctctaaggccttaatgtcgcaacgagcaatgtccaactcctgcacaacaagtttcttcgaggcgcgcaactccttgaagacaataacttattaagccgcgacacttcaatctgggaggccctcagctcatccctatgatggtcaagctttgacatggtaaagcgatgactcctctccaaagtagtaagggaactactggtgtcacgatattgtttatccagactaccatgggaatcaagaagtcttcgcatctcctcctacaggcaagaggggtactaagaatcaaaataaaggcgcgaaacaaaggcatcaggaacagttagaaaaatatacctcatgggct

SEQ ID NO: 118334 - DNA, 761 bp, Zea Mays
cacaaaaatggaaaacgatacaatcctaacaagatggtgcatgcatccgatggtgaagcatggaaacactttgatgccattcaccgtgagaaagctaaagaggctcgtaatgtacgtgttgcgctggccatagatgggttcaatccctatggaatgagcgctgccccgtacacttgttggctcgtgtttgttatcccaatcaatctccccacggtgtgtgctttcaaaggcagaacatgttcgtgtcattgataagtcccggacatctggggaataaaatgggcgtgtacatggagcctttgattgatgaattggtatgtgcttgggaggaaggggtacagacgcatgactgagctacgaagacaaacctcaaaatgcttatttggtaccagtactccatgcatgacttaccagcgtatgggctattctgcgcctggtgtgttcacagtaagtttccatgcccagtttgcaaggaagctcttaggttcatttggttgaaaatgggtggcaaatattcatcgctcgataaacatcaacaatttctccctcctgatcatccattctgcctagacataataaattttacgaaaggtgtcgtagtgacagaccacccacctacaacgatgagtggtgccaaaattcgtcaaagatagatggactcgtggccaatccagaaggtggttttgtgggatatggtgagtagcatatgtggacacgtaagtcgggcttgactcggctcccctattatgacgacatgctcc

SEQ ID NO: 118335 - DNA, 483 bp, Zea Mays
tcgaggtagtcgactttccggggtcctacaatgccatacttgggagaccttactatgccaatttcatgctcgtgccaaattacacgtatctaaagctaaagatgcctaggtcgcgagggctcatcacaatttctgcttcattcagggctgcgtacacctacgagcaagctaaatgtgagatcgcctcagcgctgaccgggctctaggagcacagagaccagggcggtgaaggaggtgcccccatcaactccaccaacatcatcaagcgggcgtggaccaaagggctcacgcaaaatatctagcaagccttttgtagaagatcagaactccaccttgtgaaatcacaaaaccctatactcgttgaagaagaatcaatgggaatgaagaaatgcgcgccaattgtcccaccaaaatcaaaacccaacattacaagtccgatcctggcattacaaggtgtgatggtcgagccaccatatctcccaa

SEQ ID NO: 118336 - DNA, 292 bp, Zea Mays
gccctcctgtccggctgtccctaaaccaccgcgcgcgatgttgcaggcgtacgtaacttgcaacattgaacagtctatatatatgattaagttcgatgagaccttacaagaatatcttttggcggatgattagatcccaacctatgatttccgcaggaattataacgggtgcttttggttttctttcgccatgcatgcatgtataccgcttttaatttaagcgggactctcgatcgccagtagaaagtagaaagtcgaacctcctgagaggcagcctactaatcaatcaata

SEQ ID NO: 118337 - DNA, 536 bp, Zea Mays
ctacggtcgaggatagcgcctgaccgcaacccatctaattcgtctgctaacgatccgatggccaggaagcttcttcctccccaaggctggacgcggcggcgaatgcatagcgcgcggcgacacctcaccggagatacataatctctcccctctagttccctaaatccgaatctgacgggtgctagacagacggggcgttattgcgaataggttggggagaatcttaccataggtagaagtcacaagtcatgggtccatggcacaccacggagcattgaggcccacggcggcgctaaggtacccggcgagcaattcctactgcgccaaagctcgaatcgtccctaccgaagcagctacacgaagcggaaacaagcacgaagctattggaggattgctcaccgagaatcgcctgcaaagatgctctgcccacggtggtcagcggattccagaggaggaatggacggcggcgagaaattctttggtccagggcgacgcttacgccagatagcaagcttgcgtacgatcctcggtcactg

SEQ ID NO: 118338 - DNA, 1204 bp, Zea Mays
tccagcagagcattgcaacgtcgcgcatgtgaaaaacataaaaaatctaaggacatgtgaaaaacatgaaaaatctaagatactatatttaaaggttgtatatatatatataatacatcaataactgaggtgtctcaagagaaaagctactacatcggatctgttgtggattcagactcgaaatcgataactcagacctagtaggactaaaactcagatccgaagggagttcgacccactcgccagaactagattgacgtgtgcaacagataaaggaaggcgacgcttttccttataccagaatacttccggttataaaattctcacatgttaagggaatcccacatgttacctcaaagaataaaactcctagacaataggccaaactactagaatagatcccattctatatccaacactttaccaagtaccattcttgtaactaaccctctccttctactataagacgaggggtaaagcacctcacaagggaagaagaggatatagccaccagcaaactggacgtagggtattatctcacgcgagagcccgaaacaatataaatctttgtgtttcttatacttttattttttggttgtttaatcttgtgaacacccacatagagaaatcctcaacagttgatgtgccagataggggagtgtgttgattataatagatctgatggaaacaactttcgtgtaagtacaagagatcaccttcagcattttcaagttcttcagcgatgcatcaaggagtctcaggcatataacagacaacccgaaaattgacatcatctcattttgctcgttgtgcttcatcagctatgcattaggatgggtccggctaaggcctagcacttcgacgacaccaacgctaacgaccctagatccaatctgcaaaatgcgtaaccaacaccctcacacctaaaggagctcggatattcgtccgaccccgatgactgtattggctcgaactcagaccctgagttcccaaatctcatctcgtgttcatggttgatggagagcatgaagatctccctctagtgcaggagaaggagattcgaagataaaaagacatcgagctcatggagagcaccccgacactaggaaaagtgcatagaatagaagtgcacacatcttcgacactgggaaaagtgttacacaacaaatatgtcacatgatgaattgatacatgggtcattgaa

SEQ ID NO: 118339 - DNA, 1216 bp, Zea Mays
cagcaagagaagaacatatttgctgtctttaatccactggatctgggaccaggttctgtttttaggaatacaaaacatccacaccatgagagagagtctttctcgccttagggactatgtggatgctcatggctcaatttcatcaaatgggagcccttcagctgtatctgttgttggagatcgggtaagttgatagtttgccttgctgatagaatttaggctgttttgaggttggcatctattcccataatgcatacatgaattttgcctgggaatgtggtatcaatttctttacatgccataccaatggataattctgaacctgtcatgtaacatctgtctcaagctcgtcaagtatgaagcagaaacagaaggctgatgtttttaattatttttctttggcagaggaaccgtggatcaacctggggtggaggcaatctaaatagcatgacatcattttcttcaacactgggggaatggctaaaccatatccagaatattctggttggtgcttcatggattgctgcacaaatttcagaagaagcagcgtcagttcttgtacattgcaggtttttatcttgatccctcagtctctaattcccatttaatctatttactgtggtaagtagagattacaatggataattttttatccttacgtgtgttgacctggcatgcatacaatgtgactatgtgaatgggttggtaagatcattactctgtgtggcatgattaaccccacggctgtgtctgcgtggcatggttacccccacaaggctgtgaaacattgtagatccttgtcctaatgttcatagagtactctgagtaactgaaaacctatggcttactttgtttgattgtttttgcactctagattttgtaagcaatgtagtttattagttaggcatttcaaagttccaggtaactcataatgccaaatttaatttcagtagaacctacagtgttccaaactttggcccctaccataccgtagcctgcagttaaccgacaatccttttggtgtattttgagatgaataatcctttaggtgtcatctgaggatcctgtgtgatctctatagctttgtctttgtagcatctgaatgatttttttccttctctgtttctgcagtgatggatgggaccgcacaacccagttggtttcacttgcttgtttattgcttgatccctattatcgaactttcagtggattccag

SEQ ID NO: 118340 - DNA, 576 bp, Zea Mays
tggcgcttgatgttgtcgacgttttagaggtaacaaccgagttatgcttgacaccgtcggtgttttttagaggtaacagccgagttatgacagacactgtcggcgttttagagataacgaccgaattatggctgaccctgtcggcgttttagaggtaacgaccgagtggtgcttgatgttgtcggcgttttagaggtaatagccaaattatgtcggcagtctcgctttcccgagtgatgacttggcgctttttagaaatggtgcccaacccgggaaaaccccatttatactcatgtcgacgtgcgcttttgagttctgagccctaacttcacatttctgcctcgaaccactcctctgtttccctaagatttccgcatcgaaccactcctcacatttccagcgagattgcgatgacgcccaagcggaagtagcagagttctgctacggcagtcattcctcccatcgatcccaacagttagttgtcgttcgcaggtaaccacatgtctgttgtctcagaatcagatctcctccaccttgttgatgttggagttcttcctccaaaagagctctgctctt

SEQ ID NO: 118341 - DNA, 549 bp, Zea Mays
taataagtttaacttttccctaatcctttcttaattggaattgatgaacaatttcgatgtttcacatagaaatatgattacctcattgaggtaataaaccttgtgtgccttgaaagccttggtcgggaactcgggatgaattgggtggtggtccttaggttccatgccctaatgaccagcctgcggatcagcaaaaccaacacgttagctagtaaatcaacagctaagagctagcagagatacactcgcagatgcaaatttgactataaactaagcatcataggaggttactggatctagatcactcggatccagcgaactcatcattccaagaagaatattctaattcatcaaggaccctgtatgatagtgccaatgttcgcaagcccgccccaccacattcattcaggtgcctagttgtatcaacttcatacatccttccattttttgccagcctatcaaatatgatgcttcttggttggaacaaagaacaatcaaggataggcaagctgaagccaaaaaaagtagtggcattgaaaaagatagaac

SEQ ID NO: 118342 - DNA, 518 bp, Zea Mays
ttgaactcctcaagcaattcacccaatgggcctctttcaggaaccccctccttccctgccacaggttctaataagacaaacacccacacctcattgcccttcaaccatttttgaaccttcagggctgaaacctggggcacttctgtcaccgcaactgaatctcccttcaaccaaatcctttctccttgatgctgaaatggcaacactttctgatcccagtcacattccattggactttgagctcttaaccaatcaaacccaagtatagcatcatacaccccaatctccaacaccctcatggtagatacaaaagtgtgtcccctgtccaccatctaatattcttcaccctcttgtcacttctcaacacctctccattggccaccttgacagagacaggagaacagggttcagtggctagttttaacttgtccaccataacttggctgatgaaactggtagaactgctagaatttaccaacatcaattgattctgaatcaaggctctaaacctaatacac

SEQ ID NO: 118343 - DNA, 293 bp, Zea Mays
ggcataagtgcaaatcgaaattatgcccaaaaactctagacactgcgaggtcaggctgggtagtatgagaaaagagggagaggaaggtacaatagagcgagtcgtttgaaagccaccgatcaaacaaaaaagaagtggatctaccatccctgacatagatgagtatggtctctgaagtgatcaataacataattgtagacacgacccaagtacgtgggggaggaggggtgggaaccaagtccggatcgttaccctcgaagcaccagtctctccaagggacataggggccatgg

SEQ ID NO: 118344 - DNA, 514 bp, Zea Mays
caccttattggcaccagatgtcatagcatatggcacactttgcctttgatttttgtaatcttcataatgccttctatcattattatgagcaacacctttatcatgtccctcaattaatttgcgaccatccttccatccacggaacccaacatttgtgaaggaatcaacacataattttcagctcttggttgcttaaagaggtagcaataaaaacaaaaggttgcatccttggcaatactgtactccaaccatgcatgattattaaaccaatcttcctgaaatcgtcgattgcgcccacatattattctttgtggataactatgaccttttggttgacatggacccatcaaaatatactctctttttatagcatccctaatatttggatccaaatcctcaattggaactcgaaggccaggatcagctataactccattctgattaggtacaacaccaagaatagtttgctgcacattactaggttgagcttcagtttctaccgtctctactaccg

SEQ ID NO: 118345 - DNA, 339 bp, Zea Mays
aatcttcctctttttctcttgatctcgcagcgggtagcggtaatcaaggtatacgaagccaatagcatcaaataccctgtttaattttttcttgccccgacctccaaaggctgtggacagagcattatcttcggccttggagtatgctccaagcagctcatcactagtagcttcgatacacttcagccagtcattgtttggctcatcaaacttctccctaaatctgatggtatacttcagtcggaccagaccaccctcactggagtcggcggtggtctccttcggcatatcccagctctccacaagaggccataccctgaaggatatatgctcttgaat

SEQ ID NO: 118346 - DNA, 436 bp, Zea Mays
gttatattagccattaggtcagttgctgattcggaaaaaaaaaagagtaaaaaaaggatttctttttcttcttctgtattatgacatgcatgcaaataatgtatatattttaagctagtgtcaagtagtcccccccaccaaacattgctgcgtcctcactggtgtgcaagtgcaatccattccttccgaaatacacatgagtctgcggcatgcagcgcgaagagctagaacgtcgctgttggcgcccatcaggttcataaaatagtgccagagtccgcgaagaacccaagggccgcggatgctctcccgttttgtccacatcttctctttcctgcctgcccctggcccctgctgccgcgcccgccaattgtttctagtctaataattacagaattgctaggacggagaagaaaggctgtttggaattggatgccaa

SEQ ID NO: 118347 - DNA, 582 bp, Zea Mays
ggacaatatactaatatactaaaaataagatgcctagatacataataattgtgtagttacaaacactaaaacgacatttaaattaattaaaacagtagaagtggtagcggaaaactcgggaatttctaatactgtacacgcatggagtgcgaattcactgcgaaaaaatgttgatcgaaattgcaaaattccctgttattgtctaaagaaaaagtgctacgagtgcgagggaaatcaatttggtggacccgtgcgaccacacgccacatggcgtgtggagaaagtccctgctattatctgaaggaaaaaaaatgctacgggtgcgcgggagacgttgttatcaagcaaacccagaaaatggcggcttccttcctcttcccgcacgcattcctttctcctgtcgactgtcgtgtctccttggtccttgcattaccactcctccggcactccgcactcccactccactgtcatcaacctcgctccctctctggccctctctctaggagttcatcactctctctctctctctctctccctgtctcctaccgatgtctccagctccactactcaggctcgcctcac

SEQ ID NO: 118348 - DNA, 371 bp, Zea Mays
cggccggtgggtcagaaccttcacctttttgctcttcggcacaggctcaactggggtgaccgaagcagcaatcttcctatttttctcttgccctcacaacgggtagcggtaatcggggtatatgaagctgatcgcatcaaaacccctgttcagtcttttcttcccctgacctccgaaggttgcggacagagcattatcttcggccttggagtaagctccaagcagctcatcgttggtagcttcaatacacttcagccaattgttgtttggctcatcaaacttctccctaaatctaaaggtatatttcagtcggaccagaccaccatcactagaatcagtggtggtctccttcggcatctcccatctttcca

SEQ ID NO: 118349 - DNA, 703 bp, Zea Mays
aaacaacctatattattccccaataaaatgtatctagtatcagattcatctcatcttaacaaattctatcttatccttgaaaattcatcttaaaagcatggtcgtcccgagacacaaaataacagatcaaagctctgcctaagatccttcagtttatgaccagctattaggctatctattctacctactaaattattcccccttgcaaaactatcttaccatacgtctctaactcaaatggttaataccaggaggggaggtgtttatctacccgcacgaattcgtcgaagaagggctgtagctaatccggaaccagaaatgaatcctcctccgaattcctcgcctgttgatgacgtgactgctgctcaaatgtgattattacaataaatgactaacacgatgacagaaatgcaagcacaaatccaccaagaacgacaggaaatgcggcaagaacatcaggaaatgcgccaagagcggcaggaacgacagcaactaccacctccaccaccaccagctccgcccagggataagcaccaagagttatgagtcataagccacctacattctctaattcctcggatccactacaagctgatgaatggttaaagtccatggacaagatgctcaatatagctcagtgcactgacagggagaaagtgctatatgcatcgggttgccttactggccccgctgcggattggtg

SEQ ID NO: 118350 - DNA, 416 bp, Zea Mays
gaatttatggatcttgcatggggtgtaatggcggcaggtaaatataatgtagaataagatgttgaaagatatggcataaaaccgatacggtataaatgttgcataaatagtatataccgtttggcgtaaaatattgtgtcattgtgcgtaactagtgtgttatggatattagttttgcatgtacatcgctagaatatcggaacggtttcggaaataatggaaataccctggaaacgtggatgcggttacttgtatagtatccgtgatttcgtttcatccgaaaaaacaccacaaagcctgcataactatttggaggtggagatggccgactctggagagtcgccggcgatggtgggagatggcgttcgtcttgatccagagacagagggagtagttgatggtaactcactggtgac

SEQ ID NO: 118351 - DNA, 656 bp, Zea Mays
gagatatggaggaatagggttcctagcatctaatagagttggcattggccaatgattggtatataattttttatagcatgtcctataaaatctagaatagcaaatgttgtggatagacatagagtatgtaaggtaccaaaacgaagagagttattagagagcggggcatatgaaagttgtgtgttgaacttgagcatgatcagaaaccaataagcaagcggtttaaagaggtttgggtcatattgtgcataataccctatgtactattggtactcattgattgatgaacataaagttgaagaagattacaagctcaagaaccatttgaataccataacctcctagctctccatttccagttggttctagtgagtgtgctagccatatcgattcttaattcacctttatgtctgcctttagatgttgtgcttgagaatattatccctttatttcgaaatgacccccttccttccttactccgtccccttttatagagtaaggaatgagagagtttatatgtcagccatatcatgggtctggtcagctaagagccaacaaatccaatcctatcttggtcatgaagtcatacgcagggccatgcctttggtcgttgcatagtgttagggatgtccttcttcagtggcaaccatacctgc

SEQ ID NO: 118352 - DNA, 886 bp, Zea Mays
accggaactccgaaacctcgttcatggaatgaggtgaaattgacgatgtagtccgtaggcgaatctgacacctgctcgtcatgcggcgcgatccactaaggttgcgggctggtggatcaaggccgaagtaggccaacttcgaccagtgcctctagatccccatcgatgacgaaggacacaggccatgggtcacggggaggaagtacagtgatcttctccgccatcaaaatgagggaagaggcgagaggagacgaagggctctgtaggaagaaggcgagaacgacgttcgaaggtagaggactagaacaacaaaggtaacggttcgacgcctccaccttggtcacctttatagggacggacggagccaccgaagcgtgaatcgaaaacatccggacgacggatgttcgaatcccgtgtgcatgtgtgccgcgaacggtctgctgaccggcagtatgtcccatcgcattaaatgactgtgtcccctctgaggaaaaactcgtcgagcgccattccacatcccgcctcaaaaggtatgccctctaccctcgactactctgccctttatcctctcggcaattgaactagaaagaaacgtcttttgcctcaggcaacccccctcaaaaagggagcaacgaattggaaaaagtcgtcttctgcctcggcatgtcactccaggaggaaaaaaggcatggaaaaatattgtttagaggtttgaaggttcgacccttggcagaaccgcctcaggacttcagggctccgagcccaatattgataagggttttgaaggttggcccctctgaaggtctccaaaacttccctagagcatagagtcagggatgactataggtacacccatacatggccctagttcaggtcgtgacccgag

SEQ ID NO: 118353 - DNA, 418 bp, Zea Mays
agcacatcagcggtccccgacgttgatgaactaacgtctaaagacctcatcgacggagaccgcgtcctggccctgtaggccctcaacaaataccaagcgcaaaccaaggcctggcgtgacaacggggtcgtcccaagagagttcaacaaaggagacctcgtactcgtccggaccacccggacagaatcacggggcaagcgagagccgaagtgggagggtccattcatcgtcaagatgaaggcatcccccagcgcgtacaggctagcaacgccctccggcgaagatttagagcactcctggaacattgacaacctccgcaaattttttgtctaaccctcggggcccacgcacccttgtaatccatcaaacaatattatttcggcccgcactcttttcctcctggggggtgaggttttta

SEQ ID NO: 118354 - DNA, 558 bp, Zea Mays
ggaaaacggaataccttgacatcccactcaaggatagcattaaaggatggctcttagagtggttcattgtggaaaaccatggcaagtccctccccctcggtcagggagacaaccagatgttcatgctccaagttggattgagtcccccacaaacttggagataatagaagccaaggttctgcttgctgagatttgtttgttgaaggagagaggtcttaccgctgaagctgtggttgcagactttgtttttaagaatattcagccactgaaggacagagcgtacccggcttatttgtatagtggtgtcaccgactcaacccgggttaccaacaagaggattcctgttgtggatttggtgagccaactggaaatgatccttagaggcaaagtatcaaatattggtgctcctgttgcatattctgcttggaatctgccaccttccaagtcctttttcaattttgtgtccaatcctcctgctggtgacagtggttttggtcttagagtgcgaccctctctccaagaagttgaggttctggttgcttcacttggtgatcttcc

SEQ ID NO: 118355 - DNA, 454 bp, Zea Mays
ctgctctaggcctcacatccttggatctatagcccaaatcaaatcaattgatcgaatctcgctcgttcatcataatccaacgcccagaagtttgtcgcccacctcttgacggtcctccacggcggtgcaaagaaccaaatcaaacatgtatcataagaaaaagcattcaagcacatagatgcctaaaaatagttgttttatctaggattagatctcctatgtcttaaggatggttttaggtacatgattccaaggtgtaatatccattttgtctttaggagtgacaagatgggagcaatcagagtaaagcagcaaaagatgagaaaagaacaagcaaaatttagatagaaccagagtagcaaagacaagtaggtaagagtttgactaggtcaatctaggttacgtcataaagtccacattactttgataccacttctgtcacacctagatttaa

SEQ ID NO: 118356 - DNA, 429 bp, Zea Mays
gtcgtacacccggtatggtggatcgctccatctacctagtatgggtcactacatcgctctgatgttgagtttacctgtagtgatgccaggtgggaccatgggtcggagtcagagggcaccgagggccgtacgtggcaatgccccgtcccattgtcagggactctccgggcatgttgtggtgtcatccaagacgatatgtgtgtggcgacgtgccctaccgtggctggtgtggggcaacaatatatgcattgtctcctcatcagtcgggtataggcatgcttctgacgcgcgcgtgataggagggcatagtgtcagggcccacaaaagtactagctcccatcgtgggccttgcacttctctgccccatcgagctgatcaacgggacttggttggacgatctgcctcgcagggttgctcggcaggatttgg

SEQ ID NO: 118357 - DNA, 429 bp, Zea Mays
tcaatagaggtgaattgtcacttgagacttgtttagtagaaacatctagcatgggttgcatatggctttggtagctagctcatgttgggatgaggaacttacccaaacatgtaaaagatcacattcatggaataacaaatgtaggttgtgtagtgcttgtcaaactaagaaataagtaggagtacctcacctaacaaagagcatcatctccaccaagtagccattagatcccattcacatggatctctttggattgatattcggttgatcttcatctgctaataatctttaatgcaacaccgctcacagaacaaaaaaatattcaatgctagtagtgttgtcatcaagctgaagaacttcagacaatgatagagtggatagcctcactctcatccaaacgcaagccatctccataacctaaggttggac

SEQ ID NO: 118358 - DNA, 495 bp, Zea Mays
tgccagggtgtcccatgagggggacgaaactgaaatgattgaaacagcgcccatatcagtaatgatgaggcgattaggtctagttgtgcaagaggaacctactgccgaagatacccccaatgtcgaagctgaatagactgaggctgaggtcgggagtgacaatgagagtgaagaggacaacaacattctgagcccaaccaaacctagtcacattgaatttggaagatccaccatgacagcagaggacttggttgtgatgaagaagctagggtactttggagaaaataaatatggattgattcgctttgctgcggaagaagtaattttggagccaaaagatggtgaagttgttgtattcaagagcttctttagggcggggcttcggttccccctgtacgatataataggggaagttttgaaaacatttgaaatatatctccaccagctgaccccaaatgttattgttaagcttagcatttacatataggctctccg

SEQ ID NO: 118359 - DNA, 875 bp, Zea Mays
aaatcaagaatctttactggcttttctcggtactgaagatccttctgaatctggattgtctattcttcgatgtgattttctagtacttgcaggcatttgcggagctaggacacgtgaaacacattgtggatatctgacatggattctggcaatttcaaggcggtatgttgcgggtcctactctgccaatgataggataggggccgacgaaccacggagctagcttccctttcacttgaaaccttttgactccgcgcatcggggagaccttgaggtagacgaagtatctttcctcaaacctgagttctctccgcctgttgtccgcataactcttctgccgactctgagcttcaagtaatcttttgcggatcagggcaaccttctcttctgactctttaacgaaggcaggtccttctagtgtcttttcccctacgttgtaccacattagaggggtctgacacttccatccatacaacgcttcgaacgatgacatcttgatactggcctggtagttgttgttatacgagaactctgcatatggcaaactggactcccaatttctgtcaaacgttaacacataggctcttaataaatcctcgaggaccttgttgaccctttctgtctgaccatctgactgggggtgataggcggtgctgaagtctagcttggtgcccatagcttgctgaaggctcatccaaaattttgaggtgaactgtgttcccctgtctgacactatcttctgtggaataccatggagtctgactatctctttaagatatatccgggcaagggtggctcctccgaaggtaatttttactgggaagaaatgggctaccttggtaagatggtctattatcacccagatagagtcgttcc

SEQ ID NO: 118360 - DNA, 369 bp, Zea Mays
gagacagtatcaataatcatctttgtcatttcctccataaactagagagccccgagggtactacaagtcttttgcataatattgcacttcggaaatttgttcttctgacaattgtttccctgaacatggagaacaatgtatccaaggtcgccaagagacgccgcttcgggtattggcaatgctattttctctggtaggctttcgcattcttgttttattggtctagattctgaaggtccagccttagcaaaatcaggagcaacaatttcgtgaatagcctttttcaactcctcaaccttgtctttggaagccttttaaggagcaggcgtcgccaccttcgagggccacagaacagcgtctaacatgttt

SEQ ID NO: 118361 - DNA, 430 bp, Zea Mays
tatcgtccgtgggtcgaaccttccagtcctcagggctggaccatccagccgtgactagtgccacaaatggtgctcaatagtttgtttggtggccaaggaataggagaggattaagggcttgtttgggagatagggaaatgaaggggattagagagctaaatttcactcgctatttaaaattgaatagggggagattttagctctcaattccacttggtctcaaacatgaagttggaaatctcttcctattcaaaatattgaatagttgcgctaccaaaccagcccttagattccgccatcacatctctaataaaaattacggtttagaaaattgtaatgatgtggattcagtctgtacaattgcaggatttgaagcctgtcagtagtgcagcgcgggtgatcaataacagaggcatatcgcacacgttga

SEQ ID NO: 118362 - DNA, 554 bp, Zea Mays
ccggggctgctcgggctcctggccggcggacaccgtcgcgggctgggaacagccacaacgctgttgcctgatgcctcgcgtgaagaagaagggtgagggccatcggatcctcgatgaagggttgaggtaagtcgatgtgaacagccgtgggatcggagataagcggtggagatttgatcttgcgtaccccttcgtcaaatgaatatgagccgtaggatggtagtttgatgaccgagattagatcccatcctcataaaaccctagccgcaggattttaatcggaagccccacgttatgtatcagttcgtagtgaatcgggatctaatccgcaccgtccatttgcgatctggcggcccagatttgagaataccccttcggccatacacttttcctaaagagcccctgttgagttacgaaatgaacccgtggtccataagcagtatagggagacttaatctatgcccctggaacttacattttagcccctgtaaaaccacagaattgtgcgcgccatccagaaaaatagaagaaaggggaaattaatattagaaatt

SEQ ID NO: 118363 - DNA, 1398 bp, Zea Mays
tatggtgctccgcctccaacatcctgcatccttcgctggatgaccagagcactgcctccgccaccgcggttgtgccccggcgagttggatccttgccgctcccggcatctaggggactaggacctcgtcacacgcgacatctcctcaggaaccgaggcttcaaaccaggcttcgatgccactgttaacaaaaccagcaccttctcccctcagccacaccactcacacacattgtttttgatgaagagtagaactgatatgaagtagaagctttattcccaggcttagcttacaagagagggttacatccctacttatagatcatgcaaggacgctgctacagtaggacggtttgctatagtaggtcggttgctacaatatgccggcactacagtaggcgtctgctacagtaagactgctgctgctgctactacctagctgtcagctacagctgactttctagaactctaaagacacctctatactactctagtatattaagcacaagaacacacaaattagttctaacaatcacgttccttgtgtggcccaaattgaagctagaatcccaaaagctaatcttttcagatttgagaacttctgggttcatcatccgggtttctttgatttagtccagcaaaaatggaataaagacgtcagactaacgtccaatgcatctagaattattgccaaacttaagaatgtcagaaatgctctcaggatttggagcatgaagctctccaatcttaattccttgatacaacagaataatgaagttcttcaaattatggacaagctggaagagtgtagacctctgtatattcaggaatggaactttagaatcattattaaaagtcatcttgagaagttgctaaaacccgtggaagttgctcggcttgtggtttatgggttttgtttttgcttccctttcttctccttcccttacttactaggtaagtccggtttggtttagccttctcttttcctttctctaccattgtttgtgcagtcctctcccgtttcttttgtttatcttttaataaaatttgcaccgttgtaggagattacctacagatattattatatatgtacttttcaatgttagatggtttggacataacctgtgtgttatcctgcccgagaagaaaacgacaaagccatagatttccaataaatctaataaacccgtttgtgacctaccgtaatgaaccacacgttccaataaggtcccacacaaagtctcccgagaggctaattaagcagaaaagcgaacaaaatgttgacctctttgtagccgaagcggcggatcccgcacggcatgagaacgcgcgtctccacggggcagcgacccggccgcggcgccgtacaacggctgcagcaaaggctccgccgagcccgc

SEQ ID NO: 118364 - DNA, 292 bp, Zea Mays
gccttcaccaagctgctgctcagggacttctcctgcatcttcctcgggaaacacagaccgctcgttgtctacgcaaagcaatcattcattctatacacttgggaaataacaaaagagcaatataccaaacatgtgcagcagagagatcacaggttcaaatagaaaaagattggcaatatggtgttccctaggtctagggtagatgactatacaaagtgattcattattcactaaccaggtctatgtcactatcatattgttcagataaagttagtttagtggtggggtcaat

SEQ ID NO: 118365 - DNA, 573 bp, Zea Mays
agtcgttctgaagaaactatgtgatggtacagtatcccgatcggattgcaagctcagtaagctcaccgccggtgatccacgcgtccagatttgcgctggtcgtcgtgattcgtgcttggcacgcagaggatatccaagggaaggtaaaagatctcacgagggaatggatttgatcgtggattgaagtttatcaccgtgcctgtagccgttgcgacgtggccggaccgccagcatcgccgttgaagctccggtgacctcggttgcgccacgccgtagcttgttactgtgcggtagtaatcgtggcacccttaggagtataatccttgagcctttgcaccggtgaacgccacggtcatagccacccgtgttcttccctatctccggccgccagcacgccgtggccaaattgagagccaccgaccccgaatcctataaattgagcgtgcccttggctccaccatgtagtcaagcactcaacgcacccacccgtgcctccgattagtcaccagagaactccaatttgggattctccccaaatcggtcaagaacaccgcagaagtgagctcaccgtgg

SEQ ID NO: 118366 - DNA, 277 bp, Zea Mays
catgtctctctcacctagttttagcaatacatatagcacttgtattattacagaaaagtgcaacattattgaaattgtcacatatcataccctttttaagtgtagctatcgtccaaaagaatttgggaccaacaacaaacaacgaactaaataatcgataacagtgcaaggaggtaagggtgttgtagcatccctagcctccacgctggattcgtccttactaaactaggtctatgaaccataatgtcaaacaaataaaagcataaattgaagaagg

SEQ ID NO: 118367 - DNA, 321 bp, Zea Mays
ctcccactcagggtccagggccctctctgccaaggtgatccgtcaaggattttactggcctgcgataatctgcaccgcgaatcgtgtcacgaggtcgtgcgaagcttgccagaagttttctccccgctcgggcaaccctttgcagttcaccaagctgatcgcccacacatggccacttcaacgctggggctggatattgtcgggcctctacctatggctcaagggaacctaaagttcaccttcgtcgccgtcgaatacttcaccaagtggatcgaggccagggcagtatccacaataacgtcaaagactgcccagaagttc

SEQ ID NO: 118368 - DNA, 518 bp, Zea Mays
ccctaaacatcaaaccctaaaccctatataccgaatgcttatacctatggattttttaccattaaatggtctccactaaaaacccaagaatgtgatttgtgtccaacccatattaaaatgtaaaccaagtaatactaaaatccaaagatcataaagatttaagggcaaacaatagtaaaattgtagagatagtactatttatccaaacattaataaatgtataaagacagaaaaatttgcccaaagccttaatctttaaccctatgcactaaacgctgaaccccaaaccttgaactcgaaaccctaaacgccaaaccctaaaccctatgtatcgaaggataactcatatggctttttgaccattatggtctccactaaagaaccaagattgtgatttgtgtccaacgtaaacatcaaaccctaaaccctatgtatcgaatgcttacacctatggattttttaccattaaatggtttccaccaaaaacccaagaatgagatttgtgtccaaccaatatt

SEQ ID NO: 118369 - DNA, 393 bp, Zea Mays
gaaatacttgttctatcaatagagaaggacaactttttttgagaccagagagggccaattttggcttcatatgtgaacaaagtgttgtgttttctgctcaaaaggtttgttttacctttgtaagttgtaaatttatattattcaaactgcagttacatataccttggtaggctgcatgcttcctttgaggtaagattgctatggagttgatcgagtgatctttcctgtcatattagatggttttcttcttgttcctttgcaacattatcttgaaagtttctaggaggcagctgaggcatgcactattccttaaatttgttgtattgtgtcttccacatgtgttagttttatatcctagatcaatgggtcaatggatcgtgacaaggctgtagc

SEQ ID NO: 118370 - DNA, 667 bp, Zea Mays
atacgttaacgctagctatctatacgtcattgggcacaacaagtcaacattactggtaagacgacgaacatttcctatatttgacccacacaaacacgacatcacgagtacaagcatttaccatgttcactttaatcgttcattggctacttatgattaaactagttaagtacacataatttacgacgacttacacatagactaacttaattaaaaaggaatagttacttaatcgggttttacaattgttcgcaatactgtaatgcaagcatacatctaagggcacacaagaaagtgatagcctaatcacactgcttattatactaatctattgaggttggttatttagtaatactcagattagcagcacaattattagaaatggtaacatctcattaattttgtttctcgtccatatagtgacacttgctaaattgacgttgattgaagctgattacttactggacttcaacaatttaatttactacttaggaacatgcactagttacttacatataacctaattatattagttactatcattgttacgcatatgcacttaacaccaaaacaagcaagcagtcactcaagacaaacacaacagagtagagtaatcaatcacaatcaacatgattaagagagcagcacaacagttacttgtttcagt

SEQ ID NO: 118371 - DNA, 483 bp, Zea Mays
acgggagcaggccagggtatgaggcgtctcatcaaaggaggggaccaatgttgtgggccatagatgctgctggtagacatggtcgagatcgacaaagcgagccaaaggtgggtggagaggctgggccgcacgtggcacacaccaaggcgatggggccacacgttgtgcaatcggaggtgattgagctatgtgaggcacgagctaaggcgacggggctgcgcatggcgcagatgtgcctaggatcgggtgtaggtgaagaggagggacatcgatgggatcaacaccacggagggaatcaagatcgagaggtggaaaggatctagcaaagggaaaacatcctcatcgaaaacaacatgacaagagatgataatgcggggtgagaagatcaaggcactggtcccctagtgggaaggagtggcggaggtgttgggatatcaagcgcaactagggatggtaatggatcatgatccaaatgtttcttca

SEQ ID NO: 118372 - DNA, 2072 bp, Zea Mays
aaatgtggataactgattttagaaaatgtaggagcactgtggtttcgttggatggctgtttctagttccaagtcacataatttacatatacaacatatgacaaacaaataatgtcagctagtaccatatgtgaaaatgctcgagtcatgtgacatttaaagaaagaaaaaaactgtatcctcttttcagttatgaattatgataactataccaaaattgtacaggtatacatagattgttgctaagaagttaggagattaaagacgaggacctaagctccacaagacaaaagaaaaacctatctataccatgtggcatgatatacctctcgagcaagtcaaagatgagattctcactaatattccctttatatcaacaaaaaatgcgaaactgaaacttcttttatcctgagacgtatatgccgctcgttctatctataaagaattttagttaacatacttttatgtccatatgcatgctgagaattttatctcatcctttaagtggctcgagctgtacttccattggttcaggtgacaaattagactccattttactgactaccctgttagattgcaaaagttcgactgtatcatcttcctcagtgttgccaagcacccaatttcctgaaagaccatcaacacctgcagtccttcgcttaattgccatatactcaaagtaagctgttaacaaagtaacgcttataacccataagattagcccacatgtaagtcccttgatagtcttactgccatatcggtgcccaagatgctgcaagccagtaaagagcgccaaggtaccagcaagcgcagcagatctcccggtcaaaacatggagatattcccaaactactctgtttccaggcggggtctctccattctctgttttatgcggtcgaagatacgcatttactggctgcatagatgcgaatgtcagtgctactgcaccgattcgagcatgtctggatttgaaagagaaacctcggagctcagcaactgcaaatacaacacccaagaacatgacagctatgcttgaatactgcagataggtgtgagcctggaaccaggcctcgcctttcagatgtttcaggtatctcgcagccatgatcccccctggcagcagaatagcccatgccacaaacatcataaacccatgaacagcaagcaccgggcggaggtcctccactgcttcagccaagccgctcaacagaagaatcctgataggacgattgcttgtgtcggagtgcatgttcttcaaacttaaggggccgggtgaccattgagcacccatggcccagatgaccttcataggagtcgtcgggtcgattatgttcttgcactccacctttccactgcatgaaggtgttaatggacgagtgaactcaaacacgatcgcaccattttccaatcggcatcgcttatgagtaacattttcatgtgtctcgtgcacactcatcccgtcctttccgtcgatccaataagatttgacatgccccttgccattgccatcgacccacccgacataagcatagctatttaccattacgctaccaaatccaattgcaaggtacccactcttcttctcaccccgtgcagcaatgttaatagagtcaccagagagagtccagaagaatgtcacctgctgatcatccagtagcacgctgttgttgtacatgtcgctgaggccaccatcgacgacctgaattttccagcccatcttgggatcatacaaggattggtagtacactaggtccggcgtgttccgatcaggcaaccagacgagttctgttggtgtagccggcacgccctccgccatgcttccaccggcgtagatgatctctgacgagttcctgagagtggcattgcctccgacggggtccgacgtgatgtagactggtgcgtcgtgcccggcctcgatggagaaggtgactggcacgccgcgctccaccttgagcagaggcgcctccttcttgttgatgtagaacaccttgtcggggttgggcggattggggtaatggagcgccggcccaaccgtcacagccagcggcgtattgcgctccgtcgtgatcctgg

SEQ ID NO: 118373 - DNA, 621 bp, Zea Mays
accaggagaaaggtggtttttcaggcctgatatggtgaaagagatggaagaaaaggttcaacgaatcatacataacttgaaagaggcacaagctcgacaaaagagttatgcagacaaacgacatcaacccttgtactttcaagttaaagattatgtgtacctgaaagtatcaccaatgaagggtgtgacttgttttggtgtaaaaggaaagcttgcaccccgatacattgatttgtttccaattcttgaacaatgtgggccagtggcataccgactccaactaccataaacattgtctgcagtgcacaatgtgttccatgtatcccaattaaagaagtgccttcgggttcctgatcgaaccattgatgtggtggatgttaccttggaaccagacttaacatattcagaacatcccattcatgtcctggactcttaaattctataaggtacaatggaaccaacatgctgaagatgaagctacatgggaaacccaagacttcgtagaaaagaattttcctagctttttagcttcatgtaatttgtgagacatgtacaattgtttgtaaagatgaaatagacccataccaccccctgccttgtacaagaaataaggaaataaaa

SEQ ID NO: 118374 - DNA, 404 bp, Zea Mays
tccggagtaagttgtcttcacaggtataaagtgtgcaactttagtcaatctgtctacaataacccatatggaatcatatccatcacgtgtgtggggtaacccgactatgaaatccatactaatttcttcccatttccattcaggcacgttaagaggttgtagcaaacctgtgggtctttgatattctgccttaacttgctgacatacgtcacatagtgcaacatgagtagcaacatctcttttcaaaccataccaccaatatttttcctttaggtcctagtacatcttagtacttccagggtgaatagaataagtcgaatcatgagcttctctcaaaataagttgacgtagatgttcgacttctggtacacagattctctttttaaaccaaacggtgccttgtt

SEQ ID NO: 118375 - DNA, 440 bp, Zea Mays
gtctggttgaagtgtgttgaaaatactagtgatgaactacttggagcatactccaagtctgaagataacgcactatcagcggccttcgagagccgaaaaaagaaaaggctaaatagagttttttatgctatcagatttgtgtaccctgattaccgctacccgccgcgggggcaaaaaagaaagggtgcaacttctgggaaggctgctgcttcggctgcttcaagcgagcccgcaccgaagaggaaaaagttgaaggtccttactcaccgaccgcgctacatcgaaccggccaaagtgcctgaatttggcggtgagacttcttcagctattgaagccaaatgacctgctcttacgcagaggattgaagagccggctgcaatgccgaagaatgacaaaattgaaaaatcgagagtcgaaggggcaaaaacattcgaagtcct

SEQ ID NO: 118376 - DNA, 483 bp, Zea Mays
ctgccaacagataagttatcacttgatggaggcgaccccttatttcctaaagatgcaacgagatataggagtgttgtgggctctctctagtatcttcttttgacatgactggatctctctttttctgttaaccgggtctaccaatatatggccgcaccaacctatgcattgggctgctgtgaagtgtattctacgatatttgcacgccacctatgatcttggtttatgcttcatgaagaccggttcttctcttctcagtgcctttttcggatgctgactgggctggtaatctggatgataggcgtagcaatggaggctatgttgtgtttttggtgggaatctagtgtcttggagctctcgaaaacaatctgcagtctactgttccagtactgaatctgaatacaaggcaatcgctgatgccacagctgaacttatatggatacaagttttattacgagaacttggtatacagcaggattgtcc

SEQ ID NO: 118377 - DNA, 413 bp, Zea Mays
caaatagtgagcatgcttgctgcaaaggtcatcttatatatcactttagcatacaaagaaaagcgatcatgtgatgacaagagatatagataacttactccaagtaaggggttatattgtcgtagttgaacaaaacatatctatgagcttgtagccatgttttatggtctaaattaactaaacacttcccagccaatccttggccaatggtatggaagaaaggagttgtagtacaatctttgtcatactcatatctaacttgatggttcaattgagtctcaccatgtaaatagtgagcacaaaatgtaagacactcagtaaacatagaccattccataattgatccctcacagtgactctttgtatgaacagaacccttcaatctcattagatacctattcacataagtaata

SEQ ID NO: 118378 - DNA, 430 bp, Zea Mays
aactaaaacgagtgtctcctccactggtgggggtgggtgaattcatctgcggaagggaatcaaaggtaaagattatggtggaaggaaaaaggaaaaagagagcccggatggtttttaaaggtagtgggttagctcaagttttaattccttttttttataatgcatgcatgctggaagtaatgtctcctctccaaacaatagggtgctcttagggcatccttaaaaagtctaagtactggcccacggggcctaattaattagccacctatttctccctctatgcctaaggcctttcgtcctaagtctagcggtctagtcctgacgatccgtagcagtttctaggcaagttttaattttgaaaatggtattcatggtttattgtccttctctgtggtggaatttgctccgataccagttgtggcagaaccac

SEQ ID NO: 118379 - DNA, 355 bp, Zea Mays
aaactgctggagatagtctaagatgttgtcctccacaccacaagggctgcagctgagatgctgtcctctactgtccataaaggagagatgctgtcctctaagcagtcaaagaactgcagcaaggcatgtcctctacccaaactgcagcaaggactaaagcctaagttgctgtcctctacccaaaactgtagcaaagactaaagcctaagatgttgtcctctaccaagattgcagcaaaggcatgcaaagattgctactacaggtcgtacacaagaggccacaaggcttattctatcattctccccctaagtcttgtgcatcatcttgtgggaaagttgggccatcccggacctgg

SEQ ID NO: 118380 - DNA, 722 bp, Zea Mays
ataaggcttgccctgagatcttcgtggagtttcctggagtgaagttggggccgtcctggtgcgaattggcgctctggtcgggcagaattcctcgccgaagacatggccgcgccaacaatccctcgccgtcgttccgctcagccgcgaatccgccccaacgacgacaccagggagctcgactgcaatctgcacggtgagaacgctgtcaggtcactcgcttttatgtcggctacgtgtagaaccttgcggggtagggatcggggctctggatcgtcggagtaacgactctccggcgaggcctcgccgtaatggctggcggcgccgccgcctggtagctgcgtgaggaaggaaagacgtcgggccgttaatctcatgatcaacggctccaaatgaatgactgtgtgctgtgcgcgtggccgtttgatttcgcgcatgcggcttagattaaatttgtgcagcgtttcagtaggtagatctgtgtcgtccatctcggatcggatggatctgagttgatagtcggtactttatatccgaactgttgatctgctatcgaccggatctggacggatctctggataccgcagattgtagccgttaatagtggatcggacggatcctgttgtataccgtttcatttaaaccgtggatctaatccaaacccttgatctcagatctgacggccctgtgatcgcgatacccccttcgcggatgcgatatgcaaa

SEQ ID NO: 118381 - DNA, 620 bp, Zea Mays
ttcgagggtggattcttccaaggtagacgttatgtatctgctccgaatgaccatcgggccctagttgccagatgcctttgtctcagtgtgctcgctgaccgatgggacccagggacccaggatcatatcaccgataagttcaaatgggtgttagtccgaaagggggatgcgaaaaatgtggtaatgatatacaaagtgaggcttgtagcacaagcgttaacatagacccaacatcaattacgatgaaacttacttccaggctataagtggcacaacgttctgatatctaatattgctggtagtaggtttaaacttaaaaatgaagacaatgtacatagtgactgtatacatgtatgggtcattggattcataaatttatatgaaggtacatgatggactgggagttctggattccaagccaaatcacaacatgtacattgttaagttgtagagggcattgtatgggcttaaataatctgaacatatgtggtacaatcggctcagtaaattcctcctaaagaaggaatacgtaaatgatagagtttccttaggcctagagatcgagcatttccttagaggattatttgtacaccaatcgacctatagtaagaaggtccttg

SEQ ID NO: 118382 - DNA, 642 bp, Zea Mays
caggatgttggaattgctgactctcagacagagtggatctgttatagagtataagaatcagttcgacaaactggcatatcacatcaaactgtttgacagggccactagtgaaaccttcttggtaacacagtttgtattgggccttaagaatgaactaaggatgaatgttgaggtgcaatttcctcagactgtcgcgatggctgcacaattggcattgaaatatgaaggttggcaggtcagacaatcttcaggaggaaaaaggtttactactgtcaaagcaaatccatcactcagcatcaaggagtctggtgaatctcagggagagttatggaaggcaagacagttgaaggaatacagaaggagtaatgggttgtgttttaagtgtagggagaagtatattcctggacacaaatgcaagactgcaggtataccacagctaaactgtatttcggtagacgagggaggagatggagggcccttgttgtctgatgaagttctggatttccttgaatctagctgtggaaatattgatgatgagatggtggtgtctttgaatgccttaagtggaactgagcattccaggtgtatcagaattaaggcattgattcagaaccagacgattttgcaattattggattctgg

SEQ ID NO: 118383 - DNA, 356 bp, Zea Mays
cgtctgcagcagatccttgctggaagctgcaccgtctcacctgtggtcaaggtcgagtctgagccggttagtccccttccccatccctcgcatccgggctactgtgattgccaccttcgtttagggatagggaatgggtggacattgcagattttgtggggtcctagatccagacgtcggtcgacaggtcgctggcgtcggtggaccacgttgcccgtcgcggttgtggagcggagctgcgagcagatcccaagtccaacgacgaagagggagtctcggtagggcgcgataaggcgcgatgaggtcagacacggagcgatgaggtcaggcacgtgtcctcagtcgtcgttgtcgtg

SEQ ID NO: 118384 - DNA, 287 bp, Zea Mays
agacgaaggctagagcagatggccttcacaagaactttggctattataattttgcgtatcggaaggatacgaaggccctagttattggctatcgcaccaagtggccaatcgagtggactaatgaatggttttacatgaaagctgatgagaagaagagggaaaaactcatgagtatggtaatgagtcccttgaagctgaacttcggcgacccttgtgcaacatgtagttagggtcctcttgccaattggccgaagtagaatttagagtggtggctgggcacatcagta

SEQ ID NO: 118385 - DNA, 427 bp, Zea Mays
cccagatgaggtgtttgatgggctggtggacaaacaaccgatgcccgggtctgttttgaaggatactgtaatggaggattcttcatctaatggtagtggaaatcagcaaagtgatcaaaagaacgtagagtctgatcactttgttttggaggacgctctgaattcaacggtctcggttgggcctgtggatggaaatgcagaaaagattgggcttatcttcgatggtctttttcccagcctgagggcgtcgtggctgtcaatgatagcctgtcggaggactttggctctggcatgttttctacggacgctttgactgaggaagctagcgtgcgggagacaagagcgatagggcattcagcacatgcacatctgagctgggccatggtgtcaggcgatgaggttgtcccttgcttgggagaccatggta

SEQ ID NO: 118386 - DNA, 425 bp, Zea Mays
gttcggtaggcaagctggatcagaacataaacaccttgaactttacttctatgattgtgatcctagcctcgagcatagatatcgtaaatgtcatcaagatcaacttgataaagacaagttagttattaaacagttggttgacatacttaggggaaacccatattctaagcaccttaggagtatggggcacattgataacgttgaagactaccatatcacattgaaccttgaccaaatgctagaccagaagttatataatgcacccatcactttggaggtcgctgcagtttggattgaggggagtgaacgtcgaggtcaattcagtaatagtgttatgctgcatgggaaggattggtcaagccacgacatccgttcatatcatggatgctatgatgcgctatcgtacccattgttctttcctaaag

SEQ ID NO: 118387 - DNA, 501 bp, Zea Mays
gtcttcgcctgggttgcatcatctttgacttcactcagctgtcggtcgagaccctcattctctttctcaagtgagccgaccttctccataaggttctggctcttattctcggtcgtagacttgtccctgatggcttcagtattttgcatccacagacactcaatcttgtcctcaagtcgcttcctttcggaacacaactatgaaaccaacaacctgccattccacagacttcggttaaaaaaactcatgtagcacagttgttgcatgacagttgccgccacaacatctgtcgtagacacgctggcgacctctctgtccccatcaacagtggcgcagaatcgtgcctaggggtccagcaaagtcaccatcgcggtcttcacttgagccctctctttaaccggctttgcaggtattgccaccacctgcccagacctagcccctacaatcgaaaaaaacaatagaagaacacataccatcataaaaaaacctacacaacaataa

SEQ ID NO: 118388 - DNA, 691 bp, Zea Mays
ttatgagaatcctcctacgcctgaggtttcgaagttcttcgaactccttaaagctgccaaagagtcgttgcatgagcacacgaaagtgaccgtacttgttttcatgactcggcttatggctattaagtctatgtatgcattctcaaacaactgctagaaggagcttctgaacttgatcagtgatgtactttcaaagaatcacaagatgccaaaggacatgtaccagtccaagaagttgctctcgggtctcggtttggactacgaaaaaatcgatgtctgtgacaataactgtattcttttctggaaggagactgtgagtgagaagaagtgcatagtatgtggtgagcctagattcgtagaggttgaaaacgacaatggtttgaccgcgacaaccgaggtagcacataagaagcttcgttacatgcctcttatacctcggttgaaatgtttgtttatctcgaagaatagagccagacacatgacatggcacaaagaaggcgtacgtgagaatcccgatgtcatggcacacccagctgatatagatgcatggaaggcactagatgcctttgattccagctttgctgacaaagtgcaaaatgtccacctcggtttggcaatagatggtttctcacctttcaatctaactgcactgtcctactcatgctggcccgtctttgatgttccatacaac

SEQ ID NO: 118389 - DNA, 368 bp, Zea Mays
gccatcccttcgtgggccaggggagaactgctggcagaatgggccgacgcagggaatgagcaaacgcgggccaaggcggctcgtgggtttttgagcgttatacacagctttgatccgattctcccgcgcgaccaccttggacatcagaactaagtgagaataagtcggcaagattgtaggaagataagttcggtcggttcactatcacttaggcatacatcgttatcgtacacacatgtaagtgcccgacggtcggatatataaggcctagggggcaccccatcgaaggcaggtcattcatcagccatctactcggttctctagcattcttcatactagagaattcccctataacccaccacataaag

SEQ ID NO: 118390 - DNA, 275 bp, Zea Mays
catttactagctcaacaactacagactattctggtcacttggcccttcgcatgctgggggttagatatgatcggaccgttcaaaaaagcttagggagggtacacttatgtgctggtggccattgacaaatttacaaagtggatagagtacaagccaattgtaaccctgacctcagccaaaacagtggaattcaactaggaaatcatcttcagatttaggatacccaacagtatcatcgcagacctaggatcgaatttcaccaacgcaaaattctt

SEQ ID NO: 118391 - DNA, 620 bp, Zea Mays
ttcacttaacaaagaaattcaagcaagaatgcaactcatcagtccatgtgaattgattccaaattcatgaaactttccacatgtcaaggtagacgcaagtcgatgtgatgcacataaaattggaatgtttaacattactcatgtatattcctgaccaagccaacacatatgtaaaagagtttagtctttgccttcctaaagtttaggttgggattattcccaaaacagtgatttcaatatcaatatcatcacttcatatttgtgagctttagatcataataatcacctgacataacttgttttcgaacccactatctcaactatatgtggctaacacctggggtgtgacaattagcatcactgcattacctagcgtcgcctagtgggtccacctagcctgactttatagacttgcaccagtgataacctcaacgtcctagaggccttgagtcctccaccatctttgacaagccatgtggcctcccgcctcatcgcacccatgaccacatcaccttggtggtagccggtgcacgtatcgcagtaccgatacctggcggcgtatgagggtgagttggagcgccagtgtaccgccatgcatagcaaaactaatagagtatgga

SEQ ID NO: 118392 - DNA, 378 bp, Zea Mays
gcctactaagacgaagcctgccgcaactgaggacaaggctgagcaagaatctctagatgctggcatggctctggagcaggatgtgacggaaaaagctaaatctcctgttcccgaagcaccgtccgaggatattgactttattattcgacatgcttcgggaaaaaggttatatgaagaagaagttatggaagccaaacactacacccgggaactaaaatatccgaagggagccttagtgtttaacggcacggacgaagatgatttcctatactgtctgccagacaacaaggaaatatccgtctgccgggagatggccagaaatatgggatttccgaagctcgaagctggcctctccgccatgtcgaaggatgacctcgc

SEQ ID NO: 118393 - DNA, 511 bp, Zea Mays
gtggttatcaagagtgtggaggtatccggccatgtagacaatggtggggtcatcctcggtagggtctctccctgatagggcctggagtcttttcctctaggtgggggtatttttgttgctaggtgggaagtaacgaagggggtttcaaagatctctctgctgtagttttggcattagagatggcaacgggcgcgtacccgctgggtactatgttcccaaacccgtacccgcgaaattaaaatatacccgctaagaaacccatgcccgcagccgggtacaagtttttgcccgtacccgtgcccacccaggtaccgggtacccgcgggctaccggtgcccgacaagaaagctaatgggctgggctgccaaccatgtttactaggctgggctcattcgaatgctagccaatcgttcctgcactgaggctctagatttcatagatagctaatgggctgggctgccaaccatgtttactaggccataaaatgaacttttggtttgtttaataatat

SEQ ID NO: 118394 - DNA, 889 bp, Zea Mays
caggtaactcgagttgataggccacctctccaacttgcctaaaaactcaaaatggtccaatatagcgaggggacaattgcccttgactttaaatctcctcattccacgaagtggtgacatcttgaggtacacatgatctccttcctcaaattccagtggtctccttctattatctgcgtagctcttttgcctggtgtgagctacccttaaattctcccgaattatacgaacttgttcttctgcctctagaataagttcaggtccaaagaactgtcttcctctagtctgatccaatgtagagaaatcctgcatttcctgccatataaagtctcgaacagtgacatcttcagactggcctggtaactattattatataagaactcagcataaggtagactcttgtcccaactactaccatgctaaagggcataaactctcaacatgtcctccaatacttgattagtcctttcagtctgcccatcagtctgacgatggtaggccgaactaaaattcaacttcaaaaccatattctcacgacaacttttccaaaatctggaggtaaactgtgatcctctatccaaaatgatcttcttcggtacaccgtatagagacacaatccgagccatatataattctgccaattgagatcacttataagtagtcttgaccggaacgaaatgagccactttggtctgtctatccataataacccatatagaatcgtattctttcgaggtgcgaggcatgaagtccataccaatctcttcccacttccactcgggtatcttcactgggtgtaatagtccggctggcctctggtgttcagctttaactctttggcacacatcgcacatagccacatgtgcagccacatctctcttcaatccat

SEQ ID NO: 118395 - DNA, 397 bp, Zea Mays
tagtgtcagatagagggacacgattcacctcaaaattttggaaaggcctccagcaagcaatgggcaccaagttatgtttcagcaccgcttatcacccccagtcagatggtcaaacggaaagagttaacaagatcctcgaagatttactaagagcctgtgtgttaacgtttgacagggattgggagtccagtttgccgtacgctgaattctcatacaacaacagccatcaggccagcatcaaaatgtcaccgttcgaagcattgtatggaagaaaatgccagacccccctaatgtggtccaatgtaggggaaaggacactagaaggacccgactttgttaaagaagccgaagagaaagttgccctgatctgcaagaggttacttgaagctcagagtcg

SEQ ID NO: 118396 - DNA, 861 bp, Zea Mays
cccaatgacgaagtagtcgtagcgctcccttttccttgatcttgagtagctggagttttccttacagcaatcttggccttcttttctgggcccgaaggtggttcttcgtcattcttagactcatcacttcctatttcatcatcgatagctttctttgatgctttgctagtagtctttgtagctcttttccacttctctccagctttagtgttggctgcaggatctgtgtagtctggatacttaaaccctatggcatccataactctattcaaccgaagtttcccttggctcctaaaggtggatgacatgtgtttgtgctcccttacgagataattgcccgtaatttcattgcatttttcttctattaatcttagccacccgatggaaggacttttgtacgaagattgctctttgaacttaatgctaatgtgacgagctctccgtttttttattttacttccttcgacaatttgcatccagtccgagtaggaaagatgttgtaggcaagtgtctcttgaatcaggtctcgagatccaattttctcgatggacatatttaaagtcttatcgcactccttagtagcttcattcatttcacactttaacctcttcaaaccgaagctaaccttcagagggctcattagcatacccttgaacttttcacggttttcagaatccacttctgcataaaaccattccttcatccaatcatgtgccacttcatctggtgtgcgagaactagagcaactatgttctatgatagatgaagttgtagcatccgaagttgttgtcaaggttgtatgcagatttagccttcgtatggtccttagcctttgtctgataatgtaagtcgtgaatcctg

SEQ ID NO: 118397 - DNA, 360 bp, Zea Mays
gatgagatgcgtttgtaggggtactgcctcggccttatataggtgaccggacgactttccctttataagttgtgatgcctatctaactctatctgaatatatctttaaagcggcagtcactcttgcttatctggagttcggtcgcctttcatccaggttatctcccgagtatcaagctcttcgagtacacacaatctacctgtgtgaggcatcaatgctccttctgcgtcagacacgcataactcggctgtcccggtctttgtctcccttggtcaaactcacctagcctgattatggcctaatggcatgccttgctaggcaaaccatcagaggcccataaagcaactcatggaacatttc

SEQ ID NO: 118398 - DNA, 407 bp, Zea Mays
cacaggttttaatctcgatcatccttacaagatccaatgaccaacatgtttcttccttatccccgccagggtagtggcggcgtgagccacaccgcggtggcgttctcacaggtgcacgccatccctcgccctaaagtgataacccccatggaaaactgtgctaaacgacacaaggacgaaaaacgagtcgatcggtggcgttcttactgcgataggagcagtgtcccggtccggcgatgacgcactgcggtttcggggcatgggtcaacctccgacgaacaattgttgctctttgattaccgaactcagacgagaaggccacacacaccatccgtagctccccgcgatgtccactgatcaatccctggccacttgccgatgacgtttagcgatttcccttgcggcgg

SEQ ID NO: 118399 - DNA, 459 bp, Zea Mays
accgaccagacgactagtcgcaagtcggccatcaggtcggtcctagtcgtcctatatatatcaggaccaatagaccaaatatatactaatgcactatatgttctagagtacaaatcaagcatgaagataactataggctgatggctgcatgtagggatgcaaattggtctaaacaacatgatcccaagtgacctaagccatcccacatgtagctcatgtcctaagctgcccagaaattccattatgtttctagtcgtccacctcctagtcggacgactaatcgtcatcagtcaatgattaatcggatggccagaaactaatcaacttattgagttgtagctcccctgcgaacaacccctggtctaactggttaggtgatgtagtagcaaactctcaggttctgagttcaatttctagtggaagcgaattttcatacctgggttaaaaaatcccctcgct

SEQ ID NO: 118400 - DNA, 515 bp, Zea Mays
agttaagcgaacactggtagggaagtgtctcatgttgaggatacctggttgttatataattgatggaaaaacgcctgggaagactaaaaattgctgaagcgcagatgctcctccagaacatgcacgcttgtgttcgaaaaatgggttcatatcctgtcgtcgatcccagttaactacttccggtatatatttatacaactagtgtactacaatactagtatatctcaagtacctggcttatccatccttttatatatatatgcagacatagtcacacacaatgtgtcagtcagtactcagtaatctccaaaaccatatgaatatcactaaaatatctgcaggttcatctggctacggaccctcctaatgaacatgtcacaagcctcatcgatgtcatcctccacgttgaactccagaccttcaacctccctattggtccttatgatctcgatgaccgatggctcctcgggattatcaagggcatgaagctcatcgtgatcgtcctcaccgttgta

SEQ ID NO: 118401 - DNA, 981 bp, Zea Mays
ccgccgccgttgtgattcacgtcgtcggtgaccagataagaccgctcggtaaagccatgcgctggacggcactccggtgaaccccccagtacttcccctctaccgtgcggcttgagcagataagcccgccggggatcgccatcgctcggccttacgccacatatccgagcacctctgtcgcgtcaccgtgactctttacagccgttaaatcatcgccggtgagctcgccacgactgaggacacgaacccacggcgccagggtcctttcttatctccgaccgcccgcgttgttcgatcaaattgagcgccaccatcgaagcctcctataaattgagcccccggttagctacgctacctcatcgcaaaaccagagcccccaatcccaccctcaatcgttcgctagagctcgtgaatttcgaattccccctaattcggtttccgccaccgcaaagaatacctcaccgtggccagctcgattcaggtgagctcaagtccctctgctgcttgttctagcatccctaggtcctccttaagctcttcgaccccttcaattgaactagaccatcacctatcgccgggaacacattcctttgtccgcaatgttcacggtcgccgtggccagggcaaattaggttaccattcttcgaattaagttaggggaaatactcggggagggtttaattcggtgtatgccgctcgggagcaccggccgttgcataaatccgccggcacaacctcaccggagttcatcctccgcgctgccatcgtcgtggacttcgtgcggtaaagaaatagaaatccagggaccatactgcaaactgtcagcgactgtgttaaacagtaaatgaacctacttcagtttagccggtaagccgagggtccttctgcaagattgccagcgcgcgggcgcgcttctgtccactgttgggtcagctgggctgaaatcagccaaatactattcacaagtttttccttttcttt

SEQ ID NO: 118402 - DNA, 325 bp, Zea Mays
tgatcgtttaggttgtgtggatgggtgcttaaaagagttgtgagatgtaggattagttgttgggcatatggtatattgggctgcacagtgattttactgcgtaaattttacccatacgtatctggtttggattatgcttttccatactcatacccaccatatccaatatgtgaataatttctcctaaatttatatccatggggattaaaatcttcacatactctaagcttaatagaggaattatacatggattaacgggtatcgggtctgcattggcacctctaagtatacctaactctctagtgatacacaccatcggcaaaat

SEQ ID NO: 118403 - DNA, 542 bp, Zea Mays
gtgtgttgaagcagagccaggttggaggcagtgagcacaatatcgttgacataaagcagcaagtaaatcaaatcagagccacaccaaaagacgaatagcgaggcgtgagacttggcttcagtgaaccctatagacagcaaggaggcaaactgaccataccaagggtgaggagcctgcttgagtcaataggctggctgcagtagaccatctcagacatagatccatggagaaaggcgttcttgacgtcgagctaataatctgtccaatcacgtaagagggctagtgcgagaacggtccaggcagtcgtcgacttcacaaccggattgaaggtctcgtcgtagtcgatgccaggccactgggtgaacccgcggagaacccaacatgccttgtaccgctcgagggtaccatcggcatggagcttatgcttgaaggtccacttgccagtgacgacgttggcgctaggaggacgagacacaacgtagtcgaagcgtgcaccagcaccttcacgccaacactcatgcctcggttagctgaaatgaaat

SEQ ID NO: 118404 - DNA, 605 bp, Zea Mays
caccgggtcatgctcgacccgagctggtgttggagtggaagggtccggaggtgttaccgtcggtgctggagtgcgtggtggggaagagttcgtcgtagttggagtcgtggctggagagcgtggcgctggatttggtgaagacttggggactgtggtaaacttgctcggtgaagaagaggtgcctactcttctaggtcccttgaagtggacgtactcgatggtgaagtcgtcgtatgtcggagtcatgcctcatccccgccttgtcccatgcccatcctcgtccttcatcgaacactacgtcgcacgtcgtgtgcacacgtgtgttcctgggtcaaaaatattgtaggccttcgagccctctgcgtagccaatgaacacccccggggtgctcctgtcatcaagcttgccgatgtggccaagctccttagtgaacgtgaggcagccgaagacccgtaggtgagagaccgccgacttgcgcccatgccaagcttcgtactgcgtcatcccgttgagtgccttggtaggtgagcggttgaggatatagacagctgtcaacactgcctctccccagaatacagtcgacattcctctttgcttgaggagag

SEQ ID NO: 118405 - DNA, 413 bp, Zea Mays
ccactaacaaacctactcaaaaaaggccaagtgtttacttggcatgagacccaggagagagcttttcaagcactaaaacaggctttgattacagctccagtactagcacttccggatttctcaaaaaaattcgaagtggaaaccgacgcatgcgacacagggattggagctgtgctgcaccaagcaggtcaccccattgcttttgtgagtaaatctttgggtcctcgtcatcaaggattatcaacatatgaaaaagaatgtttggctattttactagcagtggatcactggcgttcctatctgatgagtggtgagtttattattcgcacggaccaaaggagtttggtgcatttggacgaccaaagactcactacaccctggcagcaaaaagcattaaccaaattattaggcct

SEQ ID NO: 118406 - DNA, 539 bp, Zea Mays
ccgagcacaaattgaaggtctacccccaggcgaggccaatacgacaaaaattacgtcgctttacgcccgacaagagagaagccatctgtgctgagctggctcgcttggtcgcggccggattcattagagaggtgttacatcctgagtggttagccaaccctattcttgtactcaaaaagaataaagtggattggcgcatgtgcgttgactatacggatctcaacaaacactgtccgaaggatcccttcggacttcctagaatcgaccaggtggtggactcaaccgttggatgctctatgctgtctttcttggattgctactctgggtatcatcagattagtttggcaaaagaagacgaggaaaaaacagcatttatcaccccgtttggagccttctgccatacctccatgccgttcggcctcaaaaatgctggagcaacttatcagagggctattcagacatgcttagctgatcactagggcaagcgtgtggaagcttatgtggatgacatggtgatcaaggcagaggattcagaaaat

SEQ ID NO: 118407 - DNA, 554 bp, Zea Mays
caaaagcgtcggcggctgtgtgtagcccgtttttttgcagctattctcctatactcgcctaaaccgttctgacctatattcatggcatgatccaatatcctgcgcgatttgctgcgcagttcgcatgtcgcgagatttaggtgaacgacacgttacgattacctgcctattgtgttacatttccataaacatggctcaccccaacgtgcgaccgccccacgttctcggatgacgcgcgcgtcacccccactacccgatctgaccacacacgtcacgtcagatgattatttatttgttattagtaatttaaacaagcataaaagttgaaccacctcccgatcacgtccaactatgccaatttacgcagccaataacgacaaaatacgcaagcataaacgcgcgacccacgtctccgtacccgagccccccacgttaccatttacgcatatgtttcattcaaattccgtatgcataaacttcccaccttgactcggtgcatgcgcgcggtactcccaccccctgccacgtcgtcccacgcccgcacacctagcctg

SEQ ID NO: 118408 - DNA, 463 bp, Zea Mays
ggccaaccaaccatcgtcggcgtcctcctccagcagcttcttctctggtcttctccttccagacaacggaggagcagcttctccttctagggtccaggcgacagcgcgtatgcggtagagcatgagtgggcaacggccgatcagccgatggcgtttactacatcaacgatcaatctagataaggttgtttgattcatggtcagggaatgctaggtaacgtctctatcttggctatctctaggtgttccacaaccaaacacaccttagattaataacagaggatgagatatattgctgttggagacagcctacgcggagggaaaggggatgggaaccgctgcagccggtcttaaactagaggcctgtacctatgataaacaaattgcagtaccgtatccaaacaggacagcaaacgaatgaacaatgtagacaaattcgtgtgctatccggtcagaaatcacta

SEQ ID NO: 118409 - DNA, 284 bp, Zea Mays
tccaataaaacatttagatcgacaacaagtttggtttgaatcttctggtgaagctcaccaaaaagcttttcaagcaacaccgggtggttgagggctgaggctcttaaaattgaaggggtaagtgtaatccatttcatattcagatataccattgctcgacatattcagatatatcacacacaccactataagtgctagcaaacccatggttgatgcacgatctttgaacgcatcaaggaatgtagcggatagataaaccgatctagaaaccgattcaatcgcat

SEQ ID NO: 118410 - DNA, 358 bp, Zea Mays
aaacggactattcgttcaaggaaataatttttaagtgtgtgcattgaatacttaaaatgtttggataaaataaacaaaactaaacgtatatatgtatttaggcacatcctttgggagttattttttgttgcatttaatcttgcaaaccttgaactttgaatcaaattagatttatgaaattgagacttggaataaaactgaaaatgggaaatagaaaagaagaaacatgttcctgggccaaatgcagttcagcccatcttgtccctgcccatcctccttctgctgctgggccaaaatggctttgacctgcccatttacaccctcgctcctgacaccgccatgtgggacccactcggcc

SEQ ID NO: 118411 - DNA, 985 bp, Zea Mays
gctgtacaatctttttctatgtggcctacgattacattggaatcgatcttgactatgaaagtcctaacactgagtgccctaagtttgcggagtccgaggatgactgctttgtactctgcaatcttattgctacacttgtctgtcttgagagcaaagcttaagcgagcggcatatctgtacttggcgcctgatggggttgtaattattgctactgcgttggccctcgcatgacaccaggtgccatcatagtggattgtccaatgtatttcgaggtctaggtgccaagatagtgaaggccccgtccaatccactataaagtgacgaggacttgcgatttgattgagtttatggactcaaagactatgtggtatccgaagagttcttctacccacttgcctattctagttgtgtcctctgggttttgaacagattattgaggcttcggtctgtggccactcttattttgtgtgcttcaaagtagtgtcgtagcttttgtgacgccatgagcacaatgtaagctattttctccatttctgtgatattgcacttggagctgctaaggacctttgagaagaaatatacaggctgatgctgtaattttccatccttggctttctcttgcaccaaagctatactgactgcttgatgggatgctgccacatacaggagcagggcagatgcgggatccaggcttattaaggttatcatttgcgagagatacactttgagtgaatcgaaggctactgcttgctcgggctccaaacaatttttttgctcccctcaaggtcttcaagaaaggtaggcttccctccgtagattatgaaatgaacctgtttaatgttgctagccttctagtgagcctttggatatcttttgctgattatggaggctgcatatccattattgcattgaccttgatgggattggcctcgatgcctctatgggatacaaggtaacccaggattttgccctggcgaacaccgaa

SEQ ID NO: 118412 - DNA, 535 bp, Zea Mays
cccagtcttagttcgattgttcttttggggatgatggtagatacctagatggagaggttgctggagtggttttgatgtgtattctttgcagtatttgacgttgttatttatattgattaatgattgtaaccatgtatgcatgtggagattggaaggagctcagaaggctgggacactgacctgctttacgacgaggagcgtgggatggttcaaggtggccctgttcgcagacctgctttacgacgaggatgcgtggacggactggtgccccgcgcaggatgccacatctgaccgcgttatagccgtcatccacgacgccgagaacctaggtgcctacttgcccacgctctccttctgcttccctttacggttcacccctttcctccaaatgaactgacacggaactccctctgccgcacggtctttgtaaccaatttaaccctactgattttctaaaatcagcggtgaaattaacaagatgcccacgcctgccaaaattagccaccttatggttatctctttcacgtatgttcat

SEQ ID NO: 118413 - DNA, 442 bp, Zea Mays
aaataattgtgccaaaatttaggctaaaacgttgtaattcgccagtgtgaaagtccgcgaacatcgccgtcaggacctggggccttattatgagacatttggtagatcactttttatcctcttcctctaagaactcctttgttaacaattggttttccagggatgtgacttgcgatatgtcttccttgcgagttgcatccaactgtacaaccgagtcctccggaggaccaaacatgattttataaaatgatgtaatatgctccctcaaaacattttcacttcgaatagttctctccccatccttctactggaaaatcttgttttcctatgtctctcgttcgctagaagatgaagctctcgcatttgacctttgattccacttgatctcttcttctctcaatatatttgccaaagaagcactaagacctgtttttaaatcgat

SEQ ID NO: 118414 - DNA, 1403 bp, Zea Mays
tacaaaactaaccgagctagttttacattccaatgacctgcatgggagcatgcctccaagccttggtaatatgacaatcttagaatccatcgacctttcatataaccgcctcagtggccaaattccccaagagatcttaagcatgtattcccttacaaaatttctaaatctctccaacaattttttcagcggacccatttcccaacagatcaggctcttgatcagtcttggtacaatggatctctcaagcaataatttatctggtgagattccacatacccttggtagctgtgttacactgcagttcctgtatttgcaaggaaacctcctacaaggtcaaataccagtggaactgaatgcactaagaggcttagaagttttggatatctcaagcaacaacctgtcaggacccattcctgattttcttggtgacttccaagttctcaagaagctgaacctatcattcaataacctatctggtccggtgcttgatcgaggtatcttccacaataatgccacctctgtttcactttctggtaatgccatgctttgtggagggcctggtttctttcaacttccaccatgctcaactcaagcaacctatggccgttccaatcatcaacgaatgcatgtcttggccttttcctttactggagctttagtagtctttgtgtgcatcactgtatgctacttcatgaaaagggcatctgacaaagcaagtgatgctgagcatgggttagttacgcttcctagaaacaaatacaagaggatatcatatgctgagttatatgaagctacagattcattttccgattcaaatctggttggtcgtggaagatttggtactgtatataaaggaattctacatgatgacagtaatacagaaactgtagcagtaaaggtactcgatcttaagcaacaaggagctagtaggaccttctttactgagtgtgatgccctcaaaagaattaaacatcgtaaactggtcaaggttataactgtgtgcgacagcttggataacaacggtgatgaattcaaggcgcttgtgctggaattcattcccaatggaaccttggatgaatggttgcacccaagtgcacttgtcaccaacagagcaactgggagtctaagcatcattcagaggttaaacatcgctcttgatgtggcagaagcattggcatatcttcatcaccacagcaatccatcaattgtccactgcgatattaaaccaagcaacattctacttgatgaaaatatgactgcacatgttggtgactttggtttagcaagaattctaaacatggatgcatgtgaacataattctggtggaagtagctcggctggaattcgaggcacaattgggtaccttgcaccaggttggcaacgacttcaattatatgtaa

SEQ ID NO: 118415 - DNA, 692 bp, Zea Mays
aagaaatatctcattgctgcaaaggtatgaaattaattgactcatctcgtgtgcactcattcagcattgtcgttagtaaatctttctttactctttattcattatgtgaaggaagaggaggtcaccgaagggaagaggcttcctctcgaggaggtggaagagaacgcatgcatcagccactgaacagaacaagcaggcgatttttttgtgtggatggcgtctgccacaaaaggattgaatcgaggagtgtgctctggttgtgaagtgataactaggctaccacatgttcattttcaaaagttttcgtgtgtgatcgtgatcaggggtgaaactgtggtttcagccaacaaacttgcagttcctattgcttctccccacttttttcctttatatatattttgtatcggttacagaacatggtttatccagtggtatgctgatgaaagatgctaagtttcgcttaatataatgtatatgaaggtcctgggtacctcaaattttgtccacattgaaccagtacgaatgacatcttccttgaaagttatagaaatgcttcaaagttcaaatggcattcagcatgttccatgtgcttctatttcagcactcatttcccgtgatggcaatgcaaactggaactggtcattagttagcattgactgaaattttctagcctgttcgttttttgtttcgag

SEQ ID NO: 118416 - DNA, 281 bp, Zea Mays
acaatgccacaactgaggagaggcttcgacgagcagggaactggcaggagcggcgggaggtgtcggtaggtttaatgggtagagaggtccagagctattgcacctggcaatcaaactccgagtcttgagatccttcacagagaaaccaaaagggtcaaactctacggaacaatggttgtctatggtaaattgacgaatagaaacaagatttttgataatatgtggagacacaagaacattagcaagatgaagattcctaaggaaagcgaaccctgtgcccg

SEQ ID NO: 118417 - DNA, 468 bp, Zea Mays
cttgtttccagacgatttgaattgcttattgaatatttgcgactgttcagtgaccgtggtaggagatgagtggttgcctactctgcttggaatttgccacctcctaagtcctttttcaattttgtgtccaatcctcctgctggtgatagtggtctaggtcttagagtgcaaccctctcccgaagatattgaggtcttggttgcttctctttgtgatcttcccaatgatgagaggcaagttcattttgagatgccagcgagtccagatgatgtagaaatgaatgttgtgctcgacatgttggttggggaatcttctgattcggcccctactgaaacaatggctgttgcggttataccaaagactgtcaaaacagtggatacccggaagcctgggggtactcgcccaaagcgtcttcgccaagtcagtcgtccagctgcgcctgctgaggagaagaagaaaaagagacag

SEQ ID NO: 118418 - DNA, 701 bp, Zea Mays
ctcctcgaaagaacgcttgtccccaagcgttggctttaggaaattttgcacggagagcttcttcatcttcccatgaatccaatgcggcatccgactgtgaccacctgacaagcatctgctgcactgggctgcctcctcgtgatatcacctgtcggtccatgacttgaagaggaacttggagagaactgtcagtaccaggcaaggtagcactgacctgattgtcacctttggaaagcttgagttgcgatacgtggaagatgggatggacagtggcacctagcggcaactgaagcttgtaagcagctttaccaattctctgtagcaccacatatggcccaaaatatttgaaactaagcttgtgatttgcacgagccgctacagatgtctgaacataaggttgcaatttgaggtaaactgaatcccccacgttgaactctctgtcagttctgttcttgtcggcttgtgccttgatgcgttgctgagcccggagaagatgttggcgaacaacacggaccatcaattctctatcattcagccagtcctgaagatctccagagacaggcgtgtcattcagagtaattccaaaatgcctaggaagatggccataaaggacttcaaagggcgttcgtcccaacgaagaatgataactggaattgtaccaatattcggctatagataaccatgacaaccatttggatgga

SEQ ID NO: 118419 - DNA, 330 bp, Zea Mays
gtggactttgcggaggatttgtatgccttcgatttcagttatgcactttagcatgggctggctgattcccttcttgcacaactgaccctcgactaatgcgaagtcccagcttctgtgctttagtcgtttggcctcattgctatcgcttggatggtagtggccttgcagatacagagttattggggcccgccaatcttcggccatgatgaggttgacgatgcggtggccttcgtcgtcctgagttatttgtaaaccttctgggttgcggacagctggtgtgccgatgacgtggtacaacacgtcggagggcaaggcttcgcccttggccgc

SEQ ID NO: 118420 - DNA, 612 bp, Zea Mays
attggtagctgctcttcaggtaccctgagacacttcttcaattgtgatacatgaaagacatcatgtacatccgcaagatgattgggtagctttagttgatatgcaacttctcccactcgctttaagatcaagaaaggtccaatgaagcaaggggacaactttcctttaactttaaatcttctcataccccagattggtgacaccttcaaatacacatgatcaccttccttaaactcgagtagtctccttcgggtatccgcataacttttctgccttgactgtgtagtcctcaaattcttgcttatcattcgcacttgttcttctgcctcttgtataagttcaggcccaaagaactgcctttcaccagtttgatcccaatatagtggagtcctgcactttctgccatatagagcctcgaacggtgacatcttcaaactgggctggtagctattattgtatgagaacttcgcatatggtaagctcttatcccaactaccaccatgtttaagagcacaagctcttaatataacctccagcacttggttagtcctatcggtctgcccatcagtttgaggatggtaggccgaactaaaattcaactgtgtatccaag

SEQ ID NO: 118421 - DNA, 635 bp, Zea Mays
caaaaggagacaagaaaaagaacagaaaatgtcaaaggtgtggaattgctgatggtcacaatagtcgcacttgtctatctgtggaggagaataggcttcggttggccagccttactggtcgaaagagagggcggcccataggttctaggaacaagggttcatctagcgctccaaactggaatgaggcatgtacttcaaaaaaaacatcaaggaggtgtcacagacaatgattcatctagtggggagtagatgatttcatattttatgacaaatgtaatgtagtgccatacttgttattacaactatgggtgaatttataaatgctggaaccagtcgatattcacaaagtataagtaataatgatgtactgcatgaattgaaatgttttgtaaactgtatacaaaatatgcgtaaatgtgttatgaaaacagcgtaattcgacgctgtacaaatcttggtggcaaaaactgactaaaaatgtctttgtgaagaaaacaaatgacacaataaattgtgatttaatgtagtaacataatttttattacacatgtgtgcgagtagacaaatctgataccagtagttattgacaaaagaataaggttgtacagatttgcgtaattgagctaacaaaatag

SEQ ID NO: 118422 - DNA, 788 bp, Zea Mays
aaaagaagggaaggtgttttcgccttcggctcaaaagattgcaagcatcggtttcgtccacagcaaagcaattcacacaggagcaaaaaaggtaaaattatattacaaggtattcacaaataaatacaatattttgttcaactgacaattacaactttttgccgagttcttaagtctttctacagatagatacaaaaagaaagttctagaatcttcggtacttcggaacaagcttcggcttgatgaccttcggtgccatcatcctgcagagacatgaaggcataaggtaatcggaaatttaacaaaggaaaaccaaggtaaagacaaaggtaaaagtttcaaactcagtcaagcagttttcgtgcttcgtccccaaccagttcacgcccgccctttgcccaaatttgggtaataaatatgtttcctttgcttcgggcttcgactggaatatcaactagatctgatgttgaaagattgaaagttggcttattaacagttttggcgtgattgcacccagctttcataaatgttgcagttgtgccgcgtgaagctaccagggcacagaaatatatgtgcccggttataagttcatcaagggcttcaacttcattttcaatatgttcgaaggccccggagatatcttcggtcgaagggttaatttcttcagaagtagctccaaccgagttaaatattccctttagccgattaatgcaccgagtggcaaagtcataacacttgttccgaaggttctcaatagcttcgtgtagcttcgtatttctttcagcttc

SEQ ID NO: 118423 - DNA, 764 bp, Zea Mays
tcaatgtattcaaaaattcaacaggatataaaaggtcataagattcatgagtattgggagctttgatgactttgtcacagcttaaatactcttttgtctcttcagagataagagacacaatgtattcatttatggaatcaactatatcattagtaggagtcaatatggcacgatctttcaaatactcaagctgcatataatttttatttagatcatcataaattttatcaactatgcaagtgattttgtcaccttgtggcaacaagagtagttcatggggtatttgtatccatgttggttcatcttcgccttcttgtgctgtagcatttattttgccttctccgacatcaagcatccatttactgaatcaggatagtttttcttgttcttcatgtgtcaaggttgttcctgaaagcctcatattccgagtaagatgtaggatgtgtacatgagaccaaaggggagagttgattattgctgcattaacgatttctgaacggctcccgccttcaattacaggtaatgtttgtctgagatctcctcccagaacaataacttttccgccaaaaggtaaatctcttgccgctggtgatgaagtagccaagatgtcacgaaatgatctgtctaatgcttcaaaggcaaatctatgtgtcatcaatgcttcatcccatattactaaagatgcagcttgcaccaattggcagagcatcgtgccacatttaatatcacaaactgttgtttcatctagttcacatggaattttg

SEQ ID NO: 118424 - DNA, 497 bp, Zea Mays
attggagataagccagatctatcataccaagagtacccttccaaggttctggattgcaaagaaagatcaactcgggctaaattgatcaagatgtataagatcaactcaagaagcagatcgatgagctgttagagaaaggttacatttggccaagcacctcaccttggcccacccctgtcctgttcgtggagaagaaatatggcaccaggaggatgtgcatcgattatcgagttctgaatgaggtcacaatcaagaacaagtaccccttgcccagaatagaagatctgttcgaccaattgagaggagccagcgtgttttcaaagatagatctgaggtcaggttatcaccagctcaggattcgaccttcaaacattccgaagacggcatttgttaccaagtatgggttgaatgagttcaccgttatgtcttttggtgtaacgaatgcacccgccttcttcatgaatctgatgaacagtgtattcatggattatcttgac

SEQ ID NO: 118425 - DNA, 317 bp, Zea Mays
agatcgttagaagatgaattaagtatcgttcggcaccattcgcgcattcaaagactaatgaacccgaaggtgccaagttcgggaaaatgaagtttagtgccaagcgtggaccgtctgggaccagaggcggattgtccgcgatacactttatctgacatccgatgacacatttaatgatcttatagtcattcatacagttgttgtaattaactgttgcgatctagtcgttgatcttgtagggggcggaccgtccgggcaggactcgtggaccatccgcgagtgcgcagacaacaataacagctatgtgggcaattgag

SEQ ID NO: 118426 - DNA, 336 bp, Zea Mays
ggaaggtcggagcatcggagctggccagaagagggggagagaagcacggtgaagtgtctcgtctcgactctcgaggagagaagccaaatttcgtacaagcacacaagcgctgctctcgaaattttggtcccgttccgggcttgctgctagtgcaagatctcgaatcccgttcaatcagacacatgaccgttagtttaaactaatggctctgcctgtcaagtgtcaaacagcagtggttaggatcggcaactacaacgactagttgtcagtccactcgcttcgtatttgtcagcgtcacgtgatccagtggctgcccagaagttcctcgcttatttg

SEQ ID NO: 118427 - DNA, 885 bp, Zea Mays
gctaatgcaactagaacataccaatttggagttaaatcgcaaaagttatggattttctaaggttattggatttatttttatactaataatcattatatcggatttattttacttaatttaataaactgtggattgcgagtactatttctaagaagaacatggttcaatatataaattctaggaccaatccgcaagactctttacacagtcttggatggcgggttaatttcttaaaaatgtgagggctcttaagcatatatcctacgacgaagggggtacggttcattatggactgcccgatcatacccgagtggcctagattagatcttcataacacctggaccaatacgagttctcaataattggatctcagattcgtggtcaaggtttggccacaccatcgattaatctcctctatccgactctgatccagtggatcagatcaaaaaaatgaaggggtacgtggacgctcaatctcaaccctcggttactcgatcaacggccatgtgcctcatccacaccacaactcttacccacggcggcgcagaacagggccccacgatagcgtattctcccctacggcggcgccatggtcgccgagcacccaaactctccccacagctccatcatcgacacgattgggaagaaaacaacgagaaggctactacggtttggatagtaggggacttaccagagttggtgaggtgatggcctgtagccacggcgatgggaggcgttgtggctgtgaaggccgacaagggattatcggccggtcaagctttaggagtcttcaatttagcgcgatgaagaacttgggcacaattttgagcgcagtatagaggcatggaaggggatcactaacggtggccgcaacctttctcttcg

SEQ ID NO: 118428 - DNA, 526 bp, Zea Mays
atgttggatcataatccattcttttgatgaattcagtattcggcatatctctagagttgagaatcatagagccaacaatttggcacaagatgcatcaggttatcggataaagcgagggagatttcacagcactgaaaatctgataaccagtgcagggccaaatcaacaggccgcggaccgtccgcgtgaaggcgccggaccgtccgaggttgccaggaaggttctcctagtcgatttggctgataatgaagccgatgcaagtgattggagaacgcccataacaaattatttacgaaatcccaatatcaggacagataagaatattcggcgtacagctttcaagtatgttttgatgagtgatgaactctacggccgaacattgcacgacgtcctgcttaagtgcttggcccccctgcgtagactatattagccatggccgaagtgcatgaaggaatttgtggtacccatcaatcggctccaaagatgaaatggctgttgcgaaggtctggtttttattggcctaaca

SEQ ID NO: 118429 - DNA, 1084 bp, Zea Mays
tgaaccggcacacagattctaaaccgcaagttcggtattttttggctgagttgtgaacagtaaaaggctgagtcctaggactcaggggcttcaccttggtgtagatgacttagctactagaaggaacaactgagaaacaatagcaggagtattagtaggcaagtttccatcgatagagtccaaattacccgagttgacaactctgctaagttagactcaggggctacttttaaggatatataccaagggtatccaagacactctagtaatgaaggcactaactggtgggaccgagtaactcagacttggtctagggacttgaactcggactgagtaactcggacttagccgatggacccagactcaaatattaggggacttggcccacatggcagaataggatcaggatgtatgaacaaataagggaagataatgattcgtaataaggatgacatctttataacaactatatatccctattttaagggaatccaaatgtaaagatagagatagatattcttgattgtagggataactgtttcaggccaaactatatacttatctagctaatgattagataagcttcagtaattaatctaccgtaccttcttggactataaaaggggtggtagctctcatccaagacagatcatcaaatcataagcaatagccaccaacaaacaagacgtaggggatactaacatcgagagtgtgaacctgtctaaattctcatatcctttgtgcatttacttacagttctcgatttcataatccaccccgtataaattcaccgtcgaaatgcgggtccagatcggccgcccctctgaacccccctcaagcatggacctccatgagagatggaatgaaacgttcttgactaactaattaaataaactaaggctgtggttcatagttcatacacaagatccaaaacatatggaataagttattatttttgagcaggcagaacacggctcagggctaaacgcgatacactgtatcgctggagtaaacgcgaaacagtgctcataattatttattggcgatatatggtgtagcggtgctcatattgtatggagtcaac

SEQ ID NO: 118430 - DNA, 335 bp, Zea Mays
aggccaaatccatggaacaggaagataaagttgtcatagaaacgtgtccgagggggtgaatttcctctttataacttgatatgcatgggtgtaaaccatcgggccgggtttatgtggcagacctcaccaggctggtgtacacatatgcaaaattttaattatgaaaggagaaaaatttaacccctcagagttgcttctatggactgaacttacagagataggaaggggtacttcttcagctatagcaaagttggcatccctcgggttggcatatttccatcgccttgaggggttcctccctgctggggggaggttgcggatcccctcttggttca

SEQ ID NO: 118431 - DNA, 1227 bp, Zea Mays
atatcattcactcaaactaagaaatttggccgaattacagcctttgcatcctcacaaccagctttttctaggagtgagacggctcctcgggcaccggcgaaggcgcaaaaatctcctctatactaagaatttcatcaaaagatttggttttgccatcgatccatcggataaccgcgtcaggatcaccacggataaagttctgctctgtagacaatgcaccaactttaccaaaactatttttcaacttattgtaacattccatagaaacattgtagcaacttattgttgcagcagttgctaacttcggcaaccccgtcgtgattgggggactctgcagtttcggatgctcctctgtctttgagctctttccatctgtttcttctactagagcaacagtagcttcggcagtcacaaaaggtattatctcggaagccaagagggtagattcgacacattcaacaatctccatcttctctgtagcaggcactacaggagtcttctctaaagagtgcagcttcggcctatgagtaaaaactttagctctttttagcttcgacgcggtggaagaagttgtagttgcgattttcctctttgctccttgtttccgagcaggaaagctgtaatcaggataaataaatccaatcacatcaaaaaccctatttagtctccttttgcctcgggcaccaaaggcagtgctcatggcttcgtcctttgccttcatataagtccccagcagctcatcattggtcgcctcaatgacttcaagccaatcatcattcggctcgtccaactgacttctgtagcgataggtgtgtctcagataaaccaggccacctttgctggagccagcagcggtctccttcggcatttccagtcattaacaagtggccatatcttataagcgatgtgctcttgaaccaaatctctggtggcaatgtaagtacacactgtgttgaaggccatcaagcatgcttgtacttcatttccacttgcgatcgaaggcctcctgataccgaagcgtgatcgtatagggcgctggattatgcccctcacatcctccctcttactcagatcattcttgacataaaaccattgcttcatccaagagcccggccatttttccaaaatgttggcacaagacacctcacatcagaccgatacacaaagatgtagcatccaaagttgttatgatattgctctttcccaactgccttcatctagtaggac

SEQ ID NO: 118432 - DNA, 271 bp, Zea Mays
ctccgcaaggattttgcggtcaaggatcttgggccccttaactatttcttgggcattgaagttcatcacacatccaatggtcttgttctcactcaacgcaaatacattgaagatcttctgttgcgcactagtatggaagccaccaagggtgttgcctctcccatgctacccaccgacaagttgtcccttgatgatggagaccctctttcgcctgaagataccaccaagtatcgaagtgttgtcggcgccctacaatatttgtcattcacta

SEQ ID NO: 118433 - DNA, 367 bp, Zea Mays
cttcatcagcttactcccgaagctttaattaaagtgggggtttttatttgggccatgagaagccaagggctggagccagatgctaaatgtttctgcaacatccatgaattatcctaccagacaaaagcatattgcttacaaagtgtggccactggtgaatgactgggaaatgccgaaggagactgctgtcggctccaacgaaggtggtctggtttatttaagatacacctatcgctatagaagtcaatttgatgagccaaatgatgattggctcgaggttgttgatgccaccagcgacgagctgttgggagcttattcaaaggcagaagatgaagccatgacaactgcctttggcgctcacgacaag

SEQ ID NO: 118434 - DNA, 394 bp, Zea Mays
tgctattgataaaattagaaggggttttctatgcagaggccgcaaagaagctagaggtggtcattgtcttgttgcctggggaaaagtctgccgcctcctggagcttgaagggcttagtatttctagttttctagaattatgttgggcgcttcgaattagatggctttagctacaaaagactgatcattcccgcccctggtctggccttcacatacaagttcctaaaaaggctagagttttcttatctaaagtggtgaccactgaagtaggggatggaacaaataccaaattttggaaggataaatggctccatggaaaaagaattgcagaactattcccaaggttgtttggcgcaattctgaagcggtttgtcaattgtaggacacttcaggag

SEQ ID NO: 118435 - DNA, 503 bp, Zea Mays
tgcacatcctgtccggtactatcattgtgctggtcctcctcttgttttgtaagtagtttgtactacgtgcagattggtgtgaccttgaccggcacttgcaaggctctgctcatcgggtagatattattagagtataaaagatcatcatgcatgtgctacactgacaccagcacgaagaaattttccaagggatgggcgaattatgatgagatttgagagtgacggatcgccgagcaatacagtacgagtagcaaggtggtttcaactgacacggaaacatatgcagcctggcactgcctgcatttctacgctgcggtactagctagttgacgtcagatgcagttatgtgcgtgtatcatacacgtggtattctcagttagtggcttacctggcgtgtttaatcaaaacatatccaaagggcaaccgctcacatggttatacctttccgggtcctttctcactatatcatacggattcgtacatttggagataccaaagcatcg

SEQ ID NO: 118436 - DNA, 284 bp, Zea Mays
ctaagtctcaatgctacctcgtcaccttaagttattatgatgttaagatcgttgtagtatgtgaactatgttgactcttaaatgttctaatgctgctggtcctcctgaataagttcatgacatgattctattattattatcgttgttcatatgctttttctgatgtttatgtacctcgttttgtcgattggcttcactttataacatatgactaaatgtgtgccatctccacatatcctagcatggaccctgccaacaatgcgacatcgtcgcaggcgatgtca

SEQ ID NO: 118437 - DNA, 649 bp, Zea Mays
gtttggtttgctctcgtctggcctccagattctgatggtcactgataacatatagaaagggcaggctcaacccaacaatggtcccgaaagcagtaatcttttattgggcctgtaagtgtggaggcgttttttccttttgagctccctttttgtttggtttgctctcgtctggccttcagattttgatggtcactgatgataaaatataagcaaggcaggctcaactcaacaatggtccacaaagcagtatttttttattgggcctatgagtatagaggtgtttgcaagagtagttgacaacccaaacttagatatacacatttattgcatcttgatatattggatgaggaataaccccttgcggtggcacgcatatatcagtggcggcggattcatgattggactaaagaaggggctgattttctagtgactagtatcggaggcatcacaagctagtagagagactcattttttctctcttcttcttcctcccttctcctctaccttccacctctttttccaatggagtggagggttcatttttctctccttttcttctccctcctctaccctccacatctatattcaatagagtttcatggatgtaggagaggctagggcccccaacccccattcagacctgcccctg

SEQ ID NO: 118438 - DNA, 281 bp, Zea Mays
tcaatgggtaagaataacttgtttcatgtttgttgatgcgagaggtactatgggacggctacagagaactgcaaatgcttgttaagaaattcaaagtgagtggttgtctcacagagcaaccgatgtaattggaaaagaacattaagacaagcacttaagggtgtttgcctttgtgttgaatggtatattcggaaaagaacatgaagagaagcagatgacaaagagaattgtgaacggatgcaagtgcaccgaactcaaagtatactaccatccaagcctcc

SEQ ID NO: 118439 - DNA, 962 bp, Zea Mays
aatttatattaggggctagtgtccgtgtttgtgactggactgcacaccacgaggttacccacgtgatgcttttgggtaggacgacgtcgttgactgtgactcgatggtacgtgcggggcacgccagacttgcacgagggtttacatagttccggcctgcttagaatgtgtaacaccctacttcctgttgagggtgtgtattggaattgctctggagtatgaagattacaagtgagctacgatgatgcttaggtgttgttgatgagggtgggtataaagtgagatgggatgagatgattttgtaggggtcccttcttggccttatatacacaaccagagagttatccctttacaagttgtgaccactatctattctgttgatctcctcctttatggtggtttgtagtcctacatatctggagtccaatcaccttcttagctgagtcatcgtcgaatgcacagctcttcgtgtgcgcgcaaccgcatcacctgagatatcagtgctttggcagcacataactcggacgccagtctttgtcttattggatcaagttctcccgacctaattataacctgctggcccatcccacaagccaaaccattaggaggcccattaggcggccgatgacacgttttagtgttcgtgaggactcggaggatatctatccctcacaactagagattaaatggattagaaccattattttcatccataatccatttaaaacataaaatacattggagaatacattcaaactaacttaagcataacgaaagtcaactaaatctaagaatcatccttccttcaccgcatgtggggaggctcctcgttatcgtcgttctcctcgtcatccttgtcttcctccttagcctcaacatctatgtcatcaatgactatgacaatagtgtcattggcagtgtcattcgtggctccacaggtgtcgtccctcgtggcaagctgca

SEQ ID NO: 118440 - DNA, 340 bp, Zea Mays
attgaaccgaatggacacaccgcttagagatagaatcgataaaacaacgtcatgatcctcagagaagagtatgagaacgatcataatgagagattagactgatccacatttgatacatgagaacaggttatggcagataactagataacggagcagaatcattaatggatccagagattcagatgataaagccaacatgattcacaagaaaaagattaccagattcaggtcaaaagagaggtcatcaaccaagacgacttataggttgagcagaagagaatttaatgaggatcttggacaaggctttcgagaagaatttgggactggatattgttttgcg

SEQ ID NO: 118441 - DNA, 388 bp, Zea Mays
agagtaatgatacagactcaatattacacagcaggatacattacccattttacaaaagttgaacctattatacaacagtacaccctacaatacactactctacttttattacactactagtcctgcttcccattgcttttggcggcttcattgtcaggtgtgggagtccagacgtccaccaacctcaaagaaggagggggctcaaaaagatctaactccccacccaacgcgcgtcccgcagcgtgagagggtccggcttccgcctcagcagagtgtgcaggctcactagggtgtagttgcgagtagagcacatggacttcctcgtgcaatgtattgcagtagacctgcaggttgtcgacagctgagcttagctctctaattcgggcct

SEQ ID NO: 118442 - DNA, 570 bp, Zea Mays
actttgcacatcttgaccatgttgtcgaggatcttagtagggtatttcgtgtaggtcatatcaccctgcacactaagttcctccataggtatttgctcttttggcactctgaggcacttcatcaactgggatacatggaatacatcatatacatctgctagatgatcgggcaactccagttgataagccacttccctgactcgctttaggatttcgaagggtccaatgaagcaaggggacaacttccctttgactttaaatcttctcataccctgaattggtgacacctttaggtacacttgatcaccttcctcaaactctaaatgtcttctttgggtatctgcatagcttttctgacttgactatgcaattctcagactctcccttattatccgaacttgttcctctacctcctatataattttcgatccaaagaactgcctttcaccagtttgatcccaatacagcggggttctacacttcctttcatataatgcctcaagcggggacatcttcaaacttgtctgataattgttattataggagaactccacgtagggtaaactcttg

SEQ ID NO: 118443 - DNA, 855 bp, Zea Mays
accaaatacacgtcactaaacagatctgacgtctgaagtcagtgacatgtttatatatacacgtcactaaacagatttgacgtatgaagccagtgacgcatttatatatacatgtcactaaacagatcatagtagagatacgtaaaataaaagatgtcactgagttattaccatattttgctagtgacgtatttttacaatagatgtcacatgtgcacagttgttagtgacgcgttttttaaaaaagaagtcactgtgaaaaattagtgacgtgtttttaacaagtgtcacagatggtcacgtcccctttgagcgtttttgacgtagtgagacctacggtgacgcacgacgtacgaaactggtgctttaaatatatagcagagtgctcgtgctttgcaacagaaaatttaaatgttctcatgaatactaatccccttcgaaccctagtttagaattgttgatgtgttctgtaatttaatgcccacaaaattctccatgaaactccattaacacttgcctgatcagccaagcttgttgttgtggaccagtagtgttgaactataggagtcattaaacttgagtcctaatctaggtttgaagcacggtaccttcttaaatccctaggtgtctcgtcctgtggtcgagtttttttttttaaagtcatgacaagcaacaataattgcactaaaaattggacagtagcaagcagtgaatacttactttcctatcttcttgaaataagcatcacatgacattactttcctgtcttcttatcaaatgttcttcttgacataagcatctcatgacattactttcccatcttcttatcaaatgttctgaagacctctgccacag

SEQ ID NO: 118444 - DNA, 660 bp, Zea Mays
ttgcttctcgactgattccatgggtgaggatgagtatcgggattacttgaggggcattgtcgcgcaattgtaggaattttttccggacacatcacttatggcatccaatttttggtctagggacaaaagaagccggatatcagatattttatctgagtatgacatgacagtaatggactacccacaacagtatgaaggatgtccgctgcttcagctcgagatgatccaccatttcttgaaatcatgtgaaaattggctatcagtggaaggacaacataacatgcttttgatgcattccgagagaggaagctggccagtgcttgcattcatgttggccagactgcttttgtatcgcaaaatatacattggcgagcagaggacactagaaatggtctacaagcaggctcgcagggaatttatacagcagttctttcccttgaatccccagccttcacatttgagatatctgcactatataacaagacaaagaggtggttcagaatggcctcctattagcagacccttcatcttggattcaatagttctccatgttgttccgcggtttgacgcagatggtggttgtaggccatacttgattgtacatgggcaagactcaagtcccggtaacaagagtgcaaaggtcctttatgagatgccaaa

SEQ ID NO: 118445 - DNA, 427 bp, Zea Mays
caaatggcggagccgatggagatcaaggcatagccgagcaggagatgaggcccaggaggatgatcaagcccaacccctgcgtgacaggcccacagtggatcaagtagtagcccatgtccacagggacacagttatatatatactgctgaagagtttggagaactcacgaattaagataatgaaaaacattatcgtcctactctatcttcttccccaagcttatcctcttccaccgctcctccattcctccttctcgtctacaactagaggctaacatttggtatcagagacaacggtctttggatctggaatcccactactacacgcgtcgcgcgagggaatccagtgccatggatccacaactgaagctagcacttgacgcgcagaccaaatccttcatccctgagctggacaagaagttcgcggt

SEQ ID NO: 118446 - DNA, 497 bp, Zea Mays
gcagaacgcaagggtatggtaagcaaaaactaaccctgagcgcactcctcctttatttatgcgaatgggcaaggggcagccacaaacaaattgtgaaggaactgccccttcaaccaagggacgccttgggtatcgagcaaagagaccatgtgttttgcaggacctcgctgcctagggcagagcaccaggacaatgcgccgcgagaagtacaacggtaacgggcggggaggttgactagaccaccaagcaacccaaccatgacatagcagacgaaccatttcgcgtcccatcagacctcccatgccaaacaacatcatcatggccacccattattaccacaccacagcagtacccctgcctcggaccagctaggttaaaaactagaatgcgttcaaaaaatccccaagcagagcgaggggtggaccgagcaagctcccagcgagccgcatgctaggtgaccgacctattcgtcatttgctcgaatccacgtctatggt

SEQ ID NO: 118447 - DNA, 354 bp, Zea Mays
ggaagagctaagttttctttcacattatagcacttcatcaagcaattttttatgaattgacaaagtaaccacagggagaaggcgacaaagtggaggccaggtgataataatagctaacttacatacccaatcccacatatggagcttgaaaatcttggcatttgatcagataacgcagaaacatcctaggcatgctatctgttccaaatcagtgtggaacttctgttcaataccttcgcaagcttatctagctcgatgaacactccactgaaacacattttaattttatggagcagatcctaacgctctctaaaatgcacatatgccaagatcaatcctagttccagataaacg

SEQ ID NO: 118448 - DNA, 475 bp, Zea Mays
tcaagctcgaacttagcttgatctgagaggcaagtgacaaaggccatatgacgagggtgggagaggaccctgcaaaaattttggtctgcatttttagtataagacatgaggccgagagcctaacatcaggcacccgctcgctgccggcgagccttgagcggtcctgtaatatgctgacgacaccctcatcctcctcaaaggccgccctagggatgcctctcacttaaaaacaactctcgacctcttcagctccttgacaaggctaaaatttaacatcagcaagagcgtagccgtccccatgcacccactaaccatgtctagcaaatcacctcttgtatcagctgttggtttgaagcttcccccaaacctaccttggcctccccttctacctgcaccttttctcccacaccatagccaaaaccgatagatatctcgttgggttgcaggcgtctctcctgaaccccatggacgcttg

SEQ ID NO: 118449 - DNA, 446 bp, Zea Mays
ctcgataaccaatatgatgacctcaccctccactgcacctccctaacctcctgggtggaaagcctggagcaaaaagtcagggaactttcaggggaaaaggcgtcccttcaagagagcctctcaatagctgaaggcgaagaaaccaatacccgtgaagcttaccgcaccgtaaaaatggactatgacaagaaactgaagaagctcgcccccgcaagaaaaatccgcaagaacaccaaaagccaaggatgtcagactgagcagaaggaagaaaaccctccaaccctaccccctgccgggttaagggactcgtccgacaccgaggagatgtccctggccagccttgatgaccttctcaaggaatttggggacactttagagaaggagttcgggagtaccctagatagcactcgtgtgtgatgaacgtatggtagcagtgtgctgtgttg

SEQ ID NO: 118450 - DNA, 747 bp, Zea Mays
gacacgtccgagcaaaagccgcctaagggtgcagctggacaagcacaataagtgagcgacatcacccacagggtgcgaagtcttcacagaaagacacgtccgagcaaaatccgcctaagggtgcagctggacaagaacaataagtgcgcgacatcacccacagggtgcaaaatcttcacagaaagacacgtccgagcaaaagccgcctaagggtgcagccagacaagcacaataagtgtgtgacatcacccacggggtgagaaatcttcacaaaaagacacgtccgagcaaaagccgcctaagggagcagcaggacaagcacaataagtgtgcgacatcacccacagggtgcgaggtctcgtagaaagacacgtccaagcaaaaagccgcctaatagtgcaacaggaaaaagcgtagatgcgcgtcactaccaacttgtcgtgaaatctcccacaaatgcaactctcatcctactaaagtgtcgtgcaaacacgattacaaatcgaaagcaatctcgcaataaccacagcatgcaatgcaccatcataggttacacacataaaacaaaggcctcaacggcaactttacaaaataatacaaatcacgactgttaccctcacaactctattgcgaagagggggagggcagcgttttcactcactatcgcaacaagagcagtgagggaagcaaaaatgtcacataggctccaccttcggaataagacccgcctcccggaaattaaacaac

SEQ ID NO: 118451 - DNA, 1059 bp, Zea Mays
aacttggacccaacaaaaagatgttatatctactcaaatgtggcagcatagggggtctagccgtgtgtaatttctttgtggttttattctaagaaacattgtactctgcagtgatgttttttgttatcagccttacaatctgagaaacattgtactctgcagtgatgttttttgttaccagccttacaatctgagaaacattgtactctgcagtgatgttttttgttatcagccttaccaatctgagaaacattgtactctgcagtgatgttttttgtggaacttaattatttttatatgctgagagaaattgtgatatgcagttatgttttttgtttgttgtcttgaaactgtatcattttttatatgctaagagaaattgtgaactgcagtgatgttttttgttatcagccttacaatctgagaaattgtactttctgctttgaagcttaattattttttatatgctgagaaaactggacctacgctatgatgccatttcattacctcttcttatgacttcaattttataaatgtcttatcaattgtatatagactatggaagttgagcaagttgttgctggtagtacctcaaggactgccatgcgctggacccctgtgatgtcagcctttatcctgaggaagtttgcagacttggttgggcaaggagtaaaaatggataaagggttcaaggaggtccatgtcaactctgttgccaaggcactgtctgaattcagtggccaagaagtcacaggcacccaggtctacaatcatttgaggaagtgacgtcaaaaatggatcagggtttgtaggctcaaggacctaagcagtgctcattgggatgagaatacattcacaatcatccttgatgatgaacacctgctgggccatacaaaagacaacccaaaggatgctgaattcctcaatgtgctaattgaaaactatgtgcagatgcaaattatatttggagctgggcaggctactggcaggtatgccatggcctccaatgagctccttggcaccatctcggatatcactgaaggtgctggtgcatctgaa

SEQ ID NO: 118452 - DNA, 416 bp, Zea Mays
gtgccttcttgatgtctctgcctccatgcgtaagaccgtggatcctcatgtcctcaccggggtgtggtaacagctttagtcactggtatatctggagagtttgcctgctgcagcttagggcccattcatgagcgatttcaacgctgctgtgaacatcacattgggggttggcatgaagggaataactacgcatttgtaatcccacgattcgcttgtgttcataactttgcgcgcgactaggctatgacgcgtatgggttctgagccccctgaccctgcctctctgagatctctaagggtcaggggtgctattcgtgcaacttttgtccgtccaccatacccgtgtggggcgagccccaagccactactcgatgtagaggactgtctcaggggcttgccttgtcttttttgtattac

SEQ ID NO: 118453 - DNA, 792 bp, Zea Mays
acatcgaagactgcccagaaattcttctggcaaaacattgtttgtcgattcggagtcccgtccgagctcacagttgacaatggaaagcaatttgacagccaagacttcagggatttctacttctccattggcaccaagcttgcctttgcctcagtgtaccacccacaatccaatggcgtcgtggagcgcgccaatggcaagattttcacggcgatcaagaaaatgctcctcgacgacaagaagggcaaatgggccgacctgctacctgaagcagtctgggcactgaacacgaccgagtgtcgggcgaccggtttcaccccctttcgcctgctatacggatcggaggccatgaccccacaggaaatcaaacatgggtccccacggacaagcgcttcagctgtacccgacgttgatgagccaacttccaaagacctcattaatggagactgtgtcttcgccctgtaggccctcgacaaatatcaagcccaaacgaaggcctggagcgaccatgcagtcatcccaagagaattcatcgaaggggacctcgtacttgtccgcacaacctggacagagtcacggggtaagctggaaccaaagtgggaaggaccatttatcgtcaagacgaagtcgtctcccagcacgtacagactgaccacacaatctggcgaagacctggaacattcctggaatatagataatcttcgcaaattttttgtttgaatcctcagggccatcacgcccttgtaattcaccaaacattattattccggcccgcactcttttcctcccagg

SEQ ID NO: 118454 - DNA, 513 bp, Zea Mays
gttttaaatatttgcttagggtttaattgttgttgaattttttgaaaaaaccaatttaccccctcttagatatcgtgatccttttcataccccatcaggaccctaactaccgttgtaagactgccgagttccccttcgacccagccaataaattgttttccaatgtcaggtccccctcaacaaaagaagcagtgcacaccctaagttcctgataagcatcacacaaaagcatccgggccctattcactccatcgcgcaccttggcaacatcctcagtcgacttcgcgttcaacttttccaattcagaagaaagcctcgccgactccatgcgagcaacatcgccatctgaagactggtgttgcaacattttcagttcattcttcatctacgaagtattggtggccacataagcccccgatgcaacgcagtcagcaaaggcaagagcctccatgcaatcaaaacaccaatgaccacccacaaaaacaaatcttgcatcaaaaaataatgataaat

SEQ ID NO: 118455 - DNA, 773 bp, Zea Mays
ggaaaaagggacaaacgggtaaacccaggccccgaatctagaacgagacgaagaccatggattcatgggtgcacagtgatcccttaccaaacccgccaggaacacaactccttcgacgggagaacacaaatctaaactagatgaagcaagtcggattcaaagacaacataagcgtaattaccgtaaaaaaggaagctggctattgggatcgataggggcatgacaggcgcatcactcccctacttcttcttcctaggcgccatgggacttcactaagacgcagaattgagcgcggaggcaccgagggacgagaatttcagagggagagtcgcggtgaaagagcagagttagggtttgcctgccaaaaaactgacggacaacggatatgtatatatgcgccaactgtaaacctgccacacacaccagcacgagggaaacaaattttttagaatcgaataggagaaacgttaagtcgggcatgctaagtcggacgagttaagtcagacgagtttttagccggatggactaagtcggtcagaagaccgttgtgcacaatcagtcgagatagatcagtcagaacacatgttcaacaaaacaagggactcaatacaagtgatcaaaaatctcgaatataggatgcggatcaaaagaaacttggtacttgtcgggtatcgtaattagtgagagcacctagagggggtgaataggtgatcctgtaaaattcaacactaaatagccacaaaacttggttatagaaatgttagtgcgactaa

SEQ ID NO: 118456 - DNA, 368 bp, Zea Mays
caccaaatgccttcacatgttttactcccatacaatttaaaagttccaagccgaataagagggcctcatattcggcttgattattagtgcaataagttttcaatcggctagagaagtcgaaggagacatcacttggtgaaacaagtacgatgccaatgccttgtccttcattacaaaccgatccatcaaaatataaagtccaaggagtaatagtaaggtatgtcatgtctagtttatgaatatcattaatccgatgttctacaataaaatccgctacaacctggcctttcatagatttcaatggttcataggccaagtcatattctataagtgcataagcccacttaccaattctaccactcataatt

SEQ ID NO: 118457 - DNA, 320 bp, Zea Mays
tggaaacgggtccactttacctgtcacagcttctgcccactccatcataccgggtcccttctatcttagtaacatccttgttgctcccgatattgttcaaaaccttattttcgttcgttagtttacttctgataacaattgttctatagaatttgaccctcttggcctttctgtgacggatcttcgttccaggagcttgatcgccaggtacaatagcttcgggcccctctacaccctcgctactccaatatgtcccacaatgtcctgcgcccttgttgccactgtctcctccactacttggcatcgtcgtcttggccatc

SEQ ID NO: 118458 - DNA, 518 bp, Zea Mays
ggcaacatccgttacttcaacagttcgatctggaacccgaagacacttctttaattgagatacgtggaacacattgtgcaccgcagacaatgtttcgggtaattgtagtcggtaggccactggtccatatctttcaaggataggaaaaggaccaatgtaccagggtgcaagcttcccttttaccccgaaacgtgatacgcccctcattggtgaaactttcaggtagacataatcttcaacttgaaagtacaagggttgacgtcgcttgtctgcataactcttttggcaagcttgggcttctttcaaattatgtattattcgttgaaccttctctaaaacagtttgcctcaccggcctttattttctcatgaatgtgtttcataccctcatcatttctttgtgcatcaattattctttgcagaagaaccgactcaagcttcaagtgatttgaagttccatgttgaatcattcccaggttcaacttttccatttcttggcatagtgtaatgtcagaagtc

SEQ ID NO: 118459 - DNA, 875 bp, Zea Mays
gtataacctgtccagattgttacgagaggctgcgagtgctcgtttctcttcctacgaacaagaagcaacattcagcacccagtcaacaataagcatggcaaagtcaaccaagggagtttacctcatgcgccaccctttcagagtcaagctgagcactaagggaggaattcaaagaacgtgcgccatccaaagaagtagagacttgggccaagttggcttgactttgagaatacttctcctcaagatcagagcaccattgggttaagttggcttgatttcgaagatacttctcatcaaggtcaaagcaccgctgggccatatccgacaacacagctgaaaggggatgcatgactaagaacaagttgactaataaaaataaacagggaagctgtaagatcactaccactgggtcgaagcctgcgctagccaccagagccggatcactatcggcaacaccctcgggggctaggtaactgccggcgtcaccctcggggggtgggtcttctgtagtagccacctctaaggctgggggctcctcaaccacctccatgggagtcgggtgactcggatcgatgtctcgacatgaaagactgccctccaaagtcgacgacgcgtgagacatcactcgggttacctcttgcccagcgaaatcaagcaaggaaagcccaccgtctgggacctctgaacaaacaaccgggatatcatcggcagcgggctctgacagcatatctttggggatgacttcctccagtacttgatcaaagtccgatattgaaagtccctaaagactgacaagagccgacagagctggagtgcggatgtcgctactcccctcacttcctctatagtgtcggctgttcttacggatcagcggg

SEQ ID NO: 118460 - DNA, 398 bp, Zea Mays
ggggaagtggtatgttcttgtgatcgtcggtgacttttttcgctattcttgggtgttatttatggcggtgaaggatgaggcttttactcatgctcgagatttgattctttggttacaaaatgagtttcctaagaatgccatgaaaatgattcgcagtgaaaatggcacaaaattcaaaaatattcattttgaaaccttttgcgcttctttgggactttagcatcaattttcctctttgtatgtgccccgacagaatggcattgttgaacacaagaatcagacccttgtttagatggccaggacgatgttcgatgagcataggactcctagcatttttgggccgaagcaatcaacattgcatgccatgcgtccaatcacatctttttttgagcttttct

SEQ ID NO: 118461 - DNA, 383 bp, Zea Mays
ctaaaactcgggtgtgacaatacggtggccctggcatggatttcggtgattcggttcgaaaaatgggacgaaccgttgtaggcccggacggtccggctgtgcccagatcggtggatttacctctgatttgcgacaaaggttgtggttgttcgaaatatgcgttcattgacatcccataaagtggttggggttggtcgtgccaatttgcaatcgatgaatcatgcattttttcttagattcaacctcgtgtgtaggaaaattagcaatattggatttatcaactgcatgcactagccatttgtaatcatcttgcataccccctatgatttgttgcatttgttctcgttgatcatctatgtaagatctaactgattggattttgt

SEQ ID NO: 118462 - DNA, 277 bp, Zea Mays
ctcacttggacctatacacaccaccttcttaatgtctttcttctatgcctagaggagtttcacaccttgctatctggctccagggactcgctcgttctgcaacccccgcttgactgcctaatcgtcttcttattcagcagtgctgtcaaagcagacactagtcaaggacggcggtgatgcacactttctagtttgatggtgttcgactatgaggattgagagcacctagagggtgaataggtgatcatgcaataatgactgaaaacaacacaaactt

SEQ ID NO: 118463 - DNA, 486 bp, Zea Mays
gtttccctgttggtgctgttggccgacgccgtgctcagatgagatagagacttctcctgaggccgaggctaggtcggcacactgatacacagtcatgcctggagtggttggaatagcagtcgagtggtctcctgtgagattcgtgagagggtaggtggcatttaacgcacttctgctagggcagttggccaaagccaagctcggggaggcagagatttcttctgaggcctaggccttgactagacgttgcatgtcccactcggagtggttgaaacaatggccggagtgagggaacattgcatggtattcgtgccctatgtgtcatcgtgggcggtgaaagtagataagaccgtagtggtgtcgtcctatgttgactttagcgccctcacaggggtaggtgaatgtacgaatgcacgttttggaaccagagtggttggccgaagcgggtagctcctgagtgtcgtctgaggtgccctcgggcgagtt

SEQ ID NO: 118464 - DNA, 714 bp, Zea Mays
caaattagggggacatgacaaataaattaggggacactacctctgcgtatctgcacaagggcccaagagaggtggggcccggccataggaacggagctctcagctcccacaccgtgcaccagtgaatgcgagcagctggtctagccttccagtaatctgatctgcatgcagtgtgatccaggattcacgtggataaggatgaaatcaagagagcgctagctaggatcacacgccaatagcacaaggaaggaatgagcgagcgaaccttgaggaaaacatcgccgacgagcttctttgtgtggctctccgtcgttggtcgcaaccctcgccactgccctcactcgtcgcacatcgcgctgtggtcacggtcggggctgcccttccgtccggtcgaccggtcgagcatggggcgatcaagcaggactcgaggaggaggtagcggatttatggcgacggatcggggtagcagggccgagtgtgggttgttggcttgttgcgcccgtgggcgtggcaggcggggggtgggggcgggcggagggatcatgagctagagggggagatcgtggagggagtgggcagtttggagggagatcgtgggggattcctttgtgcgggcgtctgggagtgagcgggtgctcctgagatggctgagatcgacgatgaacaggagagcacgggacagagacggtgctagcaggaagagctagagggcga

SEQ ID NO: 118465 - DNA, 454 bp, Zea Mays
aaaaaaagcaaaactccatagtgctccatcaccgaagcagaatacatatgaacatgtagctattgtgctcaattgctacgtgtaaaggcaaccatgatggattttttgtttgaattgaggaagcacctctcctatatgacatggggaacatcatgatgattgtaagcaacctagtccaacactgaagaaccaagcacattgatacaagcgtaacatcaatattgaaagtattggcaccaatgagtagtgagacgacatcttctgatgtattctctatgtcctaatgtataggtttggaacctaggttgcaaacctcatttgcgatagagatatcaacacttagtcaaaacctttgttgcatgtatgaacaatcagttatctacataggttttgattaagagaaaaatagaggtcatagtttaaagagaaattagatttcctaattcaccctctc

SEQ ID NO: 118466 - DNA, 665 bp, Zea Mays
ttcaggttttccaggtgttagctttgtctgttgatccattggagtatcgactggattacatcctttcataccacaagattccactatcttctctgcatatgcactctggcagatagtaatttctccaggtttttgcttcacctccataccgaggtaataactgagtaaaccgagatcactcatgctgaagagcttcatcatctgttgtttgaattcagcaatacacttgctgtctgggccacagataatgagatcatccacatacactccaaccagtaatagggtcttacttgttcctctcttgtaaacagcattttcttcaagactccttttgaaaccaagattcagtagttccaaatcgagtctggcattccaagctctaggtgcctgttttagtccatagagagcctttttcaatctcagaacttttcttgatgcactagagtctataaagcctggaggctgacttacatacacctcctctctgagatcaccattgagaaaggcagacttgacatccatatgatgcacttcccagttaccttgagttgcaagagccagtaaaatccttactgtctccagtcttgctacaggtgcaaacacttcttcataatcaataccatagatctgagcataaccctttgcaaccaatctagctttgtgtc

SEQ ID NO: 118467 - DNA, 1549 bp, Zea Mays
ttcaatatgaggctgcacaaagccccttatacaatggggaaatatagaaaacataaatatgcatctatatacatctaacagttatagtggacttatatttgtgatcggatgacgtagaggacaagacagcatgcatagcacttactttccagaactgctaactgaaaggaccgaataggaatcgtggggagcaggagtgctgatatgcttcttggtctgctttactatcaactgttctattgaattgttcattgaccttcctgcatcagatgcaacaccagcattcccaagggatggattcgctgtgtttgacaattggaaattcagtaacttaagttctctttcaactatgtaaacagcagaatgttccttgttgcctgttggtgttggtaaaggagcaatagctggaagtgctcttgggtcaaactcgcttaatatgataccaatattagttccagtagcaacaagatgcggctgcaaggggtgtgccaccatgcagtaaacctataatataaccacaaaattgaatctatatttagcagcacacttgaggaaaatgcatttgcacaatagagtactgagttttttttttggaaggggggaaggggaactacctctctttcatgtactacattgcatgtttcaaatacagttattctactcggaaaacaagcttcaatttgaagaatatagatcaagcagagattattgcaagagttttatcactagtctcttgaatgagagccgacctaaataaacgtgggtacaggcggttcattactttgtgtcatgctggtattaatgattctggaggtttatccacaaccaatcaagtaatcgaagattcaaccatcaataacgactgccgatgaaattgtaggcgtagggtactggaataagaaccattggaacagtacatatcagctccattttctcttttttgttaggtaatgataatgatatttgagatgtccaaatgtgtgcatgtcccataaagactcagtatcaatggtgacaatttttctttgcagggcacagcatgcaatctattccaactattgcaaacaacaacaaaaaatcatcaaactgtgaattgcctaaccttggacatagcagttaataaagttgagatgagtgagtaaaaaatatttcagattatcaaaatgtgttaaacataaaatcacatacagtaactaaaaatatcgtcactgagatggaaaatcagtacactccattcaaggaataagagcagaagaataccctcagtttcttatgcagtgcaaggacctgtgggggaactagtgatgacagctcgcagagcggtcttgttaaagcagaataagttgggtgctctatggccctgtaataatagagcgttgaacagtcaataagctatgattagcatcattagagaaaaatctccaactaatgtctctggagacacagaaatacataccaaatatgtgagtccttgacacaagttagaatatcaaggtttggtgcacggggatgacaccacgatgcaacactatgacaagcaagtttaggc

SEQ ID NO: 118468 - DNA, 272 bp, Zea Mays
catgtgggtgttgggaaacatgtccaaaaagagacctccggtaagcaaccatactgttatcggtgtctgacgaaagggcacacgatgcaaggctgcactgcaaaattattttgtgacatttgccgcactgaagctcataactctggaaggtgtccggtgtttagaggagataaacccggagctttaacctgtgggtatgcggttgacggtcttggcttttattatattcctcatgctccacggcagaaaaacaaagatgattctcattctgc

SEQ ID NO: 118469 - DNA, 1000 bp, Zea Mays
tgatttcgaagatatttctcctcaagttcagagcaccgctgggccatatccgacaatgcagctgaaagggatgcatgactaagaacaaggtgatcaataaaaacagttagggaagctataagaacacaaaccagcattggacgccttcaggtcatcaatctgtttttggagtaacaatggattccattgcatcagagtcagagcttgctcgggaacagtggctccacaggatctcagctgagcagaaattccatcgacaagagcctatgatcaaagacagatgagcagaagaaagataactcactaatatgaacaatgtaagagcaagaggtcgactcacctgaagattagagaagaacagtggtaaacccaggcaggatcgacgagggaagatcagtaggaacaatctaaagggcatcatcaggggtgatctcagccccgccagcaggcagcaggctcctcgcttcaagctcgttggcctctaaggcgacatgtccatttacagttgtgaaagcatgtacaaccgtcgccccatcggactgaggaggggacgacccaacgtggacatccatggaggcgtgggaaagggagcccatctgaacaccctcgggggctaggtcgtagcttgcactacccaccagagctggatcactaccagcaacaccctcgggggctaggtaactgccgacaccaccctcgggggctgggtcttctgcagtagccacctctaaggttgaaggcccctcggtcgcctccatgggagtcgggtgactcagatcagcttcttggcattgaagactgccctccaaagtcgacgatgcgcgagacacagctagggttacttcttgcccagcggaatcaagcaaggaaagcccaccgtttgggacctctgaacagacggtcgggatatcatcggcagttggctctgacagcatatctttggggacgacttcctacaatgcttgatcaaagtctaatattgaaagaccctgaagattga

SEQ ID NO: 118470 - DNA, 686 bp, Zea Mays
aaaaattcctagactcagtctacacctccccttggacggtgagttgattttcacattggccagggactctttagaaaaagagcgcgacgaaggggtatcggctctgtccggccactcgatccaaaactaagggcccggattagatctggcgcatgcaaatcctgcgagtaatccagaccgtctgatctgatatccgtggcccggatttaattttaccatggtctacttgcgtccatccaatcagaatccaacaatgcgtgatcagttgaccgaagtgctactgaagttatgatcctaaacgtcgatcgctcatccaacggtcagaaatgtttcccccaactccgatctgtccacggcagtgcacagggtctccagcggcggtgccatcgccgacgaactcccgagcatgccaggaaggccctatgtctaatgcgcttcgatgcaaaacgaagagggtaaggtggcaagcacaacggtggaaaccttatcggggattaggtcaccaggaggcatgcccacggcgcacgacggaagtctacggggtctacgacgtcggtgagcaatttgttgcccggggatccctatcaaagcacaagttgtggtggggaacgcgcgacgaacaccagggatcacactcctaccacgaattggggctcaggagcggtaattcccgaagtaaaccacgg

SEQ ID NO: 118471 - DNA, 617 bp, Zea Mays
gtcgaaatcagtaacactctggatatttatactgtagtagtttctggtgacgaaattagtctcacatgcatgttacatgtaatacagtatccataaaaatgggagcaacaattatttatacaacgaaattgagcaatgaaatgcagcttcgcataattgcaacacctacatctgccgccaaacataatttcctccaactatgcaacaggagaaaaataaagcgggaaggaagaaaccaaccccacatggagggatgggagcttcatgcaagcatgccgtactggctgcatctctcatgagagcgaactgaaactttccactggatccgattcctctagcatcaccgctgcctggaagcagtcggcagcgtcagagatcctcccatcagatctgtgcacttttcctaggtaaagccaagccatccgatttgtgggctcgactcttagggcgtcggagaggaagcacctcgctgcaggtagaaacctgggaccttgcttggagagcattgcgccgatggccaccttggacggcacatgctcaagctcggtcgagaacgcgttgacgtaggcagccagtgcatccgttgtttgatctcgcgcctcatgcatgtagcctgc

SEQ ID NO: 118472 - DNA, 457 bp, Zea Mays
aaaaaagacaagggggataagaatcaagactcttcagatgatgacaactgatctgttgatgctgcttcgggtgggattattttgcaggtctcaatttagccaggctttttggctgtctcggccctggcgtctttgtttgcttattgtgttgaagaactctgtggtttctggtagtgctatgtcccgttctaacggatatgcttttgccctcccagtaattgggtttgggttccttttcatcaacgaacttgatcctttcgatgaatagtcacaatgctattaatttttccgactggtccgttttaagttttaatgtccgaggtattaacgcggtggctaaggggaatgatattcattgtgtgattagggaatccaattgcgacatcatctgcttgcaggagacgaagaaggaattttttgacagggctgacctcagaaggttctgtcccaattcttt

SEQ ID NO: 118473 - DNA, 725 bp, Zea Mays
cggtatctttctgaagaagaaggtccttcgaccgaccttagtgtttttctctggaagggaaaggggtcgacgcttctactgcacattatgttgacataagagagcgtaatttcaccatgctctacttgtacaccaacatggaggaacttgatccatacattgaaatgtttgattccatatatttagctgatcacaaacctacaccaaaggaactggataatctacgtatgaaagggtatgaaagggatgaacggaggtccatgtttcattgaatggttccacgagcatgtaattatctctttataattttcctttgtgtacttagtttgcacatacgacttgctatttaactatatctttttttctgctctatgtagtgtaagaaacttgactctctagtctcggatgatttgcgatagatatcacatggtcagttgaaagcaagaaaatatagccgctatgatattaatggatatcgttttcgaacatcaaaattagaaaaaatccgcccgcaggcagccacgacaaaaagtggagtagtagcaactgcctcaaatgcagacggaggcactcatgactattatggtgttcttcaagacataactgagtacactcttggtggggccaaagagttcatgtttgtgttatttgattgtgaatggtttgatcctcaacaaacgcgagaggatgaatttggaattgtggaggtaaagcatgaatcacgg

SEQ ID NO: 118474 - DNA, 724 bp, Zea Mays
ctgacgcatacttgatctggatgctcctctactcacagaaatcaaagaactctaagctagtgaagttagattctaggtctgtgatgatgttgttaggtatcccaaatctaaacattatttcttgaatgaactacactgcttttgctgaagtcaaagaggtgattggtttgtactctatccactttgtaaacatatcgatggcgacgagcacatgagtgtatcctccctaagctttcttgaatggcccgatcatatccagcccccagcatgcaaaaggctaggttacagggatagtttgcagatgttgggtgggtaagtgttgttgctttgataggaacttccaagcttcacacttctagactaagtctgatgcatccttatttgttgttggccaatagaagcccgacctgaaagccttccctaccaaggtctttgatgttgcgtgtattccgcactgccctgcatagatctcatccagcagttgcttccctgtagcgaagtgaatgcatttcatgaggactcctcctgcaccctcctgtatagcagccccctatgatggtatagtgagctgactgccttgcaatgtgctctactgcggcattatcatccggctcctcctcatttttttatatctgataattggctacctccaatcattgggatctgtctttgcctggtctaccgcgttgcattcttcagcatgtcctgttgtgatgcttggctg

SEQ ID NO: 118475 - DNA, 685 bp, Zea Mays
atagaggcatagaagaaccaagggtacaagtacaacaaagaatggagttaagacaaggcttgcacgtggtaagtaagaggatatagccaagggtgacataagtaaaacaccactctcaaattgagatgggagaggggagatttttaaatagcaggcatacgataagcatgaaggtaagatcaagggatgacaaaagtaaagggcataataggcaaaaacacaacaaaggttggactcaagacaatactcgcaaagtggcgaagtaaagggaaaaatgaaagagtaagacatgtaatgttcgaacaaaatatttgaagtgaaaattcattgttgagggaagttataaggaaacaatgagatcaccaaggatgtgtgaaataaaatgattgctcatagatcatcgagaaacaaggttggtcaagggcatgtatattgaaatgttattaggatgcattgggggtatatataagggcatgcgagattccaaggatatggccatacaaagaccattagaacagaaattattgaaagatagtgacttaacaatggaataggaaaggatcttagaagacaagaaggtcatggacatataaaccgaaatgtttaaatagataacatatattcaaaggtaagtatttgtattaagggataagagtattaaagaatccattccaaggatatgggc

SEQ ID NO: 118476 - DNA, 757 bp, Zea Mays
taattggacttcttcatgaccataacccaatttaatggtcctttggtccgcattgatgatggctttattctgggctaaccagttcattcccaaaatcacatctataacttgtccctttataataatcatgtttgtagggaactcacgaccagccaaggttacgggtatgtggaagactacttccttagtaaatatctgactcccaaataagtggataacaaatccctcccttgattcagtgctatgtatgcaatgcttatccacaaaagtcttgctcataaaggtatgcgatgcaccagattcaaaaaggatagctgttggatggttggcaatgagaaacgtacccattatcaccggttcgccttccggtgtagtagccacctgggtataatacactcgtccagttttcttcatatttctgcccactgagggttggccgtgtttccctttccttgatttgtgttcccagaagtctgttgaatgtttgatttgttctgcttcaggtaggggcagtctttgatgaaatgtccggacttgccagaattgaagaagccactcaaggaacttggaagggcagggaaacgagcactaggggcactcggctgattgttctgggtggggcaggggtgggacgaataaacacgggttgtctgaagggatatgtgggcggacgaggagaagaacaatttgaattgaaaggtcggattaccaaccttgtcctcttttcaggtccatgagttgatcttaaacccgcata

SEQ ID NO: 118477 - DNA, 451 bp, Zea Mays
taaaattcattacatgcatcgggaagtatatgatgctctatttaaacctactagagaagaatagggacctgtggactcttgagaaggattatacctatgtgcgaacagatgagagggatcctcccatctacaaaaataactatgctaggctatatattttttgtgcacattaaagaaatattttcccctttctcttctgtagttggtattgtgtttgggtgatattgttcctattggtctcactgtattcatggatcaaacaaacatgtgggcagatataagcactataccatgggcgaacagtctggaattatcataaagcaatctttacagtacaccgatacattactcaatcgtagtgtcataaatctttataaatattaccggaatccggctcttttccgattgctcggctctttgccgagtgcaatttatcgggcaatcggcaaag

SEQ ID NO: 118478 - DNA, 454 bp, Zea Mays
atcacaaccaccttatccgtcaattcttccatattcgacagcttgatagtgtgtctgagtatgtggaccagtttgattctttgatgcatcagattttagcccatgaccgccttttcagtatatcggcaattgttaatcgtttcgtagatggcttacgttcagatattaaacaagttgttttcattcatcggcctttggatttggatactgctgtttctctcgccttattgcaggaagaattgttgacaccacacatcaagtctaaccatcaaaaagggcctgaacaagcagcatcaaagcagcccaatcgttctcagtataccacttcgccacccctgtcaatgccagaagtgaacagtcgaactggtggttctgagaagcatggtatgccagattatcccaaacagcagtctgatcagagtaaagcagcagccctgatggcttaccgtcgagc

SEQ ID NO: 118479 - DNA, 639 bp, Zea Mays
agactactggagtttaaggagggtgatcatgtgtatctaaaggtgtcaccaatccagggtatgaggagatttaaagttaaaggaaagttgttccctcgcttcattggacctttcttgatcttaaagcgagtgggagaagttgcatatcaactagaactacccgatcacctagcgatgtacatgttgtattccatgtatcccaactaaagaagtgcctcaggatacctgaggagcagctaccaatagaggaccttagtgttcaagatgacctgacttatgctgagtaccctatcaagattcttgatacactgactcgtgtcacaagaaataaggttataaagatgtgcaaagtgcaatggagtcaccacggagaagatgaagctacttgggagagagaagaagagcttcacatagattttccccatctttccctagtccttcctaaatctcgagggcgagattcttgttaaggggggtaggatttgtaatacccaaagttgtaaaccatagagaaggggataactctctcatgtactttgtctccatttattatcacatgtgaataaccacacccaaaagtggctaattaacgaatgagacatgaacaacttgtgcatcatgctggagtttatatgtttg

SEQ ID NO: 118480 - DNA, 695 bp, Zea Mays
ctgagaggtcgtagaaccttgaaccacacttccctactatacgaacatccaaggataagatgattgatcccttcctcgcaccgatcgcagaaagcgaagaggccattggtgatcaagcgaaagcgccaaagcctttgagatgtccaacatctacgatgcaaaaccaaccaagcaaataagcgacaccgacctggtgcccgcgaggcccaaaggaccgacgccctgtcgagatccgttcgtccctcaaagaatgcccgataggcgaacgacgtggtgaactgccccgaacactcccacttccagacgaaacagtcgtggtccagcgtcaaaaccgggcaagcacatcaacaggtcccagaccgtgatgaactcgatgatcatttgtgacgtccagggccccgacacatccctgatccaacatccaacccggagtgcctaaggcctccaccacagtacgcatgttgcgacgagggaatcgtgggagcaacatctatcctccaatgacagaccctgaagccatttgtctactcaaaacagggtgtccaagccaccgtcgaccacaaatgagaccgatgtcttgagcatggcctcctgagcggtgggcaaagcaacccagaccctcgaggcagtccgttctgcgaagccattcccaacgaagacgcaaacgcaaggggcccaagccgtctctatcgagc

SEQ ID NO: 118481 - DNA, 635 bp, Zea Mays
tgaagatgcaaccaagaggagctggtcggcgtggagctacgcgcggatatggtcgtggttctggccgcgatcacgtctagaggcgtatcgaagatggtgatgttcaaaatcaaagaggtggtcgcaatattgaggaggcgaatatgggagagggggtgataccttgaatcaaggtaacccatctccctgggaaggtcaagttaacagatctgaggaaaagaatgaagatagttggaaaggaaatccccatcctatgggagaagatggtcccaacgattcgcatgtgaaaaaagaggtaactcgcagttttaatctggatagatctggctgtgctttttgtcactttaaaaatcatcttactaaggattgtcgacatcgctttccttgtgacatttgtggttgtgatgatcatgttgtgtttgattgcaaaaaacgcttgccttggaattttggtccggaactttgtgcgacacaagttgaggatcatagttttttctatattgaagaaaaagtggataataggatgattaaagaaaaatccagcactgctattatcactgttgttcaagggaatgttagtgaaaaacagattgaattggaattcatgaacatgttaggcaagaatttatggcggt

SEQ ID NO: 118482 - DNA, 599 bp, Zea Mays
cgaggagagcaggcgaaaggaatggagggagagaaacctcaccactgcaggagtggaggaggagacgcacgagcggcgggagtaaggagggagtagagatgagggaagaggaagagtagagaggaaggagtgatgagacgtgactgtggtgggagcagaggcggactccgcatcatggcctcagccgtcacttaagacggcgagacggtcgtgtcctggcacgaatggacgcaaccaacaggctttggagacgtggtagtacgcgtgaagcgtgggggtgaggaccgaggacaaatcagatgtggtttagaaaagattcacgtccgcgaccgcagccgtccacacgttgatctattgatgggcaaaacctccatgaagcgcggacagacctccgaacctgagcggctttgaagactttagatactagtggatacatgaatgcatgtttccacactgaaccaacatggcctgctaaggtatgtaactgaaaattgaagacaacagcgcactttggttctgtttgctttcccccctaaatcccattatccctccacgttaccaatctctcaccccatatatcttcactctatcgcggctac

SEQ ID NO: 118483 - DNA, 775 bp, Zea Mays
caaaagcactaacaagtaaagacgacgaccttgcaatctttaagccatgaccaagagtgtatttcacatatctcaatattcttttcactgctgtccaatgctgcgaggttggagcatgaaggaactggcacactttattgactgcaaagctcaaatctggtcgagttagggttaggtactgtaaaccgccaacaatgcttctatatcttattgcatcctctggcccaagttcaccttcaccaattctcaattttttcagaagtagagagaggtgtagtcaccggtttacaggctgtcataccagttcttttcaaaatatttgaagcatacttggtttgagcaagatgaataccatcttttaccttctgaacttcaataccaagaaaataatgtatctggccaagatctttcaaggcaaaatcagatctcagatcattgagcattgcatctatagcttcttgagaggaactagcaacaatgatgtcatctacataaacaagcataaaaatagtatcagatttggaagcctgaaaacccagtttcaccaacttttcactgagtcttgaataccaagcccttggtgcttgtttgagtccataaatggctttatcgagtttacaaacatgatttggtctcaacttatcttcaaatcccgacggttgtttcatgtaaacatcctcctctagaatgccatgaaggaacacattctgtacatctagctgcctcaatgaccaacctctggatactgctaaggataagatgactctgatagttg

SEQ ID NO: 118484 - DNA, 353 bp, Zea Mays
aggtctaggtacatcttggtggttcctgggtggatggagtaggctgagttgtgagcttcattgagcaggacttcccatgcctctccttttggtacacacagacagttcttgaaccaaaggactccttgttcatctgtcctgaggtccggaagttgttctttgagagcttttgccatatgtcttgctgtctccgtgtccaggcgttgagctttgcgtatgaggtcttctagcattggcttgacttctaggctgccgttgtttcctagacatgcattcagctgagctgattccttcttccaatcttctaaaaagatggttccctttatcccgaaaggttttcggctgagggcgtc

SEQ ID NO: 118485 - DNA, 468 bp, Zea Mays
gtgaagttgggcaacctttgagatgggattcgactatgatccagtaattgtttggctatggttgctatagcaaggttgtagctggatcatagggctacaactttgacacagagagcaggtcgagtcactacatgaaattgggaacaaatctccctgcaagttgctttgtcaggctgactgaatgagaatccaatggtacagtgcactgaaaatatccccaatccactgaacctcgccgccgacgagccgtgcgcccggattcgcgccacccgctgtgattcgtgcccagcgcatgtggataacagagaggagtaaaaatcttggcgctcgtattagctcgagctcgctcaccgttgtgcccgtcgtacccacttggacggtggctggtcgggatcatcctcaccggcgttagccgttcaacgatcatgcgccacgtgccttggtgtctgaccacatcacagtagctca

SEQ ID NO: 118486 - DNA, 379 bp, Zea Mays
gtcggataatttgtcacctgtattgaataaatgcttaaagttcacagctgtgatgcctaactgatcaattttgacccattttgtcttgcacacggttgtcaacccaatcacatttgaagagcaccacatttcctttatggtgatagtttagttcaataatttccttgataataccaaaataggttttctttcctattataatgttatcattgctgcccttgtcaaagattgttgactccgcaaccacaacaaccccactattttgaataggtctaccctcatcatatgatgttgtgtgaaagttgaacccgttcatgttatagctactatacttatttgcaaccgtcattggtgatttagctaaaattttaatctcatc

SEQ ID NO: 118487 - DNA, 1192 bp, Zea Mays
attcggatcgggacccttgtgtccctcgacgaagacttgaagcaaagtaggctccactccatttcgagcctcctgcatcacatgattagaaactctagacaagtctatgcaattaacaattgaccaggcaatttgacacacaccatacgtgcggccttgccaacgtgtccatctgccccgaagaagtggacacctggcttgctcaaccgattcatacgatttctatttgatatggccaggaactcctcagaagcccaatactcgcacatccatgcctaagcatccgaatggtggctcaaccaatccacctcactctctttgtactgctgagccgtcaggtggatttcctttgccatattcgcgtcacaatagttcccctgacgcttttggtacaccgtgatggccctcaatcgtgctttatacatcatgccctttacagctctatctgttgagccattgaatacctcacgcacatatggatcatccaaggtataggggtcgcacacgcgaaattggccctgcaaatttgaagatcaccagagacttacaaatgcaaaatctgaattcaatttgaatatcacaagagacttacccaaaacaaatcccacaaaaatgaggaacggataaaaataaatactatgtaacatttgaacttaagttagaaaaaaagataggcatggaggaaattacatgctcgtggaaccactgcacgaaggacgggccaccgtgtaaccctttcaagcataggtcatccaactgcttttgagtaagttgtttgttgggtttatatatgctatcaaagatttggaaataaggatgaagttctagcatattgacatacaaaaaagcaaggtcttgttacgctctatcgttcccacaagatgtggtaacaacaatgccttcgtgtaaggtagctcccacataaacgagatgtgcgtccaattgtgttctttaccatacccttgaaaccgacctcctacacccggttttaggtcacgatgttgtcatgaaatttgaaccagtttgtcgcttcggtggcccatctctaaccctcttgccttttcgaaatcactttgtatcctttctaaaagggtgattatagggaaggaggcgtcggtgaacatcaaaaaatgtttccttcttaccatgttctaacctatatgcttgtgagtcacccatacatatcggacaa

SEQ ID NO: 118488 - DNA, 354 bp, Zea Mays
atctattccgcggggatgcctgcgaatatgatccatcagtcttaatcaaagcatatgttctgattgcagattcacgtggtctgtgataactctcctccgattaattcaccctgatggtgatttgcctcactgagaggttcatcttgatgacgaaatttctagcaatgcgcgcaatatcattgtgctaggaatacagagcaatgaatcttttgtttttgggaaatgacgaagatcattattaaatgtgggagacaaatatgtcaacacctatcttgcctctatagattgcaaagggatccaaaacaaagtcctaggcatgagtgctttaagctctcttatcgggtcattgataaa

SEQ ID NO: 118489 - DNA, 417 bp, Zea Mays
tgaactttagtggccattttgaagatgatccagtgggaatttgactaggaatgctatagcaaaagtgaagatggtttgtagggctacaactttgctgcagagcattggttgtgttgccatgaaaaattgggagaaaaattgtcctaaacattgactgtcaagctgtctactgaaacatcccatggtacagtagctgaatcagatcccggatgcatccccctcgccgccgatgatctttatgccattattcacgctgtcgccgcgattgtgttcactggtgaggggataaccatgacggagtaaaaatcttggcactggatcagctcgggctcgggcgcggatgaggttcaccgtacccacttgctcgtcgtgcggccgggatagatttcgccaccgttgatcgctcgctgttgtgcg

SEQ ID NO: 118490 - DNA, 499 bp, Zea Mays
atttgagatctcgtagaggattatcagaaattaattggcttaattcatctaaaaccatgtatagaaattctaataaatatcataggtccaatacatgtatttcctaatagtctttgatgtttaaacccatgagtagaggtggaaggtgcaagatcaattagcatcatattgctcattgatattgacttacagggttgtcctacatatacctatgtatagatgctcctataaaaggcaaccaaaactactattggtgtttttcttagtttgcaaaattctaaggtagtcaattagtttcttacccttgctatagtgatgccatcatagtttctccatcccaagcgccaacatgcaccaactttcgaggaagcaggtcttcgaaacccttatccttatgattctgcactaggagggaacaactaaaacttttgtaaaacactttcacatgactgctcctaacctccatagaagctcgtcttccaaaagctacattgggatg

SEQ ID NO: 118491 - DNA, 508 bp, Zea Mays
ccagtcaattttcaagctctaagcatcttgacagataaaacaaaaaccaattgtcatacctttgccttgctcatttgattccatctcttcgaatgatggcgctttgacttttgcacatagtaggagagtccttcatcaaatgatgaacaatggtcatccatcgtgtagccaaccatgctacctttgatcattgttcataacattaagttcctccatgatccactccatgtcatcacatggccttcttagttcatcaatctgaacttagtttgctcttcaccattgcattatgtccattggtgccaagtccttgttcttgcttcactgccacacggtaccttacacatgagcccctgacttgcccttcatactagcaacccagtccattgtagccaagccatgtctcttgatcttctccatatagccacatgacaccatgtcatgtcttcatatgcaatgaactccttcagcacactagttgagcatatcaatatcaccaagccacatc

SEQ ID NO: 118492 - DNA, 413 bp, Zea Mays
tccaaagtagtcgccggccaggtcaagaaggaatactcagcgaaagaccctgcactcatgcagtatcttatagtcgtccgctgtctcgagagacaattcaagggtttcaccctacaacatatcaacagtgccaagaacgaagaggccaacgccttggctaaagcagcgcccaagggcgaggtcttgccctccgacgtgttctaccacatcatcggcacactaggtgtccgcaacccagaaggtttacaaataactcaggacaccgaaggccaccgcatcgtcaacctcatcatggtcgaagattggcgggccccaataactctgtatgtgcaagtccactaccatccaagtgatcgcaatgaggccaaacgaataaagcacagaagtcgggacttcacattagtcgagggcca

SEQ ID NO: 118493 - DNA, 309 bp, Zea Mays
caatttatttggacgacgacacacataaatttacgactactatcgcaagtgaacaacacagaacgtaatacttattaagttaatcgtaccacgtaaattagtctaccaacatattattcgtctaactttgcatcaaaaatccaaacatagaagatgtgtaacaccacaggtgttacttagggttttcacttaagactacagaagtaagcccatcatcacatgtgacttaacttgagtaaaggaattcaaacatggaaatcaagatcctaaataagtgcaacctatcttagatgtcatgccttggcttac

SEQ ID NO: 118494 - DNA, 787 bp, Zea Mays
cccctgccttgtcatgcccctcttggcccgatcggcctcccgcgagtctcaatcaagcgtcgctcgcccctctgctctatctctctacctctcactggtttgaccatatgggatgggaagagataaggggatgagtgggcctttgctacatgcacccagggctcctacatgagatgctactattgtatcctttttggtttacccgatcattgatcgggattgagtcgtccactggtcgttgaccccgcgcataccaactctggccccaacattgactacatcaacatctggatctttgactatgcggcctggccggggcatgcgatgtcgaggggatgatttcctatgtcgtgtctcaatcgttccatctacacgtctatattgtcgatttgtcctcaccaccatagatcggggcgcctccatagactttttccatcattgctccacctcgcgtgtactctatcagtacaaccaattatgtgcgatccactcggctcccgtgacatccatcaccaagacctaagcgcatttctcctagcaacagggttgttggcttcctgttgtgtcgcctcatcgagacgcaacatctcgcccatgtgcccacttcaccattgtagctacaacgtcattccccacgcatcaacgattgtgttgtgtaatctttgttgtgttgtccatccgcacaaggttttcgtcctactaatcagatcttcaccgttatgttggagcgctacctgtgagcgcgaggccgccaccgaccctgtgcacgaggccgccgctgctgagc

SEQ ID NO: 118495 - DNA, 422 bp, Zea Mays
gaaaatatcaagcacaaaccataaaatgaggagacaaaagtaaaactaaagtgcatattgctaggccaacttgtgctccgaagggtagccaacccagacatatctggaaaattgcaagtaaaatgggaaggtaccttcctcatctcagctttgaacagactaggttcttataggctcaaggacatggaaggaaacgacattccaagatcatggaatgccgatgagctccaaagatactatgtctagttgtcaaagcctcgacaccctttttccttatgaaggggataagatttttaatgggactgaagatgtaacatctcacaaaagtacctaaaaggtaataaaggtactttccccccagctatgactgcattaaagcaagggatttatcttcaaggtttataacgcgaaggtaaagtttt

SEQ ID NO: 118496 - DNA, 708 bp, Zea Mays
gtccagtaggattcctatagaacttggtattccatccatgtgaatgtggtcctatgctcatcaggtgtgccacgatcttggtcttgtgtagcgtagtcaaattgggactcccctacaaagttattaaaaatatggttagatatcaatcaccaatttattaagatatgaatttaatggtacctgtggaatgtatcggaggcaccaactcgaactcaccaccaccaccaccactaccaccaacaccgctagcacccccaccccaccatcatcagaagatgacgtaaaactgctatcgataaactcttgatatattggacttctaccaccaacactgctagcacccccacccccaccatcatcagaagatgtcgttaaactgctattgataaactcttgatatattggacttttaccaccactttcggtctcgtcatcgcttgccaccactttctttccttcctctttcgcttttggtaacacgaactgcacctttcgcttgtgagtgtctctcacattcttccacgtctactcaaccaagttttctcttcaagtgcctttaagccacatggtaatggggtgtcactcacggtgtcatcctcatccaacatttcctccacgggatgcaagcgttgtttaaaatgtgtagcactgcctctcttccactgtgttttacaatacatgcacttgaatctaggatatacgttctcc

SEQ ID NO: 118497 - DNA, 360 bp, Zea Mays
aagatgtgccagagcagactataggtcctccttcaccctctactgctgaagtttcagaaattctgaaggtaatgactgaatccatcccatttgcactgttaagtcctctaaggttagatctgactagcctcttgcaatgaaaggaaaccgctccatctacggaggagaaggccggggcagaagaaacgacggatgatgaatgtgatgcaagctattgagtagacatcgcccccatcttcggtggcaaaagcagctatgtctgttgatgccgaagataccacaagagccaaagctgatgaactcgcaaccacaatttcggaaatcgacaaactcatatcggatgtggttgccgagaaggac

SEQ ID NO: 118498 - DNA, 562 bp, Zea Mays
gatgtctaggtagaattctgaaatttatggtgctcaaattgtcgagttagaggtgtaattcgatcaatgccgattaagtggctgaaaataactagtaaagaagttgtagatgtaaaactggaaactggtatgcatatgtcctcgtatgatgttgtggtaccttgatgacattaaaatgatcatgtgttgcgagaggtaaagagtttagaattaacttatcgtcacatgctaatttacattattaaagtgtctctttcatggtcaccaacttacataacataagcatgtgatagttgtgttcgataaccaaatcattgcaatttggaaatgggaatttgtagtaacaatccatctttgtgcttgatgattgagttaagtgttcttgcacccatttgggatgttgtagccaaattgcgcatggttatggtcgcgggtgaaaaaggtagtagtgctcatgtgatgtctaatttaaaatgcaaattgttgggtgattatcgtggagaatgcgttgttaattggttgtagtaatttttgtgcactaatgacttgaataaaatttgca

SEQ ID NO: 118499 - DNA, 280 bp, Zea Mays
aatcagtgcttggaaacatttttacgcagctttgtgcagtcctgtccttccaaatggtcctcatggttgtccgtagctgagttctggtacaacacatgctctcactcatccttgggctcttccccatttgaggttctttatggacgtgcacctcgtcacttcggtctttcagtggaagattctgtgcaacaaactgatctcagttcttggctttcacaacgtgagctgatgctgcgcattatcaggaacaacttgttgcgtgcccagcagaggatgaaac

SEQ ID NO: 118500 - DNA, 273 bp, Zea Mays
cttttgtgtttatttggataaattgcttggatactacatcatctcttcatcatgaactgaggtcaatctcattaaggtaaaggccatactcaaatggatccaccatgggaactcaaggatgcataaaagctaatggggtgtctggtggccctaagccattttgtctcataactaggagagagaggtcttcccttgtacaaacttctccaaaaacactaaactaatgttggactcagaaggccttggatgcttttgattacataaaaaactttc

SEQ ID NO: 118501 - DNA, 482 bp, Zea Mays
cactgtcacttctaccgaagggcttataacttctaatatctttgttctttcgacctctatctcttcaatattatcggccttcggctcagctaatttagccgatgatgccttcggcattgcagccggctcttcaatcttccgcgtaagcgcaggttctttggcttcagtagccgaagaggtctcaccgccaaatttgggcactgtggccggttcaatatagcgcagtcggtgagtaagaaccttcacctttctcctcttcggcgcgggctcacttggagcagctgaagtaacatccttcccaggagttgcactctttctcttctgcccccttggcgggtagcggtagtcaggatacataaatccaatagcatcaaaaactctatttagcctcttctttttccggctcccgaaggccacagataacgcattatcttccgctttggagtacggcccaagcagttcatcacttgtagcttcgatac

SEQ ID NO: 118502 - DNA, 576 bp, Zea Mays
tctgatcaaagtttgccagggacaactcttgtagaccaatgagggcagacagagcaggagaaggaactccactactttccccacaggcgacatactgccgactgttctttcgagtcaaagggacctcatcttcttcctccccgtcgttttcatcagcaacatagacaacacacccattggggtcagcagcagatgaagcacacccattgggatcagcagcagatggagcacccccattggggtcagcagcagatggagcacccccattggggtcagcagcaggtggagcgcacccattggggtcaacgtcagtaaattcaggaacaggcactttttcagcagcaggaactgaaggaccaacgtcccgatccaaactagatactcgccgaagacgtctctttttctttttctgctcatcagcagaaggatcaagttgattggctcggcaagggcgttttgggcgagcactgacagctctctgaatatccaaggttgtatcagtttctgggagaggcgccaccaccaacgtcccagcaggagcagcatcagaagagtcctcagccagcaaatcaagca

SEQ ID NO: 118503 - DNA, 283 bp, Zea Mays
attcagtgcacctccaaggaaaccattctgcttgttttgtggcgaggacaaagtccacactacaagaacatgtcattgtaccatcaacaagaagaaagagcttgcttcgtcagctgtgcaaccttcacagtcaaaagaggtgtttagtacatcctcatattgttcaccctacatcctgcaatatgtccaacctcagtagtaggaaccgaggccaagtttgtcttcggcctcaaatgcctcaagtaacccaccgatgagtgtgtggtcactagctgcctccttc

SEQ ID NO: 118504 - DNA, 750 bp, Zea Mays
gctgaatgtatcccaccaggatagggccatcccggagagttgatgagcagctaggtgaacacgctggttttcagggcatccgatggcctctaacttcctctttactgtgcacagccagtcatcagcatcgagcgggttgctggatccgacgaatgtgggaggcttgagccttaggaactctcccattttgtcctgaggtcttcctccaattgggcgctggttctcgaggcttctagtgaggacctcaatgagtcgggtttgattggctagaacttgggctaggtctaatggcagctccggaggcgcggggagctaggtctcactcccttctccaccgacttatccttcgatacctaggggagtccttgctccaattcctgaggcggtaggcgtggttttatccgaggccatttgccagaggggagaaaggattactactttgcatatgccatattttttctcaaacatgttatttatttagcacgccagttcaatacaagcatacaaccaccatagattacactatgcacaagcgttttctaaggtgtccccaaactctctaagatcatcaatgctagccagggacacttcctcaacgtcagagaagttctcgatccctagggagggtagtgttggtggggcttcttcctttgggtcagtctgacatccttggctcttgaaacgctttcagttctttttgacgggggcgagcttctttagcctcctagcatagtccattttcagggtccg

SEQ ID NO: 118505 - DNA, 779 bp, Zea Mays
gtttaactgtcagactgtcttaagtctgaattcagactgacagtgtgtttgagccatctttgagcttggatttgaccataatccagtcagtaattggctatggttgctatagtaagatcgtagctggatcgttaggctacaactttgctacagaacgatggccttgttgccatgtaaaatcaggagaaaatccagctcaaacttgatctgtcaggctgactgaatagagattccaatggtacagtgccctgaacaagatcgctggtgcagcgcaccttaccgccggcgaccgtgcgcctagatccatgccgtcgttgcgattcatgctcaccggtgaccggagaactctcctaggtaaaaagatcttcgcttggggataactccggtggctggccgtcgtacccccttgccttgcggccggtacagataagctcaccggcgttggctgcctgccaatcatatgccacatgcccgggcatcttaccacgtcgtagtcgatcatgttaaacctatccggtgatcgccggggtgcttgccacgataaaggccaccaatcccgatcgccagtaacccctgtcttctctagccgccgcgcgtcttcgtccaattccccggccaccgctcatgactgctataaactgagcccgccatgagctccgtagggtaatcacccatccatagcacccacgcttgccttcaattgtccaccaacgaccacgaattgctcattgcccccaatctgtgtttccgccaccgtagaaacacctcgcatggctagc

SEQ ID NO: 118506 - DNA, 351 bp, Zea Mays
ttctgatgaggacatcctccactattacccgttggcaaagacgcaattggcccagttggcccaattgtagtcggacggtgaccgtgtgagcctcagaattatcccacctcacttaacttgggaggaggaagccactttaaaagggagagccacccttcccccattggactagtcttttggggcgattgggcctttccctgagttgggtgtgcatattgaactgttgggctccgggcaaccctaatttgttgggcctcggccaaccccacctgggttgggtgtatcatctggtatcagagctagggcccattttaaaaaggtgggaatgatgaggacatcctccactattac

SEQ ID NO: 118507 - DNA, 314 bp, Zea Mays
ccaaatttgagatttgactcatgaatatggtgatcctgtagctaagttagagaattggctcgccaatagggtgattgcatagtaaataagcctcagaaatacaaagagtcaacttccctaaaaaataccaaaacatcatacataccagtattcccaatacagcaacaagcttggcaataacattaagcagttttttgaaatgaagatcactttggatggtccgcttcgatatgtgtctcggataccaccataaattctttccaccctaaattttccaaaaaaacaaagcaacatgaaaatctgtcaaatttgtg

SEQ ID NO: 118508 - DNA, 373 bp, Zea Mays
aactacaatttcaaaaacgaacctggtgcttcagtttagtggagaatacgatccctgaacgcttgtcaattctaaccttttctttaattgtaaagtgactttagttaatcgctgcaactttccggtgctaattgtgtaagccatattgctatttaacttttggggctacttatcaagaaaagaaaagaaaattcagatacttgttgcttcctgtttttgcgtgacaaacatttttgctctgccaaactgaagcatggcacatgtaagcctgtcttaatctgacttcccagctgccaaaatctggcatgaaggtaggtgacgtaactataagatatctgcaccgtaaacatgacttacagaggtgtaattctgg

SEQ ID NO: 118509 - DNA, 396 bp, Zea Mays
ggtggttaagttcaatcatagagtccccaccgttcagctaagctcaaactgaaatatctcaaaggcaaaattgacgcctagcataagaaaaataatcgggctctgcctcaaagctaaaatatagtacagtagctatctgttcatgtcactgtttaccagttcgtgccatagacgcatctctaaaaaggacatcttatgtaaccaccagcaaataaattgtcagactaaagcacgattctttctccaagttcacctcaacattggcaccaatttagcgatgaagacaaataacttcaagcctttcaatagagataacagataaacattggatgcctcagcatggctacaattttatctgggctgcaaaacaaaaggatttcagaggtataagttcct

SEQ ID NO: 118510 - DNA, 613 bp, Zea Mays
gttatacacacccctcgtctccatcctctccctctaatattgttgccgataatgggaacctgccctctattacttccactggcactaccactctaccacatcaacttcatctcaataaaatcctcaattctcccggtcttattaaaaattgtatttctgttcaccaatttacatcggataaaaaatactttgtggagtttgaccctcttggctgctctatgatcttcagtctcaatcaaggttcaagaaagcgcgattaggcgtgcgattaggcgcggttaagcgctgagcagagggtcaacgcatcgcttacctactaagcgggcaattaagcgctggccctgcttaatcgtgcccatccggcatgtttaagggagaagaggagggagaggaagaggaggaacacctccgacgtcaatccagcaggcagcaaatcgacggatcgacgagagagaagaggagagacttcaagagagaggtagagagagagagcggacggagcgacgatggctgcaggcagcagattggtgtgagagagaggcggagcggcttcgcgatagagaggtgaagatcgcacgagggaggagaggcttcgggagagggagccggagag

SEQ ID NO: 118511 - DNA, 661 bp, Zea Mays
ttcatgcatctagaagtcacatttactcaacttggcatacaactggtgctctcatagcctcttcaaaaccatcttcaagtgttccacatgcccctcctcgctccaagaatagatgaggatgtcttcgacgaacaccggcacaaacttgtccatgaacacactgttcatcaagtacatgaagaagggcgacacatttgttaaaccaaaagacatcactatgaactcatataacccatacttggtgataaatgacatcttcggtatgtctgagggtcagatcctgagatgatggtaacctgatctcatatctatcttcgagaacacgctagcacctgtgagctggtcgaacagatcttctatccttggtaaagggtatttgttattgatggtaacatcattcaaagctctgtagtctatgcacatcctcttggttccatccttcttctctacgataggactggagcggcccaaggcgaggtattaggtttgatataacccttctctaacagttcatctatctatttcttgagttacaccatttctgatccgaacactctgtaggatcttttagagatgggggttgtaccggggataagctctatagcaaactcgaccttccttcccagtggcatgcccgatagctcctcggagaacacatctg

SEQ ID NO: 118512 - DNA, 1739 bp, Zea Mays
gagagttgcgcatgcgaaaaacaaggataaggtcagaaatgactgattcagatagaaagatgattgcacagggagataccaatcgtgtggagtcttccactctacgtatctgcaagaggaattccatgctgactccggcagtaatttgctaggcaccaccacaagctgtaagacatggtatgattgtataggagacctgcatggccaaatggttcttctcaatgtcatgaatgccaagtacatctgctgaatacagccttgaaatcgtacttgctcatgctactatagagggaaaggctccttgtggtgggaacaactgcaacacatgcctgcagtaggtagaaagtgtagaaacttgagggtggcacccaagcacagcacagctacaatccatccttctctctactgcagccatgattccagctttagaagaaaccccctgcattggccctgaagcgttgacctgctgaagccaacatgtcatagccccaccatgaaattccctcaggatgcaggctcacctcattgcagcaggctaaacgacacgccccttgtcggcaattatggccgtccgtcttcctttcccggatcgacaattttcctcgagagcccgtgcgctaggactggtgatgggagtagctgatacaggcgatgaaactgtgctgaaagatgaaaggagtggcctcagcagaaggatctggtgaatgatgcgagggctcacgagaaagtagcggctggaattcaaaggcgtggcggcaaaaggcgggaggatcttcaggtccaggtccatggatgactcctggatgaaaaaacaaaatgcgaattgagatcagctccaggaactgtgtgttgtttgctccccgtcatttgacctgcagacagcaagtagtgtgccatgctctgacacgcaattcctgaaatggcccccagtaacccaggccacatctcattccatctactccagtcacagccattgaactcttcagcatccccatcagttcctttcgtgcgtccctccatctgttctggtctcgcttttttccggattctaaagagcaatgtgacaattccatagggatgtagattgcgccagtcaaaagcttgagacatcagatccgtgcacacacatcatccaagcgtctgcagatgtgaccatgaattattgggacgcaatgtgttattagctccactggaacttggacaggttttcctgagagaacgaacggctgaaacactcctgacatctgcagaactggacaacacttcaacgaaagaatgatgaaggcaactgctcccttcagtattaattaagcacactgctagcacttacttctgccaggataaggagacactttctaagattgcgaagctttagctgtagaaactgcccccatgctgcagatcatcaggtgggatcccccaaaaaacaaaatacttctggtgatcaaaaattaaaaaccattgccacaaatatgatcagagtgcacttctggaaatcatggctgtggttcagacacacagacggcaccgagaagcatggtaaaactcaacaattattagagtttatgtatgattcctctcatgaaagctgtggagtcatgaaaacatcaacagcaaaaagcctcaaacgaaaagggtactatccataaccactggggaagagttcaaaggcaccgaatatttctgtctcctggctatgagtaggattacatttatacggtatccaaaatgatttgtag

SEQ ID NO: 118513 - DNA, 738 bp, Zea Mays
tcttccgaaaactatatctcttcatccataactcgggttttagtccttctcgaacccacgacattgtagcttcgcgtagcggaactccagcgaggtgatgcgccgcagcctcgacatggcgagcgacgacatcaagcggcgcgatagcagtatagcgtggttgagtgagagagaacaaggcggggaggggagagtaggggtgaggactttggctttggtatcacaacacaggtgaggtcgtggcgcaagcaaaggcacgacgccgatgacattattcagcgataggctctggcgtgtggagcgcatcagtgccaacgtaaactccagtgaggtgcagcacgtgggcaagctgcagaggctgagcagtaggaggtgaggcagaaggggttcgacggccgtggcttatatagctggagggaggtagatcaagaggcgtcaccggtgggggtggagttgtccatgcagttaatggaggtgacagttactgggtggagttgatggggaggaagggaaacgacatggcgtggcgatgactcgactaggtggcgtgttctccacgcatgtggggcgagacggtgggcacgcgttggcgtttcagtcttgcatgcaaatgtgaaagagattgggggaggagacgaatgagactatggggcccactatcatagatagaaatgtagagggagaggctggactacttggtgctgcaaattgggttggacaagctcgctcatgagtgag

SEQ ID NO: 118514 - DNA, 760 bp, Zea Mays
gaattctatgaccttcctatataataatgtaaaaacatatatgttagtcattatttatgtaagaaacaacctacatgttcgattggtcttaatagttgaagactaaaacctgtttgggtcgatgattgaggagcacaaaaaatcacgaagcaaccgagcacagtccatctctattaatcgtggcagtgagtgcacatgtgttgtgtgcaaggtgtgtgtttcctctccagatgcaacctgaaaaacaatgcaggtagagaatatactagtttatgaacgggttatgtgaagttatgtggtcataaatgtatatttggagtacttacatgaccactaggtctctgatcaaaaagggggcccgtgtcagtttgagtgtcatgagatgcatcaatgtcacctccctgccccaaaattcaatgatactatgtttaaaccctcagtcatgtgtcaattacatttaatcgataattgagattacaaaggattaaacaaagatgaaacatatacatgtttttgcggtgtggcgtcaaacatcggcaagtgggaagacgtatatgagctcataatgttgcagtctggtatatgttgaggtgggatgtttatgtccctcgacaatttattaccaacattaaaatggtaatcatgttgacattattatggttttgtctaatatttggatgcaaagtggaaattaacatataatgtaacagtgatgagattgtatataatacctgctttttggagtttgagtatgtgttcg

SEQ ID NO: 118515 - DNA, 449 bp, Zea Mays
ggatattattcgagcatccgaccgtccgaagaggctaattatccgtttgaatagtttttttgatatccatagaattttcgaaattggattcgaatagtatagttcggatatcggatacggatatgagatgattggtatccgtcggatttaggatatccgggtatcttctcggatacctgtccagatttcagatttcagatatccaaacatcttcccagatatcttaccagattttagatttcggatattcgaatagttacatgtggaatcgccctaaatatccaagctcgaacataatcaatacttcactttatcatttacatatggggattggaggttatgttcttatataatgtgttattggtcctggtaacctatttgcattttcggtcggcagtggaataatttatgaatttaattgcattttgaaaattttctgtagaaataat

SEQ ID NO: 118516 - DNA, 514 bp, Zea Mays
cgcagaagatcaaattctaaaattacagacatatggttatccgcgaacgacaactgactgttggggtcgattggcgggatgatggccgcggaggagctctttttcttctgtttgggcactatcgcaatctcgccggcgaaacaaacggaagcgaaatctcagggaaacaggagagtggttcgaggcggaaatgtgaagttagggctcagaaataaaaaagcgcacgtcagcatgagtataagtagggttttctcgggttgggcgacatttctgaaaagggccaagtcatcactcgggaaagcgagacttcagacataactcggctgttacctctaaaaacgccgacagagtcaagcataactcggctgttacctctaaaaacaccgacagtgtcaggcaccaatcggctgttacctctaaaacaccgacaacatcaagcaccactcggccgttacctctaaaacgtcgacagtgtcaagcataacacgaccgttatctctaaaacgcctacaat

SEQ ID NO: 118517 - DNA, 699 bp, Zea Mays
ggagcagctagccacaaggaggcggttcacggcggcgtagtcgaccgaattggggaagaaagaaattctctggctatagtgactaattgaaggtgggactgggtgctttggcttcgtgataacatggtgcaacagacccagccatcagtttataggattgctaagcggtggctagtgaatttgtattgagcgcgttggcggtcagagaagaaatgagtcacggacatggtgattcgtggcgttcaccgcggcggcctccctggcgaccatcggacgtgcataacactggtgattgtattgtggtaattgctgaggcacgtggcattcagtcgacgggcagccaactccggtgacttatccggaccagccgcaaagtagaaaggagcacgacggctagccggattagtacccatagcccaacagcggtgacgatctttttaccctgcggcgttatccgggcttaagtgggtacgaatcacctcatcgacgcaaatctacgcttgaggtcgccggcggcgagggggatctacttctgttgatattttggtactgtaccattggaagcttttttagttagcctgacagctgaggtttagggcaggttttctccaaatttttcatggcaacatcatcatccttctgcaccaaagttgtagacctatagatcatcttcatctttgttatagcagtcctagtcga

SEQ ID NO: 118518 - DNA, 705 bp, Zea Mays
cgcccctactatacaccaagcactaccttcgccattggtttccagtgcttgaccttctcgaatccattggcgtagcctcagtgtccatgatgaacaaagaagagcgtgccacgcgcaccgaggcctgtccaagcctccaaggggcttcccctaaggcatgatgcgcgtgatccacctacaaagagcaagattataggaagtgaaaaaaacatggtcatcatgtttagctcaagaaatatgtggttaatcaccattcatgatttatgaggacatgcatttctttactgcccatgagctgcaagcaaaagcagtgttttccccaaaaaacatacaacctattcctgcagactctttattgttgtgctcaaaaccctggaatagcaatacaatcttctcaatatatacttgcaaaatctgtaccattaccatctgcaagaagatagatacatcatattactacctataatctaatgatagcatgatgatcctagaaaatgcagtaaagggagaatggcatgtgctcatacaaaagaaactgaaaaaatggcaacaggaaattaggaacaatatgcaggtataatcatggcatcacacacaagatatcacgcacagatccgggttataaatcaaaacctgctcatatcgtactgaaattcatgtctcaaactgatcaggcattacaacatataacaaattctttttttc

SEQ ID NO: 118519 - DNA, 284 bp, Zea Mays
ctgcattgtcgaagcctggggtggtggcgggggaacttgctcattttgcccgcggcgtgctcttgctgccatctaaaaaataggagtttgccactgttatactcaagcccttgttttacatggtgtcttaacatttgtgaggaaaacggaacataagtttttgtttcaagcttgagacttaaaatcgcaccaaaccatcttgatccaaattgaagattaacattcatcttttcattaagcataaatgttttctgggttacaacatatcagaagactcaatcttg

SEQ ID NO: 118520 - DNA, 1358 bp, Zea Mays
gttttaaatactctataattccctattttgactaaaaatcatgaaactatttttattaaattctatagggaattacaagcctaacaaattggtcttgcatttttaacatttttctacaattttctagaatttctttagctctggtagaaaaagaaaaagaaaaggtatgaacagtattggacctaaaccggcccaagccagcccacgacagaaggaaagcgcccgcgctggcatatttgcacaaaggcccccgctgtcttgaataatctgttaaggacccacaaccactattcaccctctctctgacaattacatagaggtcccctgacctttgtttcttctccaaatagacccctggccacggcgcgctcgccgtcgatcaccccacgacttgtactggccatggccggcggcggctatcccaattagttatagggtgagcatttccaaccccaggcgactcaagaacatccttcaattttggtttgcacactagagaaggtcctacccacgcgcatggcagaaaatgtgacgtcgaacccgcgttcccattcactcacgcccgaattggtcaaatggctgctacgatgagcttcacgggtatacagagctgcgaaaacaacactcgagaggtgcagagccttaccagagtggtccggccacggagcgcggagacagtgctcgccggtgacagagaaaggggaaaatggcgtcgcgacggctctgggtggaattgggaggtgggattggggctacacggccgtaaggaactatagtttcaccatgcacactcaatttgggaagaggtggcagaggcagtgcgaattttgagctgcaatcaaactcactggtggagatgtgaacacctcgccatggaccatggtgctatttatagccatagcggtccggctaatgatcagcgaccgtggaaggctttgttcacgcatggcaaccacgtatagaagaggcactgtaagggaaatcgaggcatgggtgacaccacagcggaaatgaccgagccacggcgaccgccgatgggatatctccggccacgcacgactgagctcgcgggatggtgccacgttcaaagtttacatctccgcgatcaaatccccaccgattcatccgagctcattcgattcaacagtgcacagatctttgtttcagatatttcagtgcactggatcttcaaagcttgtctgaaccaacccccttccatccactcaatctcttgattcttgttaaggacagagcaaacttcattaataaagtttgttcacctatcaaccgtcttcaaacttactataggatatttgggtcataatcgagtgaatccaaagatatggcgcgtccaaatt

SEQ ID NO: 118521 - DNA, 366 bp, Zea Mays
ggggcagagagtttaccgattggtatggtgaagtggatgctgctgcaaaactgagacgtgatctcaaagttggtaaagaagaatttgatgttgtcaagctccaggacaagatagtgcttggcaatgatgatgagttatcaatcagatgcttttttctgattctattcaatcgacttctttttccatctgcttcatggggcattacaaacaatgaggtactaatgacttcaaacatggcctgaatggctgatattgactggtgtcaactagtttacacggatttgtgtgatgctgccacacgttggcacaaaaggaacaaaacaaatattactgcaacaatatatgggtgctcactcattgttctag

SEQ ID NO: 118522 - DNA, 668 bp, Zea Mays
tgcaccttcaggctattataagcaaggctatcttcaagatcatccttcgatattgcagataggccaagttcaagctttgggtacccatatttttcatcatttctcggcaaacatagatctctttattgtctggcaaacaataaaaaaaacatcttcgtcctcgccaccgtacacaaaggatcctcggggtacttcagatccttggcatattgttttgcttcggcaatctgctcctctgataactgcttccccgaagcatgtcgcacaatgaattccaactctttagcaggtgcttcaggagcaggagatttagatttttcagaagcgctctctttttccaggatcatcggtgcgctttcagaaggtctagcgttggcgggaacttccgatggcccagtttcagaaatagtttgcaccatgccgacctcgtcagatttctttgaaactttaccctctgtgctaggcgcttcagcagaagtaggagttgatgtcttcacagattccataacagcatctagcacgctagtcattcttcttttccttagagttgttgcgggggtgcttgatggcttcggcagttccgttgtgcatggtggactcagtgtttttaactgctctgccgccttctccagtttcggcacttcaaccggttttgtcctagcttcgac

SEQ ID NO: 118523 - DNA, 458 bp, Zea Mays
tttctatttggataacctgaatcgacaagatagtatttacctgtacaaacatgaaatacaaatgttaaatacttaagacataaattaataccgtattatacaaaagtacaacatatttatataccttccggtggatgggggaacctgtccgcataagttatcaaagtatcttgtaatactcttgtgtcatgtacggatcctagccatcctgtgacaacaaatgtgaacctcatatcgaagtcacaaacggccattacattctgcgatgcgtaaccgtgccagccaatatatttggcttgctccaaggccgggactgtcgctagaaagtgactaccatcaattgctcctatgcaatccttgaagtgtggccaaaacctcgcctctcgcaaacgaggatgaatctcgatgaaatttgggtctttgggcttgattatgtcagatgacatcttatacagtgc

SEQ ID NO: 118524 - DNA, 385 bp, Zea Mays
taaccgccgagcaatagctggtgacaccggcattttaaaggtaaccgccgagtcgtgttcaattatgccagtgtttttagaggtaaccaccgagcgacagatgatgacactgacgttttagaggtaaacaccgagtcgcgcctgactttatcggcgttttagaggtaaccaccgagtgatgcttgacactgtcggcatttttagaggtaaccgccgagttatgtctgaagtttcgctttcccgagtgatgacttggcactttttagaaatagcgcccaacccgggaaaaccccatttatactcgtgtcgacgtgcgcttttgatttctgagccctaacttcacattttcgcttcgaaccactcatctgtttccctgatattccgc

SEQ ID NO: 118525 - DNA, 575 bp, Zea Mays
ttgcgaaagagtaaggagatattatgtccgtgcatcgattgtgataataagatagcttggagagatacaggagtaatccaatcacatctgctaaaaagagggtttaaaaacaattacatgatatggtcagaacatggtgagttggatccgtgtgaagtgcctggtaatgacgagagagttgtcggaattttagataaagttgatggtaaagtggattatgtggatgccaattaagattttgaagaatttgattgcgaagagatgttgcgccatatggaaccagaaatgttgagttctgtgggatcgcagaaagggctatctaaaatggagggactggaaagtgcctcaaaagaacctttatatgatgaatcaaagggttgtgacaaagagtttactacactgcgtacagttctagaacttattaagttgaaggctagcgccagatggtctgatactagcttcacagatcttttgaattttctgtcccagttactaccaaaacccaacaaactaccaacaagcacttataaagcgaagaagcttatatctcccatagctctaggtgtgcaaaaaat

SEQ ID NO: 118526 - DNA, 501 bp, Zea Mays
tgggaggcgacgtcagtaaggaccagatccatctccactactgcagggagaaggtatgaactcctattcccctctgcggtcgtgttttatgtgcactgatccaagatggattagttccctgttatcttctaaagtaatctcggagttctaagtatacacagttagatccctaatttctatcagatatatgttgctctgtttatctttatacactttcctccttgatagcctcttttcgggcaaaccatgtgaagcaacttggcttttattcagtcttgtagcatcaacttttgatgttcacactttttggtcatgcagtttctctttctacctggttgattacccgcaccattccatcctgaatcatcgcgtgcgttgacttttctgtacacgaggaacgattactgcatgagtggatgcaaaataagtcgttttgaggccatccacctgcatctgtatatacgccagatatggtcgtacctggccggccaggctcgcgtg

SEQ ID NO: 118527 - DNA, 483 bp, Zea Mays
atactctatgcatcatgttggggtttttttatttgtttgtgcatttcataaaaataataatattaataaaggtacattaataatgagaaataggattttaacatgattcaaattctagggtttggaaataatgtataaaagagagcaaaatggaactctataagtaccataaagagaaatatacatatataaatgattcttttactagcataactggattaactatttaatttaaaattaccagttcacaagccaaaagtttaaattcagttgaacatttgaattcaatagaaatctctgaaaaaaaatggaaaagaaaagaaaatggagaaagaagctgtgcgggccggctaacctcatttcggcccatttcaccccctgacctattcctgcggcccagctcgtgccgcactctcgtgctgtgtatgacacatgggccccataggtcactcccctgcgccttcttcctcgcgcgcatccggc

SEQ ID NO: 118528 - DNA, 883 bp, Zea Mays
cgccataagacctcatgaaggtgtggaatctagcacgggctcaccgaggtgccgaaattttacagagaagagttgcggtgaaagaacagagctagggttatcttgccagaaaccatcaaatggtaggcatgtatatatgtgtccactatagacctatcacaagcttcggtgcgggggaaatagattttcagatcgaagggagtaaatgctaagtcagataagtttaattggacgggttcagacgaatgagctaaatgagacagaaagcatgtttctatgcaggattagttaggagaacttagtcggggcacaagaaattgatcagaacaagaaactcagtactcatggtggataatactagcaagctttattcatataagcggaagtagtattacagaagaagatccagttcattatgaaccgaccctgcagaataccccttctaccactactcctactcactaccactacatcctactactacattacactatactaatatctaagccggtggtgccttgccatcggtgttgccgccctcgcctccgccactgtcgtccttgccgctaccgccattactgttgtcatccttgcctccctcgtcgtcgccgtcgtagccaccctcgtccgctctatcgttgtcctccttctcggagtcgtcctcctcggagccctcctcttggagtcctcctcctccaagccctggatccccgctcgctagacaacccatatgtacgccctatccaccgtagagagccccatcgagtcgtccgaaccatcagacgacggcatgggggcaccgtcggtggggactcatcccctcggaagaaaaccgctcctccgagtactctgattcgccaaagtcctccgacgcaggagtcag

SEQ ID NO: 118529 - DNA, 596 bp, Zea Mays
gcaacagatgatcgaaggataagtgaagagaacaacggtgcaagcaggctgtttatagaggctggaagcgactgttcatttcctaccacgctcaccgaacagtcgtaagtactcaataagcaattcaagccgcctgaaaatgagtcaagcaacagacgctgcttcgcgtaacacgacaccatttggactaaggtcaactgctcgggcgatatgattacaccccgcggtcacatcaagttactactccaggacagtgtgctaaacgctctgcgtaccaagacgccccttggccacacccattgggggggacgaccaagaattttcaatagattttctgaacaagtcatatccatacaatatacgcaatgaatgtattgagacagaaggaagagatcgatagagatcaaaggaaatccaaatatagctattgaactgcaagtctagtaagtagaagaattgaagcacagagcgaggtgaagaccagccaagagccatctaccagacgtccaatctatcaccgatcaaataaatttcaaacctaacaaggcatgggcagaccacattgtttgaattcgcaagaagcatgaaaaaggcaa

SEQ ID NO: 118530 - DNA, 411 bp, Zea Mays
gactgatggaccttgatgccaatgtagtagctcaaacaatctaggtcacttatcttgaacacttgcttcatttctgccttgaacttagtcaccacttcacggttgctgccagtgactatcatatcattgctgttgacgccgacaaccagccaatcgtctccaacaccccgggtgtacatgccatgctccgccatgcaccgctggaagtcgagccttatcagtgcttggtccagctttatgttccaggaccgtggagcttgacgtagctcgtacaatgccttgtgtaagcgtagtaccttgtcaggatgcttggggtcgatgaagcctggtggttgatcgacgaagacaaactccttgatctccccattgagaaatgcggactttacatacatatgatgcatttcccaactg

SEQ ID NO: 118531 - DNA, 335 bp, Zea Mays
aaacaatgatagtgctatccgtggtttgagggctagatttgcagctagacaagggaatgctttcattgcaaaatactttcatgtccgttgttgtgcacatatcatcaatttggttgtcaatgatggaacaacaacattagcttctttgatagaaaatctaaggttaacagtcaagtacctcaagaagtctccatctcgcatgcataagtttgtagagatatgtagatctcttgcattgcaagttggagaagggatgagacttgatgtgtcaacgaggtggggttcaacatacaagatgttgtgcattgctatagcttacaaagaagctattaaga

SEQ ID NO: 118532 - DNA, 624 bp, Zea Mays
gagataggagccgtaccgggcttcaattcaatcacaaactccacatccctctccggaggtaatccgagcaactctttaggaaatacatctgggaattcacacacaaccgggatgtcttgtatctcttgcactacggcttcaaaaacttgtccaaatactttaactgggacggatacagggatggacaacttgacttcttcttgtccatgacttagctgaatagtcctttgatcagcattgataatagccttattctagactaaccaattcatgcctagaattacatctacatcttgtccctttataactatcatgttggtagggaactcacgtccgaccaatctcacgggtacgtggaagactattttcttagtaaagatttgacccccaggtgattgaattacaaaaccctcctttgattcaatactatggatgcaatgcttctcaacaaaagtcttgctcataaaagtatgtgatgcaccagaatcaaaaaggatgacatcgggatggttggcaacgaaaaacatacccatcatcaccggttctccttccggggtggtcgccacatgagtgtagtaaactcgcccaattttccttgtatttttgcccgctagagtgttggcc

SEQ ID NO: 118533 - DNA, 359 bp, Zea Mays
gcaggggaagcatagtccagctttcataaagcttcggaaaacaaccagttcatctttctcaggaagaggaacagtgttttctcctccggctctcactatagatacatcatgaaaatacctacccttcatggcctcaatatgccctttcttcacggtagatttcccgaagttcacgtgactcagtctccacgaccgatattcggcatcttcattaccacttttaacatcaaaatcttcgctgtcttcagaatcatcagataacccgaccagaatctcatatgttattgtttcagtattggacctatccatagctttataaaacccagccagagcaagatcctcactgttcttacttttag

SEQ ID NO: 118534 - DNA, 505 bp, Zea Mays
gactaatagtgctaaaagtgcttgcataagcaaaaaggatataagtaagcaagactgctagaagctaatcgagggcaacccagcagatctctcggttctcaagcattatattctcaccacaatattgttaccttgaaggcaaatggtcatactctggatgtcagtgacagaataagtgcagcaaaatttatggagcgtgtatgtctccattacaagtacccgctccacaaatcaaagaaatccatgactgatgttatgtcagagatacgtcaagggagaaaaacaacagcattgcttttatactcttagtagtcagttatccgtgcttttctacagcttttatatatcatataattattgtttatttctgaatactaaggtacgtgttgtctgtactttttttcacggtgtggaagctgcgtgggtaggatcgggtgctgagcaggcgcagtagctggctatgtgggcgttgggatccacatggcagtagttgagagagggcggg

SEQ ID NO: 118535 - DNA, 540 bp, Zea Mays
aaagaccgacaagtggtatgtgggcatagcggacaggacggaagacataagcgtgagacgaccagcccgattgagcatgcttcctttccatccggccaaacggttctggattttctcgatcagaggttggacatgaattttctggagcgcccgggtgtgaagttggaggcctaggtaacgacacgggaaggtccccctggtcccttggaacggctggagcacgtggtctaggtctatgttatcacatcttatcgggtggatagagctcttctcaaggtcggtgaccaagcccgaggcgcagccaaaagcgtgcaagatgtctttgaccgccaggaggtcttctctagaggggttgataaagatagcagcatcatcggcatagagagaagtcctcagttttgttgtagttagcggaatgggggaaaggatcccatttctggctgcaaggtccaaaatacgctgcagcggatcaatggcaaggatgaacaacataggggaaagggggtctccctgcctaacccctctcctgtgttggatgtt

SEQ ID NO: 118536 - DNA, 409 bp, Zea Mays
aactataaaagtatgcaatatgacaaaataatgtttgtaacaatgtagcaaatatttatatgaagctaacacaatttgaacgaattaaaccagatataaaacagagaagttatgcataaacaagtcttaggttgttttattattagttttatgcttaaaatttaattcccatgtttatttaaatgagattatggctgcggtttcaaataaccgataacccagggttccgttgacaaaatctaggacttgtttgttatggttcttaaaggtggaaggactgcgggttaattagagaagaatacgaggtctctttaacaaataagccacggcaaaggggtattgtgcgtttagatccatatgatcaaaatccaagggttcagaatagatcgtgaagcggtaagtgagcttg

SEQ ID NO: 118537 - DNA, 474 bp, Zea Mays
taagtctgaaatcggttggacagagttgactttagagctttgtagatctagaaatacaaagaatttgcctagggtcaatatagcaaagttgtagagccatcataggagaacaagtttgattaagtaactgagcactggtgctgaatagaaattggagaaaaatgagcccaaagttgggctgtcagtcagcctaaagcctgaattctgattatcagtgacataggatgaactttgggagccctttcgaagattatccagtgggtgtttgagcatggttaccataacacgattatagctggattatagggctagaactttgtaacagagagattgacaagttgccacacaaaaaacggagattaatgccctgcaaatggccctgtcagataaactgaatggtgttctgattgaatagtaactgaatacgatcccagattcacccccctcatcgccggtgaccttgcacctagatcc

SEQ ID NO: 118538 - DNA, 941 bp, Zea Mays
agtttgtaagccacactacccactcgagccaggatgagataagggccaaagtagtggaacgacagtttctgcgaagagcggggtgccactttggtctgaacatgaggctaaagcttcaagaaaaccgtgtctccgacctggaagacacgctttgagcggcgtttatcagcctgcgatttcattcgctgcttggcctgagctaaatgttgctggagcagattgttcatcacagccttgtcttgaagaaaggcggtgagatcagttgaggttgaatccaggcattggacaactaggtgcctgggtggatacccatacagtgcttcaaatggagtacgaccaattaaggagaggtggctggtgttgtaccagaactcagctgcacttaaccagagtgcccaattcgatggacaagcgtggacaaaacaacgcaagtaagtttccaagcactaattcaccctttcaatctggtcgtctgattgagggtgataagaactgctcatatgaaggttgaaacctgcctgcttaaatagttccttccagaagttgctggttaaaattttgtcgcggtcggaaactatggcagcaggaagcccatgaagcttatagatatgttggaagaatacttctgcaattgtgacaactgtgaagggatgtgtcaacggcacaaaatgagcatacttagtgaagaggtccactattactagaatgcaatcaaagcgcttggatttgggcagtccatcgatgaaatacatagagattgtattccaagcaacagttagtatggccagtggctggagaagacctagagcacgggttcggtccggcttggcttgttggcacacttgacaagaatgaatccagttttgaacaaaagatttcataccgcgccaggcgaagacctgcttcagtttctagtaagtaactggaatacccgaatggcc

SEQ ID NO: 118539 - DNA, 463 bp, Zea Mays
ccaaggtgaggagttctctgacgtccacaactgttacatgatattcgatggacagactgtgaacccctcctcgaggcaacggaagtaggagcgtcgggaggtcttcttgatcgaggtagcgactctggtctatctagactggtccgaccgcgccatcaccttcgacagtgatgaccacctaggctacgtcccgaatcccggaaggtacccgctcatcgtcgaccccgtcatcggcaacacttgtatcacttaagtgctcatgcatggaggcaacaacttcaacattatctatgttgacaaattggatctactgggaataggccgctccgaggtcgggctggggctgcaccgtttcatggcatcacccctggcaaaatagttcacccccttaggcagatcgatctgcccgtctgctttgggactccgaccaacttcaggaaggaggtcctgacctttgaggtgg

SEQ ID NO: 118540 - DNA, 352 bp, Zea Mays
ataccagactaattttgctaggctcctaattttctatagtatttaataaaaatagtttcatgatttttaattccaatagggaattttgggacatttaaaatagccaaggtccatacttctggaatttcaggaaataatttataattccaaaattcaccaaattttcttaggtaaactttaaatattatttagaaaccttgggtaaagtttggtatgatttggaccatgtttggtacttaaaacccaaaaccctagcccccccttgccctatgaacttcactatagactccgaaaaccctagtttctcggagatccgtgaaggaaagttatattcaagatattagataataaa

SEQ ID NO: 118541 - DNA, 697 bp, Zea Mays
ctcccaatggagggctcgacccactggggacatctcatttagtccttccttattctatcatgtatcagcccttcgcccagtctgaccgacaagaggtgggcctcgtgttccgttggagaatgtgaggtacgaccttggatgtgggaccgagcaaatgacctatgggtcggtcacctgacttgcgactcgctaggagctttctcggtccacccatcactctacgtggggagttggagtgaatttcggtttttacctggtgcgaggaagttgtggcggaggcacggtaaaagctaaagtcatcatggcgtcattcggcgtgggcggcttgatgggacgtgaaacggcccactcaccgtatcataagtgggtggcgtgatggtttggttaaccaccatattcgtcattgacacctttccctcgcgtgctcccggtgcttcgtctcaagcggcgtgagccccataggacgtataatttctcttgcgacgcctaaggtgggagggatatcgatgcgacggtctctctggtgttgtccgtggggccccacattctaggtgccacttcgcttccctgttcctgcgtacaaataggaaacagaggcactcagagtcgattctgcttaccgggccttctcgcctgagcatctgtcgcctctttcccttggaaagcctcttgcgttcctatgccaacctcccttccg

SEQ ID NO: 118542 - DNA, 507 bp, Zea Mays
cctccttgtccaataaatgaccatatgcctgcacaggaagaaagaagctcacatcttgttcaaattggacatctctaaggcctttgattcagtttcatgggctttcttacttgaggtcttaaaacatttcggttttgggcaaaaatggtgcaatctgttgtgccttcttctctctacctcctccacaaagggttggttaatggtgaacctggagcttctattgcacatcatagaggcttaaggcaaggagaccctttatctcctatgttgtttctgcttgtcatggaggtgcttaatgcaatggttgtcaaagctatccaggaggattatttgcagccattggtggttccttagttgaagcatcagatatctctctatgcagacaatgtgataatgttcctccggccaacacgtaatgacattctgctcatatctcaaatgctaaaaatttttgggcatgcttcagttcaggtctccacaccaatctgtctaaaagttcaatttgtc

SEQ ID NO: 118543 - DNA, 518 bp, Zea Mays
gaggccacggggctacctaacgtgatccaagggttgaagaccatttttttccttgtgacctacaagagcggttttgagtcattggttcgtgaagggtgaccgagcaagagggcgaagtccacaccactagttcaaaaaaatccagaggacccccatcaaacccaaaatccaaccctactaagccaaaatctggttgaatctaacgaagaacatgtctttggtccccaggcttcaaggctacagaaagtcactagcaccacccattcgggatgcctttggaagacggtgatgaagacctgcaagacggcatggacctcagcatcaacatcgaggaccaactcctactcaagagcgtccgcatgcgtagctccaacctctagaagcagagagacgccctcatagccaagcagcagcgcaacgaggtccaagtcagggtaccatcttatctagcaagaaaaagagcgcctccaagctcttgagaaggaaatctcgcagctacaagcctagcaaaacccgac

SEQ ID NO: 118544 - DNA, 677 bp, Zea Mays
gcagaccgtctatttagcactttgactcaggattcattttttagagcaaagtcgatagtctagattgctatcaggaaacatcgtctgctggatttggaggttatacgtcaagcaactgatagggtggtagaggaacacatcacatatttccctggactctaccttcctaacagtttttggaaagtatatcgaggagtgggtcggagtgttttacgctacattatggatttaccctgaccatcaatggctccattttcagattgaggggagggtgtgactttacaggctagtgatatccttgcactcttcggtctgccttattcttccacaagggtccacagtctatgctacggatcagtggaccctcctcgtcattctcacggtagagtgactccccaccgcttacatctcagctatgttcatatagccttttcatagaggggttgcgacatgctcctgcagacttcactccagtagtcagagatgtccacgcccttctgaggcacaccttgctacctaggacggggttcaaggaggctctgatcaacattcagaaatggctacttggtactcttatttcccacaaagtgtttgatgttattgatttcttgatctgtgagatagaggacactatgttggatggtctcggaattcgtcggcatcttcgttattctcac

SEQ ID NO: 118545 - DNA, 377 bp, Zea Mays
caacgtaatattaatgctactatcatactatgcatgtgtgagtggatctttaggatccactgaatttattattttggccagacccaaattctctaacagctactacacagcctggagaaatgaaaggcgaagtaagccgacgaacagagcactgtactgttcatgcattctttgcatgtagccgcgatacgcgtgttgcacagtgccatcgttggagtcacgggacaggcaacgacactggactactggagcaaggcgttccgggaccaagacacgacgacgacaacctaccccggcacgagctatccgcctgtaacaaatggaatggcgctctgcttgtcgtcatccgccggaagccacagtacttgccagacgac

SEQ ID NO: 118546 - DNA, 404 bp, Zea Mays
aagcagtttgacagccaagacttcagggatttctgcttcccattggcaccaagcttgccttcgcctcagtataccacccgcagtccaacggagttgtggagcgcgcaaatggcaaaattttcacagctgtcaagaagatgctcctcgacgagaaaaagggcaagtgggccgatttgttacctgaagcggtctgggcgctaaacacgaccgagtgcagggcgactgggttcacccctttccgccttctatatggatcggaggccatgaccccgcaagaaataaaacatgggtccccacggatagtctcgtcagttgtccccgacgtggacgagcccacttcgaaggatctcatcgatggagaccgtgtcttcgccctacaggctctaaataaataccaagcccaa

SEQ ID NO: 118547 - DNA, 500 bp, Zea Mays
ggtaaaacttcctgaggtgttctatgttccatgagttcccaatttctgttccgtccatctgagtgaggtgatatgatcccggtcgagtgacttctgttactatgaatggtccttcccatagaggtgacaatttatgccgtccctcccccgttagaattcggcggaggacgagatctcccactgcaaaggatcgatgtcgtacgaccttatcatgatagcgcctcagagtttgctggtatcgtgctgattgaatcaccgcattcagtcgctcttcttcgagtacgtcaacgtcttccagcctagtagcttcagcttttgctatgttatcaaagattaaccttggtgccccgaacttgagatcggcaggtagcactgcctccgaaccataaaccataaagaaggaggtatttccatgtagagctcggctgggttgagttctcaggctccaaactacatatggcaactctctgatccattttcctgtgaacttttcattcttg

SEQ ID NO: 118548 - DNA, 549 bp, Zea Mays
aaaaggatctatgttaaggattataacacttgtacgctcttgtagtatgatgaagctaggagaaatatgaaaccacccttgttccttgactaatcttagaaatcaaaaagttgtgttcactccttatcttaatgtcatacaagcctcttatgcagtctgtctcactaactcttttaccctctgactagatgatgaaccccaatgaaaatgaagtaaatggtgccaacgacaatattcctaccttaacaactatgaacgagaaaaatgagtcccaaagatatttgatgaatggaatgaagaacaacaaaaggaatagaaaaatgtttggatacatgatgagttcacctcaaccacaagcaaaagccacaaaacacatggatacccaagcagaagaagcaagtcaggctcagctacatgagatacagacacccaataaaccctcaccccctgttggtcaagcaaagttaactcgtaaagaaatcaaagcaagaggtgcttgctactactgcaaaaacgaaggacatcttattcgcgaatgcccaagaagcg

SEQ ID NO: 118549 - DNA, 398 bp, Zea Mays
ttactattacaacagaggagatgacaacatatacatgtgctaatcctagtcctctgcatcaatggctacctctgaaacataactaccaccaggcagatcatcacctaaggacactagaggaggaactgcctcaacatctaggtcctcatctgcctctccaccatcctctaaaactgcaccaccctccatctctgctaccctaggctggtcatttaggtgcaactgataatagatctgatgaacctcctcatgtaacccattagcatactactcgaggtcatcataagcaaacaccaaatcctggaaacgatcccttagatgatcctcatgggcccaagccgctttcctagactgcagcgtccatgccaagtggtgcttgcactcagccaactactatc

SEQ ID NO: 118550 - DNA, 344 bp, Zea Mays
gattctatagttatgaagtgtgcacacaacatattccatgaagtattatcagtacaaagggctacctcgtctaccaactacatgggcctggactcatatggatgcaagcaaccgcttagagaaggacatctctgatattatgccatgaccgagagtatgactctaagagcaggataaaaatggggtagttgaatcttagccagtggaatctgaggttaatgcaacctctatctcctcccttgcactataaaaaggtgaggctgagtaacattttaaaggactcacatatttgattcatatctagacactcttacacaagagttcacctagagaacaaatataaa

SEQ ID NO: 118551 - DNA, 503 bp, Zea Mays
agcttgatttataccaatgtaagtttattttcggacatgcagtagtaagtcattgacattatgaatggtccctcatgaagaaataccccttttcccctagccgtataaaaaccacatgaagtggattggagaagaaaatactacaaacaatgatattgaaattaaagtcaatatttgttttgaataatcttttataaatgatcaacatctcttgcatcattttagaattgtggttgtaaatattgtatgaattagaaagccacgaagagtagacccattttggcaaagaatttccaactcttgaagagaagggcacatttttctcatcattatatatgaatctttacttagtatttatttgaaatacattcgatgtttgttttcactttgtatggaatcttgcatttactcgattattctgaagcatgaaagtaacatagaagcatatgaatcatctcttaaatactatgaaagtatccgactgatataaaatgtcgaaagag

SEQ ID NO: 118552 - DNA, 355 bp, Zea Mays
tgaccttgattgctatccatgagctcaaacacgttgcaatggtaacatagaacatatccatacataagaataatccaaactaaaggtcagagtgaacttagctcttcaggttacttctaggttctggctttgacactactccactttctattgaccttgtcctactgtttgagctgggatcttgagccttatgacttaaaccattaaccataagcatcactccaatggttgtaagtcacatccatatatcacagtcttcaattcatcaagactctttttagcttgaccaactttgactacttgaaagccatcttcttcacccctagctttaggtacctcggtcttcttgaccttc

SEQ ID NO: 118553 - DNA, 809 bp, Zea Mays
ggatgccatgcttttccacaattctagtggctataaaagaatgggatgctcctgaatcaaaaagtacagtagtgggagtaaattcaacaaggaactcaccgagcactactcccggagcttgctgagcctcttgagcatcgacgtggttaactcgtgctctaccctgatactgagtcttgctctgctgactgttggaggatggtgccgaggtattcttggggccattcaccgagttggagtaagtaggtcctggtgccttcaactgggggcagttatttttgaagtgactggggtctccgcagtgccaacaagcatttgctggtggttgtttgcttgtgaccgagggggcctgaaaggagctctgactctgctggctgaaacgtgatggagtgggtctagctggtctattgaagcttggtcccttgggtggaaacccgaaggatcgagctctctggtgccggtcttgctgctgagctcggagaacttgaaattttctcttgaggtgacctttttcttcttcctttgccctttccacttgtatggctttattggagaggtgcgagaagctgaggaaatcttggctggcaaggatggtcttgagttctggtcttagcccttttagaaaacgggccatcctcttggcttctgtgctgacatcgtcaggcgcatagcgagctaattttgtgaatttgtgcacgtactcgctgacagatcttccaccttgagttagttcccgaaattcatcttccttgagctgaacgatcccctggggtacatggtgctctcggaaagcagtttcaaattctgcc

SEQ ID NO: 118554 - DNA, 437 bp, Zea Mays
ccaagatctattgcgccaacaggaaataaggtctgctatccagttgatgacattacaaggcttgtggcatgcacactagttataagatatgttattaacaataatcgtatgaagaaagtagccacaggccttgcgatcccaggtcgcaagttccatggaagcgacattccagaagaatattgcagggtagaagtaacgacggtcgttcatggatccgaggacgacatgctaaacatccttgggaacgaaggtattgagatagtgggacaatctatcaagaattttatcctttggccttgaaggggtgtagaattagttgatccaccactaccgtcatcgtcccctgcccaaccgtctccgccttctcaaaccgcaattcttattgtacatccgtcatcacctcaaacttcaaatgctactcctcatcctctttctga

SEQ ID NO: 118555 - DNA, 546 bp, Zea Mays
gtgtgttaccttaaccttgcctgaatcattgatccactgaatgtggtatggatgtggccgtgggcgtgtggtcaggccaagcttcttgaccaaatctgaactcaccaaattattgtagcttccaccatcaataataacacgtgcacgctgattctcgatggcgaagaaagtctggaacaaattatggcgttgctgcttctctgatgattcaggttgagaattaagaacacactgcaccatgatgcttcgaaggttcattgtagcatcagcaccaagcatgtcatcatcattagcagccacatcataggagtcatcatcgtcatcctcaccatcggaagcactaatgtagccatcatccgtagcaatgtatgttcactgactcaggcaatccttcttcacgtgaccaatcccatgacaacggtggcaaacaatactcgaagaacgaccactagaagttgctgtaggtgctggtgaattctgtttcttggcggttacctgcaaaggaagtttaccaacatgtgctggagtggtcgaatgtgtatgact

SEQ ID NO: 118556 - DNA, 389 bp, Zea Mays
acccacaataaaatccatgcaaatatcctcccattgccaagatggtatcggaagaggctgtaaggtacctgctaccttcaaatgactagctttgattctttggcaagtgtcgcattcaaatacatacttagcactttccctcttcattctggtccaccaatacaaggatctgagatcatgatacatcttgttactaccggggtgcatggaaaaattggaaagatgagcttcatccaatattttctgcctgagttttggattcttaggaacaaccaatcggtcttcaaaccatagaactcccttgctgtcctgacgaaagcatttgtacttatccaccctttgttcgagtatctccttaatgacttgaacacccttgtcaccaatctgtg

SEQ ID NO: 118557 - DNA, 691 bp, Zea Mays
cctgcatttaaggcaacaagattatgtcaacaacatagatcaaatacaacaaaatatattatgttatctgttaccttgtttttgggactccataattgcggccctaaaatatgggttatcgacctttcgatccgggatgccaatggcatgacaagcctttgcctaagccctaccaagaatctctttcgagctccttcccttacttgtccagggaccagtatctatcatttgttgccttagtccataggctagcaagattgtagtctctaacacgttcaggtacttgttccctactccttcccatcatcctatcaagtggcccttgagataccctctggctggaggatccaccacccctgtcataccttgcaccagccctctgactaaattcgtgctccacacgtgactgatgcagagccgctttaagttcatcttcatactcatcgttcccaaaatgggttcgtgctacctcatctgccctcagctgctgcctaaacctagaactcttcttttcctttgtcctatctatgtcaagttggaagtatgcctttatgtctagaggaacagagagacatttcttgacattcttccctctatgcgtgagatgctccttcaatcaggtaccacccccttcgctctttgtttctctacaatacatgcatttgaaacctgcgccaaccttctctccgtg

SEQ ID NO: 118558 - DNA, 448 bp, Zea Mays
cgaggatgtggttcctgaagatctgctgtccgagccaacagatggtggtatgatggacgtttgctctgacattccagatgtgggattagagttatcccgagcagcgtctcgtgcatcgtcgaccttggagtgtggtcttcggagtcaagaggctggtcaaggttgttccattcccatggaggtgactgagaatccttcagccttagaggtggctgctgcagagaacccggtccccaaggatggtgcaagcggttacccagcccctgagggtgttgctagtaatgattcaactcgggtgggtagtgcgagctacaacccagcccccaagggtgctgccggtggtgatccagctccgatgggcagtgcaggctgcgacccagcccccgagggtgtccgagcgggctccccttctcatacctccatggatgtccacgtcgggtcttctcct

SEQ ID NO: 118559 - DNA, 398 bp, Zea Mays
cattacgttctagcatatctacctgtccaaccaagatatcacgtgagtagagaattatgtatggtcaccactaaacgtgcaatattactaaagaagaacacgtcgatgtagtgaaagtagtcgaacgtcctcgtgtaccaacaccgacactagcacacttacccatcctcttcaagttcattgttgatcaacatcgtgcaaccaccaccatcgtcatcttcataatgtacacaagtgtgggggataaaacaccaagaagctagtgtgctagcaccaaactgtcggcgatgccttaagcaccagcaaccctagggagagagatgacgactaagatgatcctcctaagcatgccaaccacttcttctatttagaatcttgctaatggacttaataagacc

SEQ ID NO: 118560 - DNA, 364 bp, Zea Mays
caacaggcaacatctctcaaaatcagaacaagaatactcctgttaacagtgcaaaagggaaggacaataggaaatatgggcgagtgttctatactcaagttgaagaagggcatcctgtgctaatgggtacgttccttgttgcccatcatcctgccaaagtactttttgacactggtgcatcccatacatttctcaataaagattttgccatgcatcataacatttctattcaataagcaagatggggtgtggcaatacaatcgcccaggggtcgattgtttatgaaggaaatagctttccaggtgcctatagaattggctgggcatgattaccctaccaatatgatcgtactaaaaggccaaga

SEQ ID NO: 118561 - DNA, 549 bp, Zea Mays
aagtaaaaaaattaggactcctatgttattggaacggatgggtattatttaggatttttgtaaggctggttatcctatctaatttgtagtcattcactgttctctatttctaatcggatacagaacaatttacactatcaagaagggaaacatcaaagaaaaagttacagtaaaatacaatgttacctgcaaagaatttccttcatggtaaaaatgaattgttgttatgttttacttggtcaggaaaagaacacggcgatgaggacaatagcaggattgcaaccactgcagtgtagcctgctctcgcgcttgtgagccttaccacaccgctcgctgggttcgccgccttctgaaccttccttttaagcacatttatctcaaatttatttattaactatatttctattatcagataagaaggcctactaaacctgctacctttgtccttcctcccaaaaaagaactgtaaccatccaaagctcccatacaattcatgttgcaaaccgctagaaaaacatgaatgaaacaaaagaagaaaacatgcacaaa

SEQ ID NO: 118562 - DNA, 806 bp, Zea Mays
actagggcacggtattcctagggtcgtattactttagccattacagaggtgagaatgtgcaagtctgactaagcgagaggttcgattgacgaaaatgggagtatgtatgtcagagcgcgtatgtaatccaccacgacctattggtggatagtggctcaaccacttcgtagctattaagtcaacaaaggacactggataaaccgctgtaggacatgactgagtgtaacggcgggctccagggtggcctaggtgtgcatacagtaccctgacggaggaagaaggcgtcatccatggcgtccctcgactgatgggaacccaagaggacaacgaactacacgacaatgcgtgacctttattctcttgaccgtaaggctcttgtaatagtgttggtctttgaccttggcctataaaggaagggaaatggacacgattccgaggacgagcaatcacacatacacatcactagcacaagtcaaagcacagagcacttataaccgcacacatattcacacactagagacttgggagctcgatccctctctcgcccgtttgtaaccactactacaaaccagtgcaaggtaacacgagcaggtcaactggatttatggatgttatgcccaaactagaataaacccttgtgtcctctttgtacaccatccgctcgaagacacacatagcacaataattactagccagtggtttcgaaacaccaacagttgacacgccaggcatgagcatttttgcccgtctcgcaacatgtttccatcacacaatagcggatgaccgactagttagctgggtgcaac

SEQ ID NO: 118563 - DNA, 366 bp, Zea Mays
cgagttcgacgtggtatgcaaaagacgggtcgacgcctgggaggctgggacacggtacaaacgagcagatcagattcagcagcaaagacatcaaagaacaccggggggctagtgcgccggttagctaggttactgatcctaggagtcaaaaccggagtggttgaaattcagtttgataagctgcctttctactgttactcgtgtggtaagatgcatgcaacacatggagctggagtctcctccaacctcggcacctagaaatgctctgggcagactcccatcccatatgatcttaagcttcgagcaccataggataggaagaagaaatcgtagagctttggtctttggccacggggcggagaggag

SEQ ID NO: 118564 - DNA, 271 bp, Zea Mays
cacgccgaggaccggaaagacgtcggcggaagtcgtggaaatagttccttgcgctcggaataagtgcggcaactggtgggactattggttttatgtttcgggaggggaagtcgaagacctcctagggctccctgcggccgtcatgtgctcccactgttacatggcattcccaccgtttgaggtggaggaggatgatgaggacgaaggggccctccggtgtgctacccgcatgagtagctggcgtgatttggttgaggaattcatcggttat

SEQ ID NO: 118565 - DNA, 525 bp, Zea Mays
cagtgctgccatgcagctagtaagcttctggaccttcttctgcgattttggtggttccatcctcagaatggcttcgattttctctaggttggcctcgattccccgttgattgacgaagaacccaagtagcttcccagctgttaccctggacacacatttgtcagggttaagtttccagtggtagcgtctcaggcttttgaagacttgttggtgattgtcgatgaagttccccaggtccatggttttgatcaccacgttgtcaatgtaagcctccacttgcttgccccagtggtcggctaagcacgtttggatagctcgttgataagtcgctctagcgttttgaggccaaacgacatggaggcataatgaacgacgttttctcctggtcctcccttgcaagactaatctggtgatatctcgagtaactgtccaggaaggagagcatggagcagccagcggtagagtcaacaattttatctattctagggggcccgaagggatccttcgggcagtgtttgttgagat

SEQ ID NO: 118566 - DNA, 467 bp, Zea Mays
gtaaagagaaaccatgccgatcaggacttaggacaaccagtttggttaacaactattgggcctcctcatcggtcacataagaattcaatatttcttgcaaccataaaggtgtcacctcagacacagcatgcagagctaaagcatgtcccaccttagtcaacgcatcagcagccaaattttcctttccttgcctatacacaattttgaactgaagacccatcaacttgggcattgccttcctttgcaactcagactgcaattgttgtccttctaagaaacacaagcttttatggtctgtcttgataatgaattcattgtgtagcaaataggttctccatttcaaagcaatggtagcctcatctgtccagtggaacttgttttttttgcaatagggtagtgaaaggtttagcaatcgctccataattcttcacaaatttcctataatagctagtgagacctagaaaagc

SEQ ID NO: 118567 - DNA, 516 bp, Zea Mays
attgaactaacatggtttctgcccccctacacatcttattcagcgttttcttaatggtgtcatttccgatcaaatataaaatctcgcattatatacggaacatagtaaccatataaatcagatacttcaacacctgccaatcttctaatttagggtttcctttggattagcggactacaaagctagggtagttccaatcagaagctagggagctagctcagcttaaagaaagcaggaacccacacagagtggagtaaagaaaagggaattcgatttggggaatggaagggaatgaaaacaagtgggaaatttatatacaatttccaaagggtggtgatgtagttggagtgctagtagatgaaaaaagttggtgagtctgagtctgtcttgtgaaaaagcactattggtatgacaagtctcagccagtagcggcgggggagcaaatatagggcgacaacctagtagtagtaaacacaattttctgaactgtaggaacattggcatgttttaggagat

SEQ ID NO: 118568 - DNA, 294 bp, Zea Mays
atgcccgccctttgcccaaatttgggtaataaatctatttcctatacttcgagcctcggttggaacgtcaaccaaatccgatgatgaaacattgaagttcggcttgttgacggccctcgcgtgattgcacccggccttcatgaacgctgcagctgtgctgcatgaagccaccagagcatagaaatctctgtgcccagttataacttcatcaagggcctcaacttcattctcgatatgatccaaggcatcggggatgtctttagtagaaggggtgatttcttcagaagtggctcc

SEQ ID NO: 118569 - DNA, 553 bp, Zea Mays
acttacaaattttgagtccaatctccatagtgtgtttgagataccttagtattctctttactgtagcccagtggatagtagtaggtgcatgcaaatattggcaaaccttattcacagcaaaagaaatatctggccgagtcaaggttaaatattgcagacctcctaccatgctcctgtatgcagtagcatctttgggcccaagaggatcaccttcatgagcagacaatttttccgaggtggacaatggtgagctaactggtttgcactccatcatgtttgcacgctgcaacagttctctagcatattttccttgtgttagcagaatgccattatttatcttccttacctctataccaaggaagaagtgtagatctcctagatctttgagagcaaattccttcctcaaatcctgcaacaggcatgctgtggcttcctgagtggagctagcaacaattatgtcatcaacataaataagaacatatatagtgacagatcctttgttgtaataaaatagagatgtatcagcctttgatgctttaaagcccaactgaca

SEQ ID NO: 118570 - DNA, 565 bp, Zea Mays
ggaaggactagtcccggtctcgtgataccatgaaagaggatggctgggaaatgattgttggattgattattgagggagcccaaaggctcagtacatataggcaaggatgtcccagaaataggaaagtgctaatctagagaatcaggaaagtgctaatctaaggacaccttgccaatcagatccaatactaccaaaaaggggagaggggctgcagccgccactgctctagggttgcagccgaccaccctcctgggccaaccgaacaccctaaaggcccatgggcctatacagcatgctaacatatatcattgcagagccatgtacatatattagaacttttgttaggcaaattacttgcagacaacagaaaaagtagttcacaagtcacaggtggcacaaagcgtacatccagcatggtgaatggtgaaaatgcagtggaatctagtggcactagcagcaacatgcaaaaatggggactgaaattgatgtttattgtcacacatgaaacacagatgaacccacactagttatgagtatgcaacagatcaacttaacaaacctgccc

SEQ ID NO: 118571 - DNA, 360 bp, Zea Mays
tcgaaggtctcctaatgccgaagcgtgatcgtatggggcactggattacgtccttcacatcctcactctcactcaaatcatctttaacataaaaccattgcttcatccatgagccataggacaccttacgtcagactggtacacaaagttataacattcaaagttgttatggtactgttcattcctagtgcactttgtttgataaaacaactcgtgaatgttgcaaaaacaatcagcgtccgattccaacccctggcttcttatcgcccaaataaaaattctgactttaattaaagcttcgggagtaagttgatgaaggtatatttcaaatcgatttaacacttcaaccagcattttatg

SEQ ID NO: 118572 - DNA, 390 bp, Zea Mays
gcgctctatctcatctttctgtgctggattgtatctataaggtctcaatctgaaaggggttgctcctggaaccaatggaattgaatgacaatgtgatcttgggggtggcaaaccagtgggttggtcaaacagggaggcaaaatcttttataagatcctgaatctcttgaggcagactggtgttggcctgattttcagctatgtgctgcaattcaatcgtgcaccaaagttcattcaatctgtccaagtgatacagccggcaaacagaaatttgctcgggtgtggaattatctgccaactgaccatgaagaaccactctttgttgatcatgagtaaaagctaaccactgatcttgccaatgaatctccatcggactatgggaagataacga

SEQ ID NO: 118573 - DNA, 571 bp, Zea Mays
tataagtcttgccccgggcctctaaaatgttaggaccggcactggtcgtaacccgtggtgccaaggttgacgccacaaatctggtgccgaggtcgatgtcacaaatctcggtgacatgaactacaacgccgatgttcttaaacggtcacatccacttctgtggccaagacagaccgtatttctgtctcatctcttcctcttcctctccctaaatcctaatcctgcaagccttctctaatctattgattaaaccttaaaagattggatttgatccatagatctacaagagcaaggtatcctccacctacttctttatacatgttgatttggtctatgttaggtgtattttgtaaccatagtttttaggtagatatgaattgaatcaattttgattttgattgctattatcgtgttagactataggaatcgatgttctgatctacggcgccaatgttacatgatttagtaccatagaacatggcgacgaggtatcacaccgctagtagtgtggtgccaccatgaccctgacgtggcaggacctcaatgcctatggtcgtgatgtcaatattcc

SEQ ID NO: 118574 - DNA, 495 bp, Zea Mays
gaggaactgggtcgaataaaacccttttctagcaaatcttgcaattgagtctacaattctacatgttcatttgggggcattctgtacgatctcctagaaacaggagctgtgccaggcttaacttcaatagagaattctacatcacgctatagcggcaaagctggcaactcttttggaaacacatccagaaattctcgcacgaccgggatattgactactcttcgactaccacattataagcctttcccggaacctcttctagagaagacgactcgatctttaactgactttctcctaacacggtatttatctgaatagtccatttttaatgtcaataatggattcatgttgagctagccaattcatgcccaggatcacatctatgtcctggcccttccgcactatcatattggtgggtaggtatgcccacccaattctactggcacatgaaatgctacttcctttgtgcctaactttcccctaggagattttaca

SEQ ID NO: 118575 - DNA, 385 bp, Zea Mays
taagagctgacagagctggagaatgaatatcactcccccctcactacctctgtaatgtcggctgttcttatgaaccaacatgacttcttcttcttcatcatcttcatcaaatatacagacaacagccggtgcacggtcacaaccattgggatcaacttcaggacggtcacacccattgggatcaactttaggacggtcacacccattgggatcaacttcaggaaggtcacacccattgggatcaactttaggacggtcacacccattgggatcaacttcaggacggtcacacccattgggatcaacctcaggaagtacctttgctagcacttcatcatgaaccggagtagaaggacctgcatcctggtccaagcatgacagtcgc

SEQ ID NO: 118576 - DNA, 356 bp, Zea Mays
aactttaagaaggggttaaaattcagattctgaattttctgaatttcccattgagttctcacttgaggggttattttgagaattttgcagaactcttcttagaaatctttcttactacattttgtatcctatttagtataatataactttgttatttggtcctcatcataattttatgtttttcatgatcttccacaatttctccctttttgcacttaaatggcttacttagggccattttaagttttgtgcatttttcttaccttggggtgcatgatatggttaatgtatgattcttaagatgaaaagacttactcaaatatttgtttctcaagtgttggggtcttttgctcaat

SEQ ID NO: 118577 - DNA, 677 bp, Zea Mays
tatcaaaagcttgttgtgcttcttttgtccactcccatcttttcttcccttgaagaagagtagtcaagggcttggcaatagcaccataatgcctgacaaatttcctatagtaacctgtcaaccctagaaaacctctcaactcagtaagtgaggaaggaactggccaatccaccatcgcctgagtctttgctgggtcagtagacaccccatccttggatataatatgacccaaatactgcaactcagatttggcaaagacacacttctttcttttgaggtaaaactgatgagccctcaaagtagagaacaccaatcttaagtgttccaaatgttgagtcagatctgcactgtatatcagaatatcatctataaacaccatcacaaactttctcaaatagggctccaaaatggagttcatagcacactgaaaacttgcatgggcattagtaagcccaaaaggcattactctgaactggtagtgcccatggtggattttgaaagtcgttttgtactcatcctccaagcccatcctaatctgatggtatcctgctgtcatatccaaactagaaaaatattgagttcccactaactcatccaatatatcgtctactaaaggcattgggaacctattcttgattgtcatttcattgagctttctgtaatcaatacagaacctc

SEQ ID NO: 118578 - DNA, 454 bp, Zea Mays
aaagggtgaacaccaaatctcatcaagaaaagcgatcagcctaaaactcgggaattaacatgagtcgatataacatgctagtacaaaaaaaagagaagggcgcaaggacgcccactaagtcctacccgcgcaactcatctcaacgtgtgattcaaaaaaagatgcggggtggggagggggcaagcaacctcaaagcttagataaaaactaattgacaatacattcatgcacaaaggtgaggaacacctcccacacaagagacaattgttctacttcccaaagttcacaatacatcatgcactctagtagaagcacctccaggtgtggaatcaaccttgggcccgttgggtgcaggagccttagctgtagtcccaaccacagcatgaacatctaaaacaatgtcacccgggaccaccacaccgggtttcctcattagaaggaaacccgcacggac

SEQ ID NO: 118579 - DNA, 321 bp, Zea Mays
acttgataacaaaccttatttctgttgacgcgatagagcttgggacggtcgtacaatcggtggaagtcgacggttgagctgctggaattatttgtatatgtggagtgaccatatgttgaatatacatcacactcgctaaatgctgcatcaattctggaggagaaatcgatagcatttgagacataaggtctttgaactctttcttggcctcctgcttaaaataatcagccatctcttccttgtatcaatcacgtttcttgtacagaccttcccactatggtccgaatcctttcttccatccttccttagataagattcatc

SEQ ID NO: 118580 - DNA, 481 bp, Zea Mays
tatagtctggggaagtgaaggcaacaatactgtgttgaagctacacacagtggcttacgacagaggcaaggatctctcctttactcccttccccccttcggttactcttaaataggtagggaaaagatcatgcgatgtctgggttcatgggattacagcaaagggagctctggaggtgccagtgaacgcatgggtatggatgcatggctcaaccctaaagatccacgccggtctcctgagcacagcaagacagggatatggtagagtttaccacggcagagggtaggcagataaggtttcactgaagcagatattcttttcggtccaaacttgagatattttggtgatggccaaagttctgaatatccctgctatttcttctcatctctatcttcattttatactaaagtaagacacggcaagggaaaaagatcaatggcagatatttctgatcatcaggatctacagcacttgactgacc

SEQ ID NO: 118581 - DNA, 542 bp, Zea Mays
ggatgttgcatgagttcttggacgactttgtggtcgtgttcctggatgatattctgatttattcaaagaccgaggctgagcatgagcagcatctccgtctcgttctgggtgcccttaggaagaatcaattttatggcaagttgaagaaatgtgccttttggctgtccgaagtggctttctaggggcatgtgattaatcagcagggcattgcggttgatcccaagaatgttgcggttgtggtggagtggaagagaccctctagtgtctctgaaatccgaagtttcttggggctcgctggatattatcggcgcttcgtaccaaatttttccagcattgctaagcctttgactagactcttggagaagggtgttctcttcgtctggtccagcgattgcgaggtcagttatcagacattgaagaacaagttggtggacgcccctatcctagctttgcctaagagcggtaagcgtttcacagtttatacggatgcttcgtgaattggtcttggttgtgtgttgatgcaggaaggcagagtgattgct

SEQ ID NO: 118582 - DNA, 406 bp, Zea Mays
gctgcttgccctaagcattgcttcgagctggtgtgttggggttcctcttaagaaaagcattggaataatgcccatcctcaccacacttgaagtaggtggtgaccgtagcggtgttctggccaataggtctcaccgaggtgccagtgggggcagcctgacaagggcgtagagtctgagtggtggcctgaggtgtctactgagcaggacgctagtgcgattgttgtcctcctttagaacgagctggtgtacccttgaatggagcaaagcgagggcggatgctgcttctcccctagccctgggtgatggccctccttttcatctcgccaagttgaacacgtttgtgttccagtgcaatggccttctcttgaaccctctagaaagatggaaaggtgtgagacatcagctg

SEQ ID NO: 118583 - DNA, 1072 bp, Zea Mays
ggcaaggtatcgaataccggtgctcctgttgcgtattttgcctggaatctaccttcttccaagactttcatcagttttgtgtcaaatcctcctgctggtgacagtggtttgggtcttagagtatgaccctctcccgaagaggttgaggctttggttgtttcgcttggtgatatacccaatgatgagaggcaggttcattttgagatgcctataaacccaagcaatgcagaaataagtgccatgctggacatgttggctgaggattcctctgattcggtccctgctgaaacaccagctgtagcaactatcccagagcctgggaagaccttggagactcaaagatttgatagccctcgcctgaaacgtcctcgccaggccagtcatccaatttctactgttgaggtgaagaacaagaaaaagagacagctttggtgagtgtcatgcttgaatcaggatgtcggcccttctgctcctgctgccgaggaagtgccagtggagatttttactagggctgaacccaatgggtgtgacccggctgatgctgaccccaatgggtgtgaccttgatgatgctgatcccaatgggtgcaatccggtcagagctgatcccaatgggtgtgctgttcgcattattgacgaggatgaggaagaggaggaaatccctttaattcgaaaaaacagtcggcgttatatagtcagtggggagagtagtgatattccttctccagctttgtctgctctcgttggtctgcaagaattgtctttggcaaattttgatcagactctcgaggatatggtccctgaagatctactgtccgagccgacagatggtggtatgatggacgtttgcactgatatgcctgatgtcaggttagagttatctcgagcagcgtctcgtgcctcatcgaccttggagcgcggtcttaagagtcaagaggctggtctagattgctccgttcccatggaggtggctaaaaatccttcagccttagaggtggctgctgcagagaacccggtccccaaggatggtgccagcgtttacccagcccccgagggtgttgccggtaatgatc

SEQ ID NO: 118584 - DNA, 366 bp, Zea Mays
cccgccacactatgctgtggtccaagttctagagatcacagacagtggttgtgaagattgggagatagacttttcagttgaggggatcataaccttgcaggaggcaatgaacgagttggtcctttggcatcgacgcgacatcaagttgggtgatgagccgatcttaagccgtgtatcgcgtcataagtcaccaacaccgaattcaacaccaatgcaacagaaagatagttcgatcattccataccccatggtgcaggaaaatatagcaccgacctccacaaaaatcgttgaaacaatcatatcacctcttgcgaaggaactcgacgagggggacgtagacaaaattgttcctcaaaatgtcgacgc

SEQ ID NO: 118585 - DNA, 507 bp, Zea Mays
tgaggatgtcccccaccccatgtagctcatgtgcccttccttttatagcctaagggaggcacgtacatggacactaggccccaattggtgggcccaggaaaaataataatatggagcggtacatgcaacaatgggttgagatctatcgatgcggtgagcagctatcttctcttggtcactgtgccgattttttgcccagatttatcttcgccctgtcttgtcgacgtgtgggtgaaggctctggtgtaggctgtggcgtagattgacatgtcgacgtgcgtaaggggagtacatggacggtgtcgtactatctcctccgcttgtctcctttgcctatctctgtagcaagaatagtagaagtcatgatgagggctgccaatgtgtggcgcagagagtcaatggtcttgcctcggtaatgcattggttacttacacggaccatgccatgtggactgcacacgttaactacttgtcacactcgggtttcgggggtaccaagacccgggcg

SEQ ID NO: 118586 - DNA, 1144 bp, Zea Mays
ccctggtcttgagtagagtttcgtttgctagaatgtgtggattcttttgtgtattcctgtttttggccaccgtaaggggtgcctggcttagtactggtcctgctggacctttttttgtacatcttcttaatataatgatgcgcaattctcttgcgtgagaaaaaaaattgcattctgacactagatttcagataccagcgaaaaatggttcagaaccaggaaatttaggatcattccaccatacctatacaatgtttgtatcaactttccaaaaagttacaacaaaaagctttaatattcactttacgtgtgctgctacacatagctgaggatgtgtgtggcgttactgcattgtattatactctttttcttcttaacacaatgatctaatggttgaaatcacttggatagaatgatcataacagtgtaggatggtttagatacatggacacatggtagtacttgagtcgtacgaaaagcatttcccttactatgcagataatccccgctaacctagtgatgtagatgattagcggcatttgaccataaccaaaattcagttggatgttgggccaacatagattcactattaaatatgtactatgcagaagagcctaactttaaattgcagccttcttattagagaagcacaacctttgttatactactaagaactgcaaaggttacattacagttcgggtatcaatcttccataaggatcaaggactcaaactaacaataactatgattaacgtgctgataagggcattgatataacaatggattattaattaaaaacagaggttgatcaatgataaaaacttaggtgccattgtgtttaacaaggaagaaagatatcagtgccaacaccaagatgctaaattaaaaatgccatccaatatgaggcggataaaataaggcctagaatcacatgccagtgaagcattgatgctattttccacaggataacccaaggcaagactgagcaatttgccccccaaaaaatgcttaaatcagtatttaagcttaccaaatgtataagtcacgggctttctatcacggagagaacggccggtggtaagtccatctgatgtcaagtagctatcaagaaggagagcttctctctgttgctttttgagcaacc

SEQ ID NO: 118587 - DNA, 486 bp, Zea Mays
caggtgcttctagatcctcaactgcatcaggttcttcaggtagtagtggacctggtgtgggtctttgtgagctaactgtttaccttgacagtaacaatgtggctgtctatgaggatgattttgatatcttaaattggtggcatgagcataaactaacctatccaattctttcaattatggctagagacattatgtctgtttctacctcaactacttcttcagagtctactttcagtttgtctggcaggattattgaggatcggcgacgacgcttgaactcagagacagtggagatgttggtgtgcatcaaagattgggagctaggccaacagcgggcacaacatgctatggtggacaatgaattagaggagtccttcaaggagctgtggctggatgaacgaaggtgctggtgctactgacactttagcttgatcttgtgggttgagagttgagactttggttggatgtaaagtgtttctgatttct

SEQ ID NO: 118588 - DNA, 573 bp, Zea Mays
ggcgcggtctggggtgtggcgtgcgcagcacaaccatcaccgccgcagccattctccttgacgttggcctcttcaccaacgcgggcaccgtcttcccagagtaccaaagtttggtgtttgccactgtttctgagtaccaaagtttgaaaccagtgttctccacctccttcgctttttgccccttctattttgtctcctggacacataggatattaacacacctcctgctcactgcatcgactaactctctcagcttacctgtaagggaccttacgttccaactacctacacggatcctagtcggctcaactagcttccttacccctcgcacccgttgagacagatgtgaagacccttgcacatttgtcagtacacccgggcgccgatgtagcgcgccactaaggaagcgacgacccgatccttgctcacttgacaccgcatccagatcacgacacgacgcgccaccaagggggtggtggcccgacccttgcccatttaacaccgtacccgggttccgatatggcgtgttgctaagagggttacgccccaacggttttctattgggtttcatct

SEQ ID NO: 118589 - DNA, 571 bp, Zea Mays
gcggtgttctacactttcgtccataaagtgcttcaaatgctgccatttagacttgcttgataactattgttatacgagaattctgcataaggcaaacttttatcccagcttctaccaactttagagcgcaagctcttagaatatcttccaacacttggttcgttctttccgtttgcccatccgtttgtggatgataagctgaactaaagtttagcttggtatccatggactcatgtagtcttttccaagagcgaggtaaattgggttactcgatccgatacgatcttctttgttactccatgcagacaaacaatcctcgacatgtataattctgctaactgggctcctgagtaagttgtcttcacaggtataaagtgtgccactttagtcaacctgtctactgtgacccatattgaatcatagccatcccgagtacagggtagtccaactatgaaatccataccgatttcttcccatttccattccggtaccttgagaggttgtagtaatcctgctggtctttgatgttcgactttaactcgttgacacacgtcacacagggcaacattag

SEQ ID NO: 118590 - DNA, 619 bp, Zea Mays
gttcgcccgaagcgttctcgccaagacaatcagcccacttctcctgctgaggggaagaaaaagaagaagagacgtcttcgtcgagtgtctagcttggatcaagatgtcggtccttctgttcctgttgctgaggaaatgccagtgcctgaatttgttgtagctgaccccaatgggtgtgacccgactgctgtggatcccaatgggtgtgatcctgctgaagttgaccccaatgggtgtactgtccgtgttgttgatgaagatgatgaagaagaggatgaaatccctctaattcggaaagaacagccagcattacatagctagtggggaaagtagcggtgttccttctcctgctttgtctgccctcattggtctgcaagaattatctctgacgaactttgatcaaactcttgaagacatggttccagaagatttgttgtcagagccggcagatggtggcgcgatggatgtttgtgctgatgtgcccgatgccgggttggggtcatcccaggcagcgtcccgtgcctcatcgaccttagagcgcggttttgagggtcaggaggctggtttggattgccctgctcccacggaagtgactgagggtccttcagctttagaggtg

SEQ ID NO: 118591 - DNA, 316 bp, Zea Mays
tgaagatgcacttctctaagaggcatgaagctaaaagagaaaggtcatcgaccctccattgcaaaatgatcagaatcagctcgatcaagagatccacattctcaaagttcttcattaacaggtccaaaagcgcaaggaaaagatgcttcgagtctcacaactctagaagcaaattgatgaagctttagagcagatgcgcaacataacgcagcagatcgaacaaccaaaacaacaatattaccaaaaggaccttcgacatgaaggccacaactatgatgatctttggcatgagggtcccaattatgatgatttcttt

SEQ ID NO: 118592 - DNA, 274 bp, Zea Mays
gttgttgcaattaatttcatactaaaaatcaatttcctttatcatttattcatttttattgaactctggatcatgcgcgctattaccgaaaagctcaggggctactcgcaagattccgtagactcagtccacagccatggtggacggcgggttattttctagaaaatgcaggggctcttataaaagatttccagccgaaggggtatcgagcgggccagagccgtccgatcacacctgatcggacgagattagaacacggcgcagtaatatgttg

SEQ ID NO: 118593 - DNA, 366 bp, Zea Mays
acacaatagatgacgtgacggctacatagtcatgccatcacttcaccccacaatcccaactaacaaaataactgtaaccgaacttggcatttagccgatcgattcctagcccatttttcataccaccactacacgatatgcctaatacgttaaatgacttgttcacaattcacatacatctttaccaaaacattcccacatcgcttgcaacttagcctaagcttcactacacaatttcaggacatctacttaattcatgaatatcatcgtcacacacatcgactcgatttgaattaaccacacatgtctatcacataaatggagcatttcaacaaatatcctaaaacaaactaacttcatcacaca

SEQ ID NO: 118594 - DNA, 527 bp, Zea Mays
ttaaggaattaagggctatagactgaaaaaagtaaatcactttgttgcattaaaggcaaaacctttcatgagcaagctctatttgccttaagttatgctagttcaggtcagttgtcacttaggaaagcgagatattcttgagactgaaggcttctgtggctgctatttgtattcgtgttattagttctttctcgggatccatccccatcatatgcatgcatgtgtacttgcagctgctctaaccatctgtgcatgcttcacgtccatgtatgttcttttggttctttcgttgctctctgataataattttcttgccccaacccaagagcagtgcaaagagtattctcgtctatacttagtttaataggaaaactgtggttttgcatgcactagcgcccatgggtccccaccaccaccaccacgggagtatagcataagtttgtcacttcaaaagaaacattaacaaaatggcttgagaacctacctttgacaactaggtgcattcctttctcacggttctttcagct

SEQ ID NO: 118595 - DNA, 339 bp, Zea Mays
tgatcccggtcacagtcattctcacatgggctatagtgtcgttgtgtatgggtggggtagaagttcgaggttttctcgatttgtgtgataatgtcttcttcttaatacaatacttaggaattgtcttaaccctgcaagttgagtttttaacatttctctcttagtctatgctatctattttatcctagtcaaaacctatacaataaaaccaagctttctttgcatctaaggttttgactaagtgttgttatctcgatcgcaaaggagttatacaatctaagctccaaacctatctagttgtcaataactaagctaggaaggtaaatcacataatttggc

SEQ ID NO: 118596 - DNA, 716 bp, Zea Mays
cttgcccccaagcggctgcagtcggaaaccgagcacgcaaagcttcctcatcttcccaagtagctaaagcatcatcgccttgagaccacttaatgaggacttgctgaatttgtttgcctccccgtagaatgacgcgtcgatcaagggcctgtaaaggaacctgaatgtgacttaaagtgtcaggtagagcagcactgactggtcgatttcccactgcacgtttcagttgagatacgtgaatcacagggtggatagtagcagaagaaggcaactgcaatttataggccactttgccaactctcgcaagaatcatatagggcccaaaaaacttgaagcttaacttgtgagctgccctgggcgccacagaggattgcacatatggttgcaacttgagataaaccatatcacacactgcgaactccctctctgtccgtcctttatcagcttgagatttaatccgttgttgggctcgcaacaggtgttgctgaatgagcttaagcatcaactccctttgctgaagccaagtaccaaggtctagttgagtagaagcatcagaaatattgagtcccagatggcgtggtgcccttccatacaacacttcaaaaggtgaacgccccaatgaagaatggtaggtcgtattgtaccagtactcagctactgacaaccaagaagaccacttagaagggcaggcatgaacaaaactcctgagatatgtt

SEQ ID NO: 118597 - DNA, 312 bp, Zea Mays
tgagacttccttcccatcttcctacatattgatcgataggcatccatgtcgtcatgatccttcacatgttgttactcacagaatacaagctaatgtagcagaatttgctgctaggttgtgccggtgtacttttcaaaggaagagaagcagatggacagaatttttgaccattcttaattcagtggtatgagctgacacatggtagctatcttgtaaaagacataacatgctttatgacatacgaacttgacctggataattaatctttctgtacttagccatttattataagcctttaatccatcattcttg

SEQ ID NO: 118598 - DNA, 507 bp, Zea Mays
ttcctgttgcccctacgggtgctacttagggtgctggtggtggaggagtgcccgagggcactgtccctgcgggtgctgcttcaggtggcggggccgaggtgcttcttccagttagtggtctttctctgatgcagtggatgggcatgaagttggatacttttgatggcagtggtactccggtcgaggcgacagattggctaacttacatggagaataagatgaatgtcttcgagattgtgtatggtgatcgtgttcgctttggcacacagctgctgaagggagaagctcagattttgtccctcatgtggcttataatgagatggagaaggcgagccagttccgtcagggtctgaaaccttctatcaggcatgccctgggagcctttccgttggtgaacttccgtactacattggagcaggcactgggtgtggagatgcaacaccagtataccatggagtcacagaagtcttcgaatgttgatcagcctcatggccaggacgcgaggag

SEQ ID NO: 118599 - DNA, 446 bp, Zea Mays
gcagaggtggagtatggctggagcaaaagggatatcctacctgcttgctatggctcctgggtcggagcagatgaatgctatgtgtgggttaaggtcgtgtatccctctgtttctagtggtgtaaataagtagttttaggctaggttttttggcttcttagttgcctaaaacctggctgtttcttttgaacttaacttgcgaacctccaatgaacttcatttgagacaagtgatgcccaagaaaatgggggtaaactgacacagctatcacttgcattacttgccctatgcgcggaagaatctgacacagctatcacccatgaagatttccggttaacttgtggaaccggacttcatttaagacaagacaacaataccagtgttgagcttgccactcggccatagcacacacgagaacacgggatgatcaagtaactgaacagaatg

SEQ ID NO: 118600 - DNA, 847 bp, Zea Mays
gtttagtccaggaaaagggccacattctcagggtggtctggggccatgtagccgcatagcctggtcctgcaccctaagccaacacattccaccaccctagaacaactgatcgagtaccttagaatgaatacttagaggtccggacctcatccaaactcaagggatgctccaaactaggatcaactagaataaacattattgttgaaggattaattatagtcgcacccgaggcggtatccgatttctaaatacattcatgaaacctggattatgtttccaccttgtcacccggtttcgggatcctcccttataaggggtaaggcctaggttgtgaagggctaggtccaagggagaggaacacgttctgaggggtggtccaaagtcgtgtgatcgcttagcctgatccagcaccctaagcccgcacactccaccatcctagggtggttgttctagaacctaggactggcccctaaaagcatagaccttatcctgatcaagggataggtcttgacatcttgctcagcgaggttcagaaacaaaatctagaagattgaaagcatttgaaacgatgaccagtagatacgctgttgagcaccataacaaggccatgtgcagggacaccttttttgtaggttaccaggcgaggaggaggactggagttgtcacaaggaagagcggtgccaaccgctgctcccctcaccaggcgaagcccggcgctgtcgcgtctcctgcgacacattacgtggaccactggggaaacccgatatcgacctccagagtacaatgcgcctcagcattaactgctaacaagatgtatactttcccactccaacggcgggtgctacga

SEQ ID NO: 118601 - DNA, 626 bp, Zea Mays
ctagggttagggggggaaactaatgggctccccaccgccgaatcgagatccacggcccaaactcgctctcacgtcttctcccgactccagcgcacaagtccaacaagtattctactgttttactggtgaattcttcctaaaaaactccaaccccaactacactgatcacgaaagaaaagggaaaaataaatttaacttcttttcagaaaatccgaaaagaaagattaatgaatcaacaaaactcacacataaagaaaagttcgagtacttctgccgcattagctcctcaagctcctaggattctaagatacgcagcagacgacactctagagtctggtcttgctacacaggaatcggctctagctcgatttgatggtctagattccgcaaatacttcctcaacataaagacatggaatacatggtgtactctgatcatagattccgacaattacatgtgctaagcccagctgccaactcggccaagatagtagacggtcctatatacctcggaccaagctttcctgacaccaaatcaatcattgacatatgcaagtacttcaaggaatgtatatatgaatgcaaggcatataatgttcctatagcctaaaccaaacttagccaaac

SEQ ID NO: 118602 - DNA, 371 bp, Zea Mays
gtgacctgctctcgctctccgttgatcaccggagtgactgccacggtgtaggacacgaattcgttgcgccagtaactctccccctctccggccgccagcacttctcggccaaattgagcgccaccgttgttacgctctataaattgagggccgggttagctgcgctatgtcatcacgaaaccaaagcacctgttcccaccctcaatcgttcgccagaactcacgaatttctaacttcccccaaatcggttcaaacataccgcgaagaacacctcgccgtggtcagccacttccaggttcattcatgccctctgctaccttgtttcagcattagtatgcttccctgatgctcatccatccacccaattgagc

SEQ ID NO: 118603 - DNA, 583 bp, Zea Mays
ctctagtggaattgggaggtgaggttgggcctatgcggtcacaaaaggctactgattcactgcgcaccactaatttggggagaggtggagagaattccgtgaatttgtgcttcaaccgagctcactggtgaagtggtgagtacctcgtcgtgggtggcggggctatttataggcacggtggtccggctagcgatccatggcctcggattacatcgtcagtgcatggttacaacgtaaggaagagacacagtgagggaggagcgaggcatgagtgacacggcagcggaatgatcgagccacggtgaccgccggtgaattatctctggctaggctctggctaggttcgcggaattgtgccacgtccgaatctatctccccgcggtcgatcctttcccaaatcactcgaacacatccaattccatagtgcccctgatctttatccttgtttttcagatatttcagtgttctgatcttcagtgctttactgaaccgacgccctttcaccctccttttctcttaattcgtattaagaacaagttgatctccattaataaaaattgttccctgaacaacagtcttcaaa

SEQ ID NO: 118604 - DNA, 523 bp, Zea Mays
cgccagtgaagtcctccgccatggtagtcgtaccgtgccgccctcggggagctaggtggtgggcgatgtcgaagatgattcctgggccgtagatttcgtgtgtaacggccacgattagatggggataccccttcggttgtatggcactcagaccattgagatcgaatcgaagggtcaaatgtgggtcacgtttcataaaaccatagctgtcaatctcgcattgggcgtttccgattagcgcatgaacagacccccatcgcggcagtatgatttggccatcgatcggttagctggcggttaggatgtcatgagggccttgcaccgtagatcctccatccgaggactcgtatagcatactggtcttctaactgtgccaatctaatctaaaccatccgtgttcaatctggtggcccatatgcgacggtaccccttcagtcagccacctttacaaaatagccctggtgcttttacttatcaaaccgcagtccaggttattgataaaaccattacacaggagtcctgg

SEQ ID NO: 118605 - DNA, 512 bp, Zea Mays
tcaaaaaaaagattaaacggtgtgacggacaccaaatttgcatgagtcagcagtaaccgctagttggtcagttggggggtataagaccatcttcagcaaaccccaagccgtgtataggatcatataaaatattgctttgtactgtagattatactgtttgcggagtaaagtttgaaatacagagtgaaatagggagactgccggagatagtctaaacaccccccaccaaccggacaatagtgctctgtccttatttaatagccaaagaaattgtatagtgtgagataaaatgtatagtaagcgacttgaaagtcatatttcggaagattagcggtcctataagtgtaaacaagagtatgtagtgtgtgcccatttgtctcactcatcttgagagtcaagtaataatttgtgtttgctactcttgttgatcaacatcatctaaacagtttgacgacgatcgaaatgtggttatctcccgaagaggctataggtgacttgacttgggatttgcc

SEQ ID NO: 118606 - DNA, 464 bp, Zea Mays
ctggccttgttgataatactctgaagaaggtcagccgccaagataaacaacagtggtgagagaggatctccttgtttgactccttgcttacaatgaaaggttttccctgggactccattgagtaacaccgaggaagttccagaatgtaggatatttcgaacccagttaatccactttgtactaaatcctttatgagtcagaacctgcagaatcagttcatgctctaaagtatcaaacgccttttcgaaatcaagcttcagcacaatgatttatttttttgaggaatggcataaatgaatgtattcgtaggcccaagccaagcaatcttgaattgttcttccttttatgaaaccatattggttcctgtgaactaaccgtgtcatcattgtttgcagtcgatttgccagaaccttcgtgataattttcatactattgtttagcagtgatattggcctaaaatctcc

SEQ ID NO: 118607 - DNA, 871 bp, Zea Mays
atagcctccctgagctttcttgaaaggtctgatcatgtccagcccccagcatgcgaacgaccatgttacgggaatggtctgcagctgctgcacgggtaagtgatgttgctttgataagaattggcaagcttcacacttctggaccaactcggcagcatcgcgtttcgctgttggccaatagaaaccagatctgaaagccttcccaaccagagtccttgacgccgcatgcactccgcactgcccggcgtggatttcatctagcaattgcttcccagcaaccgagtgaatgcatttcatgaggactcctgtcgcacctcttctctacagtaggccctctatgatggtgtagtgggccgactgtctcgcgatgcgttctgttgcagccttgtcatccagttcttcttcattttttatatacctgatgatgggctctctcaagtattagggtccgactctggttggcttaaggtgttgcactcttccacctgacctgagaggaagcttggttttgatatttcttggacaaagatcccgggtggagtctgggcccgactggatcccagcttcgacaacgcgtctgctgctgtgttgcggtctctttccacgtgatggaactccattccttcaaatttgtcctctagttttctcacggctgcatagtacttgcccatggaattagtcgagtaatcccagtctttgtttatctagcttatgaccactagcgaatctccatatacatcagtttcctgatgccgagtgatacgacgatacttagcctgtggatcagtgcttcatactctgctgcattatttgatgctggaaatagtagctggagtgcatacttgagttgttcacctccaggagcaataaa

SEQ ID NO: 118608 - DNA, 433 bp, Zea Mays
gttgtgtggaaggagcaggtcgtcataataggggagccgagtcaagcccgacttatgtgtccacatatgctgctcaccatatcccacagaaccaccttctgtattggccacgagcccatctatccgttgatgaatttcggcaccagtcatcgttgcaggtgggcggtctgtcactacgacacctttcgtaaagttcttgatgtctaggcggaatggatggttaggagggagaaattgtcgatgtttatcgaacgacgaatatttgccaccctttttcaaccaaataaaccaaagagcttccttgcaaactggtcatgggaacttaccgtgaacacaccacgcacagaatagcccatacaccggtaagtcatgcatggagtagtggtaccaaacatgcattttgaagtttgtcttcgtagctcggtcatacgtc

SEQ ID NO: 118609 - DNA, 515 bp, Zea Mays
tttgatacaaaaagttaattcagtcattacatataatctggtgcaaatcgatgccaaatatgctctaacaggccgactgaatgagctttgcaatggtacagtgaccggattggatcaggtttagatcccctcgccgccgacgtgctgtgcgctcggattcgtggtcgccgttggtgattcgcgctcggatcagctggataacaccgggggtccgtaaatatcatgccgaggatacactccggccactattttactccagccactgtacccgagcagaccacggtcgatttggatgggttcgccggagatagccacttcgcggccttgctccacgttccttggcacattaatctcatcgccgtgactcacgttagctcgtctggtggtcgccgaggagcttgccacggtaattgccaccaatcgcgcacgccagtaaccttcttctccggccgccatgcgtctttctcaaattcactggccaccgctgtgggagcctataaattgctgacctcgcc

SEQ ID NO: 118610 - DNA, 449 bp, Zea Mays
ggggatatgggctgggctcgccgcgccgagaaggaagctggacctggacgggctttgtcagtttctagtgaccaccagcccaacattcatttcgcgtccttttgtccggtttacgacggtcatacggtgtggaaattctgtctcgggctccggcacgtggtattactaccagctgcagctggtactccttcagttcagcccgtagagtatcagatccagatgggtcggtcaatacgtacgggctgcggagactcgcctcgccctcgcctcgcttgtaccggatccagtcaatacgcatctttttatggtcaaggtacggcttgtgggctgtttgccttcgttaaccacatcgcacgtacgtatgcagccaatgcaaacttgcgtcactgcttgctcctaccttgtatttgtatacgtacgtattcttcaatggcgtcgcagacagtcac

SEQ ID NO: 118611 - DNA, 506 bp, Zea Mays
ggaaggatatacattctcacagtggggttgttggtgctagagcggcgcaagagaagatgaagcagaccgacgagaaccacgacgtcgacgtagaggaggcagacgaacaacgagcattcatgatgacgcttccaaaaacctaatacggcccctaccccgtgtagggacacaaagggacgtaggcttcggagatcctgctctctcaatcccgatggcacattgacaacatgatggggaagacgagggcagcgcaacgtaatggaacaaggagatgaaaaactatatactggggataggcacaatgcaccagtaagggcggaggcgagaaatcgtcggaccattgagaggcatgttgtgcgcccgcgcccattgcgccaccctgcccgacgaggctagcttgtgtctgtttttccttttcccctcctcaataactttatccaagtggagacaactaaattatttaagttggtatcactccacctgacgtagcaatgtggtactaaaac

SEQ ID NO: 118612 - DNA, 824 bp, Zea Mays
ctccggatgggctggtggaagaaggtgatcgataaccctccatgtcggtcgtgcgaggtatgtcgttcatgatccgagccagtacactgtcgacctaactaagagtctacatgtcccgagcgaactcaagctacagattccgtgggagaggtagacgatcgcacaggagcctagcgttgcattcagccatctcaagctcacgctcctgagcgatgtggtggttcctgtgcctaccattcatttgcatgtggaatcccctctcgttcagggactcatcaacctcgaacccctcgtccctagaaataggttgagttgggtcctgcttaccgatttcgatggagacgtgcatcgcgcttgcgaaggttcctccccttgtatggtgggctcttcgtcagagatgggatcattgtctacccccttgatgaataggacgtcggggtagtagaggggaggctctgcctccactagcttgatgattggacccgcgggccgagtgaccatggagttaatcaatcgtgttctaggggtcttgatggtggtagggcccttgactcctttcctcttccaactgatttgagtctagacccaagttagggaggtcaatacagagttcaccctgttggagttgccgtaacatatggccgagatggaggtgctggtgcagttctacgtccggtcagagcaacggtagtcccgcgcgacgcatagatgaaacggggcccctgaactcgggcatgagccggcgtagctcgcatcgcgaccaccagagatttggtcgtgatcgtcgtcgaggtcgccctaggccttagcgagggctccttctt

SEQ ID NO: 118613 - DNA, 381 bp, Zea Mays
gaattgaattaacccgctcaagcacctccaaagcttcatatcatctcctttcccctgcaaagcttgtcaagcatattttggtccccatctcttgatgggtccatcaaggttagtcaacaaagatctaggaacccaaatgtcctttgtgctagcgcttggtaaacttattacctttctagcacaagttgcaattttgggttgcctatttatatatgaatcaattgacaagctatgagcgggatagttaccaatgggacaatccttgcataggtgtcccttcttttggcatatgtagctaaggcgatcttcatgttttgaggaattcttctttccttgtctcttgcttgctacatggttagtaaatattttcttttctaaaac

SEQ ID NO: 118614 - DNA, 430 bp, Zea Mays
ctgtgtaatacgattttatcgagaacttcccatttggggtaaggttccaataaaatgtatcatgttcatgggacaactccaaaccctctatgtgtgacagcaaggaaatccaatccaccaagttggatccataaagttgtcgtcgccaggaaaaattaggagggaaggaactcatagctttcgctatagttattgatttgggtcttgtaatgttatacagggagtgatattgatctttcagcgagaccctgtccagccagctatcctcccagaaccttacttgagatccgtctttgaccagaaaggttccgaagcgtagaaagtctggttttgccttcattagacaagaccaaaagtgggagtcaccaattttccaatccacttgagccagtgattttgaacctatgtatttattacggagcaattgttg

SEQ ID NO: 118615 - DNA, 319 bp, Zea Mays
gagcgattagtagagcccggggtcaagccaatgaccacctttatcaacggttggacacaaagcagggagaaaaggatatctataggatggccaagattgattaaaggaagacaagggatgtcaaccaagtcaaatgcatcaaggatgaagcaaaccaactattagtgaagaatgaagagatcaagaacagatggaaggagtacttcaacaaattgttcaatggagggaatgagagttctacagtagaattggatgaaccattcgatgacaacaataggggttttgtatgaaggatacaagaatgtgaagttaaggaggc

SEQ ID NO: 118616 - DNA, 294 bp, Zea Mays
tacatgttttcttttgggtttcatctccaatagaatggctaggttcgtgttcaacgttagagatatttacataaacaaatcactctaaaatatgatttatacctccatgtttggctcattgactggacatagaatttcttctgcttcacgcaagaggttcattcgaaagcatgatgtagcaaacaagtaccgggactccggcagcttcttcccttcatataacatcagaaacaaaatccataaaccatccaaactacctttatataatatatgtgttacatggcgagcatataa

SEQ ID NO: 118617 - DNA, 330 bp, Zea Mays
cttttctatagagattaagccctagtactatgaaaagttttgtgaaaattggacccaaagatggactgtcagactgccatatgtctgaattcagactgacaatatgattaagcaatctttgagctgggattcgagcatgatctagtaagaatttatgagtgcttgctatagcagaattatagctggtataaagggctacaaaattgccacaaacggattggtgagtgtttgcacaaaaattcgagatcggggcgctgaaacctgtcggtcagatgctctgaataagaattcccatggtacagtgccctgaaaatatcccctgtgcactga

SEQ ID NO: 118618 - DNA, 297 bp, Zea Mays
acacatagatagacttagttaaaaaggaatagttatttaatcgggttttacaatcattcacagcattctactgcaagcatacaccccagagaacacacatgaggagacagtttaatcacaattacaaattatactactttaatgacgttggttacttagtagtattagcagaaagccaaagacatgacattaatcattttgtttccctaatatataactgcacttgctaactgttgattaagctaagttacttattagaccttaacctatttagttcacttacttagtgagatgtgt

SEQ ID NO: 118619 - DNA, 414 bp, Zea Mays
cggccgagctccggcgagctgtctgtgccggccgattggggcaaggactgacgtccttcttcggtcgaaaccgaattcacaccccggccaacgattcccctaagttaattgcacaattggtggattaatttggtctggccacagagagcgcacggatggaccaaagattcatgtgttcccgacggtcaggggacttctagcccaattggacggttcagtaagcatcacagacacggggagaagcttaaacgaagcagagagagggttggactgactggaaaaatggctgacgacggtgaagcttgtttcacggtggcggaaagagatttgggggaaaacgcgaattcgagctcactggtggatgattgtggccgattagcggtggctagttagctggcgacctcacggagctag

SEQ ID NO: 118620 - DNA, 375 bp, Zea Mays
ttttgcatgagaacacagcagtacttacaaatttgttgctccaatcaaatgatgtattactttggatcaatctgcaaaagatatctagcctattccaactagcttgggactgtaagctttgttgttgttgatgatgaaaacgcgagatggcccagcaggcgattgaaatttctgtgacagtggggtgtttttcttccctttgttctattagcactgtagcacacataagtctgacgagcatatagtttcttgatataactgttggacatgtattgtagttgtgcaacggccaggaaatctctgataatatgtacattaggtattatttcatcttattctctactgacttttgtactcgaaattattacattagct

SEQ ID NO: 118621 - DNA, 633 bp, Zea Mays
ttgccctctcccccatctcaacttctccatacttactgaaacaacctaacagtatcctccatacagttacattaacctccataggcaacccttctattatttgctcagcctcacacaaacgtccagccctacctagcatgtctatgatgtacccaaaatgcttgatctctggatctatattgtactcataaaccatgcttttgaaaaatgctaacccttgctgtaccagacccccatgactgcagacattgatgacactcaagaaggtgattctgttgggcttaatccctgctcttctcatctctgcaaacaactcaagtgcctcaactgacagcccatgcattgcaaaaccagaaattattgatgtccatgacaccaaatttcttctatccagcatttcatcaaacacctttagcgagttttgcacagagccaatcttagcatacaagtctatgagtgaattcccaacccggacatctgacatgatacccttcttctcacaatagccattcagcatctcacccataacgatccctccaagattagatatcgcaggaataactgctaaaacaattatctcactcgggctaatgcctcctgccatcatgtggcggagaagagtaagagcctctg

SEQ ID NO: 118622 - DNA, 664 bp, Zea Mays
cttcctgaggtgttctatgttccatgagttcccaacttccgtgccgtccatttgagtgaggcgatatgatcccggccgagtgacctctgctactatgaatggtccttcccatagaggtgacaacttgtgctgtccctcccccgttagaattcggcggaggacgaggtctcccactgcgaaggatcgacatcgcatggtcttatcgtgataacgcctcaaagtttgctggtaccgtgctaattgaattaccgtgttcaaccgttcttctttgagtacatcaacatcctccagcctagtagcctcggcttctgctatgctttcaaagaccaaccttggcgccccaaacttgaggtcagcaggtagtactgcctctgacccgtagaccatgaagaaaggagtatttccatgcagagcttgactaggttgagttcttaggctccaaacgacgtagggcaactcccttatccactttcctgcgaacttctcatttttatcgaagacttttttttctgagtgcctccaatatcatcccgttagctctttcaacctgcctgttggctcttgggtgtgccaccgaagcatatttgatctgaatgctcttttgttcgccgaaatcgaagaattctgaacttgtgaagttggatcctaggtcagttatgatact

SEQ ID NO: 118623 - DNA, 542 bp, Zea Mays
gaagatttgatcaccattatatggtcttcaactttgctgcagagatataccccagaactccatgtaccagtcacaaagaagctccaaagttgcaccaaaaacactaaaattcagatttagtaagctgcactaagtctgaaatccaattctgtcagctccactttagaccaccttttctccaagttccaagtagctttatgggtatgacctttaaccaaactttcacaccaacatatggtcttcaaacttgctacaggaaattcagtccaaaaccatatagattaatcacaacagagctccaaactaagcactaaaatactgatttcagacttgggctaaatccgaaaactcagaattcaaacagctctactttgagccacttttactccaagctgcatatggttttaggggcatcccacctaatacagtatgttctcctatgttcatgctacaggtttttcatagtaaccataatgtataactctatggatagagcagtagagagctccaaagttagttaattgacattattttcagcaaat

SEQ ID NO: 118624 - DNA, 665 bp, Zea Mays
tggacatctaaacagaaaacacaaaatgatgactgctaataataatgctaaaatatgacaatacatgattagcttgaggacaacaaacatagccaatacgagcagtaaaaaataccaataatccaacattagaatttagtactcagtaaaagaacagtgttccaactcatacctatttaaagcgaaaacctaatgggatgtgaactttgtttagtctaatgagcaagctgagaggaggacgactaccaaaacattggcacacagccacacagggtagtatacagctacaaaagtatatgttctatgtatgatccccagccaaagctacttcgtgaacctagagattacttaatcgaactaacaggtaagcatggacagatgaaacggtctgccatcaataacggtttccttccctaattaagacccacttagccacttagccagatgaagtcctcgtttgaaacccagttcagcgaaaaattggggttaaaaaggagcaagcgcgcggcgaacacatgcatgctactcgagataagcctaatcccgtctcgaactaaccccctgcgcgctcacgataagcgaagaaacgggcgtggccatcaaatgagcccaatcccagccgcaaatcgcaaagcttcaggactcggatccagcaccgaccaaaa

SEQ ID NO: 118625 - DNA, 542 bp, Zea Mays
gatgaatagcaggggagcgaccacccaaggtttataaagagggtagaagggcgctcgagtcctccctaggacgtggacgatggtacgacaaatttccgagttacgccacaatttctttgggaacaaacagacaagacacatgtccgacccgttatcagcccataatggaagacagtctcccctcgagggcttggggctactgttggggaaatgatccctaatccctgtacccaccggtcattgagtgcgctaaggaaagagccattaattgcaggggcccattagtcagtcggaagaggtaggtgcaccaaccttggatggacccacccccggtcaaacctcgtggaacctagcctggggccgggcatggcgaagcctgacaagggaggacaggcgtgtcagaagggaaccacttgagtggatcctgctcctggcgccagactaacccaccataaatgaccaactgcattaaccacgtctggcaccgagccacagcgtgggcaccggtctgcttcccactcatgacctactgacccctcagg

SEQ ID NO: 118626 - DNA, 660 bp, Zea Mays
gccgcgcttttgcctcctccccgttcgccgacttcggcacctacatggctgcgaagaacagcaagctcgctgcgcagttcgatgccgacgccaacacctcaggcacggacgccggcggtctattcgatggcgtctccatcttcgtggacggcttcacagtcccttctagccaggtgactgccgcgcgccaacggttcatctcatctcaagggttctcatacaccgcttaattatctcaccgcagtatgattactttagatgcaaccgtatgatcatatcgatttgactttttcccccggggttcgttttgtgtttggggtttggtaggagctgaaagagattatgctgaacaatggaggccggtttgtcaactacttttccaggcacacggtaacacacattgtttgcagcaacctgcctgatagcaaaatgaagaatctgaggtacgtaagggaagagggcctctcggttgccattatcacgctttctggttcgaccatggtgatcatgctgctgtttgatccagagcattcagcagaggacttcctgttgttaagccagcatgggtggtggattccctggcagagaaccggctcctcaactgtattttctcttgtccttactcacctttgtgtagacagcgtgcaaaatggcctgctt

SEQ ID NO: 118627 - DNA, 609 bp, Zea Mays
gcgggagtcactagattttcctggccttgtataaagagaggagagaagaacgtccacagggagccgcctagtcatcaccggcctgcaccatcgcccgagcgctgcaaggaacttggttgcgcaggaactcgcgttgtggtcttgctacaccagagaggcaccctgatggccggaaaatcattcacggcaaggagtgcatagtcggattgttgtgccgtggccgagttcctctacgtattggcgccggtaaattttctatccatagattcgtcgttcctatttcctgtatactccctagacatgccagtaggaaccaccaggatgatagatcacctaccacggcaatagcgcaaccatcatggttttcccctcgcaaccactggtatggcgccatgccctaatttgttattccctcggcaatacgattctagtagtggcggtacaattcgagcgctgggttggggagtcatgttctcaccggtgtttgtgggtctgctgggtgtgtctatggcaccggcggctggaggaggtagacggtacctggtgccgttgaactgcggggtgacggctacagaggcgtggccgcgagatccgaaatgatcggctcct

SEQ ID NO: 118628 - DNA, 286 bp, Zea Mays
ggaagagtcacttggggctacgttccatggcgaccccgaggaagtggtggagagggctcaagtccattgcgaactcgcgctgcagggaggcgaataggcgatcgtgtattgtagaagggtggcactggatgccataagcacgatgtcatcgacgtagagcaagaggtaaacagtgtcgtcgtcgcgttgaaggattaacaacgacatgtctgactttgcctaggaggcgatgcgactgtatcaggcttgtggcgcctattttaagaccataaaaaactacatgaag

SEQ ID NO: 118629 - DNA, 491 bp, Zea Mays
gctcggtgaacccgatcccgagacatccccgcggtagatcctctcccaagtacacggagagcattagagactcaccaaattcctggtgggtgcacgaaatcactcggggaagacgtggtttgaacggccggagatgaggctgtctatgacgtcgatctgcggcggcgcggtctggcggcaagttccccgttcccgatcaaggatcctggcctcggtgaggtagcgcgacggctggcgtggtgaccagatttggaaggcaacgacgacaaggggtgggtttagactgaaagaactgcgtgaccaagctactacggtgtagaaacagggacggtaaaactctagccggacctagataagaagcacaagccgagggagaagagaaacaccccttttgccttggcaaccacagcaaggtataaaccgaagcagctctaacatccattactatctcgacatgtacaggttatggctaaagtttgcatggacctgag

SEQ ID NO: 118630 - DNA, 763 bp, Zea Mays
tacaaatcctacccccttaacaagaatctcgtcctcgagatttaggaggaacgagggaaatgatggggaaaatctatgtgaagctcttcttctcgctcccaaatagcttaatcttctccatggtgactccattacactttgcacatctttatcaccttatttcttgtaactcgagtcaaagtatcaagaatcttgataggatactccgtgtaagtcaaatcaccctgaacactgagctcttccattggtaattgttcctctggtacacggagacacttcttaagttgagacacgtgaaacacattatgcacatccgatagattatcaggtagctcgagttggtatgccatctccccaactcacctaaagatcatcaatggtccaataaagtgaggagccaatttgccttttactttaaacctcctcattccacgaagtggtgacaccttgaggtatacatgatctccttcctcaaattccagtggtcttcttctattatcagcgtagctcttttgcctggtttgagctaccctcaaattctcccgaattatatggacttgttcttctacctcttgaataagttcaagtccaaagaactgtctttctccagtctgatcccaatataaaggagtcctgcacttcctaccatataaagcttcgaatggtgacatcctcagactggcctgatagctattattatatgaaaactcaacatatggtagactcttatcccaacttcctccatgctaaagggcacaagctc

SEQ ID NO: 118631 - DNA, 457 bp, Zea Mays
gtattttcggcctagagcgccacacaattccgcaaatcctattgggcaaatggccctgtcagcccataacaagaagggttttgcccgctgtcgctgaggtccagtccaattccagtggcaccggctgggttggtgtgggcttggtctgtgctgcaccactgcctgggccaagacgccaagtcaccaaggagaagaagaacgagcccggacggggcaagctagccgtgcgcatcacgcatgcatcaagttaagtagcgtactgtgtgtgtgatcatgctgcttaacaatagtaacagttgagcttgtaaatgttgatggccaacaccggttcggttcgaggcatctcaggagtcaagacccaagctgatgatggtggccatggccagtgtgcaacgggtggagcatgcgagtagtgggcaggcagggccaggtgacagcgcgaaatgggcaacaaggc

SEQ ID NO: 118632 - DNA, 330 bp, Zea Mays
ctggtctgaaaatcagactgacagttgcatcagatcaactttagaaccaaattgtgctcgatcgagtgaatgtatgatcaagaactttataacaaagttgacgctagtatgtagacaccaactttgatgcattaggattagcaactcatcacatgaaaatcaaagaaaaagtgccctgaagttgctctgtcagatgaactaaataagatcgccatggtacattcatctaaagaagatcgtaggtgcagtgcacccgtcgccggtgatccccacgccatgaaccgcgtcgcaggtaatattcaatatgactttgtttaatggtcgatcttc

SEQ ID NO: 118633 - DNA, 714 bp, Zea Mays
gggttttttgggcttttgaaatttcgggtatctagaaacaatacccgaaaacagtctcaatgtactgtaggcccgataattcgggtacccgaatttttcgggttcgggtttgggtagcccgttctacccagttttagaccactaactcaggttcactgtagtccattccattagcaaacaacgcaatatttaatataaataattaaatatacaacaaaaacatgcatcacaactgtacaataaacatttaggggttcaaaaattttcacatagcaaaagaccaaaagtgtagcacatcagtttctgtattttcgagaaagaccaaacatcacagtctcagactctcatgcagtcgtacaaattacaatcatactcgttatcagtttaccgtaaagcacaaaggcacaaaccagaatcaacaactagccaagcagcaagcacgcgtccacaatccacacaaagtcacacgcgtcctataatcttgtcctcaacagtccacaactccacaggcgccagccagtgaggcaacccaacaaggcggcatgtcaggtgaacaacaaggtagcagcacagcgcacatggccacacagcaaggcagcacctagcaacacacgatcacatgtccagtcctccactcagtccactatccggaccaccaccagcaaccaaatgaactaatgaaggataaggaatactataccagcagcaatagca

SEQ ID NO: 118634 - DNA, 483 bp, Zea Mays
gtaactggtgggagttctggttttatgtggcgccaggcgacgtcgaagggttgcccagtttgccccctgctatcttgtgctcgcattgttatgtggtgtttccacagtttaaggtggcaaagggggatcaagacaaggaggcccttcgctacgcagcctatctgagcagtggatgtgacttcgtggaagagtttatcgcttccggagtgtggcctttggcgcatgggtgggctttgggcgagattatacctcaccagatgccaaccatgtgagataaattggtgagaggtccagccttcgctgtagacttgcgttggcgggatgcggacgctttcgtgcgtgaagtggagtcgaaggctgttaagattgtcggaaaatttgcgccgaagactgaaatgttaaggagttgggatattctcagttcaaagtcaggttgaaccgtgtctttgaattgaataaatttccttttggtccctactcgga

SEQ ID NO: 118635 - DNA, 325 bp, Zea Mays
ggcgcactaccgtggggcagtggcatgctccttgtgcgacagttcgccttcttcgcactcgaagaccagtgcgccagctgtatgacttatgggaccgggcccccgtgtcataggatggataccccggtgtgcatcggggagacttctcgcgacatttcgaggcgggagcgggggagtctgcctttaaagggggttcatccctcgagtagcagccatgccttgcttctctcccactcgcggcgtcctttctcctccgagctctctgcgcccctttgccttcaaggtctctgctttgtgtcaccatagtttaccatggcattgtaag

SEQ ID NO: 118636 - DNA, 349 bp, Zea Mays
gagctagaagtcctgccacatctccatctcctccaggtcgttgatggcgaacgccagcttgccatccggggaggagcagtcctgccacgtaagtcgtggccatcctcacgcaaagggatctctcctaacggggatgatggcggtgctctcctcgttgaggaagagcatggtatgatcaaggatggggacctcggtctgatccaagggatcgacgtcacgatcgccagctaccttcctgccccggtcagaggctagggaaccggagatggagatcgccgatgccaccaccaatgtcacgccagcataccctggaccctccgtgtatgggccaacgatggctcggcatgcg

SEQ ID NO: 118637 - DNA, 827 bp, Zea Mays
gtgtttgatgatcaacataacttgtggactaatgtgtttgctagtgtttgtatttagggtttagggttagggtttagatgaattaccaaggaacaacgtagaggattattagttttattattagtttatttcttgcagttggatggtagtctttatgcattatgggaagttattgtactgtcatttggcctagatattttttatttggttttgagtatgtgtagcaatagcttgatgatttatgtttttagatgcgagtaaaatccttcttgtagagtaaactactataaacaattctgtttggtatgaagtacacaccaacatcatagcttttgtttgaaagcaagttggattaggttggggatcaaataaataagaaacaaagatattgaaaaattaaggaaagagtagaagacaatgagttaaaattatttgttactcctataaaacatgtatgaagcaagagtggattgtaatatgtgttttttattgcaaatagagtagacaactgtttaagtgtgagaacatatgtaatctagatgttaaaacatgtttcatttgagattttcttggaacatgtggtattgaaatgtttacatatatcagttatatagtgatccgctgacatgaataactatatagttgtgttgataaattatgaaacacagggaaaaatagaaacaaatgccggtttttacgaaaacatatttctatgtataaacacatttatcctgatgaaaagtgatctgctgaaatgtataagcatatagttgtgttaatggatcacgaggcatatgggaaaaaatacaagcaaagtgggattaacc

SEQ ID NO: 118638 - DNA, 365 bp, Zea Mays
ctcgaggatgttcccgagagtttttggaatcttcggaactttcttcgggtattaaatatgaatttcagcctttctaatatttaaatgcctacatttagtattttgagaactcaacaatacatatttataaatatagatatatttcttcctctcgtcgagcctgttccagatctcatatcctttttacgggatcgttaaaacatctctcttctcaaatgtcatgctgctagcatctaccccaccgtccatccaggcgattaacctcgtttgccctagcgtctatccctgtctacctctccaccgtttacccaagacatctacccatcggcactaccttcatctacctccatcaactccgcctcgcc

SEQ ID NO: 118639 - DNA, 313 bp, Zea Mays
ggcagtggaattcatacaagatataatatttaggtttgggatactaaatagcatcataaccgacctaggatccaacttcaccagctctgaattcttcgacttctgcgagcaacggagcatccaaattaagtatgcatcagtagcgcatccaagagccaatggccaagtagaaagagccaacgggatgatactggaagcactcaggaagaaagtgtttgacaagagtgaaaagcttgctggaaagtcgatcagagaactgtcatacgtagtttggagcttgagaactcaacccagtcgagctctgcatgtaaac

SEQ ID NO: 118640 - DNA, 850 bp, Zea Mays
agaaggtcggaccctggggttcgggtgaccaagggaatctctagaggagtagagggaatgccatacttttccacaaagctagtggctatgaaggagtgggatgctccagaaacgaaaagtacggtagcgggagtaaattcaacaaggaactcaccgagtactactcccggagcctgctgagctttctgggcatcgacgtgattgactcgtgcccttccttggtacggagccttattctgctggctgacggcggagggtgccttgggggcggatgccgaggtattcttggggccattcatcgagttggagtaggcgggtcctggtggcttcagctgcggacagttgttcttgaagtgactgggatcaccgcagtgccaacatgcatttgccgggggttggttgcttgccactgagggggaatggaaagagctctgactctgctggctgaatcgtgacggagtgggtccagctggtctactgaagtttggccccttgggtggaaacccaaatgatcgagtcttctggtgccggtcctgctgttgtgcccggagaacctagaactttcttttgagatgccccttctcttcctcctttgccctttcaacttgcatggccttgttggaaaggtgagagaaattgaggaagtcttggctagccagaattgtcttgagttctggcctgagtcccttcaggaaacgggccatcttcttgccctcggtactgacatcatctggtgcgtagcgggctaactctgtgaacttgtgcacatattccctgacagatcttccgtcttgagtcaatttttggaactcgtcctccttaagctgtacaagtccttggggcacatggt

SEQ ID NO: 118641 - DNA, 427 bp, Zea Mays
gtgaaagacattttgcttaaagccaaagagaatatcgggacttaccaggttgagagtatcaaggttgtgttcgagttcccagatgtgtttccaaaggacttaccaggtatgccaccagagcggaaagttgagtttgctatagagcttcttcctggcaccgcccccatctttaagagagcttacagaatatccggaccagatttggttgaactcaagaagcaaatcgatgagctgtcagaaaaaggatacatccggccaagcacctcgccttgggccgcccctgtcttgttcgtggtgaagaaagatggcaccaaaaggatgtgtatcgattatcgagctctgaatgaggtcaccatcaagaacaagtaccccttgcccagaatagaggacctgttcaaccagttgagaggagccagcgtgttctcca

SEQ ID NO: 118642 - DNA, 765 bp, Zea Mays
cacatgtggcttaactggagcaaagtacaccaaacttggaactcaagaccctaagtaagtgctacccatcttagatgtcgtaccttaacttatcatgcacatataatggggagaattgcccaaaccctaattcaaacccctttggacaaatggagcactagaagtaagtatgaacaaaagggtatgaaaaccacatgatcatgacttgggccaattataaatgatgtagtaaacttaataccctacaaatgatagtaagaaagtgaccccaaaaagaattcagaaaaaaccccaaaaggttcaccaaaaggttgagcacaaaagaaaaatcagaattcttctaagtccaaaaccaccccctttccaaagatcaaacatgttcaccctcattcaaacttcaaaaccatttgacccaattgacaaagtggcgccaaaatacctctagaataccctggagaaagttgaaccccaccccaagtcgtttgacatgacttggcatagcttttgtcccggtttggacagctgggatagaggcaacttctcacctctatatctccctaccccagccgtatcttggcttgggactcacatcaaaaaggtaggatatggtgtagggaagagaccgtacacagtggttttgccaagatctgcacgctaaggtgctccaatcggccgttgaaccatggcagaagcaaacacacacgtgttcgacgcgggctgacactcgggggcgcgctcagagcacgcccgtgcgcgaacccccgc

SEQ ID NO: 118643 - DNA, 578 bp, Zea Mays
agctgatgaaggtaaaccccaaatttcttcaaaacatcagcaatcatcccattcaaaggaaatcttaatcctgctttaaagaagcttttgaacactaccacctcattcttttccggcttcggagtagtttcctccccgccaaaacgaaccagctccttttttgcttcgctgaattagcccagcttcatcatttttggaaggtcagcttcagtgatggtggactttccaaagtccaaatgactaggtttagttggtaccccgtagctgaactcttcctcagaaccaacttcttcaacatcagcttgtgttgcttcggcagcaggtgtgtcctctgctgtaactagcccagagcgcctcatcgcttcagaaattggaacagtttcagcagcttcggcctcatctccatcacgcccaactctagcagtagagcgcactctggccatttgattttgaatttattaaaaattccttgcaaattaataaccttttttccgaagctcttcttctgacgaagtagagattaaactggagcttcgtttgaatgcaaaagtcaagcttcggctatggttaaaattttg

SEQ ID NO: 118644 - DNA, 569 bp, Zea Mays
tatatccagttataaggaaggggttcgaccctcagaactgttcttatgtggaccttattcataaagtttgcgatcattattactatctcaccgcccatgcagttttattccctggctggtatagcgacgtccaagctgagtggtcagacccggcaactagacgatggggtggtttgaggccatgaagtcgcttggtatggccaagtaccataagcctacatgcccaaccgccctgcggccgaccctgttgcgtaaattaaaggataaggaataccagctggtggaccctatgggtgcactactaaaaattcctagccaagaatgtgtgcaggtcgagtcccagttgggagcgccccttgggggtcacgacaccagttactacttaagaatcctggcatccagccccgacacgtcgaggccatatcctaggggggccaagtaccaaggaagaagttagtaacagtgcacacaacaaagaaaaagtggcgtacaaataagttgtaatatcacccggtaagtagtacctaaagagtatcttacaaaatcaaaggtatattacaacccgctcc

SEQ ID NO: 118645 - DNA, 641 bp, Zea Mays
tactaaactgccagtgatgtgccatttcttgtagtcactaagatctctctcaagcttcgaaaatccgatacttttggacaagatatctacgattgtttctctagcacgatcaagcatacaacccaaaatttcttcgtgtacaccgccaaagagacaaatccaggctgatagccaccggatatagcagattccctcaattccgaaatgtcctcttcgagaagctgctggccgcccaggtgccgtaagtcgaagcttttactttccgaagaggcttcttcagtgctcttctcttttgatgccaaagttttagcaacaattaccccatcactgttcctctcaggctccacacgagggataattctgtcaatttctgataaggtggtcccaagaggaccaccactacttttggcctcttgaggcgcttcaacagcttcatcagcagcggagaggcaattcctttttgtattgccggcgagggagtatcgaggatggccctcataatagtcatcatgcgtcatttcttatgtgcatccacccgggcgccaaggacccttttcaatctctgcttcgacgacttgtgacaccccgggtgtctatttcatgttttgtcgggagacttgtccctacctcggatcgtcagt

SEQ ID NO: 118646 - DNA, 1279 bp, Zea Mays
ggacatgctttctcttccttttatacaagatatgcaaagagtgtatataagaggaagatttaggtacatatgtaaatgataggaattagttataccctttttgtacctttacttgtatacgctctctccattgtgcttatgtccttggtcttgtttgcttaagacctatgcttaatgacagtgtgtgaaaatattttgcacaagagagagttcttacaactagtgatcctttttctaagacatggttaacatatatcaagtggatcacaaattgcataaatgaatcatgagttctccttttaacttagtgcatatcaagagagatatcgatttgaaagagtatgaggcactaagtgtcatttgatgttattctatgatcaaacaaacaatggatgtgatcaagagagtaacatattggaatatgaattaagcttaaaatgggagaatccaataagcatgctactttagcaatgaaagcaacaatccttgataaaagcgacattattttaacaagttggattgatgtggagtagcatagtatatgagaaacattattcttattcaagagactatatggaattactaagataaagcaatagtctcaacataatcaagatataagaatagactccccctaaaggtatgcaccaagtatttgaaagaattgatttagtgcacttacttttaaagacataaaaggagacccattatacatcttgttcaaggctcataaaatttgcaataaataacttgcgccttgcattctcaaaatgaaagggataagaatgcttacaaccacaccattgattatttttaagacctcatcctccaagttggtgttgttgtccttgatgttcttcctttttcatttgagtgtcctccctttgtagttatctctttttccttccaaactcattgaaaatactcaagagagatgttaatggcgcaagggagtatatggcgaaggatgatttctttagataataaatatgaacaattcatcatccataagtcaaatagacatgaagtaaaatccttaacattagtgcactttacttggaaagaggaatatgcacccttttgatattggatcaatcatgggaattttactttttcatattgaactcattatcataactttaaaagcatatcaatatgagaacagatatagcaaaggcatgaattagattctaatggacaagcgcatttatgaatatgatattaaatgcacacttagttaattttggtccaataaagagtctattcctcacaagggtag

SEQ ID NO: 118647 - DNA, 553 bp, Zea Mays
ggtttctcaagctttgtgctcaggctctggcagtccaggatgatatcatcatcgaagccatggtcaaggggcttaggctaggaccaactgctcagtattttgcaaggaagcctcctcactcccttgaaaaattgctacaaaaatggatgagtacataaggggtgacaacgatttccgtgaaagaagggaggaactccatagatacaccaaagtcgcaaggggcttcaaaggaaggtttcatgcaagacatgtccaaagtatccataacccaccatagggtgaggaaaggatggcccagtctcagggtcactcagggaagcaacaggcaagccctcagcagcaacccttgcatagcacatttcgtccacctgctccgagatgaggaaggggaggctgaagctttggtggcagattcagtgcactcccaagaaaaccattctacttgttttgtggtgacgacaaaggccataccacaagaatatgtcatcataccatcaacaagcagaaacaacttgctttgtcagccgcgcaaccttcacagtaaaaagaggtg

SEQ ID NO: 118648 - DNA, 629 bp, Zea Mays
atttttagcgtttttcgctcatgtgaccctagtgatgagcttctcctctggcatttgtctttataaatattttctctcttatttggtacaattttttaagtatgcttgtatgttgtccgagttaaatgcttgttatgatgggacacgagttgtctgagtctcagagaccagtgcgaagctttagagaccataggtccgtttgggagcggtgaagttccatttgttcaagatgtgaaactcaagacttccttagcagtgtctactttagaaataaggaaatgacaattaaatccaaaattaggattttgtggtgttatagctgccaaatgaaaaactcagagatcgtgctcatatgagttagaacaatatgcattcaactgagcccgattccaagacatgacggtacagattgtgtggtcgcgaaaagaatttatctaagtaaacgtccaacaaattgtatgttctgttatagaggcatgcatgtttgctacctatatttgcatatataatgttttgtagcgaaaatttctctccacaagtttccaaccttcgacctatcccaccgcaccttgttcttccccatgtatatatcagtcctactgttcacatgtttctaacaccctgtttgg

SEQ ID NO: 118649 - DNA, 398 bp, Zea Mays
cggcgatgaacacgaactgtggcagcgcgacgacagagcgcgatcagcggagccgacggacgaacgctgagacagaggtatttttgggctgcaactcacgcgcagttttctgatgcattaacagagtcttattacacagagtgatccgacttccccgccactccccgcagctgcacgaagcccctcattttcggtggcccgtgcgacatgcacggcatacaggtggtggcggcgaatacccgaacgacgcggtcacgacgcagactgtgcagtctccagctcgccgtgatctacgctaaaacaaatatgccatgcagtaacacacgcgacagactaatgcatctacgtgcaactaatgcaagtactgctgacgcactacaagattacagcaacatttg

SEQ ID NO: 118650 - DNA, 881 bp, Zea Mays
cgatatgtgtttatgtgaaaagtgtaattgttttatacaatgtgatgggattcgtgattatatcgggaatatatttagtaatgtgacgagtagtttagaaaatgctagtttgtgtggaggatgtgttattaagacgtgagtgtcggagttcatattagtggtcgcgccacgttgattgaagtgtctcgccacaatatggttacatgcgagacgaggttatgcgcacgatgagtttagtaaaaatccatcggtgtcactggtgttatgttgaggattatttgcgcgtggaaagtaataatgtgtttaatacttagaactcttagtcgatagtagaaattgttttggcttatatagagaggtggtgacataccaaagtagtcatcgcttcctctatatcttgagtcgggtcaatacgcgttatgtgttcatgatttgggaagtaagcgcatgatggtttcgagttagaaattagtggtttacgatttgtataaattggtcgatgtacgaaaatacttgtgaatctgtgtgtttataaaaatgttgtagtatatattgtgtctcgggttgcgacgataataggcaagccaacgtgtatgttatttagcggctgagtcattgctctagttagccaaatttttagatggtttggttaagtgcgtaatctcaataaattgcttgttgtagtctaaatgtgtatggttatggtcgcgggtaaaaatttgtagtgttcatgtgttgtctaagtgaaaatgcaaattagtgtgtgaagggcgcaatcgatatagttgttgatggtgtatggtaattctagcgcacaaaataacttgtataaaattagtaaatctacttgttggtcctaatttgattgttttaactctaac

SEQ ID NO: 118651 - DNA, 501 bp, Zea Mays
atattttgccataaaccatttgaattttccaagttccacagccattttgttaacagagcatcgttcatatatcccagattcaaaacacctaaacctcctagacttttaggagaacagaccgtattccagttgaccaaatgcattttcttcgtttgagagccgccttgccacaagagtcttttcctgaacaggtccaacttcctaataacagatttaggaagttgaccaaatgcattgttgttattacatggctatcatgctctggctgaccacaggcaggcaactacttccacttggggtttgcctgagaaccatggttttcaaggtgtcacctaggcgcctaggcgctcaaaaatcatgggcgtccctgttccctaactgaaaataaaaaaaatcagaaagagaccgggaggggggcaaccaacaagccccagcagctgccaatccccgatagctcttgcttgtagaactcacgcttgtcaattgaggcgtgatagatct

SEQ ID NO: 118652 - DNA, 507 bp, Zea Mays
gactcatgcgttgacagagtcatgaaccctctatcacctgcatccatcaccctgacatgaatgcgagtgatgtagtagcaagccctaggaggctcgtacactcgccatgtctcgtacaggggtcggacgtaggtttccaatgcgtgcagcacgtcttacagcaggttagggaagtgctctgtctcgaacattgaggtgtaatgttcagtgataggccataaccccacgtagtggtcctgctgttcttcattggattcttcgttgacgttctcctcatcatcttcttcgtcgtcgtcatcttcatcatcgtccccagagtcgtccgggtcgtcgcctccgggagcaggagcttgaacaactggtgccggcggtgctgaggttgatgatctagctgcgaaggctagtgattctgccaatggggtgggcgtaggcagaagttcctccgagctgtcctccaagatgactccacgctccactcgaatgcaagggagatccacaggaatttcc

SEQ ID NO: 118653 - DNA, 458 bp, Zea Mays
cccgaaccccagggtcagaccttctatgccagctcaaatgctcccaagtcagaattcttttaagtggggtagtgttcttggcagacttaaccgtcttgccatcccaagggattgatgtgatcttaggaatggattggttaaccaagcacaaaggcatcataagttgcgcaaacaagacagtccttctcacggaccacgaaggaaagtcagtctcttgtcaggctcagccacccgccaatgatccaatggtgtttaatctaggaaaagaaagcatgtcagtggtagaagaattcatggatgtatttccagaagagttgccagaaatgccgccagaaagagaagtggagttctacatagatctgatccctagcacggcacccatcgcaaagagaccataccgcatggctcctaccgagttagcagaattaaaactccaaatcgcagagcttcaacaaaaa

SEQ ID NO: 118654 - DNA, 315 bp, Zea Mays
ctaaaacatattgcatgcatgttgtgcggcgtgggtggcgcaaaaagaggcgggacaaaaggttggatgagccaatgggaaacgctggatgcgggctagaaattttttggggaaaccaaaacattccctctttatagctacaaattagaaaagttttggggttgtgaaaaaatagaaaaggtttaggagagctgttggaggcttgtttttctctttttccctttaatttcaagttatgagagattttaagagagctcttggagatgctcttagttctcattgcactcctccaaacttaaggaacttccttacttc

SEQ ID NO: 118655 - DNA, 408 bp, Zea Mays
gtaaaatgttgtgtgatggtttcgaaacttgttttatggggtatagaagtcacccctatatgagtattcgtaagcacgcgaaatcgtcttaagtcgtcgctgacttgaatcgaccgcttttgttagtagggcatagtggtcaccccgagttaagtaagcgtgagcatgttgcgccgtctcaagttgctgctgacttgagccgattgctctgttagcagggcacagtggtcaccccgagttaagtaagcgcgagcatgttgcaccgccttaagtcgttgctgacttaagccgattgctccgttagcagggcatagtggtcaccctgggttaagtaagtgtgagcatattgtaccgccttaagtcgtcgccgacttaagtcgattgctccgttagcagggcatagtggtc

SEQ ID NO: 118656 - DNA, 384 bp, Zea Mays
tttgaccgtggaaggcgaggcttgcatgtacgcagaggacggggcttgtatgcacgcagaggacgaggggcttgcatgtatgcagaggagggggcgggggcacaaatctggtctacattagcatcttaatagatagtatataatataattcctacccggtatcaaacacatgctctgtcacttgcatgcgcagcaggctttgcattcacgcgtgtgcacatgcagactttgcatgtagtggtggcatttgcatgcacggttgcatgcacaactttagttgcgttcgtagttagggcgttcgcgtgtgtgcacatgcaggctttgcatgcaatggaggcgtttgcatgcgtcggtttagttgcattcgtagttagggcgtttgca

SEQ ID NO: 118657 - DNA, 483 bp, Zea Mays
atcagctaacctctaaactggaatattgtaccaaatgtgtttgatagtaatgtgtgtttcttgcatttgattctgccagattcctgtacaatattgttctgtcattaacctcgaagtatgcctgttttttccgaagtttacgatataattattgcgggtcttatgcatgtttgcccatacacttatgatataatagtcatcattctatgcccatacattattctagttttgtctcaagtgtatgatacaattatcagcgttatatactggaaacaggctcattttttgtacagtcatggttcataggctaaccatcttatgcattacacaacgcagtgttatgcatttttttcacatacatgtatgctaagtctatgcacactcagtttgctgcatacctgttaatagcttatgacaaattacacatacgtttatgccagcttgcaagtatatttatgatcctttctagaatttgtcaaataa

SEQ ID NO: 118658 - DNA, 582 bp, Zea Mays
agaattcagaaagcatgtgattgtggtgcttaaaccatgttaaaattggacgagcttgtgactccaacgaactactgctatattacatctagtattaagcatcagacattctttaggtccgttgcgtgaagatgattaattttagaccacttgtctgaagattaatctaaaatctgttctggtcttgacgctacactagagttgacgaataatgttcatcacatactgatcaataatcatgacaaaaaccgacttgcgcgtgatttgccaaagccataatgtggataggatataaacacccatttgtctgaataagcttgtgtcagtttagtcagtttcagccagggcatgtttgtgtctgtaaccggtagaatgtttcaaaagcccccacgtgttgtagttgagagctcgccggcggccaaggcagtggctgaaactccggcaatctccgacaagcatccacttgtctgacataacaacacaacagctaactgcaaaagattgacgctacactagatctgatgaacaattatatgaataacataaatcactgatcataaatattaataaagtaaaacaacc

SEQ ID NO: 118659 - DNA, 516 bp, Zea Mays
gctggccaacctccacactgatcggctacacggctagcaccctagatgctaactaaacgttgtggaggacacggagagtagacccaaagtaccttcttcgaagattgtggtaaggatgcagctgtccacggtgagctgagacccgacgttgattttcctctccggtgacagcctacggtcacattcagccgccacagcgctctccgaggttatgcatgaggacggtgcgcttctagggacctctccgaacaccacgtgatccgacgacatccccctgaacccaacgatgttgtcatggcggtcgtggttcaccttctctctctcctcggttcgcacagtctgctcgatggcacagtgatgctcaggtcccaatggcgtaggtatgggatggttgagggggcgatgcgattgggttttacagccagcgacgcaaggatcccgcccgggacatcggccgatcaggaggagtccggtgaattaggtggctctgttgtggttgaagatagatctaacgag

SEQ ID NO: 118660 - DNA, 349 bp, Zea Mays
caaagttgaagaccaatcataggagaacaactttgtttaagggttcaagccatgatcctatgagaaatttggagaaaaacccaatcaaagatggactgtcagactgcctgaagtctgaaatacagattaacagtgttgtgacatgaactttgagctcgattttgatttggatccagtgactttttgtgagtacacgttatagcaaagatatagatggattgtagcactacaactttgctatagatcactggttgtgttaccacttgaaaatcagagaaatggcggcttaaacttgctcggtcaggctgtctgaatagaactactgatggtacagtaaaggttaactgaa

SEQ ID NO: 118661 - DNA, 434 bp, Zea Mays
tatacaattattgcattcagaatattcatgaccaaaatgaatagcattggagacaaaggatctccctgtcttaaacccccgtctatgataaattgtctcccctggctcaccattcactagaacttgtgtagaggaagtagataacagcaaacataagagattaatccatcgctgtccaaacccaatatgcctaagaatttccaataaaaaggaccaggagaccgaatcaaaagctttagatatgtcaagtttaaggaggatgtgagcttctttcttcttattcttgtgcagagccttgaccgtttgttggacaaacataaaattatcatgaattctttgacctttcacaaaagcagtctggttggggctgatcaaaatcggtagaacaggggccaacctattggccattatttttgttactaatttagcaaagc

SEQ ID NO: 118662 - DNA, 347 bp, Zea Mays
ctttgatatatgtatagccgacgtgcgcagacaccttcattttttatacagctttagacacttttagcatgcaccacgttttcggtttctagagatttcatatgttctccagaagggcccttgctgtatgggagagatccgacggatgacattataatagaagacagatgaatgtacatagacgtcacgatgacgtaggtactttcctcggcgacgaaagtgcgctggtttcgttttaagagaaaagggttgaaataggaagatataccaacgaaagtcattgtggccagtacaagaatattgcaggaaacaaaaaaaaaagaaaaggtttgttgtcctcattccac

SEQ ID NO: 118663 - DNA, 779 bp, Zea Mays
agggaatgccatgcttttccacaaaactaatggctataaatgaatgggatgctcctaaatcaaaaagtatagtagctggagtaaattcgacaaggaactcaccgagcactactcccggagcttgttgggcctcttgagcatcgacgtggttaactcgtgctctgccctgatactgggtcctgctctgctgactattggaggagagtgccttggaggcaggtgccgaggtattcttggggccattcactgagttggagtaggtaggtcctggtgccttcaactgggggcagttattcttgaagtgactggggtctccgcagtgccaacaggcatttgctggcggttggttgcttgcgaccgagggggcctaaaaggagctctgactctactggctgaaatgtgacggagtgggtccagctagtctattgaagcttggtcccttgggtgaaagcccgaaggatcgagctctctggtgtcggtcttgctgctgagcttggagaacttggaatttcctcttgaggtgacctttttattcttcttttgccctttccacttgtatggctttgttggagaggtgcgagaagctgaggaaatcttggctggcaaggatggtcttgagttctggtcttagccctttcagaaaacgggccatcttcttggtttctatgctgacatcgtcaggcacgtaacgagccaattctgtgaatttgtgcacgtactcactgacagatcttccaccttgagttagttcccggaattcatcttccttgagctgaatg

SEQ ID NO: 118664 - DNA, 586 bp, Zea Mays
cgtggaagtacggggggaatcttaagccatcagtgtccggcaagtccttcgggaggaagaactctgagccgttccagaggagccaatcgatcaatgaaggtgaagtgccctatgaggaagctgggttcaatggctacgctcattttgattccagcgacatggttagcttcatactctaacttcctagttgcatcgatttctctttcttgttgcaatctagttgatttattgatcttttatatgtgttccaagcagtcaacatggcgcccccttaaaatgttggtcagtgcagttttgtccgacaaaaggccagatgaagttccacaggtatactaatttgcttcactactttttgtaagttacctgttcaatggacttatataatcgcttttattgttttttatcctatgggattaccagttccatgatgtttttattctgttgtttgtatgcagctcttggagtccatgctgagcaaacttgttgaagaatttgaaaatcgtctaaacagccaaaatgaactggtatgtttggtatctttgtcaatttctcatttgttgttttttgattccttgtgcatattgac

SEQ ID NO: 118665 - DNA, 520 bp, Zea Mays
gtttgcaatgaaggacaaggaattggcattgtgcctgtttcaccaagtaatgtctccttcgacttctctagccgattgaaaacttattacactaacaatcaagttgaatatgatgcccttttgttcgacttggaacttttaaattgtatgggagtaaaacgtgtaaaagcatttggtgattcttagctggttgtccaacaggtattagaagaatatcaatgttttgatggtactctaaatagttaccttgaaaagtgttgggggcataattcattcttttgacaaatttagtattcggcacatttctagagttgagaatcacagggctaacaatttggcacaagatgcatcaggttatcggataaagcaagggagatttcataacactgaaaatctgataaccagtacagggccaatcccctaggtcgcggaccgtctgagtgaagacttcggactgttcggggttgctaggaaagttctcctaattgattcggctgataatgaagccgatgcaagtgat

SEQ ID NO: 118666 - DNA, 403 bp, Zea Mays
aatctacctggtctaacttataatctctagagaaaatggtcatcgaattttttctctaaatcccccaagaatagacggaattagttcgtagggtgatataccatgcaaaagtagtactagttagggatagtgaaaacaagcaaaaacggaaagcctccctatcggccaattctcccaattgtgctaggaactggcctatgtgctcatacgtatttttgccctagtcacctgaaaattttgaaaataggtattgttgtcctttgtgggtatgggtcatagtcaaatcggttgtcataaggtttccgatacgactgcccccatgggtcatgttgactctaagtttgtcttggaatgccccatctatctcctccctcattatgttaatggaagatggtggtaatcc

SEQ ID NO: 118667 - DNA, 318 bp, Zea Mays
ccgggtgaaggtgatcgggtgctccgaccatcggtatgggcgggaggaccggtagccgccaccagtatctgacgatcgttgagcttttgttgtctcttgttctcctgcgatccgtgtccgccgaagatgacattgacctctctgtcgacgcgcgggaaggctccacctcctccctcctcctactgctggggttgtcgcggttctcctggtcctcctcacggcgggggaggaggtagaggatggaagggtcggccgtgcccgacggagtgcttgaagtctctgcagttccgaagggtgtggcacatgtccttgtggtat

SEQ ID NO: 118668 - DNA, 641 bp, Zea Mays
cagattttaaacatccgagatccacccagagccatccgatcgacgaccaaccgcccagatccgcacacccggaagggcatttcccgctctaatctccatcgtcggttatcaaatcaatggctcctactctctctcccttatttccccctctctcacagcggagccggcccagcggcgcgcagttgaggcacgacagcgccattggcaagccccggcattgctaattcatggtccaatccttggaattgagcggtgatacaaggtgtggaggctacgacgtttacgttagaggggcttaccacccgagaagacgaagatgcaaacgacctacggtgtagcgtcgctccgcccagttgaacgcaccatggcgaccaattcggcccatgtcccactcccctagagttcacagcgacctcgcccaggtgcagagtgccctcgcgactcccttcggatgctccttaggtgcccgccaacgacgtgggggatggtggactgcggcggccgcaaccttctccttgcgagttgcgaccacaggttcctccccacacggtagtagacggcggggagggggcacgacattatatggctcgcggagctcgcaccttgcggccagttggcacaccgggtggttgcaaccgaac

SEQ ID NO: 118669 - DNA, 646 bp, Zea Mays
gtcaactgcgtctcatgctgggatgctggagtagacatatcctgtacagtttgagtggccggactcgtacatccttctttacgtatcatttaagcaaaaaatacatcgatttaataatgacatcataacgatattgaaaatgtttgtataactgtttagattgacgtaaagaccataaaactaactaacctgccgaatggggaagaatatcatctgattttttagttggttgctgcacatcataaccatcctcattgtcctccgactcagcacagaggacctcatcaattaactcgccaaaaacatcagatagattgtattgtttctcaacaatctgctgaagagtctgtttaataactgaacaagccttgccaacctccgtatcataatgtgacaacttctctatgaatcccaggcggtggcgggatggaagctggttcagcttgcttgatatcaaatccctgatgagcgggagttcgatgtgtatggtgtgctggccacatgggtcaggacgtggtacatcaaaagtgtttgtcatgttcttatgctgttgtaaaatgaatattattaagtaaatatacaaagtataactgaatattatgttcaaatttaaagacaaaacatatataaatagaattttgcctta

SEQ ID NO: 118670 - DNA, 717 bp, Zea Mays
gtccaaaagagcacaaacatggacctaaatatgcaactttgtggaaaatagtataagtatgaggtttgttcctttggatatgttgcataggtacatttcaatgtttctagtacttgtgattgggctctaacacatgttgtagagaaaataacttttttggagttaagtttgcacatattgcaaacccctatgaaaagatgagaaaaatgtatgattctagcgcttagtcatttgttttagttgctaattatatttgtctaagtgctagggatcacctcaagtcaagctaaaagaagccaaagaagttttgacacaaaagaggagaagctgtactggtctgggcaacaccggacagtccggcgaaagtacgaccgaattggtcgctatcggagttgaccaggcctcgctggctataactcaccggatagtccgggcggagcgccgaatagtccggtgcaatggacattcaacatctattagccacgccagcaggctacagcggtcagatggcgcaccagacagtccgatgcctccaccagacaatcccatgccccttgaaaaggaaagcaaccaatcaatgatctagtgaccattgtactatactaatgtgcattgttcggtgcaccattggacagtccggtgcacatgcagttagggaagactgagagcttccaaatgaagttcgagcagctcttaggccccttatggttgtaaaag

SEQ ID NO: 118671 - DNA, 618 bp, Zea Mays
ggaccgccgcgccgtccacctcgcagagccgaatccaaggtattgctcattgcaagaaggcccaagggtccattactgtttagttccaaataggtggtggacatcatagaggtggtgtcccaccttcatgataaccatcttaagtcttgaccctctgtgggcaaaacctagggatcatccccaaggtcccaactcaccacgaggacgacctagggattgttagtgttaggtccaaaaaggcgccaacacactttttggcgactccgttggggaagaaaattggatctatcaaatccaatctaatagattagatatattaaattagagctatcagatcggccgcaatggccaatctcaaagatcacaacaacgttgccctagacattaacacaaggctgactaactcgccggccgctgaggatgagaaattagaagaccacagaaaaaggttggacgaggaattccaacgataataggctcagataagcaagttggcaaaaagtggtacctctcgcacttcaaggtagatcgccaccggaaggtcataaaggagagggaagtaaagtacgattccctattagccttgctacatcagctccccattgtaagtaacacccc

SEQ ID NO: 118672 - DNA, 392 bp, Zea Mays
tgaaaactggttgcttgaaaggataggcgggtggacgaggaaaagagcgatttgtgttaaagggacggatcaccaaccttgaccacttctcggatccttgagaggatccttcacccccttcactcccaaatctttttgtcattccctgccctgaattcttggcctccagcgacagtgttgtgctcacggccctactgtaagtgagatctagacaagtggccatattccactgtagccggtcattcagaccccctcatgaaacaattcttctttttaggtctgtgtcaacttgctctatagcatactgggagagatggttgaatttgacgaggtattgcatcaccgagtctcctccttgcttcaagcgaacaaactcttccagtttcatctgt

SEQ ID NO: 118673 - DNA, 483 bp, Zea Mays
cacaaagcttgaagaggatctaaatcacctgcattaccaattataccatgcaaggaatgaaaggtttcttgcggaaaataagccaggatacttgctacctacaagatcagattgtcaaccctccacagcttgcaattgtacatgggaagaagtaagttatcttcaaagtctaatatctctttaaagttaccctttttaatgtgaaattagtgattgtttctttgtcaattttctaagcctgaacaaatgttaagagaattgatattcagagattatcactcagtccaagaagatttttcaactgaacctgaagatcaacaggatgatgaaaaatacgttaaaggtagagaacgtgtatctctaaatatgctgctagaaaagcaccaagatatttcttcaactgggctgtttgtacaccgagatgaagaggtcctactctgggctgcattcaaatttctcagtttcaagtacacatcttgggac

SEQ ID NO: 118674 - DNA, 1320 bp, Zea Mays
caacaagttagggaacttacaagggaaaaggcgtcccttcaagagagtctcgagatagcagaaggcgaggaaaccaacacctgtgagtcctaccgaaccctgaagatggattacgacaagaaactaaagaagctcgcccccgcaagaaaaatccgcaagaagaccagaagccaaggatgccagactgagcagaaggaagaagcccctccagccctacctcctaccaggataaggaactcatccgacaccgaggaaatgtccctagctagccttgatgaccttctcaaggaatttggggacactttagagaaggagttcggtagtaccctagatagcactcgcgtgtaatgaacttgtggtagctgtatgctgtaatgaacttgtgtaaggaataaagtaacttgttgaaaaaaattggcatgtgcatggtagtaactcttttccctggcagatggcttcggataaaaccacgcctaccgccaccgggattggagcagggtttcccctaggaggagaaggagaagctggtggagaagggagtgagacccacctccccgcacctccagaactatcactagatttggcccaagttctagccaatcaaacccgactcattgaagtcctcactagaagtctggaaactcagcgcccaggtggtggaagaccacagaacaggatgggataatttctgagactcaagcctcccacgttcgctggatccaacaatcccctcgatgccgatgactggctgcgtacgatcaagaggaaattggaagccattggatgccccgaaaatcagcgtgttcaattggctgctcatcaactttctgggatggccctagcatggtgggataccttcagcgcggccgtcagggacgctacctgggcagaatttgaaaccgctttccatgagcaccatgtaacccaagggatcgttcaactcaaggaagatgaattctaggaactaactcaaggtggaagatctgtcaatgagtacgtgcacaaattcacagagttggctcgttacgcgcctgacgatgtcagcacagaaaccaagaagatggcccgttttctgaaagggctaagaccagaactcaagaccatccttgccagccaagatttccttagcttctcgcacctctccaacaaagccatacaagtggaaagggcaaaaaaagaagaaaaaggtcacctcaagaggaaattccaagttctccgagctcagcagcaagaccgacaccagagagctcgatccttcgggcttccacccaagggaccaagcttcaatagaccagctggacccactccatcacgttttag

SEQ ID NO: 118675 - DNA, 425 bp, Zea Mays
taaattatagacaaataatatttgattgataaagcatatcaaggtaatgaagatcaaacccctacaagaaacagaggaggattggattagctatttacctatagttgggtatgccaactccccatgttgaggagccaaatcgactctaatccagttgaatcaatttttgtaatcaccactctagccattgtgcaagttgtcctagcaaacttagagtcgactaggctagtttatttggttccagcagtctctgatgcatctctagatggtttagcccttgttgttgataatgttgtgtctgtggattctaaggagtgttctatagagcaggcaacaactggtcattttctgaagttgagaagcaagaccattcaaatcaaggacatgtacttctcgaacatcattaacaaggtacaaagcacaag

SEQ ID NO: 118676 - DNA, 435 bp, Zea Mays
ttgagcatgagacatattacttaaggaactaaaacctaagttaagtctccttcatctcataaatcacactctaaatatatcacacacctcagggggggaaaacatctaaaaccctaacaccttccaaatgggccatttaagcacatagagataatttgagaaaaaaacttgggaaacatgtaaaattttgatatgaccaattcacaaagttttagtgcactaaataacctacaatatgtagtaaggaagattggtcttttgaattctcaaaaatccccaaatcagcccatgaactaatgccctatggaaaaattcagaaattcaaaaatctgaatttcagcccctttccaaagatcttctgcgttctctgtttttcaaaacttgaatcaaataagtccaaatataaaagtagcgccaaactaccttgaacacacc

SEQ ID NO: 118677 - DNA, 367 bp, Zea Mays
acaaactacgggtctgcctttatagtatgaggcgacctctttaaaaggaactaaataactgaatctggaagtaaactaatgcatatcttttattctggaaataaactaatgcatatctccctacaataaaagcttgcctactaacccgattgctagccacttttttgatcactttccttgcttgcttctgctgctccttttgctggatcctggcgcctttgcctctggtactggcagcctacaaatgcatcagtaacatttctcccctccacaagaaacagctcgtccgcgagcttaaaaagaggatacttctgtgtgaagtcttccaattgttcccaagaggcatctgatgctggtcgacccaccc

SEQ ID NO: 118678 - DNA, 736 bp, Zea Mays
acgggtcggacaagtcgatcggggcccacccaagtgggctccacacgcctgtcagactgctctcaccgcccaccccgcacacgccacattaattacacctgagaaagaaattggtatcggaactcctacttccaactgaaattggtagccgcaaagtaaagttaagtaacggaaggataagacaagggaaagaatctcattattgctatattttgacaagcttggagagcagtagcagagaaccattggtagtgcttcgttcgttgatcggatgggcactatcatagcttttagtgaagctgttaagctattatgttgaaaatccctccgcgaactagtagatattagcagcacgagcagtgtcttccttttatgatgtcagcaggatgtggcacgtgcgaacaccggtcttccactcatggcctatggatcctaagtttgcggccactccgagacacgtggatgctaggtctgagccccctgacgccctacaaaccctaggaccgagacccactcatgaccaacaaattctaggtctaagtcccctaacaccctacaaactctcataacaacaaagaaggccaacagtcaggcaatgaagtcagaagatctttgtggagagaatgatgacgacacccgagtttccttcaccagcacggatcacacgctccctgatggattcatggcacgacaggcgccacacgtgggaagagatatcgagacacgacaagacttt

SEQ ID NO: 118679 - DNA, 562 bp, Zea Mays
tgtagtgttgatatgtcattttgtgtccttttaagaccggtattttgttgtctcaacaaatttgcatatatatgcctattctgctcccaaatgtgtagcttcatgtactcactgcaaacttctttatttaagcgcattattattttgattagactaagaccaagtttctattgctttaactagctgcgaccagaaccattgtaatatagtatctaggctcttcacagtgtaagttcgtgaattgcaatgttctactgcaattttgtactaaccaactctacacaccggaacaaaaacctatctacggtggtggaacttattactcaatacaagacaacatgaagcacgagtcgtcctcatccgccatttgattaggttgtacccatttagcattaggcttagtgctcgatacaacagcttggtaatattgtcatttgagagacgaatatatggaagcattaacaagtaactggatatctttctctaaagttagaaaccaataagcttcgcatttactactctacacaacatatacagtctgaagaaacaaacgctacatata

SEQ ID NO: 118680 - DNA, 447 bp, Zea Mays
ggcgtcgctacaaaggatctcagcaccagagtcgctacagtaacctgtatactagttagatggggggattgccaaactaggcgtatgactatgcatgaaccagaatacgacatctggtgaacaacgtcagcaagactactttagacaataggtcgcgtcctccttcggacaacaagtacccttgtaagaaccccccttgaactgtaaaagggggactctcctcttattctcacacgagcaccctttgtaatgtgatccttagagcaatactcgagcaccctttgtaatgcaatccttagagcaatactacgatcaacagtacactgactagggcacaagcctgaaccactataaactccctattcgaatcccttgatttaccattcggggtgagtccacgctagcctcccacaccgaacacaaattctattgtgtccctagtgcccg

SEQ ID NO: 118681 - DNA, 473 bp, Zea Mays
agcccgaaagaagggcaaggtattagggtcccccaagtttgtgctaccacagagggcaacaacgacccaacctcccgggcaaagactatccccacgtgacacagatctaccactcatgacctagctgagtgtaggacagtcaaggatctagtcgagcatttccaactctatgaccaaaaatgccccaatcaaaggcgcctgaagcaacgacgcccccaaactgcagcaacaaaagcaggcttgggacccaaaagaaaaggaaaggccagaagcccaagattgcttggaccacatcctctgaggagaatgacattgacatggaatttcaagacccaaagcggatggtggatgtcatccaaggagccatcgagaagttgatttcccagcgagacctgcagctcatgcaacaagacatgcacattgttgtcccacagcaccactccatcaggccgctcaagtgggccaataacctg

SEQ ID NO: 118682 - DNA, 605 bp, Zea Mays
caccaatgacatgaccttcacattgaatgggtgtcatactgcacttacttatatttgtgaccaggcccgatgcctcaccaaacaccctcagaagctccttaaccattccaagctcatttctggtgggcggaacaaatgacgcaacatcatccgcataaagagagacacactgtctcttaccccttcttatcaaaggttgtagcagccccaaatcatttgctttctgaaatagagagttccgcacatccattactaagataaaaagcattggggagagaggatccccccgcaagcctcgctggtgacaaatgaggtctccaggttcaccattcactatcacctgagtagaggaggaatacaacagcttagcaattaaattacgcgataccagcccaaaccccagatggctaataacttcaaaaaggaatggccatgaaactgagtcaaaggccttacctatgtccaactttaggaggattctaggagttttctgcctatgaatagctttagcagtttctcgaaccatcataaaattgtcattaatacttcttcctttaacaaaagcactttggttgggggaaaccaactttagggagttttgctgt

SEQ ID NO: 118683 - DNA, 613 bp, Zea Mays
catcaaagtacattctccatacttcggtagtctctgggttgtctgggacctcatgctcagtccactctgatacaaagtcaaccagttcttgagtctttattgacgtgtgaggttggaactctatgtcgtgagctcccagctcacaggcccacttggctattcttccaatagcttctctattgtggagaatgtcccctattggaaatcctgtaactactatgactttgtggtcgtgacggagcttgcgagcggttagaagtaccgcgtatagcagtttctgaacttggggatacttcattttttagggcccgagaacttcgctaacaaagtagaccggatgttgcaccggatatgtatgtccttcctccgcccgctcaactactaacgcggtgcttaccacgtgaatcgtgcaggagatgtataacaacagatcttttgctggctgattcggtgtggtggcttgagtactggtggtgtagtcaggaactttttcagtgcctctagagcttcctgtgcctctatggtccactgaaatttgtccacctttttgagcaatttgtaaaacgacatgcctttctcgcctagccttgatatgaacctgctcagggccgcc

SEQ ID NO: 118684 - DNA, 353 bp, Zea Mays
ctcgtcaaatcccaccgtcatcacatagctcattagccctctcatagcaactacaccgccactagatcgataggagaattcatccttcaccgcccacagctcatctgtaacccgtgaaaccagtaatacttaatacttagtatcgacgggatgtagggtattacacattctagcgactcgaacctgtataaactcacacataccattgagtcgcgatcaacgacgttgtcctagccaaaagcatcatgtgcgataccccgtggtgcgcagtcgggtcataaacaccaacaaagtgttccacaacattttcaacacttaggatatgtagaccttcatcttttgattcatctttt

SEQ ID NO: 118685 - DNA, 754 bp, Zea Mays
gccgtaccaagcatggatcacgaccacttcggataagctcgtcggagttagccacttcgcgactgtgcgccacgtgcctcggtggtttaccacgtcgcagtagttcaccttgtgcatatccggtgctcgccggtgaccccgccacggtgacagccacctatctcttgcaacagcactcttttcattctccgaccgccaccgcgccatccaaaattcaccggccaccgcccttggagcctataaattgagggcagggatagttgcgccatgtaatcgtcaagctattgcacctactctcatctccactcgctcaccgtagctccgcaattcgggttttccccaaattggtctccgccaccgtaaaacaccactcccccgtggactgcccgttctggtaaggcgccatccaattcgcgcgttgttctcatgtccctatatgctggtgatgctctccaaaccgtttaattaaactagaagcccaccaatcactgggaacacgaatgaatttccataagctttcgcggtcaccgtgggcagacaggtgtagagcttcaattcagaaattgagtgaggggaaaggtgcgataggtagctaatttggttcctgtcgcttgagaactccagtcgtggcgtcatctggccggaatagtctcgccggagcgcgggccggcgtcgctcgtcgacagggacttcggtctgcaaaggattagaaataggagggtgtttatgcaaacggtcagtgactctgtaaaca

SEQ ID NO: 118686 - DNA, 593 bp, Zea Mays
caagataatagtccattcagaataagggtaaggaaaaggaaataagggaaggaaaagagagaaatgacggaggccctgcatttaataattggccaaagcaagtccagttgcagatggcttgtagttttcgggtcaggcagtggatgagaagcctccttttctgtctcggaaagcctcattcgcatgggtgaaagaggcccggcaatatttcaggcacatcaccaagcacgtcggctctcagtggctgggctctaccgtctaggcagttcttttttatccttcttcaaccatacctaattattattccgtcctccgtcactattgagcggaagactgaggctatccacgtgtactctaaattttctccgctgctcttcgatcacgccagcaaaattacttttcctatgtttactcttcccgcaacggttatctctaaatactctcctatacctcactttctctataaaatatcattttccatacatttttatcatctataccatttttacacaactaataaatattgccgagtactgaaatcttgataaggggattgtatagcgctcccctagatctagtgaagtattgtgtcg

SEQ ID NO: 118687 - DNA, 340 bp, Zea Mays
tctggatggtggttctctcgcccctgtcgggattcagcacccttactgttcaccgcccctggtcgcttcgactatggtaccccagactgcaggacccgaatagatttggatccttagatcgatagagtcagagtctataataatgcttagttcagtgtcttagcctaagccggttttagttagagttagtttgcttatcttatgttggatgcttgttatgatggacatgtactgaagttggatctttgtaatgattgtcaccaaggtgtgggtatcccctggaacttggtgtagttattaataaagtcagttatttagttaggtaatccctttatttccc

SEQ ID NO: 118688 - DNA, 442 bp, Zea Mays
caccgcgtgtcctaaccgcgccatcgcatcgccgtgactccctctaaactccccgtcgaccaccggagttactgccacggcggtgaacacgtgttcactgcactagcattcttcctcacctccaaccgccgtgtgtctcgtccaaaattcgcggccaccgctcgctcctcctataaattgagccctcccctagctgcgtaacatcatcacccacccagccaccaacaatcgttagcaaccgtgcctccgagagcttgaattttggtttctccccaatccgggtttccgccactacaaaactcacctcaccgcggccagcccctttccggtctgctcatccttctctctccctcgtttgagctttctcacaactccatgatgcttgctgacccacgtaattgcgctaggaactctttggtcgccaggaacacgacgatctagc

SEQ ID NO: 118689 - DNA, 357 bp, Zea Mays
atcataaatgtgctatcctcctcaacgggttgtactacctctaggttgtgaagtcctatcagtggtgtttggtcttagaccaacttgtctaggagtgaccaaggttagtgaatgttcaactagttttgctatggttaggtccgtcttggtcggggtaactgggtcggggatctagattggggtaacgtagatcggggtgaccatccttaccctgctataggctcaaaggttggggttaccctattcaggggtcatctcgggctatgcgaagctccagtttttagggtgtgttttctcatcttagggaaatccaagtatgggtacatgttagtagcctccgagccctagaatgatttt

SEQ ID NO: 118690 - DNA, 442 bp, Zea Mays
caaaacaccgacagtttggtctggtaaaagcaggaccaagcttcacttgaaggttagacatttatttacattttgaaggtttgagagtagataatgacttaggaaaaagagacgtagctacttggttgctttgtagactttgcttcaatcctaagacgatccctagattcttggttagcttgaccgatcttctcggtgttcggttgtcgaggtgcccctgagtagagtcttagccctagtcgtcgtagatgaggcattcacctgcgactgagagatgacgcatggcctcgaggtcgtggaacctagagaagtttactcctgagctcataccttcttcggtctcggggttttcgtaccctgagatccctaggagctactcgtacaggctgatgtaggtgttcattgtatatgggccatctaggggaatagagctgaatccgaa

SEQ ID NO: 118691 - DNA, 367 bp, Zea Mays
gttaaatattgctcaatgctctgaccaggagaaggtgctctatgcttctggtcgttttactggtcctgctgctgtttggtgggattcttatactgctgcccatgatgctgctgatactatcacttgggcagaattcaccacacagttcagaaatcatcacattcctgctggactgatgaagattaagaagaaggaatttctgtctctgaaacaaggcaatatgtcagtcatagagtaccgtgacatattcattcaactatcaagatatgctccagatgaagtggctgatgatgaaaggaggcaggaacacttcatagaaggactgaatggaccactgcagtatgcactggttgctcacaccttcccg

SEQ ID NO: 118692 - DNA, 803 bp, Zea Mays
gcggagtgtcgcacacgagggtagtctgcgctgcctctcgcggtgacttcggagtggtcgaatgccgaagaccatcgatgcggtctttctcgacacgttgcgttttagtttttgcgggggatttttgcaggtatattacatggctccacctcgttaaaaacctcaccccctgggaggaaaagagtgcggcctggaataatattgtttggtggattacaagggcgcttgggccctgagggtttaaacaaaaaaattgcggagattgtcaatattccaggaatactctaggtcttcaccggatggcgttgttagcctgtacgcgctgggggacaccttcatcttgacgatgaatggaccctcccacttcggctctagcttgccccatgactctgtccgggtggttcggacgagtacgaggtctccttcgttgaactctcttgggacgactgcgtggtcgcgtcaggccttcgtttgagcttggtatttgttgagggcctgcagggcgaagacgcggtctccgactctccgtcgatgaggtctttggacgttggttcgtctacgtcagggacggctgatgcgcttgttcggggtgacccgtgctttatttcctgcggggtcatggcctccgatccacatagtagacgaaaaggagtgaatccagttgcccgacattcggtcgtgtttagtgcccagactacttcaggtagctggtcggcccatttacccttcctgtcgtcgagaagccttttcttgatggcggtgaaaatcttgtcattggcacgctcgacgacatcgttagattg

SEQ ID NO: 118693 - DNA, 375 bp, Zea Mays
gcatagataagcttgtgtgtctcaaggtacttggcctttgcctcatggaggacctcgctgacgtagtagaccggcttctggatggttcggacccctgcagtcggtcccgagtcctcaaactcctggccttccgtcaacatcgtggtggtcggaccaccaccttctcctgggagaacttgttgactcccctgggtttgttgtgccgtcctttcggcaaccagcaccatgcttaccgtctcagaagccactgcaatgtataagtacaatagctcccccggctccggagctaccagtattggcagggacacaaggtgctgctttaactcttgaaaggctcgttctacctctttggtccaagagaatggaccggacttc

SEQ ID NO: 118694 - DNA, 367 bp, Zea Mays
catgacctccctgctccgaaaaccctagatcacggtgcccaagcgtcaggggctcagtcgtcgtctctgcccctgtacaacactcttacgatctcctcagtgtaggctccaacaatctggtatcagcgatgccaggacacgacgacaacaacccagtggtctcctctgccaccgtctcccgtcacggcgaccaccatcgactccaccacctcccccaccatgcccgacccccaacacaccgacatggacttctagtgcatgatcgtgaagcaactcgtgtcgctttcaacgcggatgagtgccataagcgtccaatagtctgcgtggctcgctgccctggaagcccgatagttcgtcgcctcttccg

SEQ ID NO: 118695 - DNA, 321 bp, Zea Mays
ctattcacgtacgctatctctcactcatgcaagccctccctaatggagggccctatcaatcaccgcccctacacaatcgcatatgccgccccaccatctgcctcacccctctcgctaagagccctgccatggtcgtgcacgtcaccccttctaatgggagcccaatccctctccgatcctgcacgctacccctcccaccactccgtgacaaccatttccctcctcaacctttatggcccacacccctctcttctctatctcggcactgccacccacttcctcaacatcaatgttagctccactaaactttatctctgagca

SEQ ID NO: 118696 - DNA, 490 bp, Zea Mays
cttaagtcggtacggtacattcatacccacctaccttagggtgaccactatgccctataagtcaggtgatcggtttaggtcagaaaatgctttgaaaccgacatggcactcttactttcgcaactgttcagggtgatttctataccataatagcaagacaattaaaggagcaaaaaagaacatcttactcgttgacattaggggcactgtctgacgccctgctcacagaatattcgagttctaacataaccctcacatacatatagacttcatactacatcaaatgttttgcaagacattattgcattgaaacacctttagcaatgtccttcacaggagcaatggaagaggaaggacgactcgaagcatcgggcgcagccttgacatccgcaatgatatcgtcaggcaccacgacgccaggccgcctcatcaagatccgtccagcgtgaacggccttgtccatggccttgtcgcgctgagccttcaaaat

SEQ ID NO: 118697 - DNA, 625 bp, Zea Mays
aactcatgtccggctaaattcacgggtacgtggaagactacttccttagtaaaaatttgacccccgggtggttgaataacaaaaccctcctttcattcaacactaggtatgcaatgcttctcaacaaaagtcttgctcatgaaagtatgtgatgcaccagaatcaaaaaggatgacagcgggatgattagcaacggaaaacgtacacatcatcacaggctctcctttcggggtggtagccacttgagtatagtagactagcctagtttttcttgtatttttacctgcctgagtgcttgctacatttcccttgccttgagatgtgctcctagaagtctgttggaaattagatttattttgctttggatagggacagtccttgatgaagtgtccagacttcccatagttaaagtagttgttagatgaactgggtaaggcagagaaacgagaaccaggggcactcagctgattgttctgagcaggggcaggagtgggacggaagaaaactggttgcttgaaaggataggtgggtggatgaggaaaagagcgatttgggttataaggacgaatcaccaaccttgtccgcttctccgatccttgagaggatccttcacccccttcacgcc

SEQ ID NO: 118698 - DNA, 573 bp, Zea Mays
ttcatgttaaaacagtgttaccaaatgatagacagtattagtacaaaattataggaattggaatgaattaaaaagaagttagaattaattttctaggaattaaacaagtttctgcaattaattttgtactaaaaatcatttcccaaattaattttttctgattttcccaatcctctgtactgcgcaccctattaacagaaagttcatgggcttctgcgcttaagtccccagactcaaaaccatctaccgtggactgctggttgattcgttaattcctcggggtttcttacgcaaaatgggtaaatcgaaggggtacgggacaatatgcaccgtccgatttagttcgtacgtgctagattagatgggcgtgattatgaatcggtacgcagatgagagccatcggattactaattgacggctcggatttaaagtatcatacatggctatagatgtgccagaacgaaatcgacggtgcggatccacctggcgaaggggtatgctagttctaatcaggaccgtccgtgtaccaaccgatagccctggttccatcctctaccttccgccggggctaag

SEQ ID NO: 118699 - DNA, 533 bp, Zea Mays
aaaaataaaggatgagcacatactgaaaaggaaataaactaaaaaataatctgctttctaacaagttaaagtgttcccaccttcagacaattataggcaaggctatctgcgagttcgtccttcgtcattgcagacaaacctaagtcaagcttcgggtatcctacattgtctgccatctctcgacagacatgaatctctttattgtcaggcagacaataaaggaagtcatcttcatcatccccatcatacaccaaggaccctcaagggtactgtagatccctgacataatattgcgcttcgacaatttgctcttttgttattttttccgtgaagcatgacacactataaattccaattcctcagtagatgctccgggagcaggggattaagattcttcggtagccctctctttttctaatagtaacggtgtttttgcggcatccgaaggtcttgattcaacacccttttcaacagcctctgaaggtcttgcttcagctggagccaagggcccagcctcagttgcaacctgcgtc

SEQ ID NO: 118700 - DNA, 859 bp, Zea Mays
atcactctccaaataaaagtggccacgggacagttgatgaaaagatggttattttgattccaaaatgccacaaaacagcaatcaaaggacccctaccagtacttttcctcaaattttctttaggtaaaattttatctttcagaataagccacagaaagactgatttttttaggcatttccactttccaaagaaatttgaaggggacttttgcacaattgctcctaatttgagaatctagggttttaacagtgaaccctctcttatgcagatgccagaccactctgtcttcagaattagactgggagaaattgatacaacagctcatgagcgcttcccactcatctggcacaatgccaaccacatttcttctaaaagatagagtttcacaatttgaatcaatcactagattaacactgacgtttttatcaagcaagaggtcaaagagtctctgaaatcttcagcaaaaaggtttatccccacaccaaatgtcataccagaaacttgtatttttgccattgcccacaatttttttacaatgattataaaaagtatcctttacttctagaatcccttttcagaaataagaatcatcttgcctctttttaactaatttaaggggtttccccttaatatacttgtacttcacaattttctgccaaaagccatcttcattctccagcttccaaattcatttggctaacaagcttaaattcatatctctgagattcaaaatccctagaccccttgatcttttgagaggcaaacagtctcccaatccacaaggtgatattttcttgtgcttttgccgccttgctaaagtatcctttttctaaaaatattgattttcttgatcacctt

SEQ ID NO: 118701 - DNA, 286 bp, Zea Mays
cgctgccaaaaatcgaagagctggccgaagtgccagcaacagaaaagatagaagaaccgaggactgaagaaacaaaaacatcagaagtcttaagtcctccaacaaaaatcgaggtagtaaaaagccaaaagggtccagcagtgaccccgaaaagaaaaataatggttaatgtgctggatgttttggagacaattaagtcttcaagcgcaactccgaagaaaactgttgaaacttctgaagtgcatactgaagcctttgttgccgaagcttcaaagcaacaatctga

SEQ ID NO: 118702 - DNA, 347 bp, Zea Mays
agacaggtattatacgtcctagcgagcacccgagaccgcttttcgaagccttgggcagcgatatggctcatcgtcgatggcagcggcgaccccgctctctttgccacactcggcatggtacaaatagggaatacgatcagcgcttttgatcgacctactgcggctttagtaaaaagggaaggcatggcttcggtctttatataccggtgccacggaaattcggtggagggcattcggtcgttggtcagcatacggctggcaaaagagcacggaggttatggccaaatctgttatgaaaagataattctgacatgggtggcccgaacgtcagcgattctgagaagaac

SEQ ID NO: 118703 - DNA, 710 bp, Zea Mays
caaggatgagatgcggccttgcggcaggatcgaagatgagagattagtggttcggctgtgcttccgaggataacggtgagcgtgcagagcctcgctcagcttcacccataccagagagaggtacaagagaagataatccggaaaatcaagcaaaatgatgtttctgccaaagcctgtaataccttcgaatatttgtcgctcgctattcatttttgaattaaaatacgataaataaaaaaagaactgagagtgagtagaaaatatctggtcttcgttcacgcgagccaccaattccgatgcaaatgcattctttgccgagttcagaagaccctcaaggcatcatcggctatctgctccagatttgctcgggagcttgttgcagttgcagtggaacttgagatccagatttcagaagttacagcctttaatttgattgctgcagctaccgtgcgatccgggtttagttttgccccgtgtgaattgtgttggggggccgggcgtgaaagccaagagcagtagcacatgcacgcccagcaataactccacctgtgattgttggatctgcgatctggatggccggcgaatccctgcagaattccatcccgtgtcgctggtcgtaccgaatgctgccggccggcttttgaggtggatcatccgtgctgcttctcgcggcactgacatattgaatggtttatcagtaacggatctac

SEQ ID NO: 118704 - DNA, 521 bp, Zea Mays
atcgccaaaggaagccacgggaagcccacaaactacaccagcgagaaccccgccagcggagcgacggggcgtggtcccacataaggccaagcccgagattccctatgtaactgaagctcgatcagccatggcctccccgacgtggcaaactccattttccactttgcccactaaggtgtggacacggttcactcggcgaaaagagatgaatgctccagacaagggctagggagctccgtcgataatcattctggctactctgcccttaagggagaacgggaaagggtgcaccactgctcccacacccttctttcttagatgtcctcttcattcaggggagagtggagacgttgcccatctccgacaacgaacccaccgtgctggaggaggagcccccaacgcgatgcgcgacaatgacaaaacaagcgccgtaatgtatggcgtcaccacgaagctggagagcgtgatctggctcagcccgtttctcgagacgaagtttctgagatggaggaaaccccaac

SEQ ID NO: 118705 - DNA, 698 bp, Zea Mays
acatggtacaataactgaagaagatcccaggtgcagtgcacccgccaccggtgaacccgcgtcgcgatccatgctggcgttgtgattcgtgctccgtggcgcgtggataaccgcttgaggtaaaagatcttggcgtcgggatgagctcgggtcctgttcagttcaccatacccacttgcccgacgacgtggccgggcgatcatcgcagtggtggccgctgtccttcgcggttgcgccacgccgtgaccctttcactatgtagctataaccatggcaagcctagagttactgcccttgagccgttgtaccggcgggcgccacaacgaactcgtccagtggaatatcccaccaccgccgtgatcgtcttcgacccaaattagcgaagcaattagccggttcctttaaattgagcactaccatcactctgcctctctattacacactcatcccaccctccgttagcctctttcgtgcaccgtagcccccagtcactggatttccccaaatcgtgtcactcacgccgccgtgaggcacacggctgtgatcagccgttcccaggtccattcattcccctctatgccatgttttagcatccttgaatgttaacatagcacatcggctcaaccgattgaacactaccatgactgggcatcgagaacatcacctcgccgccgcagaacatgtctgagagcgcgctc

SEQ ID NO: 118706 - DNA, 801 bp, Zea Mays
caatgatttttgataaaggaaggaagaggccttgagatattccgagatgaccaggggcttcagcggacggttcaacccaacacacatcaggaccatacacaattccaatcagaatgaagacaaaaacagtcacactcagggataacaaagtcatcctcaatccacaggaacctagcaaaataccttcaggccactagccccaagaggtggaagaggaagaaggagttttgaaggaagattcaaccctcaactgaggaaaatgttctgccttttctgtggagaagacaaggggcatacaacaagaacctatcaagtcacaatccagaaacagaaggaaatcaccgaagctgaagcacgacaggatcaatcaaagcaggtcctccacaccacctcatactatttcccatacattccagaatatgttcacaaccaacagccaagtctacaaccctcgggctcagttgcttcagcaagtcactcccagctcaatggatcttgccctagccatttacataagcaccttcgtcatatgagcaacaacatctaggaaaacttcagatctagccgcagttctcagcacaggacataccacagtgagacacaagggaacaatctgaagccagaacagtagatagtactataacagagtcaaagcacatctactgaaacgcctgaggggctggaccaagcatctgaagtcgttttcgaaaaatctattgtaatttcagttttctgtcctttacttttctgtcccaaagaaaatcaagaaggtatgtccttcgtcactctgtaataaatctg

SEQ ID NO: 118707 - DNA, 482 bp, Zea Mays
ccggtttctcctctgcagtgcctctttgccttctgacgatacggatgcctactgctgccgtggttgccagcctcctcttctccacactcaagtgcgcatgtctgcctcttctctattaaacagcgatagcgtcatctactctccctcttcatcgtcgtgggctaagccattaatagccgcggctgtttcttcgagtaggtaacgctgttcttcaatctgcatcaatggagtattaaatctgcccgcaaaccactctcctccctcgcctataaagcttgagccgtgcttgcttcctacctcctactcccttcagcttcctccagccgatccatttcttctctgctttgttgcctgtgcgcgtgcctgctctttctcctacccgtaaagtgctctcccgtctgctcaatttcatactagtggaggacaggtgaaccataaggcatgcggcacccaaatcgcctcctctccaacgccaggtctcc

SEQ ID NO: 118708 - DNA, 360 bp, Zea Mays
acgagttggtgttttggttgcttgactaccatgtggagccgactgcacactcaatttatagattccaggggtggtggcgcctgaattggagatggcgcggtggcggccggagaggaaagaggtcactggcgcaagtaaatcgtggatgctatcgtggcaagaccaccggcgacgagtggatacaccaaggcaatgtagtgcgacgtggttaagggcctggggcgtggcacaatcgccgtgaaggacgcaaactctagtgacggccgttaggccacatcgccagcgcaaatggtcgagggatagcgtggccacagtgttccgaactcatctgtgacgagatctttttacggccgaacgcaa

SEQ ID NO: 118709 - DNA, 341 bp, Zea Mays
gtcaatactaaaagattatggatgtgtttggtatgaggtcaaagtatggcatgcttgaggtgttaatcttaatacaaaaaaacattcagtggtgttacactgcccaaattatctctcatatatgctggtataaaggtaatactatcgatgcacaaaaaatacttaaatggttagcagtgcttttattgtgtatccaaaatgtaatccatttatggacagtaatgctcaagcagtcctgcttcttgtttttacttataatttgcatagcttccctgttattagcatacttctgaaatctatcaacctggttataattttggtattctacatgtcatgtagtt

SEQ ID NO: 118710 - DNA, 455 bp, Zea Mays
gaatgaagaggaacaggacgacaaaaatgcggccgagcgtattgccagacagtcggctcactacacactcattggggagacattatacagaaggggtgcatcaggcgtcctcatgaagtgcattctctcatctactagaaagcgacttctggaggagatccatgccgggcaatgtggaatacacgcagcatctaagacactagtcgggaaggtcttcaggtcaggattctattggccaacagcgaagagtgatgcagccgaattagttcagaggtgcgaagcttgctagtacttgtcaaaacaacaacatttaccagcacagcaactgcagaccataccagtgacttggccctttgcgtgctggggactggatatgattggacctttcaagaaggcgcaaggaggatacactcatgtactggtagtgatcgacaaatttactaaatggatagaat

SEQ ID NO: 118711 - DNA, 508 bp, Zea Mays
aaaaggtgatctattgtattgaattctttatattccaacttttagcaaccgtatggtggaaaaaacgtgccttacaaccatatcctattttggacagttctctcacgcaatttggctaaattttgcatggtctttattttattttgagaaacgatgtggcaaattgatgtgtggtgttttacttgagtggacataaacaccgtttaagtatgccttgaataacggggattataggaaacctattatcacaaaaggtcactagctagcccactaacatcttcatccactagttgtactctaataccctctcatgcgaatacaatgcgctcaatatcatagaaacactatttttagtttcaaagttgatctattcttttgaattatttatgttccaactttttagcaactgtatggtggaaaaaaggtgcttacaaccttaacctatgtttggacaaatctcttatgtaatttggctaaatttcccatggtctttattttattttgagaa

SEQ ID NO: 118712 - DNA, 839 bp, Zea Mays
gatgagcgctgatgtacttgtttgtaatgacatgttacaagtagaatgagcaccgtcgtccttgtagataggctcacaagcaagttgatcgtaagaagaaacaaaaatgatagaagtattctcggtgttatgtgtagtcagtaaaattttctattttcagaaagggagctataatggaggtacagcggatgtggcttcaaaaatacggtgctccactactcactccgaattaactttttttggttagcttgttgaatggaacgtgggctgatcaaccagcacttcatccctggcaaaacatgtctatccctatctatctatctacaactaaaacatgtctaggagaatcgtgaaaaaaaggaaaataagggaatatttggtgtggtgcctaacttactacagtttatcatgattaaggttggacatatttgacttgtttagacgtgtgttcagtttgtagcacgatttttcccaatatcgaagatctcattgataaagttttccaaatgttagaggaaaacataagaaactcgaaatacatcacatcttgagctattttgtcgattagggggagaacgtcgatgccataaacatcaagcttatcgaccgttttccaggagaacaaatgatctataacatctttgatagtgcagtggatgatcctaacaatcactacccaccagagttcttgaattcgttgacgccaaatagattaccaccgcatatcctaaaaacttaaggttaattgtctagtgattttgctcagaaatcttgatccacctaatgacttgcataatggaataagattggtagttcgagcatttcaaaggaacaccttg

SEQ ID NO: 118713 - DNA, 661 bp, Zea Mays
ggcgcttgcgcttgccgtcggcgtgtcgaggccagcctttgcccctcttgcccctgcccatggtctggtggaaagtgaggaagtgaagaagaagaagaagaaaagagcaagtgatcaaagaacatgtgaagaaaatagccagggcaagcggtctatttaaagaggacgaggggtgaccatccacttcctaccccgctcgccgaacagtcgcaagaattcaataagcgattcaagccgcctaaaaatgagtcaggcaactggcgccgtttcgcgtaacatggcaccggttggacccaagtcaactactcaggcaaatgattacatctctccatcatatcaagttactacttcaggacaacacgataaacactctgcgcaccaagacacccattgggcacacccattgggtgtgtcgcccagaattttcaagatttcctgaaggaacgatatccacaaaatatacgcaatgaatgtaccacgacaaaagggggagatcggttgagacgggaagaagtccaattgtggctactgaagcgcaagtccaatcaaaagaagcattgaagcacagagttgtgtgatgtccagctgaaggccatctgtctcaactagccagatgtccaacctatcaccgatcaaattgatttcagacctaacaaggcat

SEQ ID NO: 118714 - DNA, 425 bp, Zea Mays
attcaagaagactttagagttcaactatgaagagttcagaggcttgtgtgacaaagttcccgaataacctgcagggaaggaagaagatttagtataattagtatttcccgtatatcatcctattaggacttctatcttttaatcctactaagactcctttgttgtaacctactagaagacttgcctcgtgtactatataaggagggcaaggcttcatagatcggtgcaaagaatacataagcaaactgaagcaagcataagctgcaatgcaatacaacacacctaactagatgcatgatattactctgttcatcagtctgaattagtataaatcgttgcctttgtgttcatcagtgagtttagcatgcaacgaattccatcaatttatactttggacaactttataggagaattgttgatcatca

SEQ ID NO: 118715 - DNA, 1889 bp, Zea Mays
gtaggccaagcgtatgctaacgtatcttagctcacaaacctctgcttcggaaaaggttgacttttcaaaacaaaaggcgccacaggtaagtctctaataaaagctcggatggtactattaaaatgaatctatctataaaaacattactacatacattcatttttacttaacatatgccagaaagcactttagaggacactaatcctaaaaatgctacttttgaatctccaccaaaaaggtttgctctaccaactctagctcatacctttcaaaacaatcagacctatgtacactacctaattactagccaaaaaaagtagataatgctagactcatgaaagtagtctttgattgttttttacaaaccagatttgcttctattatataactataaatcttattgtccctccttaccaaacaattgttattttctctattacaacaatacttccaataaaagtgctcaaatacaaatctaattataataacaatatgtacatagggaagctctaatcttcccctctctattgattaatgattttaactgcaaaattagatcttctcaatattaattatttaataacaatatgtattatgttactagaaatatggtagtattgcttttcatttctttcttattacacttcctttttattcatctgagtactgttgatggcattacaaatctctcatcttcttgctacctaacgccagtactttaacatctcctctaccgatcatacatgaataccatgatatatatatatatccaaagcatttaaagaatgcttctctagcctattctccaaaagaacaacctcatctcatgttaatagaactttattttgatgcaacatatattaatatggaccctgctatccagttaccatttattcaatgccacatacttacctgaatttattttcctccaataattcctacctaatgttggtctacattttttctaatatgaatcttcattagcaactttgtgattaagcattgacatgctttcataagtaatataccattctttatatcacttcttacataaacaacaacggtctatgagacaataagctttgtacatagcatcactacaatttattcaggcacaatggtcttggaagctgattctgcttagtgtctactactacaagttcatgtcgtcacattcttcactacaaatatatgctaagaactattgtactaccgcttatatgttaagaatcagcatgttcatcaaatcaacttgaaagtaccagcttatgctactgcacaagtcttttattgttttttgcaaaccacatttctttctattatataactaaaaatcttattgtctctccttaccaaaaaaaactgttaattttcctgttgcaataatacttcaaacagaagttctcaaataaaaaatctaattatcatacttacaatttgccaataagtactagaatacattttcccttatttatcaggaaagtaatatcctattgcgtgccatttaattttataaatatttaacttttattctctgttccctattgtagacgcaaggagcttgattcaagctgcaatttcaatgactacaatgttaccaagactccaggatcgctccatccaataaataatatatcagcaactttgaactatcttttctcactatgtagtcatgaacaaactacttagatgtaaatatgcggcaaccatcatttgctacaatacactgatgatcaatctgcttagatatatactatgctactatgtagttatgaacaacctacttagatgtaaatatgtggcagccatcttttgctactatacactggcaatctgtttagatataaatatgtgataatacagtgtttgtcccataaatattatgccag

SEQ ID NO: 118716 - DNA, 561 bp, Zea Mays
ccaaattattgagaatttgccctaggtcaccacatcaattttgtagatctatcaaaggtgaacaactttgtttaagggattaaacattgttgttatgaagaatttggagataattaaacccaaagtcaggctgtcaggctgtttgatgtctgaatttcagactaacagcacaactgcaagaactttgggcacggattctggcatgatcgagcaagaatttgcctagggttgctataccaagattatagctggatcctagagctataactttgctaaagagtgtcgatcatgttattacataaaattaagagaaaattcaccctaaactttggctgtcaggtgcactaaatgaggaatggccatggtacagtactaaagaagatcgcctgtagccattcatcgtcgatgacctctccgctgcgattcgtgccaccgctgtctcgattcgtgctcggggaggaatggataacaccggggatgggtaaaaagatctgggcgggatggattgcgattgctagctggtccggccatcctgtccacttgccgcgcggccggccgagt

SEQ ID NO: 118717 - DNA, 592 bp, Zea Mays
gaactcatagtcgacaacgacaaacagttcgacaaccaagacttcagggatttctgcttttccatcggcaccaagcctgtcttcgcctcggtgtaccacccacaatccaacagtgttgttgagcgtgccaatggcaagatttttagtgccatcaagaaaaggcttcttgacgacaaaaagggcaaatggaccgaccaattactcgaagtggtatgggccctgaacacgacagagtgtcgggcaaccgggttcacacctttctgcctattgtatggatctgaagccatgacaccgcaagagttaaagcatgggcccctcgaacaaacaaatcagcagtccccgatgtcgacgaaccaacttccaaagatctcatcgacggagaccgcgtcctcgccctacaggccctcgacaaatataaagttcaaaccaaagcctggcgtgacaacgcagtcgtcccaagagagttcaacgaaggggacctcgtactcgtccggaccacccggacagaatcacggggcaagctagagctgaaatgcgaaggtccattcatagtcaagtcgaaggcatcccccagtgcttacaggttggcaac

SEQ ID NO: 118718 - DNA, 535 bp, Zea Mays
attggagcaaggtttccccaaagagctgaaggagaagccgatggagaagggagtgagacccacctccctgcaccttcggagctgccattagatttaacccaagttctggccaaccaaacccgactcattgaagtcctcaccataagtcttgagaaccagcgcccgaatggtggaaggcctcatgataggatgggagattttctaagactcaagcctcccacattcgctggatccagcaatccactcgatgctgatgactggctgcgcacaataaaaaggtagttagaagccatcggatgccccgagagccaacgtgttcatctggctgctcatcaactttccgggatggccctatcctggtgggataccttcagcgctgccgtcagagatgctacctgggcagaatttgaagccgctttccgagaacatcatgtgccccaagggatcgttcagctcaaggaagatgaattttgggaactaactcaaggtggaagatctgtcagtgagtatgtgcacaaattcacagaactggctc

SEQ ID NO: 118719 - DNA, 1655 bp, Zea Mays
aaagtaattgggtcaacagggagagagtgaactttggagaactccccaagaataccacctccctacccgacagcgcctgcaatgacattgtcttccaaaaacaggatataactgcgtgatactgagttaaccaatccatacccaagataacatcaaacgaccccaaggaaatcaccacgagattagctgaaaagacctcatcagcaagaatgacggaacaaccctggcagactaaatagctacaaatggatccattagcagaactaaccacgattggatgacccatcctttgcaccgaaagaccagcacgcgacacaaaatcctccaaaacaaacgaatagctagcgccagagtcaaaaagagcatgggcaacaaacgaatcaactgagaccgtacctgtcaccatgtctccctgctctctgccatccgcagagggtagcacataagctccagaaacactcgcggaagaggaagctcccagagtgaaattaacagaagaaccccacgaagtcgaaggatgaggcagtcgtggagctccgagctgggatggtacatgagcagttggtgcaggagtaggcgtggccaggtactgagggaaacctggcataggcacaaactgaggagtcccaggcatatagaactgctgctgaggggtggtacagaaaattgctgctcaacgattgacatcacgttgacagtgccctatgaagaggaagaagtcactggctcccaattgagcttcccattgggattcctcctacacaccacatccttgtgatcctggctgcagatagagcacctgccactctactgacactcggcacgacgatgcgcttcaccacaacggaaacacaccaaccctagcctgggcttaggaccaacccgatacctctgagtactccctcctgaagtaccctgattcagaggattttccacgataggggtggtggcactggtgttacgactttcccctcttgtgggctgaaccctcagtgttggccctcctcgcgtcctggccacgagactgatcaacacccgaagacttctgagattccatggtgtactgatgctgcatctccacgcccaatgcctgctccaccgtagtacgaaaatccaccaacagaaaggtgcccagagcatgcctgatagaaggttttaggccctgacggaactggctcgccttctccaattcattgtaagccacatgagaaacaaagcggaccatcttgttaaattccacttcatactctgtgatggacttcttctcctgcttgaaagacaaaaaatcaatcttcattttctccaggaaggtgaccgggtagaacctcctctcaaactgcctaatgaaaacgtcctaggtaaggactcctggtgaggaggagtgagctgcctgcacgcctctccatcaaatttgagcctcccccttcaacatttgcgtgccaaaacaaacacgatctccatacacaatctcgaaaacatccatcttatcctccacataagtcagccaatccgctgcctcaaccagagtaccactgccatcaaaggtgtcgagcttcatgcccatccactgcatcagagagagaccactgacgggaagggggcacctcagccccgccacctggagcagcatctgcagggacagtgcccctgggcac

SEQ ID NO: 118720 - DNA, 479 bp, Zea Mays
tgagcatttaaatatattaaaatcgagaactggatcgacatttacgcgaacttcgaggagcaaagaggcatcaaaagtcgatgcttcgtgttcggcgagcataattgtcgtttcaattctacagggacagttgaaaagacacaactgttcaacatgaaatggtttccacgtgcggctgagttaagagaaccgccagtggaaagaacatttccactagcgcttccttaagacaaccgctagtgatagttttttcactgacggattcttaagcaacccgcctgtgaactttgtattataaatacccctttcatttctcccacgacaggaagctagctcgcagccaactttcattgtaggcgattttggaggtccagattacataaaatacaagggggggggggtttgatcttcaatttttggaggaaggttgctaagaaaggttggttttatgtttctttatcaatttttgttcatattat

SEQ ID NO: 118721 - DNA, 486 bp, Zea Mays
ccaccggtagctgcttcgcctcgcctactgccacggtcgttggacaccaccacctcccactgcgtccaccgccccctcgctgccacatcgaacggatgaagtgcctcaccttcacgcgttgggtgttcgacgagatcaactgtctcgatgcggcctcctggaactcccttcttgccacttacaatgagcgaaggcgagatctggaggaagctgaacgggaggaggatgaaccaggaaatcaggaaatgtgtttggacagcgagatgtgcggtggcgagtagaggattggaggcacgatgatgaaccatgggtgtggtgtgaggcggcatacggggctgcaggaggaggaagagagcggacgagcggagaaggagacgcactcgtgcttggagaaagggagtgatgcacatggagggagcgaacacatgagagagggagtagtttgccggtgctgtgatgggtggcggtggtggcgacagcgccgag

SEQ ID NO: 118722 - DNA, 353 bp, Zea Mays
cgatatatcatcttcgaaaagttgttggccacccaggtgccgaagatcgatgcttctatcttccaaagaggcttccttagttctatttccctttgatgttgaagtctctatagcaactgccccccctcagtatttttcctaggtgcaacattcgcaataagtctatcgatttctgacatagttgtaccaagaggactgccactgttctcagcttgttgggcacctccgtcagctatagcaggagtaattttcttctgaatcactggaggaggggtgtcaaggatggccctcatcacgttcttcattagacgcttcatctgagcgtttctttcgctgggcgccgaattgtcttt

SEQ ID NO: 118723 - DNA, 272 bp, Zea Mays
cacaggagctttagtgtctttccggtatgcaaaattgtaacatctgaagttcttatgtagtccatcagctctagcctcagtctagtagtggagttcatgcaccccggcaaaatccttcagcgttggcactcttcccttggcttcggagagcccatatatacacactaagtctaactatggcatttggggtgagttgatgaaggtagatttcaaacttctttaaaacttcaccaatcatgtcgtaaagagggaatcaaagacctgctttgaag

SEQ ID NO: 118724 - DNA, 886 bp, Zea Mays
tagaatggatccatttggaattagtatgaattttctagggattaaacatgttttagcatttatttttgcattaaaaatacttttccaaatgaatttctatattttatcccctaactggaccgcgtgcacaaatgaaccaaaggccaggggcttctgtgtgaaaaattccgagacacaaggttaaactacggtggacgacatgttagtttagcgaaaacagagggtcttatatgcataactgtcgcggccgaaggggtacgagtgtttttcggctgttggatctcagtcagatggcacagattagatcgctacacgctacaaagcggtttggaactgggccatcggatcaacgttcaacggttaagatttaaaatacgcccgatccgatcctgcccttacgtcgacgatcctatggttagcacgagatcaagccgaggcggtgcaatctccctaatctacaccgtccatcccaaatcagacggtccgaggccatctccccaaacgatcccgacggcggcggcaccaaccccttgcacgacggcgccctggactggaaatccaatccgcgccttgaggtggccattttttaattcggcctagctacacgatgccccatatctgacgaatgcagtggaaggtcaagtacctcacgatttgatacagaagaacccgaccacatcaagcggcagacggttgagctccagcaaaggattgcttgcactccggtgagtctacgatcaccgcgatgccacaccagtattctccgcggaaaaacgaagccccggctctgaattccgaaggcgaatgcggcaacggggacgatgttcactggtggcactcagcactccctatggtggctgtggcggctctggaaattaggtcggtt

SEQ ID NO: 118725 - DNA, 426 bp, Zea Mays
gaacaacaccgacatccgtaaaagtaaataaaatatgagttttaggagagagtaaggtgtatgttagagatatgttggatctagtcatcactaggagctatcacagggtatttatagagtttaacgctatagtgtgtgtaatatcatatgttctattgctactcattgagttaggaaatacaaatatgaataagattataagctcgtaacccactgagcatcacgaccacctagctcaccctcttgttgcgatgagagttctagcctattggtcctaacccattattctctgtgcccatttaatagagtgaattcaatcctaggatagttggagacctctcaacccttcatcccactttcccttggaatccttcggttgagtttattaagggttgagtttattctaaatgttactttattcatttt

SEQ ID NO: 118726 - DNA, 570 bp, Zea Mays
ctgaatttgaattggccaagaaggcaatcgaagatgatacaccgcttggtgaacgaccttttgaccaagacttgggtgctcgaaggtatcaggttcatcatggtatagggaaagtcaagggtgcgaagtagctggccgaggctatcggtttcgccgaacaacttggatacccttcggggtctactatctttggggtgggccagatgattatttatactgctactcagacaatatggaaactaaagtatgccgctatatggcgattaatgttggtttcccgaagctggaggccatgctttcgactgtcttctcaagacttttctgattgcccggcttacactcatcttaaggtaatttctattgatttttgtttttttagctttgggttgcattaatggaataacttatttttcgctttttatatcattgcaaggctttaaggaacaagaagaatgttgagggcgaagtcgcttagaaagaaataatgaaactcagatccaaagtgtccgggcttcagtttgattgagatgagaaggaaaaatctttcaagatcctagaaaaggattttat

SEQ ID NO: 118727 - DNA, 621 bp, Zea Mays
gctctgtcgacggtgaccgtatgatcaacggccaaaccaacgcgttcctggcgatctaaggtagcttagctcaatcgagttggtcgaggagcatcaggggcacacgagaacactaaaacgagagggaagaggctatgagcggacctaagatgagctgaccacggcgaggtcacaccgctcggtgttcttgagtgatttgggggaaatcccaaactagggagttctagtggatgattcgaggcatgggttgcttctctggttgcacaattacatagcggagtaggcggggtcagcaatttataggcttccacagtggtggcgtccaatttcgtgaagatgtgctggcggccggagaggaagaaagttactggcgctcgggattagtggctttcaccgtggcaagctcccaggcgatcaccgggcatgcacgatgtgattcactgcgacgtggccaagcgctttagcacgtggtgcacagtagtaatcagccaacggcggtgaggtctatctgaccgattcgacgagcaagtgggtacggtgagcttagctgtgaccgagcccgagtcggtccaggcgccaagatctttacttgcccacggttatccgcatgtcacagcgcac

SEQ ID NO: 118728 - DNA, 469 bp, Zea Mays
cttttgtaggagacttgtcagaccaagtgtgggagcatggagagaaggttggcacgagtttcacgcggacgcaattattgtagggaaaccaagagcggaggcggcaatacctgtttgaaggagcatctcacatatacagggaaggatgtgaagaaatgtccttctgtttgtctggacgttcgtcctccagacataaagacaagggaaaagaagagggaaatgtttaggtagcgacagaggacaggtgaggcagccaaaacattatggtgaatcacacgatgatgaatatgaggttgaacttcaggctgctctacattagttacgggaggattcaaatttgtcaaatatgtatctaccaggtcccgaggccacatatattcaactattttatggtaataccattttagatccatatgcttctacaagcggctaggtgtgttacttttgtttcgatgttatctatttctat

SEQ ID NO: 118729 - DNA, 565 bp, Zea Mays
tcgaccgcacggaagggaagattcataccacagccgacagagtcaggcgcaagatggctatcacagaaccgatatagagattgatgtgtttgccgtgcgctccggcatcagcgattccgacaggccccacggcggtcgcaacccagccagcggcgagaaccctgggacaaggacaattactagcgtcggcgctacaacaagcggatcaggccaagaggacctgcttgtggccaccaatattacaaaggcgtgtaagagtgaatccagtctcgctgctccgccatcgaagccgtctgtatctttttgttttgttttggtcggagtttatttgctctagagagaccagtcacctggtatggaacatctactaatttcagagaattttgcatgttcgtctcggtgtgtcgttacacaatttgcggatgctgcaacgacactgaagcctgcgtagaggtgacgggcggcgaagaagctagccaagctgtgaaaacggacatagacatatggtaggttatcctgtatccttttcaatcgaatgtaggattggatacacataattataaat

SEQ ID NO: 118730 - DNA, 1022 bp, Zea Mays
tatgggaaggaccattcatagtagcagaagtcactcggccgggatcatatcgtctcactcagatggacggcacggaaattgggaactcatggaatatagaacacctcaggaagttttatccctagctgtatttcaaaagctattgggacgacaatgtactctgtaaaatgggaaatatgtcatcaatataaaaggcttcaagaatactcagtttgttcacgatcgacctacattcttacttaactcggggtgaccactatgctctgctaacagagcaatcggcttaagtcggcaacgacttaagacggtgcaacatgctcgcgctcttacttaactcggggtgaccactatgccctgctaacggagcaatcggcttaagtcagcaacgacttaagacggcgcaacatgctcgcgctcttacttaactcggggtgaccactatgccctgctaacggagcaatcggcttaagtcggcaacgacttaagacggtgcaacatgctcgcacttacttaactcggggtgaccactatgccctgctaacggagcaatcagcttaagtcggcaacgacttaaaacggtgcaacatgctcacgcttacttaactcggggtgaccactatgccttgctaacggagcaatcggcttaagtcggcaacgacttaaaacggtgcaacatgctcacgcttacttaactcggggtgaccactatgccctgctaacgaagcaatcggcttaagtcagcaacgacttaagacggtgcaacatgctcacgcttacttaactcgggattactactatgccctattaacaaaagcaatcggtttatgtcagcaacgacttaagacggttccacatgcttacgattactcatataggggcgacctctatgtcccgtaaagaagtttcaaaatcatcatacaacattttacttctgcaaatttagatactgccgaattctaaaacgataggagaataacagtagcattcaaatatcaagctggtgtcctctaacaaaatatccg

SEQ ID NO: 118731 - DNA, 627 bp, Zea Mays
cagcccacggttatccaacccaacccaagggagtccaggcggcggcgccgccgccacccacggcggaggttccaccggagacatccgacacggtgccctggtgccccattcgcaaccccgcatggtccaacacgaagctactggcatgggtagagtattggagcgctatttacctaggtgaagatggagcggtgagctgcccacgagcacagcggtttaggatgcgtcaacacgaacgccgacgagcaattgggattgtcacagtggccgaacctccttgtctcggccatgggcgcaaccccagcgattatacgaagcacccagagtctacactgaggcctcgttgacggcgggcatggaggtccattgcggcaattctccctcccacggtctctgtctactctccggccatggcgacgaggtggcttcctccggggtattgggcttgggatttgacaagaggaggtgcggttagactttctggacacgacgagagaggcggcgcccggccttagttatatcctagggatccggtcaaggcacgaagcaactagaaattcgtggtggttgttgagcccggtcagtagaaatcgggcacacgcggagatctcgcccacggcctattcg

SEQ ID NO: 118732 - DNA, 433 bp, Zea Mays
tacttacaactcattttccatattaatttaaatgatttaattaccctttggatctcggctgctatttcctaagagagcagggttatttttacaaattcgtggaccattatgtaatgatcttataatggcgcgggatggcgggtttatttggtaaaacgacaggggttcttatgaataattcctcgacaaaggggtatgcacaaatcggggccgtctgatctggttccagtggttcgaattagatcaataatttaaagtgaatcaatatactatgctagtcgttggatcagagatcaaccatctagacgtttaagacgcccgatcaacccttgtccatccatccccatatcgacgactgagaagagccctgactgaactggtactgggatctaatcccaagcgttccccgcaagatcaacgactcaggattcac

SEQ ID NO: 118733 - DNA, 428 bp, Zea Mays
gggatattttgaataacaatataaaacatagattttcacaaacaagtcatgtactttccaaccaatgtaatagtgataattcaaaggattgaacaacactttattcaacactcataaacataagacatttatacaattaccttccacttatactaaagccagtcatgcaagtatgtaataccgattgcactagtgtgtgcctcatgtttttgtcatgggagaggcttcatcaacggatcaacaacattcatatccatgtacactttgcaaatcttcacatcacttatattaatgatctcgcggataaagtgatagcgccgaagtatgtgtttgaatttttggtttgatctaggttccttggcctatgcaatagcaccattattatcacaacaaaggttccaaggatttgacacactccaaaccacact

SEQ ID NO: 118734 - DNA, 434 bp, Zea Mays
cttgaatcaggatgccggcccttctgctcctactgctggggaagtgccagtgccagtttttactgaagctgaaccgactgatgctgactccaatgggtgtgacccgactaatgctgaccccaatgggtgtgacctgattgttgctgatcccaatgggtgtggccttgatgatgctgaccccaataggtataatgtccgtattattgatgaagatgaggaagaggaggaggaaatccccttaattcggaagaacagccggcgctacatagccagcagggagagtagtggtgttccttctccagctttgtctgctcttgttggtctgcaagaattgtctttggcaaattttgatcagactctcgaggatatggtccctgaaggtctgttgttggagccggcagatggtgggatgatggaagtttgtgctgatgtgc

SEQ ID NO: 118735 - DNA, 594 bp, Zea Mays
gagatgtgaatgtgtacttgagagattattagattcttgatgtaaccttccgaccaaggtaaacagagtcgtattgatttcgaaatggattgtaattgttgggacaggtaagttgatatatttgatgacttgctaattctctgatgtagcctgctcacctaaggactggctgacattcaggccattgatgtacctagcgttgaaaacataagcatctgtgggtgtcaattctcgtgttttaagtgaggtcccactattttgaccgtgcacaataaataggtggatgttactgaacttgtatatctctatgtgtgcatcttctccaccaggccgagatcagaaaagcctgaaccttcttgacggggagccatcttgacgacacgtgggaggggcagacactgcacaggacgctggcgcctgacacatgcaaccccgtggatcaactcttctttcattatcttttctattcagttcattgaggtaatcaccattctttatgtttgtttctaacagctcaatcgatacaacattgtcttctaatggactactaattcaaacctactacttggtagatttcttatcatgtattttttc

SEQ ID NO: 118736 - DNA, 322 bp, Zea Mays
cacgatgttgttcactaaagaaagaaggataactaatgaaacatacaaatggtatgccactggcactaatagtttcatatatgcctatgcattttttacagactttgtgtgagaatattattctcactttctttgctttctgtttttactcatatatatgcaaactggagtggaatctttgatgcacacctctttcgcctcagatttaaaaattactgtttttaatcattttgcgaggaaaactttagatttaaaacgctccaattctgccctaatttactttctgctgagagattgcttcagcttcattgattgcaattac

SEQ ID NO: 118737 - DNA, 278 bp, Zea Mays
ctgtggttgaggtagctccttcagttgctgctgcaatccctaaaaagtttcagagcatacggactgttcaacaagccctcccttcctccagttgggtacaggatatcaaggggaatctatctcttgctggtttagaggaattcttgcagctttgggacttattagaagactttcaattgcatgagaggcccgacaggcatgtgtggaggttctctaactccgggatgttttcctcaaggtctgcttacaaagcttttcactggtgctgtttcctttga

SEQ ID NO: 118738 - DNA, 399 bp, Zea Mays
gtgagcagtttgctccgcctccccaccagggggatccgggtcaatcctcttctcatcctccgccctaggatccttctggaagtgttcctcccccagatcagtctggggaagaacactttgcatctcacctggcgcatcatttctttgctccgcatcatcctcctcagtggtgatctatggcatggtggctctctcctttcttggttcttgttgccaaaaagggggagaaggattctcatcttagcagcacctttaatttatgtaatgaacacctggtttgtaataattattattcatctgactcgtgatgcatgtggtgatggcttagagccacaaactttttaatgatgtgatgtgatgacattattgtaatagccagtagtaacatttcatatctta

SEQ ID NO: 118739 - DNA, 315 bp, Zea Mays
tccagcagctcacgcatgtgcatccccaaataggcactgtgcattgtgcatttagggtagcggttttcagtaggtcgcacttgcagatgtgcatcccacatcgcgacaaactaccacatgttggcacctaatacaaagcggggatgtgtgtgccattttattgtgaagcgcttgattgttgaaccatctatggacaagatggctgtagggacaaaggcaatgtttgcaccatacatatctgatgagttgcgtcttcaagttatgtctttgctctatgttggcattccagtggagaccataatgcagaggcatact

SEQ ID NO: 118740 - DNA, 543 bp, Zea Mays
cagggtgaacagaactgcccgctggtaacgcaagttcataagcaacactattcacttgacgaatgatttcaaaaggtccgaagaaccgaaaagcaagcttttgaacaacacgatcttcaactgttttctggcaatatggctgtagcttcaggaataccttgtctcccaccgcaaaaactctctccaccctccctttgtctgcctgttttttcatccgatcctgggcacgttgcagatgaagcttaacttgttgaagcataagttgtctagtctgcagccaagtcgataaatcaggtattgagcactgctctgttgattcgagtcccaattgagaaggcgtgtgaccataaaggacctcaaatggggatttaccaagagacgtatggtaactggtgttataccaaaattccacaagtgacaaccacgaataccattgtcgaggacaggcatggacaaagcatctgagataagcttccacacattggttcacacgctcagtttgcccatcggactgtggatgataagcactactcaaacacagtt

SEQ ID NO: 118741 - DNA, 410 bp, Zea Mays
gaaaatcgcatgcagccgatcgtgcgcgggttctggctcgaggtgattccagcgtaaaacgtgagctaaaacagcgtaaacgagtacgaaatttagcgtaaattctatttatgttttgtaacagtaaacatggcctaaaattatggcgtggaaatcgcgtgcagccgatcgtgcgcgggttcaggctcggacggattccagcgtaaaacatgatctaaaacagcgtaaatgactatgaaatttagcgtaaatcctataattgttttgtaacagcaaacggggcccaaaattacggcgtgaaaatcgcgtgcagccgatcgtgcgcgggttctggctcgaatgatttcagcgtaaaacgtgagtttaaacaacgtaaatgagtacagaatttagtgtaaaacacgaccaca

SEQ ID NO: 118742 - DNA, 696 bp, Zea Mays
gtgggattacatagatctgaagtagcaggactggagaagaagcttgatgaagttactgaaaacttcaacgtcgagcaatcaaaatgtgagatattcgacacagaacggttgagggtttagaaaatgttgagaagcttcacaggcaacggaggagtgctataatgttgctatgcaatgctcaaacaagttgaaaaatgcttttgttagggttggtgcattctcgactgagcaaaatttcatttttggtgatctcgagggtgtaatcaagtggattgagggtgaagtggaaacatttgacgaagtcctaactggcaggggagatttttatgcatgcgtaggggctcgggggctgtattactactagaaaacgctgattgtgaacatgccaaggctgtaatttagctgaacttcttagtttcagcgactaacatcaaggagtcgtcagctgaagctatctccctcagtgggaaattttattccgaagtgtggatgaatggcggtcgagagatggcagatgaagccatcaggcgaaatgaagaagaggctcatcttgcctcagaagaagcaagaaaagctgaagaggccgctgagcgttaaatgcgtataggtacgtttttcatattttagcttcgtaagaatgttaacttcgtgcttgacaaaaccttatattttggtgtccagagccatacaaccctg

SEQ ID NO: 118743 - DNA, 428 bp, Zea Mays
caccgggcggatggatttggtgtcgttacttatcaccctctatctcccgatcaagggtgcatactcacttcccgtgccccatctccaaattccgttcaccctacatagcatgctcccgccagtcatagtcatgagtacgatttaggggggtcagagtcttcattgttcaggcataggtcgtctgcccaaactgaattttcctatgtttgacggggcacatccaaaattttggattgctcgttcacaggattactttgctctgtatcgtgttgtgttcatgcatttgttaggagcagcggcttcttggagccaaagcaacttaggaccggttcgtggtcctagttttgtcagcggattctcgatcgctttagcaaggagcaccatggactgctcgttcgccaactgcttcatctcaagcagacaaccac

SEQ ID NO: 118744 - DNA, 397 bp, Zea Mays
tcggctaagcacaacaaatatgctatgctccttaaagcggataataagagcttgcacaataagtccagtgaaatggacttcaagcttgaactcatgtggtatagtcttcgccataagccaaagtagtgcacacagtacaataacatcgactctagcgatgaaagcaaatatctcatcttagcttgggatagctacacatcacctgacaatgttggaccaacaatcttattagttgtgatagggcaatagtgcaaggcaaaggaaaggggctagtaacaagtattatttagtccatgtaatggagaagaatatattgaacaagttctacaaggccagccaaaggatatctcagtaaaaaaatatggattagtcaattgttggtcactcgttctcaaat

SEQ ID NO: 118745 - DNA, 536 bp, Zea Mays
tgatacctgaatttggcgaaggggcctatttggctgccaaaacaaaagaaattgttcctcctgctcagaggactgaagagctagctataatgccgaagctacattcagttgagctaattgagacgaaggctgataaggataaggctgaagggtcaagaattgaagaaataacaaaaatgccagagattttgagcccttcatcagaggtaacagtgccaaaggcacaaaaggggtctgccgcaactcccaagaggagaaggatggcaaatgtgctagatgttgtgttagaaacagcaaaaaccttgagtcctgctccttcaagaaaaattgtcgaagcttccaaagcgtaacccgaagctgaaatgaagcaggcagaagttgaagctgcaacaattcaagctgaaaccgaatttgggccttcagaacccactgagatagagcctgccgtagttgaagaaaaggcgacagagcaaattgcgtctgaaaaggttgaagctcctgcttccgaagcttcaaaagaaagcactgattacatc

SEQ ID NO: 118746 - DNA, 920 bp, Zea Mays
atcattttcttcctctaaagcacccctttactgctaaaggcgttgcccaagtatttcttgagaatgtggtgaagttgcatggggtcccaaggtctatagtgtctgacagagacaaggttttcaccagtgcttttggaaaaatctattccaacttatgggagtgaagttgttgatgtacactacatatcaccctcaaactgatggtcagagtgagcgtgtgaatcagtgtttggaaatgtatctcaggtgtgctgtgcatgaccaacctaacaagtggaagagctagctcactttagctaagtactggtataatactacctaccattcggtgctggagtgtacacccttcaaggtgttgtatgggtatgaagcaccattgcttgttacaccaaaactgttgggaattgaagatagggagatagctgactggattgctgaaaggaatgccttttcagtcatgttaaaggagcagttagcatgagctcagcttcgcatgaagcagtatgctgacaagggcaaaactcctagggaatttcaagtgggtgatctggttttgctgaagttacaaccttatgcacaaaagactgtggtgaactgatcctgccctaaattggcatttaagtactttggtcctttcaaggtgatatcaaggattagggtggtggcatacaagctagacttacctagtgatgcacaagtacatccaatctttcatgtgtcacaattgaagtcatttctgccttgttattctccagttttctcagagctacctactacggtggatttgtctcaagggggtatagagccagagcagatccttgatcgaaggatggtgagaaagggcaatcgagctattgttcaagtgctggtgaaatagactggggtgcctaaggaagctgcggcatgggaggattattcag

SEQ ID NO: 118747 - DNA, 492 bp, Zea Mays
aggcgacaccatagactcagcagactcatcaggctgcccccactggcaccccgatgagacctacaggccagggcactgctataggcactacatgcttcaagtgtggcgtggctggtcactatgctaatgtttgtctgacgaggaactccaacacaccggctcatggtaattctcaaggcaagcagacacagactccaggcagcaaccgtggttacatcattgccagggttaatcaaattaatgttgaagctactgaggatggtcccaacatcgtcattggtacgtttttcattaattccgcactagctactatactttttgattctggagcttcacatttgtccatatatgctcgttatgttcatgcaaatagtcaaccttaccttgcactatgtagacctatgatagtcattacacctaaaggggcatatgaagcaacatatatgagtcataaaatagaagtaacaattttgggaaggaaattttgggcta

SEQ ID NO: 118748 - DNA, 303 bp, Zea Mays
acaaataattaaccatagaaattgtgatctcaaattgatccataccagtatgaatcaagagaacatagaacatgtgaattatataaatcatataaatacgataaacatgtatactgactgaacaaatgaaagtaaacagatagaaacctaaatagcatgactgaaaaattaaaacagacagatctatcatattataataagacagaacagataagataaaatcattcgtaactatgaaacagcatagatgaaaatatgaaacatatataatctccagaacacaaaacagtaagtaaataaact

SEQ ID NO: 118749 - DNA, 665 bp, Zea Mays
cccaaacgtgtgaggtcagcggatagggaggcgcaggtgcaaagcgcaagggcatcccgacgagagagctaagaaaaatgttaccccacctaggcaaggcacagaaatgtatgtttgtcccaaaaaaatcaatgaaagacgaggatgcacattgaaaccattgtctacattttgttcgtgccgaggcacatagaaaaatagaaaacgagcgttcttatacatactaaggcaccacacggaggcacagtacaagaatcctaggtgtcatcatctaagtagaggaagatgggccaccagtgggaggctccttggtcagggaggcggtcagggagtcgatccgactcatgatcaactaggtgaagggacggacttcatcctcgatggcatctagatcctcattgcttctaccggcggcataaccctcggcgatgatggtggcatcgatttcatcaaagtgagaaaccatttagctaagggcgatgccaccaactcggcaaacaacttcagcaacagatcgctccacatggtcgggtagctcccatagaagatcagccaggagcgcttcagtcgatggtggaggagagaggtgggaacacaccatgctagcaactaggaataactcatggagttcagagctcctctccgaatgaagggagttcgctcgg

SEQ ID NO: 118750 - DNA, 409 bp, Zea Mays
cttaaactggcctgagtcggcccactacgggcagaagcgcgcccgtgcccgcgcagactttgcgaatagacccctggcgttttgaataacccggacgtggtgccctacactatttttgtgagtcgttgacagtttacaaggacccccatgttctaattgttcgcaggccgaggtccacgacggtgaacagcacaggccgaactccagtgagcctatgccggccggataccgcaacggctggggctcccgtgcagcagacaccagattggacgcccccgcccatttcccctcaatcaatttcaccagcggggctttgaatcaaccggttcacggcgaaagtgcggatgatcagaggggtaaacacattctgaacaaccgacgacatggatgacaaaattgaagcttgggg

SEQ ID NO: 118751 - DNA, 588 bp, Zea Mays
attgatgacatatttccactttacagattacatcgttgtcccagcagttttgagatacagctagggataaaattttctgaggtgttctatattccaggagttcccaacttctgtgccatccatctgagtgagacgatacgatccgggccgagtgacttctgctaccacaaagggtccctcccataaaggtgataacttgtgtcgtccctcccccgttagaattcggcggaggacgagatctcctactgagaagaatcgctgccgcacggccttgtcgtgatagcgtcttagagtctgctggtaccgtgctgattggatcactgcatttagccgttcctcctcgagtacatcaatatcctctagtctggtggcctcagcttctgctatactgtcgaagatcaaccttggagccccaaacttgagatcagcaggtagcactgcctccgacccatagaccatgaagaaaggggtgttcccatgcagggctcggctaggttgggttcttaggctccaaacaacataaggcaattcccttatccactttcctgcgaatttttcattcttatcgaagacttttttcctgagtgc

SEQ ID NO: 118752 - DNA, 685 bp, Zea Mays
gtttacggtcttcgtggccctctaacggttacagtgtgaggatagcgtgcgctccgtcaggccaagtcaaccggatgagtggacgcagcaaaacagtgttgcatgtcacacatgaatagaaattttttttccccttcgcggacccctttttattcaccggtggtgccagtaactctttcctccctacgcttacgtatcaatgtgcagatagctagagagctcgttgttggcacagatttggggccaaacaatagtgtgaagctttgaggcggtgctctatgcaggagtgcgcgcgctaatggtctgtgatcttgcactcgatgatctgcaccatcgctgcaggagctgctcctctctatgtacttccggatgatccgtgcataagctcgtttctagttggttctcaaaccaatcctgcagagtttgctaacaaatcgcacatgaaattaggatccccaactgaaagtgttccagcgcggaccgtccgagtcaccacaagagaccgtacggggtgtggaccgttcagactataaggtcggacgttcggccatatttggtgctcaacactcgccctagcagtggtggatctaggaatggactaaaggaggtgttgatttcttagtgatcaatgacacaggcaccacaaactattaggaggctaatttttctcccttcttcttcctcc

SEQ ID NO: 118753 - DNA, 954 bp, Zea Mays
atttgttcgagttaagacaatcaatttagaaccaacaattcgacttgcaaattttattcaagtcattagtgcactaaaattactacaaccaattaacaacgcattctccacgataatcacccaacaatttgccttttaaattagacatcacatgagcactactactttttcatccgcgaccataaccatgcgcaatttggttacaacatcccaaacgggtgcaagaacactagtttctagttttaaccccatgattgttccattaatcattttaactgcttaatcggcatcgaccgacttaaccttcatctcgacggtccgagcaccacaattcacgaacgtctacctagacatctagaattacatagagagcctactacttcacattgcaattcatacagaaccacaaggttacaataataacacacatgtaatcgacccttctctacgaccttcagttaggtcaccaacagacgacatgatgactacgaaggcatgtcaccatttcatcacactcattcctcgcctatatgcgcactaattcgtttcttgcgaccatgcactgaaaatcgatccacactacacgaaatacacttatctcttatttatgtgcagacttaacacctttcgggataaagcgtcactataaacaccttacacataattgccttaggaacctattagttccctcgaagacatctattcaagtcataaacacaatcatacacttatttgtgaagcacaatttaaggaacgcctaacgcgtatagactcgacttataattatagaggaagtgatgactacttacagcatgtcatcacctctctacttaagccaaaacaatttctactatcgactaagagttctaagcattaaacacactgttactttccacgcgcaaataaacctcaacttaacactagggacaccgatggattattactaaactcatc

SEQ ID NO: 118754 - DNA, 563 bp, Zea Mays
aacccctagaggtgaacaactcaagtatgcacttcagctcctgtttccagcatccaacaacgctgcagagtacgagacactagtccatggactaagcatcgtcgtctcgctcggcatcaagagattaatggtgtacgacgactcactagtggtcataagccaagtgaacaaagactgggattgctcaaccgactcaatgaacagatactgcgcagcggtacggaagctagaggacaagtttgaaggattggagttttgccacgtggaaagagatcgcaacgcagcggcggatgcgctatccaaactggggtccagttgggcccaagctccacctggggttttcgtctaggagatacagcaaccaagtgtcaccacagattagatggaggaatgtcacattctgggtcaagcagaagtagatcccaacgactagagggagccaatcatcatatacataagaagcgaagaagaaccagatgacaaggctatggcggagcacatcgcgagacagtcggcccattataccattatagggggcctactatatagaagaggtgcaggag

SEQ ID NO: 118755 - DNA, 469 bp, Zea Mays
tgagttgcccgcaactcaatcggaggaaagggagggacttggtggccgagaattgatcaacggagcagtagtcgccgccgtggttcacacttcgtcgtgggcggggcttagtgtgccgcgatccgaggtatgaagacccccatgcttttcgtccttcttctctcaacgtattgcgagcgctagtggtgggttgagtaccggggcactgggttgggagatcgctggcggtgaaagtcaccgtgttctgctcgggccctgtcgcggctggtacccgggagagagaaaagtggggaccgtgagatggcccatcgatggatgagattaaatgtatgggcaagtagtgcctggccgtcggattcagatggacgctcccgattaagtgatgcataccccctttgttcttttgatccgagacgttgattaacgatccgatgggttggatcggatcaggccttaatgaaatctgggt

SEQ ID NO: 118756 - DNA, 516 bp, Zea Mays
caccatgggtggggtgataacccggtcattagcttgacagtaaccaggcctctgcctatctaattagttcatcacatggcctggcggcccggccctagctcgtcagacactcgacgacacactcggacttgttttcagtcaggcaggaatttttttctatgcatctcatggctccatcgcaatggctcctgcccatgcaatgaaaccgaaaggatccaatgcaatgtaatccagcattagagctcaacaactgtcctacggacgacggacctgtggttagagtatgcgctacgcaggacaacaagtgttgcatggagaaccaaccatgaggctgctggtagctctctgtcgcgtttggagggggtcgatggctccatgcgtcgtgttcagtaaagctctccacatatagcccgggctgtctgcaagaaagtgtgcgctgcttttccatttgcaaagcttgcgtcgcttttgcggtcgttatctgtagtaccctgccactgccagcggccaaaccgg

SEQ ID NO: 118757 - DNA, 398 bp, Zea Mays
gccgattcggagtcccgtccgagctcacagttgacaacgacaaacaatttgacagccaggacttcaaagacttctgcttctccattggcaccaagcttgccttcgcctcagtatatcacccacaatctaacggtgtcgtggagcgcgccaacagcaaaattttcacggccatcaagaaaatgcttctcgacgataagaagggcaaatgggccgacctgctacctgaagcagtctgggcgctgaacacgaccaagtgccgggcgactgggttcactcccttccgcctgctatatggatcggaggccatgaccccgcaggaaataaaacatgggtcaccgtggacaagcacttcagccgtcctcgacgtagacgaaccaacttccaaggacctcatcgac

SEQ ID NO: 118758 - DNA, 405 bp, Zea Mays
gactccaatccaagttgagctatggaccatgtacttcgatgggtcgctgatgaaaacaggagcgagtgtaggccttctcttcatctcacccttcatggtacacatacgttatgtgatacacctccaatttgttgtgtccaccaacatagctaagtacgaagccttggttaatggcctgtgcattgccattgagctaggagttaggcgcctcgacgttctaggggactctcagttgtcatcgactaagtcctgaagaactcgagctgtcatgacgcgatgatggaggcttattctgaagaggcccaacgcctggaagacaagttcttcgggctagagctcaaccacattatgtgacattacaacgaggttgtggatgaactaacaaagatagcttcatggcgaacc

SEQ ID NO: 118759 - DNA, 559 bp, Zea Mays
gaacgacatcctcaagggcctgatcaaaatccgttatggacaattcttgaaggctgacaagagcagacagagctggagaaggaatatcactatccccctactacctctgtaatgccggttattcttacgaaccagcggaactttttcttcctctttttcgtcctcatcaaaaatacggacaatggccgatgcacggtcgcacccattgggataagcttcaacacgattacacccattgggatcagctggtgcacggtcacacccattggggaggggacatccaagaattttcaatagattttcccaagcagtcacatccatacagtatacgcaatgaatgtatcaagacagaagaaagatatcgatggagatcagaggaaagccaaatatagctactgaagtacaagtctaatcaacagaagcattgaagcacaaagcgaaatgaagaccagccaagagccatctaccagacgtccaatctgtcgccgatcaaataaatttcaaacctaacaggacatgggcagatcacgctgctggtttctaaagcaggaaatgaaga

SEQ ID NO: 118760 - DNA, 634 bp, Zea Mays
cacgaaatgatgtggaattgagccgatacttcacgaataggtttgtatgggtgaatatgagtgaagtgtgtgcttggtttgaatttaggcgaagaaaaagagatttgggcactcggctcggaaacgatcgctcgaaacggggaatttggtgaaattaaagcctagaatatcggatgggcgtgaaattttgcgaatatgttactggaggtgttgtgaaggtgcctgaaaaatttgggttcaattggaacacttttggctggtttgggtatttcaccgagcaggtggtgtgcgaggatttagggttttggggaaatggctatttgaggtgggaaaaccctcccgaaggagctaggaacctgcaaggatactcaatggccacataggaacacattacaccacatggattcactgggattcacaggattttgaatttggcacaaaagggtggaaataaggggtgcactgcctagagaaataaagagagagagagaagacagagggagaagaggctgctcaccgagcgagggcaggagaggagcactgggtcgaggtcgccggagaacagtggacgccggtgaggggagatcgccggtgagagggagcaattcggcagagaacagagagcagagagcac

SEQ ID NO: 118761 - DNA, 1208 bp, Zea Mays
gctggtttggccagttggcgggacgaatgtaagtggggtttttgaaaggataggtagttgaacggtaaggaacatttgtagaacgagcagtcctgattaccacctttttgcgtttcgccgatgactgagaaaaccctgacctagaacctttccatgcctccttcacattttgatgtactcgcgccttttcttccacggctatggccacacttattgcccgattgaaggtaagatcatagcaagtggccatcttcttttgcaattttgagttgaggcctctcataaagcaatctcttttcttgatatccgtgttcacatgctcaatagcatactgagaaaggttgttaaacttcccaatatactgcatcatagtatctgccccttacctaagtcgcagaaactcctcaagcttcacttgcaaaaccctatcaggaacatgatgagtacgaaaagcttctttaaattcaacccaagtaacctggtgatctggaggttgtatggtgaaaaagttggaccaccaagtgctagcggctccgcgaagttgttgtgcagcaaataaagacttttgtaccttagtgcactgaataagaccaaacttctcctcaatcacctccagccactcaactgtgtcaagaggctcttctcatttagcaaaacactggcggctgagtctccataaattccatgtatgttgcatttctttgcttattcaggggaatacgaggcccaccttgattgttttgatgatgagaaatctcatgcaaaaccctagcattatcagcagtggcattcactagggcagcaatggcatctgccagtgtacgtggaactggaggtggtaggggttgatatcagcttctgcaccaccacgcgatgtgccagccccattcgacccacaagtacgcataggcatctggagtaaaacaaactcatgaataaacatccataaccatgaaatatattacatgagacaggtatatggagtattattcattacaataccaaaattgacatagcttaatatcctatgcctacactagaggtcacgacaccatactcatgccacattaaacttctgtatcactagctatctcagaaacatcactacctcttggggactcaacacctggtacaagcataggagctgcttcttcctccaagtctgcatcaggctcacccccatcaactagcaccacaccaccctctgc

SEQ ID NO: 118762 - DNA, 622 bp, Zea Mays
gggggagagaggtcggctgtaataaatacatgatggtgatttacgaatgtaaaaacaaacaaaaaggcaaaaagtttcaaataaaagtacctataatcatggcgcgtgcggcagcttcttcagcttgcttagcttcctcacgggcgccgtgagattctttctcattcttttaatggcttcgtcagccatctcacgaccacccttcatccacacatcagagtagaatttggcgcccaaggtagaagtctcaaccgaagggtccttagtattgtcagcggagagaatagattctggctgggtcgcggccttgacatgttcacacccagccttttctaagattgctgcaatccctcgggcaccgaaaaaggcacaaaaatctctgtgatcgctaaggatctcattgaaagcttcggcttcttcacctatccattggataaccccttcggggtcaccgcgaataaatctatgttctgaggaatacgcccccaccttcgcaaagctatcttttagtttcttcgcgcagttcaaggatttttcataacacctttccctggaatcacgaagctcttcaacattcttttctagccttgagcttgtccattcacttatctcttgctttgcc

SEQ ID NO: 118763 - DNA, 276 bp, Zea Mays
ttcctccttgataatgctttctccctattgaattcttatacttttgctttcatgccattgcattgccacccttgcgcaatatctaccttgatatactaaacctttgcctctctacttttctccatgataatgctttctccctaacccacttcgtatccttggttatatcatttatcctcactttaatagttcatggttatcttatttcactcttggccaccaacaaatatgtcttgtctaactccttgataattcttacctaactccttgatgtta

SEQ ID NO: 118764 - DNA, 324 bp, Zea Mays
gattggttgaaaagcatcgaagctacaagcgatgaactgcttgggccatactcaaaggcagaagataatgcgctatctgcggccttcgaaagccgaaagaagaaaaggttaaatagagtttttgatgctattgggttcatgtaccctgattaccgctacccgccacgagggcaaaagaggaagagtatcacttccgggaaggattctgcttcagctgctccaagcgagcccacgccgaagaggaaaaagttgaaggttcttactcatcggccacgatatattgaactggccatagtgcctgaatttgtcggtgagacctcttcg

SEQ ID NO: 118765 - DNA, 526 bp, Zea Mays
cgggggtaagaaagtttacggtgaggaagaacgccttgttgggtggtaatgcatcttgaagattgaggttgacttctctccttccttgacgtggttgatcttttccttctccggtcttgctctttggtgtctccatccgggttcgggacaagaggctaagatagatttgttatgtaggtcaagttgttgggtatggccgagatgatctaggtcactagtttaagcttaagtggatttgaagtatggcttaatcctttgtaccagcattaagtaacttacactagattggatcatataagcttagataggatctagattagacggaatatgactagattaaactagtgaagatctcattattttggactagatcatgatcatggtggggtaaatcaagtggtttggataatatgaatatttcaagataagacgaatctactaagtaatagagtatcttttaagataagatagatttatcaaactagatatattttaattaggataagttaggatcttttgagatgag

SEQ ID NO: 118766 - DNA, 591 bp, Zea Mays
gactgttcttccgagtcaaagggacctcatcttcttcctccccgttgttttcatcagcaacacagacaacacacccattggggtcagtagcagatggagcacacccattagggtcagcagcagatggagcacccccattggggtcagcagcagatggaacacccccattgggatcagcgtcagtaaactcaggcacgggaacttcctcagcagcaggaaccgaaggaccagcatcccgatccaaactagatactcgccgaagacgtctctttttcgttttctgctcatcagcaggagaatcaagttgattggctcggcaagggcgtctcgggcgaacactgacaggcttctgaatatccaaggttataccagcttctgggagaggcgccaccaccaatgtcccagcaggagcagcatcagaagagtcctcagccagcatatcgagcatagcacttatctctgcatcactaggatccaaaggcacctcaaagtggacctgccgttcatcatcaagaatttccccgagcgaggcaaccaaggcgctaacttcttcagcagagggtcgcactctaaggcccaaaccgccatcag

SEQ ID NO: 118767 - DNA, 634 bp, Zea Mays
gtgggatcatcagatcatgggccatggcatgtgcacgtgatcatgtccagtccaagcccaaggcggcaaggcccacttctccactccaccagatgaccagacggccagaccgccacggtgtgcagtactaatatgggtacttcgggtaccgggtgctactacctgaaatacccaaactaattttgggtaatagcatttactatccggattagacttcgggtaccacgggttcgggtatttcgggtccgggtctgggtttttcgggttcgggtagcgggtagcgggtaatatgcccagtcttagagctgtcgtgtaacctgcacgcgggatcttcattcggacacgaggacggtgacgacgctgaccattgggccccacctggcaacgtttcccatgcgaacgggtgaggggaaagaagctagggaacgggccccacgtgtcattcacataaggaaaagaaaaacgagtaggcagggtgggccggctggcgcgcgagaatcatatgggccggtggagaggttgtgagtgggccacgggaataggaagtcagccccagtgaatatatctttgcccttttatttttttctttctgatttgtttttcccatttcaatttcaaaccaaactcatgtttt

SEQ ID NO: 118768 - DNA, 414 bp, Zea Mays
gcaatattcatcatgtagataccaattaatctcaatttaacaaactagcacaaggatacaaattagtaaatcaccataaattaatctcaaattaatatcagctaaggacgatgctacacacatatgatattaattgaagcacaagcatcgccaattatacaataccaacattattcacacacctaatgcttaatcactaaataatcaacaataagatcatgataagcactatcaacactactaatgcattctcccccttaagatcaaaagaaactcaaggagacttcccacctttaacatggtgagctcatcctcatcacaaggttgagctttgagctctttagcacacaaaacaccttcacccttgagacaagctttcctcttaggtcgaggtaagctttaatgcataaattc

SEQ ID NO: 118769 - DNA, 343 bp, Zea Mays
tatattggtagatgcaaggactagaccgagaggatccggcgagcaggctcatgatatggttgttttatgccatgttctaaacctctagagctaactgttaactggttttagctgggttggggcatctaacaactaatacttatttgaggggtatagctaataattagtttatccattctaaacctctcgactaattttagcaactagctattagttttaaagatttagaacaagactttatactatctaaaactttatttttttctacactttatactaaataaccattaggtataaagggtgtacaaaattgaggggggcccatggcccactttgcctcccc

SEQ ID NO: 118770 - DNA, 458 bp, Zea Mays
ctggagggaacaaggctcatgatgttttcatccgaaactcgataatggagacaacgggggagaatttgggaaaggccaaaactagagcaccacttatgcatggggaagtcctatggctatccataaagttacccaactaggagcttggcccttgtgtgggcattgccttgcgtgggtctccaatagaggattaggggtaagcttgtgcgcattttgataccttggtaaaatattggcgtgtcaacgggagttttttctctatcagttataagcttccacaattatattgtgttgccttgcttatgtggtttaccttcctagcctagttgtaggctagtgggtaggtttggaacctaggttgcataattctttacgatagagatagcaacacttagttaaaaacataattgcacttaagaaagctaggtttgttgcataggttttgattaatagaaaaa

SEQ ID NO: 118771 - DNA, 405 bp, Zea Mays
agagccttgccaagagtggctagagatgattgagacaatgtgtaatgaaattttgggaaactacactaaaaacgaagatcaattaatgactgcagccttcgatacccgaccgaaatgaaggttgaaccgagaaatggacgctctgaattttgaataccctgattatgagcgactcagcaagggtgccgaagggacaaagagaaaaagggttgttagtgttctgagcaagcaggctgctaggatggtgaaagaggacgaaaaaactctgaagaagagaaaatccagtcctgagccgaaggtggtgactttgaagaagagaaaagcttcaactccagagccgaaggtatctgaggtggaagagtaaactccttcaactccttctgctgccgaagtagaagaaatttt

SEQ ID NO: 118772 - DNA, 296 bp, Zea Mays
agaggttagatgtgaggatctggaacaggattttagtttccactttccctggggaagaacttggaaagccaccaaatgtccatctggatttttaatgcagttcccctcgcaagaaagattggaggaggttgttaactttcctgaactaaaaatgaaaagatctggggtcaaaattagtgttatcccttggtcctctcaagctaaagccaaatctagactccatactacttgggtggttgctgaaaatgttcctgaagaacttttaaactaccaggctatttgtgagcttggctcaa

SEQ ID NO: 118773 - DNA, 414 bp, Zea Mays
ttggaataccatgcaatcacactatttgatcaacatacatttctgcatacttctctgtcttgtgggtggtatgcactggcaagaaatgagcagtcttagttaatctgtccataataacccaaatagaatcatggtgcctggaggtattgggcaatcccactatgaagtccatgcaaatgtcctcccatttccaatatggtatgggaaggggttgcaaagggcctgctgccttcaagtgactagcttttatcctctggcaagtgtcacactcggatatgtacttggcaatttccctcttcattctggtccaccaatataaagatctgagatcatggtacatcttgttgctaccagggtgtatggagaattttgaaagatgagctttgtccagtatcttctttctgagctctgggt

SEQ ID NO: 118774 - DNA, 625 bp, Zea Mays
aggcacttgtcccaattcttcccatagtgcaacacacatgccctcaacatgtcctccaaaatctgattcaccctttctgtctgaccatctatctgaggatggtatgctgagcttcttattacatgggtcccaagtgattcttgcagttgctcccagaaacgtgctacgaacggtgctcctctgtctgacacaatagtccttggtattccatgcaaacgaactatctggtcaatataaatctctgcatacttttctgccatgtgggtggtatgtactggcaagaaatgagctgccttagttagcctgtccatgatgacccaaatagaatcgtgatgtcgggatgtgttgggtaaacccacgataaaatccatgctgaggtcctcccatttccaagatggaatgggaagaggctgcaaggttcccgctaccttcaaatgactggccttgactctttggcaagtgtcgcattcagatatatacttagcaatttccctcttcatcctggtccaccagtacaaagatctgagatcatgatacatcttgttattgctagggtgcatggagaatatggaaaggtgagcttcatccaagattttcttcatgagctctggatttttaggaacca

SEQ ID NO: 118775 - DNA, 305 bp, Zea Mays
cagcaaactccgggagtagtgctcggtgagttccttgttgaatttactcccgctactgtgcttttcgattcaggagcatcccattcttttatagccactagttttgtggaaaagcatggcatcccctctacccctctagagattcccttggtcatccgaacccccagggtcagaccttctatgccagctcaaatgctcccaagtcagaattcttttaagtggggtagtgttcttggcagacttaaccgtcttgccatcctaagggattgatgtgatcttaggaatggattggttgaccaagcaca

SEQ ID NO: 118776 - DNA, 462 bp, Zea Mays
cacaattagggcttgattgcacttacataaaggggccctgagtctccgctaccgtgattctaggctagagggttgggcatggggccaaacatccaaaaagagggggaaactacgactaaggcaggatggaaagctcatcgccccctcccattctaacacctcgcgcaactatgagagcacctagatgggggtgaataggtgatcctgaaagatcaagactaaacaacacaaacttggtttatgaaatgttagtgaggtcaaaaccaaggtgctataactagagaaggagagaacgagaagagacaacttcttcacttaattgctcttcacaagatgagtattaaacttagagcaattatcgagtgagtagaagtagagaaaatcgcacaagaataaagataagtgacacgatgatttttatctcgtggtttggccaagtggaacacttgcctagtccacgtt

SEQ ID NO: 118777 - DNA, 686 bp, Zea Mays
gtcctttggagtcatgttgtcactttaggaataatagccgagtgattatcagcaatgtcagcgcttttagaagtgatagccgagtgatagcgggccacgtcggagttttagaaataacgaccgagcggttactggtgatgtcggcgttttagaagtgatagccgagtgatagcgggtcacgctggtgttttagaaataacgatcgagcggttactggtgatgtcggtgttttagaggtaatagctgaatccttttaagccacatcactgctttaggaataatagccgagtgactgctggcgacgttggtgttttagaagtaacagccgagtgataacgggccacgtcggccgctttggaaacaatggccgagtgaagtctggtaacgtcagcgtttttagaaataacagctgagttaaattgggccgcgtcagccgttttggaaataatggtcgagtgatgacatggcacgacagcgttttagatataacggctgggtgatgactgggcgctttttagaattggcgtctggcccgggaaaaccccatatgtactgcactgttgcacgcctctgcattctgtgccctagttttgcttttctgcatccaggccttctctgctctcttgcaatattgcctccgctccgctcgccagcaaggttgagatggcgcccaagcggaaagccta

SEQ ID NO: 118778 - DNA, 547 bp, Zea Mays
aatcaacccagtaaggaacatagcgggagtgcttgactggcttctcatattgaacctgggtgacaacttcaatcatcttcatgataaagggtgcatgaagacaacccttcaatggtgaccaagatgcctaaagaatttcttcctagattatatcaaagacattaattttgccagtgctggtaggagtcataagcatgagaagaacttgactctccccaaggacgttcgtctggttgctgcccttaggaagaatcatcatgctagataatgagttgaggtaccgatattacctatgcatattagaggtaatccagtattccctcccatttgaggtgtgcaccacttccttatcctctcgcctgggtagacggatatcatgaactctaaggttccttcccctgatatcttcgtcagagaaatcaaggatatgagcaaaatgacgataactgactttgtgccaaactccctggagaaagaagtacattactaggcaatcatacacatctacttcctcaccaaccttcttgatccaaagagtggcatagaa

SEQ ID NO: 118779 - DNA, 442 bp, Zea Mays
cccttcccctctttcttataggcacgcaactacctccttattgaagagctcaccatggcagcagttcctctagccatcacacttcataatgcggctactaagcccagcagtgctcggcactatcccctgcgcctctatctttagcttgtacgactctcccaccctaaccactattcttgccaccactctctcctaactccatcggcggtgtcaaaccgacgatagtcaagcgaggtagctgtgacactatgcctgatgacccgttcgggggccaggccaccccatggcccaatcatcatcaacattggatctagtccatcaacatatgctctaacccatgattgttgtccctcatgcatcctcacaaccttatcattggggcccaacttctgcactaggcccaacagctccctcacacgctcctcgttgggctcaatagtag

SEQ ID NO: 118780 - DNA, 497 bp, Zea Mays
cccagaaaggccaatgtggtagcagatgccttgagtcggaagttgcaatgcaactgtgttgtgatggattcccgaattaacaccttgtgtgatgagttgagcaagatgcagattgaagtgattccttttggtgctttgtctcacatttccattgagccagctttgcaagaccagatcatcatggcccggctcagtgaaaagggagtgcagattattaaggagaatctccatcagaaggctgagaagtataaatgtttccgccaagatggaaagggtatattatggtttgaaagcagatttgtggttcctaaaaacaaggatctcaagaagaaaatcttggacaagccccatctctccaaattctctatacatctaggaagcaccaaaatgtaccatgatctgaagcccttgtattggtggaccagaatgaagagggagatagcccaatatgtatcggaatgtgacacctgtcagaggataaaggcaagccacttgaa

SEQ ID NO: 118781 - DNA, 556 bp, Zea Mays
catctacataaaattccccaccagttttgtatacaatttacaattaaattccaacatctaattagcccaacatagtccacaagataaaccctgcaatctgtttttggaccgcaacctacccggattcaaacagcgatatctaccaaaatataactccgaatcgagcacataagtactcgttggaaaggtatgaaaaagctctacatgattatcatactgattatcaccaattacccacgagaaatccccagaaactgtcaatattactgttgttcgcccacctgcaaatctgtttttttggacagcaacatacccggattcaaacagcgatatctactaaaatataactccgaatcgagtgcataagtactcattggaaaggtatgaaaaagctctacatggttctcccactgatccccactaattacccatgaaaaaattccataaatcactagaactactgctgttcgcccacccactaaatttctggacagcacctctaccaattcgcatacgtaacatctattcaatggaattgcagcacaaataaacaaga

SEQ ID NO: 118782 - DNA, 376 bp, Zea Mays
catccacgagatcttggcctcaacgccgattgagaagatgacgttgcaaatatttcagacttgtagagccctcgagcacctccatctcttgttcagttgcttatattagtcatctgttccctatgtttaaatttgatagtagattgaggcaacatataaacttcaggtcaagataagaagagacaaaggaagaacagtcaaatgagaaaccttttcagtcagtatagaatgacatcttttttctttcagttcaggttcagagacacatgcatgtaagaatacattgcagactaatctttgttgtggcatgagtgtgaattattttatttttgaaaaaagcagaccaccaaggagccaccttcctccaatggtgtgg

SEQ ID NO: 118783 - DNA, 599 bp, Zea Mays
tttcaagcgtggctatggcatgaagaggcactacgcttggcgagattgcgtgagtggctacatgactgcatctgggcgagaggcggaatgggaagccgttagcgctgttgagcctgagcactgccgccgtcgcctgcatgtcgatcccgagtaagggagggagtggaagatgagcgacgacgctgcgagaaagatgaaagtagggagtagaagatgagcggtgatgaggcaaggaagaagaggcgctgcgagcaagggagggagcagaagatgagcgatggtgctgtgaagatgatgaagaggtgttgcgagtaaaatgatagatgaagatgggagcagaaacgggaggtgactgtgtgccttcgctcgacgtgatgctccacgcgctgactgtaccggtggcgaaagagtctttgctacaccgttcaagttgaatcgaacggttgttgcctttttcgctgatgtggatagatcgagagtccatctttgcttccggcactattatataagaatgacataaatatactctctcaattataaaagctaatatgtggtgactataactaaagctataatttcatatgaaggtgtataccggc

SEQ ID NO: 118784 - DNA, 731 bp, Zea Mays
cggggtcggaactctatgtcgtgagctccaagctcgcatgcccacttggctatccttccaatagcttctttgttgtcaagaatatcacctatcgaaaatccgtgactactatgactttgtggtcgtcaaagtagtgtcggagcttgcgagcggttagaagtaccacatacaacaacttttagacttgaggataccttatcttcgagggcctgaggacttcgctgatgaaataaactgaatgctgcatcgggtatgcgtgtccttccttcgcccgctcgattactaacgtggtgcttaccacgtgagtcatgctggagatatacaggagcagatcttctaccggctgaccgggcgtagcccggcgcggtggcttgagtactggcggagtggtcaagaacttcttcagtgcctctagagccttttgtgcctctatggtccactgaaacttctccgccttcttgagtaatttataaaatggcattcttttctcgcctagtcttgatatgaacctgctcagaactgccatgcatccaatgaacctttgcacctttttctgcgatcgtggcgcttccattctcatgatggcctcgatcttctccggattcacttcaattcatcgatggctgacaatgaatccgagcagctttccggctggtactctgaagacatacttttctggggtcaacttccaccggtagcacctcagactgttgaagaccagctgtaaatcc

SEQ ID NO: 118785 - DNA, 382 bp, Zea Mays
gtgataatgtctgtcgctcccatacgtacgctatagcgcgataagacaggacatgtggcgtgggcgcgtggtggcaacgttgtcctggctgctttaccgattgatctgtgctgtgcatcacatacatacacgcacatgatttcctacgctatagcttgcacattcaacgggaactacgggacatgcatggcggcactctacgcgtacctgtacgtgtgagccactttgatcgctgatatatatactaggggcagtgcatatgcactacaactcttgcacctgcactgctagatgcatgatgataattcagagttgtccgtgcagttctagtctagcgtccggatcggagctgatggtgatgcttcgatgaacaacagatgcc

SEQ ID NO: 118786 - DNA, 666 bp, Zea Mays
ggatcctttaggcatgccttattcagtctgatgtaatcgacgcacatcctccatttcccgcttttctttcgaaccaacatggggttggcccgcattaggggcgcttaatctcgttgataaaaccaacaacgatgagcataccgatctcttccctgatggccttgtagttttcttcgtctaagcgacgcagcctcgaaggtaagggtttcggtcctaaagttggtcggtgtcccgaaggtaacagggaggtcgattcgcccaagcggggtcacccgctttcctagtacgaccccatggaaggggcccctgtcggccagaggcgatctcagtctaggcccatggcatcaagcgtggcagagtaaaggatattgagtatgctccctctgtccatcaacaccttcgctagtcgcaccggtccaacaatgggactgacaatgagtagatatcacccaggttaggggatatgctccgagtgatcagtgtggtcataggtaatggagcgatcagactagtcgaggaaagtcggagatgcttgtcgaacttggaatgtttcgcaccgctctgactttcaatgcattctcagcgcataatagtctgaccctctgaagatcagcaaacacccggtctcgtctgggaaggtggttcccgccttctctcgcttgtcgc

SEQ ID NO: 118787 - DNA, 425 bp, Zea Mays
accttttgaagctttatatggacgacgatgccgtactccattgaattggtctgaaccaggagaaagatggtttttcaggcctgatatggttaaagaaatggaagaaaaagttcaacgaattattatacataatttgaaagaagcacaagctcgacaaaagagttatgtagataaacgatgccaacccttgtactttcatgttgaagactatgtgtatctgaaagtatcgccaatgaagggtgtatctcgttttggtgtaaagggaaagcttgcaccctggtacattggtctgtttcccattcttgaacaatgtgggccagtggcataccaactccaactgtccgaaacattgtctgtagtgcacaatgtgttccatgtgtcccaattgaagaagtgtcttcgggttccagatcgaaccattgaag

SEQ ID NO: 118788 - DNA, 584 bp, Zea Mays
ctactgttatggtttttcttgccattgttacatgctcacactttgttttttagggtttaattctaagcaagggctttgaaggcccagaaagatgcggaggatgatagatgccgaatagttcttgggaatcttcgctctgaaattatcacattaaggaacgaagctttggaaaaggataaaatattactttccttagtggatagattgaaattaacgaagctaagcttgctgcccaagccaaagctcataaagctgaagtacaggaattaaagggaaagattgccgaagcaaccgaaaaatttgaagttgtggtggtgaaacatgagatatgcgagatcgaaaagttaagagcacaaaaaaaatgccaatgagcttcgcgctatcaaagaaaaatgttacgaagtgtccttggaatgtgctaagagcttaaagaacagcttcgctaaggttggagcctattcctctgaacaaagatttatccgcggtgaccccgatggagttatccagtggatcagcggggaagtcgaagcttttgaagaaatccttagtgatcgtggagatttctgcgcctttgctggtgcctg

SEQ ID NO: 118789 - DNA, 875 bp, Zea Mays
tgtagggtgttctcacctgctgcaatctgattctgaccttgattgtgcaagctccattcaaatatctaaagttaatactacatctattatagagccccaagagcatctgactatagttcgactagaacccctacattgtatttttttaataatattttaatttagtttcagtagtatttcctttctcctcataatacattgaaacgcttttgctattgtcatcttcctgttattccactagagaacctattttttgttcttcctttctcctcataatacattgtgtagagaacctatttgttactattgtatatttctgtttctgtttattccaggcttccagcagtcaaggtacatgaaacaaagatggtattttgttgatattgttggcatgagcatgatagtttaaacaaacagcgagttgagggatagacaagttgtgacaccataataagacttaaaacacaaggaaaatcacactcctgacggggattgaaggggacaaccatttgctattggatcgcaccatgcaattcatcatgtatccaactatgcgtaacactgtacgtacagctttatccaggcaaactaaacaacagcaaattgcattgccttatccaggttaaggccaggcatgctgcatagcctctaatgcagtgcaataccaatgtgaggagccaagcttaacataatagcagacagaaacctataggaaagatattgttagaatactttgtgaatattattcagccaaccaaattgaccctaataaacgagctgttaatttgtggaaggatacatatggccagaacaaaaggatttgcatgcattaataggcaaaaaagttaaggacagacagtgtagcagcaaatgat

SEQ ID NO: 118790 - DNA, 449 bp, Zea Mays
gaaatttctagttacttcgtcaagcttcttttctagttcttgcacttcggttctgtgcaattcctcttaagtggatagtgcatactccaagtcagcaatgctcttcgcgtctttcaattgcctctcttcagccttcttcatcctctgctctgcttcaaaaaggctagaaagcatggcttcactagattttaatctctccaccaaagagagcaggatcttatcctttccaagagcttcgtttctcaatgttatgacctccgaacaaaggttttcaattgctatttggctgctttcatcttctgcatctttttgagctttcaaagctttacttagaattaagccctggcaaataaagagtgaacaaataataatgataagaattaccacaaaaatagttcaacataacaaaaattacaaaatgagaagccaaagtatacaaaccttcaagt

SEQ ID NO: 118791 - DNA, 638 bp, Zea Mays
gcactatttatcttgatcaaggcttaaaagatttgcaataagcaatttttgcctagtattctcataatgaaaagatttagaatgcttacaaccacaccgttgaatgttttgaagatctcattatccaagtaggtgttgttgcccttgatgtctttccttttcatttgagtgtcctccctttatggtcgacccctttttcctttcaaacttattgaaaatacttaagagagatgttaatagcacaagggagtaaatgatgaatgatggtttctttagatagaaaataagaacaattcattatccataagtcacatatacatgaagtaaacttcttaacattagtgcacatcaaaagaaatatgcactctttaaacattttgatcaatcataggaaatttacttcttcatattgaatttattaaacattacttggaagcaaatcaatatgagaacatatatagcaaatgtatgaaatcgattctaatggataagtgcattaatgagaaagggattgaatgcacatcttagccaatttaagtttaataaagaatctatttcttcacaaagatataattagagtgaacaatcattgatgggaactaaattaaagagatgagttcccatacctttgctttgac

SEQ ID NO: 118792 - DNA, 295 bp, Zea Mays
tcgttgctgacttaagtcgattgctccgtttgtagggcatagtggtcaccctgggttaagtaagaatgcaagtcagtcgtaagcgagccgagtatctttgaaatctctctttattgatgacgcatttccattatacagaatacatggtcgctccagctgttttgaaatacagctaggggtaaaactttcggaggtgctctatgttccaagagttcccaacttctgtgccgtccatctgggtaaggcgatacgatccaggccgagtgacctctgctactatgaatggcccttccca

SEQ ID NO: 118793 - DNA, 304 bp, Zea Mays
actttggatggcaagaaggcacgggttctaaaacggaaacaaagtatctgcagattttttgtatgtctattatgagcaatatatattatgtcaatattaaaatgtgaattgtacaagttgattaagtttttgtgttacataggtttaaatatattgtttgattgtatgagcaatgatcaattcaacttattttgttaaggtaaatcattgcttcattttaaattatttgttgtgaactaaaacttatacacgtacatatggatttcaggatttgtacatataaatacacagttataaacaaaat

SEQ ID NO: 118794 - DNA, 335 bp, Zea Mays
ccaaaatctagaggtaaactgtgaacctcgatcagacacgaggaaaattctttggtactccgtgtaaacacacaaactgagccatatataactctgctagctgagaacctttataagtagtcttgaccggaatgaaatgagccactttggtcagtctatccacaatcacccatatggaatcatacccttttggggtgcgaggcaacccagtgatgaaatccatgccaatttcttcccacttccattcgggtattttcaacggatgcaatagtctagctggtctttggtgctcggccttgaccctttgacacacatcacacatagccacatgagca

SEQ ID NO: 118795 - DNA, 392 bp, Zea Mays
atagaagatgcagtggagagcggggcctgcatctccatgggaggctgtggagaggcgccatgcaccaagcagagggaggcaagtgccgagcgccatgggtatggagctccctgctcttgcacttcaaacagagaggagccgtgtggggagaagagggagaacaaaatgaaaatggctgggagaggaggaatgactgctgcttgatttaaagagacgtccttgccagccattgggcgagatgggcggcattgctgcagagctctgcacatgacagtctgcttgcaggtgatggcaggacgactttgaacgcccagttttggcattttctgtttggattcggacccggatcactgcagaagatttgttccttgatgtatactctacaaatcgtg

SEQ ID NO: 118796 - DNA, 747 bp, Zea Mays
gtcgtaccatggcccacgtggtttgttgtgccgacctatgccctggcctgcggtttgagccctatggcgtgctcagtctccaaccataccagtggagcccaacaaacaagctagtaaaggctacacctttgtcaacctcatcatggcggaggtggtctaccagctgcggggagcactcccacacgcctggaggcattacaaaagcgaggctaagacctgcattgacccacaacgaccaccaccttcaaccaacctctatccttggtctcgccagtggcagacgtcgatcgtgatggtttctccattggcccaccactcaaacgagtggtgtttcaagggcaaggcagcgtcaatgttagtgtggtacattgcgttggcctgctgctaggtccgcatcgccaacgctcaacttgtcggccacgacacaagcccatgcgtttggggtaggatgtgtcggccaacagcctaggactcatggcgtttggggtagccaccgtcggcttccaacatgctccgcctccggctatcaccaaaacggcatatgttgctgcttacccttcgaattagacgcgcaacagagctcaaatggtttaggtctgccatgtaccttctacttacaaggtagtatgaaaattaactcttccattgtgataggataacatttatctatgatccagtccggtaagtcccacctatgtaaacccggtctccggcaccatctatggtccagctcggtaggggcctccc

SEQ ID NO: 118797 - DNA, 607 bp, Zea Mays
ggctgttgaagtctgaatttcagactgacagtggcctagaaccaagtttgagagccatttcgaccatgatccagtgagaatctatctagggatgctataacaaagatgaagatggtttgtagggctacaactttgctgcagagcattggtcatgttgccttatgaatttgggagaaaatcgagctcaaagatggtctgtcaggtcaactgaatacactctgcgatggtacaatgtctggattaggccgccagctcagaatctcgccgccggcggtccgcgcgaccggatttgtgatggtcgccgggattcgtgccgcgggcgtgtggatttcgctcaccatgaaaagatctcgtcgcggatgtgtatgagctactatggcctcgctgtcccctaccttttgcaacggcgacgtggccttatggccgtctccggagttgccgtgcttcacagcgactgtgccacgctccgagcctttcaccacgtcgtcactagccgcactagctcaccgataaccgccgtagctcctcaaccggtgagtgccacggtaaatcgcgccggtgactcacccctttctccgaccgccgcgcgtcaccactgcaattcccg

SEQ ID NO: 118798 - DNA, 501 bp, Zea Mays
tgtaattcatcagacgccgccaccggcatcagcttcaaaaattgttattgccgagaccgccgaagctgaagccgccgcagccgaagctaccagggctgaaaccactgaaattgcaactgccggagccgaagctaccggagccgaagccgctgaaactaccggagccgaagctaccggagccgaagcaggggccaccgaagattcaaacatggaaaccacactggaagttattgacaatatacttctaaaaatggctgaagaagaagctgatgtggctgcggtgaacacgacaactgaaaaggggaaagagcaaattgatgaaatttcggaggaaggagattttaactttcaagatttgcttggacaagagttaacagacgccgaaaaagaagagttgaaaaaatatgccatttcttgcggatataaatcaggggctatgctatttggtggggtcaacgaagggaagctaagatgccttcggaatcgcaccgaggccaaaat

SEQ ID NO: 118799 - DNA, 498 bp, Zea Mays
ctagttctaagtatcgatgaagttgttgaacttaaattagtgatatgacctttatttttcttaaacatactataaaagggcatgaaacgggtaccttgatctaactaagtctagttaggtgtggcggttcacattgaaaactagtggagcacttggggctataagtaggacctcccttgaccctaaggagcacatgaaagcagcatacaagtgtagactcattgtgtaacatttcttttgccccctcacttttgtatttgtctctagatctagtgttgacacagttatatgccaaaagagaggagaagtgctgctcggagatagagctaacaagatcttgagcaagcatggagtgttactctatggagtgccatgaagagttataaacaactgcagctctactgtaaccgtcatcaacaatagtggaagactcagtccgtcacctggtggcgaatctcagcgaacgaagaaaggagttgaaataaactctaagctaag

SEQ ID NO: 118800 - DNA, 314 bp, Zea Mays
atcgaatgtaacctcacaagtctccatgatacagttagtctccaggttaagaacacgataagcacgagaatgtaatgcataacccagggaaaccccttcagaagaccgagtctcaaatttgtacaaattgccctgtttcagcataaagcatctgcagccaaacaccctgaaatagctaaccttaggtggccatccaaaccacaactcgtaggaagtcttgttcaagaaagctcgaagaaagatgtagttcgacacatgcaggcagtgttgatcattttgacccaaaacgcctaagagtcctatgctcatcgagc

SEQ ID NO: 118801 - DNA, 433 bp, Zea Mays
gtctggagcctgcgaacccagccaagcctggctttacatagaaacaccccattcttcatggtatatgtgtcggaggcagtattaccagtggatctgatctttggagcacccagattaatgttcaaaagcatagctgagacagaagcaactaggctggaggacattgacatattagaggaagaacggatgaatgtggtcatttagtcggccagatactagcagaccctgaggcgctaccacgataaagcagtgcggcatcgatccttcgcatggggagatttggtcctccgtcgagtactgacgggagaggcacaacacaatctgtcactgccatgggaaggaccattcatcgttgcagaagttacccagccaagatcctaccggctcactcaaatggatgtcaccgaagtggggaattcgtggaatattgagc

SEQ ID NO: 118802 - DNA, 392 bp, Zea Mays
taatgttcttcattttcttcctttcacaggccctcaaagcctgtgtcatctctggatctccaatagcttcacatccttcccagttgatgtatctctgatgcagaataggctgatgcttcttggtaagaatcacagagttataaaaatcaacatgctgaagggtccagaaccgattaccatcgatcctcgcatcacgaatacgcaatgtagggttctagaatcggatgtcctggagaagagcagaccctccgctggcagtaaaatctgtgataggctcattggcagatcgacgagcctccgcccggtggagaaccaaccctcggataatgggagcgttggcagaggggaggtcaatctcatcatccttgcctccatcatcatcacatgttggc

SEQ ID NO: 118803 - DNA, 868 bp, Zea Mays
aggatggtatgctgagctcctaatcacagtggttccaagtgacttttggagctgctcccaaaagcgtgccacaaacagtgcccctctatcagatacaatagttctcggaattccatgcaaacacactatttagtcaacatagatttctgcatatttctctgtcttgtgggtggtatgcactggcaagaaatgagctgtcttagtcaacctatccacaatgacccaaatagaatcgtggtgccgggaggtattgggcaatcctacaataaaatccatgcagatatcctcccatttccaagatggtatgagaaggggctgtaaggtgcctgctaccttcaaatgactggccttgactatttggcaagtgtcgaattcagatatatacttagcagtttccctcttcattctagtccaccagtacaaggatctgagatcatgatacatcttgttactgccggggtgcatggagaatttggaaaggtgagcttcatccaatattttctttccgagctcgtggtttttaggaacaactaatcggtctccaaaccatagaattcccttgctgttctgacggaagcatttgtatttgtccaccttccgttcgatcatttccttaatgacttgaacacccttgtaaccaatctgtgccatgactatctgctcatgtaaagtgggctccactgaaatataactcaaggcgcctgagaaaacaacttctatgttcagcttgcataacttgtcgcacagagtggcaatcttggaatccatactcacacagttgcactgggccttccggcttaaggcatctgccacaacattggccttgccaggatggtaatgcacttccaaatcatagtccttgattaat

SEQ ID NO: 118804 - DNA, 359 bp, Zea Mays
ccaaggaggtgaggtagggtcctctatgtgtattaactctatgacataatatttggaggcaaactcccgtaatatctctccacccctacctcacacttaggcactccacagtatcatacccaccacctagtcaagcgtaggtctggccaaagagccttcctccatccccatcttctataactaatgtccacataggttcccctaattacatggttaagaccagatcccatgtagtccatgtggttgtactgttgtctcaggtgctcggcgaactgatccttagggtgaggcacttgaacaatcctatcccatgctcaagtccctatggtttgctaaaacatcttttataagcattgttc

SEQ ID NO: 118805 - DNA, 486 bp, Zea Mays
tggatttccataaaaatgtcttcccagtgcctccataaccagaaacaaagaagaatcctggtgtatcagagagtacattttgtataattgactgaaaggcattcatctgttgtgtattcaatttacattgtaattcatatgattgggtcaacatatcattgatgttataaaacaattcttcttcgatgaaccgatttctctgcaaagcttgggaagatacactttttggaggtaggttgtgatcctttatgtttccaccacatttgttgaatagaattgtaagttggtctattaggtgatcccttatttgatgttcatccatttgatatgtagggtgattcattgttttgcgcatgttgtattgaatgtcatccgctagtaatttccaaactttctcaaagaatgtgtgttcgtctccaacttcgcaaaatagcaacatagtcacaaaaagttgtcgaagctgattcgaagttgcccatttagctg

SEQ ID NO: 118806 - DNA, 1114 bp, Zea Mays
tgacaactcatgaaaacttagcatttacttaaggtcctagttcctgagtatggcttcacttattgttgtctcaccctacttgtgagggtaaagctagtgaaggtgccaagcagaaaccctagtaacacctggggtgttacagtcttcgacaagatgctgaaggagtcgtgcccttaccacaagggcccagacaaacactccctcggctagtgcgacatgctacgtcgcttctacaacaagcccggtccatcggcaggaggggaaaataagaaggctcctgatagcggagaagacgatagagcaatggcttccccgatgtgcataattgttacatgatcttcggggggacaccatcaacctctcttcgaggcagcacaatcaagaacatcaggaggttttctcggttgaggtagcgacctcagtctaccaagactggtcggaccgcaccatcaccttcgaccgagatgaccacccggaccatatcccaaacccaaggagatatccacttgttgttgatcccatcatcggcaaatgtgcctcacgaaggtgctcatggatggaggcagcagcctcaatatcatctatgcagacactttggatcttctaggagtcaggcggtcccagatcttgtctagggtcgcaccattccatgggatcacccccgacaaaagtgtgcatcccctcgggcaaatcgaccttcatgtctgcttcgggaccatcgccaatttttgaaaggaaaccctcacgttcgaagtggtggatttccggggcacataccacgctgtgctcaagcggccatgttacgccaacttcatggtcattccaaactatatgtacatgaagctgaaaatgtcagggctagcgggcgccatcaccattggccccacgtaccgtcatgcatatgagtgcgacatcgagtgtgtggaatatgccgaggcggtcgtcaactctgaggcactcatcgccgatttggagaacctcgctatagaggtacccgaccccaagaagcacgctggcaacttcgagccggccgaggctacgaagaccatccccctcgaccctaatgactacagcgagaaggtgttgcggattggctctcagctcgagcccaaat

SEQ ID NO: 118807 - DNA, 336 bp, Zea Mays
aggatgaggctgttgaggctaagcagtccaaccattagctagacccaagttaagggcatcatttcccaaatagggccaccttgtgcttcttggataccttgagcttcttgaactccgcctagattctgattgaccaaattttccatgaagtcccccatagcctgcagaaaatcttcatcattgtcatcttcagggaatgggtgaggattgccgttagggggaatgttgtcttccaggttagcaatttcatcattgttccccaattgctaataatcattaggggtcaggatatagatagggatggaccaagaacacgccattcccgtgttgtcaaca

SEQ ID NO: 118808 - DNA, 516 bp, Zea Mays
aagaatagctttgctaaagttggcagattttccttagagcagaactttatccatggtgatcctgatgggtaatccggtggattaacggctaagctgaagcttttgaagagattctcagcgacagaggagatttctgcgcctttgccggtgcccgtggagctatgtcggtccttgaaaaggttggctatgaacatgccaaggctgtggttcagccaggattctcgctctcagccaacgatattagaaacccttcggccgaagccgctgcactaagtggaaagttttattccgaagtctggctaaagggtggccgagagatagctgacgaagctataaaaaaacgagaaagagtctcatgacgccttaatagacgaccagaagaaccgaagaagctgctgaacgtgctagactcataggtatatttatcgcgacttagcttcataaattattttagcttcagaactaacaaacacttgtattgtggtgcaactgagctttctccccctttggagccat

SEQ ID NO: 118809 - DNA, 431 bp, Zea Mays
gggggctagccgactcaactcgggttaccaacaggagaattccttctgcagacttggtaagccgtcttgaaatgatcctcaggggtaaggtgtcaaatgttggtgctccagcggcatactcagcctggaacctgcctcctcccaaagccttcacccttttcgcgtcgaatccacctgtgactgatggaaatttgggccttagagtgcgaccctctgctgaagaagtcagtgctttggttgcttcgcttggggagattcctgatgacgaacggcaagtccattttgaggtgcccctgaaccctagtgatgcagatataaatgccatgcttgatctgctagctgaggattcttctgacgctgctcctgctggtactttggcagtggtgccccttccagaggttgatacaactttggatgttcagaaacctgtc

SEQ ID NO: 118810 - DNA, 481 bp, Zea Mays
gatgggggattaccatttttagtggccagccgcacgcgacccatttgatagacctcgatcactcggtagggaccttcctaggggggggggggtagtttgttcgtccccacccgattaaggatgcaccagagcaagagatcctctgcgacgagtgattggactttcacatggcgcaggtggtaatgtcatagggcctgttagtaatccattactcggtagatggcttggcatcgtcgctcttcgaggagatttagttctcctagccggagctgaccctacaagttaccttaaggaaacttgtaaaatttcacttgttgagggccgcatgaacaacatacttagctattccctttcagcttttctcctgaattcttttcgaggtctcaggagacgaaataattggcatttttaccactgaattcattgcctttttgctatagtgccctcagtacctatgatttgtaggtccacctctgtctat

SEQ ID NO: 118811 - DNA, 349 bp, Zea Mays
actcggggtgaccactattccccactaacggagcaatcggcttaagtcggcaacggcttaaggcggtgcgacatgctcacgcttacttaactcggggtgaccactataccctactaacggagcagttggtttaagtcggtaacgacttaaatcggcacggtacactcgcgtctacttaatccaacacgagcacgtttgcaattactcatcttagggcgacctctatgccccacgaaatacgaagaaatttcaaaaccatcatactgcatttacttctgctattatagatactgttgtattctaacaacgggaaaacaataacggcattcagtactaaaaagtgttttct

SEQ ID NO: 118812 - DNA, 291 bp, Zea Mays
ctcttgagtagactgaattataatccgctttggattggatggaggtcggtctacgttcttcatgtatggtgttcctgccaaatcaaacaacacatatacataaaaaacgtaatggagcaataaaaattctactcatatgcaacgtccaattaatctataagctggctatttcgtgcgtgctgaccctaaatgtacggcgagatgcttatggcgtaatatgttgacgtatatatcgtaattttgtcaacaaagcagcataacacggtattgtttagagcataaacgtgtgag

SEQ ID NO: 118813 - DNA, 642 bp, Zea Mays
gcattcataggatacgatgtgcaatagggtaattacagtatagtattagtgcgcacctaattacaccaaatcgtctaccccactagggggcctgaatagagggtccgagggcctagcaggtggacccagtcttatcttgtgggtcttgctcccatccactccctcaaagaatttgacctggggagtgaagttctagcgccttagctgcaaccagtctcaaggtctagggtcttcgcatgctcttgtgggatctactaatttgaagggtaagatgtcggtggatcggatgtgacagccctccgggtagcctttgagctgaagagcccctatagtggccatccttcgctccaatagcgcaaacacggtagagtgcaagggctcccctacatgtaatctacgccaagatctccacctcgtgtagctttgaaatttgtcaaatcttccagctcttttgtggttgcctgtgtgtgcatgtgttctgtgaatcttctctccttgctggtctatgtcctacggggtttttccctcacttctagaaactttccatcattgttgtatcttacgcacacaaggtggtcgattaattgttctaaacagttttcaaagccaaaacccgacctattggatatctcttgtcacctc

SEQ ID NO: 118814 - DNA, 888 bp, Zea Mays
aacaggactgggccagttctagcccagtcggccaaacccaaagggaaaggcgtgcccgcgcactggcaactttgcacaggggcccttgcgtttctgtctaacagcgaacgagttctttcactgtttaacagagccactgacaacttgcaaaagagacccccggtttctgtttcttcgcagtgggaggtccccgacggcgttcatgcacgaccgagctccggcgagcttctgtaccggccgaatggggctatgactggcgctcccgagcggcgaacatcaaatcggacctaccccgagtatttcccccaacctaattgcacgaatggcaacctattaagctctgtccgcgtgaaccgaatgggtggcggacagatgagtgcgttcccggtgatctagagctattccgtacaaattggcggttcggcaagcatcacagagcgacaagagtgctcaaacaaaggagagtgagggatgaactgacctagaaagggctggccgcgatgaggtgagttttgcggtggcggaaaccagtttgggggaaacaagaaattctcgagctctggcgaacgatcgtggctgattagtggtggctggttagctgatgaccctgcggagctggtcacgggcttaatttataggcggcttcgtcggtggccggtgaatcgggcgagacacgcggcggtcggaggtagaagaagacactggcgcaagcgctaggtggcttctaccgtggcggtagttccagtggtcgacgggaagctagagggagtcacggtgatgtggtggcgcggttaggacacgcggcgcagggccagaacacggcggttcaccggcgaggttatctgcccagccgcaaagtagaaaagaaagccacggtgagtcaccgga

SEQ ID NO: 118815 - DNA, 657 bp, Zea Mays
taatgactgaaaccttcaggcatgcatttggttgcagaacggcttccaatcttccttggaacactcatgctccaactgtgccgttgtctgagaatcttgaggacgtgtttgtttggtctctctggcattgaagcgcggtcggtgcggtgctaaaaaattcgctcacgtggcatgaaatccatgcaaaatactaagaaaagagcagtggcaatgaccgatccagcactgatcccggcttcacctctgtactctcacctttgattgagtcaaaactcctcacctaccaacgaatagatagatggtgtgctacgacggtgcaagtttgtgctcttctgcgccggtggaaggcttctgcgtcatgctaaggggagacatgcgtgtcttctagcccaacgtgtgtacacttactcacatcatcatcctggcacattttctttctctactggtagagcaacggagcgaggtgttcatcagccggcgtaactgcgaaagcgaattgaaatctatgcgcactgttctcttcccttgaagacatgccgtaatatattagtataagagatcaatctgtcaggcaggctgtcactacgtcacgtcgccgatgagaagtcaagtccgtgcacatcatcatacacggcatttacttccttagacttcttc

SEQ ID NO: 118816 - DNA, 1742 bp, Zea Mays
atctggcatctcaggaatttgtctgatcttttcccaattgatccatttattgtcagcacattacttcttgctatatatattgttgtatagattcatatgctcgttcgaccaaaaacggtcatcgcttgcagttctatcctgtagatacaaatttacgcataccttcccgacactttacagtgtacctaatgaggaccgcatgaagaagaaagttgagaatggaaaattgtcagaaatatttaaaagcaaaattgtttcttcaaaaaaatcaaaaacaaaagatgcaagacttgtgttttgcactccctataggtctagttggttggaaaatcagaaattccacatcttatttattgatgaggcagcatacttaaaagaatgtgaatcattgatccctcttgcaactagtgggataaaacatgtggtgcttgttggggatgacaaacaactacaatcagtggtaaagagcacgatatgtctttattataacttataagaccatttgaatgtatccttgattccttgtgttaccaatgattatttctagactgctaatactttctccttactggtaagattgctaaagagaacaggtttgggcgaagcctctttgagagattaagtggacttgatttcccaaagcacatgctaaatattcaatatagaatgcaccctttcatcagcaagtttccaaatcaaaaattttatgaaggaaaaattatagatggtctgaacgttaaggactataacaatatttatctcgatgtgcatatatatggtccttattcattcatccatgttgaagatggtttcgaagaaaacaataaacagggcttaaaaatattgttgaagctgctgtggtagccaatattgttggcagatttgcggaaggtatgtctaacatttgagctgataaagaacatgtaagtttcattaaagctgatatgtttaagtgtcatccatgtttttttggtctataaccactacagcatgcgccgagcagaagaagaaaaccaacgttggtatagtatctccatatgcagcccaagtaatttctttgcaagaaagagttcagatttataagaagcatgactttctttctattgaagtatgcattgttgattcatgtcaaagtgctgagaaagacattaatcctttcaacagttagacaaaataatggtgggaatataggctttgttgattgtgttatgagaactaatgtggctttgacaagagcaaagtatgttaacttttgttcctttttgttggcttaattaaattttattttttttgttggcaaaggatcaacctttggatacttagttaattcaagatcccagtacatactcatctaaataattatttcttccacaggcactgcatgtggatccttggacatgaattcaacatggtatgatttagtcaaagacgcgaaggatcgtgaatgtttctttaaagctcgcgatgatgatttttttgctagaacaatggatcagtttagacttatgcaaaactcacaggtgacagacaatgtttcacgatggaacattgaatgccagtgtgctccagatgcacaactcacatgtgacaaccatgctacaataccagacaaggctccagatgcacaactcacaggtgacaaccgtgccacaataccagacaaggcacaggttgtagagcctgcacatgcagagcaggtgcctatgcagtcagaaagagctgcagaaaagacatggcagctg

SEQ ID NO: 118817 - DNA, 917 bp, Zea Mays
gccgctgctcatcggcgccatgggtctaactcctcgagtcttccctgctgccgaagacaaccaagcagcaaccccacgtcaggcaccacgctgcagccgtgctgtcgcctcaactgtccgtgtgtacgcaactcgccacggttgtcggacgcagccgagccctcgatgccatttccccgctctccttgcttgctgtgccaagcaccgcccaacatacttgtcgtagtttctcgtgcttcataccgcgaacctcatcggagttcgctgcctcgacgtcgacagagcctctatgtctagctcttcacgccgaacaccgtcatcgtcgccacgaagattagtccctgcgcccatctcgtccacaccgccgaaaccgtcgatctgctccatgtgtcaaggccacgtgctgaaggtacaagacgaggtctatttttttgttagctacccttcgatttctatagttaatatcgcttagatccctgcgacgtttgtattttctttaactgaataattataattctaatgaaaaaaatggttttgttagttttatgttagtgcgctaatcagcttaattttatagctgcaacaatttacatgtttttgtaaattaatctgcattatgtttgttataatctatagttttcaaattaattatagcctttgtgtttttataatatatagttgtttataatgatatctgtgcacaaaaatacaaatttattagctaccccacctagtctacctttaattatgttttgatccttgttacagtttttgttgataacatgtatattggaacctaaataaaatagaaatgtgtttgttagtttcattaattatagaataagcattttaattagtgtttctaacagttcacttattttcataatttaatttaaactacggttgttataaaaaat

SEQ ID NO: 118818 - DNA, 576 bp, Zea Mays
gaagctcaaagccagcgggcacatgaccatcgtcatcagtttcccccttttcttttcatcggccttgatataaaaccattcgctcttccagccggttggccacttggtacgatagctgaggacctgagccttcgtatctttgcgatatgcgaaattatagtagccaaaattttcatgcagcccgtctgctctggccttcgtttgataatgcaactcatgcactcagcagaatgcttcggcatttggatccaccccttggcttcgaagggcccagatgaagatgttgagcctaacaatagcgttaggggtcagctgatgaagataaatttcaaaattttccaaaacttctcctatcatctcgttcaggggaaaccgtaatcccgctctgaaaaagcttttgaaaaccactacttcgtcatccttcggtgttggagtggtttcttctccggcaaaacgaacaaacttcttttcagcctccccaaagtagcccagtttcatcatcatgggcacgtcggcttcagacacagtagatttctcaaaatccaagtggctgggttttgatgggatcagaatgct

SEQ ID NO: 118819 - DNA, 390 bp, Zea Mays
gtttatgcaatgcttcattgagtgtctctgcgatgacgcgtttaaccatattccttcaatgaatgctcaccaactcatcctagacgttaatgttggggtatcacttctacctttatatcacttttattgaatgcataacatatatggaaaatacataatactactctctcctatttaggctatattgaacttcgaggagcaggagcaacatagtaattatcttcgtcgttttgacccttccattttggggagttacctttcgaacaaactgccttcattcaagaagctggatgagtacaaatcagtaaattttagttccctgacccatcacactgtcacgacattttgctccatttaaatttcaatcacattcatgcatatcaaccatag

SEQ ID NO: 118820 - DNA, 465 bp, Zea Mays
cacccgaaccccggggtcagaccttctatgccagctcaagtgctcccaagtcagaatccttttaagtggggtagtgttcctggtagacttatccgtcttgccatcccaagggattgatgtgatcctaggaatggattggctaactaagcacaagggtatcataagttgcgcaagtaagaccgtccttctcaccgatggccaaggaatagcagtttcctgtcaggcccaaccgcccgccaatgatccaatgatgtttaatctggtagcagaaaaaatatccgtaatagaagaattcgtggatgtatttccgaaagagttgcctggaatgccaccagaaagaggagtggagttctatatagacctcattcctggcactgcgcccatcgcaaagagaccataccgcatggcccccacagagttagcagaattgaaactccagattgcagagctgcaacaaaaagggta

SEQ ID NO: 118821 - DNA, 380 bp, Zea Mays
tttggctattgttgatagctcttcggacgaggcttagctttgtctgatgttagttgtatacctgaaaatcatttgttcacttcgaaacaaaggttacctgaggaccttcggcaaaggtaggcccccaacagtagtcccttatggaatgagtttattttttcgtaacgagcttagatcgcaaaaaaatagaattgagaggtcttgtggcgaaggtccgaaaaacaccttcctgaagctcgttatggagaagatagaccgattcaataaaaataattgatctggaagttaaatcggcgaggagaagctgagagtgatgctcagaaaagttttttggcgacttgcaccgcttcgtgtccatttctcaatataaaaacagtcga

SEQ ID NO: 118822 - DNA, 520 bp, Zea Mays
tacacttaagctggaataatctgggtggttctgccacatgacacactcggtcgcaccacatcgaatcatccctctcctcggtggggaagagtccgagcgagtgcatcatcagctccagtggatggtatccacagaaggtcgtcaaggcctttagtgccatggccttagtggtgtcatctgccctgaacccgacagttttgaagtccagcgaacgccacccgggctgcagagggtggggctccagggttagccaaaccctacagcgtgccacctagtgctcctcgtactgttgcactgtgtacagaggtggtgcagggtacccaactgcgcttagtacctcccacaagatcgagggaaaaccctcccgggaaaggtagtcaaagctaaagtgggtgtctccactatcgtgggggtaggctaagccatctatgtaagaggggtaagtgtgagtgctggagattagtagcaagagaaaggtgtacttaggttaaaaggatatggttgtatggatagactcgtt

SEQ ID NO: 118823 - DNA, 482 bp, Zea Mays
tcttcaactctcattagttgaactaggttggatgaagagggatcttggatccgcagggctctacgttggttacgggttaccaagtaggcctccgtcaacttctagacatgctcatccttggcttgcttcagggcttcaatagcaatgacttcacgactttccaaggtagatacacgggcttgagctgcggtgagatacacatggagctgacggttgcgcttctctgcatcttcttctcgggaaatcatctgatggtggtgccgagccaagaaatcatactaggcatccagggtgagcaggtatgcagtgaggtacacaactgtggggtcgtcctcaagcaactgctgctcttccaatgcacgcatcctggccatccaaacgagacggtctctctgaaagggcggaaagaatctgagcggggtgtcgaccacttcttcttcatatatttgacacggggccctcaatgccttgcgagcgacgac

SEQ ID NO: 118824 - DNA, 441 bp, Zea Mays
gcagtttgccccgcctccctaccatggggatccgggtcaatcatcctctcaccctccgccctaggatccttctggcagtgctcctcccccggatcagtctagggaagaacactttgcctctcacctggcgcaccacttctttgctcctcatcagcctcctcctaactagtgatctttggattggcggctctctctctttttggttcttgttgccaaaaagggggagaaggtttcttagcctagcagtaccttctatttatgtaacgaacatcggtttgtaataattattggtctatcgtatgatgcatgcatggctctgaagccataaacttttttattgatgtgatgagatgtgacattattaatgtaatagcagtagtaacttttcatatcatatgttatgcaataatgagcttgtatgtgtaattttactctttctat

SEQ ID NO: 118825 - DNA, 589 bp, Zea Mays
gactatatcctttcgccaccagtctcgctttgtacctgtcaacctttccttctggagtctgctttactgtgaagacccacttgcatcccaccgctttctttccttctggaagatgaacaagttcccatgtcttgttcttttgaagggcaaacaactcttctttcatggcatccttccactttggatcctgtttagcacacctccaatctttcgggatagacacagtttgtaatgatgcaatgaaggttctatatgcagcaaagacgctagagtatgagacatacttagcaatgttatgttcataacaataacgagaaggaggtttcccagcatttattctaggttctcttctttgtgcaagaggtaactcttcatgttcagggatgggagaaacagagattggagagacattactagttagatctggagaggagtctgaagagagatatgggactggagcttcaacttgttcgggttgtggttgctcccctgcttcttagtctgcttttgatagtatactataggttgcttcccatgtttttcattcacttgtcttccaatggaacaatcaggttgctccccatgtttc

SEQ ID NO: 118826 - DNA, 549 bp, Zea Mays
ctccaccgcatcatccttccgggccgccgagccctcgaggccggcgaggtcctccacttcttcttccctcatcgcctgtgaagacatcacaataacgtttcagacaacgaatatacacaataccttcgccaaacccaaaacatacatgtgctagcgctcggttggccctctctcggacaacaccgcggccatgagggtcccacatcctatcgtaaagcgcccccacagagcgcttcaacacgtcgtcttcggtctggaatacaccagcattgaattcctcgttgaaccgatcgaatgtctcaaaatgcctacatccctcgcaggacaaagcattcacagccccctcacaggtcacaagagacgcataggacatgaggcccatcacaatggacgggagcgactctagctcatcctgcagccaccctaagaagcgggtccccacctcctcccctgatttgtcgaagggggcagtctacgcgccgaggtcacggtacgcatccacgaaaagcgtgtgcgcccgatccaccccagcacgggtggcagactccg

SEQ ID NO: 118827 - DNA, 1379 bp, Zea Mays
atcttcttttgcttccactataatgttctcattctggtggctgctatctgatgcattagtgttgcttgaatttttttttctggagcaggcatggaatcgttggagttttcagatttgtctaccacggtttcagaagttgcattttcggtgtttgctcccactacaatgctctcatcattgtgggtgctctctgatattgtagtattgtcggaattatcttctactgtagcaggaatgggatcactggaatttttggatttgtcaagatcaggctcagcttctttctgctgcaggagttcctttatagttgtcgtctaatctgggtttgaagcaattgcgttctctttcatttggttgatatggctctctttctccacaagagctgcttccaattctttctgcgtgttggtaagatatgtcgtggtagtttctgaatccatgagcttgtttttcaattctgccctctcaatacttaggacaaatgtttttcaattctgccctctcaattctgcttccaattatatttgtttgttacaaaatactttaaattgtcatttcatttaaactttttattgtaaactagaaagtatacatacatatacacggatttgtacatgtaatcatgtacaaaattcgccacacctcaaattttgtgcgtcctccgccactgctcgcccccacacctcgccctccatccacctccccaaatgatgtgccttcctggaattaaaaaggccgaagggaggccacacacgagaccaccaatcggacacacgcgagtacatccgacgcccaccatcagccaggtgatggtcgattacgagttcatcctgcgcaattctttcttagtgttgagtatgttgttcttttttctagacataggttacaggtttatttcagaaataagtttatgcaatgtgtttctgcaatgtgttgggttcagtcatacattggacagtcacaggtaggttacaggtttatttctgaaataagtatatttctgagacataggttacaagtttaccgatcctctccatgcaactggtctgttatgtttcattcgattttcagttaagtcatagtactaaactgcacagtctcattcgattttcagttaaatcaatctgttaattttgtaccataattttaaatatgttcatcttctctttgtgcatttaaatatgttagttttgtacaattcaagtatgtcaaaccaattttgctagactatttagtagtacggatatctttaactttgttgcctgctctttgctcatgctccaactaatttcagtgcctaatgctactcatagtactaaactggacagagtagaccttacaactggacgtaccttcctgttcatacaattagttagttc

SEQ ID NO: 118828 - DNA, 1030 bp, Zea Mays
tctgacactatctttcttgggatgccatggagtctgactatctccttgagataaatccgggcaagggtggctcctccaaaggtagttttcactggaatgaaatgggctaccttggtgaggcgatctattattacccagatggaatcattccctttttgcgtccggggcagtccggttacgaagtccatgcctatttcttcccacttccattcaggtatcgggaggggttgcaataggcctgcaggtttttggtgctcggccttcgttcgttggcagatgtcacatcgagccacatactgagctatttctttcttcatccctctccaccagtatctgattttgaggtctacgtacatcttggtagttcctgggtggatggagtaggctgagttgtgagcttccttgagcaggacttctcgggcctccccttttggtacacacagacgatttttgaaccaaaggactccttgttcatctgtcctgaagtccggaagttgtttcttgcgggctttctccacaagtcttgctgtctctgagtctagacgttgagctttgcaaatgaggtcttctagcattggttcgacttctagattgtcgctgtttcccagacatgtattcagttgagctgattcttaattccaatcttctaaaaagttggtcccctttatgccgaatggttttcgactgagggcgtctgctaccacgttggccttcccgggtgataatgaatttccaggtcataatccttgatcagctctaaccatcttcgctgacggaggttgagatctagttgagtgaatatatacctcagactcttgtgatcggtgaaaatgtggcatttgttcccaattaggtaatgcctccatatcttcaaagcatgcactatggctgccaattccaaatcatgggtggggtaattctgttcgtgcggcttgagtaggcgcgatgcgtaagcaatgactttctcgttttgcatcagcacacatcctaagccttgcctcgaggcatcacagaagacgacaaaatcttg

SEQ ID NO: 118829 - DNA, 366 bp, Zea Mays
gaacaatcggtagtctctagtaggcagtaatatcatgtccacgaacgagcacacaaacgaacaaaaatgagtgacaggggagcataaaagtggcgagtgtctgcctccctttcgctagcatgacaatgacatcttttcacgagcaatcaaagaatcaagatgtgtaaagagtgcaaattggattaatctaaaatttttcgtaataattgtcgtttagcttatttcgtcctttgtatgtaatgatattttctagcttacacacaaagttttacgccctagggatataataacaccaaagtatttgtacaaacgtagatgtgtgaagtaaaaagaggtatagaaatacacgatctcaatccttattag

SEQ ID NO: 118830 - DNA, 607 bp, Zea Mays
cctaaagtaagtaaaacaaacgaaatccaatcccttagatcttacgtagatgagtaacgagaacaaatgcaacaaatactaagggtatgcaagaggattataacaggctagcacgtgtatttagtaaatccgatgttgctagttttccatcgcaccagggtaagactagggaaaatgcacatgatccatcggttgtaaattggcatgaccaatcccaaccactttacaggatgtcgatgggcatatatcatggacaactacagtctcctgcgcaaatcaggggtaaatccatcgatttgcacgcggtcggactgtccggaccaccaacgactggccctatttttcaaactgagttaccgaagtccgcgccagggccaccgcattttgcaaaaaccctaacagactctttcgaaccatttgcgtatatggtcggacattctgaatacatcactggacggtctagctatacggtcggacattctgcgcacacagccagacggtccgcgtatcagaccggacaatccgacacagagtatacaaaacgtaatattaattatcattcctcatctttacgcccgtccaagccaaaccttccgttacaccccac

SEQ ID NO: 118831 - DNA, 670 bp, Zea Mays
cgaaggggtgcagaggaagcccaaactcgcgctcctagaaaggcacgagcatgaccacctcatcatactgagggagcgggatgtcgccttccttcttcaatgtccactgtgagatccccttgggggaggaaccctttgttctctaggccaaggaggcgactatgttggatcgagcaagcgtggaacgatgccattggcatgaagctactaggacagatgcaacaaggcgagaaccaaagaaagaaggcaacgaacacacgggtgagaaggcacggttagtggaaccgactctaaatgcctccttgtcctttttatgcgtagaaatagggacacgaagcggcacctaaagggtgggcccccacggacaacacaggggatccgccacgtcggtattcccctagctaagggcgctgcaaggaagaatatacattttgtagggcttacgccactttagacgatacaatggggagtgcacggggagaaaaggtgtcagcgagggacagggcggttaaccacaccatcacgccaaccatacatgataaggtgagtaggttgtttcgcatcccattgagccgcccacgctgaacaacgccacaatgatttttttaccacatcaccaccacaactccctcgtacccgataaaaaccaaaaattcactccaactcccca

SEQ ID NO: 118832 - DNA, 310 bp, Zea Mays
atttgatacaacccaattgagagcttgaaattgggttagctgggatttcacggaacgaggagcggcccttttttatctatctgtttgattgaggtggacgagtatatggtaatcaaacttgcagcaaccaactgttgaggcattgccttttccggcacgtcccactcttcaccttatcctcaaaatagtttccttttttgggagcaccccattactacgagtagaccacaagaggttggtgtcagccttatcctcaagttcgtgtgattctagaacgttccattcacccttcgttcttgccccttgaagc

SEQ ID NO: 118833 - DNA, 497 bp, Zea Mays
tgggaatgtatctctacaaatttcttaagcctggtatagaagtatttctatttttctctggattaataagttttgggtattttcctactttaaatcaaaactctaaaaagtattgcaaaaaccatggggtttactattttcgctggatagtctataatatttagatcctagcaaaatttgtttgactaagtttggttgaataatacttaagttataaattttctaagttctctgctcatttaaaaacaataaacaaaaatggttaaaggaagatgactttgcatcggggtccctgggcttattcctatctgagtcgtttaaaccgtgcccctgaatcactattcatctgagtcactgacttcgcacttaaccccctaggtttttattccctccaaccctcgctcctccttcacctgaacagtgaccgaagaagaaaaagcgatggtgcggcttaccggcggtggtagaggtccggcgaagggtcgggtgaggtccgg

SEQ ID NO: 118834 - DNA, 430 bp, Zea Mays
caatcgagcggtctcctccaacgtcgagagcattccagacaccctcgagacacgatgcaaaaggagcggttggcacgcggtgtgacattctctttctcctctttccgtggcatgctggaggacatggtcggcatcaaagatctatccagtatcgtcgtcgcgttaggtcaacaagctcgcccctaaggttggtatttggcacagtacccacacacccattgaaccatacgacgtgacgcgaagatgcggttaataggcacgacgtggcctcttcttcctctatccgtggcgtgctagaggaaatgaccgacgttaaaggccactctagggccgtcgatgtgttcatcgtcgaggtcgacaagcttgcccaaggctggtacttggaacaatatccacacatccatccatccatcctaagattgcatctttt

SEQ ID NO: 118835 - DNA, 429 bp, Zea Mays
aatggtaggtttgcttttgggggcgtggaggccttttatgattaggcctgtggtatacattatttgactcagattaatcacttaaatgtatttggaactctagatgtacagaagctctaagttcttgaaagtgtgacatttcctgagcccaatggtatattggtgaaccatgaataccatcatatgtcatgaaacatggcaacatcccatgttaagcgattccaacatattctttcccgtcaagcttatgagaagatctacctgtttttaatatgaaaacttgatttgggtgaccaaggcaacttgttgattgaataaagaaatggccatgtgaaataaaattaatgaggtacaaaaaggcgattaggcaggacaaaagcggggatttaataactagctaactattaacggctatcaaataaatccaaa

SEQ ID NO: 118836 - DNA, 426 bp, Zea Mays
tctagatccctccctgcttcttcttcccggccggagctctacataaaaactggaagcgttcgccggttttccgatgttcacgttggatggggaagtcgtcgtgatcgatacgtcgaacgacaatcatatatttgagctgcagcctgcagctgatctgcgacatttttttctttctttgttggagatggtggcgtatccttgtcaagctaggagaagtagaaaagagacgagcatagcatttttttctcagagcctggctgcaattgcaacgaacgatcgatagcggagcaggtgagaccgtgactctgtctctactctcaacgtgagaggagagtagcaaacgcaggaaggaactggtacgcattgtatgacgcgacgcaatgaagaggcgaattaaattccgggacgccaccctccatgaaccag

SEQ ID NO: 118837 - DNA, 288 bp, Zea Mays
tactctctgtgtctcgtttacacttattccaacagcatgcatgtcatgtgcaacaaggcacggctttccataccgccacgccgctctttttgtttttacatgggcaaacaaaggagacggtctcaggccaagccacgctcgtttgtatcctttcactccatctgcactgccgtgtagctactgcatgcatgtatgtagctcagcagaccgaagacaaaaagaagacaccgaccgagtttatatctcatctctgtaactgattactagtacgacgagcgagcaagcgac

SEQ ID NO: 118838 - DNA, 1250 bp, Zea Mays
ccacccgttcgccacccttgttttggccactaagacaggtaaggctgtttttggcctcgcgtgagctacaacacatgttttcatggccgaacaaccaatttagtgtccaaccatagtacactagtgttaaaaccatagtacacatttttgtccccggaggcctgtaaggctatttttggcgtcccgcgacacatgttttcttcgtcgaacaacaatttcatgcctcccgcccgccaaacatgttttggctactggcatgggaaaggttgtttttagcatctattgagctacatcacacaaaacacttaaatcctaaaccccgagccccaaaccctaaaccatgaacccgtaaccgcgaacccttagactaaaacccgacccccaaaacacaaaatcacaaatcccaaactccaaaccctaaacattaaaccccaaacgctaaccctcaaatcgaaacccgaaatctcgaatcccaaaagcctaagctctaaacctcgagccccaaacgctaaggcctgaacattgaaccccaaaccctaatttgtgaaccctatacctcgaaccctaaatcaaagacccgaccaccaaaacacaaaactccaaaccccaaacttcaaaccctaaaacacaaccctaaaaagtaatgtaaggctgtttttggcctcgcgtgagctacaacacacgttttcatggccgaacaaccaatttagtgtccaaaccatagtacactagtgtccgaaccattgtacacgcatttggccccggaggccggtaaggctatttttggcctcccgcgacacatgttttcgtcgtcgaacaacgatttcatgcctcccgcccaaactctaaacacagagccccaaaccctaaagcccgaaccctgaaccctgaaccctaaattgtgaaccctataccccaaaccctaaaacgaaaacccgaacaccaaaacacaactccaaacccaaaaacacaacactaaacagtaaagtaaggctgtttttggcctcgcttgagctacaacacacgttttcatggccgaacaaccaatttagtgtccaaaccatagtacactagtgtcactgtaaaccctaaactccaaaccccaaactccaaaccctaaaacacaaccctaaaaagtaaagtaaggctgttttgggcctcgcgtgagctacaacacaagttttcatggccgaacaaccaatttagtgtccaaaccatagtacactagtgtccgaaccattgtacacatt

SEQ ID NO: 118839 - DNA, 770 bp, Zea Mays
cctgtgacgaaagtagagcgatagatagacgcacgggtcgttgaagtagtttagcaccaacgagtcacgagtggcttcatgatcttgatcgatgtagctccggtgctacatccttcgcctctttctcgttgaagactagacacaagttgcaacaccgcatttatcatagtttgatgcatgcggcatatcgagcacctcatattcggtcgtcatctcaacaacgtccgagctcaagaaagtcattctgacaacaacgatttagtggagtgaaaggagagtgagacgagtgaattatgatatggtaagagcaatttgaagagtggaagatgttaatgaactttttaaaagacaaaattttaaaatttacaatagtgcgaaccaattagaaaatatcacgtgacaaccggaggtcggtggcgaccgtgccgttcgtttgacagcccaacccactgtccggctctggttttgaagctgatatgacggaatccaccacccgatggaaccaccaggacaccgatgagtgctggctctggttttggatccaacattagtgtcccatatcgtcctcgtcgacacggaacagatatgacggaatccgtggtgttggtttcgtgtgtaccagaatacgtctgtgcatcaggttcaactagcgtacgtcgccgtcagtacatgcgtgcgtacgtggagatatgcattcctctagtcgtgtgcgagcgaatgcaggtagtagacagaaagatgcatctggatcatgtacaccggccactggt

SEQ ID NO: 118840 - DNA, 659 bp, Zea Mays
gttgacaatacgtgttttagatacctcccttttgtccctttgctgcaagtcatgccttgggaacttgggttgaccaataggcacttggtcataaggaggtggtcctgggacgaaggaagcagatggtgtccatgcactcattgctgggttacatgaggcatttgaggccaaatacaaacttaaccttggctcctgtgactaaggctggacatactgtgggatgtaaggtgaataggatgaggatgtattgaacacctcttttgactgggagggttgattggctgacgaagcaagctccttctacttgttgatggtgtggtggcatgttcttgtggtgtggtcgttgtcctcaccacaaaacaagtagaatggtttctttggaggtgcgttgaatctaccaccaagacttcggcctccccttcctcctctcggagtaggtggatgaaccgtgttgtgtgaaggttgctgctgagagcttgcctgttgctagcccgactaaccctgagactgggccaccttttcctcaccttgcaccgggttgtggatacttttgacatgtcttggataaaaccttccattttaagcccctggaggctttggtgtatctgtgaaattcctcccttctttggaaaaaatcattgttagcccttatgtactcg

SEQ ID NO: 118841 - DNA, 439 bp, Zea Mays
ccgaagttgcagagatgggtgctggtgcagaaagagcaggtgaaggaggaccctactgagagatggacatctttggaacccctccttctatgaacatcatggaagatcgccctcctaaagctagtagtgtatctggagcgacctaggacgtggaggactagagtagtatagtagtaggtggtttcttttgcctagacttaataaggaaagtgggtttgtatggactaagaatgtgtaataagtaagagcttggaataatgtggcaaaggttgtgtaactgtattgtataataataaagcatgttttcttcttcagatgccaacaaggacccgtgatcatgatggggcagggacttctagggtagtggggaggagagcccaatcgcgccacctgtacctccaactttggcagagggcattgctgtactgctaaacgctac

SEQ ID NO: 118842 - DNA, 289 bp, Zea Mays
acacattaaaaatggggaagagcaattgtgtattttcggaggggcgaagtcgtgtatgccttctcttcctccttcgtagctttcttgtcgttacgtctaaaggagggttagtcctattcatgctttatcgcctctcccccttcttcgatttgtccttcggcgatgtgaagccaaagggagctgtctattcacacgatctgttcgaatgagtcttcctgaaagtggtctgagacaacaattatcatcaaatgtggacgttcagccaaagaccttctccctaacaaagacc

SEQ ID NO: 118843 - DNA, 844 bp, Zea Mays
tctgactagaagatttgccatgagacgacatctctccaatattttccagtctcattacctctttgaccgatttttctcccacattcctagcttttttgccagttttttcataagtagggtcatcaagaccatgtctatccactgaagctcttttgccaaggttgatagactcatcgttccaaccctcatcagtgatatcatcaatcttaaagaaaatgtcataaaggaaaggtttaacccccacctcaatgataggcgggatcatagcgacactcttggcatgaactttgaatctaaccatatccttagaatctaaagataggatgtccacttcttcgacagccccgattgtagatcctaattcacatatcacctggtaattttgcagttcctctggaacattttcagccacaatccaaactgcatgcagcttagatttaggtttagcctgagagctccaatgagaaacggaaattttagctcccgacattttcattttgagctcagggaaattaatcatctcgtcaagcttctcttgagaaggaaattgcattaggaacccggcatgacacttggtagctttccaagtttttccccatggaaagtggaacccaaagtccttctcaagatcttcagcagaaatcaaaccctccataacagtcaccaaaccgatgaagcttcttttgggttttctggacaagggtttcgtaaaatgagaagagtaaaaccctaatccatcagccgccataccaacgatagacatacaaggtttgttctgtttaggcaacacacagcgagcagtcatgtgggtttctttgtgacaaaagtcacaccacaaagatct

SEQ ID NO: 118844 - DNA, 529 bp, Zea Mays
caattctggtctggacactcaacaggctctcttggaaataggggcaatgtctggaataagctctatggtaaattcgactttacgctcgtgtggcaagccttataactcctcagggaacacttcgacgaacttcgacacaattctaatatcatcaatcaggttggcctccttgctatctacagacaaatagtgacaggctccttcttctagttcaggcatgtacaactcagctactacttcctttctggatggggacaccaacttgactgttctcttgtcacaactgacagtggcttggtttctatgcagccaattcatccctaggatgacatctaaccctcgagtacccattactactaggttagcgggtaagtctatcccccttatttcaatccttagatttagacacatcttatcgaactgaacttttcccccaactgaattaactcttaaaggtggaatcattgattctatgagaatgttatgtgcttctacccatgatgtagaaacaaaagaatgtgtggcacta

SEQ ID NO: 118845 - DNA, 301 bp, Zea Mays
ctggaagctggctattgattttgtcaaagctaggagttaattttttgctgttttgagcttgggaagggatgggggaaaacatgtgagcaaacaatagttgttagttactccctcaaatgcttactaagatgctatgagttgagattgcacaattcgtcttactccgctgtagccgtttacacttgaaacacgtgcaaacgaagcaagtttctagctgtttaaagcgaaatcagcaagctaggagggttatagtttataagtcgagttagcaagtgcttgctctttttgttgcttgaacgca

SEQ ID NO: 118846 - DNA, 479 bp, Zea Mays
ttaaaacttaataaaagaattattatgggtctgcgagccttgtttaggagcactagagcttggaagggccagccgtcagtggtgctacggtctatgagacttggaaggtgccacgaggcacagcgcaggaagccaacaatgctataaggggcagccaacaatgggaaatcggaagcgttaggcatgtggtttatggtgttaggatttgttctttgctatgtaatatgggataggccaaagaatacactatgggtcgatttcggatatccaacagataacctgcgggtagaaggtaatatcctaatccgtgcccgcccgacttcggatcgaattcggatctgacccacgggtcaaaacatgtattcatacccggctccgtcgggtcggatatccgacggatatccaaatccatgggtcaaattgccatccctactgtcatttctagttcatgtatcagttctggaccatctgaacatgac

SEQ ID NO: 118847 - DNA, 546 bp, Zea Mays
tatttagaaatacaaaatgctgctaagagtggttaatcgattcatgacatgaatgaatacattaaaaatgataaagtgatcacacctgcccaagagatgcagcagcaacaggctctggtgttatctcagagaaaaccatatccagtggaagcccaagctctttctctataatattaaaagcaacatcgtttgaaaatggtgctatgcggtcctgaagtagtgagagctcatcaaggtatgcaggtggaacaacatcctgcagcaaatgaaacaaagaaggcgacaaatgtcaaacatctaaagctaaggcactccaagcttgcaatcgcaatatgaacaggtgaaataaaaatataatgactagtgaacctcaccggccgtgacgaaactgcttgtgcgatcttcacaaatgcctgtgattaaaaaaggaacatcaataaactttatgatcatcagataaggcaataggaaatgagacataccgggccaagctccaagagtatcctcctgagctgagccgcccgaagctgcaaagacaacaccaac

SEQ ID NO: 118848 - DNA, 277 bp, Zea Mays
gaagaggatctgcaatgagaatatagtgacgttagatatatagaaactccaattagagtgtgattggtttcttatatctaacccaacttggctccatcaatgtaccttgtgggtgtttggttggtttggctaagggttggactagattcaagtcacacaaaagcatccccaacctaggtttggcttcacatgaacgaatctcaaatctatttccttgaagcctgatttgccacgaaccacctcacgtgcacctagtgctaatattctcacacaccta

SEQ ID NO: 118849 - DNA, 783 bp, Zea Mays
tctccatggtacagtgccttgagtggatcaatacgccagatcagctcgccgtcgttgatcgccgtcccgattcgtgcgcggtactggatggataatgtcggagaaagggtaactcgtacgtggcaccatctcctaagctcagcgggagttattcaccggcggccaccgtgactcagtgagctctcgccgcgctgtcgcacatgcttcgatttgcctcattgtgcctcttccttacgtggttgtcatgcgttaacagcccacctcgtggccgcggatcgatcaccggatcgccgtgcctatatataggacaaggagacacggcgaggtgttcgcagttcttcaagcaagcttgagtaaaaccagaaatttgcattgtctcctcctcctctcctcaaattgattgtgcacggtgaaactacagtcccttactgccctatagccccaatcccatctcccaatttcacccagagccgccgcgacaccattttcccccttccctgtctccggcgaacacaagactccgcgctccatggccagaccactctagtaaggctctgcctctctcgagtgttgttctagcaacgctgtatgcacgtgaagctcaccgtagtagccgtttaaccaattcgggcgtaaatgattgggaacacgggattgacatcacggtttccgccatacccgcgagcagaccgttctccaagtgttcaagccaaagtgaagcatgttcctaggttgccttgggtaggttatgcttcccctgtcgctcgactgagcatccaccgg

SEQ ID NO: 118850 - DNA, 276 bp, Zea Mays
ctcggcacaataacaatttacggagaccaacatactgctcgcaacattgaaagggacctcgtcctaggacaatgcaacatccagtaccttatttctgagaacgaaagccacgttgtcccacaccctgagaaagcagtgccaaccaaagcctagattcaaagcaccgaccaggccaaaaaagtccctctagaagccacagtaccaaatcagacagtgttaatcagcgaagacctcacccaagatagagaggccaagctgttgtcctgcctacatcgc

SEQ ID NO: 118851 - DNA, 313 bp, Zea Mays
taatgtaaccatcctcttagcacaggatattactccatcatacttggtcaagtagtctattccaagtatcacatcgattccacttgactccaaaattaacagctctactagaaagcttaggcctctcatttcaatcttagtctgagggcatgagtgagtggctctaagttcacctcctggtgatcgaattaatagtttcttcttcaagggatagtttgctatattatgtttttccataaatgactttgttacgaaggagtgagatgctccagaatcaaataaaacggatgcaagaatggagttaataagaaac

SEQ ID NO: 118852 - DNA, 388 bp, Zea Mays
aaggtggtggagtgcatgtatcttggtagttaatgcgccgctatcatacttgacctttggtaagacaaccatcatggcccatgccctctctaagctaggtattaatacatatgtcatgaacctttgtgccatagccatgttgtccacacatgataggttaatgtcaatgttccctctacttaatcatacctcctagtacattgtgtgcgcattactagggtcataatacaatcatgtgattggcttagagccttcaagttttctataggataggtagtatctttgcatgccttgtcaaccatataatgttacctatcacgaattcgatgtgatgtaccttagacttaattactaagttatcaatctttaacacacctttagagttgtt

SEQ ID NO: 118853 - DNA, 311 bp, Zea Mays
ttggaagaagactagctaggaggaaggaaggaagaaggggaacggggcgaaagcgacgtgcccatgcatgcgtaattgtagaccagtattatagttgccgcgcgcagccgtaagtaacatcatcatgtccacaatcgtagaccagtttgcgtactgtcaaacagacaaacagtcttgtaaccataatttgttgcctttcgtaaaccgtacatgttgaataggaagtcgttgtccaaatcgcaaagcatataccatttctatgctgcacaaactttggcctgcagccgtaagagacgtccaaaagaccctgt

SEQ ID NO: 118854 - DNA, 396 bp, Zea Mays
gaaaaacagaaggacgaaggagaacagaaaagagaaagcttgcaaaatcactcacggtgcttctagaaagagggtggggaagtccttattcatgaaggatctcagagacaacgcggtgacaaccttgactcacgcttcaatctcagacaacgcgagcggttcaaaggaatgtcagttaggatcattaacgctggagtacctgtgcattgcctctgacgtgccatcagatgctgaatttggcagtgcatgaagatgcgcaccagcctcgcgcccgtgagaccttacttcttcaacgtactgagcaccgccacaagaggctccaccttgcccttcagtcctagctcgcccagcgatgccaatcgtttgtcgacacttgctcccgatcgtgttcttgac

SEQ ID NO: 118855 - DNA, 836 bp, Zea Mays
ggggcatgacagaagcttggacatagggctgcagcttgaggtaaacacaatcatttactgcaaagctgtgttccgagcggttgtttttgtctgcttggcgtttcatacggctttgcgcacaaagtaggtgctcatgcctcatgaaccaattcttgcattactgagcgctcccgaagccagctaggaaggtagactagcagtcactatgtcattaacagacaagccaagacatctgggctggcggccgtatagaacctcgaagggtgatcgaccaagggaggagtgaaaacgtgtattatactagtattcagccgcggccaaccaatcttttcgcttctttggacatgcactgataaagcaccggaggaatgactcgagacattgattaacaccgtttggtttgttcgttagtttgaggatggtacgacgaaccgtgctagacagtttgaaaaggtgctaccaaaactgtctcgtgaagatggggtctctgtcggaaacaattgccaagggaagtccatccagtttgtagacctgtgccatgaagagttgagccctgagcttccaaatatggagggtatattggaagcactgagcttccaaatgttagaggaagcccaggccgaccacccctatctggctggatcgcaccagtgcgcgtccctacacacccacgccaggtcgtcaggtgtgccccctgcccagtgcccatgcaccaggtcaacctctcccacatgtgtcagtcaaactctcggtctaacaaccaacctcccacgtgggacacaaggcataaattgtggttctattttttatgcgcaaatagcgtaaatagtccacaa

SEQ ID NO: 118856 - DNA, 604 bp, Zea Mays
ccaagggcttttcttccaagtgatttatctttgtctttccttttgcatttgttgacatgtctgtgctaacttggactctttcaccttgaggacttgtcaacataattgttctgttggcacattgtatcactccatcacgacttttcaaccagtcacatccaagaatcacatcaataccattggatcctaggaccactaggttgactagaaaatctattccttgaatcttgtgattaacatggaggcatgaatgtgtggccttcatgtcacctcctggtggactaatgtgtaacatcttcttaagagggtgctttggtaagttatgcttttccacgaatgagtctgttataaatgaatgcgatgctccagagtcaaataaaactgatgcaggtatggagttaacaaggaacataccatacaccacgtcggcatcctcaggcacaatttctgctgtcacatggttgactctttctctactctggttctgcagagtcctgttctgtgcagatccacgagcaagggtgttttggtcattcctttgattgttgctcttctgaggtgtctgctggttgcgcctagggcagttgttagcataatggccaag

SEQ ID NO: 118857 - DNA, 582 bp, Zea Mays
aaggtggtcggccaacagtggcttcctcgggaaggagtcatcgggcaatggtaaaaccaagcgtttttctcggggtgtagctatgcaagactgtgggccccgagatcgtctggttgcgttgtattctttatggcggacgacgtggccagcgtggggcttgagcgccaccatttgggctatgccgacccttggcctttgaagcctaaggctcagcatcgttcgttgtattatgccctgctagtgttctgcgcactcaggactagtcctgataggtcatgagtgtgccacaggctgggggcgcatgagccataaatgtgtcacagtccaaggggttcgtagactgtgagtgggatgcaacccaagggctcgtaggtcatgagtgggaggcggaccgaagactctggcatggctcggcgctaggcgtagttaatgcggtgggtcacttatgatgggtcggtctcggaccgggcgagagatccactcgagtggtttcccttcggctcacctgacctccctatctagattcgccacgcccgacctcgagctcggtgccacaaggctcgtttgggagtgagtacttac

SEQ ID NO: 118858 - DNA, 424 bp, Zea Mays
ttcaagccagagtaagacatttgatcttagatgaggaacaaaaagcaagggagctagagcaagaaattcctaaaatgcagcatgaagacacccaccaccagcagtcggtcgatgtggcttaccaaaacattcaacatttccacaggtcaaccttcacaccagctaccttccaagggctaaactatatcgatgggcgaagtcccttcgcaccacagcttcaggcctccccttagccgcaaaattacagggcgggcacatacccaaaatacaacgacaacatagatcatacttagtacatcatgagctactaggttgtagttgcaaatagatcaaggggagatgacgttaccatggcaaagtcatagcaaagtccttagacgcaacctcctcttcatttggagattttgatccctttgctttcttc

SEQ ID NO: 118859 - DNA, 433 bp, Zea Mays
cgtggttctatccgaagccatctgccatgggaagagagtcactattatgcacatgcctttttttaactagtattttattcattacatcaagccattacattacatagcatactgctaccacaagttcatcacacatgagtgctacctagggtacccccaaactctttctctaaagtgtccccaaattccttgagaaggtcatcaaggctggccagggacatgttctcggtgtcggactggttcctaggagggttctcttcctgctgctcagtctgacatccttggcttttggtcttcttgcggatttttcttgcgggggcgagcttcttcagtttcttgtcgtagtccattttgagggtgcggtaagcttcacgggtattggtctcttcgccttcagctatcgagaggctctcttgaagggacgctttttctt

SEQ ID NO: 118860 - DNA, 366 bp, Zea Mays
tggcacagattggtgacaagggtgtacaagttattaaggaaatgatcgaacaaaaggtggacaaatacaaatgcttccgtcatgacagcaagggaatcctatggtttggagacctattggctgttcctaaaaatcccgagctcagaaataaaatattggatgaagctcacctttccaaattttccatgcaccccggcagtaacaagatgtatcatgatcttagatctctgtattggtggaccagaatgaaaagggaaattgctaagtatgtatctgaatgtgacacttgccaaagagtcaaggccagtcatttgaagtcagcaggcaccttacagccccttcccataccatcttggaaatgggagg

SEQ ID NO: 118861 - DNA, 587 bp, Zea Mays
atgcatatggatagttgcgatatgctgctacttacatgaagccgaagtatttcagttgttggtagtaatgattctttgtataatttgcttcggtcatatttattcatgggatgaacatgcttataatatttgcttataactattcagttattgtttaattgcaaactacatatcagtattgtcaaatagtttcaagcaaatggttcatttattagtacaaccaatatttgaacttatgcatcattgagttggctattatgtgcttctcccatgtgagcaaattctatagtttaatgaacatcattgcccttagtggctaatatggccgatgaatcctttctaatcatcgtgctaagcttgtgtccccatcccatccaaaaggtaggttagacgctcggggggaaagcacgatcggatacccgatcatggtaacctatcatgcatacgtcggatagtacgagtactaagaccagacagtctggggtaggcacggaaggtcggactgtctgcagacaaccggaagtaacaacgatctcagactgtaagaccacaacgtcctaagataggtactaggaagcaaaacaatt

SEQ ID NO: 118862 - DNA, 330 bp, Zea Mays
gtccagagctgtgtagacgcttagcctggtcccgtaccctaagcctgcacctccaccaccctacaacgggtgccctagtatttggagttgtgatcttgtaggtccggacatgaggcttggctccccagactcaatcctgcaggtcctgttgcatgaatcaaaggatggctgataccagacgatggttcctatgggtgtgctactaacacttcctagccgaagctgtgtacaagtctaggtcccagtcgaggctacctcctgggggccgggtcaccaactctttcttaggtatactggtatccagcctcgacacgtcgagcctacatccca

SEQ ID NO: 118863 - DNA, 409 bp, Zea Mays
ctcaaatttcagggaggaaagcgaagtgatggacggagtccttgggaacttcggcccatcaactctcaatgtggcttacttccaagagctcatggtagtgctctgttcacgaggggagaaacacaggtaaggtaatacacctcatttgagagtatgttgtatctgtcatctctgattgtcatagcatggcatgtctcgtggttttatttgtcacatatgctgatgttggtgtcttgctgatctgttcgatacctgatgatgtctacagaaatttgcgtgtgtgttctatttatatccatcccagttttatttgtaagaatcctactttattacatcaaacattaactgttgcaaaacctaatttggtgtgttttattgtggagtttatttctaaataatacataacgca

SEQ ID NO: 118864 - DNA, 334 bp, Zea Mays
tatttcagatagactaaaccatcctggctggacccagaagcagcttcggtcggcatctcccagccgcttgagagaggccacactctgtacgtaatatgctcctggaccaaatccctggtgccaatatatgtgcaaactgtgttatacgcagctcggcatgcttctacgtcattcccaacagcaggagacgaccttctgatgttgaagcgagaccaaatagggcgttgaatgatcccctttatatcttctctttcaactaagtcgttcttcacataaaaccactcttgcatccaggctcctggccacctcttccgaaatgtcgagactggagagc

SEQ ID NO: 118865 - DNA, 383 bp, Zea Mays
ctttgaactcttccctcttcttcatatctaccttggcatagaaccattccttaacccactcacttggtcatttggtttggtaggccaatacaggaaactttgaatcccttcggtaagagaaggtctatcacccaatgttcttgtgcattttatctgaaggtctatccttcgtcttatagtgcaattcatgcactctgaagaagcactcggcatcgacctatgcaccctaccttcatacatcccatatgaagacaccaagccttactactgcattgggtgtcagctggtgcatgtagatctcatacttcttcagctaaagtcctgcatagaagaagctcttgaacaccatgacttcatcctccttcgggtctgggagagtctcc

SEQ ID NO: 118866 - DNA, 489 bp, Zea Mays
gtagccgcctctaaggctgagggtccctcagttacttccatgggaccaagacgatccaagtcagtttcctgaccctcaagaccgcgctctaaggtcgatgaggcacgggacgctgcccgggataaccccaacccggcgtcgagcacatcagcacaaacatccatcgtaccatcatccgctggctctgataacagatcctctggaaccatatcttcaagagtctgatcaaagttcgctagggacaattcttgtagaccaatgagggcagacagggcaggagaaggaactccactactttccccactagcgacatactgccgactgttcttccgagtcaaagggacctcatcttcttcctccccatcgttttcatcagcaacacaaacaatacccccattgggatcagcagcagatggagcacccccattgggattagcagcagatggagcacacccattggggtcagcgtcagtaaactcgggcacaagc

SEQ ID NO: 118867 - DNA, 948 bp, Zea Mays
ccagactgcagatttcagcgaaaggtggaagaaatgggaatgtcccgaactactgataccatgtgagagagatatgttgtgtaggctattgtgtattgaatgaatagtgtcagtcggttacagtatatataggaagaggagatcatgtgtgacttatagaaatagcgccagattgatctcctctatcaatcagtatcaggccttcctagtgtgggctgatacagattgatcccctacaccaatcaggatctctcctaccataactagcctggtttctatccataatagcacagatttctatccttgcctagtacatggcagatactgctaacataaaccacccaaggatgccctgtaacagcttctggacaaagtctctgactacttgctagggtggaaagcatctttaatgaataaggcaggtcatttggtcatggtacgtgcagttctaacagcctctcccatatatcaattgttggttgttgacctccgtaagtgggtctttaaagcattagacaaatgtagaaggggttttctgtggaagggacaggagaaggctaatgggggtaattgccttgtgtcttggaaaatggtgcaacgccctctagaatatggcggactgggattctaaatctggaaaaattaggctgggctctgaaaatccgttggttatgggcccataaggtggaccgtccctgtccttgggctggttgccaaattggggcccctcggattacttcagccttttttaatatgaccataactccagttctcggaaattggggaaagaatcctgttttggaaagacagaaggttaaatggaaattccattgctgatttggctcctcatccgatccaaaatatttcaagagtggtcaacaaaagaactgtagatttgtagctgaagctcttaataatctcaagtgggtggtcgacattcaaggggcc

SEQ ID NO: 118868 - DNA, 533 bp, Zea Mays
gtcaccgcccccacgaccatccttgcggtgtcggcgaccacctctagagctggtggcctaacgagaggatttggaaggagtggaggcagaagggtgcgagggaggcccctccgacgacagagggcgagggggctggctgtcagaggatgcgccgtagagggccatggaaaacacgatagactcaacatccaaagtgagcttctcaagaagtatctcattgtggatgttgtggaaggacgggaagggcatggagtgcttgatgaaggccttcaggtggttgtagtatcggctaagaccacgtaaaatgttgatgacaagtgtgcggtcggagacaggcttcctaagatcctaaagggggtataccatgcccttcatccgacaaaaatactcagtgacaaagagatccctttacaataatatccaaaagtagacgtcgaggtggatgacacgagccttctagttctcgagaaactaggcctcaaggggaacccacctggcgaacggttgctccacgctcatggaaaacatcctag

SEQ ID NO: 118869 - DNA, 387 bp, Zea Mays
cttattagcctggcttgagcttatgcgttcttttgcatcaatgagctaaacctgcggctgtatagtgtttgttaatatcgccttgcagtctcttattgagtctccttggtgcatcattcgagtcagtggaccctattggtttagagatcaccaatgcttgcagcgcttcttgattggattcaatacttcaaagtgctaaattccagtcatcggtctcggatgttatgtgattgtgtagccaatgtgacaactcggagcattttgatccattttcaacagtttgtgttgccaaaccagtcatttgtttagcccaatattccaactattgttatacttggatctttggtggtatgaaagcaccttggatgaactctgaatgatagtcaa

SEQ ID NO: 118870 - DNA, 284 bp, Zea Mays
caatcaacacacatatgccatgttccatccttcttaggcactaaaatagctgaaacaacacaaggactaagagattcacgcacacagcctttgtcgagtagttcttacacttgccactgaatttcttttgtttcctccagacttgtcctatatggcgcacggtttggcaaaaatgcaccaggaataagatcgatttggtgctcaatccctcttataggtggctgcctcgctggtatctcacatggaaatacatcagaatactcctgcaaaatgttagcaacaac

SEQ ID NO: 118871 - DNA, 405 bp, Zea Mays
gaaatatcctgttagatggaaagagtagtttgctataaagacattggatccctgaccattatgctcgaggcagttgcctcatataatttatggatttggcattcctttttttaggatagcagcgtcgaacaaccacatcaacatgctaaatcaatcgacattgttcactaacgtgttcaagggagaaacaccaaatgtgaacttccgatgaatagatatgagtataaccaagggtactacctcgccaatggcatctactcctagtggtctgtatttatgaaggccatttctctctcatgtactctgaagcagcaaacgtttgttgtgtgccaggagggcgtgcagaaggatgtagagagcatttggtgtcttaaggctcacttctatattcttgctagtctaggt

SEQ ID NO: 118872 - DNA, 283 bp, Zea Mays
taaatacctcagacacaccctggtgatgtttgcaaccaaaccaaaaccgtttgacatgctttggcctggtttttgtcgcgacccgagctgagtgacagacacgactagacacaagcttttctcctcaccctaagcatatctaagctcgagactcacatagaaaagataggatttggagcagggaagagaccttacatgggatctttgccaagatacacacgttacagaagctaaacaggaacttggacatgggcagaagcaaatatccactgttcgacctcgg

SEQ ID NO: 118873 - DNA, 558 bp, Zea Mays
ctaaagcttgattatatccttcaatagaggattgtagatgctcacaagattgataagggtatgaaggatattcaagagaaaatggaagttggtaaagccacttgtttcaggaaggatgaccaaggggtgctatggtttaaagaccgtatagtggtgtctaaggatgttgaactttgtcaacagatcttggatgaagcccatctcagtcggtactctattcatcccagaagtacaaagatgtaccaatatttgaaacaacattattggtggactaaaaagaagatagaaattgcctgttatgtggcaaagtgcgacacttgtcaacgagtgaaggcagtgcacatgaagactgctggacccctacaatcattacatttcccaacattgaaatgggatgacataagcatggattttgttatcggattaccccaaacatccaaaggatatgattctatttgggttatagtggatcggcttacaaagacagctcattttcttccaatcaaaacatattatctagttcttacatatgctcaattatatgttgctcgtattttg

SEQ ID NO: 118874 - DNA, 1580 bp, Zea Mays
ggtccagcccgacaggatcgctggcgtcgtctgaggctcgcgtttgccgtacctctgaggtagatgaggctggcgtggggagtagatcctgtagcagaaaatcaaaaaaatccggtcgaggctttaaagccgcaaaccgaaagtgagtctcatcaaacacaacgtggcgagagatgatgatcttgcgagtggatagatcaaggcactggtagcccttctgagaaggagggtagccgagaaaaacacacgccgcagagtgaggagacaatttgtggggggtcgtggcactgaggtttggatagcacaggcaaccaaaaactcgaaggagtgagtaatctggcattttgcgataaaggagatggtagggaataccgttatgtatggacgatgaaggccgccggtttgtgagaaacacgacagtggagagagcctcggcccaataaggaggaggcatggccgcatgaatcagaagcgtccgaacaacattgttcagagtgcgaagcatccgctcagctttgccgttttgggcggatgtgtaggggcacgaggtgcaaagaaggatgccgcgggcagccaggaaggcggcagtggcactgttaatgaactcagtcccattatcggtctgaaaacagcgcacagaagaactgaattgtgtgttagcgtaagcagtgaactgaacaatatgttcatgaacttgagatttatggcgtagggggaatgtccaacaaaaatgagtaaaatcatcaagtatgacaagataatatttatagcccgaaatactcaaaactggagaggtccagacatcacaatgaacgagttcaaaaggtgtagatgtattagaaacagaactatcaaaaggcagcctagcgtgtttgcctagctggcaggcatggcaaatgcggcgagctgctttattacactgtatagctgaaagtttatttagggtttgaacggcggctggcgctggatgaccgaggcgagcatgccacaactctggagtaacgacagcaacatggcagcgaggcggcagacgatgtggaatggtgtagagatccccgttgctattgcaccgaaggaggactgttttggtttagagatccttaacagaaaaactagaagcgtcaaactcaatagaacagttattgtcgcgagtaagctgtcgaacagataacaaattacgagcaagctgaggagcgacaagaacattattaagatgaaaatagcgatcagctataggtaagagagatgtgccacggccagatgaagggatggactgcccgttcccgaccgtaacggagcacggtggggaaggtaacgggaaaggagtataccgtcgttggaggacatgtgggatgttgctccgctgtccataacccaagaaggagagtcctgcaccgccatttgattaagagcagcaatcaagttggccgtattccagccgcctgaagaagcacctgcggcgggaaactgcggcggaagaagaaacacaccgcacaccactaacaggtggggtgaccttcattatatagcccgtaggctagggttacattagggttacagagtacatgggcctaatgggc

SEQ ID NO: 118875 - DNA, 325 bp, Zea Mays
ctagaacctacagcctatcgcctcttataccaactgtaacaccccatagctcccacacaatgggtgttaccaaatacccttcccacaaattagaaagcataaaaagatggagacagaaagaaaaattcggcagcacctcccttgaaagttgcataacgagggaaccacagagtttatacatgatggaaaagaaaggtaatccacattgtataatcaatatgcaaaagaagaaataaacatttaggacaaaattaattcagctaaccaaaaaaatacgaccaccataaagactagagcataatagaccactagcacacactatttc

SEQ ID NO: 118876 - DNA, 274 bp, Zea Mays
ttgcagtatgcatgaacttttgtatgagacgaaggccaccggcaaggagcagtatcacaacaacttcggttgttacggattcattactcgctctaatgcaagctacccggttccaacataccggaaaagatggcccggggcctggatggaggaatggttttatgttaagaacaatctgattgagagggaggatattaaggaaattatccagcgccccatctagtctcacttcggccttcgaagaccgaaggtggctattgaaagtgatgccgaa

SEQ ID NO: 118877 - DNA, 323 bp, Zea Mays
tcggggtcccgtccgagctcacagtcgacaacggcaaacagtttgacagccaggacttcagggacttctgcctctccatcggcaccaagcctgccttcgcctcggtttaccacccacaatccaacggcatcgttgagcgcgccaacggcaagattttcactgccatcaagaaaagacttctcgacgacaagaagggtaaatgggccgaccaactacctgaagtggtatgagccctaaacatgaccgaatgccaggcaaccggattcacaccttttcgtctactatatgaatcggaggccatgacgccgcaggagataaagcat

SEQ ID NO: 118878 - DNA, 637 bp, Zea Mays
gaaaaataaaaaggtccggtccgtagggtttaggatctaaaaaatgattcttactatcacgatctaaaaagtgacggattcttaatacggcgatgacttgattccagacggttttaacaacagtcaatcaaacaaattggtggttggaggcactagaatggaggtggttggaagcaggcgggagagcaagaacaatagtcttccctcgggactgtttctgtcggaggccaattaacaacagtcaatcaaataattcgtgccggccgcggtgacccacaccacgaagacgcactgcactgccacagggaaggggggacgcctagctgacacgcctaccacccagcgcagtcactacaaaccgccctcacccagtccgagtcccggggaatcattgcgcgctgcaggctgcacagtgcactccggcccttgtccttttctgctctgcacactgcactgtgctgtgctactccctccgaagcatggtacgcactgtcctgctaaaatgcttgctgtgttagcgccatcatcatttgagagaagaagcccaccactctgtgtactgcacctgctagtaaagccagccaatggatggtaaaccctgacggttttaacccagccagctctgcaggttacagac

SEQ ID NO: 118879 - DNA, 602 bp, Zea Mays
atatctgagggtcggattctgagctgatggtagcctgacctcagatctatcttcgagaacacattggctcctctcaactgatcgaataaaacttcaattctgggcagggggtacttattcttgatagtagcttcattcaaagctcgataatcgatgcgcatcctcttcgtgccatccttcttctccacaaacaatactgtggctgcccaaggtgaggtactcggtctgatataacctttctccgacaactcatcaatctacttcttgagttccaccaactctagtccggacactcgataggctctcttggaaataggggtggtgcctggaataagcactatggcaaattcaaccttcctttcaggtggcatacctggtaactcctcgggaaacacatctgggaaatctgatactacactgatagcctctgatggtttaatctcctcaacacgagtggtgacttggtgacaactccctttcttcggtcctgacaagatcaattccactaacacttcttctcctgatagggacactaacttcactgttctcttatcacaactaaggctggcttgatacttggttagccaattcatccctaggat

SEQ ID NO: 118880 - DNA, 425 bp, Zea Mays
tggagaatgggtactcatctcctggggtggtccgggactgtgtagccacttagcttggttccgcaccctaagcctgcacgatccaccactctgtgatgggtatcctagtatttcgaactatagccctgtgggttcaggaacctggggtacggttctagagaatggacgcacggcccctggggtggtccggagccatgaagccacttagcctggtcccgtaccgtaagcctacacgctccaccactctgcgatgggtgtcctagtatctggaactgtgattcagggggcctgggcacacgacttggcttcgcaggccaagtcctaccggtcctgttgcataaataaaaggataaaagataccagttagtgggccctatgggtgcactactaaaacttcctagccaaggttgtgtgtaggtctggtt

SEQ ID NO: 118881 - DNA, 392 bp, Zea Mays
aactgttttatccctcttcgagtgctaagtgtgactgctgaaaaagaagaaaatggacagcgccacaatcttttccatacccgaggtatgatcaaagataagctatgtcgcatcattgttgataatggtagctgcaacaacattgctagtcaagaattggtggacagattggaattaaaaccaaggcgtcatcctagtccatataagatgcagtggcttaatgattgtggagcgttgtgtgttagccacgtgctgaatgttcctttctctgttgggaagtacaacgatcacgtggaatgtgatgtggtccctatgcaagcatgtcaattgctgctaggtcaaccttggttatatgatcgtgatgtccagatttttggaagaaccaacaagtt

SEQ ID NO: 118882 - DNA, 371 bp, Zea Mays
ctcacctacaaatgggtcggccttcgaataccacacgaaggcctaacgaagtcaaaggtggtcgacttcgtcttgtcggcaagagtgacaggtccacatctccataggcaaggagaggaggcatgcgtcaggtcccgcaccgtacgaccataaagggaccacactcaattgctctaggcccacctgtcagcgatagggagggtaccaattctggtgtaacatggaaacttatacttgtagtcatgtaattaccccgttgtacagtacatatctagaatatagttggtagttggaggtataactgtacttaggaccaccaacccctggctacccctataaataccccgtcctatagccggacaggacacgct

SEQ ID NO: 118883 - DNA, 576 bp, Zea Mays
cgtgaggccccttgcaatccctgacaaaaattaagttgtgtcagtagtggtagctttactcttctttttctcatacggggacaccaattttggtatagaaaatttagatttctttgatggtcgaggatcccttaatggctgtggagaaggtggatctcttactggtggcgtagacaatgggtcaccaagaggatgaggaggagaaggtgatggagccctggattgcaatgcttgtggccgagacgatgggtcagaaagaggatgagcagaagcatgtgaagtttgaggtgcagatggatgtacaataggaactacaatttgagaaggcagagacgattaggctggggacgacgatggcagtggtggatcaaccaattcaacatcccttcgaggccaaaggatgaaattcttgacagcttgtccaggtgtctcaataccttcgggcctagggatgtctagcatgtcgtccttggattcttgaatgaccatcattacttctaccctgcaatactcttctggaatgtcgcttctatggaacttgcgacctaggatcgcaaggcctatggctactttctt

SEQ ID NO: 118884 - DNA, 577 bp, Zea Mays
atcagttctggccagagagactcggaataacgaattgggaaaatttcagttttattaaaattaatcttcagccctgaacatccttcaaaaacttccagaatccttttcagaacttttaaatcctctttatctgctttaacaaacactccagcatcgtcagcataaagagaacagcgaagctttgccgctcttggcagaacccgccccagaaacccaacatctgccgccatctcaatcatcctctgtagcgggtccatagctaaaataaacaggaacggcgatagcggatccccttgatgaacgccacgcatgtgcctgattgcatttgtttgttggctattgattaagattctggaggaggaagagcccaaaattgtggcgatccaattcctccacttctgagaaaatcctaaagctcttaaaacctctaacaaatatgcccagttgacggagtcaaacgcttttgatatgtcgagcttgacaaaaagtgctggttgtttgctcttatgaagtttctgaataactttttgaacgtagaggaaattatcatgaattgaacgtttctgaatgaacgcgt

SEQ ID NO: 118885 - DNA, 1096 bp, Zea Mays
ttccttcacagtccgaagtccacgacgacgaacaccgcaggaccgagctccggtgagcctacaccggccgatttacgccacgaccggtgctctactttggctgagaccaaattcaaaccctaacaatagtttctcctcaactaatttcactaacggtgctctaacctcctctgtccacggtgaccatgcgatcaacggccaaaccaatgcgttcccggcgatctaaggggtcttagcttaattagcggggtcggggagcatcaggggcacacaaggacattgaaacaaaagagcagagggcatgagcggacctgagttgagctagccacggtgaggtcacactgctcggtgttcttgagtcatttgtgggaaatccgaaattggggagctctagtggatgattcgaggcacgggttgcttcactggttgcacaactacctagcggagcaggcggggtcgtcaatttatagcgggcttgagcggtggccaatgaattcgagagagacgcgcggcagccgaagaagaaggttactggcgcgcgccaatggtggcaattaacgtggcaagctccccggcgaccaccggacgagctaacgtgagtcacggcggtgaggttaatgtgccaaggcacgtggcgcaaggccgcgaagtggctatctccgtcgaacccatccaaatcgaccgtggtctgctcgggtacggtggccggagtaaaatagtggccggagtatatccatggcgtgatattttcttacccccagtgctatccaattgatccgagcgcgaatcatcacgacgatagcacgaatccgcgcacgtctagtcggcggtgaggggaccagaacctgatcctatctgttactgtaccatgggattgttcttcagccagcctgacagcccgatttttggggcgaatttcctctcgattttatatggcaactagaccaatgctctgcagcaaagttgtagcctaatagaccagctcaaactttgctacattgtgtacccacaaaatgtcacaatatcctacttaaaattgagcctaaagttcatccaatctcactgtctgtctgaattcagacttaaggcagtctga

SEQ ID NO: 118886 - DNA, 627 bp, Zea Mays
ttcagtagacaccttgccatctccactactgtttgatttcttctctccacaactccattctgttgaggagaataaggcgtagtagtgtaatgcttgatgccatattcatttcaaaaaacagaaaaagaacctgagttgaactctccacctcgatatgttctcagtgccttcaattttgtccccaattcaacttctgctctttttttatcttctacagatacatcagtgcctgatcatttgttctgagtaactctacccacatatacctgttgtaatcagcaaccacaagcaagaaataggatttccccccaaatgtttggggtctgacctgcccacacaaatatgcatggcacaattccaatccttcttttgctctgaatgaagattccttaggaaatggtgtatgatgttgttttaccaagacacattcatcacacactggctcaactcgatccaccagtggcattccttccaccaattttagtcttcccatatctctgagtgcactgaaattcagatgcccaaacctggcatgccacttccaggcaacatcatcatgcattgtaagagaacacactggagagactacatcaagcttcagagtgtatagtctgtttccagtgcgag

SEQ ID NO: 118887 - DNA, 334 bp, Zea Mays
ggcggcgtcggccgcggccgtggtgtcgtcgtcgttcgccatgggaaacgggaccagcgaccgagcctgatgttgacgacaacaacggggcgggcgatcgggagtggaggaaggagctgaccgacgaccacacccggcgagaaggtcagcacggggcgggcgatcgactgggagtgctggtgatgtgcggcgtcgcgtgaggccggattgacagcacagcgctggcgattagattggcaatactccaggcgatggcgtctgcgactggagcaacgatcggatcagcgacaggcgcggaataggttgcggaagagtagcggatcggaaccacgat

SEQ ID NO: 118888 - DNA, 400 bp, Zea Mays
ggataactaagagatggatattagggatgactgactcattcgtaggggcccctaacccgttgtatataggctaacaaatttaggattacaagttggatttttttctcccttgtcacaagtcctacggtcttgtgagtttgttcatgagtcgcccgcaagctttaacacccttctcaacgaaaataatatgttgctctgccttgatcttcaagccttcacactatctctaggcctgagttggtcgatcaacccatgaaattagccgcacggcccacttaggacctctaatagcctatgtaccagattcgcgccataaggacctaggggatatttatcccccacaaaaggtgcatccatttggtgttggttgcatggcactcacctatgcactccgataaat

SEQ ID NO: 118889 - DNA, 482 bp, Zea Mays
gcaaactttccattgtgacgatatgcttgaagattccacatcttgccttgttttcacattgtcatcccaattcattatgacctgtgttaatcgtttgtatgtgttttccttcttgttgttgtgtgttgcattgtggctacatttgctaccctgacattatgtagtcctcataaatagtatgttttattgctcgtattgggactatcaaattttctaggcgacgccaatatcacctctttgatagttaatgtaccaaaattgtgattttaggagatgcaactcctacaaagggtgccttgttaataatgaattaattggggttcaaatagtgaagtttatcggttagttttctaacaatgatgatgggatcaaccccttgtagatcattgtaacctctacaaaacatacctcggttgcacgtcttgatgccgactcgaggttgattattggaaactcctttgatcttgttggaaatgtgaaaa

SEQ ID NO: 118890 - DNA, 400 bp, Zea Mays
cgcgatcgggagctgatgaccagagtggttaaacttcatctgactcatgcacaagatcgcatgaagaggcaagtagataaacatcgttcagagaggacatttgctgttggggattgggtttatcttaaacttcaaccttacattcagtcatccgttgcaactcgatccaacaacaaattgtatttcaagttttttgggccctatcagattgtggagcgtattggtgcagtggcttatcgtcttcagcttcctccagccagtgccattcatcctgtaattcatgtttcgcagctgaagcgttctaatggccgtaatgtgtctctttcttcacagttgcctcaggaggaggtgcctgtgcagattccattacagattttgcagcggcgtatgattgagcgag

SEQ ID NO: 118891 - DNA, 1657 bp, Zea Mays
gaaaagtaatataaatacaatcaatttgtttagtgcctcaaacaatcaatttacactcgaaagcctgctctcacaatgaggacgactcacgaccttggcattttgaagaccaggtacgagtattgtggaatggccattaacattgccagcccgggtcatctgatgatggcgttgtaggcacattcgaagttggccacctcgaagcggaggaactcggtgcagaagtgatcaggcatgttgtaggtacatgtgccctagtgagtactctccctgacccgttatgatgccaaataagggattgtttgactcttgaagttatgcaatggagatcccaagttcctaaagtgtcttcaggaaagtgatggtgacactccttccatcgtcgatcagcacactcttgactcggctcatgcagaccactaggctaacaagtaatggatacttgcctaggtgatcgaacttgagccattggtcaactcagctgaaggagatcggaatctcagaccagcggtacagcgttggtgggtcggtcatagctaccgggacttaagcggccagacaacttctgctgccttttgttctctttggagtcgtgctctctaaacattaagttgaccactctatcgatcttagggaacatttagctattgtcttcccatagtcgtggttgtggtggtgggttatggttctgccttgcaggtggcggtggtagctctgggaatggtcggccatggccgattgagttcttgaactccctacagttacataggttatggtgcatctccttatgttaggtacaagagcaatcgaggatcttgtctagtgatctcatgttgttgttgttgccatgagggggaccatgctgccatgcgggtggcagtcccatggcattgacttcttcccttagcctcttgtcccatcgtcggtcttgccgcagggcatcttatttattcatggacatgtctttttcgctagtcgatgaggtcgtgggctcgtttgttggcggtgatgtatctgtcagcgtcatggaagtgttgctcggatgttgccaaagccctttggaggatggcctgtacgaaagcctcatcacgagactccggtagaagtcctcactcactgcctcggtgatgttggggatgcggtacctcatcgactgaaaacacttcaggaatgagcagaaagaattttcctccttgcgcttgatggatttgaggtcccatgggtgtatcagcttgtcggagagtgactaaaagttggcaatgaacctgtcacaaaagtcagcttgtcgttgatgcagtgatgatgaaggtgaggaagccactagggcacatcttgccctagcatgattgggcagtaggctgtcatcacatccttcattgcctcagcagctcgggcagccgtgaaataaatggccaaccagtccctcgggccctgttttgcatcatacatattgatattggagatcttgaagtttggtagccagtgcactgcatgtagtcggctggtgaagccttcatgcccacgtctttgagttccaaatcatcctctagtcggagctggctgattagtccacgaagcccatttgtccgagccattgaggtcctttaatcggcccatagtctaaatttgtgtcaaggggacctagcgtatatctatc

SEQ ID NO: 118892 - DNA, 360 bp, Zea Mays
tccatgactcctacacactacctatcgagatcgaatgtgcttcaattctttttatgctaccaaaagacgcatgatgcaccgaactaaacgggatgggttaggtttgttttagattttcaacgtgaagcaataatattttgcttataaacctagactgtggtttttttactgactatttgctgtacattttaatcgaaatccaggtggtttatttgaagaaatattacaatgcaggtaagtgaaattatgttctttcttctggataagcatcactcaacgattgtataggtgcgagatgaccaaattataagataaaagtatattgcacattgggttaggtggtatgttactatgacaagc

SEQ ID NO: 118893 - DNA, 308 bp, Zea Mays
aaagaattaatcagaaaggaaagaattgattttattggtattcaagaaactaataaaaaatcttttgaagattcttggttgaactctattagttgtaatagaaattttgcctggttttggtctccagctaaagggagatctggtggtcttcttgttggtgttgatgctgatgtttttgatatcagacaagttgagaaaggggatttcatgattagggttcttctggcccataaaaaaagtggttttgtgtggaattttattaatgtttatggtgctgctcagaatgatcataaacaaaaaattttggt

SEQ ID NO: 118894 - DNA, 391 bp, Zea Mays
atgcatcactgacttttcctacttttgacttagtaagtagttagctgcaggtactacaaactgaatatatatgaaacttggcatatatagtaagtatataataacccaataaataggagtatctctcatccatgcatcgttatgtgtctcgtagccctgtttgacctaaacatagtataatcaagttagatccatgcacgcatcttgaactagatagctaggctgtcatatattgtcgtattcttataattcagtaaaagagagagagactgactagctaggagacatccatgaccatgaccggtggtgttctgaagagacgcgtctgaagagaggggggcctttttaatccgtggtcagttttaaattttcacctaatacaataaacagc

SEQ ID NO: 118895 - DNA, 511 bp, Zea Mays
acatgttcaaaatgcaacatgactgaacttgagaaaatatcatacgtagtcatcatggcttcgcgcaagctaagacattactttgaggcatacaaagtatgagtcacttccgataggggccttagggagctgctcagaaattcggaggcatccgctagaatagcaaagtgggcggtggaactattagggtacaacatcactttcttgcctagaacaacaatcaaatcacaagtcctagctgatttcatcgtagactggacaggacctgtggagccgcaacaagaacatgcagaaagggtctagaccatccactgcgacggcacatggtgtcacataggagcaggtgccacgatgatcattacatcacccatcggagtcaaatacagatacgctacgcgcctcagcttcgcactcgagtccgacaaatgcacaaacaacatcacgagtacgaagcggtaatcctaggacttcgcaagttgcgagccctcggtgtgaccatgtcacacccggg

SEQ ID NO: 118896 - DNA, 281 bp, Zea Mays
catgaggcagagaagatggctagagttgatcaaggattatgacctggaggtacattatcacccagggaaggccaatgtggtagcagatgccttgagtcaggaattgcaatgcaactgtgttatgatggattctcgcattaacaccttgtgtgatgagttgagcaaaatgaagattgaagtgattccttctagtgctttgtctcacatttccgttgagccagccttgcaagaccagatcatcatggcccagctcagtgacatgggagtgcaaattattaagg

SEQ ID NO: 118897 - DNA, 500 bp, Zea Mays
ggacttgctacattggtgaaggatcggtgaggtgaccaaagggggtgaatggaagccaccaagattctatttcgagaacaccaccatgacttgattcccaaatctcacatgaaccccaaaagacgaatgaacctacataacatagtagtatttagtccagcgttgactgaatacaccaaactgctacataggaaactacccaactatctgcaaaaaatcatagtgaaaatcgtagaacagagggagcggcagtgccagacttcagagcgatagtggcgggcagcggcagtgccgagcactagagtggtagtgtcgggcaatgaaaaatgccagatttgcctcaaactttgtaggtagtttgcgtagagggaaatcggtctattcgtgaaatatgggcaagagcaactcaaaaatccgtgcgtagatgcaaaaccctgagagtgatgggattttgttaggctttctcaattgaactaaaaacgggatcaactcgaatcacg

SEQ ID NO: 118898 - DNA, 335 bp, Zea Mays
aaaaatgatttggccattaattaagtttgtttgcaacctgttcttacttcgtagatgaggtaatggttgccttgtatgggctttctcccccttttctctctaatataaaattatgtaactcccctacctgtttgagaaaaatgttattatgagcttgctttaaaaatcactgtctcccagatactaaggtgtctcccaatgccatcaatacaccctcagaagttctatacgctattgtgatcttaactgaaccacctcccttcagacttacatgtgatcttagtctgtcaatatgacacatatggtgaatcttgcctacccattattgtgaattt

SEQ ID NO: 118899 - DNA, 485 bp, Zea Mays
tgagggtcgagtcaattagaaagggcaacataatgagtctttgaaagggtcttgctaggagagtgtgacctgagcctccctaggactgtatctatggtgattttatgtgagttgagtagttcctaagggtgagacacttcatgagacgagtccctaagaaggaggtgccatatagggcatgagaggtagagcttcccacttgaggacatgtcttgtcttaacctttaaaggatggagctaggagaaactattcataggaaccatttgtacatgccactaactttgaaagggcaggacaaatgtgatctagctagagtaataccactactacataggatgtaggttatattgtacaaaggtaatggcatatcctaccctcttgagaccacttatgaccacttagagtcatgttactatgatttagtcttcgtttgtctatggtactctagggtgactcagggttgagttgtggggtggtatcatac

SEQ ID NO: 118900 - DNA, 428 bp, Zea Mays
tgacagttagtctttgaactcaatattggctaacagtgaagttaggtgaactttgagatcggatttgaccatgatccagtgattgtttgactatgattgctatagcaagattgtagctggattatagggcaagaactttgttacagagggattgaccagttatcacacaaaaatctgagatcaaagcttagcaaaacgctcggtcaggcactctgaataaggatcccatggtacagtacacagaaagatctcaggttcagccccccctcaccgtcggtggcctctgcgcaaggattcgcgctgattgcggtgattcgtgcaggactcgggcaggatagtaccgggagggtgaaaagatcgggaggggagtggatttggtcgcggggtgaagcttatcaaccacgcttgtagccgtgcgacgtggctgg

SEQ ID NO: 118901 - DNA, 350 bp, Zea Mays
ggagtttatataactatagtattgaatgagtttattcctggtcaataagttcaatgatgttcaactagttttgtacaaatgctcatcctttgatcattgaagctatttatattgatcaaaagtagcattcttgtgcatgtacttttactgattctgtgaattagagagggtaagattagaagggattgtttctgttttgtcttgttgtgcatacatttgttgagtttttttgtggcgtagggtgactgtgtgagattcaggctgctcctgtccccttcccctcaatataaaataatctttgtatcttataacttttttgtgtatgcatctgtctgacgtacaatttcttt

SEQ ID NO: 118902 - DNA, 440 bp, Zea Mays
agttagaagcagaaccacttccagagaccaaggccatggtgggtgcactagggttctcaatcttggcccaattctggtggtcaatctctctggacttgagcttgctgaagagctcatccacggtgagactctcgtagttgggcgactcgatgatcgccgagaccttcacctcccaaaccctccaatctagagcatgtagtaatttcagcgctctctcatgatcactatagggtagttgtgccttgttggcacgcatcttgttcacaattgacctgaacctggagaacatagaatcaatggtctctccagccaactgtgtgaagttctcatactctcgcctgtacgtctcaaatagtttggtcttcacatgatcgttgccctcatggaatctctcgagggtagaccatatctgatgagccgtagtcagatgtccaactcgc

SEQ ID NO: 118903 - DNA, 405 bp, Zea Mays
tctctgacagaggttgagatctagctgagtgaagatatacttcagactcttgtgatcggtgaagatgtgacatttgttcccaattaggtagtgccttcatatttttagggcatgcactatggctgccaattccaaatcatgtgtgggataattctgctcatgcggcttgagtaggcgtgatgcataagcaatgactttctcgttttgcatcagcacacaccctaagccttgccttgaggcatcacagaagatgacgaaatcctggtgtatatctggtagtgtcaaaatgggtgcggtcgtgagcttctcctttatgatctggaaactttcttcacacttcggggtccacacaaacttattgtctttcttgaggagctcggtcataggtcttgctatgctggagaa

SEQ ID NO: 118904 - DNA, 324 bp, Zea Mays
tatttgttgctagccaccatgtaccactcatgcattctaatctccagagtcgacaacttagaaagttgcaccgtcgtcaagaacggcctcccattcacaaatttaggaggaacatcctccttcttgtatatcaagatattgattttaagacgtaatgattctcgagtatgaatcattccatcttcttcccatacttcaaaattgtctatttgggaccgtgtgcgtactccacgagatgctgattccgcttttgattgatttgtcataactctccgcaatttatgcaggtagcgtgccactgattctgacggtttcttgatatca

SEQ ID NO: 118905 - DNA, 828 bp, Zea Mays
aaaatccactaccacccaggaaaggcaaacgtagtggctgacgccctcagccggaagcctttcgggaaagaagcaacaaactttccggaagactggaaaagggagtctgctcaactgaatgcttgtttgggggaaaagagcagtatagaagttaaaccgatgctagaagaccgcattcgcaaagctcaatgtttggacgccgagatgataagacttgtagaaaaggctaacaaggaacaactctcggatctcagaatagatgaaaaaggaattgtttggttcgagaaccgtctgtgtgtaccagagggagaggcacgagaaatcctgctaaatgaagcccacaattcagcctattctatccatccagggtctaccaagatgtacctagacctcaagactagatactggtggagaggaatgaaaaaggagatagcttagcatgtagcccggtgtgatacttgtcaacgaactaaggtagaacatcaaaggctcacatggttactgcaaccccttccagtgcccaaatggaagtgggaagaaataggcatggatttcgtgatcggactgcctcggacccaaaaggggaatgattctatctgggtcatatataattgactgtcttaccatggtagctcacttcatactagtaaagactacctacggaggagacacccttgcctggttatacctcaaagaaatagtcagactgcatggcattccacgaagaatagtattagacagaggaacacaattcacctcaaagttttggttgggactttagcaggccatgagcatcaagctagatttcagcaccgcctaacaccccag

SEQ ID NO: 118906 - DNA, 1172 bp, Zea Mays
gctaggcctaatgaaacccttagcaagcagatcatccaattgccgcttcaactcaacatgctcttttggagccatccgatacagggccttatgaataggctgcatacccagaatcagcttgatttcaaaagccgcaacacgctccggtggaattcctggtagctccgctaagaacacgtcggcataatcacacaccacacggatgtcctgcactcgcaaggcagcctcactctccaccatcatagaaaaaagaattcctgacttccttgtccgacgatccggaagtagctgggacaataaggaaagagcatacttcggagtgctccccaaaaataccatctccctacccgacgacgcctacaaagacactgtcttccagaaacaggatatgactgcgcgatattgagttaaccaatccatacctaaaataacatcaaatgactcaaggggaatcaccacgatattagccaaaaagatctcatctgcaagaacgacggagcaacctgggcagactgaacaactactaatggagcccttagcagaactaaccataattgggtgacccatcattcgcaccgaaagaccggcataggacacaaaattctccgaaacaaacgaaaactagcgccaaagtcaaaaagagcatgtgcattaaacgaatcaactgagacagtacctgtcaccacatctccatggtctctgtcttctgcagagggtagcacatatgctcctggaacacccatagaagaggaaacactcggagtgaaattaacacaagaagaaccccaacgagttgcaggctgaggcagacatggagctccaaactgaggtggtaaaggagcggtcggtgcaggagtaggtgctgccaagcactgaggaaaacctggcaaagacaagtactaaggagtccttggcatataaaactactgctgagggggtggtacagaaaattgttgctcagtggttgccatcatgttgacagtgccctgcaaagaggaagaagtcactaggtcccatttaagtttcccatttagattcctcctacacaccacatctccttgtgatcctggttgcaaatagagcaccttccactccactgacactcagcacgacgatgcgcttcaccacaacagaaacacaccaaccccaacccaggcttaggaacaacctga

SEQ ID NO: 118907 - DNA, 987 bp, Zea Mays
tgacattatcttccaaaaataggatataactacacgatactgagtgaaccaatccatacccaagataacatcaaacgaccccaaggaaatcaccacgagattcactgaaaagaccacatctgcaagaatgacagaacaaccatggcagactaaacagctataaatggagccattagcagaactaaccacgattgaatgacccatcctctgcactgaaagaccaacacgtgacacaaaatcctccgaaacaaatgaatagctagcgctagagtcaaaaagagcatgggcaacaaacgaatcaactgagaccgtacctatcaccatgtctccctgctctctgccatccgcagagggtagcacataagctctagaaacacccgtggaagaggaagctcccggagtgaaattaacagaagaaccccacggagttgaaggatgaggcagtcgcggagccccaaactgggatggtacaggagcggttggtgcaggagtaggcgcggccaagtactgaggaaaacctggcataggcacgaactgagaagccccgggcatatagaactgctgctgagggggtggtacagaaaatgactgctcagtgattgacatcacgctgacagtgccctgcgaagaggaagaagtcactagctcccatttgagcttcccattgggattcctcctacacaccacatccttgtgatcctggttgcatatagagcacctgccactccactgacactcggcacggcgatgcgcttcaccacaacgaaaacacaccaaccccagcccgggcttaggaacagtccgatacctctgagtactccctcctgaagtaccccgaatcaaaggattttccatgataggggtggtgacgctggtgttgcgactttcccctcttgtgggctggacccctagtgttggccctcctcgcgtcctggccatgagactgatcaacacctgaagacttctgagattccatggtatactgat

SEQ ID NO: 118908 - DNA, 483 bp, Zea Mays
gaccaacccaagcttccttgtgcacttgtttatgtaaaaaaaagtttattgtctattcgcgcaaaccatgtctagcctcagattctttttggaaaccttgtccaaaatcctctttaaattctcctctgctcagcatagaagccatctgggttgatgacctctcctttcacctggatctggtaatcttttcctagcgaatcatgtgcgactttatcatccgaatctctagatcccttaatgattctgccatgttatctggttatctgctataacctgttctcatgtatcaaatgtggatcagtctaatatctcattatgatcgttctcatactcttctctgaggatcatgacactggtgttatcaacttatctctaaacgacatatccatgtggattgatggaagttgttgttatctttggatctctcatgtctctaaaagcctatcaatctcgatctcatggttggtttctcctcctatcgaa

SEQ ID NO: 118909 - DNA, 532 bp, Zea Mays
ccggcgcgacgatgtcgcgaaaaacgtttctgccgctcataaggatcatacaattccaataaacaaagtaaatctaatgacccatgataaaagaatactggttattttatagtatagatagattatgagagataaacaatttacttatattctaacaatttactggttattttacaatgataaaagtatgcattgtaaaggatgtatcttgtagtagtaccatactttttatcctatatgtagcattgtggatattggagtataatactttggattgggaatagccttattgtgtatgtgttgtgctaccaagtaagaagtctgctttacttgaataaagtgcttcggatggtcaaggttaagcttgttgagggctcttcaacttcatggttaattttttgtcacatatgtgcaaatgcatgacgattctggtccaaagctgaatgatcaggtgagctacagaagactgctgtgatatttttgtaacctttatcgattccatgatcatgactggtggatggacagatgaggt

SEQ ID NO: 118910 - DNA, 398 bp, Zea Mays
tccgcattgttgaatttgtgtgctttcgcgtcatttattgctggtcgcattgtgttttttctcaccatccttctttcttccttgtttttctccttcggttacatcaaaccctagcgcgtcgcaaccatcttccttgtttttctccttcggttacatcaaaccctagcgcgccgcaaccatcttccttgtttctctccttcggttacatcaaaccgagtcaacgccacaaaccgagtcaacgccgcttccttatttttctccttcggttacgtaaaaaaacagaaaaaaaacaaaccgagtcaacgccacttccttgtttttctccttcggttacgtcaaaaaaaacagaaacaaaaaaaagaaagcgaaggagaaaggatacaaagcggttgtctcat

SEQ ID NO: 118911 - DNA, 458 bp, Zea Mays
gctagtatccataggagatcgcaaattctttcaactccgatttatcctcttcagagagttgttggccgcccaagtgctgttaggtcgaaatttgctccctctgaataggtttcatcaatcttctttcccttgtttgaaactgccgcgaccacctctttctcaacaaccacatctgatataagtctgtcaattttggacaaagtggtcgtgaggttttcatctttggctgtagcggtggcttcggcatcggtcgatttggcagctttgtctgccgaaggcgggggcggggtttgctcaatcgcttgtagtatattcatcatgcgtcgtttcttctagccctcgtctctcccatcagcagtcgaagagacttcctttttctgtaagaggctggtcagttccaatcccagaggacatagcggtgtgaatgggaaggactcggtcattaccttcaatatttc

SEQ ID NO: 118912 - DNA, 581 bp, Zea Mays
ctccgttagcagggcatagtggtcaccccgagttaagtaagcgcgagcatgttgcaccgtctttagtcgttgccgacttaagccgatttctccgttagcagggcatagtggtcacctcgagttaagtaagtgcgagcatgttgcaccatcttaagtcgttgccgacttaagccgattgctccgttagtagggcatagtggtcaccccgagttaagtaagaatgcaggtcgaccatgaacaatatgggtattcttgaggtctctttattgatgatatatttccagttcatagggtacattgtcatcccgatagcttttgaaatacagctaggggtaaaacttcctgaggtgttctatgttccatgagtttccaatttccgtgacatccatctgagtgagacgatatgatcccggccgagtgacttctgctactatgaatggtccttcccatagaggtgacaacttatgtcgtccctcccccgttagaattcggcggaggacgagatctcccactgcaaaggatcgacgtcgcatggccttatcgtggtaatgcctcaaagtttgctggtaccgtgctgattg

SEQ ID NO: 118913 - DNA, 304 bp, Zea Mays
gaaactctccgattgttcctcaagaggtttcagacgatgaggaaccgcatccccgaagtcgctgaggcggtagtaattgaagacttttgtcggggatccaacgactcggccttcgtccaagccatactccaaaaagcaccagccacttccgagcaattgttcctggtgccagacatctacatcactgcggatgaatgggcccagtacctcatcggaggcatgaaacccgcgccacggcgagatgcgaaccagtagctggacaagcgctaggagaagaggccctgagaggaggtgcacactgccg

SEQ ID NO: 118914 - DNA, 424 bp, Zea Mays
taaactataaaagggcagtcccctctttctccaacatacaagcacaccaattgtaacacaagctactgcaattccatgatcaacaatacactggactagggccccaagttgtaacaatataaactgtgtctcggttccatagcctgattccctacgattcaccattcagagtaagtccgcacttgcatcccccaccgaacacaaaccttattgtcccctagttttcgaaaccacaagacttttgttccataatcgatccatgaatttggtctcgaaataagtgcaagagtggtcattagcatagatgtgctagtgctacctaaattggccttattagtttcaaatgttagttgctacataaagtccttgatttttataataattataagacatgttgtattgaggttgtttagctcgctcttca

SEQ ID NO: 118915 - DNA, 602 bp, Zea Mays
gtttgcttccctttttcatgctgtgatgctatatcgttaatgctcataaatcgcgttcagcgtggttctcagttcagcagccagagttgatctcccttgtgtttcccagatggaaggtcagagctacaccagtttctacatcaacgaagaaggtttccctaggctcttgagggacaatatgttatgcctaggaatccctggttacctagaataccgtggaatagaattcatggaacatagtaaaaagaagtacatggttaccgtgtacattggatcaagtaatcggcaacctagatggtgttccacggcaaccaggcataggtccaaggacatttgccatctcatggctcgtgaagcgctgaggacactatgctcggtctaccgagatgaagtgggaaccacccccatgagattctttccacctctcataaagacccatcaagagtggaaggaccgggtgcaagttttaagagagcaaaggcatagtggagatcccacaacagcataccttgccctctatctgcttgccttggatgagaaatatgacaaggtagtcgctcagttgcggaaacaaccaagcgagcggagaaagcagaagccct

SEQ ID NO: 118916 - DNA, 380 bp, Zea Mays
ctggcactaggtcctcaggggctggacgataagatccaaactagaagcgtgaggcctcgagggtgccctggaactgaggcggccggatcagctgcgtgaagatgtagcagagatagtgcgcatatggcagctgtcgatgagcacgaagaccatccaacatcgtgtcctcaatctcacagataaggaaatcaaccacatcaaactctgaatgtgagatcaaggcaccaagtagccagagttgtatgtgggtggtggcctctctataacccatccggggcagtagtgtctgtctcatgatctgatagagatactttgttgctagagtgaaatctgctggagaatgtcgcgacccatttgtgaagggcggtctgaacagggcc

SEQ ID NO: 118917 - DNA, 833 bp, Zea Mays
caatcacgcacgcattaaaaaagaagaaacaaaatttaaaattaaaaaacaaagattggacgtacgcacccaagtctcgcagccactcatggcccccacgtcagactttctctcacacatttttttacaagccgacctcacaaccatttcttttctcttgcattttcttgtatttgctgcagccgggtcctacttctcattaactggtgctctttcgtctttcctcatccttgttctcgcacacacgatggacggaagacgctgctgccgccgcttctttggagttaggaaacgccgccgcaaccgtccatttcttcgatgtctcgtctccacactctagtgcgccaccagagcacacattgcccatctctctttgcctctctctatcacaccacaccattactcgcgatcgtttcttccccacacagttaaaccgccattaatggttttcatgcaccttcaatccggcgcccctccgtgtccctccacctccttggcaattcgtctcgccgccgcgatgtggaggaccccatgccaccttctctcctttctctatctcaattaaatcgattgtttctccctctccactttaaggtgccatcaatggccacaaccatgtgttgctggcgtctgtccacctttcccagcgcctcctcccctccctaggcctacaaatagcaccgccgcgctctcgtggacctgtccccgacctcctctctctcctcccacgcccctgcttgctgtccacacagaatcgccacttttgtacactgtacatgcccggcctgcaacgttcctcgtcgcgcacaggcaccatgtgctgctttcctcgc

SEQ ID NO: 118918 - DNA, 484 bp, Zea Mays
cggacctggccatcgatccgatgatgagcgctcacaattgaatctcaaatacctcatcatgatcgaaaatcgtagtcgttgatctcggatctgttggcggagatcagatcgtgagatcctttaattccgagcgttgattttagatccgacggctgtgatggcatcggtcgcgtaacgattcagccgaggctatgggccgtcctatttaatctggcgggagaaattcgatctgctatcataaaatctctgtcgtcgatctccgatccaaggaccgagacttcgatctaatctgcaccgtagactatcgatccaatggtccacaaaagcccataccccttcgatcgtctacttttgcaaaagagaccatgtgctctatattaatcaacccaccgtccacctgtgcggtaacatgattacctagcagtttttgagaattgcgagtaattccctagagcttgatttaattataaaaatgaccaaaaac

SEQ ID NO: 118919 - DNA, 344 bp, Zea Mays
ttcaaaggaaatctcaaaccagccttgaaaaaacttttgaagaccactacttcatcctttcctggcttcggagtagtctcttccccaccgaaacgaaccagctcttttttcgcttcactgaaataacccaatttcatcatcttaggcagatcatcttcggagatagtggatttcccgaaatccagatggctgggtttacttggcgctgcactataatcatcttcagacttagtctcctcaacatcagcttgctctgttttggcgacaggtgcttcctccgatgttaccagcccagaccgcttcattgcttctgaaatcggaacagtctcagtagctttggtttc

SEQ ID NO: 118920 - DNA, 315 bp, Zea Mays
tcgtggtcgaggtgggagcatggaggctcctggtcagaggcgactccaagttggtggtcgaccaagtcatgaaggcaatggaaccctgctatccaaagatgctcgcgtactacaacgaggtacaaaggttagaagaaaggttcaaaggcttcgagctacatcatagctacagacgattaaatgacgatgccgatgagctctcatccatagcctcggggcgaaaacccgtcctatatggggtctttgcctctgacatccacgaaccctccatgaagatcaagcaggtacaagaagggcacacagaggaggcagatg

SEQ ID NO: 118921 - DNA, 276 bp, Zea Mays
tgggtaagtgcatttccactcgactacgaggtgtgtgacaaattgtcacccaagtgccgagtggtcgctgatgtttcaatccaactgttaaaaggttaaaccatgacgcgtgcggtagtagtagtatcggtattcaactattcacgtaagcggcatcattggtatggtaaattgaggcacatatgtcgtttaggccccgattaaattggccatttaaacaataagaagtggtgtacacgatctaaacgaaacagacataagaaagattggaccggg

SEQ ID NO: 118922 - DNA, 291 bp, Zea Mays
aagtgggcgaatgatggccaaggaggctagatacatcaacgatgtcgccaatgagagcctccccactacaacgaaccacaacccgtcacgctcaaagtgacaaacaacaaggaggctctcccgacaaggtgacacaagttgaggcgaccgacctcaatgaatagaagatatcgctggtgatcaaacgcttcaagactgctttgaaggggcacaaggactactccaacaagaacaaatcaagggaaaagtgtggcttcttcaagtgtggtaagtccggtcattttattgcaa

SEQ ID NO: 118923 - DNA, 477 bp, Zea Mays
gcatggtctagcttaattgaatgggtcgaggagcatcagtgatatgtaagagtgctgaaacaagagagcacagggcaagatcggacctaaagtgcactggccacggtgagagcttgttcatggtggcggaaaactgatttgggttaacttagtgattcgggggctctggtgagtaattggaggcacgagtgggtgtgttgagtgcacacaattacatagctgagttgagggtgtgctcaatttatagggcccttgagcggtggcccgtgaatttgtgattgcgcggtggcgatcggagggaaggggatgcactggcgcaagcgataggtggctttcactgtggcgagctcactggcgttcaccggatatgcataacgcgagctactgcgacgtggtaagatgccagggcatgtggcgcaaggtcgcgaggtggctaactccagcgaacctatccacagcggctgtgactcaggtggg

SEQ ID NO: 118924 - DNA, 439 bp, Zea Mays
gacggatgctgaagttgttcctggcccgagtgctgggcgtaggcggcgaagggcggtggcgaagcgtacagtgagtgaggtggatggtggtcggcttcgtgtggacaggactggcaagcgggaaatgttgtcctcgcaggttggggcgagtgtaggtgagggggagttgcgaagtctttttgagggtgaggagctgaggataatgctgtttaattatagggagatgggtatcatcccgaaggttgaaccaatgtaaggtgtgatgccctcgctgtacgtatgtaactataatttgtatgatgaggctgtgtgctttcgcttatccagccgtgtccataggggcgttgtgcacttggtctagcacgtttattatgtcggtccggctgcacctgtagtcggtctttgcgcggatagtttttcgacgaagatttttgcacgg

SEQ ID NO: 118925 - DNA, 435 bp, Zea Mays
ttgcttgcgccttatatttttgccattggaagtcgattatacacatgcaaatggagagttatactccctcttattttgatttggccattgatatcatgaatagccactgatatactgacagaacaaatccctaaaaggttccatacgatgcgattaacatatgatgcgaccacaaaaattgaagctgatggtgatgaagatggtggcagctaagaaactgcttgttagtcaaacccttgaggaggattatttggatattgaaaccttataaatttttcagatgttagattgtatgaaatgcagctaggtttttaaaaccacaccactaatgtttatgtggggttttgtcattttccttcttatttttccttactaacatctgtttttttgtcaggcaaatgtagttgtcggaggttatggtggatacaacacaag

SEQ ID NO: 118926 - DNA, 380 bp, Zea Mays
ggccactatagagggatgtcgcggcgttggggtgagctcctcgagcaggagatcatcgctgaccctggcgaaggaagggaatagggtgacccacgtgagaatagcctgtaggtgtgcgtaataggggctggggctgaggaggaggttgacaacgagagtctcgaccgtgaccggggagccgaggtcacggagagtgtccgccatggtcttcatctgccgacagtacttcgtgacagagagatccccctggacgagctggcgaaaagcagggtccaagtgtagaatctggacctgatgattgtcgaggaaccgagcctcgatagcaacctaggcctggagaaaaagccccccccgctcgtggacgacatcctataactcga

SEQ ID NO: 118927 - DNA, 366 bp, Zea Mays
ggtttcatagcttggcaaggaaattggaatatgggtcacaaagttttcacattgtggaatgaatattttttatttatagagagcacacttcaaactggcacattaaaaagacgaaggtgtggttaacaatagattctttagtaacctcttttatgcgcaaagcactaagaatgcactgaccgacatatcaaaataggcagagtgtcgccccttggtctgtcctgtctcaatcaatagtcaccacatttgtcatatgttggtaacttgatttattgtttttctgaataaatgccgatactgctatttataatttgcatggtttttcatagttatgaacttatggcaccattggatttgtatggtaac

SEQ ID NO: 118928 - DNA, 279 bp, Zea Mays
cacacagttcccgtgaacctcaaattttagtgagacctatgcaaatgtggctatgagaatcattgatctacgctcagatttatcaatactcctaccaatgatactactgagtaaccgagagacaaaatatttcgttgacaatggaagcatgtccacaaggccacaaattttctggaaccacatgcaccaaggtttgatatacatcaataagatactactcgtttaatctctcattgacgaccagtcttaaaaaggtaaggtagactaaacactattttt

SEQ ID NO: 118929 - DNA, 421 bp, Zea Mays
ccagaacgaggcacatccttggatcatgccttctcctcaacatcaagagtggcaattagactttcaatagtcattgcctcttctttgtttgagagccgtggcaaaactcctccaagtaggaggtagtttggcaatgaagccaccaaccacgaactcgttaggcaagagcaagacatagtcaaagtgtgcaagttccccaccagaagctggttgtcatgagcctgttccatgactgaacgatcatcgaccatcctgtatttatggtattgctcattaacataattttcacgtccaacatctgattatttatattttcggtctaggacctcccaaaatcacaagccacttcatggtgcatgtgtatgtcatatagttgatctgacaacagtgtcaagatacaaccaacataggtagagttatc

SEQ ID NO: 118930 - DNA, 389 bp, Zea Mays
cctagggataaactagctagataagtttcgggcagttatcagttgtgataagaggacaattaagttgatgtcccctctaggagaggaggtggtgaccgagttagtcccgcctgagccacggaaagggagttgtcatcagatggctattgatagtagtgaggcagatccactcaagattatcaaagtggtgtcagaatttccggacgtgttcccgaaggacttaccaggtatgccacctgagcgaaaagttgagtttgccatagagcttcttcctggaaccgcccccatctttaagagagcctacagagtatctggacccgacttggttgaactcaagaagcagatcgatgagctgtcagagaaagattacatcagaccaagcacctcac

SEQ ID NO: 118931 - DNA, 580 bp, Zea Mays
cggacactatttctatgaaatccatggtttactctgtgaataccaggacctaattgtaatgattttataaagggataggattgcgagttcgttttcccagaaacgaagggtttcttagaaaaatggcaaggccgacagtggccgccagatgtgagatctatggctcgttttactctacacgggtgatgcattacggtccttggatcaaggatccgcgacctaggtttaaataagagaaggggtatatctcttattatctcgacagtagatgtgccgatgaacggtcatcatccaccctgcccataacgcaaatgacgacgacacaacgtaattacgtggcggagcactgccagagtattgcgcgacaacgcgctcccgggccccatactcgaatcccccggtgctatgcctaaggaatcgcaaggtgaacgagacgaataggtccttgccacgggtcagacgaccgacgtcacggtctacgatggtcagcggatgcgcggcggagtgtgacgatgacgagcaattgctcagccctggcctggtctcttggcttcgttggtatgcggacgcactccctggg

SEQ ID NO: 118932 - DNA, 698 bp, Zea Mays
tacgttttgcgccttctctttctcttccttctggaaataggacaagtggatgtcatgattggtgtctatcaaaccattttgtatcatattagaagtgagttatttcttttcctgttcatgatatatctggtgtaatcaccaagttgcttttatttaaaacgtttggttcattatgttcatgttattcctatatttgcttcttgctgtctatgcttgttcatctccttctctcttattgtgttcctttcgatttacaagtaaccaccctatgtattcgttctcttgcacatgttcaccctgataagaaggtggctctatgtttttctcttccgatagggttcgcacacacatcgataatttgccaacttctgcataagttcgtagcagcctctgaaacatttcagccaaaatgaggatagcttttctcgtgctgttggttctctccctgtttctcctccctaatgggatcggcaaaagcttagccgcaaggccttcggtcgtgaatattaggtcgattcttcagttgaactccaccactggaggtgtttcagatgttgccatccgtgcagcagtggaggatatcaatttagaccccacagttctaaatgggacaacgttacaagttcagacgagggatacaaactgcaacgacggttttcttggcatggttcaaggtagaccatctttaacaccgcccc

SEQ ID NO: 118933 - DNA, 683 bp, Zea Mays
tgaagctactaggctggatgatgttgatatactagaagaagaacggttgaatacagtgactcagtcagccagataccaacagactctgaggcgctaccatgataaggccatacggcatcgatcctttgcagtgggagatcttgtcctccaccgaattctaacgggggagggacggcacaaattgtcgccactatggaaagggccattcatagtagcagaagtcactcggcctggatcatatcgtcttactcaaatggacggcacggaaattgggaactcatggaatatagaatatctcaagaagttttacccctagctagatttcaaaagctattgggacgaccttgtattctagaaattggaaaatacatcatcaataaaaagacttcattctcaaaggcactcaaactgtttactgtcaacctcacgcttacttaactcagggtgaccactataccctactaacggagcaatcgacttaagtcggcgatgacttaaggcggtgtgacatgctcacgcttacttaactcagggtgaccactataccctactaacggagcaatcgacttaagtcggtgatgacttaaggcggtgtgacatgctcacgcttacttaacttagggtgaccactataccctactaacggagcaatcgacttaagtcggcgatgacttaagatggtg

SEQ ID NO: 118934 - DNA, 578 bp, Zea Mays
taaaaatatatgtgtataattatgtgcccgcgggtttgtagcacccgcggatcatgggtatgggtagcatattatacccgtcgtgggtaatgggtgtggatgcgggtttaatattaaacccacggatgttggtttgaaaaccttctacacgcgggtttcaaacctgttgccaactctaggtgatgtggttaaaattttccttgcatgaatgacggagcgaagacctgtaacttaatggggtgagaatgaggatgaaagttcacccataggatccagtgaggacctaaattaggagtcagtcccttcacttgcatggtctattaaggtcgaacctaacaaatcgcctcaccatgactccatataatgatgcaaaatcctcactcgctaactctaacccccatttccttcactcgaatgtcgttgtcccatatgtcaagcctgatttacgtgtgtatatcgtaatatttatactcaataatttatccccactgctcctcgggatcgggtcctcgacagagatggaaaagaaatacttctcgttatgcattttgggtttggggagaggaagagattcgggg

SEQ ID NO: 118935 - DNA, 430 bp, Zea Mays
gattgatgtcgaatacgaggtcctagatggggacgtattgttcttggccatcctcttttgatcctttatccttcttaattgctaactttatttgttcctttttgcagcaatagtaaggtccagagcctatgaacgatgatggtttcccctctcggctccttgaggctactctcgtggccttttcccccaagaatgctcccctaaactgattccaaagagaagtcggtcttcagaaacggttgcccctaggcccaaacaaaagtgaggagagaggctgccaagaggacatctaaagaggcacgatcatcgtttttagtccgcgaagccttgaccacttctcaagtacacattctccctgcaccccactcttgatgctcatacattcctgttgatcgcgtttcatgcactcttcagcctgttgccgttgaag

SEQ ID NO: 118936 - DNA, 292 bp, Zea Mays
ctgggagcaagattttgaaattcctagctgccatcaatgtggtggagtgctaaagcctgatgtgagattttgttcatcctgatgcttctaggattaatttcttcatgtatataagtatgctcagttgaagtctggtatttcacacctagccatctaggtttagtgttttttctttgagctaatccgcaccagggtggggctgcaatccccgttgtaggcttctattgttttgagttagcaatgtttagagtatgaaagaaaacactcaattcaacttgtagttgtatttttc

SEQ ID NO: 118937 - DNA, 301 bp, Zea Mays
gccagaatgtgtgcttgcatcatcatcacatgggattgatgaattcataaatgaggtacgtataaacaaaaactttaggcaccaagaaaagacacataaaatcttacttttataatcatttttttcttgattcatatatgtgtcttgctatgatgttatctacatccaaagcttgataaataaaggcaaactatggtgtctctgattggttattgctgggagagaggaagatctattgggactgtgccacagtggtgaaagagtcctttgtgcttgcgacttggtgatgcctacctatcac

SEQ ID NO: 118938 - DNA, 368 bp, Zea Mays
gtccgtcagccgtagtagtggaagcaggctcgactggggtggccgatggagtttgctcgagagcaacccaatcggcgtcatcatgctcctcatccacaaagatggtatgtcacatctgatctagacctgcatgctcaaagataggggatggataaggtgcagtctcatcgaatgtaacctcacaagtctccataatgcggttagtctctaggttaagaacacgataagcatgagaatgtaatgcataacctcgaataaccccatccgaagaccaggactcaaattaatccagattaccctgtttcagcacaatgcatctacagccaaacaacctaaaatgggtgaccttggatggccttccaaatcac

SEQ ID NO: 118939 - DNA, 413 bp, Zea Mays
ggcaagggcagtatccacaataacgtcgaagactgcccagaagttcttctggcaaaacattgtttgccgattcggagtcccgtccgagctcacagtcgacaatggcaaacaatttgacagccacgatttcagggacttctgcttctccatcggcaccaagcttgccttcgcctcagtatatcacccgcaatctaacggcgtcgtcgagcgcgccaatggcaagattttcactgccatcaagaagaggcttctcgacgacaggaagggtaaatgggccgactagctgcctaaagtagtctgggcactcaacacaaccgaatgccgggcaactggattcactccatttcgactactatatggatcagaggccatgaccccgcaggaaataaagcaccggtccccccgaacaagcg

SEQ ID NO: 118940 - DNA, 491 bp, Zea Mays
gcgagggttgctttattttcccaaagctcctccaacacgtgaagaagaggaatgcgttgtgcacaagaatgattagttctccatttcccacaccacacttgaaacatagcccgttttgcatcggtactgtttcagtgaagccaatttgtcatccacatctgaacgctgtggcttgctcttcagtttatctccgtgtacactgaatccttttttttctttctgaaactatgcgatcagagcttttagtgaaattaaagaccgcccagatgacttgtgtttggatggagaaagttcatcctcttgaagcaatgccagctcaatgcacttgcagtgtcgacatttttaagagtaaatgccactcggatctcctcgttgaggcttgccaggaatttttgtcacgaatagacatcatctacgggcgaatcctatacacctggaaaaacatcagacaacgatcacgccatagtctcgcattatcaccagcgaacttg

SEQ ID NO: 118941 - DNA, 846 bp, Zea Mays
gttggatcccaggtcggttataatgctatttggtatcccaaacctgaatattatgtcttgtatgaattccactgctttggttgaggtcaaagaggcaatgggcttgtactctatccattttgtgaattttgtcaatggcaactagcacgtgagtatagcctccctgagctttcttgaaaggttcgatcatgtccagcccccagcatgcaaatggccatgttacaggaatggtctgcaactgctgtgcaggtaaatgttgttgctttgataagaattggcaagcttcacatctctggactaactcggtagcatcactcttcgctgttggccaatagaaaccagatctgaaagccttcccgaccagagttctggatgctgcatgtactccgcactgcccggcatggatttcatctaacagctgcttcccaataaccgagtgaatgcatttcatgagaactcccgtcgcacctcttctgtacagtgtgccccctatgagggtgtagtgggctgactgccttgcgatgcgttctgctgcggccttgtcatccggttcttcttcatttttatgtacctgatgataggctctctccagtcattggggtttgactctggttggctcaaggtgttgcactcttccgtctgatctgagaggatactcggttgtgatatttcttggatgaagatcccgggtggagcctgagcctgactggatcctagcttcgacaatgcgtctgctgccgtgttacggtctctttccacgtgatggagctccaacccttcgaatttgtcctccaatttccggacggctgcacagtgcttgcccatggaattagtcgagcaatccca

SEQ ID NO: 118942 - DNA, 842 bp, Zea Mays
ctccagcgaacttttttgtcaacaaaggaaaaattaggtggtgatttcatattggagagatttaacactgggaagagtagggcacattgtgttgatgtccttacgcaacaagggtcattaatcgcgctatagaatggaagtgtatgggtcaaatgtgtcattatgtgaggttttggtggagaatggatattaaaagtacttttatggtcttggaatcaatgaacaacgatatggggtcgatatggacgcatccgctagtcaatatggcaatggatagtcagttggcacatgatccacttaatccttctctaatgaaagttggtgaaactatgtggtgttcaagaggcattttcaataacgactttgacatgggttcataacaagtgggaggaacagaaggaagaatgattggtgatgataataataatgatttagatgactccgaagagtaggacattgattatggagaaggtacctcagaagagtaatttaatcactacctaggatcaatggaggatacaatgttcacaaatttgtgtgtttgtacacatgaagaggtggccaaagagtatggtttatgggagaggttgattgaagcacggaaatagattcccttgaagccttacacaatcactgagatgaggcaaatgatgccaatcaatgttgtttcttgtggcattctaaactacattgatattagcatgaccgacaaggccattgtgataccgagctgtaattgtgtaggaaatgatcatacgatcattatgatgggataattagcgtggcatcatattgaaagggaaatgaccttaaacattttctataatctattttggtgtttg

SEQ ID NO: 118943 - DNA, 667 bp, Zea Mays
gtgataggcggtgctgaaatctaacttggtgcccatagcttgctgaaggcttttccaaaattttgaagtgaactgcgtccctctatctgacactatcttccgagggatactgtggagcctgactatctctttaagatatatcctggcaagggtggctccgccaaaagtggttttcactggaatgaagtgggccaccttggtgagacggtctattattacccagatagagtcattccctttttgcgtctggggcagtccggttacaaaatccatgcctatttcctcccacttccattcacgcactaggaggggttgcagtaggcctgcaggtttctagtgttcggcctttgttcgttggcaggtgccacactgagccacatattgtgctatctctttcttcatccctctccaccagtatctggttttgaggtctaggtacatcttggtggttcctgggtggatggagtaggctgagttgtgagcttcattgagcaggacttcccgtgtctctccttttggtacacacagacgacttttgaaccaaaggacttcttgttcgtctgtcctaaggtccgaaagttgttccttgcgagctttttccataagcctcgctgtctccgtgtacagacgttgagccttgcatatgaggtcttctagcattggcttg

SEQ ID NO: 118944 - DNA, 532 bp, Zea Mays
aagatttggaggagatgggctcaaaagagccaaacttggtctggtctggatcgcacagaaccgggtccgtgggtcctagccgtactgctcagtctcaagaattttattataaaattcaccgaaccatgaatagtacatgtccatgtgcaccagactgcttctccaacggtcgacttcggcacacaccagagcgccaacgactagctgatgtggccaacgatctggtggcgcaccggaccattctggtgccacgcagctatgaaaaccacccaatcaaatcccagactaggggcacgtgaacccggtctggtgctcctacaggaagctgatttctggacagttttacaaagaaggatgcaacgactcataggtcacttggagctacaaaaatagcccctaggtgcctccattcatcacctaagtatcccaagagcatcacaacactccgacatattgcaacaacgcatactagtggttttaatgagattcaagcaccagtttttagttattcttgtgaatttgtgtactcgcg

SEQ ID NO: 118945 - DNA, 779 bp, Zea Mays
ggtgaattagtgtttggaacaatacctagatgtgcatttatgatcatcctcacaaatggaaacaatggttggctctagcagagttctggtataatactaccttccatacgaccttgggttattccccttcaaaattttgtatggttatgaacctcctgtgatggttgttccctggttgagggaggagggagatagagatgttactgtctagttgcaagagggtcagacgacctctgcgttgatcaaagagaggttggctcaagctcaaaacagaatgaaacaaatggcagatcgaggtcgaactccaagggaattccaggtgggagaacttgtgcttctcaagttacaaccctatgcccagaagatagtggttaacaggccatacccaaagttatcttttaagttctttggtcctttcaatattgtggcaagaattggtgctgtggcttataaattggacctgccagaacatgctccaatacatcctattttcatgtgtcccagctgaaggcctttcatcccaagcataccctagtatttgctaagcttcccagggtggtagatttgtctggtccagggatttggcctgaagaaattgtggaagacgtttggtccagaaggggaatcatgaagtgccttaagtgctggtcaaatggtcgggtttgcttgtttcatcagcaacatgggaagatttctatgtggtcaagaacatgtttcctgttgccctcgccttgggacaagcaagttctgtaggagggagagatgtcatgaccagcgca

SEQ ID NO: 118946 - DNA, 506 bp, Zea Mays
tccagccaagccagtagcgcctccctttcaggatgttcaaatcacatcattcgacaattgacctttgtgcgatcttgcagttgcacaggtacagaacatagaaatggtgagcctgtaactgaacatgattatcttgcgcatgtgcaaaaatcagaaatgagccatcgtggctttgtcagacaatgtttgttgggtttatcatcattggatgcaagactatgttaatatatgattgtaataattagttgaaaataggtgttgcaatttaaacctttgaaattagagatgttgaagaataaaattctttgcaaataataagtgttaccatagccattacaaataatttgaataccaatagaatgtgaattaagggatggaggactgagatttggctggtttgctggggggacgttgctggggggacgagtaatatggtttgtatctttggaatggatagccaaatgaagatatggagggtagaatttgcagggtcttctgaagatgct

SEQ ID NO: 118947 - DNA, 679 bp, Zea Mays
attttatctttgtctcatgtcttagaactcagcattacatcatcagcttatgctttagagatcagcacgttgttttcatttcatgttttagaaaccagcggcgtgatctgcccatgtcctgttaggtttgaaatttatttgatcggcgacaaattggacgtctggtagatggctcttggctagtcttcattttgctttgtgcttcaatgcttctgttgattagacttgtacttcagtagctatatttggctttcctctgatctccatcgatacctttcttctgtattgatacattcattgtgtatactgtatggatgtgactacttggtaaaatctattgaaaattcttgtacgtcccccaatgggtgtaaccgagggacggcttggtacgccgagcgtttagcaaattgtccttgagtagtaacttgacgtgaccgcgaggtgtaatcatatcgtccaagcggttgaccttagtccaaatggtgtcgtgttacgtgaaacggcgtctgctgcctgacttgcttccaggcgatttgaattgcttattgaatacttgcgactgttcggtgaccgtggtatgagatgagcggttgctttcggcctctataaatcgactgcctgcctcgctggtgtcttcacacatcttctgatcgttcgttgcttattttcccacttttct

SEQ ID NO: 118948 - DNA, 311 bp, Zea Mays
agcgtagattcgttgaggttgaaaacgatgatggtttgaccgtggcgacgaagattgcacataagcagcttcgttacatgcctcttatacctcggttgaaacgtttgttcatctccaagaatacaaccagacacatgaggtggcacaaagaaggggtacgtgagaatccaaatgtcatggcgcacccagctgatacagatgcatggaaggcactagatgcttttgattccagctttgctgatgaagtgcggaatgtccgcttcggtttggcaacaaatggtttctcgcctttcaatctaactgcaacgtcc

SEQ ID NO: 118949 - DNA, 413 bp, Zea Mays
gggttttatggttcctggtaaggataattttgtttgcaaattgaagaagtccctttatggttcgaatcagtctctgaggcaacggtacaagaggtttgattcatttatgatttctagtggctttaaaaggtcccagtatgatagctatgtctatattaaatttgttaatggttcacctatctatttgttgttatatggtgatgtcatgttgattgtcggcaagagcaagaaggagatcgctaccttaaaggcacaattaagtagtgagtttgagatgaaggacctgtgagccgctagaaagattattggcatggagattgtgagagacaggaaatctggttcgttgtttctcagtcagtgcagttatattcaagaggttctgtgtcatttcaataagcatgattctaattcag

SEQ ID NO: 118950 - DNA, 424 bp, Zea Mays
agtcatcttctccatagacggtacaaaggaacatttagccgaagctactatgatgggtgggaaattttattccgatgtttggatgaagggcggccacgagatagccgacgaagcaataaagaaaaatgaaaagaatcacatgatgcccgagtagaggcaaatgaagctgaagaagctgtcggacgtgcactgattataggtacttctatttaatgcccttttgctttattattcgtttatggcttcgaacccgaattatcatatactttgctacaaccggcctgtcgccacgtctggagccattcaatcttgaggctgactctgtcataaaagaggctttggatgtgatgaaggtcgccaatacaatcgtggatgaagttgttgacaggctactgaatgaagttgccgaaagagtactaaaaga

SEQ ID NO: 118951 - DNA, 272 bp, Zea Mays
gctggcctacttcagcgaagcaaaaaaggagctggttcgttttggtggagaggaaactactccgaaggcggaaaagaatgaggtagtagtgttcaaaagcttctttaaagcaggattaagatttcctttgaatgggatgattgctgatgttttaaagaaatttggggtttaccttcatcagttgacccctaatgccattgtcagattaagtgtttatatttgggcccttcgtagtcaaggagtggaaccgttcggcgaaggtttctgccgag

SEQ ID NO: 118952 - DNA, 448 bp, Zea Mays
gccaagggtgaggtaagtaaaacaccactctcaaattaggataagagattggagattttagataacagacataatgtaatcaccaaggtatggtcgagagatgggaaaggtaaaggcaacactaaacagaagcacaacaaaggatggagttgagaactcgcaagcgacaaagagaacgatacgaccaagggaaaaataggtaaaatataactcccagattgagatggaaaagaggagaattttaaagggcaggtataagataaacatcaatgtacgatatagaggtgtcaaaggtaaaggtgataataatgaaaagcataaggatatagctcaggcaagactcactaggtggcgaagtggagaaaacaatcaagggtaagatatgtaaggttgcaacaaaatcgttgaagttaaaattcattaccgagggatgttacatgggaacaac

SEQ ID NO: 118953 - DNA, 420 bp, Zea Mays
cgtaggcgatggaagacagcctcaagagccaagtgatgcagctgaccaaaaacaagacatgaaggcagtgatcttgtaggacagttgaccagtggaggtacataatggtttagcttgcagtgcatattggatgaggtgcagctgttcttggatattttggtataaggaacaaaatagttgttgatggtagttataatcaattttagctgatgtagaggggcgcatatcatattgatatacaagactgagaaagggattggccgatcaagaaatagtgatttggctgtggtagggcgtttgtcttgtctatagtatttgtagtgtagaagcacatgtagtttgctatataataaaagaataaatagcacagagatgtttatgttagaaaccaaacgatcctcacacttcgaagcgtatctg

SEQ ID NO: 118954 - DNA, 416 bp, Zea Mays
aacggattcttccagtgatggttcgaggctatgtccctgagcatgtctggctatcgcttttagagttgagctatttcttccgtcagctttgtgaaaaatagttatctcagaccgtggttgtagacttggaaagattggcacccgtgttactgtgtaagcttgagaagatatttccacccagctccttcaatccaatgcagcatttgattcttcatctcccctatgaggcacgaatggggggcccatgcagggacgttggtgctatccaatcgacagatgtctaaagactattcgaaagaaatgtagaaataaatgcaaaatcgaggcttccattgcaaaggcatacattctagaggaggtgtcaaacttcacaacaacttactatggtgacaaactgtcgagcgtgcataatccac

SEQ ID NO: 118955 - DNA, 500 bp, Zea Mays
cttatctgtcgcgcggcccatcaggcccatccgattttagcttggattgctctctgtcccctcctctctggcttacgtctgaagcctagccctaatcccaacagaaagacggcggcaacgcgaccacaaggatcggggaagggagcggctgcacgtggcctacgacaacctgcagctagcgctggacgacgtcgcgacctgcaactagccagctagtgccacgacccacggcgagtcgacaacatgcaagttgtagccaacgtcttaacaacaaccatggatccataccaagattgttgatccccgctgcagcctacaggtcataagaattcaggtgtatgtgtatcagtgtctactattagcatttgtttacatttagatattttatgtgattgcatttttaccatctttttctcatgtgtactgttagcataataacatgtatcaatcactttaatacttacgtctccatatgtaccgttacaaaataaatatttgag

SEQ ID NO: 118956 - DNA, 467 bp, Zea Mays
ctcgagttcagagtaccgccaggacatatctaacaaaaaacagttgaaaaaggatactcagttcaaaacagactaatcaagtagccaaggaagaaacaaagacgctaatcagcatttgtcattttcaaatcagatatctgcctctgaagtagcatccgattccaatgcgtcagagacagagctccttctgggacggaggcaccttgtgatcttaattgactagccatcccatcgaccaaagcctgatattgaaaacaaatgagtacaaagacagtaatttgcctagagtatagctagaacaggaaaagccaaattacctgaagattagagaagaataaaggaaatcccaaatcatgagaagccaggtggtggctcgacgaaggaatatcaaccggggcaatttgaagaacatcactagagatcaactcagcaccaccagcaggcatcagaactctagcatccggtgc

SEQ ID NO: 118957 - DNA, 419 bp, Zea Mays
caccatatactctgcttcacaagttgagaagacctcagtttttgtttctgaaactaccaagacacatgcatgtctcctaagaagaagataacgccgccggtgattctcctctcatcgatgtctcccccaagttgtagtttgtgtattcggtcagcgtgtagcccaccaacctgaagtcagtgttgcagcgcttggggcagacaagaccgtagtcgactgtaacaacgaagcagtgtaggatgtgcttgacggtggctaagtgctcttgttgtggtctctccatgaaacggctcacaaaacccaccgcaaacataatgtctggcctgttatgaaccagatagcgcagacttactaccacacttttgtacatcgtcgcattgacctctagtgttgcctcttcgttgaaagcttcagtctgg

SEQ ID NO: 118958 - DNA, 550 bp, Zea Mays
tagatgcttcgtcgatttgtcattgcagctaggaaactcaaagcatattctcccttcttgcctcaactagttgttgaatgctatcagacccggtttttgaagacaaaccaaatgtgcaccaagtaatccagatcgcgtacacaaccattgcacaaatgacataacattgttcaatgctcgaatcataagatatagcttaacattaatagataacagtctaatacataaacattatgcaataacacttacgtattaatggaagtatagggaaacaagggagaacatggccctccacagacatctgattgagggagattgcagggctagtcttcatacttaacaaactcttggaacccttggtgattgccttcaacagcttcttcacatgagcttgggttgcaccaagggcaacatagagtttgtatgaaagcaagggtgagtacacaacgtacttaacaagtgtcatgtttggccaaattggactagatttatgtgggttaggatattaatagtttcttttaatattcatgtatttatcactggtataggc

SEQ ID NO: 118959 - DNA, 280 bp, Zea Mays
cacgcgccctagcaaggtcgattatttaaaataaacgacaacaatttaatgccccattatttgtttgatcaagaggctcgtcatccctcgctgaccatgtgaactcacacattgtaaaactgtgcagatcgataagtccataactgccatgtacaggaggttgccgaagacactcgcattcgatgtatttcattcgctatgggacaagtgcaaggttagccacttgaccatcatattatcatgaatgcttatttcactattggccctaggagccattgct

SEQ ID NO: 118960 - DNA, 795 bp, Zea Mays
ggtcaccctgagttaagtaagcgcgagcatgttgcaccgtcttaagtcatcgccgacttaagccgattgctccgttagtagggtatagtggtcaacctgagttaagtaagcgtgagcatgttgcaccgtcttaagtcatcgccgacttaagtcgattgctccgttagtagggtatagtggtcaccccgaattaagtaagagtgcaggtcgacaatgaataatttgagcattattgaagtctttttgttgatgatatatttcccagtttacaaagtacattgtcatcccaatagcttttgaaatacggctaggggtaaaacttcctgaggtgttctatgttccatgagttcccaatttctgtgtcgtccatctgagtgaggcgatatgatcccggccgagtggcttctgcaactatgaacggtccttcccatagaggtgacaacttgtgtcgtccttcccccgttagaattcggcgaaggacgagatctcctactgtgaaagatcgatgtcgcacggtcttatcgtgataacgcctcagagtttgttggtaccgtgctgattgaattaccgtgttcagccgttcttcttcgagtacatcaacatcctccatcctagtagcctcggcttctgctatgttttcaaagatcaaccttggcgccccaaacttgagatcagcaggtagtactgcttctgaaccgtagaccatgaagaaaggagtatttccatgcagagcccgactaggttgagttcttaggctccaaacgacgtagggaaactcccttatccattttcctg

SEQ ID NO: 118961 - DNA, 1222 bp, Zea Mays
gaaagagaggggtctgaccgcagaggctgtggttgctgactttgtcttcaagaatattcagccactgaaggatagggcatacccggcctatctgtaccgaggcctagctgactcaacccaggtaaccaacagaagaattcctgctgtggacttggtgagccggctcgaaatgatactcagaggcaaggtatcaaatgttggcgcccctgttgcatactcggcctggaacctgcctccttccaaggcctttacccattttgtgtcaaatcctcctgctggtgatggcggtttgggccttagagtgcgaccctctgccgaagaagttagtgctttggttgcttcgcttgaagaaattcctgatgatgaacggcaggttcactttgaggtgcctttggatcccagtgatgcagagataagtgccatgcttgatatgttagctgaggattcttctgatgccgctcctgctgaaacgttggtggtggtacccatccctgaggctgacaaagctttggacgctcagaagtctgtcaatgttcgtccaaaacgttctcgccgagccgatcaagcctcttttcctgctgagggggagaaaaagaagaagagacgtcttcgtcggttgtctagcttagatcagggtgccggtccttctgctcctgttgctgaggaagtgcccatgcctaaatttacagaagctgatcccaatgggtgtgactcgtgtgacgctgaccccaatgggtgtgctgtccgtgttgttgatgaggatgatgaagaagaggacgaaatccctctgattcagaagaacagccggcgttacatagctagtggggaaagtagtagtgttccttctcctgccttgtctgccctcgttggtctgcaagaattatctctggcgaactttgatcaaactcttgaagatatggttccagaagatctgttgtcagaaccgaaagatggtggcgcgatggatgtttgtgttgatgtgctcgacgccgggttggggccatcccgggcagcttcccgcgcctcatcgaccttggagcgcggtcttgagggtcaggaagctagtttggattgccctgctgccatggaagtgactgagggaccttcagccttagaggtggctgctgcagagaactcgaccctcaaggatggtgctggcgcttacccagcccccgagggtgttgccggggatgattcggctcggatgggtagcgcaagctgc

SEQ ID NO: 118962 - DNA, 569 bp, Zea Mays
aatttactgacgctgaactcaatgggggtgctccacctgctgctgatcccaatgggagtgctccttctacggctgaccccaatgggtgtgttgtctgtgttgctgatgaaaacgacggggaggaagaagatgaggtccctttgactcggaagaacagtcggcagtatgtcgccagtggtgaaagcagtggagttccttctcctgctttgtctgccctcatcggtctacaagaattgtccctggcgaactttgatcagactcttgaagatatggtcccagaggatctgttatcggagccagcgaatgatggtgtgatggaggtttgtacagatgtgctcgacgctgggttggggtcatcccgcgcctcatcgaccttagagcacagtcttgagggtcaggagactgacttggatcgtcttgctcccatggaagtaattgagggaccctcagccttagaggcggctactgcagagaacttggtcctcgaggatggtgttgacacttgcccagcccccgaggatgttgccggggatgactcggctcgggtgggaaacgcaagccactgccca

SEQ ID NO: 118963 - DNA, 429 bp, Zea Mays
tctgcacaagatttccgggccaaactgtaatagttttcaacaagcgagggatggcgggttattttcaagcttcctcgaggactctttagcaaaaagacccggccgaaggggtatccaacgaccctggccgttggatcagagatccatgacccagatcaaaaggtatcgtggctgattcttaacggtctagatctagatcgagggtctggattcaatctcgaaggggtatgcccacgatccgatcccagccgtacactctacatcctacgactcgcacgaatttcccccaaccctctcttcttccccaatcagcagggcggcgacgaagcagagctccaccctgggagctcgctggatttcctccgcccagcgcactggcgtcaaaatccaaacgcgaacgatgctaaacattggggaaagaaaggcgaa

SEQ ID NO: 118964 - DNA, 339 bp, Zea Mays
tcttgtaattgtaactcctctcgtgtctcagtacagatttaattagactctacgtagcagtctagggtatttgaatctgtcttctggaactaagacctcgtgggtatgttgattagcaaacgcgtgtggccttgcctgcagtacatgccttcaccgtggagatctcggattcgttgaattctccaacgagatatgatagctgcttttgttatgatatttggaagcatggcagctttaattatattctgcgttttctgggattactggatcacgggtcgggacgaagaatgtcgacaacagaaatctgggaaaattccaaacccccacccaatctgggaa

SEQ ID NO: 118965 - DNA, 765 bp, Zea Mays
atcgtcacgaaggtcacatagccaggttcttatcggttggctcaaactgacgaaattccagtcgagaactcatggaacatcaaacacttgtgcaagttctgtccttagtgatgtcatgacttcaaaatgacaaaccattgcttctactctgagacatgtgaacaataaaaataacttcttttctacgtatatttttgtccatatattctcactactacaggtgttgtctgagccacgatcacagaacagtcggtttgagtcagaagactaactcaacctgtcgtgacatccttgcgcatactaatagaggggtgccttctaaatcctacaaacgggggaaccgactcaagtcgatgtaacatgcccacgcaattcaaaatgaagggtgactgatttaagtcagaaatcgacttaaactgatacgacatgctcatgcattactactgagggttacttctaaactctactaacagaaaagctagcataaatcacacacaaatttatgctatcccaggctagtgcggatgctgaattcaatcatcatcaaatacacataaacatgatataggccttaggctaccaccacagagtagtgtgaccatggtttcatcacgtactcaactacaaactcaagcagctccgcccttggccgcagatgtggatccagaatcactcggaggaaccttcacaaccaccttagaggcgtagacacggataacacatcagtaacaatatcctggggaatgacgacgtcaggtttcttcg

SEQ ID NO: 118966 - DNA, 515 bp, Zea Mays
ataaaatcagaaactaccgcggttatagatcatgtaattaccactagacgcgtagggcagcggaagatgtctcgatgtagacacacgcgtcgagcagtgttgtatagtcgtcgatgaccttcacgtcctcgcgcggttcgtcctagtgccccagatgcaacacctccgaggtatccacacatacagggaggaaacgccccgtttcgaactgctaggtttgcgacggtggctaggcaagggcgaggggcgggcgattgctcgtttactggtggccagttagggttaccttaaccgcactcatgcccctcattatataggcgttctggtgagcatctaactccgaggcccatcagtaaccctaaaaccctgtctaattttggatataatccgagctagttttccttccccttaagtgtgtgaccctataggttcacgtacatatatacatggcccaagtactcttacattattgcctacttggaaatcaacttctcctcttttcacgcttctacttc

SEQ ID NO: 118967 - DNA, 623 bp, Zea Mays
attccatataagctgagctagaatatggattatggatatcacaggaaaaaaaggttatgaagttgaaggatggacattgatgaattgagaatcaatgtgcatgacttggagtcagtttggcgaaccaaggacaaaggcaaggaagaactttgagggactaaatcaaaggagaaggtcaataggactgaggtacctagagctaagacgaagaagatgttacttgcaagggtcaaaggttcatcaacttgagaagagttatgttgcattgaagaccacaacataacattacttgaaacctttgggataactcttatgcatcggatggttcaagtcataaggctcaagatatcttagctcaagaaaaggccatggtcgaaagatcaaggtaagtgtatcaaagtcagaacctggaaagactttcaggtatgcatactttaatttaggggccaaaagtgagaatcttagaaagaacaagattacgggtcattccagtgtttcgaaaagttcttggtggccattgaaacatattgtaactgaagttgagacacatttgatcagattcagagttcgtggttccaagtgagttttagagcgaaaggatgaagaatataagtgatttggag

SEQ ID NO: 118968 - DNA, 424 bp, Zea Mays
ccgccagtgacccaatgatgttcaatctaacaacggaaagtatatcagtagtggaagaattcatggacgtatttccagaagaattgccaggaatgccaccagaaagagaagtggagttctacatagatctgattcctggaacagcacccatcgcaaagagaccataccgcatggctccaaccgagttagcagaactgaagcttcaaatctcagatcttcagcaaaaagggtacattcgtcccagctcatcaccttggggagcaccagtcctatttgtctccaagaaggatggaagcatgagaacgtgtattgattaccgatcgttaaatgaagttaccatcaagaacaagtacccacttccttggattgacgacctcttcgatcagcttcaaggagccaaatacttctccaagatagacctaag

SEQ ID NO: 118969 - DNA, 388 bp, Zea Mays
gtctcgatcgtcaccgaactgtctaggtgataatgatcatcaaaagtaacaagcacaaattctcacttaactttaccaagctttatgagatttatgggtgcacactaattactcttttatgcattactgaggtcacaaatcaatccaatactagcttttaagtcgctcactaggcaaaggcactttcttacaatttaaatgggttgcttcacctattaaattaaacaagagcacttatatgggtaggttggtgggatatttatagacccaaccagccgtcattatagtaactttgaaaaaattatgattgttggatcacctcaccctcaatgtcgtttgaattattgttgtgagcatatagaccgacactcaccatcggaccagttta

SEQ ID NO: 118970 - DNA, 403 bp, Zea Mays
caggacatcgttgatagatcggcggtagaattcatcatccattaaaacatacttgaaagttgtacgtcgaacgttcctgtccgccttaacacatagatttcgtaggtagttaattatagacgtcctccaatcaattgcatcggttgcattatcaaccgaatcgatcaggagaaccttcctggcaacgtcggacggtccgaaccccatacccggacggtccgaacctgctgcggacggtccgacttggttgcccagatggtccgcgacctagggatctagcgtgacaccagttatcagattttcggcattgtgaaatttccctcgctttattcgatatcctgatgcgtcttgtgataaattgttagctctgcaaatctcaaccctggatatgtgtcgaatgttg

SEQ ID NO: 118971 - DNA, 439 bp, Zea Mays
gtcacttggtgtctcttcccaactgggcaacttggtgttaggatgttttcctcaccgggctagcagagaattgtcgtgattaccaatggtaaaccacttggcatgccaccctctttgtatttgttaccacaaatcttagatttgctacattagctcaagtttacgagacgaatggttcttagattgttttaggctttcgtagatgtttccttagaagaaacacgtgccaagactaactttgatagggaattcaagggataagtctacacttgctggtattgagcgatccatgtcgcttattctacatttggtgcgacttccgtcttcttgtcttctttggtgacgatgattgtcttcaacggggtttgatcttattgtcaagacagtgtaatagttgtgtgctttataataataaaagttactgagcctttcataaaag

SEQ ID NO: 118972 - DNA, 488 bp, Zea Mays
ttcggatattaaagagatcccaggtcggttacgtggtctggtccgctgaaacaagcgcgcctgtccagacaggcgacatgcaggacagacgacgccgttacgcggttggtttaatggcaaggcggtaaacatatggaagtggcgcggaattatagggaatagattccacatgcaaacttgcttactctgttacgtgggcgcggaatttatggatcttgcatggggtgtaatggcggcaggtaaatataatgtagaataagatgttaaaagatatggcataaaactgatattgtataaatgttgcataaatagaatataccgtttggcataaaatatggtgtcattgtgcgtaagtagtgtgttagggatattagttttacatgtacatcgctataatatcgggacggtttcggaaataatggaaataccctggaaacgtggatgcggttacttgtatagtatccgtgatttccttacatccaaaaaac

SEQ ID NO: 118973 - DNA, 878 bp, Zea Mays
atgttgtccatcatttctcgacaaacatcatctccttgttctcaggaagacagtataggaaatcatcttcgtcgctgcctccataaactaaggaccctctaggatattttagatctttggcataatgttgagctttggcaatttgttccttcgtcagttgctttcccgaagcatgacggataatgaagtcaatattttccgatgatgctgtcccgaaggatggtgttgtcattctctctggtaggctctcgaatttttcctctgacagcatggcctctgaaggtccagccttgtctaaatccgaaggttcactggctttatccttggaaactctcgacggcgcaggtgtcgccatctttgaaggtcttaaaacagcccgaatcacattagccattctccttcctctcttaggagttcccgctggagcagttgtaatttgtggttgcgctgatgccttcgacaactcttgaaccttcggctaatctggcagttccaaatggatagaatctggggcattcactatagttgccgggaggaccccttcggttttatcggcagtctctatttctgaagtccctgtggcaggcagttgagcagcccaaccaaagaagtacgacttcggtcggtgggttaaaaccttcaccctcttttgctttggtgcaatagaagaagctcctagcacactcttcctttttaaccccctttttcgggcagggaagcggtaatcaggataaacaaaaccaatagcatcaaagaccctgttcagtcttcgtttcccacgagcaccgaaggcagtatacatagcttcgtcttcagcctttgaatagccccctagcaattcatcacttgttgcttcaatggcatctaaccaatcgtca

SEQ ID NO: 118974 - DNA, 689 bp, Zea Mays
cgtgcatgtggagacacacctgctgcacagcgtaggcaatgtccggacgggtgatcgtcaagtactgcagggcgccgacgatactacggtatgaagtggcgtcgtcgagcagtatgccatcgccagcggatgcctcctgttgggtgtcggcaggggtggcaacaggtttgcagttcgtcattcctgcacgctcgaggagatcttcagcatactgtccttgagagaggaagaagccgatgcggttccgtcgaacgccgatgccgagaaaatggtgaacaggccccatatccttcacagcgaaggcatcgtgtagacgcgcgatgacatgctggaccagacgacgcgtcgaggcagataggatcatgtcgtcgacgtagagaagaagataagctgtctcgccatggtggtgatacacgaagagcgatgaatcggccttcgattgaatgaagccgagggatgtcacgtgctcgacgaaacgctggaaccatgcccgtggtgcctgacggagaccatagagcgacctggagagcaggcagacgtcgtctgggcggctgagatcaacaaacccagtgagttgctgactgtacacctgttcttgaaggttgccgtggaggaaagcgttagagacgtcaagttggtgagctggccagttgtgagtagccacaagcgtcagcacggtacgaattgtg

SEQ ID NO: 118975 - DNA, 664 bp, Zea Mays
gccgcaccgatccagagggcaacatacaaccagctctaagaggactatttccctgtgcaatgtcaggttcgttatacgttgctgttactgttttttagccgcctagggatttgtttcctctggcttcatctacgtatgcttcattatatgactcttcctacatacttaaactaaaacagcaacaacagttcggtaaatgttgttctctggggtgggcaagctagcttattccctgcagaacagatctacaacgatggtcagtcctctccacagatcctaatgtttgttggcacgcttgtcaagaaatacgcgggtatactaactttaagcttttgcatttagtgcttttttatagttgggacctaatgccctttgttttagatggattgtgcttgtctggaggctcaccctgcaagtggtacattaatcctgatgttcctgaggcaggtgccctcatggctaggtaatattctgctatgcctgctgcacgtataagactgttgtttgtcttcgctctgttctaaattgagcttgactcgttgtatgtataaaccagtgcgaggaaagtgcatagtcccattaagtggaacgaggttctatcttcgaatcagcctatgcctcgtgttcctgaggaacagaaaatcgcttacattagagatctgca

SEQ ID NO: 118976 - DNA, 490 bp, Zea Mays
gtctccgcagggtgacgaggtgtcgtctggaagctagaggaagaagtgccagtaatgggaaactggttcgtcaacgttcgatgccaatcatgcggctgatgatagaaaggatgacgtggacgaacgtggagacagattttctaccgtctttaatatatggtaatgagaagcttattgtttgataacaaccacataaatacatgtatcctaggtggaactgttagtttccacactgcaggtataaaaaccggttgaattcctcttaagctgatgaagtcatataatgattgaatcgagaatatcccttcgagcaaaacgaccaaatcataccacatcatcctaatgtaatcagaaacacttcttctgaaaagacagcttcacctccacccccatcccacatatcactaatagaggcttcctacttattattgattatatataaaggccagaattgtatagctagaattgaattaccaaactaaatgtcttc

SEQ ID NO: 118977 - DNA, 546 bp, Zea Mays
ggcgaattagcaagttattatatagaaatttgtgttctcgacgctacaagttgggctatcaggagctctaaatcgcagttccgatggtacagtgtcccgagcagttcgccagctctgtccctcactgccgatgagccatgcgcggattcgtgctttcgccgccgtgattcgtgctcggatcggttggatagcgcttggggttgagtaaatatcatcgtcgtggatatactccgaccatcgtaccgagctagtcaccgatgcttcagatgtgtttgctggagacagccgcttcacggccttgtgctacgtgcctgggcacatttaccacatcgccgtgactcgcttaagccatccgatcatcgccggggagcccgccacagtattctccacgaatccactacgccagtgacctcccattcctccgaccgccgcgcgtctcaatccaaatacaccggccaccgctcttgcctgctataaattgagcccgtcgtgagctccgcagggtaatcacacatctaagccgccaagtcttgtcttcaattgtcc

SEQ ID NO: 118978 - DNA, 878 bp, Zea Mays
aggacaaacacttttgatgtaccgcgtcctgacccatctggacatcacaccattcacatcgaactcctgctcttcagggatttgatatcaagcaagctgaattagcttccatcctgccatcgtctgggtttcatagagaagttgtcacattatgatatgaaggttggtaaggcttatttagttattaaacagactcttcagcagattgttgagaaacaatacaatctatctgatgtttttagcgagttaatagatgaggtcctccgtgccgagtcgggagacaatgaagatgtttatgatgtgcagaaaacaactacaaaatcagatgatattcttccccagtcggcaggttagtcagttttatggtctttacgtcaatataaaaaaattattcaaacatttgtcgatatcgttatgatgccattatttaaaacgatgtttttttgtttaaatgatacgtaaagaaggatgtacgtgttcggccccacaaactgtaacagatatgtctactccagcatttcagcaggatacgtagttgacagacacacagatacatgaattactgttaaggcaacaacatattcgtgtactattagaaagttgccccgatgaagctgacattgatccactggtttatacaaatataacgaaatagaccaaaacacctacaaccccagtggtaatgttttttttattacttgtattttcattgaagggttgtattcatcgttttctttaaaaagcatataaccattacaattttttcagggtaaacatggtgacgttggcaagaacatgccgaccaacacaaacgtcactcctcaagcaacaccacatacggaatcttgctcgccgatatttgatgcgacgccgcaaat

SEQ ID NO: 118979 - DNA, 559 bp, Zea Mays
aaggaaaaggtgagttagacataactatacatacattatgtcataacaaaaaaagactatctatatattatgtaccggatcaatgactgcattcatagctccaaccatgtagtcgtagtgctgcatatatctcataacaaagaatccacaaccattagacctcaatttcattgttgggcagttattcaagagttcaatagggtacttcaaaaaagcagggagggctgatcttggtcgagcattttgtatggctagattgagcctactcattattaacctggcccatgaaaccttcctatcacccatatccataggtatacaatggtaattcttctagatagtcccacccatctctggtccatatgggttggaatctaacacatgtatgcgtccaatctgaagattaacaacatacaatgtccagagcgtagcatgggtaccattatctacatgcacacaaaatggaaataaaaaaatgttgaatacactatggttgatatgaatgatttgattgaaatttaaatgcagcaaaatgcagtgagagtgtgatgggtcaggg

SEQ ID NO: 118980 - DNA, 591 bp, Zea Mays
gatttttcccattactgctcgtcctttctgcttcatcacaaatttgaggtccaccgccacatgattgagttcattgcatacgctcagacacagtttggcaccacgcctaaatccttccaagcagataatgggatcgagtttgctaaccacgccaccacttctttcctcactagccatggcattacactccgtctttcttgtccctataccttaccacaaaacgccaaggctgaacgcatgctccgcactaccaacaacatctacaccatgctcctccatgcatccatgccacctccctactgggctgaggccctcacaatagcaaccttccgcctcaacaggtgtccctcctcctccatccaaaaccaaataccccaccaaatacttcacaacacactcccagattacgtctcccttcgcgtctttggatgcctctgctatccgaaccttactgccacctcccctcacaaactcgccccacaattcgcaccttgtgttttcctaggatatccatcctcccacaagggctatcgctgtcttgacatggccactcgccgcatcatcatctcacgccatgtcattttttacgag

SEQ ID NO: 118981 - DNA, 640 bp, Zea Mays
ccaccgtgccccgcctgtgcccacacatataaaggccacccaagccctagtcgagccctccgttctgccctccatcggttgcccaactcccccgtgccagcactccatttcggtgagcttcacgcgtgatgtcatcgtcttcgggagccagctaccatggccagccatttccagtagcctctagcctagcttaagcccactgtgagcttctctgataccccgtgaagctccccaaagcttgagccatatccttaccacgcaggagcaaggtaagcctgcccaccagagttcttggctccgttggtgaacgcggcccaagcaaactggcgtaccaccgtccaactccttgcaccagcagctctaccgtgcttcgatgaaattccatgacctttcaatttaatctctactccaatttgttagccaggcccctcaccgttgatgagccccgcgcgtctacgtgcatggccagaatgatcccgaccatcaccgacgatgagcagcaccttgacgtattcgtcgtgacctcctcaaccccgttgaccagttcaccagaactctaccatcgccgaatagtcacgccaccctgaactcgtcatcggccactgttggaaggagagagcgagcgtagattaaaagccta

SEQ ID NO: 118982 - DNA, 513 bp, Zea Mays
tggcactagtgttttgttgccacacagcatcttgtggtaacaaagccatttgcaacagatttaaacgtggcattaacacttattaccatgaaatatgttgtggcaatagagtttttggcaactatcgtaaatgttgcaatataacttattgcaacagaatagtccattgtaacaacgaactgctgcaacacttgaatacgttgcaaaagatgtagtaattgcaacagaacgtaaaattgttgctatagcctattgccactctgttttctgcaacagcaggcaacgacagttgttctatcgcaattggtgcctatcgcaacgatttatggtctatcgcaacgatttttgcccattgcaagaaggtgattttttagtagtgcacccaacccaacaatggagcagttcattgccgtacagatgcaacttctccaaggcctcactacttcagtacaacaaacttcttgattaatcaagacatcttcttttgcatctagctcatcttttacactagct

SEQ ID NO: 118983 - DNA, 547 bp, Zea Mays
ctaagtctctagtgctaatttcagtagccaccactctgaattcgacatcggcccactagcatggggagccgagttgcatattgcataatggccttgtcatcccgaagctcaacctcagaggactcataaccatagtcatgagtttttcactcttcttctcatcagctttcacgtagaaccattcgcttgtccacccagtcgccacttagtgcggtagacgatcaccggggccttggtgtctttgtggtatgcaaaattataacatccaaatttttgtgaagtccatctgctctagcctttgtctgaaaatgcaactcgtgcactcgatagaaaccttcggcattggcacttttgccctggcttcagagagcccatatgtaaacactcagcctggaaatggcatctggtgttagctgatgaagatatatttcaaacctcttcaaaacttctcctattatatcatatagaggaaaccaaagccccgccctgaagaaacttttaaatacaacaacttcatcctccttcggttctggaatcacttcctcgc

SEQ ID NO: 118984 - DNA, 398 bp, Zea Mays
caggatttaaaacacttgagatcgaatccccgtcacaggatcaaggttgggcgaaccagattgatcaggcagactcagtcccgtgtcctaatctcagctgttcaatacgggatcaacgatccacacctattcttcttcccacagccatccagcatccgtggccgagaccaccggcctggcggtgccatcaccggcgccagccgataagctatccacgcacatgaattcctcaatctttcgatgctaaacgatgctaggagcatggtggttcgacaaggggcatacataccattgaatcaaggcgtgagaactcccatcaacggtgaggtgtgagccacgacaagaaataggctccgacgaagaattctgcccgcgtccttcatccatcacgccctgtg

SEQ ID NO: 118985 - DNA, 399 bp, Zea Mays
aaaccactggagatagtcttaaggggcaaagtgaaggtccacgagagcaagaagtgaacggggaatgaagttgtttgatcctactgttgtttccctaattattgttttcgatcctactttaagtaaatttgtgtgcacacgctccgtggttcggacggtgtgctcggtgggcgcaatatttatactagttcgggcagaacgtccctacatctagtcttcggcgactcacgctaccgacacatttgttgctcaaagctcgtagtatacgtagggattacaagcgggcaagaaagggaggagatcccaagtcttttatgcgtgggtggacctaaggactatgggactaaagttctaagctaagccttggacatcgcggtggctcgcgccttagctccggcc

SEQ ID NO: 118986 - DNA, 579 bp, Zea Mays
ggcggagccatgtaatataataccgaaaagcccccacacaaacaatccagccaatatcatggtcatgggcgtcgaaaaagaccgtggcaacggtcttcgacattcaacgcacaaaacagtcaccgcaagaggcagcctagattgcccttgcgtgcaacacgtccgagcaaaagccgcctaagggtgcagccgtgcatgcacaataagtgcacgacatcacccacagggtgcgaagtctttactataagacacgtccgagcaaaaagccgcctaagggtgcagccgggcatgcacaataagtgcgcgacatcacccacagggtgtgaagtctttactacaagacacgtccaagcaaaagccacctaagggtgcagccgggcatgcaccagaagcgcacgacatcacccgcagttaacgaagtcctcatcccacccaactgctgcgccaacacaattacaaattgaaacaatctcacaataaatgcagcacgcgatatgccatcatagtttacatacataaaacgaaaggcccgtcggccacatcgcataaataatacaaatcatattttgccgccctccc

SEQ ID NO: 118987 - DNA, 465 bp, Zea Mays
gatcaacacaatactggagtagggtgcaagcccaaacaagtataacccactatcttagattcctcgttgagtcccagtgatccaccattcagagtgagtccgcactagcatcccctgtcgaacacaattctcattgtcccccagtttccgaaaccacgacaatgaccttccaacacatgccacacccagacacccctagattcaagctaggaccacaacaaggcaacctataaacatgaaggttcatctaagtagtggtcatcccattgagttcattggtgactcgactttagcgctaacgatgtcgtagtcaacactataagctattctccataatcctttggaacccaacactagatatggttccactgagcaatagcgaaaaaatgttgccatattcatagccaccaccagggttaagtcatgaccctctaagcatatgcacctcgctttaagaaggctata

SEQ ID NO: 118988 - DNA, 343 bp, Zea Mays
cagtggtctcggatgtgtcttaatgcaggagggccgagttatagcatatgcttcaagacagttgcaccggcatgaggaacattatccaactcatgacttagaattggctgctgcggttcatgcccttaaattatggcgtcattatctgctgggaaatatctgccatatatatacagatcataaaagtttgaagtatatttttacctagtcagaactaaacatgaggcagaggagatggcttgagctgattaaggattatgaattagaaattcactatcacccaggcaaagccaacgtggtggttgatgcactaagtcgcaaggctttttgccattgtcttaca

SEQ ID NO: 118989 - DNA, 481 bp, Zea Mays
cctctcttagcacgattgttgtggcccttcacattccatatcagaatatcatttgaatccatgaaaaacaaaattcatccagctccaccaaaaacgcatagctcaaaactgcccaggtgggggcacctcccaaccgaacggggctgccagcgcaaaaatgtgttgtctagaaagaggtgactcgaacagtttagcatatcttcttgcatccgtgaaggaaatattctctctctcgtcatagaaacccagatgcttgcacacctttgtagcagagggagagcctaattcaggtggtatcttggccaccctcctgcttcgccttaggttgaaattgctaggaatcagctttctctttcgtttgactggttggataggggccggtaggattccattgatctgttttgtaattccatctttaaatttctgcagaggagtagaagttccaatctcctcagactttgttagctgaaccgggattttt

SEQ ID NO: 118990 - DNA, 1677 bp, Zea Mays
tgactgcatgctggacgaacagcttggtctgacctgcagactgtgcaatgttgtatgcattgaggcaaaggatatctttccaccaatggtagcttcaaacagcaatcaagttagttcccttttattttacttgagaccccattattgactgtatgcatatttcattttttttggcagttcactggtaaggaccacgagaggcctgaaaggaaccattttggccaggatggtcatgtacttgacctttccttttttgagatttgtgctccagaattctccaaaatcaaggaatctgggaatgtgtgggcttcaatcactgatcttgaaccaaagttacttgctcatcagagaaaagccttcgaatttatatggaaaaacttggcaggatcattacagcttgaagaaatggatggttcaacaagtagaggtggttgtgtggttgcacatactccaggagcgggtaaaactcttctgctgatttcgtttcttgtcagttacttgaaagttcacccaagaagccggccattggtccttactccaaaagctgcaatccatacctggaggacagagtttcagaaatggggcatcctgcttccgttacatgtgcttcaccactctaacagaacaagcaaactgatggggggtcttagttcgaaactgcaggcggttttgaagagtttccaccagccatcgtggaaaacaatgcgcatcatgcattgtctggacaaactatgcaagtggcatgaggaaccaagcattcttctcatgacgtattcttccttcttatcgcttacgaaagaagactcaaaactgcgtcatcaggcgttcataacgaaagttttgatgaacaaccccgggctattgattcttgatgaagggcacaacccaaggagcaacaaatcaaagttgagaaagttgctgatgaaggtgaagactgaattcaggatactcttgtctggcacggtctttcagaacaactttgaagagtacttcaacaccttgtctttggccagacctcgttttgtcaacgacgttatgaccacgctggttacagaatcagaaaagagaacacggagccgaaccggcaaacatcaagaagcactggcaaggcatgtttttgtggaaagagtggggcacaagatagagtctagcagcaaacatgacaggatggatggcatctccttgttaaatgagcttactcaaggattcatcgattcgttcgaaggtacaaaactgaacattcttccgggtatacgtgtttatacccttttcatgaaacccaccgacgtccaggaagaggtactggcgaaactgctgatgcccttgtcaggcaatgcgcgttaccctctcgagtatgagctgctcatcacaattgcttctatccatccttggcttataaacacaaccaagtgtgctagcacttacttcaccccagcagaagtagctagcgttgacaagtacaagcggaactttgctgctggttgcaaggcaaagtttgtgattgatctgttgcacaagtcctcgttcagaggggagagggttctggtattttgccacaacgtggccccgatagccttcctggtcacgctcatagagatcgtctttggatggcgccttgggcaggaagtcctggtgctgcagggagaccaagaactgcatgtgcggtcagatgtcatg

SEQ ID NO: 118991 - DNA, 319 bp, Zea Mays
ctaatcactaggagcgggctcaatggatagtctaggtaggctcatgagtaccccaaaatttggcccaaaaacaaacctatgcaacttgcaatctaatttaatgatttgaatgtatatgaaatattttggttatttctattcatgcaaattgatggaaactatatatgtggtaccaaattatacacgatattacatggtaattattttgtcctcgtctaccctatgtccaaatcttggtccgccattgctaatcacaaagagtaataagcacaaactctcacttgaatctacgaagctcaataagattaatggtgcacac

SEQ ID NO: 118992 - DNA, 675 bp, Zea Mays
ggggaagaaactatcccgaaaccagaaaatgatgaagtggtggtctttaagagctttttcaaagcagggctgagatttcctctacacgggatgattggagatgtcttggaaaattttgagatttaccttcatcagctaacccctaacgccattgttaggcttagcatttacatctgggcccttcgaagtcaaggggcggagccgctcaccgaagccttctgccgagtacatgaacatcattatcagacgaaggctagggaagacggactgcatgagaacttcggctactacaattttgcttatcgcaaagatatgaagacaccagtggtcagctatcgctctaaatggccgacgggctagaaatctgaatggttttatgttaagattgatgagaaaaaggagaagctagtacagagcccgctggagttaaccttcgggctgactaggcctcagtgcaacatgacgtcgggggcaccatgcccagatgctgtgtataagtttagagttgtatctgaacacattggaactagggattgagttcaagaatacctagccaatcgagtattcccaacactgagggatggggtatgccgaagcttgaaaaagagaagaagaagaatgaactggttcggctgccatatcatttcaaattcaagaaacacttcaaagaaccct

SEQ ID NO: 118993 - DNA, 373 bp, Zea Mays
cgatcatgtctagcccccagcatgcaaatggctaggttatagggatagcctgcaactattgtgcgggcagatgttgttgctttgacaggaattggcacgcctcgcacttctggactaactcggcggtatcattcttcacagtcggctagtaaaacctggacctgaatgcctttcccactagagttcttgattgtgcatgtatgccacactgctcggcatgaatctcatctaatagctgcctcccggtagtcgagtggatgcacttcgtgaggactcctcctgcgcctcttctatacagcagaccccctatgatggtataatgggccgactgtctcgcgatgcgctccgctgcggctttgtcatccgattcttc

SEQ ID NO: 118994 - DNA, 404 bp, Zea Mays
gctcctgattcggcccttcgccagagcggagcgtagtcttggacctgcatggagttgcccgaacgcagcgatctccgaagcagaacgtggtctctgtggatggactcgtatggagttgcccactagggcgagcgtggcatccaaggacagacccatatggagttgcccagaggcggtgcccgtcggagcaaggcctgaatgcgcgcacgcgcagcagtgtactacagcccctaatccctcgagtgttccgtgaggatttctctggggtttaccattccctaggcaaagattgggacttgcctcctgttgacctttcctaattcggccctttgagttgttcgctgacgcctgctagttctttgttatgcacgcgtctcccccgaaagccatcccccgaaagggct

SEQ ID NO: 118995 - DNA, 676 bp, Zea Mays
gtttgcttgcccgcaataatctgcgaaaggcccaaagtcacatgccatccatcgagctccagctccagcgctggatcagaacaagatcctgtgacctcgaccgacctgaacagtgcagtatgctggggcaggggggcattagaaacttgaaactgaaagacgggcccggccgttctctgaatctccggcccaaaaggcctataacccgcaatatataaaagcacataatagcatggtaacactatcaatttcaagactagatcatctcatccgtgtatcctacagaagatatccaatgagcagtcgaggctataacctacaatggctttaagatcttctttccttccaaaaggttgaatctagcagcttacctaccaccatccgttctattgccccacatcatccaaccgtgcatgccctctctcccgatatccggctcgcccctacccacgcatggcgtaaccaccctagctagccacccattccgcgtccgctgctcctttaacagaaaatatttatctttactattatataatataggagtttggtcggtttcttcgtgtgtcactgcgctcccgcgcgagcatcccaggcctccccgcgcgtgtttgcgtctacatcaaaattcaagacatgcaacaaaaatattaagtaagagtagggatcgaaccaacgc

SEQ ID NO: 118996 - DNA, 538 bp, Zea Mays
gttttcctctgtgtgcatctatcaatgaaccttcccattctctcgtcgtggatcttctgggtgaaaacctggtctttgttggatggcgttgtccgtgttgtgtctggtgcatcatccgtcttgctgtggattctttgctgtgtttgtgtgcacttcatatccttcaacatttttgtttgtcctatagtggtcctcttgcagaggtgcttctgttgccgcttcttcaatggatgatttgatgctatccttgttgcttcttcggcggatgctttgccgccaatattctgttactcttctatcgatgctttgccaccattgtcgttggttctcgttgagcggatactttgccactgcaagtctcttctccgacggatgctttgccgttgttctttagtttccgtggtggatactttgccgccacccttgtgaatctcgtctctggcggatacttggctgccattgtattttttctagcggatgctttactactattgtcgtgccgacttccttggtggatgttttgccgtcgagatcgctg

SEQ ID NO: 118997 - DNA, 406 bp, Zea Mays
ggatgattcaaataaagtagttcatggggaagggagatcagttatccaactatctggaccgttgattttgatagtgtgttaagtttgagtacaatatgtttggtgaatttagtgggataatgagtatggggtgatttggttgtgtgacttttgcaaagtttaaactgatggattatatagtggtaagagcataactcttttctattatataaacatatgtaactttctatctttaacgtatactactttatatctaactttctatctttaacttacataccattctatatttaacgcaagttttttattattattattttcccggcaggtcccccctcccctcatcacctgtgcttccgcgaaacaacgctctgaattcaacagtgcctaaattaagtgacacaac

SEQ ID NO: 118998 - DNA, 397 bp, Zea Mays
gcgatgagctcactcaaccttgatgtgtcgtcctcctcttccccatgtaatcctgcctctacgagagcgataagctcactcaatctagatgtgtcgtcgtcctcctccatcagctccaccgtcgccatttttcctaaacatatcttgcatgtgcctcatctgccatatagtttacgccacatccaatctctgcaaatataatgagaaaaataagttagcaaagtcaggataaataaattgtactaacaaaattatagtatcatttttctcactcacttcccttgagacgatcagcaagattatccaacatctgtttctcggctctagccgcctcccattcccttgcatcctgtgctctcttctcatctgccgccttcaacctcctctgctctgcacg

SEQ ID NO: 118999 - DNA, 492 bp, Zea Mays
gacaaggctagcaatgttacccttgctgagggaaacattaaggaggagaaccagtctctagacaagcaagagacagacatcgcctctaaggatagactactcactcggtggggcaagttgctggatgagcgcgagcattaggcaacagagaaagagaagggactggaggagcgagtctaccagttcaatgcgtcacaggcaacgccggacctccagacgatgaaggccaccaagaaggccctcaaagacctgcaagtagaacatagcgctaggccaacatattatcggctaggctggcaagtcaagcacaacgttagtgctagtagggatgagccctatcccggtgtcggagccacctacatcaatctccgatgccctccctattctagactctgccgcagactgactctggcacctggactagaccctcagagcctgccttgaggccgaaggccacaagctatgctgggcggtggtggactatatcttgac

SEQ ID NO: 119000 - DNA, 279 bp, Zea Mays
gttgagtattattacgtaccaattcccttaggtaggcaatcggggaagttggatctcaagaattccccagtctcccaagtagcctcttcctctgagtgattactccattggaccttatacatcttgatcgatttagctcgagttgatctttccttgcaatcgagaatcttcgaagggtactcttggtacgatagatctggctctatctccaattctggttctgctatgatctcggtcggtaatcgaacacacatcttcagctgagacacatgggacgtg

SEQ ID NO: 119001 - DNA, 336 bp, Zea Mays
tttgacataatcagtaaatggttgataattaaggacattaaataaaataccagacttgtgtgtatttggggtattctttgggctgtataaagtttatagcatgcttccggtatatagaggttgatgctaattcttagataaacaaatgatagttgggaggcttagctggtagcatgctttttgtatgttgtacttgcacccgcccacaattctttctctcaacctcttctcttcatgcttcttttttggatctaccatttagcgcaatcgaacacccttaagggaaagtattgttgcttatatctcttttttctaaacttctttagtgctttcctt

SEQ ID NO: 119002 - DNA, 456 bp, Zea Mays
cgaccattgagctcaagatattgagtgctatgtccggtgaggcaccatagactccagtgtgttgtaagctcgctcgggttgcgttacattctctaagtaccttgtctagtggcacatctgatatgtcaccgaatatgtctggtgccttatggatctccccagccatgatgcagacctctttgagtgtcatatataatgtgatgtttggtgttgtgttcgatgcacacctgtgtgtctggtgtactctgattcttcaattgtttctttagttttgcactgctcttgtctagtgctttatttggtgcatcaccggacacgtccagtgctgctaagtagcaccatttcttcatttcttcgtgtctctttgtttgagtttatttcatcttgtgtcttagactcttgtataatcttcgtaggtcttcaataagtcttctaatgtcttgcgttgaggcgttg

SEQ ID NO: 119003 - DNA, 1462 bp, Zea Mays
ttgtgttcgtatgcatgaataaaacaatgcatataatgctcagaatctaatgctatttatcttacgatacaggaagtagacgccgaagcagctcctatgctccattgaagaacgaagacagtgcaattctggatgatgaggaaaacactgaggtatatcaggtaacgtatccttgaatttcagattgactttcttttttcttgaatagtacttattgttattactctattgatcccctatattcacttcctacatgttgcttgatggttaagcacttgaatttaatgcattaccatgctctatgcttatctgtttccctttagttcaaaccagtactaacttgtctgaactgtgtccgccttctgcgaattagctactacttgtatgcatttattgtgtttttttagctgtggagttagtatatctgatacttatttggatatagtgttcaatacaaagcagtttatagaagttacttcttccaaaccctacatacagttgtacacgcacagctaattcatctgaagatcaatcccccttattcctttaatttcttctaactcaggttacaaaaaaacagaaggcctcaaaaaggaattctggcaagtctagtttgaggtccttgattctaacgaagttatatggaaaggaaggccagaaagagaagatgcttccggttgcaccaaagctactccgcactatttcgatacactatctggaaagcaatgaatacgttcttgacggcgaatccacttcgagcggcgatggttcttcaaacagtactaagccgccgatgcaaaatgctggcgatatgatgaatctgcaccatgctacatctagcgtcccagatggctgtggtgtcgattcaagctcctcacttctcctaaagatagacgacgtccgtacgaagcgaaagaagagccaccgtagcatttcgatggacgggattcttcacaaggtcccctatgggaagaaggtgtccggagatgtgatcagtgaaggtctcccccgatcagcctctgccacgtacgatagggacggcgcgaaaccttactttggtggtgctgctgcaaagaggcatgcaaaccaagggtttcggcgttcacgttccctcagtgaatcctgggaaaactactcgcgcctacttgattccatctcgagtggtgagtccaaaagaacactggccagctctaagtctaccagggatcattccctagatggccctgtcgcgagtacttcattgcaaagaacttctgaagccttgaggtctcaaggtctgggtaaacgtgatgagaacctcgtgactgcagaagatgcgttggcgccacatgttcaagagaaaactggtgaagttgctaagggtcagagctccagcgatacgatggtcgctggtggctctgaaaatcctgctttacctgacgagcacgttgacgacaaagctgaagaaaacacatgcgctgct

SEQ ID NO: 119004 - DNA, 911 bp, Zea Mays
ctcgctttcttgcaaggatgtcggattcgcagtttatcagcttcgttcttatgcctgctccacattcaaagcgtatctgcacctctggaattctggcagcccaaattggatcaaagaatggcagcgtttctctgaggaagaatcaaaatcttggaagttggtttcttatcgccgttcttcgccggtttcgtttgctgatgtcgttcgtaagccagctctgtcaggtgcaaacttggtgcctttgggtcgtccggataggcccaaacgttcttcttcaagcttaaggcagcggtattcggttttcgatcgaatttccttcccttcacgccccgccattgatcaaggatttgctggtcgttcgcaatttcaaaaatattcaaactccagtaacggccgcgttgctagccccggacttcggccatcattaagggcctctcgcgttcacccttgggctccgcggaagttaatttggcggcccaagaagattttggaacagtgcccggggaattttgggcaggattttgtccccagcattaatggctctgccggcccagcggcgaagggctattgtcatatttgggatcactctttttcaggtaaaaatctacaaatctttggtttttcggggcagaagtgcaagcggtcttttggctccttccccaataagtttgagaatgcttcctgggtgtatcccccgcgattatggttcaggtccccctgctctcgcttacgggtgggcctccttccccgcccttttataataattttggtgagttcgctcaggtggttctctcgagtagcggctcttcaccttccacggaacttgcactgttcacaaaaccccatccctccccgctgccgtggaagagtccgccaacttcaagctcttcgtggcacgtggtgctttcgtc

SEQ ID NO: 119005 - DNA, 286 bp, Zea Mays
ctccaatgcttatggccgctggcagatgaaacgaaagaaaaaccatgattttcacactaatgaattatctaaccaatcaacatcatgttagggaggcacttacttttcagatacttcgatgtggcatggtaagctttcaggagctattatcatctaaagtaatcaacaaacatgatacagttaaatataaatataaaccatctaaattaataacactaatgtgagctccctgtgattcaagttgttagttaaatcaatctaggtccatctcaaaagtttccggtcc

SEQ ID NO: 119006 - DNA, 748 bp, Zea Mays
tgaaaacagaaatttgaatggacagaaatttgacacaagttaaagttaccgagtgccatattcagataaccttaatgaaaacagaatggacaacgttacaaaagctatcgagtgccattcaacactcgacggaatggacaacccaggttcacagtacttcagtaccaagttcagttaccttacacaagctaactattacacggataccttacacaagctgtcccttacacaaataacacatctagtgccgttaaacaacacccatattactctacttcatctgacgatccgaaagctcttcagaactgacatcatctagtgcccattccccaccacccatatgttcatcttcagcaaattggttgttgaaccactcagataatggtggcgatggaccagcttcgagatcttctaaacgttgtgcttcgtcctcaagtgactgagcaagctcatacacgcgccacattgcaaagttcactgacacctctttggccgtatctggcgaatccataatctcgtctccagccaaatctttcaactccttcccaactacacgcatctttgtaatggcttcggcgaggtcactacgaactgtttcaaatcgggtaatctgcgaaaccccaaaaattgctattggatttcaacatagtactgcatattattgaacttagttcaacccttaccgacactgaacgaggtgccgagcagtgattgacgccggctgtgagctctgttcgacagaaaacag

SEQ ID NO: 119007 - DNA, 796 bp, Zea Mays
gcggggaagagtctcagtgggtgcattaccatctccaagggatggtacccgcagaagattgtcagggtcttcagtgctgtggcctcgatggtgtcgtccgccctgaacccgatagtctcagagtcaagggaacgccaactcggctccagagggtgagcctccagagtcagccaaacctggcaatgtgacacccgatgctcctcgtacaactgcactgtgtacagagggggtgtagggtaaccagcggagcagagcacctcccacaagatggagggaaaaccctcgtgagaaaggtagtcgaaactgaaacgagtgtctcctccattgatgggggtgggtgaagtcatctatgaaagagggttagatgtaagtgttatggtagtggaaaggaaaaacatgtgcccgggttgttaaaagaaggtgggttagattagattcgttcactccaactcatcttattaccccttattaagaatgcttgttaggcttattatctgaagcacctttttccttaacttctagtttataatgcatgcatgttggaaagacgtcttctcaccgattggaggggtgcttctagggcatccctgctattctaagactggcctatatgacctacttatttagccacctatttcccctactcctaaggcctttcgtcctaggtctagcgttctagtcctgacgatccaatactggttcctaagcaaattttatttttgaaatgttggcattcatgacttattgattcctctgtaatggtaatcgcttcgataccagctatggcagaacctcc

SEQ ID NO: 119008 - DNA, 371 bp, Zea Mays
ccagaacgagagttgattgttgggaccaacgagaggaatgacggctaccgagggcccttgcttcttccttttgggttccatggtgctcctcgcaagcacaactaagcacaatactacaactgacgggtggattcagaggtggaaatcgtagcggacaaagttagggttttcaagcggatcgaacaagtagacaattatatagtcattgggatttagcatgacgccattcaataaacgacctgaaccaggaacgacatttagatcaatttcaaacaggtaatggacacaactgcactcgtactcaataaggattcggctagacagcgaaaaactcgacaaatgacataataagatatcagtgaaaaatcaac

SEQ ID NO: 119009 - DNA, 638 bp, Zea Mays
cccgtgcagctcctgaacgttaggggggggaagggtggtgtcggtggctcattgggatgggagggaactgctgggcctgaacctgatcgcgcctggtgagaacccgaaagccatgatgacactctaattaatatctaaattcgagagtggcccgcatgagtagagaaagcagtcttgattgaattcgtcaccagctctatctaaagacggattgggtgatagccacggagcaaatctagtgtcatcatcgtgcaccagttggttttatttcggtatcggttggtggctttgactactgatggctcactgccgctctgggcccgcatagtatctgttgcttggtggtcgctcagcacgtgacgagcgtggcggttccttgcgcctggctggcaggaagggcatcaatcccatcccatgctccctcccaactcaaccggctggctttacagagccgtctctgcacctgctcatacaccatcttctaaatggagacaacaaggaacgggcaaccccgtccagtccacatgtgacagcgctgcgttatcacgtgacttccaccagtacagtatcatactactactgcactccagttgctaatgcgtgtccgcatacgggactagtgagggagcagctgatgc

SEQ ID NO: 119010 - DNA, 575 bp, Zea Mays
ccagcttcagtcttggcctggctctttgcaacttcgacttcggttagttttgtctcagtctgcatttttgaagcttcggcagttttccctggagtagagcttgaagtctttatcgtctccagcacatctagtacgttgaccatccttttcctcttggggtcgttgtaagatctttttgtgccttcggcactgtcacttctgccgaagggcttataacttctaatatctttgttctttcgacctctatctcttcaatattatcggccttcggctcagctaatttggccgatgatgccttcggcattgcagccgactcttcaatcttctgcgtaagcgcaggttctttggcttcagtagccgaagaggtctcaccgccaaattcgggcactatggccggttcaatatagcgcggtcggtgagtaagaaccttcacctttctcctcttcggtgcgggctcactcggagcagctgaagtaacatccttcccaggagttgcactctttctcttctgcccccttgacgggtagcggtagtcaggatacataaatccaatagcatcaaaaactctatttagc

SEQ ID NO: 119011 - DNA, 534 bp, Zea Mays
cacaagttaccatgcagacacagaagagaaaaagaaggatagattctggagaggccttagcacaaagcttcgggaacatctcaacactgtctaggcagataactacaatgagttggtcaacttggcattatggctcactaggcagaaaagaagagaaagacactaatggccggatcctcaacacaacatttgcagtttaggattgtctccaacaatcagagcaggggaccttagcagtaatccggacgatgggtgataggccacctcagcagccgcaagcacccaaccgccctccagccccactcaaaggaacaaccaacctcagcagcaaacaccacaatatcaccaaggaaatggaaacaagtgctacacttgcggcaatactgacaattctgccaaggattgccctcgaaaccaactaagtccgggaccgattgcaactctaggtaagggcagggagcagaaagtgtaattaaagcaggggaggctgaacttcactactttggaggaccttccaaagggagcacccgtcat

SEQ ID NO: 119012 - DNA, 346 bp, Zea Mays
atctgcgctgacttgattaaccctggcaatagagtatcccttgctaggagtctgttgcttgttctgagctggtgtaccggaattccccaccggacaagcattagcatagtgcccaacctgactgcacttgaagcatgtagggccagtcttctgtcctgtaggcctcaccgggtgccagtgggggcagcctgacgaatgggaggtgtccgtggagacccctgtggagtgtactgagctgggcgtggtcctcctcctggatgagctggtgtaccctatggtggaatgtagcgaggacgaacactgctgctaccctgcccctgggtaatggccttcctcttcaagtcac

SEQ ID NO: 119013 - DNA, 673 bp, Zea Mays
ttgttttgcaccagctgtaatgttagacccgtacttactattttttataggagacgaggaaatgcagttgggagagttacgacgacaaaggagaggtgatgcgcacaataaagtccaaaagactaatgggacagaagatgtgttgtggatctcagctcgtcgattcgtacattaacgatcacatacgtgacatgagtaggtacgcgaaatctgcccattttgatagcccgatgcgtgcagagcagaggaggtttaaggcggcaaatgagaagagagcacaggatgcaagggaatgggaggcggctagagccgagaaacagatgttggataatcttgctgatcgtctcaagggaagtgagtgagaaaaatgatactataattttgttagtacaatttatttatcctgactttgctaccttatttttctcattatatttgcagagattggatatggcgtaaactatatggcagacgaggcacatgcaagatatgttcaggaaaaaatgtcgacggtggagctgatggaggaggaggacgacaacacatctagattgagggagcttatcgctctcgcagagacaggattacatgggaaagaggaggaagacacatcaaggttgagtgagctcatcgcactagctgaggcaggattacgtgctcaagaggaggagga

SEQ ID NO: 119014 - DNA, 541 bp, Zea Mays
catagggacatcaagggctcgaacctgttgattgacagcaacgggacgctcaagatcggagacttcggcctggcaatatcgtacgatcccagcaacccgcagccactgacaagccgcgttgtgacgttatggtacagaccaccggagcttctgctgggtgccacagattatgctgctgcggtggacatgtggagcacaggatgtatcgtggctgagttgtttgctggcaagccaatcatgccaggaagaaccgaggtagttctaatttgattattgatgcttcttgtcgttttgcttccagacatcgatcaccaattaatataatgagcccgaaatcgttgccattgccaggtggagcaaatccacaagatatttaagctgtgtggctccccatccgagaactactgcaagaaatcgaaggtgccagaaactgcaatgttcaagcctcagcagcaatacaggcggtgtgtcaccgagactttcaaagatttacccactccagctgtacttctcatcgactcattgctttcgctagagccag

SEQ ID NO: 119015 - DNA, 290 bp, Zea Mays
taggtaaagttatctctcgtggcaccattcgggtgaatgagaactttgtgcttacagatgttgctttggtttctaaattgcatttcaatccgctttctatttcgcaactccttgaggacgaatatgaagtgcgctttaagaggggcctttcttgtgttttggatgcttaggagaccttgtttgttggatctccaaatttggtcaggtttttcgagttgattttcccattttctgcccctctcgatatcttttgacaagatcttcctccataatttggaaatggcatagga

SEQ ID NO: 119016 - DNA, 620 bp, Zea Mays
cgataaactaggacaggggtttacatcggtcgatcctttggaggagatcgacataggagatggtaaaactccaaggccgacttttgtaaacaagaccctgaagaccgatcctagaaatgagatgatcggtctattaaaggaatatttggattgctttgcttggaattacactgagatggtgggattaaaccgagagatagtagagcatcggctgcccattaagtccggtttcagacctttcaagcagagagctagaacatttcatcctgatcttctcccacaaatcaaggacgaaatccactggctgctagaagctaattttattagaccttgcagatacgcagaatgggtctccaatattgtgccggtggagaaggagtcaggtaagcttagagtatgcattgattttcgcaatttaaatagagcaactcctaaagatgagtatcccatgcccatagccgacacattaatcaataatgcatcagagaatagaattattagctttcttgatggtaatgctggatataatcagattttcatggccgaagaagatgcgtctaaaacgacctttatatgtccaggcttcattggtttatttgaatgggtggtcatgacatttg

SEQ ID NO: 119017 - DNA, 570 bp, Zea Mays
ctagttcaattgaatgattctgtgagcaacaggggacatgagggaagctagaacataaatcaaagaggctcgagctaacctgcagaaggctggccacgatgcggtagttcacggtgtgcggaaaaccaatttggggaaagagaaattggagctctctggtggttcatctgaggcacgggctggtgcattgggtgtatgattacctagcggagctgatggcatgcttaatttatagggcccgagggcggtggctcctcatttgggcatggcgtgctggcggccggagagagggactgagtcaccgcgacgatctaccatggcgatcactggttgaggagctacgactgtcactagtgagctactacggctagcagcgacgtggtaaaagggtcacggcgtggcgcgatcatggcgaactacgtatacctcgacaacggttgctcggccacgtcgccggcgcaagtgcatgggcgatagagcaaccacagtgctccgaactcatccgcggggaagatatttttactgccgagcgcaatccactgacccgaggcacgaatcgtggcggctagc

SEQ ID NO: 119018 - DNA, 491 bp, Zea Mays
gcgccgtcggggccagctgggaaagctttggttagcgtcgagcgttggatgagctatgggtgtccgtgattagatctaggtggcacttcgctcggggtaggatcgtgtccgtcggtgggcagatcaacgcttacggaagtttatgactatgttttcctcgtagccataggatgatgatcggacggcggagttcggataccggttcgtcatggcttagatctaatctgcagagtccatttgcgatcgtgcggccgagattacaatatacccttcggccgtggctttttgctaaagagaccccagggaaagacataataaacccgctgtcctatgcgctgttccctatatcttgggagttttactccgtagcccctgagtgttccaggaaatgaggcacagtccagattattaggaaatcaggaaaaagaattagaatatgagtttttaatatgaaaataattgctagaattggtataattcatagaaaatct

SEQ ID NO: 119019 - DNA, 1016 bp, Zea Mays
aatttctctaaagattctggactgcagacacaaaaaccagggagctcggggtcccaatcataaatattaggacttataattccctatagcactccccggacgacaggtttatttcgaaataaggcagggtctctttaataaaatcgcccgcggcgaaggggtatcgatgatcgcggaccgtagatcgcttgatcagtggtcgtgatcagattacgaaccggtataccacgactgccctcagatctcgatccgacgcccgagacctaatgaaggcgtgatctatttcgaaccgtaggatcacgatctaacgactcccttttttaccaaaacgaattggtatcatctgatctaatctccaccgctcatcacccgctcaacggtccaccagttgtcttcttcctccatcagctcagcacggcggtggacgcagagttccacccagaccgcacaccgacacttgcgaaacattgacctacacacggatcctggccccggacccgaattaatcgaagtcccgaccatgctgaacctattgacctccatcacgccttggcctagcatgctaaaaagtcttgcacaacgcaccatggctccgcatagcgaccatgatggagagccccgacacagggcccccggcgccttcccaatttaatccaaagggcactaatcgtggcataggtgaactcgaaccgcttaaggagatggttaccgtgattatgggtgatggtgtggacacgagcccaaccgcggccatgcagtcccctctcttttcttctctgcgcttggtggcgaggcgtattatgggtcgaggtagccgtgatgcttgggttaaatagacgagcggagcggattagggaatccatgcatcgtccataaccataccgcgatgaatcccatcggatttcctggaatcacgcgtggtttgttacggtcggctttgggaagaagacgactgacagcacggccccacccatcagcgagacggtgcgcgcgcggaacgggagggactgacggcc

SEQ ID NO: 119020 - DNA, 700 bp, Zea Mays
atcgccaaagcacgtggcgttcaccaggtaaacggcgagctccggtgaggataaactcggccggccgtgcggcaagtagatgagatggccggaccagctaacagttgtgatccatcccgcgctagatctttttacccatccccggtgttatccattcctccctgagcacgaatcggaacggcggtggcacgaatcgcggcggataggtcatcggcggcgaggaccctgcgctggcggtctgatccttatcggactactgtaccatgggatatgttcatcagtgtgcctgacagtcacagtttaggaccaaatctctctaaagtttctctagtaactcactccactctctgtagcaaagtttcaaagctacaaaccagctacaatttgactatagggattgaactcatttgagcactggatccaaatcaaaatcgagctcaaagttcacctcataacactgtaactctgaaattcaacttcaagcagtctgacagcccatctttgattgggtttttctccagatttcacataagaccatggcttgaatccttaaacaaagttgttcccctaagattgatcttcaactttgatgtggttacctatcattaattctcactattttgaaagctacacagccccaaagttgggcctacaaccctgttttcagacttggtatagaactcaaatgaggtccattttg

SEQ ID NO: 119021 - DNA, 646 bp, Zea Mays
aaaagcggtcttctcaatatcctcctcatggatcctcaattgatggtaaccagagttcaaatcaattttggagaacatctgggcacccctcaactgttcaaagagtacctcaatacggggtagcggatatttattcttgattgtcacttgattcaaagcgtgataatccacacatagcctcttgcttttatccttcttctcaacaaacaatactggggaagcccatggagagctgctaggcctaatgaaacccttagccaatagatcatccaattgctgcttcaattcaacctgctcctttggggccatccgatacggggctttatgaatacactgtgtacccgggatcagcttgatctcaaaagctgcatcgcgctccggaggaatgcctggaagctctgccggaaacatgtcggcaaagtcacacaccacccggatgtcctgcactcgcaaggcagcctcaccctccaccaccatggagaaaaagattcctgacttccttgaccggcgattcggaagcaattgcgccaacaaggataacgtgaactttggggagcttcccaagaataccacctccctacccgacggcgcccgcaataacactgtcttccaaaaacaggatataattgtgcgatactgagataac

SEQ ID NO: 119022 - DNA, 465 bp, Zea Mays
gaaactgtttgtgttgaatgcatctattctaagagcgaagtaggcaaacgcttacccaacatcttcaaaattgttgaagaaaaagaccacgtcgtatgtggtacattcgacaaaagtagaacgaatggcagaaacatgggtcaatgaagtagtcttgcagcaaccggtcatgggcgacatcatggtccaagacgatgtgactttgatgttgcatccttcatctcctcgtggaaaactcagagacaagcttcgtcgcctcatctattatggtttgataaagcaacttgaccatctcgtcttccatcatgtcaacattcgaacttgaccaagacatttttacaatggtgtactcgaacgaaacgaggctgagatgagtatgaggtggtagagaaatttgaagtatgaaatatgtgaataagtttaaacatttcgcctctattttttagacagaagctctagttggaa

SEQ ID NO: 119023 - DNA, 389 bp, Zea Mays
cataccccaatgtctatgtgagacatttctattaacatgcccttgaccacccttgttccttaacgatccattagcgatcattggtgatcttgttgcttccttataacttccctcggtaaggaatctttacttcaacccttccgttggaaccttacctatcttacccttgattgttttctccacttcgcgagtcttgccttaactctatcctttgttatgcttttcattattattatatgtacccttgacacctctataccctacattgatgtttgtctcgtacttaccctttaaaatcgcccctcttccgtctcattctgagagttgtactttacttatctttcccttggtcatatcctcttctttggcttgcgagtttgtaacttcat

SEQ ID NO: 119024 - DNA, 1240 bp, Zea Mays
tctggaagggaggcggagacctttcgttgcacagcacagcacagccaccgtgtaactgccggaacacggatggggatccgccgttgcattctctcttctccacaccataagcaggacaccgatgctatttccactacaccataagcagtgatggtatcatagtttctcattcagccgcacccctttcactctactggttatctttttttcctcctataagccgcgatgttaatgttgtgaggtaatgagaatcagaatcaaacatgcagctataaacggtaaaaggagagaaatcataatcaaagcatggccaattcccactagtccttaggcatacataatgcatagccataaactgaactagttttttttccctggcatccacagctttatttagcaacaattaaaatctctaaactaagatttgcttaagaaaagcagccatactcaaaaagcttaacaaaagacagtatgccattattttttcacatcttcatgtacaaaagcttgtatcatccattagttaagtttaccatgtgtttagaatataggctgcattgctgcaatattaagagagagagagagaaggcgacgatgtaccttaatgagttgggtaaagctattaagtgattcatatgcttgagagtctggtacagagctttcattttcttttgtactgtataggatagtttgttttattcttgtttgctttcttcttcttctgcaatttttcagcctaacttttttttttgttttgatccactcttttgcttttctttctccttcagtccagctacatgtttgaatggttcagttaaactaaatgattcttcaacgctaggcttgctagcatccacattaggagttcctcgggtttcttcttcttccccttgcttactcactctatgaagtgcctcttccacaagcaagtagcagtcttcatattcagcagctcttgaagctagtggaagaagtctttggcaaggatttttttttacccaagtgtggcatctaaattctaaattaggattttccactatatccgtcccatgcatatctacatcgagtccatcgcttcaaaatatatctttcaggcagtaatttaatgttcaacaaatggagaccttttagtccatgcctacataatataccagttctctcaaagagtcaacatttgcatgagacaatctgactagtaggatccagtataacctttcgctcttcatcaagtgtaactgtc

SEQ ID NO: 119025 - DNA, 457 bp, Zea Mays
cttcatcttgtcgacgttggggttttgcttccgaaagagctctgctcttagcaaatttgccgcggggtcaccgttccgacagaggatacccatgcatctgttgtttacgttcctttccttattcgtggtcatgctcttcccgtctctccctttttccgcggcctccttgatttctatgaattgaacttgactcatctgaaccctaattccatcttgcaagtttccatttttgtacatctgtgtgaggcctttctcgggattctcccccatttcggtctctggaaatacctgtatcattgtcggctcgggatggtggggggacagcaccaactcgttggcggtgcaagcctagagctttgtcacgggagaaaagcagagtacctcgacattccccttaaggacaacattaaggggtggcgtctcgagtggttcattgtggagaaccactgcaagtcac

SEQ ID NO: 119026 - DNA, 371 bp, Zea Mays
caaacaaaaaagttttaagcgcaatagaatttgacataacaaaaaagtataaggttgaaaagaaggaagataagaaaaggggaatgcttaaagataagggattattagctgagttggttaggtagatagagcagtgagtttaacttcatgtggaagcgtgcgacaatacaaactatttcttcaattacaaggaagaaatgtctgaattatgcaccttctctcagctattcatggtaatattcaaagtaatagactgttcctctgaagtctgaaccatacactgtttttttctgaacttttaattttgcaggggaaaacacagatgatgttattgctgaattcacatttggtgccatctgaataactttttg

SEQ ID NO: 119027 - DNA, 325 bp, Zea Mays
atcagaatatacaataatagacccaccatgaatgtagggtattaccttacattgagagcttgaacttgtataaaccctcatgcctcatgtgccttttccttcagcttttgatctcgtgacataccctatatatttactatcgaacaatatccaacagttggcacactaggtaaggggcgtcttgaagatcaagcaaagttgatgacatccattaagtttgcattgggagacgagttcatacttggcaccctaagattcatctccgacatggttagtaatcttgtcacctataatgaagggcttgtcctagaccttttggtaatgc

SEQ ID NO: 119028 - DNA, 685 bp, Zea Mays
tatggacattgggatcgaggatgtcgtccaatgttcgttcgcctccacggggtgccccacgggcacgagagatgggtggtctggcggcatggacttcgtcgcgaggcctcttctcccaacgcttgtcgagttgctgggtcgtgtcgcgttgtggtgctgatggtgcaggttttgttcctccgatgagatcctgagcccgttcttcggtggtgatgtagaggtctgcctccctgaacagctgctcagaagtggtcggcgctttttgtagtatggctcgaacaaaggccaagtcattagatccccggtagaagtcctcgatcaccgctgcttccgcaacctcggggatacgatttctcatggtctgaaaccttttgaggtatgaccggagagtctcatccccttggtgcctgatggatttgaggtcccatggttgcgccggcttatcggagagagattggaagttggcgatgaagcgtcgactgaaatcgttccagtcgtcgatgcagtgtcggggtaggtgtcacaaccattgcagtgcgtcttgcccgaggacaatgggtaagtatgcagtcatcacatcttcagttgccctagcggcccgggcggcggtggtatagacggctaaccagcctcttgggtcctgcttgggctcgtacttgtcgatgttggagactttgaagttagg

SEQ ID NO: 119029 - DNA, 627 bp, Zea Mays
cactttaagacgacattgtcgctcgcctatgggcactgcggcccggcactaccggtgaacagagcggcactatcgcttacctgtttttgtagttctgcttttggttttatgtagacagttgagcagttttctctctagcattttggtgcagtcaatcgatgcttcattgatctgcatagtgctttgctgctttgtgtgtcccatggggtttgttttgaaattgggatcaagtcataatgttctcgagcagagaaattttagtggctctcaatcaccccctttggtcgccttatcggtccttaaattggtattagagctggttaaggatcaatccccctaatcagttcttgatccgtagaaggtgacatggaacgaggtgttggtaaacctccattcttcgatgggacaaactatccatattggaagattcacatgtctgcgtatctttagagcatcagctacagagtatgggagatttgccttgatcctacttttgaggtccagggtgctcgaatcatgcctcttaagatagagtttcatgattcaaacaacaaggctcgaaacgctttgttctcatgtctcccacttgctgagtttgagcgacttggacatttaggtatgacccac

SEQ ID NO: 119030 - DNA, 419 bp, Zea Mays
caaatttgtagagcaatcaaaggagaacaactttgcttaaggttgtgagcatagttattaagaaaaggtcagagataattaagcctcgaggttggctgtcagacttgttatgtctgaaattcagactgacagacagataccatgaacttcaagcttaattctaaataggatccaatggctttttgtaggaatcctatgtagcaaagttatagctggattgtggctctataactttgatgcagatctttggacaggatgccacagagatttgagagaaaatcgagttcaaacgttggctgtcaggccaactgaatggttttgtcgatggtacaataacctgcttgggttcagagcacttcaccgccgtcgatcactcctccgccgcaatacgtgtcgccggcgttaggattcgcactcgc

SEQ ID NO: 119031 - DNA, 810 bp, Zea Mays
gtggaggaagatttcaagcaaagtaagatcgaggatcaccgacattcataatggcaccccttagcatcatctcaacccgactcaagatgtcttcctctgaaattcgtttgtctgacacctgggaaggacacctaaccccggtatccacatatgtagagtaaaccctgtcctttagaagctgaatattcttgaaaacaaagtcgatcaccacagctttagtggtcagacccctgtcttttaaaccagcaatctcaactaacaagatttttgcctcggcaactttagagtcggttggggcctctatccaacttggcacacgcacatctagctgccttctagcatgagcaggcaaggagttgttgtgattctccatagtgaaccactcaaagcgccatcccttgatgttgtcctttagagggatatctaggtagtcgaccttcctaccccgacgatgttcaaggctggccccaccaactacttgatgatgtccacctgccatccccgacttgcaatggtagacatacttccacagtccaaagtgtgggctaatcccaagataggctttgcaaagatgcacgaagatggcaatttgaagaacataattagggtttagatgagttagattgagggagtggaaatcaaggaaggcatgaaaaaagggggaatgaacaaacctaggcctcaaattaagaaagggacaaaaaccacggattcatgggtatcctccatgggcacggtaatcccttgccaaatccgctaggcacacaattccttcaatggaagaacaccaatttaaactagatggagtaa

SEQ ID NO: 119032 - DNA, 529 bp, Zea Mays
catatttttacttatttctttggcacagatctgcctgtagaaataacttagctcagctattgcttgccacatggcatcgggcatataaccacgaaacatgacagggataatcctctccattaatatatggaagtcatggctctttaacccagttagttttcccgttttcaaattcacagctcttttcaagcccgcagcataaccatcgggaaatttaattttttcatccatctcattacctcgatcttgtctttagaggtaagacagaacaaggcacgtggcggcttaccgttgtcattgagcacttgggttggtcggtcacaaagcattgctagatctcttcgagctttcagattgtcctttgttttgtcaaaatgcatgcaggtgtgtatgagggcttcagcaacattactttcttggtgcatgacatcaatgttgtgcacaagaatcaatgacgacatataagggagctcccggagaccacatatatgtgtccagttgtggtccactccgaatccttcgtacttgt

SEQ ID NO: 119033 - DNA, 468 bp, Zea Mays
tgtgctaatccggctgcacccttaggcgacttttgcgcggagtgtcgcacgcgagggaggcttcgcttctcctcgcggtgactttgatgtggtcgaatgccgaagaccgtcgatgcggtcttttttgacattgctttaattttttgcgggggattttcgcgtgtatattacatggctccgcctcattaaaaacctcacccccccgggaggaaaagagtgcgggccggaataaaattgcttgatgaattacaagggcatgttagccctgaggatttaaataaaaaatttacggagattgtcaatattctaggaatgttccagatcttcgccagattgtgttgttagtctgtacgcgctgggagacgacttcgtcttgacaataaatggtccttcccactttggctccagcttacctcgtgattctgtccgggttgtgcggacaagtacgaggtccccttcgttaaattc

SEQ ID NO: 119034 - DNA, 660 bp, Zea Mays
aattttctaagattattctatattataaatcaccttctaaaattctatttacttaaaacaagggctaaggacagctggtacaaattctatagagcgcaggggctagtttataaagatccagggctcggctttaaaattggttttgacttgggagaatggcgggttggtttaacaaaagtgcagggactcttttgaaagaagtgcacggcgaaggggtactaagcatcctgaaccgtccgatcaaactcgcacgacccagattagatcgagtacccttgcgaaccggtactcactggtgatcgtgagatgggcgatcgatggtggagattttaaacaacgctgccagccgcacgaccgaacgatccaggatcgacggcccgctcacgaagggtataacatttataatcacagccgccaaccgcgagatctacggtctggatcccaccccatcaaagcggtacgtttcttagaatcctggccgttaagtatccgatcgacggctgagcgtccttcttctacctaacgctaggcacggcggagtcctagcctgactggcggcaaacacgtcggtgaacagccatcccacccaacaggcattcatccctaaatctgaaaggtgttacgcgaagtggaagaagatatgagttcactagaggtgcc

SEQ ID NO: 119035 - DNA, 710 bp, Zea Mays
cgcacaaccaagtctgataccacttgttagctgtctggtgctaaccggattgacaaaggatgctagtatgaactaattctacaaatgacaaggaagctaatacgaactatggtagtattatctctggtatccctttacaagcttgagcctctctttatataggctccacacacgattgctaagtggacaagtcttggctggatagcacccattgggcctgtgccgacgatggcctagctcgacaattgtttgatcaatactattctcggtggaatactgacattatgcatcttgcaaattggttgtatgataattattttaaggattcaccggtaagtaacattaccttgttgttactcgctcttccgtcaccctgtagtttaccgatagcaaacagtttgcaatttctagctttgtgataactacttttaggctttttaatttattgtctgatatatatttgtactatcccagcgcatgagtattacactagttacgacttagagctgctccaacagacgggttaaaaatcattcgctcggcaaaaaaaacataaaacccgtggaaaccgaatccaacatctcttcttcaacctcgctttcgccatctcgctcggcatcgctctccgtcgctagccaattttgtcgagctgttgtgtctcgccaaatcgctatttcccgccccgcgctctcctagccatcccgttcccg

SEQ ID NO: 119036 - DNA, 355 bp, Zea Mays
ctccaagccacgggcacccgactaatcctccgcctcggtataacataggggttgagcgaaccgtaaaagggtcgaaggtatcgcgcccgtcttgaggccgaccgtcccacggacaaagatgacctccacgtcacctcctaccataaaagtcggtcataatggtggcacgaacgacctacacgacgttatctaccgacatgtctcgtgggttggatagccctgtcgcatctactccggtttacgcatcccgtcgaggtcagaaaagacccccaacccccacgctaaggcccgagacgggcttacgcatgcactacagcccccatatccacgcaacctcaccaaacaagtcaacaaa

SEQ ID NO: 119037 - DNA, 648 bp, Zea Mays
acatagttcctttggtggtagaacaccaaactcaacaagatgcagaaggtcagcctcagaaacgacacaaacatggttaccagcaaaataagggagttggctgttgggatcgatccgagggatgtctgggatggtagcactctgttttcttttcctgggagccatcatgatttttcaaacgacgcaaacggattcgggaactcagaaagctagagagcggcgaagaaaaaaacaagaactagggttcatagctcaagaggacgtcaacagaagtttgggttggcatactaagtcgggcgcaaaggggcaggccgatagctcgggagagttttggttgcagcaaaacaacatcactcgggcattacctctaaaatgctagtgaaccgtcagacacaagagcggagtatgcaacaacagattggcacgaaagcaggtgttcattcaccagtgggggagtcattataaaattgagaccgactcattatgagtcggcctccagcccttcaatcttacattacattacattactacttagactacattacactactagttaaactacattattctactactaactactactactatgctatactaatatttaagccggtagcattatgccaccggccttgccatcatcgccgt

SEQ ID NO: 119038 - DNA, 316 bp, Zea Mays
caagcataccagcacaacataatccaattatactcattcaaccaaaacaaaaaggtgagacgaggtttggaataagaaagatattatgacatcaaggagttgggtaagaattatcaaggagttagacaagacatatttgttggtggccaagagtgaaataagataatcatgaactattaaattcagaataaatgatacaaccaaggatataaagtgagttagggagaaagtgttatcaaggagaaaagtagagaggcaaaggtttaatatcaaggtagatattgcctaaggatggcaatacaatggcaaggaaaca

SEQ ID NO: 119039 - DNA, 299 bp, Zea Mays
gcattgtatataatcagcccatggggatcaatgcaatacaatctaatcctgtcacaatacctcctctaacaggaaggagtatacatttgttgtccaatttgaagatcagcagattcacaatgaatcatacaaagttcactgtccttcgaaactaaatgtgtccttaactactacttgtgtggaaatgtgaatagctaagtgactgtgagtgataagaaagtgaagagcaaaaactcacaatgaaagagtaatacgtgaatggagtggctggccagtagtctacaaagtatagacataat

SEQ ID NO: 119040 - DNA, 301 bp, Zea Mays
attatctcgatcaatcttcaaggacatcgagctcgattttgctatgccacagagaatggtgcatgtggacccttcttccttatatgcatgaggtggtctaaagttggctttaacctttagcccaccttacattagagatttggacatcaaaagaaagctaaaacattctaaagcttttagatctctaagtttagaagagggaggcaaacatgccctagaatattggagatcgcagctactgctatcaccaagtaacacactaagatatcgaagaccgcaactgctgctatcaccgtttaaa

SEQ ID NO: 119041 - DNA, 472 bp, Zea Mays
cccgagttaagtaagtatgcgagtcaatcgtaaataagctgagtatctttgtaatctctctttattgatgacacatttccactttacagaatacattgtcgccccagcagttttgaaatacagcctagggataaaactttctaaggtgctctatgttccaggagttcccaacttctgtgccatccatctgagtgaggcgatatgatccgggccgagtgacttctgccactatgaaaggtccttcctataagggtgataacttgtgccgtccctctcccgttagaattcggcggaggacgaggtctcctatcgaaaagaaccgttgccgcacagccttgtcgtgatagcgccttagagtctgctggtaccatgctgattggattactgcattcagtcgctcttcctcaagtacatcaacgtcctccagcctggtggcctcggcttctgctatgctttcgaagattagtcttgg

SEQ ID NO: 119042 - DNA, 574 bp, Zea Mays
gcgcttgaagctctctgctcgaccatcctcttctcctccctatctcttctctgcgtccgagctgtgcgcgggggggctccccaactaattccccacaaatcctccgtgattctcgtggatctacgagtataaaataaacccgaagcctctcctctgcgttcatcgcccattgaattcgcctctaccaccacctcgcggcagcacctccatagccgatggtttctgctgcgtcaacaccggtcgaacagagaggaaaacaaagagaaagagatgcgggtgcagggagccttggaatctgctgcgcgccatgctcatctccctatgaatccgcctggaattcttggtcacgggtgaatgctggggggctatgggagctcgcgcactggcagggtaaacccggagtcatctcgtggacaagaattgttcatcggtgctgcgtcaccatcgccatggcgctccgcatcgacgaccgggatactggtgcccgaacctccggggagaacgcctccgtttggctcgccatgccgcgacaaatacgtatgtggcttcgcctggctggaatcgcgctctgcgc

SEQ ID NO: 119043 - DNA, 356 bp, Zea Mays
ggagggttggagacaaattcagagaatggcctatttggcggtaggttccatgtagaataggctacaggagcaccagcattcgagaccctgcccctcaaaatcatgtccactcgatttagcaaatcttcattgggaatcctcctatttgtaacccgggtggaatcattgatgctgctatataagtaagcgaggtaaattctgtccttcaagggttgaatgtttttgaagacgaagtcagcaaccatagcttcagcagtcagaaccccatctttcagcaggcagatctcagcaagtaatactttggcctctgttatctccgaaaaagtaggagattctacccagctaggtgtgcgaac

SEQ ID NO: 119044 - DNA, 556 bp, Zea Mays
caaaactgagcttgcttcggatgtagcatgtagttgagcggaataaggagaaacaataatctaagaatatatttttgtcttgttactagtgtcacactagagtctgtttgtttttgcatatacagattttaagcaaaaaaaaaaacacgccttgccatttctgattctgctgacttctgctttagaactttgaactagcaaaattgagaatctagaataaaaagatctccatggtatgtcgattaagtggaaacaatcagagcctaggttcagttttctcgctttattatgtaggtccagtttctacttgttgttttattatccttgtctagtcagtagagttgcctagactcctcgccatggatatctgtaattaatcttttcctagcttaaatgagaaggcagagctccaacctgttttctctagaagatatattatttgtatactgatagagccataatgtgtttttttttgaaaatggaaaatatccggcctctgcatccacgcgcaactaatccttacaaggtaatgtgcttatttggttgatatatacct

SEQ ID NO: 119045 - DNA, 894 bp, Zea Mays
ctccaagtaaagctcgagaagatttatagaaaggttctctaaggcatcagaaccgttcaagagatatatgcaggagtaattaaacggataccagatattaaagtgaaagcatgaggtcgtgttgccaaatactttctgaatatcacagaaaattagaatggaaggaaggtaacatgttcttcacgctgatctctattgctatacaaatgtaaattccttgggttttactttccttggtctgcaggttgtctttggacaagtcaaggtccctgagatgtgaacaaatccacggctttccttggtctgacctctatggctatacaagtcaagaaatgcgcttggttcacgaagtccttgaaaactttcttttagcgcacagttcttttgggacaactaagacccattgtaatctgttttgtatccaacatttgtacattccaacttctcaacgctgcaaatatattcatgttgttacctcactcagttgaacaaacggcttggcagcatatttcaccccatctatctactatcttccttctattacttttcttagttttgtttcagttgcatcacttcactcctcaaactgtattccctcatctatgctattggaatttgtcattgcatcaatgtcatatttttgtcagatgccagccagggaagtgatgtatactgcctgaattgaaactattatcaatttagatccctaactgcaacttttgtgcttgctataaaatattaccagactcctctatcaagtatcagtgtcctctcagtagcaaaagacagggccagattataggtcacatcatgacattttttgcataagtacttacacgacaagatattattttgttgcataataataaaaaagttgaacacatcaagtcagaa

SEQ ID NO: 119046 - DNA, 579 bp, Zea Mays
caacattgtcctttcctggcattagggtcgcctcattcccagggaggcgcacattgactttactgctaaaataaccaagcctcttcatagatgctgatttcaatatagcttggcttcgaaggtctgtccttcggcaactttggagcagaccttgatgatgacgaagccctcatggctttagagatgggcatggtatcttgacgtgcctctgaagaggtaggtgtgattagttttgtgaagcaggtttccaaagcaggtgaactggaaattgtctaaaatgacttagccgagaaaattttggtagcaggtagttgagggcagtaaatgtgatccgcacccacccgcttggctatttttatactaagaaatgggcatgggcacgaagcggcgcgagtcgcgaaaaactttcccgtgcgtcaccctcaacttctccccgtctgtttaaattccaaatcacttgtttttattgaatcaatatatcttcttcataacaagctctaggaaggtgtttttgggaccttcggcacaaggcctcccgattatattttttgctatctaagctcgttacgaagaaacgaa

SEQ ID NO: 119047 - DNA, 495 bp, Zea Mays
cattcctctccaccagtatctggtcttgaggtctaggtacatcttggtggtccctgggtggatagagtaggctgagttgtgagcttcgtcaagcagaacttctcgtgcctctccttttggtacacacagacgggttttctgaaccaaaggactccttcttcatctgtcctaaagtccggaagttattctttgcaatctctttctataagacctgttgtctcagtgtctaggcgttgagccttgcgtatgaggtcttctagcattggcttgacttctaggctgccattgtctcccagacatgtattcagttgagctgattctttcttccagtcttccaagaagttggtttctttcttcccgaaaggttttcggctgagggcgtctgttaccacgttggctttcccagggtggtagtggatctcaaggtcataatctttgatcaattctatccatcttcgttgacggaggttgaggtctgactgagtgaaaatgtac

SEQ ID NO: 119048 - DNA, 999 bp, Zea Mays
ctgtacagaatttggacagattcagttactgaatttataaaaagcataactcctaaacgatcagacttatggctatcaaattttaacaccagaaagataataaagttatctaccacttttctatagcacatatctacagaaaacacaatttagttaatcaaacattaaacacaaggaaatcactgagtgcagtccaaaacagcaattaataaatttcagctcttatacaattcaagaattgccgcgttctagatactcgacttattctaacttatatcaaggcacacttaagcatagtcacacaatagattacgtgatggctacgtagtcatgccatcacttcatcccacaatcccaagtaacaaaataactctaatcgaacttggcatttagccgatcgattcctaacccatttttcataccaccgctacacgatatgcctaatacgttaaatggcttgttcacaattcacatacatctttaccaaaatattctcacatcgcttgcaacttaacctaagcttcactacacaatttcaggacatctacttaattcatgaatatcatcgtcacacatatcgactcgatttgaattaaccacacatgtctatcacatgaatggagcatttcaacaaatatcctaaaacaaactaagttcatcacacatcttgcattacaaacctacttgacttatttgaagtgtctactcgaaaccgtgagtaaaatcatacactatatgcgaagcataatttaaggaacgcctaacgcgtatagactcgacttataattatagaggaagtgatgactacttacgtcatgtcatcacctctctacataagccaaaacaatttctactatcgactaagagttctaagtattaaacacacggttactttccatgcgcaaataaatctcaacttaacactagtgacaccgatggatttttactaaactcatcatgcgcataacttgtctcgcatacaaccatatggtggcgtgc

SEQ ID NO: 119049 - DNA, 372 bp, Zea Mays
gtggcacatatggttctcaatacatgtcccctgccttttgggaaagctaagcgaaccaaaagcacttggtacaatgcattagcaacctgatgtgtaaacatcggttctctaagtatcttgccatacacttggatgataacgctttaggaaacgaccatttaatgctttaggtagctcatcaccatgcaaagtctacgcattaacaaggattacctatgtgactctataaggtccttcccagcttggggaccatttgccaaacttctggtccctgctcctcaatggcaagactgttttccagacaagatccccaacttggaatgacttagccttcaccttcttgttatatgctttggcgactatgaccttgtc

SEQ ID NO: 119050 - DNA, 483 bp, Zea Mays
ggtaattccagagccgagagaggacgaagttatcatctttaagagcttcttcagagcagggcttcggttccccctaaatgacatgataggggaggttctaaagaactttgaaatataccttcatcagctgacccccaatgctattgttagacttagcgtcttcatatgggctctccgaagccaatgaatggatgccaatgccgaagctttttgccgggtgcacgagctacactaccagacgaaggctagagcagatggccttcacaagaactttggctgttataattttgcgtatcggaagaatacgaaggccccggttattggctatcacaccaagtggccaaccgggtggactaatgaatggttttacatgaaagctgatgagaagaagagggaaaaactcatgcgtatgataatgagtcccctgaagctgaacttcgacatgactcgacccttgtgcaacatgcagttagggtccccttg

SEQ ID NO: 119051 - DNA, 558 bp, Zea Mays
ccaaacctagtttctttcaaaggtttcaagtttctcatgcatagcatctacctagtttgagtccaaaagtgcatgcccaacatcccgaggctcaaaagaagcaacaagtagaatgagcaaaatggaaaatttggtgtgacataaatcttgtagtccactcatgaagatcaccaatcatctgttgaggtggatggcatcgtcgaatgtgctaaggcacttagctctctaaagtagccttcggtcgatattagcttgctcttatcctggtcctactagcagttcaaatgacaccaatgtagtgcaagtaatggaaaatggtatgtcagccaaagtagtggaagcatgctcaactgggcaatcgatggggatgacttgggaccacacgaatcaacatcttatagctccccctccaagaaaattctctcaccaagctcttttgtcacatgcacactaaaaattagggttgtacaaggtattgtttcatcaaatgtgacctcacagatctccacaatgtagttagtttcaaggttaagtatacaataagctctaggatatagt

SEQ ID NO: 119052 - DNA, 549 bp, Zea Mays
gcgaggacgattgtaataacccaaaattctattttcgagatttaggattttcccaaagaattgtaatagaatagcaatattttttttctcatctttgaaatcacatctcataggataaatatgtttgtcactaaagacggagatgtaatttgaaacttatttaaataattataaatgttcttaaaactaacatattgataagattagtccctaggaatttaattatatcagggttaaaactattttatgttgaggaaaaatgcataataaatactatttttttgaatgagctattaaaaccaatattgaatatgtgtgtgcattacatattaaaaatatctgcataataatggtatgaatatgtttagtcacatgctgggttttccttgtggtggcatctatatttgaattagtaactcatttaaatttaaaatagttgaaatgaatgggaattgaaatagaaaataaaaagaaaagagaaaaacttgtgttgggccggattcctcagttttggcccaactcgccacttagcccaggcgcgctctcggc

SEQ ID NO: 119053 - DNA, 1180 bp, Zea Mays
ctaagactcagattcaccctgcgtggatggcgggttgattgcttaaaattccaggggctctttagcaagtgatacaccgcgaaggggtattttctattctaggccgctcgattagaaatcaacgtcgcggatcactctaacattttaaatgaaccggaacgcaccgtggctcgttggattaaaaacctacgatccagattaaaaacaaccgcgctccatcctcgttcgcacgatcccaaatctatgctcctgatttcattgcgcgaagaggtattcacattctaatctaagccgtccaggaagggatcgacgaccccctacccttcttcaaccccgtcgtcctaccgctctccctctcactcgccaatgcctggacggccagacaaccattggcagcgacagtgcttcaccggcggataccacaccagtgccccgacgacgaaagctaaatgcgaacaagtgtgatgcgtaatgggaaataaagcaagtcagggcggtaagagctcacccacatctgggcagcaacgacgccatccatggtgctcggccgctttggtggttctccgtttttctcccggcaaggcgcgactcttcttccaacatggcgcacacccggattgcccagtactgctgggttccatccacggctacggtcgctcccggctactatggtggcgctgccaaccaacggttcacgctggcgtctatctcctcggtggtggcgtgcactagctcctatgcgtggttatggccgaagggaaacagtcggctgaattatatactcgttggagaggggtgtccgaggtgcttggtcaagcaaacctcatgctgatccggtattcacggagcggtcagcgacaaacgcgtcgaggaagacggctccgaaagtggctcaatcatacccgtatgcgaaaatatttgttgatgcaagcacatgcataccatgcaaaagaatacgtgatcaagtcttaatactgtcggcagggtgaggaaaacggaaacaaaaaaaaaactatgaaaaaaaatgttgcgtcggccaagggcaagttttcccttttattattattattcttgttttctattttttttcttttgttttcttatttcaaatttttgaacctatgttaaattcaaatcagtgctcacatataaatgcaacacacaaatccagtacgtaatg

SEQ ID NO: 119054 - DNA, 500 bp, Zea Mays
taaaaatctattttctaattcatttattcaatttaaaacggcaggggactgggcctcaatttctggaaagtccaggggtctcggggtaaaactcctaagacacagagcaccgcccttgtggatggcgggtttgttccgtaataacagaaggttccttatgcaaaaatgctaggtcgaaggggtatcctaagatatcggtcgcacgatccaatatggacggcacggattagacttggggctgtccgaaccggtaaataattggaaccgtcagatcgcagatgaacgtctgtgatttaaaatgcccccgatcacaccgcgtacgactgatctggatcggacggttagcagtcgcccaagccgaacgggtgagcaacttctaatctacaccgtgcatttagatctaacggcagaggcttcttctcccccctaacgcagacggcgaggacatccctagaatcacacggcggtgcccccgccggacttccgggtttcgacgccct

SEQ ID NO: 119055 - DNA, 317 bp, Zea Mays
gacgaagttggggctatgactggtggttgtggcaaggcccatgtagctggagagtggcttgctgaagctactaaaactgtaggatgtgagaatggctgttgattgcccacatactctgtaatgtatggggaataacacaaagcagtatgcaggacttgtttcggctgattttaccatgcttcggccttagctatctccttttgcttttgtattgtaacttggcatgtcctagttgtgtgccccttatcctctccacggaacaaacaaaatagccttctcggttgtgagttgaatcttcttctgaagcttcgtccccc

SEQ ID NO: 119056 - DNA, 485 bp, Zea Mays
ccactatgccctgctaacggagcaatcggcttaagttggcaacgacttaaggcggtgcaacatgctcgcgcttacttaactcggggtgaccactatgccctgctaacggagcaatcggcttaagtcggcaatgacttaaggcggtgcaacatgctcacgcttacttaactcggggtgaccactatgccctgctaacagagcaatcggcttaagttggcaacgacttaaggcggtgcaacatgctcgcgcttacttaactcggggtgaccactatgccctgctaatggagcaatcgtcttaagtcggcaacgacttaaggcggtgcaacatgctcacgcctacgcaattcagggtgaccactacgccctattaacaaaagcaatcgacttaattcagcagcgacttaaggcgatctgatgtgattacaattactcatataaggatgacctctatatcccgcaaacaaatttcaaaaccatcgcgca

SEQ ID NO: 119057 - DNA, 555 bp, Zea Mays
aacaattgcaccgccgctgcaggggaagatgggagggacaggagagaaggagagggcaaagggaacgtgaggcggcggtggagtactagtccatcaactgcaccgacactatagggaggacgggagggcgcaagggaggaggtgaaacgcgtcgcgacgaagaaagctggctgctaacgcgatgtcatgagtgaatggatggaatcgactgttggagcgtgtggagaaagggcttgcaaagatacagagccgatgaagccgcttccgttttacatgacaagatgggtagtacgatgctaggatgaacaacatcggcgaacacataaaaagggaatggatatccatttacggaacgtagggtggacgaaccaaacattctccttttctatgcgtgtgcatggacattagcaaatctataccactgtataatccaccaatttaaattttacaaaacgcatctaccaaatcaccccacactcataacctctcctagatccaccaaacaaattgcactcacacaaaacacaccttcaaaaccaacggttcagatcggcc

SEQ ID NO: 119058 - DNA, 611 bp, Zea Mays
gcatgcaataacatccattgttttagagtctatataagggaaatagtcttcacaaacaccagtcaccaaggtcaaggtcatcagcgagatagtacccttagttgtgatcatgttcattcaccatgaagttcacatttggcgcttctcccttaagcatgccagtgaacaacgatgatcggttgagcagattgatgtcattgttcgaccccgctaccccaaaaaaacatgccaaattcataagtcatatgaggcaaccacctcgagtatgatggtcgagaatccaatgcccctagtaaactatcattttcatacaatggatagttcctctacttccaatgcatgcaatttatactatatatcatactaggaaaactcctctcccccttagctaaaaagaccgtcaatagtggcatatcgactgtactcctcacaaacacctaaaatgacacctcaactgaatgttaaggcgctaaggccatattttttaccatttgaatatatatactcttcaatagattcggcaacatcagtggcggatccagggtttgaaccaagggttgtcgaggacaaaaacatttagacatgtattaccttgtataactcgttaccac

SEQ ID NO: 119059 - DNA, 306 bp, Zea Mays
ctttctcttgggcgccatctcaactctactggcgaacagagcgggagccgaattgcagagaggatctggaggcaggaaagcaagaactagggcacgaaaagcagaggcggctgaaagcgcagtatatgtgggatattcccgagtcagataccgtttccaaaagcgcccagtcagcacccggcagttacttctaaaaacaccggtgtgccacgttgtcacccggcagctacttctaaaaccctggtgtgccacatcgtcactcggctattatcctcaaagtggccgacacggcccattctaactcgg

SEQ ID NO: 119060 - DNA, 619 bp, Zea Mays
agcgaatgtgacctagcctatcaaactctaggaaatgagatgccaagaacttaatgcatcatgtggtacaaggaatgcaagttacctaatgagggccccttggaactgatgcaaagtgacttgcaaaggaaggaacatgagtttgtttggcattggttcttggctcattgccatttgtgagaggacatgcaccttgcgatccttcaagaaataaggaaaggaacattaaatatattgcatgcagaggagtactaattacatattagtggttgaccctaagggtacaatcagcttgagacggtgatgtactggattcatgtacaacgaagaaactgacttggcaccgtcaaggacttggtatatagctcggtatccaccatgtaaccgcccctcattagactataaaaggaggggtggggcaaccctaagggggagatgagatctcatcaaagaatacaacaccaccccatacatgatgtagagtgttatcttacaacgagagcccaaacccatctaaatctgtgtggctcacatgtctttaccttcatcttttgatctcatgacctaccccataaattcactacagaaagatcctcaacagttggcgtgtctagtaggg

SEQ ID NO: 119061 - DNA, 327 bp, Zea Mays
taacatgttccatcgcaatacaacgatcaacactacattggactatggctctagcatggaccaatataacctcgggtcctagttcatcattcgagtcccatcgattcaccattgagagtgagtctgcgttagcatccatgtcgaacacaaaccttattgtcccctggtttctggaaccacaatattatgtttttctttactatatattataacaaaccgactataaattaattgtttgaggcactaaatcattttaaatgaaaaacttatcaactacaaagttgcataacttttcgagatctataacttttattttggcagtttctt

SEQ ID NO: 119062 - DNA, 656 bp, Zea Mays
gaggatagaagaaacaaagttataattgaaggcttagaggataaaatcaaggaacttgaagcctctttaaaggaaaaaagacatactgctgcaatcagctgaaggctcccttgcagaagcacaatctcagaatagtaagttgagcggggagctagacgaagctcaaacaattttgaacgaaagatcacaacgcttcgaccacgagaccaaggagctcaaagcaaaggtcgtagccgaagctgaaagaaatatgaagctacacgaaactattgagaaccttcggaacaagtgctctgactttgccactcggtgcattaatcggctgaagggaatatttaactcggttggagctacttctgaagagatcgacacttcggtcgaagatatccccggggccttcgatcatattgaaaatgaagttgaagcccttgatgaaattataaccgggcacggagatttctgtgccctggtggcttcacgcggcatagctgcaacatttatgaaggccgggtgcaatcacgccaaaactattaacaagccaaatttcaatctttcaacatcagatctagttgatattctagccgaagcccaaagcataggaaacaaatttattactcaaatttgggcaaagggtgggcgtgaactggccaaggatg

SEQ ID NO: 119063 - DNA, 309 bp, Zea Mays
accttattttaccctgtctcgcatacaaccatattgtggcgtgcactcaagacacttcgatcattgtagcgtaaccctaatatatgaactccgacactcaggtcttaacaatacatcctccacacaactagcattttctaaactactcgtgacatctataaatataccccctatataatcacgaatcccatcccattgcataggatttgcacttaaatctcggcttaactgcacgcctcatactcgtctattagaaaactcttcgcctagccaatacactacactccgcatacgtagaatccacttaac

SEQ ID NO: 119064 - DNA, 1493 bp, Zea Mays
cgatgaaaggatgaaaaggctcggcgtggtcaccacgtccaaggcaaccaatgatataggactgggaaacccctgtgatgtttagtagagagttggaatggtcatagaacatcagttattgagtttcaaatgaccagaatcgaagtaatgggagagaggcaggaatggtttcagacccaatactccaagcaagacatagtgtgcacgatgggttcactaggagccggttaaagagggctctggaattccaacaaagacagagttatggcacgtggttgcactactatctttcacccaggatccatgaacagagggacacggtgtggtggtttaatgtggctttgacagcaattccaatcagctgcgtcaccaccttcaggataagtttcagtctgccacacctcctccgcttgggcggtaaaatgccccacgtaaccccaagcacagcgactggttgaagcagatctttacttgccgagctgagagggtaaaagaatggggctccatttactgacagcacaacaaaccaacagctgagtcaccagtttctagatgagttccagttctgcaccgttttccccctcgtctggacagtaaaaatatcccacatgatcaccccaaaactccctagaaaaactagggaatggaaatatttctgctattgatttctttttactcaagtctgaacatgttcaggtcaatagtaggatcaacttagccttcctttttctcctaagtttatacagcaccaggttcccatggcttaaaggaatttattcacctatacgtgatctcccattttgccacaaaactctcaattcaaaaccacagggatttgctgcacaggaactctaaactgatcattaacactgaaattcagtctatgccagatactatttccagtctgaaaattcagactacactaactgcgctgaacttcttcagttcgactgcagagccagattcatctttcttttgctcccatttcttcatagggacagagctacctccccacatcaaacttgcacactaatatatgttgttcaactctgcttataaagatatggcttaatactccaaggattagtcacaaaatagctccaaaaatttggaaaatcacactggaccaaagctacagttgactgaataaccttcagtcaacgcagactgaaagtccaactttggacagccattacttcacttttggtgtgggatcacgcccaatatacttaaaggcacttattcactaacatatggtcttcaaactttctacaaaaacttcagtccaaaaccttattgattaagcagaacaagctccccaaacagcactcccaacactgatttagaattcagacactgcaaaatctgaaaaatctagaagtctgataacccctattttaagcagctattgctccactttttatgcagtaccaagccaaccttccctaaaggaacttgttcactgatatacactcttcaactttgacacaagg

SEQ ID NO: 119065 - DNA, 391 bp, Zea Mays
tgagtacccaattctctggatcgctaggttctccacatcgcgaagtaggcctcaaagcgaagaatcacatagttaatcgccgttttgcgtggttccggcaaactccacggccacgctggtgggctgcatcatcgtcgtgtggcgaggttgggaaaggcgccgctcgggccgtagatcagaagacgagtggatgagattagacgttagggtaccggttcggctagtttgatcttgaccttaggatctgatcggacaagtcaggatggatccagaataattaaatccacaccgttgactggtgatccgaaggatctcgttgcatacatgttcgtcacgggtgggatctaatcctagcgctcggttttagatcggacgattgggatctcatgag

SEQ ID NO: 119066 - DNA, 359 bp, Zea Mays
acaaggcctcgaaaggtgccatctttagactggactggtagctgttgttataggaaaactctgccaagggaaggcacttgtcccaatttttaccataatgtagtgcacaggctcgcaacatgtcttcgaggatttgattcactctttctatttgaccatctgtctgaggatggtatgctgagcttcttattacctgggttccaagtgacctttgtagctgctcccaaaagcgtgccacaaacagtgctcctctgtcagacacaatggtcttcggaattccatgcaaacgcactatttgatcaacatagatttctgcatatttctctgtcttgtgggtggtatgcactggcaagaaatga

SEQ ID NO: 119067 - DNA, 357 bp, Zea Mays
ctttaaatgccttcggtgggtgttagctagagataacaatatcataatcattgaaactatgttgctttatagttcagttcacaattgttgtttgataatgtatatgtctcacacacagtcctaattggtttgacaacatctattgtcttctcaatcacacctcgcttgatggtcaatctggttaactggatgagcacatataaatgactaccgattgtctaccctcttttattattgtttatttatgtgttcatgttttgtagggcactgttcttgttatggatcagatgggatacaatgctgatcgcacaccattcacgaacatctcaaacaccatcattacaagtaaagcttagt

SEQ ID NO: 119068 - DNA, 271 bp, Zea Mays
cttggacagatcaccttcatcatttggacttagtctttgggcttctccgtgtagatcattggcagatcaaattatccaaatgctcatttgcacaatagaaaattgcctacttaggccatgttattttagctcaaggagtgacaactaatccgacgaaagtggatgaagtttcttcatggcctataccagcaaattgtcgtgtgttatgagggttccttggcttggtatgatattaccgcaagtttgtcagacatttcgcagttatatctaa

SEQ ID NO: 119069 - DNA, 309 bp, Zea Mays
ttaacacggtgcaacatgctcgcgcttacttaactcagggcgaccactatgccctgctaaacagagcaatcggcttaagtcgacaacgacttaagacggtgcaacatgctcgcgcttacttaactcagggcgaccactatgccctgctaaacggagcaatcggcttaagtcgacaacgacttaagacagtgcaacatgctcgcgcttacttaactcggggtgaccactatgccctgctaacggagcaatcggcttaagttggcaacgacttaagacggtgcaacatgctcgcgcttacttaacttagag

SEQ ID NO: 119070 - DNA, 589 bp, Zea Mays
gccaaaggaaactatcagcaagtctgacgaaggtgggctggttaggttgaaatacaccttcagatatgaaggtaagtttattgagccagatgatgattggctgaagtgcatcgaagctacaagcgacgaactgcttggaccatattcaaaagaagaagataacgcgttatttgcggccttcggaggccggaagaagaagaggctgaatagagttttcgatgctattgggtttatgtaccctgattaccgctacccgctgaaagggcagaagagaaaaagtgcaacttctggaaaaggtgatgcttcagttgctctaagtgagcctgcgccaaagaggaaaaaggtgaaggttcttacaaaccgaccacgcttcattcagtgcccgaatttggtggtgagacctctacggctactgaagccaaaggacctgctcttacatagaagaatgtagagccggctatgatgccgaaggctggtaacatcgaagaaatagaggccgagaaaacaaagatattagaagttacaagccctttggcaggaatgacagtgccgaaggcacaaaaagatctcacggcaactcctaagagaa

SEQ ID NO: 119071 - DNA, 272 bp, Zea Mays
tttaaagagagttttgtgaaccgaaatccgtagatggtagagatctgtattacgaatttagtgcttgcaaattgaaataaattgttctggaaagcagaaaaggctgataagctgaaagcttttcagagtgaataccgatccaccaacatggtattgtgtactttgtttcttatcctattattctcttctttccaatcatttatgctcatttctatgtgactattcctccttttgtcgggtgatctttctctgcttataattttgataaccat

SEQ ID NO: 119072 - DNA, 618 bp, Zea Mays
gtggatgggcatgaagctggatacctttgatggcagtggtactccggtcgaggcggcggattgactgacttatgtggaggataagatggacgtctttgagattgtgtatggtgatcgtgtgcgctttggtacacagctactgaagggagaggctcaaatttggcggagaggcgtgcaggcagctcactcctcttcaccaggagtcctgtcctggcatgtttttatcaggcagtttgagaggaggttctacccggtcaccttcctggagaaaatgaagattgatttgcagtcctacaagcaagagaagaattctgtcaccgagtatgaagtgggcttcaataagatggtctgctttgtccctcatgtggcttacaatgagatggagaaggcgagccagttccgtcagagcctgaaaccttctatcaggcatgctctgggcgcctttccgttggttgattttcgtaccacagtggagcaggcattgggtgtggagatgcaacaccagtacaccatggagtcacagaagtcttcgggtgttgatcagcctcgtggtcaggatgcgaggaggggcaacattgggggtccagcccacaagaggggcaagtctcagcaccagcg

SEQ ID NO: 119073 - DNA, 657 bp, Zea Mays
aacatgtatgcgttcatgattggggaagtaaatgcatggtgtttacgaattgtagactggtggtttacgattcgtatgatttggtcggtgtgcgaagatacttgtatatatgtatgtttatgaaaatgttgtagtgtatgttgtgtctcggattgcgacgataataggcaagccaacgtgtatgttaattagcggctatgtcattgctctagttagcaaattgtttgatggtttggttaagctcgtaatcacgatgaattgcttgttgtggtctaaatgtgtatggttatggtcgcgggtaaaaatttgtagtgttcatgtgatgtctaagtgaaaatgcaaattagtgtctgaagggcgcaatcgatatacacatttataccgggtttgattattgtggtgaatacgttgttgatggtgtatggtaattctagcgcacaaaataacttgtataaaattagtaagtctacttgttggttctaatttgattgttttaactctaacatatggtaaagtgttagaatggttcaagtctctagaacgcggcaattcttgaagtaattaggagctgaattttattagttgttgttttgggctgcacgcactgttttcgtcatgctttttctttaacgaaccaaatcatgttttctgtagaaa

SEQ ID NO: 119074 - DNA, 633 bp, Zea Mays
gcgagactctatagtcgaccaggtcctctcctagtaaatcatcctcctcgaagttgtcttcatccataggcattggcgcgtcgttggtggcttcctggtctcacaggtcattggtggcttcctggactcacgggtctgacgatctgcaaatggttcggacgatccagcttctggagtcaggttgtccgtggttcctacagggacctgcacaatagttttttcgtcttctatttttgtgtccacttgagttgcttcatcgacctttggtttccaccttttgtgttggccggtactgctgatgtgtatcattaaatattctttctgcctccttttccttacattattttgctcttaagcactgcaatttgcgctattgagaacgtattagtcctgatgggcaccatcaggtaatggagtactttgggtcaactgttttacttgttgctcctgtgtctgctcccgtgcctttcccctcatctgttttggtcgatttaccaaaaatcatcgacccttcattgttcccttgtatgacgacatctattgtgactatcttgatgatatctccatttgttgttcacttggtgttcgtgaatactttctctccaggccccctgctggattggtcgacctttg

SEQ ID NO: 119075 - DNA, 577 bp, Zea Mays
gcgggttgtggggatgaatctagtaacgctctccccagactatctgagaaccctgctgactcgataaagagccgccctctaccccaagcccctcctgctcctgctcctgtcgacctagcaaccatgatgtatcagcagaatagacttctagaggctctagtgaccactatcactgctcaagctcaaggaaatcaaggcaatcctagacctgtactcatcataatggcaatggcagcgtcattgcggatttccaccgcttgcaaccaccaaagtttgggggatctgacaacccgatcgaggcagatgattggttgtgtgagattgagatgaagcttgaggtcatccatgccgatgacagggacaaggtcttacttgcggtgcagcaattaaggggacaggctcttgcttggtggcaaagttatcgagaggttaatgaagatgtagttgtaatgggttgggctgattttgtcaagatatttcgagagtagcatattcctagcagtatgatgaagcttaagaaagatgagttcagaaagcttcgtcaaggcgccatgtccgtgttagaaaacattcacaa

SEQ ID NO: 119076 - DNA, 866 bp, Zea Mays
agttcaagggcttaaccctacaacatgtggaccgtgccaggaacgaagaggccaacgtgttggctaaggcagcggccagaggcgagaccttgcccaccgacgtgttctaccacgtcattggcacaccagccgtccgcaacccagaaggcttacaagtaaccaacgacaccgagggccatcgcatcgtcaacctcattatgactgaagattggcgggccccaataaccctgtttttgcaaggatattaccacccaagtgacgtcaatgaggccaagcgcctcaaacatcgaagccgggacttcgtactagtcgggggccagctatacaaaaaggggatcagccagcccatgctaaaatgcttgaccgaaaccgaaggcattcaaatccttcgcgaagtccatagcggaacttgcgggtctcactcagggcccagggccctcgctgccaaagtaatccgtcaaggattttactggcccgcgataatctgtgtagcgaatcgagtcacgaggtcctgcgaagcatgccagaagttttccccccgctcgggcaacccctcgcagttcaccaagctgatcgctcacacctggccacttcaacgctgggggctggattttgtcggaccactacccacggctcaagggaaccttagattcaccttcgtcgccgtcgagtacttcaccaagtggatcgaggccaggacagtatccacaataacgtcgaagaccgcccaaaagttcttctggcaaaacattgtttgccgattcggagtcccgtctgagctcatagtcgacaacggcaaacagtttgacagccaggacttcagggatttctgcctctccatcggcaccaagcctgccttcacctcg

SEQ ID NO: 119077 - DNA, 1394 bp, Zea Mays
gtacgctgcgggtcccactctgccaatgatgggataggggcccacgaaacgcggtgctagctttcctttcacttggaaccttctgacaccacgcatcggggagaccttgaggtagacgaagtctccttcctcaaatatgagttctctccgcctgttgtccgcataacttttctgccgactctgagcttcaagtagttttttgcggatcatggcaactttctcttcagcctctttaacaaaggcaggcccttctagtgtcttctcccctacgttggaccacatgagaggggtctggcattttcgtccatacaatgcttcgaacggtgacatcttgatactggcttgatggctgttgttatacgagaactctgcataacgtaaactggactcctagcttctatcaaatgttaacacacaagctcttaataaatcttcgagtaccttgttgaccctttctgtctgaccatctgtctaggggtgataggcaatgctgaagtctagcttggtgcccataactttctgaaggctcatccaaaatttggaggtgaactgggttcctctgtctgacactatcttccttgggatgccgtggagtttgactatctctttaagataaatccgggcgagggtggctcctccaaaggtagttttcactgggatgaagtgggctaccttggtaagacggtctattattacctagatagagtcgttccctttttgcgtccggggtagtccagttacaaaatccatgtctatttcctcccacttccattcaggcactggaaggggttgtagacctgtaggcttctggtgctcgaccttcgttcgctggcaagtgtcacaccggaccacgtattgtgctatctctttcttcatccctctccaccagtatctggttttgaggtctaggtacatcttggtggttcctaggtggatggagtaggctgagttgtgagattcatcgagcaggacttctcgtgcctccccttttggcacacacagacggttcttgaaccaaaggactccttgttcatctgtcttgaggtccggaagttgttctttgcgagctttttccataagtcttgctatctctgagtcgaggcattgagctttgcatatgaggtcttctagcattggtttgacttctaggctgttgttgtttcccaaacatgcattcagctgagctgattccttcttccaatcttctaaaaagttggttccctttatcccgaaaggttttcggctgagggcgtctgctaccacgttggcctttccggggtgataatgaatctcaaggtcataatctttgatcagttccagccatcttctctgacgagatctggctgagtgaagatatacttcagactcttgtgatcggtgaagatgtgacattt

SEQ ID NO: 119078 - DNA, 338 bp, Zea Mays
gtgaataacaggttggagatcagattacgccaaacaggaccaaaccccaaatgtgtcaaaatctccaataaaaacgcccacgagactgagtcgaaagccttggaaatatccagtttcagcagcaaactagagatcttcctcttatgaaggaacttaatcgattgttgcactagcatgaaattgtcgtgaattgaccttcctctgataaaagcactctggttagctgccactaggtcctgaagatatggtcccaaacgattagcgaggatcttagtgaccagcttagcaaaactatgaatcaagctaattggtcgaaaatcaccagctgaggaagcatc

SEQ ID NO: 119079 - DNA, 277 bp, Zea Mays
gtaataacacatggctgaaaagatatgaactaatctggaccgttcgatgaaaggcgaacgtcttggattcaatcgcgttgaagcgttaagtaaactaatcctagccggtcgtgatcggatcaacggtcatgattcacttgaacgaaggggtatgtcacgttctaatcctggccgcccataatcaaatcgacgatcacccatttccccccaaatgccagtagctgagcacggcggcgcaacgacctgagcactaattccaccccgcgcatggtgattc

SEQ ID NO: 119080 - DNA, 561 bp, Zea Mays
actactagaaaaccccccttgtatgtacgttttagttgtagcgcacacaaaagcgtctctacggcggtacataaagacgttatttgaaacaattttaagaacgcatcaaaatgttacggtatttgacacgctttcaacgtgaagagacacctaaacacaatttttaacatgctattaaaatcgtattagaatgacacaaaattagacacgctttcaatcgttagtaacctatagacacgttgcaaaacacgtattaaaatcgtctataggaaccttaagacgctttttgatatgcaatttaaaacatataaaaatgacatagttagacatgctttcaatacgtgactaacatgaagatacgtcataaagcgcatcgaataaccgttcttagccacatagagatgtttttatgtgataacgaaatatctatagttgatatgaaattagatacgcttttaaccgttactacttgaagacacgttttaatgtgtattagcaatttatccttaaccatgtagagatgtttttggtgtaaaatttagaaaatgtaacctaccgagg

SEQ ID NO: 119081 - DNA, 457 bp, Zea Mays
ggaatggatcctccatttaggagcgaattcagcagtgggccaggggtggtcggagtccccatccatttttatggaagaaggggcggaaagaagaaggggagctataatggcaagagagatggaggacgaggagcctcttctaggctctccgacgacttcgtccaccctccacacgggggaagggaaaggagaagacatggttcagttgcacctggacctggacctggacctggaatccctccgagatttgatggagaggtggatccgagccctcctggtcatggtgcacgtgctcttcatcacgtatctggagctccgcgccaagaggtcgaccgtcggcggtgtcaggactgtcaggaagaccatccgatacatccagatgcttatcggcgtggcaacgccgggagctaccggcgaaacagcaagcagccaggaggaggaggtgacactgttcgcc

SEQ ID NO: 119082 - DNA, 575 bp, Zea Mays
gaaagaaagaatatgactctcattgatatggctaggtctatcttaacggaatataatgtatcggattcttattgggctgaggcaataaacaccgcttgtcattcatcaaatagactatattgtcacaagcttttgaagaaagctccctatgaattgctcattgatattaagccaaatatctcatattttagggtattcggttgcaaatgttatattttgagaaagtgaagccggctttctaaatttgagaagaaatgtgatgaagattttcttcttggatattcatcaaatagtaaggcttatagagtcttcaacaaaactcatggtattattgaagaagcatatgatgttgagtttgatgaaacaaatgggtctcaaggtgaaagtgacaatcttgatgatgttggtggaagttaattgaaaaatgtaatgaaaacaatggccattggtgaaataaagccaaatgaagatgatgatgaaaatagtgtgcttgtcattccttcatcttcaactctaaatgaaaaagatcaccaaagccaacaaaatgatgaaattatggatactcatgatcaagg

SEQ ID NO: 119083 - DNA, 319 bp, Zea Mays
ctcagtccacgatacgtgggccgcgcagttactcaccattactcccgcattactcgtacggtaactgcccatcaatgcagcatggattgcggacatcaagactcccggtgattgctcaggcgttactagcattagttactcacataacgtattctttccattatgttcctgggcccacatgtcggggctcagcatccttgtatctgcctcccttaaactataacagggaaggcacacaacgttacaaggacaagctcactcaagttcacacgctcaggcttacatactcaatagaacatacacacagtggacgtagggt

SEQ ID NO: 119084 - DNA, 358 bp, Zea Mays
ctgatgggttcataaattatatgatgggtcagaattctcattttgttagaggaacatcacatgtcacacaattgtatgaatcacatgacaccatcacacaaacatggatattccaatgtcaccgcaactacaggaacacgaagaagatcaggaagaagatattcagccaattgatatgcatgccgaagatgacgacatatacactctggatgatatgctagctgaagatgagttcctggaagactacattgatcacatcggtgacaatttcctagccaatttgcaagccaagccgaagcgttgtcggtttttccgtagacggtacattccaagaccccgtgaaatagcacatctcgat

SEQ ID NO: 119085 - DNA, 857 bp, Zea Mays
ggtgccgatggaactgcagaatgctctgaagtcttggctgtcaaactgtttgccattgtctacggtgagttcggacgggactccgaagcggcagacaatgttttgctagaataatttttggacggtcttcgatgttatcgtggatactgccctagcctcaatccactttgtgaaatattcaacgacgacgaaggtgaacttgaggttcccttgagatgtgggcagtggatcgatgatgtccagcccccaacgttgaagtggccatgtgtgtgcgatgagtttggtgaattgcgaaagggtttcctgagcgaggaaaaaacttttggcatgcttcgcatgacctagtgactcgattggctgtgcagattatcgcgagccagtaaaatccctgacggataaccttggctgcgagggctcttggtccagagtgtgaaccgcacattccactgtggacctcgcggaggatttatatgccttcggtttcggttatgcatttgagcatatgttggctgattccttttttgtacagctgaccctcgactatttcaaagtctctgctcctgtgcttcagtcgtttggcctcattgcggtcggttgggtgatagtggccttgcaggtatagtgtgattggggctctccagtcttcggccatgatgaggttgacaattcggtggccctccatgtcctgagttatttgcaaaccttcgggactacgaacggcgagcgtgtcgatgacgtggtagaacacgtcggaaggcaggccttcgcccttggccgccgctttggccaacgcgtcggcctcttcattcttgttgcggtcgacatgatgtagtgtgaaacccttgaactgcttctcg

SEQ ID NO: 119086 - DNA, 611 bp, Zea Mays
tagaatgttggtgatatagtgtagggaggtaaaggtgcatccgctaacattcctaagacagtgtggtggccactgagggcccgatgctattttcacagtctcaacatgcatttagtattctaggatgacttaggattgagttgtagggttgtatcataccgattaggtggcggctcgatatcagcctaggaaggagggttgtgccaatgatggtgatcttatgggtgcatgtgtaaatgctctatagaattgatcgatctatacaatgtccatggtgattgtgggcctttcctatgtttttcgcttcaatttgactagggagtgtctacccttgggttagatatggattcgacccaagaccattgaggcaaggatgataaggattcatccttgtcgactagagagcatgatggtaaattataagagtgtggtgtgatatgtaggtatgggatggggtggatggatagatgggatgataccttgaggacttatatatatcttgatactaagatatacataggaaaaccatagtcgactacgaggtttttttcttacccttgcataccagtgaccacctagcaagcaaaggatttgatgagaaactgtggccg

SEQ ID NO: 119087 - DNA, 524 bp, Zea Mays
caacaagtgcgtaaaatcgaagtcttcctcaaaagactatccgtgcaaaagtcgcctaagggtgcagccggactagcacaacaagtgcgtaaaatcgaagtcttcctcaaaagactatccgtgcaaaagtcgcccaaaggtgcagccggactagcacaacgagtgcgcaaaatcgaaggcacattacatccgtgcaaaagtcttcgtcgaaaaactatccgcgcaaagaccgactacaggtgcagccgcaccgacataataaacgtgctagaccaagtgcacaacgcccctatggacacggccggatcagcgaaagcacacagcctcatcatacaaattatagttacatacgtacagcgagggcatcacaccttacattggttcaaccttcgggatgatacccatctctctatagttaaacagcattatcctcagctcctcaccctcaaaaagacttcgcaactccccctcacctacactcgccccaaccggcgaggacaacaattcccgcttgccagccctgc

SEQ ID NO: 119088 - DNA, 352 bp, Zea Mays
tcacgatccaccatgttggagttggagcgttcaggggtggcatccttggtaccactacttttaggtttgtccatatttctcttgagctccatccatttaggcacatccttcaagatatgccagcaatgcataagagagaaattgtgtttttcaatagaagcaaaatcagctgctgctgcgatagactacaaaaaccaaggatagaatattagtatactgaataaatattcacaaactatcaatatatgaaccaaaactaagcatctaataacaacatgaacaaaccttgtctgaatctgacattccactaggattggaacgaatcttggcaaccatgtatcctgagaattta

SEQ ID NO: 119089 - DNA, 700 bp, Zea Mays
ttcaagaatattcagccattgaaagacagggcctacccagcttatctgtatcgagggctagccgactcaactcgggttactaacagaagaattccttctgcagacttggtgagtcgactagagatgatccttaggggtaaagtgtcaaatgttggtgctccagtggcgtactcggcctggaacctgcctccttccaaagccttcaccttttttgtgtcgaatccacctgccactgatggcagcttgggtcttagagtgcgaccctctgctgaagaagttagtgtcttggttgcctcgctcggggagattcctgatgatgaacggcaagtccactttgaggtgcccctgaaccctagtgatgcagagataagcgctatgcttgatttgctggccgaggactcttctgacgctgctcctgctggggcgttggtagtggcgcccctcccagaggctgatacaactttggatactcagaagcctaccagtactcgcccgaggcgcccttgccgagccaatcaacctgatccttctgctgatgagcagaaaaagaaaaagagacgcctccggcgagtatccagtttggatcgggacgttggtacatcggttcctgctgctgaagaagtgccggtgactgaatttactgacgctgaccccaatgggtgtacccaatctgctgctgatcccaatgggtgtgcccctt

SEQ ID NO: 119090 - DNA, 426 bp, Zea Mays
gagaaatatactaagaaaaaaggatgagaaaggtaaatggaaagtatgatgtgagagaagttgaagtctaaagaaacctatgatgttcatccttttgatgaaagtgacaaagctcatatcactgtcagtgaagatgatgaagaaattgatgtccttggggaaggagtccttgctaatatagtaagtgggtgtggtccaggccacatggtgcttgtgatctaccaaacatgaatgctaccgagttcgaaaaaattctcatgacctcaattctggtattaggagctctgttataattgaggaaaatagttctcacatggatgctgaaatgcagtacaacatggaggatgttgtgggtacacatgacaatgtgattatgaatacttctcatgatatagttctccaggtgcatgatcatcatctccaaac

SEQ ID NO: 119091 - DNA, 464 bp, Zea Mays
gtgctataaagttggtatcatgttattggagatataattataacctttgctttatcgtgtgccgaacttatcaaaatgttctgtgggtgcaccacgattcttattcataaagtcaagtgcgcatacacaaagcccactaacctaattgtgagattgccattatattgtgatgttaacaacaaccaatctttctcctagatgtacctatagttgtaggccatccatacttccaatatagaaagttgagttaaagataaaccaccaaccatgttcatttgttttgcttgattatcttattttcaaacaactttcattgtactaggtcatagcttaataaaatgacaattaatttgaagcacatttgcattggattttaaatatacattgtgccatatcgaaatttttgggaatactattatttcatcaaatgactttgtagtgtttaagtatatatgaagaaacaa

SEQ ID NO: 119092 - DNA, 357 bp, Zea Mays
gggtaaacccggtagctctagattctgttgtgttttgtgcccaaatgacttcaagaagttggtcagcccatttgccatttttgtcaagaagtctcttctttatagcgctgaaaatcttgccattggcgtgttctagtactctgttggattgtgggtggaacttgccgacacatggtcagactagctcaaacggtgggagaacaaaaacagtttgatgccagcaaacataatgtattagagcaacaatgtttttcttcgtccatcgcaatggtgttgtacggggtatttataggtaaccaagggacaacaccctgtcaaatacgattatgcccctggtgacctatgtatccctagaat

SEQ ID NO: 119093 - DNA, 507 bp, Zea Mays
attaatgtactgcaaataatgtattgttttctaaaacttcaaatactgacgtaaaaagtcaaatagtcagttaaagttaatagagggagttgaatagaggagaatgattggagaggatgtgaaataagagaaaagggatgtatttaaatatgcataaaaggtatgaatagaggatttaagagggggaatggatagattcagcctaatatgctccatacaaactgatgagacatcactcccaaacatacaacgcatgtgcacggtagctgaatctccagaaaccttggagaggaccaacaaggacttgtgaaaggtcaagatatcaaggaggagaagctagaacgttcgcgataagagggagccaagtatgactcaacttcatctccacatcaaagtctaggaccagtcttcactaaaacggacgcccaggatacatccgaacttcgattaggccagattttatatggccggaaagctaagaagataagatttccaacccaactagaa

SEQ ID NO: 119094 - DNA, 280 bp, Zea Mays
ggaagagtgagtcgatgtgagcgtgttcttggaggtgttccacggcggcgaaatggtgttcccgacaccagaacgtggtagcgctccatcggttaggcagatgagcaacgttaacattcgacgtggtaacaaggccagtaacaaggctatctacagcgatctactgcgacgtggtaacaaggccagtagcgtggcatgcccggggtaacggcgatcatcacggcgacggccgcgcggccatatcgctggacaagtgggtatgacgaagatggttctatcc

SEQ ID NO: 119095 - DNA, 680 bp, Zea Mays
cggcgttcggctgcccctgccgcctgcaacccactcagccagcctcggctagttgccctgcagacttctcagtttctcttataacaggtatttgatctgattccttagtagcttagttttcttttttgcttggtggaccgcagccagttaggccctgtttggaaacacaattttgtaaacctatggtttagaaataccgtagtctaacaattgttatgacataatactacagttttactaaaaccaaggtaaaaccaaggtatccctagatactaccacatgtttggagccatgtcacataagtcacaggtttttccgtaaacaagacattgtcaacatctggaccaatcggacatgaagcaaaactagtaaagcgcagaaaaagataatggtgcagtccaacacgcgcaagaaaggaaaaactttggtctggacttcagttttcaataccacagaaataccatggtattgataaaactatggtattcaaaactctgttttctaaagtccaaccaaacagctttgggtttgaaataccatggtatttctatatactatggtattgcatgaaaactatggaataactctgcttccaaacaggcccttaaagtctagatgacaatatcagtatggttgcttatagccactagggtaactgagcacatcaatatcatcatact

SEQ ID NO: 119096 - DNA, 619 bp, Zea Mays
cccgtagtggagttgatgatctgatcgatccgaggtagggggtagggaactttcggacatgctttatttaaaccccgaaggagtttccaacgagggtccggggtgccgtgtggtgcccgcatgcccccgagtggattttgcctcacaattctttgtccctggatgatggggatacatcgctggaggattcccgagggactgcgtcgatacaactctttttcttctctaagtagcacaaaagcttttgcacgctgagccaggcggtgagcctcagccttgccaagagggagctttccttggaggagatactctaggtacggggtccgccagtccgaggctggagtgcccccaccctgctcaccattgatcagcatgacttcaggctcgcctgctgggagcgagtattcgttaggggcaggtatggatgcctccttgggtaccaccgagggtttgtagatgtccctggagaagatatttagggggaccgtggtccatcccgaggctatcttcgccagttcgttggcgacctcgttataccgtcgcgaaatatgattatgttctaggccaaagtacttgtcttccaggcacaaaacttcttcgtagtaggcttccattctag

SEQ ID NO: 119097 - DNA, 288 bp, Zea Mays
cttgatcaactagatcttacaaggtacgatatgggaacatctcgacaaatccagaaatctcttcattgagtccggctagaaatcttgcaatggttgactcaggatcttctctgattccagtccacactaacaacaactccatttccttaaaatattcatcaactgatttccttccttgcttcaataattgcaatcgatttcgaagaccacgttgatagctggaaggaacaaatcgcctcttcatcactcacttcatctcttcccatgtattaatatgtcttagtccca

SEQ ID NO: 119098 - DNA, 516 bp, Zea Mays
ctttgatcgcatggtcacaaaactagagacaagaaacatgaagaaaccaaggtaattagtatgagagttttccaaatttggtgtcttgatgtagaaaaaataaatatatgacaaacatgtttttctacaaggcatggtataataagtcggagtgagtaataaatttcatcatagatttagaaggaagaaatatatcactaaatatgttctttcataatgccaagttaagcaggtggggccgagaaaacaattctagtaaggcttggttgtactaaccccaaactagatacaacagaggaaaaatgaaaaaatgttggtctaccaaatatggcgcatgagccttaaggtggacctagagggaagtagaagaaataaatatataactgaatatgtttttcgcaatgcaaggtaaagtgtagatgtgctctaactaggcttaaattgcagcgacacgttatccatccacaaagcttggttgcacatagaaaaaaggtaaagagaaaaatgtagacgcag

SEQ ID NO: 119099 - DNA, 457 bp, Zea Mays
ctcactgttcatggaaatgcctgttgcacggcctgtttcggaaatggtctcctttaggtggggctcctttagtctatttgcttgttcatttagttgtggacttgccacttctcttttggttgcaatttgattattttgttctgtgcattttcccctggtttggttgttcaattatactattttcttacattctgtgtcttcatgttttgttatgcagtgtgtttactccatattactctgagattgtactctacaacatggctgaacttcagaagaaaaacgaagatggtatcactacactgttttatctccagaagatttacccaggcctgggctttacttctttctattttccatgagcgctgaaaggaatacttggattctctatagtgtaaccttctcttgtgatccttcagttatatctgttttcctgttgtgatgtgtatgtctaacaaac

SEQ ID NO: 119100 - DNA, 383 bp, Zea Mays
gtcggacgcagtgttactagtggatctgatctttagagcacccagattaacattcaaaagcatagctgaagcagaagtaaccaggctggaggacatcgacatactagaggaagaacggctgaatgtggtcattcagtcggctagataccagcagaccatgaggcgctatcacgacaaagcagtgcggcatcgatccttcgcagtgggagatttggtcctccgtcgagtactggcgggagaaggacggcacaaactgtcaccaccatgggaaggaccattcatcgttgcagaggttacccggccaggatcctaccggctcactcaaatggatggcaccgaagtggggaattcatggaatattgagcactcaggaaattatatct

SEQ ID NO: 119101 - DNA, 333 bp, Zea Mays
cttcgaaaaatctagtatgaaacaacgaaagtacccagccaatccaaagaaacttctgacttctgtgaccgaggtaggtgccttccattccatcacttgttaaactttacttggatccatggaaattcccttctctaacaaaatatgccccaaaaattgcacttccttcagccaaaactcgcacttactaaatttagcatacaactaatgttcccttagcacaattcttaggtgctcttcattttcctttttgttctcagagtagaccaatatgtcatcaatgaacataacaatgaagcggtccagttcaggcatacagactgagttcatcaa

SEQ ID NO: 119102 - DNA, 784 bp, Zea Mays
ggccacaataccgaacaactcgtgctctaatatggtctatgccaaattctaaccttggcgatccactgggaatcactaatttaacccgaacgcagctctagagctcagtccacgcacacccgtggagcttgagacaatcccgacgcattcctagtgatctagcgtggtatagcttaattggttgagccgaggagcatcacaagcatgcgagagtgctgaaacacggacaaggagggcgagggaggaactgagagcggctgatcacggtggggtcacacacggtggcgtagacggccaatttggcggaagaacgaaattctccggctatggtggctaatcgaggatgagggttggtgctctggcttcgtaacaatctagcggagctatttgtgcactcaattgatagtatccgtgagcggtggctccgaatttggaagagggaagctggcgaccgaagagaggggtgagtcaccggtgcaaactaccgtggcgttcaccgggaaaaaggttacggctgtcacttgtttatcctccacaacacacgacaacgtggtagaatagcttaaggcgtgtcgtgaccgaggtaaatggtggcacgacgacgacggtcgtgtggccacgtcgccggtgcaagtgggtacggtgaagccggctcaatccattccccctctgatctttttgcgtcctcggtaatatcctccccgagctgagcatgaatcatggtggacaacacggatcacagcgcggatatcatcggtggcgaagttcattgaatctgatcttg

SEQ ID NO: 119103 - DNA, 476 bp, Zea Mays
agtagcaaccctgaaatagtgtgttttactcatctttggacatttgcaacttggaatccataaacattttgataaggaccataatagcaaagatgtagagctactatagtagtataaagttatgtaagggacttagccctagaaccatatggaacacagtgtaaaacatcaccaaagttgggctgtcagactaaaacaatctgaaaattggatgatcagtgacattggatcaattttggagccaagttgtgactaatccagtggagttaaggcttgggtcactgtgacaaggttggagaccatatattggagtacaactttgtcaaaggaaggtaggtgtgttactgcctagagccaggagtaaaagtggctcaaacatgcgttgtgaggcgacttcgaagggagattcagaatgaacagtggtctaaagaagatcgccggtgcagtgcacccgtcgccggtgaactcgcgctggg

SEQ ID NO: 119104 - DNA, 329 bp, Zea Mays
acatgtgtaaacacgatgccgtatcggttttttcagcaaaatattcatcacgaaattgcagatatttgcagatttaacactctggtcctgctctcaattggttttcatataaatggtaccttcaggatccaaacttttgttgagggacactgactgtgattcctttttaacaccttcagtagcattgaaaatgacattcttgaatgcacttctgaagaatagagcttcagaagcatcctgaatgcaaacaagaccattagtaaacatagtacagaaggaagaaacttgtttatcgtgaacctaacgaacagcgatgcccataatcagtg

SEQ ID NO: 119105 - DNA, 444 bp, Zea Mays
acgccatcatggggcgagggtccatcaacaagttagaggcagcaatacacgggctctacctgcgcatgaaaatcccaggccctcagggtgcaatcaccatatatggagatcaataggcggtcaggaacatagaaagagacttcgtccccgaccaacgtaatgtacatttcctcacaacagaatgtgaagacaccagcagtcctcgcacaaacaaaggcaaaaagattaacgcacagctgcagagtgacgagggaatcaagatagtccccctcgacctcatgacccccaagcaaacagttctagttagtgaagacctcctccccgaagaagaagaagaaagacttctctcttgtctcaaacacaacaaggatgtcttcgcatggtctaccctagacctcatcagcgtcagccacactatcattaagcacagtttgggcattgatt

SEQ ID NO: 119106 - DNA, 455 bp, Zea Mays
gcagcaggataaattaacttaggagtacgtacgtgagagagaaattaaaagaaaccccaagcgcagagagagagagcgcgcgcgcgcggcagcttcagccttcagctatagctgcccttttcgtctctcctccccacatcccagaaaccattctttactcccctccaagaaaacaagcaccacacaaaccctaaagaaattcagcgcacgcagcaagcgcgcctctcatcctctccttcctcgccgtctactattttcatcatcaccgccaccacttcctctctcgcgccgccaattattaatattatcggtactgttgtgtagccattatttttactttcgcttatttgctactatactccttactgacatataattagttcttctcctaccctagaaagatggcaggcctggatttgggcacaagctcctacctgcaccaccaccaccaccag

SEQ ID NO: 119107 - DNA, 490 bp, Zea Mays
ttgtagaaaacattagcaatatttgtatctctaaataaatttaatgatactaattacgtacacttcagaagccatgagtctggaaactgggaaaccagcgttcaaagctggagtctgaaaggtaacattctatactattacaagcataccaaatctcagcaaccttggtctgttggataccaggacattgctatgtttgaccttcgcccaacacagcatgcggttgatgacagcttgcgtcttccctcccctttcaagagcactatccacctctgcggaaaagatgtaccgccggagaagaacacttcagaagatgtgtgcaacttctcaatcaccattttgttacgagaataccgaagagccccaagtcaattctttcagcagcttactcattttcatactcatattcaaacttcactctataaacagtataatttatagtacaaaacaatgttttagatagggctggcaaaatgctcgtgactcgtcg

SEQ ID NO: 119108 - DNA, 532 bp, Zea Mays
cacttcaggaatgctctcttgctcccatccccctcattcttctcatccaacctcgatcgtcgttgaaaacggttccactctgccaatcacctcagtaggtgcctcggttctccctggaccgttctacctcaacgacgttctcgtagcccccacatcactcataatctcctttctgttcgtcagttcactactgacaactcctgttccattgagtttgacccctcaggtttctctgtgaaggatctggccaccaggactcccctcacccgttgtgacagctcggggcccctctacacgcttcggccttccaccttcggagcgtctccgcctcctgtcctagtctccaccacctcctccaccacttggcatcgtcgtctcggacatcccggacctgacgtcatgaccaagattaccagtagcctagatcttttacgtagtaggggacattttgagggcctctgtcatgcttgtcagttagaccagcatactcatctcccatttactacttctcgggctaagcaggcttttgacc

SEQ ID NO: 119109 - DNA, 355 bp, Zea Mays
tggcttataagcttgatttaccctccgactccaagattcatccaattattcatgctgaaaccgtgcaagatcctcggtcaccaccaggaggaatctgagagtgactgagtggttgccagttgaggctaacgattctagcatgatcacaatagattccatggttcattctcatctgaaggttctgtggacatggaaagaagtttattcgcctgtgttgacagttcatgaccgctccagtttggggacaacctagatttgaagaggtgatagtaattttcaccggcatgagaatgcagaggaagacactgaagaggtgtacacgagaagaagtgaagacgcgcgggagcaaggtttt

SEQ ID NO: 119110 - DNA, 281 bp, Zea Mays
ctgaagttcaacttcgtaccaatgttttcatgaaggcgctttcaaaaccttgaggtcaattgggatccacgatcagaaacaatcttcttcaataccccgtgtaaacacacaattcgagccatgtatagctctgccagctgagaacccttataagtagtattgactggaatgaagtgagccactttggtcaatctgtccacgatcacccatatataatcataacccttcgaggtgcgaggcaacccggtaatgaaatccataccaatgtctttccacttcca

SEQ ID NO: 119111 - DNA, 365 bp, Zea Mays
ctcaattggtatcttatcattgcttaatcattctttgggtaacttatcatttgagatatcctccatgattaactcttggtgtgttcgtgaataaacctgcatcccgttgtgagttatgctatatggttttatgattactctatgtgaaaatatgacatattgcttagtttatatgatgaccctattgtggcactatgtgttatgtctctaatgcattctctcgagctatgaagtgcataaataatagggaactttcagttggtttgtggtaataactgatgctctcatggccatactggtaaaaggcaaaggtatggaaaatggaactgtgcaattttattgaatatcttgaagttccattgatt

SEQ ID NO: 119112 - DNA, 413 bp, Zea Mays
gtgatgtatggacatcccctgtaatcagcatttctggctataagtattatttactcgttctcgatgacttctcgcactatttgtggacttttcccttatgtcagaagtcggacacctttcccaccctgtctcacttcttcgattgggtctccactcggttcggtcacaccatccggagtatccagtgtgacaacgggcgggagttttataacaatacatcccgtgactttttttctctctcacggtgtccacctccgtgtgtcgtgtccctacatgtctcctcagaacggtagggttgagcgcatgattcacatagcgaacgatgtcatgcgctctctgctctttcaggcctcccttcctgctcactattgggctgaggccctcaccactgccacctacctcttcaatcgtct

SEQ ID NO: 119113 - DNA, 301 bp, Zea Mays
ttcatacttgcatggaactgtgaactcagaaagccaagaatggtctatttttagagtcccaagagtgatatatttgctaaatgtacttagctagtgcaacaaatactaaaccgagaactaaaaactacctttgtaaaaccttaaaacataacatcgcaagtggtgtgtggttgcaatgtgcattaaatatcagtgagaaaggctagtcaagccgaagacagaaaacactgaccagcaaggccaaaggtgatcaatggttgacctgccacattcagattacaatacgatagttttcattaac

SEQ ID NO: 119114 - DNA, 351 bp, Zea Mays
ttggtgacacctttaggtacacgtgatcaccctcttcaaattctagtggtcttctccggtaatcagcatagctcttttgtcgggtctgtgctaccctcatgttctcccggatcatacagacttgttcttccgcgtcttgaataatctcaggcccaaagaactgtctttctccagtttgatcctagtagagaggagtcctgcactttctgccatataaagcttcaaatggtgacatcttcagactggcctggtaactattattataagagaactcagcatatggtagactcttgtcccaactgcctccatgcttaagggcacaagctctcaacatatcatcaagtacttggt

SEQ ID NO: 119115 - DNA, 359 bp, Zea Mays
cttctagcttctctatatagggaagaatacattaaagttagtggcttggacaatgcaaaggagatatggtacatcctcaagatcgcccatgaggggaacactatggcgatgatcacaaagatggaactcattgaaggtgaacttgggaggttcaccatgaagagttgtgaagagccaaataaaacgtacaacatgctcaagaccctggtgaacgaaatctgcaactatggaagcacaagatgaacaaatcatgacgtcatgcgcctaatgctaaggccatttaccgttcttgatcctaaccttatgaacttgatttgagagaaccccagatacaccaagatgatgccccgaggtaatcc

SEQ ID NO: 119116 - DNA, 360 bp, Zea Mays
aatcttctcggctaggttagaaataaaacttcacaaataatttatcttgccgagaaacttctgcacttcgaccttacaggttggaggtcccacattttgaatagatttgattcgttcagggtctatctctataccatgttcatgaatgatgaatcctaaaaacttactagccgacactccaaaagcacatttacgtgggttcattttcagaccataccgacacattttatcaaaggctttgcgtaaatcagctatatgagagctaaactcagccgatttgactacaatatcatcgatgtagacttccacagtgtttcctaacagctcgtgaaagatcaaattcatagccctttgataagt

SEQ ID NO: 119117 - DNA, 621 bp, Zea Mays
aactgcactacttttgctgaagtcagagaggcgattggtttgtactctatccactttgtaaacttgtcgatagcggcgagcatgtgagtatatcctccttgagcctttttgaacggcccgatcatttctaggccctagcatgcaaagggccagattacaatgatagtttgcagatgttgggcgggaactggcacgcttcgcacttctggaccaggtctgttgcatccctcttcattgttggccaataaaaaccagacccgaaagcctttcctaccaatgtttttgatgctgcatgtattctgcattgccctacgtggatttcatccagcagctgcctccctgtagccgagtgaatacatttcataaggacccctgtcgcacctcttctatagagaaggccccctatgatggtatagtgagaagactgccttgcaatgcgctccgtgacaaccttgtcatctggttcttccttattttttatgtacctgataattgactctctccagtcgttgggatctacctctgtctcgtctaccgcgttgcattcttcagcatgtcttgttgcgatgcttggccactgcacctcctggacaaaaactccgggcgaaacctgggcccgac

SEQ ID NO: 119118 - DNA, 616 bp, Zea Mays
gggagcaccacttgcgtgtggagaaggcccatgtctatcaatgaatttatctagccaagagcttggtgctcatgtgtactacccttgcatggagctctaatgaggattagtaagaatcatgtgtgcttcttgatacctcggtaaaaatcttgacatgtcaacgggagtttgcatcactatcacaattaagcttctacatttacattcttacctttgattgcatgctttacctttcatagcttagttacaggctagttggtagggctagaacctaggttgcataacttcctttttggtagagatagcaatacttagacaaaaccttagttgcatatatcaatacttggttatttgtacaaattttgtttaagataaaaaatagaggcctagattagcatgaacaataattgtcctaatttaccccctcttaggtgttcatgttccttttagatggctcttggtgcttcaacatggactagtggattatgacaacaatctgataccatggtatgaaatttgtttttttatttaacctcatgactagaggaatgcttagtgaccgaaagcatacctttgtgaaactctaacatgaacaagggattgctcttcgacaatc

SEQ ID NO: 119119 - DNA, 723 bp, Zea Mays
gcagaaccgtgcaccaacactattgtggacgcctacactactgtcttaagaagcagtatagatatatttcactatataatctatcagtttaaattttacaaaaccttcccaaccaaattaccacacacataacattcattaaatccaccaaacaaattgtatctagacttagcacaccatgaaaaccaatggcttaaatcgctagataaccctctctcccttaatcacttaaatctaatgaacgatattatttggatcatccttcatccctccccactccatcatctccccgcgccccctacacctcactcgcgtcgccgtcgccgccgttaatttctcgtctcattgggatcgtagcgttagcacgagctatatgttattatatacaaatgcgggagcaacctagctcaaccaagacgtctacatcgttgttttctccttcaccgtcctatcagacatcaccgacacactgcgggaaagctcggttgtctgataaaaccaaaattaaaaaatagttgttgccaagaatcaaacatgggacatccgtgtaatcgttcttattactcagctcaaccaagacgtccacgtcgttgttttctccttcaatatccgaccagaacatcaccggcgcgcagcaagggagctgagttgtccgataaaaccaattttcttttaagaaaatagcggttgctaagaatcaaacctggtgtaacagatggaatt

SEQ ID NO: 119120 - DNA, 1041 bp, Zea Mays
aaattatattgctttgttatttctgtaatttgtaggataatgcttggttgtataattcaaaggatgtggttgatagaactggcaggaaggcaaagcagttttgggcagtaatgggcagctgttactagcacatacactaccaccacagaaaatagtcgtaagaggaactggaaccagatgatattatataggggacaaataaaccattataagcggtttccatggatgttgggtacaaacctgtagagtgtggtaaagtgggatgagtgacaaccaggttattgacaaagtattagaggtttatgccattcaaaataatggtgagtccttcactctactgcacatgtgttaaggtagtacgtgatcaaaagtggtcaacagatctgaataggttgaataacgaaaagaaaaagagctcaaaggataacccagctcaagttgtcaatatggaagtagaccgataaaagcgacgtatgggacataagagagtaaaaaatgagtgtaatgacaaagggaggcagctgatactttgtctgattttagtgcaaaacctgagtacattgaagtaagcacgaaaaataggacagacagagagaatatgactgaaattcagcaaacttcggtgataagaagattgaagcagctcatgaataaactaagtgcaaaacgctagaaactgacacccaactattgcttgcatctatcgattggattactgcagatgctttggctgatgggaaacaaagcactggagagcctgagacttgctttgtttcctaacacttaatccttctttggtttcttattaaattgttgggaacggttaatagatggatctgtaaattttttggaaattgattctacagtagcaagtatgtgcatataaatgtgaccatgcaagtaatatctataaggtaactgaaatccttttaattcttgtttataatgttattttccgtcttcaaactgaaactatttagtttgtgtgattagtgttatttccaccattttttgtgaaaatggaaattatttagttgtgat

SEQ ID NO: 119121 - DNA, 415 bp, Zea Mays
acaaggtcgtatcatcgtgggccaagcaaagactacaattgaaatgggtcagcccaagaaggcaatgggctcgcgcctggattgtccgtagattatgcctaatcttaagggaaccgtccatctttcccacgttcggtgctctcgaaggccggagataggttgggatgaagtgattgagtctttccttaagataagctaggttagttcgctattaattaggagatatgctggaagaatgtgatcatcgtgtgcttgggagtgtcccatggtcgtgtatataaggcctaggtgggaccccatcattttcatctcattaacacctctccatttaggagacgccacttgtaacactccacgcatacagagccaccccaggaagtagggtattacacaacagcattgtgcacgattttcg

SEQ ID NO: 119122 - DNA, 375 bp, Zea Mays
gtcccaaacgctcaaacacgccttctcaacggcgcccgtcctctagctatcaccttcgatgccccctttatcgtcgtctttgatgcttctgggatggggttcagcactatccttcaccggggcatgggacccttggccttcttcatccccctttgcgacgcgccatttgaagctggcggcctacgagcggtaactaatcagcttggtggagatggtgcggtgccagcgactgtatctatgtggttgccgcttccctcgtccgcatggacgactaaagcttgaagttcatcctttaccaacgactgtcgaccattctgtagcaacactgggtcgacaagctgtttggtttcaattttactattgaacactatcccg

SEQ ID NO: 119123 - DNA, 405 bp, Zea Mays
gaacaaagaggtaacactccacatgactttagcaaaggacaagggaaaagtcgagcagaagcctgagcaagacaagggccagaaatgtcgctacaatcgttggatcaaagcggtcaaacgtgggactcggctgcgccaacataataagttgcctatcctgaatgagacaagaggctacacatggtcctcatagacgaaggaaggagtcttaatatcatcttcactaaaaccctcaggaagatgggattattcgagaaggctttgaggccgagtccaatctccttctatggtatcatccctgaccagtctaccatgtcgttgggacagatagttctgcttgttaccttttgtatcgaacccaatttatgcactcagtccttacactttgaggtagctgacaataac

SEQ ID NO: 119124 - DNA, 344 bp, Zea Mays
aagcgacctcgctcacccactcaagagagacagcaggtaagaccgattggaccacctcaccaatcagaaagaatgacaggtcataatgtccaattacgacccaatatacctgcatggacacctccacccccatatccacctatgccatatcaatatacatacatgccactgtcatatgtctccaatcaaatgtgggcatgccaccatactcatttgggatgccccaataccccgcttgaggggcaccccaaacatctatattcaacagggtggcacctccagtacaagaccgattgggcaccactcaatccagtcatcaggcatagacccagcgagattgccgg

SEQ ID NO: 119125 - DNA, 729 bp, Zea Mays
cgggtatatgagagcactcaaacgagggagaaggcgacatgagctgacctgaacggtgctggccacgacgagctcggttcttgcggtgcggctgaccgatttgggggaaaacagcgattctccagctgggggggctaatcggggatggcagtggttgctatagcttcgcaatttggagacggaggttggagctcggttgatttgagcgaagggagcgaggatgtggtgaatttatagccgcggtgagtcacacctgcggccatggtgataaccatcgccggtcttagctagcgatcaacggcgacgtcaagtgctacccttttcttacgacttgccacgtctctgctgtgacagtaatatggccgaatcgatatggcatggaagaatgacggtgaacggcgtcgatgatcggacacggcctagaggagggatggtcgtgaggcagccggagttagtgccctccaccacggcggtcttacccggagcaaaaagatcttcgcacggacatgctcaccacctgatcatcccgatcccgacgcagatcacggcgcggacaggtcgtcggcggcgaggaactgtcgtgctggcagtctaatccacatgggacactgtaccatggcgaatgctcttcagtcggtctgacagacagagtttgggcctcattttctctcaaatttctgtggcaacacatccagatctctgcagcaatattatagtgctataaactag

SEQ ID NO: 119126 - DNA, 555 bp, Zea Mays
taaaaacaaacttaattacaaccagttctacaagtatacatagaacatatggataatgtattttcatataaaaagtaatctttgtgttcttgtacatcagcatgaaatattttttatatctatacaattgaattaacatttgagaagtcccgaaacttttgaaaaaataatgcaacaaatggagaggtccaatgtactgtgaaaaggagaattgttgatgtaggtgcttctatcctactcggctgcatcagatggtcggcgtcaaccctagcagcaaggcggatgtagagcgtttccccatctccactagaagaagcatcagactgttgtttcacgttgtacagtttcccacgccttgccttgtcctagcatcagcgaccctgccttgccctagcacctagcaccggcgaccttgccgtgccgatgactaaaccctatcgagcagctagccggcgtcaaccctagcaaccagagcaacagtttgggatcatacctggcctggcgatcagcaagtgcgcgtctccctagcgaccgtggcgatccgcttcctggcga

SEQ ID NO: 119127 - DNA, 358 bp, Zea Mays
tctggtgagttcattcgaatcggtcgtgactcaagcgggcacggcggtcggagtgaaacagcggctcaagttcatccacaaggtgatatttactaccctgagcaactagtagttctcagttgagcacgaatcgtagcgtctggcgtgaatccgagcacgtggtcgccggcggcgagatgaactgattctgatcctatccagttactgtaccattagaaccgttcatcagagcgcctgatagagtagattaaaggctttggttctccaatttttgcatgacaacttgataagccttctgcaataaagttgttaacctatgtacagactttaatttgatcatagagactttggtaattcc

SEQ ID NO: 119128 - DNA, 621 bp, Zea Mays
atcatggagaatcatgggaattccctccccccacggtcaggaagacaggcggatgttcgcactccgagctggaccgaatcccccacagaccaggaggtggctgaggcaagggctctattagcagaagttggattgttgaaagaaaggggtttgactgcagaagctgtggtcattgactttttttcaagaacattcagccattgaaagacagagcatatccggcctatctgtaccgaggcttggctgattcaacccgggtgaccaacagaagaattcctactgtggacttggtgaaccggctcgagatgatactcagaggcaaggtgtcgaacatcgacactcctgttgcatactcggcctggaatttgcctccctcccaggcctttatcagtttcgtgtcaaatcctcctgctgatgatagcggtttgggccttagagtacgaccctctctcgaagaagaagttagtgctttggttgcctcactcggagagattcctgacgacgagaggcaggttcattctgaggtgcctttgaatccaagtgacgcggagataagtgccatgctggatatgttagctgaagattcttctgatgcagtccctactgaaacactggcggtag

SEQ ID NO: 119129 - DNA, 387 bp, Zea Mays
tgagccccatttgctacttgcaccgtcaagggtcgttgcagaggagtaaggccatggacatgagctgccacttgagcacttaaaaaggagtgggaactccctgaatccagtaagactaatagctccataccctgaatttgaccgatgaactgaactgtttttggggcagcgacaccctccacttctgcctgggataaacagattgcattcagttattcagaagagctctcatcctcattgattggaagttggaagagttgccagagttcatccacaacatgtaattgaactgagtctgcacaacgatggcctctggtatacggtagcccacacttgtaacataaccccttggccttacgataagccatcaagggcgcgagcttatca

SEQ ID NO: 119130 - DNA, 579 bp, Zea Mays
aaatgacttatgttgcatctgttcatgcaagccacgtctcctacgtataggtaatcaaacagtggctcacataaaatcaacgcacacgttgacacagaataaaatgatacgggcaaccaatcaagcagtatctgtctcctctctgtcctctattggattatttatttcctccctagcttggtgcataaaatgactctcgactctcgtccacatcatgcatatctgacagaaaaggttgtaggtttatctgtctttcatgttgtttacaggccttcgaagtatataagcaactgactatccttttgtttggttactcaccttgatctaaaaaggatgaaaaattgatctgtgagataagtttaccattttagtcatatttttatgaaatatattagtcaataataacatattatggtgggaattttcagttcatgttgccgcatggacactccgatattttgttacagttattatggccccgtttggttctattaatcatagaactaaagtttagtttagagactaaactttagtctctaccatgtttcgttgtacatactaattatattttaaatacat

SEQ ID NO: 119131 - DNA, 404 bp, Zea Mays
atcattttctaagagaacgagtttctagaagattactcgatattgactttgttccttctagcgaccaaattgcagatggttttacgaaaccattgcctgcaagacagttggagaacttcaagcacaatctcaacctcgctcggttaagattgagggagggtgttagataaaatagtttggttgttatctatgtaaatccatgtaaacagtaacaacctgagataagtatgccacaagataagccttcgcatgttagtttagatttagttgctgggctatctttggccatgcattccggtggttgcagattgcaatccttggcgcatttgtcgtctatatataacactgtcggcgttttggacccacgaggaccctcaaccgactagtgaatttgacgctgcgtg

SEQ ID NO: 119132 - DNA, 455 bp, Zea Mays
gaggagagggcgccatgaggagaggaagaggcggccgacagattcaaggccattgatggcgggagttacagagaggagagtaaatggggaagaggaaagggaggtatttaggctagatttacgctcctttgatgactggttaagcgctgctttaatcattcgggaagcagcaaccgttatggtggcggaggtgctgttgcgagtgagagaaggggaggggaagaggtcacgacatcagtggagggcggaggggaaggggaacaacatccatggggctcctccactggagcaagcgaagaggtgacgaggagtcgaggagtcggcggttgcgctttagagaggaaacggtggcggcactgtgtcaacctgagatagggatgaaaactggatgggtacctgggacgggtaccggatatgggtatgaaaataggacaacttttcggatacagatacgg

SEQ ID NO: 119133 - DNA, 360 bp, Zea Mays
ctatgagcgagccgcatgtctatgatataggtcatgagtggggctctagtctgggtacacaggtcatgagtggaaggagaactgattctctaccgcagctcggtgctaggcatatttaatatagttggtcattaatgatggggcaatccatgggttcaggtgcggaattcactcgagtggcctccttacaattcacttgacccctccttctgcctccgcctcaccggcaggctcaatgccccgggatcattcgggaccgggtccttctgggatagactcttcctccgtcttccctctgactcgtgggccctatggacccagggatctaatccccgacacaaccatttcacctaaatagct

SEQ ID NO: 119134 - DNA, 381 bp, Zea Mays
gacatttggagttagccttaaggccccgttcgtttgttcggtattgaggacaaacatgtttttgttcctggggcaaatagggtggatccggatggttcacgcaacactggtcaggaaagaatctggccctagaataaaaactggtgcttcactgaagcctgttcacttcggtaggattgttgctacccagttttggccagcatagctgctgcctagtcccagtttcgacgagaatagctgctcagctttgtttccaatgcacttgcgcatacatacacatattaacaactaaaaaacaatgttgtacatatatacaaagaaacatatagtaataacaaaagacctgcaattattcacccatactcgccaagaaacagttac

SEQ ID NO: 119135 - DNA, 459 bp, Zea Mays
tcatggatttgggggccatgttttgccatcgctcttgccttatgcttcgtgtgtttggtgactcgagttttgtggtttggttggtcttggtagaggtggttgttgtgttttaggaagggagtggaagaagtttcggcatgctttaaagcagaaggatccctgtagctagagaggggtttatcaatcggcttatactccttcttactagggacctatctgtgccccctagtggctataagtaatgccgcaccaatgttgtgaattgtgaagtgactgtttttctctattattggtctatatggctgcggtgcttttatgtgactagtctatttttatacctattccttccttcgacatgcttctcctcttttcatgaccgaagctactaattttgtttggatgtgtagggttacatttataaggccaactttagattcaacgaaaataacactatttcac

SEQ ID NO: 119136 - DNA, 472 bp, Zea Mays
tcatttttaacataaaaccactcctccatccaggcctcgggccatatttttcggtatgttggcaccaggtaacttgcattagagcgggcaatgaacccgtagcagccgaagttgttgtggtactgttctttgccaatagcctttgtctcgtataaaagctcgtgcatactgcagaagcacttcacgctcggctccagcccctggcttcttacagcctagacaaacatctccatcctaattatagctttggggtaatatgatgaagaaaaatctgaaaaatctttaatacctcaaccacaaatttgctcagtgggaaccagagacctgctttcaggaagcttcggtaataacaactttgttttcctcaggagcagggacagtgttgtctcctccaaccctcacaatagacatatcgtggaaatatctccccctcatggcgtcaatatgactttgtttgatgctcgatttcccg

SEQ ID NO: 119137 - DNA, 314 bp, Zea Mays
cgaaacggaactgcattgagccattgacagcgacccccactgcaagcagtcgccgttgcccgttggcaacacggccattgatggatggatccgtgatcgtttgtttatctatcacgccgtacgctcgactcgatggtgatctgtattgttttcgctcggtcgggtgctgcggtatgatcgcgtcgtacggacgggactggaggacacgagagcgaggcgatatccaatcagcaagcgaaacgtctttcgtccctctgggcaatatccgggcgaaggggggcaccagtatagtatccactcctgacagccacacc

SEQ ID NO: 119138 - DNA, 896 bp, Zea Mays
cgggccaactggtcttgtcctgcgtagccatgatcacgtactatccttatcttttctctcttttgaaactgttataatatcaataagaatcaataatcgagcaatgttagtgtaatgaatagaaacataatatgttgttttgtgctaatgctatcatactttcatagtaagcatatgtcttaatcgaatgcactacataactaccgagctgcaaacagtctattaaaatgttaaaaagatacttttttcaaagcaattactaacaaagaaatacatgataacctgcagagaagaacacagtagcctctggcgatgatacatgctctatgtataggtgtatatatataaaatgacatttgtattgttgcttggatgttgttggtgaaaacaatgcaaatattttgtccatcattaattaagaaacacgatcatattgctcttttgctgccaataacggtagttattgaccataacaatgcatgctttgacttagtaaacaacatcatatctccttgttcatagggggacagctgaatgtccatactgtacacggcccgtgactcaaacattatacatgtaatccaaacgaaacataaaaaagccctagaaatagtgctaacccgctaattcatgtcgttgttgtccagctaaaatttttgaccccacatgcatcgttttctaacctcactcaaatctaacagatgccagactttaatggtttctcatgttttgttgtttttgtttttttaatatatttaaatgcctcacatggccatgcactggaaccagattcttagctaaggtgtatgttgcttactatggtgtatgttgcttactactatctgcggtgttaaattcgtctgtaagatcttaaattgtatacaaatattatgccg

SEQ ID NO: 119139 - DNA, 743 bp, Zea Mays
atttgatgttcgactcatatacaaatattacatttcctagtacataagaagttagtcttccttcagtatcctctcggcggcttcatgtaaaagtttgtcgacgacttcgtcaacaactttgttagcaatcttcattacatctaaagcctctttcgttattggatcaacttcagggttgtatggctctgctgggagagagaggccggctgtaataaatatatgatggtaaattttgaaggtaaaaatgaacaacaagacaaaaagtttcaaataaaaattacctataatgatggcgcgttcggcagcttcctcagcttgcttagcttcctcacgggcatcgtgagattctttttcactcttctttatggcttcgtcagccatctcacgaccacccttcatccacacatcagagtagaatttgtcgcccaatgtagaagcctcagctgaagggtccttagtattgttagctaagagaatagattctggctgggctgcggccttgacatgttcacacccagccttttttagaattgccacaacccctcgggcaccagaaaaaggacaaaaatctccacgatcgctaaggatctcatcgaaagctttagcttcttcacctatccattggataagtccttcggggtcgccgcgaataaatttttgttctaaagaatacgcccccaccttcgcaaagctatcttttagcttcttcgcacaatccatggatctttcatagcacctctccc

SEQ ID NO: 119140 - DNA, 407 bp, Zea Mays
ttgagatatcacgaaaatacctccccctcattgcatcgatctgcccttgtttaatagttgattttccgaagacaacatgacttggtctccatggccgatcttcggcatcttcatttccactttccacatcgaagctttcactattgctagagtttttagaaatcctagctaacatctcattggtgatcttctccacgttggttttttccatggcttcgtaaaacccggtcagcactagatcaacgatcttcttctcatcagccatttggacaatggttgctagaatgccaaagctcaaaattcaattaaactcgaggtagtagggaaggttaaaatggcaaacacaatgcaagcagctaaaatagcacaaaaaatactcacgacataggcttctatttatatgctca

SEQ ID NO: 119141 - DNA, 467 bp, Zea Mays
gcgtgttattttgcttcttttttcgagtacacttcctagttctttaactttatacttgttttgcattagatggggaagtctggcaaagtgattgcaaagtgggacacaaaagcaacaaaggtttacatagaaatttgtgtagaagaggtcaatgcaggcaacatgtcgcataactttctaaatgcaaaagggtatgctaacctcattaggaagtttaaggaacgcactggccgcacgtacaccagggagcaaataaagaataggtgggactctttaaagagaatgtacacgcaatggaaaacacttaatcaatgggcaacaggtcttggttgagaccctcatactagatcaatcagtgcaccagatgagtgctgggctaagcaaaatgaagtaagtagccttttgtttttttgtagtttaggaatactgatcggcatctgaaagtaggaaattccattttactgcag

SEQ ID NO: 119142 - DNA, 582 bp, Zea Mays
gaaaaggggagcgtcgtgcctggctgggtgagtgagtgtctgagtgacagagtgagagactgagagccagccacgcgaagcaaagcgccacttgtccttcctgcgagcgaggtggtaaactttactctaaccaggtgacatacgtggcgcgggggcagccagtttcgttttcagcacggcaacagtacctttctaacgtctctgtctgggaagagaaagagtcagagagagagccgatcacgttatctccatttgccggccatcacagaattcgcgaaaagacgtgcgtcagaacgtgtaggagatgctctttcgttcgaggagagggggaagctgatctgataagcacggtagtagtactagcagacgtgcacggtaataataagctgaagacaactactccctccgtccggttgaattaggcgctctagcccaaacagtatgtccaatgaatttgtcgttttacctccgtcacgccgttcgcactgccgccgccgctgcgtcgttcctcatgcgccacatattctcgttcacaccctgattgcgcaccataaaggaagccaaatcccatttcgatctaca

SEQ ID NO: 119143 - DNA, 344 bp, Zea Mays
tcgtgatctcgtcagcgaatttcaaaaaaaaaagaatgaacagacaaagaaatcgaacaaaacgcacggaggaatctcacgccatggaaacctgggatccgctaaaacaacgtgcagactacacccgcgtgtattgtaggcacattcacctcctaaatcacccatggaaaacagaaaaccgcacaaaacgaacgggctaaccaaaaaactccacaacgggtgcaaactaggagcaaaaaaaggacgggggagagggaaagtcgcaggaccagaaaccgaggcgccagcatccagctgcggaggttgagagaagggacagcggggcgcaccaacctggattcaca

SEQ ID NO: 119144 - DNA, 529 bp, Zea Mays
cgagctgataatgatttcgccaaagaagggaggaagcatataggtattcggagttgactaggtgcttcagaggaagactccatcccaggcatgttaggacgatccacaatcccaatgccaaagatgatagggccaataatgctcagagcagtcagcacaactcacagtcctcgggcatgaagcaaacttcttacagaccaccagccccgagaggcagaggggggagaagctttggcggaggaaggtatggtagtcagcctaagaaattgttctgcctgttctgtggcgaagacaagggacacacaatgagggcgtgccaagtcacgatccaaaagcagaaggaaattgctgaagccgaagcacgacagaatcagccgaagtaagtcctgcatactgcttcgtgctactcttcgtacatcccgaagtatgtaggcaatcaacagcctacggcttctgctgctttagcaagtcactctcaagcttcctgggctcagttaccaccacccccaccactggcgcctgccccaag

SEQ ID NO: 119145 - DNA, 716 bp, Zea Mays
cgagcgccttaagaacactggaatagagtatatacaatctatgcagcagattgcccttaatgttctaagttggtattatcacaatttcacaattcacagtctcatccttaataatccaggtaacattatcctaagccaaagtctactacacctacatcaggttgcatggtatatttgtttgcgctaactgtaggcatgagttatggtgcccctgtttcatcagttaataattcagatgcttgacattttgcactcaaagatacaaacaatagaatgaaactctaaaacatttaaaaacttgtgtggttcaaacagttaactatagagggttttccagtatggaaaatagaggagagccacacagtgcctgacagtgaaaaccttgtaatttacatatgatggtagattaagaaaaatccttagacacacatgacatgactatggtctgaagtgcagaaggccatctggcccacccacattgcatgacataaaactgaaagcctatcaacaatagggctcgcaggtcgcaacagaaagttataataacaacagcaaaaatcgcgcagaaacattagcaatgaaatccatattttctgttagtatttgatccatatacaaataccattattcctgaattctactgcacctatgtatcgacgctaatttataacccactccaaacatccgtccgagtccgacctcatcatcaaatcaag

SEQ ID NO: 119146 - DNA, 534 bp, Zea Mays
agcagaagttaatcgcctgcagcaggaaattgcggaactcgatacagccattgactgggctgtaaattcttgctctttcgcctgggattgtgaagccaaagctctatcccgggtagcagaactaaacacatccttgcaaaacctgcaagcgtattgtaacaccctgcatgaagaggtgcacgtattgtacgaccggctgcatccaaacgtgccaccaaaagttgcagcaatgggagatggaccatctggaacaactaatggaggagctgatgcggggttggacctttttggagcccctccttccatgaaccttgtagatgaacggtctcctgaagcgggtagtggagcagctaaggacgaagagaattagagtagtatagtttaagtaatgacttatgtaaaacaaataaggaagtcgagttgtattactgagtatctataattattacagttcaacaatgtaataaagatggtgaagttcattattaccagctgtcacggaacctcccaaggtattagacccacttacagatg

SEQ ID NO: 119147 - DNA, 529 bp, Zea Mays
attcaccgcacccgcgttctcctttatctccggccgccagctctgtccggccaaattaagcgccgctgtcgaagcctcctataaattgagcccccggccagctgcgctaggtcataccgaagccatagccatcactcccgtcttcgattagccccccatagccggagaatcgctcacttcccccaattcggtttccgccaccgcgaagaagacctcaccgtggccagctcgattcaggtgagctcaagtccctctgctgcttgttctagcctccttaggtaccccgcaaatccctcgaaccctttaattgaaccggaccgccagggatcaccgggaacacgtaccattgtcctcatcattcgcgattcacgtggacagggcgtgatagcttaccaatcgtgaaattaagttgggggaatcgttcgaggagagtttaatccggtgtacgccgctcgggagcaccggccgttgcctaaatccgccggcacaacctcaccggagttcatcctccgcgctgccgttgtcgggg

SEQ ID NO: 119148 - DNA, 653 bp, Zea Mays
tgactatcggtacccgccgcgggggcagaaaagaaagggtgcaacttctgagaaggctgttgcttcagctgctccaagcgagcccgtgccgaagaggaaaaaggtgaaggttcttactcaccgaccgcgctacattgaaccggccatagtgcctgaatttggcggtgagacctcttcggctattgaagccaaaggatctgttcttacgtagaggattgaagagccggctgcaatgccgaaggctgacaaaattgaagaaccaagaaccgaagggacaaaaacatcagaagttctaagcccttcggcaggagtggaggtgccgaagacacaaaaagatctagcagcaacccccaagagaaaaaggatggctagtgtattagatgtgctggagacgataaaaacttcaagctctactccaggaaaaattgccaaggcttcaaaaacacagattgaaactgagacaaagctgaccgaagccgaagctatagtgagctaggctgacgccgaagctgggccttcagtgcccgccaaggagaaaccctcggaaactagagaaaaggcagcagaagaagagggtatagaacaaattttgcctgaaaaagctgccgctcctgctcccgaagcgtcttccgaagtccttgattatattattc

SEQ ID NO: 119149 - DNA, 357 bp, Zea Mays
catggttacaattctgcaaacttatttttattactaccaaatgcatagtcaatcattaagatttacactgatatgcgcaacactattttatccataagggtccttcaggggctcatgcataccattcgtttggagccattagttgacttcagatcaacaagtaaaatgaccatcaggatctaacgttcacaaagtcattcacaggttgcattgtgcttttaagcacataggaaaaatgtgagtgtttatattgctagtgaagtgcacgacatcagaccaatgctgccaagcaaagatttttatatgcagagatgtatagtccagctcgtttttatcactgcccatggtttacccgat

SEQ ID NO: 119150 - DNA, 349 bp, Zea Mays
gtttcctggtggggggtggggtggggtggggaggaaactgagtttgtgcgagttgtattatgtgcgtattgtatgtatatcttcttaatactagcaacaaagaaaatggtgtctggttatcagtcagtggagaataagttcggtgaatggtgaacccattgtatatatagcgctatgttgctcaacagagcacaccacaccacaccagagttacatcattagttccagtcctgcttcacacctggccctgttttgcttgaccttttagctgtgatcaacctatatggtcagctaaagaaaatgctttacttgtccatggaacttaccagattaccagtagtttacactt

SEQ ID NO: 119151 - DNA, 416 bp, Zea Mays
gtcagggatgtcatcctctccagtaatgctgatattgtttgtttgcaagagacgaaggtcgctattttgacccagcaggtgctcctttcagtttttgggactgtctatgataacttcgtggctctacctgctgttggcactagaggtggagttctggttgcttggaaggggggttcttgtcaggccgtcgcttcaagggttgataatttctcagtttctgttcttttcgctgagcatgaaggtcgtaattggtggctaactggagtctatggtcctcaaggcgatgatgaaaaagtgttgttcctgcaggagcttagaaatattagggctctttgcaatgggccctggcttgtggcaggtgattttaacttaatttaccaagccgctgacaagaataatgccaatctggatagggc

SEQ ID NO: 119152 - DNA, 432 bp, Zea Mays
caggatgttattataaccatcaagatattgaatgagaggcaacgacaagccgttgcaagaaaagggttttccaatatcctcgacatgacccttgatgcactgggcagccgatctcatctttggtggttgatggataagttggaccacaaggacatgacaattcgccccggtcaaggaaatgaactaaagattacaaaagaaactgtccacctaatccttggcctaccgaatgccggcggtggtaagccactaggcatcgatgaagcagtggcgggcaataacctgagggctgaacttggtttgtctaaagatgagttcattgttgcaacactgcaggaccgtttaagaaaaggagacgacgatgacctctccattagatgcttctttttgttattattcaataggttgttgttccccacttccagctggggc

SEQ ID NO: 119153 - DNA, 302 bp, Zea Mays
gtttgagggataggaactctttctttttaatcttcataaggctagcaggaatgtggtaattcctgaattgagtggagaattctactcaggtgatggtgttggcagtagcgtgatcagcgcaatatgcatcccaccaatccgtagcggggctagtaaggcgacccgatgcatagagtactttctccctatcggagcactgagctatgttgagcatcttgtccacggactttaaccagtcatcagcgtgtagtgggtccgaggagttagagaatgtcggtggcttgtgactcataaactcccgg

SEQ ID NO: 119154 - DNA, 395 bp, Zea Mays
aaataggccctaactctgttaacatcattccttgctctttcctggatccgccccattcccactcaagccagtagcctatgtaagccatccgctcccacctaatatcaccaacaaccctcctaatgcatgcacaactcccaccatgccaaagttctctttaaagatgaataaataaataatgagggaaaggatcaaaggagcatcaaatataaccccgcactcacgcacccagccacaaacgcatagttgggcgcacaaaatgcttgaatcatggccattaaggattcaccatcacacaaccgttcctaatctaggacaaaaggcacggtgtctactcaaggacacttggatgtattgatgcaagtgcaaactaggtggcaccattcaacaatgat

SEQ ID NO: 119155 - DNA, 543 bp, Zea Mays
cacaacccagtccagtgccagaggcatcacaatacacatcaaatggcttgtcgttgtcgggttgcgttaacaccggtgctgtggttagatgctgcctcaaggtgtgaaaagcatcttcgcacttctgaccccaaacaaacttggctcctttcttcaacaattcattcatcggcttcacaattcgagagaaatccagaatgaatctccgataataaccggccaatcctagaaaacttcgaatctgacggacaattgttggcagcttccagttcatcacctcttgcaccttatccggatcaacagctatgcctgtttgagagatagtgtgacccaagaatttgatttcctttagccagaaatcacattttgacagtttggcataaagacggtgctctcgcagacgttgaagcactacatgcaaatgaccggcatgctcttcttcgttctttaagtacaccaagatatcatcgatgaaaaccaccacaaacttgtccagttcaggcatgaagacagaattcatcagatacatgaagtatgctggcg

SEQ ID NO: 119156 - DNA, 852 bp, Zea Mays
tggaattctaacccttcgaatttatcgtccaactttcgtaccattgtgcaatatttgttcattgattcggttgagcaatcccagtctttgtttacttgacttatgaccaccggtgggtcgtcgtacaccattaacctcttgatgtcgagtgaaacggtgatgcttagtacatggaccagtgcctcatactctgcggcgttgttggatgttggaaacaagagttggagtgcatacttgagttgttcacctcttggagcgataaagagaatccccgcccctgctccttgctgtcttagcgagccatcgaagtacattttccatatttcagcaacttctggactttccgagacctggtgctcagtccactctgatatgaagtcgaccaatgcctaggtctttatcgtcgtgcgaggtcggaactccttatctcattttcatgatgttggtcgcgtgaagcgctgatggtgctccacacgtctcgtcagctggtgatggagtgacgtaggtcgttcgcaggatgagggaggggtagaagatgattggccgcctgagtaagcagccgccggtaacctttcacgtctggggttcgcggaaggtcatcggctatctgcgccagtactcctccaacttcactcggcgtgttcagtgcttgggaaaaatcgaggtacaggtttcgagcaaggagagggttctctcgctggagcctggcatcttgttcggctagctctcgctcttgatcctgagcctgtctgtgatcacggcgacgagagttatgtctttcttgatgtactcgttcattgggagtttccctcacttctgaggcttcgtcccgagacacgggctgcgccggat

SEQ ID NO: 119157 - DNA, 949 bp, Zea Mays
ccatcttcttggcttccatgctgacatcatcaggtgcgtaccgagcaagttcttggaatttgtggatgtattcgctgatggatctccctccttgagttaactcccgaaattcttcttctttgagctggacgattcccaagggcacatgatgctctcggaaagcagcttcaaattctgcccaggtagcatctcttacagcagcgctgaaagtatcccaccaggatagggccatcctagagagctgatgagcagctaggtgaacaagctggtttttagggcatccaatggcctctaacttcctctttactgtgcgcagccagtcatcaacattgagcgggttgctagatccggcgaatgtgggaggcttgagccttaggaactctcccattctgtcctgaggtcttcctccaatcgggcgctggttctcgaggcttctagtgagaacctcaatgagtcgggtttggttgggcagaacttgggctaggtctaatggcagttccggaggcgcggggaggtgggtctcactcccttctctaccgaattccccttcaatacctaggggaatccttgctccaattcccgaggcggtaggcgtggttttatctgaagccatctgctagaggggagaaaggattactactatgcatatgccatcatttttttaaacatgttattttatttagtactccagttcattacaagcataacaaccaccacagattacactacgcatgagcgttatccgctaaagtgtccccaaactccctgaggagatcatcaaggctagcgagggacacttcctcgacgtcggaaaagttctctatccctagggagggtagtgttggcggggcttcttcctttgggtcagtctggcatccttggctcttgaaacgctttcagatcttcttgacggggcaagcttcttcagcctcttagcatagtccatctt

SEQ ID NO: 119158 - DNA, 293 bp, Zea Mays
atgcaccgccgtctacgactgccttcgcgatcgtgtatagacgaataggcactccctaactttcattttaaaacaccaacacggctccttttgccctttatcgcgggcatcggggcccattcgagggcccctcatttgctctagcttccacagcgaacacaatatccaacacaataaaaaatcctaagtcctcctcggacgactccccgtccatcctcgcgaaggaactcaaacacccttcgctatccgacgaccacgaactaaacttagagcgcttgccgctattcataggt

SEQ ID NO: 119159 - DNA, 592 bp, Zea Mays
cagaggtgagcgcgagctagacgcaaacgacgctggcgttcaacagccagaggccaccacgcgaggatgtagggagacttctaggagctggcatgtgctagaagcgtggagagggccttggcatcgatggcttgagagacataggatgatagaacatttccagagacttatacgtattctagataggagaaacaaaagcaacatgcagataaggagaggtgacgtgagggagttggcctaggataggattgaagacgtccttgatgagccctcgagagcagttgctgtgatccaagtttcacctgctcaaagccgaacttggagagactgccagcacctgcttgattaggccacgtcgtgggggacacgccagcatgcgagagacagcacaacgacatcaatcaaagcgatggcggtgtccttatccaaagtttcagtgaactgaaactaaagttcagtagcccgactgatagcccaggttcgaacgatatttactcccttatatgcgaagcagcttgcaaccagccttaactaaatttgtgctctgatcaacgcactatcactttggtataatgactacagtgaaaaaccc

SEQ ID NO: 119160 - DNA, 362 bp, Zea Mays
ggtgtgctggccacatgggtcaggacgtggtacatcaaacgtgtttgtcctattcctatgctgttgcaaaatgaatattattaagtaaatggatacaatataactgaacattatgttaaaagtttaagacaaaaaaggttataaataaaagcttgccttaaattgtgattgaacaggtggtaccgctgtgtagcatgtctctgtgctgcttcggaactaaaaaaggtgtgtaagatactgactcaaatgtaactatattatgctaatatgtgttctagactgtggattatccttctaatacaacatagtacaaaatgatataacaaaaaatggagttcatttgtacattaaaacgacactgc

SEQ ID NO: 119161 - DNA, 326 bp, Zea Mays
aagatatcacaaaacaagtaccaaaatcgttcaagttcattccatgttcaatcttcaatgtttgatttccagtacatggatatacaacacaagaattcagaatttcaatcaattcatacaactgaaagatcacaccaaaaacatggaagaaacaccctttatgagacatgtgcattgtgaaatatatgcagtccaaatcattcttccgtaattgacaagcaaatgcactataaggttttacgctgaatcattcacatcccttgacaggtaaacagctggtaaatagacaacagaatacagaccttagcacttgaaagtgtccttat

SEQ ID NO: 119162 - DNA, 385 bp, Zea Mays
gttcaggttcggagaacagcaggggtaggttaacccatggtttgtcaggctgctcccatttttgccataaccaacgtcacctcagggctctgttgaagaattccaggtttttaatccccaagccgcctagccttttgtctctgcatgttccgctccaattaaccgggcagtgcggtcgacctcccaatccatcgcccttgtataggaaattccgccttattttgtcgatttttttaaccgcccatttggacagtgcattggaagtcatgtagtacaccggaatattggagaggacaacattgactagcgccagccttccagcgcgatttagtaatttccccttccaactagctagccgacctgctaccttatccaccaatttttg

SEQ ID NO: 119163 - DNA, 682 bp, Zea Mays
gttacgccttcttttagaacaccaggcacatgaacatgaaggggtgccagaggacctcaacatcgacccatgagtgcagtcaatgttgtcccggttctctgaagtttttgctgcaccaatcggtttaccaaccaatgagtaattgtgtcatatctcatagtgcacacccactcgagctcaagaggtactgcagggttatcaacatgatgaacaagctaagcagctcctgactcagctagccgtggcatcagaggttgacacctctccatttacactaactcaaggtctggtccaacacaagggtagggtgtggcttggaaacaatgtcaagtcacaaaccaaggtcatctcagctacttgcgctgcaacctacttgcgttgtttcgtgcatgcgtgccccagcaagtggttgcagtgacttctagttaccgaattttggtacaacaccgatttctattcagcactggccatatccccttccgaggaacgtgaggtggtgttcaggctgatcaaacaacatttgtgccgagctcaagaacacatgaaaaaataggccaacaaacaacgatccgagcgagtgattcagcttgcttttcgattcttcgaaccatatccagttctctagcatatcagatctgttgcatacaagctccaggtgttggactcttcccagattcatccg

SEQ ID NO: 119164 - DNA, 549 bp, Zea Mays
aaagttctagtacgttttctgtagatttttgaaatgcatttgtttgccctaattctttaagcagatttagagttgtgaataaaacagtggggtatagtcagaaattcagtccaattatatgaaatgtgacgattgaaaattcagaccatgtctgaagtatatctgagtacttataaaataggttcttgattactaagtgctagctcttaagtttgctttgttccttaattagggttcggagttgtgtcggtggtgagcatgtgatgtcatgttctttcaaagtaaaggaagatgcatgatggacttgcatttaggatttttgctattatcctagtttccatcggttcaaatattccaattgttttattattttcctaattcatgtttatgttcctgtcattagtggagaaagggacatctatactgattggaaaccgtctacagtaccgtctactgaatcggtactaggcatccaagattaaaggcctcaatctttagtcccaattgccacgactagtagtatagatagaccttttagtattggttctt

SEQ ID NO: 119165 - DNA, 825 bp, Zea Mays
cgaggatatgtccctagctagccttgatgaccttctcaaggaatttagggacactttagaaaaagagttcagtagtacctctgagaacgctcgcgtgtagtacgacttgtagtagctgtatgcttgtaatgtattggtgtaatgaataaaataacttggttgaaaacaattggcatgtgcatactagtaactctcccttctcccaggcagatggcttcggataaaaccacgcctaccacctctgggattggaactaggtttcccctgagagctgaaagagaagccgatagagaggaaagtgagacccacctccccgcacctctagaactaccctaagatttagcccaagttctagccaaccaaacccgactcatcgaggtcctcactcgaagtttggaaaatcaacgtccgaatggtggaagaccacaagacaggatgggagatttcctgaggctcaagcctcccagatttgctggatctagcaatcccctcgatgctgatgattggctgcgcacaattaaaagaaaactggaagccatcggatgcccggaaaatcaccgtgttcaactggctgctcatcaactttccggaatggccttagcttggtgggataccttcaatgtcaccatcagagatgctacctggatggagtttgaaacagctttccgggagcaccatgtgccccaagggatcgttcagctcaaggaagatgaattctgggaactgactcaagacagaagatctgtcagtgaatatgtgcacaagttcacggagttggcccgctacgcaccagatgacgtcaacactgaagccaagaagatggcc

SEQ ID NO: 119166 - DNA, 424 bp, Zea Mays
aagggattgagattactacaaaagtcccggtcaagcagttgcagtacatgcctattactccgcgacttaaatggttgtttctaaatcaggagacaacgaagcaaatgagaaggcataagtaaggggatcatcaggaccaagatccggatatcatggtgcatccatcggatggtgaggcatggcatgcacttgactgttttgatccagaatctgcaaggggccctaaaagtgttcgtcttgatttgtcggtggacgaatgcactcctttcagtataagttccactctgtatttgtgttggccggttttcataatgccctacaatcaccctcctaccaaatgcatgaaataataggtcacattttgtaacgcccaaactcctgattttggaattagtaaaatccttctaaaagaaaccaatgcaaa

SEQ ID NO: 119167 - DNA, 275 bp, Zea Mays
catgctgatgtcatccaatttccacgaaggtatagataggggttgcaaagctctagctgatttcaagtggcttgcctttatcctctgaaaggtgtcacattccgatacatactgggctatctctttcttcattctggtccagcaatacaaaggcttcagatcatggtacattttggtgcttcccggatgcatagagaatttggagagatgagcctcatccaagattttcttcttgaggtccttgtttttaggaatcactaatctgcttttgaacc

SEQ ID NO: 119168 - DNA, 526 bp, Zea Mays
agatgaaggttttgaagcatcacccggagcagtacctcatcatctttgaggagcagcaagatcagagaagggtgctacaccaaagtcgcctccatcaccgtggctgggttttctgctttgctgagtggaatgaacaacgctacagctctgtggcgcgctgggactttcatgttcggctacggctggagggtgtcccagtacatgcctggaacaaggacgttgctgcccagatcattggaagccactgtgccatccatgtgttggacgagaagaccatgcctcgcaagcgaactcgcacttttgatctatgggcatggagtgaagatcctagcaagatccctcacgaggtgagactaaccatcactgatcctgatagggagatggaggatccaaggggcatcaagctcggcctttcttacagagtgcttattcacttggaggtggtggatgatctctctttcttccttggtgggggagctgaacctggccggatgcgtcgctgcatgtttgagtggcactatggtgt

SEQ ID NO: 119169 - DNA, 338 bp, Zea Mays
cacgtagaccatccagtacggtgtcctcgatctcacaaatgaggaaatccacaacatcaaactctgagtgagagaccagggcaccaagtagccaaagcaggatatgagtagcagcctccctgtaacccatccgtggcagaaatgtctgtctcatgagctgatagagaaacttggccgctgtggtgaagtccgccagagaacatcgcgacccatctgagaagggcggtcggaacaatgccacggcgtgagctataccagaagcaactccgccatgagggcgacgaggaggatcagaggtgccatagcacatgctgtgaagacgattcgatgactcgttg

SEQ ID NO: 119170 - DNA, 503 bp, Zea Mays
catggtatttgatgctattggatttgtatatccagattattgttatccttcgtgaaagcaaggaaagaaaaagaaagactgctgcttcggtggcctctagctcgtcgaggtgaaggaaggttaaagttttgacgcatcggcccaagcacatcaaaaatggtcgaggtgctgaagctgattgaaaggtccgctactattcctaagccaagtcgctctatggctgtcgaagttaagatagggccagctaaagagccgaaactgaagaaggcagtagaacagccaaaggccctgagtccaccatgcgagacggaattgccgaaggcatcaaaaatcccagcgacaacaccaaggaagaggagaatggccggcgtgctagacgctatcatggaatttgtaaaagtataactcctgcttctgctgaagtgcctagtatagaaggcaaaagtttaaagaaatctgatgaaaccgactcagcgcaagatatttccgaggttgaaccctca

SEQ ID NO: 119171 - DNA, 654 bp, Zea Mays
aagtaattgagacattagtttaacaatctaaacgagactggtcgatagcgtatcattttttacgtatttatatatagaatagataggtttaacaggaaaaaagtactagcgtccagagagtagaggccctttgttttttggggccagttgtggccgcaccctccacacccctcaagtacggccgtgtgcccaagcctcataagtgagagcaacgctacagtgcaaacaacatgagtgagtgagtaaataaaaaagtaagcatgcagcattttatcttctccattctctcatgaggctatatgaacctctaacagctattagtgctaccctgcaagctacttcgtttttcttcttttatctccaagacacatctgttcctatcttcagttcttcttggtttggatgccaaataacatgactatggaggatggagatggatggactatgctgctggttgcctgatttatgtctagaacttgtaagattttatctgagatggctctttaaccttactgttaacttgcttctagttctagcctactgcactccggaccagaaccgacaagaagtcgatacactccaaggcaccatgtgccgaattggctttcagatagcgacacatgcttgcatgattacgccggtaccaggattaag

SEQ ID NO: 119172 - DNA, 344 bp, Zea Mays
caactaggtgggtcttcattgagatacgggtgcattgtctactactaccatgcctacgttaataccgagaatcttgagaagaatatactaagaaacatcgatgtgcatctccaaaaggggaaaataaaacaaagggcttcatgttgagacagctcagtttttgcttcctcgtttcaacaaaatcttctctggcatatttgtttccaccattctactaatttagtttttgaagactgcttaatctaaaggattaaatgtgtttattaagtgattaaatatgatttggttgatactactactatgaaatatgtttaaataatacatctgtggaaatcataataaac

SEQ ID NO: 119173 - DNA, 498 bp, Zea Mays
aaccatcatctagaaggcacgaaccctaagaagctcacgtggaggctcatggcgtgcataccttcttgcaggtgagaggctaggtgaggaagtggatgcaatcgatgctgcactggagcgcctccttcttcgatgttagtggcgtcatctagctatatggcccttgtttcggggatgatgaaggcacatgacccttggccccagccttgccccgcacggccaccgctacggggatagataacgttctcggcgttaggcaaaggttagttcatggctgcctccgctcggcacgagcatactagactcgtgtcggcgaaggcactgagaagtagggatggatcgtcgtagagtggaggacgcaagaatcgtattgtgagatggaagaagctgggagagacactggaggcgagcgcttttcactatagacgacaacacccactttccacgagaatgacacgcgaattcatctggaacacttgcgggtagtcgctgtgcgag

SEQ ID NO: 119174 - DNA, 358 bp, Zea Mays
tggaaataaatcttcatcagcttcaagcgcatggtacaacacagtagtatcatgcatggagccaggttgtccaatagatgcatatataaagcgcatatcaaaatcaacaactcccatcacattttgagtaggtttaccagaccttcccatgaacctgatcaagtctttctttggaggcgttgcatttatatgagtgccgtcaattgctccaatacaacccttaaagtgaggccacattctttgatcattggtaattcttctatgcactgtatggaaattaggatcctttggttgtatgtacctttttgacattgctaccatgcaattcaggacatcactgaattttctgctaattgtt

SEQ ID NO: 119175 - DNA, 550 bp, Zea Mays
agaacagaagaacagaagaacgcgaagaaaggaaaaacatcgcagaatacaagaacagaagaacgcgaagaaaactgtaagtacaatgccactgattactcttcgtcgcgtcgttcaggcgatccgccgtgccgtcatcagggagttcctccgcgcataccgtgaaggaatcctcgacgacaatcggattggctttgccattcacagggtaatggtgaatctggttaacaccggtgccaccggtgtctggattccaaatcgccgcagtcataatcgcagttcatctcgtcgtcgtcgagcaccaccagtggtggttccccctccaccgccggcgacagcaacgtccacacaagtacctgcatcagtgtttcaaatgggagagacttacccgcacggttactgtccattccacggattcggaccatgtgctctgcgcgacgccggcgtgctggaggctactctcaccgctgcccgccagtactacaactctcaagcgcaacctgatgcagttcccatggaggagatgctcgccacggtcgcggctccaaac

SEQ ID NO: 119176 - DNA, 424 bp, Zea Mays
cggggagtcctcttcagctgctgaatcaagagaaattgttcctccgatgtagagggctgaagaaccggctacaatgccgaaggcaccttcggttgagctagttgaaacgaaggttgacaaagataaggctgaaaggtcaacaactaaagaggtaataaagatgccagggattttaagtccttcaacagaagcaacagcgctgaaggcacaaaagagttctgccataactcctaggagaaggaggatggtaaatgtattagatgtactggaaacaaccgactccataagtctcgctcccaaatggaaggttgccgaagctgacaaaacacaacccaaagctgatactaagcaaatagatgttgaggctacaacaacccaggctgaaaccgaggcggggccctcagtgcctgctgagacaaagctt

SEQ ID NO: 119177 - DNA, 372 bp, Zea Mays
agctgggcttagcacatgtaattgtcggaatctatgatcagagtacaccatgtattccatgtctttatgttgaggaagtatttgcggaatccagaccatcaaatcgagctagagccgattcctgtgtagcaagaccagactctagagtgtcgtctgctgcgtatcttagaatcctaggagcttgaggagctgatgcggcagaagtactcgaacttttctttatgtgtgagttttgttgattcattaatctttcttttgttgttccgatagaagcgtcggaattcgaggtcgaattcttttaaggggggtagagtgtgatacccaattttctgaaaagaagttaaatttatttttcccttttctttcgtgatc

SEQ ID NO: 119178 - DNA, 604 bp, Zea Mays
ttgctaacacgttgagttgcagtttggaaccatcagtgcataggtttggtcgtctagaaagagcatctgccacacggttttccacccccttcttatatataatgcggaattggagacccaacagcttggttaaggctttttgttgccagatagtcgacaacttttggtcttccagatgggttaggctttgctgatcagtcttgatcaaaaattctccatgttggaggtaagggcgccagtgatcaactgcaaataaaatggctagatattccttttcgtaggtggacaatcccaagttcttaggacctaaagctttactgatgtaagctataggatggccttttgctgcaaaactgccccaatacccgatccacttgcgtcggtttccactacgaattgttgtgaaaaatctggtatggagagaaccggtgcttgcaccaatgctgccttcagagcctcaaaggctttctgagcttcatcattccacacaaaaatttggtccttcttgagcaggttagtaagaggtttgctgattatgccgtagtgagcgacaaatcgacgatagtacccggccatgccgagaaaactcctcacctccttgacg

SEQ ID NO: 119179 - DNA, 379 bp, Zea Mays
ggattttagaaagattgcctaaggttctcaggtgaatcatatcctggaagcgacccccagtcacctcagccccagaaggatagtgctcccaaaactggtaagtcggatactgctcatgatgaggagtgggaggtggattcataccattgttcgggagatggtttgggggagaacgaagctccaccaccatactcccgaggccgatgtggagcgccttgtccgatcggaccgttggggaagctccatggcgtaggcggtcgctcctcctctgacctctggttgtgaggcgcgtcgtggccgccatgttcgagagcatccgttaagcgatggaggtcggaacgaactgaatcgacggaagtttgaagcgattcaatatatc

SEQ ID NO: 119180 - DNA, 701 bp, Zea Mays
aggactcatattatacaaggatcgtatactattagcagcagcatctgaatggccattgaaaatatttcaaagcctgcacaacacaccaattggagggcattcaggattcttggtaacttaccaaaagataaagaagttgttcaggtggattggtatgaaaaagatgattcagcagtggtgtcaaaactgtccaatctgtcaacaagcgaaatcggaacgggttccgtacccaggattacttcaaccgttaccagtccctgaaggtgcttggcagttggtctcaatggattttatagaaggtcttccgctctcggatcattcaaactgcataatggttgtagttgataaattttcaaaatatgctcacttcattcctctccaccatccattcacagcgttagctgtcgcgcatcaatttatggataatgtcttcaaactgcatggatttcctcaagcactaatcacggaccgtgatcgcatctttacaagtgctttgtggcaagaattgttcaaactggccggagtggaattgcgattcactactgcttaccaccctcaatccgatggtcaaacggagagggtaaatcaatgtttggaaacatacctccgttgtttcactcaagcatgcccatctaaatggaaaagatggcttgcgttagcggaattttggtataatactagttatcatgcttcattgaaac

SEQ ID NO: 119181 - DNA, 796 bp, Zea Mays
ttttctgggtttgagtaccaatattagacattgtcagcattccagtggccaaaatggttttagtcaataattaaacagttcttttctacagcgggaagctggacagtaacgaaattacaaaagcttcagagttttgatcatgaaaacgaaacatgtcaaaaacacacatctgaccacccagggcccagcatacgtagcacactagcactaatgacataacgatattccccagaactacatgatgataaaaatgcgaactttaagcatcactgagcgactactagttacatgcccaaatggacacaagtcccggacacaagctgtccacgaagattcacatctgctccacttcagttcaccatgccctcctgaatctgtagtgaagagcagccagcttcagagcttctgccccttgctccaactgagcagtggcctggtttctgtaaacctgtccaataacataagaaagaacagaccatgtgaaccatctccgtaggtgatctacaccttttccttcaaagcatacattctttcttaaatggaataacagtgagtaggatcaaacattcaccatggttgctgctcaagtctacgtacctgcaagacaggcgcacccccaccaatttgctctagctttaccactgtgcctaacatacagccgcaaggctaaccacgtgaaaatgtttactgttcgacagacaggcctacacaagaaaatcccgagacgtgggtgatttaggctccaaacaaaatgtgccaaggcacaaccaaagaagagatggtttatggtttcttt

SEQ ID NO: 119182 - DNA, 1820 bp, Zea Mays
caaggtttcgggttggaatatgaaaagcagccaggttgagagagcagttcctttgcacagcagtccccaagagattattataaaaatcccacacaacttcttgtttttcctcctgctctaccaagattctatctgctactttcaatgtggcaatgaaatttttcttcttcctatatcgtgcctgttggtgaaaaaaagatgtattagcttcgccttctttcaaccagcgaaggccacttcttgttctggccatagtgcgctccagggaggataaagctaaagagtggagctttagccgtcgccgaagccactcctccagaggcaacagagccctagaatcccctgcaatttctagctggtgcatgatttccttagccgctaagagctgattcttaacattgacaacactccgctgactccaggactgcaagtgtttcgaaagcctttttaacttcactgcaaaacgttgcagtggacaaaaggaaccccctggttgtacccaagattcttctaccttctccatagaaccttccaattttgaccaatagctttcaaagtgaaatcgtctcctgccctgggaatactcatgcagccccaacagaagaggacaatggtctgaaatgaatgttgccgaactttgcaaaacacagtccgggaaataatccccccagtctgaagtgtgaaagactcggtttaaacgaacaagcgtgggacttgctcgttcattggaccaagtaaatttgcgccccatcaatggcagttctgacagatttaactcattaagaatacgacggaatctacccatcatagccctgtcaaggttgctattgttcttgtcttcggcttgatatataagattaaagtccccaccaataatccaaggtccaaaacatgccgagcaaattgtgcgcaactcatttaagaactgcaacttctgatcatctggttgagggccatacaccccagtaaaccaccaaggagtaccagaaatatgatcaacttgaacagatactgaaaaagagtctactctggtctgaagaaccttacaagtgccccccttccaagccaccaatatccccccacgcgtgcccagtgcagggagacaaatgaaatggtcaaactcacttccaagcaaagacatgaccctaaaacgggaaatagaggccttctttgtttcttgcaagcagaccatatctggtcgagcgctaacaattgtctgacgaactgcatctcttccgactttcttattaagacctcttacattccaaatgatgattttggacaaatccatttaaacaagcgagtaacaaccaaaaaaactggaaaaaggagaaaattatgcgcctcctaaataaaatcagtcggggcatctccggcgaggagctgaatggtctccaggttctccacgttttcaggaacagtccaaccaaataaagctaccaaagccttgatgtgggactccgatagtggattggagaagaaacgtccatacttatcatgagcttcagtgctaacaacctcatttccactagcaatacccaaccttctaatgagatcttgctggatatgtctgataggcgcatctttgctggatttagaacccttgcttgccaggcggctgctatgacgaggaacaaaatccggaggcagctgcgcagaccttctcttctgtgggggcggatggggaagaatgcaagagattggttttgtaacactagcaacaaacgattgcaccggtgtgataccttgctgaaccaaagcttgagagttgttgctgtaatctgatctaggatcaaattcatcttgcacctgatgctggc

SEQ ID NO: 119183 - DNA, 358 bp, Zea Mays
gtccgacggtgctctagaccaggtccttgtacactggaccggtccgacgcaatctgttgtcgaagtcttgttgtagccgtctctgcgcactcagactggtgcatcactgggtctgtccggtatgcagagcatagaccagtttttgcaatcattgacaaatcttgttcaaacaagtttggttgtacttaaggatattcctaggacttaaacaaacatatatagtgactttccaactagtccaagtcatggaacttgattgttttaattctttcaactcatattccttttctagctcaaattggtccaaaatggtgtttcattgaaactgagctatccaacctctttgcatgagttaaat

SEQ ID NO: 119184 - DNA, 678 bp, Zea Mays
caagtttcaactcttttcttgaaggtttgcttcgctgagttgctatggagatgcacattgttgaagatgagagtcattaattccttgttatctagatcgcccagcacataagaatagccaccaacatctcttctagttaaaagccgctaggctttgaagcgttctccgcgtttctcgcatgcgtgggtgacggtatcacgacacgtctcgcagtcctccacacctcacagtccttctccctaggtcattggaaaactatccggagaaaccaacgcacaaatcgatcatgtgggccatcgtctgtctcttgtccaatctactccatttttctatcccccacgaccgtgcttcatggacatacagatttcgtttcgggctgatgcgtgccctcggccccttgcccatccctacctcttcgaataggctcgtacccatcacgtttttctcctccacacaccgagtaggcgagcacccaccagagtaccagactattcgtccctgcattgcctccactattaccgccatcttcgtctgcgcgctgtcgctgccgatatcgctagccccaacctcctagtgtcatcgttggtggtccgccaacctggtccgcttaccacgccaccgtgttcctccctgccatgccgcctccgatatccagcccttgctcgtgctcctactggc

SEQ ID NO: 119185 - DNA, 637 bp, Zea Mays
tgcgcgcagaatactacaaagtacaagggctaactagcaattttccccagactcagtgcaaacccgagctggatggcgggttgaatcagaacaagtcgagggctcttttagaaaataactgcggctaaggggtaagatggaatctgagccgcccgatcgcaaaacaagggttcagattagaatcccacgcacccaaaccggtatgcagttctagtcgtccgattttgagtagacggccaggatttaaaaaccctggatcaaaccacgcccgtccgttaacagatcaacgaagctagacgaccataggcgaaatgctacctcggcctaatccagtgcgaccatcaaaagatctaacggttgatcctttttcttctaccactccctgccgacgacggccatacacggcggtgctccatggccggacccccctcccccacacacggctgcacaaactcaaatcccgtgggtgctacgtgatgagaaggcgaaggtgaacatcaaatgagggtcttaccaagggatgggagggcgcagagacccagtgacggtggatggcggcgccgtggtggttctttggctccggcgagcaatccccatgctccaagccctcaataccgccatatgaggtcgcgaacgc

SEQ ID NO: 119186 - DNA, 308 bp, Zea Mays
ttccagtgatagcgacagttttgatgtcgagagtggtaatgaagatgccgaagatcggccttggagaccgagccatgttattttcgggaaatcatctgttaagcaaggacaaattgaagtgatgaagggaaaatatttccacgacatatccatagtgagagctagaggagaaaacactgttccacttcctgaagcaaacgaagtagtggtttttaagagttttatgaaggctgggctttgctttcccttgcacaagatgttggttgaagtattgaagacatttgagatataccttcatcagcttaccc

SEQ ID NO: 119187 - DNA, 518 bp, Zea Mays
acaaaactggtaaaagccttggaaggaggcagattccaggctgagtatgcaacaggagcaccgatgttcgacaccttgcctctgagtatcatctcgagccggatgaccaaatccacagcaggaattcttctgttggtgacccgggtcgaatcaacgaggcctcgatacagataagctgggtatgctctgtcttttagtggctgaatgttcttgaaaatgaaatcggcgaccacagcttctgcaatcagacccctctcttttaacaatccaacctcagcaagcagagtccctgcctcagccacctccaggtctatgggggattcggtccagctcggagtgcgaacatctggctgtctccctgaccgtggggggagggaattcccatgattctccatgataaactattccaggcgccatcctttgatgctatccttgagtgggatgtcgaggtagtcggtcttcctcccacggcgcatctccaaactcgtgccccccacaagctggtgctgccctccggc

SEQ ID NO: 119188 - DNA, 308 bp, Zea Mays
ttctattctgggcaaagggtacttgttcttgattgtgacctcattcagagctcgataatcgatacacatccttctggtgccatctttcttctccacaaataggacaggggcggcccaaggtgaggtgcttggccggatgtatcctttctctgatagctcatcaatctgcttcttaagctcaaccagctctggtctagatactctgtaagctctcttaaagatgggggcggttccaggaagaagctctatagcaaactcaactttccgctctggtggcatacctggtaagtcctttggaaacacatctg

SEQ ID NO: 119189 - DNA, 676 bp, Zea Mays
gttgggttcccgaggcattttccctggcctatataaaaagccacgcgctcaccgctatgagatttttacccatctccatgtggaaaaacccctagccctgttgctttctgcgtgttgccttctttctctctcgccaccaatgatctggcccgaatcaagcaaacagctcgccgccgccgatggtacatgatgttgtcgtcttcttcttcgtccttgtcctctgcgactgcgtcctcgaacgagctatcatcagagaagatgattagtgatccggcaacggttgtcgagctccagctcagtcacactgtggagtttgggacctcgaggatttactcaggtcacatgcacgagatgcagcatttggggtattttgggaatagagtagggtgggcgccgggggctgaagatgtccccgagtcagagggtgagttggttgtgttcgaggcctttttcagtgccggacttcacttgccggcacatcgatttatagcagaagtgttgctgaagtttgaaattaagattcatcagctgacgccgaacgctatggtggtgttggcaaagtatgtttcggcggtgactttgtatggtggggaaccgtctgttgaggccttcgtgaagaattattgtttgcattggcaggagaagaagataggtggattgattgcccaatttgggc

SEQ ID NO: 119190 - DNA, 422 bp, Zea Mays
tccatgtattcaggatcatgcgtcttgttgcattgtaattgattcttttcggtatcctttttaaaaaattcatgattatgatccaagtgcaacagatcaatacgcactgatataactgtctcttttgcatcatcataaatttttttaagtttcataccggccttgcattgtgtccgcttcgaactggtactacgtacctttgggtttgatattccccttactgcacttttgccttccatcgagcaattcaaccacttacaatttttccgttccctatattttttcaatggaaatccaacttcatatgcatacctactataaaatttatatgcttcatccaccccactgaatgtcataccaactttaggtaccaatctcggatcaattgtaacttcctgtgcaaaaatataaattgtatcatg

SEQ ID NO: 119191 - DNA, 433 bp, Zea Mays
gctttggatgccttttgtgcaaaatttgtggcagtaggattcgtctgcgcgtgcgattgctccatggcgacgtcaagtggcatttgacacataattggtcgagataatagatccattgctcgatagtggggattaggttaaaacgtaagttattgtgtaaaagtgtgtcgatcgatatatatgcaaagtgtggtgtattagttaggcgaagattagtttaaattgcgagttaggtgaagaacatgttagtggcggtgtcatttgaggattagagtaatttttgttgtgcgataaattagagatgtgaaagatgagtatgctgtgtcggacaaattagtcgatagattcagaacatgggtttgtgatgtttgggatgtgtggtaaaaaaattgatgctttgtcatgtaaccttagaaaattttatagattgtgc

SEQ ID NO: 119192 - DNA, 725 bp, Zea Mays
ccattattattttcctgttgttagaatccaacagtagttataattgcagaagtaagtgcagtgtgatggttttgagacttcttttcatttcacgaggcatagagatcgccttgagatgagtaatcgcaagtgtgattgtgttggatcgagtagacgtgagcgcgtcgtgccgatttaagtcactactgacttaaattgactgctccgttagtagggtatagtggtcaccctgagttaagcgtgagcatgtcacaccgccttaagtcatcgccgacttaagtcgattgctccgttagtagggtatagtggtcaccctgagttaagtaagcatgaggttgatagtaaacagtttgagtgcctttgagaatgaagtctttttattgatgatgtattttccaatttacagaatacaaggccatcccaatagcttctgaaatctagctaggggtaaaacttcctaagatgttctatattccatgagttcccaatttccgtgtcgtccacttgagtaagacgatatgatgcaggccgagtgacttctgctactatgaatggcccttcccatagtggcgacaatttgtgccgtccttcccccgttagaattcggcggaggacgagatctcccactgcgaaggatcgatgtcgtatggccttatcatgatagcgccttagagattgctgataccgggctgactgaatcaccgtattcaatcgttcttcttcta

SEQ ID NO: 119193 - DNA, 312 bp, Zea Mays
accacctccatcacttggcatcgtcatctcggccacccaggacctgacatcatgaccaagctttccagcactttagatccttgtattaggggacattttgagggcctctgtcatgcttgttagcttggccgacatattcgtctccctttttctacatattcttctagggctgagcaggcttttgaactggttcattgtgatctatggacctccccttactcaatctctctggatacaaatactatttagtaattttggttgattttcccattttctatggacttttcctcttcgattgaagtctgacacttt

SEQ ID NO: 119194 - DNA, 692 bp, Zea Mays
agatgttggagccattgcagtgcatcttgcctgaggacgatggacaagtacgttgtcatgacatcctccattactccagcggcctgggcagcgattgtgtagatagccaaccagccgcccgaatcctgcttgggcttggacttatcgacgtttgagactttgaaattaggcaaccattaaattgctcggagtagggggaaagggtcgagacaccgcatgtcccccagtcttcctgatgatcttctagggcatggtcgcgatgacggtccctgagaagtgagtgacgtcgtgtgtcatgttgcctctcccgggttgaccggcctagagtcgagatgttcatagaggctgctgccgactcagctctagtggcacaactacgtgccggtgcaccatgatctcggtcgtactcttcctgctgcatcatctcctctttgtgtcggctatcatgcgaagcgttgatgttgctccacgcgtctcgtcgtcggttgatgtcgtggcacatttcgtttgtcgcatggacgaggggaagaagatggttcactgccttggtgaggatctgttggtagccttccgcatccggggtgcgcggcaagccgttggcgatctgagccagggctccaccaacttcactcggcgtgttcaatgctcgagtgaaatcgggtagcaggttctaagggagaagcgggttcttg

SEQ ID NO: 119195 - DNA, 328 bp, Zea Mays
cgaagttaaaaagttaaaaatggctgactccttgaaaaacgagagcgacaactattttgggatggagggggcatgtagctttagcttttgtgctgattattttggggattatgtgcattctaaatggccaagaagatgctttgctcctgtctaatgaactgtgcttattaatcttcagtatgtggtagctgttttcatgaatatatttaggctgttcactgataaacagatgaacttagagtttacatcttgtgaacatgcatttgcatttttgttcatctgttcattattctttctactttcatgtcttgggtgttgaagttgagga

SEQ ID NO: 119196 - DNA, 591 bp, Zea Mays
tcaatcatttggatagataactccgtagatagacacatgtcttctccacgcgcaagtggttctccgcttctagcctctctcggatgagctaaattatttgtgtcacaacacgtgcattgtgtttcttggctctccacactagagaatgaccggttgggtgggtatatatagagccccaagtctaatgtagctgctgaaaggaagcatacttttatgtgtcactagaccggtctggcgtgccatatgtgtacattataccgggtctggtgccttccacatcagctagtcgttagagctagcagttgtcgaccataggagcattgtgtgtcctatgcaccagaccaggtctagtgtggcacatattcctggatttcgtgttggtccatctctacattttgagtcaggtgctatgtctggtgcacgcaggtcttcaacccaatcctctattcatctagcatacatgtccggtgtggtgctagtgttcatcggaccgatttgatgcacctctgtgcggtctgatttgcttgtttcttctatttccttttattaggctttttatatcttgtgtcttgaactcttgcatgatattgg

SEQ ID NO: 119197 - DNA, 337 bp, Zea Mays
cttgggggcggtactgccagccatggcgaggatgacagagtggctgacattgaggttgagcaggcaggagagtccgcttaggaagacaaggttagaattctagtgattgggctgtgtgttgtgctgggctcggcccagtatggatgtaacgagccgtataaaaacggttgtttcttcacgttcctctgcttccttcctcaaaatccctctcaattttagtgtggacaatacaaacattgaatataggatgatgtctgtcaccattacaaggtcatgaatgtgaccagatcataaatgtgaactacattatagaaatctttgatttgtactatcagca

SEQ ID NO: 119198 - DNA, 296 bp, Zea Mays
tgcacttctcaatggtatgtgtcgtcgccttgtagtagcggcaaaagacaacaacagcacatcctgaagcaagagggaccgctgctggtgctggagtagtaggagctggggcaggcgacacagttggagtagcaagaaccatcgatgaagacgatagcacaccacgaagacgaatctcttcagtccgggctaaggtgaccacctcaaccatggatgggagaggagaacgagcaaggagttgagcccgaagctgcttgaactccaaacaaagacaccacaggaactcgtggaggcgg

SEQ ID NO: 119199 - DNA, 308 bp, Zea Mays
gccttatctcccttttttcccttatgctccctggttcatggcctgtaccaattttaagctaaattctcttcactgtctatttccaagtacttgtcacatgtccacgcagccgctcatcaaactttccacagcacagcacaaaaccctccctaaaccttgccagctaatatcgccagacggactccaaaatggcatggccgcaaccatgcttgaggcgctgaagaccctaggcaagattttagatggattatcgactccataactaggacaccacgcagctcaagagtccacaggtaaccgggttagaa

SEQ ID NO: 119200 - DNA, 289 bp, Zea Mays
gtggcggtgtggaggcattggttctcgacatggtggagttccgcggcgaaggaacgattccggccagccattaccggcacagtgacgcgttaagcaactatcggtggggtgctacacgcataatggagtgcaaggactcaatctcatggtaactcaccgagatgtaagtagcctagtgcccagaccacggtgaggagcgggtggcggcaacctcgaacgtcggcgacgacttccagcgagaccagagcatcaacccgcccgagcaggtcacggtcacactcctaacagc

SEQ ID NO: 119201 - DNA, 442 bp, Zea Mays
cctgatcagtaacggactcggagcccaagtgtcctgaggcggtttcctgaaccctgttgagggcccaacctttgaacccctgaatagtatgctgcttttttcctttccttctcgaagaaggatgtccgaggtggcggtgccatcttctcgttctctgcaagggaatggaaaagaggagggagagaggggcacaccttttgatgcgtaatgcaaagcggcgctcgcagcctgacgtcaaccgataggaagggcaggaattaaatgcgacgagacacatcggcgcgcaggccgaccgttgcagcacgcgtgcgtgaggaattcgaagtgacccagcccacgcctagttttgactcgaggtggctcagcccaagatttggtgactccatccgtccctatgtattcgcccaagacgtgctcttcgattatttaccttatgtttttg

SEQ ID NO: 119202 - DNA, 424 bp, Zea Mays
actataccctactcacactcaaagggagagtaactcaacgttaaaaaaccactgaaagatatcatctcaatggaaaatgttttctgtctgaacaaatcaatgtttgatttcactctttggttactgtgcaggagcattctcgcgaggaaccttatctacaggttcaccagaagcagagggattacttgaagtagccgacgcagcaagtacatcagctacaatgtcatcaggcaccacaacgccaggcctcttcatcaggatccggccagcccagatggccttatccatcctttgtcacaccacgccttcatgatagcacgaccatcctctaagacattgatgtcacgacgggcagcctccacatcgcgacgagcaacctctagctcctgtgaaacaagtttcttcgaggcgtgaagctctctga

SEQ ID NO: 119203 - DNA, 461 bp, Zea Mays
tcgctatgttccaccctagggtacaccagctcatcccgaagttgggcaacattcctatcagcgatctactcaatcgacaccactggagacaccgcatactccgcatactcatcaggctgccccactggcatcccaatgagacctacaggccatggcactgctacaggcaccacatgcttcaaatgtggtgagactagtcactatgataatgtttgtccaaagaggaaccccaacacaccgcctcatggtaattctcagggcaagcagacacagactccaggcagcaactatggttacaacactgtcggggttaatcaaatcaatgttaaagctaccgaggatggtcctaacatcgtcattggtacgtttttcattaattcagtgccagctactatactttttgattctggagattcatattcattcatatctactcattatgttcatgcaaatagtctacc

SEQ ID NO: 119204 - DNA, 911 bp, Zea Mays
ctcgcacacagaaaggatatgatgctatatgggtgattgtggatagattgactaaagtggctcactttattcctgtcaagactacttataaggtatctcaatcggcagagttatatatggctcggattgtgtctttacacggtgtactgaagaagatcattttggatagaggatcatagtttaccaccaggttttggaaaagttttcatgagaatatggatgcgaagttgagttttagtccggcctacctcatactgatgaacagactaaaaggactaatcaagtattggaagacatgttgacagtttgtgcccttcagcatggtagtagttgggacaagagtctaccttatgctgagttctcatataataatggttaccagaccagtctaaaagatgtcaccgttcgagactttgtatgacaggaaatgcagaactcctctatttttggaccagactagaggaagacagttctttggacttgaacttattcaagaggcagaagaacaagtttgtataattcgagagaatttgagggtagctcagaccaggaaaaagagctatgctgataatagaagaaggccactagagtttgaggaaggtgatcatgtgtacctcaaggtgtcaccacttcggggaatgaggagattcaaagttaagggcaaattgtcccctcgctatattggaccattcttgatctttaggagagttggagagatggcataccaactcgaactacctactactctatcggatgtgcataacgtgttccacgtgtctcaacttaagaagtgtctccgtgtccccgaggaacagttaccaatggaagagctcagtgttcagggtgatttgacttacacggagtacccgatcaagattttggataccctgactcgagttacaaggaataag

SEQ ID NO: 119205 - DNA, 885 bp, Zea Mays
ggcttttctccaatttttgcataacaactaaaggagatgtctgtatcaacgttgctctcctataataggtctacaaaatttatgtggtgacctagggcaaattctcactaatttgaaagccacagatctccaaagttgagccaaatctcttattttcagacttagtctatatagggtttaagtagtgctttttgcaataagcccaacacttagggtttaacttgcaaattcacatatttgtgatccatttgacttaggataccttattgtcatggtttttgcactttagccccaaaagtggactaattttgcacttaaccctctagggtttggatttagggttttccagggtcctttttagggtttttggtatttcaggggtgtgaatgtaatgtaggtccattcttaagaatattttatgactatttcacttaaactttagggttttctctatttggctcttgtttacccttcagaaccctatttaaggttaagtaccctacactagggtcttatttgcaaaataccataacaatacaacttgtttaaaaattttgcctagtgaatgcattctaggtgtatcacacatatgaaatgctaatgcaaatgatgttatgctcaagttttagtaacagtaacactaggggtgttacatccttcccctcataaaagaatctcgtcccgagattaaaagtcctagggtaagtaatggaaaaggaaacacgtcattcttttatttcctgatttctagtacaaagtaggggtggtttgggatttactcctttattacaacaactatacacactttacaaattacatgaggctaaaaagcgtgggaaattcttgtctaaaaagtcttgagtttcccatgtagcctcatcttcg

SEQ ID NO: 119206 - DNA, 567 bp, Zea Mays
tatttgctcgaatggactgccacccccgctctccaccactcccaaaaatgttctcgtctcgagctagaaatgtacaaacgggtcgcctggtccggcttgcccggacccgttaaagcacgatctgcttaagcatgacacggttagatccaaataaatatgtgggccgagctaggctgggctgtccaatgagctcaactatgtgaacgagtccggcacgggacgtgcccaaccgtgttggaccggtaagcctgggccgaaaatgaacaccataccggcccgagcccgccagcgtataaaccaagcttaaaattagaccgccataaaaagttaaactcatttacaaagcacagttgaatgatataatgaaagacaataacatatattacaaataatacatatatcacaaatgtttgtcttaatatctcgagctacttgtatgtacgtatgtaaagctatctgcagcggatcttctattcatcccctattttattcctaagtgtcaaacaatattatttacatcctctattttagacactctattagtgactgtgcaatagccaatagaag

SEQ ID NO: 119207 - DNA, 361 bp, Zea Mays
gcgacgttggcgttttagaagtaacagcccagtgactgctggcgacgttggcgttttagaagtaacagccgagtgataacgggccacgtcggtcgctttggaaacaatggccgagtgaagtctggtaacgtcagcgtttttagaaataacagctgagttaaattgggccgcgtcggccattttggaaataacggccgagtgatgacatggcacgccagcgttttagaaataacagctgggtgatgacttggcgctttttagaaatggcgtctggcccgagaaaaccccatatgtactgcactgtcgcacgcctctgcattttgtgccctagttttgcttttctgcatccaggccttctatg

SEQ ID NO: 119208 - DNA, 346 bp, Zea Mays
cttgatctgcacggtgcccatgccaacaacagtgcaaggggaattatcacccatccgaagagtacctccgttctgcacagcttcataggtactaaacagagatttgttagtgcaaacatgatacgagcaagcagaatcgaggatccattgggcatcagcagcagcacaaccagcaaaggctataagaacatcaccattatcagaattattttcggatgcaacagagacagtaccaccggtcttacccttctccttgttcctcttctccttgttctgcagtttgtaacaattctcaattacatggttcatcttcttgcagtatttgcaaaataattcatcagatggc

SEQ ID NO: 119209 - DNA, 327 bp, Zea Mays
attgcacatatattgataggaatgttcagctcctttttaggtaagttctaagcactacctctttcagtgacaacatgtacactcatgtatttatattgcgatgttgcttgctttcgaccattgtgacacggacacaccgccaccaatatttttatctaacacgattaagaagtaggaatgcaatgttcttttagcatttttcctttggtttggaggggacccaagaaatgctacatgctttatttgcttctaatgaaaatgattgatctgtcatcggttccaagtgatagatctgtcggctaatcgtctcaaggagaaggatccatc

SEQ ID NO: 119210 - DNA, 284 bp, Zea Mays
cgccgcatcaacccgggagccgctggagcttctggtattggtaaccaggagggtaatcaagaagtaccacttcctccacgtccgccatacacacccgagtagttcttcacgcaatttctaggagctcaaaggaacatggagaacttgcagcgaaatatggaagtggagcttcgcaatattgctaacaacactcgccatgggcaacattaagaggcatatggggtcaatcagtatagcagtttcaaggatttcatggacaccaggccaccaatattcaaggaggc

SEQ ID NO: 119211 - DNA, 730 bp, Zea Mays
ggaaggtctgtatcttccgcttgaactgatgcaatcctccacactgccacgacatctcgatgatcgtgcccagccagatagactgtggtgcctacgggtgccatgacgtctattctactaaaaatcttcatcatcatcatgaccccagtcacgacgagagatctccctgcctctgcgatcctctgatctctctcttttttctccaatagagtctggcacgccgtagctccacacaaattctctgcgtggcctgcggcaggggcccccctctaacatccctcccatggatgaaggagaggtcttcgacaacttcaatgtggttgaaaatggtgtacacatggccttccttcagatcagtttgtgagtcatgttgagccccaaccagaggcagagggcacgaggaggggggagctccctatcaggttctgtgacagttaaccatacctccttggggatttcacaagggtccaagcaccaagcccaaatgtcaaaggacctagtgcgctccctgcgcctcgagcgctcctcgacatagtgaatagaacagctcctgcccaaagccctaacagccacatcctcaccccagcagtgaaccggaatcccctccaccctaaccttcactatgaactcaaagctagtcttcctggtgtaacagtcctctgaccagtccccaaagtgaaaaacccgaccacgataggagaccgacctcctatccagtgcccattgctcg

SEQ ID NO: 119212 - DNA, 729 bp, Zea Mays
gtaaagcaggaaaaggttagctcacctgaaggttagaaaggaacaaaggaaatcccaaagccggaggcattgatgcgccgtcaaatggaggggtactagtagaaacaatattgagagcagactcgagccctaaaggaggattagaactcgcgcccaaggcagtactcagtgaaacctcagccccgacagcgtgcagcgaattcccagcgctcgggtcactaaccactaaagtgatcggaccaacaagagcggcaggaagactcatcaacactagctcctcatactgagttggtggtgatccgacatgaacatccatagaagcagccaaagaagagccgagcttggcaccctcaatggctggatcatcctcggcagcaccctcgggggctgggttatcctcagcggcaccctcgggagctaaagcaccctcgatcgtacccacaggagctgggtaaccctggcatgcaatgtcagaagccaatgagttcccatgaactaggtcaccctcaaaggtcgaagaagcgtgaagttgtccgggttatttcttgcccaactggattactagctgaggggctgtcatccgggacctctgtatggatgactgcaccctcagtttcaagaagctccgataaaagatgtttagggataatctcctctagtgcatgatcaatgggaaacatcgtcaacctctaaagactaaccagtcctgacagagcctgagttaggaca

SEQ ID NO: 119213 - DNA, 558 bp, Zea Mays
ggaaggggtctctgagctgcaagtgcggagactacccttaggagttagagggttttggtgggtgggtgatgtttggttttcagtgggttcgacgaaggtgaccttgtccttctcactggcgttagcggaggtggccttcttggcctcgtcagcaagggagaggttggtcctggtgttcttcttgggagccatcgtgggctgttctttgaagccagcacgatggacaccaaatgttgggactggggatagtgggcccaagcactcgcgagcgaaagtgacagatagcacggcaaaacagatggcggagagctcaaatgtcttgtcatgtgtgtcccatccagctacaggtcgggtgtaattatagggtaattgggggcaggtaggcctaagtacggttatgcctgctagcctaagcacaccaagtattctaccctcctcagaggtttacaagtgggaccaccatcgcccggtcggaggtgggccctttgcaggaggcctggacttcgcttacaaggacacgtccttctaggcgaagcaccaaagtcgtttgacttccca

SEQ ID NO: 119214 - DNA, 419 bp, Zea Mays
cagcatccccgatgtaatttatctggtgctggcatagaaagatgagaattgccttggttgtgacgaggggagaagtggttgcacatgcctgtttcatctgaaacagtgcagttcaacaaaggcctgaaagttgaagtcacgtgagatatataaaaactaccataacccatagctaggcaactgttcttgaatctttctagatgaaacatttttgggcttctttatgtgctccaccgccatgaaccctagatttatttctagtgtgattacatccacagactcagtgtcggttgggcattcctgtgacaaggaccgacaggcgacagcgttgtagaacccaaaacagaacttgaatcggttacagtagacaagtaaagactgctctgagcagatagtactcgcctacttatgcacattga

SEQ ID NO: 119215 - DNA, 482 bp, Zea Mays
cgctgcttagtgccttagtttcagcttccacgtacttattgtttttatccatgcttgcatattgtctgctctcatagttcagcagtactaccatcttgctcctgttgggtttgcaacagttggtagcagccatcccgtttaaagcacgggatatttcggtctagactccagatagagaaagccgatcagaatacgcttcatcacatgtatttacattcatcagataaaggatgccgatcatatttccatccagctagagggcgccgatcagaagatgtgattccttgtggtgccaatctgataaactgggaatggaccaccctcgatggctcagagcgggcccgcccgtgctacctatccatgcaaaatccatgtcttctccgtgctatataccccatacccaatacccatccacaatccgtggccatgggtaacggtgtagcgctcgtcctctcgctctcgattcctccgtgttctcaaca

SEQ ID NO: 119216 - DNA, 505 bp, Zea Mays
taattgtctcttgtgcatcaacatgcttctctcacctttattccaagaataagaaattgtgaataatgtgttgtattgctatgaactgcaaaaaactgtcttacctcgtgtcagattggtaagtcttgttaggtcgcgttatgtgtttctcttgtctttgctatctaggtggcattgcaattgttcaaccctttttgccaataaaaaaattgttgtctgttttgcccataaaaagacccctccaaacaaccttgagtttagcaagtgaaacctctaaaacaaattcattcttgtgttggtgttttctaacccttgtgtgttttaccctgaagttgcacctacacaacttgtagacccccataacttaacagctagccaaactgaaacttccttaagcacgtggttatgtcaaaaaaacatcgtttgtgtctagttgcgcaaaccatgaccaagccatgtttctttccataaatccttgcccctaaaacttcatagcatttctgtt

SEQ ID NO: 119217 - DNA, 856 bp, Zea Mays
cacacatataaatatagattgtcagcctcaatgaagggcataatgctttgagcaaatatttcatcaaacactattgagtttggcagtttttgttctatcaagggttgtttgttccatagggagatggtgatacttgatgtcgatgtcgacatggcactgaggcctggtgcacagtgtagtgctgaaaagtgtgaactcaagcttggtatatgcccttatggtttgagtttgtgatgagtgattgttaacgaagtagtgtcttcggttgagtcgagtggactaacaaggtgcgtgtgtgtgcaacatgtctcttggcttgtggtgcatagttatgaagtgtggagttggaggtggacgatgaaggtgaaggtcatgcaaattagtgttgattgaccgacattagtaaaagatgactgttgggacttgatcgacaaactaaataagtcgaatgactagatataaaggctaacgcacctcgggacaccaacatacacaaggatatcgtagagcatatcatgtcgctggaacgatatggtagagcatatcatatcgctgacacttgatcgacaaactgaataagctgaatgactagagggcttggtgggacatgtatgcatgcaacacatgggggacatgtatgcagtacactacctacgatggtttggtggctgaacctcaaatcgactcagcgactgtttcatgggtttggtcacaaaacttggggcacgattctggcaggaagcagaggtgcatgtgaagccatcgcgaaggttgtgtcaaggcaaaaccaatctatgaaggaagtgtggacgtcagatcatcagatttgaagatgggctattatgccctatcaaag

SEQ ID NO: 119218 - DNA, 503 bp, Zea Mays
aaataaaatgtcagattttatcaattaatttcaacggtcacagagagaacattctctataaagccatgagaacatgtttgcttgtctgcatggctcatggtatgcacatctcggcacttggcagcaacaatttaacagatgttattcaagcaattttgacaatgggcacttctctgaagtaggatcctcaattacaattggctcatcaattttgacaactcgcacttctacaaagccgattggaatagaaggaggatcaacttcttatgtagagacaacagctgcttgacctttccttttaggcacgtagacttgattgattgtgtattcccctttgcacgagccaaaaatgtccttgatgtcattattatatcttgattgaccgaagttcaatcgactaaacaccgaatgacatacactaggactaaacaccaaatgacatacactaggaccaaaaatagctccttgcattggttgcatcataggcaccattgccaatatgg

SEQ ID NO: 119219 - DNA, 302 bp, Zea Mays
cctgcagcaactccaaagaggaggagaatggccagcgtactagacgctgtcatggaatctgtgaaaatacaaacttcttcttcagcacttgatttagagggtgaagccttaaagaaatcttgcgaagattgtgtggcacaaactacttttgaggttggaccctcagctcccgctgaagcatggccttcaggggctactcctatacccacggaaaaagaaagttgttaactccgataggttcactagtcgtagatcattacaaccatgtggttcagagaggaatatcaggtaggaggaggaag

SEQ ID NO: 119220 - DNA, 396 bp, Zea Mays
gtcgagatattccatgaatactttattcatcaggttcataaagtaagccggtgcattggttaatccaaatgacataaccaaaaactcatatagtccttatcttgtagtgaatgctgttttaggtatatcttcagtctgaatcttcaactgatgatagcctaatcttagatctatttttgagaatactttagctccactcatctgattaaatagatcttcaatctaaggtaacgagtatttgttcttaattgttacttcgttcaagcatctatagtcgacacacattctccttgaaccatcttccttgttcacaaatagaactggggctccccatggagacgaactcgggcgaataaaacctttttctagtaattcttctatttgtttattcagttc

SEQ ID NO: 119221 - DNA, 334 bp, Zea Mays
gccggagtttaaccgggggggaggaagatgcatggtagcggttgagatctggaagaacgaatgtgattagatcttaggatacctctttgcgacattaaatcaggggcgtaagttcggtattgggtggctaggatctgaacgtggatcctcgatcagagggcggttgtcgtgtaacggttgaagttaacctagatctaatcgtgaccgtagatttctaatccgacgaccgagagctatccataccctttcagccgtgtcattttacctaagagtccctgtgttttatcgaaaccaacccgccgtccacggcagttataaagtatttagaccgggc

SEQ ID NO: 119222 - DNA, 485 bp, Zea Mays
aaagctttaaaagctcaaaaagatgcagaagatgaaagcagccaaataacaattggaaaccttcgttcggaggtcataacattgagaaacgaagctcttgaaaaggataagatcttgctctctttggtgaagagattaaaatctagtgaagccaggctttctagcctttctgaagcagagcagaagatgaagaaggttgaaatgagacaattgaaagatgtgagcgcattgctaacttggaggatgtgttgtccactcaagtggaattgcacagaaccgaagtgcatgaactataaaagaaacttgacgaagtaactggaaatttcaatgtggaacaaacaaagtgtgagatatctgacatggaatggttaaggctgcagaaaaatattgaggagcttcatcaagataaagaggaatgctacaatgttgttaaggaatgtgctaataatttgaaaaatagttttactaaggttggcgcattctcc

SEQ ID NO: 119223 - DNA, 336 bp, Zea Mays
gtcgtcttcgcgtggatgggactggtaagcgagaattgttgtcctcaccgattggggtgagtgtaggtgagggggagctacgaaatctttttgagggtgaggaattgaggataatgctgttcaactacaaggagatggatatcatcccgaaggttgagccaatgtaatatatgatgccctcgctatgtgtatgtaactgtaatttgtatgataaggctgcgcgccttcgttgatccggccacgcccgtaggcgacttctgcacggagagtcttttggaaaagacttcgattttgcgcacctattattctggctgcacccttaggcgacttttgcac

SEQ ID NO: 119224 - DNA, 364 bp, Zea Mays
tcatcaaggagaagcttacaaccgcgcccgttttgacactaccagatatacaccaggatttcgtcattttctgtgacgcttcaagacaaggcttagggtgtgtcttgatgcaaaatgagaaggttattgcctatgtgtcctgcttactcaagccacacgagcagaactaccctacccacgacttggagttggcaaccatagtgcacgcccttaaaatatggaggcactatctgattgggaacaaatgccacatcttcaccgatcacaagagtctgaagtacatcttcactcagccagacctcaacctccatcaaagaagatggcttgaattgatcaaggattatgacctcgaaatccactacca

SEQ ID NO: 119225 - DNA, 585 bp, Zea Mays
cacgcatagaaaattagcaacagcagagctgagacgacagcagctagcagcctagcatgcttgttccccccatgcatcacacacgggggtcagatttgtggaattcaaatgtctgcagatgatgatgaaaatacgtacgtgccaataatcttgcattgtcaaatgcgtgtactacagttagtagtctgatcacaattcacacgacaccgtaccgtaacgtttttttcgtgctctcttttcctttattttgtgatctcagctgatgaatttgaaaacatggttgctagcttgtggtcgcacatgctaaaacttttccattttctagaaggaaaaaaaccatcatgtgtccacacccgtcatggaacacactagtgttcctatactgacagctatagaacgcgcgacgacattctcgcgcgcccccattacggccatgctattattaccgctacatatatatatgcatgcatgcatggttccgtaccttttgaaatgtcggattacttttactgttcgaaaaagccattagtcatgtagttaactacattgagagaaaaaaaatcattcggagagatagatcatagt

SEQ ID NO: 119226 - DNA, 703 bp, Zea Mays
gattgcgatttggagattagtggtttacgattcatatgagttggtcggtgtgcgaatatacttgtgaatctgtgtgtttataaaaatgttgtagtatatgttgtatctcggattgcggcgataataggcaagctgacgtgtatgttatttagcggctatgtcgttgctctagttagccgaattgttcgatgacttggttaagctcgtaatcacagtgaattgcttgttgtggtctaaatgtgtatggttatggtcgcgtatgaaaagtagtagtgttcatgtgatgtctaagttaaaatgcaaattagtgtgtgaagggcgcatcgatacatgtatatgtaccgggttcgattattgtggtggatgtgtttgttaattgtgtgtggtgattctagcgtacaaaataactcggataaaaattggtaagttgtcttgttggttctcacttggttattttaactctaacaaatgtcaaagtgttagaataattcaagtctctagaacgcgacaatttttgaagtaaatagaagctgaattttattagttgctgttttgggctgcacgtagtgatttcctcgtgttatatgtttgatgacccaaatcatgttttctgtagaaaagccatatagaaaagttatagataactttattatcttacttgtgttaaaatatgacagccataagtctgatagtttagaagttg

SEQ ID NO: 119227 - DNA, 501 bp, Zea Mays
gccaggtattcctgcactaagtctctagtgctaatgtcagcagccaccactctgaattcgacttcggccagctggcatggggatccgagttgcatattgcataatggccttgtcatcctgaagctcaacctcagaggactcataaccatagtcatgagtttttccctcttcttctcatcagctttcacgtagaaccattcgcttgtccacctggtcggccacttagtgcggtagccgatcaccgaggccttggtgtcttttcgatatgcaaaattataacatccatagtttttgtgaagtccatctgctctggccttcgtctgataatgcaactcgtgcactcggcagaaaccttcggtattggcacttttgcccaatcttcggagagcccatatgtaaacacttagcctaacaatgacatttggtgtcagctgatgaagatatatttcaaacctcttcaaaacctctcctattatatcatatagaggaaaccgaagcccc

SEQ ID NO: 119228 - DNA, 732 bp, Zea Mays
ggaagccaggggtcgacatagccaaaatgatgatgcctgagaccatcatctcccccacgtcacccgccacaataactacgagacaaccgggcagccctgggccacacaagtacgcgtggcctcacccggggtaaaacgctggtttaaccccggccttacgactccttcccagggaagccaccattggctgacccatctcctggtctgtaaaagggagaggctcacctcaggtcaaggcgaaggagtgatcgatcgaagagagagctcttggagacaatcggacgccttcagacggagacgaacccatacagatgtatagaaggaggagcgtcgatgaggaccaggaggccgatgccccgccgagccaatacttgcctaggactccaccttgtagcttctaagctccacttccacccctacaagacatctaggagcttctcctccctctctcgactgcttgtaacccctactacaagtttgatcatcagttgtaccgcgcaagccatcaatgactagaaatagggacattctgcccgaaccagtataaaccttgcgccctccgtgcaccccctggagcccagaacgcgcacaataaatttacttttcggagcgatgtacgaaacaccgatagtactcctcccacatatggagtcgctgctcctcgtgctgtctcaagctgggtagtgccactaaatatccatagtgatgtggcctccaaccaatctacattct

SEQ ID NO: 119229 - DNA, 415 bp, Zea Mays
cagagtcagaaaggcaattgtatgagtccatgggcattggcattgacagggcaaagatacctacacagtttcacgagaaaacatgcaccgtcgcgcgctggccactggacacgacaacaacaacttgcctatattggcataggcagagtgataatgttggttaagataacgagtgctatacgcatgaaaacttctttcataaataaaggcctacatctacatatagagacatgaataatgaagcagcacgatctgaagcatctaggtcccctactattttttaataagaatgaactgtagctgtgacgacatgccaaagcctagtagatattttatttacgtacctgaatatgattggcccatcactgctctcggtttgtacttgtgcacatgtgagatccaagttgaaaacgca

SEQ ID NO: 119230 - DNA, 867 bp, Zea Mays
agatgagtaccgtaaagcctatgttcgaagatttctttggcttagggcctaagcaccaactgtgcaagatgacattgtcacagaagcaatcatcaaagggctttattcaggcctagcagctcagtacttcattaggatatcccgcatttcctagagaagatgctacaaaaaatggacgagtacatcagggtagacaacgattttttgccaaagaagggaggaggcgcaaagatacatagagatggccaggggctttggaggaaggtttcacccaatgtacatccgaagcatccataacccaaaccaaaataaagataagtccagttagggacaacgaagtcaacatcaagaatcaggaacacaacaacaatcctcgaaaagcaacttttcccaccagctccaagaggagggagaggaggccaaagttttgaaggaaagttcaatgcacaactatgaaagttatattgtgctttctatggagagaacaaggaccacccttcaaagacccgccaaataataatacaaaagaaaaaagaacttgctgatgctacccagacaactcaaccaaaggaagtgtttgacacatcttcatattattcatcatatatttctcatttagcatcatgaacctcagaaatttagagtaaatctcaaaaaccttcattcgaaagaggggtcgttctaatcgaagtcttgctaaatgttgtggaggaatatcatatacatgtgatatttctggttttcgtcaatcattgggaatagatggattataacgttgtttttcacctttatcatgtgtgaaaacaagggaaggtttttttgcgttcgtctcaaaaagcacaattttttatttcacacatcacaaag

SEQ ID NO: 119231 - DNA, 273 bp, Zea Mays
gaaaatattttgcacaagagagagttcttacaactagtgatcctttttctaagacatggttaacatatatcaagtggatcacaaattgcataaatgaaatcaggaattctccttttaacctagtgcatatcaagagagatatcgatttgaaagagtatgaggcactaagtgtcatttgatgttattctatgatcaaacaaacaatggatgtgatcaagagagtaacatattggaatatgaattaagcttaaaatgggagaatccaataagcat

SEQ ID NO: 119232 - DNA, 286 bp, Zea Mays
ggggacgaggtaaagagacaattctaggtcgagggtggtgtggaacgtggcaccagagtcggcaacctagtcggtgagaagagggggcgacaaagacatggggtgcgcgaagagagccaaggaaggcaccccatagaaccaccgggacgggggttggggccgggcgtggcgagcatgttgacgacgatcatgggtggcgtagacgataaggtctcgatcgtaatggagacaatcgcggcactgcagaatacaaatggcctagtagcgtggtggccctcccgagggt

SEQ ID NO: 119233 - DNA, 411 bp, Zea Mays
taaccctgttaggtttaagtgtagtctgtaataagaattttattgcaaaatattaaactctacataattctatgtcactctatgcacctggcagtgttatgactccttactacagtgaagaaactgtatattcaaaaagtgatcttgatctggagaatgaagatggtgtatcaattatattctacctacaaaagatctttccaggttccatttttctttggtttcccttcaatctcaatgattcaattatttattattgtgttaccaattttcctccttttttatcctgattcctaatgtagatgaatggaacaatttcatggaaagaaataattgcaaaagggaaagtgaagtatggggaaacgatgaaaatgtactgcaacttcgtcattgggcttctcttagagggca

SEQ ID NO: 119234 - DNA, 705 bp, Zea Mays
gtagacgtttcttagtttatgtcaatgacaactttggggatcagctaacctctaaactggaatattgtaccaaaatgtgtttgatagtaatgtgtgtttcttgcatttgattctgccaggttcctgtacaatattgttatgtcaataacctcgaagtatgcatgttttttgtccgaagtttacgatataattattgtgggtcttatgcatgtttgtccatacacttatgatacaatagtcatcattctatgccaatacattattatatacattatcagcgttatatactgcaaatagggtcattttttgtacagtcatggttcacagactaaccatcttatgcattacacaacgcagagttatgcattttttcacatacatgtatgctaagtctatgtacactcagtttgctgcatacctgttaatagcttatgacaaattacacatatgtttatgcccagtttgcaagtatatttatgatactttctggaaatttgtcaaatgaacacaggaatcacatttacataaggaaatatttgtatcttatgggcttctactctctaccagatgaatcatcatctccgacatccaccgttcgttttttcgacgttgatgtctcattccattgtggggctgcagctatgattttgttccttgaaccaggaggtcgtccttgcttacgtccagataggttagccaatcgaa

SEQ ID NO: 119235 - DNA, 292 bp, Zea Mays
gaaaatttcttcccttcttacctaagtatctctgaagagtttattttaaagaccaggtagtaagagtgcaacgtatagaaggtgtgaatcaactaaggttgattctgtaattacacatgcatcatgctaaaaactatactaataaggtttcctccttagacaaatgtgtcgcgcaccagaaagaccgcgcacaaatctactggacccattggcataccccgccatcaacttgctccaagacatgaagaaagttatgcctgatcatcttctttatttgatgcctttgaattcc

SEQ ID NO: 119236 - DNA, 1124 bp, Zea Mays
catctccaaatctttagtggtcaatacattgagttgagggattactctttttggacatttagcctggtgccctggctcaaacttctcaccacaagtatagcagagtccatttatcctcatgtattctttcacttgtctctccttactccatgccccttgatccactaccttctcttcagtcctaactcctgtcactcccctacctccttggtctatcttactattcctaccactattctttaccacaatctcctgctgcaccagcaccaacctaatagccctatcaacagtggaaggaatctgggacattacatgaccttgtatctcattcttcaatactttcataaactgagcaacaaagaatacctcccccagttctggattatgtactgctgtttcatatctagcctccttaaattcttctacatactcttcgacacccctttctgttgcatatgcaaaattcttcccatggcttttggatattcatccacaccaaatttcagcaacactaatctagagaaatttgcagccacctagctgcatttccctccatgttcatcgaagcagtagctaccttcattgcacctgggacctgatacatgttgaagtagtcctcacatcgattcaaccaaattgccggttccttgcctccaaacttggggaaaagcatcttaggtacatgctgttgcaactcccttcctccttgatcctggttcggtaatgcccctcttctacctcctatatccgatgactctggtcccattccaacatcctccatctctcttgccatagcttctaacctcatcctagcaaacgccttcccgttctcctccacacgcatggatagagttgtcctctcatcggcaacctgtttcaccaagtcggtagtcaattctgactgtcccaatagctagtgatgcaccttctccatagcctcaactttccctgtcaacctctccaacatcaccatcatcttttcccaccttgcttccccttgtttagcttctgtcgccatggcttccaacaccagcctcgactgcggcgaaggtttgacaaagggcgtcgtggtgatcacctcctcttcttcctacaaccaacctaacccccttgtgatcaccaac

SEQ ID NO: 119237 - DNA, 865 bp, Zea Mays
tgcccaactcatatagcagagtttgtatccacattacctcagcggtggcattagcaactgctttgtattcagcttctctgcttgatcttgatactgtagattgcttcctggcactccaagaaataagattagatcctaagaacacaacaaatcctccagtcgatcgcatgtcatattgatctcctgcccagtctgcatctgaaaaggcacttacaagaagagagggtgacttacaatttttaagtccaatctccatagtatgtttgagataccttagtattctctttactgcagcccagtgaacagtagtaggtgcatgtaaatattagcaaaccttattcacaacaaaataaatatctggccgagtcaaggtcaaatatttcaagcctcctacaatgctcctgtaagccatagcatctttgggaccaagaggatcaccttcgtgagcagatattttgtatgaggtggacaacggtgagctaaccagtttgcactccatcatattggcacgatgcaacacatctttagcatattttccttgtgttagcagaattccattatttatcttctttacctctataccaagaaaaagtgtaaatccccaagatccttgagtgcaaactccttcctcaaatcctgtaacaggcatgttgtggcttcttgagcagagctagcaacagttatgtcatcaacataaattagaatatatatatagtgacagaacctttatgataataaaacagagatgtatcggtctttgatgctttaaagcccaactggcacaacttattactcagccgtgaataccacgcccttggtgcctgtttaagcccatataaagccttatcaagtttgcagatatacc

SEQ ID NO: 119238 - DNA, 543 bp, Zea Mays
ttagaattgatggtcaatgtcaatatatcattttctgcgtgaaattatgttgtattgagatttgatttaaacattgagttgcgattatgcagatgtaaatgtttacgttattcattgtatacattatttcagcagaggcttaatgtgagatgcaatccccaagatgttatagtaagcattcagattttaaatgactgacagcgtcaagatattgcacggagggggttctccaatatacttgatatgagagttgacgcgcttggcagtagatatcatttagcttggctgatggaaaagcttgaccataatgatatgacaattcaagccggtctagggaaggagctcaaaattacaaaggagacagtgcaccttattttggggttaccaaatgctggtggaggaaaggcattaggcattgatgaagctgttgctgcaaacaatttaagggctgaacttggtttatccaaagaagaatttggtgttgcagctcttcaagatcatttgaggaaagggttttacgatgatctaagcatcagatccttc

SEQ ID NO: 119239 - DNA, 493 bp, Zea Mays
ctgaaaaagaggcgtttggtgggggagtattcgcttattggcagcttttgatcatttcgatgtctaacatacaagcgaaaaaacaccatcttcgatctcacatactctcgggcttctgcagttatgttgtcaccgtatcatagatcgtcgactggacagttctccctgatgcgtcctccaggtgccattgttgattgccctagaaacgagacgccacctgcaactctacgaggacctggtagccatgagatctatggagaagatggtgttctgacaataatgatgcgtgggccgatgaatacaataggatctggtgaggtggatacatcaaatatattacaatcgcacgtaagttcaatgcttataagtatgtttatgatttgaattcactgacgatgatattgtgttcgggagaaatgaagatttgatgttaatgtaaggatttttttatgttgtacacagccagattcgattgatcctagtttaattccta

SEQ ID NO: 119240 - DNA, 511 bp, Zea Mays
ggcaagcttggtgccgatggagaagcagaagtccctgaagtcctggctatcaaactgtttgccattgtcgactgtgagctcggacgggactccgaatcggcaaacaatgttttgccagaagaacttctgggcagtcttcgacgttattgtggatactgccctggcctcgatccacttggtaaaatattcgacggcgacaaaggtgaacttgaggttcccttgcgccgtaggtagtggcccgacaatatccagcccccatcattgaagtggccatgtgtgggcaatcagcttggtgaactgcgaagggttactaagcggggagaaaacttctggcaagcttcacacgacctcgtgactcgattcgcgacgcagattatagcgggccaataaaatccttgacgaattaccttagcagcgagggccctgggccctaagtgagagtcacaagttccgctgtggacttcgcgtaggatctgaatgccttcggtttcggtgacacattttagcatgg

SEQ ID NO: 119241 - DNA, 344 bp, Zea Mays
tgtgggggacagatatcccttgggtccagtagaaggctagaaggcctcgcaaaaggccttgggtctattgtttcgcaaggtcatcccttcgtgggccaggggagaaccgccggtaaaacgggccgacacagggaatgagcaaacgtgagccgaggcggctcgcggggttgtgagtgttatccacagctctgatccgattctcccgcgcgactaccttggacatcggaactaagtgagaataagtcggcaagattgtaggaggataagttcggttggttcactactacttaggcatacatcattatcgtacacgcatgtaagtgccccacggtcggatatataag

SEQ ID NO: 119242 - DNA, 768 bp, Zea Mays
ggactacacggtttgctgcgcacatgatggctggccagtagaacccttggcacaagaccttggcatcaagggctctagggcccgagtgagaacaacagatgcatttgtggccctcttggagaagtttgatgtcttcaacctctttaatgcacttgagcaagggttggttgagtccctttctatatagctacacgtgtattattgtgaactaacgactttagtgttttaaccttttggccttgacttaatcgatggggtggtagtgaccctgcaggtacaaagttatgggtgctctccaatcttcggtcatgattaagttaatgattctttggcctttgagatcttctgtgattttcagaccttcggggtttcttaccacgggtgtgcctatcgtatgaaagaatacatccgagggcatgggatcaccctttgttgttgcctttgctagcatgtcagcctcttcattcttgctcatgtctatgtgttggagtgtgaatcccttgaactgtttctccagactccgcatgactgataagtattgtaggtggaccgactccctggctgtgtagtctttctcaatttgtccagcgacaatcttagaatcagttttgactatgtagttctttacgccaaggtctctaagtttctaaagtcctaggatgatagcttcatacactgtaatattgtttgtgcatttatctgacttgagtgcaaagcttacgcaggcggcgtatctgtacttggccctgaacggtgttgtgatgattg

SEQ ID NO: 119243 - DNA, 1887 bp, Zea Mays
ctcttttgctcaaactcagctgcattacctgggacacgttatcagccaacagggtgtcgctacagacccggctaaagtgtcggtcattcagtcctggtcgtctcctaaatcagccaaggacatctgcagttttttaggcctcgcaggttactaaagaaagtttgtagcgaactttggcatcctaagtcgacccctgaccaacctattaaaaaagggacaagtgtttgtgtggcattcagaacatgagcaagcttttttggcattaaaacaagttttaatcagtgcacccgtgttagctctaccggacttctctcagcaattcgagattgagacaaatgcgagtgacaatggaattggggctgtcttacaccaggctggtcatcccattgcatttgtcagtaaggctctcggtcctcgtcatcaagcactgtccacatatgagaaggaatgtttagctatattgatggcagtcgagcactggagatcctaccttattaacattgagttcatcatccgaactgaccacaaaagcctaatccatttggatgaccaacgtcttaccactccttgcctccttggcaacaaaaagccctgaccaagttgctgggcctgcgttacaaaatcagctataaacagggacacaccaacagagttgccgatgctctatctcgacttcctcatgaccaactttgttctgtcactactgtccaacctacttggttgtcaaaagttgctgattcctatgctaattatttagatattgcaccaattctgaaattgttggcagctcagactccttccaatcactacagcctgcacaatggattaattatgtacaaggacagagtggtgctccctgcacaatctgaatttccccagaaaatattctcaaatttccacgacacaccaattggaggtcattctagattcttggtaacctaccaaaagatcgagaggttatttagctggactggtatgaaacaaatgatcaaaacttggtgcagtcattgtccagtctgtcagcaagctaaagttgaaagagtaaaataccccggacttctccaacctctgccaatacctgatggtgcttggaaaatgatcacaatggattttatcgagggtctaccaacgtctgatcactcaaattgcattatggtagtggttgacaaattctctaaatatagtcactttgtttcgcttcgtcacccttttacagcattgggagtggctcatcacttcatggacaacatttttaaacttcatggattcccttcaactataattactgatcgtgatcggattttcaccagtgcattgtggaaagaaatgttcaaaattgcaggtgtggaattacgcttcacaacagcatatcatccccaatctgatggtcaaacggaacgagtcaatcaatgccttgaaacttaccttcgctgttttgctcaagcgtgtcctactaggtggaagaaatggctttctctagctgagttttggtacaataccagctatcactcatctttgcaactcacaccttttgaagtattgtatggctatcctcctagacacttaggagtggacttcagagcagcctgtgatgttccttctctgcaagtttggctcgacgaaaggaaagtagtagttcaattggtccagcaacagctagctcgtgcacaacttcgtcagaaaacacaagctgacaaacatcgtactgaaagaacctttcagataggggactgggtctatttaaaactacaaccgtatgtgcaggcatccttggttcgcagagcaaatcacaaactggcgttcaagttctttggtccttaccaagtcattgcaaagatcggctctgttgcctacaggttaaatcttccagactcttgccacattcac

SEQ ID NO: 119244 - DNA, 431 bp, Zea Mays
tgctcacagaagtcgaagaaatctgcgctggtgaagttcgatcccaggtctgtgatgacactgttgggtatcctgaatctgaagatgattttctggatgaactccactgccttggctgagctcagggttgcgatcggacagtactctatccactttataaatttatcgaaagccaccatcacatgggtgtaccctccctgagcttttttgaatggcccgatcatgtatagcccccagcatgcgaagggccaggtgaccggaatagtctatagtcgttgtgctagcaagtgctgctacttagccaggaattgacatgcttcacatctttagactaggtcggttgcatctttcttcgttgttggccaatagaagcctactctgaaggccttccacgcaagagtccttaatgttgcatgtactccacattgccc

SEQ ID NO: 119245 - DNA, 396 bp, Zea Mays
agaaacgaatggggtgacccagagatgagattggggtggacgtgtcggtctggatcggtggcggcgaggaagttgtctccgtgaaatatcgagtggaggttggaaataccgcgaacattattgggccgcacgtttgtgagtcccaaatataatactctttagcttgagccccaaaacatttaaatgaattttattaaaatgaggctcctattggagctcacctttcttgtttaggccttatatttcaatttgttttattgcttagggctattgttggagttactcttatattttactcaaacacgtttccatccgatatctgatacgtctcctacattttcattatgccttcttttggatttccaaccccactatgttgtgctgcacataatttgc

SEQ ID NO: 119246 - DNA, 357 bp, Zea Mays
cttgatacatcttagtacttccgggatgaatggaatatcgactaatatgagcttcatccagaatttgttggtggacctcaacattcttaggcacgactatgcgatcattaaaccatattatcccttgaccatctcttctaaaacacttagcttttccggcttctattttctcataaatatgtttcatacccttatcacttctttggacatcaataatcttttacagaagaactgactcaagcttcaattggttcaaagttccatgttgtatcattcccaggttcaacttctccatttcttgacataatgtgatgtcaggggtcctcactgtaagataatggcaggaagccttgcgac

SEQ ID NO: 119247 - DNA, 319 bp, Zea Mays
aagccgaagcttttgaggagattctcaatcataggggagacttctgcaccttcgctggcgcccgcggagctgtgtcactccttgagaaggttggctgcgaacatgcaaaggttgtggttcagccaggattcccgatctcaaccaacaacattaagaacctttcggtcgaagccgctgcgctaagtggaaagttttattccgaagtttggttgaggggtggccgagaggtagctgatgaagctattagaaaaactgagaaagagtctcatgctgccttggaagaggccaggaaaactgacgaagttgcagaacatgcaag

SEQ ID NO: 119248 - DNA, 658 bp, Zea Mays
tatttttttcctatcgattgtgttgtcttcggagcaaggttgaactaacacattcccctgtgtagcttttgaggaacaatggaaggttcactatgatgaataccataagatgaaggaactacttgagaagggaaccatgaatgatgactccgatgaagatgagggtgacctagggaacaagaagggttgatggttcgatctgtcctggtctgaactcgggatgtgacttacaaaatccacggtatcatgggaagtatgttgagcacttaaggactactatcgacttattagctatgcataactgcaccatcatttcctgcacaaaacttggcagttccctcccttaggaagtttatgccatgcttaagcatcttaccattcaaattgcaaccgagagtgtttctgtacttgctagctcaaattgtaagggtgtgtacaacgggaatcttgagttatgtgtttgattgtgtctagagggtgcaggtaaaaaaaactctagagacgtctcttgagtctcgagtctcagacgaaaacacgtctcttgactctatgctcggtagaagatataattgattgatgcattatatttattgtgtcttaaagaatatagcaacatataggttttagacacactcatattgtgtcttagttgtgtatt

SEQ ID NO: 119249 - DNA, 477 bp, Zea Mays
ggtttttccaccccttgttctctaaataatacaccatatcaagccaactctcttcatgaaacttgctatccttcagataatctttaactttgctacatagagtagggctcatactccatgggattaattaccacagagctccaaacagataacccaacactgaaattcagtcttcaatacactgaatataactcagtttcagtcacctgacaatccaactttgagccagttttactccacttttcgtgtagaatcatgttatatccacttactgaaaactattcaatatcatatggtctttatttcatctacaaacaatatagcctaaaaccctatagaatagccacaaataggtttcaaaactgctatcaaaacactgaaattcagttttagttactgtttccaatctgaaaattcagaatacagcagcaccacttggaaccactctttttcctgggttccgaatgtttctagggg

SEQ ID NO: 119250 - DNA, 714 bp, Zea Mays
aaaacctctggcatttttggtatttcttcaatttttggcccttcagttttatctttgtcagccttcgtttcaactagcttaaccaaaggtaccttcggcattgtagccgactcttcagtcctctgcacaggaggaatagtttctcttgttttgacagctgaggaggtcccttcgccaaattcaggtatcgcgaccgattcgatgtaacgcggccggtgtgtcagaaccttcagctttttcccctttggcataagctcatttggggtggccgaagtatcagctttcctcttttccctgtccgtgcagcgggtagcggtagtcggggtaaacaaagccaatggcgtcaaaaactctgttcagtctcttctttccccggcctccgaagactacagacaaggcattatctcctgccttggaatatgctccaagtagttcatcacttgtagtttcgatacacttcagccaatcatcatttggttcatcaaacttatccccaaacctgaatgtatacttcagctggaccaaatcaccttcactagagttaatgatggtctccttcggcatttcccagctttctacaagcggccatactctgaatgctatatgctcttgaattaaatctcttgtaccaatgaaggagcagactgtactgaaggccctctggcacgcttcggcggcgtcatcaatttcaaccttcggccatcgaaggccgaa

SEQ ID NO: 119251 - DNA, 633 bp, Zea Mays
ttcagatggactcttctaccgaggatgggataaagggaggctaccacacatatccagctctggctccttggtgccctggtctctcactctgagtttgacgtcgtggatttccttatttgtgagatcgaggacaccgttttggatggcatgcgtgctcgtcgacagttgccatatgctcactacctgtgtcacatttttgcgcagctgattcggcctcctcagttccagggcacacttgaggcctcacgccttgtttttggatcctaccgtccagcgcctgaggatccagtgccagcttctgctccagtttttgacactcaggctgaggatgctgctcttcatcagttcgaagctcaggatgcagcagttgatgatgatgatgatgattttgggattcctcctccgcctccgcctcctatgcctccacgctcacatgatcatgaggttgggagttctagtgctacccctgctgcccctccgactattgaccctgctattgcttcgattctccagtctctcactcagcagcaagctcacctagcagccgagcagacccggatatccgagaggatgctctcgatgtttcagaccatacaggacaggcaggattctcttcagcagcagctactccag

SEQ ID NO: 119252 - DNA, 443 bp, Zea Mays
gttttacagatgaagctggaagagttcatacatctgaagcaagggggagactcagtaatgcaatatcttaacaattttaattatttctcacaatatgctattgaccaagtggacacggatctaaagaagaaaaattgcttcatgagagggttgaatgaccgactcctgtgcaagatggccacatgtctggatctcacctatagcagggttgtaagcacaacgctggaagtggaagctaagaattcaggacaaggaaaaaccaagagatatgggggtgaaggatcatctcaggggtctgaaaagcggacaaggttggtaatttgtcccttcaaccaaaatcattcttctcctcgtccacccacatatcccttcaagcaaccagtgttcatttgtcccactcctgcccccgcccaaaacaatcagccgagtgcccctggtgctcg

SEQ ID NO: 119253 - DNA, 346 bp, Zea Mays
tgctgatgaagtgtggaatgtccgcttcggtttggcaacagatggtttctcgcctttcaatctaactgcaacgtcctactcatgttggtccgtctttgctgttccatacaaccttccaccagctctttgcatgaaatatgaatttattttcttttgtcttgtaatacctggtccggatcatcctggaacaaagattgatgtgatgatgagacccctgattgaagaattgaaaattttgtgggaaggagtcgaggcgtacgattgttacaagaaacagaagttcaacctgagagctgcgtttttgtggtctattcacaattttatggcttatggtatctttgctgga

SEQ ID NO: 119254 - DNA, 488 bp, Zea Mays
acagctgcttccccgaagcatgtcgcactaaattctagctcttcagcagacacttcgggagcaggaactttcttgggtgcattttcttcttccaaggtcagagcagtagctcctgaagcatacgcctcgataggagctgatggcccaacttcggcagcatttagtgtcatgccaacttcactagttttcttggggatttcaccctttccttcaagcactgaagcaggggtttgtacttttgaagattccataacagcgtccaatacgctggccattctcctcctttttggggttattacaggaatttttgacaccttcggtagctccgactcctgcggtgggctcagagctttcagttgctctgccgatttccttaattctggttctttgggtgtttttccctagcttcggcaggacgcttcggcacttcggccgcctcggatttctgctgctccactgttacctttggttttggcacttcggccgac

SEQ ID NO: 119255 - DNA, 313 bp, Zea Mays
aaattgccaagtacatatcggaatgtgacacctgccagagaattaaagccagtcacttgaaggcagcaggccctttgcaaccccttcccataccatcttggaaatgggaggacatttgcatggacttcatagtgggattacccaatacctccaggcaccatgattcaatttgggttatcgtggacagattgaccaagactgctcatttcttgccagtgcataccacccacagggtagagaagtacgctgaaatttatgttgatcaaatagtgaggttgcatggtattcccaagaccattatatctgacagagg

SEQ ID NO: 119256 - DNA, 441 bp, Zea Mays
gacaaatcaggaaactgtcaggaattgaccagaaaacatttagagttgtatcctggatttatggaaatgttacttgcagagaaacttccacatatatccagcagttaaaatctgactgtgaaatatctagaattatttcctgacaaacacaaaagtataatttggtaatttatggaagcattgcccatgaaaacataagccgcgggaatttacccatacatattcatgtgaaacagttgggccggtgccagctacatccatatcattaagaaacaatgtctagttaactgattcctgaagctagaaaaattccataatgaaggtaaaacatgactcacctccaacaatttgtaggtgctgggcgtcttgaatactgcacagttgaaaccatggtgacaatcacatctttgttctggttcagactcccaatttctgatttgc

SEQ ID NO: 119257 - DNA, 660 bp, Zea Mays
acggctttctctaccagatatgggctttacgagtacttggtgatgtcattcgggctgaccaatgccccgacatatttcatgtatttgatgaattcagtatttattccagagctagacaaatttgttgtggtcttcattgatgatatcctggtatattcaaaaagtgaagacgagcatacaaagcacttgcacactgtacttcagcggctgcgcgatcatctcttgtatgccaaactcaccaaatgtgatttatggctacgagagatcaagttcttgggtcacaccatttctcaagatgggatagcagttgaccctaaaaaagtacaagaagtgatggattggaagcctcctaccaccgtgcgacagattcggagttttctgggattgacaggattctatcggcgattcattccggatttctccaggattgctaaaccaatgactgaattgttgaagaaaggagtaaaatttgattggagtccaaaatgtgaagatgcctttcgtgcattaaggcagcatttgacgacggcacccgtgctagcacagcctgacaacaccaaatcatttgatgtatattgtgatgcttcgggcactggactgggttgtgttttgatgcaagacaaccgagttattgcatacgcatccagagcacttaggcct

SEQ ID NO: 119258 - DNA, 388 bp, Zea Mays
caaagttgaaaagaagaattacgaagcaacaaaaatgcataatgccaatattatgaagatgaagaagcaagatgattcgatcaaggaccttcagatgagcctcgaagctgaaaaagagaacattgctaacaaagatgtggaaaatcagagattattggaaaatttaaggcagcttcgagataactcttttattgttgcttcctggtgctgcgatgtcctgaagaaaatcttctcttcaactggtgccatttcaagggtgacttcttacactagtggggacactgagggagcactaggctggatatagaaagagttaggggaagttgagtcgataatcaccacacgcagcgactactgcaccatcattagatcccacggaatggcctcg

SEQ ID NO: 119259 - DNA, 729 bp, Zea Mays
catggctcagcccccatgccgtcgatgtgggagctgggagcgcatgacgcaggcccaagttcatttacgcgattctgagattggaatcgcccctaatgacgacgatgtgcaggtagcaagtgtccctcccatattagttttgtgttctgcggatttaatgtactcctacaatttaagcatagtatttatgctattgtaggcgtgtgtagattctgatgcagagactaaggatgggagtgttgttgaggtacgacataaggtaacacctactgtgattgaggataatacagaccaagataaggcagaccaagatctggagtactacatgagattgtttcaacgtaatttacatgacctgaatcaaaatatacagaatctagagcatgacatacataagtttgatagaatagtgaaacaaaagattacgccagtacccaaaagacatgacacataaccttcctgcgtcaccttgtttacacttgcatgaccatttcctgtaaacaaaagccatgatatcttacctagcttccactagcatgctcactggacaaggagtgaagagtagtctcatataattgtcggtcacaatcaagtctgtttggaagaatgcctaaagcctccagcctctctttgttcatatgggggatcttatacctattacctccacctcccttcattacttcaatcaagcagccttgcaatgtcaggtacactctatttagaagtgta

SEQ ID NO: 119260 - DNA, 519 bp, Zea Mays
gagaatttggatttttctcttgaggtgacctttttcctcttgtcgtgctctttccacctggatggccttgttcgagaggtgcgagaaactgagaaagtcttggctggcaaggatggtcttgagttccggtctcaaccctttgaagaaacggtccatcttcttggcttccgtgctgacatcatcaggtgcatagcgagcaagttctgtgaatttgtggatgtattcactgatgaatctccattcttgagttaactcccgaaattcttcttccttgagctagacgattcccaagggcacatgatgctctcggaaagcagcctcaaattctgcccaggtagcatctcttacggtagcgctgaaggtatcccaccaggatagggccatcctggagagatcatgtgcagctaggtgaacacgttggttttcagggcatccaatggcctctgacttcctctttactgttcgcagccagtcatcagcatcgagcgtgttgctagatccagcgaacgtgggaggttt

SEQ ID NO: 119261 - DNA, 443 bp, Zea Mays
ccgaaagtggaaatttatgatactgtcgaagcgtgtcagcgggctttcaacactgtctgctcctttattggcacaagagatttgattcaagaacatatagccttcagggtatggccgcttgtggaaagctaggagatgccgaaggagaccgccactaattctagtgatggtggtctggtccgactgaaatataccttcagatttagggagaagtttgatgagccaaacgacgattggctgaagtgtattgaagctaccagcgatgagttgcttggagcttactccaaggccgaagataatgctttgtccatagccttcggaggtcagaggaagaaaagactgaacagagtttttgatgcgatcggcttcatataccccgattaccgctacccactgcgaggacaggagaaaaagaggaagattgctgcttcggtcaccccaac

SEQ ID NO: 119262 - DNA, 473 bp, Zea Mays
ttgtgaaccacataacttaaaacaccttactttactagtttttgcactttagtccaaaagtgcactgattttacacttagccccctagggtttaggtttagagttttttagggttccaattagggtttctgatatttcaagggtgtgaatgtattgtaagtcccttcttagtaacattttatgactattttacttaaacttcagggtttactctatttgggtcttgttttacccttcagatccctgttcagggttaagtaccctacaccagggttctatttgcaaaatgccataacaatacaacttgtttgaaacttttgcctagtgaatgcattctaggtgtataacacatatgaaatgttgatgctcatgatgttatgctcaagttttagtaatagtaatactaggggtgttacaggttctaaggcaaaatctgtcacttcaacggttcggtctggaacccgaagacactt

SEQ ID NO: 119263 - DNA, 681 bp, Zea Mays
tagaccccgctgcactccggcgagcttattccggccggacgatgccatggctggagctctcgtgtgacaggggcgcaattaaacctttaccgaatacttcccctccatcaatttcaccaagggggcactgaattgattagttcacggtgaccgagcggatgggcaaggggatgaacgtgttccgatcaaacagcgacgaggatgggcaaattgaggctgggtaaaggttcacgggttcaccagggtccatggacacactttggtttgtgcagaacaaggcccgaagagcgggtcgacggtgagggggttaaggcgacgttctacagagcaagcacgcattctggtgaaaggcttcagccgcaattcgattagttgactgggggcaataggaggctaacagcaagcaagaacatgaaacaattggataggtactcacccgaggaccgctggtcacgggggagttcttcgcggcggaggtaagaaccgaagagagagggaattggggctacgtgggttttccggtgagctcgagtcaattgcttagttgatgatgtgcggaatgcggtgatgaagcagtgcccgcactcaatttatagacggctagccagcgacggatgaggatcgcagattcctcgattgtgctggtgagcttatcgcgcggcggattccggtgacagcgcg

SEQ ID NO: 119264 - DNA, 327 bp, Zea Mays
gtagatgtcagccttcctgaacagttgttcagaggtggcgggtgccttttggaggatagctcggacgaaagccgagtcgttggatcctcgatagaaatcttcaatcatggctgcctcggcaaccttggggatgcagttcctcatcatttgaaatcttctgaggaacgagcggagagtttcgtcgttttggcgtttgatggatttgagatcccattgctgcaccggcttgtcggagagggattggaagttcgcgacaaactggcggttgaaatctccccgatcgtcgatgtaatgtcaaggcagatgtcgaaaccattgtagcgtgtc

SEQ ID NO: 119265 - DNA, 638 bp, Zea Mays
atttatacaagtttctagaattatttttgtattaaaattcaatttctaatattaattatctggttttctctgttgtctggaccgggcgccaatagcagagaaacccaggggctaactcgcaatttctcccaagactcagtctaacccttaagtggacggtggcttattttgaggaaaactgaggggttcgtttagaaaatatccgggcgaaagggtatctagggtttctgaccgttggatcatcaatctgcgccccagattagatcggcgcggccgtgaaacggtacgcgacgagaaccgttggatgcaaatacgacggggaggattttattattctggatttgattctatccgtccgatctagatcaacggatcaggccgaatgctacggaagggtatgcgatcatctaatctcagcccctgaattctagatctctggcccacggttcttcttctctccgccaaatccacgcgacggctgagcactgctcacccacggcggagcatcaccggcggacgcacaatccgacgcccggacgcccctaacctgaaattggccggtgctaaacctagacggggtgatggcgagcacggaagggagattcttacccgcgattgaaggagtagcgagctcgtcc

SEQ ID NO: 119266 - DNA, 312 bp, Zea Mays
cggcagcctagaagtcaaaccaatgctagaagacctcatatgcaaagctcaacgcctagactcgaagacagcaagacttatggaaaaagctcgcaaggaacaacttccggacctcaggatagatgaacaaggagtcctttggttcaagaatcgtctgtgtgtaccaaaaggcaggcatgagaagtcctgctcgatgatgctcacaactcagcctactccatccacccaggaaccaccaagatgtacctagacctcaaaaccagatactggtggagagggatgaagagagagatagcacagtatgtggcccgg

SEQ ID NO: 119267 - DNA, 583 bp, Zea Mays
ggaaaatgttagatatgtccttaaactcgtccaagcgatcgagttgggctctactacaagccttgtttgggggtgcaaattctccccatgtttgtgcctcagtcacaggcgctatataaacaaggtcagtgccgacatggaaggcaacacttttgccaatcctagttgtcgtacctagatatgttctgatcaactgtacccaattgaatagaaacatgcccaatctattctatggcgtcagtagaccacagatcctcgagacgatgttgacaccttctacaacaatgactaatgttcaccttggtcctaaaggtctaactctctctgtctctctctcccttcctctttcttctataactctagatctacactggttacttctttgctaaagaatggagacagattaggggtgatcagcaagaccctaagcatcaaagaaaaagctgccaaatgggcattcaaagaaaaggtgttacaaagtttcctcaaccccttcatgatcgagagcatagttgtagacttcacccagaagcttattatgtctgcttcttgacatattcctcgtgttaacacaataattaag

SEQ ID NO: 119268 - DNA, 407 bp, Zea Mays
ggctgggggagagagtaatgtccctctgcccgaagctgacgaggtagttgtctacaaaagttttatgaaagcggggcttcgattccctttggataatgtgctggttgaagtgttgaaaaccttcaaagtctaccttcatcagcttacccctgaagccatcatcaggatagaggtttatatttgggccatgaggagtcaaggacaagagccgaatgcgaaatgcttctgcaacttgcatgaattaactaatgagacgaaggctgttggaaaagagcaataccacaacaatttcgaatgttatggcttcgtaccccattctgaagtaagcagtctagtgccaatgtttcacaagagatgaccaggagcctggatgcaagaatggttctatgtaaagaatgaccttgttg

SEQ ID NO: 119269 - DNA, 525 bp, Zea Mays
gctatatgagcgatagcaaaagatgagggttagcccaattcgaccctagccctttcaaaggtagttgggggctggaacgagcaagaccgctacaccgcctatggtgtggcgcgtggttaaattgatggagctagtattagaggccacctccttaacaacagggtgcgctgatgaagcaatgttgacacaacagagtaaagcacaccatcatcctacctaacatgccaaatatcgtcatgttgtgacactaaggtattgagactataaaagaaaattagagtagtgagctagggacccctggatcagggtgtagacgtaatcgattgcacatggtttagagaggttcgaaccgcctgagaaaatattacatgctcacatggtatctgagcccacaaatgaggagtgtgatgccatcttctatgtgctagatcttacatgttaagagagtgaactcttgaaagctaaagactatatccccaaggacgaccttgaaccctccccaagtcctcatttaagatgctctgc

SEQ ID NO: 119270 - DNA, 440 bp, Zea Mays
ttcgaatggttagagattattgaaaccatgtgtaacaaaattctaggaaattttacgaagaaagaagatcaactgatgactagagcatttggtaatcgctagaagcaaatgttaaacaaggtcatggatgccctacagttcgactacctagattatccgaaggtagaagaagaagctactagcgtgaagagaaaaagaattgttagcattatgaaaagacaagcagaaaggtccatgaacgaaaggaagaaggagatagctatgaagccgaagatgaaagctgttgatcaagaggagtcctcgtagtcagggccaaaatctccccttcccaagaagcgaaatatggcaaaggctggccatattgcaaagagatcttcagaattactgaagaaagcttttgagaccccttcggctttttctatcgaagttatagacatttt

SEQ ID NO: 119271 - DNA, 282 bp, Zea Mays
agaggcttggtcaactcggcgagaacgttttggacgaacattgacaggcttctgaacgtccaaggctttatcagcttcagggatgggaaccaccaccaatgtttcagtaggagcagcatcagaagaatccccagccaacatatccagcatggcgcttatctctgcatcactaggatccaaaggcacttcaaagtggacctgccgttcatcatcaggaatttctccaagcgaagcaaccaaagcactaacttcttcgacagagggtcacactctaaggcccaa

SEQ ID NO: 119272 - DNA, 358 bp, Zea Mays
ctccacaacaagatttctcagaaaagatggtcggaaaaagtcgaaccaaacaagccctaaaggtaaccagacataccagatcatcgataccttgtttactgcacaatgatagaactaggctagccaggtcatttctgaaagttgcctagatggggtgaataggcaagtgaaagtttttcaacaaaaactagaaacgaactggctaaaattggattgatctcactacacgagttcaactaaagaatgagatataaactcagttgatctaaaaaatcacccagttaactttggaaattatatgttctagatgatccatagggttcacagtagcagatctgagaatggaacttctcaaaat

SEQ ID NO: 119273 - DNA, 674 bp, Zea Mays
aaaggttgcagaaacagaattttcacgattactcccactgtccgaaaataagtgcacttctagcattcaaatttcgtcccacaccaagtgcacatataggtataggaccacctagctttagtagtttttttacattctctatttcctaagtgcaattgttactcaacattggaataaacaagcaattctagaagtgattttcttttggggctggcgtagtatttcttttaaggtactgttggagatgctctaactgtaactgtgctgattgtcacgtccaaatgatcttcctaggcagaaccacaaacaaaaagcgctgattaaatatgcttcaggaggatagagggtcagctctagttaggtactcgcagctgcctcgcttgctcaatggcatgcaattcaggaaaaggtagaacatccttgccttccatcagcaatccattcataggttcaggctcatttccatgcccagcacggtcaccctaagcaaatttcacttgcaatggccactaggtaatttcatcaaagcttttaaaccaccactttatatatcatcatcacatatcctgatcccatttgcactgcctaacacctacattcagagcaaagcagatcaaagcacacagaactgaaggcgcgggtcaagtaaaggacatgggtgtccccatgtatgc

SEQ ID NO: 119274 - DNA, 505 bp, Zea Mays
cccaaggcgaggtgcttggccagatgtatcctttctctgacagctcatcgatttgcttcttgagttcaaccaactcaggtccagatattctgtaagctctcttaaagatgggggcggttccaggaagaagctctatagcaaattcaactttccgctctggtggcatacctggtaggtcctttggaaacacgtctaggaactcggacacaaccttgatactctcaattgggtctgcttcactgctatcaacaaccatctgatagcaacttcttttctttggctcaggcgggactaactcggtcaccacttcctctcctagtgggacaccaatttgattgtcctcttatcacaactgataactgcctgatatttgtctagccaattcatccctaggatatcatctattccctgggtacccattactatgagattagcgggaaacgctatcccccttatttccacacatacattcaaacaaatgctatcggctcgaattctaccaccg

SEQ ID NO: 119275 - DNA, 312 bp, Zea Mays
gcctagcttcgtcatcatagtcatatcagcttcaggcacatttgatttcccaaaatccagatggctgggcttcgatggcataataacatcataatcaatctctccttcattagcatcaccctctttaatttctgcctgctcggtttcagcagcgggtgattcttcttctgcagcgccttcagtcacaaccagtcccgatagcctcataacttcggagatcggagcagtttcagcagcttcggcttcgtctccgtcacgagtaactctagctgtcgagcgtaccctggccatttggtgttgaattttttgcgt

SEQ ID NO: 119276 - DNA, 501 bp, Zea Mays
cgcctctatataatgtcgatttgtagggtgatggaaaactaggtacgtgttcacctcggttgacgagctagaagaagtcgacattggccctagcgataagccgctgtccacattcatcagcaagaggttgaacccagagttacggtagctaatgataagcctgctaaattaaaggaatattcagattgcttttcttgggattacatggaaatctagggctagataggggcactgttgaatatcgactcccgctgaagaaggggtttcggcctttttagcaacgatcatggttgatgaaggatgaagtactgcaagaggtcaagaaacaggtggagaagataatggaggcatgattcatcaagccatgctggtacgctgaatagatttcaagtgtagtgtccgttcaaaagaaagatgcctggtggcgggtgtgcatggatttcaaggacctcaatagggccacaccaaaggatgaataccccatgcctgacgtggaagtgt

SEQ ID NO: 119277 - DNA, 737 bp, Zea Mays
tccgcttatccactcaatgacgccttcggggtcgcctcgaataaagttctcctcagaggagtaggcaccaacttttgcaaaactactttttcaaattttttacgcagtccaatgattttcgaagcatctttccttggactcgtgaagctcctcaatatttttctccagcctggccttccaccattcacttatctcttgactggccttcgcgactccataattttctttagcttcggccagttgttttcgaaggtcttcaatcttggctttttgggcttcggcctaggcattgtacttagcttcgacttcttttattttactcaccaatgaaattaaaattttgtctttctctagaccttcgtttctcagctcgattgcctctgagcgaaggttgctaagagctattgtacagctttcatcttcggcgcttttttgtgctctcaaggcattgctgagaatcaagccctacaaagaaaaagaaagaattaagcatgacaatgaaaaacttcatttccaactttaaagttgacttatatacctttatactattgaaagcaagactatcaacaagatcatccttcgacatagccgaaaggccttcctcaagcttcggaaatcccatacttttagctatctcccgacaaacggatatttctttattgtccgggagatagtataggaagtcatcctcgtcagtgccgttaaacactaaggcccccttcggatattttaacctc

SEQ ID NO: 119278 - DNA, 423 bp, Zea Mays
agtatatagaaacctaagacttgaagagaaaggggctatgttcctactccaatgttcaagaacgacaaattggtcgatacatgttgatattgtatgactgatacaacacatgttgttagtccttcaaagaaaaaaataaacaaggatccagtgatacatgagactatagaatcatttgcttcttggcaataaagatcaataatagtcccatatgaaagaagtgccaataattgatgccctggatggacttaaaaaataaggaagtttggaatttagatggaggacaatcccactttatttgaagaagctatagaggcgctcgctcgtctaaaaggtaaaagaatcacttattaccaacgatgtttgggactcataaataattcctcacagagccaaaagagtaggctgcaaagggtctaaaag

SEQ ID NO: 119279 - DNA, 396 bp, Zea Mays
tgaggggtcataggcttgagtataaacgttctccctttcagatctagtgtgtactgatttgttcttccacaatgctgagaatatcggtcatattgccaaggtctttccagtagcaagtgacacacagacatgggtgcaacatcgcactccaccgtgtcaacatactctccaatcttgtacgaaactttcaccttataaccaatcttgatatctcctgattcgttcaaccattgggcatgatatgtatgagggtgtcgctgcaacttcagatcaagcttttcaaccatctcacgacttacaagattatgacaacttcttccatcaatgatcacctttactactttgtcttgcacttttgctctcatttgaaaaagattatgtcgctgtccaatttca

SEQ ID NO: 119280 - DNA, 361 bp, Zea Mays
gtctttacgtcaatataaaaaagttatgcaatcatttgtcgatatcgttttgatgccattattttaaacaatgtttttttgtttacatgacacgtacagaaggatgtacgtgtccggcccccccaaatgtacctgatatgtctactccagtttctcagcaggatacgcagtttacagacacacaggtacatgaattactgttaaggcaacaacatattcgtgtactattagaaagttgccccgatgaagttgatattgatccactggttcatacaaatataacgaaatagaacaaaacacctacaaccacagtggtaatgtttttcttattaattgtatttttcattctagggttgtattc

SEQ ID NO: 119281 - DNA, 693 bp, Zea Mays
gttggtttgcttggggtggaagtggcaatctttcttggtattggagttgtaggtgttgtgggtgttgtggggacctctgattatagttttgttgttgtgggtggtattggtgttcgttttgataacgagggttatgatattgatggggtgataagtatgggcgatggctcgttggttgttagcgggggctgtcctagccatactcactttggtttcttgtctttgggcaatccctggtggggtggtttgagtcttcatcgtggaagacactataaaacttcttgggttgttgtggacctctatctcggcctctgccgcttggtgcaccactgaggctttgccgctaaggataacgttgggggggacactgccctgttgttggttggctatgttgtggacctagggttgcacctgactgtggtcttgatagggatattctcactgttggcctaggttccatgacctacctgttgcgagtctatcttcggctaatgttgtaactctaccttgcggtaatgtagctcttcggaccgagcatatttctcgaagtgatatagttcctgcagagttgaaggtgattttcttgtgcaatggttgtacaggtgtcatgtgcgaaggcagtttatcgtgtagtggatcatgatctgatcgtcgacctaaggcaactgtgactagaatgatatgaactttttg

SEQ ID NO: 119282 - DNA, 566 bp, Zea Mays
aacaagtaaacattgatcgctaaattgcgtggtaaacatttattttgctaattgtcggctacgtgaatgtgaatccggaacgagtattattttataaattcgacatgaaattgttaatcaaattattctctagtaagatgttcgaatagtgggtgagatttgtctgtgttcatttgaatcagatatgatttataatatcgaagtcgacatcgtattggtctgacctgtgtatatttcatccgaaccaaatttctagatcctagctgcttgttagtacgtgccttagtaatcacagaaggaagaaaatctcctattttatttgacatccttatcctcccgctgttattctcttctctattcttatctagtataccaaattgaactctttggtattctctccagcacacgccgcttaatggatctgtggccttatccaaagcctagacgtcatctctgtgtctcctctccgttcttacgtgaagcagccgccctctccatcctcctcaccagcgcgcactgctcccctgctcgaccccggcatggggctctggtcgccagccgcgacg

SEQ ID NO: 119283 - DNA, 425 bp, Zea Mays
gatgagagcacgagctacgagatgatgaacctgtcctctaagctctcacttaagatgagttaatcgctccatctaatagtgtatacctacaagtgatttgaaaagtttggttagtgcatgatcaatttagtataaacagagtaattttataaattagagctaaatgtccatgcactttcccccaccactagcatgcaccactgtgggatctgttggaggaaggttgagcgccccctcgatcagtctaactcggccacgatcaagcacactttggtgtaggtacagtttgcataggggcacttccatttgtgtcaatgtcaaagtcttccaccacaacttttggaggggacgatgtgaagggccacaatagccaaagggttcgacgcatccccatgtgtcctgaaggcacaaactatcccagaccg

SEQ ID NO: 119284 - DNA, 443 bp, Zea Mays
tttgattcaatttaatttgaaacctgataattcgtccgcagactgaacagcgaaacacattaattatgaatactcagtttggttctaattatcgtggtctaatttttttaatctcgcatcaacactcttgtcgccaagcctctaataaaatgtactcgggtcaaaattcacaagagtgggtcgagattccaaattcttattcgcttaatcgataaatctttaatcagacacaaggttcgacatttcgcgaaataaatacgcgagatctatccagcattgaaattgtgatcctttaggacgacacacatcgtttacgtgggcgagagcctaaatggactggatatcggatataatttttgagacaacactggtttagtcgaaatcggataaaatttatccgataactaaacacagttgagtttattattttacagagtgtgcca

SEQ ID NO: 119285 - DNA, 625 bp, Zea Mays
attgttttgaaggcatgtttcatccttacccttcatctgataatgtaagtcatgaaatttacaggaggcatcaacatcggtacgacctccctggcttcgtatagcccaaataaaaacgctacggcgaaccattgcatttggatttagctgatgcatgtatacctcgtatcacagtagtaccttcacaatcatcttgtacataggttgtcaaagtcttgccttgaaaaagctcatgtaaatgacaactttgtctttctctggcttcggcgttgtctcctccctagggtggcgcacgttcaccttgttgctaaaataaccaagcctcctcatagattgcaaatcctttcccttaaagttgagtgaccaatttcaatgtagcttggcttcgaaggtctgtccttcagcaattccaaggtaggtcttgatgttgatgaagccctcatggcttcagagataggcagggtgtcttgtcgtgcctctaaagaggtaggtgtgatcaactttgtgtggtccgaatcctaggcatctaagcaaactagaaagttatttagaatgacttagccaaagctggtttctgaagcagtggtggagaggcatagaaagttttggcagtaggtagttgagg

SEQ ID NO: 119286 - DNA, 1056 bp, Zea Mays
ctcacccaacccttcgtcggacctctaccgttgccggtaagtcgcgccaccatttttttcctcgactactgttcaggcgagggaggagtgcgggttagaggggataaaagctaggggggttaagtgctaagttagtgactcatgtgaatagttcttcaagggcacggtttaaacaactcagataagattaagcccagggaccccgatgcaaagtcattttcttttaaccttttataattattcttttcaaatgagcagagaaaatggaaaattcataactcgagttatattcaaccaaatttggtcaaacaaatttttctaggacctacatattataaactatgaaacaaaaatagtaaatcccatggtttctgcaatactttttagagttttgatttaaattaggaaaatacccaaaacttattaatccagaaaaaataaaaatacttctatactaggatgaagaaaaattgtagagatacatacccaacatacacactgtctaaaaatactaagcaccccagtatacaagaataacccaagaatgtccattaaaaactatttctgctcaaaccttagaaaaataagaaaggtaatggaaaataataaccagaggatgaacatatttttcctagaatacctaagtgataaagaacagaggaaaaatgcagagaaccctagtctagagctaatccaaggttatttattttattaggcactaagaaatcaagaaaagccatgattaaaattataaggaccattgcaaaaatggcagaaaaattcagtagactcttatttgatagaacaccactacaaaaatgataaacaccccaacccatcacaataagagagttgaacatttaaaacttgaatttggcccatgttttaattaaatcatgagaaagcctaaaattgtggaacagtgggcaaacaaatttttacccaattacttatgaggtaaaccaccagagaaaaatataaaactcaattaaaaaagtaaggtaacacacattaccccctaccccatgaaaaaggccatatattccaagaatttct

SEQ ID NO: 119287 - DNA, 454 bp, Zea Mays
agcaccgattccgtcggtgatgggccacaaaagaaacgaggaaggaggaagacaccgagatctagtgcaagatgtggatcaataccacaactgagaaacggaggagagatgagggccgaagaagaagagccggagatgaatacagatatatgaagaaggagaggcggggacatggccacgcggggtttgcgcctccatggccatgctgacaatgagtcgctgagagccagagacggagaggcagcgacactgagagctggtctgccggagacaaagacggatccgtgaagaggcacgacatagacgataacaaccgtagtgaggcacagtggaggtgacaagagctagtgagttagggtttcagagacggcgagacgatgtggaatgcagtggagtggagtgtgtgtgcgagtggccgatccgagtgctttgccttttgggtttagggttaggc

SEQ ID NO: 119288 - DNA, 568 bp, Zea Mays
ggaactttaagtttttcaaccattctatcaattgtttcttccttttaggttaagactttaaggagcatgtggcttcttctcgttttctcctagctccagagttggtcgactacaaatttaggccaagttttttctagcattagggttgtgttttgttttgtcaatgatatttaggcaagtgctgataatgctttcccccatatttcgttcctgatgcatgacaccaatgttatgcataagaatcaaggcttccacataagggagttcccatataccacatttgtgagtccaattatgctcggttacaaaaccttcaaaccaatttccatctttgtttagattcaaatcattaagtctcgtgagaatctctagaccactaagaagcttgggtggtcgcctcgtcacaatcgtgtccttcctaaaagtgttcctctcgatcctgaatgggtgatcatgaggcaaaaagcatctatgtcaatcaaagtaacatatctttccaccaaacattagtcagaagcataaagtgtcctcaacgcctattggacatgtcagaatcccatgacaactc

SEQ ID NO: 119289 - DNA, 906 bp, Zea Mays
gctacttcgaaagcccaagctgagacccaaagatgcgaaattgaagatcttcggaaacagctagcagaagaaaaattaaaatgtgcaattgctgaaactgaccgagacgccagtgattactggaaaaatcattgggagaaaacaactgcagagcttcggtcttcaagagaaagatgttatgaaaaatccatagagtgcgtgggaaaaattaagactagtttcgccagcgtcggtgcatattcgaatgaagacaacttcgtactggcgatcccgaaggtccaatcgactggatcaacggcgaagccgaagcttttgaggaagttttaagtggccgtggagatgtctgtgccttctcaggtgccaggggaattgcggctattttggagaaggcaggttgcaagaatgtgaagattctagcccaagccgaagccgcgttctctattgaagatacgaaggacccctaggccgaggcaagctttgttggcggaaagtttttcaccgacatctgggaaaatggtggccgaaggatggctcacaaacttataaagaaaagtgaaaaagatacccacgatgctagagaagcagcaaaggcagctgaaaaaactgcagaacttgaaaggcagataggtattgtctaattacttttgactttatgttttattcttgtgacttcgaacttattcatgttttatatcgtagctgaattaactcctcccccggagcccttcgggtcacaggccgaccccgaagcaaagaagcaagatgaaattactaagatggccgaagctattatggacaaagttgtttttcaactactaaacgaagctgcggaagtagttttaaaagaagaatagctattgttgtaaaaacatttggaatatttgatgtaatatttgctgaacaaag

SEQ ID NO: 119290 - DNA, 673 bp, Zea Mays
gtttcggctgtgaatgcagtgcctgttagtgcaaatttgtctggttctgaaactgagtcttggtcatcagacgagggtgagtttgggagctcgttttcgtggacagaggagtcttcggatgaggatttagatttttttgctgcgttggatgtggccgcggcggagtccttgtcgcagcctgaagcacacgaagtctctattcccccggctagggcgatgctcgaagagcaccaccgacgaagggtggtgtctaagcacaatgttggcgagatgtcgcgaagtgggaggcgtcgatggatggggatggaacggtcccatcttcggctagatcggggtggccagcgggatttgatgtcatcgacgtccggtacgtgtattggggaggggatctgcagaatctttttgagggcgaagagttgaagatgatgctgtttaattttcgtaaggcaggccttattccgaaggctgagccgatgtagcaagttttctgccctcgctctcgtgttgcggtagtgagtgaaaacgctgccctcccccggctcgcaatagagagggagggcatcaagatgtaatttgtattatttgtgcagtgtggtcgacgacccttcgccatgtttatgtacactacgaggacatgttgtgaaatgggatggcgacctcgctttccgcggcg

SEQ ID NO: 119291 - DNA, 296 bp, Zea Mays
cgaacatagccttaccggtgagtataccctccttgtgtcttcgttgcgttcttctctacgtttatctgttgctccctcggagtttgggtcaacggggttctcgggtgaatgcgacagccatggagccacctcggattatgtcctgccgccgtgtgccttcggtggggggagaagacgagtctcttgtcatcgatccggtaatgaacgaaccagattatcggattgtgacgcttgggataggtgtgatggtggccgtagatctgtaatcgtatgcgtgagatgatatcatcagttac

SEQ ID NO: 119292 - DNA, 438 bp, Zea Mays
ggaaacgatttaccatctgctaatctcatgcgtcttctctcagcaagtgtggtacatcattctgcataaggtcagcctgcaggacctctccccccagcctgacaacaactcctttgatgcatggtgggcaagcataaattttgatgttgctggccagactaaaaaaaggtctcaattccatcatcattatgggagctttgtccatttggaatcaccgcaattgctgtgtgtttgatgggattcaaccgagcctaaatgaggttctggtttcggtaaaagatgagcttctcctatggagtttggccggagctcggggaatatctgatatgcttgctccagagccagccaatgtgtgagttgttctctagtggtattgggtcaagtttggcaagtgagagagatacaccgtttaatctaaaagggtgtgtgaatgtgtgt

SEQ ID NO: 119293 - DNA, 750 bp, Zea Mays
gcaagctacccagtgccgacgtttcagaagatgtggccgggctcctggatgtaggaatggttttatgtgaaggttgatttgagtgaaagagaagatataaaaggggtcatgcagcgccccatatggtctcgctttggcatcaagaggctggctattgcagttggaaacaacgtgcaagcatgccagacagcttttaatacagtgtgtacttacattggcacaagagacttggtgcaagagcatattgcttacagagtgtggccacttgctcatggatgggagatgccgaaggaggctgccgatggctccagccaaaatggtttggtgtatctgaagtatacctttcgatacaggagccagtttgatgaaccgaatgatgactggctagatgccataaaggtgactagagatgagctgcttggagcatattcaaaggtcgaagatgaagccatgacaactgccttcggagctcggggcaaaaagaggttgaataggttattcgatgtcattgggtttgtgtatccagactactgttatcctttgcgaaagcaagagaagaagaggaaagctgctccctcggcgacctctagtacgtcaaggtcaaaaaaggttaaagttttgacgcgtcgacccaggcgcattgaaacggccgacgtgccgaagctaatcgagggggccactcctatctctgagccaagtcgctatgtgcctgtcgaagctaagacaaatgtgactgaagagccaaatgtg

SEQ ID NO: 119294 - DNA, 427 bp, Zea Mays
tattggaagaatttggtgccaaagggaaggggaaagaacaagcttccacttcagtttcacatgcaacagcaacaggaagcaattcactggaacatggaatatccaagtcctaagcattgcttaattgtgtcatgattcttctactttgtcttctgttcactacttcactcatctggaaaccatatgctgctgtcacgtgctagaattttagtctgtaatgttgtccaattggactgaattgactctggtataatgttttccagttggacttggactgctgtaatgttggcacgttgctgtaatgctgtccagttggacatggactgaacgtgtgatgttttggggggctgtattctgagcagaaatgatgtcaaaactgctgtaaaatgtgctgccatattgttcggtctgagtattaatatgcatg

SEQ ID NO: 119295 - DNA, 554 bp, Zea Mays
cgacgatgaaagcagaggcaaacagaaaatggtgttgtgcactagagaggagaacgggaggctgcgacctttatatgtgagggagaggtgggattaaagcaggaatcaacgctcctcgatgccaattgttgtgccatattgattcacagagaaacggaagtcgtaactactccaaagatggagattttaagcaagagccggacacaagaatcagaatggttgcgagaggaggggagagggcggacgactgttgatggcgtgttccactacagggaaggcgagtagacggggagggaggcgaggtggtgtccagaccgtatgaggagacgagcaggcgcgacctgctgcggatgatggcggtgctgccatgtccgttcgtttccagaagctgtgtgagattggagaggagagagcaatagaggtgggtcccacatggcattgaaatatagagaggcgagaggtatgaatggaggcatgtacgggacccgactgggcctgtcctggttggccggctagatatgcgtggttttttttattttctttttttatatttc

SEQ ID NO: 119296 - DNA, 476 bp, Zea Mays
gatgaatacaagaacacacaaagtttgcgagtggtttgggccgctggagcgtaataccctactctactatgagtcgctctattggtgacttgagaaggtttgtgtctgaatccccgtagtcgtctcgccctgaacagcttcaggccggtctgctttctaccgagtgcaccctcccttttatagcctaagggaggggcttacatggtgcctgagcccgacaagtgggcttagggatacgaagagatcacagggtaatgctagtggatcgatgccttccatgtccggtcttgtcctctgttcggtcttgttggcgtgtgggcaaaggctacgacataggtcacagtgtaggtgaacatagggagaatacggatgatgtcgtcccatcccctccacctatccgttcacgcctcggtaacacgtgaggaacattaaaagtcataatgaggggtgcctaagcggcgcgcattgagtaaatg

SEQ ID NO: 119297 - DNA, 288 bp, Zea Mays
cagctttgctcaaggatctgaaaactgattttgcactaaaagaccttggcccattacattattttcttggaatagaagtgcagaaggtagataattgtattcacctctcgcagagtaagtatgcctcagatattcttagtcgagttgatatgataaattgcaagcctaccactacaccactctctacttcagaaaagttaagccttcacaatggtgaaccccttgggcctgaagattcaacacagtatagaagcatagtaggtgccctacaatatctaactttgactc

SEQ ID NO: 119298 - DNA, 462 bp, Zea Mays
gtaggatctcaggttgacggctctgattagaagcaggcgataccccttcgcgacattaaatcggggacgttgatctttgatcggacgacgcaggattgatctgcgggctcggttgatgcgggccatggatcgctgatccaaccgccctggttgcgtatcgcatccctgctggggggttttaaatctgggccactaggcagagatcagacggctaggatccaaagataccccttcggccgcaagatttgcagaagagcccttcagttattagataagtaacccgcggtccactcaggtgttcccctgagtctgtggaatatttacgcttgagcccctgcgctttctaggatttgaggcccagtcccgagatcagataaaatagggaaactaatttaaaaatagatttttagtacaaatttaattgcagaaacttgtttaattcatagaaaatgcatatgaact

SEQ ID NO: 119299 - DNA, 336 bp, Zea Mays
gttcaacagataagacaccacttgaaagaggctcaagctcagcaggaaaactatgcggataaacgacaccgacctttggtctttcaagccaaggattatgtataccagaaagtatcaccgatgaagggtgttaatcggttcggggtaaaaggaaagttggcaccccaatatattggcccgtttcccattcttgaacaatgcggaccagtagcatacagacttcaactgcctgaaacattatctacagtacataatgtgttccatgtgtcccaattgaagaaatgcctttggattcctgatcgaaccattgatgtggtggatgtcactttagaaccg

SEQ ID NO: 119300 - DNA, 512 bp, Zea Mays
cttcttccattccacgcaccctggctctacgggcttttggaagctgaaggccagctgttaagcacaacacaccatctaataacgtctcattttcagtggagccgtgaccctctaccatcatggataagcacaaggtcattattcaaatcaactcgctttctcgttgccttggtaatacttgcagtatacaatagtactattagcattccagtctgaataataaaaaggataactagggctcttgtgtgctgtgcccaatgcggatgtctcatccctgtaccgaggccaccaacccatcagcatcgcaccacacaatttgccaaagcaaacggcggtggatcgattagtttattttggcaagtgcgcgatggtcccgcacgtgctgtcttttgtgctccgtttcctgcggcgcctctgaattggagattgtgaaatcttgaatacggctgctgctgctgccagctcgtctgcttggttttgaaacgcaggtctctgtccgttgacaatgtctt

SEQ ID NO: 119301 - DNA, 546 bp, Zea Mays
cttagcgctcatcgagggacaaagtcctcaccaaacatgtgcaacaatcgaaaacagtatgcccctcttataacatatatgacacttgggcttgatatgcttttgttggagttgttgttgcgagcgtgaggttgtggatgcatcgaattgttttttgaagccatatcctcattacccgcctatgtgatcgtgaggagcgccatggccatgtccacacaatccctaatgaccaatgcttgccgagttcgcggagaaacctgaaacaccgtcatggagaagtgtgttcctctgttcacacacaagaagttggaactagacattcccaaacgtgagcggctttggcttggtcgctagggccatcacaatggagctaagctcgtcgttaagaccagacagaatataggagatgagctcttaacctccaattggttgtcgacgaagatcatctcatgagcaagcgctcatgctttggccacgtcttctgtgacagacttatctcctttttttcaaattagttaggtcaattcttgtattgatgaagcatgc

SEQ ID NO: 119302 - DNA, 344 bp, Zea Mays
tgtcagggtcttcttccacatagtgaagcaggtctgtaactcacttgaaaagttgctggtgaggggcgactttgctgagtaccctgatgcgcgtgagtttcatggcacggcgcgcattgccgacatgctgtctggatatgcaaaggaactccccgcgcagtgcccgataaacaggaacgaaccgtttctgatggaggaggtgcgtatactggaggagactaagggcataaatctacctaacttcctcccaagaacagcgtttcttgtcctgctgaagaagaaggtgcagattatagatgtgatccctcaggagcttgccaacaaagtctgggactacgtggagg

SEQ ID NO: 119303 - DNA, 354 bp, Zea Mays
attataaacacaaaaaggaattaaaacttgagctaacccacttcctttaaaaaccatccaggctcttttatttttcttccttccaccataatctttacctttgatacccttctacagatgaattcacccacccccgccagtggaggagacactcgttttagatctgacttcctttctcacgatggctttccttccatcttgtgggaagtgcttaactccgatggttaccctacaccccctttgtacacggtgcagttgtatgaggagcatcgggtacctcgttgccgagtctggctgactttggaggctcatccccttcagccgggttggcgttctcttgacttcgagacgatt

SEQ ID NO: 119304 - DNA, 448 bp, Zea Mays
actaaatgtaagggattctggtatatacatgttccgagcacagggcatgatgtaccacaatatcaagtcatttggtagggagggtggagcagagcataaacaccttgagctttacttttatgatgatgatcccactctcgagcatcggtaccgtaagtgtcgtgaagagcatcaacagaaagacaaagaggttattcgacagatagtcgacatactacgtgaaaacccgtactccgagcaccataggaccatgggccacgttgagaaccttgatgactatcgtatcgcgttgaacctagactagacgttgaaccagaagacatataacacacctctcacttcggaggtggccgctgtctggatcgaagggagcgaagggcgaggccaattcagcaagagtgttatgctccatgggaaggacagttcaagccactgcatccgctcatac

SEQ ID NO: 119305 - DNA, 431 bp, Zea Mays
atcctaccaaagtagaagctatgtcaaatttgaatcaacccatcaatgttagtgaaatcagaagtttcctagggatggtaggatactattgttgcttcattaaagggttttcaagcatcacttggcctttgaaagaactccttaagaagaaaaagaagtttatctggtccaaggattgtgtggaaagttttcaataaataaagaagctcaatacctcccctatgctcacactaccaaacattaaccagaacttcgtcattttctatgacgcctccaagcaaggcttggggtgtgttgtgatgtaagattagatggtaattgcttatgcacctcaactacttaagctacatgagcaaagttacccaactcacgatttggacatggtagccatagtgcatgccttgaaaatatgaaggcactatctgattggg

SEQ ID NO: 119306 - DNA, 436 bp, Zea Mays
aggttgaggctgctgctgctacacctcttgcatggctgccagggtctgaccaatcgcttgaatcgcctgagtctgcatcagaaacatctaatctattgtcattaggggtggtgttagcaactgttgcaggggtgcctcattctgtggtgcttgctgctctggctgggaatgccttccacctcggctcatgttgttagacatttgtagaatgcatacacacattagatctaaccttgcagtctttcagcataaggaaatatatatagaagtcttcacaacactgaataaatgagcatctccactgactttcaacacagccaacacaacttctcagataaagaggaaactggaaataaaaggttgcccaactaaatgactaattacccaaatgtactaccttcaagaggaaataccaagaaccatagttataatcatc

SEQ ID NO: 119307 - DNA, 343 bp, Zea Mays
ggtgagggcaatcccaggctgaacagcatggtcaacttggctgtcgtgctcaacacagagttggaccacgcccttgacgagttgggcaagattcgggcggaggttgcggaattgcgtgctgagtgcgcagcacgccactatctggatggtggttctcccacccctgtcgggattcagcacccttaccgttcaccgccccgtggtcgcttcgactatggtaccccagactgcaggacctggatagatttggatccctagatcgacatagtcggagtctgtaataatgcttagttcagtgtcccagtctagtcagtctagttagagttagtttgcttattttatg

SEQ ID NO: 119308 - DNA, 348 bp, Zea Mays
tttttatattaaaaatcaatttctgtatttatttacctatttttatatgctctcgggactgggcctcaaatccagagaaacccagggggttcggggtaatctttctaagacacagggagcactgctagttgaactgcaggttctaatctataattccagaggggctcttatgcaagttttgcacagcgaaagcgtacgggcagtcattggccatccgattagaattcggtcgcccagattaaattggctgcgcgcacggaccagtaccgcgcctcagccttgtgatcgtagataaacgtaccagacactacaccaaaatcatacacttcctacggttttttaacttcc

SEQ ID NO: 119309 - DNA, 688 bp, Zea Mays
gagcagcaagatagaactgtcacaagagcgcagctgaggggggtagtttctctttataacttgtcatgcatgtgtgcagaccaatagtccgggttcatgggggcagaccccaccggattgtcgtacacgtatgcgttatctagtcacaagaaagggaaacagactcgaccccttagtcttgctctatggatagaacatacagagatacttgacatcggggtaaggtgctcctccagtcatatctagatggttccccttgggtcggagcactcctgttaccttgaagggtccttcccagctgggggagagttgcggagcccctcttggtatggtatctgccgtggggctaagccccgacccagggttcccatctgtatttgacttgggagcccctgtctcttgctgtgatcactcctacatatacctgtctgcagctcggacccgtgggggtccggaagggcctccggaggaaaggcatgcttcagctccgtagaccggggaacacggggtccttctggggttcgtctagttgtcttcaccggagtaggagcctctggtgaagatatctttcaggtccccctcgggcgactggtacccgaggtcccactcagccgcggctacctcgccgtcatcttccttctctttaccgggccgacggcgaggcggggagccgtctttggaagacttc

SEQ ID NO: 119310 - DNA, 332 bp, Zea Mays
atgtgattcttggatgcgactggttgaaaagttgtgatggagtgatacaatgtgccaacagaacaattatgttgacaagtcctcaagatgaaagaatccaagttagcatagacaagtcaacagatgcaaaatggaagacagtggtgaatcatttggaagaaaagcccctggaaaatatcaaggtagtgtgtgaatacccagacgtatttccggaagaattaccaggtatgccacctgaccgtgatatagagttttctattgaattattacccggaactacacctatctcaaaaagaccttatagaatggatgtcaaagatttagtataactg

SEQ ID NO: 119311 - DNA, 627 bp, Zea Mays
tagactagcatagatcgactggaatgatgggataggaactatagctcggcaatttggccgccgccgtttatctctccgccagtcgtcgtggtccgcgctgctcggccctcaaagtttgctgtagagcgtatggtcgagtccgctgtaccctaaatgccgtatatctgtagtttagtggggggaaaagccatggaggaaccgagatggccatcaccggccatcccccgccgcgttcgggggagtagcgccatcgcacgtggactcgggtggggaagatgggctactgtcgtccgatccattttgggcggccatgatcacgccaacctatctgtgtggctaggttgattcgggtccgtccgatcgtaatcgggagaactcggggctgatcgcttgtacattaaacctgggccgtagatctcacatcctgcgctcgtcatcgcgtaccggttcggatagacatgatctaatccctaccacccgcgcgaaatctgacggccaggaaccgaccgtaccccttcgcctggcatttatctaaagagaccctagattattaacaaatcaacacgcagtccaccctgtactattctctgtgtctaggaatttttacctaggcgcccctgtcttttc

SEQ ID NO: 119312 - DNA, 410 bp, Zea Mays
caagctctacagatggtggatagccagagattttgcccttccatcccgcccttcccaccatccttgccccaagccagagattcgcggccatccgcgataatcaatcagcacaaatcgacggccctggttttctgttccttcaatcaccttcctaagtcgacgccaacctaccatcgacggcgaggatggaggtccttaaatatgtccaaagcgaggctgccacaccaatccccatcctccactaacgaaccaatatcttacaggtactctgcatgtgtgtgaagccgtctccgcctccaccaccctcggtatggacaatcgattcctcttcatctccctctcgttgcgtcgtctcctgttgcgatgtggatcgtcgatgcgaatggaatgcggtgtgtggtgtaattctg

SEQ ID NO: 119313 - DNA, 689 bp, Zea Mays
gcatcagaagaatcttcagctaacatatccagcatggcacttatctctgcatcactcggattcaaaggcacctcaaaatgaacctgcctctcgtcgtcaggaatttcttcaagtgaggcaaccaaagcactaacttcttcgggagagggtcgcactctaaggcccaaaccgctatcaccagcaggaggatttgacacaaaactggtaaaggccttggaaggaggcagattctaggccgaatatgcgacaggagcgccgatgttcgacaccttacctctgagtatcatcttgaaccgactcactaagtccatagcaggaattcttctattgattacctgagttgaatcagcgaggcctcgatacagataggtcggatatgctctgtcttttagcggctgaatattcttgaaaacaaagtcagcgaccacagcttccacagtcagacccctttctttcaacaatccaacttcagcaagcagagcccctgcctcagccacctcctggtccgtgggggattcggtccagctcgaagtgcgaacatctggctgccttcctgaccgtggggggagagaattcccatgattctccatgatgaaccattctaggcgccatcccttgatgctgtccttgagtgggatgtcgaggtagtcagtctttctcccacagcgcatctccaagctcgcgccccc

SEQ ID NO: 119314 - DNA, 487 bp, Zea Mays
ggaaactgaagctactgagacagctccgatctccgaagtcatgagacaatcgggattagttgtgacggagggagccattgacaaaggtgcacctactgccgaagctgaacaagctgatatcgaggaagaaaatgttgatgaagaagaggaagactataacactctgatcccaacaaaaccaaaccacttggattttgaaaaatctactatgtctgaggccgacatgcccatgatgatgaagctgggttacttcgaagaagctgagaagaaacttatttgttttgccagagaagaaaccactccaaagccgaaaaatgacgaagtagtggttttcaaaagctttttcagagcaggattacagtttccgcttcacgagatgattggagaagttttggataattatgaattctatcttcatcagctgacccataatgctatcgttaggcttagcatcttcatctgggcccttcgaagccaaggaatggac

SEQ ID NO: 119315 - DNA, 427 bp, Zea Mays
gcgcccgtccatgaatgattagcacgaaagaatccaaatcaagggcaacggaaagcactagtaggttacgtcaggcacgatgctgacgttagatagcgtcagactaaccaaacttctataagttgacacaggggcagttcatggggctaatatgcggcgtcgagctctcgttccgagagatttaggtcggcaatgatcaaacgaccaccacgatgagcttcagcaacaaacgtaaacaatagaacgctaaatcaggggcgcagaaccgtaccatgtacgcctggccacgcgaggctgagactttgatgacgtggtcaccagacacgcgaaactacacggctagagactagagtgttttcagggtatagcttgggggaaaatgaaggcagcaatagggtattgaagtcacccacaacgacttactaca

SEQ ID NO: 119316 - DNA, 523 bp, Zea Mays
gttgaggtgcatgccttttttgggatagaattgacacaaaggtatttctcctgcctgaccccttcctgatgggtttggtgtcgagctttgaggcatgcagatatatgagatgtgaagagaggatctccaatccatcagattaagaaaaaagaataatcctctatatcagacaacaggagatcacgaaaacatatataaacctaagttgtaggtgagatgtgctacagcagatagaggattttttgtattccctttatacgtggcagaattttgtttttcctttctggagggtttgtccttcatcttcgtcgtccttcttgttcccgtccgtcgtccgcatctccctgctcatgggatttcggtaggtcctgtccgcccgcctgctctcacgatgccttccatctcctgcttgaggtggcagcgtttgcagagcggcgctgcagctagcgactcatgagctccggtgatgcagtagcggcgtgcggcagcagagcggtcggtgctctcacggcgactagaagag

SEQ ID NO: 119317 - DNA, 577 bp, Zea Mays
accggacgacactccaaagtcagatcctgctgcaccgcaattggttccatctcaatctgatggtccggatcccgcaagaacttcctcagcatagagacatgaaaaactgggtgtacccctgccatggaatccggcaattgcaagcgataagccaagctgcccacccgggccaagatagtgaacggtccaatatatctcgggctaagctttccagagacactgaaccgaacaactcctttagtgggtgatacccctgagaaggacttggtcacccactgcgaattccaaatcccacctcctcacatcagcataactcttctgacggctctgagcggccaaaatattctgacaaatttttcgaaccttctctgaagtctgctgaacccaatcaggaccaaccagggatctctctcccaaggtctcccagcacaaaggggagatacactgcctgccatataaagcctcaaatggtgccatcttgatgctagtctggtagttgttgttataagcaaactctgccaatgcaagatgatcttcccagctacccttccaagacagtacacaagcacgcaacata

SEQ ID NO: 119318 - DNA, 692 bp, Zea Mays
tggatattcagtattatgggatgaactttgggggctattttgaagatgatttcatggatgtttgagtatggtgactacagttggtttgtagatggatcatacggcgacaactttcatactggtcgatcagtaggttgccaagtgaatttaggagaaaatccagcttcaagttgctctgtcaggtcaactgaagatgaatgccatggtacaataactgaagaagatacctagtttattccccttcgccgccgacgaccgtcacaccatgattcatgtcggtcgccgtgattcgtgcgctgtgacttgtggataacggtgaacgagtaaagatcgtggcacccggatcaacttgggtccggtcgcggctaggttccccgtaccacttgctcacctgccgatcgggataaacctcaccgccgttggccgatcactaccgtgcgccacgtgctaagcactttaccacgtcgcagtagctcggcttgcgatagttactcatcgccggtgaagtcgccatgacggaagacacgaatccactacgccagtaatctcccctctctccggccgccagcacttctctgccaaattgagcgccaccgccgttgcgttctataaattgcagcctcctagagctccgctaggtaactacacatccagtaaaccaactcttacctccaatcgttccccacaactcc

SEQ ID NO: 119319 - DNA, 408 bp, Zea Mays
tgacaacagtacaatcattaatttacctctttgccaccatgggaacctatctagattcatcctatagtctagaggctacttaaaagtggaccacctccttcctagagaagacacctctcctccctcactccgtccagtacattcttgtgcttgaagctgtctatatgatctccaccttgagttccttgcatgcacaagagattggacaaggaggtctatgactatgagactccatccgctcgcatgcctacacgggtaaatataaaatcaagtttttttgggagtgcatctgcatgactagtcttcctcatgctcctttattctagatgatttgatcaaacatctatgggcttcattaagcgaatgactacttcccaacaaccgctcaaaggactacactggtatctc

SEQ ID NO: 119320 - DNA, 554 bp, Zea Mays
ttgagctggctcgttaacaaatcaagctaatatgttagctcagctcgtgaaaaaattcaaaaaatccaagtcgagctgaccataaaccaagtgagtcgacgagccactagtatttcgtccagccctaaacaagacatggcagcagacaatacagctatgggtgattggcttgggtacaaatttgggtgtaccagcgtgtatgtattatattaagaaaaataacaagtataataataattttatagttaagctagccagcattgcttagatccctgacaaattagagcaagcaagtcaagtaccatggtcagttacaacgacagtaatgaagcgaataattgattattaaactagaccgtgattttgacatgagcaacctttctgaaaaaaaattaaggcaacgacaaagataggtaaccatcactccgcattgacgacgctgggactagacgtggaggcgctcgtgccacggaaacatccttcgtggtcctactgttgggaacatggtcacatgtgtgtatcgcagagaggcagagaagagaatctgattgcag

SEQ ID NO: 119321 - DNA, 325 bp, Zea Mays
tcaaagctggattatagagcaacaactttgttacagatggatgattgagttgccacataaaaatttgagaactaagccctttaaatttctctgtcaggcgcactgaatggacttcccattgtacagtaacctgaagaagatcgcaggttcaatgtatctcaccgccggtgatcccgcgccgtgatcctcaccgatgctgcgattcgtgcccggtggcgcgcggataactacgtagggtaaaagatctcgcgctagggatgaagtcggggcactatggccgccctgtctctgtacccacttgcgccgctaagtgaccggatggtcg

SEQ ID NO: 119322 - DNA, 515 bp, Zea Mays
cactcagaaagactcaacctcagacagagaagatggcttgagttgattaaggactatgatttggaaatacaatatcaccccggaaaggcaaatgtagtagctgatgctttgagccgtaagggtcaagtgaacaacatcactactcatttgatgtcacaagaattgtgctgggaaatggaacaactcaaccttggtatgctcaataatgtagaagcaacagttatggaagttgaatctactttggaagaagagatttgtaaaggacaagagtccgatgagaagattaaggaaattaaaactttgattggtttaggtaaagccccagatttcacggaagatgaccaaggcacagtatggtttaagaagagaatctgtgtacccgaaatcgagcacttgcaccaacttattttgagagaagctcatgattcaacttactctattcaccccggaagtacaaagatgtaccaggatcttaaggaaaagtattggtggtacgaattaaaaagatatgttgc

SEQ ID NO: 119323 - DNA, 452 bp, Zea Mays
ggtgagggcaatcccaggctgaacagcatggtcaacttggttgccgtgctcaacacagagttggaccacgcccttgacgagttgggcaaggttcgagcggaggttgcggaattgcgtgttgagtgcgcagcacgccactatctggatggtggttcccccgcccctgtcaggattcagcacccttaccgttcaccaccccgtggtcgcttcgactatggtaccccagactgcaggacccagatagatttggatccctaaatcgatagagtcggagtctgtaataatgcttaattcagtgtcttagtctagtcagtcttagttagagttagtttgcttattttatgttggatgcttgttatgatggacatgtactgaagttggatctttgtaatgattgtcaccaaggtgtgggtatcccttcaacttggtgtagttattaataaagtcgatta

SEQ ID NO: 119324 - DNA, 338 bp, Zea Mays
gggcgtagaataagctctctcacatcttccctctgactcaggtcactctttacgtaaaaccattcctgcatccaagagcctaccacctcttctgaaacatgggcacaaggtaactcgcctcagatcgaggcacgaagctgtaacaaccaaattgttgtgatactgttcctttccagtcgcctttgtctgataagacagttcatgaatattgcaaaagcaccttgcatctggttctagtccttggctcctcatggcccagataaaaacccccactctaataagagcctcaggggtaatctgatgaaggtatatttcaaatgttttcaaaacatcgacta

SEQ ID NO: 119325 - DNA, 493 bp, Zea Mays
cagatttgtgtgccaagtcactgaatgtgagatattaatctgaaaggcaagaagcattttttgtgttgctcaagatctggaggagggcattatatggtgaataggtgatagtgcagcaattaaaagctatggacaaacatttggaaactttgtttggcgtttgatgcatagtatcctagcaaataaaatgggcctgaagatggcacctttacattttaatccagtgaactcacctcatgctcctccggttgtcgatggagttggagttctgttcaccaccatgcccatcagtatgttgcagcatataacatgcactcgacaactaaatggcttgcttaatctcaaaaaatgaaaacctaataaataccttgcagctaatgccttttcatgcttatattttccactgagcaagcgcatgttctgattattccactaagcaactgcatgttttgattatatccatgtttactaccttacaaaaaacacttctctg

SEQ ID NO: 119326 - DNA, 382 bp, Zea Mays
aagtgatgagtgagaaaatgatagactacatcattcgatcattcctcgaaccaacacgctattagtctctctcctccccttatattgtattatgaggccttatgatttttttaatcataatgtatctttcttttcacagaacataaggtcctaattggtttggttttagatgcatctgctttcaatagtcaaaatgagaggccgctctcaaaacagaaaaaagagagatgcaattgacattggctgtaataataaagccatatgggtagagatttttggttgacattttagcaattgcatgtttgcaaagaattttggtagctatgtcatttccattctgtattatgtgataacaattaggcctggcaataatgtaacttag

SEQ ID NO: 119327 - DNA, 549 bp, Zea Mays
gaactggccgagcacaaattgaaggtctacccgcaggcaaggccgatctgacaaaaattacgtcgcttcacgcccgacaagagagaagccatccgtgctgagctagctcgcttggtcgcggccagattcattagagaggtgttatatcctaagtggttagctaatcccgttcttgtactcaaaaagaataaagtggattggcgcatgtgcgtcaactatacggatctcaacaaacactgcccgaaggatcccttcggacttcctagaatagaccaggtggtagactcaaccgctggatgttctgtgttgtctttcttggattgctactctaggtatcatcagattagcttggcaaaagaagacgaggaaaaacaacattcatcaccccgttcggagccttctgctatacctccatgtcgttcggcctcaaaaacgctggagcgacttatcagagagctattcagacatgcttagccgaccactagggaaagcgtgtggaagcttatgtggacgatgtggtgatcaagacagagaattcagaaaatttca

SEQ ID NO: 119328 - DNA, 678 bp, Zea Mays
caaaaccctaaatcgtgcagatcccttcatctccctccgcgcacaagccctaccatttgtgcatagtcgaattgagccgaacgcttggtcaccggtttgagggcgccggcagggctgtgggcgatgcacagttgcgccgtctgacttggtgtcgcagggtagaagacgggcatgtggtcgtcgataacgagataagcgacaaagattagaagctagaataccctttggtctattgaatccaaccgtagatctcagggtgggcggatctagagtaaccaaaacgtggatatgcctcgagaccattgatccctgatctgatgatccctgttgtgcaccgggtcgatgagaggcatgatctaatctggcccatcgatccccgatcggacaactcatcgtgccacgtaccccttcgaccgagcataattgcaaaagagaccatatcttccttatatataaaacaacctgccatccatgctagtgtaaagagtcttacagttcagtccttagtttcatagttttaaccctagccttatatgaaatagaacccgcggtccaataaatcggataattatagaaattaaaaatctgaaattggtttttagtatagaaataaatccaatagtcttagaaaacccatatctcatcatttttactattattggacccgttcaaattgcg

SEQ ID NO: 119329 - DNA, 380 bp, Zea Mays
tcttggtcaacctatccacaatgacccttatggaatcgtggtgtcgggaggtattgggcaatcccacaatcaagtccatgctaatgtcctcccatttccatgatggtatagggagtggctgtaaggtacctgctatcttcaaatgacttgctttgattctttggcaagtgtcgcactcagatacgtacttagcaatttctctcttcatcttagtccaccagtacaaggatctgaggtcatgatacattttgttgcttccaggatgcatggaaaatttggagagatgagcctcgtccaaaattttctttctgagttctggatccttgggaacaacaagtcggtcttcaaaccataaaatgcccttgctgttctaacgaaag

SEQ ID NO: 119330 - DNA, 347 bp, Zea Mays
gacaaatccaccaagagcaaagctccttcggaggaagaactccgacagagacaaggtggagaagatccaactcggaaacaacagacatatgattacctgcgaaaggcaattggctgttgagatcgataggaggaatgaccgcagcagcagaattctgattcttccgcttgggcgccatcgcaatctcgtcggcggactgagcgtaagcgaaatcaaagggaaacagaggaggttcggaggcaaaaagtgaggctagggcttagaatgcagaggcgtgcagcaacgtgatgcaaatggggttttcccgggtcagacaccgtttctaaaaagtgcttagtcatcactcg

SEQ ID NO: 119331 - DNA, 327 bp, Zea Mays
cattatcggaccactgcctacgacacaagggaacctaaaattcaccttcgttgccgtcgaatactttaccaaatggatcgagggcagagcagtctccacaataacagcgaagaccgcgcagaaattcttctggcagaacatcgtctgccggttcggagtcccattcgaactaacagtcgacaacggcaagcagtttaacaaccaagacttccgagaattttgcagttccattggcaccaaagcagtgttcgcctctgtctaccacccacagtccaacggtgtcgtcgaacgcgccaacggcaagatcttcagcgctatcaagaaaag

SEQ ID NO: 119332 - DNA, 541 bp, Zea Mays
tttgatattgacatcctagatgtagctccaaattgttaaaatcatgattttggctcagaacatcgttctcatgaacaggagactgattatgttttgctactcgactctcacgtgccgctcagccgttaataccattaaatatgattgtgccgttgcaacgcacgggtattgaacataagattcaattgcatagtgatctaccatccttatggcactacctcttatgcactaatcatcctcagaaacaaacattccagtgataaacccaatacaacactacacaagagaaagttgtacaaaggccttagagcacaaaaatatggaaatttactccattccaaactatgtcattttggattttctagataatgtttttttactatgtatctaggcatgacatatatctaagtgcatggctgcatctagaaaagctaaacgacttagagagggagtaacaggaatagaaaaacagtagcatgattgtacttaactacattttcatctctgtttaaacattacagtcagctgtaatagaaccctg

SEQ ID NO: 119333 - DNA, 481 bp, Zea Mays
atcctcctcctaccttgtttgaactcactcataaagatgcaagtctaaggtttaggcggtgcaactaaattaaaacattgtaaaatatttgatgattgtatctaatatcgcccaaatacacaagctcaggatgaatcattatttacttgccatgtcgtttgcttgttttttttctttctttcttagtgctgcttgtttgtagacagtggtggaccgaaccggcattctgttgtggatgctggtactggtacaactacgtaatgatcgatgtctggctgctgattgatcgagcacctgccattaattaaaagtcgtatcatctacgtacagaactaagcagtttgtgtgctgcctttgtttactcgatcctaccataacattgatctaaaacatctttttctaccataacttatgccactagcctgtcattttaaaccattttcacgcgcatgaagaatcattgatcttgactggcccaaaa

SEQ ID NO: 119334 - DNA, 623 bp, Zea Mays
cgataacaagtcctctgggatcatatcctcaagagtctgatcaaagttggccagtgacagttcttgcagaccaatgagggcagacaaagcaggagagggaactccactactttcatcgctagcaatgaactgccgactgttttttcgagtcagaggaatctcattttcttcctcctcgtcatccacattggcaacacaagcagcacccccattggggtcagcaacagatggggcacacccattgggatcagtagcagattgggtacacccattgggatcagcatcgataagtccagtcgcgggcacttcttcagtagcaggaaccgaggtatcagcgtcttgataaaaactggatactcgccggaggcgtcttcttttcttcttctgctcatcagtagaaggatcaggctgattggctcggcaagggcgcctcgggcgagtactgacaggcttctaaacatccaaagtcgtatcagcctctggaaggggcgccactaccaacgccccagctggagcagcgtcggatgaatcctcagctagcaaatcaagcatagcgcttatttctgcatcactagggttcaggggcacctcaaaatggacctgccgttcgtcatcaggaatct

SEQ ID NO: 119335 - DNA, 712 bp, Zea Mays
ggcatactattttttttttctaggagtacatatacagtgaaattttaactgcatctatagaatttgcgttttcaagggggcgtattgcatccgataggtacaaactagcttcgccactgagcttcatatttacattaaaatgtgacgctttgatgcaggcagctgacactgcacctgcagctactggtttctccactacgcttagctagcaccccccaaaaagtcgtgccactgcttctatcgtggaattacttctcctgtcctagtcgaattatcagaggacggatccaagatctgggtgcctgcttctgtttacaaaagcaaaggttacaacgagatagagagggagatgcatgcgcacttcctgagctgagggtagagtgttggaggatagctttaggtcggaatatcctcgcaaaaatccatcgtgttgcagtgtatagcttgaacctgacgacgatcctgttggcttcattctgatggcacgtcagcacacgcaactcgagtaagaaaatatcttgcccacccaacccaaggcaccaaaacaaaaggaccctggtgctctatctcactattctctatgtggtccttcccacgaatcgaccggtgactgtatctgttaagtactactcctgcatcgaatgtcttttgttcaaaaggaaaagtaaaaaaaaaaagatcttctaagccagtcattctatctgctgttttt

SEQ ID NO: 119336 - DNA, 337 bp, Zea Mays
ttgagggtcaaaccaatggcatttgaatatcactggagtaagaggtttggaaccataaaattgagttcatatatttcttcgattcgtccaaaataatcgacattgtcaagaccgggcgtaaagactccagaacacgttgttttccgattgggccgactttggtcgtagtttgttgtgcaaaaatggtatccattgataactcttttgcacaaagctgacggaagaaatagctcaactttgaaagcgctagccagacatgctcagggacatagcctcgaaccatcgcatgaagaatccgttcaatccatatgtggaagtcatgactcttcatccctaa

SEQ ID NO: 119337 - DNA, 311 bp, Zea Mays
ccaagttgctatcagtcacaggcgaattggacacaaaaagggtgaaagctttgggaggaggtaggttccaggccgagtatgccactggagcaccaacatttgaaaccttacccctgaggatcatttcaagtcggcttaccaagtctatagaaggaattctcctattggtaacccgagttgagtcggccagccctcgatacagatatgccggataggccctatctttcagtggctgaatgttcttaaaaacaaagtcagtgaccaccgcctcagcagttagacctctctctttcagcagtccaacttcagcc

SEQ ID NO: 119338 - DNA, 711 bp, Zea Mays
caaggtcaagaaaggataagccatgattcgcccaagaccttgtccgacgatcgctcaaaactccgccttgctcgagcctgtcctcgggcaaaagcagcgctcggagaaatcctcgtctcgcccaagcccccctatccacagaatagtggtttccgcctcacccaagctcgtctcggacaggaggacaaccccaagcctgaccttagtcaaaggtcacggaaaccatagagacatgagcatttaatgcgaatacctaccccatgtgacgccatagtcaaatagagcgatgggaccatccactttcatcaactatgatgacgcatgctcgagaataacgaccgctgctcctccatgccgactactatgattcggacaactctggatgggacgtgcacatgtctaagcatggtctcaccctcgggagggaactccgtctcgcctgaagtcagccacatcctcaaagaaaactctgcctcgcccgagctcggcttcgaccaactgccccagcaacaactccccgtgaatcccacagggggccacttcgacaactatgctacctcctcctagtatgactgtacgccccaggcaggttcgacaaaggcctcagaagtaacctccgtctcgcccgagcctggcctcggcctagataacatcgaccaaaggacttcaccaactccttcgtgaaggttgccggcaacaggatggtacaga

SEQ ID NO: 119339 - DNA, 461 bp, Zea Mays
gcaaaaataattgtatgcttttcatgaaggagcatgcaggagagaaaaatgtctgaaatgtggacaatctagatttgtggaagttgttaatgatgagggtgacaaggtgatgacagatgttgcatataaacagctccattacgtaccactaactcctcgagtgaaacagttgtttctatctaaaaaaccgctatgaacatgcgatggcacaaagaaggtgtccgtgataacgatgacctaatcgtgcacccttcagatggggatgcttggaaggctctcgatgcgtttgatccagactttgcagctgatctgaggaatgttcgaatcggcctcgcgaccgatgggttcacaccttttggtcaaatggcatcatcatactcatgttggcccatctttgttattccatacaaccttccaccttctctttgtatgaaatataaatttatatttctttgcttaat

SEQ ID NO: 119340 - DNA, 953 bp, Zea Mays
agtttcatatgttgctaaatgacacacgttttataattataagaagaattagagacaaattagaagtaaacaaaagcgtgcatgtttcttgaattgcttaagtgtctcgggtgcacgccaccatatggttgtatgtgagacaaggttatgcgcatgatgagtttagtaaaaatcaatcagtgtcactagtgttaagttgagatttatttgcgcatggaaagtaaccgtgtgtttaatacttagaactcttagtcgatagtagaaattgttttggcttatgtagagaggtgatgacatgccgtaagtagtcatcacttcctctataattataagtcgagtctatacgcgttaggcgttccttaaatggtgcttcgcaaataagtgtattttgtgtagtatggattgattgtgagtgcatgtgtcgcaagaaaagaattagtgcgcatataggcgatgaatgggtgtgatgaaatggtgacatgccttcgtagtcatcatgtcgtctattggtgacctaactgaaggtcgtagagaaaggtcgattacctgtgtgttattattgtcaccttgtggttctgtatgaattgcaacgtgaagtagtaggctctgtatgtgatgctagatatctaggtagatgttcgtgaattgtggtgctcggaccgtcgagatgaaggttaagtcggtcgatgccgattaagtagttaaaatgattaagggaataatcatggggttaaaactagaaactagtgttcttgcacccgtttgggatgttgtagcccaattgtgcatggttatgatcgcgggtaaaaattagtagtgctcatgtggtgtctaagctaaaatgcgaactagtggatgaaaagcactttgatatacatatatgtcggatttgatgattgtggtgaatgcattgattaattgtgtatggtagtcctaacgcacgtaataacttg

SEQ ID NO: 119341 - DNA, 300 bp, Zea Mays
tttggaaattaatagtttgcatgactgggttatataatgcgttgatataatactataatatgttgcgtaaaactagaccattacacaaattatgaaactaaatatataccaaaaattggcattgaacgtttaacaatcggccgatctggataggaatggtatataaactcaatacacttaacataactaaacaattgggagtacataattcgggtttcacactacatctacaccagaaaggttgtagcataggcactggacacagttagcataattagcatggtaaatgtgtaaaaggaa

SEQ ID NO: 119342 - DNA, 348 bp, Zea Mays
acattcatcaaagtctgtagggatcctttcttcttcgtcgtcgcctgccatcgaaacacaaaaacatggaacaaacggtgaaggttatccctaataatctcactacacgctcctctcgggtggaacacaggaacacgctctaatgtatcttaccaaggtcttacaagtgtctgacgaaatacaagcaaagaatggtacaatcggaggttggttcgtgatacttaccaagaggtagtgaaaccatgattgcaaggtcaaatctgtattgatcagaagatatagtatgtggagctgtaggacaggcacaatatgtatgtgaatgtggaacaaaatcgagtgcagattagc

SEQ ID NO: 119343 - DNA, 399 bp, Zea Mays
catccgtagttcgcgctgtctccgtggacagggtgatttaaagctcagatcgtgcaattgatcgaggggaaacgattattaggtgttgaattaggagttaacctggttagagcaccgtccgttgcgtatttcggccagagcgagctcgtcggagctaatgctccgccgctccgcgttggggacctggctttatgaaagaatagaaggggagggaccttgatgcaaatgtcagtaagacaaaacaatagtgttgcggactctttcgggttgtttaaaaagccagggtcttctatgcaaagttgaaaccgggggcgcgggcgcgcgcgtgttctcccttctgcaggctagtttgggctgaattcagcccaacactgttcatagtttctctttttctttttc

SEQ ID NO: 119344 - DNA, 646 bp, Zea Mays
aatgtgactaacccggaccaggatgtgcttgaccacggtgatggcggacaccaagcatcgatcaatacgtttcggttgcatacgtaaggtaaaactccctgggttgcgtggataacaatcccgagcacatgagggcgctaaaacacgagcaacaagggcgaggacggacctggaatcagctggccgcaagtaggcggttcacgacggcgcagtcgaccgaattggggggaaaacggcgttgcggcgactctgggtgaaattgggggtggggattgaggctacacgaccgtaagaaactatagcttcaccgtgcagactcaatttgggagaagggggcagagacaacgcgaattttggattgcgatcagctcactggtgaagaggtaaacacctcgtcgtggctccctgctctatatataggcacgacgatccgacgatcatttcacatgccgaccacgtcagtaggaggcacagtgagagaaatcacggcatgcgtgacagcgcggcgagagttcactgagtcacggtggtcgccggtgaacaactccggctggctcggggtatggtgccacgtacgcgttatctgactccggcgttatccgttccctaccacgcacgaacccggacggcggtggcacgaattttg

SEQ ID NO: 119345 - DNA, 380 bp, Zea Mays
gtgggacctaggtccaactggatcccagctttgacaacgcgtctgctgctgcattgtggtctctttccacatgatggaattccaacccttcaaacttgtcttctaattttcggacggctgcatagtacttgcctatagaatcaatcgagcaatcccagtctttatttatctggcttatgaccactagtgaatctccgtataccatcaacctcttagcacccagtgacacgacgatgttcaacccgtggatcagtgcttcatattctactgcattatttgatggtaggaataatagctaaagtgcatacatgagttgttcacctccaggagcaatgaagaggatccctgcgcctactccctgaagtttcagcgagccatcg

SEQ ID NO: 119346 - DNA, 435 bp, Zea Mays
gtcgcgttctctgttccaagatcgggattgatgccctgttgcacgccggcgtggcgttctggctgggctgacaggcgaggagatagggtaggaagcgagaggttgaagatgggctggtagccgttggatagggggggggaacgaataggattaaatctggcaaagtgttggcccccgaccgtcgatcatacggtggatggcgtagatttgatcgagcccctttaaaatcagaaccgtcgctttcggatctgatggccaccatttcctaccgattcatttataggcgcgatataatctggtccgcagggattggatcggacggctcatataaactcgtaccccttcgccgcgcctcttttgtttaagagcccctggacttttagtgaatgaacccgcggtccatcgtggctgtcctctgagtcttagggattttac

SEQ ID NO: 119347 - DNA, 482 bp, Zea Mays
gtttggagtaactaacctgccccagtcttcaagggtgcgtgtggcagatgaaagttgtatgtcttgtactcgttagttaattggagttgtttggtctgtccaacattgtgaatttgtcacggatttttgtattctagacttgtccagttatgatatgattgtgggcttggactggttgtcattgcacagtcccatgaagattcactagttgcacaaatggatggtcatttcttccaacaattcttcagtcctgctacatggtctctctgctgcattgatgctaggttctatggtcgaagttgccgtggttgattcagtcagtccttcttttcaggatgctggtttacctgaaccgcaggtgtccttactgacagaattgcttcagtttttgctgctcccactggtttaccaccgtctcgggagtttgatcactccattcccttgttggctggtgctaccccagttcatgtgaggccctacag

SEQ ID NO: 119348 - DNA, 289 bp, Zea Mays
agcagttttccattcatctcccaatttcatacgaatctggtggtacccactacgcaaatcaactttagaaaagacgatggcaccactcaattcatcaagcatatcatcaaaacgtggaatagggtgtcgataccgtatcgtgatattattaatagccctacaatcaacacacatacgccatgttccatcttttttaggcactaaaataaccggaacagcacacggactaagagactcacgcacgtaacctttgtcgagtagttcttgaacttgtcgctgaatttctttt

SEQ ID NO: 119349 - DNA, 690 bp, Zea Mays
cttgcaacaatttaaagcatgtagattgccataatatagaaatgaagaatatgcaatctaccatatgagaggaatttcttcaaagaatggtgacataattttaaaaacatcttaagtgctcccccttttttttatgtgactacaccagacacataagaaatgataatttaagatacttgcactttaaaagcataagtgttaccatcctttgacgttcctccatgttgtaggccttgattttccgcacatgatgattctttatttcctacaacattaatatcttccccgagatgatatgagtttaagatataacaaattaaaataaccttgggttaatcttgaatatagatcattgaagattgatagcttgagtcaacaaaaattgaattgactttctcaagcaccccaaagcttcataccatctcctcctcctgcaaagcttgtcaagtatattttggtacccatcgcttgatgggtccgccaaggttagtaaacaaagatctaggaacccaaaagtcctttgtgttagcgcttggtaacctcattacctttctagcacaagttgcaattttgggttgcctagttacatgagaattaattgacaagataggagtggagttgttaccaatgggacaatccttgcattgatgtccctttttccggcatgtgtagcataggcgtttttcaagt

SEQ ID NO: 119350 - DNA, 513 bp, Zea Mays
ggtaactcatggaacatagagcatcttagaaagttttatccttagcgaagcctcaaaagctctcgaagcaacattgtactatgtaatcgggggacttcatcatcaataaagttttcgttttcaaaggcattcagactcttgactatcagctgacttcgatttgattagacttgaaatcagcacgcttactcaacttagggtgaccactataccctactaatgaagcaatcgtcttaagtcggtaacgacttaagatggtgcgacatgctcactcttactcgactttgggtgaccactataccctactaacagagcaatcggcttaagtcggtaacgacttaagacggtgcgacatgctcatgcttactcggcttagggtgaccactatatcctactaacgaagcaatcagcttaagtcagcgacgacttaagatggtgcgacatgctcatgcttactcggcttagggtgaccactataccctactaacggagcaatcggcttaagtcggcgac

SEQ ID NO: 119351 - DNA, 457 bp, Zea Mays
gatagacctcctagcatgcattcggtgccttaaccatgcagccaaccaggctaacataactgctacaagaaccactgcctttgtaattagccgacgacgtgcaatagcagaatccattgctagagtaataaaatagaaaaggagattagaggtctaagttggctcacatgtgttgtgctagttgctaaaatgtaattcatagaacattgatctatagctcagaggcacactagcatcatagaacattgatctatagctcagaaaatacatgatcaagcatgctaaacggtgatgtgctagttgctaatatatgaaaatagattcttacacaagccatgactgcgacataaaagagatgcgccacccagaggcaatgaatcatcacataccattgatcgatagctcagagaaacacaaaatgtgcattaaacttgccattaaagaaacacaaaagcaa

SEQ ID NO: 119352 - DNA, 344 bp, Zea Mays
gttggttgagggtataggaagcaccccattttaggtttggtatgggtttaggcgaccaccatgatatcagggcctctatggagatttaacaaattataggttaacgagagaggtcatagtgtgggagtgtgtatgatgcgtgagagacaccaaatttagagaggtttaggccacaagagcttaataacatatgtccactaagttgcttgattgtattgcttggaaccggaaatggctaagtgtgtgtgcctgtctaggtgtcctagacttgtgttcatcccaacgtggttggctttcattggcctccccctatgaagggtcccctctaccttttatagttcaag

SEQ ID NO: 119353 - DNA, 790 bp, Zea Mays
agctgtcgcaaataattgcgagatggaggatcgcctaacaaaccctcttgcattgcattgcatgcgcgcgcgcgcgtcgcctaacaaaccattacacaattattaattgttggattacctctctatatatgcagtgcacgctttaatattcttgttaattggatggcggtgtatattaattaatgaagacaagctagctagctagctagcacaatgctgtgcacacccactaattttataaaacttgcaataattagcacatgcatggggtttcatacatacatatatttttactttgtcttttcgtagcatgttatgcacttttttgttacgtgaagaaataaataatattccgtttatgtacctttttcactaatatatactctctttcattagttcaaaaatgaaacgggtttcattagttgaccaccggccgatcgactcggaggctgatgtaagcccaagcgtcctatcctccgggacgaataacctgggctagagcatgcaagtcgtgtcagtcagggagagtacaacgttacagttacataccagtgcagtgccgcatgcaacatgcattgcatggtacgtaccatctcggttgttggttggttggtccaaacattgcccagtttcaaaggaaagagaccatccaggcaggactcaggagcatgagctgagcagcaggaggaacgggcgagtagtggttggttgcctttgttgggttagttagttgcgttgcccggcctccgtcccccatctgcacctgcatcaacgtggcactttaatttcc

SEQ ID NO: 119354 - DNA, 665 bp, Zea Mays
gctatctcttcatcggaatctgtcctaaacgacgacgactgtcggaactaagcatcagatcaccatccccgagcccaggcgagtctagtccatgccctaattgaactaatctggccctggattctcctacccacgatgatggcgaacaccaaggacgaatcgaggcgttcccgacgattaagcgcggtctagctcaattggttgagttgacaagcatcacaagcatgcgagagtgctgaaacacgaataaggagggcgagagcggacctggagatggatgtccacggcgcggcgtcacatggtggcgcggacgaccgatttggtggaaaaactaaattagggcgctatggtggctaatcggaggcgagggttggtgctctggcttcgtaacaacctagcggagctagctgtgcactcaatttatagcatcccatagcggtggctccgaatttggaagaggaaagctagcggccggagagagggggtgagtcactggcgcgaattaccgtggctttcaccagggcaatgtctcaggtgatggacaggctacctacggtgatctactgcgacgtggtaactcttctaagtatgtggcacgactacgaagggcgacgaattccagtgaggacacctcagtcaatcgcgcggcaagtggcacggtgaac

SEQ ID NO: 119355 - DNA, 499 bp, Zea Mays
cactaaccagcattcgccatctccaactcagatactcgctgatgaagcagcataggattccaatgtgttagagacagagctctttctgggacagaggcaccctacgatctcagctgaccagccatctcgtcaaccaacgcctgacattaaaaataaacgagtataagaacagtatttcacccggagtatagtcaggtcaggaaaaaccaaataacctggagattggagaagaaagagggaacccccaaattatgggaatttagttgatgacttgatgaaggattaccaaccaaagcaatctgcagagcatcagcggggaccaattcagcgtcaccagcagaaatcaaaactctgtcatcaagtgcgccggcctctaaggcgacctcctgacccgaagctggtgctgctgccatgcaaccagaatgcggaggagaagacccgacatgaacatccatggaagtgtgagaaggagaacacgctcggacaccctcgggggctg

SEQ ID NO: 119356 - DNA, 430 bp, Zea Mays
atcgactttaggtatcaatcttatatcaatattgtccggctgcgcatagaaatttaacatttacgattcaatagcgactaaatctaatgtaatatagatacaacattacaaaaagtatgtaagaaaataatagtatcataattgggagaacttacatggctttgaagaatatgaggtgtgtcctgttcatgcgccccaatatgtctcatggggatgtgcttatctgtgccgaccatgtctgtcgattttgtgtgctcatcaatatgtccaggtgccctcaatgccgcgggggagtaacagatacaccctctgtgtaaccggtgatcgcagacgctacaggatgcatgtccattgaaatagacgtacatgttgatctatgcacaggcgctacaggttgcatgtcatcgccagcaccggtgctggacatttt

SEQ ID NO: 119357 - DNA, 282 bp, Zea Mays
tggaggtcgagtacctatagagatatgtcatgcatcaaatctagtggacatgacttatgtagatgaggaggacgaggccattaaggttgtgatgcagttagagctagatgggatgtttgcaacactatgagactaacgatagcttagacaaggactacgatccaatcccacatattccaccacctagatcacatgacttagagaccaggggctctagcttagcaccaccaccaccacaaccaaaatgctagcagaccatgtcctacttgagatactagcata

SEQ ID NO: 119358 - DNA, 612 bp, Zea Mays
ctccactccaaccttctcgaggtgcgaaccgtctcctccacctccaacttgtcattagcagactcctcttctacaccttctccattttctacaccttctacaccttggtgtagctcttcttccttttattctagggtggggagattcaaaatacattacttggttagctcattctccttcaacgatctcctcctagacctagcctcaaccccattccatgattccatccctagggcctccaagaaatgatgtctttgtgagtatcgaggtgaaaagacaggaagaaatacaaaaccgtttgggatggatccatcgcttctatcccaatgctcagttcccatgtgccctcttctcctctcccatccttgttgcctctcgaatgcgttctcgcgcgtggcttcattccctccccgcgtgcaaccactggtgcgagctcacacgccgccatgtatagtggtagatcagtaatgcatcgaagaggaggctgattttctaattaccaatagcggaggcaacacaagctagtaggactcattttctttctttttcttccaccttccttctcctctaccctccacctctttctccaatagagtggagctcatttttctc

SEQ ID NO: 119359 - DNA, 620 bp, Zea Mays
ctctggccatggtgaagcttctcacgacggcgatggtgaccgatttcagggaaatccaatgaacttgagctacgatggatgagaaggactggctaagggtgggctaggttcataaccgaagggcggagcgagggaatactcaatttatactgatcggcccccagtgtcacaaatttggacgaggttgagttcacggcggtggcgagatatttctaccgaggcaagttcaccgtggcgcacgatgggtgaatggcctagggcaataactgactgcttgccacgattataaatatgtggtgaaatgaccacggtgtggcgcaaccgcaagagacgaaggccaccatgacgatggtcgctcggccacgtcgccatgcaagtcggtatggcgcacagggctcaatccagtcccctatggacttttcacccccctcggtaatatcctactcgaactgagcatgaatctttgtggcaagctcgaatcatggcgcgccgatcaccggtggcgaggttcactgaacctgtgatcttgttcagttactgttcatgccattcccaattcaaagtgcctgacagagcaactttgagggtgaattacttccaattcccaatagtaacaaacc

SEQ ID NO: 119360 - DNA, 362 bp, Zea Mays
aaaaaataaaagacatgggatcttctcgaagagcctgtctctacgcaactctctatacatattgtcaagggcatgtataatcctatttaatatggggtgtcttgaggagtcttagggggttaagtaaaaaggtaaaagagatgggatcttcgcgaagagcccgtctctacacaactccctatacatattgtctcttaactacatttatgatctatgggctcagggcgatctcttagggtatgaacaatgcatattaatgtatcgtgtcttgagatgtttctagtggggtaagtgtaaaaaaacaaagaaacaatgtcttcgtaagacacacttgtggctcggttttctaagctaaaacacgg

SEQ ID NO: 119361 - DNA, 546 bp, Zea Mays
actttttcaagacttcaaccaacatcttgtgtaaggggaaccgtagcccagccttcatgaagcttcaaaaaaccactacctcatatttctcaggaagaggaacattattatcaccaccgattctcactataaatacatcatggaaatatctacccttcatagcctcaacatgacctttcttcacaattgatttaccaaagaccacgtgactcggcctccacggccgatcttcgacatcatcattatcactctcaatatccaagtcctcgctatcaccagaatctttagacagtgagctaaaatctcattagttattttctcaacattagtcctctccatagcttcataaaaccaggctagtgctgggtcctcactccttttatcttcggccatctcatatttgggtaaaacaaaacaccgaagctcaaaactagtcgtggttacaatatcagcaagccagacaacaaagctaacacaagcttgatagcacgaaaaatattttatcacaaccctcatatatatatgcaaagcactactgtaaagcaa

SEQ ID NO: 119362 - DNA, 325 bp, Zea Mays
catcagtctcttgatgcccagtgatatggcaatgttcagtccatgaatcaaagcttcatattctgctgcattattggacgctgagaatagcgattgaagagcatatttgagttgttcacctccaggtgcaatgaagaggattcctgcgcctgctccctgcagtttcaacgagccatcgaaatacatccgccatacttctgtagtctctgggttatctggcacttgttgctcggtccactctcatacgaagtaaactagtgcttgagtcttgattgcagtgcgaggtcgaaactcaatgtcgtgagctcccagcttgcaggcccac

SEQ ID NO: 119363 - DNA, 446 bp, Zea Mays
cgtaatgtacgtgttgcactggccataaatgggttcaatccctatggactgatggctgcaccatacacatgttggcattagttcgttatccccctcaatctgcccccgacgtatgctttcaaagacagaacatattcttgtcgttgataattcttggacacccggggaataaaatgggcatgtacatgaagcatgtgattgatgaattggttcgtgcttgggaggcaagggtatggacatacgaccgagctacgaagaaaaacttcaaaatgcatatttagtaccagtactctatgcatgacttaccggcgtatgggttattctatgccttgtgtattcacggcaagttctcatgcccagtttgcaaggaagctcttaggttcatttggttgcagatgggtgggcatatattcgttgttcgataagcattgacaatttctccctcc

SEQ ID NO: 119364 - DNA, 534 bp, Zea Mays
gtgaaatgccactcccgaaatgagatgggagattggagattttagataacagacataatgtcatcaccaacaccaaggtaagatcgagaaatgagaggtaaaggtaatgaagagcaaaagcacaacaaaggatagagttaaaaactcgtaagcgacacagaagaggatatgaccaatggaatgtaggtaagttacaactctcaaattgagaggtcagagaggagattttaaaggatagttataagataagcatcaagataagatatagaggtgacaaacataaacatgataataatgaaaagcataacgaaggatagagtaaaagcaagactcacgaagtggcgaagtggagaaaacaaccaagggtaagataggtaaggttccagcagagtggttgaagtaaaaaaattcattaccgagagaagttataaggaacaatgagaacaccaaggatgtgtgaaataaaatgatcgctcatggatcgtctagaaataagagtggtcaagggcatgtgaactgaaatgttttaagcag

SEQ ID NO: 119365 - DNA, 371 bp, Zea Mays
ctctatggtgtaactctagatttattacaacaggtcgaaggttgtaccttcttagattgtctctaggatagagacataaaagcaagagaaataaaaattatattgagtgtgtatgaaagttttttgattgagcccctctgttactttaataaatgtgtcttgactctggtacaatactgttgactgtccgagcttcagactcttcgcgtgcgtcacgttgttgctgaacctggtggttcccttttggctattgattgtgagatgaagttggacccatgagtggtggtggtggtagggcccatgcagctggggagtggcttgttgaagctactgatactatgggttgttgattgcccacatactcaggaatg

SEQ ID NO: 119366 - DNA, 329 bp, Zea Mays
gtgggattgcatcttattatatgctgaaaaccatctgtagttttgaatgtcgaaactagattttgatgtcaatgggataagcttggcaagacctaataacacaaaaccaaagggaagaacaatcaaggggagtgaacaaaaggttattaaattgggcgcgaaaggtacaaagaagaagaacaggaaatgctagaagtgtggaattactgatggttacaacagttgaacatgtttgtcagtggaggagaatagggttcgattggctagccttgctggacgtaagagaggatgatcgcctggatgtaggaacaaggttagaactaatgctc

SEQ ID NO: 119367 - DNA, 486 bp, Zea Mays
cgggtggacaggaggaagaaggcgatccctcgaccgttcatctggatctgggcggtgtggattagatgtcgcgataactcttcgcgcgattcggcctaggccattggattgcgaacaaacggatcaaacacgatctaggacattttaaatctacaccatcgatcatgtgattcacgaccccgattagaaagtatttgtatcccttcgggaatagatcgtgacccttggattagatcggacggatgtaggcagatccatcctattaaaatcgtagccttagataattgatccggtggtctgtggggcgtaccacttcgtgacttaatccgggacctcaatctctaatcatgcggccgtgggtgcccgaactccccaactgtgacgattttgcttaagaaaccctagaattagttggaatgaacccgcggttcaacgcacgaggatcctgagtctgggaaccatttacgtagtaaacccttagagttc

SEQ ID NO: 119368 - DNA, 424 bp, Zea Mays
gtgagttgtcgcgaagtgataggcgtcatcgtggtgagatggagggtggtcgtcttcgtgtggacgggactggcaaacgggaattgttgtcctcgccggctggggcaagtgtgggtgagggggagctgcgaagtctgtttgcgggtgaggaattgaggataatgttgttcaactatagggagatgggtatcatcctgaaggttgagccaatgtaatgtgtgatgccctcgctgtatgtatgtaaccatgattttgtgtgatgaagctgcacgctttcgttgatcaggctggtcccgtaggcttctgtacggagtgctttggaaaagacttcgattttttgtacttgttattccggctgcacccgtaggcgacttttgcacggagtcttttggaaaagacttcgatttttcgtgcttattattcc

SEQ ID NO: 119369 - DNA, 303 bp, Zea Mays
tgcaattcttttgatgcttcatgaatttgtcattgtagttgagaaatctgaagcatcttttctttttgcttctcgacctggtgttggatagctttaagattttagatctcttggtcaaggtcatcatgtggtggacgatctacggcctttctcttgccttttgtcgatcattacctgcagagggatacctctattttggttgattttgatctattggaacaagtacgacactggtagttgtgcttctctttgaaggcatgacaaagagttgttcctttttgtcgtgagtttacctgaagtggg

SEQ ID NO: 119370 - DNA, 277 bp, Zea Mays
tcgtgcttatgaagcaaacagcgtccttttgtactagaaacaagaagagatgccaaccagaagtgaagaaaagctagcaatgcaatggctgacaggctgtgtgaaagatgatgggtaagcaagataccagggcggcaatgcaaaaagatgaggagctggagatggttagttagcaggaggtatgctgctgcgttgctatttgtttatccaattcgaggaaagatcagggaaccaagtgcagccagcagccaagccaatcggagagccaaatctggtt

SEQ ID NO: 119371 - DNA, 875 bp, Zea Mays
aggttctttactatagatagaatatgctataaatcttctgtaatcaggaaagtcaagaaccttccctgcacatgatttgtctcctttattgtaagccacgccaggggctcttcctggctatatataacacgtagacggcacgaggtcaagtgcacgtttccagccctctgattgttttccacatggtaccagagccatcaaaatagattaaatctatcttccaccatgtcaacctcctatgtcgccaccattaatcctttggtcggccaagttgttttcgagaagctaaccaaacacaaccacgcactatggaagatgcaagtgctggccatcgtgaggggcgcacgcctggagggatttctcacaggcatcacaaagacccctgcgtctaccgtgaagaggacagcagatggcaaagaggaggagatgcagaacccgctctacgttgagtggattgctacagatcaacaggtcctgggattcctgctctcttctatcactccaaatattttatctcagttaactacatgcaagactgctgttgaagtatggagtgctgtcgaggccatgttcacctcgatgtcacgagcacgcaccgtcaacatcaggatcgcgctcgccacaacaaagaagggagatctctccatggcggaatacgtcaccaagatgcggtctctcgccgatgagatcgtgtctgctggcaaggccatcgatgacgacgagctggtctcgtacgttcttgctggcctcgatttcgactacaatcccatcgtctcagccctagttgccaggactgagccgatcagcgtgggagagatgtactcccagctgctctcctttgagcagcgcatggatcttctccagcctgatagccg

SEQ ID NO: 119372 - DNA, 312 bp, Zea Mays
tctcactcttgtgctcgcgacatctttgtagatgccccctaacttttgggtcccttcctctttcgtcattaaattgctaccatttcacaatctttaatcccctcgtattgacatgctcgtatcccttgaatctttaatactcctgtttcaatacctacctctaataaaaactctgctgcttatttcaacatttcattttatatgtccatgatcttcctgtcttttgagaccctttcctattctattgttaagtcgctatctttttggcaatttgtactctcttggtcttggtatgctcgtaccattggaatc

SEQ ID NO: 119373 - DNA, 580 bp, Zea Mays
ttttttcttcaaatgtttgtttgtgtctgtgtggccactataatgtaggtcttaaatgccaccaaggaatcagcaccgatgggcaacacttatgaggaaaagaaagaagataacgcgaagaaaaggaaggagattgcacctagatgagaagtatggtctcactttgtcaagatttgtgtttatggacacttgaagaaagggaaatgcaagtattgcagccgtgagatcaagtgtgacccaaatttgaatggtacatctgccctacgtgctcattttaatatttgcaagtgcaatcctcataaaaatagagacccaaatcaaagcaatttacaattatctcatggtgaaaacgttgcaatctataagtttgatcataaagcaattaggaaagcattttctgaaatggtcattgaagatgagcaaccatttgcatgtgctgaaaaggcaggctttagaaagttcattgttacaacatttgtgttttgctgtactgtgctcttaaatgaacagatcatgatatttgtatttaattgtattgtgttgttagaggcttagagcagttttattcgtatttggtttt

SEQ ID NO: 119374 - DNA, 372 bp, Zea Mays
actacaatggtaaagaagttaatttaatcaaagcatgagaacaatgtagaaagttgtgtgaggcaaatgtgtgaaaactgaaaagactagagaagtagcttgatgctagctggttgtgaaaggaggcaggaataacttttttaggtgtggcgccgagttaaaaacaaaagtaaacgctggtggtgaaagtagcttgatactatgaatttgattcctttagttaccgtaaaagaccccatcactatgaatttaaagttgtttatcaaacaacaacaacaaagaaataaacgctggctggaaaccatatcatatccagcaggtgtaaccacaaatggccatcgagtgagtctatctatgatcacactaattacc

SEQ ID NO: 119375 - DNA, 810 bp, Zea Mays
ttgttcttattcttcataccgatttatgttagtgtcgttactatctgtctgcttgagtaataacaacatactgtatggcactaaatcatttggtggataactgaaatgcatgaacttggaaacgacctcgaaccaggctgcctgtatatgcgtggagacatatacaatacagtatatttagcgagggcgtgattttagcttttgtctccgtgtcttgtttttaccaagagagtaagttatgctactatatttagcaaaaactatcagaagagagtatagcacatactcaaattgcctattttctcaccatggacgagccaaaaattagttactagaatattaatttttgaagcaaagaaatcaatacaaacaaatcagcatcaattgtaaacgagcttttaggctggtgattacacgtggagtggcaatagcagtacaattgaacatatagaaatgtatggtggattactgaattgcgtggacttggaaatagcctcgaactaggctgcctgtatatgcgtggagagaaacccacgaggctgttcggcggagctttaccaagctaatggggatcagtgcaccgactcccattaccatgtgtatgtgtgtttgcgtgctgctacgacgactactttcacgcacgcgcacacagaaaacgcgatgctaccactccatatgactctaagatgttttgacatggctgttcggctgcttgccaataaagagtcatgtgggccgaaaggagaaatcataaataatagaaagcattatatggacatgcgtttctgggtaagtttgtttccaatcatt

SEQ ID NO: 119376 - DNA, 377 bp, Zea Mays
tattttttggtttggctatgctgtacaaaattaggtattgggtcctcagtgttgaggagcctagccaaacgtcttcctaaaaacttacctgtgagccgtcctttaccttgaaagagccgaatctgagaaagtctcgcttcaccttcataagatcgtaccaaaaatgtgagtcctcctgtctccattctacttgggataacgagatttaaccaaggtatttgtttcgtaaaagttgttgccagatcccatccgaagtgagcatcttgaaaatccacttacttaggagagaaatgttcttgatgcccaaatcgtgaatacctaaagcccctggtttttaggttgactaagtatgttccacctagcatgacaatattttt

SEQ ID NO: 119377 - DNA, 691 bp, Zea Mays
caccgccgattctagtgagggtggactggtccgactgaagtataccttcagattcagggaaaattttgatgagccaaacgatgactagctgaagtgcatcgaagctactagtgatgagctacttggagcatactccaaggccgaagataatgctctatctgcagcctttggaagtcggggcaagaaaagattaaatagggtatttgatgctattggcttcgtataccctaattaccattatccgataaaagggcaagagaaaacgaggaagaccgccgcttcggccactgtagctaagccgaagggcaaaaagattaaggttctaacccattggccgcgctatattgaaccggccgtagtgcccgaatttggcgcagggtccacttcagcagccgaagcaacacaaactgcttcgattacacagagcgctgaagagccgaccgtaatgccgaagatgcatacagtcgagccagtcgaagataaggttgataaggctgaagagccaaaggttgaagaaataataaggatgccaaaaattctgagccctccaatagaggcaaaactgccgaagatgcaaaagacttctgccgcaactcccaagaggaggaggatggccaacgtgctagatgttgtgctggaaactaagaaggtcttgagcactgctgctacaaagaaagttgctgaagctaca

SEQ ID NO: 119378 - DNA, 434 bp, Zea Mays
gagacacgccaggagttgcgccaggagagagaagagatacgtcaggagagaagggcgcaatagcagctgcaacaacaacttcaacaacagcagcaacagcaacaagtaccattgcctccaccaccaccaccagttccacctcgtgataagcaccgggaatttatgagtcataagccaccgaccttcgccagttcgtcggatccaattgatgcagatgattggttgaaatcaattgagaagatgctcaacatcgcccaatgctcagacaaggagaaagttctatatgcctctggtcgtctaacaggtcctgctgctgactggtgggattcttatactgctgcccacgatgctgctgacactattacttgggcagagttcagtacacagttcaggaactaccatattccagctggtttgataaagatcaagaagaa

SEQ ID NO: 119379 - DNA, 285 bp, Zea Mays
cacaatcttttagatagataaggaataagtttggtcactcattggaaacaataagccacaaatttagtgaagtccttaacgcaatttatatgatgtcttctgacgtcatcaagcataaggacacacatttcaatgagattcaacctagattgcgagagactagattctggtcacacttcaaggattgtataggtgccatagatggaagccactttcccgcgtctgtcccggccacggagcaaccaaagtatattggtcgacacggttacgcatcgcagaatgtca

SEQ ID NO: 119380 - DNA, 289 bp, Zea Mays
agacataaaaaactgctcactcacgtgccctcatggaaatatactatggaccatcaccagtgataatcatatcgccaacataaagaagagcctatccacaagatgatgtgtgcacaaaaagacttggatcatgagcattagcataaaaaccagcagaagaaaaacactctaaccaagcccgaggatcctgcttgagggcataaagggagcatcaacagacatgtcgtcgcagctgacgggcgaactctggcgagtggtcatgaagatgagcgccatcaagtcaaaggag

SEQ ID NO: 119381 - DNA, 714 bp, Zea Mays
gagtctctttctttaaatcttggagatgtgggtggagcattccccctatttcgctcttagaatcgatgcacacaaccacagtggtttctcatcccacccaaaatacatttttgccctttgcatgctcgcctacggtagtgttgttgactctattgatgagtatttaaaatggagaaatgctcgaccttggaatgccttgaacatctgtgtagggttgtcatttcatattttgatgaggagtagtcatcattccactattgatgatgttaggcatctattagttaaggggagaggattttctggtgtaatatagtgtatagattgcatatattagaactagaggaactatcatgttggatagaaaaggcagattattaggagacattggatcggcaactatcatgctcgagatggttgcctcgcatgaatcatggatttggcatggttgtttggctagtggggtcaacaacaacgtcaacatgctaaatgaatcgttgttgtttactgacatgcttaggggagaagcacaagtgtgaacttcatgataaatggatgtgagtacaaccaagggttctacctcatcgatgatgtctaccttggtggtcggtgtttgtgaagaccgttcccccctcatagaattcgaaacaacaaatgtttgctacgtacctcaaagacacgcgaaaggacgtagagagcatttggcgtcctcaaagt

SEQ ID NO: 119382 - DNA, 384 bp, Zea Mays
tggggatcttgatggtaacctgccaccacatctaacagccattgggggtgcccactgatatagcattgagggaaataggcgaatgaggacgctgagaaagagcattagcagccctgttggttgatccctgcttatagaccacctggtattggagccccaacaacttagtgaagacacgctgctgccaaggaatcttcaaacgttgttcattgagatgagtcaagcttcgctgatccgtgaatattaaaaatgtgccatgctgtaaatatgacctccagtgatctacaacgagcaaaatggtgaggtactccttttcataagcagatagacccatatttttgacacccaaaggcttgctcacataggcgagagggtggctgtttt

SEQ ID NO: 119383 - DNA, 789 bp, Zea Mays
gttcatgagagactcaatgatcaaaatttaaaaaggctgcgatctattttcatacgtccactcatcgatctacggcaaggatgaatcgttgccgaagcgtcatctctactctaatcctatccctccatttcagatccgacgaccagtagatttcctccctattctaatcccaaccgtctgcttcagaatcaacggccaggaacctgtcgtttacctcccgatggtggctctcctacaactatggtggcgagatcgccgacccatcgtactactgcagtctagatcgtgatttcacacacagcgttgccgaaacagcgaagcagataccgtggacgagaaagactactaggtggcatatgacagcatgtggccagagaaccgaaactgctactccggcgtcattatcgaacctgggaccttgattagatcaaataatgctagcatttaaacccatacctcgaggtagcctacgacaaatcgtcggagcgaaagatacggtgtcgtcgtcacaccatggcggtgccccggtcgatagatccggccaccccggccccggccctggccccgatccctcctctgtttggcaatggcgacatggttatccgattgtttggggtagatctagattggttgggtctaactcctgcgctagccatgattatatagggcaaagtatttcagagtgttgaggggtattcgatcgaggagattgagtccgtcgtcccggacagaaaacccgacgcggataatgcaacggccaaggggcccaacggctcaggacatagccgc

SEQ ID NO: 119384 - DNA, 275 bp, Zea Mays
ttgagggccctgtgtcagatctatgaagaagaagtggccgacaccccgctcagattctttccaccctttcagagagaccgtccagtttggatggcgaggatgcgtgcattggaagggaagcagctgcttgaggacgaccccatagtcgtgtacctcactgcatacctgctcacccttgatgcacaatatgatttcttggcttggcaccaccgtcagatgattgcccgagcagaagatgcagagaagcgcaaccgtcagctccatgtggatctcac

SEQ ID NO: 119385 - DNA, 657 bp, Zea Mays
gtttaaactctcaagctagactcacacagcaagaacataagctaactgtatttctcatttatttggcagaattttgtcttcaagtgagttgatgggtcctatcactacctatttcggagattgtacaattcaataagagttatgggttctaaatagttctacagagaacaaaatcaattattaagggtccaacattatacattttagtcatttaaaagctgttatacattttagtcattgaaacaaaagtaattgaataaaaaaacaagggccaatggaaaggaagatgacctctcgatcaacacaatgatactcatatggattatgatttaaatgatactcaaataagtagaagtggcaactgtataaagaaattaggtctgaaacctaatttgtcctagaacacttttatccatgaacgtcttttgttagactgaccaaagtttttaaccattagttaataaaaagaagtaaataagaaatactacttatgttatcatcaaagaactaacaggatgatctttcagaccatggcactaaccacggcacacatggttgctgaacggttgaaaaaacagagcttgtctctcctctaccctcctactaaatacaaaacaaggacactgcaccatcgcatcccaaagaaactagggatgg

SEQ ID NO: 119386 - DNA, 523 bp, Zea Mays
tgacgctattggattcgtctaccccgactactgctacccgctgcgggggcaagggaagaagagaaaagctgctgctctggccgcctcggctgaacctgtgccgaaggctgcgagcaaaaagatgaaggtacttacccaccggccacgttatattgaaccggctgtggtgcctgagtttggcggggaggctttttcagctgctgaatcaagagaaaccgctccttcgatgcagagggctgaagaaccggctataatgccgaaggcacctttggttgagctagttgaaacgaaggttgacaaagataagcctgaaaggtcaacaactgaagaggtaacaaagatggcaaagactttaagtccttcaacagaagcaacaacgctgagggcacaaaagagttctgccataactcctaggagaaggaggatggtaaatgtattagatgtgctggagacaaccgactccacaagtctcactcccaaagggaaggttgccgaggctgacaaaacgcaacccaaagctgat

SEQ ID NO: 119387 - DNA, 999 bp, Zea Mays
aagtcgataacaaccgatagaatatcaaaagagtggatgtctacctgtaaagctcacacgagaggtgaaaatccaggcaggacaggagacggctcacgggcaggcaaggtcactaaaatgacagaagaggtgagcatgtattagtcacatagtcataagtatatgaaatgtgaataaatacatacacagagaattatggcacataaaacgagagatatggcgatcgagaggtcaaacgacgcgaaaacggcgtttgaacgagaaatagtgccataggaggtttggaattcgaattgaggcatgaaatgatggggaattgagtcgatacttcacgaataggtttatataggtaaatatgagtgaagtgcgcgcttggtttgatttcaggcgaagaaaatggaatttgggcactcggctcggaaacgatcgctcgaaacagggaaatgtgtgaaattgaagcctggtatatcggattggcgtgaaattgcgcgaatatgttactgaaggtgttgtgaaggtgcctgaaaatttgggatcgattggagcatttttggctggtttgggcatttcatcgaacatgtgatgtgcggggatttaggttttgaatgaaatggctattggaggtagggaaaccctcccgaaggagctaggaacctgcaggggattcaatgggacacaaaagaaccacatccaacacttcgattcatagaaaattcacagatttgatatagggaatcaaaggtggggaagaggtgtgctcactaggctttgaacagagagagaagagagaagaggggagaggggtgctcactgaggcttcttaccagagaggagagggccgagcaccagctggagcagagccaccagagcacggccgccggcgaggggagagtcgctggaggggaggaatcactagagacagagaagagcagaggtgagtgacagagaaatggttccctgcctcgggctcgggcgggggaaggatttttaaaaaccgat

SEQ ID NO: 119388 - DNA, 666 bp, Zea Mays
cggcgtgccgaaagaaggttggcatgctaggtttcagtgttgctgcggagagaccttttgcagctcccaccgataagcggagaagcactcatatggcttcaactaaaagtgtgtcggtcgcgagcagatcgtaaagaacaatttagtcgttgttgccgacaagatcgccaagatttaagcgttagctagtatgttcatctagttaaacgatggtcgccgtgcacgttttatcactgtcaccatataggttagtagagaaggttatatagagcatgaaagattaatgactctttgattatctgtgtactgtttatacaaattatcttatcgtcgtacatgtccctagatatactatatcttaagtaagatttgcaatgttcatataggctttgcattgtttttacgtcattaatgtaataactgatcgatagcagcagacgtgcacgatcgcgaacacacaaacgtacgtcatgcacatgctcggacaccggagacacgacatcgacatgtagcttgagtactcaatccaccggcactaactaactgccgttgcacatacgttgagaacgctcattttttgatagtctgatttcctcacggacgcgtgcgcgcaaccgggagctgcgagactgaacttttagatggctagtgtgagactgatcctgc

SEQ ID NO: 119389 - DNA, 320 bp, Zea Mays
gaaaagtgaaccgaagcaaaccatcacatttaggctgtgttcggtttggcccattccgggcctagttccaggtggaataaatcagcctaggttagaacccggtctagtatgttagcggtgttcgttttaagctgggccggaaacaatcccacctgatttcaactcccctccaattctcagcctagaagtctaggtggtctgtctcctggattggttcctgatctgaaaatgggctggtgaccaagaatgagtaacaagccatgttccactcgatcctaggctgacttggttaccggtctggcttggatatcagtctgccg

SEQ ID NO: 119390 - DNA, 480 bp, Zea Mays
aggatcagcagcaaggggtcacaccttagtctcgtctcgctccctgaagcgaggcggtggaatgggcggagcggaaatgggagcgagaggtggaacagtggaagctggagtggtggaggttgtgggtatggcggaagtggtggatgactctggagcgatgggaggtggagtagaagctgtggcagagggggtggagggagcagaagagcgaggccgagatgcgaggcgacgaactctataggcaatctggtctgaggaaatctgcaactggccaccgctacttcttttggccttcctgctgctctaggtacactgtcttgcccttgacctgcctgaaggggcgaggagggtcctcgtcgtctcctccccctagcgctgagacattcttcgtctgcaccatcctgacctgagtgctgcataggagagtgaaaagctaagcacaagtagatagcagctgataagattagtaatgaaagaatg

SEQ ID NO: 119391 - DNA, 431 bp, Zea Mays
gaataatgatggtttgattcctccacataatcaataagagagagcttgattgtagggccatgtgaatagtggagcatcaaactattgggtatggcccaatggtctatggaaatagatcaaagagttccatggcgcatcaaactggtctgacatcggaccatatgacgtaactgtagttgatagagttcttcttataggatcgtcgaaccttgtgaactgtggtagtgttggaccaatgtatgcaaagttagatcacttaagtggcactaatggccgatatgcaaacaagttttcccttctcgatagtacaactatatattctaaacccaatcattcacttctttacataaccttagaccagtggaaagaaatatcctacaagtcatacctttgccttgcgcattctacttcatctcttcaaataatgacgt

SEQ ID NO: 119392 - DNA, 336 bp, Zea Mays
ggaatgccatgtcatcatctattcctgggcttgccccttgtctaggcagaggtccggtgccgacacgtggctagacacccctaacgtaagccaccggatgatgactgaagaaagcctttgacatagggtccgacagcattgagtgcggatgggatgtatacttgcccgcgtcagtagcaggtagcgtattcctggcattaaatgcacacggtgctccagccctataatgtgtggattttactgttagctgcacattactgagtcaagagcattgacccaatgctacatttgtgcacctttcattatgacttccacttgctttgcgtgttgcctagg

SEQ ID NO: 119393 - DNA, 317 bp, Zea Mays
ttcaacatcctctagtgcgccgaaggcgaggaaagtcaaggtcttaacacgtagaccgaaacccattggaacggtcgaggtgtcgaagctaattgaaagagcagaagctactcccccagccacagagatggctcctgtgatgccaattgaagctagtgcggacccagtcaaatagccagagtcggagaaggcaacagagcagccgaaggtgctggtgacagcgctaccgaagctatcagctactgcaacaacaactccaaggaagaggaggatggctagtgttttagatgttgttttggaaaccatgaaaatgccaa

SEQ ID NO: 119394 - DNA, 327 bp, Zea Mays
tatattgatgatataaattcttgcacaataaaattccactgaagcttatattggcagcaaaatagtgttacgcaaattcacacaaaaaacgggtgcaaatgtgttggatattatttcaaataaactaatcaatagtgtataaatagatgcctagctagttccaatcatttaatatatagggatttttcctttgtactctctctatatatggacactcgtttttaacttggcttgtctcaggcatcctattagcatattcctcatcaacttcttctacaacacaaataaaagagcatgagaacaaaatcctcacctaaaatctcgctt

SEQ ID NO: 119395 - DNA, 343 bp, Zea Mays
gtcaaaagcaaagttaccatggtgaaaatcgccgtaccattcatcttcattgattgggctctcttgacgaagctccctgtgttggggccttcggtcttggtcatcctgagtgagatgatgcatttcctcagctgcttcgtcaatcttcctctgaaggtcagctagctgaagcatcttttccttctttctttgtacttgctggtgaatggcttctagatccctgatctcctgatccaattcctcctcctgaggtgttgggccggtagcctttctcttctggctcctagcttctcgcagggagagtatctcctggtttgtgtccagtggttgcacagcatcctcc

SEQ ID NO: 119396 - DNA, 551 bp, Zea Mays
atctggagatgggtctgtcgctcttcttcagggagattccggtacatagcaataaaggcctcaatatcttttgaagagggtcgcactctatggccgagactgttgtcttgaacatgcggattggatatggactctgaaaagggcctgtgcgagggaagattccagaaagaatacgaaagaggagaaccagcattcgaaacattgcccctcagcatcgaatcaacttgactcaacacatcctcctcagatattcgctaattagtaattcgagtggggtcattaacaccagtgtacagataagaaggttagactctatctttcaaaggctaaatattcttgaaatcaaagtcgacaacaacagcttcagcagtcaagcctctgaccctaaacgcacatatctctgcaagtaacaccctggactcagcaagctctaaatctttggggatctctgtccaactaggcgttcggacatcgggctgtctcccggatcgagcgagaagtgacttgttatgattttccatagtaaaccactcgaagtgccatcctttaat

SEQ ID NO: 119397 - DNA, 402 bp, Zea Mays
ctctacccccttcaaaagaattcaaccacgaattccgacgcttctatcggaacgacaaaagaaagattagcgaagatcaaaaactcacccataacgaaaagttcggggtacttctaccgcatcaactcctcaagttcccaagtagtctcgcgctcagactgattagcccacaagaccttaacatacttaattgatctccttctcatgacacgctccgaggacttcaagatacgcaccggacgacactctagagtcagatcctgctgcacaacaatcggttccaactcgatttgatggtacagatcccgcaaaaacttcctcaacgtagatacatcaaatactgggtgtacccctgccatggaatccgacaattgcaagcgataagccaagctgccaacccag

SEQ ID NO: 119398 - DNA, 411 bp, Zea Mays
cggcgaggatcatgcgaccacgtcgccaagcaagtgggtatggggccggctcccggtctcatccacggtgaagatcttttcaccccaagtcattatccgtgcgcccatgggcacgaatcgcatcgtcggtgcgaatccaggcgcgggggtcaccgacaacgaggtgcactgcatcttctaatctttgtcaggaactgtaccatcagaaccctcattagagcgcctgacagagcgagttagaggtctttattctctattttttatgtgacaacgtgttaatccatctgtaataaagttgttgatcaataatctagctttgattttttatagcaaccatactatactaatcactggatcccactcaaattcaatctcaaagttcatctgatttcattgtcatttagaattcag

SEQ ID NO: 119399 - DNA, 1985 bp, Zea Mays
cagcaggaagtcaaacttgatgatattctattgaaaaatagatcaagagtacataagtgaggaaatatgaagcaaagattaaatgacaaaggagacactgtacaatggatataacatggtctctacattagtttgcttatatggataaagattaggaaaatctctatgcactgatatgatcaagctagaatatgaagataaagattaagtgaataataggaagtgtcaagccaaaatgaagaggatataaggaatcgtgaattggcttgaccatactgatgttggtccatgtatgtttctatgagaatcaacctaaagcttgatcgatcttaacatgcatatctagatgacaatcaagcaaggatcacaatattgaagaaacggtttttcaatggatgatcaatatgatgtgacttgaggatggattgataaggtgaagatagcaaggaaagggcttcaaggtactaagcaaaggtgaaggccaagcaacaacttgaggaccaagatgccaaggctaaggtaaagaagagagtacttgcattgagttgaggaactaatcaaggtacgaggagtcatattgtgttgaggatcaaatcattagtggaagtgatttggaagccatgaattgaactcatatgtgatgaaatcgttcaagtcacgtgctcaaggtgtgtttgcttgaagagatgagacaaagttgattgcaaccccttatgaagtgatattgagaacaaatggcatatgaagacattgaagactcaagtggttaaaatagttatattatcttgatcttgagtataggtatgtcgtactatcaagggggatgcaacacgaatcatagaaaagtctgaagtgctcaaactaaccaaaccccaagtgctagcatgagagaaacacaaagcacatcagttatggtgttttttatctttggacttgttctttgttgagttggatagccctcgaaacaagctttctgaaaagtccaagatcactgaaattggagttcagagtcaaaagttatggcgtttttcgtgaagctggttatgcagctgcagtgctactcagaggcccgacactgccggggcgcgacagtgccggacctgtacagccccaaacggctagttttgacccccaacggctagttttggattgggttgtatatatacccatcccacgccccagggggggtcctgctagtgtccaaaacagtcccaactcatcccaagccatatttgagccctctttaactcctctctttgtgagagtgtgattagtgtttgattaacagttagagagttgattacgagctagagagcagatctagaccaagacaagcttgagcacttgtcgggctttgtcaacattcgttgtgcattcattactcttgaaggggaagcctcctagacagctaggtgtcacttggtgagctcccgtgcttgtggtgagccacggaaaagtctgtaattacccgatctcttagtggaaatctcaacttatcacctcggtggttagagaagaggagtgagttgaaaaagacttcaaatttgttttagctttctcaacaacgtgaaggtaggcaagcctttgtggcgagctgaaccacgggataaatcactgtcttgtctcttacatttcgaattgcattacttgccttccactagatatacttggtcgtgcattacttgccacaagatatcaccaagtccatatccaagtattggctgcaatcatagctactgttgagcattctgcagcaagcagttgtgccaggctgagcgcagcagtgtcgggcaggtttctaatagcaggttgagattcattctaaacatacacattctattgtgctcatgttgttaagtgtgctttgctcaattcatatcacctaggatttgacctttgtttgcaagtcgttcgaataatcgcaattaatcctgattagtcgggttggtcgcctgaaagtgaccgactgggaggacaactcaatc

SEQ ID NO: 119400 - DNA, 321 bp, Zea Mays
attaattgggctcgaaattctcttccttcaattttgagggttacccctcggactatacgatttgtgaaaacctcagccctagctaagcttatccagtacttatgccccacttctactgatgattggttaaagcggtgagcaaaagcagtactcatgaaagaatgagaagatccggaatcaaatagtacaactgcggtatgatcgttcacaagaaacgtactagccatcacaagttcttcgtcagtaatctcgtccacagtggtgagatgcactcgagcgggatagacgtcgttcttcttcttagggcgaggacaaaacttg

SEQ ID NO: 119401 - DNA, 702 bp, Zea Mays
ggcggctaaagttcacccctttttcttttatagtgggctcagaagttgttttgtcgatactatggaggttgccctagactgcgctgctgggccttggtggccagccaggtgtctagctcgctccagattgctctactaaaggcgatgacccctggccctgtgtcgggagctaaacaaggaaagcgatgcgatcgagaaggcattgtggcacaagcttgattggctttcaacgatgcgccaatagcttgcggtaagccgcacgtgggtggcttggtgagggaaacattcctcttgctaatcaacttgttgtccgatttttgtgtgttcattcactcatagggatgctggtgggcaggtcccatcttcttcttgaccaaagggaggcatgggcgttccaccagtgatcttcaggtagcgaaaagcgaggccgtcgaagcccgcacttgcgccacgtcgatctagaacgcatgtgaaaccctggtcggagcagcgaagagggatgcggagtcggcgaccctcgcacatattgagagagcgaaagtgaactcccacctccatattctggagcatggtaaagaggtcaccgaggcccgagtcgcagccttggacgaagagctgggtgatcgaaccaaggaggagaaacatctggcctctttgtatggtaatacctcataatagtctcttttgaggctaggcatccgc

SEQ ID NO: 119402 - DNA, 845 bp, Zea Mays
aataaattaagggtcctaacttattgtgaagaaacatttaaatcaccatccattaccaccctaggtgtcactggagcttagatagttgcctaggctacataaacctacttctggggttttttctttgagcatccagtaagctggtctagggaaacaatgcacatcacattttgggtggtgatgagttttttgctctattgttaggtatcctgccaagatatactgaaggtactagatgctagtaaagtctgcagttctgtccagaactttactgatgtgtacttacggcttcctggcataccatcaaatgcccagctgaccgaaggtgagtgtatccgggtcagaatttgtgaaggaagatttgcattgttgatacgagaggtatgcacgcttattttgttttcattatgcttctttcattctttgacatgaatctataacacattgccctttctcttcccttcaatattttgctagcctataagggaaggaaattttattatccagccaaaggttgattttgatattagtgccagtactgttgcagggcttcttaagcttgggtaagtggtgcattgtttgattttatccatgtctttacatattactgggaaaaacgcactgggcatcctttatcttagtattggcacactaagtgtaaacttcataatcttgagttgttggttaatgtgtcgcttgttggatttaatttccattttagtacaatatgcttgcgagggctcagtgatgggatgtgtaagaggaatataatttgtggaataagatgatttacattgagcctctcgtgtggtatgtatagaatttacatgacttggtgtgaaatt

SEQ ID NO: 119403 - DNA, 325 bp, Zea Mays
ggcaaaggtcactaacaaatcaaagactagcatcttggaatccaagttacttcacatgaggtgtgcagcccatattgtgaacttgatagtccaagagggattgaaagagcttgacatatctatcaagcgtgtccgtgcagctgttaaattcattaagagctccccttctaggattgccaaatttaagaagtgtgcggagctagagaaggtcaacaccaaggctttcttggcacttgatgttgtcacacgctggaactcaacatataatatgctcaaggtagcagtagcatacaagaaggtgtttgagaggtatgcagaagatgat

SEQ ID NO: 119404 - DNA, 478 bp, Zea Mays
gttcaatccaagacttattaggaccatacataatccaaatcagaacgaagacaaaaataatcacactcagggacaacaatgtcaacctcattctacaggaacccaacaaaataccttcataccattggcccaaggggtggaagaggaggaaggagttttggaggaagattcaactctcaaccaaggaaaatgttctaccttttctgtggagaggacaagggcctacaacatgatcctgtcaagtcacaatccagaagcagaaggaaatcgccgaagctaaagcacgacatagtcaatcaaagcaggtcttttacaccgcttcgtattattccccatacattccacaataggttcgcaaccaacagccaagttcacaaccctcgggcccaattgctttggcaagtcactcttcggctcgatggattctgcctcagccgtttacaccagcaccttcatcatatgagcaacaacatccagg

SEQ ID NO: 119405 - DNA, 654 bp, Zea Mays
attataggaattggaatggatcaatttggactcaatatgggttttctatgaattaaataagattctggaattattttaacactagcaatcattttctaattgaatttctgaatttcctctgattctagactgggcctcaattttagagaaaggtaggggtttctgcgaaacaatcccgagactcagtgaacagtggatggggacggcggttttattctcaataaatccgagggctcataagcaattatccccaaccgaaggggtacggggcactatgatccgtccgatcctaaacctgtggcgcagattagaagttgtctaaattgaaccggtattcagtaacagccacctaatgctagatctacggctctgattttaaaaaccagagatccaccccgaaccctccgatcgacatccaactgcccaaatctacacacccgaaaaggtattcccttctctaatcgccactgttggatcaaaatcctatgatctgagctttataaggacacgatctactctcgaccaccgatcactcatcctacggcctggatcaccattggacagttttaatcctgaccatctaccagtgatccaacggccagaccaccttcttcttccctggcgcgacaccaagtgcacagccgatggcttccg

SEQ ID NO: 119406 - DNA, 597 bp, Zea Mays
gcgggtattagcctggccagggaaggtgctgacgacggtcggaccaatcaaaagcaatggcatggttggaccatctgaggaaggccaaagatgctagccgagcgttgaacgcctcacatcacttgggtttccagcgtcttttgaagcgttgtggtcatatcccaatgattaacaggcagccggtttcagccggaaattggggcctcttatccttggctcttcgtcctttcggggctcggaccccatcccgggcagcatctccttgcttaggaaattcccaagcaaactacaatccttgtaggcatgttggactgggtgtcggtggttcgggcatggggtttcgaggagcttcttgaaatggtcgatggcctcctcggttggaggcctctttcccctctagcctgttgtagccaccagcatatcggcttgcctccgccagtctccgttccttcttgcttagagttggctgtcaaaaccctcgacacactccttgtcgtgtttggccttctgcttgtggtggtcgaagattgctcccactgtgtcttctcctgacacgtggttggttgcgatgtctagaagttccttcattgttcgtgg

SEQ ID NO: 119407 - DNA, 376 bp, Zea Mays
gtgagcttcaccggctcgcgtcgcactcagatcatatccaaccattcactccacatatattttactatgtcgctctaaaagatattcctcctacagttagaactccaccaactattcaccctattcagccccttatatatactataattcaattatttgacattttttcattgattttttgaagtttgaaaaaatcatatactatatacactaccataatacacattgttttcaggttacggtacttaaaaagtgttattaatatcacgaagaaataaagtgaataagttacgagggagattaaaactcgtcccatatgtgggggaagtttcttctctcccacacatatatggagtgcaacggacatagacgccgg

SEQ ID NO: 119408 - DNA, 549 bp, Zea Mays
agcgcgagcatgttgcaccatcttaagtcgttgccgacttaagccgattgctccgttagtagggcatagtggtcaccccgagttaagtaagaatgcaggtcgatcatgaacaaactgagtattcttgaagcctttttattgatgatatatttcccagtttacagagtacattgtcgtcccgatagcttttgaaatacagctaggggtaaaacttcctgaggtgttctatattccatgagttcctgatttccgtgccgtccatctgagtgagacgatatgatcccgaccgagtgacttctgctactatgaatggtcctttccataggggtgacaacttgtgccgtccctcccccgttagaattcggcggaggatgagatctcccactgcaaaggatcgacgtcgcatggtcttgtcgtgatagcgtctcagagtttgctggtaccgtgctgattgaattaccgtgttcagtcgttcttattcgagtacatcaacatcctccagcctagtagcctcggcttctgctatgctttcaaagaccaaccttggcg

SEQ ID NO: 119409 - DNA, 884 bp, Zea Mays
cgatgacgaacggtggtgagcgcgccctccggcgagcttgtaccggtcgggatacgcaaaggctaagcttcttacttggtcgacaccaaattctacccctcgcgaccctaatccctccatcaattgcataattctagctcaaaattcctctgtccacgacaacggcgaaaactgaggacaacccaaggtgttcccggtgatctagtgtggtctagttcaatcggttgggccgataagcatccttagcacacaaaggtgctgaaacgggggtaaggaggatgtgaacggaaatggagatggtggtccacggcgcgatggttcatggtggcgcggagaatccaattgggggaagtttgaaattcgcgagctacggtggctaatcggaggcgagggctggtgcactggacacgtaacaaccaaacggagctcactagggcatcaatttatagagtctatcagcggtggcgcccaattttgagaagatgcgctggcggccaaggaaaggggatgagtcaccacggcgatctaccgtggcattcactgagacactgcttccggcgatggacaggctacctattatggtctaatgcgacgtggtaacaccacagattatgtggcgcatgagcggcaagcggccaacactggcgagggtcatttcgtccggtcgcagagcaagtgggtacggtgaacaatccagtgaccgggtccaagcttatcctggtgccaagatcttttactccctgcggttatccactttgcgccgagcacgaatcgtggcggccgacgcgaatccaagcgaggggatcaccggcggcaaggtttagtgaacccacgatcttcttcagactactgtaccatcaaagtctttcattagagcgcctgac

SEQ ID NO: 119410 - DNA, 820 bp, Zea Mays
gcattagactcactattctagttatagagagaatcttccttttgtaggtgtcgtagggatttgaattcctatcgtgacaccctattcttttaagaacttggaatatctctctctacatcatggcaataataagataataaatgtaagacatgccatgagttgcttaataattttagaacatgtagattgccatagtataagaatgatgaatatacaatctaccatatgggaggaatatcttcaaggaatggtgacataattttaagaacattttaagtgcttccttttctatgtaactacacaatacacataagaaatgataatttgagatacttgcacttgaaaacatagttgttaccatcctttggctttcctccatgttgtaggtcttgacttttcgacatgggattagttctttgtttcctacaacatcaatatcttcccgagatgatatgagttttagacataataatttgaaataaccttgggtcaatcttggatatgtagatcattgtagattgatagcttgagttaatgtgaattgacttgactctctcaagcacccaaagtttcatatcatctcattctcctgcaaagcttgtcaagcatgttttggtacccatcgcttgatggatccattatggttagtcaacaaagatctaggaaccctgaatgtcctttgcgctagcgcttggcaaattcattgcctttctagcacaagttgcaattttgggttgcctagttatatatgaatcaaatgacaagctatgagtggaggagttatcaatgggacaatccttgcattgatgtcccttttccg

SEQ ID NO: 119411 - DNA, 468 bp, Zea Mays
ccgctgctgatgttgcacctggattaatatgccttctattaggatttgcatgtgacttaagtaaatggtcttaatgatagtacgccattgagagaaatataccataaacaacatgggtggctataggaggagcaagttggcctagcccaattggaacaccagctggctcgtgtggacatatagcagctgcagtatttctgccccttccattgtgatcactttcatcatctgtaatttgaaggtcaaaaagacccacagatgagaaaagctttgtacgtggaaagagacccaacttatcagtttttgagtaatggaatcgcttgttgagaggatgagcacactctgcgataaaaaaaaataaagaaaaaatagacatacatcagattcgtattaggtttacacgacgaccaaaaaaacagagcaataataacctaaaaatgatgctaaagcaagaaaccaaaaaaggag

SEQ ID NO: 119412 - DNA, 280 bp, Zea Mays
aatttagaaaatatatgtagcatatactattcgcggtccaatgcaacaatacctaggaaaaggcacttcactagtgattcaggttggcgcattttatggacagcccaacccaactctagaaaaaggatcacgaactctggtgatgcaaactttgcaacgaattcgtagaagctaagaattttgaaaagctagacaattgcattccttaactttgactcgcttatacacatcagccttcagctagcacaaactaactctgaatgcatatttgccatatcct

SEQ ID NO: 119413 - DNA, 655 bp, Zea Mays
cagctctgtagcaacaatgggaattctcctgaaaggctgttgctacttaaaagaagtgtacggatattcaagcttggaggactcgcgggactagaatgaggcatggaggtgctagaagaattgccttgttttgcaactttggtgccacaatcaggaagctcccctgcaagtagattgtctgatagatcaagaactcgcagctgcttccactgacaaatctgattaggaataagcccagtaattcggttggagtagagaaccaccagctgtagtagtggggcttcaaaattcagtgacagtggtccattcaaagagttccttgagatgtcaaacgtcacaatgcttcttggcagccgtggtaccgagccagtgagctggtttgacctgagctgaaggattcccactgacatgaactccaaatcacggggcagctcaccagtaatcttattgtaagagaggtccaagcttgatgcgttagcaaacacagcccaaaaccattctggaatcgtaccggtaaggttcgagtacgaaatgtcaaggacgttaacttggttctgccagcgtagccaggcagggaatcgggaacccagctgacaggatgaaaactctgctacattcagttgaaacggtggcacccagtccggatccactctga

SEQ ID NO: 119414 - DNA, 378 bp, Zea Mays
catctcttgatgggtccatcaaggttagtcaacaaagatctaggaacccaaacgtcctttgtgttagcactaggtaaactcattacctttctagcacaagttgcaattttgggttgcctagtgtcatgagaattaattgataagctaggagtgggagagttaccaatgggacaatccttgcattgatgtcccttctttcgacatatgtagcataggcgatcttcaactcttgaagatttcttctttccttgtttcttgcttgctacatggttagtcaatattttcttttctaaccttatgcctttttgttttaaaaggggacaagatttaattaaatgtcccttctttgagcatttaaaacaaagtttatcatccttg

SEQ ID NO: 119415 - DNA, 378 bp, Zea Mays
actaagatataccaagatctaaaggaaaaatattggtggtatgatttgaaaagagatgtggctactcatgttggactatgtgacgtgtgtcaacaagttaaaggcgaacaccaaagaccagcaggattgctacaatctctcaaggtaccagaatggaaatgggaagaaagtagtatggatttcatagttggactacctcgtactcgggatggctatgattcaatatgggtgatagtggacaagttgactaaagtggcacactttgtacctgtgaagacaacttactcaggagcccagttagcagagttatacatgtcaaggattgtttgtctacatggagtaccaaagaagatcgtatcagatcaaggaacccaattt

SEQ ID NO: 119416 - DNA, 332 bp, Zea Mays
aactttggccggtggccaacttaaatacaacatctttttttagtgggcatgtacaaccccgtttaataccccgtctcttgaggggtctctagggtgttaaatgcaaaaaaatacaagggacgaattcttctctgcacgactctctatacgtaacatttatgatgtgactgattttaaagaaagctcattgtatgatgcggtttattactaggtgtctcttatgcatagaaaaccaatcaagaggcttttatgtgtcgcgtggtgttattatttcacagcttgtttatttacgcatgcatgcatcatcgcactctatatatgctccactttcc

SEQ ID NO: 119417 - DNA, 386 bp, Zea Mays
cgccaacaaaggtaaaaagccaagggcatgaataatgtgcacgcaaggcaacgacagtgcgctagtgaacctggccggatttggggtgtggacgctcatgccattagagtcatgttttacagtgaggttggtgaagttgggcgctagtgtggatgagagatgaagctagggcgacaacaaagcgacgtacatgtaaggcagcgtacttgcggcgaccatcagtgccttctaggtgatgtccatgtctacatgtattttgtagaaagctgactagttcatccttgggaaattgtagtcccttaatgcgtctggaatttatgttaatgcacaaaatatctcagattctataatcctataacaaataaaatctcaaattttttgcttgt

SEQ ID NO: 119418 - DNA, 622 bp, Zea Mays
tgagattctagcatttattcatctgataaggtcttattgcttactaataaaatctcaatttgtgatgttttctgcgccaaaaaggctttcatgcattatatatcttcggtttacttcggataaaacttttatgcatgaggagagagagcaaaaaaaattaacttatctgtgttttattgtatttcaatttattttcccagaatattaaagcattatagagcttgatatagttgttatggccacttggcaatataaataaatatatgatgccacacaaaacaatcaaataaaatataaagttaaacaacattatttacgaaggttgcgctatgctgtgacttcagggactcgaataatccaccacattccacgagagtacaagctccagcgtatctggcgtcaacgtgtgtgtggccatcaaggctacaacaacgaataagcctccgtaacaagcgtaacaggcgcaattgtggcttgatagtcggggtacaggataagtccacacaactcggtgatggcggtccgactcaacgggagtggtccgactaagtgagagtacaacatagcaatcacatgacgcagccaagttcgtacgacacaaataacatgtcgtgttgccagg

SEQ ID NO: 119419 - DNA, 428 bp, Zea Mays
acaggtggattcgacacaaaaagggtgaaggctttgggaggaggcaggttccacgctgagtatgccactgaggcaccaacatttgacaccttgcctctaaggatcatctcaagtcggttcaccaagtctgcagagggaattcttctgctggtaacccgagttgagtcggctaggcctcgatacagataagccgggtacgccctgtctttcaacggctgaatattcttgaagacaaaatcagtaacaacagcttcagcagtcagacccctctccttcagcaatccaacttcagccagcaaagcacctacctcggctacctcctgatctgtgggggactcggtccagcttggggtgcgaacatccggctgtcttcccgaccgaggggggagagagtttccataattctcaactatgaaccactccaagcg

SEQ ID NO: 119420 - DNA, 420 bp, Zea Mays
attgaacagagtttttgatgtaattgggtatgtttatcctgattaatgttttcctgctcggaagcaaggaggaaaaaggaaaattgctacttcgacctcttctggtatgccgaagctgaagagggccaaggtcctgacccgtaggccgaagctacaatcttcagaatagatggttgtggtgcccacaatagaggaagcaaagcttactaagagcgccgaagctgtccctgccaagctagccgaagctagtgttgatgcgatgaaaaagctagaaacagtaaaaacagcagaagaacagccaaagctgctgagccctccaaagccagagttaacaaaactatcaaccactgtgacaacgaccccgaagaagaggatggctagtgttttggacgctgttttggaatcaatgaaaacaccaac

SEQ ID NO: 119421 - DNA, 1003 bp, Zea Mays
cgagcacaccaggacctcaccgcccgccggaagtcacatctgcgcagaggcacttgcctgttgcacatgcacctgggcggcggtcccctttctcctgccgcgtcctgttgaccagccagtaccacggccaaagaaaaaaatcatcgtactccatgcacttaacgcggtcaaatagcgctgaggcagcaagtggattgactgccgctttgcacatgtgctgtttgcatgtccgtttgtaggtgcggaagaaaaatgtagtggagggctgcatgcatgcaagtgctcccggtcaaagcggcttgcagctgagagggttgtgcaacttaaaaaaaaaaccaccaaatacgtgattaaagcatgttttatgttacaatttctattttaattaattatttcccgcagtaaataattagtagaaaaatagatgtttaaatatggaaaatgctttttacacctgatgtgttatgctcatgcaataattttggtgtctatttttctgcttttatttctcgtagcagatatttagcagaaaattattaaaatgcatgtaaagtctatattgtccatacttaaatcgctctaaatatttgtgttgtgttgagctttcggactcacgtcgagcgattaaattgtataatgggtactcagacacgccgatcaggctgcgttggtaatcggctgagttatgacattggctaagcattgactgcgccctggcaacacgtcacaatatttatgtcgttcgaacttggttgcgtcatgtgattgctatgtcgcactcttgcttagtcggatcgctcccgttgagtcggaccgccattgccgagtcgcgtatttttcgcatgccctgcaggcactgtccgtctctcgtgaccattgagtcacaattgcgcctgttgcgcacattatgtggacttattgtgtaccccgattactgagccataattgtgcttgttgcgttaattaagaaggttggctgtgttgtcgtagccctgatggccac

SEQ ID NO: 119422 - DNA, 700 bp, Zea Mays
tggacagactgaacacatagaatcttcttaggaggaaaaacctcaatgtaagtgacaacaattacaactgtgtccttcgtagtctgaacatagaagaaacaacatttcatctcttcggcaccaagtgttctctacatccatctctagaagaacaatgaggacaacgatcaagctcagcagaatgatactcctcatcgccatcagggctgtcatcagaaggatttggcgcttgctgcactcttctagacacaaggaaaatttgatacaaaagcgccatcctaaaatctgaaccaccccctcaatgttcataggatcaaccacccctaactccataatctctggaattgcagatggatcagcacatcatccaaatcatctaaagcagggtaaatcctttagaatcagagtgctctggtgtatctcatgaacccaaacagacagattgagttgctgttgcaccgtagacaactcccaagcatgcagtggaagaccataaatctccaactccaccaaagaaggcaaacagactcccgaagcatccaccaacttcgaccatctctgagaatgtataaccaaatctccttcatttatcgttgtccatctagtcaaaacctctagtaccaagtccaatcgtggaagcattaaaatgaatcttgaggaagacatctgtttaaccttcaaggatgaagcctgaactccc

SEQ ID NO: 119423 - DNA, 369 bp, Zea Mays
gcacaatagaatttgctctgaatgttttcaatcatggattggtataccaagttggtaaagctaaagttggagtataactttggctaagaagttttggtctgcaccatattaaattgtgagatacaggggttttaacagggaggtgtgttgatggggcagcaggcctaaggtaattgagttcaggatttcatttgaaaactaacgaagatcacccctgctgctctcacctgtgtatgtgaatagatgtgaggggaaacggagactgaatatatattggttgtggtgtcgactaggtaaagtttcagtatctgaaattgaattcggttcaattctttttcagttacctgaattttagtttttgtgttttca

SEQ ID NO: 119424 - DNA, 366 bp, Zea Mays
ggaaaattggggtcttcaaggggtctttttgcaatgttccccctgcatttgctaggttacaaggttactaaaacttgtttagggactaagatcatgctttggcaatttggttaacttatccactgatccctggcttggaagtctagtgctcttaggtgtccttagggtttaatcaccttgggtcctcatgaccattgttccaattgtgtggttgaaatccatgccactaacttctcttagctaacccatgtttccaaggttttatgttcttcttttcttccacatgtgatcatagtcattagtgcataaatgtaaccatggtcttggtaacacctggggtgttacaatctgggggatcgcgacgaa

SEQ ID NO: 119425 - DNA, 534 bp, Zea Mays
cgaccaatacaaccaccgagaggtcaaggaaaaggaagcagagcgatcgaaaaagaggtgacaggggactgaacaagtttcctaacaaaacatataaaatctcaaatgtgagccccaaaggtcagcccctagctccagaagaggcactgcctaagtttcagaatgcacttgggttcttagttagggataatcttaacatcacaatccgacattagagagaagtgtcagttgatgtcaagaatcaaatatggattaagctattaatgaggtttgttctgcctcggggttcagaagaactcgtgaaggaatacacaatgaagcagcttgcaatcaatttctgaaactggaggtctaagatgaatacaaaatttgcaaagaaaggaatagacccaacaaaaaatataaaatctcagaaggtcagtgggcagtatttctagagtagaggagcagccttgatttcatatctctaagcgaggcaaattcagaactctctaagaagaacaagtaccaccaccactcagccttggttacaag

SEQ ID NO: 119426 - DNA, 311 bp, Zea Mays
ggccgagtgattactagtgacgtcggcgttttaggagtaacaaccgagttatatcgagtcatgtcggcattttagaaataacgaccgagtgaagactggtgacgtcagcgttttagaaataaccgctgagttgcatcgagccacgtcggcgttttggaagtaatagccgagtgatgactgggcacttttagaatcggtgcctgatccgggaaaaccccatttgtaccgcgccgtcgcacgcctctgcattctgagccctagctttactttctgcttccagacctcctctgtttccctttgatctcgcttct

SEQ ID NO: 119427 - DNA, 551 bp, Zea Mays
attggccacaagaaacgtacccatcataaccggctctccctccggtgtagtggccacttgtgtgtagtatattcgcccagtcttctttgtattcttgcccgctgaattattcatcgtgtttcccttgcctagatttgaactccctgagttctgctggttgttggatttgttctgcctcggatatggacagtctttgataaaatgtccagacttcccacaattgaagcaaccagttgatgagctagggagggcggggaaacgagcaccaggggcactcggctgactagttgaagtgggggcagtggcagggcagatgaagacaggctgtttgaaagggtaggagggtggacgaggtgaagaacggttttgattgaaaggtcggattaccaacctttgtcgcttttcaggcccctgactggacctgtcacctccaattcgcttcaattttcctgggcctatatgcttagcttctactgccagcgctgtgctaacagctctgttgtaggagagatcaaggcaagtggccatctttctttgaagccagtcattga

SEQ ID NO: 119428 - DNA, 768 bp, Zea Mays
atctgattgcggagcctgagattctagagctagagctagagttggtactaaaactaccactattagagtagacactgtagagactagtggcactgatggctgaacaatcacaactccgatggcctgagatgagaaatctagagttactggccggagaggagagaacgtcgaaccaaaagagtgcaactaagctcctgactgtatggctggcactactgaagtctgaaggggcagaggcggagtcgactgcagtggaggcacaagaacgtcggtgtgttgaagaatatgaatcataaaagcccggtgctctgccctatctgctagaagctgttgctgaagggtgtcctagtggtcctgagtagtctgaaacatggagagcatccactcggacaaatgttgctgcatcaaagactaaagaatgtctgccagggctggatgaattgctagaggtgcagcactggaaccacctgcctagtgatcatgtgagtgaggtggtacatgaggtggtggtggtagaatccctagatcatcatcatctaaatctaaagaagtatcagcaataagaggttccataccctgatactcaatgtgtcggatcgcctcgtcctcaacttggcactcggaggccaaagaatctagaggtctagtatccaaggcacgagcactagtgtgagcctcatcctcaggtgcgggtggtagaatccaaacaaaagtctggtagagtcaagagtggcctagaaatgaggaggtcgaatcagctgcacaaag

SEQ ID NO: 119429 - DNA, 427 bp, Zea Mays
ttatgcacattcgatagactagcaggtaactcgagttggtatgtcatctccccaactcgcctaaagatcaagaatggtccaatgtagcgaggggacaatttgcccttaactttgaatctcctcattccacgaagtggtgacaccttgaggtacacataatctccttcctcaaattccagtggtcttctattatcagaatagctcttttgcctggtttgagctaccctcaaattctcccaaattatacagacttgttcttctgcctcttgaatcaattcaagcccaaagaactgtctttctccggtctgatcccaatataaaggagtcctgtacttcctgccatatagagcctcgaacggtaacatctttagactggcctgttaactattatatgagaactcagcataaggtagactcttgtcccaac

SEQ ID NO: 119430 - DNA, 306 bp, Zea Mays
agggttatcggaatgggccttggtggactgcttggtggaatataaaggttaaggagaacaacagatgagggatcgaaaagaattattgaaacacatagaacttgtttgtcttgctcctccgtctatctcttcgttccatccccattatgtgctctaactctctatctagttccttctttgcttctcttgtggtgagggttgctaacaacccgctcctgattcagatgtccaaactggttggaagccattattcagttcaaatgagcaaacctgatagagagagttgaggtggcgatggaactgaac

SEQ ID NO: 119431 - DNA, 370 bp, Zea Mays
gccgagttagagtaggcaggtgtggtcggtttcagctgtggacaattgttcttgaagtgagtggggtcaccatagtgccaacaagcattggttgaaggttgactacttgcaacggactgagtgtggaaggaactctaactaggctggttaaaacgcggcagagcagatcctactggcttgctgaaatttgaccctttgggagggaaccaaaaagattggatcttctggtgcctgtcttgctattgagatcagagaatttgaaactttctcttgaggtgacctctttcttcttctcgggctctttccacctggatggccttgtttgagaggtgcgagaagctgagaaaatcttagctagcaagaatagttt

SEQ ID NO: 119432 - DNA, 423 bp, Zea Mays
cctttgtgcccaattccaaatcttgtgaatcctagtgaatccatgttgtacaatgtgttcctttgtggcccttgaacattcttgcaggttcctagctccttcgggagggttttcccacctcaaatggcaatttccccgaaaccctaaaactccgccctccacgtgttcggtgaaatgcccaaaccagctaaaaatgctccaattgaacccaaatttttcaggcgccttcacaacatctccagtaacatattcgccaaatttcacgcccatctgatattccaggctttaatttcacccaattccccgtttcgagcgatcgtttccgagccgagtgcccaaatctctttttcttcgcctaaattcaaaccaagcacacacttcactcatattcacccatataaacctattcgtgaagtatcggct

SEQ ID NO: 119433 - DNA, 574 bp, Zea Mays
ggactggtccgtgtcgtaaggccatgtttctgccccagggtttgtcatgctgttgtttgcatggggcaccttcctaggttatatggtcccttttttcgtatgtgaagcgagcccctattcatcacagcgggtccgtctgggggcgtctcgtctttttactactccttcccacgcattttgtctgtcaaaaagaggaagggtgacctgcaccatgcttcccttgatggtcgtgtttatggtgcttggtgagctccaaacggatgatttgagtgaggccctggtgccttccactagctccaggtgcggggtctgctggggaccgtcttcatactcctaggtgtcaactcatatagttgttggccccatttgaccgggtccgatggctcactgtctctcttcacgataaaccatgagttagatgtttcctgagacccaaacacgatctagaagtacccttggcgctcgtgcgctagggtcctggccattaggtgcccacctcttgattgcccctcgctctgtggtttggggagcgaccacgaagtctttgtgagccgaccttcaaactccaagtttg

SEQ ID NO: 119434 - DNA, 315 bp, Zea Mays
ttcaagcccgacttatgtgtccacatatgctgctcaccatatcccacaaaccaccttctgtattggccacgagcccatctatctgttgacgaatttcggcaccagtcattgttgcaggtgagcggtctgtcactaccacacctttcgtaaagttcttgatgtctaggcggaatggatggtcaggagggagaaattatcgatgtttatcgaaggacgaatatttgccaccctttttcaaccaaatgaacctaagagcttccttgcaaactgggcatgggaacttaccgtgaacacaccaggcgcagaatagcccat

SEQ ID NO: 119435 - DNA, 630 bp, Zea Mays
tcagctccagtaaagagttccaccggtacttcttcagcagcaggagcagaagggccaacatcctggtccaagcacgacactcgccgaagctgtctctttttctttttcttcccctcggcaggtgcagttggatgactgacctggcggagacgtttcggacgagtaccctcaggccgttgagtatccacggttttttcaagctctgggatagttgcaacagccattgtttcagcagggaccgagtcagaagaatccccagccaacatgtccagcatagcacttatctctgcatcacatggacttataggcatttcaaagtgaacttgcctctcatcattgggaagatcaccaagtgaagcaaccaggacctcaatatcttcgggagagggtcacactctaagacccaaaccactatcaccagcaggaggattggacacaaaactgaaaaagggcttagaagctggcagattccaagcagaatatgcaacaggagcaccaatatttgatactttgcctctcagaatcatcttcagtcggctcaccaagtccacagcaggaatcctcttattggtaacccaggttgagtcggtgacaccactatacaaataagccgggtatgctctgtccttc

SEQ ID NO: 119436 - DNA, 372 bp, Zea Mays
agaatcaaatagaatgactacagggtgattggccacgagaaacgtacccatcataactggctctccctccactgtagtggccacttgtgtatagtagattcgcccagtcttctttatattcttgcccgctgcattatttgccgtgtttcccctgccttggcttgaactccccgggttctgctgattattggacttgttctgcttcgaatatgggcagtctttgatgaaatgtccagacttcccacaattgaagcagccggttgaagaacttgggagggcggggaaacgagcaccaggggcactcggctgagttgttgaagtgggggcagtggtagggcggatgaatacatgctgtttgaaggggtaggaggg

SEQ ID NO: 119437 - DNA, 296 bp, Zea Mays
gaatagtgagtgaggaaaccgtatccctgaggcgtaggtgttcctgcggctcggctatctttccttagtcgggatgtcccctgttcctaagggttttcgcattacgactaaggtgaggctatgaaacatgttcgtttttcaaaactgcgaggaaaagacaacacaaaggaggggttccccctgctagcccccgagggaagctcagtattgaaagtaagtgttgggggcctgcttcgtcgccgaaggtcctctaagcaagttggcacaagcagacatagcatgaaggtacaggccga

SEQ ID NO: 119438 - DNA, 395 bp, Zea Mays
cacgggtaaaaaaaaagttcacatccaacttgcactctatgtcgcggggaaaatgtgcacatcgtcctgcctacgcaccgcggggaagagagtgcagagaggagagcgaggacaaccaaacaaatcgagccggatgttgcgggaatatcttcctggttgatcgggcgggaacggggaatctgtccaagtgctctccagatctggagtcaaaggatactgccctatttggtctgtccatcccagcctccaagaatacaagcagctgtagaccacgaaactctgcttcgatagcaggagcagcagagagagagacgcacgccggctatcagttcagttcttctgggcatctctcaactcaaggaggagacacgacttggctcttcttcctctccggc

SEQ ID NO: 119439 - DNA, 428 bp, Zea Mays
gataatttcgatttggtggaggaggtgactctcgtgatccaactacgaacgaacaggttgtggcgccttagtaatcatagaaccatctccaaatggttattgaccttgctggtggcaaaatcaacctgaacacgaagttctattcctgtgagcaatcaaagaaacaagcaagaacaagatgtaggcaaaactgaatatcaatcactcatgagttggggttcactaggctgtccataggtgctcggtgagcacaactgcagtacatgaagtttgcacaatggctaaaactatcaaagaaaacccacccaaggaggaggcgtagcacctagcaaaatagggaggaggtggtgggtgtccatccttcccacaaggcagagaataggtgcccaatcagccgcacagtctcctacccacaaggcagggaatag

SEQ ID NO: 119440 - DNA, 511 bp, Zea Mays
atgattctcatattgattaccactaatttcctacgaaaaatccccagaaactgctactactactactgttgttcgcccacctgcagaaatctgttttttggacagcaacatacccggattcaaacagcgatatcttttaaaatataattctgaatcgagcgcataagtacccgttggaaaggtatgacaaatctctacatgattctcccactgttccccattaatttcccacgaaaaattcctagaaatccctagaactactgctgttcgctcacctacaaaatttctagacagcacctctaccgattcgcatagataaacatataatcgattggattgcagcacaattaaacaagatacaaacacaaaaatcaccttgaatcctccccctttcctctcttcttcttccctccaccaaaaaccaccgggagacttgcaccaacgcgacgtagatccgagcgggaaaggaatggcaccttggagagaagggcttgaggaggggcggctaggg

SEQ ID NO: 119441 - DNA, 571 bp, Zea Mays
gaatcaaccttggattctctgatgaacgcgagattgtggtcatcagttccagcctcgacgataaataggaaagtgcgctcatccagttcctgcaagacaatcgggatgtattcgcatggcaacctacgaacatgctgggagtcccgagagctggtcgagcacaaactcaaagtgtaccctcaggcaagaccgatccgacagaagctacgccatttcacgcccgacaaaagagaggctatacaggcggaattagctcgcctggtgtcagcatgtttcattagagaagtactacaccctgagtggctagcgaatcttgttcttgtactaaaaaataataaagttgattggtgcttgtgcgtcgactataccgatcccaacaaacactatccgaaagatcctttcggactccctaggatagatcaggtagttgattccatcgctggctgctcgatgctctcctttctggattgctactctagatatcaccaaattagcctagcaaaggaagacgaagaaaagactccattcatcacaccttttggggccttctgctatacctccatatcgttcg

SEQ ID NO: 119442 - DNA, 378 bp, Zea Mays
ggccgaaggggtacgagaggattatggccgcttgattagatttaaactacccggattaaatcgtgactcaagtgaaccgatgcgcgatcccaaccgctggatcccccatcaacggccgtgagctcacctgcacgggattgaatcctacgcctaggaactctcatcgatgttcaagattgagttccccgttgagcgactgcaccagatgaatctcaaccatccagtggccatccaaaggtgggctggttgtgttccctatccgcactcaaccgcggcggcgggctgctctacacggcgggatctcgccggcgcgactacgaactaggcctaaacgcacgattccctgaatacgttgaggataaaccatgtagggaccat

SEQ ID NO: 119443 - DNA, 1432 bp, Zea Mays
agaaaaggtaagggtattccctcctcaaagagtcctcactctccctggtagcttcctcttctccttctctgctccactgaactttacagattctcacttctgagttgcgggtcttccggactgctgagtcaagaatctctattggcttctctcggtactgaagatctttctgaatctggattgcctcttcttcgatgtgaccttctggtacttgcaggcatttgcggagctgggacacatgaaacacattgtgaatatcggacatggactctggtaattcaagacggtatgctacgggtcccactctgccaatgatggtataggggccgacgaatcacggtgctagctttcctttcacttggaaccttctgacaccacgcatcagggagaccttgaggtagatgaagtctccttcctcaaatctgagttatctccgcctgttgtccgcataacttttctaccgactttgagcttcaagtaatcttttgcggatcagggtaactttctcttcagcctctttaacaaaggcaggcccttccagtgtcttttcctctacgttggaccacatgagaggggtctggcattttcgtccatacaatgcttcgaacggtgacatcttgatactggcctgatggttgttgttatacgagaactctgcataaggcaaactggattcccagtttctatcaaacgttaacacacaagctcttaataaatcttcgaggaccttgttgaccctttctgtctgaccatctgtctgggggtgataggcggtgttgaagtctagcttggtgcccatagctttctgaaggctcgtccaaaatttggaggtgaactgggttcctctgtctgacactatcttccttgggatgccatggagtctgactatctctttaagataaatccgggtgagggtgactcctccaaaggtagttttcactggaatgaagtgggctaccttggtaagacgatctattattacccagatagagtcgttccctttttgcgtctagggtagtccggttataaaatccatgcctatctcctcccacttccattcgggcactggaaggggttgcaataggcctgcaggcttctggtgctcggctttcgttcgctggcaagtgtcacaccaggccacatactgtgctatctctttcttcatcactctccaccagtatctggttttgaggtttaggtacatcttggtggttcctaggtggatggagtaggctgagttgtgagcttcatcgagcaggacttctcgtgcctccccttttggtacacatagacggttcttgaaccaaaggactccttgttcatttgtcctgaggtccggaagttgttctttgcgagctttttccataagtcttgctgtctccgagtccaggcgttgagctttgcatatgaggtcttctagcattggtttgac

SEQ ID NO: 119444 - DNA, 462 bp, Zea Mays
gtaaaagagtgccaaataataagttatacataggaggtatgggatcaacaagtggttgattccataatcgtagttcatgcatgcatcatattcaaacaatactaagtaatctccccctcttatagagacatggcacgcacaaagactacccagcgaaaggcgatcgagcctcagggtgtacctcggcaccagttggctcctcgatatgaggggagcagtagcaggagtaatgatcccataggggatctggagggtagagttgaatgtctaatgatggaactgcgccatggaagtagggagcttgcgcgtgatagccgctgcatcgctgagtcgggagattgtggagcaggatagggctattgactaggctgtaaattcacgatctatagcatgggattgtgaggcgactgcccgagtctgggtggaaaagctaagtgtagccctagaaaatctgcaagcgta

SEQ ID NO: 119445 - DNA, 306 bp, Zea Mays
cgagtggtgcttgacgtcgtcggtgttttggagataacagccgagttatgtcagaaatcttgttttcccgagttatgacttggcactttttagaaacggtgcccaacccgggaaaaaccccatttatatcacgtcgctgcacgcctctgagttctgagccctaacttcacatttccgcctcaagccactcctctgtttccctctgatttcgcttttgttcaatccgccggcgagattacaatggtgcccaagcggaagaaccagaattttgctgcggtagtcattcctcccatcgaccccaacagc

SEQ ID NO: 119446 - DNA, 499 bp, Zea Mays
agctggcgagtgccgtcaatttaaaccgtgaaacagtgagtttgaaaattaaatattttgcttcataatacttcctgtctccctacatttcacattttccatcatgttggaatatattgtacaaaaatatacatctgttcagggaaaaaaaacgtaactattgtaatgcttccgctctaccctcgacttcgaagctacaaaagaagcttagtgattatagcatgcaatgtaaatggtgcatggtcatttctcattaactctttaatttagttctcccaggcccatgtttcaaagtactaaatctaagaaaaacactacacatgttcttaaagaacatgcaacaagcatcaatattcttcgcagaatttaaataaatagcattcaaggagtgaaattattgtaatatctatgctcctgtctttcataatgctctaaaatggataaacatagcgaaatggagggaatactaaccaaacaacagatgactctgcacctcaag

SEQ ID NO: 119447 - DNA, 599 bp, Zea Mays
tcaacttctttccaatccacatttctaagttttgtataatgcataggtataccaaaggtattggaagggaaaagagcccatctcaccaaagcagagagctcatttttatgaaaattaatcttgagaccagataactgttcaactgcacacagcaaaagcttcatattattggcttgctcaagattattttccaagaaaagtaccgtatcatctgcatattgcaaaatagaaagacgtcatttactaaatgtgggactactccttgacactgaccattatttttagctctatctataagaattgttatcatatcaactaccaagttaaaaagaatagtagagaggggatcaccctatctcaccgctttcttggtttagaaaatggcccacatcatcatttactttaacttctacagatcctctagaacctacctgattaatccaagcacattaagatggtgagaaacctttcattctcaatacctgttgaagaaaaggccatttcaggctatgtccagcggctcgcacaaaacgttgcggatgtgcattttgcgcgaccacgacacactattcacgcttccagcagatcgtggatgctgt

SEQ ID NO: 119448 - DNA, 458 bp, Zea Mays
gtctaactccggcgagggttgattcaaggcgatcggtggtagagcggacacggcggccgaacgaacagtgccttaagctcatctagggggaaagatcttttcaccgtgaaacgttatccgggcaccggtgagcacgaatcacctcatcagcgcgaatccacgctcgggtcaccagcggccgattcactgaaccaacagatttttctggtcactgtaccatcaggatcttcttcagtcagtctaacagatcatgtttgggacgaatttcctcccgattttgtatggtgactatatcaatgctctgcagcaaagttgtagcctaatagaccagctttaactttgttacagtgtgcgtccacaaaaagttgcaggatcttattcaaaatcgagctctaagttcatccaatctcactgttactgaaagttcagacttaaggtgacctgacaacctgactttg

SEQ ID NO: 119449 - DNA, 630 bp, Zea Mays
gtggtgctggaggggctttcttctttcgctccgtctggcatccttggctcttggtcttcttttggattttcttcgtgggggcgagcttctttagcttcttatcataatccatcttcagggttcggtaggcttcacgagtgttggcctcctcgccttctactatatcgagacactcttggagggatgccttctcctttttaagttccttgacatgctgttctaagctttccacccgggagtttaggtgggtgcagtgggaggaaaggtcgtcatagtggttatcgagagtgtggaggtatccggccatgtagacgatggtggggtcatcctcggtaggatctctccctgacagggcctgaagtcttttcctccaggtgggggtatttctgttgctaggtgggaagtaacgaaggggggtttcaaaaacctctctgatgtagttttggcatagctgtttaagggcttttcgggcaacattttggcaagtgtctgggaagcggtgcccgatgaaggtgacttggaagggagggtggtttgggtaacttcggctttctcccaggtagattgccatagagcacttctcaactccattttcgtggtattctttccagacatattccggcttcttgc

SEQ ID NO: 119450 - DNA, 306 bp, Zea Mays
gagtagaaccttgactaggcagaattaaggtgaagttcccgcagaacggagaattaacttccacggtacggctggctacatcaagcacaacttggtgcaaggtcatccaattagctcctagaaaaatgtccacattttccaaacccaacacaagaagagtggttttgaccatgtggcttcccagttgaacaggcacactttggtttaattgattagttgcaattttacccccaggtgtgactcataaatgacccttttgagtgagagaatggcagttcacatttagcactgaacttttggctaatg

SEQ ID NO: 119451 - DNA, 287 bp, Zea Mays
ggaaggtgatcatgtgtatcttgaggtgtgaccacttcgtggattgaggagattcaaagtcaagggaaaattgtcccctcgctttattggaccactctgagtttttaggcgagttggagagatggtctatcaactcaagctacctgataatctatcttatgtgcattccatatgtctcaacttaagaagtgtctccgtgtccctgagaaacagttaccaatggaagagctcagtgttctgagcgatttgacttatacggagtgccctatcaagattcttgacacttt

SEQ ID NO: 119452 - DNA, 858 bp, Zea Mays
gatccaccagtttaccttggaggagctagagcgcaagaggaatgagctgaaggagtcctaagaggaagtttcaacactcagcaattcgctatcctccaaagattctaccaacagagacctccgtgcttcaaagaagttcatgtcacaagagttggaaactggcaaatggaacatcaaggtcttagaaggcgaccgtgaaattctgcaagcggggtatgacaaagcgatggataaggtggtttgagccagtcgccgtctggtgaagaaacctagtgttttgttcctgatgacattgttgcggatgttcaggctgcatcagggactgcagctgaggctcctacccttagtagtcctagggctgattccacccccagaggtgcttctgtatagtgtattgtaaattcggaaaaatataacaattgttgcttgggtgggaggcgctcctcccttttgtggatgtatttggcaattggtttcagtctaagctttgaggttgaatccttgtattgtgatgagttgtgcggggagggggaacttagtgggtgtccctgcatatttgcttttgttcttcttgatggggttttgcctgcacccctttttgcatatgtgtgtgtatgcacgtgacaccgacttaaaccgcttctcgacttatgtcgactactctgttagtagggtatggtgcgcaccctttgttttgtaagcgtgagcatgtaacaccgacttaagccgatcctcgacttaattcaattgctccattagcaaggtatagtatgcacccattgtttgtaagcgtgagcatgtaacactgacttaagccgatcctcgacctaagccgattgctctgttagtagggtatag

SEQ ID NO: 119453 - DNA, 544 bp, Zea Mays
atggtactttattgtctagccaacaagacaaactgcaagaggctcatcagcatttcaaggagattcttggagagactggaatgagacataaggtagttcagtgggccgctctagattattcccccttttcgttaggtgagctcgacatcgtgatgcaagagtcagagatcaagaatgtggtcatgagtttacattcagaaaaagctcctggcccggatggtttcattggccttttctataaatgttgctggaactgggttaaagaagacctcactgctgcaattaacgatttctacaatttgagatgtaaaaacctccacctagttaatgaagcaagtgttgttctactcccaaaaaaagaggtctcggatagcatcgataagtttagacctattagtctaataaacagctttatgaagatcgtcaccaaaattttggcaaacagactggcaccgcgcatgaatgaaattgtatcggttgcccaaaatgccttcatccaaaagcgatcaattcatgataacttcttatatgttcaaagggtgat

SEQ ID NO: 119454 - DNA, 480 bp, Zea Mays
aatgactatgtgatatcctgatcccagcggattcaggaacggattaaaagggggctaaattttttaaactgaactaagataaagctaaatgatatcattctttatgtccataaaaaacaagaacctataaaaagagaatttttgttgtacacggctcttattagtctcaagtgttgtgttaaaatcatcttttttatgagaaatatgtacatcctatctctataaacataaatattaatttgaattgatggaacaaaattaattaatatctaaaaacaactgctcgtgtgtattggtgtctgctatcctgtaattgtgctatgcgctgctctgcttgtgttgcgtgctgcactccttacgcagatagtgacacacggagggctgtgagcgcgatctgggcgcccgatttttttgtattttaatcttttttttgaaaaatgttcatgtttagacccttaaataacttaatctcatttttgg

SEQ ID NO: 119455 - DNA, 697 bp, Zea Mays
gaagttcttcgacattcgacgtataaatagtcaccgcaagaggaagcttagactcccctcgcgtgcgacaaatccgagcaaaagccgcttaatggtgcagcctgatacgcacaataagtgcgcgatatcaccctatgggtgcgaagtctttactataagacatccgagcaaaagccgcctaagggtgcagccggatacgcacaataagtgcgcgacatcatcctatgggtgtgaagtctttactataagacattcgagcaaaagccgcctaagggtgtagcctgcgcgacatcaccctatgggtgcgaagtctctaccatacgacaaatccgagcaaaagccgcctaagggtgcagccggacatacataaatatgcgacatcaccctaatggtgaaaagtctactacgatcccctcaaaggtgcgaacaaaaaccacctaagggcgtagccaggtacgcatcgtaagcgtccaacatcgtcgtggaaagcgaggtccccatcccattttacatgccacgccattacgatcacaagtcgggacaacctcacaacaagcgctgcatgcaatgtcatcatagtttacatacacacagcgaggggcccacccgccacattgcacaaacaatacaaatcacatcttcttgccctccctctctattgcgagcgggggagggcaacgttttcactcactaccgc

SEQ ID NO: 119456 - DNA, 351 bp, Zea Mays
taggatatagaggtgtcgatggtgcatatgataataactaaaagcataacaaaggatatagttaaggcaagactcgcgaaacgacaaagtggagaaaacaatcaagggtaaaataggtaaggttccaacagaagggttgaagtaaagattcattaccgagtggagattaaaggagacaacgagatcaacaaggatatgcaaagtagaataaccgctcatggatcattaagaaacaagggtggtcaaggatatgttaaatgtcttgaacagtcattgggatataaaggtagcatatataaaaataagagtatgcaagattccaatgatacaagcgtacccagacatgggaat

SEQ ID NO: 119457 - DNA, 504 bp, Zea Mays
gtttttaatactctcgggactgggcgtcaaattccagaaaacacaggggcctcggggtaagttttccgtgacacagtgaatagggtgctctggatggcgggctagttatctaataagcgaagggctctttagcaaaacggccaatgaagcggtatgggcgagtctcggccgttggattagacaccgagggcccagattaaatccttattcaaacgaaccggtactgaatcgcatccattggatccgaatcaaacggtggggattttattactctagacctatctctgtccgtccgatccagatcaacgatccagattgaaacgcggcgaaagggtacgcgggatctaatcagggttgttcatcaagatctaacggtgtctgtgtttccccccaatctctccgccagcgacggcggcgccgcccgacttcacggcgaagctcgccggggaaatcccaatcaaacgttccagtgccctagagctcaattaaaggctgctacacgat

SEQ ID NO: 119458 - DNA, 1243 bp, Zea Mays
gcaagcttcacacctctggactaactcggttgcatcactttttgctgtcggccagtagaaaccagacctgaagaccttcccaaccagggtcctggatgctacatgtatcccgcactgtccggcgtggatctcatctaacagttgcttcccagtagctgaaagaatgcacttcatgaggactcctgttgcgccccttctgtacagtgcatcccaatgagggtgtagtgggctgactgccttgcgatgcgttctgctgcatctttgtcatccggttcctcttcattctttatatatctgatgatgggctccctccagtcattagagtctgactctggctggctcaaaacgttgcactcttctgcttgatctgaggaaatacttgggcatggcacctcttggacgaaaactccaggtggaacctgggtccgactggatcctagtttcgacaacgcgtctgtcgccacattgcgatctctttccacatgatgaaattccagcccttcaaatttgtcttccagtttttggattgctgtgcagtacttgcccatagagtcattcgagcaatcccattctttatttatctgacttatgaccaccagtgaatctccgtataccattaacctcttaatgcccagtgatatggcaatgtttaatctgtggatcaaagcttcatattctgctgcattattggatgctgagaataacaactgaagagcatatttgagttgctcacctccaggtgcaatgaaaaggatccctgcacctgccccctgcagctttagcgagccatcgaaatacatccaccatacttctacagtctctgggttgtctggtacttgttgctcggtccattctgatacgaagtcaactagtgcatgagtctttattgcagtacgaggccgaaactcgatgtcgtgagctcccagcttgcaggcccacttggctattcttccaattgcttctttgttatggagaatatcccctattggaaacctggtgactactatgattttgtggtcgtcgaagtagtgatggagcttgcgtgcagttagaagtactgcatacaacagtttttggacatgaggatacttcttcttagatgaccccagaacttcgctgatgaagtagatgggatgctgtactagatacgcgtgtccttcctctgatcgctcgactactaatgcggtgctcaccacgtgagtcgtgcaggagatgtacaacagcagatcttttgccggctggt

SEQ ID NO: 119459 - DNA, 368 bp, Zea Mays
cacatctctaaaccaggtcgactccatctcgcttggttgttgaccagtagaacccctctataaaagccttcccaaccaacgttaatgaggttgcatgaacaccacactgtcccacatgaatcttcctcaacagatgcctaccactagatgtatcaatgcatctcatgaagactcccactgccccacgccaagtctttgccgatcagagtgtggttggcagactgcctagcaaggcgctcgacaacagcttttttgtctggctcttcttcattcttgatatatttgatgatgggtgctctccagttagttggatattcttctacaagcagtatctcatgctctatcaccttgcactcttctctcgagtc

SEQ ID NO: 119460 - DNA, 307 bp, Zea Mays
tgcacatccacccgatggttaccagacgggccgtcagtgtcctccgacctatcgaccgcctggttctcacaacgtcctcctctacgacgctctcccccgagtcgtcctctgtccgtagtgcgctcgctgatcccaactggcagcgctctatggagtacgaggccttgcagatgaaccacacctgggacctggtgccctgctcctttggcgtcaatgtgttcaccgggtaatggatctttaagcagaagatgaaggcggatggctccttggatcggtacagggctcgctgggtcctacggggcttcat

SEQ ID NO: 119461 - DNA, 450 bp, Zea Mays
ggtgggatttcgtcggcgaaggccaccttgccctttttggtggcgagggtcactcttgctgcgtcgtcctcggctggagagctagctcgggtgttcttcctgggaggcatcatgggttggtcttcactgcacaaacggtgagcgccatatgttggacctgctgataggtggtcaggtgggcccaaacactcgggagctgataaggggtcaggggcacaacaaaatgttaggttggaactacagtgtcttgctatgtgtgtcccattaggttgcagaatggggtatttgtagggcgtcgtggggtaggtagacctaagtacaattatacccctgattacctactacattcctagaatattccacacaacagggtcattacagcacaataaccccatgactcaatgacaccgaacaatctaccaggttgagggtcttacaagttggaccgcc

SEQ ID NO: 119462 - DNA, 892 bp, Zea Mays
gtcgctgtaaatgaaacagactcgtgaacgtttgatgcatatcgtacggctgacgaagaaagggatgacgtggaccaacgtggagagaattttgctcccacggttaatatatagaaataatgaaaagaattgaaagctaaacatgtttgagtagtactgcaagtgaagtggcacaaataaaagctccatttccaagatatctcatgttggtaactaaatccaaactatatgtggagaaaaggtaaacaccataatcagctaacaacatagtttcacgcaatttgaatggatttgtacaggctgcgcttaacactcccgattcagggaaggagaagagactgacctgaatctcatagaagacgacagtgagtagcatgagaatggttccgcccacgacgaaccccatctgcgcgtcgagctcgtctatcatcccgggccggtaatcaaagctggcgatgtgcgcaaggaggtcgtgcgtattgatagccagcaacctggcgacatcagccattaagttgttagctgttaatctttctgagccaagacttcttcgagaaactaatctggaaacatcagctcacgactccgacacgaaccactgggtggaaattcatcaccgttgtggcaaagtattttctagttgagttgctcgccgtggcgcggtcgaccataccggggcggaggcacggcaaccctgtagagcgcggcgaggtggcggtgtgtgccggcacttgggacttgggagagctcttgacgggggtggaggggaggacgaagcacctaggtaacggcgtttgagggcggggagtggactatctagaaccttcacgacaaatagagatgccggataggggtagctgggggttgtacgaaaacggtcgcctaacggctc

SEQ ID NO: 119463 - DNA, 420 bp, Zea Mays
atttcactcgtcaagttgctctacacgtatgggcccgcccctttacgagttcatcaactctcgaactgaagctgaatgtgtactcaccttcaaaaagggactagctagctagggcccgtcagcctgactaattaatcaatgatccgtcgctcgtaatcctcgtcagctccaaccaatgactaggataagctagtagtactacgcagtacagtaatcgatcaacaaatacagactgacgtaggaatgagccatttgcggccggttgtctgcttctccctttacgcttgtttagtcacacatgtgggggagtggcgttgttgttttgcggtttctccgcgacttatctatgtcaaataaatcgaatcagagaaagcgggcgtccgggtcgtccaggcttatcgcatccttctgtgctttcac

SEQ ID NO: 119464 - DNA, 571 bp, Zea Mays
tcctttccggatggggacactaacttaactgttctcttgtcacaactgacagtggcttggtttctgtgcagccaattcatccctaggatgacatctaacccttgagttcccattactactaggctagcggggaagtctatcccccttatttcaatccttagattcggacaaatcctatcggtctgaacttttcccccaagtgaattaactcttaaaggtggaatcattgattctatggggatgttatgtgcttttacacatgatgtagaaacaaaagaatgcgtggcaccaatgtcaaataatacttttgctgggtaggattcgactggaaacatacctactgccacgtcctgagcatcctagatttctttggcctccaggtggttcccctttccacagttgtaggcctaaccacggcctcctggtgcttgctgtggcgctccttgtcttgctggggcattgactgctggcgactgctgagctactttctttggacagttctttgcccaatggttttgttctccacagtagaagcatgcatgacctcctacttgcgctagaactgcttggc

SEQ ID NO: 119465 - DNA, 387 bp, Zea Mays
tttcttaacttatataatataatcgttgttcattgaacaccattgactttttattaattaacagaagtaaaaaatgttgagcgatgcaggaatcgaaccggcaatctaagcaaccaagacaagatcaatttgcgatcgtactggttctctaattattcgtcattttgatgtcagaccatgttctctagtgcatcgaggatcacaacataaggacatgacttggaaccattgaggtaattcctagaatttatggttctagtcatgaggctcaagatcctagatcaagtagtaggacatggacacaagaaagtggagaagtatcaaagtcagaacctggaagggacccaaaagagctaagtacactttgcactagaccttctatagtgg

SEQ ID NO: 119466 - DNA, 377 bp, Zea Mays
caaggagataatcatcgttgtcgaaatactgcaaactcttaaggtagtgtttgattctgtagtattgtgggacggagccgctacacttctaatttgttgttgtttggattggtttcgtgtatctaaaataggaaaattatccataaatgttgaaccatctggctccaccaaaatatctagaacagagccacttcatcccaaccggctccggaagcaaacaatacctaattggatggtttgcttccagatccataacaatcattattatggtcacaatattctcaaaagcaatttcaccaagaatcatcagtggactggtagcaaggagataatagctttcctatgcccgctaatacttcaccaagcaaacatcccaa

SEQ ID NO: 119467 - DNA, 290 bp, Zea Mays
ggttgcatcactctttgccgtcgactagtagaaaccagacctgaagaccttcccaaccagagttctagatgctgcgtgtatcccgcactgtccggcgtgaatctcatccagcagttgctttccagtaaccgaaagaatgcacttcatgaggactcctgttgcaccccttctgtacagtgcgtcccttatgagggtgtagtgggctgactgccttgcaatgcgttccgctgcggctttatcatcggtttctctttgttttttatatacctgatgataggctccctccagtc

SEQ ID NO: 119468 - DNA, 366 bp, Zea Mays
agggggccaaacattcccttagtgtcctccattaggaagtcttgaatagtaagggattttgaaatatactctccattaggaagtcttgaatagtaagggattttggtcccctcaatcccctccattaccctcggtcccaaacgtgcccttagtgtcctctcctcctctatgatcacctgccgcgcagctgcaagtatctagtatataacatgaactaaatactagcaagtggtgcatatgacttcgtaacgtataaggatagaaactggacgaaatggaatgcccgatatatatgtaccgtgagaattctatattatagcaccgttcaaaacatgcttgttgcttctatgagatggcttcttttat

SEQ ID NO: 119469 - DNA, 476 bp, Zea Mays
gatacacatcaatgggtgtctgttcaacataagtttgagctttatgtatatagaaattagaggctatctaaaaaaggacaatttagatcgacaaacctcacatgcatgagatacaagacaagtgttggtccaaaatgagtgatgcatacgttttgttactctactaacccaatattaaaacatttaaataaccctatatggggccaagtcgcacttgtttgtcgttgtcggaggtcttgacacgggatggacgaggtagggctacgcttagcgtgagggccaggtgtgagggcctttcttttcgattgcgggtgaacatggtggataggcatggaagccgacacgtatgggtaataacgagttagcacgacgatggcagcaggaaggcacgagcatggtggcgatagccaggagcgggggtggacacgaggtgcggtgggcgaccgagcgatacacaatggcaggggggcaaggaa

SEQ ID NO: 119470 - DNA, 672 bp, Zea Mays
gttgcttgaggagtgacgtttgtgttggtcggcatgttcttgccaacgtcaccatgttgaccctgaaaaaaatgtaatggttatatgctatttaaagaaaatgatgaatacaaaccttcaatgaaaatacaagtaataaaaaaacattaccactggggttgtaggtgttttgtttcgtttcgttatatttgtatgaaccagtggatcaatgtcagcttcatcagggcaacttcgtaatagtacacgaatatgttgttgccttaacagtaattcatgtacctatgtgtctgtcaactgcgtctcatgctgggatgctggagtagacatatccggtacagtttgagtggccggactcatacatccttctttacgtatcatttaagcaaaaaaatacatcgatttaataatggcatcataacgatatcgaaaaatgtttgtataactttttagattgacataaagaccataaaactgactaacctatcgaatggggaagaatatcatctgattttttagttggtttctgcacatcataaccatcttcattgtcctctgactcaacacggaggacctcatcaattaactcgcaaaaaacatcagatagattgtattgtttctcaacaatctgctgaagagtctgtttaataactgaacaagccttgccaacctccg

SEQ ID NO: 119471 - DNA, 343 bp, Zea Mays
ctcaatttcatccaattcctggtggaatcagtgaatccaagtgtatgtgtccctggatgtctaatgttgctcccctacaggttctgagccccctagggagggtttcgcgtcacaaatagccatttcactatcatttaaaaaaacttgcacgccaagtgctcggtgaaatgcacaaaccagtcaaaatagctcaaatcgaccccaattttttccaccacactccagataccaccagtacctctcacgccaaatttcacacctatccgatattctagacacctgtttcacaacctcttcattcttatggtgatatgtttcgagccgagtgccaaaaatgtttttc

SEQ ID NO: 119472 - DNA, 490 bp, Zea Mays
gaacggatgaaaaagggaaggagcaataccgaagcgcgttatgtataactcagtaaagtgagccatgctgacaaagaaaacgaaagtttagtgtgaccattttgagttcgtgaacggatgaaaaagggaaggagcaataccgaagcgcgtcatgtatagctcagtcaagtgagccatgctgacaaagaaaacgaaagttcagtgcgaccattttgagttcgtgaacggatgaaaaagggaaggagcaataccgaagggcgtcatgtatagctcagtaaagtgagccatgctgacaaagaaaacgaaattttagtgtgaccattttgagttcgtgaacgaatgaaaaagggaaggagcaataccgaagcgcgtcatgtatagctcagtcaagtgagccatgctgacaaagaaaacgaaagtttagtgcgaccattttgagttcgtgaacggatgaaaaagggacggagcaataccgaagcacatcatgtat

SEQ ID NO: 119473 - DNA, 546 bp, Zea Mays
tttgccgcggtgtcacccatgccgcgatctccctcactgtgtcttctaccgacgtggtaaacatgcgctagcaaagctatccggggccggagatcgtctgccgggtcgccgtggctataaatagcacggtggtccacggcggggtatgaacttcgcacacacagtgagtttattgatgcctaaattcgcactgcctctgccccctcctcccaaattggttgagcacggtaaaactagagtcccttgccgccgtatagccccaagctccgccctcaatttcaaccaagcacgccgtgacgccattttcccccaaattagtccgccgcgccaccgtgaacagctctgtcgtggctagcccactcgggtaagactctgtccaattcatgtgttgtttttattgctctatgtgctagggaagcttaccgtggcacccgttagctcaatttggccatggttaagcaggaacgcgtgcccatggtcacggttttcgccgtgcatgtggacaggccattctcagtacgttcgggtcaaattaatgcgtgttcc

SEQ ID NO: 119474 - DNA, 442 bp, Zea Mays
ctaatctaccgtttctcatttcgacgtccatccatgcgaagctggggaagagtctatggtcgctcggtttatggcgatgtcgatgtgtagggcctagactgtgtaggccggtagctgggattggcctggtgttgcgcatcgcggccgactgggcgttcgggttgggcaaatggtgcctggtgtaagcgtagcattggagaagatgatgggttggccgttggattggcaacggagggttgtaatcaggcgtgtgcatcgtgtgagcgttggcgtcgcgtgggccgttgatcgttcgatgtgtggttgagatcaaaccgcgcgcctgttctcatcgcaacgccctcacgtgtaatcttagccctccatccgtgatcgcacggccagtacttcacgataccccttcggcctggcataatctctaaagagtccttgtccttttaac

SEQ ID NO: 119475 - DNA, 654 bp, Zea Mays
ggaaacggcgctgcatgagcatcgtaagaactccccttaccgaactcgccatcgtgtcaatttcattttgcgatcatcggaactagtggctgtgcaccgtggggcgagatgggtgtttcgattacggcgtccccgccgcggcatcactataggttgccggtgttggaccgggaggggggaagacgtggcctggccattgatctgctgccgaacgaccctgattagataggaaataccccttcgcgtgattgaatatgggtcgtggatctgagatcatgcgaataggattcgagcatagtcgttttaaatctagattgttgatcgtcgatctaacggagccctacgcgtaccggttcggggttccatctgtgtcgttggatcacgatctcgcagcacaaaacgcgttaccattcagtgaaaacctaggtctaatctgaaccgaccgttccagatcagacggctcagatcacgcgataccccttcggtcgcgtaatcttgctaaagaacccccagccttactggaaaataacctgcagtccacgaccactgtgtattgagtctagaaaatcttgcgccagggcccctgcgtttctgtttattatacgcgcagtccaagggaatggaaaatcaagaaaaatgatatagaaattgatt

SEQ ID NO: 119476 - DNA, 645 bp, Zea Mays
catctaaccaatcatcatctggttcaccaaattgattcctgaatcgacaggtgtacttcaggcgaaccagactgcccattccgacttctatatcagcttcaacaccctttggcatttctcaatcggcagccagggggcataccttgaaggctatgtgttcctacactaggtctctagaaccaatgtaactacatacacattgattgatgccaggcaaccttgtgatttttctgtattcacaatagcaggcctcctcagtctgaagctggatcagataggccactggattacatccttaatatcgcttctttgactcaaatcattcttcacatagaaccattgcttcatccatgaacccgccatttttccgaaaagttggcacgagacaccttgcatcagaccggtacacgaaggtataacatccgaaattgttatgatactgctctttcccagtggccttcgtcggataagataactcgtgaatatggcaaaagcaattagcattcggttccaatccctggctccttattgcccaaatgaaaacctcaaccttaattaatgcgtcaggggtgagttgatgaaggaaaacctcaaacttcttcaaaacttcaattagaaacttgtgtaaggggaaccatagcccag

SEQ ID NO: 119477 - DNA, 539 bp, Zea Mays
aagaaacattataaagtacagatggttacactggttagcaactaactcgatggcatggactccgctatccatttgctacgacaggtcataattgcatatatgatagatctgcccctatagcaagacatcctcaacgatgtggcatcggtttcatcggttttcgagcggtttggtaaaccgtggttaggtataatcttctttatctttgtgctcatcaatctatcatacaaaagagaacattgggtattacgtgtagcatgactcaaacttctataaactatccatgagctggtaacaaagttgcaaccagaatcagactatacatctagtttatgctctatccactaacttgtcccctgttccggctatgtacagtaccctggatgacaacccatctcctgaatcgactcacgtgcagacatgcccttctcccctaggccactgacaagtgtgtggttcgtctcctctttcaatctgcttgccttcccctagacacggacgcgtgactagcctccttgtcttcctctccgctcgttggc

SEQ ID NO: 119478 - DNA, 385 bp, Zea Mays
cggatctgcgtaccactttgattagggttagatctaatccgggcggtcgaggaggaatccaacgatcggatggcgttgttggcctgtcgtcgtcgatcttggatcgggcgtacaccattgcctaccgatttggggtgagggtcggtctaatcagaggcgcacatttccgatcttacggccgagatctgatgataccctttcgccatggttaaattgcaaaagagcccctcctgaattacaaaatgaacccatagtcctggcagaggaattctaagtcttaggaatagttgcgcaatggcacgtggcttttgtttaaatcatgtgcgtagtctagaagccagtaaaagtgaataaatgattaatgaaattgatttttagtatgaaa

SEQ ID NO: 119479 - DNA, 527 bp, Zea Mays
ttgcaattatagtattcatgactccatgatttatgattatcggagttccaattccattcaggatcatgattttgacaacctgctcacaaagactcaaggtacatacttcttagtgtgagaatttggacatatttcaaaatttgttatcgatatagcttgagctcctaatgatacaaatcttgttatctgcagatgcaggcatacattcatttattctgccaaatgtgaatctgaggaagcaagggtggagagtcatcttacagtgtgacatataacgtgatggttgctttccttcatgaaatacggagccatgaaatttttgggaactgggttttcttgtcaaatcaaatgctcattctgacaccagcaaaggtagctcataagtgaaccgaagagaggtgtggaaaaattcatggtgcagtgcaactaaatttctttgatggctactggacccaatgcaatatatttcgcaggaattcaatcggaaagttgaacatagctctggacagtgcacagttcacatttta

SEQ ID NO: 119480 - DNA, 425 bp, Zea Mays
aaggcctttaccagtttcgtgtcaaatcctcctgctggtgatagcggtttgggccttagagtgcgaccctctcccgaagaagttagtgctttggttgcctcactcaaagaaattcctgacgacgagaggcaggttcattttgaggtgcctttgaatccaagtgacgcagagataagtgccatgctggatatgttagccgaggattcttctgatgccgctcctgctgaaacactggtggtggcacccatccctgaggccggcaaagctttggatgctcaaaggtctgacagtgttcacccaaagcgttctcgccgagccaatcaacccatttctcctgctgaggggaagaaaaagaagaagagatgtcttcgtcgagtgtctagcttggatcaggatgccggtccttctattcctgctgctgagga

SEQ ID NO: 119481 - DNA, 465 bp, Zea Mays
cgggcagcatcctaacatcacattgcctctctttgaatcgcaggtatgtaaaccatcatatataagagtgaggtagagttgaatgagtgatctagtcactatatgttcacctagatgtatgatcttaattaccggtagtatttatatcgagagataactgaacatgcatgtttggttgcaaaatttcggtatataggtatcttcccggttgaagggacgacatcatgatcgaagtcagtcagcggactcaacaagcttgaactccgacgatccacaagacgtggaccttgagctcaagctatgattctaaaatgtccctagctccctttctcccctctcctcccttcgttgtgacgcgatagatttgttagtctgcttcatgggcattttcacttgtggtgcaataagtttctgaattggtgccactagcgctagtcgtcagaaccagtgcaatgcaagaggatt

SEQ ID NO: 119482 - DNA, 427 bp, Zea Mays
tcgggagtgggagcggcagctttttcaggcaaaatctgttctatagcttcttcctccactgccttttctccaatttctgagggtttctccttggtaggctctgaaggcccagctttggcgctggcctggctcattgtagctttggcttcggtcagttttgtttcggttccaattgacactttcgaagctttggcaattttccatggagtagagcttgaagccttcactgtctccagcacatctagtacactggccatcctttttctcttgtgggtcgccgcaagacctttttgtgccttcgacattgtcatttctgccgaagggcttaaaatttctaatgtttttgttccctcgattcttggctcttcagctttatcagtcttcggctcagctaacttggctgagggtgcctttggcaaggtggccg

SEQ ID NO: 119483 - DNA, 283 bp, Zea Mays
taaaccagttgagaattacaaacatcctaacaagatttttaatgtgggtcctcaaccagtatgttgctgctcacatttccaactttggaaatacacttcaattactgttgtttacttaatgtttatttatccaggttcatgtttgggatttttcagggtaggcaaacctgatattaatgaatgcatggaatggactacatgattgcttccatgcagatcaagcggtagcatcagctgccatatacgatccatctatatgccatcttagaagttttaaagctcc

SEQ ID NO: 119484 - DNA, 890 bp, Zea Mays
tttccaacaaatctggtttctactttgtttctggatacggaagcacaggaaaaacctttctatggaatgctatagttagtcatctaagagcaagagagaaaattgttttaacagtggcttcatctggggttgcctcgcttttgcttccaggaggatgcactgcacattcacgttttaaaattccatgtgaactacacgaaaccatcacctgcaacattaaacgaggaacaatgctagccgagttaatcaaatcaacttcattgattatttgggatgaagctttaatgactcatagatttgcttttgaggctttggacaaaactttccgtgaccttctagctccacattttgaacaagctaaaaaaacaccttttggtggaaaggtagtagttcttggaggtgatgcacgacaaatattgcctgttatagaaggtggcacacgctcccaaattattgatgcaactgtctctaactcttatttatggggttctgttactgttataagtctgactcaaaacatgaggctcctctcaagtagcacatctattgaaacaaaaaaggaaattgctgaattcagtaaatggttgcttgatattggtgaaggaaatgtaccagcaacaaaaagaaatgctgaaactgaaagttcctggatacagttgcccaaagatattttattacttcctcaaactggtaatatagaatgtattgtcgactcaacatatccagatttgcagcaaagatatacagatattgaatatcttaaggaaagagctatactaagcactacaaatgaaactgttgatgctctaaatgaatttattgtctcttctattcctggaaatacacatgaatatttcagttgtgataaaattggaaagaccccatacagc

SEQ ID NO: 119485 - DNA, 290 bp, Zea Mays
aattaaactctatctcctcacattgtcttctgctgcccatacacctagtactccctccaggtctaaaattcttgacgtttaaggctatgaaggaatggatcaaaaaatttgacgttttagcttttgcatgcaagtttagccgtttttgcccctgcatgcgcgcttagcctgcatggttccaatgttgcacatttaatttccctggctgcatgcggctccttgttttctctgcatgcatgcgtattaaatttgctggatgtggagcaagccgcgagagaggttgagcagcc

SEQ ID NO: 119486 - DNA, 1069 bp, Zea Mays
cgtaaattcaaggttttatgacacaaaggaaatgtcacagaaggtctcaagtgttgtagtgagagctcgactaggttgagttctcaagctccaaaccacatatggcagctctctgatccactttcctgcaagcttttcatttttgtcgagtactttcttcctgagcgcttccattccattgactctttccacctggccattggctcttgaatgcgctactgatgcatacttgatctgtatattccgttgtttttagaaatcgaagaattcaaagctggtgaagttggatcccaggtcagttatgatgctatttggtatcccaaacctgaatattatgtcttgtatgaactccactgccttggctgaggttaaagaggcaatgggcttgtactctatccatttggtgaacatgtcaatggcaaccagcacgtgagtatagcctccctgagctttcttgaagggtccgatcatgtccagcccccagcatgcaaatggccatgttatagggatggtctgcagctgttgtgccggtaaatgttgttgctttgacaagaattggcaagcttcacacctttggactaactcggcggcatcactcttcgctgttggccaatagaaaccagatctgaaagccttcccggccagagttctggatgctgcgtgtacttcgcactatccggcgtggatttcatccaatagctgcttcccagtagtcgaggaaatgcacttcatgaggactccagtcgcgcctttctgtacagtgcgccccctataagggtgtagtgggccgactgtcttgcgatgcgctgtgtcacagccttatcatccggttcttcttcattctttatgtacatgatgataggctctctacagtcatcggggtccgactctggttggttcaagctattgcattcttctgcctgatctgagagaatactcgggtgtgatacttcttggatgaagatcccgggtgggacctgagctcgactagatcctagcttcgacaacgcgtctgctgctgcattgcggtctctttccacgtggtggaactccaacccttcaaatttgt

SEQ ID NO: 119487 - DNA, 770 bp, Zea Mays
cggggagtggatatttattcttgatagtcacttgattcaaagcgcgataatccacacatagccgcttgcttttatccttcttctcaacaaacaatactggggaagcccatggagacctgctagacctaatgaaacccttagccagcaaatcatccaattgccgcttcaattcaacctgctcctttggggccattcgatacagagccttatgaatgggctacgtacccggaatcagcttaatctcaaaagttgcatcgcactccggaggaatgcatggaagctctgccagaaacacgttagcaaagtcacacaccacccggatgtcctgcacccacaaggcagcctcaccctccaccaccatggagaaaaagattctcgacttccaggatcggcgatccggaagcaattgcgccaacaaggataacgtgaacttaggggaacttcccaagaataccacctccctacctgacggcgcctgcaataacactatcttccaaaaataggatataattacgttatactgggataaccaatccatacccaagataacatcgaatgcccccaaggaaatcacaactagattggccaaaaaaacctcatcagcaataatgacggaacacccctgtcaaactgaacaactactaatggagccattagcagaactaaccaaaattgggtgacccaacctctgcaccgaaagactagcccgggacacaaaatcctccgaaacaaacgaatagctagtgctaaagtcaaaaagagcatgggcc

SEQ ID NO: 119488 - DNA, 309 bp, Zea Mays
ctactgtaagtgctccagatttatctcttacggttttcatggaataataaggagataagttaaagcaatatgtagacaaatctattaaaagatgtatgcgttcatacgagaaatcgacttcccctagttttccctcgcacgagtctaatggggagccaccgacaccaaacacaccggctacatatgggtcacccttggcccaaccatcatatggtatgtcgatgcacacgttcgtgtaaccatcacatccgttgccaccaggcacgcgacaggctctagacagtcggaccgtccaacgtgtttcgtcag

SEQ ID NO: 119489 - DNA, 455 bp, Zea Mays
ccggcggccaccgtctccgactgtgctccggcgacctcgggcccctctccttccctcctcggtaagcagccctgttctcctccctctctgtactggtgagcagaggctcccttatccacccccttttgcatcacttccaaaatcttgtgaattcctgtgaaatccagtgcaatcaagttgtgttttgtgttcccctgtattccttgaacactcctgcaggttcttagctccttcgggagggatttcccacctcaaatggctatttcaccgaaaacctaattcctcgcacgccacgtgcccggtgaaatgcctaaaccagccaaaaatgctcaaattgaacccaaatttttcaggcaccttcccaacacttccagtaacactcttgtcaaatttcacgccaatccgagattccaggcttaaatttcaccaaattccccgttttcgagcgatcgttt

SEQ ID NO: 119490 - DNA, 514 bp, Zea Mays
tcctacgcgaagtccacagcggaacttgtggctcccactcagggcccagggccctcgctgccaaggtgatctgtcaaggattttactggcccactataatctgcgccgcaaatcgagtcacgaggtcgtgtgaagcttgctagaagttttctccccgctcgggcaacccttcgcagttcaccaagctgattgcccgcacatggccacttcaacactgggggctggatattgtcgggccactacctacggctcaagggaacctcaagttcaccttcgtcgccgtcgaatacttcaccaagtggatcgaggccagggcagtatccacaataatgtcgaagactgcccagaagttcttctggcaaaacattgtttgccgattcggagtcccgtccgagctcacagttgacaacggcaaacagttagacagccaggacttcagggacttctgcttctccatcggcaccaagcttgccttcgcctcggtataccacccgcaatccaacggcgtcgtcga

SEQ ID NO: 119491 - DNA, 352 bp, Zea Mays
gcaatattggtgcctcaagaagcttgcgaggtaactcttcaactttcgattcttagtttatgacaactgatagaaatacacaaataaggagttctatgaattcagcgtgtcagtaccaacctgggcaacaaatatatataggacacaagaatcaacaaacatatggtatcctgatggctttgagagtatcttgggagcaagccacattcccaggtccgctgcagtgcccactggccactgcccaccaccaggagccctcttctgcctccttcccttgagcttcgccgactacgcgattcagtgcgggattctgcaggactcgcctcatccttgctgtggctatgagcaactg

SEQ ID NO: 119492 - DNA, 359 bp, Zea Mays
gaatgatgggagtgacaaatactttgatccaacttaaaaattgcagcagtaataaatatgctcaaaaccttcttaaatactccagcataaaaaatatcacttggtgctccaccatttcaagcaataaggctctctccaacaaggtcatgtaaaaggtcatgttcgatatatttaactcaccgagctcgcccctacacctccagcaaagtcttctatcacatcctttaaaatttggcggcctcttctcatcctctaaatgtagcggctccttctacaattgtaaaattaattgtcttgcaatttggcaatggttttgtctgttcaatattcaatgccatttcaatggtagtttacaattg

SEQ ID NO: 119493 - DNA, 540 bp, Zea Mays
caggtaacatagtatgcatataaacatttgcttcatagaaaaaggtaaatagctggaagcagcatgaaacttaccagtgacttgtcatataaaaatagacaaactgcaagaaggctccaccgaatcaccgaaatagcgtcagcaatagagagttctgtctctttgatgtttctattgcaactttatcatacaccaagctacaaaataaagatgatggcaacagaaaacttagtggccaggaaatctgcacggtacatcatgtgaatctatttttttcatttgcaatcaagtgatttccacaacacctcatgtcatgcatactaatgccacaaacagaccttgtcttcccaataggatcaaaatagttggactccaagaacaaagcatgacacccgataaaataagtaaaaggtttacctagaaactacaaaaaataataataagtaaaagtttagccaacatcatcagagctcaaaatagtcttggcaaattatttgcataaataattcagcacgcaaaggtttaggtccaactattttg

SEQ ID NO: 119494 - DNA, 439 bp, Zea Mays
aatcttacccgtcgggttacccgtataaggtcacgggtataaaatcttactcatacccatactcgcgcgaataattttacccgtacccgctagaaaagtctaaaatactaatgtgccaatcactcaaaatgtcaaacaaacacataaaatgatgaagggggttgtggagctctggtgcatcactccatccaccccattagcgacaacctagtactccgcctcagcaacggagggcacctgtcccagttatcatagacaaccagcttaggtgtgcaggagcgccaaagatgaacctcatattcgatagtaccctagaggtaccgaaggatccacttgaccgcactcaggtgtggctcccggggatcatgcatgtaaagacagagctagcggacaacatacgcgatgttgagccgggtgaaggtgagacactgaagattgc

SEQ ID NO: 119495 - DNA, 366 bp, Zea Mays
ctgagccaccggaggaggctggcgcggagctccaaactgagtcagcacaggggtagacggtgcaggagtaggcgcgacctgatactgagggaaaccctacatcggcacgaactgagaagtcccaggcacataaagctgctgtggaggaagaggaactgaaaactgctgctcagcacttgacatcatgttgatagtgccctgagaagaggaggaagtcaccggctcccatctgagcttcccattgggattcctcctacacaccacatccttgtggtcctgactgcagatcgaacacctgccactccacttgcactctgcacggcgatgcgcatctccacagcggaaacacaccagccccagcccggg

SEQ ID NO: 119496 - DNA, 366 bp, Zea Mays
agagcataagatcaaacctttggtagctttatccatgagcagcaagggtttattcattcctcctgacattttgatagctttgccaagacacctgatcaggaacggttgaaatatataggcgtactaggcactagctacacctcatccgaaaccacatggaatccatccgttgaacccatcaacacatactaacatacttatggttcccatatatatcaacacatactaagaccaaaacttgatagctttagctaggtccccgtgggagaatttaggcgtatgtaacagacattttatacaaaataaaagtaaataagattagacaaacctagagacacgtgaataggcatgtttaagattaaaatt

SEQ ID NO: 119497 - DNA, 336 bp, Zea Mays
taaagtttcgagctaggtgtctcatgcattccctgtgttccactccaggaaacgccttatcaaccgcatcttccaaacctttacaagcatcagtgtgtatggtaaatccatttggaaacccaataacttggcgcaaattattcaaaaaccatgtctagctctctgcattttctgactctatcacaccataagcaaccagaaacaaccaattgtgtccatcaattgcacaagcagctactaactgtcctttaaatctcccagtaagaacagttgcatccaccgccaaataaggcctacaaccttctaggaagcccttccaacaagctttaaatgaga

SEQ ID NO: 119498 - DNA, 562 bp, Zea Mays
ttgttttaggtgttctagatatcattgcaaagctaaggatataagctttccaacctaattagtcccacgtcaaaatacgcttggagtcgacaagaatcatcgtaacaagtggatgtctacaatctgccagaaatcaatgacgcctatttttgggcttgaaggccatgtacaccctagggtcctcatctatgctggtggaaggtgactagaacaaatagaggtttcagaggatttgcacctggcaatcaagttcctagtgtgcaaattcttcacaaaaatgtcaaacgggtcaaattctatttaacaattattattggtggtaaaacaacgaatataaatcagattcttaataatgttaggagacactaaaacatcgttgagaacaagactatgacgcaggacggaaaaatatgtgatctagtggcagtgataggaagtagtgctccatttcccataatgatatatgaaggagtagatgaagagggtggggagatggtggagagtttaccagtgtctacggtcatgtgtgaatcgccacctgaatcagcgtaccactcagaca

SEQ ID NO: 119499 - DNA, 383 bp, Zea Mays
ttggtaagcgtaaatctactatctgggttgattttgatgaggtatttgagaaagtgaggtccaatgttcgaattgctgcttatttgtagaatgtgtaagactcgtttatctgctagatcttctgctggtactgggcatttgcttagacaccagaaagcttgtaggaagaaggttgatcacgctgctagggtccagtctcggcttgctttcaatcctgatggttctctacacaattgggaatatgatcctatttttgctcgaactgagttatgtcgtctgattgctaggcttgaccttccattaggtataggtgagacataggcctgagaggattatattgcacgtgctcataaccccaggtttaccaaagtttctagatagac

SEQ ID NO: 119500 - DNA, 576 bp, Zea Mays
ccagccaaagtggcctgatctatctgaagtacatatttcgatttagggatcggtttgacgaaccgaatgatgattggttggatgctatagaggcaacaagtgatgaactgcttgaagcctactcgggggccaaagacgaagctatgacagtggccttcgacgctcgagggaaaaagagactgaatagggtttttgatgttatcgggtttatctaccctgactactgttatcctgctcggaaacagagggggaaaaggaaaactgatgcttcgatgtcttctagtgcgccgaaggcgaagaaggtgaaggtcttgacccatagaccgcgacgtattgagacggccaacgtgccggaacttatcgaacatgcaggggttgctcctgccacaaaactaggtcatgttgtgctagttgaggctagtatagatccggtcgaagagccgaaattaaagaagacaacagaacaattgaaggtgttgagtccatcatgtgcaataggactaccaaagccatcaagcattctcgaagtgactccaaggaaaaggagaatggctagcgtgctagatgttgttctag

SEQ ID NO: 119501 - DNA, 327 bp, Zea Mays
cgacgactcaatgctgaatggatgggctctcacctaaaaacaaaaacaaggagttccatcaaggattgacccctgaaaatatgcacagactatgtgaaaacccaagcaatcctcatgtattactcgggggctacatctagcatatgcgcttgcgtgcaccgaggaattcaacttcctcccagtataaatgtttccacccattcaatccatttgggcgagaaacccttcaatctaagggtttggaataggaagtgacattttactttatcgtaagccttctcgaaatcaatcttgaaaatcacttcgtcttgattttttctatgtatc

SEQ ID NO: 119502 - DNA, 403 bp, Zea Mays
caactgtcaattcctttctactctcggtgtctcgtttacacttattctaacacgttatcagtattttgcctaccgccgaagtctaatcggccattgcgttgaagaagggcgagcgcccacttactgcagatgtcccccgatgaagaatcaatacaagatgatccattggatagggtaacaatattctgattctaccttccatggatcttgattcattttgcatacttcctggacttctccatgcaaccgctgcatgaccgccgtggtgattgccgcatgatgtgacatgctctcacgttggacatgcataccacgagtggatctttgggtgattggcgacatcgcagggagcatcatagcgactaaccgcaccaagatctggatcccacgccgaggccgcctg

SEQ ID NO: 119503 - DNA, 1126 bp, Zea Mays
gttcgaattggttgagcgaacagcggatcaatgtctttgtttggtttgtctatagtggcttttggatttgggagtatcatgagtgtataaggcagataggaagagccacagggggacacaaagcgttcgcagttcgctgtagttggtaagcctggaacgtcagggaatcggttgttcttttgtcccaaaagaaaacaccaacctatctctttcaatatcgactcaaaagtagagttctcggcaaaagtgaaacgattggtatataaaggacgagaaaaactttaaatcttcttggtcgtttcggacatgttgttcagtgtgtcactgttaggtggactcacgttgattatgtggtctcaaggagtgcatgattgctaggatagtcacctgtttcaatgaaatgcatagaaactagagatgaaactgacgaaagtttgtggttgcttcagttgctgaatataaacatgtaaaaaagtcaacaaaaatattcttcaaatatttggtgctcatgtgtactcaggacaggctaaaacagatgagtctgatttggttgactcttcttaaaatagatgcatggtgcatgcgtggcctttttccttcagcagacatgacacatgcatctgaagcattggtcgaacataaataactatttatgatctgcaggcttatttatgaaccatgttattttgtgcgttgatgcccaatctggcatgtgcaaccactggtcttgcaggttgaaataatttgaaattgaataataaaacgacatacaaatatgttgttcagctggaattaaaaagttactcatcagcaagtttaattttggcacacgaatgactttgattagaatagaactacatcatagataaactttgagcctttacctttttgccttggtatggtaatggataaggtcacaacagacatacaaagggatatccttgatgtatgctttttatgcacgatgtagtactagctgataaaagttggacaatagtaaataggaaactagagttttggcgagagactctggagtccaaaagttttagactcagtagaactaagaccaaatatatgcgttctgatttccacactacacatgaggaaggagatgttaatttggaag

SEQ ID NO: 119504 - DNA, 334 bp, Zea Mays
ctgagatcatgatacatcttgttactgccggggtgcatggagaatttggaaaggtgagcttcatccaatattttctttctaagctcgggatttttttaggaacaaccaatcgatctccaaaccatagaattcttttgctgtcctgatggaaacatttgtatttgtccaccttctgtccgatcatttccttaatgacttgaacacccttgtcaccaatttgagtcatgactatctgctcctgcaaggtgggctctactgagatgtaattcaaagcccctgaggaaacaacttccacgttcagcttgcacaattcgtcacacagagtggcaatctt

SEQ ID NO: 119505 - DNA, 284 bp, Zea Mays
gccgtgtgggtggcctccaggtaggcgtagtgtgtcatcgaacaattggcgtttctgaatgtcttctgtgttcttctcctcgctgtggactgtggttgcatcatcgccgccgtagtgccggtctctgcgagactgcgtggaatggaatccgtcgccgtctggccaggcgatcaactgaatcgatctgttccctgacggcagagagaatttcggagtgcgccccatttgtgctcggccagtcagacgacgtgtgtactgggttcagaatcagatgatgcattttt

SEQ ID NO: 119506 - DNA, 522 bp, Zea Mays
agctaagaattcctgaacaagatcccttgttccaatatgtgtgcagacaatattaaaagcaaccatggcagcctgggcttcgaagttgttgtagcatgttggctttttatgaccaaaacttgtaacagtaggagtttgaaaaaatgcctcttatatcagcccgcgcagtcaagtcatgcttcatataaaaccactccttcgctcattcattcggccccttgcttcggtaagcaagagtcggaaacatcgagtcccttcgataagcaaagttatagcaaccaaaattgttatgaaggcccctagtcgccttcgtctaaaaatgcagttcatgaatctgactgaaggtttcgcagaaagcttcagcatcaagttcaatcccttgactctgaacagcccaaatgaaaatttctagacacactaactcatcaaaattgttatgaaggcccctagtcaccttcgtctaaaaatgcagttcatgaatctgactgaaggcttcgcagaaagcttcagcatcaagttcaa

SEQ ID NO: 119507 - DNA, 271 bp, Zea Mays
agctaaagtgcaaattgaggaggaatcctcaagtgatgatgatcttgatgctaacattgctttgatggtgagaaagaccaccaaaatgttaaagaagctcaatagagaaggcatcaagttttactcaagaaagaagaagttcttctgcagtaaaagaaagcccatctctgaaatggactgctacaattgtggagagcttggtcatcttgctcatcaatgcaacaagcccaagaagaacaagttcaagggcaagaaagatgattaccgtgat

SEQ ID NO: 119508 - DNA, 399 bp, Zea Mays
gaggctgccgaggccatcttccacaaggacaagggcaacgggaagcgaaaggaggatgcccccaaggcgtcctcccaacgcaaccccaagaaaaacaagaagaagaaagcgccatagggccaacacgaggccctcactaggccttaccacaagggccccgtcaagcacacccaagggggtcccaacgtttttgacaagatgctgaaggattcctacccttaccataagggccccgtcaagcacacccatggggagtgtgacatgctccggtgcttctaccacaagcccggcctcttgatagaagttggcaggaagaagggttctggcgacaaggaagacgaccagggcaaagagttccctgacgtccacaactgttacatgattttcagtggaccgacc

SEQ ID NO: 119509 - DNA, 508 bp, Zea Mays
acataaatatcgcaaaggtcaaaggcgataacacacaagggtatgagagaacagatgaaggcatagaatagtcaatggcataattacaacaaagaatggggttgtgtcaaggcttacgcatggtaaagaaggggatattgctaagggtaaaataagtaaaacatcactctcaaatggggatagtagattgaaggtcttagagaacggacatagtgtaatcaccaaggtaatatcgagagataagaaaggtaaaggtaatacccaaccggagcacaacaaaggatggagttaaaaactcgcaagcgaccaagaaggggatacgaccaagggaaaagtaggtaaaataccactataaaattgagatgaaagagagaaggttttaaaggacaggtataacataagcatcaaggtaagatatagaggcgacaagggtaaagatgataattgtgaaagcgtaaccaaggatagagttaaggcaagactcctgaagtggcgaagtggagaaaat

SEQ ID NO: 119510 - DNA, 271 bp, Zea Mays
ggaaggctcctatggctaatattagtcaaaagaatcatgcatttatttatgataggaaattttctagaaatgttcatcatgataggagttgtaatgcttatgattcaaatgtcatgattgcttgaagttcttcctttgtgcatggtagagatatgactaggaaaaatgtcattcatcatatgactaagagaaatgttgttcatgtacctaggaaagcaagtaatgaaccttctacaatttaccatgcttgcaatacttcttttgcaatttg

SEQ ID NO: 119511 - DNA, 631 bp, Zea Mays
gtgctatgcttagtaaccagagaaacccaatagacgactatacctttagggaatctttgtaacaacttcatagtgagaccctgctatttcacctttggagtgatcaaaaggggagtcatgatcctcagggagaaagagaatcatgactcgtaggcaaagtgtaagccatgctcatggttaagaacataatgattttcctctttgattagagtttatgtggtttgtttattataatgaacactcagaagttatgctctaaggttaataagtatggagtgatgctaagctaatttagtgttaatagatacatgactgtctaaaagcaatcgctagcgatctaactcttcataaagctagtccaccttagccaaacaggacacttgtggagtacgctatatactcttgctttcacacaaacaacggtagccctcaatgcaaccactgcttaggcgaagttgttgatacaaatctttaggagttctaaggcttcgatgagtataaatactaggccagcgatctcccctattcagatgcttatggagggtcgtgctaccttttgtttccatagtttatgttttaacattataacataatattgtagaataatgttatatttatgtctttgtttgca

SEQ ID NO: 119512 - DNA, 494 bp, Zea Mays
aagaaactagattcaagaaaaagcaaccaataaacttggtagaaatacaccatcagaactaggatttactcttgagagtctcgagccaattatactaaaaaaatagcttgagccttaggggcttatggggcatatatctctcaggtcatcacacctcggttatgttccgtgggccacctgcaaggcacccagtgggtcgcccgaaatgcgcctagtgggcctctgtcggatgcaaccagaggcgattgaagacgacgaatgtgtgggcacggaggcttccaggatcatgtcccacgcttgcaaagtatgtacagacctctcgaagactaactaaccaccgataattatggcataactctagtagaaacgggtagatagagatcatgatccaagttgtgcgggatgatcctttcttagtcagatataaggctaaaagggaacccctacgaaaacaaggccgacctccatacggtagtcatcttccacctccagaa

SEQ ID NO: 119513 - DNA, 566 bp, Zea Mays
ggccgcgtacgagtgggcctgcaccgagtacgtcaaggccggcaggaagttcgaggactccatagacgtgaagcccgacttctacgagggcctcatcgcgctcgggcagcagcagttcgagcaggccaagctctcgtggcgctacgccgacacgtgcaaggtggacatgggaaccgaggtgctggagctcttcaaccacgctgaagacaacatggagaaggggatggagatgtgggaagggatcgagtatctgcgagtcaaagggctgtccaagtcgaggaaggggaaggcggccgcggtggtggacaagctggtggccctcagtgagcagggaaaagatctgtcgccggatgaagcctttgagcaggcatccaacatgcgctcgcagctcaacatctcgtggggcaccattctctacgaacgctccgttgtggaattcaagctggggctttctagctgggaggaaagccttcaggaggccattgagaagtttaagaccggaggcgcttccgtagcggacatcagcgtcatggtgaagaaccactgtgtcaacggaaacaatcaag

SEQ ID NO: 119514 - DNA, 1074 bp, Zea Mays
gttgcatcagaataagcataaagctgaagcggactgctttgagcataaaaaagacacctagtggatgttcctcgtaagtagcgtaggacacgaagcaaatgtccataatgcaccaaagttggagtactcacaaactgactcaagatatgtactgcatgagctatgtcaggtctcgtcacagtaagatagaccagacttcccacaatacgacgataccgagaaggatcggcaagaggtgtgccctcagatgagcggagctgtaagtgaagatccataggggtggcagctgtccgagtatcagtaataccagatcgtgcaagaagatcttgaatatatttgtgttgtgaaaggtagtaacctttggtggagtgcactacttcaatgccaagaaaatagcttaggggacctaaatcagtcatcatgaacaattttccaagttgctttttcacagaggaaatgtgttcctcattgtcaccagtaatcaacatatcatcgacatagagtagaagtaaagtacgtccttgtgtggattgatgaacaaaaagagcaggatcatgattactaggtgagaaaccagcagccataatagcagaagcaaaacactcaaaccaagcacggggagcttgtttgagaccatataaggcacgccgaaggcgacaaacagaaccagagggaacctcaacacctggaggtggcttcatataaacttcttcatttaaattaccatggagaaaagcattcttaacatccatctggtgaattttccaagaacgagtagcggctacggcaatcatagtacgaactgtagtcatgtgggcaacaggagcaaaagtctcatcataatctcgaccctgactttgctgaaaacctctagcaacaagacgagccttgtatcgctcaacagaaccatctgatttggtcttgactttgaagacccatttgcatgttatcggtacagcatgtgacggtaaaggaacaatatcccaagtaccggtgcggtcaagtgtagcaagctcctcaatcatagcaagttgccactcgtgaataccagcagcttcctgataagtagtaggt

SEQ ID NO: 119515 - DNA, 375 bp, Zea Mays
gaggctaccaaccaagtccccgtcgagcaagttagccaggtgaggctgccgaccaagccaccacccggcaaaccgatgaggcggagtgaccaaccatgtccccgccgagcaaagcttgcgaggcggagctaccaaccaagtatttgtgcccatgaggtggagacctaaacccgtccatcacgacaagacatgtcatcaccatgccacactcgaacgtgcgcacactgcacaagacgagtcccgggggagacatcaacataggagtctcaacagtagttcgcatatcagaaaagataggacaatacaccataccaatcgtatgtatcaggtgcgatgggaggagacgcaaggcgtgcagcgggcgaagccatgccg

SEQ ID NO: 119516 - DNA, 590 bp, Zea Mays
tatacttatgactatgtgactaatacgtgctcacctattctgtcatttcagtgaccttgcctgcccatgagccgtctcctgtcctgcctggattttcacctcccgtgtgagctttccaggtagacatccactcttttgatattctattggctgttatcgacttgtgcttagcttctctctctcatttgcagtcgtcaggtcaggatgccgcacatgaagaatgtgtcggcgccagggggaggagatgacgaggaccctcctcgcccctttaggcaggtcaaggggaagactgtgcatttggagctgcagaaaggccgcaagaagcagcgtctggacagagcagctcgagcagcgatggcagcagcagcagccgctgagtaggcagagagagaagatcagctgcggatttcttcagatcagattgcataccgagttcgttgtcacgcctctcgtcctcgctcctccactcctaccactccctccactgctaccactccaccacccacttcgcctactccagtcactcctgcgccatccaccacctcaaccattcctaccacctccactactccagcttccactgctccttc

SEQ ID NO: 119517 - DNA, 544 bp, Zea Mays
ttgtagaagtaaatgcagtgtgatggttttgaaatttcatcttggggcacagaagttgccctaagatgggtgattgcgaatgtgccaagcgtgtcgtgccaatttaaatcagtgtcaaattaaactgactgctccgctagtagggcatagtggtcaccccgagtttagtaagcgtgagcatgtcgcatcgtcttaagctattgccgacttaagccgattgctccgttagtagggcatagtggtcaccccgagttagataagcgtgagcatgtcgcaccgccttaagtcactgccgacttaagccgattgctccattagtagggcatagtggtcaccctgagttagataagcgtgagcatgtcgcaccgccttaaatcattgccgacttaagccgattgctccgttagtagggcatagtggtcaccccgagttagataagcgtgagcatgtcgcatcgccttaagtcattgctgacttaagccgattgctccattagtagggcatagtggtcaccctgagttagataagcgtgagcatgtcgcac

SEQ ID NO: 119518 - DNA, 488 bp, Zea Mays
gggaaatgcttaaggtttctaagtaggccacgagctatggtggcggatgggaccactcatatgtactcccgatgacggtccctagccagaccagtcgttgtagatgggctgggccgtgcttgcaccatgggctgcttttaatggctcgagcatggctgttgtcacgcaaggccatgctgggctccaggcagacaagacgggattatggacatgtatacctgggatgtgaagcgcttcaagcatggacatgtacaggagccgtgcctttggttagagccggcgatgtgtggactgttgccttggtagccagtggtagagtgtgcagtgctaccgttgtagctgcctggtccgccttgctaggagggacccgtgggggcacaagtgtagtgctcaggtcattatcgtcatcattcatctctaaggctatctccagcagattacccatccttatacagttatatctatattcaaactccactctacgaaca

SEQ ID NO: 119519 - DNA, 1145 bp, Zea Mays
gacgggacaggtgaaagactttgggatgtccttcagctagggtaggatgccgactctttcgtcgtagacctcctcggacctctgggagagtttggtcgccacgaggttgccgatagcgaggttgccgatagcgaggtggctagtctccatgctcacctagaggaggcggaccgtcgcgtcgtggggtaggtggtgtcagggcgaactccatttctgtatgtctcactcccctctgtgtgattgtcctgtgccatttttcagagttagagctggaggtcgccgaccttcgtgagggtgtggacgaggtgttgcctttgttcgtgtctagggcaccgatcgtggatagtgcctcctcaacgttgccaatcgggtccaattggctgtccgtcgtggtgctcatcatggtgctattggagcccttgttttcgtgcagtcctggtcgggctatgagctcaacactggtgacctaccgtaggatgccagggctggtgcccaagaggatttcgaagaagacttcaacattgccgtcgaggccatggtcgacatcctctagctaacggatgtagtcaacggacccccctagttaggaagtgttcataggtggttttagccatgggacggcacgagcgtgtcggcctatatgcttttctaatgttccctatggacttggtgaaaatggttcccttcccttttgtccccgattttcttagtacttagtataggaaacgaattttggcatacttatttcgggggctctcttactctccgatcatgcaccaagcggctttggcatggctcatcagtcccgggaagcggtttcacaagattctggtctacctcggtgctatggcagccatccctaatttctggtgtcccgcacgcctccgaggtaataggaagtgttgcattgggggtagcagggtcggccgcggtgttgctcgggtttctcgctggtgattatgagttgtcttgggaggatgcattgtcccttcccacgcattccatccaccggaaggggaagagtgagctgtctcttgctccttttttacgacggaggttatgacgagcctccctttttgtggggcgagcccctgggtcccctgatcgttacggaggatcctctagggggcgtgtcccgtttcttc

SEQ ID NO: 119520 - DNA, 622 bp, Zea Mays
aaaatatataggcaaacaaaattgtttacgaaagttgcgtataatgtgactttaggggctcgaacaacccaccacaatctacgcgagtataagctctagcgtatctggcgtcaatgcgtgtgcggccatcagggcaacgataacacatcaaaccttcgtaaccagcgcaacagacgcagttgtggcttggtagttgggtacacgataagtacgcgcaacaggcacaacaggcgcaacaagcgcagctgtgactcaatagctgcgacacacatgcaatgccttcagggcgcacgaaaaatgtgtgactcggcgatggcggtccgactcaacgggagcgatccgattaagcgagagagcgacatagcaatcacatgacgcagccaagttcaaacgacacaaatattgcgtcgtgttgccagggcgcagtcaatattcagctaatgtcataactcagccgattaccaacgcagcctgatcggcgtgtctgagtacccactatacaatttaatcgttcaccgtgagtctgaaagctcaacgcaacacaaatatttagaacgatataaaaatacacaacataaccttcaaatgcattttaatatttttctgctaattatctactacg

SEQ ID NO: 119521 - DNA, 532 bp, Zea Mays
aggaaataaaaaatgaacaacatcgactattagaagggtcccattctacctaccgtgtcgcaccaggacgaccctaccgaggcagcagcgacggtgcagctgcctacgccggtggatatctcccgtgtctgtcgtttttaggtaaatagatcattttcatgcttcccttcgatttttccatgttcattactcactgtacctttctcttgtatttggtttgaaacatttgtaatgtgctctcggatctacaccgaaaatcacatgcttttttgttccctttttctctccatctacaccgaaaggcacaaattatttttggtctcttttttatgtcacattagaaaccctaaatgtgttttcccctggaaaaaatcttgcaaaaactaaaatcgcgtagtgtggagcttcctttgtattttactggtcgccgcgcatccactcacgcgttcgtgcgcttcaaatgctacctaaaagccatgcttcttcgttcttttacctgctttacaaacgagtttacggtgttgtatttccc

SEQ ID NO: 119522 - DNA, 534 bp, Zea Mays
atttttcagaccaaatgtcatgacaacccactcaaataaaccaatgaagcctggacatataaaggtcgttttagatgcatcttcttcggccatgaaaatctgattaatccggcattaccatcaagaaagctaataattctatttcctgacgcattattgatcaacgtgtcagctatgggcatgggatattcatctttaggagttgctctattcaaattgcgaaaatcaatgcatactctaagcttacctgattctttcttctccaccggcacaatattggagacccactctgcgtatctgcaaggtctaataaaattagcttctagcagccggtgaatttcgtcttttattcatgggagtaggtctggacaaaatgttctagctttctgcttgaaaggtctgaaaccggacttaataggcagccaatgctctactatctctcggcttaatcctggcatctcagtgtaattccaagcaaagcaataagaatattctttcaatagaccgatcatttcatctctaggatcggtctcc

SEQ ID NO: 119523 - DNA, 401 bp, Zea Mays
ggattcttatgttgctggcttgctgcccatgatcctgctgacactattatttgggtggaattcaccacacagttcagaaactgccacattcctattgggatgatgaagattaacaagaagaatttctatcattgaagcaaggtaacatttctgtcagcgagtaccgtgacaaattcatttaactatcaagatatgctcctgatgaggtggctaatgatgagagaaagcaagagcacttcacagaaggactcaatgggccactacaatatgcattggttgcaagtaccttcccatcatttcagaggctgcttgataaagctctagccattgaacacaagtatgttcaactgggagacttgaagaggaaggccattgcccaggggcagggtagcagcagtatt

SEQ ID NO: 119524 - DNA, 837 bp, Zea Mays
ctgagtttagggaccggatagaagatgactccggcaaattgaccctacacgtcaatcgctgagaatgaaagtccacatacgtacggcgtagcaaaattttaaagttattcgaatttttttgtattaattattttccctactatttaaatgaaatatatttaaaaataactaaatgaaagaaactaaacgacgacgaggataacttcgatgacgagccacgcgtaggttgaccgaagcgactacgacatataactcttcatagtagtcttccctcctatttgaccttattctgagcagcaaattcagcaagaatgggtatttttatagccggtacccggcaagtgtgtaatgaaaagtgtagtgtaaggcttactgaggataaaattgagctataacttttcgcactttttattttgttgatcaaagacacaacttgccttctaaagcaaactcctattgcttagagtctttacagggttggtctttagatccctctgtcgaggattctcgatagtggatttatgggggtaggtcgcgagaccgagaattgaaggtaaaacacaccggtttcgggctcccgtcgtgagataataccctacgcccccaatgtttttggcggctaatgatctgttatgtgtttggtttgcggatctacgctcttagggttccccgactctccttatatagttcaagaagagggggcgtggttacaaaggcgaatgcgagtacgtacatgatagatctaatccggtaacctagttatatgaaaatctaactctttccataattataaatgtgtcttacttatctattagaatcgtgttctatttgcctaga

SEQ ID NO: 119525 - DNA, 968 bp, Zea Mays
accacatcaaagttgaaggccaaacataggagaacaactttgcttaaaggtgtgggcattgttgttaaggaaaaactgaagaaaatctcaacctaagttggactgtcaggctgatgcaatctgaaattcagatattcagtgtagcagagtccactttgagtatgaattcaaccttgatttagtacccaaatgtgttcaagtcctatagtcgagttgtagctggtatgtagcactacaactttgatgcagagccttggatgagttgctaaggaaaatagagagaaaatgtgacttgaacttgctctgtcagttgctctttgaagcgctcaccatggtacagtgtcacgactgaaacagatcagactgccagcgcccaaaagatctcgccgccggtggccgtcgccgttgattgccgttcgtcgtgattcgtgcgccgtggacaccagataagcatcacccagtaagaatcttcaccgccgtgagctgggctccactccggtgacccctcccgtgcctccccctctgctttgcggtggagtgataggctcgccggtgaactgccgcttcccggcctcacgccgcgtggctctgctttccaccgcaacaccgtgactcgctacggccatctaatcgtcgccggtgagcttgccacggcagtagccacgtattcaccgcgccaggcttcttcctcccctccggccgccagctctgtccggccaaattaagcgccgccatcgaagccccctataaattgagcccccgggcagctgcgctaagtcatcccgaagctatagcacccgctcccaccctcgatcatccaccagcacgcgcgaatttctcattctccccaattacagtccccgccaccgtgaaaacaaccgtactgcggccagcacaatcccggtcagttcatcttctatgccttctcgtttgagtgcttccacaaccccgtgatgctcaccgaccca

SEQ ID NO: 119526 - DNA, 609 bp, Zea Mays
cttggtcttcttttggattttcttcatgggggcgagcttctttagcttcttatcgtaatccatcttcagggttcggtaggcttcacgagtgttggcctcctcgccttctgctatatcgagacactcttggagggacaccttctcctttttaagttccttgacctgctgctctaagctttccacccgggagtttaggtgggtgcagtgggaggaaaggtcgtcatagtggttatcgagagtgtggaggtatccggccatgtagacgatggtggggtcatcctcggtaggatctctccctgacagggcctgaagtcttttcctccaggtgggggtatttttgttgctaggtgggaagtaacgaaggggggtttcaaagacctctctgttgtagttttggcatagctgtttaagggcttttcgggcaacgttttggcaagtgtctgggaagcggtgcccgatgaaggtgacttggaagggagggtggtttgggtgacttcggctttctcccatgtagattgccatagagcacttctcaactccgttttctcggtattctttccagacatattccggcttcttgcggatccccatgcgtagcgcgcaacttcg

SEQ ID NO: 119527 - DNA, 448 bp, Zea Mays
agaacttgtaaaccctaaaaatacattttgagaaagtttgaagaaactttgctctctttgaggaattataatgggactgactctaaatgtacgatttatccttccaaatgattaaacaaataaaaataatattagggttaatgactcagatttaaattggacttataacatttagattataatctcaaatctcagaaaaataaataatagggagtttcctattttaatttaacaaatgtttctttcaccaatattacctctagaagcatttatttgaaggaaaaatactaataccgagaatagtagcgtttatattcataattggatcatatttgatatttaggaatttgaaaagtttaaaccagaaatttaagcttagtttgaatcttgaatttggaaataaactagaattaagaaaagaaaaaaaagaagaaatactcacatgggc

SEQ ID NO: 119528 - DNA, 565 bp, Zea Mays
gcgaggtggaggaataggtggagtggaagcgtgagcgggagcagtggaagcaggagtggtggaggtggtggtagcagtgggagtggtggacggctcgagagcgacaggagctggtgaagtgggaggtagagtggagactaggtcagaaggagtggaacgagcagtggaggagtgactccaagacgcgagacgacggacttggaaggcaatctgattagaagatatccgcagctgacctccccgctctgcctgatctgctgctgctgctgcaatcgctgcacgagtggctctgtcgagacgtctcttctttttgcccccttggtgctcaaggtagacagtcttcaccctgacctgtctgaaggagcgaggagggtcctggtcatctcctccccctgccggtgtgacattcttcgtccccaccatcttgaactgactactacaagataatgaggaaagataagcgagagtagtagagcagtaggtaaggcctgaatagagtgcgatatctacctgggaacttctcgagagagaggaactaggtaggacaggagacgcgcaggcgagc

SEQ ID NO: 119529 - DNA, 821 bp, Zea Mays
caggtacaagatcaatgacatacttctggtaagttggacctactgtttgataaatgtcaatcaacagagattattggtcacttacactaatcattctatagtacagaatgatatactacatactgaaggtatgtggtggtcatgattttatatcactgaccttattatctatgaagataatatactttgtgttgtttagatgaaaaacaagttacgaactaagtctctaccttacttcacattttaaatgtgtttgagagcaggtatgagatgacttagtaatttgcaaagatcagggggagtttcctcttgatcgggaaaacttgtttttacatcatgttgtactcttttctttgcatgagttttcccctgtttgggtttctcattcaaagtttttaacgaggcaacatcaacacaaggcctatgtcgtatcatctatttttcccatagaggtttttcgaggatgatacattatgacatagctattgttgtatttgaactaggttatgagtttatctcataaaagtttaaatgatcaacaatagatcgtgattactctccttatttctcccactgggtttttaaggagactcggctcatatgttgatttcccagattttctgacacgattatcttggaaaaatattagcctgagttatatgtctcatcatttattttccccactggggtttttgagatgatggctatagacatattattgttctttgggctagaggtccattggagaacaacgtaccatgattcgattgaatcaccgacaattatctataaggataattgagcttgtgttgttcagatgg

SEQ ID NO: 119530 - DNA, 743 bp, Zea Mays
atgaagactaattaagagtaggcacaaggagggagggcaccattccacaacgatatgtagtttgtgcatggatagtggtgcatggtgcagaatcgaatgatattctcatcatgaaatggcctgcactccacccttccttgatccatccacaagtgttcctgatgcctcataggccaaatactactcacaaggcacttagtttgtcgtgtggccatatttgttgtgaaagagtaagcatggtaaccacggggggattcatgtctcacttgattccatgtcattcctcaagagttctatatatggttccacacatacacacttgataatgtatttattttaaaataaatctacataaccttatgatctttagtgggtggtctacttcacccctcacattcaaaatcagttgtttaaccctctcaactttacaaaaccagacaaatatctacgtaggcagttttagttggcggttataatgaccacaacaggaatcctagattccctcggctaaaacaatccttacattatcatcactccaatcagccacactatgcatcaacaattttgaatcaatttaaatactctatgcactaataactagaaatcataacagagcaaaaaataatcaatttcatcaccttgaatcctgggtgaggtcgatgtcgactgcggctgtgggtgcctttgatgctgctctaccacgtttacgccaagcagtagtaacctgatctggcacctcttca

SEQ ID NO: 119531 - DNA, 809 bp, Zea Mays
tatctccaaccctcctgcttgtgatggtagcctgggtcatagagtgtgaccctcttctgaggacattgaggcattgattgctccactttggagtcttcccgaggctgagaggctaacccactttgagatgccagctagcactgatgatgccgagatggatgttgtgcttagcctgctggctggggagtcgtccgactctacccacaccgagctgatggctatcacgatgggcaagaatttgatgaagaagtggagattcggaaacccaaaggtgcccacccaaagcgttgatgtcgagtgaaccgcccgactgcacctatcgaggagaaaaagaagaggcgacttcagcgactgtcgtgcttggatcaggatgctggtctttctgtgccgatccttgacgatgtcccagtggacgccattcccaagtttgatgccaaaagcagtgataatgcataggctactggtggcattttttatgaggatgaagaggaggaagaagaagaaatcccattgatccgcaagaacagccgtttctacagaggcagcgaggggggtagcgatattccctctccagctctgtcggcacttgtcagtcttcaggggcttttaatatcagattttgatcaagcactggaagaagtcattcctaaagacatactatcggagcctcctaaagatgatgtcccagccatctgttcagaggtcccagatggtgggcttccattgcttggttctatcgggcaagaggtaaccctagtggtgtctcgcgcatcgtcatccttggagggcagtctcccatgcaaagacac

SEQ ID NO: 119532 - DNA, 326 bp, Zea Mays
gggtttctcctatttaccctttatgcataaatggttcacttagggttaactagggtttaagagttttccctttttttgaattcatgaaaagtttaagtagacttcaacttaattctttgttctcattttcaatgttcacccttttattgagattgcatgtgatcaagggttggggctagcttaaggaagaaccctaagtgacactggggtgtcacacttctagcgtctctatgccgggatgaatacaacaaagtggacaacgccaaacaaatatgggacaccctcaagatctctcatgagggtaatgatgccacgatgatcaccaa

SEQ ID NO: 119533 - DNA, 336 bp, Zea Mays
tcacagccatatttttccaaaatcgctgcaacccctctagcaccagcaaaagcgcaaaaatcaccacggtcactgaggatctcttcaaaagcttcagcttcttcaccgatccattcaataatcccttcgggatcgcctctaataaatttttgctcagatgagtaagcacccacctttgcaaaactatctttcagcttcttggcacaatccaaggatttttcgtaatatctttcttttgattcccgaagctcatctacgttcttttgcaatcttgcgctagtccactcgcttatttcttgctttgccttagccacttcaaaatcttcattcttctcg

SEQ ID NO: 119534 - DNA, 711 bp, Zea Mays
ctctgtcgagctcgcctcagtccccgttgtggagctctcgcaccctcctctcgcactctccaggtttcttcaaaggtaaggagtttgacattcccctctcccccttggacatgaggtctttgcctcaggtccctctggacgctaggtgcacttgttcttggtactaccaggtaactaggtctcgcactctcctggccaaaagatcttcgtttgatttatgcggcactattggtaatgaggtttgatttcgttagatctgagaatgttttgagtaatattggtagtttttggttgtgtagatcatgattttgtggtatttatgcggtattatgccacattttcttagatctaatataacttcatgttgatgttcttatctggttaagcccagcctgcatcaatcagacatttccccataaaagatgttgcttgcttcacgttttattatgcaatgttgtctttgttagatctggtataacttaaaagttcaagatgtgcaagatgtaggtctgaattaagacataattaactttgttctaaattgttcttgtgtattctgttactttgttctaaattgttctttgtaaattgttctcatactttgttcttatattctgttctcatattctgttactttgttctaaactgttctttgtaaactattctcatactttgttctcatattctgttactttgtttcctctattctca

SEQ ID NO: 119535 - DNA, 463 bp, Zea Mays
ctccgcctcacggacttgctcggcagagacctggtcggttgctctgcctcgtggacttgctcgacagggacctggtcgatggctttgcttcgcaggcttcctcggcaggggcctggtcggttgctctgcctcgcagacttgctcgacaagaaggtttacaggccttattttgggtaccatgttcctaggtacctgacattaaccaaacaatcaagaacataaattactgcttgtatgcattagcatatgttcagttactgagataatccctaggattaaaggattttggttgcaaaagctatgccattcattttcagttatttattgattatccacttgaagatttacatacatttgaaataaatttcttacaggtaagtctataatgctagacaacaagaataacattgtgtcatggttttcttaggataagtaagatcaaccaggccaatttctgaacttg

SEQ ID NO: 119536 - DNA, 391 bp, Zea Mays
ttcttgttgtctacggatcgtctggccttcatagcctgctatctgcgcctgtcccggactgtctgccttattacccagatcatccggtgtacgcagggcaggtgactgtgatcgggtgtctgattgtgcttgccctccggcgcctgaagtatttcttttatctggagccttccaagtaaccactctacgtgacatatttggtgtgcgaggatcaccaatgatgatatttttatctttgcttttatcggccgcacatggccgaactaagatttttttgcttgtcggctccaatgtggtgacaaggataggtagcatgtcaatcttcacctcttgaaatctcaactggcctttctttatagccgattgtatttgccaatggaagacaacacaa

SEQ ID NO: 119537 - DNA, 585 bp, Zea Mays
atctcgaccgccactcctccgagtcgctcacgttgtccgagattgaagcaagagtcaaggtcgtcatcgcgttatcattagggttatttatggacgaagacttcctgcacccctttatcggagcataccgagtggcctagtgagccttcctttctattcttctctctttttgtttcgctttgttagtgatgttgagttgtggtacttataggggatcagtcctctaggcccagtattccaccgctcctcgagggggtcgctatttaggcagggcttaagtgcaaaaggagtgaccgagagaccctaggggcgtgcatgagatgccttcatgcgaagaagaagggcaagggcgtcgcacgccttttcgaatcgggtgagggagtcgctcttcctcctggatcggaggaagcgtcttccatggcttccagtggagcgggaattgaggggttggtgagtggtctgtcttgccatggtgatgctgcaagtacctctaacgtcctgactgagacgggataggccgatcgtggatccagccccagtcgtggctccttctgtcaatgttgtggaggtcgccgctgcgatcgg

SEQ ID NO: 119538 - DNA, 324 bp, Zea Mays
ttcttccttccatgtgccctctttgacggttcttttcttgaagacttttgccttctcccttttcaatttccaccactttgttctcgcaatcttggcttgtttatccctaggggcacacacttgaaaacgaaagaccgcctccataagcttacgttgagagacaacacactccctaggtatcaacttacaatccatgcatgctcgtttatcctctctttttatgaggacaaagtcaaactagctagaatgttggccactattataggccactaaatgagagtttctctttctataagtttaatattggatcgccaagcaatcctc

SEQ ID NO: 119539 - DNA, 445 bp, Zea Mays
tatacctccaaggccactaccatccatctgactgcaatgaggccaaaaggcttaaacatagaagcagagacttcgcaatcgtcaacggccaactatacaagaaaggaatcagccagcctatgttgaaatgcataactggaaccaaaaagcttagagcttctccatgaaatccacagcggaacttgcggatcacactcaggaccaagagcccttgcagccaaggtcatttgtcagggattctattggcccgcagtcatatgtacgtccaaccgagtaacccgatcgtgcgaagcatgccaaaaattctcgccccgaacaggcgccccttcggaactctccaagctcatcgcccacacctggccacttcagcggtgggggtggacattatcggaccactacccacagctcaaggaaatctcaaattcgccttcgtcactatcgaata

SEQ ID NO: 119540 - DNA, 555 bp, Zea Mays
tagaggacacctcagtgactcatgcactttactggtgagcaacagactgtaaaaatcaacctgcgatcaagtgtctattagtcttgaagtcgaggctaagatcaaaatgccaggaaggtaatttcgaatttgcataagatgaactaattcaatggtgtagtagtcataaacaaaggcacgctgcaacagggcaaagaaggatctaattcatcgtcggtccatggtaattatgacaaggaattgttgaggcatgggtaaacacagggatctaaacaatctgaggctccatttcactggatctcgaagacagcgaaacatgaacagtatatcattacctattgccgatttggcaactattcgaagaattggaccgagcatgaacagttcagaaattgctaggaggacttgtctgatctggtgacttacacggtgcaacggaagcatcgctgaaatggacaggcaaaatctacgagcagagacacgcagaagcgaccgcatttgagggacgaaccccaagcgttagactaaagactaacacctcggcctagatccagc

SEQ ID NO: 119541 - DNA, 288 bp, Zea Mays
gctcatgttaacaatgagaagttagtgcatagagctcaaaaatgcacttttattagctatggttctggtgtcaaaagatattgtttattgtgtgttgattctaagaaggtgattgtcagtcatgatgttacttttgatgaaagtacattttcttcctctggaggtgtttctgatagtggttcctcatccacatctatgcctgaaactactaacgagaatcttgaggtagatgtacctattaatgttgattctgttactcctattacatagtcagtttcagcttctgta

SEQ ID NO: 119542 - DNA, 568 bp, Zea Mays
ggagaatcgtctgaccctgcccgtactgagtcgatagctgttgcgattgggtagaatcttggtgaggacgaagaagttcagaatcctgaaggtgtttgtcgcaaccgatcgcgccggacaaactacccaactgcgcctgatgaggggaaaaagagaaagaaaagacttcggcgaatatcatgcttagaacaagatgctggtccctcgacatcactcctcggtggtggctcggcgagcaccaccctcgaggacgatatcagaggttgtggtgatgatagagttggcggttgtgtgcttgatgaggacgaagaggaggaagaagaagaaattcccttgattcgtaagaacacccgtagcagcaggagtagtgacattccgacacaggccttatcaggacttgttagcctccagggggttgacaatgtttgcctttgaccatgcattagaagagattatccctaaaaacctgttatcagagcctactgaagttgaaagttccatcgtctgttcagaggttccggatgatatccctttgtcatgcaatcctgtcgggcaagaggtaacccgg

SEQ ID NO: 119543 - DNA, 312 bp, Zea Mays
caattgtctcattccaacattccaacgatcaaatgagctaagtctgcaaggcagtaataacaataacaatccaacgttcaacaattgtctcaattcaaaaaatgttcgtaatatggtcgccaactcataaaataagtccacaaagcacaaatgtctaaattcaacaagtccactgaccattgtctacacttgacactccacaacccacatgcatttagttcaggcacaatagcatactcacactcacatagagagagacataataaaaatcaacggtcaataaacattcaatgatataaacaccatttcgcc

SEQ ID NO: 119544 - DNA, 606 bp, Zea Mays
cttgaaaacaatatgttgcagttcagtagaatatgtatgtccacaattattcaactaatgtgtgttgaacatttaaatgatcctaaacaccattcttcatcttttggaatgtgttctctatcgagacacatgtcctgagaaatacaaaacccattttctatatatagttcaccttcatattttcttctaatgtttattttttgttcttaggaaggacccctttggttggcagttttccctaaaggcactgattttacgtaagatatcttcccattctttcttgccacatgtttgggtttgagttatgctcctctagaagaatatattaaatcattcatcttcatagttacgacttcttgtggggaataacaaacaacttatatttcagagtccaaacttttggtttcttgtagttctgctctgtcgacagaccctaataaagttagccttgttttgatgttgttatgtttacatgattaatgtcatatttagctaccgctggctttgttcttttagaagctataggattgaagaattcagaaccttggggcaatctttttttggtatttctatagtctacccaagctgttcataatcaacatgcag

SEQ ID NO: 119545 - DNA, 413 bp, Zea Mays
ttgtacttacatgtgaatgcagtatttgaggcgtatccatctccctggagctaatattggacataggaggtcggaccctttgttctccttcttcccctatgctcatctcgtcgattacaggacccagtagagcaggaggtggtgtgaccagtgagttaccatcaactcctccctctgtctctggatcaagacgaacgccacctcctaccatcgccggcgactctccagagccgaccatctccacctccaaatagttatgcaggctttttgtggtgttttttccgatgaaaggaaatcacagatactatacaagtaaccgcatccacgtttctagggtatttccattatttccgaaaccgtcccgatattctagcgatgtacatgtaaaactaatttccctaacataatactta

SEQ ID NO: 119546 - DNA, 548 bp, Zea Mays
cctcgcatcgtggtctgcttgtgacccgtctcgatttaaggtaatctcaccctctgttggtccgtcatgatgttgggagcattttgacacctcgccacttgatctgtcgagctccgggcactagatttggtcacgacggggcggcgccgccgcgggctgttcaccatcgtgttgggtatcggctgagggaagaggacggtgccgtggctgcaagatccgaaatgggtggtcaagattagatcgtgaaaatattaagcctcgaccatccgatgctagttgaacgcttgggatcgcgccgtgtataccccctgtgcgcttctaatcccgaccgtagattttggatccaatggctgtgggcctataccggttcgatgctgtcccgatgtgatatgggcccaccatctctaatcgggcggccaggacttatccgtaccccttcgcttggcattcttacttaagagcccctgggtttcaccaaaatgaacctgcagtccaatgcgtgggaaacctgtgtctgggttattttgcgaattaaaccccgaccttct

SEQ ID NO: 119547 - DNA, 494 bp, Zea Mays
tttctgataagtcgtattgtgaaaaaaacatagtgaatagtgaattcgacttagtttgatgatatatatgatataaaatgtaaaacttatctatgtaaacaattccttctaatctcttttattaaatccggagaggattttttataccctctccacactctgtagcccgcttgcctccaccttatcacgacacgtggcatgagtacggatccaaccgagggactgttcagttattctggattgcaggtatgaattgttccagcttatgaaattatataaattattccatttgttctaaaatatagttctttctagcctactttttctatctacattcattcaaatgataatgaatataaacatacatgcaaactacatttatatattacttaataaatatgtaattagtctaaattatattttaagatggatgaagtactaaatttttgaccagaatcattttaggcgttcgtttcggaggaaccgaacgagcc

SEQ ID NO: 119548 - DNA, 430 bp, Zea Mays
tggaaacagctagggtactaaaaaatattaatgagctttgggattccaaagagaaatgctatgaagcatccatgaattgtgtgaagaaacttactagctttgcaaaggtgggtgcatactcatcggagcaaagatttatccgaggcgatcctaaaggagttattcaatagatcggtgaagaggttgaagcctttgaagaaatacttagtgaccgcggagatttttgtgccttcgctggtgccctaggggttgcagcagttctagagaaaactggctatgaacatgttaaggttgcagcccaggcagaaaccagcttctctgcacacgatacgaaagaaccttcaaccgaagctactttgatgggcggtaaattttattacgatgtgtggatgaagggcggacgtgagatggccgacaaagccattaaaaa

SEQ ID NO: 119549 - DNA, 339 bp, Zea Mays
cacagatgaggtggaaggttgtatggaataacaaatacaggccaacaagaatatgatgtcgcatttgtattgaaaggtgtaaacccatctgtcgccaacccaattcgaatatttctcgcttcactagcaaattctggatcaaagtcatctagagccttccacgcatcactgtcagatgggtgtgtcatcacatgagtgtcctctcattcatgttctttgtgccatctcatgtgcctagctatgtttctcgaaagaaacaaacgcttaagacgaggcgcaagagacatgtaacaaagttgcttttgagctatcgttgatgtgaccatttcaccatcatcg

SEQ ID NO: 119550 - DNA, 645 bp, Zea Mays
gtaagcgaatgatttccatccccttgtccaatcgtgctgttgcacccttttttggctgtggtagtggtggtgattgctgctgaggccgatttcgctgcggcattgctgtggtatgcgacgaaatggtaggctagttgttgggagattcgggcagctggggccaatctatggtggagttactgcgaattctcggggaggctaggtgcaatagggttgtaggggagtgtttgtgtctctaactctatgggcgcgaaatgttggtaattagtggcaaatgcctgtgttgcgttgaggatttagtgagagattgtggccccatattgataaagctgtgagtttctgtgtgaagttatggattctgggtggggctaatttgcagttgcattttgtgaaagtgcatccattttattacatttgggatgaacaatttgaaggatgcctgttgcgtggggagaacatgtcaaatttttctggttttttgttaataaatgttgtttcctactgtatgatttgcttaatgcttctgaatttgcagttttacttgtgctgtggttagtgatttgtcgtgcatttgctaggcctactgatcaattatccgaagttttgatgtcacatttttcattttcatactaatttgaataggtg

SEQ ID NO: 119551 - DNA, 694 bp, Zea Mays
ctttgcataatttttcattctgagcctgagcttcggcaagtgatccttcggttaaatgtagcaggtcatctttttctttcaaagaatcttcaagttttctgatcttatcttcaaagcctttgactacaatttcattctttctatcttcatcatcttgttgcattttcaaggctttgcttagcagtaatctctggaaatatgaactaaagttagaatacctaaatcaacacgaagataccaacgataacttataaaggagtcttactttgaagttcgagtaaagtaagctgtcaatgatgtgctgacgtctgtagtagctgatatccttttcaagctttgccaatccaatgctctttgacagagtgcttataatttacccctagcatggtcgcggatgcatcccacaatttcttcatcaaccccaccgaagagcattgatccaagctggtagccgtaggatatggcaaattcctttaactctgatatgtcctcttcgaaaagctattgggcgcctaggtgccgaaggtcaaagttcatacttttagaagcaatttggctgtggcagtagcttcggcatcgacgggtatggtagctttgtctaccgaagctgagggtggggtatgttcaataacttccattatattcatcatatgccactgcttttcccccctcgtttttctcctcggcagccgaa

SEQ ID NO: 119552 - DNA, 491 bp, Zea Mays
cttataagctccatatgaggagatagcctaataggtgtcaaatattagttggattcttgaataaagctagttcacacaaaaatatcaattcaaggcttagtccattaagcagttgtgagttggtgtagtttctcagtctagatggatgttcaactttgtagtctccatcataaaactggtatatcaaatagtatttgaggatatttctagagctgattaagtgttgccttcaatttttgtgggaattgttagaattatatgacatttgtcccatgttcctcctagtgatttatagaataaatcttaaaagcctactgatgcatgagccaatggtaagaagtttagttacacattagaagttgatgtgtaatctcagagtccactcccatatataatagagaatgtgttatttccaaaaggaacgagaagtaaataatatacttccataggtttaggtgagagagagtcctcggtgctgcatgatctctagc

SEQ ID NO: 119553 - DNA, 453 bp, Zea Mays
cttgattctcatccgactaaacctctcagcatagactagagttgtcagtgccttcctgtgcctgacctcgaagatcgatgatgtgacttagttgtgcctaaaccattataactctttcttgtcgattattcaacattgctcatcacccaacattcacaatgtccgtccacatgtgatgttacccccttcaacacctccctaacccactttaatgtttagtgactatggggctctatacctatgaaagatgctgacgcaacacctaacacttaagctgctatcactgccatacacgctacttgtgtatgacaccatgtatatgctaaataggatatgattacagtcacgacacttaggcctagcatcgtgggtatagggctcctccggcatggcgtaccactctcttatcgacgatgacatgttgtttaatcgactcactcgataggctaagat

SEQ ID NO: 119554 - DNA, 324 bp, Zea Mays
cccaatcactggatgttgggtacgtccggttggctaggtattcctgcaccaagtccctggtgctgatctgttcagccactaccctgaattctaccttggccaactggcatgctgaccctagctgcatgttgcataggggtctggtcattccgaagcttaaagtcagcgggcacatgaccatcgtcatcagtttccccctcttcttctcatcggccttgatataaaacaattcacctttccagccggttgaccatttggtgcggtagctaagaactggagccttcatatccttgtgatatgcaaaattgtagcaaccaaaatttt

SEQ ID NO: 119555 - DNA, 810 bp, Zea Mays
tggacctgtagcgtgctggccacggcgagctcacttagtacggtgttctgaaccgatttgggggaagtctcaaattggggctctctggtggataatcggaggcacgggtgggtgcgttgggtgcttgagtacatagcggggctgatggcacgctcaatttataggatccgagggcggcggcgttcaatttgaagagattgcactagcggtcggagagggaagaagctactggcgcaagcgattcctggactttacattggcaagaccaccagcgatgaatgggtgggctaaggcaactcactgcgacgtggttaaagggtcagggcgtgtcacaatcacggcaggcgatgtatacctcgacgatggtcgcttggccacgtccctggcgcaagtggatggacgacagagcggccacagtgtcccaagctcacctgtgacaaagatcttttcacgaccgagcgtaatccacttacccgaggcacgaatcgcggcgaccggcgcgaattcgagcgcacggttcaccggcgacgaggggagctgcacctaggatctatgtcagttactgtaccatcagaatgttattcagaacacctgacagagcagattgcagcgcccaaacctcaaaattccatgtaataacttgctaatccacctttaacaaagttgtagtcctatagtccaactacaattcgactatagtaaccatccccaaccgatcactagatcctactctaattcgacttcaaagtcctgctaatgtcacgggtggccataattcagttatcactgtgactgacagctcaactttga

SEQ ID NO: 119556 - DNA, 473 bp, Zea Mays
aatttattcacttcagctttaatgtagtcccaacgagtattaattgattttttacctctcttgataggtaccatgttgtgcattatatctactacatacacgaacccaaaatgactccctcctctggccagtactagtgataggatcacaactcatctccaaccaagatttgcaaagcatattatcttcataagctggaaaattggtctgcttgttccttgttgtgaccttgctgctcccatatggtaggctagccataccattgtttcctatggcaccagaagcactaatgctagaatcaaattgttgtggcaccaagggaggatggggaggcaaagctctcgagccagaagattgtgcattgataaggctaactgatgcttcattgagggaggtggtgtattcatccatcctagagaaaaagaaacattgaaactaaaattttccactaatacattcaaaactcagcaaac

SEQ ID NO: 119557 - DNA, 2324 bp, Zea Mays
aacgaatgtccgagacttaccattgcagtatgtagggcgagggatgatggcattccactgtagcacattacttgagtctttacccccgcatgagacgtaagacgtatgcaggtcaaaggtagtgttccttgaaaccatgtacacacataggagcaaagatgtttttccagttcatgaattgaccagatatcgatggaatagaggaggacgtcgctgcatgaggcagtagtgttttgtggtgcctcccctggcatgagagcagcgccacgctggtgaagtcaagcccgcaactcagcaaggagcaagcaggtgacggcggcaacaacagcagcaacatgatggtgacgagcagcgaaacagagggtgaggccatcagcagctctagtatgtactagtgggtagggtagtggcgattgtgacgtggttgttcctatcgattgaggtggtggtccattttatagcccatgcaaacagtcgggcgctgctgcgtctgagtgggccatccccctctcgtttgatcggggacacagagtagagcaaagcaacgtagagcagagcagctagctagcgtctctctcatcactagtagtactatcgtacaaccagcccagcagcagcagactctcatcattattgtaccactaccagcccagcagcagcactgcctaccggctacgctgctgctgcattcccgcatgcttgagcaagttgtagctgtagggagggggaatcacatcacaggagagctaaggtggagcgccgagacgagaggatacgcaacatctccatttcatctgcgctgatttaattagtatgtgcgcggttgtaataataattaattaattcagaaattgaggggtagacctgctggatgctacctcacgctttgggcgctggactacaaaaccaggagtagtagacacaccatccgaggaagcctgcaatggccacacatgctacgactgcgatggcggctatggcaccagatctgagcccgccgggagttggcggtggaggttgggacacacccttcttatccagctatcgggagcatggatctcttggagtatgcatgtagtataataataataatatgatggaatggagtaagtagtgattaattaaggaatgtccgagacttaccattgcagtctgtagggcgagggatgatggcattccactgcagcacattacttgagtctttacccccgcatgagacgtaagaagtaggcaggtcaaaggtagtgttccttgaaaccatgtacacacataggcagacaaagatcgttttccagttcatgaattggacagatgtcgatggaatagaggagggcgtcgtagcatgaggcagtagggttttgtggtgccgtctcatggcaggagagcagcgccaccctggtgaagtcaagctcgcaactcagcgaggagcaagcaggtgatggcggcaacagcagcagtaacatgatggtgacgagcagcgaaacagatggtgaggccatcggcagctctagtatgtactagtgggtagtgtagtggcgattgtgacgcggccattcctatcaattgtaataataattaattaattcaaaaattgaggggtggacctgctggatgctacctcgcgctttgggcactggactgcaaaaccaggagtagtagacaaaccatccgaggaagcctgcaatggccacacatgctacgactgcgatggcgactatggcacccgatccgagcccgctaggagctggcgttggtggttgggacacacccttcttatccagctgtcgggagaatggatctcttggagtatgcatgtagtataataataatacgatggaatggagtaagtagtgattaattaacgaatgttcgagacttaccattgcagtctgtagggcgagggatgatggcattccactgcaacacattacttgagtctttacccccgcatgaggcgtaagacataggtaggtcaaaggtagtgttccttgaaaccacatacacacataggagtaaagatctttttccagttcatgaattgacaagatgtcgatggaatagagtagggcgtcgtagcatgaggcagtatagttttgtggtgccgtctcctagcaggagagcagcgccacactggtgaagtcaagcctacaactcagcgaggagcaagcgggtgaaggcggcaacagcagcagcaacatcatgatggtgacgagcagcgaaacggaggaggaggccatcgactgctctagtatgtactagtgggtagggtagtggccattgtgacccggccgtccctatcgattgaggtggtggtccattttata

SEQ ID NO: 119558 - DNA, 977 bp, Zea Mays
ttttacacctttactaggtgtttttattgagctctgcattcccttaggaacgacttcagagctttttatagatttggtatcacactcgatggtgcaatctcaaatttattacagacggtcgaagggtataccttctgaatgtttgttgcatcagaaaagtacagaaagtaaaattacaatagatttttcgaatagcttcggctctttgatccaacctctcaggcgtttcaatagatgtgctttgattctgggacagcactattgactgttctggcttcagattgttcccttgcatctcgctgtggtgtattttgtgcagagaactgctgctggatctgaagtggtactggaggttgctgctcatacgatgaagatgttggtatgaatggctgaggcacgatccaacgagccgaagagtgacttgccgaagcgacagaccccgaggattgtgggcttggctgctggttgcgaacgtactctgggatgtatggggagtaatatgaggaggtgcgaaggacttgctttggttgattttgtcgtgcctcagcttcggcaatttccttctgtttctggattgttacctggcaggtccttgttgtatgtcccttgtcttctccatagaaaagacagaacatttttcttggttgggagttgaatcttcctccaaaactcctggattgttacctggcaggtccttgttgtatgtcccttgtcttctccacagaaaagacagaacatttttcttggttgggagttgaatcttcctccaaaactccttcctcctcttccacctcttggggccggtggtctgaagctgttttgtggttgttgttgttgggttcttgtagactgcgattggctttgttggctctgttgtccctgagtgtgattgtttttgtcttcgttctgatttggattgtgtatggttctgacatgtcttgggttgaaccttccaccgaagcccctggtcatttccg

SEQ ID NO: 119559 - DNA, 272 bp, Zea Mays
gaggacttggaatttcctcttgagatggcctttttcttcttcctttgccctttccacttgcatggctttgatggagaggtgtgagaaactgaggaagtcttggctggctatgatggtcttgagttctggtctgagccccttcaggaagcgggccatcttcttgacttcagtgctgacgtcatctggcgtgtagcgggccaactccatgaatttgtgcacatactcaccgacagatcttccgtcttgagtcagtttccagaattcatcttcct

SEQ ID NO: 119560 - DNA, 713 bp, Zea Mays
gtgagtacatacaatcacttaaaggtaatgtgatatacggatacctcattttttaagtaggccttaattatccttattagaaaagaccttcctaacattgtgccattttttttctttgcaaatccttaattcaattaatcctgcggcaacgtttttggccaaaatcaaacatagcttcgtatccaaatagatcatatcatgggaaacctgagtacgagtgctcacactgtcatgctattttttggtatgctgaaagagtacgaaatcggcacggtgctacatctattgcatataacaattgctgtaaaggtggcaagatcagcatacctgcatatatgcctagacccgaacctctattttctcttgcaagatttgatggtgatacaacctcaaagagattcatcaaaagcataaggcaatacaattgtttatttgctttcacatcaatgggtgcacacatagataattccgtcaatgatggtcgtggtccaccactgtttaaaatatgtgggcaagtgcatcatcggattcgatctctattacctccagatggctcatcaccaaaattcattcagttatacatttacgacactgccaatgaggttcaaaacagaatgaattgcctaggagatgatatcaatagccaagataatttggattctgatatagtcaatggattaattaagatgctagacgatcacaatccattcgca

SEQ ID NO: 119561 - DNA, 1062 bp, Zea Mays
gaaaaaatcatttattgccatggagaggtcgttcttgatcaactcaaagcagcatttgtagaactgtccaatgaacccatccggcccaggagccttttcagattgaagcctcatgatcacgtccttaatttcactatcatcaatcaagttgtccagctcagcaagctcaaaaggagcataccccagatggtcccagcaaacagcactgctcctccttcctgtcatgccaagaatctgaccgaagtggtgctgaacctcgtacatcttggcttcctggctcgttaacagcgtgtcatctctaattagtgatctgattaaatttttccttcttctattattggccgccaagtgaaagaacttagtgttagcatcgcccaatcgcatccaagtaagtctggaatgttgtcttgctcgtgacctctgagcagaggcaatatccagaatcttgattttgaggatcctcctgaattccaattcttcagaggagagttgtctactttcttgtgctttctccagaagagtgagaatgatctgaatgatagccatccgcactttgaagttgccaactgtattgcgtctccagatcgaaagagccttggccgtgcgagtcatcttcacatgaaggcgaaggattgcgtcatcagagttaactgtagaattccatgcttgatggactacctcattgaacccctcaatctgtggccagaacgattcgaatctgaacccccggtagaatttgaccgtagagtggccttgtattaacagtgggcagtggtccgacgtcatggtgcacatggagagtagatcagctgcggggtacagatcatgccattcagttgtcgcgaagaatctgtcaatcctagtcatggtagggttagcttgttcatttgaccaggtaaatgctctatcggtgagatctagctctaagaggtgtagatcatcaattgtgctattgaactgcctcatcacccttctgttgattgaccctttgtttttttcttttgctctcctaatcatgttgaagtcacctaaaattacccattctggcctcaccatggtttg

SEQ ID NO: 119562 - DNA, 486 bp, Zea Mays
tttgggggacttcacactattaacactgccatccaagcaattgcaacagtggcattataatctatcacaaactaaagaaatgacatcggactctcctgattgtcattagcatatttgtcgtgccggtattgcccctggctctgttcgctaccgctctgttactcccgcacgctatgatctgggcgttgtcttctatctctcgctctctgtgttcgtttgagttcgtcgtttccccaatgcgcttcccttcccttccattctctcgccggggatctccttgcgttgaggtcggatcctgcgccaaggtcggatcctgcgctggtgagatctcctatcgtattccacttgttagctctgtaaccctagggtttatagccatggattccggcatggaatctgtcgctgagctgtgtgcccagaagttctccgtggccgttgaagcaggccgcgacaccgtcaatgcttctgttgccacctgtgtggtag

SEQ ID NO: 119563 - DNA, 497 bp, Zea Mays
gctcgatttagaagtgcacgtggaattcttagcgaggcatagtggagttcctctgctctgtccactcctcgaactagaatacccagccacgggcatggagaagccgttgatgaaacacctattgctagtcgtggcgattagtgaagatgaccaatagctattcgtggtagcgcttgatggcctgcatgtcgtcgttgtggatccccaactgctaaaagagtgtctcgatgaggtggtgggcttaatgtcatgcctattgccattgacctttcacaccaacgcctgaccagtgtggcatccctattctgcttgatttgccttgtcgcagccaccatcttgcactccctctctggtctcgcgcgagggtctcctaggtaagtagccatggtcactccttttccagtgatagtgttgagatattcgtggtgtgagtggatgaagtggaactgctgttagagttgctgaactggatccttgttattgagtttatactcacc

SEQ ID NO: 119564 - DNA, 290 bp, Zea Mays
ccgatggcttctaacttccttttaatcatgcacagccaatcatcagcatcgaggggattgctagatccagcgaatgtgggaggcttgagcctcagaaagtctcccatcatgtcttgtggtcctccaccattcgggcgttgattctccagacttctagtgaggacctcaatgagtcgggtttggttggctagaacttgggctaaatctaagggtagctctggaggtgcggggaggtgggtctcactcccttctccaccggcttctctttcagctcttaggggaaaccctgc

SEQ ID NO: 119565 - DNA, 289 bp, Zea Mays
aaccgatcaagcggcgatctgttctcgacagaatgacaagcaaaacccgagccctaatgtggtggcggctactgattatataagggttaggatcatgagtccctcccaggacgcgccctaatgggctcaacagagatacacggcccaaaggccaagttacagtgtcgcagcaccgagacagattatggacctccaccttgatccgaacgtcctttctggccttccacgcctccaagtccttcaccatgtccttgttggtcctttccttcattcttaagtacaattaatt

SEQ ID NO: 119566 - DNA, 442 bp, Zea Mays
gtccgcagccttcgggagtcgaaataagaaaaggttgaacagggtattcgatgctattggcttcgtataccctgactattgttacccgatgcgagggcaaggggtaaaaagaatgattgctgcttctggaaaggttgtcgcttcggctatcacagctgagtcgaagggcaaaaagatgaaggttctgactcaccggccgcgttatattgaaccagccgtgatacttgaatttgacgaaggggcctcttcagctgccaaaacaaaagaaactgttcctcctgcgtagaggactgaagagccggctataatgccgaagttactttcagttaagctagttgaaacgatggctgataaggctgaagggtcaaaaattgaagaaataacaaaaatgccagagattttgagcccttcgacagaggcaacagtgtcgaaggcataaaag

SEQ ID NO: 119567 - DNA, 394 bp, Zea Mays
caagcttcgacattgatctcgtatccgtacaacctacacagccactgtaggatcccaaatcctatcaatatggtatcagagatgtcgggtgacgattatccaagcaacagtcgctaatcccatcaccatcggacgttgttggtcgtcgatgccacctcaaaagccctacaaacattgccacgtagttggccaatctcaccatctacatgtcatctctggatcaccaacagtcctcctctacgagcgccatgcacttagggtttttctatgggatgccgatgtatggggtgacagtgttctcattcttctacagcaccaccgctgtgccaccctccagcaccaccgcaacaaccattgttgccccgtctgccccacttcccatccattcgataaa

SEQ ID NO: 119568 - DNA, 735 bp, Zea Mays
tctcttcagatattacgtagtacttcaaaagaattttcaaacacttacctagaaatattctttcattcttaccttcccactttttggtagtctcttatcttgtaaagtcagggtaacagagtgcaatatatagaaagttggggatcggcgaaggttgattccatcattatcaggttatgcatgcatcatgtttaaaaatatactaataaatcttcccctcttatggagatatggcctgtactaggaaaacaggcaaatctactggaccttttggcgtgccacgacatcagctagcttctaggcacgaaggaagtagtagtggcagtaatgacccaattggagacctggaagccagggtggaacaacttcggtcggagttacgtcacaggaatagggcacgggagcaggacagtcatcgtatagctgaattgtcagctgaagtcagccgcttgtagtatgacatctcagaacgggatacgaccattgattgggccgtcaactcgcattcgttcgcttgggactgcgaagcaaaagctctagctcatgtggcagagattagtgcatccctcgaaagcctgcaagtatattgtaatactttacatgaagaagtacatgtactgtatgctcgactgcacccagatgtgccttctgacgttgcagcaatgggagccggaccatcgggtacagcaaatgaaggacctgatggggagctagacctttttaggccccctcctt

SEQ ID NO: 119569 - DNA, 648 bp, Zea Mays
ctcagttacgaaaatcaaaccagggtctttcactagcaataagatcgaagtgggcagttggctatgcaacaacaaggcctttagtcccaagtaagttggtgtgcataggcagaggctagagatgaaacccaacaaaagaatgatgaagtaaagttaaataaatataaaacagtaatatagcatcagtggtaataaaagtagtgaaggatgtttgattatcatggttctggcatgtggatcgttaattcctattcagtaaaaaattgttgcctacttccagtctttcttgcctatttttactacatccatgcaaattttgcctcatttctacctctccttgaatggcattggtccctcaagtataggtggtaaggtggattatgatgtaatgttagggtcctctagactttgtgccttagacttggatgtcatacataattttactgtggagtatgctactgtgtaggagttactttctttacttaatagataatatgtcctggagattgatgttgaaaaagatttttcactgctgcttcaatctgaggacaatgatagtaatatatggtgtatggcaggagcctcagacttacacgagttccttgctaggtcgctggtcccagggggtgaagccacttcaaaaagaac

SEQ ID NO: 119570 - DNA, 582 bp, Zea Mays
tattttcctattaaaaatcccttttccaatttatttactcaatttcaacagctctggatcgggcctcaattaccgaaaagtgcaggggctcgaggtaatattccgcagactcaggacatagtgccagaggattgcgggttagttctcaaaatccaggagggctctttaacacaatagccaaggcgaaagggtattggtcacagtgggccgttggatccgcggccgacgacacagattaaatctgggtacattatgaatggacacgtaacgccagcgctcggatccaagatctacggtccaaattctaaataaccgagatcgattcgcacccatcagattatggatctacggctcacatacggcacacccgaggtaataccccccatccaatcctaaccgcacaaaggtggatcaaaggtgccagccgcgtcttcctcatcctcaaaggtgaatcccgacgacacccagcggtggcggcatcaccggtcctagctgaaccccgatcctgagctcgaagcatctctcccgaacaagctactcgaggcggaggtaagtgcgacgttgttgcagggttactcaccg

SEQ ID NO: 119571 - DNA, 717 bp, Zea Mays
cttcggtagcttatcactagaaacttcgtagtcttgtgataagcaaagttgtaacatccaaaattctcatgaagaccatctcctctggctttagtctgatagtgtagttcatggactcggcagaaaccttcgccgaacggttccactccttgactacgaagggcgcaaatataaacacttaatctaacaatggcattaggggtcagctgatgaaggtaaaccccaaatttcttcaaaacatcagcaatcatccctttcaaaggaaatcttaatcctgctttaaagaagcttttgaacactactacctcattcttttccggcttcggagtagtttcctctccgccaaaacgaaccagctccttttttgcttcgctgaagtagcccagcttcaccatttttggaaggtcagcttcagagatggtggactttccaaagtccaaatgactaggtttagttggtaccccgcagctgaactcatcctcagaaccaacttcttcaacatcagcttgtgttgcttcggcagaaggtgtgtcctctgctgtaactagcccagagcgcctcatcgcttcagaaatcggaacagtttcagcagcttcggcctcatcttcatcacgctcaactctagcagtagagcgcactctggccatttgattttgaatttcttaaaaattccttggaaattaataaccttttttccgaagctcttcttctgacgaa

SEQ ID NO: 119572 - DNA, 274 bp, Zea Mays
gctttctgccgagtgcatgagctacattaccagacgaaggccagagaagatgggctacatgaaaactttggctgttataacttcgcatattgcaaggatatgaaggccctgctgcttagctatcgcaccaaatggccaaccggttggaaaagtgagtggttctatatcaaggccgatgagaagaagagggagaagttgaagacgctagtgatgagcccgctgagtttatgcttcgggctgattaggccctgtgccgcatgtcgtcggggtcacc

SEQ ID NO: 119573 - DNA, 323 bp, Zea Mays
ggcagtggtgcttgttgttgttgctgttgcgcccttctctcttgacgtatctcctcccgctcttggcgcatctcccgacgtatatcctctctttcctggcgcatttcttgatgctcttgtcgcatctgagcgtgcatgtctgccatagtgtctgccatttgctgcattatttgcatctaggctgaaataactggatcagcaccgactggtggaggatttgggggattcatctctgcttgttgttgttgttgtctaagcacccttcggttatatggattggcaggtagatcaattcctcctcccttcctggtattgaccatctg

SEQ ID NO: 119574 - DNA, 328 bp, Zea Mays
aatacacctaagaagtgattctaagtctaactcacccgaacaacacaacattcagatcggcgcaaaaacatccaaaaacctcacaacgaacttgctacaagcatgacttctagaccattagtcctaagctcatgaagttttaggacaagctagacatctaatttaactataactttcatatagcacatgtctacagaaaacacaatttactttgctagattaaccgcacaacaaaaattgtacgtgcaggaatttcagtttgctagcacaagagcacttaactaaattactaagccaactcatagagagaaactaccatcaatttctc

SEQ ID NO: 119575 - DNA, 434 bp, Zea Mays
ccactgtcctctatgcactctagctccagccatgtgaagtttggcaccggaagtagcagaaactaacttagcttaccactactctaaatttgtgtgaaaccctcaccctatagggtaatctatgtttgttgccaccctaggcatgacaactaggcactcatggcaattaagcataaggggaggatttgaacctgactagcaagaagcaacccaccatggcagagcgaacttataccatagtttccaaattagtagcatcaaatccactgattcatgtccttgttatcatacttatcgatgttgatggtcttgaacttctttgggtacatgagggcatttagtcttctagaaaagctagggaagccatccacagttttgtccacaaagtcatactagattgtctaaggagaatgtgtggttgggatcttgatgtt

SEQ ID NO: 119576 - DNA, 614 bp, Zea Mays
ttgtacacgccgctaacaccagctactagatgtgctgccgcgttggaactgccatggcagtgcatgggatgtcgcgggatatccttgtgatcagaaagcaacacgcacgcacgcgaagacgatgacaccgggaaaacgcgcgtaccactcactcttcatgcatgtctacggatggctgctggttccagaagttagtgaaatgtagagacgcatgcatggtatccatgtacgcacgaagtaatgttgcaccttataaatccacatgaacacacaaccttatattatatatgccatcttgatgtgcttcatagtaaacgagacgatcgacggtgtgcctggctgcttcttgcccttgcccgtgacacatacatgcatgcaatgcaatgataggataggattggatttgatcggtagcttcttggagcagagaccagccagagaggtgatgtggagagagagagagagagagatgatagaaaaaaatgaagaaaacgcagtgggaaaggctgcaacgggatcgcccgcaggatctgcccgttcaggacaggatttcagacgctgaacgtgcaagtgattccccttgtttgcttctgtaccccacccctttcgaaacc

SEQ ID NO: 119577 - DNA, 416 bp, Zea Mays
gacaaaagagcaaacaggcaaccctaatccacaaatgaagaagggcgcaaaaacaactgtctcaggtgtatcctcggtgggcgctcctaatcctcccaagtcataatagaactcaattctttagggagaataacaccaatttcaactaggcatataagatcagacttagaaatagaagaaatatgaaaaacgatgtaaagattgggaaatggtttgttctcgtcataaggagggataaaaccggcaaggttcccaagttcactagtagtcctcttcctctttggagccatcatcactaacacaatcaaaaggcagcaactagagatgagagattggagactagagaaatagcggagcaaacatagagtttgcgggcagaacagacgaatacaatagaatcttccttacaatctgat

SEQ ID NO: 119578 - DNA, 703 bp, Zea Mays
ggagatgagaatgcactgctgctgttctaaataattcctgtctggagcatgtccgctacttgtttctcaatttctgatttcagagctggtgcataacgatacgacctgagttgtactgggcttacaccggtcagcaatggaatacgatggtcgcactcgcgtgggggaggaagaccctgtggaacttcaaatatatcagcatattgagtgagtagttgctgcagttctgcgggcaacttgtgaacaatggcttgatccttgtcagtgagggattccaaggaagatacctccataacagtacactgcatgtcctgaacccccataccacacaatttgatagtagagccttggtacggtataatcagccacttatcttcctagtgtacccacatagggttgtgggaactcaaccagtccatacctaagatgaggtcgtagtgagtgagctgaataatcttcaagcttgatgagaaggcatactcattgaggtaccatgtgacattagtcaattcatggtcactgggtaattaggagccattggccacctgtacgcgaagtgaagctggtaagggagtccaattgggcaattgcgaagcaactcggtggctgataaatgaagtagagctgcccgaatccaagagtaccaacatatccataccaccaatgtggctaataaaccgcatggtcttgggggtatctgcac

SEQ ID NO: 119579 - DNA, 321 bp, Zea Mays
ataaacaatgcactagtcatccaaccttcctagtttgaactggaatcatataacaatatattttcttacataatttacaacttctaaagaaactattagcaagccaaaagaagaaatatacagctttcaagaatgtggaataagaaatatgcaatgagaacatgaagtcaattaactggacacagatacctcaaaggaaatacataatgagttgaatgcaccttttctttaaggtatggtggacctttccttggactttagaacatgcatcctttgttcatggaattttataaggacatggagaaagctctaggattatga

SEQ ID NO: 119580 - DNA, 374 bp, Zea Mays
aagggcgtcgcccgtgagtttatctttgctgttcttcattcattcgatttctctcccccattcgtgtctcctcccccaactagatctagctcgttgtccgtgtgcagtggatccaccatggatgatttggacccattcaatgacatggacattgccctttcttccccaccaggtagatatttctggtcgactttggtatgaatcgtgcacatgtaacctttgattttgtacattattggttgaattattagcaggtaccgtaatgtcttctccgcctctgttatggctacattgaaagctcagactagagggttgggccatttgacaattgtcataagtgacaattacttggcagaggtgagaaatagtacaaa

SEQ ID NO: 119581 - DNA, 996 bp, Zea Mays
gttttctattgctagattaaacatcattggatcattggcgggcggttgggcctgataggaaactgcttttcctttgcggtcggtgagaaggatggtcttacttgcgcaacttatgatagccttgtgcttagttagccaatccattcctaggatcacatcaatcccttaggatggcaagacggttaagtttgccaggaacactaccccacttaaaaggatgctgacttgggagcacttgagccggcatagaaggtctgaccccggggttcgggtgaccaaaggaatttctaggggtgtagaggggatgccatgcttttccacaaacttagtggctataaatgagtgggatgctcctgaatcaaaaagcacagtagcgggagtaaattcaacaaggaactcaccgagcactactcctggagcttgttgggcctcttgagcgtcgacgtggttgactcatgctctgccctggtactgggtcctgctcagctgactgttggagggaggtgccttggaggtaggtgtcgagggaatcttggggccattcaccgagttggagtaggtaggtccgggtgccttcaactgggggcagttattcttgaagtgactggggtctccgtagtgccaacaagcatttgttggcggttggttgtttgcaacagagggggcctgaagggagctctgactctgctgactgtaacgtgacggagtgggtccagctggtctattgaagcttggtcccctgggtggaagcccaaaggatcgagctctctagtgacggtcttgctgctgagctcggagaacctggaattttctcttgaggtgccctttttcttcctcttttgtcgtttccacttggatgactttgttggagaggtgagagaagttgaggaagtcttggctggcgaggatggtcttaagctcgggtcttagccctttcagaaaatgggccatcttcctagactcggtgctgacatcgtcaggcgcgtaacgggccca

SEQ ID NO: 119582 - DNA, 989 bp, Zea Mays
gatggactgcgtattatgtaagaacttagtattatatatattgtgtcctaatcttctgttccaatctttgtgttcaattttatgaatttttgttgcaatcttgtgtatatatatacctcaatgagttctctaattaaggaccaagggttaatgcccgaccacatgaacaagggtgtttctcaagaacattctagtgatgaaggatatgaaactcctagcaaccctttcctagcatagatagggccactcgccatgtgttgcaacgtgaccctaattatgatccgcaagagtgtgaggtaaagtacacatctttagtttcgtgtgtgtacctaattagatgatttcaccatgtctattacacatgcatgatttgcattttattatatgaataggaggtcttgtctcaatattgagcgatacttgatgaagccgcgacacgataccaaggtgcacctgagctgacccaagacgaaagcgcaccggaaccgaccgatacaaccaccgagaggtcaaggaaaaggaagcagagcgataaaaaagaggtgacatgggactgaacaagtttgctaacaaaacatataaaatctcagatgtgagtctgaaaggtcagccctagctccagaagaggcactacataagttccgaaatgcacttgggttcttaattagagataatcttgacgtcacaatccgacattggagagatgtgttagttgaggtcaggaatcaaatatggaataagctattaacgaggttcgttctgcctcggggttcagaagaacttgtgaaggaatacacgatgaagcagcttgcaatgaattttcaaaactggaggtctaagatgaatacaaagtttgcaaagaaaggcctagacccgacaaaaaatataaaatatcagaaggtcagtgggcaatatttctggagcataggaggagccctgatttcatatctctaagcgaggcaaattcggaactatctaagaagaacaag

SEQ ID NO: 119583 - DNA, 364 bp, Zea Mays
cagctctccacagtcacgcagatggccagaccgcaagcccacagccgctgactgctgcttgcttgtttccgcgtattgtcatctttgaaggaagatgaccactcgtccactcgcctctggagacaagcagaaaggttctggagacaagaagaatggttgcacgggcacatatggagctgctcggagccactttttacggctctcgctcgggcacctaaattagctccggcaaggagtcagagctgtccgggaagcactaagtctaggctagttccaaacatttggtggcttacaccgtggaatatggaaatggaacgtaattaacgtgacgcggtagctcacatctgcatttaataaatacaac

SEQ ID NO: 119584 - DNA, 480 bp, Zea Mays
ccattcgttgcttccggtcatgtgacgcaaaaagctggaatccatgacccacgtgttctctaggcctccatcctgcattaatagaaagacacagggtgagcaaatggcacatcattggggtttggacactgaggataataccagttctgcggtatctggccataaaaggtggtaggaaaaacatcagtcatccctagtcttaaaggggggaaatgatcaccacaagaaagaaattgtggtccgccaaggaagtaagaatcaaagccactttcacggggtccttggccatatggcacatgaccaacaccccaccgggcatgaccaccatgtggtatctctgcctgaggcctagcaacaagaggcaaagcacctctaggcatcgaaggacatcttcgaacaggaagatcatgaacaccatgagaaaggcggttcatgtcctttctgcttggcttagaaatccaccgctcatctcacttcctc

SEQ ID NO: 119585 - DNA, 470 bp, Zea Mays
cttctcagggtatcacctactaaaggagttgttcggttcggtgtctctggaaagctcatcccgaggtacattggaccgttcactatcttggcccgagtgggcagcctagcttatcgcttgctgctgccggattccatggcatgggtacacccggtttttcatgtctctatgttgaggaagttcttgcaggatccggaccatcagattgagatgaaaccaattgctgtgcagcaggatctgactttggagtgtcgtccggtgcgtatattggaattctcggagcgtgtattgaggaagagatcaattaagtatgtcgaggtcttatcgactaatcagtctgagtgcgaggctacgtgggaacttgaggacctaatgcgacagaagtatcctgaacttttcgttgtgggtaagtgttgttgattctttaatctttccttttgtcgttccgatagaagcgtcagaattcgagg

SEQ ID NO: 119586 - DNA, 483 bp, Zea Mays
aaaataagaatgaaaatgaagattacaacctaaaaggtgctagagagatggctgaatggtttagccctcccctcttatttatagaaggttatcctccttttctgaagtactcctagatacatagaatgtatccactcaacgagtgctaaaatgaacaactttgggaatttcgatctgacgatctcgcactgtattatgtcacgtgtcctctctaatttcctccaaaaccgtgccatcaggttttgagatccaaacctagtgaaacttgtgaactgttgtgcagtggttttgaggcgtaaccaccaaaaaccgaggatggtatacttgatacacaatccgctcctctatgttcttgcgcctgccagtgtccctaggtgctagccaccacggctgatcacccgacttcttcaatcccttggccaagactcacaatatgtccttcaccgcttccaatccatcatcacgaacccaccttcgctgttg

SEQ ID NO: 119587 - DNA, 316 bp, Zea Mays
aaaagagttagtatatgtctttgatcgtcatccctgcacttcacgttcagctttgcaagcatatttaaacaatgtggttatatcaaaataatccttataatcaagtatatcctaaatttccctattcaaaccaccacgaaaacgcgccatagcagcgtcatccgactcaacaaaccacaatgaagcatacccttttgtaactcctggtaatattcctcaacagattgtgaaccttgttgaaaacgctgcattttgttaagcaaatcacgggcataataggaaggaacaaatctatggcgcatggcagtttttaatt

SEQ ID NO: 119588 - DNA, 900 bp, Zea Mays
ctgggtgcgccaactattggtgtttcaaaccgccgctccgacaagtaaatttctatgtgcgcattctgagcttcggacggtgttctcggtgggtgcaaggtttatagtgattcgagcagaatgtccctacatctagccttcggtggctcgcactaccgatacctttgttgctcgatgctcatagtagggattataagtgggttacaagtagatgagagagggagggagggctcctaggtctcttatgtgtggatgggcctaaagacttcgggactagagtcctacactaagccttggcttcggcctctaggtcttcaagtctcattgggcgggtgcggttgcctttagtcaagtgtcttctattctgtgtgcctctcccattcatcgtgaccaccctcctccttttatgggccaaggtaggggtcggccttcggtggctcccttgaggagccacaatatcgtggtaaaaccgtgtgttttacctaggcagggccatgttgtccgtatgcgtcttgtcgcctggtcgtccctattcatgctcattatgatggacgacatgggcggtgtggggcctaggtgtcatcattactacctctacgccacatcgaaccttggcctctgtagcctaggtctcggcgtggctcgtcgcgctgcgagttctacggacagcctatgcactcaagcctgggctcgataggtcatgagtgcgccacaactcgaggggctcataggtcataagtgcactgcaggccgaggggttgcacaggtcatgactgggcggcggactggccctctactatggctcgatgctaggcatagttaatgcagccgaccacttatggcagaccaatctcgggccaggtgaggaatccactcgagtgggttcccttcgtcttgcct

SEQ ID NO: 119589 - DNA, 331 bp, Zea Mays
gtgtatccttatagagtagagagataaaatgagaaacacccccatacaaagcaacatctccaccttacctaagataaagttggagcaaaacaccaaagttaatcatctaatatacatgtaaacaatgaaccgaccttactgaaaacactcgcactggaccctctctgtgaccaaaaaaatagctcgtagagttttcagggactagagcctcaactcatctttgtagaagtgttgtgctgatggaagtgatggggttgcatggatttcttaaacgggttattgctttctgacttaataatgataacttctcaggcttgtaactactttgttc

SEQ ID NO: 119590 - DNA, 638 bp, Zea Mays
atatagggcactcatgcaccaaaccgtcaagcgagcggtatgtccagggtagagtgaccacatgtccttggcgtgatcaacccgatccttccacatcgggtcatcctcctcggcggggaacaagccgatggggtgggtcgacatttccagggggtgaaacccacagaaagtcgtcagcacgtgcatggctgtggcctctgtagtgtcatcagcccggaaaccaaaggattcaaagtctagtgaacgccaccccggctgcaggggatgaggctccagagtcatcctcaccctacaacgagatacccagtgttccttgaacagctagaccgtgtactggggaggtgtagtgtaacctgccccctgcagtacctcccataagatgaggggaaaaccctctcgtgcgagaacgtccgtgtggaaaggtgcgtcccctccgtcagtgggtacgtgggaagtcataagggtaagtgtaagcgaaagggaaaaagaactgaaataagaggtgctaagtgcaaaagactagaaaaaattctaagggtttggcctttctaggtttaagttgagatctcccttattaatttacaatttactaagggtgactcattgtttatgtaacttcctattaataatgaaatttt

SEQ ID NO: 119591 - DNA, 327 bp, Zea Mays
cgcagacaaacgccggatacccttgtactttctagttggagattatgtctacctgaaagtttcaccaatgaagggtgtatcacgttttggggtaaaagggaagcttgcacctcggtatattgatccttttcctattcttgaacaatgtggaccagtagcataccaacttcagttacccgaaacattgtctgctgtgcataatgtgttccacgtgtctcaattaaagaagtgtctttggattcccgatcgcaccattgaagtaacggatgttgccttagaaccagatttaacatattcaaagcatcctgttcggatcttggatcaaaa

SEQ ID NO: 119592 - DNA, 351 bp, Zea Mays
cgagcagtagggcaccttggtggtgtgaccaaaccttggtaaaaatcatgtgttttgtgtgccttcttgtgagcgtgatttgttcctcatcatctcaggtctacgatctatctagttcctcgatgccatgctaacctctcattgggcctcgctctctgcctcttcgccgatgcatcacacttcccccactaaagatagtggagatgttcaggtggactcctcgccctcctgttgattcctgaaatgaattaggaataatgatactcttaattgtaaggttattggagaggccaaattatcttctaaagtgtatttataataatttctacatgtcattgtttaatgacctgg

SEQ ID NO: 119593 - DNA, 670 bp, Zea Mays
gaggcatgttagtaagagaatacaaagataaattcatttagctatcacgatatgctctggaggaagttgtagatgatgagaaaaagcagaaactatttttagagggattgatcaggccactagagggattgatcgggccactccagtaccaactaatgtcccactcattcacgtccttccagaaacttttggacaaggcaatagctctggaatacaagcatgtttagcttggcgagatgaagaggaagctatcaccgagggtcaagcgggaagtagtagccgccgtcgctatgctccaccacaaggaaccctagctcgccttggcgtggtggacatcagtcatatccacgccctacttcgcaaacaccacaaacaccacgccctcgccctgcaaccccagcaaaacctcctagccagaatactaccctgagcaattcttgtttcaaatgtgaagtggggcattatgccaatgtctgtcctaagagaaatgcaaatactccaggtcgaggcagtatcctaacaagcagaatcacactccatccagcaaccacgaatataatattgccagggttaatcaaatcaatgttgaagctaatgatgatggttctatcatcatcattggtacgttcctcattaaatccatgctagcttccatattatttgattctag

SEQ ID NO: 119594 - DNA, 360 bp, Zea Mays
ggaaggcaggctttagccccatagaccaggaagaacggttctccacagtagcctggcttggtgtggtacgtttccccacaacacgcaaagaagctcattcacccaatttgcaccatgtttctttagatagtcatacatgcgtgtcttgagcctcccccccaaggatctccgcattttccctctcaactttcctgttgattttggggtgtgccacaaacgcaaagaaaagctaagtatcgatgccctcagaagtcacaatacacctaaaatagccgacttataaactaggtcccgttatccgcaatgatatggttcatgacaccaaatctagagatgattgacttgaggaaggaaacaact

SEQ ID NO: 119595 - DNA, 563 bp, Zea Mays
ccgaggacaggcctaaatgctgattgctgacttgttgctcgtcaggttgcaggtcttgctggggctgctgcgcaggtgggtcattaacaatccactggtcccaatccccttgaatattgtctgctggctgaacttgaacattgtcttctggcgggaaattaagatcccaaccagcagcaggcagaggttggcccagaccaaataatgcgagagggagctgttgaccatcttccgggacaactggctctggatcttcatcttggggttggccccccaacaagttttgttgtatgatctcacactgcagtccacgagttaccgataaaaccatcagcttccgagaagacaatgaactaggggacctcctcgagggacgtgactcgaaccctaagcatagtcctattaacattatgtttgtcctcctcccacaagattaatctaccaaaggagccaatagcagcctgcaagtactcagaggaacgataatcgagggggaatcccaacaacataagccagcaatcgcgattaaaaaaaagtgccctgtggttccaagcatcattatg

SEQ ID NO: 119596 - DNA, 559 bp, Zea Mays
gattataataggaagtagaagtttaacaaattatagatttatagccgatttcttattagagggtgctcgatttccagctatgtactgagtttctgacaaccaggccacattgaagtagaaaagctcaaaagtagtcgctttttccagttatataaattgggcaaatcatttgggggcacaaagctacatggacagacaggctggtgagtcaaggatgaaggatcaccacatctgaagcagaatatctattgaaaacgctgaacccttaaatctgtacttccacaacaaatatttgtggtcttttctcttcttcttttttacccccacatacttaaatagtatggcaaaaatggataaataaataattgaaattccttaattctgtagttttgctatagtttggccaaccattagtcattttgcacaatatactcttaaagacaacaatatattttcatgaaaaaatacagccctgtccctggtgaaaaaaataaaaggtgcaataatccttgagttacccgaggttaaggaaagaatcattttgaaacaatttgccagc

SEQ ID NO: 119597 - DNA, 494 bp, Zea Mays
tttttatataaatgcttacctttataccctagtgtatgtttaagatattccagtttacatgcccttgaccacccttgtttcttgatgacccatgagcaatcatttcattttgcacatccttggtaatctcgttgcttccttataacttccctcggtaatgaattcttacttcaaccattttattgaaacatcacctatcttaccttgattgttttctccacttcgctatttcgtgagtcttgccttaactctatccttagttatgactttcgttattatcacctttgcctttgacacctctacatcttaccttgatgcttatattatacctggcctttaaaaccttctctcttccatctcaattttatagttgtatttaacctattttcccttggtcgtatactattccttgtcgcttgcaagttttaactccatccttggtcgtgctccagttgggtattacctttacctttctcatcttttaatctcacctt

SEQ ID NO: 119598 - DNA, 337 bp, Zea Mays
ctcagattctttccgccctttcagagagaccgtcccgcttggatggccaggatgcgtgcattggaagagtagcagctgcttgaagacgaccccacagtcgtgtacctcactgcatacctgctcacccttgatgcacaatatgatttcttggctcgacaccaccgtcagatgattgctcgagcagaaaatgaagagaagctcaactgtaagctccatgtggatctcacctcagctcaagcccgtgtagctgccttggaaagtcgtgaagccattgctgttgaagccctgaagcaagccaaggatgagcacgtccagaagttgatggaggcctacttgg

SEQ ID NO: 119599 - DNA, 693 bp, Zea Mays
caaaaactaaaattattttgagaaccaaatattatataaatattcctcttgtcgatctcgttctgggtctcacccttttttgtgagaccgtcaaaccgctattctccttgtgaacatcgtgctgtttgggtctacatcgtctacccccgcctaccacattgcctcgcctcatcgcgtagtgcctcacgtgttgtgcgcgcaaccattttcccctcacttgttcctctcgctgtcattccgagctcgcgtgtcgtcttcacctcctcaaactgttgtcgttttcgcacgtgctagtctcactcggacacagccgtaaccaccccgcctctgtgcctgaataccttgcctatattcactcgcaaggccatttcatgcgcgcctgacccatcagccgaacctcccaagtttcttgtcccacgcttaggactacccgatgaagcccacccatcatcttcctccttgtaacctccagtcccgcttggatcagccacatcctaaggaggtcgacaaccacttgccagttctctttcaaaccacttgcttaaatgccctgctccctcacacaacatcacctcccatacacctgcattgccctacccccacctctacacacagcctatgcactgaagtgcatgctgatctcgctatcgtgcccaaagaattgtcgtcgatcctcacatacatgtgagttct

SEQ ID NO: 119600 - DNA, 389 bp, Zea Mays
cctctgatctgatcgaacgacccacaacagctgacccgaagcgtatcacaggctcaaatctgtggcacccaatatacgatctacggccagggttaattacagacgaatcagtagacgacaaccgttcatcacacgatcagtggtccccaggtcatcttcaacccaggtaaggaccgggcgacgccagaacacccccgacggtgtggccattgccatgcaccacgccacgacaccccgatgcctctctcctaacgcggctagggaaaacacgtagatcaggacatggcgaatttgatcgaatgctccttaccaagggttgaggccgaatcgtggccggacgtcgatgttaagcggatccgaggcgaagcttcgattccggtgagcaatca

SEQ ID NO: 119601 - DNA, 390 bp, Zea Mays
gtattttgagataattaggcccaaagatgggttgtcaaactgcctaggtctgaattcaggctgacagtgtgattggacaatctttggacttggattcgaccataatctagtcagtgtttggctatggttgctatagtaagaatgtagctggatcattaggctacaactttgctatagaacaatggccttgttgccatgtaaaattaggacgaaatccgccccaaacatggtctgtcaggctggctgaagaacaatcccatggtagagtaacagatagaattaggttctgatcccctcgccaccgacgagccgcgcgcggattcatgctatcgccgtggtgattcgcgctcggatcagttggatagcaccgggggtaagtaaatatcacgc

SEQ ID NO: 119602 - DNA, 631 bp, Zea Mays
aaaagttgtaaattatttgtttgaatgaagtaattctttcacgaactacataaataaataaatatatatataagcatttaccaaaatgaacaaagcatacaatatatcaaaaaaatataaaccttgcatagcatgtcacatttgaattgtttgtgcctataaactgaagcttggaaatcaaaatttcgttttacattaaaactaagataaaactgaaatttaaaagaaaatagaaaaaagaaccaagaggcacttgggctggttcttcttttccctttggcccatttcattctttcccttggatggccatttcttttctttttaccgcacgtctagctccacatgaacgacatgctaacttatgcctgacatcagctacatattttatttgaaacaatggcgctcgggctctgataggacccacagttcagcttcactcagtgtccacgcatgacgccgcagatccacttgccagcttcgctcatccatcgcgcacacgagaaacgccgctgtctggtggtcccaacatgacagctacatcttcctgctcgaacggactccgctatttctgcgcagtcgtaaccaccatgcgcgagatcgatctgaccaacaacctcagctaggatcccgc

SEQ ID NO: 119603 - DNA, 574 bp, Zea Mays
aataactgagttatgttgattggacgtgatgtgtaaatttaaaaatagtaggtttgtgtgtagagtgtgtgattgaacatgtatgtcgatgtattataatagtgattgcattaaagtcgtttgaagtattttaaatgcatgacggagatggttgcattcgacatagggaaagagacaggttgtgcgataaaaaggctagattgattttataggtcatatgaaaaacgttttattaagtgtatacgtcgagtatgttaaatggatcctacgtatgtagagtgtagtgtattggttaggcgaagaattttagaatagacgagtatgaggcatgcagttaagtcgagattgaagtgcaaatcctacgcaatgtgatgggattcgtgattatataggagttataattattgatgtgacgggtagtttagagaatgctagtgtgcgtggaggatgtattgttaagacataagtgtcagagtttatatactagtaggttacgctacgttgatcgaaatgtctcgagtgcacgccacaacatggttgtatgcgagacaaggtaatataaggtgtgctcgac

SEQ ID NO: 119604 - DNA, 1163 bp, Zea Mays
cttgaacgtaccaatcacatgccatcctaaaatgggctctggtaaagctgagtacctctttaccccaagggttgaatcgtgacctgccagctggaaggcggtagcaaggctagtgtgtgtttcccactagggttaggtggggacggttcagacttggggtgtaactaggggaaagggtggcatatgtgcgaaatcctagggaaagtaagcctatgccgtgtgcttgggtcttccctgcagggtgtaaaattggttcaaatcactgagcttaccaggtgttaagctgcttgatctcgcactaacaatcgtcgtatgaaccaacgttaacatgctttagtctcgtgctttcaataccacatgtttgcttggtacatattacccaaggaagtagctggcaagggtaggtgctggaatagtggaaagttgatggtggagtcgtgctactttcttgggcgagtttggtttgattaagtagttgacagacacaaagtcagatcgaggatctggttttggaaattagatggtaggtacaactcagatctgatatctgggttttaaagtagttgataggtgcaaatctagaacgattagtgctaataattgaatttgagctaaaatatgaaagtaaggattgatttctagtaagctcccgcttttggacgaccaatccagcaaaaggcctttgcataccccttggaatcgggtttagtaaccctgtcgggtaagtcttgcagagtatttcatatactcagggttgtggctttaaccctaattttaggtctagtttaaacaaggcattttcatgaagcttgcttggcacagatcatcatcagtgggctcgatgctgacctcgcatagcctttggtgtgctccttaaggactctagtttatagcttccgctgtgagatcttgtaaaactctgattaaatctaatatatttgagttgttgtaatcatcgtggctctctcgagggcgtaaagtgcatgattcgatccttaccaaattgtggtgaaatcgaggtcctgtgggattctcgatggactaccggacttgacctatttttgggttaagttgggcggtttcggcacactatctaccttaccatgtgttttattgatggtttacatgatcacattaagtctgttgtacttttgcaacgaccc

SEQ ID NO: 119605 - DNA, 673 bp, Zea Mays
gtccagtgtgtggagaatctagatggaaagatggtgaaggtaaaagtaagagtcctcagaaggtactgcgacattttccgttgattcctaggttgaaaagaatgttttcctcaaaaaaaatatctgaggatgcacaatggcacaagttgaagaggaaagttgtggaaaatgagcttaaccatccagcggatggtaaggcatggaaggactttgataagcaacacaattggtttgcagaagatccaaggaatatcaggcttggtcttgcaacaaatggtttcaatccatttgggaaaatgaggtcctcttatagtatgtggcctgtttttgttatcccttacaactttcctccatgggtgtgtgtcgagcaatcaaacttcatgatgtgtctactcatcccaggcaaagaatgccctggaaaggattttgatgtctttttagagccactaattgacgagttgctagatctctggttaggcgtcaatactattgatgcaagagttggtaaagagtttattctacatgctgcagtgctatggtgcatccatgattatccagctctaagcacgttgtcaggtagagtcaccagagggtattatgcatgtttgcattgcgacaaaaatccttgctctagaagaatacggaataagatctgctatatagagcatcgacg

SEQ ID NO: 119606 - DNA, 388 bp, Zea Mays
cattaaagactatgaactggagatccattatcacccaggcaaggccaatgtggtggcagatgcattaagtcgtaagacttcctgccactgtcttatggcgaagacctccgagaacactttgtgtcaagaaatggaaaagctaaacctggggatcatccaacaagggactctaaatcaactaaagcttgagtcaatcattttgcaaaggataattgatgctcaaaaggataatctgggtatgaagcacatacgagagaagataagggctggaacagccaaatgtttcaaggaagacgaacaaggtgtgttatggtttaacaaccgcatagtagtgccaaagaatgaagaactccgccagcaaattcttgatgaagcgcatcttagtcgt

SEQ ID NO: 119607 - DNA, 1839 bp, Zea Mays
ctgaaatgtgattgggagagacgtcaacagttcaaaaagcttattaacaacactggcaactgcatctggatgatgcttcaagaaagggcccaaagcatccaaataatgaccatgaataactgcaaggttaggttctgtccactttaaagaaagaagctgttgaagtaagcctggttgacaagcagaaggaaacttagcaccctgtagaccaaactgtaaagcaaaaataatgtaagttaggttcagtgaaaccttcaaaaatcttgtgcagttgggatttcgtatccaaatcagttttcccacaatcaactgagccatcgaaaatagcattgacaactgcttcaagccccagttgagccccttccattgcatcaagatcctgtaaccaaatttcattttgcagaggtagataaacatctgaattagaaggtaatccttggctggccaaatgaaaatggaaagaaaaacctttagtttaggtttatgcggtaagccctctttcaaaaatagatcctaggcagcgtctaggcaataggcaagatgcatgcctttcctagcacctaggtgttttcccatcaagagtggcttagggcttgatctctgtatgaatttcaaacacattggagatgatggaaggtgacttatgatcatagaactcgtgatgggtggatgataatgccaaattgtttcttttaatgtgctaacattctctatttaacattatactgtaactctactaattgaagtacaattgtgaagaaactcctatgcaatcctaggcactaatcagagcttgaccacctgcctagtgcctagacttattacaacattgggtaaacatatgcagctaatccaacctgtggggacttagttgcttgattagcatctccaaagacaacatttattctctgaactacaattgctgcagcaatcacagatctttgagaagcaatgactttaatgagatccaactgcaagaagatgcataaaacatcgttaactgagttgtggacaataagaggccagccattatccatcattggtccaaaaaatactgtaaatagccttttataacttatttatacatatatagttgggatcctcccaactatttacaatacaaaaagttccacttctataacaaatcacacaatcaaattgaaaaaattgaaggaaaatcatgttgtatgtatcaaggtaaagaatcagtaattgaaggacaaaaatgtactatgaataaactagacatcctcctaattttgtgtagtttcacatcatgcaacaaaactttaagaatcaagaccactgaagacaagatgacaagaaattatattgatggacaagagaaacacaaatgatcttttaagattaacaaggaccaaaggcaactcttttttttagaagtcaggagaaaagaaaacataccaatttggtgcggtagttgcagaagtcgctcttcccctcaagctcttcactccatatttctaacaacccagaagttgcacttccattgttcttcagcattctcttgaaagaaacatccaaaattgtactgtatatttcatcagtgacaaataccgatacccctttcttcttttctgttgataagtcaccagtagatgcagaattaccagcagcagaattatcaccagaaacacgtgcaatagacttagatttcgatggttctctcaataccacctagacgaagtttgtgtcaacttctctaaagttacaaaataatatgacatgcatttcaactatgtaaatagaaataagaagtataccagccaaaataatagagactggaaatgaagtgtgattttgtagtgttggtaatac

SEQ ID NO: 119608 - DNA, 383 bp, Zea Mays
gagcacgcttaactttgggattctttcaagccatacttccaaaaagaaaggcaaaccatgtttgtatggatacgtcttcaatcctataaaacctggcccaagataccacagcccactcgaaccagaataccacagctttccagctatttgggtcccgcctcactgctgtatgatgtgacacagtaggtaggaatagttccaccaacataaacctctgcctaagaaaagcccaaaaataattcctcgcaccccgctcaaaaacacatttgtatttttgattttccaaatatctctaaatattcaaattctagaataatccaagaatattcatttccttttctttttctccctatgattataaaatccaaaactcctccatccaa

SEQ ID NO: 119609 - DNA, 277 bp, Zea Mays
gccgattcgaacattcctcggatcagctgcaaagtctggatcaaacgtgtcgagagccttccaagcatccccatctaaagggtgcacgattagctcatcgttattacggacaccttcttggtgccattgcatgtgcatagaggtgtttttagatagaaacaattgtttcactcgaggagttagtggcaagtaatggagctgcttatgtgcaacatttgtcatcaccttgtcaccctcatcattaacaacttccacaaatctagattgtccacatttc

SEQ ID NO: 119610 - DNA, 748 bp, Zea Mays
gtggccgtgggcagcagcagccactacggcaaaaccagcaacgcaggagcttccccacgggcccaactgcaacccacgacaacaatgggcgcccaatctgtcaggtctgcttcaagacgggacacacggcgattgactgttggcacaggtttgatgaaaactatgttccagaggaacgccatgttgctgctgcaatgagcccttattctatggatcaaaactggtacatggactctggtgctacagacaatatcactagtgatcttgagaagctcgccgttcgtgacaagtatcatggaagtgaccagattcatacagcaagcggcgcaggtatggaaatcaaacatattggtcattcattagttcacaccccaactcgcaatttacatctaaacaatattcttcatgttccaaaggccactaaaaatcttgtttcagttcatcgcctcaccaaagataattctgctttccttgaatttcatcctgattattttttgatcaaggatcaggcaacgaagaacaccatccttaaggggccatgccgcaagggtctttaccctcttcctctacccgccataaagcaagcctttggagttgtcaaaccatctttcgaaagatggcacagtcgtttgggtcatgcttctgcccccattgtttctaaagttattagcacaaataatcttccttgtttagatgaatcaaataaagagtcggtgtgtgatgcctgtcaaaaggcaaagagtcatca

SEQ ID NO: 119611 - DNA, 460 bp, Zea Mays
tgtttgatctttggaaaggggggtggttttggacttagaagaattctgatttttcttttgtgcttaaccctttggtgaaccttttggggtttttctgaattctttttggggtcactttcttactatcatttgtggggtatcaagtgtactacatcttttataattggcccaagtcatgatcatgtggttttcatacccttttgttcatgcttacttctagtgctccacttgtccaaaaggggtttgaattagggcttgggcaattctccccattatatgtgcataacaagccaaggtatgaattttaaggtgggttgcacttacttaggatcttgggatccaactttggtgtacttttcccaacttaagtcacatgtgatgatgggcttacttgtgtagtcttgactgaaaaccctaagtaacacctggggtgttacaacaaaggcgcttgggccttgga

SEQ ID NO: 119612 - DNA, 720 bp, Zea Mays
ctatttttgtaattgtggaaagactaactaaggtggcctactttatcccagtgaagaccacatattcgtgtgccaggctagcagagttgtacatggcaaggatagtttgtttacacggagtgcctaagaagatcgtgtcagactggggatcccagttcacttcttggttttggcaaaagttgcacgagtgcttggacacaaagttaaatttcagcttggcataccatcccaaaactgatgggcagaccacgatgaccaaccaagtactaaaagatatgttaagagcttgtgctcttaaacatggtggcagttgggataagagtttaccatatgtggagttctcttacaataacagttaccaggccggtttgaagatgtccccgtttgaagctttatatggcagaaggtgtataactcctctatattgggatcaaactggtgaaaggaagttctttagaccaaaaattatacaagaggcggaagaacaagtatggttgatacgagagaacttgagaactacgcagtcaaggcagaaaagctatgcagatacccggagaaggcagttagagtttaaggagggtgaacacgtgtatttgaaggtgtcaccgatccggggtatgaggaggtttaaagttaaagggaagttgtcccctcgctttattggacccttcaagatcctaaagcgagtgggggaagttgcctaccaactggaactactcg

SEQ ID NO: 119613 - DNA, 292 bp, Zea Mays
gctccacacctttaggtacaactattggtcacaagtcttccatggcactggtttgggcctacaagcggcacacgctcacccttgatggcgtgacaacgaggggcagtcgtggcccacgagcactgccccatccctcagacacacttggcgtgaccggtacccctccttcctcgaccactttagctcctacgctgggccaggtgtacaagcatcgcaccgtagacgagatggtcgaacatcgacgccagggcctatgctacaactatgatgagccgttcgtctatggtgatca

SEQ ID NO: 119614 - DNA, 435 bp, Zea Mays
caatctttccaagtctgcaatcacggtccgagataactcttttgcacaaagctggtggaaggaatagctcaactctgaaagcgctagccaggcatgctcagggacatagccttgaacaattgcaggaagaatccgttcaatccatatgtggaagtcatgactcttcatccctaagactcgcagagtagataagttcacccccctactcaggttagctgcatacccatcaggcaacatcaacatcttgatccactgaagtacttccttcctttgggccctgcttaggacgaaatcgaccttaggccttctccatgtctttccaccactaggcggcttcatctcttagtttggtctatcacataacgctgccagatccactcttgcctttatgttatcctttcacttatcaggaatgtccataattgttgcccaaag

SEQ ID NO: 119615 - DNA, 398 bp, Zea Mays
ctggaataattcgggtggttctgccacaattgtaataaaactcaaccatgaaaaacatggtgaaatcaacataggcatacttgtatatcacaagcataataacaacttcaatttcacaaaagaccagcgatatcaaacgcattaataaaacaatataaagatttagagataaattatatcaggcattaagtcataaacaacttaccacatcaccataaaggaatagggaggggtgaaattattgtcatctgcacttcaaagacattaatatatatcaaagatatttgaacccatacccttcctatatgtgcaagtgtgtcaaatttatcttcaaattgccaagaatctaaagcttatgctttgataccaactgtaacaccccgagatccaaaaacacc

SEQ ID NO: 119616 - DNA, 499 bp, Zea Mays
ggccacagcgaggtgtctcaaggcggcacgacagaccgattgggggaaaataagaattcgagggctgtggtggctaatcggcggtgaggagcggtgcactggcttcgtaacaagatagcggagcaggccgaacactcaatttatactgaccgcttgagtgtttcacgaatttgcgatgggatatgcttgcgaccggaggggaggtgagtcaccggagcgcagctaccgtggcgctcaacaaggtaaagactcaggcgatagatggttatctattgtgatttattgcgacgtggtaacatttcgaagcacgtggcatccttgtggcaagcggcgaactccggcgatggcatttcgagcggtcgcagggcaagtgggtacgacggccagctcacaatctcattcgcgatcttgatcttttcactggtccggtaatatccacgccgcgccatgcacgaatcactgcggccggcgcgaatccacgcgcggagatcactggtgg

SEQ ID NO: 119617 - DNA, 686 bp, Zea Mays
atgagatgcacccagctttatcccttaaacccgggtgtgacactccaattcttctaccattcttgggctaggtcacttaatcaaacttaaactactatagtagctctacaacattgttgtggtgactcatgaaaaactcctcatagatcaagagatacagaggattgaagttggcctgttaacaatgtttttagagctaagaacatgggtgctcttggatcttttgcaatttaccccaattttcaccacaaaacatggaaatctccaattacgaaagttgcttaacttttgttactctatcactttgatgtatacacttttgactaaaagtgcatagaacttaaaatcacccaatagggcactaattagggttttgagtgttctagggtacatgtggtacttaagttctctaagtttaacctttcttgaacatttctaccaacttgttgatatcaccccttagtgctcatctcacaaggtcctaggtctctaatccttaaagagagatactctaacctagggtcaagaatcccttaccaattcaaatcctcacacaagcatcacatcacctgtttgttttcaaattttagcctagtggatgcatcctaggtgtatcatacataatgaaatgccaatgcatatgatgtcatgctagattttagttcttgtaacaccaggggtgttac

SEQ ID NO: 119618 - DNA, 350 bp, Zea Mays
ctagtttaacaaccatgatctaatgcaaattaattagatcatatctagtcaaactagtcataccaatctaatctagatcccatctaatctattatgatctaatctaaagtaagttacttaatgctggtacaaaagataaggccatacccctcatgcacttaaaactaaactagtgccttaaaccaactcagtcacatgcatgaggtctaacccaaccaatagagtcatgatggatttcataatctattaacccccacctaaaacaaacttttgacctacatcatgtagtctatctcacccatatctatcttaaccatatcacccaactccgatgatatacactaacctca

SEQ ID NO: 119619 - DNA, 3407 bp, Zea Mays
ccgcatcgtcagcgtacaaagagcaattaagggttgccggacatggaacgatttgcgaaaggattcctgactggatcgcccgctcaataattctttgaaaaggatcgatggcgaggataaagagcataggggacaaggggtcaccttgccggagtcccctcaaatgggtaattctcctacccggctttccattcataagcacacgagaagatgatgaagcgaggagagcagcaatccaatttctccatcttgcaccaaagccaagaatcgcaaggacttctaacaagtaagcccagctgacagaatcaaacgccttggaaatatcaagcttgatgaaaagtgcttcacatttattcttgtgcaatttttggatgactctctgtacatatagaaagttgtcatgtatactcctccctttgatgaaggcattctgcgatctggacaccagctgctcaagcctaggtgctaatctttctgctagcagctttgttagaaccttcgctaagctgtttatcaaactaatcggcctgaaatcagcaaggcagagtgccccctctttttttggaaggagaacaatgtttgcttcattcgcaagatggagcttagaagtgcggtgattatagaatccaatgagagcattgaccaaatctgtcttaacaatactccagcattttttatagaataatccaatgtagccatcaggacctggagctttctgggaaggtattgtccgaataactttgtttatttcatcctcagaaaagggggtttctaagtcactcaagtctgaagcctcataaccaagaaaagaccagttcaacgcctgctccctagctgagtgagatcctaacagatttttaaaatactgaaaagccacctcctccttatctgtatgggtcaaagcgataccagcgttagaatgcagctccccgatgaaattctttttccgcctaatattcgcatgaagatgaaaaaacctagtgttagcgtcccccaaacgcatccattttaagcaagaatgctgctttgctctagacttttgcatggcagccaggcccaatgatttatttttcaagaaacgaagaagctccaactctagcggaataagctgtctaaattcttgtgccttctctaaacacaataaggcaacttgaacaatggccaatcgcagttgcagattaccacaatgttgggacttccaaattttgatggctactgcaagacgtcgcatcttaatatgcattctcaaaatagcatcactagtgtgaaccggctgattccagttgtgctccaccagatcaaggaaccccggcattgttgtccaaaaagcctcaaacctgaaaccccgatagaaatcaaagttgacgtccccttgaaggaatagtggtgaatggtctgagatgagggaggcgatagcttgcaggtcggaacgtgggaacagatccaaccattcaagagtggcaaagcagtggtcgatcttggacatagtgggggtgtcatggccattgctccaagtgaaacgtttcccattgagcgaaagttcaattaattgtagatcatccagagtgcgattaaaccgttggatcatcctatgatttatcctccccatattcttatcacctgctgagcaaatcaaattaaaatcccctaaggcaatccacgcggggttggtaagcagcttgatggaagcaaattctgcaagaaaattcactttgtcctcatcggattgggggccgtacacgcccgtgatggaccattttgtattatctgctaaggagcaaatatttgcagtaatagtgtgttctgtagtgtacaggtgattaagtgagaagtgctggtcagaggctgcaatcaggacgcccccagcagtcccgttggccggaaggcacactgtctgggaggcaagagcttgaccaagggtttccttcagaaggaagtcattccattgtgagatttttgtttcttgcaaacacaccacagatgccccagaggaagaaataagattacgcacactggcacgtcttgcagcaccattcaacccacgcacattccagcataaaatcttgcagtctgatctattcatttgaaaataaaataccagttgcgctgccatacaaataagggagaggaggggcgtgccgggctggggagccccatataaggcaggccatcccaaatccaaagccagaaacacaaaggacacaaacactcgctactggcaataatagaccaccaaacactaagccatgaacacaaacttccttggagacacatcataggggaaactactaccacacaccactggcccaatgacatggccttacgccacaaattccactgcatcgactggtgccaccgtcgccctggtagatttcttcatcttgttcgtctccttcgtgccgaggttggccagtgaaataattgcctccgccttgcctttggtcagtgggcgatcaaagtgctgcgaaagttgttcaacaacgtcaagttcagataatacagatagttcattgcgatcagatgtcgaatttaattttttgaccaaaagatcttcagctatttgaagtgctcctttgccgactctattcctagccttttttgctagcctgctgcttttgcgttgaatgggactcgaaagctgcgggtttccagcaaaagcaccactagactgtctactgcaagagggatctacagtttgcagggtgagaggtaaattctgcgcactattattgcaagtttgatcttcggtaggaaggttatgaaagggatagggcgaagactcctcagctgctgttgtaataatggaggcagcaccagtcaactgggggacatgctgatttgtttggactggacagctacctaggactggatctgggagcggcctagtgattgacataagaaattcatcaaggctagggatggaaggtacctctagcggaggagcagagagctgtccagtgctcacagtaggagacgccacgtcctccatgggttgggtggactgcagcacctgcacaggcttggccaccctagctgtctgagaatctgcagcatccaaaccacaagagacttcatcaatcattgggtcagcccagtctgaaacattaaaaacagcatccccaagataaggcatacaaaaatcagaaacagaaccttgcttgatgatagcagaagggtgtgctgcagccttctcctcaataaagtgcaccaagggctcagcaaaggagaccttcttgttagagagacgcttggggcgccacaccagcttggagttgggcatgaaagcaccttggccccaggcaagatgatgaatagcatgctggcgatgatattgtgcaggagtgcgagaccattccccctggcgatgagaggaggagtagcagtcgttgatcgaaccatggcaacgg

SEQ ID NO: 119620 - DNA, 564 bp, Zea Mays
cagatagttcatgaagacacatgtgaatgttttctgcacaaaaaactctttaacactttagtttgttgtgcattcgtacttttgtgccttagaataatatggatcgattagtcgatcagacatcctaatcgtccaagactctagaaaccgaccaacctatataatacgcccatatgctatggtgttgcggtggacatggcttcagacactgaaccgcgggtggagtaggaattgcaggccgacaaacaggcaacagccatacgcccatacgtccatgaacctatcttgttaggtcgagatattgttggtgggactaatggcagagccactactcagacaccctataggactgctaggtggcaatgtccaacccaatcgcgcgcaacaaagagcaacagtagcagcaccgagccaggtcagtacgacctcttgactccaaaatccccaaattcaaacataccgaacaaggaaatgattagaggatatattgcatcccaaattcccaacctctagatctcttgtactgctctcctctacccagacataaaaaatatgaaatcaaag

SEQ ID NO: 119621 - DNA, 698 bp, Zea Mays
tgagggcacagattgaggataaaagtgttcaggttatcaaagacatgatcaagcaaaaggcagaaaaatacaagtgtttctgacaggacagcaggggaattttatggtttggagatcgattggttgttcccaaggaccctgagcttagaaagaagatactggatgaagctcacctttccaaattctccatgcaccctggtagcaacaagatgtaccatgatctcagatctttatattggtggaccagaatgaagagggaaattgccaagtacatatccgagtgtgacacttgccagaggataaaagctagtcacttgaaggcagcaggccctttgcaaccccttcccattccatcttggaaatgggaggacatttgcatggattttatcgtaggattgccgaatacctccaggcaccatgattccatttgggttattgtggacaggttgaccaagactgctcacttcttgccagtgcacaccacacacaggacagagaagtatgcagaaatctacattgatcagataattcgtctgcatgggataccaaggactatagtctcggatagaggagcaccattcgtggcacgattttgggaacaattgcaagaatcacttgggacccatgtcatccgaagctcagcataccacccccaaaccgatggccagacagaaagggtgaatcagattttggaagac

SEQ ID NO: 119622 - DNA, 274 bp, Zea Mays
aattgctcgaggtagtaaatatcgccgtgtggatgaacttgagccactgtttcactccggccgccgtgtccgcctgactcacggccgattcggatgaactcaccggagttagccacctatcagccatgcgccacgtgccttggtgtcttaccacgtcgcagtagctcgtattacacatgtccggtgatcgccggtgagctcgccacggtgaaagccaccaatctcttgcgacagtgctctcctctctctccgaccgccaccgcgccatctcaaa

SEQ ID NO: 119623 - DNA, 456 bp, Zea Mays
cacctttgtactcgcggatttcgcttagaatccatcgcatcatgccttccaagtcacctttagcctaattcttctctcgggatgttgcaccaaccgaggaggtcttttctaactcgttgcgacacctattgcctagtgtgtagtagttactcatcaaaattagatagttttctttctgctgccttaggtgctttatttcatcatgaagatcccctttcttcacttgagcagcgataatgttaacaactgcttcagcagatgcttgccttattttgctagtctatgctttgtgttcctccgttgctttctttagctcggcttcgagtgatgcaatgtgtttatctttttgtgcattcgaagcttcgagttctaatgtttcttatccattgcttccttaagtttgtttttctcattagatatggcccgaacttcggttcgactaccaataaagtcttt

SEQ ID NO: 119624 - DNA, 276 bp, Zea Mays
caaattgatggcttggcgagcatcactgagctatgagaagacttaaacaaggtttgaatcggacagagctttaccagaatcggctggccacggtggacttgatttcacggtgttcttcgactgatttgggggaagtatgaaattggggcttgctggtgatcggctgggggcaatactagccgtgggggtgcgcaacgatgttgcgaaacgagttacggactcaatttataggcaggttcgtcggtggtactcaatttgagcgaataacgcggcggc

SEQ ID NO: 119625 - DNA, 573 bp, Zea Mays
cgggcaatccatttctcacaccctttcaaagaagggtatcatattcctatggagttgggtcccttgatcgacgccagaattcatgaataaattgttccatgtatggcgtcacctcttcaaggttggtcaatacatatagcatgatatggcaccactcttcatgtgtcagggtcttggtggtcgaaccacttgcgcttccgagttgtcctcgaaatatggtgaggttcgattcattgccgccatcattgtaacgagggggtggattatgcacgctcgatagtttatcaccatagtaagtggttgtgaagtttgacacctcctcaagaatgtatgcctctgcaatggaagcttcgattttgcatttacttatatatttctttcgaatagtctttagacatctctcgattggataacaccaacgtccctgcatggccccccattcgtgcctcataggggagatgaagaatcaaatgatgcattggattgaagaagccgggtggaaatatcttctcaagcttacatagtaacacgggtgtcaatctttccaagtctgcaatcacggtttgagataac

SEQ ID NO: 119626 - DNA, 642 bp, Zea Mays
gtaaaaacatcaaaagttatggtcaaatgaacttaaccaaaaggcaggcagcagcattcggatgcaaagagaaggatgtgagaaatggtatatcctgttttcctgatattctgatactctcaaaaagactgaaaatacagatttcgccgaacaagtgtgtatttctctaggaataagcatggaatgtatgtgaccgtgatgtcataacataataatagaagaagaatcatctaacattgcatatgaaagattggattctgaacgaggatgtgagctcttaaaggcagggaacctcacaggggggaaaagagagagagagagcaaaatgataaatgatctgtggcctaggaggtaaagaatgatgcccaggcccagataagatgtgatgaatgaaaccaccgtgggaggaggcgatgatgaaacaacaggcagaaaaaggaataagatccggccgatcttgggaacccgatgttccactcacagaacgcaagtggagccaacttttgcagacaggaaactggcacatggcttggacaacgacgccggaatgaggcgacgctgttacagccttgttcactccgtgcgaatcctcagatgcgaacttagtacatttgtagaaagtttgcaagatcagccaccaag

SEQ ID NO: 119627 - DNA, 446 bp, Zea Mays
ctgggacatgccgaaggaaactgtcgccgaatctagcgaaggtgagctggtccggctgaagtacaccttcagatatggggataagttcgacgaaccaaacgatgactggttaaaatgcatcgaagtgacaagtgatgaactgcttggatcatattccaaggcagaagataatgcattgtccacaaccttcagaggtcgaggaaaaaagagattgaacagagtttttgacgctattggcttcgtctatcccgactaccgttacccgctgtgggggcaagggaagaaaaggaaagctactgctgtggccgcctcggccgaacctgtgccgaaggctacaagcaaaaagatgaaggtccttacccaccggccacgctatattgaaccagccgtggtgcctaagtttggcggggaggcttcttcagttgctgaaccaagagaacccgtcc

SEQ ID NO: 119628 - DNA, 372 bp, Zea Mays
agaatctccgtataccattagtctcttgatgcctaatgatatggcgatgtttagtccatggatcagagcttcatactcggctgcattgttggaggctagaaataacaactggagggcatacttgaggtgctcgcctccaggtgcgatgaagagaattcccgcgcctgctccctgcagcttcagtgagccatcaaaatacatccgccatacttctgcagtttctgggttttctggtacttgttgttcagtccattctgatacgaagtcaaccaatgcttgggttttaatggcagtgcgaggtcgaaattcgatgtcatgagatcccagttcgcaggcccacttggctattcgaccaatggcttccttgttgtg

SEQ ID NO: 119629 - DNA, 827 bp, Zea Mays
agtcgtgttgattggaagccggatcgtatgtgtgacatctccaccaaatcgatagttatcttcacctgacggaagatcgggcacccccgttcctatcaccaaggcaatttgaacgacgtaatttggagttatatcgaagaagttattggtttgcaaagtatttgtatatgtattatattaattttatacttcaaaagactctgcaggggtgtttctgcaaattttgggggtctggatgtaagggtttccccacggctgaggacggtgggtcctaattttaaagtcaccagggactcttttgcaagattcatgggtcgaaggggtacagatgtgtatcgccgttagatcaaaagctcacgacgcagattagtccggactcataaatgaaccgatacgcaatactaatcaccggatcccgatccaacggctaaaacatcatcgacccccaacctaaccagatccgttggattaaaaatcagtgctcggattttaatgaagtcgagattgactcggaatcgtccgatcagatctcaacggttctaacttactcgcccaaaatgatccaaacttctaatctcgtccgtcaaattcggatcgacggcgaggggcctttctccccccagctgaaaccccgcggcggtggaactcaccagcacacatgcgaccgagaacccaaagtcctaaaaccaaatcggacgaagctacgcgaagaggatggaaaaacagagctagtaagcggtttattacctcggttcgaccagtcgagccttctgcccacgatgaggtgcgggtctgtggaccagcgccgacgttgacgagaaatcgtt

SEQ ID NO: 119630 - DNA, 519 bp, Zea Mays
tcctcatcgtcctgctctggtaaccccactttcctagatcggtttgtgcctgtagggtgttcttgttaaagtttgcttgtaatgtctgtgagattgcaatcatggtcgtgtactcgtgtatgattgcggtgttcgcagattttgtttgcttgttcctagaccgtcatttctgtggtgcaaatttagcatcttggatgaagtgaaaatggacaattttgttcatttgttattaggttctggcacttggacttggtatttggtaacagagaatttacttatttagtagctatacagcccgtgtcattgtcgttgggcgaatgaatttcatcgtcagtctattgcatgaatgataaatgcatgtcggtggccttttgccgaatctaccattttgtttgttcgtcatctccatttctatctgcttgtttattagtagtagaagtagaactgctatttatggctgaggcctgagggaaaaaagaatcaaatgttcaaccaacttcatttttttcttgagtgcat

SEQ ID NO: 119631 - DNA, 813 bp, Zea Mays
agaagattgagctagatgtcgatcatagacctgtttgactatgactaatcacttgctagtcgtctctaccatgaacgtagggttcgaaggccacacaaaaggtttaaggggactttgccacggttggatccatccttttagaatgggacaatgcctctagctatcacccgtacattgagggttgcatggggtgtgacacagaccttgccaatgcttgcctagagcaaagggttcatgaaaggctgcatggatggccgtagagactccacctatcataggtcaagctctttgatggctttcgacgcctatggctgccacctctccaatttgggtcgtgaaggccatgatgaagacctcatcatgggtggagtctaccgcttgctaatgaagtaggcaaggcccgagcgtggataatagggcactgatgaagacctcaacagaaaagcattccacatttagagttgaggaataatacctaagcggtgtgggcaagatggaccatctgtcgcctacatcatgtccatctatcaacaccaaacacaatgttatcccagtaagggtatacgaataagtgcatgtaatacttggactctaactgcccctatttacactattgtacaacatatccttaggatgcagttggtaatcatgggtacacctatacttttagaggctacctcttggttgccctataaatactccggcccgaacaggatgaggggatgattgacaagacatttgagaacctctgcttcacatttgtatcgttactatgcctcaattgttcctctttgtttgggtcccatcagccag

SEQ ID NO: 119632 - DNA, 287 bp, Zea Mays
catggtttcaatctaggcacggacataatcgatcttactcgcctcagacctcacgttcatgaggttcttgcgtaggccctgccgccctggagtcggttgatgaggtcagtacacgcccttgaaaggagaccgcaaccaaaaagattgttgcgcccttgatcagcacgagttcggataggatcgaaccgatcacaggaccaggttggttaaactcaaccacaacattcttccccttgctcccatacttactttcttatacttataacttgcttatacttagaccttac

SEQ ID NO: 119633 - DNA, 298 bp, Zea Mays
gactagattgataactgttgttataagcaaactctgccaatgagaggcacttgtcctagttcttgtcgtaatcgattgcacaagccctcagcatatcctcaaggatctgatttaccctttatgtctgaccatcagtttgagggtggtaagccgaacttcttaccagcttggttcccaaggactcttgcaattgctcccaaaatctggctatgaattgggctcctcggttagagacaattgtccggggtagtccatgcaaacacacaattcggttaatataaaactctgcatacttttg

SEQ ID NO: 119634 - DNA, 379 bp, Zea Mays
aaaaaatgtaactgatagtgattagtgtccatatactcaattttaaagaaaaatgcaaataggaaacattttgttgcatcaccgacacagtcctcaagatcatgcctctcatggggtataggtatctgttagcttcagttaggtttagtctccatcagatttacatagtgttcactgtcgacacagttttcatagttttgacagtttatcggatttacacacgctcgatacgctcaatatagattggcccagagcagacctaacaaggtatgctggtttgatcttatgctacatacttcgtctagatctgtacattttatgtgccacacaatcgtagttccacaacttagactttacatgatgaatcaactgtgtctgc

SEQ ID NO: 119635 - DNA, 540 bp, Zea Mays
tcaaatagcatcaaagacccttttagtctttgtttctcttgagcaccgaaggcaacatacatggcttcgccctccgccttcgtgtagctccctagcaatccatcacttgttccttcaatggaatctagctaatcatcatctagctcaccaaattgattcctgaatcgataagtatacttcaggtgaaccaaacttctttttcccgcatttgcattagcttaagcatccttcgacatttcccatagcagctaagggacacacgttgaatgttgtgtggtcctgcactaagtcaccggtgctgatgtagttgcacacatcattaaatgccgccaggtagccttgtgatttttctgtattcacgataatatgcctccacatttctgaagcaggattagataagccactggattacatccttaatatcacttcttggactcaggtcattcttcacataaaaccactgcttcatccatgaacttggccattttttatgaaaggttggcatgggatgccttgcatcagaccgatacatgaaggtat

SEQ ID NO: 119636 - DNA, 382 bp, Zea Mays
tggtcattttgggtgtcaaaactaagctactatcgttgctagccttcaggagcccggagagtttgtcgagaatgcccaaggaccctacccggcgcgccaactattggtgtttcgaacctccgctatgataagtaaatttctatgtgcaccttctacgctccgaacagtgtgctcggtgggtgcaaggtttatacttgttcgggcagaacgtccctacatctagtcttcggcggctcgcactatcgacacctttgttgctcgatgcttgtagtatgggttacaagagggttacaagcgggcgagagagggaggaaggcctcccaagtctcttatgcatggatggacctaaagactacagaactagagtcttgtgctaagcctt

SEQ ID NO: 119637 - DNA, 1280 bp, Zea Mays
gtcgacttgcaaattttattcaagtcatttagtgcactaaaattactacaaccaattaacaacacattctccacgataatcacccaacaatttacattttaaattagtcattacatgagcactactactttttacccgcgaccgtaaccatacacatttagaccacaacaagcaattcaccgtgattacgagcttaaccaagtcatctaacaattcggctaactagagcaacaatataggccgctatacatcacacacgtcggctagtctattattatcgaaatccgagacacaacattgtatataacaatcacttaacgcaatcgactcctgcttaacacgagttggctaatgacgtgactatttcccaattaccaacatacaccacctttcgccatttttggataacctgcgcgacacacagctattgtaatacatctcaacttcattcaaccccatcagtagagcactagcacatttcagaaaatttcctgagacttacgatgacaaggcatcgatcttatcatgcacatcaaagcatcacaagcgtgtttacggaaccaatcggttaacttgatcgacacactacccatgttctttgcctttcaaaatttatcgcacaataggaatcatccccatttgccaatgacaccaacaatacctactgatctattattcaccacatcaacatagttacacgccgcacactagtttctaacatgcttcctgcataacccgtaattcaattactcactaacaataaatcacgcacggcaactaccacatcaaccgatttatttatttggaacaccgcctgcctagcgtaccactagtaccccacattttgactcaagctcaataatacagcctttattcgattatacaacaacgacctaagcgtcgtgttacccaatgcatacatctttcctcgttgtgagtataaccatattacggcatatacccgcacacctcaatcaaatatcttacgccaccaccactataatacaccacggcacacacgcacatacgtgtccccacgttacgcacaaggcatcaacagcatagtgactctaacaggattaatcatactcctcattcgcctcgactatcccaatcatcgatcacatgcataaaacaatacacttttcacgtagacacctattgatgcattccccaacacataatccgcatttttaaaaattttcctcacaacaaaccacacatcaaatacattcttactaaaacttaaaaacatccgagccctctttctaacatgtttt

SEQ ID NO: 119638 - DNA, 423 bp, Zea Mays
ctttctggactcatatatgatgtgtatctaattctatcattaaaaccaagtagtacacataataagccaaaagaacggtacgctcaacactgaatggtgctgatgaccaaggccaccgagactatgtaacttggttgggtaggcaggccataagccaattgtcattcaagagaagggacaaggagaatgggtcgaaatgggttgagaagaatgggttgggtaagcaaattgtgtttctaggttaaggtagaccaagtaagaagtgacaaaaatgttttccttttctaactttaaatataaacggattcaaagagatttgaattttcatcacacaagtctagccaaacaaatcaaccaaaatcatgtgctacatcatttatataacaagaatatttctaaaccccatattaaattttaatctct

SEQ ID NO: 119639 - DNA, 562 bp, Zea Mays
cagcccctgggtctctctgagatggcaatgaagactccataggtacgtgtctgaaccgatgtacccgggcagcagtagcacgctgaaggtcaagcatacggggatcagcatccagtggtttcacctcagtctcgtcacgctccctaaagcgagatggtggaatgggcgaagcagaaatgggtgcgggaggggaagcagtggaagctagagtggtggacgtggtaggtacaatggaagtagtggatggctctagagcgacaggaggtggagtagagacagtggcggaaggtgtggagggagcagtggagcgaggccaagatgcgaggcgacgaactcgataggctatctgatctgaggaaatctggagctggcctccccgctcagcctgctctgctgccgctgcaagtgctgcacgagcagctctatccatacgccgcgtctttctaccctcctactgcttatggtaaattgtcttccctttgacctacctgaaggggcaaggagggtcctcgtcatctcctccccctgacgatgagacattctttgtctgtaccatcctgac

SEQ ID NO: 119640 - DNA, 567 bp, Zea Mays
tacaaaggactggtataaacaatgagcatcattatcgagtcggttgtttctttgttgtccttgacctattaggagaagagtttaataacagattcaatgaggtaaattctgagttgctcctgtgtatgtctgctctaagcccatgtgatttgttctctcattttgataaggaaaaattgattgtcctagcaaaattctatccagatgaatttgatcacaatgatatagcaactcttgagtgccaacttggcctatacattgataatgtcttgcatgaggtttgctgatttgtgaagcataagtgatttagctaaattgatggtggacacaagaaaacacctttgttatcctttagtgtatcggcttctaaagctagcactaactctccctatcgccacaacaactgttgagagaagtttttctgctatgaagattgtgaaaagtgcataacgtaacaaaattggtgatgaatatttgagcgttggtctcatttgctatgttgaaaaggaacatctggacactgtttctaatgaaacaattgtcgatcgtttccacaagatgcaaggt

SEQ ID NO: 119641 - DNA, 320 bp, Zea Mays
aaacaaggcttttgactatgaaagacaccaccccagcagggaaaggcgtgaagcataaaaagcagctaatctggaagtccggtagtaatcgaagtaacccatcaaggcgagccaaagaaggaaccgagaaatctgagaattgacaatccagaagtgggtgtcggaaaagaagagacaagactttccctcattcattccttagattaggacgaggaagcttcctagagagtagttaacccgggttagctttgatggactacttactggcgcacgatattcatatgagaaaaggttgttcgtggataataattgtatttctt

SEQ ID NO: 119642 - DNA, 401 bp, Zea Mays
gcaaaaacatgcgtcgaaaaaagaccgcgacgacggtcttcgacattcgaccaatacaaagtcaccgcgaggctcagcgatagctagcctcgcgtgcgacaaatccgcgcagaagtcgcctaagggtgcagccggactagcacaacaagtgcgaaaaccgaagtctaccgcgaagactatccgcgcagaagtcgcctaagggtgcagccggactagcacaacaagtgcgaaaaaccaaagtctatcgtgaagactatccgcgcagaagtcgcctaagggtgcagccggactagcccaacaagtgcgaaaaaccgaagtctaccacggggactatccgtccaacagctgcccgagggcacagccggacgaagcgtaacaaaagcaaaaacgaccacaccaac

SEQ ID NO: 119643 - DNA, 293 bp, Zea Mays
ccaaaacgcaagccgaagccgaaactgggcaagcagaaaccgaagctacgcaagctcaggctaaagtcgaagttgggccttcagtgccctccgaaatggagcctgccacgcctaaagaaaaattgacagagcagattgcatctgaaaaaatcgaagctcctgctcccgaagcttcgaacaaaaacgttgactacatcattcgtcatgcttcaggaaagaaactatcccaagaagaaatactagaagcaagacactacgcccaaagattaaaatatccgaagggagccttagtg

SEQ ID NO: 119644 - DNA, 339 bp, Zea Mays
gatgtggtgcggtctggtggcaccagactgttcggtgtatgctgacggttgacaacttttccacaatagtaaatgtcggtgtgttgacccgagagacctaccaactagtgaatcagtgttgtgtgcccatatctagatgggtgatgcaagaagacacaagcttttatcctggttcgggcaagagaaggttgtacttccagcagagggaggacgagacttatattatcttgcacccaagtgcttgtagtagggggtataagctagtcgggagagggagaggatcccaagtccctagtggtgattgaggcaagtgccaataccaatcgtggaggtgaaaac

SEQ ID NO: 119645 - DNA, 404 bp, Zea Mays
atcaactcaggtcaccaacaagaaaattcctactgaggatctggtgagccgactagacatgatcctgaggggcaaggtatcaaatgttggtgctcctattacctattctgcttggaatctgccacctcataggtcatttttcaatttcgtgtccaaccctcctgctagtgatagtggtatgggtcttagagtgcaaccatctcctaaagacattaaggctctgggtgctccccttcatgatcttcccaatgatgagagacaaattcactttgagatgtcggcaagtccggatgatgcataaatagatgttgtactcaatatgttggctggagaatcttctgactcggcccatgctgaaccgatggctgttacggttggacaagagcttaacaaaatagtggaca

SEQ ID NO: 119646 - DNA, 468 bp, Zea Mays
taggacagagtgatttaaaaaatgaaaatacttaaatgttgaaccatttggcttccaagatcttggatggagccactttcatagacggagccgttccatcttaactggctttggaaccaaacactatcttaacgtaggtgagcacacagctccacaaggggaaggagggcatgtaaattttctagctatagcaaatacaaaagcctcaacagtttggcagtcttaaccttatagctcctcctgtttatcttctcaactataccgattcttctgtacatagccgcctcctgtacatacaatacgttgtaatttaccattattaatacaaaatttacagtaagggatctcccctcccgaaaaaacggaaacatatatataattggtaaagatatatcagttgaatcgtcaaagtgtacgaacggaaaagtaaagcacaatgcgttggcatatgcttcaaatcatgtactg

SEQ ID NO: 119647 - DNA, 573 bp, Zea Mays
tgtgatgatcttgcggagctcacggtggcttcaatttatagggagcgaccgcgagcacaacgaatttgagcggcggattgtgatctgtaaaacggggtgagtcactggtggccgcgcaacgtggcttttaccgtggcggcacctccggcgatcaccggacatgcgaagcacggttagccacgacgtggtaaagcgtctggacacgcgacagatgacggtgatggttcaacggcggtgagaatcttatccgagggatcggtgagcaaggggaaaggtacggcggctagccggagtggtgtccagctcaacggcggtgctgatccttctacccgagatgttatccacttgccacgagcacgaatctagacgccggcgacacgaatcacggcagagatatcgtcggcggtgagatctctacgctagcggtctgatcccaagtctggtactgtaccatggcgaatcccattcagatgaactgacagcccgatttgcagagctatttactcccaattttgtgtaataacatgatcgacactctttagcaaagttatagtcctaaaatccagctacaac

SEQ ID NO: 119648 - DNA, 663 bp, Zea Mays
tttagcccgagtcagcccaatacaggcagaatgcgcccgcgcgtgttctcgcgctagcggatttgcactgggaaccctggtgattggaaaaacccattaacaatcccgcacactattacgatgtgtcactgacatttacactgaggtccttcactttctaattcttcacaactcacgatcccttaccgtggacggcggagcaccagctccggcgagcctgtaccggccaagatacacaatgacaggtgctctggagtggttgacacctaattcgatcactaataaccatttcccccaactaatttcaaggttctagcccctaatctctctgcctacggtgacattgcgatcaacgaataacatgaagtgttctcggtgatcctatgggttctagctcaattggatgggtcgagaagcgtcacaggcacacagggatgctaaaacaagagcgaggagggcatgatcgaacaagtggagagctggccacagcgagctcacttagtacggtgttctggaccgatttgggggaagtctcaaattggggctctctggtggataatcggaggcacgggtgggtgtgttgggtgcttgactacatagcggggccgatggcacactcaatttataggatccgagggtggtgtcccatgaatttgagatggc

SEQ ID NO: 119649 - DNA, 747 bp, Zea Mays
aagaacaagtgaacaatagtagaagttcacatcgcgcccgaattagactcgcggggccttcggaattgctcgccggtgttgtgttccaccgtggaatcgcccctttccatgaccgtggatccccacaacgaagccctccacgtagctccttatcgtacccgcttcattttgcgctagctagggcagtggattgtcaccgggagatggggttgtgggtctccggcatggcacaccgtcgtgggtgggtagcgcgccgtgctggtccagcagatgagagacgatgaccgctggccatagattggccagtatgcggtcgagattagattttagatgccggttcgctaggttgatccaagccgtagatcctcgatcgggtgatcccgagctattctagttactttaaatgtaaaccttagatctcggatctgtgcgccggcgtcgtgagcccctccgcttttaatctgagccggtttgtccgaatcggacggttctgggtgatcggtacccgttcgacatagagattttgtaaaagagcccctaaaaattgtaagaattaacccgctgtccactgctagtgaaaaatagttacatctgtgccctgacttttataaaaataaaccctgtgctttcacctttttgtacccgcagtccgaatagggtttcagatttaataaaacaaatcagaaaatgaattgttatatggaaattaattcccaaaccttaataacactccaaattgaaccattc

SEQ ID NO: 119650 - DNA, 336 bp, Zea Mays
gaacactctggcgaggtttgaaaccaaaccaaaatcgtttgacatgatttgacataggttttgtcttggtttgaacagtgccgacagagctatcttcacgccacaatatcttctcacccaggccatatcttcactcgggactcacacacgacagaaagaccttggcacggtgaagagatgctacacaggatccttggcaagatatgcacgtttaggtcggccaacaggtgtttgaactcgggcagaatcacacctccacgtgttcgatcgtgtgctcaagcgctcggctgcgcactagctgccctctacgcgcgtgtcgtgcatggtcgatgcctg

SEQ ID NO: 119651 - DNA, 679 bp, Zea Mays
aaaaaccagaaggacatttggtggctttccaagttctaccccatggaaaatggaagctaaaatcctgttccagatcttcacacttaacctcaccctcaagcactttcaccaaacctaagaaactttttctaggttttttagcagcatttttagcaaactgagaagcataaaaccctaatccatcagccgccatacccacaattggcatagtaggtttgctttgcttaggccagacacatttagcagtgacatgagtttctttcctacaaatctcacaccaaagaggcttgaaacaatccctggcgtgatgcccttcatcgccacatttttggcaaaaaagacgacgaccaatatcaagatccatgcaggaattgccatgtatacatgacacgagatcgatccgcattgcatatcaaccgtacacataacacgtacgctcccagcaacttgctttgcttagggtggtatctgctcacgataaataaactattaataagaacaccaacttgcatcggcagatgcatgcattgtgtaaaaggtgaggctgtatatccattacactaaatacctctagccaagagacaagcaatatttagggtgtatatccattacaaagaactctttgaagcaagctttgcattaagccacacccggttccttatctctaacgatgagatta

SEQ ID NO: 119652 - DNA, 346 bp, Zea Mays
cttcgtctaccttcggttcagtagagggtatctggtcaagctttcgcttcttagaaattgttgccttcagctctggcgttgtttttgctttcttcaaggccttttcatcttcttttacggaccgggcaacttgctaacccttttcttttcacacccccggccccttcgtcaaacctttcataatctggatattcaaagttcaatgcatccattacccggttcagccttcatttcggccaggtaccgaaggcagcagtcattagctggtcctccttcttcgtataattgccaagaatttcattgcacatggtctcgatcatttccatccattcattgcatggtttct

SEQ ID NO: 119653 - DNA, 562 bp, Zea Mays
aggaggccgtggtcaggcctacaaccgtggaaaggtgaatcacctagaggcccaagcaatctaggatgctcaggacgcggcagtaggtatgtttccaatcaaatcctacccagcaaaagtactatttgatactggtgccacgcattcttttgtttctacatcttgggtagaatcacataacatccccaaagaaccaatgatcccacctttaagagttaattcagttgggggaaagttcagtccgataggatttgtctgaatctaaggattgaaataagggggatagacttccccgctagcctagtagtaatgggaactcaaggtttagatgtcatcctagggatgaattggctacacataaatcaagccactgtcagttgtgacaagagaacaattaagttggtgtccccatctggaaaggaagtagtaacaaaaatgtacttacctgaactagaagaaggagcctgtcaccatttatcaataaatgacaaggagtccaatccgattgaggcaattaggattgtgtcagaattcctcgatgtattccctgaggaattaccag

SEQ ID NO: 119654 - DNA, 349 bp, Zea Mays
attaaacttacttctcgctttgccactacaccaccctttagtcacatgaccatcgtgagcatccttcacacaattatacgacagcaacctaaacgttgtgttacacaatacatacatctttcttcgtcgtgagtataaccatatcacggcatatacccgcacacctaaatcaaatatcctacgccaccactactataatacacaacggcacacacacatacgtgtactaattcaatcctcacataatctgtatttccaaacctactcatcacataaatttctatcgatgcccttctgacaacataacctgcaatttaagattaatccacacagcaaaccacacatccaa

SEQ ID NO: 119655 - DNA, 560 bp, Zea Mays
agttaggaagaataaggtctaatagatagatacgaggactggaccttggaggagaacaaaagttaggtgaaccgatccaatgagaaggtctagaacaagcatattttagcctacatagaattttaatttttcgatacttgacattaggcataaaagggttataaagaattgagggagggggatggcccactttgcccccctatggatctgcctctgccgggacctatgggactggacttgtgtctgacaggagcgctggcctcgggacccgctccctgcttggggataggtccaatgctgccacgtgccctagaggtgaaaatgctcagggactactaccatggatccagaccccgcagtggggcccgcaccctaattatgccgtctgaacccctatagacgggtctggacctccacgtgtatcgtttggaccccccacatgaggatcctagacctccccgtctgacattcagacccctgttcagggaaggcaaagacttcaagtcagcatgcgttcttatctcctcctctccgctcgaaaaggggtgcgatgctgccac

SEQ ID NO: 119656 - DNA, 449 bp, Zea Mays
agactgttctttgggcctgaactgattcaagaggcagaagaacaagtccgtataattcgagagaatttgagggtagctcaaaccaggcaaaagagctatgctgataatagaaggagaccactggaatttgaagaaggagattatgtgtacctcaaggtgtcaccccttcgtggaatgaggtgattcaaggttaaaggcaaattgtcccctcgctatattggaccattcttgatctttaggcgagttgggggagatggcataccaactcgagttacctgatagtctatcggatgtgcataatgtgttccacgtgtctcaactttagaagtgtctctgtgtccctgaggaacagttaccgatggaagagctcagtgttcagggtgatttgacttacacggagtatccaatcaagatccttgacactttgactcgagttataagaaataagg

SEQ ID NO: 119657 - DNA, 511 bp, Zea Mays
cccgggttgtccaatccgccgccttggtggtcattgcattgcatcgcatggctggacactcgagtcgcggcatcaaatgaaagaaagactaggagttgcccaagtcattcatctaaacaggcctgcgcacacatcgtcaaaaaaagggcctatcaaaaatagctatgtggcccattgaggcccaccgaaaccgatgcgcctgctcgtctcccttgacggcgctctggttccatggaacgaatacatgaggcaatacttcttccccttctcttctttctctatatctcatatatacgaccatgatcggtccttatggatgactagggtatatacttccttatcctgcatcattagccatgaagacattgctatctaactctaactgcacacaaattcggtagcaccgtagcagtcaccttgatgtgttctctttacttgtctgtttaggggctctttttcatgtagctgtactttcatcgactcccacgtgagttacaaaggccacaatcat

SEQ ID NO: 119658 - DNA, 473 bp, Zea Mays
gaggatttgatttactctttctgtttggccatctgtctgcggatgatatgcggagctccttattgcatgggtcccaagtgattcttgcagctgctcccaaaagcgtgccacaaacagtgctcctctgtcagatacaatggtctttggaataccatgcaaacacactatttgatcaacataaatttctgcatatttctctgtcttgtgggtggtatgcactggtaagaaatgagcggtcttggtcaacctatccacaataacccaaatagaatcatggtgccaggaggtattaggcaatcccacgatgaaatccatgcaaatgtcctcccatttccaatatggtatggggaggggttgcaaagggcctgctgccttcaaatgactggccttgattctctggcaggtgtcacacttggatacatacttggcaatttctctcttcattctggtccaccagtataaggatctgagat

SEQ ID NO: 119659 - DNA, 339 bp, Zea Mays
aaaaattctagtgtaattagatcgggatcgatactgttttgtaattatattgttgtattgtatattctgagaatgtagcaagtaacgaggggtatgagaattacttaggccctcatctccttggtttccctatgaatactccattcgccccctgaataggacacgcataacaagacatttgagcaccctagcttcctgttttgttgagcattgttgcctcgcttgctactgagtgcttgggcccacatgttagaacctaacatttggcgcccatcatttttgctttgacaaccaatcacacgatggatctcaataagatgaacactaggtcaaactcca

SEQ ID NO: 119660 - DNA, 367 bp, Zea Mays
gcggagcaggcggcgaaggagccagtcgagttatgtcgtaaggtggaagaaacagggaaggtggtggcccaaatccgtttggaattgatggggaagcagttggaggattcttctgggggagcggaatttccatcatccgctcatcaacatcacagtgaatcaacaggtttcaggggaagacaggagcatgtggaatcccgtggtgaattcagaggtggtccttctagaccatctggtgatgttcatcagcattcataccattctcatcaggtattgcccaaacttccatttccgaaatttgctgagggtgatcctgtggtttggttggacaagtgcttggagtatttttctgtctaccaagttccag

SEQ ID NO: 119661 - DNA, 405 bp, Zea Mays
cttctccctgccagcgctctctctctgtgcctggagatttctcccctctccggcgatctcccttcaacggcggcggccctccggcgacctcaccccggtgctcaccccttccccccttaggtgagcagctctggctccctctccctcctctctatttcttttgagcagagcactccattccaccccttttgcccaaattccaaatcctgtgaaatcttgtgcatccatgttgtggtatgtgtgcctctgtgtgtattgagcatccctgcaggtttctagctcctttgggagggttttcccacctcaaatagccgtttcaccgaaaccctagaactccgcacgtcacgtgctcggtgaaatgcccaaaccagccaaaaatgctccaattgaacccaaatttttcag

SEQ ID NO: 119662 - DNA, 400 bp, Zea Mays
ttgtggtcggcttttgcgtcgccgcggttgggcgcgaccgttgtggcttgctggaggtaggagaagctctctgggccgtggattggccgatgaacggatgagatttgatcgtgtccgatggtgatccagtgcgtccgctcgagatcgtgcggctatgaattgagttaggttccataaaatcgggacggtaggatagggatctaacggcccggatggcattccagttcaagcggggaagatttaatctgtacccttgtttcctgatcggatggccagtactcgtccgtaccccttcgtggtgtatcttttgcaaaagagcccctgcagttttaagcaataaacccgtcgtccatgtattactattcactgtgcctagtatctcttgcgcagagacccccgc

SEQ ID NO: 119663 - DNA, 630 bp, Zea Mays
ctaagttggaaggtgtgtcagagatgccatggccggtgatggtgcaagtagctaatggtggtagattgttatgtgacaaagaattttttggggccacatggtcgatccaaacttgtgaattctgcacatattttcgagttttggatatcgcagcttatgatattattgttggaatggattggttagttgtgcatagcccaatgaaggtagactggggacatggctggttgttgattccgtatggcacatcgtcagtcttattacgtggtggtattgaggatgttcaggccactacagttgtgcggtctactacttcagaatctttggctatgtcatgggctgatatggagttgccgcaacagatggcctcgttgctctcggaattcagttcagtgtttgatccaccatctgggctaccgccttctcgcgactgcgaccactcaattcctttggtggtagggtactctcctgtacatgtgcgtccataccattaccctccacttattaaggatgaaattgagcgccaaatagcagcaatgttggctgaaggtattattcagcacagcaccagctctttttcctcttctgtgctctttgttaagaagaaggatagttcttggcgtttttgcg

SEQ ID NO: 119664 - DNA, 949 bp, Zea Mays
tctcaccctctggtcagtattctgcgacgtcggcttatgagcgtttcttccagggagggatcctctttgactcttgggaacatatttggaaatcctgggcacctggtaattgtcacttcttcatgtgaccaggggttttagtccattgatcattttcttgcagcctgtgttttctcccgacaattctggttccagcttcttcagaaggtcggtctccagaagctgtgccacgaacctggaattgcttcctttggtgattggtggtggcatgctagtgaggcagtatctaggctctcaaggcatggtctgaattctatgattattttgggagcttggtccctctggaaacatcacaatagatgtgtgttcgatggaatttcgacctaacctttcaggccttgtgatccaagtctcagaggagctgcatctttggagtttagctggggcaaagggtgattctcacctagctgcccgaactctggagttgggtgcttgatgtattggtcgttccttttggttagatttttgtctcagacacgtatgtccttgttctagggagggggtgtgtgttgggggttttcgggctttctttgtacccgcttttttcttaatataaatgatatgcagctctcctgcgtcttcgataaaacaaggctaccaaataaactctaacatatatatcttgtggagcactctatagagctaaccccactcttcatctttggccagtgacaaattaggaatagagaattacaatatttggatgtttaattagagaagttcgaggcattttttcacctaaatctctattcctatcaatatgggtggatataacgtggctcttggagttcctctaatcaacaattgggacgtgttttctcatagtttctgatctctcatcatcaaacatcaccttccattccagaatgatacattttatataggaaaa

SEQ ID NO: 119665 - DNA, 362 bp, Zea Mays
ctaggagacaaggcactcaatcgcgagccctccaggggagcgtcgacagaaatcttgtacatatgtaacctcctagccataaggggagctaccccggtatgaaggtagttcctaataaccccttccaatgtgaccctcggtcgtggagaatcaatacgaccgtaataggtccggtcgtcttcttctccccatcttccgagatgccccatacccagctcagcggagcctcaaggggcgctccgtgtgagaatggaggaaggccacaaccggtagcaaacgaggaaccgtggttgcgtagatagaaccattggccatgccagcctttgtttgatgagcacagtcgcatgcgaagcagttcaagc

SEQ ID NO: 119666 - DNA, 538 bp, Zea Mays
tatgatccaaactggaggcgtgaggcctcgagggtgccctggaactgaggcgacctgatcagctgcgcgaagatgtagtagaggtagtgcacatacgacagctgtcagcgagcacgaagaccatccaagaccatgtcctcaatctcatagataagaaaatcaaccacatcaaactcaaagtgtgagatcaaggcaccaagtagccataactgaatgtgtgtggtggcctctctgtaacccatcctaggcagcagtgtccgtctcatcacctgatagagatactttgctacaggggtgaagtctgctggagagcgttgcgacccatctgggaaaagcggtatgaacagggccgcgacgtgagcagtggcaggagcgactccgccgtgagggcgtcgaggaggatctgatgtaccatagcacagactgtgaaggtgagtcgatgactctggaaatccaaacagctggcgaatctggctgacatgtaaagtgacatcctctcgctcaaaacggaacctcgtccactgatggtccgagtcga

SEQ ID NO: 119667 - DNA, 340 bp, Zea Mays
tagggcagttatgactgagaagaagcgtaaggatatggaagatcggaagcgcaagatgagtggaccacagtccggaagcatcagtcgtccccgcttctcaggcagttcatctcagcaaggcaggcccggtcacccacagggatatcagcatcagagtcagcgcccgcatcagcagcagtttcagaggcagtacccgcaacagcagcagtatcgtcagaacagtcagcagggaggtaatcagtatcagaagcagaacaaccaggcacctcgccttcctgccctcgtaacaaatcagagcaaccaagcagccccagcacaaggaggaggcagaggatgtttc

SEQ ID NO: 119668 - DNA, 364 bp, Zea Mays
ggaacacaaagggagagaatcgattcagttatatcatgatcaaaatgacacgttagaatatctattagtataatgttttatctaaatacgaggtgatcttctgtctttattggtattgtcatgacatcatttattgactacaatgatctacaaaactgtttttttgctgaaagtgttgtgggtctaatgtttgtttttgttagatgtatatagataggactctactgcttttttgctatttctctattgtatatagataggattgtatgttataccagggtatatctactggtattatgacctcatattgtaatacaaatgctatttcaggaataccatccggttggcgcgtcgatgtcgagcg

SEQ ID NO: 119669 - DNA, 290 bp, Zea Mays
ttgaatggtggtgctatatggggtaccttggatgctttgcttggaagtggtcgaattcgaggacgaattcttttaaagggggtagagtgtgataccccaattttctgaaagaagttaaatttctatttctcttttctttcatgttctgtagcattggggtttggagtttcatgaggcattcctcagggaaacagtagatcttttggcattttttccgctggggtcgggagctcagatgggagagcgagttcgggccattgatctcgatctgatggatgggagcccccctc

SEQ ID NO: 119670 - DNA, 427 bp, Zea Mays
cttttttagtgtaattacccaaaattttattgcacatagtttctatcatttctaaccattcttggcatggccctttgaattgtttctcaaatttgaatcgataaggcagtcgcacaagttcattcttttcctttgtcccctttagcttcggcatattccattcactcagcgtcgggaacaccttataggctagatattcttggactagatctctggtgctgatccgctcggcttccaccctgaattctgccacaacttcttagcacggtgaccctgacgtcatgcggcacaggggcctagccaacccgaagcttatgctcagcgggctcagtactagcgtctttagcttctctctcttcttttcatcggccttaacatagaaccactcatttttccaaccggttggccacttggtgcgatagctaac

SEQ ID NO: 119671 - DNA, 885 bp, Zea Mays
aagatctcaggttcagcccccctcgctgccggtgaccactgcgcaaggattcgcgctgatcgcagcgattcgtgcaggactcgggcaggataataccgggcgggtgaaaggatcggagggggagcggatttggtcgcggggtgaagcttatcaaccgcgcctatagccgtgcgacgtggccggaccaccggtgtcgtcatggaaactccggcgaccttaattatgccacgctgtggctctttactgcgcagtagtaaccatggcacgcctaggcttaccatctcagaactgttgcaccggtgaacgccacaactgagccaccaatgaccttcctctccagccgccagcacgccatgccaaaattaggagccaccacccttggaaactataaattggtaccctgacctgctccgctaagtaattgtgcacccagtgaaccagccctcacctccaatcatccctcacaactccccaatttgggatttcccccaaatcagtcaagaaccctgccgtgtgtgagctcgtcgtggccagctctccacaggtccaatcatgtcctcctcgctcttgtttcagtactcttgtgtgctcttgatgcttctcgactcggccaattgaactagaacacgtaggatcaccaggaatgcctcggttcatccgtagttcgcgctgtcaccctggacagagagattaggagctagaactttgcaattgattgaggcgaaatggtcgttaggggtagaattaggtgtcagccacaccggagcaacggtcgtttcgttattcggctggtacaggctcgccagagccactgctccgccgtccacggtcggggacctcaccttgcgaaggaatagaaaggggagggtctatctgcaattgtca

SEQ ID NO: 119672 - DNA, 394 bp, Zea Mays
ttattacgtgcgttaggactaccatccacaataaatcaatgcattcaccacaatcatcaaatccgacatatatgtatatcaaggtgcttttcacccactagttcgcattttagcttagacaccacatgagcactactaatttttacccgcgatcataaccatgcacaattgggctacaacatcccaaacgggtgcgagaacactagtttctagttttaaccccatgattattctattaatcattttaactacttaatcggcatcgaccgacttaaccttcatctcgacggtccgagcaccacaattcacgaaagtctacctagacatctagcatcacatagagagcctactacttcacattgcaattcatacagaaccgcaaggtgacaataat

SEQ ID NO: 119673 - DNA, 300 bp, Zea Mays
gtggccagctgcagatctcctcagaccagatttcctacaaagttcgtcgcctcgcgtctcggcctcgctcctccgctccctctacaccctcagccagagatactactccacctcccactgcatcaactcctgtcgctctaaagccatccaccacttccgccatacccaccacctccaccgctgcagcttccactgttccccctcccgctcccatttccgctccacccattccaccacccccgcttcagggagcgagacaagacagaggtgcgaccgttagctgctgatcctcgactgctt

SEQ ID NO: 119674 - DNA, 636 bp, Zea Mays
agaaataatctctccggcacaattccaccactgctcttcaacaagtcatcgctcctgtatctcggagttgcatcgaacaagctgcatggaagcttgccagctgatgcaggcaccaacctgcctggtgtcaaaaagctcctcctaggtaacaacaggctgtccggaacacttcctagttcacttggtaacgctaccatggtcgaaatattaggtcttggattgaacagattccaagggagggtggcacctgagataggaaagctgtgcccgtttaatgtcgagatgagtgcaaatgaactgcaagcagaagatgaacagggttgggagttcttcacgctgttcacgaactgcacccgtcttcaactgatcgatctacccctgaacaggttaggaggagtgcttcctacttccatcactaacttttcaacacagatccaatggctcagcatcgcggccaatggcatatctggggtggtcccctcaggcttaggaaaccttatcaaccttagcaacctagacatgggtgaaaacgacctgcatggtgtaattcctgaagatatcgcaaaacttacaaatctgcaagtattgttgctagcaaataatcagttctcaggaaatataccatcctcctttggc

SEQ ID NO: 119675 - DNA, 363 bp, Zea Mays
cgaaaaactatccgcgcaaagaccgattacaggcgcagccggaccggcataacaaacacgctagaccaagtgcacaagtcccctacgggcacgaccggatcagcgaaggcacacaacctcatcatacaaattatagttacatacgtgcagcgagggcaccacacattacattggttcaacttttaggatgatacccatctccctatagttaaacagcattatcctcaactcctcaccctcaaaaagacttcgcaactccccctcacctacactcaccccagccggcgaggccaacaattcccgcttgccagccctgtccacacgaagacgaccaccctccacctcactcaccctaagcttcgc

SEQ ID NO: 119676 - DNA, 566 bp, Zea Mays
gtctcaacggattttgttgaggagttggcagagatgtgcgctgagctcggggcggtcatgactttgcccgacctccgacaatcatcttcgtgaatgctgaaggtgaccaggggtgactggcatagaaaagaccctatccccctagcctccggtgaagattactttacgtcccgtttggctcaagattttaaaatttttccttatgggagaaacattggtgttgtattaacagctgtgatggaaacagatcgacaggaggctgcgcggaagaagtggaaggctccagtgcggctggtggatccccgacgcgacacgaaggtgccgcatcccaccgcgaagggacctaccgtgactgctgccatgcctccccctgcagtgcctgctatgaagttttgtggccaggggaggcctggagctatggtgccagagggcttcactcctcaaggtagtttaatccttggaaggcagttggtgcggggactagcatgtggggtgacgaacgtttatgcagcgtgcagagtcttgctgctggtgatgggggtctttactctgcatttttgcaattt

SEQ ID NO: 119677 - DNA, 659 bp, Zea Mays
gggaaactgtaaatggaggacgacccaggtagcggtggaggcaaaacactttattcacctatatatatctttactgtatgaagtgcaggaagccgattgtgaagctaccacaaaaaaaaaagtcagcaagatatgcattagaaaatgcttgatatgcatgtgcgatgatacaagatcagcaagcggaaatgcttagaaaaaaaactgttcttatcgatcctcactgcaccagagtaactcgattggaaaggaaacatttgaaagaaattgccagtactcgccatttgcacctatctgctgtcactctgtctacagaaacacagggccttttcttctggatgtggagggccatctggaacttgttagcgaggcttcgtcttgtagggtggtggttttgatttcccatcatgttctttgatcagtctggcgtctagagatatgcggtggttagatacttttgaatatctgctgtttctttgcacaagatgagcagaacactaatctaaaaaaacattactctaatcaactgatcgtttgagtttaaaaggaatattaatgatcaatacttggtgctgactatttgcgttacttgtttagagatttttagaggacacgggacatccgaatttatcatgtgccagttttttttaaaaaaaaac

SEQ ID NO: 119678 - DNA, 274 bp, Zea Mays
tcagaacttcccacaccccccgattcagccttgcacggaggactttttctggtgtagggatgactctgccgttgaggagctcagacaacggtataacttgggttggagcctcccctatgaatttcttgagtagagaaacgtggaacacatcatgtattctggccctgggaggaagctgcaacttgtaggagacagtgcccaccctcgatagcacttgatatggcccaaagaactttgggccaagtttgttgggtgtagcagaagtgacactaac

SEQ ID NO: 119679 - DNA, 599 bp, Zea Mays
aaaataatcatctttcatcatatgctcccttgcgctattaacatctctcttaagtattttcaatgagcttgaaaggaaaaagagacaactataaagggaggactctcaaatgaaaaaggaagaacatcaaggacaacaacacctacttggacaataaagtcttcacaacaatcaatggtgtggttgtaagcattctaaacctctttcattatgagattaccaggcttaagttatttattgcaaatcttataagccttgatcaagatgtttaatggatctccccttatgtcttttaaagtgaatgcactaaatcaattctttcaaatactttgtgcatacctttagggggagtccattcttatattcttgattatgttgagactatagctttatcttagtaatttcatatagtctcttgcatgagaatagtgtttctcatgaagtatgctactgcacatcaatccatcttgttaaaataatgttgcttttatcaaggattgttgctctcattacttaagtagcatgcttattggattctcctatattaagcttaatttctatatgttactctcttgatcgcatccattgtttgtttgatc

SEQ ID NO: 119680 - DNA, 292 bp, Zea Mays
gccagctgctgctgagactagaggagttgaagctgctgttgagggggaggccacttcctcaagggaggctccacaacatattcagcaccgtcacccacctcagcagatgatcggggagcttcacgagcgagtcactcgctctaggtcacaacacatttctcattttctcactcagcttttgttgctacttttgagctctgagatgttggacatgcttcatctgatcctaactgggttaatgctatgcatgaggagcttgaaaattttgaaagaaatcaggtttgggttttga

SEQ ID NO: 119681 - DNA, 536 bp, Zea Mays
tttggaagagccttcatgagaacatggatacgaagttgaacttcagctcgacctatcatccccaaactgatggccagactgagagaactaaccaagtacttgaggatatgctaagagcttgtgcccttaagcatgggggcagttggacaagagtctaccatatgctgagttctcttataataatagttaccaggccagtctgaagatgtcaccatttgaagctttatatggcagaaagtgcagaactcctctctattgggatcagactagacatagacagttctttgagcctaaaattattcaagaggcagaagaacaagtttgtatgatccgggagaacttgagggtagcacagacacggcaaaagagctacgctgataaccggagaagaccactggaattcgaagagggtgatcacgtgtacatcaaagtgtcaccaattcgtggaataaggagattcaaagttaagggaaattatcccctcgctttattggacccttagaatctttaggtgagttgggaagatggcctactag

SEQ ID NO: 119682 - DNA, 543 bp, Zea Mays
ctcaattttgagagcaggatggctttgttgtatggaggatcctagccatcggctaatgttgctgcccgtcgaggtcgtggtggttctggtccgtgtggccggggtcgcaatggccggtttaatcctggtcgcagcagcaacagcaatgcaccaggagggtgcagatctgatgggaacacaataacctgtcaggtttgtgacagaactggacattctgcccgcaagtgctggtaccgatatgatgaagacaactattccaactcaaattccaagagtgcagcagcagcaatgcacagctatggtgtcgatacaaataggtataccgacacagctgcaacggatcatctcacgtctgagctggacaaactgaccactcatgagaagtacaaggggacagattagattcacaccgcaaatggtgcaggtatgaacatctgcaatgttggtaatgctgtaattgacacccctactaaacccttgtttctcaataatatcttgcacgtcccaacagcacaaaaaagtcttgtttctgttcatcgtttc

SEQ ID NO: 119683 - DNA, 403 bp, Zea Mays
aaaagatctcgcgggggtgaggatttggtcgcgacagaagcttatcaccaagcctgtagccgtgcgacgtggctggatcgccggtgtcgccgtggaagttctggtgacctcagttatgccatgtcgtggctcgttactgcacggtagtaaccgtggcacacttagaattaccatctttgagccattccaccgttgaacgccacgattaagccaccagtgctctcccctctctccggccaccagcgcgccatctcaaattcacgggccactgccctcgggtcctataaattgagcgtgccatcagtttcgctaggtagtcaagcatccaatacaccaactcgtgcctcagatcgtccaccagagctccctaatttgagatttcccccaaatcggtcaagaacac

SEQ ID NO: 119684 - DNA, 405 bp, Zea Mays
tgggggtccacagtcatttaggtagttaaggaataagtttggtcactccttggaaacaattagttgcaagtatactgaagtccttgatgcactgtttaagatgtcatctgacataattaagcccaaagacccaaatttcatcgagattcatcctcgtttgcgagaggcgaggttttggccacacttcaaggattgcataggcgcaattgatggtagtcactttccagcggcagtcccggcctcagagcaagcgaaatatattggtcggcacggttacgcgtcgcagaatgtcatggtcgtttgtgacttcgatatgaggttcacatttgttgtcacaggatggccaggttccgttcatgacacaagagttttacaagatactttaataacttatgcggacaggtt

SEQ ID NO: 119685 - DNA, 705 bp, Zea Mays
tttataaaaatatggtttatggtacaaataattccatcactgcgtaggcaatttttctacgaagctaacacaactgaaatggatcaaatcggagctaaaacagagaaattatgatttttctaacattcctggattaatctttttacactttaaaataatatctgattattagccagtttatttattttatttatctgaaaaatggacggctgacactatttccaaaaggcccggggttaatcctataaaaataaggacctgaatgcaatggttctccaatagattagaactgcgagtttatttgtaagaaggattgggactctttaacatatttcccacagccgaaggggtacgagcgatttctagacgtccgatccaaatccggtcgccaaaatgagatctgcatcccgccgaaccggtatactgtcagtcactggatcgagatccgatggtccagactttatgaaacccgctcttaccacaaccgcccgatctgagtgagatatatggctcccgctacccggtacccagtccttaatcaccaccgtcaattagccgctacccggtacccagtccctaatcaccaccttcaattagccgatcgacagctagtgctttatcccttacccctggtcataccggttgtccggtggcgctcgcacagccgccacggcgacaccattgtcggcataaagtgccatggca

SEQ ID NO: 119686 - DNA, 706 bp, Zea Mays
gttgggtccgcaggctccagactacatacggtagttccctgacccatttgcctacgagcttttcactcttgttgaatactttcttcctgagtgcatcaaatatcatcctgttggctctttctacctgcccgttagctctcgggtgtgccactaatgcatacttaatctggatgctcctctgctcgtagaaatcaaagaactctaagctagtgaagttagatcccaggtctgtgatgatgctgttgggtatcctgaatctgaacattatttcttgaattaacaacactgcttttgctgaagtcagagaggcgattggtttgtactctatccactttgtaaatttgttgatggcgacgagtacatgagtgtaacctcaccgagctttcttgaatgacccgatcgtatctagcccctagtatgcaaatggccaggttatacaaatagtttgcacatgttgggcgggtaagtgttgttgctttgataggaattggcacgcttcgcacttctggactaagtctgctgcatctttctttgttgttagccaatagaaacctgacttgaaagcttctcctaccaaggtctttgatgccgcgtgtattccgcactgcctcgcatgaatttcttccaccagttgtctccccgtagccgagtgaatgcatttcatgaggactcctcctgcacctctcctgtatagcagaccccctat

SEQ ID NO: 119687 - DNA, 1181 bp, Zea Mays
accaagtccaagacgctctgtagatgcaaatgtcagcaaagaaaacatccactgacagaggcagagtggagcagggatgtacatacctgaaggttggaaaggaattaggaaaatcccaaggctggaggtatcgatgtactcctaggaggaaagacgctaacagaagcaacatcatgaacagaactaggcaccaaaggaaaggggtaatccaagctaagtgcggcacccattggaatctcgactccaggagcacccattgggtctttagtgccatgggacctgacctctaagttggccgggccagctataccaacgagaagatcagaactcatctctacagcttcgttagaccgaaccatttgtgatcccatgtggacaaccatggaggcagcagagggggagccagtcctaggacccttgggggctggatcacctttagtgacaccctcgggtaaagcatccttagggacctaagcaccctcgagggctggagacacatggcaagatggtggggttgcctcttgcctagccagaagactagcagagggtgcaccgtccgagcattctacacgaacgtcgatgcccctaacctcaaaaagatcgagcaaaaggtcctcgggaataaccttctctagcgcgctgtcgatggcggacatagtcattccctagaggctaaccagccctgagagaacgaggtttggaatgtcattgttagccttactacgacgatccctatgtaccatgggagcacatcttcttcatcaccatcatcctcctcctcttccataacatatctgctgaccctcacaccaccacagctctccacatcatcctcaagatcggcatccgccgcatcatcaccaaggtttagtgcagcagagtcaacctccagttccaagctagatcaacgtcgaagttttcacttcttctttttcgcttcggcagactcagcctgggagtttgcccggcatgctcgcttgcaacaagcactcctatgactgcaaattcttccttccccgccacacgagcgcccgggggcagcactccctgactcaactcaagcagacccagacgattctccagatagtgcactaaggactgcgtccatctcagcgtcatcagtgacaacttgcatctggaagtgggtccgtctctcctcctaaggcaaacctccatgtgca

SEQ ID NO: 119688 - DNA, 764 bp, Zea Mays
ggcagtgatgggggcagtgatattccctcccaagctctgtcggcactcgtcagccttcaggggctttcaatatcggactttgatgaggcactggaagaggtcattcctgaagacatcttatcagagcctcctgaggctaacattccaaccatctattcagaggtcccagatggtggactttcgctgcttgattctgccgggcaagaggtaacctgggtggtgtctcgtgcatcgtcgaccttggagggcagtcttccatgcaaaaacactgatccgagtcatccaactcctatggaggtggctgaggggccttcatccttagaggtggctactgcagaagacccagcccccgagggtggcgctggtagtgacctagcccccgagggtgttgccggtagcaacccagcccccaagggtggagttggcggtaatctagcccccgagggtgttgaagcatgctctctctctactgcttccatggatgtccacattggatcgcccccagtccggtccgaggaggtgacggtgagacgcgtttctacggctttcactggtcaagtcgctttagaggtcagcgagccagatgccaggagcctgctgcctactgatggggctgaggtcacctcgagtcgtgctcttgagattgttcctgctgatcttccctcgtcaagccatgcaccagcccttcctgcattgggtcttccattattcctttccagtcttcaggtgagtcaaccttttgctttttattgttcatactggcg

SEQ ID NO: 119689 - DNA, 696 bp, Zea Mays
gcgtaaccatctgggaactttaagtttttcaaccatttcatcaattgtttcttccttttaggtttaagactgaaaggagcacgtggcttcttctcgctctctcctagctccagatttggtcgactacaaattaagcccaagtcctttcttgctttaggtttgtcctttgttttgtcagtgatattcaagcaagtgctgagaacgctttcacccatatttcgttcctagtgtatcacattaatgttatgcattagaatcaaggctttcacataagggagttcccatagaccacatttgtgagtccaattatgctcggttacaaaaccttcaaaatgattttcatgttcatttagtttcaaatcattaaatctcgtgagaatctctggaccactacgatgcttgggtggtcccctcatcacaatcgtgtcctttctaaaagtgttactatcgaacctgaacgggtgatcctcaggcaaaaaacatctatggcaatcgaagtaacatatctttccaccaaacttcagttggaagcataaagtgtcttcaacgcatatcggacatgttagaatcccatggcaactccatccagcaaagataccataagccataaaattgtgaatcgaccataaaaacacagctctcaggttgaacttatgtttcttgtaacaatcgtacgcctcgactccttcccacaaa

SEQ ID NO: 119690 - DNA, 1143 bp, Zea Mays
gcgggaatcatttggtaattggcagaattatagggattagatttcgcatgcaaacgtgcgtaatctgaaacgtgggcgcggaattaatggatcttgcatggcgtttaattgaggcagttaaagatgatatcaaataagatgatgaatggtttggcataaaaaaggtacgctataaatgttgcatatatagtatatctagaatggcgtaaaacattgaggcattgtgcgtaagaagttgtaatgttgttttgtattgaagttacactcctacaatatcggtatggttacggaaattatggaaataccctggaaacatgggtgcggttacttgtttagagtatcatccgtgatttccttgcattcgaaaaaaatatctgactactggagaactagttggcgatggagatgtccggctctggacaatcgccggcgatggtaggagatggcggtcatcttggtccaaacactgagggatttgttgatggtaacttaatggttacaccgcctcctgctctacgggggcctgtaatcgacgcttcaagcatgggggatgaaggtcatcaacggattcgaccgccaatgtccaacattagctccagggatatggatacacctcaaatactgcattcacatgtaagtatacttgttttttttattaataattgattagattgttatgatcatattctggggtacaaacaacaatgtcaatgaattgcagaaaaaaacattgatccaaatatagtgccaacagtaggggatgactttcaaggatgttgatgatgcatataaattctataaaaagtatgcatatgaagttggatttccattgaagaaatacagagagaagacattcagtaagtggataaattgttcacgtgaaggtaaaagtgcaccaaaaccaaatgatacacctaggatgaggaataggaattcggggcgtacgcaatgtaaggctggaatgaaatttaaaaatatatgatgatgaaaaaaatggttgtagctacaaaaattgaactggtgaatttggagcataaccatgagtacataactgacgaagcagagaaacaacatttacgttgcaacaaaagtagggatgctgagttcataaattttgttgatgcaatgcatgatagccgagtg

SEQ ID NO: 119691 - DNA, 959 bp, Zea Mays
gggaaacagcagctacagtccatggatgaaccttcaactcgccatggatcatcggcgactcgtcggagtagtgggcggttggggaacgtcagtggggttgcgtgtaggggcttcgagtgactatgtagagttcacacgcccgaaggccgctcggccgagggaacagagggaggacgcaggggatgggagagagggagaggactcacctagaaccgccatgtgcagggacatctgcttctgcgcaatttggatctagggagggagatgaggagttatgcgatggtggggtgggtatatagaagagaacacaggaggtggttgctaaattcgtcatcaattgcgtcgcaatcgagtgagagaggtggttgcgagcacgacgaactgcgcgagacagtttaagacggagactgagtcgaacgagcggtagacagggttagataaaattagaggaggacggtcagagctggcccgtgggtccaagacaatgtgatagacgtcggagggatagaaagggatagacgaggatagccgacgcgagtagcatgtcgttcgcgagagaagaagcagttcggtgattccgcgaaaaagggcacgaggtctgaaacgggctcgacgagaggagcaagaaatatatatatgtattatcgaaattccatattttatagtttctccacaaatgctaaatttttaggtatttaaatgatattaaaaaaaacttaaattcatatttaatatccgaagaaacgttccaaagattccaaccattcttgggaatgtcctcgagatatttttaacatgtttcgataaaattttgcactcataaacactatgcatcggcatgaatgcaacactcaagcacctctgaggtttttattttactaagcttacacctagatataaaataaaataattctccacttttaggaaaaaaagaagggaagcaaagaaatgagagtgta

SEQ ID NO: 119692 - DNA, 581 bp, Zea Mays
ggaacattggagcctgtaagctttatccacatttacatatgtacatccaccatacaaaggatgtagggtattatgctcaggcgaccctaacatttctaaatcatgagtgtgcaatttgtcgtgttagtgctccgatctagcggtcctaggcctacacccctatctctatttctccaattttctctagtacccttggtaccttggtgtcacaacacataacaccaaccataaccctttgatgtggccactatgggagcactaaacaaacgcactagacatagcaccaatggtcaaattccaacggctaacaaactagtgattgacattgtgcctagtctagttcccttgtctagtgcttgccaaacatggtggatgagtgtttgctcgaagttgccccaaaacatggtctcgggtacaatagggtagtgcgcttgtcctatgcctccccgaacacttcctataaggacttttgaagttccaacatgtggttagatcacattggccatgtctgatgtacaccagatgacatcatgctctagctgaaactatgtaattataaagcataaccaacttgtttagtg

SEQ ID NO: 119693 - DNA, 405 bp, Zea Mays
ataatttgggatggatggagtatctaattctgtacatgtacaatgcacacaccttacacgcaatatctaaattgttttatgtgtttcttatttacttgatctttgtatttctaacttgggtagtctgaactgtatgacatgctgagtctatctactatgacactcgtgatgcacatgctgtttgtgttgaagttaaatgatactgaaatacctgaccatttaatatgcctaacctttgaggcctagaatattgtggacatgtgtcttataagttagaactgtagtgctattacttgtagtgtcaaatgaacaatatgttacacgttgtttactactgttgtttccacaaattatgaaaactgaactgtagcattgtataaaaaaccatcgtttattggatatttt

SEQ ID NO: 119694 - DNA, 832 bp, Zea Mays
gaagtactgaccggaatggcagatttgacactgggctttagctaggatacatagaagacaagatgtatcgacgcagaagatggtaactatagccgatatgccacactgccgacccgttggagcaccttgtaagggccaaaatatttgtaggagagcttatggttggcacgagtagccactgaactctggatataaggctgaagcttgagaacattcggacccgcgtttatccgcctgaaatttcatacgttgttgtgcacgtagcagatgatgaaggacagcatgggtcatcagctccctctgtgataaccaagactgcaagtctgaaacaggaactgcatcggcagtggatataccaggtggtgtggaggatagtcgtacaatacctcaaatggggatttacctagggatgaatgaaatgaggaattgtaccaaaattctgcaagaggcagccacttgctccattggctcgggtgagaactgacaaagcaacgcaataatgtttcgaggcattgattgactcgcttcgtcttaccgtctatttgtggatggtaagatgtgctcatgcgtaactcagttcccgaaagcttgaacactgcttgccaaaatgcactagtgaatatccggtcgcgatctgaaataatggacgagggcataccatggaggcggtaaatattgtccaagaacacttgagctatcttcagagcagtaaaaggatgaccaaggccaatgaaatgcgcaaattttgaaaaagtatccacaactacaagaatgcagtcaaatttgccagatttgggaagtccttcaatgaaatccaaggataatacctgcc

SEQ ID NO: 119695 - DNA, 599 bp, Zea Mays
cccggccaaagctgaccccaatgggtgtgatgtctgtattattgatgaggatgaggaagaggaggaggaaattcccttaatacggaagaacagtcggcgttatatagccagtggggagagtagcggtattccttctccagctttgtctgctctcgttggtctgcaagaattgtctctggaaaattttgatcagactctcgaagacatggtccctgaagatctgttgtccaagcccacagatggtggaatgatggaagtttgcgctgatgtgcctgatgtcgggttagagttatcccgagcagcgtctcgtgcctcatcgaccttggagcgcggtcttaagagtcgagaggctgatctggattgctctgttcccatggaagtggttgaaaatcctttagccttagaggtggctgctacagagaactcggtctccaaggacggcgctaacgttttacccagcccccgagggtgttgccggtgatgatccggctcgggtgggcagcgcgagctataacccagcccccgagggtgtccgagcgggttctccttctcatacttccatggatgttcacgtcgggtcttctcctccacattctggt

SEQ ID NO: 119696 - DNA, 469 bp, Zea Mays
ctgagcgaagtcaggcaacaagtttcggggatgaggcgggtcatcacgccggtgcctggcattatgttctacctgttcccattcgtgatcctaggtgaggtggtggcctcgtcatcggagttccactattcgtaaaacgccatctcattaggggttcccccgcttcatacgctttatcccgagaaacgagcttggtgggatcccattctccagttgtgtggtgacaccgagcattttagcgctgatttcgatgatggagtgcctcatgctacgggggctcctccccttgcaaggtgggttcgtcgtcggagggagtgtcttctattcttccatggatgaagaggacatccaggaaataggggcgtggagccaccccccgacatcccaatcgttgctcttgtgggctaggcagccaatgtggtcttcggctcttcctcgatgactgtgggagcataggggccttctgttc

SEQ ID NO: 119697 - DNA, 438 bp, Zea Mays
aagctacattttagatgattattgcagggtagaagtgacgacggtcgtccaaggatccaaggatgacatgctaaacatccctgggcccgaaggtatcgagacacttggacaagccataaacaattccatacgttggcctcaaagggatgtcgaattggttgatccaccaacgccgtcgtcgtcgcatccccaaccatctctgcctcctcaaactttaatacctattgtacatccataatcacctcctcaatattcacatgctgctctcatcctctttctaacctaccgcctccgccacaagcatcaacatttaggactccaccttctcctcatcctcttggagacccgctgtctacgccaccagcaagggatccaccttctccatagccatcaagggattcacggccatcaaagaaatctaaattccctataccaaaa

SEQ ID NO: 119698 - DNA, 431 bp, Zea Mays
ccttcaccgtggtggctccattgcactttgcacatctttataaccttattcctcgtaactcgagtcaaagtatccaaaatcttgatggggtactcagcataagtcaaatcttcttgaacactaaggtcttccattggtaattgttcctcaggtaccctgagacatttcttcaactgagatacatggaatacatcatgaacatccgtgagatgctccggtaactccaattggtatgctacttctcccactctctttaagattaagaagggtccaataaagcgaggggacaactttcctttgactttgaatcttctcatatcccagagtggtgacaccttgaggtacacataatctccttcctcaaattccagtggtctccttctattatcagcgtagctcttttgcctggtctgagctaccctcaagttctc

SEQ ID NO: 119699 - DNA, 368 bp, Zea Mays
gattgattgatggatggacggatcaaccaaaaattcgcagggtctgcgcaatgcatggcggccatccttgaaatcgtcatgcacaacatgatcaattagctacaaccggaatcttacatacagaagatggcttacatgcatgcagctctccaaattaaatcccggcaactaaacgtaattactggtgctaattacctagccagggatcggacgatcgatcgatcgatcttagtacagacttttttagctgtagcagcagtagttctagttggcgatcaactatcttttactacaccaaggcaaggcaactgcatggtgcgtggcagctcgcgcgcgcgatctccatctccatcgacgacgagatcgag

SEQ ID NO: 119700 - DNA, 392 bp, Zea Mays
cctaacctttttaattgggtttcatatttttctctggtggtctgcctcataagtaattgggtaaaaatttatttgcctactgttgcacaattctaggcttcctcatgatttaattagaatatgggccaaatccatgttttaattgtttaactcacttattatgatgggttggggtgtctattatttttgtagtggtgttctagcagttaggagtccactaaactttctttaccctttttgaaatggtccttgtatttttaaattacggtttttctagatttcttagttcctaataaatatttaaccttggactagctctagactagggttctctgtatttttcctatgtcctttatcacttaagtatactaggaaaaatatgttcctcctcg

SEQ ID NO: 119701 - DNA, 348 bp, Zea Mays
ctcataagttgtggatgtattccaacaaaagtgaacgctactctgacatccacatttcggtaaaaaatgaagggatatagagaaacatcactttaaaagtttatagacaaaaaacatgttcacaactcatgcatctaagtgaaacatgagtaaaagttaatgaatcaatgattcatttagcgcttttatctaattgtatattgataaacaaatatgataaacaatgtcaaatactctcacatatctggtattgttaatcgggtaaaagttataattttgatgcaataactctaaaatcgtgccaccgacctcgtcgcctccagcctctcccctcatctctcccccgcg

SEQ ID NO: 119702 - DNA, 398 bp, Zea Mays
tgcaccttcatgcgaagttgggcacgagccaaatgctgtttgactaaatccatcatgactttcttctcctctatccatttctgcagtgagggaatcgggcagacagcagaagactctactccaaagtgacgaggagcgtaaccatacaatacctcaaagggagaaaaacccaaggctgagtgccaactggaattataccaaaactcagctaaatagagccaatccacccatttgctggggcaagcattcacaaagcacctcaaatatgtttccatgcactgattcacacgttcagtctgcccgtctgattgtggatggtacgcagaactcatgttgagagaaacccctgccaatgcaaagagtgtcttccacaactgactggtgaaaatacgatcccg

SEQ ID NO: 119703 - DNA, 494 bp, Zea Mays
gttctggtcattcctctgattattgcctttctagggtgtctgctggttgcgccttggacagttgttggcatagtggcctagctcaccgcacttgaagcagccattgggttggacaggtgcgttgtttctggcctgcgtgttactggcgccaccttgacggttttgggaactcccaccagacctctggttggtctgagagttgctcctttgctggttctaactctgattatttctctggctttgttgtccagagcgttgcacttgataattgcttccaccctgatttccagagcggaactgcgaaccttgagcgttattcggacgagtgttcctgcttgactgaccttgaaatttccttttgtggtcagatagctcctttcttttactttcaaggccaattgccttgttcaatagtgtctggaagttgggaaatgtatggctctgaagttgataattcagaggtccaattagtccttccaggaaacgctcttggc

SEQ ID NO: 119704 - DNA, 732 bp, Zea Mays
caatgtcccagcaggagtagcatcagaagaatcttcggccagcatatcaagcatagcacttatttctgcatcattaggatccaaaggcacctcaaagtggacttgccgttcatcatcgggaatttctccaatcgaagcaactaaggcgctaacttcttcagcggagggtcgcactctaaggcccaaactgccatcagtgacaggtggattcgacacaaaaagagtgaaggccttgggaggaggtaggttccaggctgagtatgccactggggcaccaacatttgataccttacctctaagaatcatctcaagtcgattcaccaagtctacagagggaatccttctattggtaacccgagtcgagtcagctaggcctctgtacaaataagccgggtaagccctgtctttcaacggctgaatgttcttgaaaacaaaatcagcaaccacagcctctgcagtcagacccctctccttcagcagtccaacttcagctagcaaagccccagcctcagccacctcctgatctgtgggggactcggtccaactcggggtacgaacgtccgcctgtctcccccgaccgtgggggggagagaatttccgtggttctcaacgataaaccactccaaacgccatcccttaatactgtccttgagaggaatttcaagataatcagacttccttccacgacgcatctctaaactagcacccccaaccagctgatgctgccccccg

SEQ ID NO: 119705 - DNA, 830 bp, Zea Mays
gcgagctcaatccacagaccggaagcacgaattgtggcgatcggcaacaatcacggcggaggatcaccgacggtggcattcaaggatcctgttgatatttgtgtgcactgtaccattgcgatttttcttcagaacaactgactgagcatgtttggggtcaatttgctccatattttatgtggtgacccaaccatcactctgcatcaaagttgaagcttaataaaccagctttaactttgttacattgtgcacgcacaaaaagtcacaggatcttactcaaactcgagccctaagttcatccaatttcaatgttactgaaaattcagacttaaggtgacctgacagcccgactttggatcaaattttatcaaaacatttcatggcaccaaggcttaatccctatagcaaagttgttctcttatagtagctctacaagttcgatatattgaccctagggaaattctttgtatttctggatttacaaagctccaaagttagccttgctcaactgtatttcagactttaccaatgatcattagagtggcccttttgcaatttggcccaaatctcaaggtttcttttgcaattctttaaacatctgcactatatgacttaaggttccctaattccatggtttttgcacttaggtccaaaaatgtgccacatttgcatataaccccctagggtttcagtccagggttttctaggggtctatttagggtttctggcacttctagggtttaaataccacatcagtccattaatggtgacattttatgattattactaataagctttgaagtttttctcttatttaggctttgtttact

SEQ ID NO: 119706 - DNA, 340 bp, Zea Mays
ctggtgaaggatgtcggacggtccatgaggtggccagacggtttgtgataagacccagatagtctgcccatgcctagagccgatcctttgttaggtgcgagcgacgatggttgtggctgtgaacgtgttcgtcagtataccatataatggctgggtttgtgaggacccctttgtagctaactcttttggcgaggtaggctcaatcgtgacctcgtgtgatgggaaacttgaaacaacaaattttactattgtatacatgagattcttaagtgtgtcttctattccgcctatgttttgttgtagttcattctcttgtagatctatgtattgtttaagcgac

SEQ ID NO: 119707 - DNA, 431 bp, Zea Mays
gggaccaacaaggagatgcaacttaaagtcacctcagtgttacatgatagcgccgtggtaggtcattctggctttctggttacctatcgaagaatcaaagcgagttttgcatggccaggaatgaaacagcaagttcgatagtttgtcaggacctgccaaatatgccaacaggcaaagcccgaacatgtcaaataccccggtctcctactcccattaccgattcctgaacagtcatggcaaatagtcagtatggactttatttcaggtctcccaccgtctcgcaaaggtaagtgtatattggtggtggtggacaaactgtctaagtatgaacatttcataccaatgcttcaccctttcatagctttgacagttgccaaggtgtacatgtctgaggtttatcagttacatgggatgcctactgccattatttc

SEQ ID NO: 119708 - DNA, 614 bp, Zea Mays
gccacaaccagtagagatggatcctccgccaccgcctccaccagcaggagttgacccactggttgcagctcagatgaggatgatgcaacaaatggcagataccatggtgaatatgtgtgctcagatgcagcaagaacgccaggagatgcaccaggaacgagaagagatacgtcgggagctacgccaagagcgagaggagatatgccaggaaaggagggcacagcagcaacagcagcaacaatagcaagcaccactgcctccaccaccaccaccagttccaccccgagataagcaccgggagttcatgagccataagccaatgacatttgctagttctcctgatctactagacgctgatgattggctgaagtccatagagaagatgttgaacattgctcagtgcactgaccgggagaaggttttatatgcttctagatgtctcacatgtcctgctgctgattggtgggattcatatactgctgcccacgacgctgctgacactatcacatgggcgaagttttctacgcagttcaggaactatcatataccagttggactaatgaagattaagaagaaagaatttctgtcgctaaagcaaggaaacatgtcaatca

SEQ ID NO: 119709 - DNA, 376 bp, Zea Mays
tcagtttacaatcgtcctaacgaggacatacaccagtaagcggcgagagatggtaactgacgtatcactgattttgatgtacagggttgggacagacgtaacaagcgccctggagatgcgtgacccacaggcctgactgaccagatcgggaggcgggcgcacaacgcgggaagtggagccaaggcacaaccattatcgagccgagaccaggtaagataactcaacccatcttttcaatactcgatgctatctctcaccttccgggaaagtccgttgggtcctcgttgaccgtgaccgcgaggtggctcatgctattccataaagtttttggagttcaaaggtccgtccgtgaagggtttgcaaccgctccctaaac

SEQ ID NO: 119710 - DNA, 655 bp, Zea Mays
ggacctatgggacctgtttgagggggaagagttgaggttgatgttgttcaattttcgggaggcaggtcttattcggaaggaggagcctatgtgacaatttgttgcccttgctgttctgttgcgatattgagtgaaaacactgccctccccctcttcgcaatagaactgcgatggccatgtttgtggggtaaatgttgtatagtgtatgctattgtgttgtgggatggtgcctttgagcccttcgcttgtttgttcatttgtgattgtgccatgtaatttgttgtgcctattgcgagtttgctgcaaatttaggcgactttggtgtggattggcgtgtacgtgctttagatgacttcacgtttgataggtgaccgtgcatctgttgtgcttgtccagctgacccttaggcaacttttgctcggatgatgacttatgtagagatcgggccctgtgagtgttgttacgtacttttgtttttctggctgcaccattgggcgactattgctcggaatgtcttcgtggaagacttcacaccctgtcggtggtgtcgcgcacttattgtgtctttttctgctgcacccttaggcgacttttgcttgggcggtgtcttcgtagaagacttcacaccctgtgggtggtgtcacacacttattgt

SEQ ID NO: 119711 - DNA, 351 bp, Zea Mays
gaacattgctatgtcactgggcatcaagagactgatggtatatggagattcactggtggtcataagtcagataaacaaagaatgggattgctcgaatgactcaatgggcaagtactgcatggtcgtccgaaagctagaggacaaattcgaaggactagaatttcaacatgtggaaagagatcgcaacggggtagctgatgcgttgtcaaagctggggtccagtcggacttaggtcccgcctggagttttcgttcaagaagtactacgcccgaacatttcattagatcgggcagaagagtgcaatattctgagccaaccagagtcagattctgatgactggagggagccaat

SEQ ID NO: 119712 - DNA, 1222 bp, Zea Mays
atgctgcagggtcaggaacgctgggagctgtcgccctcggcacgtgatctccacctgcacggattcacgcaacgcaacgcaacgcttcgtcagttcttcagtaacttcacattgttagctcggtgctgtcatcagaaattaacaaactcaaacacttgcatttgcatcccctagctttattctgaaattactccacaggcacatagcacaagcaaacgcactactgaaaaaaaactgcaacggctactactactccatgcatgctcacgctctccctgtcctgcagatggctacaacgcccagacaaacaagtggtgcctgacgctgatgtctgactcccctgttagtttgcgatagtagcaaatgcattgcattatactcccccacagccacatgagtgagatgcccagacaacctactactactgcatgcatgcatcatgtacggttttatccgagaggaactagatagatagagcaaactaaacgtgcttgcaaaagcacagatctcaaggggcttatgggtccgggcccaaagcgcattattcaaattaccaggcacagatctgagatgcaaaaccgtatgtgtatgtatgtaactatttttcaccgccggccatgtacgcccctcatttgtttaattaaaccagacaccctctcaggctcaagtcaatgctttacagtcctgaaaaacaattacccaagtgccaagcctaccgaacaccccacacgattaaaataaaataaaatccagaacctttgtcattagtagtagtagtgtatattataaagcactaagcagggcagttaacgttgattgattggttggttgattcttccttctgaaaactgtccttcagcgagcgagcgagcatgcatgcatgcagaggtcagcatagcaagtgcccacacccgtgaccccagtgtgcaggtgttgtagtagccctcctccggccatgcttgctttgctttgcttgcctacctaacatgccatggcatgacagcgacgcctggccctactccgtattctttttttctatatggtttttaggtgcaatacatagggccaccgacattggcgacgttgacagcagatcccaaaatggagctcgtgatgcatactcactaaataaactagatggcatctgacttgataattgcactctaagcccataattagtgcccaagggtatggacaattctacccaaaaactgcatgtttc

SEQ ID NO: 119713 - DNA, 371 bp, Zea Mays
agtactttggataagattcaacaaaaattgaagttgtgtaaacagtacctcaaaggttgggattggaatctcaaaggtataaaaaaagagaagggatcagattgcttctgagttgaaaaaattggaagaaattgaagaatctgatcttttgaacagtaatcagattgattatagatgttctcttatgactgaaattttgatgatgcttgatgaggaagagctattctggaagcagagggctcatgaaatttggctccttcatggtgatgggaataatgagtatttccaccgtattgcgaatggtcgtagaaggaaaaacaacatattttttcttgaagatggagataggaaaatatttggggatgagaata

SEQ ID NO: 119714 - DNA, 1264 bp, Zea Mays
attcctatgctaagtctgaaatcagggttatagacccaactttggggttgtgtagctttcacaagagtgagaattcatattaggtcaccacatcaaaattgtagcccaattataggacaagtttgcttaagagtgcaagccatgttcttgtgaaaagttgggaaataattgagcttgaagttggactgtcagactgcttgatgtctgaaattcagattaacagtgggatgacatgaacttagggcttgattttaagcaagatccagtgactttttgtgggagcacattgtagcaaagttatagatggattgtagttctacaactttgctgcagatcattgggtatgttgccatgaaaatttgtgagcaaatcgagcctaaactatggctgtcaggttgactgaatgctgcagcccatggtacagtgcccaaccggatcagatcagccgccgcagaagaatcccaccgctgacgaccttcgccgtgattcacgccaccgctgttggattcgtgctctgggcgagtggataacatcgtgcggtagaagcccctcgccgacggtgagctggaggtcactccggtgacatcaccgtggctctctctccctctttgcggctgagcggattaacacgccggcgaccgccgtcttccggccatgcgcagcgtggctctcgctttccaccgcaccaccgcgccttaccctcgctctccgtggctcaccggagttactgccacgccataggacacgtattcaccgcgccaggcttcttcctcatctccggccgccaccgcgccatcgtcaattcaagcgccaccgctcgctccgcctataaattgagccaccggccagctgctctaggtcgtaccaaagccatagccaccactcccgtctccgattaacccccatagccagagaatcgctcacttcccccaattcagtttccgccaccgtgaaacgagcctcaccgtcgccagccatactccggtcagttcccgtcttctgctcccttgtttaagcgttctcatgcatctgcgatgctccccgacccctttaatcgaaccaaaccgcctgggatcgccgggaacgcaacactttaaccgccatgctcacggccgccgtggccagagctccgtagttgattataagcgcaattaagttaggggaaatgatcatggtagccccgatttcatgtccgctgctcagggaacccagccgtagccccaatcggccggtctaggacctcgccggagtctctccgcgcgtg

SEQ ID NO: 119715 - DNA, 288 bp, Zea Mays
ctgttacggatcgtcaggactagaccgctagacctaagacgaaaggccttaggcatagaggggaatataggtggctaattaattaggccccgtgggccaatacttatattttcaggatgccctaaaaaggcaccctatctttctcttgagaggtaacgtttcttccagcatgcatgcattataaaacaccaagaagaattaaaattttgagctaaccccctttctttaaaaccatccgggttccctttttctttttccttccaccatgatctttatctttgattccct

SEQ ID NO: 119716 - DNA, 1045 bp, Zea Mays
gaacaattctgattaaaaggcaggatcaccaacctggttctcttctcaggcccttgatttgacctttcacctctaaacccctttgattttccatgcccggaatttttggcttccactgccagtgctgtactgacagccctactgtaggtgagatccagacatgttgccattttccattgaagcctgtcattaagtcccctcataaaacaattctttttcttcagatcggtatttacttggtcaatggcatactaggatagatggtggaatttgttgagatactgcatgacagtatctcccccttgctttaaccggatgaacccttcttgcttcatatggagcactccctctggaacataatgctctcggaaggctagcttgaattcctcccaagtgatctggtgtccagccggttgaattgctacaaaatttgcccaccatgtactggcaggccctctaagctgttgggtcgcaaacaatggcttctgtgtctctgtgcagcgaatcagcccaaacttctgttccataactcttacccactcatctgcttctagaggttcttctgctttaataaagagtgggggtcgagtcttagagaattccgaatatgtagtatcacgcagtccttggggaggagctctgcctccatgctgctggaattgattgcctgccatttcacgcaagaagcgtgtattatctgcagtggcattgaccaaggcagcgatagcctcggccaaagtcggtggtactggtggcgggttgggtgtatcttctcgaccaccggaagtccccgcaccatcatgtgcgcgagttcgtgatggcatctgaggcaaagaaacatttgggaaaatataacatgccagcatataccaccatattacattacaaaatgtaataattatacagactccagcgtacaacttgacttcattacttattctacataagtacaatatctaaactatactattctagtcttcatcatcctttgttgcttcgtttcctgctgcaggagaccgttcgtcagcaaggttcatggaaggag

SEQ ID NO: 119717 - DNA, 605 bp, Zea Mays
caaagaattgaaattttcaaaaccctttctcaaatccttggggactccttttatagcattgtaccatcaactggagaaatgagagacagaaggtcaggggtggtaggaactaggaagcagccccagctgttggaggatcattgtccaaacctgtctggttcagcctgatcacatagagagatgcataaaatccagcatttattttcttgtagcagcatctttacactaggttgaatttggaaagataactttcctcaccctttgtttttgcctttccccgagtctatacctggagcaaaggcatagcatgttttgctcaagtgattaataactatcacactggccactggtttcgtgaatatgcttgtaataactatcccactttttgatactgtcttgcccaatttatcagcatgatttatcatgtagcatgttatagtaaagaaatatagcatgcctcttgtggtttcacttggaacttggaagtggataaacattgtaattgttctccatccatacaatccaatgtaaaatgtgtgaaaagtaagacagtttgttgtagcagctatctgaaaggcgtgtcgattcagttgtgccggtgaagc

SEQ ID NO: 119718 - DNA, 540 bp, Zea Mays
tggccaaaaagtttgataggttgagcctcagatttctgaacaatatgcgaggagtgacagttgagttagagcctacctgatacacccagcccaggtggggttggccgaggcccaacaaattagggttgcccggagcccaacagttcattatgcacacccaactcagggaaaggcccaatcgccccaaaagactagtccaatgggggaagggtggctctcccttttaaagtggcttcctcctcccaagttaagcgaggttggataattctgagtctcacacagtcaccgtccgactacaattgggccaactgggccaattgcgtctttgccaacgggtaatagtggaggatgtcctcatcattcccaccttcttaaaatgggccttacctctgataccagatgatacacccagcccaggtggggttggccgaggcccaacaaattagggttgcccggagcccaacagtttattatgcacacccaactcagggaaaggcccaatcgccccaaaagactagtccaatgggggaagggtggctc

SEQ ID NO: 119719 - DNA, 351 bp, Zea Mays
ctattgcacccgttaaagatatccgaatggaagtgggaagagattggtatggacttcattgtcgggttgcctcgcaccccaaaagaatatgattccatatgggtgattgtggatagactgaccaaagtggctcacttcattctggtcaagactacttacaaggggtctcagttggcagagttgtacatggctcggattgtgtgtttacatggagtaccaaagaagatcgtttcagatagaggatcacagtttacctccagattttggaaaagctttcatgagaatatggatacaaaattgagcttcagttcggcttatcaccctcagactgatggctagactgaaaggacc

SEQ ID NO: 119720 - DNA, 591 bp, Zea Mays
gacaatatgctgtcgttgatatctgctgagatcggcttcgagcttcggaaaaccaacacttttcaataaagtgctgacaaccttcgccccaactcggtcctgaaggcatcctaaaccctcttcggcaacaccaccgaagagcagcgcccctggctgatacccgcaagatatagcatagtccctcagttcttctttttcagccttagacaattcttgcccaattatgttttgaaagttgaaatcttcttcttccgaagcatcttcggcaatctccttctcttttccaggcatcttctccccttcttcaggcactgcggccggggtttcctcagcagctgcagcagtttcttcctcagccatattcaaaatcatttcatcaatatcagtaagtacgttttccaaatttgtggcttcagctgctgctgcttcggaagtagaagcttcggcaggaccggcttcggctgctactattttcggcgctgaggccgatggcggtgtttcttcaatagcctcaatgacagtaataatcctccgcttttttggttcagcgggcttctcagcaatcgaaggcttcttcttcttctgtaaaag

SEQ ID NO: 119721 - DNA, 557 bp, Zea Mays
tggcacaaaaatgatgagtagcaaggagctatgagtttggaaaccctaggaggtgtggaaattttgaagtttagggcttgaagcatagcactaaagggaggaagtagggttatatagtggacgacatggatgtaggtgctggggcttgggcatagggagcgcacatagagcgatgggttatggatggcaaagaacttagctatgaggaagcagatggaagatcacatgcacatgatgtattgaaagcagcctatgtgtgggtgtggtggtgcttgatagtgtgatgaggagcgtgtggcaacatggagcaggggcatggtatgttggtgtgttggcatggttgagcgattatgaggggcgcacaacatggagagaacaaagcgatgaacatgcaatgaaggagctagctcaacgggtgaggtggttgaggagaaagatacacatattgtcgtgaattgaaagaaataagcccatgatccatgtcatagacatgtttattgtgctcccctctaaggcaccagacatgtccagtgatgtaacacaccgtccacttccgg

SEQ ID NO: 119722 - DNA, 1061 bp, Zea Mays
atcgatgtcggtggccagggacaacaggtgtcgcggggtgtgaatctcgccggacttggggtcgctgggcgttgctgccatgaggatttgctgcatggatgaaggtaaggaagtgtaccattacgttctcctgagagccctctgcgtgtagtccgtttggatccgaataatacggccggggttcaaactttgggtggtccagccatggcgcttccatggcgggttggccgccaccgtcatggcctgggtgctgctgcggtctggtgttgagaaggggggaagaagggccgctggctgttagattggagattgacggctaggttcggatctggggaaaatagctatgagtcgttgatcctggcgcctacggtggagattagatcaagaccgtgatgaatccgagccatcgagatgagatcgaaggagtgataatagatcgggctataataaaatctagatcgttgcttttagatccagtggaatagattgggtaccgtttcagtttgagatgagtctaatctaggtcgtctgatgtagatcggacggttgatgccacccgataccccttcggccatgaccttttgttaaagagcccctgctctttttcgtatttaacccgccatccactccagctattcatcgagtcttagaatacttgcgtcgtagcccctgtacttaccagtaattgaggcatagttcagacagtgagaaaaacttataaaataatttagaaaagggatttttaatgtgaaaacaattcctagaacttgtatagttcctagaaaattcatagggagcccaaatttattcattccaattactataattttgtaataatgttgtttatcatatagtgtctctgttttgacatgaaagtcacactaaaaattatttcataattaatcggatgccaagcacatgaaaccttaggaaattcgtatctcctccgttttaaatccgatttgattcgttccagttgcgttagctttgtataagtatctactacacaatagcaacatttattatataatatcccatacttttataattgggttaatcta

SEQ ID NO: 119723 - DNA, 400 bp, Zea Mays
cgactcaccgagccaacaacgctgacatacaattcagtgccatgctcgttggcgtgcaagcagaaaagccaacaatagtcagaccctgcaactgaatggccctaaaatccaagacgcacagagactgggggcgcacagttcgctcgatcagcagagaaaagacatggccttctgtcggatcagatgtcatcttttgcaaaacggagaagcacaccaatacaaaacaaacgactggaactgacagtgtggactctattattttctgttcatagtcatacgtggacaccgataaacagcaacagcagcagaatttgatgaccacaaattttttttgggtacgctaatcgagcctttacgaaaaaggtttgatctgttggaacaagcccatcagttgattagc

SEQ ID NO: 119724 - DNA, 522 bp, Zea Mays
ctccaatcggcaacagggtcggctgggggtcggtctcctccacgatggtgactagctccggggccgatgggatcgtgcccgcaggttgcctgtccttatggcgagccttgtcatattggacagttggtttaaaaaggttggtcgcaaagacccctgaagggacggttatttgtcctgacactattttttgcgagagcattcgccatttcgttgtctcgccaagggatatggttcagttcaaggatgtcaaatcgttcctccagccggcgcacctcctgacagtacgccgccatcttgggatcgcaacattttgactctttcatcacttgccctacgacgagctgggagtcccctaggacgtccagacatcaaacacctagttcaacgacaatgcgcagcccgttctcgaaggcttcattcttggccacgttattagaagcttgagagtggagtcacatgatatatcgcagttggtcctttgatggtgatgtagaaatgagactgtcactagctccctccttt

SEQ ID NO: 119725 - DNA, 482 bp, Zea Mays
gaagtgcaaggaggaagaagtgccacgacaactagtcaaatggtgcgaggagccgaaggaaaaatacatagcatgcgtcacgctggatcgccaccaaaagatcatccgttaagaggagatcgatatagaatatctcctaccttcgcctcatgctcctattgtaagtattctagatccattttaaaactttcatagaacaacgggggatcagttaaaacaatatatagataaatttgttaacgggtgggcgcgttcaaatgaaaaatctattgccctagttttccctcgcatgaaactaatacatagccacccgcacctaatgcatcggctacaaatgggtcatcttatacccaaccattatggcgatgaatgtgttcatagcaccaccacaactgccgccgcatggcacacgattagctctagacatggtcggaccatccgatggtcatctcggaccattcagttacatcacagaatgtcca

SEQ ID NO: 119726 - DNA, 847 bp, Zea Mays
cttaacaagaatcaagagattgagtggatagaaggaggtcggttcaggcaaactctaaagatccagtgcactgatatatctgaagaacacagggaaaagatctatggcactgttgaagcaaatgagctcgagtgatccagtgggggggatcgatccgggggaggataactttggacgtggcatcacccccgcgagctcagtcgtgcgtgccggagatattcaccggcggtcgccgtgactcagtgcttttcgccacggtgtcatccatgccttgctcctcccttactgtacctcttctatacgtggttaccatgcgtaagcaaagccttccacaatcgctgatcgttagccggaccaccgtggctataaagggcgccatgaaccacggcgaagtactcacatctccactagtgagtttgattgtagcccaaaattcgcactgcccctgccacctcttcccaaattgagtgtgcacagtgaaactatagttccttacggtcgtgtagccccaatctcacctcccaatttcacccagagccgtcgcggtgccattttcccctttctctgtcaccggcgagcacaagtctccgtgctccatggccggaccactctggtaagactctgcacctctcgagtgttgttttagcagctctgtatacccgtgaagctcatcatagtagccatttgaccaattcgggcgtgagtgaatgggaacgcaggctcgacatcacggtttccgccgtgcgcgtgggtaggaccttctctaagtatgcaaaccaaaattaaaggctgttcttgagccgcctggggtcggaaatgctcaccccgtagctaattgggatagtcg

SEQ ID NO: 119727 - DNA, 1231 bp, Zea Mays
acatctttaaagcatgtaatccttgcaaacacttttgcatctaatcaccaaccatacaaaagatgtagggtatcacactcatgcagctcaaaccaatctacattgtgcttgtgtttacaaccatatcgatgtcctaatacaatggtcccagtcctacattcctctctctccctctcattttctcttgtacctttttgtactatggtgtcgcataaccgtgacatttgacacaccacgttgggtgttgcgtgctttgctgtgttgcatcgacaatggcttcatcagcgcaactagtcgatgaaacgatggcctttgacactggctccaacaatactaaccatgtactaggtcatgagcagcataccggtcttgcttgatatatctctccgctacgttaggcgaagctaaggtcgggtcaggttgaccaacctcttcctccattacccaaacaacttcctttgtcggtctagttcgatatcccttattgggaccacgtggcactaccaccactagccccactccttttgtgatccttctggtgtaaataatatcaagggagtctcatggcaaatgcatccacgagctttgagagaccatagtcctttgatgcatgccactcttctagcctcattttggaactctactaaagtggcctagaagcttggtggcccatcttagcacttgacaccacgatggacacgacaatgactcaactttagcacttttgtctccattggacctcatgattctgtggaggcgctcctccacgactctctagcgtctgacgttagggaggtagctatagaatagtgtcggcaatatgtcactaaattcatagacatggcccagaccgaccttgggtcgtctgaagccatacaacctccttccatgaggtctccaaccaaacatgatgcatcatccatgtgctctcatgcaccatccatcatcaaatagggcttaattcctaaggacacaccctacgatccaaagccacagtgcaaggcttctcttccctcttagccacatcctcaagacctgtggcaccatatacaccagtagcatgtcctgtaggatgcacgagttgttcttgactctcgtgcaatcgttgtcatagtgaaagagcaagtattctgctactcccatgggaattgttcctgcttgtaggctagagcatacaactagttcaccccagtggggctatatagatgatgtaggttattacgttcatgta

SEQ ID NO: 119728 - DNA, 505 bp, Zea Mays
gtttcctatcccagctagcagaattactcatttgccgtgtagccactacatcaagcttcatacgcttgcttctcatcccttgacctccaccactttgcggcctactctcctgtaatctgtttgtcccagcagcagctatgtgtccctgtcctatgtttggcttggttgccacttcttcgccgttctttgtgtaattctttgtgacagccacctgaccattttgcttcgccatctctgcctggagactttctgcagcatttaatatgtcgcactccactgttcccactatgatttttgagccgcttttgcccagcggctcattttgcccaccaacacccatacacagctctttggcatccgctgggttgtgaggagaccatttcttttgcatctgcgagcgcaactcctcgggaccttttgatatggcaacagccctgagccgactccccatactcctccctagcctgctccacactccatgctttcactctgtctccaaatatag

SEQ ID NO: 119729 - DNA, 271 bp, Zea Mays
ttggcggtgcccttctggctgctaattgtgggtcgaggctagtgccataggtggtggtggtggtagcaggacccatgcagcttgagagtggcttgccgaagcaactgatgttgtgggctgttggttgcccacatactcgagaatgtacggagaatagcatgaagcagtatgcaggacctacttcgactgattctgccttgcttcggcttcagctatctctttctgcttctcgatcgtgacttggcacgtccttgttgtatgtcctttgtcc

SEQ ID NO: 119730 - DNA, 1146 bp, Zea Mays
taatttttatccgtgtcatttcaagcactagaagtaccatactcaattaacaacgcattctccatgacaatcaatatcgaagcgcttttcacccaataatttgcattttaacttagacatcacatgagcactactacttttttacccgagaccataaccatacacatttagatcacaacaaacaatttgtcgtgattacgagcttaaccaagtcatctaacaagtcggctagctagagcaacgacacagtccgctagacagcatacacgtcggcttgcctattattatcacaattcgagacacaacatatatataacaatcacttaacgcaatcgactcctacttaacatgagttggctaatgacgtgactatttcccaattaccaacctacaccacctttcgccatttttggataacctgcacgacatacaactattgtaatacatctcaagttcattcaacccatcagtagagcactagcacatttcagaaaatttcttgagactacgacgacaatcgatcttatcatgcacataaaagcatcacaagcatatttacggaacctatcggttaactcgatcgacacactacacatgttcttcgcccttcaaaatttatcgcacaaccgaaatcatcccacttgccaatgacaccaacaatacctactgatatattattcatatcacgagcacagttacacaccgcatactagtttctaacataatcctcatacaactcgtaattcaaactaatcactaacaataaatcacgcacgacagattccgcctcaaccggttaatttatttggaacaccgcctagcgtaccactagtaccccgcattttgactcgacttataaacatagaggaagcgatgactacttcggcatgtcaccacctctctattcaagcaaagacaatttccacctagaacgaccgaaccttcccatcgagcacaccttatattttcccgtctcacatataaccatgtggcggcgtccactcgagacatttccatttaatttaacgcaatcactactacaacgcatctaagcacacacaatcacccacaggctcgcccttcgtatacgatcggccaacatttttaatttttgtcgccacatatgacgagcacaactcgacggcc

SEQ ID NO: 119731 - DNA, 488 bp, Zea Mays
aaaattgttccctgtcggtacaaaagtttttcataaggctccgtggattgaggaagatcgaagcatctacaaagctaaaatcctctttaatctttttcaatccctctcaatctatataagttagggatgaaatgaatgtggtctaatggggtagtatgaggaacaaatgacaatgctttttactgtcacaaacacatgtttccgatccggtcaatttatcttggcaatcactatcaacaataattctaaaacattaattatttggaccctgtttggctgttgccataatttgccacgcataatcctcggtgctaaacagtggctgccagaaaaaaaaagtttagccatcaaaatcgaacccacacttatatataacagagtttagcgagaaaattgagtttatgatctataagacagggtgctaaaaatgtgcatgttacccgatttctcttttttagtcttttttttgaagcaattaagcaacgggg

SEQ ID NO: 119732 - DNA, 451 bp, Zea Mays
gggaaaattgccaaggcttcgaaaatgcaaatcgaagctacaacaaaactgaccgaagtcgaagctgcaatgagccaggctagtgccgaagctaggccttcagagcctgctaagaaaaaaccctcggaaattgaagagaaggcagcggaggaaaaggctatagaacggactttgcctgaaaaagctgccgctcctgctcccgaagcaccttccgaagaccttgattatgttattcgacatgcttcgggaaaaagattatccgaggaagaaatttttgaagctaaacactatgcccaagaactgaagtacccaaaaggggccttagtgtttaatggtacggatgaagatgatttcttgtattgtctcccagacaacaaagaattatccgtctgcagggagatggccagaagtatgggttttccgaagctcgaaactggactttgtgccatgt

SEQ ID NO: 119733 - DNA, 433 bp, Zea Mays
cttctcagtgggagatctcgtcctccgccgaattctaacgggggagggacgacacaagttatcacccttatgggaaggacccttcatagtagcagaagtcactcggctaggatcatatcgtctcactcagatggacggcacagaagtcgggaactcctggaatatagaacacctcaggaagttttatccctagctgtatttcaaaagctatcgggacgatgatgtactctgtaaaatggaagtatgtcatcaataaaagaaaggcttcaaagatactcagtttgttcatgattaacttgcattcttacttaactcgggatgaccactatgccctgctaaacggagcaatcggcttaagtcgacaacgacttaaaccggtacaacatgctcgcgcttacttaacttggggtgaccactatgccttgatgaacgg

SEQ ID NO: 119734 - DNA, 605 bp, Zea Mays
ccgtgtccaaggtggcggactagcgcattaggactcaacgtcgcagtaatttcatgtcgtcgttcgtgtatcacggccatgccgcccttcaccgtggtcaagtagctctgcgccctaatgtctggtaagtaatccgtaatagtgttcgccataattctctcctcctatttctggtatctacttgtggatttggggcttgtgcgccatctggtgggattcgccggagtcccagccgtgcacagtagctggcgtcgccgccctgctctttggggaagaagagagggttgggggaaattcgtgcgagccgtcgatcccgtgttttacggtcgtgatcggatccctagtgtttaaagtaggaaccgtgggatcttgatccgatggccaggtttgcgtaccggttcgcagggctctcggatttaatctgagcgctagaactaggatccaacggctgaaatctatccatacctcttcgctgtcgtctttttgctaaaaagcccttttagaaattagaaaataacctgtgacccactgctgtgtaaaagtaattccacataggcccctggcttttgcagtttagtcctggaaactatttaaggaataaaaat

SEQ ID NO: 119735 - DNA, 387 bp, Zea Mays
gccatccaaagaagtagaaatctaggccaagtcagcttgactttgagaatacttctcctcaaggtcacagtaccgttgggttgagtcggcttgacttcgaagatatttctcctcaaggttagagcaccgctgggccatgtccgacaacgcagctgaaagggggatgcatgactaagaacaagttgatcaataaaaacaatcagggaagctgtaagatcactaaccaacgttagatgccttcagttcatcaatctgtttctggagaagcaacgaattccattgcatcagagacagatcttgctcgggaacattggcaccacaggatctcatctgggcggacattccatcaacaaaagcctgtgtgcatagactgatgagcaaaagaag

SEQ ID NO: 119736 - DNA, 634 bp, Zea Mays
ctactactattagtagggatgctatagaaagcacccgaaaaattagttaggtctgagaagacgactagaatgagcatgcatcgtgattgtcgcattataattgtctcttgtgcaccaacatgcttctctctcctttattccaataataagaacttgtgaataatgtgatgtgttgttatgttaggaactataagaaatgctttaccttgtgtcggattggtaagtcttgactaggtcgtgatatgtgtttctcttgccttgctttctagaaggtatgatagttgttcagtccattttgcttgttctgttcataaaaagacccccatccaaacaacccagtggttagcaagtgaaacccttaaaaaatcaaatcacatgctcgtgttggtattttctgacccttgagtgttttacccttgaagttacacctgcacaacttgtaaacccccataacttgaccgctatgccaacccaagtctccttgtgcacttgttgtgtcaaaaaaaatttggtgactagttgcgcaaaccatatgcagtccatgtttctttccataaatccttgcccctaaaacttcatagcattcctgttgatcatccagctgatcttgttgcctacctctcctttcacctgg

SEQ ID NO: 119737 - DNA, 371 bp, Zea Mays
aagaaatatcgcccagggatgaactccagccgctattttactctggtcgtcgtacccgagtgtgtcgcggccgccttggatagattcgccggagatagcctcttcgcggccttgcaccacgtgccttggcacattaacctcaccgccgtgactcacgttagcccgtccagtggtcgccagagagattgccacggtaataggccacgaatcaccgcgccagtaaccttcttcttctccggtcgtcgtgcgtctctctcaaattcaccggccaccactgtgggagcctataaattgtcgaccccgcctactccgctaagtaattgtgcacccagcagagcaaccagtgcctcgaatcatccactagagctccc

SEQ ID NO: 119738 - DNA, 1047 bp, Zea Mays
cgttcctgcacgccccccattcatgtctgataagggagatgaagaatcaaatactgcatcggattgaagaagtcaggtggaaatatcttctcaagcttacacattaacacatgtgccaatctttccaagtctacaatcatggttcgagataactcttttgcacaaagctggtggaagaaatagctcaactttgcaagcgctagccagataagctcagggacataaccttgaaccatcgccggaagaatccgttcaatccatatgtggaagtcatgactcttcatccctaagactcgtagagtagataagttcacccctactcaggttagttacatacccatcagggaacatcaacatcttgatccactgcagtacttcgacccgacttatgtgtccacatatgttgctcaccatatcccacaaaacaaccttctggattggccacgagaccatctatctgttgacgaacttcggcaccagtcatcattgccggtgggcgatttgtcactacgacatctttcataaagttcatgatatctaggcggaatggatggtaaggagggagaaattgttgatgtttatcgaaaggagaatatttgccacccttcttcaaccaaatgaatctaagagcttccttgcaaaatgggcatgggaacttactgtgaatataccagacgcagaatagcccatacgtcggtaagtcatgcatggagtactgatacctaaacatgcattttgaagtttgtatttgtagctcggtcatacgttcatacccattactcccaagcacagaccaattcatcaatcaaaggctccatgtacatacccattttaattcccgggtgtggaggaattatgaacgacacgactatgttctatctttgaaagcatacgccggggggatattgatggggataacaaacacgggcccacatgtgtacggggcaacaatcattccatagggattgaacccatctatggccagcgcaacacgtacattacaagcctattcagctttctcacggtgaatgacttcaaagtgtttcc

SEQ ID NO: 119739 - DNA, 405 bp, Zea Mays
gagaagggcgcaacagcaacagcagcaacagcaacaagtaccactgcctcctccaccaccaccagttccaccctgagataagcaccgggagttcatgagccataagccaccaacatttgctagttctcctgatccactggacgctgatgattggctaaaatatgtggaaaagatgttgattattgcacaatgctctcaccgagagaaggttctatatgcttctggtcgtctgacaggtcctactgctgactggtgggattcatataatgctgcccacgatgctgctgatactattacttgggcagagttcagcgcacattttagtaactatcacataccagctggactgatgaagatcaagaagaaagagtttctatcattgaagcaagggagcatgtcagttag

SEQ ID NO: 119740 - DNA, 851 bp, Zea Mays
tcccattcacaaatttaggaggaacatcctccttcttgtatatcgggatattgattttaagacgtaatgattctcgagtatgaatcattccatcttcttcccatacttcgaaattgtctatttgggaccgtgtgcgtactccacgagatgctgattccgcttttgattgatctgtcataactctcttcaatttttgcaggtagcgtgtcattgcttctgacggtttcttgacattgtcagtggcgattcgctgatgaattttctttgaagtagttggcccttcaatattggtgtcaacctttgcttcctttctgatgtccgcatcgatattctgaggaacaattttgtctacgtccccctcgtcgagttcctccgcaagaggtgatatgattgtttcaacggtttttgtggaggccggtgctatattttcctgcaccatggggtatggaatgatcgaactatctttctgttgcattggtgttgaatttggcgttggtgacttatgacgcgatagacggcttaagatcggctcatcacccaacttaatgtcgcctcgatgccaaaggaccaactcgttcattgcctcctgcaaagttatgatcccctcaactggaaagtctatctcccaatcttcacaaccactgtctgtgatctctagaacttggaccacagcatagtgtggcaggacaggattatcctggtagttaacaagtcctggttttaccaaaccagtagcatcttgttttgtttttgtcccagattgattgattggaatatgaagacaacaaggcttgtcctcaacaatatcgtctacagggtacttggtgcccgatacgaagtcttgcacagat

SEQ ID NO: 119741 - DNA, 459 bp, Zea Mays
atgaaatagttcagacttttgaatgggctttcaattcattcaaaacatgtatgggatgcgagggtccgagagttatgctaataggtatgtggtatgtcaatttgttatgcaaaaaagtgaattaatttattgtgaaagtaaattaatagtttgtgagcaattgcagatcaagatcctgcaatgccaattgctctaagaactgtatttccaaaaacagttcacagactgtgtttatggcatgtccagaatagatttatgccattcttaaatgagatatatgcaaggtttgctgataaggattttaaaacaacattccaatctattatacatcatccattaactcctcatgagtttgaatgtgcctgggaaatgatgctagaggagttcaatcttcatgaagatatgactctacgcaaattatatgaaataaggaatgaatggataccagcattttttaaa

SEQ ID NO: 119742 - DNA, 604 bp, Zea Mays
taaggtggatcgcctcaagaattcgatattcaatgtacttttgtaaccatcagggtgatagggctctaaattttacattacaaaattcaagaatcaaatcgaattaggatcataccatatttttatctaattttaaactaaaattaattaagggcctaaataaattatgaagatcaatttggatcatgatccattaccacctgttgagcactagatttggtacctgggcatgactacatagttcgactatgtggctcggatggtacacgccctgaacgatccacatatatagtctggacggtctacgattagataaactcggttgagaatctttgtgcttgcatatccggctaaccacgtgggaatttgttgggacattcccctatatatacgaaggggtatgaccgattggcccacaacacaatcgatctaaatcaatctattcatcagtttctttacatttcttgccctaggagtaacattaattagtcttcctcatcctcaatcttcacctctcctcgactttacgttgtctagaccctaagatcttttctccctgatggggtccctcctagggggtgatatccaggtgctgaaagagacc

SEQ ID NO: 119743 - DNA, 413 bp, Zea Mays
gccgattgctccgttagtagggtatagtggtcaccctaagccgagttagcatgagcatgttgcaccgtcttaagtcgtcaccgacttaagctgattgctccgttggtagggtatagtggtcaccctaagccgagttagcgtgagcatgttgcactgtcttaagtcgtcaccgacttaagccgattgctccgttagtagggtatagtggtcaccctaagtcgagttagcgtgagcatgttgcatcgtcttaagacgtcaccgacttaaactgattgctccgttagtagggtatagtggtcaccctaagccgagttagtgtgagcatgttgcaccgtcttaagtcgtcaccgacttaagccgattgctccgttagtagggtatagtggtcaccctaagctgagttagcgtgagca

SEQ ID NO: 119744 - DNA, 509 bp, Zea Mays
cattgctccgatagcttttgaggccttgctaagggtaaaactttctaagatgctctatgttccatgaattccccacttccgtaccatccatttgagtaagccaatatgatcctggccgagtgacctccgatataatgaatggctcttcccatagtggtgacaacttgtgctgtccttcctccgttagaattcggcaaaggaccaagtctcccactacaaaggatcgatgtcgtatagccttatcatgatagcgcctcaaggtctgctggtatctggctgactgaattactgtgttcaatcaatcttcctccagcacatcaatatcctctagcatggtagcttctgcttcaacttcagctatgctttcaaagactagccttggtaccccaaacctgaggtcggcaggtagcactgcctccgaagcatagaccatgaagaagggggtgtttccatgcagagctcgactgggttgagttcttaagctccaaaccacataaggtaactctctg

SEQ ID NO: 119745 - DNA, 508 bp, Zea Mays
gattgatagccttcgtgagaccatattgaaagaagatcatgattctgattactctatccaccctggtagcactaagatgtatcaggatttgaagcaaaagtactggtggtatggattaaagagagatgttgctgcacacgtggctaagtgtgatgtgtgtcaaagagtcaaggccgaacatcaaagaccagttggactattgcacccgcttaaggtacccgagtggaaatgggaagaaattggtatgaatttcattgttggactaccccgcaccccagctcggtatgactctatttgggtgattgtggacagattgacaaaagtggctcatttcatacctgtgaggactaattacacgggagccaagctagcagaattgtatatgactcggatagtttgtctacatggagtgcctaagaatatcgtgtctgatcgaggatcacaatttacttctcgattttggaagaagttgcatgggagcttggatacgcagttgaatttcagttcg

SEQ ID NO: 119746 - DNA, 344 bp, Zea Mays
cgtgctgctgcagggaaaacttgtcgacaatgaggaggaagaaatcctgccatctcgcaaggaaggcggagttgaggccgagggtgaggggcatgaggacacatatattttgcacgacaacttcctatgcatgtagattgaggagtgctgtcgcctcgtggtgaaaaagggccttgaggagaggggggtcgctggcgtgagtgccagtgttggtgacgatgttgtcgatggcatcatcatcgtcctgtttgggctcgactgtcgtgtgctcacgagtagcgaggttgagggtggcccgaaggcacgcgtcagccgcattgcgcttttgctgggcaagccttgct

SEQ ID NO: 119747 - DNA, 354 bp, Zea Mays
cttcatttcaaaaatgctttcccctttctttctctcagaagtcagatggaggttcgttgccaaaccagcttttgccagaatgaagatggtttccccaagttgctgaaagcatgcacagttctcctcggaatcaggagccagccagagtatgttggtcgtgaattcgtcgagcatggcacagagaaatgtgtcgtgactgtgtacattggatccagtccgcaccatgtggaatggagtgtcactgctgctgggcacagattcaaagacacctaccaagtcgtcgctcgtaaggcattgagggccctgtgtcagatttatgaagaagaagtggccgacacatcgctcagattcttt

SEQ ID NO: 119748 - DNA, 829 bp, Zea Mays
agaaatgggatgcaacaacccatgctccttagttttgaccataagtgtattgaggacatccataacaagaataaatagtagtggagacaaggggtgccttgccgcaagccccttctatgagaaatgaagctccccatcacaccattgagcatgatctgagtggaagaggtcataaaaataccactaatcacatctctccacacaggaccaaagcccaatttctccaacacttcaagaaggaaaggccaagagaccgagtcgaaggccttggaaatgtccaacttcaagagaattctaggctgatttttagcatgtagaaatcttgttgtctgctggacaagcataaaattgtcctatatgaaacgacctttgatgaaggcagtttgagctttagagactagcccctccatgcagcaccccaacctattagcaagaaccttagtaaccaatttcgtgaaattgtggatcaaactaattggcctgaaatccttagcaacaagagcatcattatgctttagcagcagggtaatgaaggttgtgtgaagaaatctataattcctaaaatctctccccaaaactgttgaaacagacgccaaatggcgccttttataataggccagcaacacttatagaaacgcccagtgaaaccatcgtgaccaggagccttgtccgagggaagttgcttgatagtgttcaagatctccttttttgtaatcaagagctcaagagcctaaagatcgtgccactacaaacctaaggcttccagattgatagtttaatttctctgcaccccacttccaattagattcatatagaaatctaggaagac

SEQ ID NO: 119749 - DNA, 510 bp, Zea Mays
gttgaaaaccactacaataaatctgtgccttttaaaaaagagaacttttgaactcaaaatttttccaagagatgcatgttaaaaattgtttcaataccttgttaaaacagacaataagtggaagcggttactatgagagtgttaacactagataaaaagctagagttgagttatggccctcttgataagttgtaacttgtaaggtaatgatgatgaagggtacaactataatttccgcacactacctattcctgttgtctgttcagggggaagcaaagtggcaaaagaggatcatatttaactccacataatttgaagcagacgttcccacaagttttaagggattaaagtgggccaggtcaattcaaatagaaaccatttctttctttcgttttcgggttctttgaacgcaacgttaggtggtttattttatcttttttttcttctttctaacctcaaaggggtcaaagtcttaaagctacctctgttggcggggctagttctcaaggg

SEQ ID NO: 119750 - DNA, 513 bp, Zea Mays
acggaaggggcggagggttgtgtaaggagcatatgtgtgtgttgttgatctgttgcgtctagtagttgtaatggaggagtataagatgtgatgggttgtaattgggcctgttaatcggcctgtaatagggagaagaactcctataaatgtcggttgattgcagtagagaaggaaccgaaaaagaataacagaatccagattcaaatccccatacatgtgtcgcttacctggtgaagtctcctcggaagatcccgttgtgacctcgtcggcgtcaagggtgctcacgtcggaggggatctatttctcctcggccatgggtcactacaagtggtatcaaagccatcggagtcggcgatcactaaagtgaaggtgcaacggctccaacggcaaaaccatcggcccaaactcgtttccttctataagcaatggatgagaaggctcgggcgattcagggaaactgggaccaaatgtttcaatctatggaggcaatgacatgaagactgaaggaggtgg

SEQ ID NO: 119751 - DNA, 1494 bp, Zea Mays
gaatcatttactaaaagctcccttttgtatacatccaaagacaggtaaaactcaagatgtgttaaattcctgtattagtttgtaatgtgataataaggtggcaggctcttatgctcaggagcgggtggcatgtccttttgaacatctagattcaataacagatgcagtcccttaaaatccttgacattgttgatttagtttattctaacagctgcaggaataatgtttgtcacacaatgttccctattgctcacaactgactcttcttccaggccgtgtttgtgttccgattgaccccagtaactgtgatgattttgatcctgcggctgttccgactctatcacaggtatggtccatagagcctagcatgagaagcactaacatttcatatccttctcccaagcatcatggtgcaatgctgatatgctaaaacaagtgcactcatacagcttttaggagagctgaatgctactggttttcagacagatcctgaaaatagtaagtgattgtagccatgctccttttgtgattcgtgtaaaaacttattatttcataaattgcagaagtaaaggcgttctagtgccaagatgcagccttgcgtaacaggctaacatgctctccttttgacaatcctatcgagtttcagattgggaaagaacgtcccttgggaaatccatcagttttttcagaacttccttcctgcacccattgctgaaagcatgcaaggtatggattctttcctatttcatttctgtggcaatgccggcatccatatgcattatgtgaataattgaaacactgcaaaatatcttaagtagcagaaccttaggagcatatattatagttctcttcatcccgcagcaaccacctgaagagaaaaaaaagttcggatgcacacttactttcagttaaactcttatctcatggttctgacatttcctgaggcataactctgaatctttctctgccatgtaattttgcaggaggaactggaaagtgcatatagcgcgaagcttcagcagtccaagaattccttggactggtaaaatctacgcatgtttctgcctctgttttatcatcagcccccgttcggccctccctgagcatccaacgggtaacatggacctggtgctaggtggaatatctatgacgctgccaacccgtgttgcatgcctgggatgcatgcaaccatgtcagtttgaagttgcgtcttaggattcatgttaacatggaacaagtccgagtacatgctttgtggtatttttacctttggattagtttattaggttgaagggttataatgacggtcaaacactcgaaaatggatgcatggagatctgcctcggtcatttcatgcaagttcgttgctcagcagataactggggctgcttggttccccggtgagtgcagcacgctcagttagtttgggagttagaaaaccggagagatgatttgaggggttggaatcctctactaactcaattttgaataaga

SEQ ID NO: 119752 - DNA, 724 bp, Zea Mays
gagagaggtcgtgttcaagcgtggattggctccaaatctttgagattatggccatgatcccattgagagatctcttcccctgacattcctttgtcgtttgtgtgtgggggcttgcgggtttcgctgactggatcaagagatatggaggggtgaagttgggtttgtctcactgccgaacactgagagaagatcccgagtttgacgtgtccagggcaagcgtcccaatgccatctttatgtatgaggtagagaggttagttagacacatttttgtcaatgggacattagagttttgagatagagatcaaggtgaacgcgctcggttttggtttagaggccgaaaattcagaaatctgaatttcagatttccccattacacctccacttgaatggcttgcttggggtttataacaaaccattgtggcaaaacttttataatctttattgtagcttagttagtgtattccaatttttataattggcctaagccatgattccatgtttttcatggtcttttatcccttttcttcctttctacttaagtggcttaattagggttggtctagggtttcaacatttttccctttttttgaaaacctcatttgttttagacatgattctttagatataaacttagtggatcttttattcttagttgattggtgcctcctgcccaatttggtttacatgaaatgatggcacttgagttagcactgagaagaaac

SEQ ID NO: 119753 - DNA, 1564 bp, Zea Mays
gcagagtatttcccaacaattttaatagcatccacttcaacctcgctaatgaaagccaccccatcttgtccgccaagctcaacagcaaagttaggactcacaaccacaacatccttcttgaaaaaggcactcctcaacaacatccttcgtcgtgtgatctcaccaactgtctagcctccgctctgtggctacacttgacacacaatgtactcttcgaccaaatctttgtcgctgctcatcactcatgcatgatgaagcgctcaaacgtcagaatcattgtccctaactttgaagtctgagaaagcaacaaagtcatgggccatcataacactacccgccggctgagccacacccggtacaccctctccaagatcatcataaaaccaagacttgaaccaactaccacacctgttctttggactcgacacgagttcatacactttgccacatgtctttctggtcttcagtgtgaaagtgcagctcccaaactggatcaccctaccaccaatagtcttcttctgccaatgaaggaagtaatgcttcccaaagacttgaattgaaggctctccaccatatgtagtcatctcccacatatatttagacaatgccacaatggcattcgacgctagttgatgcaattgaacgctgaaacgtttcagcacttcaccacgaacaggtggcatggaaatcaaagaccatccttaaaaataccttgaacactacgatctcccctcatgggtttagagtctgctcagtactaggcacacgccgatcctcgctccaaaataacctaacagttcaaattcgcacacgtggttcaaggaaaccgcagaccgaccgaattccaaggtttcgaagccagtgtgtgctgaacgctagaaccacccaccggtggtgacatcttaacagggtgctcagcacttgatgacaaggaagaagagggtggcagcacgagcttatgtcagcggcaagcaatttgcttaattcacggcaaatcaatcgtcgtcggtaagatggagtaaaatgcgcggcacgaggaagaagcgaccgatcagaggaatgaggtggtgcgcggaaaaaagaatagccctgcactgccctaccgttatatagagcgatcgagcggcgcttcaaaaaacatgaaggcactcaccatcaaaagacgagccaccctacgtcagctggcaatgtcagtaaccaacgatcacaaacacaaaaagcaacccgttcaacttgttatcgagggcagcattcgcctgtcatctctacaagacttcgggtttgactcaacaagttgaaccaacccctcggagggctcatgttggaacaaagacagaacacccccctcgatcacaagtccacatggtcaaagttgcagaagaaaggcgaaggctgagaaataatatcgaaggcactagaacgtgacctctctttggtggaaaagtcaaccagatagactaacttacaaaggtcgctggccactatcgaaagctcgaagactcgacaaggccgaaaggcgacccgtgatgtgaatggcaagtagatttggcattaagcgacctcc

SEQ ID NO: 119754 - DNA, 479 bp, Zea Mays
tggctgaaattgttgaaaatactagtgatgaactacttggagcatactccaagtctgaagataatgcattatccgcggccttcgggagccgaaagaagaaaagactgaatagggtttttgacgctattggatttgtgtaccctgactatcggtactcgccgcgggggcagaaaagaaagggtgcaacttctgggaaggatgttgcttcagctgctcccagtgagcccgcgccggagaggaaaaaggtgaaggttcttactcaccgaccgcgctacattgaactggctacagtgcctgaatttggcggtgagacctcttcggctactgaagccaaaggacctgcccctacgcagaggattaaagagctggctgcaatgccgaaggctgacaaaattgaagaaccgagaaccgaagagacaaaaacatcagaaattctaagcccttcggtaggggtggaggcgtcgaagatacaaaaagat

SEQ ID NO: 119755 - DNA, 700 bp, Zea Mays
taggtggagcagttacagcagaatctaaatgtgtccttcaatgagcggtgccttgatgcaactcatattctggatctgctggcgaaaaagaagcagcttcagaaggagttagctgagcagaagaaacaactggtcgtgacaatgcgatccagggaggcagcttttggccgtgagaatcatctaagggggccatttctaggatttggtcctagcttacaatgatctggaggattactctaatgagctgcatgaagaagttcaccagctttactaccagctgcacccccaatgatgcgccaggagccgcagaagcagagggtggtgtggtgctagcagatgggggtgaactcgacgcagacctagacctagaagcagctcctatgcttgtaccaggtggtgagtccccaggaggtagtgatgtttctaagatagctagtgatacagaagattaatgtggcatgtgtatggtgtcgtgacctctattgtaggcataggataataatctatgtcaattttggtattgtaatggataatactccatgtacctgtctcatgtaatatatttcatggttatggatgtttattcatgagtttgttttactctagatgcttatgcgtactcgtgggtcggatggggctggcacatcgcgtggtggtagaagctgatatcaaccctccaccaccaccagttccacctcac

SEQ ID NO: 119756 - DNA, 686 bp, Zea Mays
gaacgagttagccgaaagcgaaaacgggctggggaacacacagaaaaagaagccagattaaagcgaacggatatacgatgcaaaataacatggttcattacttacactgcttgcaaataattattctccaatgcaaatgatgaaatgaaccaagaccagagctaaagagggattctgcttgcgtgcatcacatccaatccaacctcacctcccgattgctgccctaattatttgcaggttttatttccacgaggattggttctggtcaacctcacacgtacgtagtagcacttgcccttgtacatgtgctgccaacgggacatcgtcgtctacaaaaacagtagcagtattattatttgtctgaattcgtgtctgcactgataaggattaccgtactcctgtgtttaggagtaccgtagtacgtagctcatagtgccaagacgaagaagatattcctgtatcgtcgtggaaaaaaaattgtagatgtggaggcggtccagccgcagagaacacattcgcagtgacatgtcgcagtcacggtcacacgcccatctccgtcagcttcgtagatctttcagcaccctcgtcttccgtctacagtcagcacttcttagcttttccaaattatctccatttcgacctgacctctatctccaagacatgaagtacttcgaatgaccacgtat

SEQ ID NO: 119757 - DNA, 278 bp, Zea Mays
ttgagattaaacaactacgaattactattagtcgtatcataagcaggagagaagttaaataaagctgaagaaaaacaatggccgcacatacaaaatgtggcgcggaccgtttgtgaaaccggggagaatctcacctctgtcactttttctcgttctcccatcagaaaagaattgccaaagcgcagatgcagcttgacagacccggttactcactcactcaccagtcggcaaaattctttacgacttctctgaccacggttggttggctagcttagctt

SEQ ID NO: 119758 - DNA, 722 bp, Zea Mays
tggtactctaacatattcgttggtcacgtcggctattactgaaaattatttcagaacttcagtctaatagcttgaccactcacacagttgctgaaaaaaggccttcacttgggatgcagccgtcgaccaggcttttgacgccctcaaacatagcccaactttgtagttgcctgacttcaatgccacatgcatcatcaactgtgatgcttcaggaacaagctttggcatggtgctccatcaggacggggccctgatcgcttgccgcagcacgccaaactggccgcctatgagtacgagctcattggtctggtcaagaccatgtgccactagcggacatatttatggacacgcccgtttgtcgtgcggacaaaccactactcgctgaaattcccctgctggactagtgcatctccactatatcgcagcatacttgggtgagcaaactttttggctacgacttttctattgaatgtatgccaggcaactccaacacgaccatcaacatgttatcttgccgcgacgaggatgcagtagcagcgctggccatgtccagcccagcccctccttcgcactctttgacgacctctgatgtgagtgcttgagctcgacgaggggagacacctgctggaccagattcgcaaaggtgaagccacgaccaactggtcatcaaccaacggcctcgccatgtgcgtcagccgtgtgttcgtcccccttccatcctc

SEQ ID NO: 119759 - DNA, 361 bp, Zea Mays
attttttcacggttgatttcattttactttcattcctttccaattcaactattaacataacagaaataacaattcagtggaatgaattatgctggaaagaagagggccttttttcatgtcttttgaagtagtttatcactattctgttattagtttcacactggtatttttcatggtctaattcactaacggttttggcataatattgataaagaaagcgatttgatacaggtaaagctagctttcttctttttctccctgctccttctcgtctcttcaatatatataagtattcataagtctcttgtgagcgatcaacgaccattcatgtgtgatagtaattctatacttctgttcattt

SEQ ID NO: 119760 - DNA, 340 bp, Zea Mays
aagcagcggatccgctttccatgcgtgcaactgcacaagcgatcagaccacctttactgacatgcctggggcccacacgttctaccactgcctgcactttcggtgcttgaccgaatcatgtaactactgcatgtagtccctatgcaacgcctgggcatcaggttaaggaacggtggtcaagacagcgtactacgatggctgcgaggggtcgtctttcctgtgcggcggcgacatcatgaatgccaaggcagtgccagtgctctgattaagttgtgtgcgcaactacgcacccgcagtattcacggagaagagaacagctagtcctcacgcaatgtgtttt

SEQ ID NO: 119761 - DNA, 415 bp, Zea Mays
gcacgcgaccttactaattgttatcaaaatttccacaggaccataatagattatggtgaatattgttcgacatgttctgatatatatgaatgtttcgccgatgggaagtgtctcgacaatgtgttcatgcagtgcttcatccaatgtgttgatgatgatgccaaaaatcagcaaccttccatgagttcgaacagattaattcttgatgttaatgttggggtaaattatcgtaacatacctacaccatattcatatacacaatggtatcccaagtatactgactccattcatattgtttgttgcagtcactactcaactttgaggaacaggaacgacacagccgaaacccacaaccttttgatgaatctgtactgcacacacttctagacaatacattgcccgagacagacgaatt

SEQ ID NO: 119762 - DNA, 451 bp, Zea Mays
ttcatgtgctgcttttggttggattcctgggccatccgacagaaaaataaggaaaaaaggatggtggaacaaggaatcaggcttatcagaaggatgacaagtgacgtgttgtgccgtgccttcggttggagaccggtggatcgttgaatttatgcgagttagccccttgtcgcctgctgatagtggttcattgccgatagtttgatcttctgtagactatcccttttttgtgttgttcgtctgggtgtgatacttctgcctcctcaggagtgctgttctataataagtgatttctggacagaacgttgtgtttctgttgcgtgttaggtcgttccttcctctatcgagtgtggtcgttattgcttaggatgtctagcatagctttttatttctggtctcctgttggctggccttggttgtctttgtcagtaggcctgtaatgaacctttgt

SEQ ID NO: 119763 - DNA, 576 bp, Zea Mays
gcaggtatgaggcgatagttcgatcgctccatgcacacacgacctaactatgtgagactttgtacagctcggccgaccctcttctctagtatcagtttggcctaacccctaggagttagctttaggtccgcctcttgggccgggtagaggatatcaggtggttcagccatggttcgtctggactatctccgctcccactaactcgtggcctcgagggcttgggttttttaatcccaacaaaactctaataatgttcatagttaggagctacttgagattgatgatgttgacactaaggcccctttggcatggctgactcctctaaaaacagctctagccctggctcctcttgcactttggcttctctggagaagccaaagtcgttttgcaattcgtttggcaaaacaacttctctagtgtttattttgaatggggtatgaagaaaatataggaggagccagtagaagccatatttttagtgctctggctcccaataagaaaacgactctaactctcagaggtctctcgacgagaagcagttttttgtgaccgtttggtatggcttcacgatgagct

SEQ ID NO: 119764 - DNA, 395 bp, Zea Mays
tttggatgcatccgggtcttaggtgttctagccaagaacaggccaattcggctaggtagggggaggttacagataacgaaatagccattatccacccccagtctaacactaactagtaatcttcaagccacaaactggagttcgattcctgagtacttgatgacattagcaagtgcatggtatgattggggtaccaatgcctagaggatgtggtgctcaaaagcttggggacgtggcaacggtgggctcagacttcgatcctcattagggatgaaatgccccccatggcgtcaaggatagccatggctaatgatgagcctcgtgggctctcgctcacggctacgaacatcaagaatgtttcgagcgagaggtggatggtacccctgacattgtgc

SEQ ID NO: 119765 - DNA, 275 bp, Zea Mays
gtttgtgttcatctaataaaaaagatcacatagcttgttgttgctaatccctgatgtacagtacattacaattagcattcaatactgagtctagcaaacattcttgacttccaacgattaatgacagagaaggtatcaggattggcttacatgcaacggatgtgcatatttgttgcttgtctccatactgtatacagatccaatagaggctttttgtgatcttacttggttttttaagttggatgatagcacttgcaatgtagtttgtcatctta

SEQ ID NO: 119766 - DNA, 355 bp, Zea Mays
tgaggagaagaaggttgcggacccttttcttgctgggttttacgaatctatggcaaaaacaaatacggagaagaacacaaaggaaataatggtagatttgtctgaagattccgacgatagcgatgactatgatgttgaaagtggggatgaagattcttagaaccggccctggcgaccaagccataccatcttcggaaagtcaaccattaagcaaagtcatgttgatgccatgaagggaagatactttcgtgacatgtctattgtgagggttggaggagacatcaccgcccctgctcctgaagaaaatgaggttgttgtttacaaaagctttttgaaggcaggtcttcggttccca

SEQ ID NO: 119767 - DNA, 329 bp, Zea Mays
ttctgccggtgttttagaggtaacgaccgagttatgatagacactgtcagcgttttagagataacaaccgagtggtgcttgatgttgccagcgttttagaggtaacaactgagttatacttgaccccatcggcgtttttagaggtaacaaccaagttatgactgacactatcagcgttttagaggtaacgactgagctatggctgacactatcggcgttttagaggtaacggccgagtggtgcttgatgttgccggcgttttagaggtaacggccgagtggtgcttgatgttgtcggcgttttagaggtaacagccgagttatgtcgga

SEQ ID NO: 119768 - DNA, 694 bp, Zea Mays
tatgccaacaaatgtgaatagctctcttctggaacttggtggcatggtggatataatattcggctgtgatcatggcttactagatctcagtttggtagatagtgccagattatgcactgcgatgttcttgcaggtcaacagtaacttgctgctgaaagaacatggggctgattttggtattgtcttgtcaactgctgagtgcgtggcatgatgcttatccccacaaagtcttaaccaacagggtgaagatagtttcagcattatcctatatgaagtatgtactggacagaagatgagatgtgaatgcaagtttgggttgctctttgatgggatgcagaacaagggcagtgttcgagaggtgatacttgaactaacacaatggtggctcaatgctgctagtctaggaaacaatgatatggaagttcagttacaacctgatatccaaagaaaagccatgaacaagttaatgggcttacaattcataatggtgtatgagaaaggcaaggagaatatattggctgatgcattgtcacgagtgggtccgtttatggctctgtattgtggcattcgtttccaaccagtttggatacaagaggtacccaactcttcgatgactgactcttatgctcagaatctgttgccaagagtgaccattcacagtccacatggagttgtgttctcagtacagcagggc

SEQ ID NO: 119769 - DNA, 454 bp, Zea Mays
caccatttcatttctatttctacaccttcaaaggttaagatatgaggcaatagtatacttcatgcaactagtcctaatatatcacaattgctatagacctaccacagaacttcatatatgggtgtaaaatgaaccaacctaatatacacaattcctcatatgccgcccataaaagaggatctagagtcaacgcttgtgtaaattgttcagctgcagctgaaattctgcctgtgcacctgcacacagttgagataaatatctgaactctgaagaaatatagaatgcagcaacatggattcagttaagccatgaataataaacctgtagatcactccaaggaggtagtgtcctgttgctccacttggaacctgcagaaggatgaaactaatactagaaacaagctgacccaatacaggaattaaaacaaacaaatgtgattgattttattttctaa

SEQ ID NO: 119770 - DNA, 412 bp, Zea Mays
aagtgaagtaatagtgatcacaacttgtaaagggataactctctggtcatgtatgtaagccgaggagggcccctacaaaattatctcatctcaccccatcctcatcaacagcaaccgagccatcccaaagcctatttgtaatcctcatactccagaaaccaatacatagccacaacaggaagtagggtgttacacaattcaaagcggcccaaacctatataaacctaggagcaatactgacgtgcttccgcacgtaccatcgagtcgcaatcaacgacgccgtcctacccaaaagcatcatgtgggtaaccccatggtgcgcggtcgagtcacaaacaccaacaaaccgaccaggatgttgtgtattcctgtcttgaatatataattagtatcaataactagatagatcatt

SEQ ID NO: 119771 - DNA, 349 bp, Zea Mays
agctgaacaaactgtggttaagggtgaaaattttggtgagagtgaagaagactacaacattctgatcccaacaaagcctagtcatatagattttgaaaaatctactgtaatggaagatgacatgcctatgatgatgaaattgggctattttggagaagctgagagcaaacttattcgatttgctggataagaaattatcccagagccgaagaaggatgaagttgtcgttttcaagagcttcttcagagcagggctgcgattccccctgaatgaaatgataggggtggttttaaagaattttgagatatatcttcatcagttgactcccaacgctattgttagactcagc

SEQ ID NO: 119772 - DNA, 438 bp, Zea Mays
gccaacccaagaaagctgcacaattccttcgtgttttttggtgtaggccaagtgaccacagcagacaccttttgagggtcagtctgaactccctccgaactgataacgtggccgagatatgaaatggacctggcagcaaatgtacacttgaacattttgaccttccactggtcttgacgcagtaagccaagcactgcgtccaaatgggcagcatggtcgtccaaggaagaactgtataccaggatgtcatcgaagaaaacaagagcaaacttccgtagcacaggtcgcagagtgttgttcattgcactttgaaaggtggccggtgcaccagtcaagccaaaggccatcacacgaaattcatagtgtccactatgtgtttggaatgctgttttgaactcctcaccctccttaagtaatatttggtggaacccaacacgg

SEQ ID NO: 119773 - DNA, 412 bp, Zea Mays
gcacctcggagtcagctacgagaacaacattcagctccatggccggttgcagaatttggcctgtccttgttccatcgaacatgtcataagtgacatctgcgctcgttgtaccctgaaccacggtagtgcccttcacatagactatgtcgtcgacggggtctgctggcacaggctctcgtcgtgcaattcttgttataacaacttgccgcattgactgtggtgatagaacttctatgttcggcactggaatgtaatttgctgtatggttcaatgaccacatacagaatgccacatggtgatctgtaacgttacggatctctagtgtgcttgacacctcttgggcaaccgggaagcgcaactctttggggtcaacctggatcagctcatttgagggagctgacgagctagccta

SEQ ID NO: 119774 - DNA, 400 bp, Zea Mays
caatgctcgaagagatctagcaatgctttgtgaccgaccaacccaagtgctcaatgacaacggcaagccgccacgtgccttgttctgtcttacctctaaagacaagatcgaggtaatgagatggatgaaaaaaattaaatttcctgatggttatgctgcggtcttgaaaagagctgtgaatttgaaaacgggaaaactaactaggttaaagagcaatgacttccatatattaatggagaggattatccctgtcatgtttcgtgggttacatgcccgacgccatgtggcaagcaatagctaagctaagttatttctacaagcagatctgtgccaaagaaataagtaaaaatatgatggagaagttggagaaagaaataccagtgttgttatgcaagctaga

SEQ ID NO: 119775 - DNA, 309 bp, Zea Mays
actccctccttcaactgtgatctgttcagcttcagcaatcgaggtaccttcggcaacagcctcctctggcacaacaaggcccgattgcctcatcacttctgatattggtgttgtctcggttacttcggcctcgtctccctcacgagacactccagcagtggatcgtactctggccatttcagtgtttacgcttttttgagacgaagctgatctcaagtgccgaagcgtttgctcaaaaatgcaatacagaaagctttggctatggttaaatttttaacaacgcaacagtgcgatggcaatgaatgctgt

SEQ ID NO: 119776 - DNA, 503 bp, Zea Mays
gtttcttcttctccagtttccaaggatttctccttgacgggctctgaaggcccagcttcggtcttggcctggctctttgcagcttcggcatcggttagttttgtctcagtctgcgcttttgaagcttcggcagttttctttggagtagaacttgaagtctttatcgtctccaacgcatctagtacgttgaccatccttttccttttgggggtcgctgtaagacctttttgtgccattggcactgtcacttctgccgaagggcttgtaacttctaatatctttgttccttcgacccctatctcttcaatattatcggccttcggctcagctaatttgatcaaggatgtcttcggctttgcagccagctcttcaatcctctgcgtaagcgcaggttctttggcttcagtagccgaagaggtctcatcgccaaattcaggcactgtggccggttcaatatagcgcggtcggtgagtaagaaccttcacctttttcctcttcggcgc

SEQ ID NO: 119777 - DNA, 339 bp, Zea Mays
catcatcatcatcatgagctgttgtatcctgagtgtcgaactgacgaagagcagcgtcctcggcctgagagtcaaaaacaggagcagaagctggcacaggagtctcaggcgcaggacggtaggatccaaaaacgaggcgtgaggcctcaagtgtgccctgaaaccgaggaggctgaatcagctgcgcaaagatgtggcacaagtagtgagcatatggcaactgtcgacgagcatgaatcccatccaaaacggtgtcctcgatctcacaaataaggaaatccacgacgtcaaactcagagtgagagaccagggcaccaaggagccagagctggaaatgtg

SEQ ID NO: 119778 - DNA, 528 bp, Zea Mays
caaagcaattggcttggaaagcaaaaggaaggaattatttgatcataaaaggaaattttggtcacaaggacagaccatcagaaatacccgacaaaacaactcccaaggttctcagttttgctctagaaatcagagtggaaataacaattatcaaatgcaacgctctggacagcaaggccagaaaagcaatcaacagagaactaattatcagcaaggacaagggtatggcagacatccacaaaatcgtcaagaaaacgctatgaacacacaagccaggaataataatccgatcaccccagttcagcccaatgggtgcttcaagtgcggagaaactgggcactatgccaataattgcccaaagtgcaaccctcaaacaccttagaaaaacaacaatcaaagggttgaccaaggaacaccaatttgtaacaacactcaaggtaaaagttatcaaaaccagaacaagggaagggttaaccatatcaccgcagaatcagctcagaacacaccagacgtagcacttggtacata

SEQ ID NO: 119779 - DNA, 723 bp, Zea Mays
atcaaggtgggctatggtactgtcaaccaagtatgttcacgtgttaaaagatatgaaattgttgctggaaagattctcaccaaatcaatgtaaactgaaattttcagcgacactacaacacaattccctttcacattttttcacttctttttttcgacttctttctcttcttctttttttctttttttataacactaatggggtgctgagatcaaatgcaatgacacaatatgaatgcgatggtggtaactagcaacttgaggaacttcaaacaacacaaggtaatagtacagccaaagggttataggttttttttgtggctttggactataggacaaaacaaaatataagatgaatgaagactgtgataaataaatggatgacagtgagacctaccgtgataacgaaagctttgataccagatgatgtgtaccgagttatatttggtacttgggtggcccgatcttcacgatagtaggttgattaaaagtaacggaataacaaggtaaatttgctgcagcgggtaactgactttatacctgatcaaggtcggaggtgaccaagcaacggggagagagacaccgaaactgtgtagacttcgactcaatcttcgaacgtccgcagatccacaaccggagctaatccagacaatgcgaggcagccgtattagaactcacaaggaacgaactagtggatcctagaggaatctcttcacaagtccag

SEQ ID NO: 119780 - DNA, 566 bp, Zea Mays
attgccgacttaagccgattgctacgttagtagggtatagtggtcaccctaagtcgagtaagtgtgttgattccaagtctagtcgaagtcaattgataaccaatagtgtgaatgtccttgagaaggaaatcttttattgatgacgtattttccaatttctgagtacaacattgctctggtagctttgagtcttgctaaggataaaacttcctgaggtgctctatattcaatgagttccccacttccgtgccatccatttgagtaagccgatatgatcatggccgagtgacctccgacaccatgaatggcccttcccatagcgacgacaatttgtaccgtccttctcccgttagaattcggcgaaggaccaagtctcccactacgaaggatcgatgtcgtatagccttatcatgatagcacctcagggtctgctggtatctagctgactgaattactgtattcaatcgctcttcttccagtacgtcaatatcttctagcctggtagcctctgcttcagctatgctttcgaagaccagccttggtgccccaaacctgaggtcggcagg

SEQ ID NO: 119781 - DNA, 279 bp, Zea Mays
ttctcgttcccttcgatttttgttccgagggggtggccctacgttagtcgagcaaacaaaaaaggagaggtattagcgggaccatatctattggaaggacgtaaatgttttgacaagggacaagttatccagtgttttctgaggatggtcagtcaagttattgacttctcctcagcccccgcttctcgatccatggggtcgtcgtccctgggtcggggacaatacaaaggaatggctacaaatgtcgagactttgttaagggtagaattgtcgtagtcg

SEQ ID NO: 119782 - DNA, 641 bp, Zea Mays
cgaccgatagtgatgttgcacccctgcccgttgaggacttcaatctcgatgatgtggagatgcttatgaagtcacccctgatggtgccgccactgagtaagttttttaatacgtatgatttgtaggaatggcgtttggtgccacggggccttcgggtgcctccgcatcgatggccgattcagtggaggttgacatttcgaagatcagcgaaggggcttcgaaggaggccgtcgtgcaccttcgctcggtgagggctgctacggtgtaaatttcctatgtttcggtgattgttcgggctaatagtgtgctttttcagattgtcgccattgcggacactagctgggcgaggcggaggacccagctaacctgcagcttcgagatagtagccgctccacatccgccacggagtccatagattatgatgtccctgatgtgcttgcacatcgtcaccttgtcttcacccgtgacgccatcgcccgtggaagtgaatgacgacaacgatagggacacgacgtagtaggtggtggcagtgctggtggacagggcggtggtacctgaagtggtgctgctgccgccacagctgtcggcgtagctatgatcatcagcagctagagcaggtctggcgggagcagagatatcaa

SEQ ID NO: 119783 - DNA, 697 bp, Zea Mays
ctggatctcaagttgtagttgtgggaaggagggtgctaaggtctagaacctcgaggtagaggttgggggcgcaccagggaacagtagatgggaatagaagacgggaagtaggagataaatctttcttattcatcctgaaccaatccagccatatatataggttgtttacaaagcgtccctaacaaattcaagccctattaactaggataaactcaactaacaaaccctattaaccaagaattgataatagatccgactttatctaaggcctaataggcccattaactaagttgttactattccggtgcctcctaacatattggcgcccatacatgacatctctccccgcttggagaaacaacttgtcctcaagctggaaggaaggataaagccaccagaattcctccaagtcttcccaagaggcagtatccgcagagaggcccttccactggatgagaacctgcagcttaccacacattgttctagccttcaatgctacaactggttccgcacaagcacgcccatgatgaaccaccgggatccatgaaatggcttcagcagcccaacatggaaaacatcatgaatcttggctcctagtgagttgtagtatgtaggacacctcaccaatgagctcaagcacttagaaagggccatagaacttaggcccaagcttaccccccgccatgggtagaaatgg

SEQ ID NO: 119784 - DNA, 390 bp, Zea Mays
ggcaagggttgtaagtattatgaagaggcaagcaatgagatctattgaggaagacaaaaataaaataatatcaaaaagactaaaggtttcggggactgaaatttctaaactaaaagtgaagtcctcgaaactcaagaaacggaagtctgtagaatcaagtcgtgccgaggaagaagagtccgctccaccgaagcaggtcaccgaaacccctttggcgtcttcgatttgcgtgacagaaatcctagaggtaatgactgaacccctgtctttttctatgctaagtcctctagggtcagagctgactagcttatttcagccaaaggagaaaagtgctaggaaagtcgccgaagcggaaaccaaaaagggtccttcggcgcctggggggaatgc

SEQ ID NO: 119785 - DNA, 621 bp, Zea Mays
cccttgaggactgggttctctgcaacagccacctctaaggctgaaggattctcagtcacctccatgggaattgagcgaccttgaccaacctcttggctctgaagaccgccttcaaaggtcgatgatgcacgagatgctgcccgagatacctctaatcccacatctggagtgtcagagcagacgtccatcatatcaccatcagttggctctgacaacatatcttcaggaacaacatcctcgagagcctgatcaaaatttgttatggataattcttgcaggccaacaagagcagacagagctgaaaaaggaatatcgctattccccccactgactctgtaatgctgattgttcttccgaatcaatgggacttcctcttcttcttcttcgtcctcgtcaacaatatggacaataaacgacgcagggtcacacccattgggatcagctctggcagggtcacacccattaggcttagcatcagcaaggtcacacccatcgggatcagcatcaacagggtcacactcattgggttcagctccagtaaagatttccaccggtacttcttcagtagcaggagcagaagggccagcatcctggtccaaacacgacactcgccgaagccgt

SEQ ID NO: 119786 - DNA, 524 bp, Zea Mays
aagttgttttaccctttagagatgctctcttcattgtgctttgtccttagtcttagtcgcttaagacctatactcaagacaatatatggaaatattttgcacaagagagagttctacaactagtgatccttttctaagtcattgtcagcatatatcaaatggatcacaagttgcatagaagtgtcatgaattctccttttaacttagtgcatatcaagagatattgattgatagaatatgcgacactaagaaacataagtgttcatcccatgatcaaacaaataacagatgtgatcaaaagaacaacatatgcaatagataagctttgaaataggagaatccgttaaatatgctactttaacaatgaaagcaacaatccttgataagagtgacattattttaacaatttggattgacatgtagtagcatacttcatgagaaacttattctcatacaagagactatatgagattactaggataaagcgatagtcttgatatgatcaggatatggaaataggctcc

SEQ ID NO: 119787 - DNA, 552 bp, Zea Mays
gaagagatgttacgtcgttaggagaaatcaaaacatctttgctcacaagtataatgagcaccagatatgggttgttcctcacttctctcagctcagattttgtcgctagcataactagatgttctccctcttctttctttttatctcttgaatttggcttgtagcactcactcaccgaattgtggatggcactcaatttattttgctcttctcctcctctacttgctacactaatttcagttttcttttgtaagtgttcaaccatgatttgttgaggggccataggctgagtacaaactttctcccttttagatctagcgtatactgatttgttcttccacaatgctgagaataacattcatattgacaaggtcttcccagcagcaagtgacacacagacatgggtgcaacatcgcactccactgtgtcaacatacgctacaatcttgaatggaactttcaccttataaccaatcttgatatctcccaattcgttcaaccattggacatgatatggatgagggtgtcgttgttacttcagaccaagcttttc

SEQ ID NO: 119788 - DNA, 309 bp, Zea Mays
aaagaatttgagagctctgggtgctctctacttaaggggtggatttaggggtcttggaggggcctttttgcactgtttttcctctgcattttgtagattacaatgttacttaaactttggttaagggttatctcatggtttgcacatttgtttaatctttcccttaagccagggttttggggggttaagggcttaaggagggtctagggttttatcccatcttgcccaaggtgataattgcataagtgcttgggtaatgcttttgtcattaaccttcttagtcaagccaaaggtttccaaggtttttgg

SEQ ID NO: 119789 - DNA, 334 bp, Zea Mays
cgtgtgagtaagcttctattttaaaagtgcaaaagaatcctcttgtgactgcccccaattaaatgaaacacccttctttgtcaactcatgtaatggggcagcgatggtgctaaaatccttcacgaaacgacgataaaatcctgcaagtccaagaaaactccgcacttgtgtcagtgtcaatggcgttggccaactctgaatagcctgcaccttggcctcatcaacctcaataccctgtggagtgacaacatagccaagaaacgatactcgttcggtgcaaaaggtgcatttctcaaggttagcaaataagcgcgcggcgcgcagagcatcaaaa

SEQ ID NO: 119790 - DNA, 275 bp, Zea Mays
gttttgaattgtgagaaaaatggggatgaactggaggggtgcaggcgagtgaagaggttcctggttcagtggattccaagttggttaagaattctgaaaatggatatccacacactacctctgtactcagtgctccagctcggattttggggatacggtcgagtgcaaaggtgtaccaggggaggggataactcaagaagtttcaccgccgtagtgtttggatcgagtgagctggacacctctccaaactagtgactatgctactgatgttttgc

SEQ ID NO: 119791 - DNA, 635 bp, Zea Mays
gtggctgatgcccttagcaggtccggggttccaaaagtggccttgcctttgatcgctgatctggaccgtttggggatagctttgtgctatgtcggcaccgctagtgaggagactcggatgtttattcaatcctccctcatggagagagtgtgtgcagctcagcagcaggatcgattattgtaggaagctcgaaagagggttggcaatggtaaacctcgggagtttaccattgatgagaatggtttggttcgtttcaggggtcgtctttgtgtgcctcagaaatcagaggtgaagatggatatcttgagagaagctcataaaacgccttacaccgttcaccctggcgaaaccaaaatgtaccgagatttgaagcaaaacttctggtggaagtggatgaaggttgacgtttctaagtatgtggccgcctgtgaagtatgttagctcgtgaaggccgagcataagcagcctgcaggtttactgaagccattggaaattccggagttgaaatgggagcatatcaccatggattttgtggtgggcttacctcgttctcctcggggcaaggatgttatatgggtggtagtggatcgcttgactaagtctgcgaattttattcccatgaagaccacaaattc

SEQ ID NO: 119792 - DNA, 673 bp, Zea Mays
ctaaagtcatctaacaagttggttaaccagtataaaacttagcaagtattttagacttcgcaactcaaaaacataggtgggagcaggttaattagtttttcttaaccattttctcaacttaaactggacaacacacaagtcacttaaaacaccatattttaggagacctcacatgtcgagcatcaatttataacctaagtgactcaacctctatcacgcttgacaactaccacatcatccgatttatctatttggaacatcgtctgcctagcgtactactagtaccccgcattttgactcgacttaaaaacatagaggaagcgatgactacttcggtatgtcaccacctcactacacaagccaaaattattattatttaaccacacgcctagataagcatgatttcaattcaacttgcccatattttaaatctcggcataagcttggctattggctaacgaagtgaccattttctaattaccaacatacaccaccattcaccatttgtggatacttgcacgacacacggctattgtaatacatcacaagtacatacaaccccatcagtaaagcactagcacatttccaaaaattccccgagactacgacgacaaggcatcgatccgccatacaacaaaaatcatgacgaagacgataggtgctatcaactaat

SEQ ID NO: 119793 - DNA, 464 bp, Zea Mays
gccacgaccatctcttccgaaatgtgggaactgggtagcttgccttagagcgaggcacgaagctgtaacaaccgaagttgttgtgatattgcccctttccggtagctcatggatgttgcataaacattttgcatttggttccagtccctggctcatcatggcccatataaacatccccaccttaatgatagcttcaggagtaagttgatgaaggtaaatttcgaaggttttcaggactttgaccagcaatttatccagagggaacagaagccctgccttcatgaagcttctgtaaactaccacttcatcagcttcaggcagagggacattattttcccctctagccctcacaattgagatatgacgaatgtacctctccctcattgcatcaatctgcccttgcttaatagttaatttcccaaagataacatgacttggtctctagggccgatcttcgacatctt

SEQ ID NO: 119794 - DNA, 496 bp, Zea Mays
ggcatgacaaatggctcatgggtcagaggattgcagacttgggccctcaagtttttagtttggttcctaaaagactggtgaagagaaggacaatggctgatgctctatgtagctcttcatggcttggtgatttaagaggagtggtgatgtgggaggtcattgctgacttcatcattcttgcagatgctataactgatgttgctcttcaactgggggctcctaataaacattattggaggttctcttccaatggtctctattcggccaaatctgcttatgagctaatgttatgtggctctacctccctggcgggctttgaaagaatgtggtgcacctggcgccgcctaagtgtcatttcttcctctggttggtcttacataacaagtgttgggcggctgaccggctcactaagaatgttctttcccatcctagtaattgccctttatgtgaccaggaaaggggtctattcatcacttgcttgtttcatgtgttcttg

SEQ ID NO: 119795 - DNA, 451 bp, Zea Mays
cctgcttttctttgaagaccataacctttactattctaaattcctggtgcatgtgctactgacttgtcgttttcaacgatccacaatttcagtttgtattactactaatgcattgtagcagttccccataatagtgtataatccatgtttttttctgtttaggttgatgtttctatttgtgtcattgaaagtaaatttagtggctaacttttgatttcttagtctataaacaacattagctacagatagtgggtcttctggaaactggaactggaacattttgcatcaacgatttggagtatggttacacattaagcattagctgaaaacataagaagtcacgctgaaagtagaagactctacttggtgctgtaacttcaaccttaatgcttcatggcacatgtgacactttcatatgaaacgtcaagacgataagttatttgcaggatca

SEQ ID NO: 119796 - DNA, 299 bp, Zea Mays
cccgagcccagcctcggctacctgctccccgcgaatcccgcaggaggccatttcttcaactgtgtcgcccgagctcggcttcagccttgatattatcaacggaaaggcacccgacgtcaccagaaacagtggagttgatgagtggctttttgtcatgctcagcacttcaccaaccactatgacatgggcagcttccccattaggtaggctcgggcacgtgaccgatccctaagctcttgcctcggttctctacaggaaccggacgtctccaccgggcataagtcaacagcaagtacaag

SEQ ID NO: 119797 - DNA, 469 bp, Zea Mays
ctaaaccttcctcgagcggagcgagagaaagacaaagaagggtatgtcgtcgcggcaggcgatcctcgcgtgcacggccaggtctgagcgcggcatgtggtatagaaggatagcaggagatcatgatcgtgcgcgtgcgagtttccatgcagaagaccgtctggggatgcaagatccctcgtcgaagatgcaaagctgtcgatctgtttccagccatatgcaacctcgccttcacctctacaactgtggtgagtcacccgatctaatcatggccccgcggtgcgtagaacctcttgcatgaaatttagttcgctggaaaatctgggtcgtgggattggagttggccggcaatggcaccgccgccctaggcgctctcatccctcgcgtccgtcggccggagtgaagaagacaaccgggatccattgatccgggagcgtacggctaggattagatcgtgtatacccgttcg

SEQ ID NO: 119798 - DNA, 496 bp, Zea Mays
gttgaagacaggggtgttcaggttatcaaggaattgatcaagcagaaagcagaaaaatacaaatgcttccatcaggacagcaaaggaattctatggtttggagatcgattggttgttcccaaggaccctgagctcagaaagaagatattggatgaggctcacctttcaaaattctccatgcactcaggcagcaataagatgtatcatgatctcaaatccttatactggtggaccagaatgaagagggaaattgccaagtatatatccgaatgtgacacctgccagagaattaaggctagtcatttgaaggtagtaggccctttgcaaccccttcccataccatcttggaaatgggaggacatttgcatggatttcatcgtgggattgcccaatacctcccgacaccatgattctatttgggttattgtggataggttgaccaagaccgctcatttcttaccagtgcataccacccacaagacagagaaatatgcag

SEQ ID NO: 119799 - DNA, 286 bp, Zea Mays
gttgggccacgatatagacatcgtctcctggtaaggtggaatcttgtcaaatttcgactatcccaagattagaatgtgtctgtctcgtcacttgagggtcaaaccaatgacatttgaatatcactggagtaagaggtttggaaccataaaaattgagctcatatatttcttcgattcgtccaaaataatcgacatcgtcaaggccgggcgtaaagactctagaacacgttgttttccgattaggccaactttggtcgtagtttgttgtgtgaaaacggtatccatt

SEQ ID NO: 119800 - DNA, 351 bp, Zea Mays
tgggatcaacgacgggttgtcgttgttgctgggcaccatcggccagacaaggacaagaggagccaaaagagagacatggacgtgaggttctacaggtcggggttgcatagagatcatctgtttacctctgaggaggtcgtgatgaccaacctttgtcccggagatcatacacacaatcatattaaccgtaaaactaaatatgactcgctcttgcacgcaagccagtcaatttatcacgcatatgagcaatcatgttgccagattttaatctcgactgaattatatatgcattctaacaatgattgttgtaatgcacactccactgcctcatatattgacttatcatgagag

SEQ ID NO: 119801 - DNA, 575 bp, Zea Mays
aacggatagcccaacaaaagaaaatacggagaggtagcgtcatgacgatatgctagtacccgcaatgggccagaaagggaggaagcctctgtccgaatgagcatttcaagaagatgctcgaggctccatgcctaaaccaccgctaccatatccggcacgcctacaaagattgtgggctactcaggaagttcctaagcaaggaggtgtcatctaggagggccactgagccccaagagatggaggacaggaaagaaaaggcttggtttccctgacaaaatgaaatgtttgctaatctttggcgggactgactactatgcatcaaatagacacctgttgctcaaacgacgtgaagtattacaggttcagcaggcggtcctagctttcctcgactagtttggccacgccatcaccttcggtcgttctaaccatcccaagaatgtcccttggtctgggcgatacccgcttatcgtgaatcccattatcggatctgtacaactgtcgaatgtgctaatggacagaggaagcgggctcaatattctctactctatcgtgtctcatgccatgcgcctcagtcg

SEQ ID NO: 119802 - DNA, 282 bp, Zea Mays
ctcgcccacctgatctcacatccacggttcagatctgatcacagtagagatgccttaggttttaatcacagccctccatggctcgatcaatggcatacaccacaccacccttcgccccagtcagacacggcggtgctcgtgcacccacggtggcaccatggcaagaatcataccaaccccacaccacagccctgaactttgattcgaacgacgatacatattaaggagaagaaggtgcagcatttggggaggtgctcaccggcttttggacgaagcaggctc

SEQ ID NO: 119803 - DNA, 611 bp, Zea Mays
tttggataaacggtaaaaagtgacagattctaggttttgataggtctaaagggacaccaaggtaggtgaaaggcattgatcatgtctgacagttgagtgttctagcgagaatctccatctttgctgggcaaacattgatggggtacatacttgatttattataattcactttgagccccgtcgaggttgcaaaagagttaagaactgctctgaggaaaaataatttcctggggcaagcttccattatcaataatgtgtcatcagcatattggacaatcgggaaatcttaaccacagttctcagtgaggggcagctagagtaggtcttgttgtctcgctttattgatgatactttgaagcagatctgccgctagaacaaataaaagaggcgagttggggtctccttgtcttaccccatgcttgcaatggaaagttttccctgggacgccattaaggaggaccgaagacgtaccagactggagaatgtccctaacccagcccagccatttgggcccaaatcctctgtgagacagcacctggaggatcagttcatgctcaactgtatcaaaggccttttcaaaatccaacttgagcacgatgatttcttttttg

SEQ ID NO: 119804 - DNA, 532 bp, Zea Mays
tgcaattcgtgctctgtagcacgtggataactgcgagaggtaaaaagatcggaagggaggtggatttggtctcggatgtgagcttatcggccgcactcgattgccttgcgacgtggtcgagcggccgatgtcgttgtaggatgccggccatctcagtcgcgccatgccataggctgtcttaccacgtcgtcgcgagttgtggagtgtaactagggattgccataggactttgccctagcgcgtgccatagtgaacttgccttagtaaaaatatcccgtcaccgtcgtgatcctaacttcgatcaaattcggagcaaccgtggtcggcttctataaattgagcgtctcccttgcttcgcctccttgttaggaacccagtgcaccactccttgctctcaattatccaccgcagcccgggaattcaaacccccccccccccccaaatcagtcatctgcgccgccacgaggcatctcgtcatggtcagagccctctaagggaattatggtcgggcctgagagtgttttgagttttc

SEQ ID NO: 119805 - DNA, 316 bp, Zea Mays
aaagactccatccaagattgtggatcttgactcatcttggtgacctcacttgatccttgaagacttgagttggtgctcatcctttcttgatgaagttgatcatcttcttcggtcttgtctcattgatcaagagttggtgtatattattgggctagggaatatggttaagatagatatggatgagatagactacatgatgtaggtcaaaagtttgtttgatgttaggtggggataggcagatcatgcaatccatcaagactctattggttgggttggtctatcattctttatttagtgtagggtaaactaagttaaa

SEQ ID NO: 119806 - DNA, 470 bp, Zea Mays
ctcaaagaagatcccaaaagaacaagaacacaactcggaaggaggtaactcttgagatattattttccgattgttctaactatgatttatggtctactagtgtaataaatgcttttagaactatagatccacgattagaacaaattatagacaagagtatcataccctctgattatgatgcttctgaggaaaatctaagatgtatacacttaaaccatctagctcttgacatcttaggtaattctcttagtgaagaagattatcatgccttcattacaaattataatgaacatattcctgatgcgcatgatatttggactaggatcaaaagtaaatttgatgagttcaaacatgatcgttcatatgatgcttctacttcctttagttcttgtgatactaacccttgcaaggaagaagaagaaaatgaccgatggagaccaaacgatgaatccacctctccaaaaggtttg

SEQ ID NO: 119807 - DNA, 2516 bp, Zea Mays
gtcatgactggccattagaatttatacactgatttacacaccttgaagcaggagttgcgaccagagcatcaataaggggttctgaaagttgagaccctttcataaagttcagccagggggattcttggggcaaagctgtatcttttaaagtcctagatggtacaacataaccatgccataagtaagcagatgtatcaatcaactttctcgagatacaggcttcgataatgagatggagcatgttcccagctgaaaaatggttaagaaaaaaggatagaacgatgaaggttaaaaatgcatttattatgagtaacagaatactgaagcaataaggacattaaaaaatgttccgagcatagctaacaagcgatatgataacaaagattggtcatcatgggaacccaactagtggaggcccatgaaatgccttcggcaagaaaccaatagtgaaacactgcaccgcgccccctcaagaggaaattagaaatgataaaaccaaggacttatgcgtgtatccacccagcatagtctctgctttctttctaatatgataagtattaactaattggtaggaataggacaagattataagtaccagctttcattgaagagtcagtctggtccatcatgctagtgttgccagccccagccttatagttggccttaaatattgctgcttttgaggctgcagcattagctgcattcaccactgatgaaggtggtacaagaagtcctgaatactggatcagatcctggagagatgatataagcccttgtctttgtggaagaattttgttcccttcaactccaaacatatcactttcctcttgaagaatcgcggcaattgataatggtataagagctaacaacatgcataaccttgcatctagatgaggaatcggtccttcaagaggttctctagcctagttataacactttgcaagtgagaaagacacatggatgtagatactataatccataattatcatgggaagatccatttacccgttgtacaagacgaagggtggaaatccaaagagctttaaatgtttcctgccagcttgcttcattaagcacttgcattgtcttggtcatttctgaataaaaggaacactatttagtaacaaaatcatgtcattcttgcaagaactgaataatttgattgcaaacacgcagatcatttttgtctacatagttggaccaacatgtaaacttgcattatagtcatcacaactcaaaaatgagagtcaggggtaccttttataatcccgatagctgatgtaacacttagatgcttcccatcaattgcattctccacatatatatcaaatattatccagcaggcaggcctcccagctccagtaagctggcccagaagggagccaccggatcccatattaccaagaacacccagaatgtgtttgttatttggttgatagcctgctttgcaaactctccagatgtttattaacaagtcattaattttgtgtccagaaggcagtagagtctccaaggtcaccttgtgtgcttcaatagaactcaacctctggcgtagagaactgaacttttcaggcctaacctagaaaaaaattcctctttagcacaattgtaatgctggttattagcaacagagaaaatacaaaacgagtagggatgtaagttttgaaagtttttgtgcaaggtcctgtcaataagtatggaacgtttaggtaacaaaacctactactataataattgacagctgccagagaagttgatttctaatcaaataactgtttggaaatcaaaaaagactaaatagtaatctatcaggacaaaagttctagaaatctatctttcctttgaacaatatattactatataaaatttactgcttaagcctattgttatccctatgtatactgaagaaaagttgaaaataatttttttcagatattgtgaccaagatgtttcccaagtgcaatgtttgagtgcatggaaagaacagaaatacttagatcatggatataacatcttcatggtcaacatgttaataaggtgggcacacttaaaacgccttgtatcttgttgcatgtgaaatgctgggctaatgttctgtacctaacttcacccttagttgcaaccagttgaagttaaatttatccataggtgggtaatacatagacgaccaccgtgagaaagggtatgagaaaatatacatgttcaggaatatcaagctcagaaatgattgaatctttctatcagcagccatcatatgcaacacgtccaaagccatgaaagtgttcttccggcgtaactgttcgcgatgctcattttggttctcagtagatccccttttaatgtctaagtccataggctgtggcccctcaatggcatatacactctcttgcccctctgccatcacagatggaaagccacaatcctcgagtatgctatcaatcagtttattgacaacagccaacacaaacagaatgacaacatgtccaaactctgttccagaaaatccataaaccttg

SEQ ID NO: 119808 - DNA, 426 bp, Zea Mays
ggggaattgagccgatacttcacgaataggtttatatgagtaaatatgagtgaagtgtgtgtttggtttgatttgaggcgaagaaaatggaatttgggcactcggctcggaattgatcgctcgaaacggagaattgtgtgaaaatgaagcctgagatatcggattggcatgaaatttggcgaatatgttacgagaggtgttgtgaaggtgcctgaaaaaattgggtttaatcggagcatttttggctggtttggacatttcaccgagcacgtggcatgcggtgaattagggtttcggggaaatggtcaattcaggctgtgaaaccctccctaaggagctaggaacctgtaggggtattcaagagacacaaaggaacacctccaaccacatggattcacaggatttgataagaatttgagattgagc

SEQ ID NO: 119809 - DNA, 433 bp, Zea Mays
taataattcaatagaaaactctatattacggtcaggtggcatacctggtaattcctccgaaaatacgtctgggtattcgcacactaccttgatattttccaagggcttttcttccaagtgattgatcactgtctttccttttgcatctgttgacttgtctatgctaacttggattctttcaccttgaggacttgtcaacataattgttccgttggcacactgtatcactccatcacaacttttcaaccagttgcatccaagaatcacgtcaataccgttggatcctaggaccactgggttgactgaaaaatctattccttgaatcttgatattaacatgagggcatgagtgtgtggccttcatgtcacctcccggtgaactaatgtgtaacatcttcttaagggggtacttaggtatgttgtgcttttccaca

SEQ ID NO: 119810 - DNA, 1007 bp, Zea Mays
cacttgacctaaccaaggctaatgagaacggtggatgcacatttgcttctctcaactcgatacactaataaagcactaatctcatgagtcgtgattatcaaatctcaataacctcacatggaaaaggctcttcctttctctccaaatggatttttcagtggaacaaataggcaagagacctcaaatgaatgagattgaggggtatatagcctcaagcaaaggaaatggtcgttgcctctccaccgaacacgtctggtgcagttctaacagctagtttttgatgtattagtatctgctgcctcacttcacatgtttgctaagtgtaatgttcgaggtgcacagttgcaaatttatccgagtatcatgtttggtgtcacaccggacacgtctcgtgagtactcggccacatctcatttgtatcctctctagatgccctatccagtggtagtgatacattggacacgtccagtgagtgtatggcctctcacactcgtctacacagctctctgggcaggtgcacattggacacaccggtgttattctcctgcgtgatggcacatatccggtgcacatcggacgcgtctggtgcctctgttgcaccatcaactcatttgtttgaaacactttgagttggttttgattttaaacttcacttgggtttttaaggttatttaacactagatatcacaagtgtgcatcaccactcataactatacttacctaggtcaaaatattcaaccatgccccctttatagtatcaccaaagaaaaaaaataaaggtcttatcggtaaaatatgtgtccatcaactccattaacacttagaactagctgaccttaacctacttgctcatcctttgaaaaccgataattaactttccaccaataggagcacaaaaaccatataaccctaatcgatcaccattactgtgacctaactcaatttgcctctgcaaaacatacgttagtcacaataacctagtgttgtcattaatcatcgaaacctaa

SEQ ID NO: 119811 - DNA, 382 bp, Zea Mays
ttagatcgctgcctgtgtaatgaaaatagttgaaagaatcactatgagtttgatcccgcacccccaccaaattgatgcgaatacaacttcaacatgttgagaagtgagtctgatacattaaatgtgacaactgttatattcattagctaccatgcatgatagttcttcatcaaacaaaaatgaattgccagatacctttggtacctcccctgattcttccatacaaggtagtgttactgaaagaccggtgaggcgactggaggggcagtgaataggagtcaatcaatttttttgctgcccaacactgaaaatgagcacttcactttaattgagacgaagtaagcgcttaaactaaaattacatcaacaaatcagtgatctca

SEQ ID NO: 119812 - DNA, 383 bp, Zea Mays
tatgctgataatagaagaagaccactggaatttgaggaaggagattatgtgtacctcaaggtgtcaccacttcgtggaatgaggagattcaaagttaagggcaaattgtcccctcgctttattggaccattcatgatctttaggcgagttggggagatggcataccaactcgagctacctgataatctatctgatgtgcaaaatgtattccatgtgtctcaacttaagaagtgtctctgtgtccctgaggaacggttaccaatggaagagctcagtgttcagggtgatttgacttatacggaatacccgatcaagattcttgatactttgactagagttacaagaaataaggtgataaagatgtgcaaagtgcaatggagtca

SEQ ID NO: 119813 - DNA, 484 bp, Zea Mays
tgaacagactcatgtggatagtattgtttaggcatgaaaccagagttgcatgtaggattgcctaggtatgtacccttgatcgggtagtaggcctgggaaaatccatacctggatgcatgctcccagtgagatgtgctgatgcggtggccaaatttcccattggtgtgtgtacatccagcaagtgggcacacggacaccaactagtgagggccaaatatgcccaacttttcaaaggttgtagatcgatgctcatgctcgaggaatttgttgatgcgagccacttctagtgtgacatccttgacgtgtttctcctgcccaggcttccaaacctcaatgtcgatcttcatcatctcgagcgcaatgaggcgttcctcaccccacaaggctaccacctggacttgctgctggatctcttcacaacatgtcgtaaagtggttgtagataccctcacaccgctcttcaaaacggcactcctatccatcac

SEQ ID NO: 119814 - DNA, 740 bp, Zea Mays
ctatatctcctgttgttgtatgtacaggctgttctcctattgtatccagcggtcgttgttggtatgctaccgtgtctactgctacatcttctgttgctactattgtctgaatatactgtgtccctaggatcccaaaactatgtaaaaatatcgttgtatatatttactgagtaagattatgaattactgtgtattgtcactgtaaaattgctgaaattctgagaaaattactgaatgtttgaacgttaataatttattactgatataataataaattagtataataaacagtgtttgtattttaaaaaattactgaacactaataagcacaaattacctttttactgtaaatattgctgaatgatgatataattaccgaacaataatacattgtttatgttacataagtttatgtttgtatattactgatgaccttttttttgcatcataattactgagtgcactatagaatatgaatagcataaaatacttatggatcaatgtctatacgcgctacatattactgccaggtgtgtgatttacttacaggaaagttgtcgtttgtcattttgcctccgttgtgtgactttttgtcgacgtcaccgatcctttttattaaacttctggtaaacacgctccaccgaggtgttccactgggcaacacaaattcacaatccagattgtctagataatacacctatatagaaaagaaatgtaaaagaacttcttactgttttaaa

SEQ ID NO: 119815 - DNA, 340 bp, Zea Mays
gcatccatcactcgattcaatcttcgcttcggtcgggagccgaaggctgcattcattaactgatcttcttttttcgtatagttccctaaattctcgttacacataacttcgatcgtgtccagccattcttcgcagggttccttgaagtgttttttgaacttaaactgataaggcagccgaacgagttcaccctctttcttctcttcttcaagcttcggcataccccacttcttcagcgttgggaacactctgttggctaggtattcctggactaagtccctagacccaatgtgttcagacacaattctaaattcatacacagcatcttggcatggatccc

SEQ ID NO: 119816 - DNA, 368 bp, Zea Mays
gtactttttcatgtgtagtccatatttcaatttgaaacactagtttgagacattgttggtctgttggagatgctcttatgactggtgtgcaatatatgagataccgtaagcgcgccatagcagctagttagttgctattttattggctgatttatttagttgctattttattggctgatttgttgctgggttgttgccagccggctagataggattagttggagaataatgtggagatccacctagatatagggaggttagtttatcagataagttaagttagaaggagactatatataccggctgttagcattaatgaaagtggtcaagcagggcaacccttgtctttcccagccgcatctctccct

SEQ ID NO: 119817 - DNA, 855 bp, Zea Mays
cggcgtcatagggagcatattgcgtcatcctcaacaacgtcttcattgcggcgatcaggaccttcctgcggggttcattcgccgactctcagcgcttggcgtcacgtctttgctgctcggcaaccttcgacgggcggtcgatttggtgtctcgatggtgaagtggaagcatggggttggtggcagtagaaacaggggcctgcaatctacttgatgaattgcttgggtgtcgttcactcgactgggtcttcggcgctgacgcagtctctgtcttcgcatggcaaactccaagaagacgggtgatgagaggtgggagaagatgatgaagaggttggaccgattgggaggtagactggaggcgatgatggtgggtcagcatcgatttctggagctggcggaccgcgtggccgcagtggcaaggaaggcagaggaacacaagcaagtggagaggtatgtgccgtgcgagcagctttggatgggttgatagggaaactaggggcaaggcaagggacaaaacaatcgagtcatccaagcattctagggcaagtggatgtggctgcaaagaggggtgaagctgtgagcaaggttgtagatgatgaatggaagcttcgtttcaactcaggtgttccattgcaatagcgcgaataggaagttgtgcctaatgacccatgggtgtttgttggaatgttatagccagcatgtatgcatcatgtgttcagtgaagtgggtctaaaagtggcatgggatgaggagatgcaatatgaaacttacatgtaggaagggttactgaagcaacttgctcgaggtggagaagatttagaagaatcgaataggaatgatgcttttggtgaagaag

SEQ ID NO: 119818 - DNA, 272 bp, Zea Mays
caaagatgatgaggggtgtttaccttcaagccaagaaaaaatcaacaagtctcctttgggtgctcaagctaaaggctctggaaaagctaaagctgaaaaacaagtaatgaatatggaagtggagcatggtgaaggcattaggaggaggagcagacttgaatccaatgacgacatgaagattgctgacaaagctgcagcgagagctatggctaaagatgccttcataaacaaaggtatgaactctaatcctttttctgttcttaatactgaaa

SEQ ID NO: 119819 - DNA, 348 bp, Zea Mays
agtggcccaacaatatccagcccccagtgttgaagtggccatgtgtgggcaatcagctttgtgaattgcgaagggttgcccgaacggggagaaaacttttggcaggcttcacacgacctcgtgactcgatttgtggcgcagattatagcgggccagtagaacccttgacgtatcaccttagcagcgagggccctaggccccgagtgagagccacaagttccgctgtggacttcacgcaggatctggatgccttcggtttcggtgacgcatttaagcatgggttgactgacccccttcttgtatagctgaccctcattgattgtgaagtcccggcttcggtgcttgagg

SEQ ID NO: 119820 - DNA, 503 bp, Zea Mays
cggagtgtcgcacgcgagggtggctagcgctgcccctcgcggtgactttgtattcgtcgaatgtcgaagaccgtcgatgtggtcttctttcgacgtagatttttgcgggggatttttcgcttgtatattacatggctccgcctcattaaaaacctcaccccccgggaggaaaagagtgcgggccagaataaaattgttgtgagaattacaagggcgggcgggccccgagcagtcaaacaaaaaatttgcggagattatcaatgttccaggaatgctccaattcttcgccggatggcgtcgcgagcctgtatgcgctgggggacgccttcgtcttgacgatgaaagggccctcccacttgggctccagtttgccccgggactctgttcgagcggtccggatgagtacgaggtctccttcgctaaattccctcgggatgaccgtgttgtcacgccatgcttttgtttgggcctggtttttgtttagagcttgtagtgcggatttg

SEQ ID NO: 119821 - DNA, 452 bp, Zea Mays
aaaagatcgaaggggagcggatttggtcgcggggtgaagcttatcaatcgcgtctgtagccgtgcgacggggccggaccgccagtgtcgtcttggaaactccggcgacctcaattatgccacaccgtggctctttactatgcagtagtaactgtggcacgcctagacttaccatctcagaaccgctgcaccggtgaacgccacgactgagccaccagtgaccttcttcctctctggccgccagcacgccatgcccaaattaggagccgtcgcccttggatactataaattggtgccctagcctgctccgctaagtagttgtgcacccagtgaaccaaccctcaccttcaatcgtcccccacaactcgctaatttgagatttcccccaaatcagtcaagaattccaccgtgtgtgagctcgccatagccagctctccacaggtccgatcacgc

SEQ ID NO: 119822 - DNA, 395 bp, Zea Mays
aaaataatcagagatagagcatagtcaaatatataagatagaaagagattaagactgttaattataatagaaaaactatgtaatgacaaaaaacaaggaacatgtgcaacatattctatcatgtgcatggaacaacgcaggaatatgatcatgtatcgctattatagccagatctatagaacaacatgcaacattagacctttaatagtaggagactacttattttgtttatcataaagcaacatcattcagaacaaataatcaattgtcacaatatgcacaagtgcattctactacaagagtccttcactaaaaatttaaatatactaggttttacacacatgtgcctcagtccagcttctaactttctaggtttatatggatttgtaccgagc

SEQ ID NO: 119823 - DNA, 472 bp, Zea Mays
ttgtagctagatcatcgggcaacaactttgttacaggcatattagcaagttgtcatgtaaagattcgagatcttggccctgcaaattgggctgtcatgcgcacttaatagggattccattgtacagtgactgaaaaagatcccaaattcatcccccctcgccaccggtgatcttgcgtcgggattctcatcgctgttgcgattcaggctcagcaaagtaccagatgtggctcagggtggtaaagatcattgtgtggataaactccggccactgttctcaccggccgtcgtgtcccgccgtggttagtcgcactggcatcaccagcgttcaccgttatccggccaggctacgtgcctcgacgctttaccacatcgtggtgagtcaccataaaccgctccttagtcctggctcgtcaccggtgggtctgccacgatgaaggccacgaatcaccgtgctagtgactcagttcccc

SEQ ID NO: 119824 - DNA, 475 bp, Zea Mays
tgagtatttttcgtgctatttgagctgctcgcattgtgtttgtcattttaaccttccttacttcgtcgatttcgattggtttttgtgcttcggcattctagcaaccattgtccaaatggctgatgagaagaagatcgttgacccagtgttggccggggtttacgaagccatagaaaaaaccaacgtggagaagatcgccaatgagatgttagttgggatttctgaaaactctagcgatagtgaaagctttgatgtggaaagtggaattgaagatgccgaagatcggtcgtggagaccaagtcatgttgtcttcgaaaaatcgactattaaacaagggcagatcgatgcaatgagggggaggtattttcgtgatatctcaatcgtgagggccggaggagagaataatgttcctcttcccgaagctgacgaagtggtggttttcagaagctccatgaaagtcgggcttcggttcccc

SEQ ID NO: 119825 - DNA, 439 bp, Zea Mays
tcgaaatccatccgtcgttgaatccgattctgatgatagttcaccagaaattcatgaggagactccccctcagtcccgatccaagcatgggcgaggatcgggcaatgttatgatgggtggtgaggcctctgggtctcaaggtagtcacggacgaacggctcgaaacccttctagtcgttctcgtcctgcgacaaaccctcaggcctgggagtccacatgtgatgacgaaggaggcaaagatgatgatgtggaccttcctcctgctcatgcccccatcatccaaggattggtgctgcacaaagctcaggctcgtcgttccccaaacgaagaaattattgatttcagtgctagcggaggatctgctcttctacaagacatgcgctttcagaatcctaccctccgagtacgtgatgtcagaattgaaggtaatcgcttctgg

SEQ ID NO: 119826 - DNA, 791 bp, Zea Mays
gagggcggcggtcctgggtggagacggtgggcgacgtagcgaaccctagttacctttctagccttttctgatggtggagggtctgaattgagaggaggccatatttgcaaggattagaattaggtagaaatgatcaattcaattccacagacagccaaacagaccaattcttggaaagtgattcaattcaaaccaattcttgggagccaaacagccccttaggtttttttagattcccgttacaatagctggctctcatgcttgaccctcgcatccactgggcatgagccctttctcatctcatctccttcgtttcatacagatgagcagaaaagcagctaatcgagagcccgttgtttcgtttttttttcttcttcttctgataagcctttctgaaaacatatctgtaaagataaatctagctgtagagagaatctgattatcgtgacaattacgtatggaaaaaataaatgagtatataaagtttagaatctagaaagtggcagattatttctatcccgactaattgaccgatcgtgtatttatattgattttgaacgcttttcatcaatcgattttcataaaaacaacagatcgaaaagataggcgttttgcagcaacaaatttttgttggtcagaatcagaaaaaataaagctgaaacaaaacacgtcccccaagctcacttggattgaacggacacgcgatggcctgttcgttggcgacaccgatcgtgatcgggacgacggcccagggatcctccgaccatagtccgatgcgtgctgtttccaag

SEQ ID NO: 119827 - DNA, 349 bp, Zea Mays
caccaacatgtaaggtatgacaaaaatactattgtttgtgacgtaatattaatgtcacagaaggcatagaagattgtagtgaagaccggtgggagccattgggtaattgacagtggatgcactcaacatatgactggcaacccacgaatattcacctcacttgatgaagatgttactgaacaagataaaatcacttttagggataattcaaaaggaaaagttcaagggcttggcaaggtggcaatttcaaatggtctttcaatttcaaatgttctcttggttgcaccattaagcttcaacttgctatcagtgggtcaactttgtgatcttggccttcaatgcttattca

SEQ ID NO: 119828 - DNA, 398 bp, Zea Mays
ttttgactcgcagaccgaagccacgtcctttagagaggacagtcgcagtgcttgatatagaaaagatggagattactgaacatgtcgaagctatccccttagctccaaagacaattcctgctgcgacagtcgaagctagtatcggtccgacagaagagcatccaaagctgctgagtcccccaaccgcaactgagttgctgaagataacaactgctgcaaccacaacaatgactcctaagaaaaggagaatggccagtattctggatgtttttttgaagtctacgaatattccaactcctgcttctaccgaagctcccaaagataatgttgaagagtcgagagaagtatcgattgcaagcgcttccccttcccacgctgaagctgaaacttcgggggct

SEQ ID NO: 119829 - DNA, 441 bp, Zea Mays
cagatgccctgagggacaaaatacaaattctaggagccagggcatagggcggacacaagaattgctttagggaggtggaacaggtgtcctagcgagtgaacgctgcctataaggaaactgcttgcaatagttgagccagttcaagggattctccttaccgtcataggtgaaggacatgaacatcgtccatacccccatcatcccattgggaaagcttgtggtatgacgaccaccaatgaggacgcctagtggctccccatgggggccagatgcaaaagaacggtgacctgctgcaccttaaggttgatcaactgtagcatggggttttttctaagggcggatggtggcactccctgcggtgtcggtggcatgttgtgttgtgctatgggagaagaagtattggcatccgtcaccgcggtagcgtcaaaacctgagatcttc

SEQ ID NO: 119830 - DNA, 461 bp, Zea Mays
cttgaaccaggaggccgtcctctcgcttacgtccagataggttagccaatcgaaccctattatcctccacggttaaacacgtacggctgttgtgaccatcagctatgccacatttctggcacttcttgctcatcttcttagctcctttcgcacccaatttaagaacttgttgctcactacttttgattgttcttcccttagggttggccttatctggtcttgctaagtttacaccttccatatgaaactctagtttctacaaatcaaagatattaagtcagttttcatattcacatattcatcatatactatagcaatgttattacctttctagcttccacatccgtagcaccactatcaccagacgcatatcagtgttatgttccaatgttaatatcaacatattacattgatcatcgttagcattgcattcatttgtattagaccccattaaaatttcc

SEQ ID NO: 119831 - DNA, 500 bp, Zea Mays
tcaaggcgtcaatgactaggattagagaaccttatcgctttgtgcattgactcctggccgtcggatccgacttgcacaatcggtagccgtaggatctcaaaagaatgggcggccaggattggtggatgggagcggtctgaccagatcctatctacaccgttgatcgactacttcacgactaggattagatcctcagaaaacgtttcggtcgggtggcagttgtcgtttgatcgtggatggacggtagagatcgaattgaagcatacctcttcactctgccgaatgcgcaccgttggatggcgatctgatggccaagataggataccggttcatttaagagtctggactaatctgtgccgtgtgctttagatcgagcggccagaatcctacgataccccttcgcgagacaaattctcataacaacccttatgtttttacagaataaaacccgcagtccacaacagaggaggtctgagtctatagaaattttatattttcac

SEQ ID NO: 119832 - DNA, 716 bp, Zea Mays
agaaggggaaaatttgagcttgttcggttgccataccgattcaagtttcgaaacacctttggcggcccctgtgccgaatggttggaaatgatagaaataatgtgcaatgagatccttgggaactatacaaaaaagaggatcaattgatgacagctgccttcggtacggtactcagaaaaaatgaaggctaaatcgggtgatggacgcccttaacttcaagtatccagactacgaaaggcttgacgaaggagctgggagagcgaagaaaaagagagttgtaagcatttttaaaagacaagcaatgtgatccattgaaaaagatcagagggttgcttccaaaaacaaaaacaaaattagtggagccgaagatttcggctcccaaaaaaatgaaagtcctcaattttgggccctgacgaggcgaaggtacaagattcaccagagaagattgctgacacctcttcgtcctcttccgtcagtgttacataaatccttaaggtaatgactaaacccttctcgtttgctatgttaagtcccctggggtcagatctgactagcttattgcagtcaaaggagaagggggttgaaaaaggtgcggaaggggagaagaagactgctttgatgacttggggaaatgagggggtcagaagaaaagacgcatgatggttgtgatgaaggctaccataagacccaccccggtctcgacagaaaaaattgtt

SEQ ID NO: 119833 - DNA, 618 bp, Zea Mays
tgagatgcaatagaatcgagggccgctgctggtccatgaaaacctctgcacaaaaggacgctgtggtggtgggttgggctgcgtgctgctggcacatcggtaggaatggtgtactgtagcgggggcggtctgcctgccattgccgtttggtcaggcaggcacctgctctcgcagtctcacgtgcgcgtgggatggttgggttgcacacacagctgctgggcatggactttcagtgagtgagcgttcagttcagcaggtgccaactgccaatgcaaccccgtgcattacctgacccatagcgatatcatactgcattgcaacccgtgtccgtgagtgactgaaagtactgtagactattaccactacgcgctgtggagctcctcgattttgtctagtacttcagctacatcaatacagtaggggagtgagtagtaataggaaatgtcctgtctttagcctcccgagaagttgatcagtggccacctcctccccgtttgggaacagtgacaggcgcaacgcaaggcaagcaacgcgggaatctccgttcgtcgtatcgctgggaaaaggggattctctttccttccacctccgacaaagacacagcccccttcccttccc

SEQ ID NO: 119834 - DNA, 347 bp, Zea Mays
cgcggggcatagaggttgccctaaaatgagtaattgcaaacgtgcttgtgttggactaagtagacgcgagtgtaccgtgccgatttaagtcattaccgacttaaaccgactgctccgctagtagggtatagtggtcaccccgagttaagtaagcgtgagcatgtcgcatcgccttaaatcattgccgacttaagccgattgctctgttagtagggtatagtggtcaccctgagttaagtaagcgtgagcatgtcgcaccgccttaagtcattgccgacttaagctgattgctccgttagtagggtatagtggtcaccccgggttaagtaagtgtgagcatgtcgcac

SEQ ID NO: 119835 - DNA, 320 bp, Zea Mays
agagtactccgagtccccaaaggattcagaagaaggggtggacgaccttcgcgcttcccgtcatccgccattgcgcttggaggttggggttctcttaggcttgaagagaaaacagagagttcaagaacacaaaggtggggcgataggaaacaacaaggattcacatatttctggacagatgggttaccgcttcatgtcccattcatacagtgaacagtcagagacaactaatgtgccgcttagagttccaagagatagcacaaacacggcatcggaggtcagttatccacatcacgactccacctcaaatgagggaacta

SEQ ID NO: 119836 - DNA, 321 bp, Zea Mays
gtatgttagctccaacaggaccattcaagtatacaatgtagatgtgctatccgatcgttgccgttagacagtagtgcttgtttgggagcaagagtaatggagaagagtgaggagaagaccgtgcaaagtcgaaactaaaccagtgttgaacagaactccatggctgttttattatgtattggcgaagataaaatctcagtgcatgttttcaatccaatttttagtttaatagtggcgggctagaaggagaagaaggtgttgaatcacagaatcacatatcgaaaatgaagcatgagatccatctagctgatagatttactt

SEQ ID NO: 119837 - DNA, 346 bp, Zea Mays
tgaagtgtaagaggttgggctcaagcacaaagaaagttaaacatgctagaaaaaatggggaaaagaaggcttagcctttagagaacctggtttggggatggagttaggggtggcaatgagcaattttccattgattgatatctcaccatccatgtccctattacatacattaagggggaggagagagggggctttcctctatcccatcctatcacggggaatcaatcctcataggaatccccattcctacttccacaacatagagcaaagacaacaatctcaaggtaggaggatttgggaagaagggattattggttaaaacctaatttctccaattattaaacca

SEQ ID NO: 119838 - DNA, 572 bp, Zea Mays
cctggaaacctcacgagagagagagaatccaggcagaacataatataggcacacgggcaggcgaggtcactgaaatgacagaagaggtgagcacgtattagtcacatagtcataagtatgtgaaatatgaataaatacatacacagagaattatgacacaaaaactgagtgatttggggatatagaggtcaaacgacgcgaaaacgacgtttgaacgaggaatagtgccataggaggtttgaaatcggaatagaggcatgaaatgacttggaattgagccgatacttcacgagtaggtttatatgattaaatatgagtgaagtgtgcgcttggtttgaatttaggcgaagaaagtgaattttgggcactcggctcggaatcgatcgctataaatgtggatttgtggaaaactggtgtctggattggcatgaaatttggtgaaggtgttactagagtggcatgaaggtgctggaaaaatctaggaccgatttgagaaactttgactggtttgggcatttcaccgagcacttggtgtgcaggagtttaagtttgaggtgaaatggctatttgag

SEQ ID NO: 119839 - DNA, 810 bp, Zea Mays
gggcattcaggttagcccgaaaattcgggtcgggttttttgggcttttgaaattttgggtatctagaaacaatacccgaaaacagtctcaatgtactgtaggcccgataattcgggtacccgaatttttcgggttcgggtttgggtagcccgttctacccagttttagaccactgactcaggttcactgtagtccattccattagcaaacaatgcaatatttaatataaataattaaatatacaacaaaaacatgcatcacaactgtacaataaacatttaggggttcaaaacttttcacatagcaaaagaccaaaagtgtagcacatcagtttctgtatttccgagaaagaccaaacatcacagtctcagactctcatacagtcgtacaaattacaatcatactcattatcagtttaccgtaaagcacaaaggcacaaaccagaatcgacaactagccaagcagcaagcacgcgtccacaatccacacaaagtcacacgcgtcctgtaatcctgtcctccacagtccacaactccacaggcgccagccagtgaggcaacccaacaaggtggcacgtcaggtgaacagcaaggtagcagcacaccacacacggccacacaacaaggcagcacccagcaacacacgatcacatgtccagttctccactcagtccactgtccataccaccaccagcaaccaaatgaactaatgaaggataaggaatactataccagcagcaatatcaagtcagcaacaaaataaagaaatgatctgcagtaaaaaaaattcgggcctaacgggtatttcggg

SEQ ID NO: 119840 - DNA, 410 bp, Zea Mays
gcagactaaaggtgaaatcaacaagggaatgatattaccatttcaactactaacaatgatgtttcacaaaattaactattttgttgatatgccaaaggttgttcttctaaaacttttaatttatattttttatagttgatcactagcgaagattgtttctacatgcatataggaaataaaatcataagtgtaactgataaaagactacagttgttatctgaagaaagtggagtatttaggccatgtgtcttaacggcactggttggctcaagtagtgctggaaggacgacccatcttgatgttttagctggtagaaaaacatgtggatgtattgaaggtgatatcaagatttctggccataagaacaaagaacttttgccaagatagctggttatgttgatcaaaatgat

SEQ ID NO: 119841 - DNA, 1121 bp, Zea Mays
cggccgaaacgatctcgtgcgcgtgcctgatctcgtccctggcgggtctgatttaatccctagcgggtccgatctcgtgcgtgagagagaaattttgatgtctgcgcttgcagttatgctctgttcgtgcgtatgcagttagagagcaaattcgagattgtgcgcgtgcagcagtagctatcctctgcaatttccatgcgtgcagtagttagagaacaacctcctacttcttaattagtttggtgctactgctacattatgcgtgcaacagattagttcatttcgaagttcatgtatgtgctgtgtctggccatctaaaaaaacatcgttttcttgtcccttccatttaatttgctctcagccaactctattgaattaggccactgcatgcctgtggcctgtgtggtgtgtgagatattgctgttaaagatatctcatctgttatgttcagtcaattgttgttaggcatttactcggtcaaagaaaaaagaattgttaggcatttcaatgtttttcccagcatgcatggacaaaggctgttcgtatcacaagcaaaatgtttaagccatttttcaatgcaaaatgatagcagccgataattatttgctttagaaactgtcaattttcttatgtcccatcagtttgtgccttttattttgctttagaaactagctacactcttgatttgttggaactaacatatcattgctctgcatttaaacgatcatctagcagatttaaactgtatttcacaagtttcaggttctagtatacgatcatctagcagatttaaacgatggtattcatcataaatcttcagatggtttagtagatgtaaattagagtaaacatttaagagtgaatgatatatgaatctgttttgacaacaaatatattgccacaagttttataattaatatttaccatatttatggcaccgagtaaggcatggatgaatctagttgatgagcgtcttagtattgaatgtttggatggcctgacttcaaaaaaaatctttatttagatggagtcgccaagttcttggattatgcattcagtaggtcaggtgatggaggtatataaaactttggatggtttaatagccctcatcagacatacag

SEQ ID NO: 119842 - DNA, 298 bp, Zea Mays
ggatattagtcaaaaatagtggtttttcttactctaaaaactctcattcttctcccaaaaaattagcgtctcgcatccacagcctcctctccctcatattttggtatgttccatccgtacccaatccattcatcaacgtatcggatcatctacagcctctcaacgactgtacagattatgtcgcatgtcacatttaaaggaactgttgaagtacccatcataattcactattaaaacttgttaacctactcttaataataagtttttggggtaaaatttttaacatacttttggagtc

SEQ ID NO: 119843 - DNA, 666 bp, Zea Mays
tccatcaccttgtgtgggcagtggtgccagaaaggcaagatcatagccatctgtccgttttgctggtattgcggcatctttgacctgttgtggtgcaggctgccgccaccaccaccatgatagttttgttttcatccaattaattttgttctctttgttttgttcatactcatttgtgctataataggaagaggcaggccgcaggtgtggtttggtagatatccagaatgatatgctggagcgggagacatccctgacataacattgggagcagaagagaaactgtggacatcactgcaacctgaggtgagagcatatgttcagtttggtagtgttcactttaattagatctaaattgcactcagaagtttcaatccgtttcttggaatggatggggattatttcagcttgtgaatatgttcagtttggcttgcagtaccagtgctactttgtttgattgagtacactagtgtttagagttgtgagctgagctgcatagagctaatgtagaaggatccaatgcatgttcaatgttccactggttaagattaagactgcaggcacttgtatgtttctatatataatcgaccatgacatgtgtgataattatacaggtaggaataccatgcagatgcattcgctggttgagtgctatagttgggacca

SEQ ID NO: 119844 - DNA, 817 bp, Zea Mays
gaacgacgcagtgaaggagccgctcttgcgcccaggtcgtggaccgtccgcgctgccgtagagcgcattttcgggcggtacatccccagtgtttggcacctagatcagtgttaaaatacttttaacgactctgctacgaaacgaaggatacatatctacaaaattaggcttatatggccgattctaaatatcacaacggtgtttctccaaatagtgacacaaggctgactaatttgtcgatcgctgagcataagaaattagaagatgacatgaagaagctagaagaggagatccagcgacaacaaggtcaggtgctcaaggtggcgagaagtggtacctatcgcacttcagggtagatcggacacagaatgtcgtccgagagagggaaataaatgtcaattacatgttagccatgctgcagcagctccccacggtatgtgatgccaagtcagccgatgatattcaatctattaaaatttcttctgataatcagattaaaagtatcacgtaggatatagagaagatgacgcatgcattagaaaaaactcacacgcctattttttatcacatgaattgggcaccaaaacaactgtgctaaacacatcagcaacaaatgggttttctcaatcccagccatattctggtatgtaaatggactcaaatacaagacaaactgttgccgccatcctcgatatacggtagatcagttctaagcatagccggaccgtccacacacgatctcacacagtccggtcctccgtcagaccatctggcaccctactataacaccccgtccacacccggaccgacagtactt

SEQ ID NO: 119845 - DNA, 317 bp, Zea Mays
cgaccattctatcattatacaatgcattttctagggtcatgcaaataactttactatcaactttccattacaaaagacatgtgcccttcatcagcaatagaaaccatatcaagtgacaagtggtggatgcaatttattgatccaaatggtcctcttatacaatttccgtttagcatcaatataatgagcagtaatgcaaatacaattgtaattttgacaatctggttgccaattatctaaggtgaaattaactctgccaagattattattgatagcttcagtgacttattttcttcccctttcaaacacatggccat

SEQ ID NO: 119846 - DNA, 819 bp, Zea Mays
gatatataaggtgggttagggacccctacaaaatgattggatcccctgttaggcatagccagatcttagatctcatccactttgttaccataaactcaagctcaattccaccttgccagtgcataggacgtagggtgttaagatctcagtatcgaacctttataaatatttgtgttctgtcgtgctttgcacgaactatcgagctaatcattgatcttgcaatccacaaaagcattatctggtacatctcgtagtgtgttgccagtgctaaacatcaacaatttgcacgctaggtaggggaggcggcatcgacactggttagctccatggacatcatcttcaccaacaccgtaaacttttctctaggtaaaacatttcactttggatctattacttgtattgttgacaatagcaaaactctgcaccacgtcgttgatgtagggaatgaagtaaataagcgtacaaccactaccattgtttggggagattactcgctcgagcctataatggctctggcaatgaccacgacgacactgcagctatacgtcacgtcgccatggactatgctaactcatctctaggttctggcacctccacttcctcgaccaagatctggacccagatcagtcagaggggggagtactggcctatgacgtcaaagccagctcttcacttccccaacatcttcttcatttatggtgtggtggatgaacacttcatctctgacgatgaaccagctgaggcgggggaagacccgcaactatgggaggcacgtgatctctagaaccaacgatggaacatccgatgccaccatgttgt

SEQ ID NO: 119847 - DNA, 868 bp, Zea Mays
aattgatgctttgacggcacaagtaggtcagctagttgagcttttcaagaatgccgcgggtgatgtgtccaataaagttattgacccacaaatggaagatcaagaagaggatgaaaattggcgtgaagcaggaaaaggtcatgaacaattcatgttccaaaagcaacaagcaccaccaccattacacacattgaaggattatcatgatatcattaatgacttggttgataagaagatgaagcaaatatcaatcgagcaaagccctcaagtttctgaaagtgagcttgaaaagacatatgaagcatggcatgatttagtgcccttcccatcagggtggcacccaccaaagtttcgtctatttgatggcactggtgatgcaagagagcatttggcgtactttgaagccatgtgtggagacacatcccgcactccatctcttctattacgacagttctctggttcgttgactgggccagccttccattggtatagtcgcttgccggttggctccatacctgactggaaaaccatgaaagaattgtttaagtcccattttgtgtccatgaagaaggacttctccatcgtcgagctgcttcaagtcaagcaaaagcgagatgagaaaattgacgactacatacttcgtttccgcaatagctatgttcgccttgcaagagaaatgcaccctcaagaggctgttagtatgtgcatacatggcatgcaacaacattggtcgctcgaggtgtctcgacgcgaacctagagatttcagctccctcagttcggcagtggccgcaacaaagctggagtttgagaagtctcctcaaattatggagctttataagaatgtcggcctcctagacaacacaaag

SEQ ID NO: 119848 - DNA, 390 bp, Zea Mays
gtgctacaaatgaaaatagaagagttcatccgactgaagcaagggggagatactgtgatgcagtatctcaataaattcaaccacctctcccagtatgccattgatcacatggatacagatctaaaaaagaagaattgtttcatgaggggaccaaatgacagacttcagcgtaagatggcaacatgtttggacctcacatacagtagggctgttagtacaacactggcagttgaagctaaaaatgcgggacactagaaatcaaagggatatgcaggtgaaaaatcaactcaaggacctgaaaagagaacaaggttggtgatccgaccttttaatccaaactgttcttcaccttgtccaccttcatatccatttaaacagcctgtatttatt

SEQ ID NO: 119849 - DNA, 394 bp, Zea Mays
caccaggtattggcagggcctcttaactgctgagccgcaaacaatggcttctgggtctccatgcatcggatgagtccaaacttctgctcaatgacccgtacccattcgtcagcttcgagggggtcctcagctttgacgaaaagtgggggatgggtttccgagaaatccaggtacgaagtttcacggggtccctgcgggtaagccctcccgccttgttgctgaagttgatgtcccgctatttcacgtaggaagcaggtgttgtcagcggtcgcggtgaccaaggcagtgatagcctcggccaacgtgggtggtaccggcggtggattgggtgtatcttcttgaccacgggacgttcccgcgctgtcatgtgcacgagttcgagatggcatctgaa

SEQ ID NO: 119850 - DNA, 373 bp, Zea Mays
ggttggctgtgctgtgctggtgtgattatagtcggtcttagcgcggatggtttgatgctgtcgctcctgcttttgttgtactggtttgactgcgcccttaggcgacttctgcgcggatagtcttcgcgagagacattggaattttttcgcacttgttgtgctaagtccggctgcacccttaggcgacttctgcgtggatttgtcgcacgcgagggtggctagcgcttagcctcgcggtgacttcgaattggtcgaatgccgaagaccgttgtcgcggtcttttttcgacacatgtttttgcgggggatttttttttcacatatattacatggctccgcctcgttaaaaacctcaccccccgggaggaaaagag

SEQ ID NO: 119851 - DNA, 462 bp, Zea Mays
tgcaggttgagttcagaaagctgaaatggtaccagtgtaaggtagctgacttttggacaccataacttgggtagtatgttgtttgggtcccagacctctatagtaaccttgaagagctttgtttagtgatcaaattttgttagcagagagcggtctgtctttagcaaggacagggagaaaaggggggctgaacagggaaggttcagtcaggcaatgatgttcatggtgatctaaaatatctgcagagatcttttctccttgtcgtgcttcacttttgtgcgaagattgagataaagatgggggaatagcaggggtgctcaggactttggatactactgaaatatccaaagtctggactggataatatctaccctagtgaaaccttatctgcctgcccttaaacgtggtgaactccaccaattcactgccttattgtgctcaataaactggcgtggatctcca

SEQ ID NO: 119852 - DNA, 861 bp, Zea Mays
aatcacccttgcacggaggaggaagttacaaccaaaaacctaacatcgaagccctaatatctagccgtgttcaatggaaccagaatgagatgcaaaagacaaaacctagcacgaagaacacatagccagagaagtctccgtacctgcggggatcgtcggcacgttgaggattgggtgtactggagatggtagcacacgtcgggaacaccacacggcggccgtcagtaacagtacagttgctgatggggaatgcggcgcgatctgttgttggaagaatcgtatgacgcagtgaacagcgtaaacacatggagaaggatggattgtgaggtacgcaccagaaacgagatcgtagttgccggcgacggagcggacactcgcggggaaggaggagcagcggcgtgcagtaggcttcgctttccagatctccgcccaggcgcccacagagaagctagcgggccaacctttttttccttttgactgggaactggcagccttatgtggaagcgtcccgtggtgtggccagcaggccaccattttttccgtttgactgggaacctggcagccttgtctggaagcatcccagggtctggggaatctcatattcacgtgctgcatcttggacgtacacgacaaatcaaacgattgagagaaattttgcagacgtggacacctctacctaccagattccctccacgctttattaaaaggaattccataatatgtctccttgatatggtacgtagatgttaacgcttttccttataaatttatttaaatttggtatagtttaacctagcacaaacttaggttacttatattccgcgataaaagtcgtacgtagtatatattagccgtgaactt

SEQ ID NO: 119853 - DNA, 830 bp, Zea Mays
gaggtcaaacgacgcgaaaacgacgtttgagcgaggaataatgtcataggaggtttgaaattggaattgaggcacgaaatcacgtggaattgtatcgatacttcacgagtaggtttatatgagtaaatatgagtgaagtgtgcgcttggtttgaatttaggcgaagaaagtggattttgggcactcggctcggaatcgatcgctagaaatggggatttgtggaaaactggtgcctgggatatctgattggtgtgaaatttggcaaatatgttacgtgaggtgtcatgagggtgctagaaaaatctgggatcgatttgagcaaatttgagtggttcgggcatttcatcgagtacctggcatgcggggttttgaattgagggggaaatggctatatgagtagatgaaacctcccaaagggagaagattacctgcaggggaactcaaaagggcactagggcacacatctaacaacttgattcacaggaattgcacaaatttgatttaaggaatcaaggggtggtggagggagagttcactggatagacagaagagagggagagggaaagaaagcagagaaatgccttaccagagaatggagagggagaggaactcgggcttggagaagatcgtcggtgcacagtggtggtcgccggcggcgaggaggtgaggtggggagcgcagagagcaccggagatagagagcaaagggctgggaagtgagcacaggctcgggctggtaaacctttttaaaaacgcatcatgggcgcaccagacagtctatagtgcctgtctggtgcacaccggacagcgcatagctgaaaggggatctgc

SEQ ID NO: 119854 - DNA, 297 bp, Zea Mays
ttgacaaagatacaatctccaacagttggtcggacactattaggcactatagttcctgtatatacctattcgggactaattaaaaacgaagtctttagttcctgtattgtagccgtatgatagcctaccatgcatatcacggccttgttacgtacgagcaattcccgtgtactcacaacagttaacgtcgaaatttccgacggctaaagccgttggacataagccttaaactatcggaaatagcctatctcctgcacggacctcgcgtgcagtatttatggttggtgaggctatatc

SEQ ID NO: 119855 - DNA, 662 bp, Zea Mays
cttggagtcttgcatactcttatattcttaagtatgtttatttttataccccaatgaatgttcaagacatttcagttaacatgtccttgatgacccttgtttcttaatgatccatgagcggtcattttatttttcacatccctggtgatcttgttgtttccttgtaacttcccttggtaatgaatttttttacttcaactcttccattggaaccatatacccttgattattttttccacttcgcctcttcgcgaagcttgccttaactctatccttggttatgcttttcacgattttcatccttaccctcgtcacatctatatcttaccctaaagcttataatatacatgtcctataaaaccttctctcttccatctcaatttttagagttgtattttacctattttctcttggtcgaatcctcttcctcgtcgcttgtgactttccaactccatcctttgttgtgcttctgtttagtgttgcctttacctttcccatctctcgaccatacattggtgattacgttatgtctgttgtctaaaatctccaacctcctatcctaatttgagagtggtgtgttacttatctcacccttggcaacatcctcttctttaccgcgtgtaagcctggacacaactccattctatcttgtactcatacca

SEQ ID NO: 119856 - DNA, 1471 bp, Zea Mays
ctgtccagcgatgaatggtagcagttgttataccagaattcagcaagtggtaaccaggtgggccattgctttggacaagagtgtacaaaacagcgtaagtatgtttctaagcactgattaaccctttcggtttgtccgtctgtttgtgggtggtaggagctgctgagacacaattgggttcctgttaagcggaagagctcttgccacaacttactagtgaaaatggggtctcgatcatacaccttagccattgttaaagctgtgaaaggatgtaatagaggtaggaaatgggcatacttcgagaacttgtctaccaccaccaaaatgcaattgcccttgctggaaggaggtagtccagaaatgaagtccatgctcacagtttgccaggcttgttctgggactggcaggggcagcagtaacccgggtatttgactctttctggtttagcttgttgacagatctggcacgaactcacaaattcatgtatatgtttcttcatgcccggccaagcgaaattagctttaactcttctgtatgtgactggaaaaccggagtgtcctcctacggcactgtcgtgtagtgctgtcatcaccatttgttcaaccacttgattgttgcccagccagattctgcctttgtaacgaattacaccattagtgagtgtataatgttcctatttttcccccatggccaaactgaccaacagttgttttgctactgagtcattttcgtacccctgagtaacttgtcgtaaccagttcggaaccacaactgatgtcgaaactgtgttgagttgtgtatcagtagcatcttgggccatattcggacgccgagacagggcgtctgcaactcgattttcacaaccttgcctgtactgaatacgaaactgcaagcccaacaattttgtcaaggccttctgctgccactgtgttgacagtctctgatcgtcgagatgggtcaagctttggtgatcagtctgaataataaactctccatgttgcaagtatggtctccattgctccacagcaaatagtatggccatgcattccttttcatatgtagacaatcccaagtttttttgacccaaagatctactgatataggcaatgggatgtcctccttgctgcagaactgctcccactccacccccactagcatcagtttcaatgataaatggcttagtaaagtctggaatagctaaaaccagagcttgtgctaaggctatcttcagtgccttgaaagactggtctgccagctcggtccagacaaatagggtgtccttccttagcagcgttgtgaggggcttgctgattataccaaagtgtgccacaaattttctataataaccggccatgcctagaaaactcctcacctccttcacacatgtaggtgtaggccaattctggattacttccacttttttgggatctgtagttactccagcagcacttacaatatgtcccaaaaattc

SEQ ID NO: 119857 - DNA, 992 bp, Zea Mays
gttttggtaaacaaaggtgtcgtgcttgttttatgtgatgagtaggtctgaaaatacaagttatgtgaagatttaattagtacacgtatgtgtgggtgtgccgtggtgtattatggtaatggtggcgtaaggtgtttatttgaggtgtgcgggtatatgccgtaatatggttatactcgcgacaaggaaagatgtatgtattgtgtgacccgacgtttaggttgttattgtacaatcgtgtgaaggatgctcccgatggtcatgtgactaaaatgggttgtagtggcaaagcgagaagtaagtttaattctttaaagcaattagtggatagcatctatcggtgttgtcataatttttgttgtatggcaatgtgatgtttcactttatcaatcattacattccatgcccattggataaataaatgtgttgttgatcgattagaagtcttgtatgagcgttatcgcagcccaataattatgggaggcgagtagcgtccgtaagtcagtccttgttagaatcgaagaacaatccgataacatatgcacataagtgctttaggtccttcagtagccagtataagtcttatggagtttatgccatgttttaatgtctctatgttagaccccaacgatgtgttattttaggtaacttgtgtgtaactagtttaagttaagaaaaggttaagaaacattaagtaacctgctcccacccatgttttgagttgcaatgtctaaaatggttcgctaagtcttctactgtgattagccagctcatgttaaataggagtcgatttcgttaagtgtttgttatatatgtgttgtctcggattacgataataagaggcaagccgacgtgtaggatgtatagcggcctatgttgttgcgctagttagccgaattaatagatgtgtttgggtaaggtcgtagtcacggtgattacttgttgtagtctaaatgcgcatggttacgatcgcgggtaaaaatctgtagtgc

SEQ ID NO: 119858 - DNA, 530 bp, Zea Mays
agaaactgcttcaactacatagagtactgaagagccggttgtaatgccgaagatgcctacagccaaggaagttgaaacgaaggttgataaggctgataaaccataaattgaagaaataatgaaaatgccagatactttgagcgctccaacaagggcgacaatactgaaggtacaaacaggttctatcgtgactcctaaaaggagaagtatggtaaatgtattagatgtattggaaacaaccgactccataagtcccgctcccacagggaaggttgccgaagctgacaaaacgcaacccgaagctgatactaagcaaataaaagttgaagctacaataacccaggctgaaaccgtggcagggcccacagagcctactgagacgaagcttgccacaaccgagcagagggttgaaggaataactccagatagtaatatagcttttgagaaaagtgtgtccaaagaagccgaatcccttactcccaaagtactctctgaaggttttgattatatcgttagacatgcttcggtaa

SEQ ID NO: 119859 - DNA, 640 bp, Zea Mays
tatttttaatgtatcttctattaaatccccattgtgtatttcaagtcactaactacattcttaaatactacaacaacacaagcaattatttgaatcctgcgccatgataattgatagaccattatctaaatatggtagaacccggatgataatggtaatttgcttacaaagatagagacaagagctcttataattaggtatagtctcggctgagccgatctatatccttatctaacgatcagctagataatcttcctgtattcgctctcctaagattaaaaagtgggtctaggcgccctaaaagagcagatcatcttatcacattacataagcaatagacactgccacacacaggacataggatgtcatcttacattgagagctgaaacctatctaaatcctcgagcctcttttgcatttaccttcacttcttggtctcgcaatccaccccataaatttagtaccgaataatcctcgatagttggtacctaggtaggggaaatcgtgctaatcatagtagatctgatgtcaactatgggctttgcacagggagacatcatcttcggtaccttcagattcatcgccaacacgctcgagaacattaggcttgtcccagattccccgacgacctcaatgtccc

SEQ ID NO: 119860 - DNA, 320 bp, Zea Mays
ataagaagaagcctatgttgatgatcgcgagcagtttgccccgcctccctaccatggggatccgggtcaatcatcctctcaccctccacctccctacccgggtccgggacccattcctggtgaccctaggccatccggctctggttaccatcaccaccctccacctcctcctgatcatcgtacatcttcggcatctgttttttctgcggctgatgagccacctcgggacaccacatttgaggaggacgtgatgaggaccctcttccctgactacacttcataccctccatcatatcctccgtcatatcctcctcctggag

SEQ ID NO: 119861 - DNA, 556 bp, Zea Mays
acaaataacgacatgtcctccctcaaaccatcactagcagggccatatttttctcagacccacagcccttctagtccatagagcttagcctagcatcatccttgatgtcctggataattttgttaatgtttggaatagccccaccacatacacacccattcttgcgtttccaaagccaccaagctaccaggattactatagaacttaaatcgtttactagaagcttggggactatcatctctttattgaaccaccagtcttgaaattttgtctctacatgtccatttgctggagtgaggtattgcagcccgaaaagagagaggattcaaaaccagacatctctagaaagacacattgtatcaagatgtgatgcatagtttcctcctcttgatcataaggagtacatttggcaggatgctctagcccccgacgagccaaatgatctgatgcccaacatcggtttagagaggctaacagataaagaatttacatctttgtggtgcccaacttttccaaatccttttcgctagttcaaagtggacaaccccctaaaaac

SEQ ID NO: 119862 - DNA, 407 bp, Zea Mays
caagcattcagggagcattacattccagatgacattcttcaaatgaagctggaagaatttgttcgtctaaagcaaggcggtgactctataatgcaataccttgctaagttcaaccacctatctcaatatgccatagaacaagtcaacacggacttaaagaagaaaaactgcttcatgcggggtttgagcgataggctacaacagaagatgtctacctgtttggaacttactttcaataggtctgtaagcacgacaatatctatggaggcaaagaattcaggacaagggaagacaaagaggtttggacatgaaggaggtgagggatcctcttatggatctgagaagcgatcaaggttagtgattcgttcgttcaatccaaatcattcttttcctcacccaccctcctt

SEQ ID NO: 119863 - DNA, 469 bp, Zea Mays
acaaaagtggctcacttcattcctgtgaggactaattacacgggagccaagctagcagaattgtatatggctcagatagtttgtctacgcggagtgcctaagaagatcatgtcagaccggggatcacaatttacttctaggttttggcagaagttgcacgagtgtttagacacatagttgaatttcaactcagcctatcatcctcaaactgatgggcagaccgagagaaccaaccaagtactggaagatatgttaagagcatgtgctcttaaacatggtggcagttgggataagagttttccctatgcggagttctcatacaataacagttaccaggccaatttgaggatgtccccgtttgaggctttatatggtagaaaatgcaagactcctttgtattgggatcaaactggtgaaaggcagttctttaggccagaaatgattcaagaggcagatgaacaagtacgtt

SEQ ID NO: 119864 - DNA, 589 bp, Zea Mays
catcgatgtcttggtagtagcttttcgattggaggcatccaccaaaagttcccattttaattcgtccttcaagacataccagtaaagcatatactagaacaccttgccttcctccgttgcaaaataaggttcccattgatatatatatgtgtttgaatcatatctttccaaatttcagaagttaattgatggcagattacttgttacagactttgtgttgttactgtattgttcccctgattatcagtgcttagattaattatttgtctgaacaacatccctagtttggtcactatgactcgtggataaaatggctatccagaaaagaaatggttaatcaaatgcttatcagaactgttggtcattatgcttatattgttggtgttttcacttacatattttgttaaggtcaccatttttgctttagtagcttgttgccggtcagttataagatacttgctagctgtgtatgcttattgcttggttgtcaattacttctcatgtatcagtttttttatttcttttatcccttctgattaaatgtttgtataccattaaggtgttagtatccttcgaatgaagaattttg

SEQ ID NO: 119865 - DNA, 318 bp, Zea Mays
aaagtatttgatgaattattgaaaagcggcaacattaaaatgactcacatcgtaccacctgctgatgaattaaaaaggaaggcatattgtaaatgccacaattatttttctcgcgctactaatgatcgcaatctgtttcgccgacagatacaatcagccattaatgaaggttggttgaattttcaataaatgcatgtggataaatagtcattctctatcaatacccttgatctcaaaggtaataaagtcttagtttggctagaagtggccgataaagacaagggaaagagtgtcctcatcgatgccccatgggttctc

SEQ ID NO: 119866 - DNA, 589 bp, Zea Mays
cacatctttatattaaattacaactttgccctccctattatatggtatcccttggtaattgcgggaatattgatgtgtcgtgtatgacttttcttcttcctagggatcttctttggcttccttcgataggtaatttctccaaaggcatcgaagctctgtttctcctttccttgtctcttcgactttgtggctcgtctgaagcttcagctatgcttctcgtctttgaagctctcttacaccctttgggtttgactttgatcattatcctaagtatgttttttgttattagagacctttcgattaagcaatatatatgtacgatggcgctattcatcactcaaggtgacggctcagagatacaacacccgaaccagacccgcctaattaaatcccaccaaaccacctatccacgtcaacccacccaactaattccccgcatgctacaacacgaccaacattggagctgccaccacccatatgtaattagccaaattctgctccaattaggtccaacccaccatcacgttgacccgcgccaccaacattcacaattcctcatggttgcacctccactcatccgctgcaagag

SEQ ID NO: 119867 - DNA, 280 bp, Zea Mays
gccaaggtggtttggtttatctaagatacaccttatggtataggagccaatttgatgagccgaatgacgattggttagaggctgttgaggcaaccagtgatgagctgctgggagcctacacaaaggcagaggacaaagccatgatcattgccttcggcgcccgaggaaaaaagactgaacagagtttttgatgtgatcgggtttgtttatcctgactattgttttcctgcttgaaaacaaggagggaagaggaacattggcacttcgacctcttctggtg

SEQ ID NO: 119868 - DNA, 469 bp, Zea Mays
tcccctacataggattgattctcttatagatgtaacgactacttttgagctcatgagtctacttgattgttattctaggtaccatcagatatggatgaaaaagaatatgaacaaaaaactagcttcataacacctagcaccacatattgctacctttaaatgtttgagggactgaagaatggtggtggaaactttagcaggatgacaagcagggtattggcccccaaattggtagaaatgtgccaacatatgtggatgatatcattgtgagatgcacaaaacaagaaaaccacatcttagatctacaagaaaccttcaacaacttttgaagagttggtctgaagcttaaccttgagaagtgtgtattcgaggtaaagaagggaatgttccttggttgcctagtgtcaaccaaaggaattgaggccaatcctaccaatgtagaagccatactttggatggagccaccaaa

SEQ ID NO: 119869 - DNA, 663 bp, Zea Mays
tatacatctgtagatttatcatatgaaatatttgggtcgcggcccactagatgcacattatggtcagccaattttgatgcttctttacttcggctttcacaagccaaagctcatcggcgcagttgtgttattaaaaaaaattaggtaccatctattttttaattaagatcgcaatccattaaaaatcagccctgctagctcatgaatgtggaagcattggtttctagtgccccagaacctccaaatatagtcattaaaacgattcttcacacccttgtcgaactaaagctaaatcaaactatcggcgaattcatctagttgtgctaataactagtatatgtgtttgtgtgtgctcttaccgcattcaccagagaatttggaaaactcgggtatcctagtcctttgtgggtatgggatagtatcaaactggtgatcatctagctacacttactccgagttttctcggaacagttctaccatttgttctctaattttctccatagtgcccggtggcaagccaatagtccttgggatgtcgggctcatttggtcgggcattgttatgtcagccttcttgccatggtcgatcaaaaacaatgttcggtctgtgatcgtatggcacgctgtaactttgataggtaggggagaaatgtattgttgatgc

SEQ ID NO: 119870 - DNA, 423 bp, Zea Mays
gcttaaccccccctttttttctaggtttcacccctgtaacagactgagttctagtagctcagatcctgtttgcaggggtgctggtttggtggtcttgttttgtttgttatctttgtctaagtctgtatctagatcctccttttcttcttaatgaaatgactcgcagatctcctgcgtggttcgagaaaaaaactgtcgaaaacatagaacattcactttgatggagcgcgcgatgaacttgaagagaacagtgtacttctcccagagaacccaaatgtcatgataatccttttgtcatgcattcatgcttttgattcgcctggtatggtctgagtctctgagatgaccttacctttgagttttgtttactaggctcacttgttgatgtgcctggccttgattttatttagagtaatattcttt

SEQ ID NO: 119871 - DNA, 834 bp, Zea Mays
aacatccaacacgtttgccatccttctcctcttaggagtggcagtagaagtcttttgtatctttggcatatctgcctctatcggaaggctcagaatctttggcgtttttgttatattgtcaatctttggctcttcagccttttcagccttatcttcggctgactcagctatatgcatcttcggcattacagcttgttcttcagcgccatgtgcagtagaagcagtttgtattgttttggctgctgaagaggaccctgcgccaaactcaggcaccacggccggttcaatgtaacgcgaccggtgggtaagaaccttcatctttttgcccttcggcacaggctcaactggggtggccgaagcagcagttttcctctttttcccctgtccccgcagcggatagcggtagtcggggtatatgaagccaatggcatcaaaaaccctgttcagtcttttattccctcgtcttccgaaggctgcggatagagcattatcttcagccttggaataagctccaagcaattcatcacttgtagcttcgatacacttcagccagtcgtcgttgggttcatcaaacttctccctgaatctgaaggtatacttcagtcgaaccagaccatctttgctagagtcggcggtggtctcctttggcattacccagctttctacaagcggccataccctgaaggctatatgctcctgaattaattcccttgtgccaataaaggagcaaacaatgttgaaggctctctagcatgctgcgacagaatcatcaatttctaccttcggccttcggagcctgaagcgggaccagatagggcgcataatgacttcttt

SEQ ID NO: 119872 - DNA, 717 bp, Zea Mays
gtaaatagtagagcatcaaaccatagggtatgggtccaacgatatatggaaacagaccggagagtttgaggggacatcaaacaagttcaatggtggtcatgggaccatatgacacaaccgtagtacgtagagttcttcctacagggccattggatcatgtaaacagtggtatcttcataccaatgataccctatcaaccggctcatacaaatgatcttgcctatttaatagttgaatcaacccttttggagtatgagaaagagcctttgcctagtgggagacttgagagttggaaatcactgtattagtggtctcattatcacatagagagtaattagtgtgcacccattgatctcatgaagcttggttgaatcaagtgagagtttgtgcttattactcttagtgatcactacaaaaaaatggttttgtatgacaaaagtaaagtgtcatgtttagtacaaaattggtcataaaaagtgttctgatgaatcaagcatgaaaagtgttctgatgaatcaagccactaactatgaatctaaataactgtttggtaacatttacagagatgacacaaagtagaaagaatggaattgggattggccatgggagggaaaaaaccttggggcagtgtctgctgcgtcttcaaaacccgggagttcttgcttttgctcctcttgacacactgagtgaccatgacgccaatgccaccaccatcag

SEQ ID NO: 119873 - DNA, 392 bp, Zea Mays
tctggggtgtttgtggatcctggggtgttatattaggcttgcatgtgccctttactttctagcactcccattttcgccactgattcaacttcctgagcacttcgaaaaccccagattacgccaccgtcgtcagaccttgatcacattcatgaccattttgcacctgtgagttcgaggcattcgttggtgatcgaaaccaagtatctaaggaccttagtggcgatagggctcctccaatagaagaatatcatctagtggaagattctaggcaatgattccttctcaatgcccgatgccgaccaaatagtggtctttcttcaattttttcttacacaaatttggtcttcaacctacctgtaattagggatatgttgcattaataccaaatcgag

SEQ ID NO: 119874 - DNA, 493 bp, Zea Mays
aagggaataagcctaccgatactctgagatgaccaggggcttcggaccacccaaggcatgttagaacgatccataatcctagctcaagtgaagacaggggaagtcatactcaagggcattagcacgactctcaatcatcaggaacacaacaaagctccttcaagccactagccccaagagggagaggaggaagaagtttcagaggaagattcaactcataaccaagaaggttgttttgcttgttatgtggagaagataaggggcatacaacaaggacatgccaagtcacgatatagaatcaaaagcaaatagctgaggccgaagcacggtggaattaaccgaagcaggtcctacatactgcttcatgctattccccatacattcctaagtatgtgggcaaccaacaacccacagtatcagtagcttcggcaagccactccctagctgcatgggccctgccaccatcgccaccactcatggctctaacttcgtc

SEQ ID NO: 119875 - DNA, 440 bp, Zea Mays
cagaagtgttatttgatactggagcaatgcattcattcattactgcatcatgggtaaaagcacatagtcttccaataactaccatgtcaacccccattcaaactgactcagccggtggtagaatttgaggtgatagcatttgtttgaatgtaagtgtggaaataagggggatagcgtttcccgctaatctcatagtaatgggtactcagggaatagatgtcatcctagggatgaattggctagataagtatcaggtagttatcagttgtgataagaggacaatcaagttggtgtccccactaggagaggaagtggtgaccgagttagtcccgcctgagtcgaagaaaagaagttgttatcagatggctgttgatagcagtgaagcagacccaattgagagtatcaaggttgtgtccgagttcccagatgtgtttccaaag

SEQ ID NO: 119876 - DNA, 331 bp, Zea Mays
tgcctaccttggctaaagtttctcgcttggttggctcgtgttgacggctgagaggatgcagcacgaccagaagaagaaggtcacagtcttctctctgatttcgtggtggtcttgtttgccccccttgcctttccggatcgaaatcttggtgtttagggttctctgtcaactcttacagcttcgtgtatgtatttggtgtgttgcaagcttcgtcctcgctgtggtttttcgttgctttagtgatcagagcagttttgcatctagaaatctccgtggtgtctgctgtagccgttttcttttctgatccgtggaggattaaatttattccctg

SEQ ID NO: 119877 - DNA, 489 bp, Zea Mays
gctatttgttaattgtctatgaaaccgtagcatgacatgggatgttgatgtagcaggcacaactgcgaaatctgtaatgcctgtgtcaattagctataggtattgaaagacaagcaggcaggcagaaaggaagcaataacattctattgaacaattgaatttgaacacaatgtttgaatatgtacaaaagatagtttagagttagtaacaacagatgttatcattcgtcataagaataaattttgttacaatctagtatggaacaatgtgatgttgtaatttccttcaatttgattgtaccagtattatttgttatatgaaatgtgcatatggagtaactgaccatgtgcagaatgaagtgaattcagtttagctagaagagcataatgtggcaggttagtaaaacgaagaagattgtacttaaggacatatgtgtctactatgagagatgcatttgggaaaaagttgtggtgtaatttggtaagaaac

SEQ ID NO: 119878 - DNA, 291 bp, Zea Mays
ggaggattggcgctgcgctggtttggaagcgctgaaatcgccaggggagtcgcctcccacgaaaggaaactctgcgcggctggggttttcttcaaatggacgctggtttatctccgttgaatgcgcgagtacggttttagaaagaggaaacgtgggagaggtggctggttcacgggggtaacggcgccgtgactgggcccagttgactcggtgtggttcaaccaaaatgcccatgttgactagcctgggcttcctttattattggaagcccagggctcttaatatataaac

SEQ ID NO: 119879 - DNA, 488 bp, Zea Mays
atttattctcgatctgatccaacctaataggttaacctaacctaacaaagtctaaccttaagttgagctaacctacggacagtcacttcaccagttaatagtggtaaaataaatgcgactctactcctatagaacatcttctaacccaaccaatagggtcatgatagattgcataatatgtctatcttcacctaaccacaaacaagcttttgacctacatcatgtagtctattccatccatacctatcttaaccatattcctccaccccgatgatatacactcaccgcgaatcaatgaaaccaagaccggagaagaaaagatcaacctcgtcaaggaaggagagaagtcaaactcaaccttcagttgcattgccactcaacacggagttctttctcaccataaactttcttaccccaggctattcttgccctaacctacctatcctttatcctacataataagtggctaggtatagaagatacccatg

SEQ ID NO: 119880 - DNA, 528 bp, Zea Mays
gtccaggttcagcttcgtgtgtgttgcccgcagcttatcgaagaccagggttaagtcttccactagggtctaccctctcttagtcttgaccacgatgtcatcgatgtatacctgtaccctatccctaatcaggtcaccaaaagtcttactcatcgcccgtacaaatgttggcaaggcgttttttagactataaggcattacaacataacagtagagcccatccatagttacaaaagaggtatgcttcctatcttccctagacatctggatctgatggaaaccagagtaagcatctaggaaggacaagaggtcgcacccagaggtagaatccacgatttgatctattcgtggaagtggatatgggttcttgggacaggccttattgaggttggtgtagtcaatgcacatccgaagcttcccgttagccttgggaactatgactagattggccagccataatgggtgatggacctcttcgatgaagccaacgtccagcagcttccggacctccttacggatgaaatcctg

SEQ ID NO: 119881 - DNA, 318 bp, Zea Mays
tgcctcagcatttgtgcccgtgtgctcgcacgttcacttccctcatgcccccactcatttgcccgcaacgacgcttacattctaatcaaagtggtgttgctgttttcccctgccacgctgtcgttagcccccagccaccaccaccatcactattgaccctcccaagagttactctgcaagcgattaatcgccaccaacgccgcttcagctcaccccacgacgctataaataatcctcgtgtctccattcactctgttgtgtcctccctcatcccgctcatgtgcaccaaacgttgccaccacgtcgactattgccaag

SEQ ID NO: 119882 - DNA, 526 bp, Zea Mays
ggagattgctaacaagtcagatgttggaaatgatggtgacgtcaatatatctgccatgtttgatgagaaataagatgttttgccatttgcatctgcatcccttccttctccagaacccattttaataaatgaacagtgggtgtgctacgacaagtgtgagaattggcaacttctactctatgggatgaatcgagatatacttcccaaaaatggcggtgtagtatgcagagttggttgtaagttcatccacttcgttcaatttcttgcagtggtggccttgctgctccaagatcccattgaatttgattaagtgttgttaaatgctttatttggtttttaagtgcccttattttggtatttgcaaatcgttgtaggcctcgaatgaatagttgcaaaataactgaagatgaaatcataggagccctttgggcactttatatggttcctacacctggaaataacattaaggatggtggccatgataatgctatgacaggcataggcacaactattgctccaacgtttc

SEQ ID NO: 119883 - DNA, 713 bp, Zea Mays
caacgactaggttactttgggagtggtgtcgggtgggctccaggggctgaagatgtccctgagccggacggtgagttggttgtgtttgaagctttcattgttgctggtctttgcctgccggcgcatcggtttgtagttgaggttatgcggagacttgaagtacaaattcatcagttgacactgaatgccatggcggcgctagcgaagtatgtctgggttgtttcctcatacggtggggagccatatgttgaggtcttcgcgaagaattactgtctgcactagcagaaaaggaagataggtggtaagattgcttagtttggatcatgcacctttacgccgaggactgggaagacctcggccgaagtcatcgagattgtcccgtgcgccaaaaataagtggggcaattggtgggaattttggttttatgtggcgcccgttgatgtcgaaggcttgcccagtttgccccctgccatcttgtgctcgcactgctatgtggtgtttccacattttgaggtggcagaagaagatcaagacgagggggcccttcgttacgtagcccgcctaagtagtgggcgcgatttggtcgaagagtttattgcttgcggggtatggcccttggcgcatggttgggccttgggcaagattgccccccgccgaatgccaaccttgggtggccaattggtgcgaagtatggcattcgccgtggacctgcg

SEQ ID NO: 119884 - DNA, 576 bp, Zea Mays
aggatttgtaatacccaagttgtaaagagtaaaaaaattgccttatatgatttgcccctatttattagtacatgtgaacacccacaattaaaagtgaattaattaataaatgacacgtaagtaacctatgcatcatgttggacatcttttgtttgtttgtgcatcaaacacaaaatttataaaggaggcaagtctagtttcgaatcaaattagggcatcaaataaaatgggaatagtagagttaaagaatggaggatatccaatgattatgccaataaataagtgataattatctcaaaaggagatagtattattcataataaggtttaattagccacatgaaggtatgaagttcaaatcactaattcaaatttattagaaaacttgaaattggcaaaataaaaagaaataagaaaaaggaaaatctcaaactcgcttgctgggccgttatttccatggctcgacccattccacagagaccatcgcccccgcgcgacccacctcctgcggctggaattgacgcaccagtggtcactaaaccgcgggaccgccctgtcacactaaccacgaccccgg

SEQ ID NO: 119885 - DNA, 565 bp, Zea Mays
tattaatcaaccgagaaaaaagatgaatcatgtcgatgacgtgcagtcatgttacacgcttctaaattgatgtttggtatacctacccactctttgattccttaatgcatgcagaagatccaaataggaaaaaacttaaaaagtaacttaacaaagatgaaggtttgctgttttgactctcgtgctcgcgaggctggggagatcacacaccttatataggagggtcgggaatgaaagcagtaggctcataagctacaaggctaggaacgttatgatccgatagagtagaaactctcattgttactcctcaaaatcaacaatgaagacgatccttgtaatgcctccatcaatcagtccatgtgataaaactaagtctggtccgcatcacgttagattggctccaatggagcatcagatttctccctccatttgggagagtttgccttcagccattcccactaggagaaaactccccttatatatggggacattttttccataatacttgaattacgttgtttatttatgatattaacttttttaagcttaataacctgataataag

SEQ ID NO: 119886 - DNA, 285 bp, Zea Mays
cttcgacattcttgtccttcatcgtcagcaacgggttagtcagatctgaccccaaggggctcaatgtagagcaaggtaagggtcgcgtcattacctctagtatcttcgtagcaccgatagataaggctgaaggggtctcagtaatattcttcaatagcttcagaggcttcttgctagcgtgatcaaacttagatggttttcgtttctttgtggtaggggactatggccccgaatgagaggattccccttactcaacctcttttctttttggcttcatagccaaca

SEQ ID NO: 119887 - DNA, 359 bp, Zea Mays
ttgaccttctccatgatccgttgctgatggaagtatgattcatagcgattgatgaagatcaacggatcggtttttccgtcgtacctgggaaaatccatcttccggaaccgtgggggttgatcatggtggtgctgcctgtagtggtccccggcggaaggtcgctcatggtggcgtggcccgtagtggtccccaggggcgcccgaggacttgtccttctggagttgtaccacagtcgcctggagggatgtcacggttgtagtcaagttctcgatcatcttggcaaaaacggcggtagtcgggtcagccatggctgaagtgaccgacgcaacggctgacgatcgcgacttaggagggctggg

SEQ ID NO: 119888 - DNA, 304 bp, Zea Mays
atgaggcatcactagagcacccaggaatggaagataatgttattaccttcttagtcgattataatattatcggtgatgatgaacctgttgttgctcaattttattttggttcaaaagaagcggtcttcacaaaaccgaaggaattggtcaatcatttaaacccgctctatgtacgtgaccatattgatgggatgccgatttctagtatgcttgtcgatggtggagtgattgtaaacttaatgccttaatctttgtaccgaaagctaggcaaacaagacaacaaattgatcaggactaatatgat

SEQ ID NO: 119889 - DNA, 502 bp, Zea Mays
ttctttgtctcactgacatctccagtaagacccatcccctttctattctttacaacccgagaccctctatcgtggacggcgacaggccgagctccggtgagctcatactggccggaatacgcagcggctagtgctctagcttggctgacacttaatttaactcctaacaatcgtttcccctcgatcaattgcaaggttcgagctcttaatcatactgcccacggtgaccgcgcgatcaatggacaaatcgagacattcccggtgatcctacgggctctaacttaattggatgggtcgaggagcatcaagggtacatcagagtactaaaatgagggaacagagggtatgaacggacctgtagcgcgctggccacggcgagctcactcagtacggtgttctagactgatttggggaagtctcaaattgggacgcgctggtggacgatctggggcacgggttggtgtattgggtgagtgactacctagcggagccgatggcatgc

SEQ ID NO: 119890 - DNA, 547 bp, Zea Mays
cttatgcagtacctcgcggctatccatagtctcgagaggcaattcaaaggtttcaccttgcagcatgtggaccgagccaaaaatgaggaggccgacgcattggccaaggaagccgccagaggcgaggccctgccctctgacgtattctaccatgtcatcggcacgccagccgtccgcagcccagaggggctccaaataaccaatgacagcgagggccaccacatagtcaacctcatcatgaccgaagactagcgggcaccaataaccctgttcctgcaggggtactatcatccaaccgatatcaatgaggccaagcgcctcaaacattgaagccgggacttcgcactaatcgaaggacagctttacaagaaaggggtcagtcaacccatgcttaaatgtgtcaccaagaccgaaggcgtccaaattctgcgcgaagtccacagcgggacttgcggctctcacgcagggcccagggccctagccgcaaaggtgatccgtcaaggtttctactggcccgccatgatctgcgctgtaaatcgggtcacaa

SEQ ID NO: 119891 - DNA, 547 bp, Zea Mays
ctctgtcgcaacacgccgtgactcggttctccatgtcgccgtgatcgtggcacgcagtaaatcactgcctctgagccatttcaccgctgcgcgccacggagagcagctctagccagttatctgatcgcgccgatgagctagagcttagccaaaatccgcggcgtgtgtgatcggaccctttgaattcagtaccctccctgctccctcttgttacgcacctagcgcaccacccctcaccccagttcatccaccatagcccaagaaatctacatttccccaaaatcggctagaacgctgccgtgaaacacctcgtcgtggccagcccttctcaggttagttcatgtccctctgatccatgttttagcatcgagaacatcgtgtcgccattgcagagcaccaccgagaacggtctcacctcgactagccctcccgtgctccctccatccaaattcgcgtgcgtaccgcacctctggtgagctagtgatactcgccctagcttcaatttaaatgctatcgcgttctgttgctcggaacgggctcgccggag

SEQ ID NO: 119892 - DNA, 298 bp, Zea Mays
gtcggacatacctcccatcatggggctccaaggagatcaccacaccctcatgcaacaggggggagcgactcacaacatcagcacaatcactcgccgactgaaagcgcaccagcagagatccgagcgacgaggtgagaagctcaaagttgaagtgggggaaagcagcacggattgcctcccaaacgaacgacgctggggcagacactgcccattgcagtgttatatagacaaacatgaatgcaacggctacatcgtgccggtcgagaggaaaaaacctcaagagatccctggaggaccg

SEQ ID NO: 119893 - DNA, 995 bp, Zea Mays
gaataattaaatattatacaaaggaaaatttacttgtcgttctcaaattattacacccgaagtggttcagagaggaataacatgagcaggtaggaggaggaagagaggtaagacttgggaaagaagaaaattctgtgtatcttcttacatgcctcacccggcagccattccctcatacataatcctcccaacacccactatttaacccattccggcccatagacgacgacattgtccttcctgggccttgacgagcgacgcagcctaattgttcctgttccttgtccggtacacagttgttcctttattgcacttctgacatcccctcctactttgaatgttggttgtccccaaacaacggcattgcaaggcctgttcatcctcccaagtagccaacaccggaggcatatgggaccattgaatcagcacctgagcacacagagtagttccatgagtcacggtatgccgttgaaggatcttatcaggaatacagaactggtagtcttcggtgggcagtgaaggagatgccacaaaaccagatcccaatgttttcttcagctgtgaaacatgaataactggatgaattttagaagtgggaggtaacagcaactcataagcaacctcccccacgcggcggctgatctgaaatggtccaaagaacttgaaagacagcttttggctagagcgttgagtgacggaggactgtacatacggctgcaacttcaagaaaacccactctccaactgcaaatgatcgttctgatcgtcctttgtcagcttgacgcttcatccgaagtttggctcggtccaaatgttgtctgaccagatcagagatgagatgcctgtgttgtaaccatgaagcgagatctgaggactgaatgacagtatccagagcaatctcaaactgtcgaggcttgcacccatataaagcttcaaaaggagacacgccaatggaagagtgttgcgatgagttgtaccaaaactaggcaaccgaaa

SEQ ID NO: 119894 - DNA, 559 bp, Zea Mays
ccggttacaagatatgaataataaccaaacctagctgattccaccctttttattgggtacctaatctctatctgtgtatgttttcactcttatcaacaaccgggtgttgtcatatgtacatggatatcaatattattatctcctaatctcgtaggatctctagaatatttatctttctagagcttccttgcggatgagatcttactctgattgtgtgtgccgagttactagacactcgattgagcccataaacccacctgttatggcctttcacgttggatatctctaatatatatctttaacagtagcccccgaggcttatttggtcgagttatagggtcaggaagagaatactcggctcttgaatcttcttgtataggtgagccttgctgtgcctaagttgttatctcctttgtcctactaatctctggccctgttattcataaggatgacaacgcgggataggttcgggacgggcagtgggttttttggattcggcgaggatgggaacgggtctacattttctctcggagacgagactagacgaaatcatgagaca

SEQ ID NO: 119895 - DNA, 423 bp, Zea Mays
cgggaggaaaatggtgttcatcggctacgaacacggctccaaggcgtacagggcatacgaccccgtcacgaagcgtgtccatgtgacgcgcgacgtggtattcgacgagcgcgcccagtgggactggggagctgttgaagaggccggggaacccagtgggggcagcgatgtattcaccatcgagtacactgtcacaagtccggcggccccggctgttgaagcaagggcagaacaagttccgggtgaaatcgaagacatggtggagacagaggccagggcagatgatgatgacatggatgcagaccacgacgatggtgtgcctctccgattccgcagcctagacgacctctatgggccagcatcatcacagggcgtcgcaccgcaaggtacattgcgccgcagctcacgagtgccagtaccgcg

SEQ ID NO: 119896 - DNA, 289 bp, Zea Mays
atgcatatatatattaagagcactgagcttccaataatagaggaagcccaggctagtcaatatggtcattttggttgaaccacaccgggtcaacagttcccagtcacggcgccgttacaccgtttcctccgtcagccagccacctctcccacatttcctgtttctaaaactgtcttcgcgcaatcaacggaggcaaacccgcgccgataggaagaaaaccccagccgcgcagtctttcctttcgtcggaggcgactcgccaggcgatttccgctgctccaatcgagcgc

SEQ ID NO: 119897 - DNA, 621 bp, Zea Mays
ctgcaatggagctaaaatcacggacgaacctatggtagaagcctgcaagtccaagaaaactctgaatctgtgtgaccgtcatcggtgtaggccagtcccgaatggcagcaatcttgctactatccacctctatgccctgtggagtaacaacataaccaagaaacgagacacgttgtgtgcaaaagatgcatttgtccacgttaccaaataagcgggcagcacgcaacgcatcaaaaacagcactcaattgttcgaaatgctcttccatagtcttgctgtaaataaggatatcatcaaaatagacaacgacaaacaatcctatgaagggccttataacttcgttcatcaaacgcataaaggcgcttggagcattagtcaatccaaacgacataaccaaccattcatataacccaaacttcgttttaaaagttgttttccattcatcacccagtttcattcgaatctgatggtatccactatgcaaatcaatcttagtgaaaataatggcaccactaagctcatctagcatatcatcaaggcgtggtataggatatcgataacgaattgtgatgttattaatagtgtgacagttgacacacatacaccatgacccatctttct

SEQ ID NO: 119898 - DNA, 668 bp, Zea Mays
gtaatccatgcaatttatagatgtgatccaaaaacacccgagcaacatgagcagcagtgaatggatgggataaaatcaagaagtgcccatatttggagaacttatccacaaccaccaagatgcaattagcatgtccagaacggggtaatccctcgatgaagtcgagtgaaatcgtatgccaggcttgcggcggtactgacaatggttggagaaggcctgggtacttaaccctttccggcttcgcctgttgacagactgaacaagaatgcacataagcctgaacagcagacttcattcatggccaataaaatagttgtttcaatcggccgtaagtgacaggtatgcctgaatgaccgccaatagcagaatcatgcatcgcctggagaacccgctgctgtaattcagagttaccgtccaaccacacgcgccctttgtaacgtattacaccctgacgcagagagaagggtctggaatcatccgactgtactgacaaacttgttaacagctgttgggctgtaggattgttgtcataaccggcaaccacatcatgtaaccatgctggggaacaatgagaaacagcgaaacagtctgctgacggccggggcaaacggggcagagcatcagctgctgcgttgtcggagccctttctatacacaatcttatattgg

SEQ ID NO: 119899 - DNA, 667 bp, Zea Mays
gcgtgttcgagaaaaaaatatagatgaactaaacttcacaatgattccactaggtgacaaaatcatcatttcactcttcacttaacaatattaagtctcaaaactaacgtaaaaaacatataagtgattaaagatagctatcgggctaaaaagtaagtttaaagataaaaagatccaaaaggcatatcctgcctttttttaaaggccaaggaaacaatttgctcacgtggtagtagtgcgccggcaaataccagtagccggtgcctgattgatttgcaaaaagatattacatctcactgtctctacctttttcgtacgtttcagaaacggtgggagtagtgaagttatgtgtgtatttcgcaggcttaaatctcggtgttgtcatgggcgatggataagtgatttgcactttgtagttactaattagctttcgcttaaggcataggcaaaggcattgggatgcaagaacagagaaatcgatcgtgagataaattactcacaacaaacaaatataatagtttaaagtagctgttggaacttgctctcttgaacaagttgatccaacgggaaagtgaaaggagtgttttaaaagcttaacgtaggatggcaacaactctgttgatctggcctctcaagggcgttgtacgggggtatttataggcactcg

SEQ ID NO: 119900 - DNA, 340 bp, Zea Mays
tgttgaaagtgggggtgtcttttattggcaaaacaagcaacaatttttattagcaaaaagggttgaacaattacaatactacctagatagaaagacaagagaagcacataacacaaccgagcaagacttactaattagacaagagataagacctctttttttgcggttcataaaatagcgatacaacacattattcacaatttcttatgattggaacaagggtgagagaagcatgttgatacacaagagacaaatataatgcgacaatcatgatgcatgctcattctagtcgtcttctcagacctaactaatttttcgggtgcttgctacaacatcctta

SEQ ID NO: 119901 - DNA, 522 bp, Zea Mays
aaatgaagtcctgccctgaagaagcttttaaaaactacgacttcgtcgtcttttggatctagaatcacctcttccctggcaaattgaacaagtttgctctcgacctctccaaagtagcccaatttcttcatcataaccatgtcgcgtgccgtcacagtagatttaccaaattcaatgtggctgggtttcgctggatcagaatagtgtaatcctcttcatcttcgttctcactccctccaactgcgatttgttcagcttcagcaatcgagctaccttcggcaacagcctcctctggcacaacaagacccaattgcctcatcacttttgatatcggtgccgtcttagttacttcggcctcgtctccctcacgggacaatctagcagtggatcgtactctggccatttcagtgtttacgcttttttgaaacgaagctaatctcaagtggcgaagtgtttgcttgaaaatgcaatccagaaagctttggctatggttaaattttttaacaacgcaacagtgcgatg

SEQ ID NO: 119902 - DNA, 462 bp, Zea Mays
cttcgtaaaaaccgcaaaaaatccatcagatggccagagtgcgttcgactgcaagggtgactcgtgaaggagaggaaaccgaggccaccgagacagctccaatttccgaagttatgagacagtcaggtctagttgtgatagaggaagctactgacgaaggtgctcctgctaccgaagctgaacatactgttgctgaagaagaagaagatattgatgaagaggaagattacagtattttgatcccaagtaaacccagtcatctagattttgagaaatctacaatgtctgaagctgacgtatccatgatgatgaagctaggttactttggagaagctgagaggaaacttatccgatttgccggagaggaaaccaccctagtgccgaaggatgtagttgttttcaagagttttttcagagcaggactacggttccctcagagcagggcaacatggcgcttttccc

SEQ ID NO: 119903 - DNA, 504 bp, Zea Mays
tgggcttgatcgtgtatatttggttcaacgaacctgaaaagttgctaacttgttcaaaatttcaattctctctgtatgcagccttctaatttcctccagacgctttgaaatcaattcctgctcatatttgtatgtgtcaatcttaaaagtccatacacatctagcatcctagccaatagtttggagctctaaaacaagaacttgacattaccattaactccttgtgagtagcttcaagatcttgcagttctgtttgtttatctctcaccttttctgcagtcatatttttgtttcccagcgtaggaaccaggatcggtgttgcttgtttattgtctccctgtgctttcagtactgccagtttttgtttgcttccttccaacttggcaacaacactagtcaactcctcttgagaagtacataaatactgggttagtttaccattacacgacagctaggtacacataatagaataaagaatagtattggtaataccatgtgttggta

SEQ ID NO: 119904 - DNA, 287 bp, Zea Mays
tccgaaaaaacaccttcccttcgctagaatagcgaatcattctgagccgtgggacccaccgaattgtggggctctgagtatatatatagaaggttgtgttgcagatatttttcgtgccatctagcttttgtgttgcggttgtcgttttagctttcctgttctgtgagtgcaattgtttttgagcttcggctttttgcagtgatcatcaccgaaatggccgaggataagaaaagtgtggatcccacactcgctggcttctacgaagccatggaaaggaccaacgtaga

SEQ ID NO: 119905 - DNA, 371 bp, Zea Mays
cactgatgacaaggatggagactatgaggccaatgatgacaaggatgaagactatgaagaatgtgaagaggtttcccctacaactgctaaaggaaagcgtcatgtttctattggtcgaaaggacaagggtaaaaagcctaggccattgggaggacattgggtgcaagatcaattgagcaaacttgtgacagcaagtgagaagagcacagcatccgttgagtctttggcaagaaaggaggacaatgggtgctccattagagatgtcatggcattggtgaaagagtgtggtgcagttccaggaacaaaagaacacttcatagcatctcaagtttttgtcaagagggcagagagggagatgtttatgactttgg

SEQ ID NO: 119906 - DNA, 368 bp, Zea Mays
tcccactgtctggactaggcctcaaattatggaaagtgcaggggcttcggtgcaacattcccaagactcagagaatcccacaacggacggcgggttgtttcaagataaacagggggactctttagtgaattggccatcgcgaaggggtatcggcacccgtgagccgtccgatccaagatcgtcggtccagattagaccgagacacccatgaacccgcccacattattagtcgttggatcgtggatcgacggcgcagattttaaatactaggatcattacacgcccgcacgatcaaggatcaacggtcgcggtgcaactttccccgttctaaatcctagccacacatcagccaatctacgccccgcgcg

SEQ ID NO: 119907 - DNA, 483 bp, Zea Mays
ggtttgactgctaaagttgtggttgctgattttgttttcaagaacattcagcctttgaaggacagggcctaccatgcttatttgtacagcggtgtcaatgattctacctgggtcactaacagaaaaattcccactgaagatctgatgagctgactggacatgatcttgaggggtagagtttcaaatgctggtgttccggtggcctattatgcatggaacctaccaccacttaggccattttctaagtttgtgtctaatcctcctactcgtgacgtagcctgggtcttagagtgcgaccctcttctgaagacattgagaccttgattgccccacttcatagtcttctacaggataagaagcagactcattttgagatgccggctagcactgatgatgtggagatagatgttgtgtttagcttgctggctggggaatcgtccgactcaacccacaatgagccaatggccatcacagctgggcaag

SEQ ID NO: 119908 - DNA, 727 bp, Zea Mays
ccttttttataaaaataaagtagttgtaaattagttttctttgcaaaccatgtattttattaagttaatataattttgtatttcaccttatatatattattttggttttataaaagaaaagagacaagtgaagctgctcggtttttggaccttttggcatgctcccgcgctcgacctaccccgcgttttggcctagatcgcttagcgatcgcccgcccatgtctctcccactctctttcgctgataggtctgccccaattagggatttcctgttcctcccgccacaccgcatagcagcgtcgccttgtcgcgcctccatatgcttgcttgcttacttgcccgcccactagctcgaattcactttgcagtggagcactactgccgccacggttgttacctccaccaagtgtcgatgtcgttttctctgccccacaggacataaatccggtgagctattctcactccctagcgtcgcctctgctccccctctcggcctatataagcgcctcacgccagagcaatctcctgcatgcctttattccccctatcaagctcccatgcgccctatccacgcatgtcgagcatcgccgccgccatctgccatgaacagagcaactctgggcaccccactactgtcaagctcctccatgagctcgtcatcgtccccaccagcaatcccccacctacctacatcgatctcatgccgccgcaccattcctgatcgtcg

SEQ ID NO: 119909 - DNA, 482 bp, Zea Mays
tgacctctctatacttcctttgtcttccccgtagccacatacgagtaggagattacgggtatctatgagctgcctgcctgcctcctcctgctgaagtgccggctggcacctgccgcggccaaaactttgttttgatttgtacgcagcttttatggcaactttgcttctacaagcaggcaaaccaaaggggaggatggatgcagagagcgcaggccaggcggcgtaggcttcggtcagtgcctcagctgagctgcctgcctcgtgcctctcttgcagttccagttcatactgctacattcctcgagaagtcttccgctgctgcctgcccgcctcgcttaaaatttcaactgtcgctggatataccaccccctgtgctgtgcatcttgatgctgcatgcatggcgagaggaatttacagagggtacaaacaatctttctgctcatagctcgtgaatctctctgcctggtttctttcgaaaagac

SEQ ID NO: 119910 - DNA, 1171 bp, Zea Mays
gcaggattgagcaagaatttgcttagggattctataacaatattgtagctagatcttagagctaaaactttgctaaagggtgatgatcatgttactgcacaaaatcgggagtaaacagccctgcaaatcgctctttcaggtgactaaatgggctttcccatggtacagtaacctgaaacggatctggacgccagctcaactcgccgccgacgatccccgccgtgattcgtgtcgccgccgtcctgattcgtgcccagtgaggaacggataacgccggggatggataactcgtatgtggcgccatctcccaagtccagccggagttcttcactggcggccaccgtgactcggtaactttcgccgtggtgtcactcatgccgtgatctgcctcactgtgcctcctaccgacgtggtatgcatgcgctagcaatgctatccgtggccggagatcgtctgttgggttgccgtggctataaatagcacggtggtccacgacgaggtgtgactatcacacacacattcagttgaatcgaagccgaattcgcgctacctctgccccgtcctctcaaattaagtgtgcacagtaaaactagagttctttgtgaagctgaagcaccctctcccaccctcgattagccaccataaccggagaatcaccaatttcccccaaatcggtcagccgcgccaccgagaatagcccgatcgtggccagcccgctcttgtaagttcctatccaattcaagtgttatttccgtggctctgcatgctggtaaagctcaccatggcacccgtttactcaattcggccatgatttggcgggaacgtgtactcgtgaacccggtttccgccatgatcatgggcagacagttcccagtggggtttatgtcaaattaaaggatgttcctagattatccttgatcggttatgcctccccgatagttaaccatagcagtcatcgccggcgatggccggtacagaccacgtcgaagacgaacggcgagcgagccgtggccagggatgtttctagagaagaaatagaagtacgagggtatttctgcaaagtgtcagtgactgttttaaatagtgtttttggactccttcgggctaatcaaaactgcagggacttattcacaaagtcgtcgtcgcgcgcgcgggcgcgtccgtgttccgg

SEQ ID NO: 119911 - DNA, 471 bp, Zea Mays
gcagtttgtgccgatggcgctccgccgtggggatgcctcgcgccgccgtcttgtgggctgggggtggtgtaacgcgctaccgttggatcctcactgtagggtctagattagataagcgaatcgataggatgtgggatgttaatgaccgttagatctgcaatggacggtagagattagtttgggtgtagcttttcgtgagatcggatcgtgacctcagatcgtggatcgtgcggtttggatgagtggaaccatcataaaatctgtgccgtccaaatgaaatctagcggctatctgagcataccgattcatatggatccgatctattctggatcgtccagatgggatccagcggttaggaaatagagataccctttggtcgaacactttttcgtaagagcccctcggtttcattgaaataaacccgccgtccagtgagcgctgttcactgtgtcttgggcaattttccctgtg

SEQ ID NO: 119912 - DNA, 747 bp, Zea Mays
gtccttccacccagcgtggataaagagcacatagtgggcatgagatttaaaaagcatattattctagatcgaggcattattaaacaaccatctcatcaggttgagaagattaggccacattgagatagagagacaagttgtagtagatgagttcgctggcacataattggtctctataatacattgggcttgatgtgttaatttgtcaaagggtggaacatagaaagttaacaaagaaagctgagactaaaggggagaatgttaaatgtgtccttggacttagtcaagagaccgatttggggtcaaccacgtgccctgattaggggcacacacctttctatggttgtggccctcagttatagacgatataaaaatcaaggtaggatcgacacgaaagccaacatttatgccaaccctagatgccacatgagaacgattctaatctacctcctagtgccctagtgaccagaaacacacgcaatttccctaatggttcccatagacactaacggatttacatcagtgactattaatgttagcttgctcatggtcctaacatacaagaaggaaagactcaacaagagggatgcactcaagtcctagagacgacgtcggcgccatccactactatggtcagcatccatcttggactcgatggtatggttgtctttctatctcttttcacacactcaacaaacacactagatctgcatctactattcaatatacaagaacaaagatgaacta

SEQ ID NO: 119913 - DNA, 435 bp, Zea Mays
agtggtcaccctcggttgagtaagtgttctgatttcaagtttaatcaagtcgaagtcgatggataacgaatagtttgaatgcttttgagaatgaaatcttttattgatgacgtgttttccaattacagaatacaacattgctctgatagttcttgctaagggtaaaacttcctaaggtgctctatattccatgaaatccctacttccgtgccatacatttgagtaagccgatatgatcttggacgagtgacctccgacactatgaatggcccctcccatagcggcgataatttgtgccgtccttctcccgttagaattcggcaaagggccaaatcttccactatgaaggatcgatgtcgtatagtcttatcatgatagcgcctcagggtctgctgatatctagctgactgaattactgtattcaaccgctcttct

SEQ ID NO: 119914 - DNA, 328 bp, Zea Mays
attcatttgcttgtactctatgaagtggaagttcttgagatgccaaaaaagcagggaagtgcggacacaacagtcaagatgagctacttaaaagtgaggataattcaaaggagcgtggtatcccgagaatatgaacactccagagatgcaatatttgaggttagtatgcagtagtcgagcctattcatagattattgttcctgttttctaatcttggtcttatgactaataatttttaatgagtggttctaactggactgcttccaaatgtagtcattggctaagccaaaatttgaatttcataaagtaactaagatcagtgtttgtc

SEQ ID NO: 119915 - DNA, 1785 bp, Zea Mays
gacgaggtcattctgtgaaaggtccacaaaaatcagtttagtcatgttggcgattgtatttggtattctcccagagaagctgcaacctcgaagtattaatactgtcaacttgttgagatgtccaattgtcggtgttatagggccagataaaccttgatggttataggatatttgcaggaatcttaagttttctagattgccaactgaagagagtaattgaccagtaaaagcacaatcagagattgtcaaatattccaatgtcgtaaggttgccaattaactgtggaattggccctatggaaccacaatacctgatatccaagcttctcaaactggttaggtttccaatccaggagggcattgtcttggtagagtagcaatcagaaattttcaatgttttcaagctctggagatcaccaatccatgagaaatttgacctagcctcccttgaaaaatttaccgaagagagtcgcaaggtactaacatggtccatcttgtctacgaaaaaatagggaggttccatagaaattgatcttccatctattcccaggtctgtcaaagatgtgagattgcccaagtagctcagagtgacaccagagaaatgtgtatcctgtagattcaaagtttccagcgagctcccatggagaaattttggaataagccccgagagttgatcgttatttgacacatccaatactgccagattcttcagttgaaagattttcggtggaaaggtgcctctcaagttattaaagctgagttgaagaactcttaaattgagaaaatctgcaaagaattctggaaccacgccggaaattccattcatttttagattaatcacttcgatagagcggagacgtagaaaatgtcgatggataggaccaacaagcctgcattcctccatgctaagaacctgaagatgaggaacgtattttccaagagttctgccccaatcttctctgccactactacttatgtccacgccatcaaggtagagctctctcagatttgtgaggtttgacaatagtgtctcgaaacttggttcttgtaggaccaaaaggttatagctgtcaaaaagattatacaatgtgtctatttcagcaccatcaatgttatggattgaagaaatatccagcgatatgagactcgggagtttgcctattacaaccggaatgtgtccatagaaacctgcgtaagaaaggttgaggtgtgtgagtaccgaaagcctctcaaagccagccgccggaataggggatccaccgaagtcattcttgctcaggtcgagtcgctggagtgaggtgaggttgaagagcgcgccgtcaagactgtagctgtacaagccacggccaccgaggtcaagaacagtgacatggccggagacactgtcgcatccaacaccctcccagaggcagcagtccgtgcctgcttcccatgaagcaagggtggtggtggagtagtcgaagagaaaggatcgcttgagctggaggagtgctgcagcatggtctggatggcaccaaggagctgtgaggttaccataccaagtggatgaagctagtgatgagcggaggtggtgtatcagtatcaggaagaggggaaggagataactagcacgagccatgcatcattgtctttgcactccagaaggaaagcaaaagaagatagttctatatagtagtactagagatggacacatcccattgacgatgccacccagtccaccgtaatgactttgaagttttcaatgtcaagccgccgaaataattaagggctgtttgggactagagat

SEQ ID NO: 119916 - DNA, 329 bp, Zea Mays
ttcagaaacaccgttgatggtttttattcttggcatgaactgtattctggtgcagtaccgtagagaagtttgcaagattttggaggctgcctgtgattatttcctcaaatctgaggcaaatagccatgacagtgacgagattgtgatggtgtcttcaccatgaaagcctacagatgaaaaagatgtacatagtgccatgcacatatgcaagtgcagtggaaacaagtttgcaagattttgcagggtgattgtggtcacatccaaaagctggggaacagacaaccagcaatgatattgtggcaatattcaagaaaagtgcagtggaaaac

SEQ ID NO: 119917 - DNA, 486 bp, Zea Mays
gatatacacatgtattggtggccatcgacaagttcacaaagtggattaagtacaagtcaatcgcaacattgacaacaactaagacagtagagttcattcaggagattatattctgggttgtagtgccaaatagcatcagcactggcctgggatcctactttacaggagcagaattcttcgatttcattcagcaaaagtgcattcttatcaggtatgtttaagtagcttatctgaggtccaatggtcaagtagaagaagcaaatggaatgatcctagaggcattaagaaagaaagtctttgacaagaatgaaaagcttgcttggaagtggatcagagagctaccatacattgtctagagtcttggaacccaacctagtcgggcactacaaggcaacaccccattcttcaaggtgtatggttcaaaggtagtgctacctatagatttagcatttggggcgcccaggctattgttcaaggacatagaaa

SEQ ID NO: 119918 - DNA, 943 bp, Zea Mays
ttcacgaaaagtccatcatatctcttgtacttttttcaattaacccctaaagatctctcaagagacccaatattaaggcagcatatcatgtgcaaacgccccacctcgtgcaactgtacaagcggaaagtgatcgacatccgatattgatccaacgaaggcgtcgtgggcctaagcaatttccaacgaggtcatctcgcgcttcttaatttttcctacttagcttggtcactctggtccaccccttctcaccggttcaggatccctcattatcgcccaccctcacgatcgtccaccggagaaccgttcgcagattgttctttcttcctcctaccattgcacaacctcctctcttccatggctagacgggatcctcagaatgaatcattggcaccaacgatggatcgacatatgattgtggcagcttcaactcgaacccatgaaacagtttttctcctcccaggcaatcgatgcgagataacgaacatgcgtcgatgaccaacagccacctcttgaggatcacccatcaaagtatttggaggaagaagacaaccatatgctatcatccatggtaggcacaccacactcagcaccgttaatggaatcgataaccccaccacagaacccatcttcacatctcattgtaagtgcgcaacatatatgggtctcaagtgagaacacattcgtgctcaattctaatgttgatcgacatatttgtgtcattgtagcgttcttcatttgtccctgatgttgaggcaagtttgaagcctgtggtggggatgccatttgagaaccttacagatgtagagaaatgttacatagattatgcacgtgagggtggcttctctgttcttaacgtctagtttgtcaagtctagaaccgtctctccaaaaaacggtgagacgaccccttctgttaccactaccaaacaagatgaatttgag

SEQ ID NO: 119919 - DNA, 1121 bp, Zea Mays
ggcgtgctggctcgattgagctcagggaagggggagagaggtgaccgaagctggtgtgaaggaagctggagctcgggcggtcccttttataggcggccagggagggggaaagaggagaggtggcgagcaccggcgacattcctggcaattagatcaatgtagaactccacttctctttctgtcggcattcctggcaattcttttgggaatacatccatgaattcttctactacagatatgctttctgctgctagattaaacaccattggatcttgggtgggtggctgagcctgacatgaaactgactttccttggtggtcagtgagaaggatggtcttatctgcgcagcttatgacaacattatgcttggttaagcagtccatccctaagatcacatcaattctgtgggatggcaatacggctaagtctgccaagaacactaccccacttaaaagaattctgattttggagcatttgaggtggcatagaaggtctgaccctggggttcgggtgactaagggaatttctagatatgcagtgggaatgccatgcttttccataaaaccagtggctatgaatgaatgggatgctcctgaatcaaaaagtacagcagcggggtaaattcaactaggaactcaccgagcactactcccgaggcttgctgagcctcttgagcggcgacgtggtttactcgtgccctgccatgatactgggtcttacttaggtggctgttggagggtgctggggcactcttggggccattcaccgagtggagtaggtaggcacaaatgtcttcagctaaggacaattattcttgtagtgactggggtctccgcagtgctagcaagcattggctggaggttggttacttgcaacggagggggcctagagggaactttgaccctgctgactgaaacgtgacggagcaaacccagctggtttgttgaagcttggtccattgggtggaaacccaaaagatcaaactctctggcgcctgtcctgctgctgagctcgaaggacttgaaacttcctcttgaggtgacccttttcttcttctctagccctttccacttgtatggccttgtttgagaggtgcgagaagctgagaaaatcttggctgg

SEQ ID NO: 119920 - DNA, 785 bp, Zea Mays
aaaaacatgggttggagcagattaatcagcttttcctaatcattgctcaacttaaatttgttaacacacaagtcacctaaaatagcacattattgggggtctaacatagaggcattaacacaaggcataaaactccataagactacatttgctactgaaggacctaaagcacttatgtgcatatcttatcggattgttcttcaattttaacaaggaccaacttatgaacgctactcgcctccaataattattgggctgcgataatgctcatataagacctctaatcaatcaacaagatatttatttatccaacgagcatggaatgcaataattgacaaaacaaagtatcgatccaccatacaacagaaatcatgacggcacctatggatgctatcaactacccgtttaaaaatactaaacttacttctcgctttaccactacaccactctttagtcacatgaccatcatgtgcatcctttattcgattatacaacagcgacctaagcgtcgtgttacccaatgcatacatctttcctcgtcgcgagtataaccatattacggcatatacctgcacacctcaatcaaatatcttatgccaccactactataatacaccacggcacacacgcacatacgtgtccccatattacgcacaagacatcaaccgcaccaatgactctaacaggattaatcatactcgtcattcgcctcgactatcccaatcatcgatcacatgcataaaacaattacacttttcacgtagacacctatcgatgcattcccc

SEQ ID NO: 119921 - DNA, 487 bp, Zea Mays
acgaaactgaaaaaggacttaggaggtggcagattccaagcagagtaggcaacaggagcaccaacatttgatactttgtctctcaagatcatgtctagccggctcaccaaatcctcagcaggaattctcctattagtaacccgagtcgagttggtaacaccactgtacaagtaagctgggtatgctttgtccttcaagggctggatattcttaaaaacaaaatcagcgaccatagccttgacagtcagacctctctccttcagcagacagatttcagcaagcagaaccctagcttctgttacttccaaggcagtaggagattcaatccaactcggagtgcgcacacctggctgtctccccgaccgagggggagggacttgccgtggttttcgacaataaaccactcaaggcaccaccctttaatgctgtccttaagcaaaatatcaaggtattccgttttcctcctgcggcgcatctccagacttgc

SEQ ID NO: 119922 - DNA, 590 bp, Zea Mays
atttcacaacattgttaggccaaggagccttcggccctgtctacaaagcagacatgtcttctggcgaggtactggctgtcaaagtgctgtcgaacaattccaggcaaggtgaaaaggagttccaaaacgaggtaattaataagctagctagcatttaaatatacatatacgcctgacgcctgtatatatatcgtttgatttagacctagaccacctcactagctagaaggaaaggaaagaaaaaagaaagaaaatctggcatgcttagtgctgattaattaattcttggcttcaggtcttactccttgggcgactgcaccacaggaacctggtgaatttggtcggctactgcgccgacaaagggcagcatatgctactgtacgcgtacatgccgaacgggagccttgcgtcacacttatacggcatgtattttgattttcttttatgcaaaaacttcgtttgtttcaacaagtgaactccttgttttttatagctagctgaacattcttttctgtggctcgatcaggcgaagacagtgcgccactaaagtgggacttgagagtaagcatcgctctggatgtcgctcgggg

SEQ ID NO: 119923 - DNA, 609 bp, Zea Mays
gtatccagtggggtgttgtagggcttgcattctatcattccgacatagtctagcatatcaagagtgtactaggcgctgagagaggagcattcaggtagcggtgcacgtaatacgttcccaagaaaatgctggataggaccaagatctttcatatggaaagcggcttgcaatgcagtgatgatctgacagaggagagggttgtcgtggtagttaggacaatgttgtccacatagagcagcaggcagtagtgctagactcccgctgaagcacaaacaaggaggtgtcggacttggcttcaacaaagttgaatgacttgaggtgagtggtgaagcagttgtaccacacacaaggagcttgtttcaagctgtagagcgatttgttgagctggcagacatggtcgagtggagctgggtcaacaaaactaaagtgctgagtgcagtagactatctcaaatagggtgtcgtgcaagaagacattcttgatgtcaagctgatggatcgactagtctctagagagagccagattgaggacagtgcgtatggtggcgggcttaacaacaggactgaaagtctcattgaaatcgatgtcagggcgctgtgtgaagtcgcg

SEQ ID NO: 119924 - DNA, 310 bp, Zea Mays
tttgatgcaatcggcttcatttaccccgattatcgctacccgctgcgagggcaacagaaaaagaggaagattgctgcttcggtcaccccagttgatcctgtgccaaagggcaaaaagatgaaggttctgacccaccggccacgttacattgaaccagccgtggtgcctgactttggcgcagggtcctcttcagcagccaaagcaatacaaaccgcttcgactgtacagggcgctgaagaaccaactgtattgccgaagacgcatatagttgagccagtcgaagataaggttgaaaaggttgaagagccga

SEQ ID NO: 119925 - DNA, 921 bp, Zea Mays
gccgggcggtcagtgggagagggaagagagtgaggcgcgggcgcgcgggagagaggtggagacttgggccaggttcggcccagccgatagggaagggttttctttttctgttttcttttctcttttcttttccttaacctctttttcctttaaacaaaaattcataaaaatttcctaagtgcccaaaatgaaatattctatgtgaagtgctactagcaatcatggtgcatgcatatgatgaatataatgcttcatgggggtcttaggaggtaattagggggttaggagtttagggtttctaacctcggaatcagaatttgggatgttacaatccccaggaaggcctcacagagatggacgaagatagcaatttggagtacagagttgggatttagacgagtcaggttgagagaatagaaatcaagaaggctgcggaagaaaggagaaatcggcagacctaattctcggatcaagaagggaacgaagactaccgactgatgggtatcctctatggcgacggtaatcccctgctagatccgccaagagcatagttcctttggcgacaggaccccaatttcaacgaggtggagaagatcggactcaaaaacaacagaagcatagttgccgcaaaatagaagttagatgttagtgtcgattgggggaatgacaggggcggcggttccctacttcttcttcctgggcgccatcagaccatgcgggcaagcagggttgagcgcattcacaaagatgagcagggatttcacgacggaaaaagcaaagttagggttcactgccacgaaactgccagcgaggatgtatgggcgcacactaagtcgggtgcatcgagatggacgaagtaactcggaccagaccctcaacaaagcaaagtcatttgggctcgtcagacataggcgctaaccg

SEQ ID NO: 119926 - DNA, 305 bp, Zea Mays
attgactaagtgtaggaaacatacctttttcccattcttctcccatcttttctgtttctcctcaaacaaagcccggaatgacagtttctctacaaactaaaagcgcaaaccaaatcaccaaacatgtagtaaaaaggtgtgtgcaacatagttgaacactctaaccttgcatcttaacctttttcaccgttttacccattttggcctatttgaggtcgacgttggactccaaactatcaagtcgacttgacttgatctagattgtcatctatgagctccaacaccctgcaaaggtcacatagaac

SEQ ID NO: 119927 - DNA, 371 bp, Zea Mays
ctgtgaccccatcttcattatatggttgcattttgaggatcttaattgtgttagactgattttggactgctttgatgcagccactgggttgataacgaatttgcgtaagagttttgtcattccaataaggtgtgtcgggcaagttgttcaagatggctgcaatcttctgcaatgcagctctggttcttttccttgcaactatctgaggctgctgccgatctctgataagaagctaaggagtgatcttatgttatgggtggaaaggctagctgatcggcttcctaattgaaaagctcggctactcagtcttgctggtcggagagcaatggcgaaacatgtgctttcggccattcaggtttatattcttattg

SEQ ID NO: 119928 - DNA, 319 bp, Zea Mays
gattggaagtaaggttgcacagtttggatcgtgcaccttcacgccgaggaccaaaaagacttcggcggaagtcgtggaattagttccctgtgctcgcaacaagtggggcaactagtgggattattggttttatgtttcgggaagcgaagtcgaagacctcccagggctccccgcagccgtaatgtgctcccactgttatgtggcattcccaccattcgaggtggcagaggatgatgaggacgaaggggccctccggtgcgctgcccgcatgagcagcaggcatgatttggttaaggagttcatcggttatggagtgtgg

SEQ ID NO: 119929 - DNA, 443 bp, Zea Mays
cggaaccctgggggccacgagtaagaggggacggatagagcccctcctcgataaatccacccctagatgactcacacgcgtcgagctagggggtccggtgaggcggaactaggtcgaggagtcagacagatcgtcgagggggtcgctcgagtaggtcccatgcaaccgttggactgctacccgccattaatgctacacatgccacatcaactgcgcctgacgccaagttagagcacaacatgtcaccaatctccctccaaattatagcttataagccctagacctgagtccactcatgacctacgaatttaggcctgagtcccctcaacgccctacaagggtcacaaagcgacggaggaaggccaagggttaggccgcggagatcgagggtcgacgtggaagacgtagccagagaacacaatgatgacacttagactcccttc

SEQ ID NO: 119930 - DNA, 302 bp, Zea Mays
ggtagagaccgaccatgacatgtggtggagccggggccagccaacatgcatgcgaagagcagaggccgaccatgacatgaggtggagccggggccagccaacgtgctgacgttagtcgttgtaggaaggtgccttttgaaggtttgagtggtgagccccccatatgtttagcctcgtggaagggccttagccacgcatattgatgactccacaatgtgatcttgtcatctcttaaaccaccttgagggtgggtcctattgcctatttttcgtgtagagtctagggcactcgtacccaagggc

SEQ ID NO: 119931 - DNA, 445 bp, Zea Mays
tgtagcgatgggccgtacttcaagttgcttggtagctacacgttcacggacaaagtgataatcaacttcaatatgcttggagcgacgatgaaaaatcggattggccgatagatacgtagcaccaagattgtcacaccagagagtaggagaacgtggttgcgaaactccaagttcccgcaataaaacttggagccatataacttcagccgtagcatcagcaacaactttatattcagattcagtgcttgagcgagaaactgttgcttgcttccgtgaactccaagaaacaagattcccaccaaaaaatataacatagccaccggtgctacgacgatcatccggattaccagcccaatcagcatccgaaaaagcactgagaagagaagatcccctgcgactaaatcggagaccgaaatccatagttgcatgaagataacgaagaatc

SEQ ID NO: 119932 - DNA, 375 bp, Zea Mays
tcattagccagaagtttagtgctaaatgtcaactatctttctatcattcaaaagggtcattcatgatagccacacctgggggtaaaattgcaaccaaccaattaaaccaaagtgtgcctattcaactgggaagccacattatcaaaaccaccctccttgttctgggattggagaatgtggatgttattatgggagccaattggatgactcgacaccaagtagtgcttgatgtagccagccgcatcgttgaaatcaattccccaatctgtgggagtttcaccttacttctgcctagccaagactctactcggtcatgtgcttttgctatgacggagttacccctaaagaagatcccagtggtctgtgagtatgcgg

SEQ ID NO: 119933 - DNA, 522 bp, Zea Mays
gtttaaattgtcctaatttattttgcaaaaattcagactttagcaatcttctgaaacattagatccaatatcgtttgggttgagccatcgatgtcttgcccaaactctaatctttgaaattgaatctggttccttaaacttcgtttgaaattctttgacgcctgtgttgcatgtgtctctctgtggtttggcttcatggcgtgtggcgggcacaaccctatgtgtgacaacgcacaacttcttacttacgtgaaaaacacgtatcgtctccatggaggtccccgtgtgcaccttatctccctaccgctatccctttcggttatccgaatcggccaccgattcaactcttcactacgtgtcgcgccttccgtcactctgctgccgcgtgtccgacgtgctagcgagtgtaaatttgggaatcgactgatttcataaatctagactgcacgtgctattcgtggaaaacacacgcaaagtcgataaccaaggttggtttcatcttgcacgctatttatggcagag

SEQ ID NO: 119934 - DNA, 566 bp, Zea Mays
gctgggtaagcgccagcaccatccttgagggccaagttctctgcaacagccatctctaaggctgaaggaccctcagtcacttccgtgggagcagtgcaatccagcccagcctcctgaccctcaagaccgcgctctaaggtcgatgaggcacgggacgctgcccgggatgaccccaacccggcatcgggcacatcagcacaaacatccatcgcgataccatctgccggctctgacaacagatcttctggaaccatgtcttcaagagtctgatcgaagttcgtcagagataattcttgcagaccaatgagggtagacaaagaaggagaaggaacaccactactttccccactagctatgtaacgccggctgttcttccgaattagagggatttcatcctcttcttcatcatcttcatcaacaacacggacagtacacccattggggtcatcttcagcaggatcacacccattggggtcagcagcggtcagatcacgaccatcggtttcagctttagtaaagacaggcactggcacttcctcagcagcaggaacagaaggaccggatcc

SEQ ID NO: 119935 - DNA, 575 bp, Zea Mays
ggcacggcactgcgctacaccatggagagtaaataatattcctttttccttgtgcaaaggaaaggattcatatgtcgcgcatctgtgtaacctcggattggttaccaactcccagctgctactcagctaattaaaacaccaccgttgttattattcagctaaacaaaacaccacgattgcgatggatcatgagtaccgtacgtgcggtgtcaggcaaatgcagtgcaggcccactttttcccactaattttttgccagcccagcagattgccagatccaccaccacccacaatcaccttacccctattatagatgatataataatcaaccaatccatccatgctgctcgattcattccatcgcaacaacaaaaccacacaactaactatccctttttctcgattaggaactgcatccatccatccatgatatattgatatgagaagtagctagctactagtacccaagctcaggcggcatgcaggccacaatggcctgcatttctcttctcctccgcttcctggccctcctcaggatctcctggctctcctccgcgcccaccttcaccaggtcgc

SEQ ID NO: 119936 - DNA, 395 bp, Zea Mays
gacaatgaagctagtcatactaccactaaggcggcgagggtagtacttgatgtgaataccatctccaacattcccaaactcgtagctgtagaaggacaaggctcgttatgttgcatcttgtgtggaagaccccacacattccctctcgaagatcaaatggaggtctacgagaatctccatgccttgaaagttcctccttggggtagaaccaaacaagttgcctcccgatgatccaggtaccacctgtgactatgctggatgacaaggcatcaatactctatcgacaagtggtgcctcccataggctcggtgtagcagtccgcaaagctcctcatggaagcggctcctagtggttgcatcccaagagatgggcaatgatccactcctcgtactcgt

SEQ ID NO: 119937 - DNA, 501 bp, Zea Mays
agcttgctgtggttgtgagatcaccaacggtggatgccaatgttgtcacttattttcaatttctatatgttaaaaaataaggcaacacaagttaatagattgtaaccttctccttttaattactcctttctcgaagggtaattcgagggatatgatgtaaaatgagaatgattgcatgacaataggcataagaaatgaaaaaataaagggtagaacatgttactcatcttcatgccttaacacttatcatttcatcattcagaacataacaaatagttaaagacatactgataggaacgggggtgcccgatcttctgtcaggtgaaaataactatcaatttggtggagatgtcacacagacgatccaacttccaatcaacacgactagaaccccgcaatcgcagcaccacttctcctctggttatcaaccgtgcactgcgcgattgacctcgccacgagggctaattcctgcctaagaatcgaagacacaagcaagaacaa

SEQ ID NO: 119938 - DNA, 647 bp, Zea Mays
acgggtaaaatatccgcggatagtgtctctggacatccatatccgcgacttatatccaatatccgaacccgtacccgttacccgctatggataacaaacattatccacatccgttacccgcgggtaacggatatccgcggatatatccgtttgcccactacacatacaaaatatttaaatccagcaaattcaaacatgatatcatatttgtccagcaaatttaaatatgataaaaacataaagacatacagaatttgtccagcaaattcaaacatgatatcatatttgtccagcaaatataaaattgtctagcaaaatcaaatctgaattgttcaaattgataaaattacaaacacacaagattcatgaatcaacaccaaagatcagctggttattcagaatcagcagccaacacacaagattcttctttcatgtcttcttcattagcttcaaggcaagaccaaaaactattgaatcttgtgggctgtggcgatgtggcccgtgggcctacgggacgggtgtacaagatattttaacggatattcgggtatttgggtatggatattaatttttcgtatccgttttaaaaatatccacggatatcaagtgctatccgtatccgtatccatgggtacagactcgtaccc

SEQ ID NO: 119939 - DNA, 365 bp, Zea Mays
caaccctcgaccacagtcgtgtcctcatctactaaggttcatcggacgcaaagtagcagcatcagcatgagagaggacgggtggtgaggggccacaggagcgtgctcatcatatgaggacttgataaacccaacgggtagaagggagctcgatcttttgatgagagttgatgatggttggaaaatggttggagaatgatgttggttacctgactaccacacccaagatggtgtggtgccttgagcgatagatacactgtctcctgataactacaatttggggtggaggtcgacgttgtgatatccaactacaacaaccacaagggtgctacgccttagcgatagttacaccgactcatgttgttg

SEQ ID NO: 119940 - DNA, 645 bp, Zea Mays
agctttggcttgggcctcattttggcaagagggataaaatcttcgatgggcacttacatcacctcatcttcagtgtccttttccttagccaaagaaacaaatttaattagcttcaaccccaaagggcttaactctacagaaggtatgggtttagtcattaccttcattattcacgactatgcatgcctatggctaaaggatcggtcctctcttcaatagtgggctttgttattgcactctcttcttcattttcgatagaaatcttttcctcgttaatctttaccttccttggtcgtctcaatttcggaccctaaaactgccctttggtgtttattagtcacttttgtttttatctgcttcacaaatttttgttccatcatgttgacttttttcttccccaacgtcttgagctagatgggggtaatccaggtttgaaaatcatattgcttcaaagactcgattcagtcttcatttttctcaaccgctgaaggcaacaacaagggtctggtcttccttcgcaacaaaattattaagcacttcattgctcttcgactcgatgtcctccaactattcatcacatggatcaccaaatacttcttcaaatttgtacttgtagtccaacctcacaaggatttcgcctttcac

SEQ ID NO: 119941 - DNA, 521 bp, Zea Mays
gcgtactagacgctgttatggaatcagtgaaggcgttaactcctgcctctgccgaagcacctagtgcgaaaagcgagattataaagaaatctaccgaagctggcacaacataggctgcggttgaggctgggccctcagtccccgccgaagcaagaccttcagaggatgttgaggagggtgatgaagcaagaccttcggaggttgtcgaaggaccattaatgttaggaaaagtgggtgctaccgaagaatctgagtcccctgctcctggagcacctaccgaggaattcgaattcatagtgtgtcatgcttcaaggaaaaaattataaaaggagcaaattgccgaagcgcaacattatgccagggatctgcagtaccctcgagggtccttggtatatggtggggatgatgaagatggcttcctttattgtctgcctgacaataaagagatccatgtctatcgggagatggcagaaaatgtaggatatccgaagcttgaactaggcttatctgcaatgacgaag

SEQ ID NO: 119942 - DNA, 475 bp, Zea Mays
tgtttgctcatccatttgcggatgataagctgagctgaagtttagcttggtatccatggactcatgtagtcttttccaaaagcgtgaggtaaactgtgttcctcgatctgatacgatcttctttggtacttcatgcagacaaacaatccttgacatgtataactatgctaattgggctcctgagtaagtcgtcttcacaagtataaagtgtgccactttactcaacctgtccactataacccatatggaatcatagccatctcgagtacggggtagtccaaatatgaaatcgatacagatttcttcccagttccattccggtaccttgagaggttgtaacaatcctgctggtctttggtgttcggctttaactcgttgacacacatcacatagtgcaacatgagtagccacatctcttttcaaaccataccaccaatacttttcttttaggtcctggtacatctttgtacttcca

SEQ ID NO: 119943 - DNA, 583 bp, Zea Mays
atatctatctcatcttaaaagattctatcctacactcatagatccatctcctctcaaaagatcctaacttatcctaatctagcttaatagatttaccttatcttaagagatactctattgccttaatagaatcatcctatcttgaaaaagatttcatgtcatcctaataaatctaactgacctcaagagattctatgttatccttagggattcatcttgccctaattagcgtatttatcccactctagaataacaaccatgagctaacccaaccaatagagtcttgatggattgcataatctattaacccccacctgaccaaccagattttgacctgcatcatgtagtccatctcacccataactattctaaccatatttccccaactccgataatatacactaacctcgaatcaatgagctcaagaccggagaagaaaagatcaacctcgtcaaggaaggagagaagtcaaactcaacattcggatgcattaccacccaacacagagttcttcctcaccataaacgttcttacctctgcctattcttgccctatcctatccatctcttatattctacataat

SEQ ID NO: 119944 - DNA, 860 bp, Zea Mays
caatagctgattcgttttcaatatcctcttgatcctgctgaagccttagagctttgcctagcattagaccctatgggcagtcacaaagaagaaatggttaattacttgcaatcttctcaatgctacatgataaagtgaagttttaccttgatgcttgtataagccaagttttgagaaagcttttgcttcttcaatctgctcagctctgtctcaatttctgggaagccaatacttcattcaacattcttaacaattttgccttctctagagtcgaggatgcaggctagggcatcttgtcctccactgaaaatcatagctccaggattgtaactgatatcttcggccagctctttcaactttgaggcctcttcttcgctcaaatcaccactgacaagatgcctaacaataaacccaatatcttcatctgtctccttgctagaagagtgagcaggcccaaccacatctggtttggagcagtacttagctctttacgccctcttcgaagcccgaaggttgttcaacttcggcactttttgcctcatcttcctcctcctttgttgacgaagccccaaaaattgcatcgacaaggtattcaattcctgggctcttctccctagttggggattcctttgccattataggtgccaaagcatcaccttttttgcccgtctcctttgcggttaatagcagactggtcagctttggtcctagcgggcttatagtggaaaaaggcaaaggttgagtcaataccttgagagttcggctgtagcctagggatgaagtggaagtactcccttgtaattgtgcagttgttttcttggctttcttcttgaaagtggtggccttatccgaaggtggct

SEQ ID NO: 119945 - DNA, 593 bp, Zea Mays
cttcctctgggccctacttaggacgaaatcgtccttaggccttctccatgtctttccaccacttggcggcttcatctcttggtttggtctatcacataacgctgccagatccactcttgcctttacgttatcctttgacttatcagaaatgtctataattgttgcccatagtgcctcagcaacattcttttcagtgtgcatcacgtcaatgttgtgtggaaggagcaggtcatcataataggggagccgagtcaagccagacttatgtgtccacatatgctgctcaccatatcccacaaaaccaccttctgtattggccacgagcccatctatctgttgatgaatttcggcaccagtcatcattgcaggtgggcggtctgtcactacgacaccttttgtaaagttattgatgtctaggcggaatggatggtcaggagggagaaattgttgatgtttatcgaaggacgaatatttgccacctttttcaaccaaatgaacctaagagcttccttgcaaactgggcatgagaacttaccgtgaacacaccaggcgcaaaatagcccatacgtcggtaagtcatgcatggagtactg

SEQ ID NO: 119946 - DNA, 402 bp, Zea Mays
ctcggattcattgtcagccaccgaggaattgaagccaacccagaaatatcgaggccatcattagaatggaagcgccatgatcacagaaaaaggtacagaggcttactggatgcatggcagccctgagtaggttcatatcaaggctaggcgagaaaggcatgccaatctacaaattgctcaaaaaggtggacaaattttagtggaccacagaggcacaggaagctctagaggcactaaaaaagttcctaactacaccaccaaaactcaagccaccacaccgagccacgtcgaatcagccagcagaagatctgttgttatacatctcctgcacgactcacgtggtgagcaccacgttagtgtcgagcaggtggaggaaggacatacatacccggtacagcatcc

SEQ ID NO: 119947 - DNA, 431 bp, Zea Mays
gtgggatggatgaaaactggttgtttgaaaggataggcgggtggactaggaaaagagcaatttgggttaaaaggacgaatcaccaacctcaaaccgcttctcggatccttcagaggatccttcgcccccttcacacccatatctctttgtctttccctgccccgaattcttggcttccaccgaaagcgttgtgctcacggccctgctataagtgagatctaggcaagtggccatctttcgatgtagtcgatcatttagacctctcatgaagcaattcttctttttcaggtccgtgtcaacttgctctaacatggaaatgggaagatatcagtatggatttcattgtgggattgcccaagaccgctaaatgatttgactctatctgagtcataattgaccggcatacaaagacaacccattttctgccagtc

SEQ ID NO: 119948 - DNA, 3111 bp, Zea Mays
cttcatggtagagttggtgtcccatgcagaccctgaattataggtaactttatttttgtcctaagtcaaatttctctaactttgaccgagttcatataaaaatgcactggcatgtacaatatcaaactagtttcactaatccgccatgaaatatgtcttgataatgcatttattaggtatttagatgttaatatatttccctaaaaacttgatcaaaattagaaaaaaacttaggacaaaactagaatagcctataatttagaatggagggaataatttgcaataaaagtttcaaattgtctacacttgacccaaaagtaacttgtctgtgactggagggtgtagttatacagcattcccacatgaatttcttaggaaacattatagtgatggtggattcctatctccaaaattgttaccagatttccacattcaaagagagccttcaaactaagtgggtaaacagagagtaactgtgggaaagaggtcaagtacttaccatattttcatggtcaggagaaattttattagtacatagataaacagcaggtagaacatcatcaggggataaagcaagcaaactgcattacagaaggtaagatgttaagcattccccccagtaatgaacatatcctgtggacgatcaacatgtatagaacaatcaaagaggtaaacattcagaaacctcctgaacatgttgcaaaatattgcgatagttttgatctttcctttttccttttcaaccaagtcaaatgtgcgagccaaatgcaagtatggtgcaggctgtcctgctatccagcaagctgcagaaatgcagatacatatggcatgactaactattaaataagatgctaaagaatatcaggaataagcagctaaccatgttcaataggtagatacttttcaattagcagtgatgtgttggcagaatctccatgtgctaaagaagttcctacatgtaagtttgacatttttggagtagcctgagaataaccactagccatgtctgtttcactacaattatctgcagtttcaccttgtgcattctgcagcataatattcttgtcaacctcaattacattattaccctcacttgaactgtaaaatatgtcaactgctacagccacatctccgtttgccttctcaagcaaataaactgcatattctctagacatgctaccatctacaatctggagaagctggtctacaatctgatcttgtgttttttcagtatcagctaactgatcactgttttccacgttattttgatgtgcctccacagttactctttcaggtctacaccttttaaaagcagcttcagtagctctaatgaaataatttgtaattgtggactgcttccgcccaccagattctgttgaggaagttaatcggcctttcttttttggcttgtttgtattgctggaacccctcttatttacctttttgggagtatttggtttcattctcataggagacaaatttaccagttttgcagagtattccacaggcttctgtgaaaataaagaagattcttgctgactacttacatcagcagacgacccatgattagaagaatggtttttctctgtcttgggtgtgccattacaagaaacatttgcttcttcaaagaaatctctttcccgctcaaaaaaaatcgatgctgctttaacaacatcaccttcagaactcatcagcaggtctgtgatctgttcctggctcacccacgagggtaagaaatctgacagttctttaagtgtttcctgcatagtattctccatcagtttatcctgttgttcagaagcagaagagattgctggtaacaaagcagcatcctccccatcaagctggctcgagcaattaacaaccacatctttgcagctacgagtagcatctattgacctacgatggaatgccatcaagaactcctgtttgtttgctgtctcatcaaccaacccagcaaaatgcttctgcagagcaactgcctccttactatcgagcttcccagcatccactccggcagtagggatcacactctttgggtgcaaaaacttaacatagtcgcgcaactcattgtaacttgagtgctcactataaggaacaagatggatttcgagtgaatctttcaccctaacagcaaaaccttccttcttggtttcatacatccacccagttggtacaaacccaacagccttagcataccctctctccatcatgatctccttcaatttcacaaaattcggctggaagtagggcgaagtctcccctaacaaattccacccaagaacatgcacatccgtccctgttgcgtcctcagtaaaaacgctattcttcccaccgaaccccaacagtgtcaaaatcttcatcttcctactgtccacatggattgaacacccacagcgctgtgcgacctccagcaaaatcttctccttgccgacagcataggtggcgatcagacatagcacacgctctcctgatactgaactctcctctttcacacgtttgattgcattcactatgtaatccacagaatcctcttgcgaagggaatgtaaacttggggttgcagtatgtggtgtccagaaacaccgcatcagcacggacgaactccagcaagttaggatcacgcgtcatagactctgtgtaacgaaagtcaccggtgtgcacatatctctcggctctcggcccaggagaggcgaagaggaactgaacggcaccgggacaatgattggcgtccacggcggtgacgccccacccatcaacggtgatacggacaccgatatcgagggagacgacaagttgaggcgggacagagagcacggatgagacgaggcgtgcggttggcgcggagcagaatacaaggccgcggcgccaggaagggccgaggccactgtagtggtcggagtggaagtgcgagaggaagtaggcgacagagaagtttccggcatggcggaaggcatcgacaaggaagcgggagcccgggatgagtgcggcgggaggcacagagaccgggacagggggaagaggcgtggaggcggaggtgaagatggagaaggcatgggaagaggggagagaggcgatggaggagaggaagagcgatgaggtggtgacggac

SEQ ID NO: 119949 - DNA, 982 bp, Zea Mays
gttggcatgccgtacttttcatgtttctgtgtggcctagatatctattttcatgttcttgtttctttgtattacctaaacaaactctcctaaatactgaacatcgtcgtactagatatattacaaaataatttatgtgaactgtgtatttcttgtcacagtgtcggcttgcactccaaaggaaacacttgcaatactgaagttataaaaggatttttcagatcttgcctgcatactaccagatgctggaggttactgtgtttcagattcactgcttggagcgatcaacatatttatcagtgttatgagctctgtgctgtgacaagcccacctctcattggtacagttgttacctatacatttttctctacaagctccagatataagtaatcaaatcatagatgatataatcattggataaattgtatattcttgtactgtattcccttagttccgaattatagttcactttggttttgtcccaagtcaaacttcttaaattttgagcaatttatagaaattcacaccaatatctgtagcatgaagtttatttcattaaattctctatgaaactaatattggaagaacatttatttgaacctcgagatgttgacacattttttgaaaaacaaggtcaaagttagagaggtttgactcaggacaagccgaactgcactataattcgaaacagaagcatgttacctgtttgctttcttcagaactctttacctatacgtttttacaattgcaggtcaagcttctatctgaactaaaaaatgaacttagaatctcacacattgagcataacgaagttcttatgaagaccattttaaatgagcatgtcaagtcattgaggtgatacattatggaagacactgggtgtcatgatacaaaattattagtcgggtcttgggtacataacatctaggctttcacttttttattttcataatctgactgctaagtgaaggacaggcctggca

SEQ ID NO: 119950 - DNA, 838 bp, Zea Mays
gttcctgagattgatagccttcgtgagactatattgaaggaagcccatgattctgattactctattcaccctggtagcacttagatgtatcaggatttgaagcagaagtactggtggtatgggctgaaaagagatgtggctgcacacgtggctatgtgtgatgtgtgtcaaagagtcaaagctgaacatcaaagaccagctggactattgcacccgcttaagatacccgagtggaaatgggaagaaattggcatggatttcattgttggactaccccggactcctgcagggtatgactccatttgggtgattgtggacagactgacaaaagtggctcacttcatacctgtgaggactaattacatggggccaaactagcagagttatatatggctcggatagtttgtctacatagagtgcctaagaagatcgtatctgaccggggatcacaatttacttctcagttttggcggaagttgcatgagtgcttggatatacagttgaattttagtttggcctaccatcctcagactgatgggcagaccgagaggactaaccaagtactggaagatatgttaagagcttgtgctcttaaacatggtggtagttaggataagagcttaccgtatgcggagttatcctacaataatagctaccaggccagtttgaagatgtccccatttgaggctctatatggcagaaaatgcatgactcctttatattgggatcaaactggtgaaaggcagttctttgagcctgaaattatacaagaggcagaagaacaagtgtgaatgataagggagaatttgagaactgcgcaatcaaggcagaaaagtta

SEQ ID NO: 119951 - DNA, 510 bp, Zea Mays
gagtttttagtcattaaggttttaaggaatgttgtcaaggttcctgtacttatcatagcttggtagctatggcacatgaaattcaaatgtagatgaagtgtaatattaaatccaatgtaaggcttccagggctaataaccaagggctctatctcaaaatgagtgtttgatattttgattaaattaatattaaatctaagctaccaattgccagcaagaatccaactggccttataccgaccccgggcactattagccttgagcttgtgacggaagatccacttgtcggtgaggcggtgaccacgttggtgccaggggggacacaacacctagtcctaggtgtggttagcaagcagtgcctcatattcctccaccatagcacgacgagcgcgatgcggaccgaagatggaacaagtgagggaggcgttgcgtggttgtcgtgagcaccaggcagtcgatgggacagagaacaccggtggatcgccacgtgaccatcgggtggacatggtga

SEQ ID NO: 119952 - DNA, 450 bp, Zea Mays
cacaatttaataaaggcataggggctaaagcgctaaaaataggacctacttgtcatgtttctttgtattgtctaggtctgcgggctaaaacagagaaacaccagggactctttcgaaagactctactacgaaggggtattgatgtaccagggtcgtccaaatcaaatacatcggccgtatgagtgggttggatcggtgctctctgatccgcaatcagccgccacgatcaattcccccggagagggaccctaagctctaatcccgaccattcagattgagatcgacgacatatgacaccttgccaccctacttgccgccctgaggcagcgacgcccactacacgccgtcaagctcaccagagcaagacaatacgatgccacaacactccacgccgatcaccaaaatctgaaaataacgcgaatagacgagggaatcgatggatgagtactc

SEQ ID NO: 119953 - DNA, 714 bp, Zea Mays
ggacgagtacttagaacatttattcagcattgctatctgttactgacttgtgtgccacatgtatatatatatagtcagccttcctagagctccaactttctctcgagcagaataggtactcctttgcaatcacacccacgctcgttggacagtcacaccggtcaccgtttgccacctgcagtgctggtaagaaccttgtaagagcggggtaagacgcttcataacttgtgttccaccaccaccaccctgagagatagttgtagggttcacattgtttgttgcctttttgtctctgttttgtgctagcaatgacaggaccaaagaaccaaatggacaaggagaaggggcctaagcttaacgatgatgagtgtgtctgtcagctggaattgaaggagatgatgcgcgcgatgactgaagcttttaaaaataccaggactctgcgacgacatcctatgagcagcttgatcaacgagttgctgaacttgttacacgcatggacgtactggaggctcgtcccccaccaccaactctagccccagctcactctcctgtgtacgacgacgacgacaatgtttatgcactgctgcgacgacgcctcgcacgtaatcgacaaggtatgggaggtaatggtagacgttgtcatcataatcctgaaccagaccatgatccatttgctaagattaagttctctattccaccgttcatgggttctta

SEQ ID NO: 119954 - DNA, 322 bp, Zea Mays
gtaatagacgagtgtaacagacatatgtggtgaggcgcggtggttactggtggtatgcagccgctaggtcgtggcgcatggtgcaccatatcttattcggtatggacaacaagtgaagcataaaattgtgtgttaactatcataattttagatggaaagtggatgtaacagatggaaccgagcatgttgttcgcatatgcagatatatgaccataaaaatcatctatacatctcgtaaaaatgttgcacgagtatcgtaagtccatgaaaatgtgtttaaacatgtaacaaaaatccataaaaagcttgtattgttaccata

SEQ ID NO: 119955 - DNA, 525 bp, Zea Mays
gcccttccttggtacagagccttgttctgctggctgacggtggagggcgccttgggggcggatgccgaggtattcttggggccattcaccgagttggagtaggcgggtcctggtggcttcagctgcggacagttgttctcgaagtgactgggatcaccacagtgccaacatgcatttgccgggggttgcttgcttgccactgagggggaatggaaagagctctgactctgttggctgaatcgtgacagagtgggtccagctggtctattgaagtttggtcccttgggtggaaacccaaatgatcgagtcttctggtgctagtcctgttgctgtgcccggagaacctggaatttccttttgagatgccccttttcttcctcctttgccctttcaacttgcatggccttgttggaaaggtgagagaaattgaggaagtcttggctagctagaattgtcttgagttctggcctgagtcccttcaggaaacaggccatcttcttgccctcggtactgacatcatctggc

SEQ ID NO: 119956 - DNA, 509 bp, Zea Mays
cgagaaactagtcgagttgaccagagttcatcgccagggttggatacggcggctgggctatattacgtcgtgggcggatgctaccatcgctccgatcgccggtaaggatactatccatcacttcgcctttcttcccccaatgcttagcaccgttcacgtttggattttgacgccagtgcgctgggcggaggaaatccggcgagctcccagggtggagctctgcttcgtcgccgcgccctgtcttcaggaggtggaagagggagttttggtcattgatcggccaatgcatggtctagattagatccacatcgtaccggttcaatggttgatcttagcccttggatcgagattgtgcgcaccggaacagatcgtgacgttttaaacccggggccatcggatcaagatccaacggctcacgatggacagtaccccttcagccgcgactaagtgcaaaagagtccctatgctctaggagaatcaacccgcagtcctattccgttataaaatca

SEQ ID NO: 119957 - DNA, 626 bp, Zea Mays
gaaagatatcagagggtagttggtcgtttgatatatctttgtcatacaagaccggacattgcttatgcagtaagtgtggtgagtaggtatatccatgatcctagaactgggcatatgaagatagtttatcaaatcctgagatacctgaagggaaccctggcaagggactgtggtttagaccaaatcaacatatgaatttggaggggtattgtgatgcggactgggccagcagtagggatgatcggagatccacttctggatattgtgtatttgtgggaggtaatctggtttcatggagaagcaagaagcaagctgtggtatctcggtccactgcagaggctgaacgtagagcaatggctctagtagtgtgtgaaatgatatggttgaagggtctcttgaaggagcttcaagtgttgaagaatgagacaatgttgctccattgtgacaatgtggcagcaatcaacatagcaaacaatccagttcagtttgatcgcatgaagcatgtggagattgataagttttttatcaaagagaagattggtagtggggctttgaagttaaagtatgtcaaatctcgtaatcaagtagcggatagtctcacaaaaggtttaggtcctaagaataat

SEQ ID NO: 119958 - DNA, 473 bp, Zea Mays
atttccccttgttttatgttgggaacacgaggtcttaaagtttcagttgggtggttgttcaaatttgacctatgttatttcagttcctgacttcctgcgtatgagcagttcttcagttaaatttatgtttggatagattattagcaatgatgtctcttctaacctacaaactatgttttacatgtttgctgacttgttctctttaaatatcacacaaccaacttatctttaggttgtaaaacaaaaacaaatattccatggtgctgtcctttgcatttttttcttgaacacacaggagaggtgcgtattattgtattaagaaggaaaaagggataagaacccttaacgaagccagacactcacaccacttcgattacaaagaaacacgtgcgctctttacaagaaaagtcgaccacaacctaaacttaactcttactgcgcatgagggcaaggagacaattaacgccttgtgc

SEQ ID NO: 119959 - DNA, 622 bp, Zea Mays
ctcaaacgaaggcctggcgcgaccacgcagttgtcccaagagagttcaacgaaggagacctcgtactcgtccgaaccacctggacagactcacgaggcaagctggagccaaagtgggagggtccgttcatcgtcaagtcgaaggcgtcccccagcgcatacaggctaacaacaccatccggcgaggacctagaccattcttggaatattgacaatcttcgcaaattttttgtttaaatcctcagggcctacgtgcccttgtaattcaccaaatagtactattgcggcccgcactcttttcctcccgggggtgaggtttttaacgaggtggagccatgtaatatacccgcaaaaatcctccgcaaaaactcagatacagcatgtcgaaaaagaccgcatcgacggtcttcggcattcgaccactccgaagtcaccgcgagaggcagcgcagactaccctcgtgtgcgacactccgcaaaagttgcctaagggtgcagccggaatagcacaataagtgcacaaaatcgaagtcttctcctaaaagactctccgtgcaaaagtcacctaagggtgcagccggaatagcacaataagtgcgcaaaatcaaagtcttttcctaaaag

SEQ ID NO: 119960 - DNA, 473 bp, Zea Mays
gcctcactccccgagcagaaactccaactccggcgagctctacaccgcccgccatcactgcccgagcatggccgccatggccagcccacctccggtcaccaccaccgacgacccgcaccttgacgtgatcgccagagacccccggacctcacccgacccttcgccggacctctaccgttgctggtaagccgcgccaccgctttttcttcctcggttatagttcaggcgagggaggagcgcgagttagagagggaaaaagactagggggttaagtgcgggtcagtgacacatgtgaatagttcttcagggggcacaatttaaaagatgcagataagattaagtccagggaccccgatgcaaagtcgttttccttaaacctttatgtttattcttttcaaatgagcagagaacttgggaaattcataacttgagttatatccaaccaggtttggtcaaacaaattttgctaggac

SEQ ID NO: 119961 - DNA, 434 bp, Zea Mays
gatcaagtgaaggcaaaggtataacatatgttttgttttttgccggtcatgaggagtttagagaagatacttgatcgaattagtaggttagatagtcgtactattaagaggggtcaatgacctgatctgtgtaaaacttagtgcctcatagagcatccagtggttgcatttgcatgagaactaacagcgcttcaaatttcatgagttaaaaatcctttcaaaagcttgtttgaaaagtgcaaagtcttggatgcgcggaccgtccgggtcttgagggcggaccgtccgcgatccaccagtggggtccgaagtctgaccacttcggacaagtcctattcatttgcactgcggaccatccaggccttggggccggaccgtccgcagtactgaccagagaagactgctttcgggacagtccctgaattatagtgcgg

SEQ ID NO: 119962 - DNA, 387 bp, Zea Mays
ctggtgttcattaggatacttgaattctccccctaatgtcgggaatggtcctcgttagatgcaatcagcgaaacgagctgtgtacaaatcccctgtaaggggctctaggtatttgatgatcgatggggattgatacccacatagatgcccaatttcctatgaggtcccatagctgttcgctgaggcggtgatacaggggtgtaacccacacatccaaatttgcgtagatgggatatatttggaggatttcctcgtactaggtgcaacggggatgtggtatgatatgcagttgggcgaagttgaataagatcagcagcgtgtaaaacggcatgaccccaacaagaagtaggtaaattgcattcatgaagtaaaggtcttgcgatgagt

SEQ ID NO: 119963 - DNA, 477 bp, Zea Mays
gtgttcttatgcaagaaggacgagtaatagcttatgcctctaggtagctgcgccggcatgaggaacattatccaacacatgatttagaactggccgcagtagtgcatgcccttaaaatttggcgtcattatcgactgggaaatgtatgtcgtatgtatactgatcacaagagtttaaactacattttcacccagtcggagttaaacatgagacagagaaggtggctcgagctgatcaaggactatgacctagaaattcattatcacacaggaaagactaatgtgttggctgatgctttaagttgtaaagccttttgtcattgtctcattgtgggattgcctgacaccaccttatgtcaggaaattgaaagattaaatttggggatagtgcaacaaggaaccttgatgcatttgaagcttgagtcagttattcaacaaaagattattgatgctcaaaggactgataagggtatgaaac

SEQ ID NO: 119964 - DNA, 747 bp, Zea Mays
ccccacgaggatgcggccgtggatcggtccatggggggtataaacagggatggcgacctccctcccttgagcccgctaatctgaacccagacacctccttgcaacaggataaccggaatttagcaatcgtcacccgcatgggtcatactcgccgtcgtggccataccatcaattcgtcgccgttgtgtcgtcgtatgggtaccagggaattttatcgggatatctagatagtaacagtggagtcaccggggttggagatcgtctagggtgtctggaatgcgtcgtcggaggtcgaccacctcggtggagcctcggagcaccatggaccggggtccctgctataccactgtaggtaattcctcctctattgtgtttgatattccgccctcatcacttagcactatctagactcgggattgcggctttcggtgttggttggccattcacacgccatggcctccgccgcggatacgttctgtcgccgtgggtaaggggagaagacaagtctccgatcgtcgatccaataatgaacggaaaagattatgggagcatggcgcttgggcctggtgcgagggtggccatagatttgtaatcgtatgggcgagatgatagtatcagatactttgagtcctggctcttgatcggccgatgggcggtcgagattagacggtctcgtaccgattggaagagtaatctggagcccttggatggtgatctcgcggccctggtcatacacaggtgttagcc

SEQ ID NO: 119965 - DNA, 448 bp, Zea Mays
gcaaggaaaaggtcgacaacggcgaggtagacatggctgagcgagacctcgggtaccagtcacccgagggggacctaaaggacatcttcactagagactcccactccgatggcgactagacgaaccaccggtgggaccccatgtcccccggcctacggagctgaagcctgccttcctgcggaaaccattctgggtcccccacgggtctagacttttgacaggtttatctaggagtgaccaaggccatggacgggggctccttcgtcaaacgcagatggaaacccgggttcggggcctaatcttacggaagtaccaaaccaaatcagggctccgcaacactccccagctgggaaggacccttcaaggtaatgggaatactccgacccgagggcgactatctagctacgactgaaggagtacctcccccggtgctggaacatctctgtaa

SEQ ID NO: 119966 - DNA, 456 bp, Zea Mays
taaaaattgatttctacttacggtcgacctaaacctaagtcatcagtaaaaatagatttttcaccgacagtcaatgtgataaaacataaaatgtttttttaaatagcaaaacatttatttttattagagaaggagcctcactaaaaaacgtttgtttttattattggatggttataataaaattattgtgtgctacgccagggccgcatcatcgttggcaggaaaccaattcgtgctatactacgatctagtctactattatgcattgcaacgttattggcacgaatttaaacttactaacactagtaaaaaaagctttatacagacggttatgaatacatttatactggtgttttttagaaccgtcagtactaagagccaatatatagaaaaaaacattatttgtacggacggataactgagaaccgcaagtggaaatcgattttcactgacgac

SEQ ID NO: 119967 - DNA, 286 bp, Zea Mays
cattttgagaagcatgttattccaaatgtcctgcaatatggcaaaataaataatgtccccatgaattggcatagcaatgcccctataatgattggataatcttagaataacttcccatcaaaaggatccattttcagaagagaagtgaggaatccgcccagaactgtagtgagtcttccaaattagttccccacccatggggtatctattctgtcatagaatttgtgtaagtgcttcataagcaacgcttgattgtgcattttgatattaataatcctaagaccac

SEQ ID NO: 119968 - DNA, 313 bp, Zea Mays
cactcacagactaaaaaatagtaaggggaataggggggttccaggctgggactaggaaatacatacattgcacgacgattccgatgtggctgccgtccttcaatcccctagtcgccggtggctggtgacaggtgacctgatgatggaggtaccggccaggggcatcggtcggtagttgggtacttgggttaggtgaaccagcgtggtgaataattgaagaaggaacaagaaaagaaccagcgacctgatgagtgatgattggtgaagattgaagaagcagctgacgtctggctcgctaccacgcgccaccgag

SEQ ID NO: 119969 - DNA, 828 bp, Zea Mays
cttagacatgattgctcattttaattgttaagtacatattgttgtgcgtcgtataccaactacaccttacttaatgtcacagctactgacataacatacttgtcctgcaataagtatgacagctactgaagagagacatattcggactgaagacttgcctcttcacacgactccatgactaaaataagatcgacattgttgggtcctggctggcccatgtcatgatctggctaacatgtaaactctattctttcttgttgtatataaggaggaacatggtaattgtcgataccctataacaggggtaccccatgctacaatatgaaggcacggtacccacgtgtctatccgtagacgcatgataaacaacgcccgatcccaccacatggacgactccggggccgccatgtgttcagagaaagtaacatatgccacgatatcaccagtggatctggacccccatggaaagtgttggaccccaacatacatagcccgaacccctgggtacgacccaggacctccacgatatctcgtatgggaccctggaccccactaagtgaggtccgagccacctatggcaagatcccgggacgatgcataccctgacctaggtcagggacgtacaggggtccagcgcttacgcttgtcaggactttgaccagagcgcttccgctccccgctcaggcgaagacccgatgctgtcacgtggcctagtgcccgtgacgtaagccagcgggcagagcatgacgtaaggcctctaggccacgtgatctttacatttattgtggaaaagacgcgccgcctatctacccttctgacaggtgatgt

SEQ ID NO: 119970 - DNA, 273 bp, Zea Mays
gagacgaggttggcgcctaggaatatggcataaccagaactccaaccatctttgccatgtcagtgcacttttgaacccggttcatgcccccaaaaactcgatcccactctgtgatgtatgaatgtattagatgaaacttgatgtaaaaatgggatcgagttcttgggatttgtttgcgcgttgatccgggtccttgcgtttttctgtgatttattttgtgtgctatagttagatccggtactcgaacttcactaatagtgctcaatgcactta

SEQ ID NO: 119971 - DNA, 467 bp, Zea Mays
gggccatgtaggtatgccatatgaatttctagtagtgtgcctattagaaagaagaacagctagatgcacatttgcattaactttagtaatctcaacaaagcaactccaaaggatgagtacctgaagctgatcactgatatgctcatcgatgcagcagtccacaagacgatcagcttcctcaatgacaatgttgtatataatcaaatttttatggctgaaaaagatgtatacaatgctgctttttagatgtcctaggtcagtagtattgttcgaatgggtggtatgaccttcagactcaagaatgtaggagccatgtaccaaagggcaatgaattacattatccacaatttcataggccagctagtagaagtctccattgatgacatggtggtaaatttggttgtacaagataaataattaaccaatctttgcctagttactcaaagggctaggcttcatgatttaag

SEQ ID NO: 119972 - DNA, 607 bp, Zea Mays
ctccttcctagattgctactccggatatcatcagatcagtctggcgaaggaagacgaagagaagattgcattcatcacaccgttcggggccttttgctatacctccatgttgtttggcctcaagaacgttggagcgacttaccagagggctatccagacttgcttagctgaccactgaggcaagcgagtggaggattatgttgatgatgtggtcatcaagacagaaaacttagacaacttcatcgaggatttgcaacaggtcttcaacagcttgagacgctatcgatggaagttgaacccagaaaaatgcgtgttcggagtgccgaatggaaagctacttgggtttatcgtcagccatcggggaacagaagcaaatccagagaagattgaagccattatgagaatggagccatcacgataacagaagaaggtacaaaggctcactggatgcatggcagcgctgagcagattcatatcaaggctaggcgagaaaggaatgtcgttctataagttgctcaagaaggcgggcaaatttcagtggaccatagaagcgcaagaagccttggatgcactaaagaagttcttgaccacaccatcagtgctcaag

SEQ ID NO: 119973 - DNA, 924 bp, Zea Mays
gcttacgactaccatcaattccattaggtaaaaaatcagtttgttttttatgatgtttatacctatgtatacattattatcatcatcatcatcttaataatttaatatcttaaaccttgcatgatgtgtaggtggctaacatttcaaggttgtccatttagaggccatgatgaatctcggaaatcaaggtgaaaggagttgtgttacaaaatgctccaaaaaatgccaaatacacttcatctgatgtccagaaggaaattctaagcattgttgcacggaaagtgcaaaaattaataagagaagaaattggcactagcaagttttgcatcatggttgatgaagctcgagatgaatctaaaaaggagcaaatggcaatagccatccgttttgtcaacaaagaaggacttatcaaggaacgttttcttgacctcgttcatgtgaaggatactactgcattgactcttaagaactcaatttgtgttgtcttaactgctaataccttgagtatagaagacatcagaggctaaggttatgatggtgcaagtaatatgagaggggagtggaatggattgaaggctctaattctaaacgagtgtccatatgcatattacattcattgcatggctcatcaactgcaattggctctagtggcagcatcaagggaagtgcaataggtacacaacttctttcagcatgcaacttttatcataaatgttgttagttcatctactaagcgcaatgatgagttactagctgcacaagctgaagaaatagctcgtgaaattgaattgggagagcttgacactggacaaggtgcaaatcagatgagctctctacagaggctaggggacactagatggagttctgattacaagtcaattcaaagcttaaagaagatgtttagcgccacaattttagtcctac

SEQ ID NO: 119974 - DNA, 824 bp, Zea Mays
atttgtagctggtttgttgagctacaactttcatgcccagagttggtcaggtcactacagaaaacctgaagcaaatcacgttgcaaaacgctctgtcaaaacacctaaagcagttcttgatggtacagtaacaaaaggtatgcaggttcagtgaacctcgccgtcggtgaccatgcgctcggattcgcgccaggcgctgcgattcgtgctcaacgaagtactaatagttgctcgatgtagtaaataccgccttgaggatgaacttaggccactgttcaaccccggccaccgtgtccgcctgactcacggccggttcagataagatcgccggagttggccacctatcgaccgcacgccacatgccaaggtgccttaacacatcacagtaactcgtattacgcatgtccgttgatcgtcggtgagctcgtcacgatgaaagccaccaattccttgcgatagtgctctcccctctctctggctgccaccacgccatctcaaattcatggcccaccgccctcgggcaatataaatccattggctccactaggtagtcacgcacccaatacaccaaatcgtgcctcaaatcgtccaaaagagctcaccaatttgggatttcccccaaatcggtcaagaacactgtgtgtgtgagctcgtcgcggtcagcgctcgacaggtctgatcatgttctcctcgctcttgttctagcattcctgtgtacccttgaagctcatcggcccaaccaattgcactgaactagagtagatcgatgggaacactttgaattgtccgcggattgtgcggtcaccatgaatagagaaattggg

SEQ ID NO: 119975 - DNA, 1067 bp, Zea Mays
cccgactcttacttcctgagacctgaccctacttcatcagagctggagtgatataagcaaccctgttgggacagtagttggcataatgaccgacctatccacatttgaagcatgacctgtttgtggatgcattaggagcaacaggtcccttgtaggtgcttgcttagggtatagcttgattttgttgagtttgttgtccgaaactgtcatgagctggcgtgccttgaggtgtagcataatggggacaagtactacttccaacttgtccttggttagtagcccttcttttctctcctagctcaactctcttgtgttctagagctatagccttgtctagcggtctctggaaggacgtgaatgtgtgggacatcagttggtattggagtggccgatcaatccctctagaaatagtttctgctttttctcatcatcatcaacttccccaggagcatatcgggataactggatgaatttgtctttgtattcgcttcctgacatgcctccctgtttgagggataggaactccttcttcttaatcttcatgagaccaacatgaatgtggtagtttctaaagttagtggagaattttgcacagaagatggtgtcagctgcagcatgtgctgcgcagtatgcatcccaccaatctgcagcagggccagtgaggcgacccgatgcatatagaagtttctccctatcagtgcactgagctatattgaacatcttttccatggactttaatcagttgtcaacttgcagtgggtctggggagctagacaaggtgggtggcttatggctcataaactctcggtgcttatccctgggtggagttgggttggtggaggtggtagttgctgtcattcctatcgttcttgatggatttcctgacgctcttgacacattttttgacgctcttgatggatttgcgcttgcatatgtgtcatggtgctagccatctgctgtagtagttgcatccgagcggcagctacaacatctgtcctagccggtgggggattcagaggaggattcatctccgattatggttgggtaactatccttctgcgacgaat

SEQ ID NO: 119976 - DNA, 468 bp, Zea Mays
ttcgaaactcaagaaagaattgatgtataaaattgatattttagataaaagaagtgaaattatgggcatttcggactatgaaagacttgaaaaacttgaattggagtggaatctgaaaaatatgatggctgaagaagggcgtaagagaaaacaaactacgagagaaagatttattaatgaaggtgatgagaatattaggtattttcatcttattgctaaagggagaaaaagaagagtcaagttcctttccttgctgcatgagggggcaaccgtagatgacgctaatggcattaataaagtcgcgacctcgttctataaataactttttggcccttctgactcttctaacattaatatgacaaatcttccaatgaatcaattgactaatgtggaccggtatctcctcactgctccattttgcatcaatgagattaaaaaggtggtgtttaatctaaaacacaacagttc

SEQ ID NO: 119977 - DNA, 586 bp, Zea Mays
cgagggttgtttttaggaaaatccggggctcttatgcataataggcagccgaaggggtatcgcgatatctcggccgcacgattgcaaatgaacgatgcggattaggtccagattaatttcgaaccgctactgcatctaggccgtcggatccgggattcacggttcggatttaatgactcgaagggatacgccaagattcgatctaggccattccctacacgatcaatggttgagggccaactttcccctagatctaatctaagtcgttgagtacgcgatcaacggtcacgatctcacaagcgaaaatggtatgcggtgatcatcctggcccctgatccgtgaatccatggctcaaaacctcacacgcccgcatctaatcccaaccgcacgatggatatccaacggccccacgcatcttcttcttctcccctgacgggccggccatggcggcttcgtttgcgcatttctattactgcgaggagagggagctaacaccggtgggtgaccgaccatgcggtcccatctgccagcacatgacgcacgcgcatgatcgaaactagccaactaggccaggcgccagtgcaag

SEQ ID NO: 119978 - DNA, 625 bp, Zea Mays
ccggatgttgttatggtctaactcaagatatgtagatccaacagtcatgtgaccttcatgagatagctttgcctcaatgcagactcctcattcatgccacatgtcgtctctagtttctgttagaactccattcgagttttgaggctcaaaccagaaactgtccgcctgttggttttaaggtcaaaccaccaaaccctctcgtgagtagcacatctgatactcccttcatgatctactcgtgtgtcacagtcagtcctcgactacctgatcaccaagttatccaatgttttcgcttgactttgtcaacctcatcttgacctggtcaatacagtctactcctccatgtactcttgcactcctccatgtactcttgcacttttcaatgtcatccacctatggttggtcctctagcttctgtaatccctcagtccaagctcgacgtttgtccttcaccactcttaatccatcgacatgaacctacatgatgttcaccttcatcatcgaccaccacctttatgctccataagtcaaaagacatgttacataacagcacactcacaccatagttagtcttcaaactcaacaaaagcggatcattcccttaagttcattacacttaacatcg

SEQ ID NO: 119979 - DNA, 567 bp, Zea Mays
atgagaccaagaactgaaggtaaatgtgcaaagaggcacaagaatttagataggtttggactctcgatgcgagataatacccttttatcctatgtgttggtagctattgctatgatttgatgatctgcccttatgaggcacttcactacaagaaacaaataaaggtttgtggggggaaattaagaacatggataccgacgaccttatttgagttaagttcaagggttggagtaaaaacgtgggtgctcacgaacttaacttaagttcatgtgccatgaccataaccgtcgaacttatctacatttttaatgtgaacttctaaaacattgtaatgaggtagttcctcgccgtggtgctaacagacctcatagctagacaaaatcattcttacaaagatctattgacatagtcctcctgtcataaaaataattgttccaacacttgctaaaagggcacctatcgtcggtaccatctctgatttaccaaaacacgatcagaaattcatcggtcttctcactcactagatagatcccctatcttcttacaaccttcatacatccatcgatg

SEQ ID NO: 119980 - DNA, 297 bp, Zea Mays
gaagtcgcctaagggtgcagccggactagcacaacaagtgcgaaaaaccgaagtctaccgcgaagactatccgcgcagaagtcgcctaagggtgcagccggactagcacaacaagtgcgaaaaatcgaagtctactgcgaagactatccgcgcagaagttgcccgagggcacagccggatgaagcgtaacaaaagcaaaaacgaccacaccaaactgtccgcgccaagaccgactatatgcgcaccagtccagcataacaaatacacctgaccaagtacataacgccttcgcgagca

SEQ ID NO: 119981 - DNA, 401 bp, Zea Mays
gttcaaataaactgaaaccggaaccattattggccaattctgtttcctgtttcaaaatccgagaagaaaaatcttctcacagtgctctctttccttatctcctcacgtacgctacgtagttttttctagtcttcgttctcatccacgcacggaaggaaaatcttctctgcgttcctatcctccactctgatatttcatcgctctgatttttgttgaagttgctggccgctcaacctcatctagcgcgcaagatctcctggagatttttccaccgcttgcacgtccagctcttcttcaaatatcccatacgtacatcttccttccctcgccttatctctccaccgctttctctcttccatctgatatgccgcgtcgctgtattctggaaagcaaaagaaaat

SEQ ID NO: 119982 - DNA, 806 bp, Zea Mays
gcagggctacgctctgcgtggggagtttgaggaggcgctggagctgttccgaaggctgcagagggaaggccacgaggtgaaccatttcgtgctcaccacgatcctgaaggtgctggtcaccatggatgctcctgggcttgcctgcggcatccacgcctgtgcgtgcaagttgggccacgacaggaacgcctttgtggggacagcactgattgatgcctactcgctttgtggggccgtctgtcatgcgaggtgcgtgttcgacgggatcgtcgggaaggatgctgtcacttggacagctatggtttcttgctactctgagaatgacattccagagtatgcacttaatactttctccaaaatgaggatgacaggttttaagcctaatccttttgtgcttaccagtgcgctcaaggccgcagtttgcctgtcatctgccttgctaggcaagggcatccatggttgctcagtcaaaacactctatgatactgaacctcatgttggtggtgccttgcttgacatgtatgccaaatgtggagacattgaggatgcccacgccatttttgagatgattccccatgatgatgtcatactctggagctttctgatctcccgttatgctcagagctgtcagaatgaacaggcatttgagatgttcctcagaatgatgcggtctttcgttgtgcctaacgagtttagtttgtccggtgttctccaggcttgtgctaatattgcctttttggagctgggcgagcaaattcataaccttgctataaagttaggctatgagtctgaattatttgttggca

SEQ ID NO: 119983 - DNA, 758 bp, Zea Mays
tctgctactcgattcgaggtaccttgcttgtagcaaattttgtactgcaaaccaagcagtttagtcaaagctttttgctgccatggtgttgttagtctttggtcatcaagatgggtaagactttctgatcagtgtgtatcacaaactgtccacaaatcaagtaagatcgccagtgatcaacagccatgagaattgctagacattccttttcatatgttgataaggtttgatgtctaggacccaatgtcttgctaacaaaagcgatagggtggccagcttggtggagaacagccccaatgcctgaatcgcaagcgtcagtttcaatctcaaatgttttagcgaaatccggcagggcaagcacaggagccgagactaaagcggttttcagagcttgaaaagcctgatcatggtcctcggtccaaacaaacaattggcctttttttaggagagaggtgagagggcgactcataatgccaaagttttttacaaatttatgatagtatccggcaagtcccaaaaaacttcgaatgtccttgactgaacgagatgtaggccaagatttaactgctgatattttctccgggtcagtggccacaccttcttgactgattatgtgaccgaggtaatgcaggctggtttgagcaaattaacattttgatagatttactttgaactggtgcttgtccaagatattaaagacaacgcgaatatgttccaaatgatcccgccaattggtgctataaaccaatatatcatcg

SEQ ID NO: 119984 - DNA, 341 bp, Zea Mays
gggccttagagtgcggccctctcccgaggaggttgaggctttggttgcttcgctcggtggaatccacaatgacgagaagcaggttcactttgagatgcctactagcccgagcgacacagaaataagtgccatgctggatatgttggctgaggattcttctgactcggctcctgctgaaacactagctgtagcactcatcccagagtctggaaaaacattggacattcagagacctgatactgttcgcccgaaacgtctccaccaagctagtcatccaacttctcctgctgaagggaagaagaagaaaacgagacggcttcggcgagtgccatccttggatc

SEQ ID NO: 119985 - DNA, 527 bp, Zea Mays
aaggaacacttctttaatttgccatagaactgattcttcctaagagcacccaaaatgagacagagatgccgctcatgctcttcctccgtttttgaataaatcacaatatcatctagaaacaccaccacaaagtcatccaagaactcatgcaacatcctattcattgcttccataaaagcagcaggggtattatttaagccaaaagacatgatgataaactcgaaatgcccatacctggtgcaaaaagctgtcttctcaatatcctcacgaatcctcaactgataaaaaccagagttcaaatcatttttagagaacacctaggcacccctcaactgttcaaagagaacatcaatacgaggtagcggatatttattattgattgtcacttgatttaaagcacgataatccacacacagcctcttgcttttgtccttcttctcaacaaacaataccgggaaagcccaaggtaacctgctaggcctaatgaaacccttagccagcaaattgtccatttgccgcttcaattc

SEQ ID NO: 119986 - DNA, 339 bp, Zea Mays
gattaatgatgcttatgatgatgtttacatgatgcatatgagatgtataagcatgcttaacactaagggtgttacacccgagcctgtctcgggcaaggaagataaaaccccaaaccaggcctcagccaaaggtcgcaggggacataaggattcaatgcgcatacctaccccacacagcgtcgcatgcgaacatgagcgacattaccgtggtcctatcggctttcaccatctacgatgacacaggcctgggtacagctgctactgttccccgcgccacctaccaatcctaatgggatgcgcaaacaacaaagcgcgtgctggacctcgagaggaaactac

SEQ ID NO: 119987 - DNA, 605 bp, Zea Mays
cccaggtgtcgtaggtccaactctgtgtcctccgaagaagcctttttaaattctttcatttttaaagccaaagccttatcagtggatacttcagctatgtccttctcgggagccacatcagatataagtctatcaatctctgacattgtggtcccgaggtcttagcttcaggtgcggcttcattagcttcggcgttgtcttcggcatcaacatgtacaacatttttttccgcccaggccagggcgggatcatttagatggcttgcactacgttcatcattcgttgtttcttctgacccccggcatttccctcggtagccgaagcagtctcatttcctccctagctttgttcaaattccttctcctttgactgcaataggctagtcagatctgaccccaggggacttagcattgcaaacgggaagggttcagtcattaccttctgtatttctgaaacatcgacataggaagatggagaagtgccgacagtcttttctggtacatcttgtaccttcatctctgcaggagctatcatgacagactttcgtttcttgggagccgaatcctttggctccgctagaactttctgcttcttgacaacccttg

SEQ ID NO: 119988 - DNA, 635 bp, Zea Mays
ggtgcattggaaaagggcttgtgcagtaacaggctttgagtggaaaccctagaagcttgtgagaagcatttcttttagcttctgccacgaagtgacaatccttggccgaaacgatgaatatcaagtttgggctacatttctgaccgccatgacgaaggattattccatggttgttgagttgtcaccatataagaatatgttagctttgtaactcatgaggaacttctttgggtcagatagaccatcatacattggtcgtgtaggaggtctatacaatggtggccaaggtgttccctgtagctctagtgatagtggtgaagcttcgtcataaaggaaatctttgaagttgaatggctcatgatgaaaattgtcatgattacgcccctcataattctgctccttgtagttgtactaatctttttgtgcttcagtgttacacatctcttcggcttcttcgtcaatcttcttatgaagctcggagaggcaaatcaccttctccctgcgcttctccatttactggtggattgcttcgagagattattgatctcatgatcaagtttctcgtcttgcggttctcggttgacagccttcctattttggttccttgcctccccgatgagagctttgtccccttg

SEQ ID NO: 119989 - DNA, 487 bp, Zea Mays
ctacatagatactctattgaacaatcagtctactcgttgtttcttttagatagcgttcaagacatcggtctacaacttattacaccacacaagtgtcttgcacatccacaagtttcgacggggataaaaaggcgcatatttgaggcgaagacagatagtagtgctctctaattaatctagcagtaaacgactactagcaagaaccatgcatagcctctctactccctccggttccctacaagaagtcgtttaaggagaatagcaaatggataccagaacaagtcgtttttggagttgtgggttcaatttggacgaaattgtccccactgatgcttgttagtcttcgtatggacggacgaaatcgtagctggtttgtcaccttgattatgacccgcggaagcaggtttagggtttatttactctaaaaatagaccattcaatgtgagccatattgagcatcaaatgatttcaacattgtaggtgtccg

SEQ ID NO: 119990 - DNA, 609 bp, Zea Mays
gaaagaaggaaggggcctatccatttatagctcaagggtaggaccttacagagtagacttgctacttgcttcctactgctaagagtgtgatcagttgacgtagtccctctgacatcatccataggtcgtgtgcagctgtattcccggcatgacgtactgttcttttcgtctggtatacaggtccctatagcgagttcgatgctgatgtccttgtactgacgcctgatgggtcccacgaggtagactcatggtatgtgtgcgaggccgtgcgcgatgcagtcttgtctttcgtcatgaaccctgcatcaccctccgtcatacgtaggcatacacctggtatggtgtatggtcatgtccttcatggtatgtaggttactgtggagactttgatgattaggtcctccatggccaaggcattgatacgagtatattttacctataggtagacaggtatgggtaataccaacccatacccgtctacccaacagatagaaattcttgcttattaacatacccgtgggtagagaaatcatctcgtacccaccttcatatcggataaagcccgttgggtatttagatttcgggtatccattgccatctatagtcggg

SEQ ID NO: 119991 - DNA, 642 bp, Zea Mays
gttgagtggttctattggactagatccgatagactgatagtttattccgatttaagtgtgtcattgcctttgaggcgagacttagacacttaagccagaataatctgggtggttccgccatagcttggctcctactctgcttttttgtgccccaaagatccctcgccttcggcggttttcttttcatcctcttctcttgatgatgatgaatctccaaaattagcccctccaacattctgaatatgcgggctgtccacctcttcggacaagatatatttacccttcgaagataccgaagtttgaccaccttcatcagcacccttcatagttgtcatcaaccaagtcagtgtcggccccaagggacttaaattggaaaatgacagcggttgagtcattaccttaaagatccgcatacagcctaatgatgaagtagttgtagcactcccttttccttgctcttgagcggctagagtttttttatagaaatcttggccttcttcttttctaggctcgaaggtggctcttcgtcattctcagacccatcactctcgtttcatcatcagtagctttgtttgatgatttgctagtagtttttgcagctcttttccactttgctccaacttcagtgccagctgcaggatc

SEQ ID NO: 119992 - DNA, 933 bp, Zea Mays
catgtctagggctcgcgtcccaatgccatcttctggcatgtgacagagggattagttaggcacaattttgtcaatggggtcattaagatttgaactagggatcaaggtgaacacgctcggtctttagctcaagggctgaaattcagaattctgaatttcagaaatccccattgaacccttacttgagaagcttgttttagagtttttattaaactattttggacaagctttcataatttttattgttgcttatttagtatacttcaatgtttatatttggcctaagccttgattttatatttttcatagtcttttgccccttttcttcaatactacttaaagagctcaattagggttggtattagggtttctacattttgctctttttgaaattcttatttgtttggaacatgattctttagatatacacttagtatatcttttattcttaagttaatttgatgcttcatgcttaatttggttcacataaaatgatggttcttgggttagcacttgagagaaaccctaggtgacactggggtgtcacactcgtcacatgttttggtcatcttctctgcgaccaccttcgaagggcttctccctccctcttcttcggcattctagtccttcatcgtcagtaataagctagtcacatctaaccctagcggtcttagcatagcgaaaggcaaaggacaagccattacctccacaatttttgtaatgccaatagacaatgtcaaaggagtctcatcaacctgtttcggtggctcagatggtttcttgacatcatggccaagcttcgatgatttactcttcttgatagtaggggattttggccccgactgcgaagattcaccctcatcagctcccttttgctttttcaaagctattttcttcctcctatcctccttcactaatctctcagtccgcctt

SEQ ID NO: 119993 - DNA, 503 bp, Zea Mays
ctattcttctagcccaaacccaacaagaagttttagagagagggaagttgaaagtaacaagaccctatggggttggcaagcagttgaatgcaggggttagaggagaaggcaaacctcaaattatggggggtgatttgtctaaggagaggcaagtaagggagttcaggaagttgaatggattgtgttatgcgtgtggggagaagtttgagccgggtcaccttgctaaatgcaccaaaagggttcaagcacatctaaatgctgttattaccaaggaggaacccattgtgctcactgatgatgtgttgaaacaactggaacaggaggatgataaggaggaagtatgttgtaaagtgtctctgcaagctatggctggtagagatgatgagaacagtatgatggtgagtgcaatggtgaataaacagaatctggtgatgctgattgattcaggaagttcatcaaattttatcagttctcatatggtgcaattactggggttagcagag

SEQ ID NO: 119994 - DNA, 292 bp, Zea Mays
acgtattcagttttgctgaatttttagaaaccatgtattcctttcagtgttggacccttctaactcttaattcttggtgaatgaccattacatcaaacttggagatctattatggaggaatacttcttatgatgaaggatctccctgttcttattttagattagaagaaaactttgctccaagtcgagctgttgggctggtggtggactgaatattgttcagctgactgaaaccggttcaattttagtgagaaaaagatctccatgccactgatgtttatcctgtacatgtg

SEQ ID NO: 119995 - DNA, 569 bp, Zea Mays
tgctacccttaggtgtggaggcatcttcgtcacaagggtgcttgctgtttgctggcccagtcttgttagtctcagctacatttggcagggtgttgtctgcaagtactgctttgcctttcttttctgtcagggttgccttggaggcatcgtccagataggtggtggccctagtgatcacattcttagaagccatcgtgggagcagttcagagcatgaatagtgggcgccaaatgttggcacgaaaatctgtaaccaagcactcagaaacagtaaagcaagtagcacaatcaagcggcggactgcaggcgtgattgtattaccaagcgtgtccagaatgttacaagactggggtatttataggggtagtcaggggttggtaaactaagtatcgtaatgcccccgactaccaactatattctcgtcaagcacagtacaacaggttaattacatgaccgagtacggatttcccaattacacagtaattgatatcctcctgagtcgcttaaaggtgagcctgctaacggcgagctctgttacactgagaattcttagagcaaggtctactagtg

SEQ ID NO: 119996 - DNA, 367 bp, Zea Mays
agactgaccaaagtgataatggctgtatttagtgtgaaaaattgctaacagtgctacgtaatacagaactagctcataaagaaaacgaaatagcatctaagtgccttcttgatgaaccaccagtccaccacaacaaaacctcacaaaaattgggattttctacagaagttttgcaggcaacgtagaatgaatgaatagtggagcatttgcttcacattagattcaaattccaccattgcagtgcaactagtttgcaacttaagaaactagaacatcaaatactgcaatagcccagaaaagagagaaaaatacagcataaagttataatgtcaaattgccacagctcactgttaagacttatttgatc

SEQ ID NO: 119997 - DNA, 486 bp, Zea Mays
ccgagggatttcaaagaaagacatcataaacataggaagacttgttagaaccgaattaataagaactaagcctccgccaaccgagagatgtttaccttacgttacgttaaacgtaccatgcattactacatggaatagccggacgggtggccaccacaccatcaccaccaattcaccagccggccggggtgggcagaccggcctcgtacatgcatgcattatgcatacagcatctgcacctgcatgcacgcacatgaatgctggctggtgacagtaccagtactggagagctgcagctgctcgtacatggccggccgctagccatcgacagcgtgtattgcattgcattgggatcaccactctcactcgcttatcccccatcgacgacggtactactccagcgccgtccactcatatctatgggcgcgtgtttgtcatggttatgcttcatcccatagcagttctactccaaaattttgggttgac

SEQ ID NO: 119998 - DNA, 275 bp, Zea Mays
caatattggtctgaatgcttctacctgatgtagatgtggatatactcgagattaatatcatatccacatttgacttattggcatttgatctattctcggggacgcctgcgaatatgatccattggccttagtcaaagcatatgttctgattgcagattcacatggtatgtaataactctcctccgataaactcaccctgctggtgagttgcctcacgaagaggttcatcatgatgatgaaattcctagcaatgcgcacaatatcattgtgctagg

SEQ ID NO: 119999 - DNA, 420 bp, Zea Mays
gcctgatgaagacatcccaagtcaggactcctggtgaggaggagtgcgctgcctgcacgcctctccaccaaatttgagcctctcccttcaacagctgtgtgccaaagcgaacacgatcacaatacacaatctcaaagacattcatcttatcctccacgtaagttagccaatctgtcgcctcgaccggagtaccactgccatcaaaagcatccagcttcatgcccatccactgcatcagagaaagaccactgactagaagaggcacctcagcctcgccacctggagcagcacccgcagggacagcgcccccgggcactcctcctccaccagcaccctgagcagcacccgcaggggcaacaggaatagcttgcctcagaatggccaactcctgttgcatggcctgcatcgcggctaacattg

SEQ ID NO: 120000 - DNA, 643 bp, Zea Mays
tactttcaccgctagcgatgaactgccgactgtttttccgagtcaaaggaacttcatcttcttcctcctcgtcgtccacattagcaacacaggcagcacacccattgggatcagcaacagatggagcacccacattgggatcagcaacagattgggtacacccattggggtcagcgtcagtaaatccagtcataggcacttcttcagcagcaggaaccgaggtaccaacgtcccgatccaaactagatactcgtcggaggcgtctctttttctttttctgctcatcagcagaaggatcaggttgactggctcggcaagggcgcctcaagcgagtactggcaggcttctgagtatccaaagttgtatcagcctctgggaggggcgccactaccaatgccccagcaggagcagcatcagaagagtcctcagccagtaaatcaagcatagcgcctatctctgcatcactagggttcaggggcacctcaaaatggacctgtcgttcatcatcaggaatctccccgagcgaggctaccaaggcactaacttcttcagcagaaggccacactctaaggcccaaactaccatcagtgacaggaggattcgacacaaaaagagtgaaggctttgggaggaggcaagttcca

SEQ ID NO: 120001 - DNA, 346 bp, Zea Mays
ctttgtccatagccttgtcgcgttgagccttcagaacgacgcagttgtcctctgaggctttgacagccagtcgagcagtttctagctcctgtgcgacgagttttttgaagcatgaagatctttaatggtcaaatccttggctgataacagctgtccaagccgctggacttcatcctgagatacttgcagctcgtgacgatgatggtccaggtccgacatagtgaagcggtggctcctttccaaaatagtcaaggagttgctagcgtcatgatataaactatccagattatcacgagaggctacaagtgctcgtttctcctcctacgaacaagaatcgacattcagc

SEQ ID NO: 120002 - DNA, 495 bp, Zea Mays
atcagtgggagaatcatgtagagctttgtcatacctttccaacgagtacttatgtgatcgattcaaagttatattttaggagatatcgctgtttgaatccgggtaggttgctgtccaaaaacagattgcagggtttatcttgtggattgttttgggctaattaggggttggaatttaattatcatttgtatacaaaacttgtggggatctttatgtagatgcttctggagtttttgtttgttaccactgctatcataattttaaagatatgaaattgacaagcagcgccgctgcagttggtgggtgaaggtggtgataagccgcttgtgacgggtttggaattgtgcgtaggtgcggcgtcgtttatgagcgcttgttatgtgaatttgtgcactaagtggtgtgtcaaaaacaagttatggacttcgggatcgcacttagggctttgtccaaattccccggtgaaggcaagtaaaatagtgatggttattccgt

SEQ ID NO: 120003 - DNA, 982 bp, Zea Mays
caattcaagaattaccgtgttctagagactggaattattctaacactttacatttgttagagttaacataaccaagagagaactaataagtagacttactaaatttttatccgtgtcatttcgagcactcgaagtaccatacttaattaacaacgcattctctacgataatcgaaacacttttcacccaataatttgcatttcacttagacatcacatgagcactaatacttttcctccgcgaccataaccatatgtatttagactacaacaagcaaatcatcgcgactacgagcttaacccaagccatctaataagttggttaactagagcaacgacacagtctactatacagcatacacgtcggcttgcctattcttctcgcaatctaagacacaacatatatatcacaatcacctacgcaatcgactcctacttacatgagttggctaatcacaacataagacttagcaaaccattcaggcatcgcaactcaaaacatgggtgggagcaggttaattagtttttcttaaccattgctccacttgaattagttaacacacaagtcacttaaaacaccatattttaggaggtctaacatagatacattaacacatggcataaaactccataagacttacattggctacttaaggacctaaagcactcatgtgcatatgttatcggattgttcttcaattttagcaaggactaactcatgaacgctactcgcctccaataattattgggctgcgataacgctcatataagacctctaatcgatcaacaagacatttatttatccaaagggaagggaatgcaataatttataaagcgaagcatcacattgccatacaacaaaaatcatgacaacaccgatagatactatccactaaccgtttgaaaaaaaactaaacttacttctcgcttgccactacatcactcctcaatcacacaaccatcatgagcatccttcacacgat

SEQ ID NO: 120004 - DNA, 488 bp, Zea Mays
tggagtgccgcctctcattgaaggatagctacaaacctcgtctgtactttgaggtcgcggttggggatgaatcggatgactcgactatctcgtagttatccatatcatatgatcctatatgctcatccttattattcatattatacaaaatgataatgcacgcatgattacactgagtacttgctaggagaaatagtgacctagggttgcaagaatttgaaatcgagccttgagcatctcgattgccctttcaacatccttctgtgcccccatctaggcagacaacaaacatctcctactttggagtctacgggagtagtatggtcttcatgaacaccatccgtcgacagtatatgccatcagcgaggtagcatccctagttgtacttgtgggcattcaccgtgaagttcacatttagtgctcccccttgaaagcacgacagtgaacaacggtgattggttgagcatgttcatatcattgtatcccgc

SEQ ID NO: 120005 - DNA, 406 bp, Zea Mays
ctgacttgtgtgccccatatatatatttagtgagccttcctaaagctccacctttctctcaagtagaacagatactcctttgcaatcacacccacgttctaagtgttgtcacatcggtcaccgtttgccagctgcagtgctggtaagaactttgtaagagcgaggtaagacgcttcataacttgtgttctaccaccacccctgagagtagttgtagggtttatattgtttgtttgttgcctttgtttctatattaaactaacaatgatagggtcaatgacccaaacaaacaaggataagggtcctaagtctaataatggtgagtgtgtctcccatctgcaattgaaggagacgatgtgcgcattgactaaagcttttgagagtcacaccattgatgttgattcatc

SEQ ID NO: 120006 - DNA, 556 bp, Zea Mays
gagatggaagaagacagacctcatcttcttgcccttcacagccgctacaccgtcaggttattcatcccatcaggcgctactccaacccagcaaccctcccctggcaagccatcatctttgtgctgcagattctataatgcttgtccagtctccaaactggttacccaattgttgttgctcaatacactagttactattatactcacaaaggcagacataagcacagtctggatgcattggcgcactcaaggtgagcgctatcctctgtctcgctccttgcctattggagctatctgatagcacctagagggggtgaatggtgatcctgcaaaaatcaactctaaacaagacaaagttggtttattataaatgttagtgaaaacaaaaccaagttgttatgagtagaggtggagggaagaagagaactcttcacttgattgttccttgaatatgtgtattgaatatatgaacaatagtacaagtgaaatatgagaacccttggaagacaacaatctcaataaaagaaatgcacaagtgacactgtgattttatcctg

SEQ ID NO: 120007 - DNA, 454 bp, Zea Mays
gggatgtatgtaacatactaggactatgttgatgtaactagttgaggctataagcctataacaattctgtacctgggtatgttgtatgaatctatgattaaaaacgatgattgtttatttgtcgtgctgttgtgtggtgaatgtgaattgctcaatgggagaaggtacaagcctcgatctaaccatagtggcggtgagttgagggaacatgcataggccataacttcttttgttccttttattcctgaatattgtctctttatatagggatggctgggttaaacatactcctaaaagccagaatttaatactatacctattacctagctttctggaactacaaccccccaatcccccaaaacacacacgcacacacacatgcacatcatctgcagtacaagtttatgtgacatgatgaggaccgccagtgagtctccacgtgcgtgcatcggtg

SEQ ID NO: 120008 - DNA, 418 bp, Zea Mays
ccttctcgccgaggactggcttgagaagaacaagcatcgactacgctccaatccgaaggagggaggtggtggtttcactagaagattcaccaagaacaagtaggcgtcgcgctctgagggcggtgcatcgggtccggtcaagttgacctccgagggcacaccacggcaaaaggggtggtgctggaagtgtggcatctacggccactgggcggtcgactgcaagcgctcgaagaaggacaaggaacagcaacagtcggaggcgaacgtggctgtgacagttcctaatgatgtttgggtacttgatacaggtgccagcaatcatatgacaggaacttgaacaatgctaacacaactcaatacaagagtttgaggaatggtgaaattcagtgatggatctcatgtgaggattcaaggtatg

SEQ ID NO: 120009 - DNA, 299 bp, Zea Mays
ctggcccttcaagtagcgtgtttttaccttgtattcccacgttgttcattctccatagctgagtcaaaagatcggggtcactgattttaaaccttcaacttcaaagttcagcgcactcagattgacagatgaatctgcagtcgtttattcctattcgtccaaaccacgaattccgtgtcatccacgtcaaaatgcagtcatgagagtgctcaccatcaaccctgaactattgacttgagagtatccttgcaatgaacaatagagactattattttcattaccatcaacctcctccttgc

SEQ ID NO: 120010 - DNA, 463 bp, Zea Mays
gccgcccaaactagctgccccctgtcctcaccaaatatctcgtcaacaataacctttgtgtacatagataatttgtacattggattaagaaaagctgcaacacaatgagtagattaatgttctctttatccttctcctttcccctcccatttcctctctccttctccaactccatctgctggccatactcattgtccttattgttggtgtgccaaactcccccaatacttgtcaaaattttccatcattctcacgcccattgatacttgtagattgtcttgactactcatccaagacttaataagaaagtgtacttcaccaatctcatgaaagaaactattgctagtcacatgcaaactagatgaaacacgcacagtaaggtcatgtaaatgctcaagaaactctaccatcttctttgcgttctcccaatcattttcatcaaggtaaccatcacccttccttt

SEQ ID NO: 120011 - DNA, 366 bp, Zea Mays
gctccttcttctagttcaggcaagtacaacttagttgctacttcctttccggatggggatattaacttgactattctcttgtcacaactgacggtggctttgtttttgtatagccaattcatccctaggatgacatctaacccttgagtacccattactactaggttagcggggaagtctatcccccttatttcaatccttagattcggacaaatcatatcggactaaacttttcccccaactgaattaactcttaaaggtggaaacattgattctatggggatgttatgtgcttctacccaagatgtagaaacaaaagaatgcgtgacaccagtgtcaaataatacttttgctggatgggattcg

SEQ ID NO: 120012 - DNA, 781 bp, Zea Mays
ggcaagggtggctcctccgaaggtagttttcactaggatgaagtgggccaccttggtaagacggtctattatcacctagatagagtcgttccatttttgggtccggggcagtctggttacaaaatccatgcctatttcctcccacttccattcgggcactggaaggggttgcaataggcctgcaggcttctgatgctcgaccttagttcgttggcaagtgtcgcaccgggccacatactatgctatctctttcttctttcctctccaccagtatctggttctgaggtctaggtacatcttggtggtccctgggtggataaagtaggctgagttgtgagcttcgtcaagtagaacttctcgtgcctctccttttggtacacacagacggttcttgaaccaaaggactccttcctcatctgtccagaagtccagaagtggttccttgcgagctttttccataagacctgttgtctcagtgtccaggcgttgagccttgcatatgaggtcttctagcattggcttgacttctaggctgccattgtctcctagacatgcgttcagctgagctgattctttcttccaatcttctaagaagttagttcctttcttcccaaaaagttttcggctgagggcatctgctaccacgttggccttcctagggtggtagtggatctcaaggtcataatctttgatcaattccagccatcttcgctgatggaggttgaggtctggctgagtgaagatatactttagactcttgtgatcggtgaagatgtgacat

SEQ ID NO: 120013 - DNA, 410 bp, Zea Mays
ctctgccaaagtgggaggtataggtggtgggattggagtttcatccccactaccccaagtagtcccagccccatcctgaccacgagtccttgtcggcatctggagaagaaaacatacttgattattacacagtacaattacacagcctttattacattattccaagcttgtccaaattatacatactcaacccatacaactcattttccttatttagactacataaggaaacaaacctactactacaataatctagtcctccacatccttggttgttctagatccgctgctagcttcgggagggtgattattcgtgcgttcataggaggaggggctctgtcgctctgaagatgtccaacttcccataaggtcctccttcatctgctcctgatgcaccaactcccatctct

SEQ ID NO: 120014 - DNA, 455 bp, Zea Mays
accctaaattctgatacagacagttggcatggtgaccctggctgcatgttgcacaggggtcgtgtcattccgaagtttagagacagcgggcacatgaccatcgtcatcagttttcccctcttcttctcatcggccttggtataaaaccattcacctttccagccggttggccatttggtgcggtagctaagaactggagccttcgtatccttgcgatacgtgaaattgtagcagccaaaattttcatgcaaaccatctgccctggccttcgtctggtaatgcaactcatgcactcggtagaatgcttcggcatctgggctcatcccttggcttcagagggcccagatgaagacactaagcctaacaatggcgttaggggtcagctgatgaagataaatttcaaaaaaattcaagacctctcctatcatctcgttcagagggaaccacagtcccgc

SEQ ID NO: 120015 - DNA, 548 bp, Zea Mays
gtcctagcgtgttagagaaaataccagagagcgtgtaggtgtaggtgtgagagaaaattgcaataaagcgttgtcaatttgtcatgcaccatgtacacgcacgatgatgtacgtaggttcggacgggtgataccatacctcctctatgtatattagatgattacatgtaaatgcacacaaaacttacatactcagacggtgtataagatagtcagagagaacaacccgagttgtttgatcaaatcagatcatcccagatcaactagatccattttatgcgactctacacttttcttttaaattacaaaggagagagttatatctttggatagacagtgagttctttagagtagaggtttgtcgagtatctaggaacgagtttccaaagtaaggcctataaaccttctgattgaacatgcagcgaagcgaaacagacgactaagtccccgtcgagcaagctggcgagatagagcggtcgaccaagtctctaccgaacaagcccgcgagacgaagcaaccgaccaggtccttgccgagcaagtttgcgag

SEQ ID NO: 120016 - DNA, 462 bp, Zea Mays
tcctctttgtcttagctgctgatctgctacaatcaattattaacaaggccaaggattgtgacatcctcaagctcccgatccccctatcctgtggatccgactttccgattattcaatacgcagacgatacaattctgattctggaagcgtgccctagacagctcttcttccttaaagctatgcttaattcttttgctgattctacaaggctccatgtgaattataacaaatctaatatctatcccatcaatgtctcagagcagaaaatggctatgttagcaaatactttccactgcaaggtcgggtctttgcccttcacttatctcggtctccctttggggcttaaaagacccaatttggaagccttcctacctctcattcagaagactgaaagaagacttgcttcaacctctatttttctttcgcaagctggcagacttcaaatggtcaacgcagtatttt

SEQ ID NO: 120017 - DNA, 462 bp, Zea Mays
actgcactcactaatgtattgagttaaataatatttattggtaaatcatgtaagatagcaccatgtgtagttgcgactgaatgcagtacttcccgtcggctgcccctccccttttactttatcaattctggaggctacagtttgccgcttcccctacagtactacaccaaaaggggagtcgtagtcagccccctagtcttgaacctcgtgcacgcccgtatttgttaggtgaggaaaaattgatagtggatgataaataggtatataaatgatattttactgttgtaatgggtatagagggagaatttagagggaaccgctaagggagggagaaatctcagtgacatgatatacaagtggggtataatgggcataataatttaggggaaccgttggagacagtctatgcatgccctatataagagtacacgtttcgatgtggcatacaaaacgcctaacaaa

SEQ ID NO: 120018 - DNA, 612 bp, Zea Mays
cgctgccgcgcggagtgctctgctcaccgtagctcaccatcgagtaggagacagacttttggccgtttgattaggtttgaacgggtgagatcaaagggggacgtgtggggctgccccgacctttggatcgagaattgagggtcgtgataagatcgggatcgaacaggatatggatcgttgatctggaatggacgacagggatcatacgtgcgtaccccccttcgttactttaaatctagacccttggtattggatcgggtggtcaatcgcatacaccggttcagattataatgtgggtcgttggatggagatctgacgaaccacatcacataatggttcggttaaaaccacgatttaatccgagccatccggatcggatcggacggctaggatcgccctataccccttcgtcgcgccccttttgctaaaaagaccccgagataaatagaatctaaccctggctcggattggacggctaggatcgccctataccccttcgtcgcgccccttttgctaaaaagaccccgagataaatagaatctaacccgtagtccactcggtggttggctgtgtctaggatatcttgcgagttaaaccccgaccttctctgta

SEQ ID NO: 120019 - DNA, 401 bp, Zea Mays
gccctagcaccttgtttggttggatttttcaacgatgggctgcgggtcgtcagagcagttaattcaaattcatctctatctgcatgaattggtagcgaatttcttccttcgttatggactatgttaatccaacccgttcgttcacgcagttccatagttctggctcggttccaatccaaaaccaatggggtgccatatgacgcctagcactttggacccgagatatgattcacttcgttttacaaagaaattgcgatttgattgaaccccatgctccatggtccacgctaagtcttgtcttgccctggatctgagggatatatgattgcccttggcctgttttaagtttggtatgcaatttcgatgtggcttacgcgaaactgttttggattaattcaaaa

SEQ ID NO: 120020 - DNA, 561 bp, Zea Mays
gtgggtatccgcaggatcgtcaaggaagcaacatgaaaacaccggccagaaacaacaatcaaattaccccagtttagcccaacgaatgcttcaagtgcagagaaattggtcattataccaacaactgtccaaagcgcaatccacagacgccctagaagtacaacaatcaaaggtttgatcagttaacacctacttgtggtaatgtgtagaataaaactcagcagaaccagagtaaaggcagggtgaaccatgtgacaacagaaagtcccggaggatgcgaatgtggtgtatggtatgttccttataatctccatacctgcatcaattttatttgattttggagcatctcattcttttgtaaccaagtcatttgtggaaaagcataatatatgaaactatcctttgaagataaaattattaattagatcgcccggaggtgaaattagagccactcactcataccctcaaaccaagcttgaaattcgagaaatatacttttttagtagagctgataatcttggaatctagtagaattgatgtgatacttggtatagattattt

SEQ ID NO: 120021 - DNA, 530 bp, Zea Mays
aacagattgggaggaacaattcccagattctcttctccagagctcagccacggatgactccgaccattgccctttgctgcttgggtttcatgattttagcagaggaaaaggaaggtttcacttccaagcattttggcctaggatggagggatttcatgatgtggtagctcagtcttgggtgtctgttcctgcagggccttgcccacttatcactttggccaagaaattaaagacaacggctaggagtctgcagagctggaatgccaaaaaaattgggaagattaagctgcagcttgagatggctagggagctcctacatcaattagaggtggcgcaggacaatcgttccttatctcctgctgaattgtggctccaaagcatgctcaagaagcactcccttgccctgtcctctatctctcgtaccatggcaaggttgaaatcgcggattgggtggctcaaaaaaggggatgccaatacctctctttttcatgcacaaacaaggttcaggaagaaaaagaatttcattgcaa

SEQ ID NO: 120022 - DNA, 367 bp, Zea Mays
gtgtggtggcaagcaattagtaagtataaccaatatcaatagtgatgtattgatttataaactatgctgatttataaagttttgtacaagccgaaggaagatgtgctaatggagaagaagtggatgttggcagtctggcatgctgtttagactttagagtgcagcctagcatgccttatctcttacttgcatgcgtaaccacctatgcaacagcatgagcgcttcctctttctcgctattgtcatcatatatcctcacacttgttgtcgtatattaacccacaaaagtgttgtcggtgttttgacccaaggatcccaccaactagtgaatgaatgttgcatgccctagcccagatgggtgaagaaag

SEQ ID NO: 120023 - DNA, 592 bp, Zea Mays
cagtctcacattgttgctgccaaatttgaatataacctctgttttgttggtttacctggagctgtttgtgcatggagagtatattagaccatgtccactgttaccttaaaggatgttagacttaaaaaccctctacttgataccactcatgtgggagggagccttcgacactggatctgccctctatgacatattgagccaaatgaaaagaaacattcatgatgacacgatgagggatacctacttctcttgtattctctaccgcttttttccatgaatcttcgtactgccaggtgcttgggcttgcgggaagcaacaacttgctgtcggttgtgcttgtgcctctcaagtgtggtgaggagggagcatgtgaagaaaaatgtttgtttttttaaaatttgctgactcaatttttcatctgagttggatacctaataggactctatctagctgaaaatttatagcataaagattgtttagggatgtatgaatgaaaaccagaaagctgtagttttgctgtttttttgtatgttaattttggcttaatggttaatatctattaaatttgttgagaaaattatttgacaatttt

SEQ ID NO: 120024 - DNA, 593 bp, Zea Mays
ctcaaaccttcatatgtcgcattccttttatatgttcatgatggtaggactggtttggccccatgtggtgcaacagaaataagatggcgattgagaataaatctcctagtggccctaaaatgattttgtataaatctattggcagttgtttgtctgttgcttttgagtagatgttgggtgggttccatgttctctgttttcttggtcaggagtttagctcaggggtgtcttgtgctggctggactttagtcagtttcagttgtgttgcttggttttgtgtggattggtgttgctgcctggttaaactggtctccccagtagagtgtgtgagttgtcagtttgtatctgaatccttatatgctttctcaaaagcagagtaataatctcagttcaaaaaaatttgtagcgcattttggatgtgattacaaatccgtgaattacgttggttatttggatgtgaatgttatgttggaatttttgggtgtgattgtaattctcgatgtgaatgctggaatgggccgggccggggcaacttcctacggttatagcttcagcaaccgtcgaagttatagatgatgaaccttattttcagt

SEQ ID NO: 120025 - DNA, 557 bp, Zea Mays
caaatgttcgtagtgctgatcctcaagaatagacaagaagagaaagaagtcgatcccctgatcaacaatgccgccaagaagaagacgatcaatgagcagtaatatcgacgctctacaaaacctagttgcctacacacccgatcatgtttctatgtttcacatatacaaaaaggtggttccaaagatatgttctcctaacactcagtgctcgcaaagaatcaggacaggaaggctcagttgcagcttgatggagaagagaggtgattcgtgtgtttgcctattaggctcctatgaaggaacatgaaagtggagagaggcgtcacgtggcggcgagcggggttgagcgaagtttcttcagttttgttgagtcaagctagctccaggaggcgaaaaaattttattcagcgactaagggtctgcaatggatgggccttctctcatgaagacaagacccaagagatccaaaacttcttccagaatgagatgaaacaaccaccacctaggaatgttgaccttaactgggagattatctctaataggcgacatgacctctccag

SEQ ID NO: 120026 - DNA, 305 bp, Zea Mays
gatcaccagtcaaactctggccccacctgcaggctcgcatcctcccctgaggcgggcctgggggccactgtcggtacccgagattaggggtaccccttactacgatataaaggcatgatgcctgcggagctacccttaaccgcgcagagaacaaccccaagggtatctcgtgagcagttatggtggcgttctcggaggcaacgtcgtcggacccagaaggcacgggacccctgtacgcacaacccggacccccgaagtaaagtagcccggagccattggatagggttcagaccccatcaagtgag

SEQ ID NO: 120027 - DNA, 1140 bp, Zea Mays
atacgaagctcttcttctctttcccaagttgcttcatcttcaccgtggtggctccattgaactttgcacatctttataactttactcctcataactcgggtcaaagtatccaaaatcttgatggggtactcaacataagtcaaatcctcttgaacactaaggtcctccattggtaactgttcctcaggcactctgagacatttctttagctgagatacatggaagacatcatgtacatctgacagatgatcgggtaactccaattgatatgcaacttctcccactcgcttcaagattaagaagggtccaataaggcgaggggacaatttgcccttaactttgaatctcctcattccacgaagtggtgacaccttgaggtacacatgatttctttcctcaaattccagtggtcttcttttattatcagcgtagctcttttgcctggtttgagctaccctcaagttctccccgattatacagacttgttcttctgcctcttgaataagtttaggtccaaagaactgtcttcctctagtctgatccaatatagaggagtcctacatttcctgtcatacagagtcttgaaacaatggcatctccagactggcctggtaaccattattatatgagaactccgcatacggtagactcttatcccaactaccaccatgcttaagagcacaagctcttaacatatcttcaagcacttggttagtcctctcagtctgcccatcagtctggggatggtaagccgaactgaaattcaatcttgtatccaattactcgtgcaacttcttccaataccgagaggtaaactgtgatcctcgatcagacacgatcttctttggcacaccatgtaagcatacaatccgtgccatgtacaactctgctaacttggctcctgaatacgtggtctttactggaataaagtgggctaccttggttagcctgtccacaatcacccatatagaatcatatccagcagacgtgcggggtaatccaacaatgaagtccatgccaatctcttcccatttccactcaggtatcttcagtgggtgcagtagtccggttggcctctggtgtttagccttaactctttgacacacatcgcacataaccacaggtgcagccacatctctc

SEQ ID NO: 120028 - DNA, 440 bp, Zea Mays
ccacggggcgacaaacggtaagggtgctgaatcccgacaggggcgggagaaccaccatccaaatagtggcgtgttgcgcactcagcacgcaattccacaacctccgcccgaaccttgcccaactcgtcaagggcatggtccagctcagtgttgagcccgacgaccaggttgaccatgctattcagcctgggattgccctcaccaacgggagagacaatcacacctccagcactgccggtcgaacgacgaggatagtacttcaggtcaaggccatcagctaccccactcaataacaagcaatactgtgaaagtgcatgtcatgctgcatcttgtatggctgccttggtagtatccctcttagtgatagaatagtgctctgagaaggcctctgcaccccggagatcattgtccggacggcgccccaagcaagtagcctccca

SEQ ID NO: 120029 - DNA, 337 bp, Zea Mays
tatttatcccaaccttttccatcaatgcaatgagagaaaggttctttaaaatcagcatcagcagcataaagtttttaatggattccaaaccaagcacttttgtatctagttgtgtaatcaacgcacatcttctagacaaggcatcagcaacaatgttatctttaccacgcttatgtttgacaacatagggaaacatttcaatgaactcaatccatttagcatgtcgacagttcagcttgccttggcttttaagatatttcaaagcttcatgatcagaatggattacaaattctttagggaacgtaatgttgccaaacttccaaaacacaaactaacg

SEQ ID NO: 120030 - DNA, 524 bp, Zea Mays
catttgcaaaaaatggggtgggcggtgggccttgaggttgcgctggttatggttacagaaaatagtaccagataagccttgggctttcatcccctcccaagctcataaagtagttaattcctttttctctattgctttgaaatcagagattgctaacgggaggaataccaacttctgtactgatagatggttgcatggacaaaggatagatcatcttgcaccaaatctgtttggggcaatctctaacagagccagaaaaagaacagtccatgatgccctcactaatcagcaatggatttctgatatccagggtgttcttacattggcagtactaatggaatatttgttactttgggatctcttaccagaagttgacttgtagccagatgttgaagacattcatatttggcaattctcaccttctgggcaatactcagcgaagtctgcctatgaagccttgttcaatggatccatctccttccagcctggggaaaggatttgacaaagttgggctcctagtaagc

SEQ ID NO: 120031 - DNA, 355 bp, Zea Mays
tcccagagttcaccaaaatcaacatgatctgattctgaataagagcttagactcccacacatgttttagtaattgtgccactgacatcattcatggataagtggtaaacctcctcttccaaatgtttcgcttgttcaatttacttcagcgtttcatcaaataatggcatgggcaaatctttagtcgataatgcattcaactgcatttgtaacctcttcggacatttcccttgatggcccggctcaaacttctccccacaagtgaaataaaggccattttgcctatgatactctttaaccagacggtccttagacatctctcctattgttgtggttgccttgttgttagttctcgg

SEQ ID NO: 120032 - DNA, 568 bp, Zea Mays
ttaacacctccctcaatctggagggtataaaattaagttcagattactacaaatcttatcaaatgctgaaccaggcaaaggtttggtcgttatatcgacttcatgttagagttgtcgagccttgaacgcaactaggtgtgcaaacatgtcgtcgaggaagagtgactcaatcttggtcatcatggttcatggaggtgttgaatggggtcgtagtcggtcgagagcctcgctagcagataggcgaggacctcctcattgcatagagggggcatcagcggtggcgagccccatgatcatacggaagaagttgacgatagacatatcatgtttctttgatgtagcatggaggtgtttcttagatctagtttagtcttacacaatgatctctcttcgactctacaccgattggggacacgttggacggcctgccgaccctgagcaacgatttggaactctccccctcgatgggatctctcccgagggcgagttctagggttcttcgcggagaagaacaccctttgcgccatctggacagtgtggccctaggcgcggaccgtccggaaatgtg

SEQ ID NO: 120033 - DNA, 527 bp, Zea Mays
ccaaagtctagacgcaggcgaaattcatcgccggcgtatagctgaggctgcgacgggatagcacgctgagtagacgcggatgcgagtcgaggtggctggcctgggagtgggagaggcggagctgggactcaggcttggcttttatgcatcacgggtggagtccgcgcgggaaaatcgcctggtgtatcaccccgaaatacggaacggtcgcagcgcttggtcattccaaatcacggtgtttgttacgaatgccggggagcagactcccagatacgatggagatagaatttggcttgcatgatgatgtaagttgtgatgtcatccgcggcaaggggaataaaataatacaaaatagagatgtgggctggctgggggaatgtgggagtgggctgcaacgcaagtgaatcttccttttttttatttttttcatttattttcttccctttcttttctttaattctaagatcaatttaaattttgaattcaaacttgtgcctaattcattctaaatccatattgtggaattt

SEQ ID NO: 120034 - DNA, 461 bp, Zea Mays
ctcctgtcctacctagattctctctctctctctcgtgaggtttctaggtacttatcacttcggtcatgatcatttccgctgctatctctcgtgcttagtttttcactctcttatgcagccctcaggtcaggatgatgcacatgaagaatgtgtcagtgccagggggaggagatgatgaggaccctcctcgccccttcaggcaggtcaagggcaagactgtgtacttagagcagcaggaaggccgcaagaagcagcgtctggatagagcagctcgagcagctcttgcagtggcagcggcaacagagcaggtagagcgtggtggacagctacagatctcgttagaccagattgcatacagggttcgtcgactcgcgtctcgacctcgctcctccgccccctctacacccgccacagctactactccacctcccacttcgcgagctccagtcgctccagagcca

SEQ ID NO: 120035 - DNA, 470 bp, Zea Mays
tcttctcctcgtcttcctttgctagactgatttgatgatatctggagtagcaatctaggaaggagagcatagagcagccaacagtcgagttgactacctgatctaatctagggagtccgaagggatccttcgggtagtgcttattgagatcggtatagtcgacgcacatgcaccaatcaattttattctttttgagtacaagaacggggtttgccagccactctggatgcaatacttctctaatgaaccccgccgacactaggcgagctaactctacatgaatggcttctctcttgtcaggcgtgaaaacgacacagcttctgtcggattggtcttgcctgatgatatattttgagtttgtgctcggccagttctcttgggactcccggcatgtccgcaggttgccatgtgaacacatcccgattgtcttgcaggaactggacgagcgtgctttcctatttgtcctcgag

SEQ ID NO: 120036 - DNA, 1130 bp, Zea Mays
gtgatatgctcccatttccactctggaatttctaatggcttcagcaaacctgcaggccgcttatgctcggccttcacgcgctaacatacttcacaggtggccacatacttggaaacgtcaaccttcatccgcttccaccagaagttttgcttcaaatctcggtacattttggtttcgccaggatggatggtgtaaggcgttttatgagcttctctcaagatatccatcttcacctctgatttctgaggcacacagaggcggcccctgaaacgaaccaaatcattctcatcaatggtgaactcccgcggtttaccatcacccatcctctttcgagcttccttcaatagacgatactgctactgagccgcacgcactctctccatgagagaggattgactaagcatctgagtctccttgccagcggtgccgacataacacaaagcgatccccatacggtccagatcagcgatcaacggcaaggccaccttcggaaccacggacctgctaagggcaccaaccaccacattagccttccctgggtgataatgaatggacaaatcataatctttagtcaattccagccaccgacgctgcctcaaattcagctccttctgagtaaaaatatacttgagacttttgtgatcggtgaaaatgtcacaagtctcgccataaaggtaatgcctccacgtcttaagagcaaaaacaaccgcggccaattccagatcatgagttggataattcccctcatgcttcctcaactgccttgagccataagcaatcactctgccttcctgcattagcacacagccaagaccaatacgcgaagcatccgtataaactgtgaaacgcttaccgctctcaggcaaagctaggataggggcgtccacctacttgctcttcaatgactgataactaacctcacaatcgccggaccagacgaagggaacaccctttccaagagcctagtcaaaggcttagcaatgctggaaaaatttggtacaaagcgccgataatacccagcaagccccaagaaactccggatttcagagacactagaaggtctcttccactccaccacaaccgcaacattcttgggatcaaccacaataccctgctgattaatcacgtgc

SEQ ID NO: 120037 - DNA, 447 bp, Zea Mays
ctccccctggcgctggagcatctctgtaagttctatccataggagcaagtctgaggggtcgaatttgtttcccttttgtaactaggtaacgcatacgtgtacgccaacccggtgaggtccgtccccataagcccggcctgttggtctacacccatgcatgataacttataaagaaaagaattaccccctcagatgtgccctatgatagtttcatcttactgctccatggtcttaccttgcagtttttcatatattattttatctaacccacccgaacagttccctttccatcagacataatgacatccaaattgaacagccaggattgcagtttaggacctctctgcgaaagcaggagggcccgacagcctgggagccggctctagagaacgggaccctgttccatggggtggtccggagcctatgtggctgcttagcctggttccg

SEQ ID NO: 120038 - DNA, 670 bp, Zea Mays
gcacccacgacggcgccattgccggcaacacccagttcgagcaccggggctccataccatgatctgataggctatacatgatccactcatcacctcgagtcagacctaccctcacacggcatcgattaatgggccccgacaccaggccacggcgagcagtagtgtcgcgccatcgccaagctccggatagcaattctcggtggcccacacccactactatagggacaaagcgaacataataggggaacccataccgaatttcacgtggttgtcgccttgtccgtggtgattcgtgcctccatgactccctggaacgttggtaaacggttctcgacgcttaggtcaatgaccctgctggatgggggcacacaccttcttcacgacaccgtgaggtcccaaggcccaatcccgaaccctgagcggcttcacagatgatcggcaacgtcggtgagtctcctctcctttatgactcgcggaggcgtcgatggtggtgatcggatttgatgtaaaagctctcaaccgagtcatttatggaaaggggatttcatggcttggtatttataaccccaatagatagacccgagggtggggcgacggccatatcgagccctggactcatcggtgacggttatggaggtcgttgcaaccaaccgagagagggaactctggt

SEQ ID NO: 120039 - DNA, 513 bp, Zea Mays
aacaatttagccctttttgaaagatgtcaactcccaagtgttccaccaacttgagtatgtgagtgttgtggttttgaccccatgataagtaaattttaggttaggagagggttagaaaatcgttgtcccgatggctttgctctagcgagcctgagggaaagagtttatattggtttggagagaactcctacgtccagtatggtgctaaagtctttgttgctggcttttgtgtattacaaggcggagcgcttggatctcgtgcttgtgtgagaagtatacaaattgaagttgccaatctctacaatttggcactcgtccctttatatagctagaggaatgagtggccattgttgcatgaagatttcaacaggatgcatcattcctatccttggacatgtggcccttctggtatgtcattgcgcgtgcaaccgtttcaccatcctcggccgatcaatccatgggttggttaagtcctataggtgtctgaagccttgttactaggtatgtcctgag

SEQ ID NO: 120040 - DNA, 510 bp, Zea Mays
ctccatttttccatcttcctttatattgtagcctcccaatctctattttaacattaattttaggtgaagtccgaactttcagaccttcaccgacttgctcaacgatcaatctccacaacttctcgacactgtcggtgagagggtggtcttcttcgatgacctttctcccatacatcattgtcagaagaatgtttttgcccatccctgttctctcactccacaacctttgtttccatacccatatactcctgctttgtatccctatcgaccttctatgaatgctcctcctactcccataaggatcctaccaccgatgctctttctgccaccaaagttcctaccactgacgctcctcctccaccattcacttattcataccctcctctataccccatatagaggtccatatggtgctcatatatatggatcatatggtgctactcctccattccctcatctatttggtgttcctccctgaaatgatgttcttattttatatggtgctcttcc

SEQ ID NO: 120041 - DNA, 431 bp, Zea Mays
tcatcactacattggactagggcgcgagcctgaaccaatataaaccctctgtctcaacaccacgtttgagtgtctatgattcactattcagatgagtccgcgctagcatccccaccgaacacaaaacttattgtccccggtttccaaaacaacgacgtgaggtatgttggtcattccctttatgactcgtacgtaagcaaggaattcatcgctcgttggtgtctcgtcgcgcagaactattgttcggttggtttagtgatacatgaacttcgtgaaatagtgctcttggagcggcaatcccgcattcactagaaaacaaagcgtggcaacgccgcgccaccgtgtaactagtaaaatatttttgtgtagaaaaaagattagcgttggacataggagtgctctttgagtgatgaatgagtggtacacacatg

SEQ ID NO: 120042 - DNA, 356 bp, Zea Mays
gcgacttgttacctggtatggcccaaagaagcgaggacccaatttcgacggagcagccgcggtgacacccactgctgtccgctgttgtaaacggagccatacccagtctccttcttggaattcgacctctcgtcgtgactgatcctgatatgtcttcatcacaatttgtgcttgtaccagccttgccttgatttcagtcagaaattcatccctttcctggagctgctgatctaccgctgccacctttgcgacacctggatggtaagctaataatgctggcggctctcggccataaactacccgaaagggggaacatttgagggcggtgtggtacgaagtgttgtaacaaaattctg

SEQ ID NO: 120043 - DNA, 421 bp, Zea Mays
gtttgaaatggcacattgctctcgttgtcggattgactggctacagagggatggggtcttgttgctggaagtcgatagggtattaaggcctggaggatattttgtgtattcatcaccggaggcctatgctttggaccccttcaacaggaagatatggagacagatgagtgaccttgctcgaaggatgtgttggcgggttgcatctaagaagaaccagacagtgatatgggctaaaccattgactaatggatgctatatgaggagagagcctggaacacttccccccatgtgtgaacgtgatggtgactcagatgctgattggggtgtccccatgaaagtatgcctaaccccatactctaagagtaagttcattcccttcattttccttcagaacaccaaatacgataatagtgtatactgc

SEQ ID NO: 120044 - DNA, 413 bp, Zea Mays
cgacattttgacgtgtggctcttgttgagcgcagggcatgttgtaccagtttggccaccgctcacctatcgctgcaacatgtgaaggtggaacagacacatgggcagccgcaggcaagcggggaagtccatgactggctactattgccatacgccatggcaggccctatcgtgtgcagtttctctctctacgtatcatcaacgacaccctaaaaccaccacgtccagcaggtagaagcggactgaaaatgacatgctctattgctctcctttcttctaacggttatgacttaggaccatccccttcttggctgttgattgtttcacaggctggttgtccttttgtctataatggacagtaacttatattaccttctctctgagctagacttgttaatcatcatccattactga

SEQ ID NO: 120045 - DNA, 368 bp, Zea Mays
cccgttggcaaagacacaattggcccaattgtagtcggacggtgaccgtgtgagcctcagaattatcccacctcgcttaacttgggaggaggaagccactttaaaagggagagccacccttcccccattggactagtcttttggggcgattgggcctttccctgagttgggtgtgcttgatgaactgttgggctccgggcaaccctaatttgttgggcctcgaccaaccccacctagctgggtgtatcatctggtatcaaagctagggcctattttaagaaggtgggaatgatgaggacatcatccactattacccgttggcaaagacgtaattggcccagttggcccaattgtagtcggacggtgac

SEQ ID NO: 120046 - DNA, 682 bp, Zea Mays
cgacaaccttaacagcctccgactccacttcccacacgaaagcgcccgcatcccacccgcgcaagtccacaatgaaggctgggcttcgcaccaatcgatcccccagggttagcatccagcgaggtataatctcgcccagagcccacccgtgcgccaaaggccacactctgcaagcgatgaactattccactaggtcacgtccactgctcagacgagctgcgtagcgaagggtctcctcgtcttgatcacccttcgctaccttaaactatggaaacaccacataacaatgtgagcacaagatagcagggggcaaactaggccacccttcgatgttgcatggcgccacataaaactagaactcccaccagttaccccacttatttttcgcacacggaacaatctcgataacttcagtcgaggtctttccagtcctcggcgtaaaggtgcatgacccaaactaagcaatcattccacctatcttccttttttgccagtgtagacaatactttttcgagaagacatcaacagatggttccccaccatatgaggacatagcccacacatacttcgccaacgccgtcatagcattcagtgtcaattgatgaatttgcacctcaaacctccatagatcttcaactacgaaccgatgtgctggcaaacgaagaccagcagcaaaaaaagc

SEQ ID NO: 120047 - DNA, 651 bp, Zea Mays
gagtccctctgctgcttgttctagcatccttaggtaccccgcaaacccctcgacccctttaattgaaccggaccgccagggatcaccgggaacgcgtaccattgtcctcatcgttcgcggttcacgtggacagagcttgatagcttaccaatcgtgaaattaagttaggggaatcgttcggggagggtttaatccggtgtacgccgctcgggagcaccggtcgttgcataaatccaccggcacaacctcaccagagttcatcctccgcgctgccgtcgtcgtggaccttcccctgcgaagaaatagaaaccggagggcttttctgcaaactgtcagcgactcagtgcaacagtgaccgaagccatctccagttagccaaaaacctgagggcgtttctgcaaagcctccaccgcaggtgcgggcacgcctcggtttcctgtgctgttggaccgcctgggctgaaaccggcccatcactgtttaatcttttcctttttctttttcagtgaagctttaggaaattatagaaaattgtagaaaaaccctaaaattgtcaaaccaatttttctagacttcttattttccatagtatttaataaaaatagtttcatgatttttagattaaataaggaattttgaggcatttaaacta

SEQ ID NO: 120048 - DNA, 479 bp, Zea Mays
agggactagtccatgccagatagagataagcaggaggtggttgcctaccattagcatgcattaaacagctttgctggccatcctacacaagtgtacccgcatccgcacatccagcgcgccgtccacaccacgccacactagttttacgctgcgtgacaggatagaaccacagtccacagcgaagagccaaggcatgtcccatggctacgacgaccccatgccccttcaacgctggctgcaactgtgtaaccgcgtgcagaggacatcagccacactgccacagcaaagcgtactagatctacggcaacggcaacccagtcatcttttgtttggagtcatcatcatcagatgagatgcagatgccggagaaagaagaaaagcgagcagcagctcgtttgcttaaaggtagaccgtgcagttgagtggtagattactgacaggcccaactttgcatcagtgaaagccagacatggcaagcg

SEQ ID NO: 120049 - DNA, 547 bp, Zea Mays
tagtttgtcaccatagtaagttgttgtgaagtttgacacctcctctagagtatgcctctgcaatggaagcctcgattttgcatttatttctacatttctttcgaatagtctttagacatctctcgattggatagcaccaacgtccctgcacgggcccccacattcgtgcctcatagaggagtgaagaatcaaatgctgcattggattgaagaagctgggtggaaatatcttctcaagcttacacagtaacacgggtgccaatctttccaagtctgcaaccacggtccgagataactcttttgcacaaagatgacggaacaaatagctcaattctaaaagcgctagccagacatgctctgggacatagcctcgaaccatcgcaggaagaatccgttcaatccatatgtgaaagtcatgactcttcatctcgcagagtagataagttcaccccctactcaggttagctgcatacccgtcagggaacatcaacatcttgatccactgaagtacttccttcctctaggccctgcttaggatgaaatcggcc

SEQ ID NO: 120050 - DNA, 856 bp, Zea Mays
taagcctaaagatgggttgtcagactgtcttaggtctgaaattcaggctgacagtgtgattgggcagtctttggacttagattcgaccataatccagtcagtgtttggcaatggttactatagtaagtttgtagatggatcattaggctaaaattttgctgcagagcattggtcttgttgccatggagatttgggaagaaattcgccctaaacattgactgtcaggctgactgaagaacaaacccatggtacagtaaactgaaatagatcgcagattcatcccccttcgccaccagtgaccatcgcgccgcgattcacgctggtcgctgtgatttgtgcgtcgtgacttgcggataactgtgggcgagtaaagatcttggcgcctggatcgactcgggctcggtcacagctaagctcgccgtacccacttgctcgtcgatcggtcagatagaccttgccgccattggccgattcccgccatgcgccacgtactaaagcacttgatcacgtcacagtgaatcacatcgtgcatgcccggtgatcgccggggagcttgccacggtaataggccacgaatcaccgtgccagtaaccttctttctttccggccgccagcacatcttcgcgaaattggacgccaccgccgtgggagcctataaattgccgaccccgcctgctccgctatgtaattgtgcaaccagtgaagcaacccgtgcctcgaatcatccactagaactccctaatttgggatttcccacaaatcaacctagaacaccgagcagtataacctcattgtggccagctcaattcaggtccgatcttaccctctactttcttgtttcagcacccttacttgc

SEQ ID NO: 120051 - DNA, 1046 bp, Zea Mays
atttgatataaaacatgaatacatctgggtttgaggtgaacaacggacacgtttaattctagaccaattgccttacatgccatatttgctcaccaaattgtttgtgttgttggtctcacattgtacatgttaaatgggggtcttaattttttggttgaatgttcgctttttactaatcacagtattagagatcaattccatatttcagaggggattgtacattgttagttgcttacctagaaggatacgtctattggctaatagagtttgatcggtattttgtatagttttttactctgtgtattcttttggtaatgttgtccaaatttatttcaggttaactttgattatgatgctacgcttttgataagctggcgggcaacgagaatgcatctcattcaaaatcatgcttgttacctttcctcccctctgtgtattggcagaagaaaaacctactcttttgtacatatcaactgcccgttgttaaaatcttttgccagatcgcatggctacaaaatgtgttctaggtattggtgtggctaaagtattttggcaacccagaaatgcattttattccacaactcatttatatgttaccactgttttatttattggctattgcgacaaattacaactgatatgcctcccattctgtctgtggtgctttggtgctcaacacaagcacttgttttctttgcagggccacttgcaatgtgtgatatttcatttgcagttcctctagagtggtggcccatgtcttagttaattagttactggacctgttgtgtcatggacagctcatgcgtgctttgtaaatatcatgaactctttggacccaaccctgagatgcgatgttggggatgactgatagctgaccacatttgacctatcctttacaaacataagtttggcttgcctacgaacgctaaagcgcccgatagggcactctttattctagtagaaagaatgttgcgctaccgtttttatatatagcttgtgcttcctttgtgttcaggtctatagtctttgggaattgggatggcatg

SEQ ID NO: 120052 - DNA, 498 bp, Zea Mays
gttgaattcaccgtacccacttggtcgcggctggccggaatgatcttcgccggcgttggccgcttaccgatcgtgcgccacgtgcctgggaggtttaacacgtcgtagtgaacccttgtagcaatcccgtccatcaccggtggctttgccacggtgaaagccacgatagcgctcgcgctagtgacttctcctctctccggccgccaacacaacttctcaaaattagccgccaccgctctcggacactataaattgatggtaccgctagctccgttgggttgtcacgaagccagtgcacccgctcgtacctcagatcgtctaccaccaagctctaatttgggatttcccccaatccactctccgctccgccgtgagccatcgcgtcgtggaccgccgtccctaggtttgttcataccctcctttctttcgttcccgcatccttgtgtgctacgggtgcttataggcccagtcaattgaactagaccaggttaaatcatt

SEQ ID NO: 120053 - DNA, 295 bp, Zea Mays
gttttctctagaatcgctgcaacccctcgggcaccggcgaaggcacaaaaacccccacggtcgctaaggatttcttcaaaagcttcaccctcttcaccgatccattcaatgactccttcgggatcgccacgaataaacttttgctccaatgagtatgcacccaccttggcaaagctgtcttttagtttcttggcgcaatccaaggatttctcatagcatctctccttggactcgtgaagctcctccacattcttttccagcatcgcacttgtccattcacttatctcctgctttg

SEQ ID NO: 120054 - DNA, 590 bp, Zea Mays
gaaaatggtcgattgggcggctctagtggacgatagaaggcaagagctggtgctttggatgcgcaatgacttagcggagctcactagggcagtaatttatagggtctatcggtggtggcgtccaattttgtgatgctgcgctggcggccggagagagagaagagtcaccggcggtgatctatcgtggcgattgcggggtaataagctacagcggtcactgggtaacgaccatgactcacatcgacgtggtaagatatccaaaggcgtggcgcgactgaggaaaacggcgatagccacgacaatgactgtgcggccacatcaccggcaagtggatgggtgacagagcggctatagggctctgagttcatccaaggtgaagatttttccattgtccatcataatctacgtcacagagggcacgaatcgcggcaccggcgcgaatccgagcgcgcgaatcaccggtagtgagggggatgaatctgaagatctttttgcgtactgtaccatggtcatcaccttcagtcgtcctgacagcccaaattgaggagcagttttctccaacttttatgtgatagcccctaaccctcctg

SEQ ID NO: 120055 - DNA, 901 bp, Zea Mays
gttgatttcacttctcatctgcctgcttgcagtatgtaactgaaattcccgctgcatctgctgcaggatgtagttatttagcaggtagtaactaatttccatttctgtggtggcggtggagagggagcacggcacttccattttatttctggcacgtctgcttggatgagatgagtttctggttgtcgtgcagagatgtatgctaatgaattctggcacgggaaggggaagccagttggatgacttgcgtagcagattttgtgagctcttttcatgatgatgcctgctgcagctttgatgtttttcccctgtattggttgatctattgtttgtggtccgtgttggttatatgtgcttgtctacaataggttacatgttattctctttttcttcgcatatgatcttgaggtgtttgcaattgattgtctagtgcccctgttatgatgttagctagtggtctatagttgtcttttctggtggttgtggtggcatttacttttccatcttatgctcatgttccccttttcaaagactttcatgttgcttcatttgatctcatgaaactttttttctaatgtgtcacttcgcagcatggaccattcccattatctttgttattgtcttctcgtactgcattgctagctttatttacaatagaaatgcatatggtatatattatgcccgtttacttatgttgcttgggttgggtagttctggttgacttagtgctacttcggtattcccatttaccgccaagaaatcctaaaatatgtatggtgcaatcgttaaatctgtgcatgattgtttatgagtgtatcattgttgggaaaaatgggcagaatttacaacaattgaaccctccaaaagttttctactgctctgtgctgagcaggttcccttt

SEQ ID NO: 120056 - DNA, 361 bp, Zea Mays
ggtgaacttatctactatgcgagtcttagggatgaagagtcatgacttccacatatggattgaacggattctttctgcgatggttcgaggctatgtccctgagcatgtctggctagcgctttaagatttgagctatttctttcgtcagctttgtgcaaaagagttatctcggaccatggttgcagacttggaaagattggcacccgtgttactgtgtaagcttgagaagatatttccaccttggttcttcaatccaatgcagcatatgattcttcatctcccctatgaggcacgaatggggggcgtgcagggacgttggtgctatccaatcgagagatgtctaaagactattcgaaagaaa

SEQ ID NO: 120057 - DNA, 517 bp, Zea Mays
agatggctatgagttaaatgagattagtcagaatctggtttggttgttttgcttctgaatggttttgataggttatgtaacctattatgtaggtcaagttgttatgtatagccaagttgatctaagtcaccaatttaggcctatgtgaattaggtgtatggccttatcctttgtactagcattaagtaactcactctagattagatcataatagattagatagaatctagattaggttggtatgactagattaaactagttaagatctgattaatttatttagggacaagtaggtagatgtgggtaggataagttatgatagttgaaaatcttgggtgcttataattttatgtcggtctatacagatttttcaacccaacgcataagtcaagtacttgtatatggctgagctggtatagggaaccagtttaggttaatcatgtttataggagtagggtctaatttatgccaccaacattatccaacttgcttaagcaacttacattagattctataa

SEQ ID NO: 120058 - DNA, 544 bp, Zea Mays
ttcttgaccaccccaccggtcctcaagccactacaccgacccacgactagttgggtagctgaagacctgctattgtacatctactgcacgactcacataatgagcactgcattggtagtcgaccgggcagaagaagggcatgcatacccaattcagcaccctatctacttcatcattgaagtcctcggaccctccaagataagataccctcaagtccagaagctactgtatgtggtactcctcactgcgtgaaagttgcgtcaatactttgacgatcacaaaatcatagtagtcacaggtttcccaataggagacatactccacaacaaagaagcagtgggaaggacagccaagttggcatgcaaactcgaagctcacgacatagagtttcgaccccacactgcaatcaagacccaggctctggtggatttcatatcaaaatggactgaacaccaggttcccgagaaccccgagtcgaccgaggcttggaagatgtacttcgacgggtcactgaaattgcaaggagcagggtctgggatccttt

SEQ ID NO: 120059 - DNA, 464 bp, Zea Mays
gtccttgttcatgctaagaaccatggtctcaaatgtgtttcacatttgcatctgtgtaatatggctctgcaatacccactcctttttccctatggtgaacatggattccatcttggcattaggtatgcggatgatgacgtcaacgaacgaacaatatacatgacgatgcttgagtttgttagataccacacacactataggttgtgtgatgcaaacccgaatacttgctatggtaggctcagcgatcagattggtgtcgatgcgtattccacagtcaaagcctctagattgcaatttatagctgaccaccagaaagatttgcgatacgaaatagtgcaaggtgtgtctgatgccattgataagggtttggttaatgctggaagctggatgatcgttcctttgtcgtttactggtggtagaaggtatcatgtgatgaactaccaagatgctatggcaatatgtag

SEQ ID NO: 120060 - DNA, 587 bp, Zea Mays
ctaggggtgtccatggcaagtaggagcttggctagggaaaagaaaaattgacctgtggggtcagatggcaccatggctaccctatcagggaagaaggtgagcgacagagcaatagaaagggaggatttagatgtgagaggcattgttcagtttatagggataggagaagaagaagggatgccattgatggccagtggaggtgaaggggaaatgaacaggaagggagtggaggggaagggaaggtgcatgggaagaagaaggcgtacgggtgcggaataggaaaagaggaggcacgatggaaaaatgaggtggtgtttagctgatggttggcctagttggcactacaaccacaccatggctagcacatgtgctcgagcgggctgctagtacgtgcaccagctcgtgcatagggtcgcgctcgcacattccattgccctagccatgcctttgcctagtcgcgcttgcgcactgaccatggctgcgagcctagccacatgcacgcctaggcaagtgtttgggcgactacactttagaggtggaagtttactttgttggggtccaatgggctaggtctcaacaaaagtttt

SEQ ID NO: 120061 - DNA, 297 bp, Zea Mays
tcacctcatacagatcgtgcttattgtctcccatgttttgttttttcaaagaaaccaattggaaagtatggatcagatacattcacagtcaaggggtttaacaattagaaaaaggttaatgaaggaaaggaatgtgcttttctaaaacacatgggaaattttggttctgcccataactattctgttggctgtttcaataatctgaaaaacagtatggctcatattgacaaggtgatggttaaagaaaatgagaaattagttgcagaagcaagactaaggcttacgtctaccatcaat

SEQ ID NO: 120062 - DNA, 422 bp, Zea Mays
gaagcgttagctgctcgaaaattacattttgatcaagcacataatcacaacacataagcagaagtcactcttttgtaatttttgatgtaattggagctataataatccatttgcggagcctcgggtgaatcatgcatgacctaggaggtcggggagcgtgttttgcgttgtgattccctggtactcaggtatcttggtatgattagggacataatctaggtaaccctaattatggtatccgacagtcggcaacaagctctgcgacaaggcattgtcgccgtgcaggccacggtttcctgctggtcaggcctcggctacacagaaattcaaatttcagatgagacgagccggaggaagctgaatggttgggttgagccgagacgaaaaggtggttgtgggctctgtttctttgatattggtgc

SEQ ID NO: 120063 - DNA, 533 bp, Zea Mays
gtttaccactgcaccggttttggcccaaccagatattgaaaagccatttgatgtttattgtgacgcatcaggcagtggacttggatgtgtcctgatgcaagaaggatgagtaatagcttatgtttcaaggcaactacgccgacatgaggaacattatcacacacatgatttggaattggcgacaatagtttatgcccttaagatttggcgtcattatctgctggggaatatatgtcacttatatacagatcacaagagtttgaagtatatcttcacccagtcagagctaaatgagacaaagtggctcgagctaatcaaagattatgacttggagattcattatcacccaggaaaggctaatgtggtggcagatgctttaagtcgtaaagactcttatcattgtctcacagtaaggacacctcacaccactttatgtcaagaaatggaaaagttaaatccggggatagtacaacaaggaactttccacatttgaagcttgagtcaattatcctacaaaggattattgatgctca

SEQ ID NO: 120064 - DNA, 492 bp, Zea Mays
caacaacggacagccgagattgaaaccattccatctgaaccggtacacaaccgcagccgtccgatccctagcgaatgcaccggatttaaattaactatattgaatcgcgctcgccagatccgaaaacagacgtgccggatcaactctgcgaaccggtactcagtgtgaccccttggattcaaatccgacgacctagattttaaaacacacagatctcaccgtagccgcaggatatgagatctacgattcattttccccacgcgcgaggggatacagaagatctaatccaaaccgcataatgtcgatctaacgactagaggctttccccccactcccctttctcctaccggcgtcaactcgatggcgcctgactgaggcacggcggcgccattacctcggacccgaatcccatcaccctgtgcccgaagctcaaatctactaggtgcaacaccatcacagggctgaagcgaatacagagcggggcatactcac

SEQ ID NO: 120065 - DNA, 897 bp, Zea Mays
gccaggccttcgtttgagcttggtatttgttgagggcctgcagggcgaagacgcggtctccatcgatgaggtctttggacgttggctcgtctacgtaggggacggctgatgcacttgttcgaggtgacccgtgctttatttcttatggagtcatggcctccgatccatacagtagacgaaaaggagtgaatcccgtcgtccggcattcggtcgtgctcagcgcctagactgcttcaggtagaaggtcggcccatttacccttgctgtcgtcgagtagccttttcttgatagcagtgaaaatcttgtcgttggcgcgctcgacgacaccgttagattgcgggtgatatactgaggcgaaggcaagcttggtgccgatggagaagcagaagtccctgaagtcctagctatcaaactatttgccattgtcgactgtgagctcggacgggacttcgaaccggcaaacaatgttttgctagaagaatttctgggcagtcttcgacgttactgtggatactacccttgcctcgatccacttggtaaaatacttcgacggcgacgaaagtgaacttgaggttcccatgagtcgtgggtagtggcccgccaatatccagcccccagcgttgcagtggccatgtgtgggcaatcagctttgtgaattgcgaagggttgcccgaacggggagaaaacttctggtaggcttcgcacgacctcgtgactcggtttgcggcgcagattatagagggccagtagaacccttgacggatcaccttggcagtgagggccctaggccccgagttagagccacaagttccgctgtggacttcgcgcaggatgtggatgccttcggtttcggtgatgcatttaagcattggttgactgaccccttcttgtatagtt

SEQ ID NO: 120066 - DNA, 321 bp, Zea Mays
cgaggacgggcgcagcagccacgcaggttttactgcctgtctcacggcaaagattgcgcgcacccaatgagggattgcccggaaacgaaggccaccagggacaggatgtctcgggcacaacccgccgacaacccaagagttgtcgcgcacacatatcaacaccacccccacaaccatacaaccacgaccccgcccaacatctacctaaccacgcataccaacaccactaggaggtacaagttgtaccaccccctcttccgcctccgcacccgcatcagccaaacatccaccaccaaaatcaccccaagcaccaaaacagga

SEQ ID NO: 120067 - DNA, 550 bp, Zea Mays
cttgcgctagtgaggagcagatctggagcagcagttgagcagcgtcattgcctttgaggtcgaggtagagagggaagactggaggagccaaagcactatagcaccaatgcgtctatgacttggcaccgtcgccttcgaggtgggtgtatcgagagggaggacaagaggagtagagtagagaaccataggtcggtggaggagccggagcgacaatcatcggacaaaagagcactagtgcgtgcgaaaggaccaaggacagaggcacggagcaccaaaagcttcgcaagacgctaagagtagagagatcgagaggagaggcatgagaaaaaggagcgagcggctcggcatgttacggtttatgtttagtggctaggaagttgggaaccgggggaggtgggttgggcggctaggcctttgtgccctcggcctctacatgtatgcctatattggtccgagtcagttataaggcatagttaatagggttaattgtatacatgccactcaaattgggtagtgcccaactagctcaataggctgagatcactatcaa

SEQ ID NO: 120068 - DNA, 489 bp, Zea Mays
cacttgccccagtgattggctaagcatgtttggatgtctctctcgtaagtcgctccagcattcttgaggccaaacaacatggaggtatagcatactctaaacggagtgatgaaagctgtcttttcctcatcttcttttgccaagctgatctgatgatatccggagtagcagtctaggaaggagagcatagaacagccagcagtcgagtcaactacctgatctattctagggagcccgaagggattcttcggacaatgcttgttgagatcagtatagtcgacgcacatgcgccaatcaactttattctttttagtacaagaacaagatttgcaagccgctcaaggtgcagtacttccctaataaaccctgctgacactaagtgggctaactcagcgcgaatagcttcccttttgtcaggtgtgaagcgacgtagtttctgtcgaatcggccttgcttgaggatacaccttcaatttgtgctcgtccagtt

SEQ ID NO: 120069 - DNA, 910 bp, Zea Mays
ctaaaattgaatgaacaaatttgttggaaacagaaatttatagaaatcatgaatgaaaagttttactacaagcaacataaaaggtctattaacctcttgagtttgtgtagcagcatacaaattattcgataaaatggtagtgcacaacaattacatatattatcattgacatcaatatcacataaatttgttgccaacaaccaatcttcctaactatagtttcataattgtgtttagaaaccagattaatataataaagtccctctgttcctatttctaacttcctcaaagaaaagaattatcagtcacacgacatggccagccagttgttcttattgtctttgagaccatgtatcttgtgctgttgtagcttctcgagaagaatgctcttgatttcttcaccgtgaatgcaccaagcccgccaataccttgggaacctcaacatccaataaaccaacaactgatcaaacaaaacatcgatgacgcgcactgtgatcaactgatatataaaaaacctcaaagttccagggttcatgagacaagtgcacacttgaccttagagaaacgaacattggccccagtcctcaaaaacgaacataacataaccaaacacacctttacatttcaagcacaataagtgcaaaaataagaaaaaaagacacaaattgagtcccatacacctgttgggggtcttcttctccgccgaaggtcctcaaaacatagacaccatcggcaaagttgtcctgaagatttccttctttctgccgaaggtcctcaaaacatagacaccatcgacaaagttgtcctgaagatttccttctttctgccgaaggtcctcaagatggagacctcacttaaaagcaatgatggcaagtgctaaagttgccatcagcttcggtttagaccaagc

SEQ ID NO: 120070 - DNA, 608 bp, Zea Mays
ggtgagtgtttttcttgggaggcatcgtgggtgttgtctacgtcacacgaacggtggacgcaaaatgttgggcacaaacacacgtaaatgcgttgtcaggtggacccaaacactcagaaagcatgtgacatcttaggtgcacgacaagacagatgtaggaaactttagattctcgttatgtgtgtcccgtcccgctatagcacaggggtatttataggcatgtccaggggtacatggtccaaagtatgaccctgcccctggataccgaccacatccaggggatatccagtgtaatggagtaattacagtgttgtctatacaataaacggcacacaccagatagtgcacccgcacactacgctgacttgtggacccctagtgacgtcttctagtggaccggtggcatgcaatgctgatttgtggtctttgtcccaagactcttcacgtcatcgctcccttcgttgtgccttaccagatgatgatccttcagtcagtgtagccgtgaaagccttagcctctttcgaccccgtgtggtcatctaatcagaggccccctcgctagtggactcctcgtcagagaatgctgcctgagtcaaaggccccttcgcc

SEQ ID NO: 120071 - DNA, 2277 bp, Zea Mays
ttttctcgcggcggccaagctgaatcccaacgatggcgtccccttccgcttccttggccaccactatgcgcgcggcggtgacaatcaacgagcggtcaagtgctatcaccgtgccgtgaccctcaaccctgacgactctgaggctggtgtatgtgtgggaatatgtatattcatatgcccaatgtattcgtcggtttgcttgtgctggattctaatgtgttttcccctttatttctgggatatggcgcaggacacactctgtggcttgctagatgttgaagggaaggagagcttggagcttgctgtctgcaaggaggcagctggcaagtcaccgcgtgcgttctgggcttttcggagacttggctatttacaggtaacttgtatagcaatttcttgaatggactatttgttgaagcaagaatgccaatagtatgtgtcattaacagaggtcctgattggatatgttatgttaatgaatcttacggcttcattttgtatcgggtcagaatccacaggtccaaacctgtccgagcctaaacccaatgctattggttaagggaaacattggtttgcagcaattagctagatttaacatggttatgcagaatgatgaaaatactttaaatttaacctaatctaaccccttcaatatttaattttttatagcaatctcatccatttgtcatcgatgtttcttgtactttatacagaggcagtgttcacttccattaattttggcattgatgtcatgaccccacaaaacatttatgttaagttgttaatgttagtgacttttaatgattcaattctgtggctatccttttaaattagctgacagatgaaattagaatgtgcaggataacatgactcagttggtcattcactattagtatagcattattaagttaaattctggattgtactggtcttggaaatatttgagagctttatgcgtggttctagcctgagcaacatctcttatgataacttctacttgagaagttgatcgcttattttctttaaaaattggtaagggttttctgttggaaggagatactgctgctaatattttaggtgtgcaattttcttttgtttgtgataaggcattacaaaatttgtatataatgtgtattgacatgagttggtgaaaggttaggttcatcagaggaaatggtcagagggtatacaaagccttcagcatggaatacgaggttacccaacatgtgcagatttatgggaggtgggtgctcccccccctccagtttgctcttgccaaggtttcttagtgtaacttatatgtgatgtgtcttcaagttatcaattattgaatttagacattccatatttatggctacaggcacttggtctggcataccaccgtttgggcatgttcaccgcagcagtaaaggtttgctgttttcagttgtgagcatccttaataactgttgcagtgcgctgtattgagccttctcaatgtgcttaattcagtttttgccggcagtcatatggacgagctattgaacttgatagttccagggtctttgcattgatagaaagtggaaacatccagttaatgcttggttactatagaaaggtaggaagttttctgcttgcttctttaactatctatcgttctgctggtatacatgatttaatcagtcaatgctaatctaacggtgaatccattcaaaaatctatgtagcactgatctctttcattgttaaaactatttaatttctctcgaaatacacaacgccagggagtggagcagtttcgttctgctttggaaatggctccatgtaatcattcagcatactttggccttgcttctgcattgcttgcatgggcaaggaattgtgtaactactggggcctttggttgggctgctagcctgttgaaggtactttgatctgatagtagctttttaaatatcattgaataaaccatagctgtatagctttaccatatagtttgttttctcataggaagcttcagaagcttccagaatttgtacttctttgactggaaacctttcatgcgtctggaaattgcatggagatgttcaggtatttgatatttcatcatttaagtctccttgtcatctacttataagtgaagagttgcaatattatattctactatataccttgcctgtttggtgtcagctcacacttgcgagatgctttccatgggtggatgggaaaatcaaaagggtcatggatgcacagatgttcaaaaattctgttcaagagtggagaaatacatgtttgttagcag

SEQ ID NO: 120072 - DNA, 321 bp, Zea Mays
cagtaataggacaccaatccaatgcaccagtaaccttccgctccttcagccgccgcatgtcatcgctcaaattcccggccaccgctcttgcctagtataaattaaaaccaccgtgagctctgtaggatcatcacgcacccaaccaccaagtattgtcctcagtcgatcaccagggagcttcaattttggatttcccccaatctgctcaagaacaccgctatagtttcaacctcaccgcggccagctcaattcaggtctgctcataccttctgctccctcgtttgagtgttcttatgtacccatgatgctcattgacccccc

SEQ ID NO: 120073 - DNA, 670 bp, Zea Mays
aaagaggtaatcttctgggacttagtcaattgaattttactataaatgtgtttgtctaactcacaagaaggtcttcccaaaagttgaagacgaatggaaaagaaagcgaaggaaagcacacaagtgtgttgctgtctgggtagcaccggacaatttggtgtcctgggcggccaactgtccagcctcgagtgtttcagctaaaactgttggatagtctaggcccatgcgagggacagtccggggccggtcaccggacagtctagtggtcctcggaggcaacgactagttgacacgttagcagcgccaacgggaagattagagcaccggacagttcggaacccacagaagcagaagtgaccactcacggattcggtgactgttggacagagacacaccggacagtccagtgcccccacagatttggttgtttttttcctggattgagatcattgcaaggaaaggggcaatggctaggggctcatttggggctataaaaggacccctagacacccttttggagaacacaagtgcagcaaacaagtctatacatcaagtgatcatattctctctctctctatcttttgtgtatctctatagtttgtgtaggggcaatggctaggggctctatgctgtgtgatgtctctttgccgttattgtttttatacttgca

SEQ ID NO: 120074 - DNA, 344 bp, Zea Mays
acccaaatcaaggaaaggggcccaaagattggcagaaaggtcggcatctctaaacatgttcatatctagattggccaagcgaagcctaccgttcttaaaattcctaacattagccaaagtattccaatgggggccagcccagcagaaggccttcgaagagctgaagtaatatttgattcatctcacaaccttatcaccaccgacgctaggggctccactattattatacgtctctgcctctcactctattgtaagtgcaacctcgttacaagagaagataaatgagagttccaagaaacaagtgctaggctacttcatctcaaaggtactcagtccatccaaac

SEQ ID NO: 120075 - DNA, 608 bp, Zea Mays
gaaatcgaagaactctgagtttgtgaaattggatcccaggtcggttatgatgctattcgatattccaaacctgaatattatgtcttgtatgaattccactgccttagctgaagttagagaagcaatgggtttgaattctatccatttagtgaatttgtcgatggcaaccagtacatgagtgtatcctccttgagctttcttgaaaggtccaatcatattcaatccccagcatgcgaacgaccaagttacgggtatggtttgcagttgttgcgctggtagatgttgctgttttgacaagtactggcaggcttcgcacctctggactaactcggctgcatcactctttgctgttggccagtagaaacccgacctgaagaccttcccaaccagggtcctggatgctgcgtgtatcccgcattgcccagcatgaacctcttctagcagttcctttccggtggctgagagaatgcatttcatgaggattcctgatgcgccccttctgtatagcgtttctccaatgagagtataatgagctgactgccttgcaatccgttctgctgcatttttgtcatctggttcctcctcattttttatgtacttgataatcg

SEQ ID NO: 120076 - DNA, 801 bp, Zea Mays
gaccggtcgggttcgaccaagaaggccaggggtgcaccgggaaagacgaggcgtggagggggtacgagaagagagaggagcactagtgcggcaccggccaacttggttggagggagtgcaacggttgggtcgcggatccggttaaggtcgcgtcagcaggggagagtgcagtgtgctacatactctgctcgagtgtcgtccgaggacacgggggaggacgaaaagcatatgcaggagcagacaagagtggaagatgtggagttcatggaggtggatgatgattatgacgacgtcaacgtggctggcaatgtcatagatcaagagagtgagcaggacgaggctctggaaggaaggagcagtcaggatagccatggctatagcgaggacaaggagggcaaagactctgctgctttgagtgataatgaggaggatgtggggggaaaggaattgttggaagaggaggaggaaggtgccgatcaagaagaaagtcatatcatctacgatggtgaaggagaacaagaagaggacgcatctgaggaggaaacacaggaattggatgaaacaggggaggcgcagccattcaatcctagcaacaccatggcaggtagcactatgaggtcaggaggcgatggcaagcaagtctttaggaggagggtttttgagggcatatatttgcctgagaatccacacaggactgttggcaagggcatccaagggcggacgcgatcacagcgaaaatgcaaggacaagaaactgctgaaacgcggaactttcagtaaaccttacaacattgatattcca

SEQ ID NO: 120077 - DNA, 303 bp, Zea Mays
gcgcgatataggagacgacaccgtaggggctacgtcgcccggaagcaagaggccgaactccaccccgacagaatataagttctcattgtaaagtctacccttgagttataaaagggcaagacaacccacatcttcaaaacacaacgacacacaagcactcaactgtaacatactccaaacaatattatgatcagcactacactagactatggcgcaagcctgaaccagtattacctctgtctcggaaccaccttcgagccctccgtggctcaccattcggaaagagtccatgctagctccctg

SEQ ID NO: 120078 - DNA, 335 bp, Zea Mays
cccacttgagccggatcatctccggcagtaccctcgggggctgggcagtggcttgcgtttcccacccgagccgagtcatccccggcaacatcctcgggggttgggcaagtgtcaacaccatccttgaggaccaagttctccgtagcagccgcctctaaggctgagggtccttcaattacttccatgggagcaagacaatccaagtcagtttcctgaccctcaagaccacgctctaaggtcgacgaggcgcgggacgctgcccgggatgatcccaacccggcgtcgagcacatcagcacaaacctccatcacaccatcatccgctggctctgacag

SEQ ID NO: 120079 - DNA, 342 bp, Zea Mays
actccggtgactcaccgtcgaacccctttgctttacggctttgggagataggttcaccggcgatggccaactgctggtcttgtgccgcgtgctcgggtacccccgtcgcgtcaccgtgactctctatagatgtcttatcgtcgccggtgaagttgccacgacggtcgacacaaattcgcgacgtcggtattcttccttatctctggccgcctgcgttgttcgaccaaattgtgcgccaccgtcgaagctccctataaattgaaggccgggactgctgcgctaggtcatcgtgaagccgacgcacccgttcttcccctcaattacccaccgtagccggaaaat

SEQ ID NO: 120080 - DNA, 469 bp, Zea Mays
caccggaacgtgcggttgctctgtaaatcgccgccataacccaccctcaccgtcgacctgctcttcggctcgtattctgcccaaaccaaagagtgtgcataactcctagtgaacccgtgaatccttcctcagcctcaatttggtcgtccccgccgtcgtttggtcggaacgcgttcgttcctataaccatccgcctgtcaccatgaaccagttgtttcagagctccaattcaaaaattgagtgaggggaaacctcgggttaggtcggaatctggagtcagtcgtcggtgagcaccaatccttgcgtgctccacccagtccagctcgtcggagcatggctcccgcgcggttcgccgtcggggatcagtcgacgtaaagaaaaagaacttcaaggacctctgtgcaaatcgtcaaagactcagtaaaacagtaactgaactcatttccaattagccaggaccccgagtccc

SEQ ID NO: 120081 - DNA, 512 bp, Zea Mays
gggcgacacaagctatcaccaccatgggaaggaccgttcatcgtagcagaggtcacacagccgggatcatatcgacttactcagatggacggcacagaagtggggaatttgtggaacatagaacacctcagaaagttctacccttagcgatgcctcaaaaactcttgaagaaaagttgtactctataaccagaagatttcatcatcaataaagctttcattttccaaaggcgttcaaactcttgattgacaactgacttcgattgggcttgactcgaaatcggcatgacttgacttagggtgatcactatgccctactaacggagcaatcggcttaagtcggaaatgccttaagtcggtgtgacatgctcacgcttacttgacttagggtgatcattatgccctacaaacaaagcaatcggcttaagtcagaaatgccttaagtcggtgcgacatgctcacgcttacttgaccctaaggtgatcactatgccctactaatagagtaattggc

SEQ ID NO: 120082 - DNA, 686 bp, Zea Mays
gaggtgctaaaaatgagatgaaaatgatggggttgcccctaggccttatatacacgaccgtggggcactccctacacacacgctgatcacactcttccagcttatcttctagctaatagagaacatactttgcttatcttaaggaaaacccggtggcttcgttttgatctatctctggcgtttgagggcctctggcgcgggaaagacaaacaacttcctcaagattatgcctaatccgtgaacgatccgagcgcgagcccatcaccttcttggatcatcccatttcaactgtagtgtttgcctggcccacaatgtgatgaccttacatggtgactggtttgtggccgacgcaagggttttcaccttctagtgaatcttggggatatctgtcccccatagaacccgcagtggttccctttcctcgactcctctgcccgatccgtgctcaacctctcccctgcgcagattagagctcgccaccaccatgattcctagtcgtacggccaaccaaagccccctcgcgccgtgccaagctgcccctcgcgtcgtctctgtgtaagtgacctttccccacccctcttcagcaccaattctgccttacaagggggaatttcggctcaccggagtcgcccctcatcggaccaccgtgtcttcacggcgtccggccactgcagtccctccctgag

SEQ ID NO: 120083 - DNA, 362 bp, Zea Mays
cacacataagcctgtgacttgcccttcacactagcaactcagtcctcgaagccaagccatgtattcatatgcaatgaactcctttctcacactagttgagcatatcaatataaccaagccacttcaccaccatggctcaaatagctcacactagtgtgcctgtggtaatcacctgtgtatctcaacataaacacttattagtccacctaagttgtcaaccaatcaccaaaaccaaacaaggtccttgcaatctccccctttttggtaattgatgacaactctacaaagatatgttgtttccgttctttttccaagctagctcttcacacaagtgtaaattgctagtttggtttggtttttat

SEQ ID NO: 120084 - DNA, 330 bp, Zea Mays
ctgaaccatatgtaaaacagccatgtattcaaatagaaattgaactgaaccatatatatgcaaaacaacaatgtgctaaattgttggtctcaaacaggaagaaggcaaactgaaccatatatatgcaaaacaatattttgcagtgaagtactattactatgagatcagaaatgcttttcaagccatataatcatagtgctggctgaacacttatacaatgatttgtatcaacgactcctgtgatttgacaaacatggacacttacccaatcttaaaacagtaaataccctggaagcaatgacacatctatttgagataaaaaccaaactt

SEQ ID NO: 120085 - DNA, 780 bp, Zea Mays
aaaagcttcgccattatatgttagaacatacagtacaacttgtttcgagagcagacccgctcagatatattttaagcaaaatgacattatcgggtaggttagctaagtgggtgatgttactctcacagtttgacattgtgtttgtgcctcagaaggccattaaaggacaaggtttggccaatttcttagctgcacaccctatccctgatgattttcccattgacgatgatttgcctgatgaagaggtttttaccattgagatacctgatcatatatggcagatgtatttcgatgacgcaagtcaaaaatcaggtgcaggtgctggggtcatctttgtgactcctgaagaaggaatcattccatactccttcacattaacctcagcggtttcgaataatgccgccgaatatgaggctctcatcattggcctcaaaatagcccttggtatgggtataagcatactccatgtctacggagattctcaattaatagttaatcaattattgggagtatatactattaaaaaacaaggtcttataccatattttagaaaagcaaaaatgcttaaatccatgtttgctgatttaaaagttcagcatgttgtacgaaataaaaatgaaaaggcagatgcactagccactctagctgctagcatgtctctaaatccacatgacacaatggatgtacatgtggaggaacgtagagtccttcctatattggaagaggaagaagacatatcatccatctttgcaacaaatatagaaacttgtgagattgaga

SEQ ID NO: 120086 - DNA, 517 bp, Zea Mays
gagcgggtggaggaaggacatacatatccagtaccgcacccgatctacttcatcagcgaagttctgggaccctctaaaaagaaatatgcccaagttcaaaaactattgtacgcggtacttctaaccactcgcaagctccgtcactactttgacgaccgcaaagtcatagtagtcatcgggtttccaatagggatatccttcccaacaaagaagccttcgaaagaatatccaagtgggcctgcgagctgggagctcatgacatagagtttcggcctcgcacagcagtaaagactcaagcactagttgacttcgtatcagaatggactgagcatcaggttccatacaacccagaggctactgaagtatggcgaatgtatttcgatggcttgttgaaactacagggtgcaggcgcagggatcctcttcattgctccaggaggtgaacaactcaagtatgcacttcagctattattctcagcatcaaataatgcagcagaatatgaagcactgatccacgg

SEQ ID NO: 120087 - DNA, 397 bp, Zea Mays
tgtatgggtgactcatggcaatgaagtgtgcatatttagagaaccgatcaaccactgtcaatattaccgattttccatggacctttggcagaccctcaatgaagtccattgcaatatctgcccatacttgtcgtggtacttctaaaggctgaagcaggcctgctggttgaagagcctcggttttattcttttggcagatgacacaggagcgcacccaatcctttactagtgccctgtctctatgcatgaagaagtctgatctgcctatgtaatgtcttttgtactccacaatgtcctgcagaatttgcggcctctagtattgctggaatgagtgtggaggaggctggtacaagcacccggttgccatgcattattagtccctcctgtgtatgccatg

SEQ ID NO: 120088 - DNA, 935 bp, Zea Mays
cagcagcaggcgcagtaccaacaacagcagcagccggcgcagtaccagcccatggtgggttctccgctctgggaccagaattctctggcctccacgttcagcaccgtcaccctcactctgtcggtgaacaacgactggtaccttgatacaggtgcctcttcccacatgacccccatgatggtaccctctctcattcctcaacccctcggtatccctctcccacctccattgttgttggtaatggttcgctcctgcctatcaccgccaccggctcgacgcaccttagctctcttgttctaaataatgttcttatttcgcctcagcttatcaagaatcttatttctatttgccaattcactattgataacaattgttctgtggagtttgacccgtatggttgttctgtgaaggatcttctctcgcggaacgtgatcatcaggtgcaatagctccggtccgctctacccgctgcagctgcccgtcgttcactcccttgatgcctgctccacgtcatcctcccgtggcaccatcgcctcggccacccgggtcgcgaggccctctccaaactcacttcagctattcctggttgtaataaaagtttggagtccttgtgccatgcgtgtcagctaggacgacatgttcgtcttccttttaatccttcagtgtctcgagcgtcaaacaactttgatcttatttattgtgacttacgggcatctcccattgttagtatctctggttacaaatattacttagttgttcttgatgactgctcacatcacctatggacgtttcctttacggcttaaatctgacatgttttccaccctgtctaactttttcgcctatgtgtctacccagttcggcgcatgcatcaaggctgtctagagtgacaacggccgggagttcgacaactctagcgcgcacaccttcttcctca

SEQ ID NO: 120089 - DNA, 677 bp, Zea Mays
ccactgggggctactgctagaaatatgataaagctctaaggattcatgggggtgacgtgacagggcgtccgccgcaccattttcaattcctttcttgtataatattttgtattggagacccaagagtttggtgaaaactttttgctgccacggcgtattaagcttttgctttgtcaagtgtgagagactatgctgatcagtgtaaattatgaactcatcgtgcaggaggtagggtctccagtggtcgacagccatcagaatagctaggtactccttttcataggtcgataatcctctattctttggacccagagctttactgacaaaagagagagggtggctgttctgactgagaaccgcaccaatgcctgatcccgacgcatcagtttcaatggcaaacggggacgagaagtcaggcagttgcaagactggggcagaggacagtgctgtcttgagtgtacgaaaagcatgatcatggtcttgagtccatacaaaatgtgtgttcttcttcagtaactgagttaggggtttagagatcaccgcgaagtgtcatacaaatttccggtaatatcccgcgaggccgagaaatccccgcaactctcgacagtttgcaggtactggccatgaggtaacggcgtccacttttgagggatctgttgccacccctcgcgctgaaa

SEQ ID NO: 120090 - DNA, 297 bp, Zea Mays
gatatccgaggaggagaagatgtatgaggagaagaaggttgcagacccttttattgctgggttttacgaatccatggcaaaaacaaatacagagaaaatcacaaaggagataatggcagatttatctaaagattctgatgacagtgatgactttgatgtagaaagtggagatgaagattctgaggaccgaccttggcgaccaagccataccatcttcggaaagtcgactattaagcaaagtcatattgatgctatgagaggaagatactttcgtgacatgtctattgtgagggttgg

SEQ ID NO: 120091 - DNA, 647 bp, Zea Mays
agatcgaccggcacttgaaaaaactcattcagactccaaacaaggcaaactagtagtcgatcgaaatcgtctcaacgatatctatgcatctacggtctccgatcatcagtaggacacaccatattagaattttaaacatggtttggtttttagggtattatacccgacgtgaacatccatggaagtatgagaaggagaacccgctcggacaccctcgggggctgggtcatagctcgcgctgcccacccgagccggatcattaccggcaacaccctcgggggctgggtaaacacaagtgccatccctagggatcgagttctctgcagcagccacctctaaggctgaaggaatttcagccacttccatgggaacggaacaatctagattagcctcttgactcttaaaacagcgctccaaggtcgatgaggcatgagacgctgctcgggataactctaatccgacagcaggcacatcagcacaaatttccatcatcccaccatctgccagctccgacaacagatcttcagggaccatatcttcgagagtctgatcaaaatttgccagagacaattcttgcagaccaacgagagcagacaaagctggagaaggaacaccactactctccccactagctatgtagcgtcggc

SEQ ID NO: 120092 - DNA, 702 bp, Zea Mays
cctccacttgagtgtagccttgggcaaccaaccgtgctttgtttcttgtaacaacgccatgttcatcttgtttgttcctaaagacccattttgtcccaatcacattttgcttgggtctttgaaccaaggaccagacttcaccggaagttgtccaactcctcttgcatggcaattatccaatccggatcacccagcgcttcttcaaccttaagtggctcaagagaggagacaaacgagtaaaattcacaaaaattgctaaacgggatcgagttgttacccctctcctgatgctacctaggatgttgtccaccggatgatctctttgaatggtatgatggactcgaggatggggcagtgatggttgtctttgaatttgctcctcctcctcatccacttgatcaagaggcacttcaccatcaacacttttatgttcatcttctaccacggttggcatcctttggggttgatgaccttcatcaagacttggatgacttgaggttgatgggtttgcttgggtggaggatttatcacccaccacctttgcgcccacatcaaaaacctcattagtcatccataaagttcctaactcatcatccttttcttgaggtctcacttcacctattgcaagcttctttatggcctcacaaggtggttcttcatttcttgcaatgtcaatagaaacatgcccttgcgagccattag

SEQ ID NO: 120093 - DNA, 725 bp, Zea Mays
ctcgcaatattgcccattattgaaaaataatattgctcattaatattagtgttgttcaacaaaattgtttccccagaaatggatcttccaaatttatggttcatctgagtcttagctgcgagatggcagatgagacaaacagtgttagtgttccgtgtgttttaagttgctaatccatcaacccctgaaatgcataatccttattctcgtccaattccacaccatgcatttgtaactatgtaggcaccccaatttccccagtttcctaaaaaatttggagaaagcatgttcattaactgagaatttaggtaacaggaaatatttgtgcaagtcaagaaatatggccttcgcttctagtacagttaggaagcaacaaaactgttgttagagaaggctttagtgtaattgctactgaatatataattgaagagtagcctttgtagcatggatgctagtttgttgtcagattcaatcattcaattgccatttccatatcatttctgcctttaattaactggcacttttgtttgcacaccactgcaacttagtatcttctaaaatcaattattgacacttcatactttttacttgtttcatactaagatccatgctattacagaacatgtatgcatggttttgcactatacatggttacagaaattagtgttagtaaatctggagattctggagatagtttgatcgcacataattactacagtggttgc

SEQ ID NO: 120094 - DNA, 472 bp, Zea Mays
gtaccgatgtacaagatcatcagtcccacgacaatggaatgagaaaagtgctcatggtctaaaatgaagatgtgatgccaatgaaacttactgtaattggtatgtgccaaagggatacacgcaagagaaactatctgcaggtgatctcctggctgacttaatgggatcaaattggggctagattgagcatcaggcacagttgacacgtcatccacaacacgattatagtcttcagggggacggtctactacaacccgccacaccacaaccttcatgagttgcaactgggtcttcatagacgaagtaacataattctcctagtctagttgagaatcaatcggaatgactcgtcttatgacatttggtggatgaccaatgttaagcactctgtcaaccgcaatgtcatcatcttcatggtaacctagcttttgtttagcctttgtaaacacatcactcaaggagggtctaccaa

SEQ ID NO: 120095 - DNA, 463 bp, Zea Mays
gccgacaatatgtgtatgcaacaaagaggaccttgttgccttcctttgtctatcgttggaaaaatacttatatttgggtcaattgaattcgttaagttgtctttgccaccatagttgggatattcaagcttctcgtagtaagtaaagatgtcaacttctataacaagtggactaaggtctaaggatggatgaggtcgtaaaacctgccatgttgaggcttacctaatgtggcccaaagttgaatcccctttgcaattgccacaaagttgtaattatcatgtcaaagtaagtttgtagcgagatacattgtggtgtagtgcggtagaagattaagaatgacctatgctacgaagatcattgtgacttgatgatgatgccgatctttgtgacataaatgtaggtcatcccattttggttaagggactatcaacctttctccgaagtctccatgcattaaacaagc

SEQ ID NO: 120096 - DNA, 389 bp, Zea Mays
agtggtcacgtggtgtggttggatgtgacaaatagattggaagtgtggggtttgtcgaagcactgtgatgtcgaacgtgtatatcgaagtgcattgtagtggtaattgcgtctagttaatcggtagtgtctcgagtgcacgccataatatggttgtatgcgagacggggttatgcgcatgatgagtttagtaaaaatccctcggtgtcactggcgttaagttgaggtttatttgtgcgtggaaagtaataatgtatttaatacttagaactcttagtcgatggtagaaattgtctcggcttaagtagaggggtggtgacatgccaaggtagtcatcatttcctctatgtttataagtcgagtcgagtcgatgcgcattatgtgtttgtt

SEQ ID NO: 120097 - DNA, 544 bp, Zea Mays
gagaaaatatagaagacataatcttttagagtatgttgttaaggatagagattgttggagacaacctaagcttgccagcgtggcacacacacggtccgagggtggtgaaaggcctctggtgctcctcggctcaattcgaaaagatcgttggaccataacggccggaactgctcccttcctcgtcctcgttcctcctttgcatctatctgagaatggctaagaaggcacatcaatgagcaggaaaactattttgtgcattgaaataacatgttctgaattctgtgtttttaaataaatggccataaatgcagaagttagagaaataagcccacatttaaagaaggcaaacaaaaatgcccataattcatcaaatcatgcgcataacacataatgcgaacacaagtttgatttgtcccttctggtttgggttgatgatgagtgattgtcaacatgagttgtactttggtgtgagtcacgaactaaccagagtatgagattatgtgtatgtgcaaccatgtctttcgacttctggtgtgcaggtgtg

SEQ ID NO: 120098 - DNA, 697 bp, Zea Mays
tggaggacctctcggtaaggaaccatccccctgcatactcgccctacctgtccttcgcggcgtagcacctagatccaactagggccggcgtactactcgacgtagcagggcacgacaccacccctctgttcgccatattctccgcatagtgtagatgcgctcggactcgtggttgtgcccctgggcgcggctgtctggatcgccagagatgttatccgccgtagcatagtgccgccgcgggggagtgcatgggagctgtcgggaacgatggccgctggccgttggatggccagggtatggccgtgatctgattcgcaaacaacccatcgtctgaagaaaatcctagccttagatttatgatcggacggatcatcgctgtatgaagtaagaggtgatcggcaccgtcggtttctggtctggtggctactattgtataccgattcgccagataatagatctaatccttaccgtccgtttttaatccaacgtctgaaagcatcccatacccgttccaccgtgcgcttatgcaaaagagccctcgggcttccagagaatcaacccgccatccgaatgcatagtgcgctgagtcttggtactcttctgtattaccccctggtcttttattaatttgacgcccagtccagtgccatggcaaactgaataaaggaattagaaaatatgtttttattatataaat

SEQ ID NO: 120099 - DNA, 410 bp, Zea Mays
atgagaaagacagaacaaataatggtaatgagagaacatagaatggtggaagaacatgagaatgagaaacgcatgagaatgagaaacgcagaacaaggaatgagaatggtgacagaacggaaaattataggagattataggggagtacgagcactttactagtcgcggtaaaagtaaaggtgtcctattggaaccattatgttttttcatgaatgtcagctgtagtaatacatgcaaaaaagttacgatctcctattcttttatctatataaataaattgtcgactgaaatagtgaaggtctgtttgattcaacttttttttccaatgcttttctaagaatatggttatagagagaatctgactgtggagattaagtgcaaaggtggataaaaaagttcatatagtttag

SEQ ID NO: 120100 - DNA, 460 bp, Zea Mays
gaaacaggcacatgagacgaccaagaaagttctaactgaaattcagtcgagaaatgaagagttaatcaagaaaattcaggattgtgataaaaatattcttgagcttcagctaactgtggagaggtccataatcgtcccttattgtctacctagcaacctctaggatattaattctgtcagaatgatacctattttaatttttgaatcaactccatatctatgtcatgagtacaggcttcaggaaaacacatctactacagaggctttactgttgagagaacgagaacaaaacaatgcaaccatgaaggcacaagctgaaactcaagaaataaatttgcagttactgaacaagcttgaggacgttgagacaaaaattggtcttcttcaaggaagtgtacaaaggtactcttaagtctgttgttatatttgacagataagtaaccctgtcttcagtcaacct

SEQ ID NO: 120101 - DNA, 486 bp, Zea Mays
gattccacctggcgagtggtgagtcccgatataagtatataaggatcgatgtgttatgatgatggcggcgcaggagaatatggtggcaccggagactgaagatgagaatggcggcgtcacgaactgaacaccagcgagctgaggaagaaggtagggtgcgaagagtgtttgggttgaagtaatggccggttagcaggccgtgtaattgtggtacatgggccacgtcatataattattgaactatgttgttgaaccggtaacgatgaaaatagaaccttccctcacatacctctgcttgtcttcttcctctgttcacgttcctcattctcttctccactgatcgtcggaaactcatcgactgtcttcacaattgatatcagagctggttcactacaaggaatccgatcgtcatctagttcctatcaccgcgaggtgaaccacgtagtcccaaagacgaatgcttttgcgtaaggggtatgctacgac

SEQ ID NO: 120102 - DNA, 316 bp, Zea Mays
ttgctattattggtttagccttgattgcatttatcaatgacccgataagagagcttcaagcactcatgcctaggactttgttttggatccctttgcaatctatagaggcaagataggtgtcgacacattagtctcccacatttaataatgatctttgtcatttcccaaaaacaaaagattcattgttccgtattcctagcacaatgatattgtgcgcattgctaggaatttcatcatcaagacgaaccttttcgtgaggcaactcacgagcagggcgagttcatcggaggagagttatttacagaccacgtgaatc

SEQ ID NO: 120103 - DNA, 474 bp, Zea Mays
taacaaccatgatatagtccaaaataattagatcttgactagtctaatctagttataccaatctaatctagatcctatctaaattagtgtgatctaatgggacctgatctaatctaaattagataattaaaaggttagttaattctggtaaaatagattaaaccctgcccctataagcatgttttaaccaaaattagtatcttagaccaacttggccatgtagaactacctgacctacctgataaattgtctaacccacctatcctaacctacaagcaaagtaaaccatgtttgacctatatcacgtttcgcaaccatctacatatctaaaccttctaaaacccagatggagacatcaggactagagaagagaagttcaacttcgtcaagggaggataagcaccaactcaagtctacaaaaaagcgagatcactagagaagtcaagatccaccatccgtggtggagtctttcct

SEQ ID NO: 120104 - DNA, 360 bp, Zea Mays
gtcacaaggttagtaactctagcatcttatcagaatgtgtggatactcaaactcatccaatatcgacatcttgaagtgaaagcactccataaattcgactgaatcacgtaaagcctggtaccagtgagcagccctacctctcaaatgaagagatgtagcactaactatgaactcctcaggaatctggtataacaaaaaataagcttcacaattatcgatccaaactctagcctcatctacatcaaacatcgggaactccaactttggcaaccagcttcttcgatgattcggatcagcatctgcacccattttgttgctaatctcatgtcccgaccttgcttcctcgaccgacaaagtagc

SEQ ID NO: 120105 - DNA, 399 bp, Zea Mays
ggctcaccatggtggatgacgtcttcggtaaggctatttgcgtaaggggcttttgtccattgttcctagacctttttgtgctctgcaaaaagtacatagcgatgagagaaagattggtatgcagctatggataaggagacatagagcgtacatgatgaaaatggacacatggagcaagaaagtaggagagagaatctcagatctcaccactaacaaaatcgcacctgcgtccgttcgtcttccatggaaggggtcggcctatgtaggtgagcagtgactgatctgagcgacgttggcaacaaaataaatgttctagcaaaagaagcattgatcaacacaacgttagattagtcatggctttattcataaaagattccccagtccctagacgtattcaaa

SEQ ID NO: 120106 - DNA, 848 bp, Zea Mays
catgaattgacctccctctgacaaaagcactttgattggctgcaaccaactcatgcaatcgaggacccaaccgattagcaggcaatttggtggtcaacttggcaacactgtgaataagtctaatgggtctgaaatcactagctgaagaagcatccatccttttagggatcagaatgagataagcaaaattcaaacgccaaagcctttgggtattcctctggtgggggacggccagggcctctaacaagtcatccttaatgatgttccaacaagttttataaaacctccctggaaacccatcaggcccaggagccttgtcagatgggagaccagcaatagtgtcacttacttccttctccgagaaagggcagtccggggcaccgagtatattgtctctggaaatcagcacccaacagattggagaaaaatccatccaaaatattctgcatgttctcatgattagtaaccacccttccttctccctccagcttggagatgaaattccttttcttccgaaaacaggcttgcatatggaagaattttgagtttgcatctccctcatttagatactgcactctggacctcaatcttgcgattgtcctttccaaggaagcaaggacaaggcagtgctgcttcagtttcctcaaaagccacagctcttcactcagcaaaactctgctgacctgcaccatttccaacctatgcaacacctcccgagcaagccctaattggttccttacattgcccacctccttatgtccccaagactgcaattttttagcaggccttttaagctttaagggaagcctctccataggacaagaggtctggactggttggttccagga

SEQ ID NO: 120107 - DNA, 442 bp, Zea Mays
gtcaaagttccatgttgtatcatccccaggtttaatttctccatttcttgacataatgtggtgtccggagtctttattgtaagacaatggaaggaagccttgcgacttagtgcatctgccaccacgttggcctttcctgggtgatagtggatttctaattcataatccttaatcagctcaagccatcttctctgcctcatgtttattgctgactgggtaaaaatatacttcaaacttttatgatctgtaaatatatggtagatatcccagcagataatgatgccatattttaaggtcatgaaccacagcagctaattccaagtcatgagtttgataatgctcctcatgccggcgcaactgtcttgaagcatatgctatgactcggccctcctgcattaagacacatccgagaccactacccgatgcgtcacaatacacatca

SEQ ID NO: 120108 - DNA, 387 bp, Zea Mays
atgaaataccaggtatgtgctgctcccttgaggtgataggaggcgagccacactttgtcctcctcaatcgtgcgttggcctctgaaatactgctcatagtggttcagccattcgaggggatcctccttcccatcaaatgtcggaaactccatcttgtagtgtcgcggagctcctgcgtcgaaagactgcagggtgggatgggttgggatatgatgtaatggctgctatggtatgtatggtggaaacgatggaagaggtgacagcgagtggggcatggggatttggtggattggtaatgggttggatgatggtggagctgtagctggtggtggcctggtggaggtcaatggtgcatgtgtctctggaatgccgccataacctgggaga

SEQ ID NO: 120109 - DNA, 1099 bp, Zea Mays
ctgtgatgttcctggatggtagggcagaagagcaggaggttctcggccatataccaccttgaatggagagcatcgaagagcagtttggaaggaagtgttgtagcagaattcagcccatggaagccatttaagccactctcttggtctatcccctgccaggcaccgaagatacatggtgataattcgattgaccacttccgactgtccatcagattgggggtggaatgctaaactcatgggcaacttgactcctgccagctggaacaattctgaccagaatgtgctagtaaatattgtatctctatcactgacaatggagtaaggcaacccatggagacggacaatgttatcaaagaaggcctttgctaccgatgctgctgtgtaagggtgtcccagagcaataaagtgtgcgaacttggagaaacaatcatcaaccgtgagaatcaccgacttgtcgcccacttttgggaacccctcaatgaagtacatagaaatatcactccatacttctgaaggcactgatagaggttgcaggagaccaccgggatggagatgttcagttttattgcgctggcagactgaacaacctttgatgaactccttaactctctgtaatgcatgaggattatcgaatgacgaccggaacctgtgaattgtcttttggattccttcatgtcctgtgtcatgggcactggcaatagtatcggccaaagagtagaggcatatggcacatagactttaccttcgaaaaggagcaacccatccaaatctgtccaacccgatgaaacagtgtcggcagcaagctgctggcgcacatcttggatttgtgggtccgttgcagcctcggctcgcaaactgtcaaacagctcaaaaggtgtagagatggtgttgagcgccatgcctggctcgacacgacgtgagagagcatcaactgcgccattgagtttgccaggcttgtactccaccacaaaatcatatccgaatactttgctcacccatgtatgttggggaattgtggtcagtcgctgatctaacagatatttaaggctgtagtgatcggtgcggaccagaaactggcgcccccagatataaggcctcc

SEQ ID NO: 120110 - DNA, 290 bp, Zea Mays
gaaaatgatgccgaaacgtgtcaaaaggctttcagcaatatctgtgctttcattggcacaagagacataatccaagagcacatagcctacagagtgtggccacttgttgatagttgggagatgccgaaggagactgctgctgggtccagcgaaggtggattagttcgattgaaatataccttcagatacagagaaaggttcgacgaaccgaatgacgactggttgaaatgcattgaggctactagtgacgagttgcttggggcatataccaaggccgaagatgatgcttt

SEQ ID NO: 120111 - DNA, 592 bp, Zea Mays
ggccttgaaagcaaaagaagggaactatctgaccacaaaagtaagttccaaggtcagtctagctggaacacccgcccaaacaactagcagggttcttagtttcgctctggaaattagggtggaaacaattatcatatgcaacgccctggacaacaaggccagagaaacaatcaaagttagaactagcagaggaacaactctcagaccaaccaaaggtctggtggtagttcgcagactcgtcaaggtggcatcgtgaacacacagtccgaaagcaacaacgcaccagtctaacccaatggttgtttcaagtgcgatgagcttggccattatgctaacaacatcccaaggcgcaaccaacagacacctcagaagagaaacaaccagaggaatgaccagaacacccccgctcatggatctacgcagaacaaaacgccgcagaaccagaatagaggaagggtcaatcacgtcacagctgaatcagtgcatgaggatgccgacgtggtgtatggtatgtttcttattaactccatacctgcatcagttttatttcactctggagcatcgcattcatttatagttgagtcattcgtgg

SEQ ID NO: 120112 - DNA, 2088 bp, Zea Mays
tctttgaataaataaggatatcatccaggaacacgaccacaaagtcgtccaagaactcatgtaacatcctattcattgcttccataaaagcagcaggggcattagttaagccaaaagacatgactatgaactcgtaatgcccatacctggtgcaaaaggatgtcttctcaatatcctcttcacgaatcctcaactaatgataaccagagttcaaatcaattttggagaacaccagggcacccctcaactgctcaaaaagaacctcaatacggggtagcggatatttattcttgattgtcacttgattcaaagcacgataatccacacatagcctcttgcttttatctttcttctcaacaaacaatactgggtaagcccatggcgacctgctaggcctaatgaaacccttagcctgtagatcatccaattgccgcttcaattcaacctgctcctttggagccatccgatacggtgccttatgaataggctgcgtactcggaatcagcttgacttaaaaagttgcatcgcgctccggaggaacgcctagaagctctgccggaaacacgtcggcaaagtcacacaccacccagatgtcctgcacccgtaaggcagcctcaccctccaccaccatggagaaaaagattcccgacttccttgaccggcgatccggaagcaattgcgccaacaaggataacgtgaactttggggaacttcccaagaataccacttccctacccgacggcgccagcaataacactgtcttccaaacataggatataactacgcgatactgagataaccaatccatacccaagataacatcgaaaacccccaaggaaatcacaacaagattggccgaaaagacctcatcaacaaggatgatggaacacccctgacaaactgaacaactactaatggagccattagcagaactaaccaaaattgggtgacccaacctctgcaccgaaagaccagcacgcgacacaaaattctccgaaataaacgaatagctagctccagagtcaaaaagagcatgggccacaaacgaatcaactaaaatcgtacctttcaccacgtctccttgctctctgccatcggcagcgggtagcacataagtttcggaaatacccgcagaagaggaagctcccagagtgaaattaacagaagaactccactaagccgacgggtgaggcagacgcggagctccaaactgagacgacataggagtagtcggtgcaagagtaggcgtagccagatattgaggaaaaccctgcatcggcacgaacaagaagtcccaggcacatagaactgctgcggaggaagtggaactgaaaattgctgctcagcgcttgacatcatgttgacagtgccctgagaagaggaggaagtcactggctaccatctgagcttcccattgggattcctcctacacaccacatccttatggtcttgactgcagatagaacacctgccactccactagcactctgcacggcgatgcgcatcaccacaacggaaacacaccagccctagctcgggcttagggacagcccgaaacctctgagtacttcctcccgaagtacccaattcagaggttttgccacggtaggggtggtggcgctggtactgagacttgcccctcttgtgggctggacctccagtgttgcccctcctcgcgtcctggccacgaggctgatcaacacccgaagacttctgtgactccatggtgtactggtgttgcatctccacacccaatgcctgctccactgtagtacggaaatccaccaacggaaaggctccctgggcatgcctgatagaaggtttcaggccctgacggaactggctcgccttctccaactcattataagccacatgaggaacaaagcggaccatcttgttgaagcccacttcatactctgtgacagacttcttctcttgcttgtaggactgcagatcaatcttcattttctccaggaaggtgaccgggtagaacctcctctcaaactgcctgatgaaaacatcccaggacaggactcctggtgaagaggagtgagctgcctgcacgcctctccaccaaatctaagcctc

SEQ ID NO: 120113 - DNA, 528 bp, Zea Mays
tgaactggaggtactgagataccagaatgctgaagcataagagccatgaatgccctagtctcagcccgatcctgaagtagctgctgctgaagtgcatcctgcctgtcctgcatgttctgaaacatcgagagcatcctatcggataaccgggcctgctcggccgccaggttggccagaatcgtagcaagagtagggtccatagtctgaggaggagcaggggcagcactagaactcccagcctcatgatcatgtgagcgtggaggcataggaggcggaggcggaggaggaaccccaaaatcatcatcatcatcagctgttgtaccctgagtgtcaaactgtcgaagagctgcatcctcggcctgagagtcaaaaacaggagcagaagctggcacaggaatctcaggcgcaggacggtaggatccaaaaacgaggcgtgaggcctcaagggtgctctgaaatcgagggggctgaatcagctgcgcaaagatgtggcacaagtagtgagcataaggcaactgccgacgagca

SEQ ID NO: 120114 - DNA, 746 bp, Zea Mays
agatgtgagcatgtcgcatcgccttaagtcactgccgacttaagctgattgctccgttagtagggtatagtggtcaccctaagttaagtaagcgtgagcatgttccactgtcttaagtcactgccgacttaagccgattgctccgttagtagggtatagtggtcaccctaagttaagtaagcgtgagcatgttgcaccgtcttaagtcactgccgacttaagccgattgctccattagtagggtatagtggtcaccctaagttaagtaagcgtgagcatgttgcaccgtcttaagtcactgccgacttaagacgattgctccgttagtagggtatagtggtcaccctaagttaagtaagcgtgagcatgttgcaccgtcttaagtcactgccgacttaagctgattgctccgttagtagggtatagtgatcaccctgagtcgagtaagtgtgcagattgataataaatagtttgagtgcctttgagaatgaagtctttttattgatgatgtattttccgattacagaatacaatgctgccccgatagcctttgaaatctggctaggggtaaaacttcctgagatgctctatattccatgaattccctatttccatgccatccatttgagtaagtcgatatgatcctggccgagtgacttcttctaccatgaatggcccttccaatagtggcaataatttgtgtcgtccttccccggttagaatttggcgaaggaccaagtctccca

SEQ ID NO: 120115 - DNA, 893 bp, Zea Mays
tggtatgagtacaacaaagaatgttgttgtgcccaagcttacacgcggtaaagaagaggatatagccaagggtgaggtaagtaaaacaccgctctcatattgagatgggagattggagattttagagaacgcacatagtgtaattaccgaggtaagatagagagatgagaaaggtaaaggtaatagcaaacaaaagtgggcaaaggatggagttaaaaactcgcaagggacaaagaagatgatacgcccaaaagaaaaataggtaaaacatacaactctcaaattgagatgggagaggggagactttaaaggtaggtataagatgaacatcaatgcaagatatagaagtgtcaagggtaaaggtgataataacaaagagcataggaaaggatggagttaaggcaagactcaccaaatggcgaaatggagaaaacaatcacgggtaaggtaggtaagattccaacagaatggttgaagtaaaataaattattacctagggaagttatatggaaaagataagatcatttaaggatgtgaggaatagaacgatcgctcatggatcatgaagaaacaaaggtggtcaagagtatgtaaactgaaatgttttaaacagacattggagtgcaaaggtaagcatttatatacaaagtaaaagtatgcaagattacgaaggtgcgagcataccaagaccaagggagtacgaattgccgaaagatagcgacttaacaacagaataagaaagggtctcaaaagacaggatgatcatggacatataaactgaaatgtttaagtaggcagtagaaattcagaggtacgtacttgaaacaagagtattaaagggatacaagcatgtcaataccaaaggactagagttcgccaaatggtagcaattt

SEQ ID NO: 120116 - DNA, 401 bp, Zea Mays
gaccagatacaaggagttctttagggaggtcgaaaactcagaaaccaaaaaagatccatctagtaaactacactacactgctgacaaaaaaaaaaccttcccactggaactaagcatcaagggaggaggccgccaagtaggagaggctttttgccccagccatttcccacatcaatctctcttccctagctagactaagagctagagaaacattaggggtccaacccttagatacatttgttttgatgattccaaatgatccaagccccctaggcaatgagagaattcagccccttcttgataggtccattgacagaccctaaagcttcttcccaccataacatgaaggagggcaaacctggctgtggggcaagatattgcagacctagttgtctcagcag

SEQ ID NO: 120117 - DNA, 502 bp, Zea Mays
ccggcccacagaccggttgagccagtttttcaacagtctgcgcacaacttttctgacatggcagactggcagagcagaaaatggcagggtgaatagtgcaaaaaccggttgagctggtttttagaccggttgagccggtttttcaaactggctgaactggtttaaagaaaactagagagaaccatggggaagtcttagtgggaagtgaaagtggtttttccaagagcattcatgatctaataaaatgttttcttagaggatttagaagaggtttggactgagctcatcgcagttacttactcaaattttgcggatccctcttaatcgaacgttgattcctatgactcaagaattgtaaaaagtaaactatcattgttcacaagcacttgaagcacgctatatgatgtagaattttaatctgctgtgctttcccttttgtgtacatatggaatatgtgctcctcctgtctttaggataactgtatacatactaggagcaaact

SEQ ID NO: 120118 - DNA, 447 bp, Zea Mays
acctatgaggtggtagattccaggcagaataggcaataggagcaccaacatttgacactctgccccttaggatcatatccagtcggctcactagatcttcagtagggattctcttgtttgtgacccgggtagagtcattgatgccacagtagagataagctgggtacgccctatccttcaaaggctgaatattcttgaagacaaaatcagcgaccacagcttcaacagtcagacctttgtctttcaacgaccagacctcgccaaacaatactttcgcctctgttatctctgaaggggtcgaagattctacccagcttggagttcggacatccggttgcctccccgaccgagggggtagggacttgcagtggtttttcacaatgaaccactcgaggcgccaccccttgatgctatccttgagggggatgtcgaggtactctgttttcc

SEQ ID NO: 120119 - DNA, 490 bp, Zea Mays
cgaagggggccttagtgtacaatggcaccgacgaagttgatttcctatactgtctcccagacaacaaggaaatatccgtttgccgggagatggccaaaaatattggatttctgaagcttgaagctagcctctctgccatgtcgaaggatgacctcgcagacagtcttgcgtacaacagtctgaaggtacggaagttatggtcttataaatagattatcttatgtcttttattctcgtgctgatcctttatctcccttctttttgcagggcttacttcttagcaacgctttgagggcgcagaaaaatgttgaagatgaaagttgtcagatagcgcttagcaacctttggtcggaggttatcagattgaggaacgaagctgcagaaaaagacaaaattctattttccttagtccataaagctgaagttgagaatcttcagaacaaacttgccgaagctaatgaaaattttgaacttgcaaaagtaaagcaag

SEQ ID NO: 120120 - DNA, 400 bp, Zea Mays
cttaaatatatagatggaagacatccatccatcaaggatgggcatgtgcataaaaatggagggaaaaccaatagaagaatactagtaatggcattgagtgtgtaaagtgtgagagaaagaagtagagtgggacaatgagaccttcacaacttacgacaatgttacgcccctgtctagtagtgccacaccacgatagtgccagacagagagtgatggtgcatggcaaaaacaagaatgcccatcaatctaagcctcatgcgtccaaagaaattttaggaactcattatgtgttgaaaatcaataaccttggtcaacttgttgctatctacatgggaaacaactcaagcttgaaagtgaaaaatgcatgttggtaccccgaaattgggctacccacttctac

SEQ ID NO: 120121 - DNA, 699 bp, Zea Mays
gtcaaacatcaatactttttcgttaatatttccgtttccattcgtttttgcaattccgtttatcccgctcccatttcccttccgactattccgtatctaatcccgtttccgatgaaaaaaatgtggatacgaaaacgggagaggggtttttccgtccgtttccgtccgttttcatccctaattataaatccctgcctcgagccctcgatcaaggatgaaggtttttggatcatgatacatcgagcaaatcatgtctagtacatgggacttaataagtaacaaactatgactactttagaggcctaaattaatatataacacactaatacgatatgattatgatgtatagagtgtaattataagctaagtatcgggacctaaatatatggatagaaagcacgggcgacagcaagatcaaatgctccaccacggcctgcccagtacgtatccagatgcagtgcatgccatgctcatgcatggaagccctagctatcgatcgtgcatgtgccgctgcaggataataatgcctatataaatagtgtctttgaatgcgtatggtcctgtgtgccttgccgactctcttttacatcggccggcaataagaacgagcatgcatgcagatacatacaggtgcattgtgtttctccatttcgtcccttcttgtctgcattgttgtacgaagacacgggctccaacggc

SEQ ID NO: 120122 - DNA, 560 bp, Zea Mays
gattgaggccaccggcatcccacgacgacatcggccgctcggccacgtcctagagcaatagagcatggcagatgagctcacgccagagaccatttccacctcccttccgatctttttgcctctagcagttatccacgcgccaccgagcacgaatcataacactagcgtggatcacgacatggggatcaccagcggcaggttccgtgaatccttgatctttttcaattacggtacatattgaatggcccattcatcggcctgacagagcaacttgaggagctttattctccgactgcctcaaaattgttgccctatacaacaacttcaacttggttataagtttcttgatcgaatactcactggattatgcataattcggcttcaaagttaatcagagaccactgacagtcaagtttcagtgcctgacccgactgacagcacaacttctagggcattttatttcaatttatgtacagttctagggctcaatcacttaatcaaacttggactactatagtaactctacaaatttgttgtagtgacccatgacaaaatcctca

SEQ ID NO: 120123 - DNA, 362 bp, Zea Mays
gtacaataagaggctcgatgttaaaatatatttccagaaagtaggcagcacgaaccaagtaaccaacaactagaagatgaccatgcaatgaaaagtagtagatcattgttgagttttatgtctcgaagccttctgagctaactgtgttgcaggagtccacttagcaacgctcggatcttttacaccatgaggtggctgtatggaacgagcctagttacaacatagttaataaaacgtcgcctaaatagtaaggcgccccaatgacgtaaggcgctgtttgccttactcccacactaaagcgagtggaagagagagcctaggactagcatcgtggcggctccggcaaagccgacacaagagag

SEQ ID NO: 120124 - DNA, 440 bp, Zea Mays
caactcaacatattctggtttcctgtgtgttctccagggacatatggtggcgggtattgtgtaaagtgggtctgcaacagttggcacctaggcatgaggatatgatattccaagactggtgtagtagaacagaaagtcttgtgccaaaaattcaaagaaaaggttttaatacgatagtaatcttagtggcatggtggctttggaaacatcggaacgcttgtgtctttgatggaatagccccaagcactggcaccattcttcagcacattcatgaggatgcaactttgtgaagaatggctggagctagggctcttagaagcctatggccttagcttatggcatgtgcctcctctcttaaggctaggtcgttgttgtcgtgtttagggccatagatgagtctctttatgtttttgtgttttcgtcctccatgatgagtgtcc

SEQ ID NO: 120125 - DNA, 424 bp, Zea Mays
tttgtttcttggacctaatgcgacgacgaggctgaaactgtgtgcaagtaatagtccatccatcaatgtaacactcatgtgtttcttcttggggctaggcatccttgtgatgtttcctttttggaatacttcacaatttatcaactgacagtgcattaggtatgagagaatatgttattagttgttcttgaggagacatctgtctgtttatgccagaaaataaaatccggttcttctattttgtagtttcactttcgtttgtactgatctggcgacaaggaattccatagtacttacaacaacaacatgttccaaggtcacttgtttgttggtttggttgttcatccttttgggtcttgaatgtctgttcatcagctgttttatttatagtgttgttttgacttgccaacacgccacattcttt

SEQ ID NO: 120126 - DNA, 637 bp, Zea Mays
gggaattgcagggacatgtgttggcacaattacctcgaacactggatcgggcgatacttctggcgcagattcagcaggaagtggtggagatgaacaaggccaaatttcagaggaattatttaggtggcaaagtaatggtgaacacagtgaaaggagatcctagaggagtaactggccctgctgatttggctaaggagaggcagctaagagagtttcggaggctaaacggtttatgttttggttgtggagagaagtacgagccaggacatcaagctaaatgccttaaaagaggtggagcacaattacataatctgactgtagaggatatggggttggtgttgtcagatgagacgttgcaacagctggattaggaagataaggaagtggaggaagcatataagctgtctataaatgctatcagtggaactgaccgtgagaattgtatgagagttcgggcactgatccagaatcaagtgttggtgatgttggtagactcgggcagctcctcaagttttgtcagtcagaggatggtagatcagttggctttatcaactgaagttgtttcaccggtaagagttaaggtggcaaatggtgagttcatgttgagttcaaaaagggtggcagcgctggagtggtg

SEQ ID NO: 120127 - DNA, 403 bp, Zea Mays
ctcgactaattctatgttgtgctcctatatgcccccttgccaaaagtattttattctattatggtctatacttctctcaatctattagatctgatctcactcttatgcttgcgacatctttgtagattgccccctgaccataacctttttgtctattgggattcttccctcttccgtcacgaaattgctaccctttgactgtcttttttccccttagtattgacatgttcgtactcctagattcttcagtacttttgtttcaaatacttacatctgaatttctcctgcctacttaaacactctagtttatatgtccatgaacttctggtcttccgagatccctccctgttccgctgttaagtcattatcctctgcctttttgtattcccttgtctgggtacgc

SEQ ID NO: 120128 - DNA, 452 bp, Zea Mays
tgcgcggcctactccatctccttcttttttttattttctctttgctttaagagactgacatgtgggccccctcgcctgacaaactttgttccctgtgaggatcggaccgcgctgacagaagaatgcctcctgccgatctcctcgccgtagatcccgctcccgtaacaacctgtgcgcttcgaccgggctgttggagctcgtcctcgcccccgtgctataaatcgggccccgcaacatcttcttctcaccccatccagtccgccaccatcgctgtttcccgccgagagatttgggggagctcggttgctgtcacggtcgtgatcgggccacaccgtcaaccagacgtcgatgatgggtggtacgtgttcgcggggagattccgatcgttgtcgggaagttgctgggcatgggtggcgaccgaacctcggcgaatttctcactggagtaaaagc

SEQ ID NO: 120129 - DNA, 681 bp, Zea Mays
ggaattaccattgcaatttaacaagagcccatacttcaacaagaaatcccatgatttgctaacaacctcttaagtgaagcttcatcaaccctttgcctcttcaccttttggctcttcagccacttcaacctgccaatcaagagggaggttacatcagtgaaataaatgaaaaggtggtacaaattcatagatcaaaagaactggtatgatcaagaggataagcaagaagttgtcaagaccctacctcaatagttcttgatttttcctaccatctgtatatggggaaagacacaaactgaaaagtccgcaaactcatacttatcgtcagcctatagaatacatattaaacagtctaatccgagtttcacatgtaagcattttctcgggaccagtctcttccttgatgaaataagaggtactgtcagccataacttcccacgcactttgtctatctaattttggactcttggtggacaccacaacctgcaattcgggtttgacaaactggttctggttttttcagcagaaaagaaacaactataaacatagaagtatatattgtttaatatagacaacattccagtttacctcatcaataccccaccattggaggaaatatcagtataagggtaagcctcacaaatcaaattacaagactaatcaacaaacagaatgtcatat

SEQ ID NO: 120130 - DNA, 938 bp, Zea Mays
tggagttcattcaggaaataatgttcaggtttggaatacctaacagcatcattaccgacctaggatctaatttcaccagttcggagttctttgacttctacaagcagaggagcatccagatcaagtatgcatcagtggcacacccaagagctaatgggtagatggaaagagccaataggatgagactcgatgcactcaggaaaaggtgtttgacaaaagcgagaagctcgcagggaaatggattagggaactgacatatgtagtctggagcctgcgaacctagccgagccgagctttacacaaaaacaccccattcttcatggtgtatggatcggaggcagtgttaccagtagatctgatctttggagcacccagattaacatttgaaagcatagccgaagcagaagcaaccaggctcaaggacggctaaatgtgatcattcagtcagccagataccagcagaccctgaggcgttatcacgacaaagcggtacgacatcgatccttcacaatgggagatttggtcctccaccgagtgctaacgggggagggacgacacaaattgtcaccaccatgggaaggaccattcatcgtcgcagaggtaacacggccgtgatcctaccggctcactgaaatggacgacaccgaagtggaaaattcatggaatattgagaacctcaggaaattttacccgtaagaaatgcctcaaaactcttgaggatgagttgtactttataagcagaaggtttcattatcaataaagcttccatgttccaaggcatacaagttcttgatcaaactactgacctaggttagactcaactcgaaatcggcacggcactcgtacacaacttagtgtgatcattataccctactaacggagcatttggcttaagtcagaaatgccttaagccggtgcgacatgctcacgcttacaca

SEQ ID NO: 120131 - DNA, 381 bp, Zea Mays
gtatatggatgctatggctctggtgcggaagtttggtaaaccggacatctttcttaccatgacatgtaaccccaactgggatgagataaggagggagcttctccctgggcaaacatcgtaagatcgtcctaatcttgtagtgtgtgtatttcatgcgaagctacaagagttaaagcataggctgactaaacaggatattctcggtaaggtctgggcctacgtctatgtcgtggagtttcaaaagcggggtttgccacatgcccatcttctactcatcatgcagaggaagtacaagctcacgtgccctaagcagtatgaccttttgatctcagccgagatcccacacaacaagtaccctgaactacgaaagatggtgatcaa

SEQ ID NO: 120132 - DNA, 409 bp, Zea Mays
gagaatactgctacagatgccctttctagacagcctaaaagtgttgcttcctatttgtcgatctcccattgcacaccaacctggttgcatgaagtcatagcaggagatggggataatccggtggctcaagaattattagccaaactcactatcaatgccagtacttggggacatttttctttgactaacgacgacatacgttacaaagggcgtatttggctggacaggaataccacactataactcaaagtaattcaagccatgcatgactcagctcttggggacactccggggtgccggtgacatatcgtcgtctaaaacaactttttcattggcttagtatgaaatctgatgttcactcctatgtccggtcctattctatatgtcaccaggccaaacccgatcgcgc

SEQ ID NO: 120133 - DNA, 306 bp, Zea Mays
cgccagtgcaccccttctcttcggtcgccgcgcgtcattccccgaattagtcaccactgctcatggatcctataaattgagcacaccctcggctccgctagatattcaagcattcaatccacccactcgtgcctccaattactcatcagagaaccccaatttgggatttcccccaaatcggtccgaaacaccacgcgaagtgacctcgtcgtggctagcttgtttcaggtccgttcatgctctctgctctcccgtttcagtgcccttaggttctcctgatgctcctcgacccattcaattaagcta

SEQ ID NO: 120134 - DNA, 438 bp, Zea Mays
tcatcatttattttccccactggggtttttagatgatgactatagacatattattgttctttgggctagaggtccatgggagaacaatgacataccatggttcaattgaaccaccgacaattatctgtaaggataattgagcttgtgttgttcagatggaaacaggttatatcaggagcaacattaatcagcatattgctcctaaattgtattatccatcttgcaaacaaagtcttgtgataatcttactgatctattcagaaaatctctaccatactcaacgttttcagaaatgtgttgaggggattggtatgagaagacttaaatgcttgcaaggatcagggggagtaattctctatgatatttgacctgttatatgccatcatattacactcttttctttgtataagttttgccttgttaaggttttctcatcca

SEQ ID NO: 120135 - DNA, 513 bp, Zea Mays
aggagggtgtttgtgtttggtacaaatgagaaggtactagtgggagacatgagaatttcacaaggcttccaatgctaggcactatgctagggataaggattcttctacatgacacttccattcatttcatcaatattggatgttctagggtgtgttcattgagaggcccattctggtaaagcaacaacagatcatcttgtcctatttggagaagtttccatagatggcaatcttggtacatgcttttaggtcattggatggagagaggctatggatttttggcagaattagaatgagtgggtggttcgacatttatgtcactttggaggtgaagatggacaaggtgaagttgtcatgtatgattggtacaaagaggttcatggtgatgtttgaggagccaacaatagctagcaagtttgactctcttgagataaataggggttgtgatgacgatcacaaccttgcaatcggacgagactcacattttctgccctaggataggtcatatgcatg

SEQ ID NO: 120136 - DNA, 415 bp, Zea Mays
gtctggttttagacctttcaagcagaaagctataacatttcgtccagaccttctcccacgaataaaggacgaaattcgccggctgctagaagctaattttattagaccttgcagatacgcagagtgggtctccaatattgtgtcggtggagaagaaagaattagataagctcagagtatgcattgatttttgcaatttgaatagagcaactcctaaacatgaatatcccatgcccatagccgacacattgatcaataatgcgtcaggaaatagaattattagctttcttgatggtaatgtcggatataatcagattttcatggccgaagaagatgcgcctaaaacggcctttatatggccaggtttcattgatttatttgagtgggttgtcatgacatttggtctgaaaaatgct

SEQ ID NO: 120137 - DNA, 418 bp, Zea Mays
atccaaccattcttggcagggttccttgaagtgtttcttgaacttaaaatggtagggcagccgaacgagttctttcttctttttctctccgtcaagcttcggcataccccattcccttagcgttggaaatactctgttggctaagtattcctggactagatccctagttccaatatgttcagacacaattctaaactcatacacagcatctgggcatggtctccctggcgtcatgttgcactgaggcctagtcagcccgaaggttagctccagcgggctctgtactagcttctcctttttctcatcaatcttaacataaaaccattcagatttccagccggtcggccatttagagcgatagctgaccactggtgtcttcatgtctttgcgataagcaaaattgtagcagccaaaattc

SEQ ID NO: 120138 - DNA, 750 bp, Zea Mays
aaactttgtatatagttaattatactttttttccttctaacaaaatgatttttaaacgaggtagtcactgcgtagtcctgtaacttaatacagatattaagtttgcttttggtaaaatttatttgtcttatcttttatttgtttcattaaatttgttttgattttagggctctaatgtgaattttgggacctgatgtgaattccggaccaaaaattgaattccgggccaaaaattaaatttcgggtcacccgaaatgaacctggcacgtttaagaaattacgtgtcaggccgtgggtcgatccggcacagtctaaaattcaaatgggtcaccccgacccaaaatttaaacgtgtcaggccattttgggcttgggccgggccagacggtccgaatgtacacctgtagcttcaggtgatacttatataggctagaccaaggcgaattgagctccaaatcgttgggaatcggcgagtgaatcaactctggccggtttccataaacggcgaccacaaaaaggaaagaaatactcggcgtggggaagggaagatcagtcgagatcgaggggaaaaggaagagcatcacggtgcactgcacatcgagcaaggattcagacagaggcggcttgacgcgggcgacaagctacatactcgggcgtgagtgtgaggaaaaagaaaggaaatggctgacacgcgaggcccggctgagagagagagagagagagaggaaggtgtggctcattgatgggccac

SEQ ID NO: 120139 - DNA, 542 bp, Zea Mays
caaaaaccctaaatagacccctggaaaaccctggactgaaaccctagggggttatctgcaaaatgtgcacacttttggacccaagtgcaaaaaacatggaaatagggtatcttatgtcatatggttcacatatttggagatttgcaaatgaaaccataagttttgggcttatttgcaaaaaggccacatttgtgctccaatagctaagtctgaaaatcagtgcattaggaccaactttagaaccctgtatcttccaaattatgaggaatttgcctagggtcaacacatcaagtttgtagagctatcataggagaacaagtttgattaagtgactgatcactggtgctgaatagaaattggagataaataagtgtgaagttgtgctatcacaagtaagttgggcaaatctgaaaattggattcagaaaagtatagccccaaggaaatgcagtcgatttgagagcaccaaatctgagaatctatacagaattgatccatgaaccctataacaaacttaaagactgttgtttggggaacaaattt

SEQ ID NO: 120140 - DNA, 567 bp, Zea Mays
ctgaacgacaaataggaaggcgcgctcgtccagtttctacaagataaccgagatgtatttgcatggtagcctgcggatatgccgggagtcccgagagagctggccgagcacaaactgaaggtctatccccaggcaaggccgatccgacaaaagttgcatcgtttcacgcctgacaagagagaggctattcgcgccgagctagctcgcttagtcgcagcagggttcattagagaagtactgcatcctgagtggctagcaaatcctgttattgtactaaaaaagaataaagtggattggcgcatgtgcgtcgactatacagatctcaacaaacactgtccgaaggatccctttggacttcctagaatagatcaggtggtagattcgaccgccggatgttctatgttgtccttcctggactgctactctggataccatcagatcagcctggcaaaagaagatgaggaaaaaactgcattcattaccccgtttggagctttctgctatacctccatgccgtttggcctcaagaacgctggagcaacttaccagagagctattcaaacatgc

SEQ ID NO: 120141 - DNA, 339 bp, Zea Mays
tttgtcgggtgcaatgccacgatagtgtgttataacatagattgctgacgtctgacaacataggtctaataattccttgatgctgtgttggaaacaagatgatccatgaacaacccattgaaaaagttcaagaacgctgaaatttccaatttacctgggcccagccgtttaatgtcccaatccaaggaatcgtcataaaaattgtttttggctagtgattttcatggtaccagacactgatgtagctacaattgtgccagatgctgatcagtgcttattgttcgtgcatgcttctaggatattgtttcaggagaattgtttgtggatgcttctagaata

SEQ ID NO: 120142 - DNA, 494 bp, Zea Mays
aaatctcccttaaaggtttcttcagttcatgttaatgtagctaggtctcagtctgaacattctgatagtatgaagattgggaaaagctctgaaggagccaaaggataccttgacagtcagggtaatgaagatgatgattacaatgaaagtgaggatgatttgttggattcccaagatctggaggaattcatcaaggatgaagaacttattccttttcctcctcaagagaaaagaaaaatgaatacaaatgtttctgtttctgaagatgttggtaagaatgttggagttaagaaaggaggatccatggaaggggagcttgcagaaggagttaggaggagcagcaggttggagtctaatgatgaaatgaagattgcagataaggcagcagcaagagcaatggctaaagatgcattcattaacaaaggtacgtcatacaatccattttctgttcttaatattgataatgttgttcttatggatgttgcgcataaaat

SEQ ID NO: 120143 - DNA, 323 bp, Zea Mays
gataagagtctaccttatgctgagttctaatataataatagttaccaggccaggctaaaaatgtcaccgttcgaggctatatatggcaagaagtgcaggactcctctatattaggaccagactggaggaagatagttctttggacctgaacttattcaagaggcagaagaacaagtctgtataatcacggagaacttgagagtagctcagaccaggcaaaagagctacgctgataatagaagaagaccactggagtttgaggaaggtgatcatgtgtacctcaaggtgtcaccacttcatggaatgaggagatttaaagtcaa

SEQ ID NO: 120144 - DNA, 296 bp, Zea Mays
tctgggaacaggtcttcacaaggcattgcggcatccacattgatgttttgactcccatcattaacggaagaccttcctgcaaatgcttcttccctttctcttggctccctatcatcctcatctgttaaacctaatctaccaaccataccaatctctaaaggaacttcttgttgtcgttcctcgtcccatcttggctcgatttctattgcatcccaatcaatttgaaactcctgtgtcacaaaattttttaaccaacttcgtctcagggacattgacagctacgaatgacacaaaat

SEQ ID NO: 120145 - DNA, 783 bp, Zea Mays
gggcatgctgcggctgcgcgcatgcagctgactgggcgaatccaccccatccggaccataaaaacctctcgcacggcactcattttcccctcccaactccagagaacgcccaaccgagagcatcatggtgttgcgtggtagaagcagtgggggagaagaagccgccgccagaggatcccatccgtaccgacatctcgtcctcggcgcaccgccgagaagaatcctctgggcacggggcagccgtccgtaccctcggggtgaatcgggagtctcggggcgcggagatttcctcgccggcgtagtgtaatcgtcgtggttccctcgcggacgagtgggtcgattttggtgctttgggtcttggtaagcacaagccttcctggttcgtctttgccccgctacgtgtagagcacacccggtgtgagtgtagggaaagaggttacaggtttggagttctgcggtcatggcgtccgccgttgttcggctcggcgacgccgctgtatggttcgaaggagggagaaaacccatgcgtcgtccatccatggatgggcagtcacgattagagccctgaatcactaagtcgcgaccgttcgatgctagattggacgcttgggattgaaactcgcataccccttcttgttttaattccatgtcgtagatcttgagatcaacgacaccagttcgatctcagtgaataaagccacatgccgtagatctctgatccaagggccagggttgcgtaccggttcacgtaaatcaggatctaatctaaccatttgatttctg

SEQ ID NO: 120146 - DNA, 471 bp, Zea Mays
ggggaccaaacagcttcgacggggaggaaatcaaacgagtccttagtgccattggtgtctgttctgttcgctgtagtgtgatttgcgaagtcaacttgctgcatccgttgctacgtgcctgtctttgccccccctccgtataagaaacacagatcagaatgcattcagccctcagcatgctccatgatctgatctgactaatgaaatagacgaatggcctggatcgcagctacagtcaccgacgcacaacgccgctttagatccgaggtgacttgacatgtatgaaatgaacacttcgctacgaatctctgatggctgaatgcatagagctccagtcttctgccagctcagggaagatagataatctaatacaaactaaatgcatgttagccccagcaaacatcttgctgtaaacctgatagagaacttgtccggaaaaatatttcacaaggatcgtctccggaatctgaa

SEQ ID NO: 120147 - DNA, 324 bp, Zea Mays
atcgccccacgactccacgacaaactacaggcaactgccacgcggacgtatggtaatgatgtgctgtgtttcatggactaaaatttagccaggatggtaccagatgtttccagatatattacgaatattaaatatagtgtatttataaaaataattacacggttaaagactaaaagacaagacgaatttattaaatgttaggtacataagaacgaggtacgcaagacgaggcccataaatctctctctgaccaatttaacaaccaagttctcgtcgtcgagcaagtatgcaagacggggcaaacgactaagtccccgccgagca

SEQ ID NO: 120148 - DNA, 577 bp, Zea Mays
ccgggagggtgaaaagatcagaaggggagcggatttggtcgcggggtgaagcttatcaaccgtgcctgtagccgtgtgacgtggtcgaaccgccggtgtcattgtggaaactccagcgacctcaattatgccacaccgtggctctttactgcgcggtagtaaccgtggcacgcctaggctcaccatctctgaaccgctgcaccggtgaatgccacgactgagccaccagtgaccttcttcctctccggctaccagcacgccatgccaaaattaggagccactgcccttggaaactataaattggtgccccagcctgctccgctaagtaattgtgcacccagtgaaccagccctcacctccaatcgtccctcacaaccccccaatttgggatttcccccaaatcagtcaagaaccccactgtatgtgagctcgccgtggctagctctccacaggtctggtcacgccctcctcgctcttatttcagtactcttatgtgttcttgatgcttcccgactcagccaattgaactagaacacgtaggatcaatgggaatgcctcagttcatccgtaatttgcg

SEQ ID NO: 120149 - DNA, 702 bp, Zea Mays
attgcatctaatccaattcgtctatccactcccgtcctcagcgaatccgcaccccgcacggtacgcgagcgcctcagtcacccacacaatgacacaaacccacgtacaccatgtcttctgttcatagcaacggctggcatggcaagtggccacgcgccaaatgcattgcaacaggagaccaacaatccatgcacgtcgctccgtagggaacggggaaagcagtttcaatagactcacacacgttgtgtcttccatgcatagaaacgcggggaaagcggtttcagcagctgcgaggtggagccattttactcatcctaatccaccaccaacctagctacaaaaagtcatactgaggcccctcaagcgatagtggtaatggatctgctcgccgctggtggcctgatgctttccaactactccgactcgcctacgtcctccaaggtacgcacatacgtacatctgtttttctggcattcgtgggacctaattagtgtcgcattcgtgggaccgaggccccgcaagcatcttcacatgcctgtccaccgagttagtgtcgcattcgtgggacctaatggagaccaacgctgggatggagggcatcgactgttactcagttaggcatgggccacagagggcatcggtggcaagtcaccaaccttaggcacgacgacgggcattgacgacaaggcggcaaccttcggc

SEQ ID NO: 120150 - DNA, 367 bp, Zea Mays
gggagttgcaccttaaattatattaagaagagagaaaaacaaaggtctatagaagatcaaattacaaagcactccttacggagaaagagccatcaagagtcaggcaagggaacaaccaaataggaaagtcccttggctccagctaattcccaaagacttctctcatcatcagcctgcttaagaattagagataggctgggtgtcactccatcaaacatacatcaattgcgatgattccaaatcatgatgagagaatttagtcctttcttaactatcccctgtactgcctctgaagccaccttcctccaatgtttttgagtcgagaagtcgagtcgagtcttgcagctactgactagtagactagtcg

SEQ ID NO: 120151 - DNA, 495 bp, Zea Mays
gcgtaagggatagagaaaaatatggtataagattttaacagacaggacataacacatatacgctataaatgttgcatatatggtatataccatttggtataaaacgttgagtcaatatgcgtgaatagtggttgagggatatttggattctgggttacttgatccattatcggtaacggtttgaaaaaagtggaaataccctagaaagggggatgtggttacacgtttagtgtagcatccatcattgtcttcatacgaaaataacatagggcttcaacctgcatcaatcgttggggtggaaatgaccgactctggacaattgctggcgatggcaggagatggagttgtgattcgtcgagacaccgaggcagtcgttgatggtaacttgatggttacaccacctcctgttctaatggggcctggaattgacgagataagcaatggggaggaaggagaacatcggatttgacctccgctgtccaatattagctcccg

SEQ ID NO: 120152 - DNA, 498 bp, Zea Mays
agcttttgaaatcttgctaagggtaaaacttcctgagatgctctatattccatgaattccctatttccgtgccatccatttgagtaagctgatatgatcctggtcgagttacctccgctactacaaatggcccttcccatagtggtgacaatttgtgttgtccttcccctgttagaattcggtgaaggaccaagtctcccactacaaaggattgatgtcgtatagccttatcatgatagcgcatcagggtttgctggtatctagctgactaaattactgtattcaatcgctcttcttccaatacatcaatatcctctagtctggtagtctctgcctcagctatgttttcgaagaccagccttggtgccccaaacttgaggttggcaggtagcactgcctccaaaccatagaccatgaagaaaggggtatttccatgcagagctcgactaggttgagttcttaggctccaaactacatacggcaactctctgatccatt

SEQ ID NO: 120153 - DNA, 432 bp, Zea Mays
caatttataggacccgagggcggtggcgtccaatttcacaaaggtgcgctggcgaccggagagaggggaggagtcaccgcggcgatctatcgtggcgatcactggttgaggagctacggcggtcaatggtgagttgttacggctagctgcgaggtggtgaaatggtcacgacatggaatgatcatggcgaacgacgtatattacgacgacggccgctcgaccacatcgccggcgcgagtggataggtgacagagcggctacagggttctgagctcatccaaggtgaagattttccatggtcaatcataattcacgcaacagagggcacaaatcgcggcaccggtgcgaatccgagcgcgtaggtcaccggcgaggaggggagctgaatctgtgatctttgtcaggcactgtaccattgggatcccattctgg

SEQ ID NO: 120154 - DNA, 674 bp, Zea Mays
ctgtcttctccgtcggcggcggcgacgaccctggtagcggtccccgccccgttggccctccttccccgaacgtccccgctcttctccacgccacgtgattcttccagtgagaggtcacgccatcgacaaggggatatagtagaagcgttatggtccctgtgtcagcgagagcaacagtgctgacggtcgtcgcgtcgtgacccctcctgctccatgagttcgaagacccgttgttcgtctgctcacccaggtacgaaaagttttctaaccatgtctcctctaatcctcaagatctcaaggaggcagacaggtcgttggtagcctccaagtggactggaagggaaacggttggcagcctccaaatagactcatccagtcatcctcattctcatccggccatccgggagatcgtccagatattcagatgtgatctcaactctgaactgtctgttaaagagccaagaggcagaggcccaaggcgcaggccggagagccgagagaggccaagagcgaggagaaatcgatgctgtgggtttgaaacatgacggcactgcgtgcaccagatggtcgagcgaacgagctccacttccgtgcgtggctttaaaaattctcttccctgacacatgctcggccgccacaacgctttgcctcctctatctgcaacggaaacaaag

SEQ ID NO: 120155 - DNA, 562 bp, Zea Mays
attttaattgttcaatctgtcaatcactagttatattatcaatttcaactgtgaagatacttcaacttgatgagtggtaagttatagcaggccataagtgttatagtgggaataagttatagcaagcaaaaggcagctgtggaacacttcaacttgatgagtggtaagctcgatttttgtacactttgtgacatgatgatggtcactaacatgcctaaggctatgaccagcagacaatgcatatgaccgtgcaaaacactattttgcactgtttacataatgtagtttaaaacagaagataggatattaataaggtgttgtgctgatgatagcccgtaagccacaaagagaaagacacctgagcacttgaatggtcaactgctgctatgtgactatcttgagcaaagcaattgccatcacttaaagaagagtaacacaaattaattagaacaattttcatcagagtggtgcagggtaatgtgaactgacaaaactaccttttaaacgaaagcacaatcaaagacagtacatacctgttgtatatcgtaccgtcagtacaacg

SEQ ID NO: 120156 - DNA, 1020 bp, Zea Mays
ctcctgcagtgcactcatgtcctatcagggtttggcctgagtgcattggccacctgtagccacaacgagacaagccgcaccgagacctaggctacgaatgccaggagtcggtgtagctcgaataatggcacgtgggcccatgttgcctttatcatccgccataaagaatacgagaccacctaaccacccagacgctcacaaacgaacatgacttcatcggagtaaaacattcgttttaccatcacttggtgaatccttcacgaggaagccaccgatggccgacccctctttggcctataaaaggaggaggtcaaccaccagatgaactgacggactagtgagaggacaaaccaacgaaaggaggaaggacacattgatgaagacccgaagactagagccccccgccaggctaagacttagttatgactccaactatgtagcccttagctccacctcatccacacaagagacttgggagcttctactccctaaacccctacttgatcaacaaaggtgtcgataacgtgagccaccgaagactagatgtagggtcgttctgcctgaaccgatataaatcttatgcccaccacacacaccgtctagagcctagaacacacacaaatttacttgtcggagctaggtttgaaacactaatagttggtgcgctaggtacgagcttgcacgttcttgacgaacccttcaggctccagatggcctataatggcgacaacgtatcctaggcccccagagcgaccatccgcttcgagagtctcgacttcatcgtcaacaacaggggaatgatggttagggccctagaagacctagttccctcgacgagcgactcactcgacattgctggggggtctcgacaacctctggctcagccccccacaaggaagtgacgagcagcgaggcgcgctgcaacgcgccttcaccaaaatcgtgggaatgctcgatcctgacccagactcgatccatgaccttcccctcttggggttggaagacggacttagctcccca

SEQ ID NO: 120157 - DNA, 277 bp, Zea Mays
ttagtaaaatggtcgggcagaaagggtatggagcgatcgcaaccatcagatccgaagtttatggcgccgattagattggattccccactcaaaccgttatgccaaggggctgttggatcagagttgacgacctagattttatgacttctgctctaactgatgctgtagatcatgcacgaggggctaggagtaaatcctgcccacacggtgcgcacgctcaatcctagccaccgatcacggaatctacgtgtcggggaccataattaggggtaccctc

SEQ ID NO: 120158 - DNA, 290 bp, Zea Mays
aaggaactcagaatttaggatcgctatatacatggtagaaaagtctgaggaatcacagtaaagatacaaggaaattttttgatggccttatgatatatttttggtggcacatttggttggagagaaatcgtcgagtgttccaagggcaacaaagagacattgagcaggttgccttctcaatcaagaaagtgtttgaaagcagagcatctctcccgcactcatttggaggctagtggtctgaacgcatcaatggatttaaataggacaaggggagtggagttagtttatgg

SEQ ID NO: 120159 - DNA, 526 bp, Zea Mays
tgggacatgtatctcttcccaacaatataatccattacaaataaaaataattcgttcttatttttttccgtcatctttcctagtcacacatgactatcgactgaccaaagcctaggaatagcaatttgacctatagatttggatatctgtcggaaatcctagacaacggagccgatatgaatacattttagacctgtgggtcagacccatatctgactcgatgtcgtgcgggcacggattaggatattacctcacaccttttgtgttacttgttggatatctgaaatcgatccatagtttatttttttggcctagcctatattatacagcaaagtgcaaacccaaactccctgaatctcatgcctaacgctcccaattccccactgttgtccattccatctagtcgtgctggcttctcgtgtcgtgcctcgtgcccccttctaagtctcataggtcgcaacatcgctagcggttgtcccttccaaactttagtgtctctggccacagcccgcaccccatcggccgc

SEQ ID NO: 120160 - DNA, 368 bp, Zea Mays
gcttaatcttactactgaagatttttgtggtacacttagcaatttagggtcaagcttggttaagctaattggtaagttcattttggtgttccattgatttctttttaatgtcttagtgagagtttattaagattcctagctgaattcattggagtgagatttattattccctctcttcttttctatttcttttatgctcttacagtgggtttgaaatacaagatagcttaataaatttccaaaaattctgcaaaaattacagtggcttcttactggtgtataagtctttgccgcaaaatttgggacttaaaaagtgagtggttctctctgtataaaattatcaaatattagggtagagggggtgtttt

SEQ ID NO: 120161 - DNA, 542 bp, Zea Mays
ggaaaaatacagagaccattaatttggaccagttttaaattaaaatgttttatttagccttatttggattgaaaatcaattattagaatagcaaaactataaccaaaatgattaataaaaatccagtggacttacaaccaccagagccccactacaaaaataaagagcacctcagcccaactctttaagtaaagaaaataaatacaaagtgataataaggcattttcccaataaatcatgaacaacacctattaatgtgataatgggcaaccaaaaattagctaagtccatgatgagataaactaccagagaaaaatgcaaacccatgaaaaagaagcaaactcacacctattgctagtgttttatgggaaacgccacttaattcaaataatgcataccaccccttcccttaagcaaaaagaggccaaacttcataatgatttctcttgcacaaaacaataactgagaaaaataagcaccctgttgtttgatgcttttcaaatatggtggtagtagaaagcacccatttggctagaaacttg

SEQ ID NO: 120162 - DNA, 460 bp, Zea Mays
ctgatgcgtacttgatctggatactctgttgttcacagaaattgaagaattcagagctggtgaagttggatcccaggtcagtgatgatgttatttggtatcccaaatctgaatattatatcttgtataaactccaccgctttggctgaggtcagggaagcgattggcttgtactctatccactttgtgaatttgtcaatggcaaccagcacatgagtatagcctccctgagccttcttgaagggtccgatcatgtccagccctcagcacacaaatggccatgttatggggatggtctgctattgctgtgccgataaatgttgttgttttgacaagaattgacaagcttcgcatctctggactaactcggcagcctcactattcgctgttggccagtagaaactagatctgaaaactttcccaaccagagttctggatgcaacatgtactccacattgccc

SEQ ID NO: 120163 - DNA, 674 bp, Zea Mays
cttggggcattaagggtgtcctggggcatgtccttctataggtttgtcgactcctcggtcgtcgccaatgatgctgcaagctcgtagttagtgcgctcgcacttgtaggccaccttgatggaggcactcgtagtgatgactctgtttgggtcgggcatcttcagttttaggtaggtgtagctcaggatggccatgaacttgtcatatcatggcctttcaaggatggcgttgtaggacttgaggaagtctaccacctcgaaatacagtggctctatgtggaagttcgaggggtcgctaaaattgatggagcagagtgatatgctcgagggggtatgcttgctggtcagatatgatgccaagcaatggtgtctactgggttgcaactcggtgcgtgcaattcctagggaatcgaaggtctcaacgtacatgatgttgagcttgcttcctccattcatgtgcaccttggagaggcgcttcgtgcccataatgggctcaacgacaggagggtaggtcctatggtgtgggacatactttgggtggccgcagtggtagaaggtgattggtgtctccaaccaccagaagtatttgggacaacggggttcatggcgtgtacctcccggcacgccatcttgaggcaacacttgtcggcgtatgcctcggggctgccaaagatc

SEQ ID NO: 120164 - DNA, 276 bp, Zea Mays
ataccaagtcaatgacagagtatctgcatgctttgaatagcttgtctcgctaagcgtcagattatgtggacacggaggccaaaaagattgctagtttcaagaggggtttaagcccaaagatgaagaagagtatgagaatctcctctcatacatctttcaatgatttcgccagtgattgtttgactcatgagaacacaacaatctctacactgtatcaaaagggcgtaagagaaccttggaatctggaatgtcgcagcctagaaccacagtgatggc

SEQ ID NO: 120165 - DNA, 551 bp, Zea Mays
ctaagtggggacgcctgcaccagcaagttactgaagagaatgcaacacactccctttcagatgttccagcagtgacacacattgaaggtgaacgtcctagtgcaaaagtgcgcacaaataaaagcacaaggactttggaacaaccggtttcaaataacttgggaaatcacaaagaaccggatgattcaattgaagaaattgccataaactatgttgagacgggagagttatataaccgaaagactatagttgtcgacactgatttcatctctatgatcgctgttgtgattactgaggatcctgaaccaaagtccatggcagagtgccagaagtgctcagattgggtcaaatggaaagaagcaatagagacggaattgctctcgctttcaaagaggcaagtatttgggcctatcgcccgcacgccccccaatgttaccctagtcgggttcaaatgggtgttcgtccgaaagagggacgcgaataacgtggtggtgagatacaaagcgagacttgtagcacaagggttcacgtagagacccggcatcgattac

SEQ ID NO: 120166 - DNA, 500 bp, Zea Mays
ggacaatccaagtcagcttcctgaccctcaagaccgcgctccaaggtcgatgaggcgcgggacgctgcccgggatgaccccaacccggcgtcgaacacatcagcacaaacatccatcgcgtcaccatccgccggttctgataacagatcctctggaaccatatcttcaagagtttgatcaaagttcgccagagacaattcttgtagaccaatgagggcagacaaagcaggagaaggaacttcactactttccccactggctacgtagcgccaactgttcttccgagtcagagggatctcatcttcttcttcctcctcattttcatcagcaacacggacagcacacccattggggtcagcgtcagatgggtcacacccattggggtcagcgtcggtaaattcaggcacggacacttcctcagcagcaggagccgaaggaccagcatcccgatccaagctagacactcgccgaagacgtcttttcttctttttctgctcatc

SEQ ID NO: 120167 - DNA, 553 bp, Zea Mays
gtggatgtggatacattccaactcgactcccaatgcaatttattaccctctgtaataacttataaattgttctggctcttgttgttgttatgtatagctattaccatgtatctatgtcatagtatatctaagtgtatataaaaaagttatatacctgaaattctaaaatagtttataatttaaaacaaagcgagtagtattttaaaaaaaaacactaatgctacctctccaaatataatagaaaataacactacgtttcattcaagctaccatattcgtttgtggtcatgctggctcgttaatttttttccctgagacagtgcacttacaattacaagtgtcctactcctaacagttcataggacctccttgatatggctaggtggctctagctccggctccaagtcgtaccaaatgtccaaatggcaccgtagaaaatggttttagcaccgaaattttagatgatccggagttgttttacactaggggaggatgtgggtggcaaggaccctaaatttatgacttcttcggtgaagatagagctgtggctatt

SEQ ID NO: 120168 - DNA, 524 bp, Zea Mays
gggccggaattcaaaaatgctacaattgatgaatattgtgatgacaagggtataaaacatgaattttcttccaaatatacaccggaacaaaatggaattgttgaaaggaaaaataggactccaattgatatggctaggtctatgttagctgaatataatgtgtcagattcttattgggccgaagccattaatgccgcttgtcatgcatcaaatagattatattgtcacaagctcttgaaaagactccctatgaattgcttattggtagaaagccaaacatttcttattttagggtgttcggctgcaaatgctatattttgaggaaaggcagtcgactctctaaatttaataagaaatgtgatgaaggttttctccttggataaatttaatagagctttcaacaaaactaatgacatcattgaagaagcgtatgatgtagagtttgatgaaacaaatggatctaaagatgaaaatgaaaaccttgatgatgttggtggagttcaattgagaaatgctatgaaaac

SEQ ID NO: 120169 - DNA, 484 bp, Zea Mays
gccttgtcttctcctctctcttctctctgttcatgccaccagtaaagcacccctcttccaccccttgtgagtcaattcaaatttcctgtgaaatctagtgaaaccaagtggtcatatgtgttcctctgtgtgccttgagtatccttgcaggttcctagctcctttgggagggttttcccacctcaaatagccatttccccaaaaccctaaaactccgccgtccacgtgttcggtgaaatgcccaaaccagccaaaaatgccccgattgaacccaaatttttcaggcaccttcacaacacctccagtaacatattcgccaaatttcacgcccatccgatattccaggctttaatttcacccaattccccgtttcgagcgatcgtttccgagccgagtgcccaaatctctttttcttctcctaatttcaaaccaagcacacacttcactcataatcacccatataaacctactcgtgaagtatcgg

SEQ ID NO: 120170 - DNA, 404 bp, Zea Mays
gagaaaaagggcaagtgggccgatttgttacctgaagcggtctgggcgctaaacacgactgagtgcagggcgactgggttcacccctttccgccttctatatggatcggaggccatgatcccgcaagaaataaaacatgcgtccccacggacagtctcgtcagctgtccccgacgtggacgaacccacttcgaaggatctcatcgatggagaccgcgtcttcgccctacaggctctaaataaataccaagcccaaacaaaagcatggcgtgaccacgtagtcatcccgagggaattcagcgaaggggacctcgtactcgttcgaacagctcggacagagtctaggggcaagctcgagccccagtgagagggccctttcatcgtcaagacgaaggcatcccccag

SEQ ID NO: 120171 - DNA, 724 bp, Zea Mays
gacggtctattattacccagatagagtcgttccctttttgctccggggtagtccagttacaaaatccatgcctatatcctcccacttccattcggcactggaaggggttgcaataggcctgcaggcttctggtgctcggccttcgttcgctggcaagtgtcacaccgggccacatactgtgctatctatttcttcatccctctccaccagcatctggttttgaggtctaggtacatcttggtggttcctgggtggatggagtaggatgagttgtgagcttcatcgagcaggacttctcgtgcctccccttttggtacacacagacggttcttgaaccaaaggactccttgttcatctgtcctgaggtccggaagttgttctttgcgagctttttccataagtcttgctgtctctgagtccaggtgttgagctttgcatatgaggtcttctagcattggtttgacttttaggctgccattgtttcccaaacatgcatacagctgagctgattccttcttccaatcttctaaaaagttggttccctttatcccgaaaggttttcggctgagggcgtctgctaccacgttggcctatctggggtgataatgaatctcaaggtaataatctttgatcagttccagccatcttctctgacggaggttgagatctggctgagtgaagatatacttcagactcttgtgatcggtgaagatgtgacatttgt

SEQ ID NO: 120172 - DNA, 498 bp, Zea Mays
aaagaatttactgtgaaaactctatatgttaacattgatagtaactggtatggctcttgcttcaatcatatttggaaagggaaaatccctccaaaaatcaaagttttcatgtggtttcttgaaaacaatgtgttgttgactaaagagaagttgattagtagaaattggacaggtgataattcttgcagtttttgtccagatttcgagtcgactaatcatttattttttacctgtcacactgctagatcagtgtgggggtgcgtagctaaatgtttcaattctgatcatgttccaaataatattgaacagtgctggatagatgtggcttaatcgtaatctttttgatggcaaagaaattggaattgtcggggctgctgccatttgctgggtcttatggaaagcaaggaataaagcttgctttgaaaacattgtgatcaattctccgatggaaattgtttgtcatgcttgtgcgttgattatgaaatgggcaggtttaag

SEQ ID NO: 120173 - DNA, 504 bp, Zea Mays
ctgctttgtgtccaaccgttgatagaggttgtcaaaggcttgaccccgggctctactaaccgcttgctttgcagacttcttcgctgtcctatacttctctatgttttccgcacacttgtcatgatgtaagcgtttgtagcaatctttcttctccttgatagccttttggacatcttcgttccaccaccaagtgtctttaacttcccttctgtttccttgactcaacccaaactcttctgaagctatctttcggatgcacatcgccatcttcctccacatgatatttgtgtctccctcttctgcccaagggccctcctcgataactctctccttgaaagtttgggccacatcccctttaagcttccaccactttgttctagtgaccttgttatgcttattccgttgtaaacgaatcttaaaacggaagtcagctacgacaagcttatgttgggttaccacacactctccaggtataaccttgcaatctaagcaggcatgcctgtc

SEQ ID NO: 120174 - DNA, 756 bp, Zea Mays
atccgcgtcgtctctcgagaacaaatcataggatgaacagtcgatgaaacttgtatttcgttgggtgcatttcgttgtttttctgttttgaaaattctgatgggtgatgggaatgcacttcatttgtttttttggttttcagaggcactataagtcgataactattcttaactcagtggatcaaccatatttagccaggataagaatgatcaaatgtatgagctaccgctgttttgttgtccagtcaaacgattttttcccttagccgtacgaattttctgtttgaggagtgcatgacctgtaactcttgaattcacaacccacctaaaagaatattgtaatcctgattcatgtttctgttccttcatacggagtataacattttttctgaaacctactcgcatttttgtttgagcctataaatacttctttcggttatattgatgtttcgcctgagcacgctcccatatgtttattccaccagacgaacactctttatttggttcaatctaatttctccctcagaagcaaagattaaagcaccaaccggactcgcaagcgagagcaactattaaagataccgtgtgacaccctccttcactaatcaatattcgtatccacttttttgtctactcaactaatatttaatagcatacggtaacgtggtgccactacacattattctacaaacccagcatgatcgacttgaaagttgaaagttacaagtattatccttggctcaaggtccttattgtt

SEQ ID NO: 120175 - DNA, 573 bp, Zea Mays
ctggtatctagctgaccgaattactgtattcaattgttcttcttccaatatgtcaatattctctagtctggtagcttctgcctcagctatgttttcgaagaccagcctttgtgccccaaacatgaggttggcaggtagctcggcctttgatccatagaccatgaagaagggagtgtttccatgcaaagctcgactacgttgagttcttaggctccaaaccacatatggcaactttctgatccactttcctgtgaacttttcattcttgtcaaagactttctttctgagtgcttccaatatcattccattagccctttctacctgaccgttggctcttgggtgtgctactgacgcatatttgatctggatgcttctttgttcgcagaaatcaaagaattcagagctagtgaaattggatcccaagtcagttataatgctattcggtattccgaacctgaatattatatcttgtatgaattccactgccttagctgaagtcagagaagcaatgggtttgtactctatccatttagtgaatttgtcaatggcgaccaacacgtgagtgtatcctcc

SEQ ID NO: 120176 - DNA, 318 bp, Zea Mays
gcatcttcacacttttggctccaatcatacttggctcccttctttaacagttcagtcattggtttggcaatcctggagaaatccagaataaatcgtcgataataccctgccaatcccagaaaactctgaatctgcctcactgtagttgggggtttccagtccatcacctcttgtaccttctcaggatcaactgatatcccctcctgagaaatggtgtgacccaagaatttgatctccttcagccagaattcgcatttagacaacttagcataaagacgatgatcgcgcagtcgctagagcacgatgtgcaggtgctca

SEQ ID NO: 120177 - DNA, 525 bp, Zea Mays
caggtagctatcacttcatttgagatcctattggctactctctacttctgcttatcttttcactctctcatgtagcagtcaggtcatgatggtgcggacgaagagcgtctcatcgtcaggggaggagacaacggggaccctcctcgccccttcaggcagatcaaggggaagacagtttaccttgagcagcatgagggcaggaagaagcgtcgtatggacagagccgctcgtgcagcacttgcagcggcaacagcagcagagcaggctgagcagggaggccagctctagatctcctcagataagataacgtatcgagtttgtcgcctcgtatctcggcctcgctccactgctcccttcacacctttcaccactgtctccactcctcctcccacttcactagctcctgtcgctcgagagccatccactacttctgatgtacccaccacctccaccactccagcttccactgctccccctcccgctcccatttcctctccacccattccaccacctcgcttcagggag

SEQ ID NO: 120178 - DNA, 484 bp, Zea Mays
tcccatttacaagatggtatgggaaggggctgtaaggtgcctgccaccttcaaatgactgaccttgaagtgtcgcactccgatatatacttagcaatttcccttttcattctggtccaccagtacaaagatctgagatcatgatacatcttgttattgccggggtgcatggagaatttggaaaggtgagcttcatccaatattttctttctaagctcggggttcttgggaacaaccaatcggtctccaaagcatagaattcctttgttgtcctgacggaagcatttgtatttgtccaccctttgttcgatcatttccttaatgacttgaacacccttgtcaccaatctgtgccatgactatttgctcatgtaaggtgggctccactgaaatataactcaaagcaccggagggaacaacttctatgttcagcctgcacaactcatcacacagggtggtgatttttgcatccatactcagacagtt

SEQ ID NO: 120179 - DNA, 420 bp, Zea Mays
gaggtataagggagatttatgaggtcatgatgcttagttgagttataagcttgtcatcttgttcatatttgttttcatcaatcgatgagtagaaagagaatgtatggtattatgcacactttgacttgaacatctctaaaactgctagcgtgctagttcctagtggtgcctatgttcaacacattgcttgcctatgcctctgctctacccaatctcttctttttggtactttacatatcctggtgtctagccataacaacatttggtgtgctaggtaggggaagagcactctctctctctctctctctctctcgattattgtgttttgttgtgcagcaaaaaatgctatgatgggacgatcaaccccgttgagttcctccatatttatgccactgtgatcttatcattggggtgttgaag

SEQ ID NO: 120180 - DNA, 526 bp, Zea Mays
acgaccttgactttaccgcagaggaagcgatgactacgtcggcatgtcaccacctctctacagtccaaatcaatattaactacatcgatcaaacctcatatcgcgcaactcttataatttactatctcaaatacaaccatagcacggcatgcacttgagactcattgttcaagttaacgcaatcacgactaccatacacatgcgtaccacattttcctccacgtacctttaatctacgccaaaaacatactcgtgcacatacctacttacaaacctatgcacaacgacaaaattgacgaccatctcactacaacatttaacaagagctgtgaataaaatcaaaaggagcatctcaccacttcatcatacccattcatctcctatatgcgcgctaattcgttttcttacgacatactcactcgcaatcattccttactacagaaaacatacataatttttatttatgtgcagaacataacacttcttgaggtaaaatgtcattataaacacattacacataattgca

SEQ ID NO: 120181 - DNA, 789 bp, Zea Mays
attttttgtagggtattaagtgtactacaacttttataattagcccaagtcatgacaatgtggtttacatagcccttttgccataatcccatctagggctccattttcctaagggagttgaattagggtttgagttattttctcctctttaggtgcatggtaaggtcaaagcatgacttctaagatgggttacacctacttaggatcttgacccccaagtttggtgtcttttgctcaaattaaccacatgtgatgataggttcacaagtgtagtcttgagtgaaaaccctaagtaacacctggggtgttacagcagtggcaagggaagcggcgacaatgtcgatggcgggacgccaccggaataaatattagtgtagtgtagtagtaggtagtggtagtagtagaagtagtagaagaagaaatggaagtgaagtagagggtgtgttctgccaggtcagttcatattgagccgacccttctcttttgtaatgatctcccccaatatgaatgatatatggctgttctatgtgaacttgaccttcctttgatataatgtgttttatgtcatccttgctggtactgagtcctttgctttgttcgattttatattctgactgataaatttgactgatgtgtgttatgttcgacttagcatgcttggttaaggacttaactgtcttataaccacccgacttagcgcacccaacttagcacacccgacttcagcatgcccaacttagtaggtccacaacatgcgcatatccatactcgctcgtagttgcctcgttg

SEQ ID NO: 120182 - DNA, 571 bp, Zea Mays
ctcagatgcagcaggaacgctaggagatgtgccaagagcgggaggagatacgtcgagagctacgccaagagcgagaggagatacaccaggaaaggagggcgcaacagcaacagtaacaacaacagcaacatcagcaagcaccactgcctccaccaccaccagttccaccccgagataagcaccaggagttcatgagccataagccaccgacatttgctagttctcctgatccactggacacagatgattggctgaagtccgtagagaagatgttgacgattgcccaatgctctgaccaggagaaggtgctatatgcttctggtcatctgacaggtcctcctactgattggtgggactcatatactgctgcccacgatgctgctgacactatcacatgggtggagtttacgacacagttcaggaaccatcatataccagctggcttgatgaagattaagatgaaagaatttctgtcgctgaagtagggaagcatgtcagtcagcgagtaccgcgacaagttcatccagttatctagatatgctctagatgaagttgctgaagatgagaggaa

SEQ ID NO: 120183 - DNA, 446 bp, Zea Mays
caaagatgaaaccctcgatagggtagcagtggcgcccgcaggcatcactactatttgctcgcaaacgagcatggatttcgtcgaaggacccaccaccacatttcctgccgctcggatccagtcacccaccgtcaaatataggaggtggagtggagagatggatctaaccgtggaggctcaagatctcactagtacacggaagttctatagtgtgcggtcctagagcgatttgcactggcattttccagtgccgtccgtgctagaggctagtagaaatcgcccttttcactggcgcaaccgcaagtggaaataacattagcactagcgggtccgtgtaaatatttgttttccattgacggtccagttaagtgaacgccagtgtaaatatatttacacttgcatttccttaaggcgggcccacctgtttattttcactggcgtgctgt

SEQ ID NO: 120184 - DNA, 608 bp, Zea Mays
gaaaaagaaaaagagacgtcttcggcaagtatctagtttggatcggggcgctggtccttcggttcctgctgctgaggaggttcccgtgcctgattttactgacgccgaccccaatgggtgtactccatctgtcgctgatcccaatgggggtgttgcctgtgttgctgatgaagacgacagggaggaagaaaatgaggtccctctgagtcggaagaacagtcggcagcatattgtcagtggggaaagtagtggggttccttctcctgctctgtcagctctcgttggtttataagagttatctctggcaaactttgatcagactctagaggatatggttccagaggaccttttatcagagccagcggatgatggtgtgatggaggtttgtgctgatgtgctcgatgctaggttgaggtcatcccgcgcctcatcgaccttagagcgcggtcttgagggtcaggagactgacttggatcatctcggtcccatggaagtaactgaggggctttcatccttagaggcggctgctgcagagaacctggccctcaaggatggtgttgacgcttacccagcccctgagggtgttgccgagggtgactcggctcggg

SEQ ID NO: 120185 - DNA, 278 bp, Zea Mays
cgcttccaccactcaggattgacgagtcgttttgacgtcttagaggaccgaaacctacgcgagcttagttactagaagattttggactaggcttacgggtactttcccctaattgatgtaacccttgagaacttttgagatctgtgggatgttgtaaccatgttatcttcatttcgaacttaatgttatgattatggcaatttcctttccatataagatgatagcatgtcgttcgaaattgcgagttgggataacaatggcgacaatctccgttttca

SEQ ID NO: 120186 - DNA, 663 bp, Zea Mays
caatgtcaaatagaaccaaaaatcccaccagttcccccacttgtttttttgcacacggatcgatttccacaacttcacctgaagtcttcctagttcccggagtgaacgtgcatgaaccaaattgcataatcttaccaccaacaaccttcttttgccagtggcgacaaaagttcttagagaagacctcaaccgaaggcttactgccatatgtagccgttgcccacataaacttcgccaatgccattaggcattgggagtaagctggtgaagttggacttcgaaacgctgcgggacttagatgacaaaccgatgcgcaggcaatcgaagaccagcaataaagaacgcttcaaaaacaactaactccccctccggctccgggacctcctcggctcgcggagcgcgccccacaccgtctccaaaataccccaagcgttgcatttcatgcacgcgacctgagtagatcctcgacatgccgaattccactgtgtgccccagaaacatatccacaactgtcgtcagcccagtcgtggcggacgatgacaaggaagaagacgacattacgtaccgtctgcggcggcgagcggtctgcttcacatggtccagttcaccgacagtgagaaacctcctcggcgcgagcaatgcaagaaggcatgctgcaacttt

SEQ ID NO: 120187 - DNA, 393 bp, Zea Mays
gattgagaagatatgtggtggtgtgaagagcctcaacccaataaggagcaggaaggtgagcttgaaagagtaaggaacggacgatgttgttaacagcgcggaggacatgttctgctctaccattctgctgggaggtatagggacacaacatacgaaggtggacaccgtgggagaggaagaaagctcgtgcgtgggagttgtcaaactcacgaccattatcgcattgcaagctttttatggtggtgccaaattgagtggcaacaaaagagaaaaaattagcaatagtgggaaatgtgtcggatttgaggcggagagggaatgtccacaggaagtgggagcagtcgtcaaggatggtgagatagtacttgtaaccagaaatactgggtattggag

SEQ ID NO: 120188 - DNA, 543 bp, Zea Mays
ctggcttgcaaattgagctagcagagagagtcgctaggatagccttgcttgatatgtctagctcagtgagtgcccctgcacctgtgcagtgtgcactctatgagggtttgtagtgtgctcttgagtcctacagacatgacaagacaagaatcgaggaaaaaacacataccttcaatctgtcttgagctgggtgtcattcagtgagccctagttgagcatgatggtcagttagttcaagaggggaactaatggaccagtgttaggcgctgctaaggatgtgagtgtcgcttgttttggtaaggttggtgagtgcagtggcctgaaaccctcagagaaacttttagccaccccaagcttgtcaagttcactccacctaaaaatgccacccctactgtgaaaaatggagtgattgaggagcctatgagagcctctccacagaaacaagtgtgaactccaaaaccttaccatctcaggaacacacttgacacccttcacaacatttctagtggtccccttcctagagcctctcagccatcgaaaagg

SEQ ID NO: 120189 - DNA, 355 bp, Zea Mays
ttttcttagatgatatcctggtgtacagtgatactttggagcaccatgtcaatcatctggaacaggtgttcaaaatactgatgcaaaaccagttgaaactcaaacagtctaagtgtcgatttgctcaggataagttggaatttttgggacatgtgatcagtgccaagggcatagcgactgatccgactaaggtggaggtgatcaggaattggcctactccttcctgtgttaaagacgtgcgaagtttcttgggtattgctggatattacaggcgatttgtggctggttatggtctcatttgtaaacctttgacaaatctgttgaaaaaggatcacatatttgtgtggacctctga

SEQ ID NO: 120190 - DNA, 554 bp, Zea Mays
atcgccttaagtcattgccgacttaagccgattgctccgttattagggtatagtggtcaccccgagttaagtaagcgtgagcatgtcgtaccgccttaagtcattgccgacttaagccgattgctcggttagtagggtatagtggtcaccccgagttaagtaagcatgcaggttgacagtgaacaatttgagtgcctttgaagtctttttattgatgatatatttcccagtttacagaatacattgtcgtcctaatagcttttaagatatagctaggggtaaaacttcctgagatgttctatgttccatgagttcccaatttctgtgccatccatttgagtgagacgatatgatccaggctgagtgacttctgctactatgaacggtccttcccatagtggcgacaatttgtgtcgtccctcccccgttagaattcggtggaggacgaggcctcccactgcaaaggatcgatgtcgtatgaccttgtcatgatagcgcctcagagtttgctgatatcgggctgactgaatcaccatattcaatcgttcttcttc

SEQ ID NO: 120191 - DNA, 817 bp, Zea Mays
gcctgatttactttggtatatggtcgaaatttttaaactttgctgctcacattctaggacaacgcagattcatcaatcgaacttaaatactgaaaacagtcctaggacaagcgcagattcatcaaagtttaaatgataaggccaaagacagtaaagtttaccagattcatcaacgtgagcaagtaaatcaggccaaagacagtaatgagttcacttatgaccagtctggaaaaatgcagagagaccatccatggacaccaaatcaacataacaaagagaggaatggtggaaggagtggctcacctcgaataggcgcagaagagacgacctgcgcgtgtctgcccttctgctacgcagcagatctacaagaacaacatacatcatgagttccaggaaccgagacaagagaaattagcactggaagaaatgaacggacgacggcgacggagtcgagaggagaaagcgcttccgccgggtagcaggccgacggaaagacaaaggcaccagcgaaggggctccacatatgtagtagaaagcagagggatgggcgctacgacgaaggacagaagaacagcgatcctgcgctgttggaaaagcacaggcgacgagacggatttgtgggattttaaaatccgctgaacagccctcacctaatgttatgggcacagcaccgaagcacagcgacgcgcgacgagctggacagaagacctacaccagcgcactgacgtagccaacggcgattctggaaatctaagatctacaacggcgcaccggcctgtagcactatgcttgcgctgttggagaggctgaggcggcg

SEQ ID NO: 120192 - DNA, 357 bp, Zea Mays
agcagctcgagctcaacctaggatggcagtaggaaagatatcatgggtacacaggggcatacttatacccatcaataaaaaatactcatatctagactcactacactacctatcatgggtataaaattatctcaaactcacatccaccaacattttattagtcatgattattttaatcacaaaaataagtaccaaatacaaaatattagagctccatacctcatcaataattaaagatactaaaatagtgtattagtttgtccagcatgacaaactcaacgaacccaacatgtcataggtgagtggggttttgtacaatttcacaccaaaaattagggttaggcttttggtatttta

SEQ ID NO: 120193 - DNA, 393 bp, Zea Mays
atcaaagaaagtaactgtttttttggaaatctatttcattaggtttccttctgacatacaatgtagttcttcatcctttggaaaattggtcagccggtaagaacgacactaattatcacattgaagctaggttttgtcaggacaaaatcaaaagcaaacctggctgcatcaatggcatcaacaactggtatactaatatcaactttctttggagcaggggcatcatttactccatcaccaagtaacaatatggtaaggaaaaatagcatgtgtcagtaacaaataataactaaaatattatggactcccactgctgagtactatggtcaaatgaacaacatggctaagctagcaatgatcatgtcatgagaaatatgacatccatacatagac

SEQ ID NO: 120194 - DNA, 552 bp, Zea Mays
caaaactcatggtattattgaagaagcatatgatgttgagtttgatgaaacaaatgggtctcaagatgagagtgataatcttgatgatgttggtggaactcaattgataaatgcaatgaaaacaatggccattggtgaaataaagccaaaggaagatgatgatgaaaatagtgtggttgtcattccttcatcttcaactctaaatgaagaagatcaccaaatccaacaaaatgatgaaactatggatactcatgatcaaggtacttcaagacattcggttcctcctaatgcttcaactagcaattatcaaacggtatcaagaattcatcattctattatgaaggatcacccggtaaatcaaattgtaggtgatattagtaagggtgttcaaactcggtctcgcatagcttcattttgtgaacatttctcttttgtatcttgtatggaacctaaccgtgtagatgaagctctacttgatgttgattgggtgaatgcaatgcatgaagaattaaataacttcgctagaaatgatgtttgggagcttgttgagag

SEQ ID NO: 120195 - DNA, 403 bp, Zea Mays
atgtcgaacaatgtaatcaatatcttcagctaaagcttcggggacaggagactttgctttttctgccatatcttgctctgctgtcttgctggtatctgaaatttgctgacccaccttatcttcaggctcggcggccttcgtctcagtaggcgctgaaggcccagctttggcttcgacttggattttggcagcttcggcagttttcttggtaggagcaggagttaaggccttcgtggtctctataacagcgtctagcacgctggccatcctcctcctcttgggagttgcagcaggagctttttgcatcttcggcaaatttgcctctaccggtgggctcaggatttctggcacttttatcactttttccacctgtgactcttcggccttatcatctttagcttcg

SEQ ID NO: 120196 - DNA, 286 bp, Zea Mays
cttcaaccattctgttgcaaccttacctatcttactcttgattgttttctccacttcgccacctagcgagtcttgcctgaactctatccttatgcttttcattattatcacctttacctttgacacctctatatcttacattgatgtttatcttatacatgccctttaaattctcctcttttccatctcaatctcgaagttatattttacctatttttcccttggtcgtatcctcctttttgtcgcttgcgagttttcaactccatcctttgttgtgcttctgttg

SEQ ID NO: 120197 - DNA, 309 bp, Zea Mays
tgtcctcagtttcttcagaaaggtatttgtcaagttcatacttagtgttgttgcttgaaccaatgcctttgccgagcctcattttcttagcaacaatttcctttagcttccttcctctacctcttcctctaccttcctttgatgttattgggtcacttacattggttgtatcctcacccgaaacatacattttcatatactcctcgaacaactcatgaagacaagtgttaattgcttccgaaactatttgtcccctttcctcgccaaatatctcttcaacggttatcttggtatacaaagatagcttgt

SEQ ID NO: 120198 - DNA, 684 bp, Zea Mays
cgccaacctcagattcggggcaccgaggctggtcttcgaaaggatagctgaagcagaagctaccaggctagaggatattgatgtgctggaggaagagcgattgaacccagtaattcagtcaaccagataccagcagaccttgaggcgctatcatgataaagccatacgacaccgatcctttgaagtgggagacttggtccttcaccgaattctaacgggggaagcacggcacaagttgtcaccactatgggaagggccattcattgtatcagaggtcactcggccgggatcataccggctcactcaaatggacggcacgaaagtggggaattcatggaacatagagcatcttagaaagttttacccttagcaaggcctcaaaggctatcggagcaacattgtactctgtaattggagaatccatcatcaataaagttttcattctcaaaggcattcaaactcttgactatcagctgacttagattcgattggactcggaatcaacacacttactcgacttagggtggccactataccctcctaacggagcaattggtttaagtcggcgacgacttaagacggtgcaacatgctcacactcactcgacttagggtgaccactataccctactaacagagcaattggcttaagtcggcgacgacttaagtcggtacaacatgctca

SEQ ID NO: 120199 - DNA, 340 bp, Zea Mays
ccaccaggtaagaatactgaaattagagccaaactgagttttagtgtcactgccaagatatgaagtcagttcaaagagaggagattgagaagatgatactgagggacctgcaccccttccaatagaagcagaaaaagaatcatcgtcaccatagatgtcatcccaagcctcacttgccttaccagaaccaccacatgcaagctgttgatttgcactcaagcacacctcaccaaatttggtctcatagtttatgtacatcttacttaacttggtacgaatagtagatggaaaggtactataatcaatagcagttagagaatacaacctgagaagaagcttg

SEQ ID NO: 120200 - DNA, 712 bp, Zea Mays
tttggacttcaaatgaattttctaagaattaaataagtttctgcaattaattttgtattgaaaatcatttctaaaatgaattcatctgtctctggtccacgcacactaataaacgaaaatccaggggcctcagcgcaagtgccaccaagaaacagaacccaactacgtggaccgcgggttgtttttaggtaaaccgaggggttcttgtgcaaaatgaactggcgaaaggggtacggggtgatataggccgcaggatcatggatgaacgatcctgattagatcggcatcaactgcgaaccggtatcgtatcctggccgacggttcgccatccaacgatccacattttaaataccagaggtcccccgcgatccatccgatcgccaacgaacggacgcggacgaaactctaccagatttaatgcccaccgcagcaaaaggatctgacggctagcacaaggctcttccccggttcatccccaatcacgacggcaagcccaccgcggcggagcgccatgaccaggaccgagcgaggagcttctcccagtggtcaccatcgaattgaaacaaagctacacgttgctgagactacgacgagcaggtatagggcacacttacccgcagctaggaagtcgagataccccgacctcgggcggggcggatctatgtcggcacacgaacgatggtgagaaattcctcgacaaccagccggtctt

SEQ ID NO: 120201 - DNA, 825 bp, Zea Mays
tcacaagtgtgcaaggggaggaggatccatttcgatagttgatggagttgtccctatatgacataaacaatctgatccataagtggatggaaatgggtcactcaaacacggatctagtgctagatgaggagaataccgagagtgacacaccattaccataaagcctcatggctcaaatcacttcaagggaaactttggctgagtggactaagaagaatgtgggggacactcacattggtaagcgaaaggtgtagttcgtgttaccaaaaagaagcaaagaaagaaagaagtggcaagcgatgatgagacctatactggtgattaaagtccacaataccaagagtctatcgatagcagttcaactacgtcttctgatggtgttggtgttggtggtggtagtgttggcggtagctgtgttggtggtggtggtgggtctgagatggctcctcccatacatttcacaggtaccattacatttggttctcagtaaattagtgattgctatctaaccatattattgtaactatgtaggggagtctaagtatgaatacgcttgtaaccgaagaaagaacaataataggatgaagttgttgtcacttgactagtgtatcctcatcatatttttatacttcatcgtattttgaatcagcgttcatcatggccttcttcctttaatttatcccctcggcgtgaatggatagagaaaaaagatgggccatgttacttaagttgttttgctctattttggttctacacgggaattttgacgggtgacaaacaaggactatctaagctagaactcacaggaggcttgttggggacttg

SEQ ID NO: 120202 - DNA, 554 bp, Zea Mays
atttggttgagacttcagagtatggttactcagaagatggttaaatcgaagatgacgatgagtttgattcgaagagtttgtggaattagatttttaggaacaacatgaacaggagaacattgaatttcataacatggttgggatttccgacaatattggttgggatgtagacaagtcgtgggatcgtatcatgtgactcctcttttgcgatgtctattaattaaggcttcatgatctatgtgctacttgtagtaaggttggttgtgtaaggtcgtctatgtgtctccttgtagtgaggataagctcaaattgtagtaaggttcaaatgcaacttgtagtaaggtagtcaatgtcagacttcatgtaaggttacctatttaatgttgtctatgtgagacttaatgtatgcttttgtatgcttatgatgagatgattttgtatgcttatgatgagatgcttttgtatggttatgatgagataattttgtatgcttatgagaagatgcttttgtatgcttatgatgagatgattttatcatgatgtgcaagaagttg

SEQ ID NO: 120203 - DNA, 543 bp, Zea Mays
ggcccgctccacagccgcgcttcacttgcatgcaagtgccgacatgtagggcccacaacttcagccacgtgtgtgggagaacatcatttgctctctaattcctggggccctcctcgctagtgtctcatgacaacaccgcgagcctaactcactgattcgtgggactgagctagctacgatgttggctagattcccttggttcgggtgcataaatacccccctcgaactccttaatccatccatccgtcgaggccatcagccaccagaataaagaggaagcagagagatggagagaagctgagagagagggcgccgttgagcgagatgaatcgcagctgccttgcgggcaaagccacgctgttgttcagtgcccggaagatagtccaagggactcgcatgatctcatatatgggggacatacaagttgtcggtcatgagggtcctcggaacattcttgattcctcgtcgaacttggcgggtttctgtcgggtcgcaccacaccataggcaggtcaaaatgcaacaccattcaaggtaatacctc

SEQ ID NO: 120204 - DNA, 371 bp, Zea Mays
gaagaatgtaaaagttcatgtacctgagctctaggacatgccatttttgttttcttttgtttttttgcaagcaccacgtagcagtttaaaagctaaattccaccgaatctatctctatatatgcatacactcagaatgtctccaaaaccctccttaaaaatcatttgggaagtcaatgcatgattatgccaagtgatcgatgaacaaaataaatagagggctctatttttatcttcctctctagtagtttttagtaattagagaatcttcaggactctgttgtataatttacttgctaaaccagagacaagttaacaaaataagcaccaaccttaatttaccccctccaatagtttaccatatgaactttc

SEQ ID NO: 120205 - DNA, 464 bp, Zea Mays
aaccccatcgcacttggactataaaagggagagagggtctccttcacaaggtgaggccacggactcaacacccacggacacacacacacacacacacttagtcattttccgagcaatacaatcaagtaactaagaggacgtagggtattatgctctagtggcccaaacctctctaaattaggtgtctcttgtgcataatacacagccccaagttgtgccctgtctcgtgaacctagagttctttgagtcttgatagaggtcctgatatcgtggtgatcgcctaagcccttgcgaacctaaaaggtggtgctttcgatacctcgaacagaccacctgccattagttggtgtgccacatagattgctatgcatgtcgttgtagcaccaacatggcaacttgtgagcccactacggagggagaggaccatggtgccctctcagacaccgactctcactcccctaagc

SEQ ID NO: 120206 - DNA, 373 bp, Zea Mays
caagccttgacttaactccattcttggtggtacttgtaacactggccttctatgcctttatcttttctcttacacacttgtccattatcgcctttgacccttgcggtatttatgtctttacctaaatgcttactttgaacctaccctttaaggcctcctcttttccaacctagtttgaaagtggtgctttacctatctctcccttgattgtttcccctctttatttctttgcaagttttgtctcaattccatcccttgatgtgtttcgatttgctatcaccattaccgttgtcattcatcgatcttaccttgatacctatctttatggttgctctttaaaccccctctcttccacttcaatttgagagtggca

SEQ ID NO: 120207 - DNA, 323 bp, Zea Mays
gtcgtttctatggaacttgcgtcctgggatcgcaagacatgtggctactttctttgtacgctgattgttaatactatatcttataactagtgtgcatgccacaggccttgtgatgtcatcaactggatagcggaccttatttcccattgacgcgatagagcttgggatggtcgtaccctcggtggaagctggcagttgagctgctggaattatttgcatatgtggagtggtcatctgttgaacagacatcgcactcgccaattgctgcatcaattctagaggaggattcgatagcatttcagacatcaggcctttgaactctt

SEQ ID NO: 120208 - DNA, 688 bp, Zea Mays
cggagagagaagaaagggagagggcgcagaagtccggagcagacaatagagcggaggtgtgcgcgggcagggccacgaggcagagcttggcggctttctgtaccgcgcaggggatattccggttgggcttcaccacacgccgccattgatccactcctcagcgagctcacgtgcttctgcgttgtcaactcaggtgatagcgcatccatgtagtttgtctttttccttctcaacgtgtagcgttggtattggggggagctattggcgccgctccgcttggttgtatgggtagatgagagagagagagaggtaggagtatcgcgaagaggaagaagcactcaggtgccgttagatttcaaaactgcggctcggatcataggatagtgatacctcttcgtagcatgaaaatctggtcgttgatcgtccaatctgcggcttaggttatcacgtgtatacctgtcgttcgtcgcaaatctcatggctatggatgcgtagcggttcagcctataacagatgtaatctaatccactcgattttgatcggatgactcagatttcaccataccccttcgccttggcaattatgctaaagagcccccgtagtacttatgaatcaacccgcggtacccctcggttgtgcatgtgtctggggaattttattgttgaaacctcgagcttctctgtttttg

SEQ ID NO: 120209 - DNA, 336 bp, Zea Mays
tggaagccaaattacgagcatggttggaatcaaaggggaaaacaaagtgcatccaaaaaatggatggtcttttctccccaattgccagcaagactctattgtctatgacccatatattacatggaaccatacatagttcttatttctttatcttctcctgcacaagatactttttgatccagtagtccttgttcccactgaaaatatactacgagagcacatgcagacagaagtagatacaccaaagaaaggtactttaggaaactttagggtattatatttgtgtgaaatagtagttacaaaatatgaaaagttggttgaaatttactcagaaca

SEQ ID NO: 120210 - DNA, 287 bp, Zea Mays
aaacccttgtgttctctttgcacatcatctgcacgataatcactaggtactggtatgaaacatcgatagttggcgcgctaggtaggggctttttgtgtgtcatgtcgttttctccatcaccgggtagtggatggcaagccacagtgtatgagtacatgatgatgtcctttggattgactaatgcatccacatactttatgcacttcatgaacaaggtcttcatggagtttcttgataacttaatttgttattatgttcatggatgatatattgattttatccaagga

SEQ ID NO: 120211 - DNA, 381 bp, Zea Mays
gtgtcaccacttcgtggaatgaggagattcaaagttaagggcaaattgtcccctcgctatattggaccattctgagttttttaggcaagttggagagatggcctatcaactcgagctacctgataatttatctgatgtgcaaaatgttttccatatgtctcaacttaagaagtgtctccgtgtttctgaggaacagttaccaatggaagagctcggtgttcagggtgagttgacttacacggagtatccgatcaagattcttgacacattgactcgagttacaagaaataaggtgatgaagatgtgtaaagtgcaatggagtcaccacgaagaagatgaagcaacttgggaaagggaagaagagcttcgcatagattttcc

SEQ ID NO: 120212 - DNA, 297 bp, Zea Mays
caataatctcattgctcagtgtaagaattttatgctttcagatgatgaagataaatcaaggtggcttttagggagcaagggtttttcggttaattctttttacaaagaagtgaagagatctcagattgctgttccatcgaaattcttgtggaaaactaggttaccctataaaatcaaagtgtttttgtggctcgtcatgtataaaaagattctacaaaagataacttgttcaagagacactggcatgggaaccttgattgtgctttctgtggacttccggagtctatagaccattta

SEQ ID NO: 120213 - DNA, 434 bp, Zea Mays
ttccaggtagaataagcaacaggagcaccaacgttcgaaactctgcccctcaggatcatatcaagttggctcaacagatcggcagtgggaattctcttgtttgtcacccgggtgccatcattgatgccgctgtacagatatgcagggtacctgtccttcaaaggctggatattcttgaaaacgaaatcggcaaccacagcttcgacagtcagacctttctccttcagcaaacagatctccgtaagcagaactctggcctccgttacctccaagggagatggagactcaacccagctcggagtatgtatatctggttgcctccccgaccgaggggggagggactcgtagtggttttccacaataaaccactcaaggcgccaccctttaatgctatccttaagaagaaaatcaaggtattctgtcttcctcccgcg

SEQ ID NO: 120214 - DNA, 912 bp, Zea Mays
ggaaattatccagtgtcccatctggtctcgcttcagcctccaaaggccaaaggtgaatattgatagtgatgttgaagcgtgccagaaggcctttagtactgtgtgcgccttcattggcgcgagggatttaattcaagagcacatagcctttagggtatggccacttgtggagaattgggaaatgccgaaggatactattgctgaatcgagtgaaggtggcctggttcgattaaagtatacttttagatttagggagaagtttgatgagctagatgatggctggctgaaatgtattgaagctaccagtgatgagctactcggggcatactccaaggccgaagataatgctttgtccgcagctttcgggggtcggggcaagaaaagattgaacaaggtatttgatgcgattgacttcgtataccctgattaccactacccgctacgagggcaagggaaaaagagaaagactgccgcttcggccaccccagctgagcaaaatagcaaaacggtgaaggttctgacccaccggccgcgttatattgaaccgaccgtggtgcctgaatttggccaaggagcctcttcaactgccgaagcaaggcaagctgctccgattgtgcagagtgttgaagagccgattgtagtgtcgaaggtacctacagttgggccagccaaacctagagatgataaggctgaagagccacaggtggaagaagtgatgaaaactccagaaatcctgagcccaccagcaaatgtagatttgccaaagatgcagaaaatgcctgccgcaactcccatgaggagaagaatggccagcgtattagatgctgttatagagaccacgaaggccttaactcctgcttctaccaagaaaactgccaaagctgccaaaaatcaagtcgaagccgaagctgg

SEQ ID NO: 120215 - DNA, 465 bp, Zea Mays
cggaccctgaagatggactacgctaggagactgaagaagctcgcccccatcaagaagatccaaaagtgtttcaagagccaaggatgtcagactgacatgaaggaagaagccccaccaacactaccctccctagggatagagaacttttgtaacatcgaggaagtgtccctagctagcctggttgaccttctcagggagtttggggacactttagtagaaaacgctcatgtgtagtgtaatatgtggtggttgttatgcttgtaatgaactggagtgctgaataaaataacatgtttgagaaaaaaaatgatggcatatgcatagtagtaatcctttctaccctctggcagatggcctcggataaaaccacacctaccgcctcaggaattggagcaaggactcccctaggtatcgaaggagaagtcgatggagaagggagtgagacccacctccccgcacctccgg

SEQ ID NO: 120216 - DNA, 539 bp, Zea Mays
cacatgatttggaattggcagccatagtgcatgccctaaaaatatggagacactacctgattgggaacaaatgtcacatcttcaccgatcacaagagcctgaagtacattttcactcagctagacctcaacctccatcagcgaagatggctggaattgatcaaaggttatgaccttgagatccactaccaccccaggaaggccaacgtagtagcagacgccctcagccgaaaacctttaggaagaaaggaaccaacttcttagaagattggaagaaagaatcagctcagctgaatgcatgtctgggagacaatggcagcctagaagtcaagccaatgctagaagacatcatacgtaaggctcaacgcttggacactgagacaacatgtcttatggaaagagctctcaaagaacaacttccgaacttcaggacagatgaagaaggagtcatttggttcaaaaatcgtctgtgtgtaccaaaaggagaggcacgagaagttctgcttgacaaagctcacaactcagcctactccatccacc

SEQ ID NO: 120217 - DNA, 1043 bp, Zea Mays
atggggggacacttcaccatgcatgtgtcacctctaccttaatggggggacacttcaccatgcatttgtcacctccacctttcatggggggacacttcaccatgcatgtgtcatttaccactttaatgggggaacacttcaccatgcatgtgtcacatccaccttacatgggggacacttcaccatgacacatcaccataattctagagaggtccaaaaatatataggcttcgtgacttaccatgattagtgtagggaattctagaaggctatgtacatcatggttatccatggttgttcctagaaagttgtcttgcttatgattaaggtttatcatgaatattgtataatcttctagaaacttggttatgcttattatatgacaattgtttaagcgaggttttccttgcatattttcaatgggcaaatgatggccatgggaaaagctgtcttaattgatgctaaggtcataacttctatagtttaagaacgacttcggggggaggaagaggtcgaagatcatggcatgctcacctatggctcaaatcgacgatgagggcttgtcctctggtttgaagagtaaggcacgcgttgttcggatgtgagggtgacaatgagatggtgactggactgtgaggttccgtggcaagggcatcagtatttataggcggaggaacgacaatttataatggagggagtctcgaccggcgtactgtgattggcgacgttgccacagtgcaatcgcaacatcccgaggttggcagggtaacttggctcatggtgggtcattcatttagttgtgattgtgacaagtgactggcgtgtgctcaggcgggtgcatgaggtcttgttggagtgactttctgcactgaggtatcacttcaaggtctgcaacccgaccctttaatatagcagtttggcatgcatgacaaggctgtctcagggcagagggtgtaggtggggcttgctaggacgcacaaatgccaaggcatgtagaggtaggcttacgatttatttacgcatgtgttttgccacaagtggtt

SEQ ID NO: 120218 - DNA, 978 bp, Zea Mays
acactaaaagctttgacgaccttctacggataccatccactggagatgatgatgcacccacttggactcttccccgccgagaagagggatgacctgatatggtgtacaagagtgagccacgtaaaggatttgtgggccatgcatcccgaccaggttgggagaatcaccgtccagtgcatgagtgcactgtaccacctgcaggccttgcaaagcgacgccatgacacacctcactgggctcgctcaaactgcaaagatcaccctcgacgatagggagcacttcgtggttgacctttctttagaattggtggagaaggatctataggtggaacaaatgagcaaccgcatccaagcattggagcagtaggtggaaacccgggacaacaccattgagatcctagaaaactagctccatgatgtgcaagaggagcttgcggaggccaaggctcacctagaaatgcatcaccaagaaatgaacgctaatgaggcagacaatgaggaggagcaggatcccgaggaaatagagctagcttccagtccaaacacgacctactccggagtgtcccctacacctgcggccagtgttgcctctaccaataagggttagacaggttagaattaaacatgttaggagaaagggaagaccacgtaagcttagcttttggtaccaacttttggactaggctttagggtggatctcctaatatgatgtaacccagaaaacctgtatgaacaatgcaatgaatgaatggttatccttgtttggttcgatataattttgtgtcatttttcttctcacgatataaagtcactgcttggaaccctgaatcgaggtaacaacgacagaatttctgttttcatatggcagctagacctcgtcgcgaacaaaacgagcaggttcccccaccacctcccccagctccaacaatgcaggaactaagcagaataagatcctgcggtagctagtgcatcgctagcc

SEQ ID NO: 120219 - DNA, 734 bp, Zea Mays
ttgtgtctctcgcttgttgagtttgagctagttggacatttgggtacggctgacgagatctggtccacacttgagaaattccatgagggcaatgatcatgtgaagaccagactctttgagacgtattggcgagagtacgagaactttattcagttgactagagagaccattgacactatattttttcggttctagttgattgttaacaagttgcgcaaacagacacaactaccatatcacgatcatgagagagtgctcaaactacttcatgctctggattagagggtttcggaggtgaaagtaacgacgatcatcgagtcacccaactatgagactctcatagtggacaagttattcatcaagcttaagtccactgagattgaccactagacctaggccaatattgagaatcctagtgcacccaccatggccctagtttctagaggtagttcctttttcaacacttcacctgctttgtttgctttgtcttctttgttttctatcacagaggagcaggtggagagccttgggagtgaaaatctagcgcttgtggcctgccgattcacgtagtttcataacaaccgctagaatcgatggcaaggcaggtccaacgatggatgctacaactatggcaacctcgaccacttcatcacaagtttccctaagaagcgcaagtcggagaccgacaagtgcgaccaccacataggtcggtgtaaggccaagaaggagtacac

SEQ ID NO: 120220 - DNA, 322 bp, Zea Mays
gataattaggggtacccagactacacccctaattacactcttaaaaaccctaaggacactaccaaagtacgtcccacgaggttaaggaatcaggaactctgcctcgcctgaggtccctctcaggggtcttcccaaaactccgcctcgcccgaacctgatcttggatggggcatgagctttggagaatctctgtcccaaccgagaccccctcaccctaggacatccatgtttgcctctcccgagcccgtttcgggcgagaaggtcaagacctgtggcaaggctgacccgaaggccactgggggacaactgcattcaatgcgcg

SEQ ID NO: 120221 - DNA, 473 bp, Zea Mays
ggacactataacaaagttagaaagggattatagggcaacaatttccctgctggccgaagatcaagttgttacacaaaaattgacgaacgaagcactacaaatcgctctgtcagaaccactaatgactagcgcgatggtacagtgattggatcagatcgccaagtttggtgtacctcgttgccggtgacctccgcactgcgattcacgccgatgccacgattcatgccgataaagagtagataaccgtgagggttaaaaagatctcggggaagaaggtcttagccggggctgagtcaccgccatacccacttgcccgcgcggtcggtaaaatatcgccgctggtgctcgccatgattgcagcaagggacatgtagtcgcctgattcaccacattgccgtgatcgtggcatccccgagatagtggcagtcgcaaggtgaacgcatgcgctccacggtgaggttcggtgattgcct

SEQ ID NO: 120222 - DNA, 475 bp, Zea Mays
atcccggaaaaaccgaatcaactactgaggtgactaagagggtggaaccgttccccacaaagatcgaggaaaggatgagaggggtagggaggcgccggagtcgaccacccaatcggtgggaggagggggtggcgaagacatagggtgcgagaagagagccacgagatgtgcccctatagagccactagaaggtgggggagacaacaaggtctcgatcgttagggaggcaatcgtagcattggggaaaacaagcggcccaggagcatggtgacccgcctgggggtggagcgcgacgcaatcacggagaacagggttcatggcccgatcaaatgccatgaatgtgctctagagaaactagccgtcgtgaagggagacacgtgcacagtagggaggcatgggaaccgcaacggaggtaggggtccctagaagtgagaggtggggcgaagcaggaggtgccgagggcggtgggacacaa

SEQ ID NO: 120223 - DNA, 293 bp, Zea Mays
ggaacaatatcatccatcgaggtcttcgcggagctccaagccatgaggtaattaaaccacatccacgccaccaaccaacagatcgatatgataataataacgcacgagatcatcaaaaggacgtcgatcacatcatgttcatgtcatcgccagctgaacgtcgatccggagaagaagaaggaccaggaggggagccgcggcggcggccacctgctcccgcagcagttcatcgggctcagcacccccgcgttgtcgttcgacgacccgctgcgcttcgtggcctcagacgtgca

SEQ ID NO: 120224 - DNA, 576 bp, Zea Mays
cttcatggtgattgcatgggccactgacaaaaaattgtaaggggcaggtccaacgagacttgagaggacaggtggagagggtatggatgggaagaatataagtagatggggtcacggagataaggaagaatagatggccctgaccaaatggggataacatttgctttccatagaggccgaaaatatatttatcatttgcagaagtacatctcttacaattgtggatatgaaacaggtcaaacagctggtctgacggagcatgtacatgcatatgataaacaggatatggtttaatcatctaatgaccaaatcattatctgtataatacaaatttatttgagcacctacctttactcgggtgcatgattttttttgcttatctatttgtgcctctagcacccagtttcgagggtgtacatggaggcttcggctttgggactaggaatcaaggagaggaaatcctgaactttgccctagcctatgacatgtttatagcaaacactttctttaagaagaggcaatcccacctggtgaccttcagtagtggccaacacactagccagattgatttcgtcc

SEQ ID NO: 120225 - DNA, 805 bp, Zea Mays
ggcttggttactttggtaacagtgtcgggcgggccctaggtgcagaggaggtccccgagcctcaaggcgagttgatagtttttgaggctttttttgttgccggtcttcgccttccgacacatcgattcgtggcggaggtgttgcgatggtttgaagtgcaagtccaccagttgacgccgaacgccatggtggcactagcgaagtatgtctgcacagttacttcctacggcgggcaaccgtctgtggaggtcttcgccaaaaattattgcctgcattggcagaagaggaaaataggatataagatagcacaatttggatcgtgcaccttcacgccgaggactgggaagactttggctgaggttgtggagatagtcccctgcgctaggaacaaatggggtaactggtgggatttttggttctatgtggctcctagtgacgttgaaggcctgccaagcctacctccagccattctgtgctcacactgctatgtggtgtttcctcgattcgaggtggtggaggaagatgaagacgaaggggcccttcgacatgctacctgtctgagtagcgggcgtgacttggttgaggaatttattgcctatagagtgtggcacttggtgcacgactgggtattgggcgaagtgaccccctgtcggatgccaaccctgggcgaccagctggtgcgaggtccaaccttcgtggtggatttacatggtcgcaacgcggtcgcgtttgtgcatgaagtggaggctgaggccgcgaagattgtaggaaaatatgtgtcgaagacggaaactctgaggagttg

SEQ ID NO: 120226 - DNA, 639 bp, Zea Mays
cctcatcctgggactccttctgcttgtttctcttgcgctccaactcctccatggtgaagcgatgactcctctctagggtggtaagggaactagaggcatcctgatacaacttatcatgattgttttgggagtcaagaagtttctagatctcctcctgtgggtgggagaacctttggtaatagatcaaaagcatggaataagcatcttgatgctcccggcaggttacctcgtgggttttcttctccaaatcgaactttgattacagggaagaattcatagcatgggcaccatcaagaaacatagtcacttgatcaatctccgcccgacctcgagcacacctctcctcagcatcagggcaccgtcgagtcaaagttgaagaaatgactggaaaccatttgtgatatgaacagaaagaaaaattgacaggaagcatcaacaacaaactcactagtgttagtagatttcagatcatctatttgcttctgaagagaaagagtattccaccacgacaagaagaaagttactcagggattggagcaccacgtgcttccagctgagtagccaccaagtccaggagactctgtgggtacagaagtcagcagagggaacacccattggtaaaaacaaggtagcatggga

SEQ ID NO: 120227 - DNA, 404 bp, Zea Mays
tgaatcttggctgttcgatcaaatcgggttgttggtgctggtgtctggcgtgggggtatcgtgggctgtccatcttcgatcgtgtggtcggcataggatccggttcacatagacaacccctctaatctgcgcccttgatcaaaaatccgaaggtcagttatcatcggacccccccttggccgcaccgttttacgaatgagacccagtactttcttgcaataaatccgccatccacaacagtattaagattatagcagaaatgtcctagaaattacaagttgaaccccgtgttcccagaatatcatgcgcaccatccctgggctttcatgattcatataaataatcctaggaaaatgaattttagtagaaaaataaaactataaacttgtttaatccatatcttg

SEQ ID NO: 120228 - DNA, 598 bp, Zea Mays
cggagagacgctcagctggtgaaactgaatattctcgccgcaatatacaatgcctggcctgcaggtccctttcgcactggtatatactattgcatatgctgcaagtgacctggtatcatgctgctactactactagcacatgttgtttcaccaatcaccacacgcttggcgcttctgctcaaggctgactggcgcgcatggagctggtgggatctggatgaggaccacaatgcaagcaccaacactgacgggttggttagttattagtgactgtgttgatacgcgaaaagtacaaggctcactcagagctggtcagatggacccctaaacccaaccaggtcgagcgtttaaaattcaatcagatcgccccttcatctcggccagatcagcttcctgttgtcaaatcataatgacaaatcgtaaaaagatgggtaaaaagatggataagcgacataaaattcaaaccaagctaacaatttgcacgggtgcaaagagctaccttggattgtgcttagttttgtggaagattgttactactaaatgatgctaagatataccatataaagatgtacttttgtaacatgtaaaccgaatgatg

SEQ ID NO: 120229 - DNA, 503 bp, Zea Mays
gtcgtcgtccaccgctgtggcaacgaaggcggcagttgaggtgagcttggagctggggattggggtctgcggtagaagcagcggccgtggcggtggtgtcgtcgaggacgacgggctggatcttgagctcaggctcgggtgcgcatgggagtgatgactgatgactgatgaggcacacgtacgtagtgtgtcgtcgtaagtgtgaaccatgcatgcatgcaggtcggtgtagtgtagggttaaattaaatggtcgtcgtagctgtcattatgtgaaccttatttccttttattttattacacgtgtcctccctcgctagctctcgtccatgtatgaactatgtgcgcccccgcagcagcattgccacgactttgctaattgaagtaaaaaaaaactttataatgttagtgtggtttgtggctccactaccggactgacattttttatggagtgtctcaaatactcggcaaagtttttttacgctcagcaaagattttatcgag

SEQ ID NO: 120230 - DNA, 470 bp, Zea Mays
ttttggtgcagaggttgggtcacccaatttcggttagttctgataatggctccattagtagctgctcggtttgtcaggggtgttctgtcatccttgctgatgaggtcttttcggccaatgttgttgtgatttccttgggggctttcgatgttatcttgggtatggattggttatctcagtatcatgcagttatatcctgtttttggaagacagtgttattgcaggcgccgttgggtagggaggtggtattcttgggaagctccccaaagttcacgttatccttgttggcgcaattgcttccagatcgtcggtcaaggaagtcaagaatctttttctccatgatggtggagggtgaggctgccttgcgggtgcaggacatccgggtggtgtgtgactttgcctacgtgtttccggtagagcttccaggcgttcctccagagcgcgatgcagcttttgaaatcaaggtgatt

SEQ ID NO: 120231 - DNA, 273 bp, Zea Mays
agaaatactaaagcgtgtcatgtatagctcagtcaagtgagccatgctgacaaagaaaacgaaagtttagtgcgaccattttgagttcgtgaacggatgagaaatggaaggagcaataccgaagcgcgtcatgtatagctcagtcaagtgagccatgctgacaaacaaaacgaaagtttagtgcgaccattttgagttcgtgaacggatgaaaaagggaaggagcaataccgaagcgcgtcatgtatagctcagtcaagtgagccatgctgac

SEQ ID NO: 120232 - DNA, 484 bp, Zea Mays
gtcactgttgcggggcacagattcaaagacacctaccaagtcgtcgctcgcaaggcattgagggccatgtgtcagatttatgaagaagaagtggccgacaccccgctcagattctttacgccctttcagagagaccgtccagtttggatggccaagattcatgcattggaaggacagcagctgcttgaggacgaccccacagtcatgtacctcactgcatacctgctcacccttgatgccattatgatttcttggctcgacgccatcgtcggatgattgcccgagaagaagatgcagagaagcgcaaccgtaagatccatgtggatctcaccacagctcaagcccgtgcaactgccttggaaagtcgtgaagtcattgttgttgaagccctaaagcaagccaatgatgagcacgtccagaagcagatggaggcctacttggtcacccataaccaacgtagagccctatggatccaagagtccac

SEQ ID NO: 120233 - DNA, 859 bp, Zea Mays
caataaacgaaggaaaaaaggaaaaaggtggcacacttccgttagcgctaatgtttgacaaaagctttacaccaaatcatgccaagctccaaaggctccttttctctcttgctcactcacttgggcaccaaacgctgacagacttaacgagctgcaatggaaagtccctttttcgtcctccctttggaccgtcatgcagactgcagagcatgtcggtggaacagaggtgcggtgccaaacagaaaagcagaggcctttctgagcctgacgaaacctttgtcgttctgatgatgccctaacagcatgaatattctctccgaactcgtgctaatttaatctacaaatataaatgcgtaaaggatgtgatgattgagcatgggcaacgctgcataggcacgcctgggtaatgcatcattggaatcccttacttttcaacgtgcttaatgatgggtgtcagcactgggtactcagactagtgatgccagatttggtgggggggctaatgggacaaagggcatcagcttcccatgcattcatgctaatgagcctttagcctgggagataccgtacctggctagtgtgtgagtggcgtggcactggggattgtttgtgaggtacgcctttcttaaactttaagaaagcaagacgcatgccctgcacattctttgattacgttctgttggatggaattgccactgtagttttatcatggtggctgttagtttcgatcttgctgctatttactattctctattatcatttataatttatttgtttgactttttttttctaagtttgatcagcttgtcttattcaaaatttttagaaaaaataaaaaaaatctaaaaccatacttaaa

SEQ ID NO: 120234 - DNA, 939 bp, Zea Mays
cttaacacagctgtcaccgttaattctaattaacctaagaggtcaagttacagtcactgcctctgttaacacattataggtggcgggcatgataactgcctccgttaatagatgattaatagaggcctaacgtcggaggcggttgcaatgtccgcctcttttaattgtttttgcctgcctctattaaagtttctatactagtgaaaactttctagcagcaaccaaaagaattcaggatatgaaagaatttggacttactattgttcatgtagtcaggagttggattggacaccgagtctcctgcttacaagagaaagccaactatgcttgggagtatgggggtctgactgacctatccttggctacacaaaaatatagaattacatatgtctagagatcctttatcggaaatcttcacctcaattggagactagcccaaagaaaattccatcaggttatactctttgatggtcccacacctaatagtaaatattccatatattaaaaaagaacaaggagtatcaatgtctagcagtattctgattggatacatgaagaatgttacaattgaacatcgacttgattagcgatctgaacaaattgtatggtttacttctttcaaaagatcttcaatttttttattaggcagctagctatgaacccttcttagactcttgacaactccaagcttggataatgctatagagtaatgcccaaggctaatctactccccacttccatattggctcagctgacttcacaaacgtgttttagaaggattactaacttctagaggtcaaatgtgcccttgctagcctcgaagccatatagccgagtgatcattgacttaagaagggccttatgggaattatgttctttttggacctctacaagagaatatagtgactcagtacactagaatctggaaatatggagaga

SEQ ID NO: 120235 - DNA, 366 bp, Zea Mays
gaccgatcgtgactttgctctggaaaagttccaaagtccagtgggcggtgtgctgtgctagctgtgcagtccccctatgtcctggaccagtagaccttccagcttcggggatcctatttctccatggatcatacatggttctcggacgttgatctgctactgatgagatggggtcttagtgaatttccttttacttgtgttgtgacattttcacattagagacgcctatttcttaacatgaaaaaaggaggtatcggatggcattctagattgattagcaccgttgacgcaaaaggcaaaccacatggatgttgctgagagcacgtgatgtagtatgcaggatggtatttatcacaagcatcccag

SEQ ID NO: 120236 - DNA, 854 bp, Zea Mays
ccccaatagcttttgaaatatagctaaggataaaacttcctgagatgttctatgttccctgagttcccaacttctgtgccatccatctgtgtgagacgatatgatccaggccgagtgacttcagctactatgaatggtccttcccatagaggtgacaatttgtgtcgtccctcccccgttagaattcggcggaggacgagatctcccactgcgaaggatcgaggtcatatggccttatcgtgatagcgcctcagagtttgctgataccgtgctgattgaattaccgcgttcagtcgttcttcttcgagcacatcaacatccttcagcctagtagcctcagcttctgctatgttttcaaagatcaaccttggtgccccaaacttgagatcagtaggtagcactgcctccgaaccatagaccataaagaaaggagtgtttctatgcagggctcgactaggttgagttctcaggctccaaacaacgtacgacaattctctgatccactttcctgcgaacttttcatttttgtcgaaaactttctttctcagcgcctccaatatcatcctgttggctctttctacctgcccgttggctcttgggtgtgccaccaaggcatatttgatctaaatgctcttttgctcgcagaaatcgaagaactctgagcttgtgaagttggatcctaggtcagttatgatgttgtttggtattccaaacctaaatattatgtcttgtatgaattccactgccttagctgaagttagggaagcaatgtgtttgaattctattcacttagtgaatttgtcgatggcaaccagtacatgagtgtatcctccttaagattttttgaaaggtcc

SEQ ID NO: 120237 - DNA, 835 bp, Zea Mays
atgttgctagaccgcatgtggggaccacacggtatatctgtggtgagaggtcttgccgggacatcgaacatgtgaccgggacatcaaacatgtgattaagaccggtttccacttttatactagtttcccttgatgatggtattgtgtggtctaaagttttgtatttgttagataggcgcgattggaagcagaggctggcgggttggatgactcagacacggagtccgacctactgggggcaatggctggtgcaggggcagctgcgcaagcatcaagttcaaaggcgcctgagtcttcgcaccgcagtgcagatgtctcgaaagatttagagcaggttcgggtaacttcaggttggggaaagtttcttttgaggacttttgctgagagggcaagagaattgcaactaacaaactttctaggtgcctgcacaagttctaatgtccgagcctacatgggaggttattgttatttctaacacttcagaggagattgacgatgttgtgtttgtatctcctcttggttgtcgtagtccttcagtggacttcgaagatttatacaagcttttaggttctgacgagtctccgaaccttgaagacaaattatcgtttttgcgcttttagacgaagtaacgtcggctctccttatttgggggaacttcactagttggtcaaggtgacgaagacatgacgccgtccggccatgagaaggggaggcgaaaagtgactcggaaacgattgagcctagttcaggggctgccttgtcactgatggtgacaggcagcccgtcaaatggtgatgtgtcaatggaatcaaagtccattgtccgagaatttttt

SEQ ID NO: 120238 - DNA, 513 bp, Zea Mays
atttccctcaaacaccgtgtcatcattgcatcaaggaaagaaagttgttcgttcctcagaggcataaatcagactaggaaagcaacatgaataaaacatacagaaacacgagttaaatattttgctccaaaccgtgcttcctcacattatgaaggatgctacaaaccgatttcattttacacatcacaaggttcggtttactaataaagctatcaagatttgagtgtcactacctttaggcagaatagtagaacacgtgcacaaatatctctttgctaggtgacggtgtaaaactctcctatatttcttgcttgactaaggctacaaaaatttacagtagagcgcttttaaatggtgtaaatgttggaaaacacacaaaatagaaatacatgccaacatataagcctacaaaatacagtctaaatgttgcatatcttcttttttcatactgcccctctctattttaaaatatatgacattttaacattgttaggtacataacttttttagtgc

SEQ ID NO: 120239 - DNA, 770 bp, Zea Mays
gtgcaatttttataggtcttaaaccaagcagtctcttctctaaacaccaatcagaattgacaaaatgagcaactacactaatatagtcctctctggccttggcagaccaaatattagaggttagagcaatatatgatacatatattaagacctcaattaactgtccagcacagtcaatagagtctaattaaataccttgctattgtttccctagatgacttaatgaacctaggattatgagcatgagtaatgtattcctggaaagcatcagattcaccaaaggaaataggcaaatctaatctagaaatcaaacaacaaagctcatttcatgcatcactaacagagtactcccagataacaacaaaaccatcaaaattaaacataacaatagactaaacaatgccagctttcttttctttcttagttgagcaatgcatcgagtgtcgaatcaagtggctagttccagaagatgacttagcagatatactctgcttttagtaatggcatatggcaacaactcttacctccttacctctctcaatcgcagttacctcttcaaagtctaaccagactttggacgacgggcctccttctcctcgaacggtagcctagacctgggcgggatctagacccacttctcgtcgcgaccgtggggctcgttggtttggatcaagtgctagccccgcctcaaccgtgccactgataatgaattggaaggcatcctgaacctcattcttgtcttctagcctcctctcctcgtccttggcgat

SEQ ID NO: 120240 - DNA, 376 bp, Zea Mays
tcgaatcctgagctggtgataacctgacctcagatctatctttgaaaacacactggcttctctcaactggtcgaacagatcttctattctgggcaaggggtacttgttcttgattgtgacctcattcagagctcgataatcgatgcacatcctcctggtgccatctttcttctccacaaataggacaggggcggcccaaggcgaggtgcttggtctaatgtaaactttctctgacaactcatctatttgcttcttgagttcaaccaactctggtccagataccctgtaagctcttttagaaatggggccggtttcaggaagaagctctatggcaaactcaactttctgctcaggtggcatacctggtaaatctttt

SEQ ID NO: 120241 - DNA, 416 bp, Zea Mays
gggcgacgtcgtgcgttccctcggtttgaatcgggttcgtggtcgaaatcagagggcaaggggccttttcccttaccttctctccttctggggatcggaatgtgtcatccaactctgataaacgtccagtgccaccgtctaagtcagtggatgagcgactgggtgcactgcgggctttccgtagggccaaaggcttgtgtgacagatgtgcagaaaagtgacataagggccatacttgtgcagcaacggtgcagcttcaggccatgcaggaggtatgggagttatttacccctgaggagttgccagagcagcctgagtctgaatctgtacatgaagaccaactgttttcagtggtgttatctgaggctgtgagtggtggtccagctaaaaaggctttccaattgttgggttggctg

SEQ ID NO: 120242 - DNA, 413 bp, Zea Mays
aaatatcttaaaaacaaaaaccagtgaaaagggcagcaacaaaatagataacaaaaaatagggcagcaacaaaagtgatacaatccatccacaataatgtcacaacaagttcaaaccggagtaaaaaggattaaacagatacatagtagcactgaaaatgggacatagtgctacaaaaaattacagatcctagtgactcatcctagtgacccaatcatgtttcattgtaagccagttgaagcgttcttccggtgtgtccaaagtcataaacatctccttctctgccctcttgacaaaaacttgagatgctatgaagtgttcttttgttcctggaactgcaccacactccttcaccaatgccatgacatctctaatggagcacccattgtcctcctttcttaccaaagactcaa

SEQ ID NO: 120243 - DNA, 3809 bp, Zea Mays
gtcgagcccccgcgggtcgttctctggcaccttcattcgccacaccagcgggggctccagttcccatgaatctgcctctggcggcggcgggggtttcgggtcctctttctggactccagcggtggagcagtcagaggagctccggcagccatcgcctctgatgcagcaacaacagcaacaacattcaaggcggaagccatcggtcagctcggtgccagacagtgttaccagggaggatccttccaccaagtacgagctgctccatgagcttggtgcgactcttgctctggaattattatttcattagttctttatatgtctttttgtataatgcctgaaattttgagctattttgcgcaatgcaaattcaattggaaatgcagggaaaggttcatatggtgcagtgtacaaagcaagggatctcagaacgcaggagcttgtggctgtcaagatcatctcattaacagaaggggttagtttctagcttcttattacaaagttctgtgaatattccggaaggctacccaagacatatttcatatttggcaaccatattgcttttgttgtgagcattttgtttgcatgggcttaattgtgggagaatctcataaatgtggttgctttctgatttctgagtccttgcatttttgtctttaaaatataagcatgtatctctggcattcaggaagaaggctatgaagacatacggggagaaattgagatgctgcagcaatgcagccatccaaatgttgtccgctactttggaagctaccaaggagaggagtacctatgggtataaataatcaaatagcctgcttgtatccattttattaatattaggaactagccaaacttttctatcattgtgagatttatctagttgtcaactcatttaacatgatcttgatgcaaatgtgattctcaacctacagataattatggaatactgtggtggtggaagtgttgctgacttgataggcatcacagaggagcctcttgatgaatcccaaatagcttacatttgtagagaagcactaaaggttctaacaccacatttgtggggcaattaaatgtcttcggatatttaacttttgtgtgcttattttcttctccagggccttgcttacctgcactccatttttaaagttcacagagatattaaggggggcaacatccttctaactgagcaaggcgaggtgaagttgggtaagcacatttgtttgttcatttttttcattttgttggcacttgatatttctgcatgtcttgacttctgtgtttgacatgctcaacaatgtacaaacaggtgattttggtgtagctgcccagctgacaagaaccatgtcaaagcgcaacacggtattcttaacagtgtttcttttgctacttcaaattccaaagttcaagaaacttcacatcgatgtgacaaacaaaatgaagtgcagatgaaacttgtcaatgccagtttactataagatgccccatttgtgcttgtgcatggttctttaatatgatgatactttgatgagaacttgaaacaagttcgtgttggaaaatgatcgatgtgaagtcctagctatttctgttaagtgttatattgaaaaataggaatgtgtatatttcatatataatatatcttgctcaattcttccttggcattcttctgtttttcgaaacccattcgtgacagcctctagtccccaaatatcccattatgagtttgctcattcccccatttggcttcttccttggccactagcccaccactcaacaattcttctgttcttgatgactgcgaggctcatttcaagctggcacattgctgccctgctggagctattggagaaagtagagggttactgtgacagtagcatatcaaatcaacagttgtggaaatcataatataaagacgtccaaattgggaaatattattcagggtgttatcatcctactggcaggtggcccctgcccaatatgtcatcttcactatggatggtactttcatcttttttcctcactgttagggagttggtgcactgggagtccaaatcagctagggtagttcatagttggctagatctaggaggtacgttgagtcagagtttggaaaatcagggtagagtacaagttcaggttctctaggacgatgatataatgtagtactatactataagtgttgtggtggctgtttttgaggaaggtaatgcttggtgctgggcttaggggcctgctctcaccacacctatagaatagttcttggtcgtcgtccccagtactgctgccagtgttgttctagtggctggggtgtgttttgctagtcatgactgccctgactggccttgtgttggggggggggcatttgttgtccccccccttgttgtattgtttccttcttaatgaaatgacacgtagctctcctgcgtttgctcaaaaaaaaaagaattgactggaatttatcaatatctagaaagaaaccaaaagaaaaaaaaatcaatctactccctttctactgctgttgatacttcttgtttctcttctacacgttctaggcagctacacttctctagtttccaaccatggcaatacataaatgcttgagtaacccataactaatagttctacatccaaccatttcgtagtagtgtgccggaaacatttggtgtcctcttcttgatggtatccaatatccattgcttttctgcaagcacgcacaagcagacacttctaagtacacatactgatttgttgtcaatttgtcattgacatgcagccatgctttgagcccagatccatcatgatcgcacaacacaaatctacatgtatacggtgtcttggatgtttctgttgttggggcgttaatatatacttcaatcaaaatgcaaagataaaactgtcccgattttacagtaaaataactctatcaacagactgtcagcattgctctctaacctcagtctgtatggcttttgccaaataaaaataatgcagtgttttttttgcaaagaacaaaggttttagtggcacactaatttccattatttgatccttcatgttaatgctttcagttcattggtactccacattggatggcaccagaggtcattcaagaaagtcgttatgatggaaaggtagcatgctattctctctgcagtgtatatctatctatggaattgttcatcttagcagcatttatggatgttgccatttcactctatcacttggcccataaatttatgattgggttttttgctgagtgatttctttaatattttgtttgtttgggtgcggactgtggaatgtctttacatatggcaaaacaaaggttacgtgtagctgcaaagtcataaaagccagtaaacaatttaacaattgttatgacttatgaaacccctgcctagtgccaaaacatgttatttcttttccttgtctcttgatagttcctctagtaaaaaaatattacttactacttaacctctaaaacatgcctactggttgcaatgtgagaaaattgtttttgcagttggattctttctttaatttgtcttactaaatcatgtgtacttgttttctgcgccaggtagacgtttgggcattaggtgtatctgcaatcgagatggcagaggtagacattgttctttgtttttttcttttgtgaatttacaccttttcctttttgtgtcatcacaatgctttttaatatttattttgtatctgtagggcatgccaccaagatccactgtgcatccaatgagagtaagcggtgcttctcaatgcgttgtcagtatctgcagttaatgaggctaataggc

SEQ ID NO: 120244 - DNA, 586 bp, Zea Mays
aaatagtgttccacacctctttttctgaaaaaggtgcatccaactcagagacgtcatgactaggtatactaagagcttctaaatcaatgattctatctctgcccacatttgtaccaatcagattgaagaagtgatcaactgctgtagccttctcatcatgcccagttaaggtgacatccctttccctcaatgaggtcacaacattcttcctttttcagtgtctggcatgcaaatggaaaagcttagagtttgcatctccatccttgagccacgaaattctcgatctcagcctggccatggtccttttcaaggaagatagtagaagggtatgcttttttaacttattctttaaccagatttcattcatggacaggatcctgtcatcctgagcaatctcaagcctatgaagaatttccttagccaaggccaattgggaccttatgtgtcccacctgattattactccaggatataagacttttagctgtcttttttaacttcaggtcaaaggtttgaaaagggcatatctcctcattaactgaatcccaggcagtctgaacgacatcttgaaacccttcaaatttaat

SEQ ID NO: 120245 - DNA, 311 bp, Zea Mays
ccggagacaccacaaacgtagcagataaagtcctcctttttcttcttcatctttttggacttaggttggtttcgattcttctgtggagagttcttcttctggaattttctatctccacccttctcaacaacgtgagcctggagttgctgggatggcttgttactggaccttgcacactcttccacatttatcgcagctcacaactcagtgagagtcatttgcttcttcatgtggcggcgtgaagtcgcaaagtctcgccaagaaggcgggacctttgccagtattgcattcacatgaaaactgtctagtag

SEQ ID NO: 120246 - DNA, 348 bp, Zea Mays
attggcaccagctttccttcgcctcagtctatcacccgcagtccaacggagttgtggaacgcgccaatggaaaaatttcacagatgtcaaaaagatgctcctcgacgaaaaaagggcaggtgggccgatttgtacctgaggcggtctgggcgctaaacacgactgagtgcagggcgactgggttcacccctttccgccttctatatggatcggaggccatgaccccacaagaaataaaacatgggtccccgcgaacagtttcgtcagctgtccccgacgtggacgaacccacttcgaaggatctcatcgatggagaccgagtcttcgctctacaggctctaaataaat

SEQ ID NO: 120247 - DNA, 329 bp, Zea Mays
atgttgaggtcaatgtagtcaaggccatcgaggatgtcgacgaaaatagcgacacagtcaaggcaggtcatcatggaggaagcatacaccggatttgctaggcctgagaacgtgtcctggagaacggcacgctacactgccaatataagacatgctagttagagagccccaacaatgtgtcaacatccgagcgaccttggaagagagtgcctcaacgatggttgattgtggtgcccaaaacaactgagcacaaggtgtcgatgtatcccacaattgtcaaattagatgatatatgtgggaaagagacaatgatgctggcgatgtggtta

SEQ ID NO: 120248 - DNA, 601 bp, Zea Mays
tgctatgcacccggctctgccctttggaaacgggtgtgacagaagtggtatcaaaggcaatgtgaccgtaggtcgctagattagttagaaatggaaagcccagtcagtatttcaaaacatggtctattttcctcgataaaaacttagtttatatcaaaactcgtctcttttattttcaactcttgtctgattctttgtctatcagaaagttctaatgagaagcattgcaagattatcaagctaggattgtggaacttgaagcgaagttttcctgaagaattttttttttgaagttatcaacgatgccctattctctgtcttatccccactccgcaagaagttttgttatggatcccttggatctattaccagacttcttggctaggttgataggattgttctttagtattaagattttcgactagatcggtaatggcgatattatattatattatattatagtggttttctaatccataatattgctatataacccttgacttcttatacttttgttttcttgccattatattgccacccttgcgcaatatctaccttgatatactgaattctttgtctccttactcctacttgataatgc

SEQ ID NO: 120249 - DNA, 440 bp, Zea Mays
tctccaatatgatccttggccttcctatatcaaagtatgacaaatatgtggttgatatgtgccacccttattcaagtgtgatgagtgattgcgaaggagatgattggcttttgtttagtgtggacttaaccatgacatgagtttggtgttgtgtaacatgtctcttcgcttgtggttcatggatatagagaacaaaggtggtggtcgatggcaaaggtgaaggtcattcagatagactaggatcgatggtgacaaacacctaggcacatcgactagtgcaagagtacatggatgagtagaatgtgtttaccaagtgaagttgaggtgttggaagacttggtgattaggcggtcaagggctagtagtagcatgtgtagagaaaatggaaggagcatatccgatatgctactcacaaggggtttaatggtttaggattcaaa

SEQ ID NO: 120250 - DNA, 474 bp, Zea Mays
agaagctctatggcaaattcaactttccgctctggtggcatacctggtaggtcctttggaaacacatctgggaactcggacacaaccttgatactctcaatcgggtctgcttcactgctttcgacagccatctgataacaacttcctttccttggctcaggcgggactaactcggtcaccacctcctctcctagtggggacactaacttgattgtcctcttatcacaactgataactgcccgatacttatctagcaaattcatccctaggatgacatctattccctaagtacccattactatgaggttggcgggaaatgctatccaccttatttccacacatacattcaaacagatgctatcagctcgaattctaccaccgactgagtcaatttgaatgggggttgacatggtagttattgaaagattatgtgcttttacccatgatgcagtaatgaaggaatgtgttgctcca

SEQ ID NO: 120251 - DNA, 441 bp, Zea Mays
ctggctacttggtgccctgatctctcattcagagtttgatgttgttgacttccttatatgtgagatcgaggacacattattggatggtcttcgtgcccggcaacagctgtcgtatgctcattatctctgctacatcttcgcgcagctgatccagccaccatagttctagggcacccttggggcctcacgcctccactttggctcctaccatccagcccctgaggaccaagtgctagtacctgatccagtgacaaacatttaggcagaggatacaactttccatcagttcgagactcaaggcacaacagttcctgatgatgatgatgatgatgatgatgattttgggattccgcctccgcctcctgtgcctcctcgctcacatgatcatgaggccgggagttcccgtgttgtccctgctactcctcctgctgttgaccctgc

SEQ ID NO: 120252 - DNA, 361 bp, Zea Mays
cggggttatgcacatgatgagtttagtaaaaatccatcgttgtcactgatgttaagttgaggattatttgcgcatggaaagtaataatgtatttaatacttagaactcttagtcgatagtagaaattgttttcgcttatatataaaggtggtgacatgctaagtagtcatggctttctctatatttataagtcgtgtcgtgacgatgcctattatgtgtgcgttaaattatgcttcgcatatagtgtgtgattgtgctcatgatttcgagtaggcacaacgggtggtcaaatagggttgtgatacaagttgggtaatggagttagttgttttaggttaatcattgaaatactcagttcata

SEQ ID NO: 120253 - DNA, 320 bp, Zea Mays
ctcccctcccccatctgatctttttcatctgtcgaagaaaaaaatgagtgggcaggagagcataaaaagcggccgagtggcctgcctgcctccttccgggccagcatgacagtgactcgagagaaggccggggccgggggccggggtattattggtttggtgcatccagtacacatgtgtctgaaaccatgcatcaaatacgatcagcgcgaggcgtgtttgcctgcgtgcagcgtgctccagcctccagcaaacatgcatgctgcatgcatgtggacgtgccggtgatctctcgaccgtacccttttgctagctctccg

SEQ ID NO: 120254 - DNA, 462 bp, Zea Mays
aaattaacaagcactgctgctgtagtttggtgggtggtaggcagaggtgttgttcacatcggtgttggggtttgtgcgtaggaggggtgttggttattagcgaatgttatgtgaatgtgtgtactaagttttatgctgcaataggtggtggacctccggatcgtacttagtgccatttcaattcccgacgaaggcaagtaaatgcagtggtggttttataccgtttggttgtatcttgtaccatgtctttgaattttcatatgtatcgaatgtgttaatcattggattctatcaagaggtttggttgtttgaaactattcatgttctacagttttaaatatgttgaggataatgattcgagaatgttataggtggttgattcgtaacttgatgaagttgaagtatctatttgaagcatgttaaatgatgtggaattatgttggcatgtcatgcatagtgcat

SEQ ID NO: 120255 - DNA, 359 bp, Zea Mays
tttgggtgatctctaaaagttcattaaaggttgtggagtttgacttatatgctccaaactgaggggatgcatgttgcagcctagtatcagttaacggctttggtgaaatttattcacacaaacatggcaattcaaggcatgatccattgttcagttgtggatgaacgtaacctctgtcctagatggatgttcaacttaacagtctctattgagacactggtacatcaaataacagtggaacctagaatattttacatttgccttggaatttggtggagattgttagaatatttggggtaaaccctatttatctaatattcagtaaaattccaagggcaattaagagaggataaggtgga

SEQ ID NO: 120256 - DNA, 744 bp, Zea Mays
gactgccaaacgaaacatcaaggtcttagagaacgaacgtgaaattctgaaggtggggtataacaaagtgatggataaggcagtccgcactgatcatcttctaatgaagaaacctggcgttgtggttcctgatgatattattgcatatgttcaatctccataagggactacaaccaaggctcctgcccctcgtggtcctgtggttgactccactcctataaatgctcctacaagatacattgtaaactttggaaaatagaaaaacagttccctgagtgggaagcacttcctccttttgtaagtgtattttacaatttagtttgaatatgatctctagagttgtttcgttgtattgtgatgagttgtgcgggggaggggggacttagtgtttgtccttgcatttttgttttgttttcctcgatggggttttgtgcacacccattttgtgtgtgtgcatgtgtatgtatgtggtgctgacttgaaacacttctcgatttgagtcgacgacttcgctagtagggcatagtgtgcaccctttgattgtaagctcgagcatgtaacaccaatttaattcgatccccaacttgagctgattgctccgttagtagggtatagtatacaccctttgtttgtaagcatgagcatgtgacaccaacttaagctgatctcgacttaggctgattgcttcattagtagggtatattatgcaccctttgtttgtaagcgtgagcatgtgacaccgac

SEQ ID NO: 120257 - DNA, 600 bp, Zea Mays
atacattggactgcgggttcatataacaaaagggcaggggctcttatgtaactattctcggccgaaggggtatggggtgatatcggccgtttgatccacaatctgtgcgccagattagacttcatgctagttattcatccgcgctcaaccatggccgtcggatccaggattcgcggttctggtttaatgaatcgaaggggtacgcccagattcgatctaggccattccctgcacgatcaacggtcgagggccaactccccctagatctaatcttagccctacagcgattgatcaatggtcttggggcttcttcctccccatgaccccggacgactgcgtcacgaactggggaaacgtctagctcgcgtgtaggttgactaaccacccacgggtatggatcggagcgcggatagaacctatgcagtgaggatggaatgttgaattacagggacgtcttcttaccaagttcgaagcgcaagtacagttgcccacggaggcttgcggcatgatgtcgattcctcaacaccgcccgtgaagctcccgatttccgaattggcgaatacatgaatgagtcttcgcgcagtacggggtgatatcgca

SEQ ID NO: 120258 - DNA, 352 bp, Zea Mays
aatacctccaggcaccatgattctatttgggttatcgtggacaggttgacaaagactgcgcatttcttgccagtgcacaccacccacaggacagagaaatatgcagagatctacattgatcaaataattcgtctgcatgggatacctaagactatagtctcagacagaggagcaccattcgtggcacgattttgggaacaattgcaagaatcacttgggacccatgtcatccgaagctcagcataccacccccaaacaaatggccagacagaaaggataaatcagattttggaagacatgttgcgagcatgtgcactacactatggaaaggaatgggacaagtgtctgtctt

SEQ ID NO: 120259 - DNA, 528 bp, Zea Mays
gaattactaaggtctaaggaccacaggttaaggatttaaaagaaccgaggtgttctgtgtaaagttcgggacttatttgtgataattttacaactgaacagaacggtgggttgaataagaaaaaggacggggtctctttagcaaaagacgtttggcgaggtggtattcgggtgtcctatccatttgatccaataccgagggctcagattaggtttagatgccccatgaaccggtacgtggcataggcctttggatccgagatctatgcctaatatccttcgatgccattgatcaagcaatggccctcggtcccgcgatcaacggtccaaattcaaactatccattgcttcctctagatctaatactggccacacatatccgatcaacgatcatcacctcttcacctacctcccggcgatcataaaatccggactcccacactccctcccaaactcaagggcactatacgttatggggacaaaagcaaaacaatggggaagatcctcatcgagcgctgcagcgtggtcg

SEQ ID NO: 120260 - DNA, 693 bp, Zea Mays
aatttatagcaggcttgagcggtgaccggtgaatttggattgagacacagcggtcgaagatgacaaaggttactggcgctcgggatcggtggcatttaccgtggcaagctccccggcgatcaccggataggcttaacatgatcgactgcgacgtggtaagatgcccgggcacgtggcgcaaggccgcgaggtggctatctctggcgaacccattcgaagcaaacgtgactagctcgggtacggtggttggagtaaattagtggtcggagcatatccatgacgtgatatttacttaccccaagtgctatccaactaatccgagcatgaatcgccaacggcgagcacgaatctgagcgcacagctcgtcggcagtgatgggatctgaacctgatcctatccggttactgtaccatcaaattgttcttcagtcagcttggcagaccaagtttagcatcaattttctcctgatttttcatggcaacttgttgatcggccagtagcaaagttgttgtctaatgatccagctacaaccttgctatagcaaccacagccaaactctcaatagatcatggttgaattctagttcaaatatggctcaatcacactgtcagtctgattttagacctaagatagtatgacagcccatctttgggtccaattttctcaaaatttttcatagtaccaggacttgat

SEQ ID NO: 120261 - DNA, 479 bp, Zea Mays
tattggctttgggtcatcgagaatcgccaagcgttgcacaatgtttgtcagatgaactttgaagtctttgattggctcactttcctagaacattgtctgttcatacttgactcataggctattgtggcattgacttctgcacccgctcatcaccaatgcacatcgtcttgattgtttttgacgtctccttggttgatggcttggttggtagagtagggaccatctctggggctaccctagagtagatcacctccaatgtgatacagtcatcatggaatgatcgtcgtcgctgaactcgacaatgtcctaaagattacaagctcgaagcttgaacttcatcaacaactgtcgtgtgttgtagttggtttttgtcaagtgtggccagttgctagagccactagactacatggtacacacgatgaactatgacctcttgttgatggcgtgagccatgggatcaagagcgacgagtgttgctt

SEQ ID NO: 120262 - DNA, 681 bp, Zea Mays
ggtcagacatgaattccttgtagattcttttttttccccaacacggagagtatttccatataaccctgtttaaaaggatatgtttgatgaaatttataagtccaaattaagcatcacatcgcttgagttgaccaagtatatatacatatacatctggcagatgagagggcttggcatcgcatcacatgcatgtgcaccctcatgtgcgcacacgctcttgcttggctttggtgcaaggccaaggcggggcagtggactgtgttagaagcatccacacgcgattattagttagtttatggatggatgtagatcggacgagctaggccagctgatctgatgagcggtgaaggcaagtctgctctgcttgtgatgcgatacgttctggaatctggggtgtcttttgtttgacgtgccgagctgagagctctagccgcgtgcattggaattggaagccgagagagcgggtgcgcgcgtcgccgtcgcgtgcagtggaataatggaacggaagaaacaataaggaacagcaccttcagttcagttcagttcctccgtcgcatgcatggtgtgtgtcgtcgtctctgccgttcgtttggtctgccgtcggtatcacacacaccacacacacacacatgcacagagacaggaatggacgactctgtgcggcgagcgcgaggtacgtag

SEQ ID NO: 120263 - DNA, 473 bp, Zea Mays
tcattagttatttaaccttgtgttgaatctttgttcacctatcattatacattattcaagtatgttcatcatactgaatttcatgttcaacacttaagcaaacttgttagacctttaaatgtgttgttatccaaatcaccaaaactcacaaaagagattaatgcactttcaaattgctctcgttattcatctacataaattctaagagattgaatgtcatctgtcttacttccactgggggctggtgcagccggtcgaagagatgacatgtcacactccccttgtcgaaagatcttctgatgtcagtccaccttgaaattggccaggtacttctcctcgtccccctcgatcaactgtcttttgtagtcctcgaatctctactgatcttcaagcgacaatttctccatagttgacttcacgatgttgcttaagatatcggattgatcatttgaactgatcatctatggtcaatc

SEQ ID NO: 120264 - DNA, 501 bp, Zea Mays
tgtcaggcaacctgatatttccacccacaaacttaatggagggccgctagacgtggtggaaagaattagggatgaggtagtcgggttgtttagagacaaactcagtgttagtgtgtcaggcatagggcagccgtatcggaaaccttatagtcatcgatttgactccgtgccatatctgcaaggggttaggataccggacttctcaaaattttcctgtgaaggcgggaagagcacgcatgagcacataagctagtacttagcacacctaggagaattggctgatagggaagcctaccgtgttcgtttattctcactatctctgactggtaccgcattcgtgtggtacgcaaccgtgccacctaactctatcaattcttgggaggagttagaacagaaatttcatgaacacttcttctcaggagaaagttagaattagatgatttagcttcagtctgacaagggcctgaagaatcagttaatgactatatccggaggttccag

SEQ ID NO: 120265 - DNA, 371 bp, Zea Mays
gtggatggattgtactgctatgttgtaatgtcgtatggtctgaaaaacgccctgccaacatttgtgtgggcgatgagtaagactttcggggacctgatcagggacaaagtagaggtctacgtcgacgacatcgtagtcaagactaagaagaggtcgaccctagaggaagacttaaccctggtcttcgacaagctgtgagcaacccgcacgaagctgaacccggacaaatgtgtttttggcatttccgccgggaagctgcttggattcctggtttcataccgaggcatagaagcaaacccagagaagatcagggtgatcgaagcgatgaggccccccacccgagtcaaggacatccagaagctcacagggtc

SEQ ID NO: 120266 - DNA, 363 bp, Zea Mays
agtccaccatttctgaagctgatcttcctaaaatggtgaagatgggttattttagtgaggccaagaaggaattaattccccttaaacaggatgattgctattgtactgaagaagttggtttctgaagttttcttaaagctggcttaagattccccttaaacaggatgattgctattgtactgaagaagtttggggtttaccttcatcagctgacccctaatgctatcgttagattaagtgtttatatttgggcccttcgtagccagggagtggaaccgttcggtgagggtttctgctgagttcatgaattacactaccagactaaagccagaggagatggtctgcacgaaaattttggctgct

SEQ ID NO: 120267 - DNA, 523 bp, Zea Mays
cccaaatctagggttcgtatgatcgcgggcggcagaccaatcccccacggatgcatcatccagattgatgttaaataccctcaatctaccaccggagcagatccatgtacacttatgtcaaaggttgatgaagtgtgttaagaaaaccttaaccgatagagcagatccatgtacactagtgctgctcatactattcgaacccggtcattgacatgacttcggtaaactacagaactaagcacgtacaatttgcaaaaataaaggaagactcatgaacctgggagcagatagaagaacgcggtcgcacctgaagaacggaagattcgggccgcaacaacacgaatcgaagcgacaaagtccggatctgaggatggcgtccacgctcggagaggaaaacaacggatgcggcgacgaagagcctcggcagactgcgatttgtgggtgcttcggcttccgacgtgaacggggttgactgctcacgaactcgacgtgctcttcttcgtcctcctcgccgccgacctcc

SEQ ID NO: 120268 - DNA, 356 bp, Zea Mays
ataattaccgggccagtgtgaagatgttaccgtttgagactctatatggcaggagatgcaggactcctctatattggatcagactagaggaagatagttctttggacctggacttattcaagaggcagaagaacaagtccgtataattcggaagaatttgagggtagctcagaccagataaaggagctacgatgataacagaagaagaccactggaatttgaggaaggagattatgtgtacctcaaggtgtcaccacttcatggaatgaggaggttaaagtcaagggcaaattgtcccctcgctttattagaccattcagagtttttaggcgagttggagagatggcctatcaact

SEQ ID NO: 120269 - DNA, 872 bp, Zea Mays
tggctttgctcgtaaggaagagtggagaggtaaaaagtcaatactcctcggtaactcttgtcgggcatcagtatccttccccgtgtggactctcgatcatgtccaaagattttatggagatggtgtgatctgtgtttgtggtgtgcgcgtcgactggtcataattattggggtttgtctgtgtcatcctcctgtgtcgacctacctattccttagatagtagggtttatttcccaatcgggggtcgcatatctcctcggtagacttagacctaggggtgtaagccatgagtggggagaggtgggcagactgtgacgtaccctatcgactagagtggtagtggggagcccgcgaggttggcggcttagtcggacggaacgcgccaaatctactcgagtggatcttgacttgcttgatggatccctgttggttctctgcatcgcccgatcctcacgactcgacctgtgtgatgttttatgagtagggcggatgttagtagcttatagacggttcatacatgatatctctcatcgttgactcatgggccccaaaaggatgaggtttcacaaccctggcaacaagcttgtcgatgaattcatgtttaacattgttatccaaaggttgtccatactctcacaagtgcatttgtgttaagatggagacataaaaaaggagagaggtatccacttgaaatagtaaaacttagtataatgctatcacagtaggcaatttgtttatactgactctaaggtcgtttgatatatggttctatactctaaatttagaaaaaggttctctcatttgtctcttctatatgttttagcggtgttctccaaagcgttctctagatatagataacgtatttcattcact

SEQ ID NO: 120270 - DNA, 458 bp, Zea Mays
gccgacgaacgtgccatcgtggtcgtcggtcggtaagcatcgcttggacatctatattttgaactataacggtgagccgataagcagtaagtgtcatcaccggtcgccctaaccttaatcacctcgaaggcttgagctttgagtctgatctttctccgactgagatacttgtcggtgatcgttgggtttagggcatcggtcttctaatcctccctaaattttggcttccctaaccctaaattcctaatcctccctgattcttggcttccctacttggctgctacctcttatgctccggtgttcctcatcgactaccaattagtcgctgactccagtgctccggctactcttggtaagtatcctactctactagatgtctggatcttcattaattagtttgtcacatctttgacccttcttcggttctggtgactgatgtagtgatgtttgtcgtgttt

SEQ ID NO: 120271 - DNA, 680 bp, Zea Mays
gcatgcactacagtaagtcaagatatgttgtggtggtagacaaggatgggactgagattactaatacataagtaccaatcaagcagctctggtacatgcctatcactctacttcttaaacgaatgtttctaaattaggagacaacgaagcaaatgaggtttcataaggaaggggatcatcaagaccaagattcggatatcatggtgcatggatcagatagtgaggcatggcaagcacttaacctttttatccagaatgtgcaagggaccctagaagtgtttgtcttggtttgtcgatggaccaattcactctttatagcaaaagttccacttcgtacttatgttggctggtttcatgatgccctataatctccctcctagcaaatgcatgaaataaggggacacgttccttgctctaattgtttcgagccctaaggatccattaacaaaatcaatgcatctatgcaaccattgaacgaagagctaaaaatgttgtggcagggagtagaggcttttgatagccatatgaaatgtagatttaaactacgcgcgacatatctatgatcaattcatgatctattggcatatgacatttggtttgtcttgtgtgtgcacggtaggtcgtgtgtccagtatgtttgggtcactcgcaagcatataggttaaggcacggtaaaaaag

SEQ ID NO: 120272 - DNA, 327 bp, Zea Mays
cagataatcatgacacagcttagtgacaagggtgttcaaatcatcaaggaaatgctcaatcaaaaagtggataagtataaatgctttcgtcaggacagcaagggtactttatggttcgaagaccggctggttgttcccaagaatccagaactcaggatgaaaattttggacgaggctcatctctccaaattttccatgcaccccagaagtaacaagatgtatcatgacctcagatccttatattggtggaccaggatgaagagagagattgctaagtacatatctgagtgcgacacttgccaaagaatcaaagccagtcatttaaag

SEQ ID NO: 120273 - DNA, 336 bp, Zea Mays
atccaccaaatgtcataagacgagtaatcccaattgattctcaactggattgggagaattatgttacttcggctatgaagacccagttgcaactcatggaggttgtggtgcgacgggttgtagtagaccatctccctgaagactatgatcgtggtgtggatgacgtgccagctgttcctgatgctcaatctggtcccaatttgagcccattaagtccgccaggagatgatctgcagacagattcacctaggtgtatagcacagaccaattgcagtaagtttcattggcatcacatcttcaatttggtccacgagcactttgctcattccattgtcg

SEQ ID NO: 120274 - DNA, 646 bp, Zea Mays
ggccgacctacgatcgtgaatcatgatcgaagacgtgcccggcgagctctcgactgctcctccacgcacttacgttgcacggccagcccacctctgtttggagatgggccgattgtttgatgggtttcgttctactcccacacgggctagtgctgcgctcgggcccgtgcagatgctacgctccaagaatacgaattcctcggccacccaataatgaccacaagagatggaactgggccagcctgcactgactcactgccttccttgatgcaatgatgtgtagtactttgggtgggcctgtgtcgtttggggctttgggccagggggaggctgctttgaaataaaaattccataaattaattatgtagcccatcctccccattaataaagaaggcagaagagatacggtaggtaaaagaaaagatatgcgctcttgtttttcgttgtaaacagagatttcaccgatcaagtagtgtagggtaaagagagattccaaattgcagaaagctgtgaggtcggtgccggtggtgaaaaaagtagccacgatggatgatattttcatgtgtttttttaggttataagatgcatgtgtagacccgtcttgcctaccggtgccatctaaattcttggactcacttattctaaa

SEQ ID NO: 120275 - DNA, 297 bp, Zea Mays
aagccgagtaagcgtgagcatgttgcgccgtcttaagtcactgccgacttaagtcgattgctccattagtagggtatagtggtcaccctaagccgagtaagcgtgctgattgataataaacagttcgagtgcccttgagaatgaaatcttttattgatgaggtattttccaattacagaatacaatgctcctcgatagcttttgaaatcttgctaagggtaaaacttcctgagatgctctatattccatgaattccctatttctgtgccatccatttgagtaagcctatatgatcct

SEQ ID NO: 120276 - DNA, 547 bp, Zea Mays
aggcttctcttatcgtcatgatcccttcgtcaccagttagcgtgcgtaggcgtacactcggtctgtcgtgttgtcccgtccttctgatatacaggtcaatatatagaccctagtgcccattgaacatgttgtgcgtatgtccggacttggcttgatggtgacgtgtcgcatcggagatgacgtggatcaatagcactggactcagatctttgcctcatcgggttgctcgataatgagttggtcaaccggagatgattggcggagagttggttggccggtccacctcgcagagttggtcggcggagttgggcaccttccggagcatcgctcaagacaccctcgggcgagctgtggctacgtctcctgcccagggttggcctcaagcaagtcgtggcagcgtctcccgcccggggatggcctccggcgagtcgtgactgcgtctaccgcccaaggttggcctcaggcaagtcatgactatgactcccgcctggggttgtcctcgggcgagccatgactgcgtctcccacctagggttagccttgggcga

SEQ ID NO: 120277 - DNA, 622 bp, Zea Mays
gtttccctacccactgacttgtgttgtgtggggcattaacccttgccctatgtggttcatatggctgaccatccctttccggccttctgggaggggccgaaaagtattcgccccgacatgtctagaatgttatattacggtgctagggcactgtaaggatgtgatgggaggtttagctgggacgaatgtgtagtcgggtaataatcattatcgtaaggttctgtgtgctctgcattggaccgtccggttaaatacgcggaccgttcggttgtgtgcgtggactgtccggtgatgtattcagacagtccggcgctatgcgcggacgctcaaaattgttcattagggtttgcgtgggatgtggtagctcaggcgcaggtctcggtaattcggttctaaaaatggggctggtcaccattggtccgaacgatccacgctcacgagcagacggtttggccgtgcacagatcaacgagtttaccctcgatttgcgtaggaggtagcggttgtttaggatatgtgtctatcgacattccgtaaagaagttgtgactggtcatgccaatttgtagccgatgaatcgtgtgtgttttccctagtttcaatctcgcgtggaggaaatattgc

SEQ ID NO: 120278 - DNA, 377 bp, Zea Mays
gacaacggcaagcaatttgacagccaagacttcaaggattttctgcttctccattggcaccaagcttgccttcgcctcagtataccacccacagtccaacggagttgtggaacgtgcaaatggcaaaagtttcacaactgtcaagaagatgctcctcgacgataaaaagggcaagtgggccgatttgttacccgaagcggtctgggcattaaacacgactgagtgtagggcgactgggttcacccctttccgccttctatatggatcggaggccatgaccctgcaagaaataaaacatgggtccccacggacagtcccgttagctgtccccgacgtggacgagcccacttcaaaggacctgatcgatggagaccggg

SEQ ID NO: 120279 - DNA, 480 bp, Zea Mays
cagagataatgagcatacgacagctgtcgccgggcatgaagaccatccaataccatgtcctcgatctcacatataaggaaatcaaccacatcaaactctgaatgtgagatcagggcaccaaggagccagagctagatgtgagtggtggcctccctataacacatctagggcagtagcatccgtctcatgatctgatatagatacttggccgttggagtgaaatccgctggagagtgtcaagacccatctgtgaaaggcggtcggaatagggccgcgccgtgagctgtggctggagcgactccgtcgtgagggcatcgaggaggatcagaagtaccatagcacaggctgtgaaggcgagtcgatgactcggtaaatccaaacagatggcgaatctggctggcatgaatagtaacatcctctcgctcaaagcggaacctcatccactggtgatcgaggtcgatccatactgaagaatagaac

SEQ ID NO: 120280 - DNA, 672 bp, Zea Mays
tcaccgggattcacagggcaattcctcatggctatggcgcgctacggattgtcgatgaagttaagcaacgacgagcaattctcgcgacttcagcgatccccggtgtcggcactcctttgcccaagtaccagtgtccctagtgatcttgccggtgccatccaccgaggacatacgaccctgggagcatatcacaatgacaacaggccgtcccctatcctttatctttctcagacatggtgacgcacaattgggcacgagggtcacggcttgacccatatttgcgtcgagggagggcgagtccgagccgagaaggtcggttgcgagatccatgagttgttgcaacagaatcccgaggaagcggggaggcgtctatggtgtggcgcgcgcgagattacaaagagaagaagggactaaccatagtggcccacgagtaagtgaacaagggagttaactgacataccggcctcgtggacagtgaccgagcgctcgcggtgggagggagttggagaattgggctacgcagtgggaaaccgggatcgggccggcgtgggggactacggtccatagatgaagggggcaaatggacccgtgcgggtaaatcggcccaggagtcctagataaggtttttctctatttttatttcttttctgttttattttctattcttctttt

SEQ ID NO: 120281 - DNA, 379 bp, Zea Mays
ctcggctaggccaatatgtatccttatctggcgagagactaggtaaccatccttataaatggagcgacaaggcacattaagagggctaatcattaaatcataagcaatagcaaccaacacatagaacatatgatattatctcgcattgagagatcgaacatgtctaaattctcgagtctttagtgcatttaccttcagttcttgatttcacaatccacactataaatttactacagaatattacttgacactccctacttacctctatcgtgccatagggtttggcttccacttcctcccaccatggccgatgctcaggcctatacgattgccctcccccaaccctagacgtcgcggagccacccatggtcgtcatccc

SEQ ID NO: 120282 - DNA, 738 bp, Zea Mays
tggaaactgaacaaatcaattgccaaagagttgctgccagcagaacctgcagatttagcaatagaaccatggtggggcgttcggtttgtcaacttcacattggaagaatttaaggttagatccatccatggtgatttttattttttgacagaaaaaaaagaaaataaatacagcactgtcttcctatcatgtaaagtgcacatcgtttgctctcaatggaagaaaataatacattagtagaatcttgcattggtgggaactgatgcgctacattactgtagaagctttcagaagacgagacatcagcgatagacaaaatatgtaaggaggaagtcaattcatatgttctatttgacccggaggtagtacggggcctttataggagagggatggtatacttcgatgtccctgtttatcctgatgatcgttttagaggtaagcagcatcagcaaagctttcagctttgtcactgtttaactctatgatttcatgacttgggcccattttaagatcattgccatgcgggcccatatggccatattcatctgcatagttgcctctctttttttctcctttttttttgcttcagttttgaattcataccaccacttcagtttccaggcttgaaggttttgtttcaaacaaggatcagtcctacgaagatccaattgaagagtgagtagtttccatcagtagtcttctgtgaagctgtaacgaactgcattccctacttaactg

SEQ ID NO: 120283 - DNA, 305 bp, Zea Mays
aaaatactagtgatgaactacttggagcatactccatgtctgaggataatgcactatctgcaaccttcgggagccgaaaaaagaaaaggctaaacagagtttttgatgctattggatttgtgtaccctgactatcgctacccgccgcgggggcagaaaagaaagggtgcaacttctgggaagactgctgcttcagatgcttcaagcgagcccgcaccgaagaggaaaaagttgaaggtccttactcaccgaccgcgctacattgaaccggccatagtgcctgaatttggcggtgagacttcttca

SEQ ID NO: 120284 - DNA, 675 bp, Zea Mays
cgagttttctacgctactgtatggatagacccagatcatcactggatgaggtttcgttttgagcgagaggatgtcaccattactgccagtctgattcgccagctctttggatttcccgagtcgtcgactcgacttcacagcttatgctacggcacctctgaccctcctcgtcgccctcacggcggtgtggctccgggtacagctcatgtcacggctctgttccgcccgcccttctcagatgggtcgcgacgttcaccggcagattttactacagcagccaagtacttatttgagcttatcagacggacccttctgccgaggatgggatacagggaggctaccacacatatccagctctggctccttggtgccctggtctctcactctgagtttgacgtcgtggatttccttatttgtgagatcgaggacaccgttttggatggcattcgtgctcgtcgacagtttccatatgctcactacttgtgccacatctttgcgcagttgattcggcctccacagtttcagggcacacttgaggcctcacgccttgtctttgggtcctaccgtcctgcgcctgaggctcctgtgccagcttctgctccagtttttgactctcaggccgaggatgctgctcttcgacagttcgaagctcaggacgcagcagttgatgatgat

SEQ ID NO: 120285 - DNA, 401 bp, Zea Mays
gcatctcccagttatccacaagtggccataccctataggctatgtgctcctgaaccaggtctcttgtgccaatgaaggcacaaacattattgaaggccttctggcatgcttcggtatcattcccaagcgcagtagccggccttcggaggacgaagcgagaccagatagggcgttggataatcccctttatgtcttccctctcagtcagattattcttaacataaaaccattcctccatctaggccccgggccacctttttcgaaatgttggaactgggtagcttacatcagaacgaggaacgaagccataacaaccgaagttgttgtgatattgctctttgcaagtggccttcgtctcatacagtagttcgtgcatgttacagaagcactttgcactcggt

SEQ ID NO: 120286 - DNA, 390 bp, Zea Mays
gtacttggtttgatgtagcctttctctaacaactcatcaatctgtttcttgagttccaccaattcttgtctggacactcgataggctctcttggaaataggggcggtgtctggtataagctctatggcaaattcaactttcctttcaggtggcatacctggtaactcctcgggaaacacatctaggaattctgatactacattgatagcctctgatggtttaatctcctcaatatgagcggtgacttggtgacaactccctttccttgatctagacaagaccaattctactaacacttcttctcctgatagggacactaacttcaccgttctcttgtcacaactaagactggcttgatacttgcttagccaattcatccctaggatgaca

SEQ ID NO: 120287 - DNA, 304 bp, Zea Mays
gaatactattttgaaacggagagagtagtattttgactaattaatatcattggtagaaataaatatcctctttcagatatttatggtgacagacaaaatttgaacacttataaattaccgagaatcacagtaaaggtgtatacatcaaaattacattcgctgatccagacctaaccaattgtagctaaggaacttattagggttttctctagttcttcctgtagtcttggatgatcaagattcgttggctccttcttgttgcaacttcgtcggtagcctctccatcttcttttcctaaattccc

SEQ ID NO: 120288 - DNA, 368 bp, Zea Mays
ccggtggggcgccgtgtcgctgacaaaactgtttacagattacagtgcgcttgctgcaccggcttactagactaccccacacctaataaccgtcagtgacagcctgataggtgggcgcagccttgtgggtccaggatgtcagtgacgttacccggtagtggtggcctggtgggagttactctggttttacacggcgggtttgtgctggatttggatgtgagttggttaacctttttgaattgcggctccatttggaatcatgatttgttagggtcccatttggggggtggagaggttgagatcaggggtgggggagccctgctctgccctcctcgtcccccaccactttcgctgctgagttttgtctc

SEQ ID NO: 120289 - DNA, 349 bp, Zea Mays
aaaaccgaatattgtttctgagcaaatccatccatattgtcaaagaaccaaaccaatgatttactccattttgattaaccaaattgatgtaattatattcatcgctttcttggtggcaacattattatagaatcggaatcgccttgtctatttcctagcacaatttttttcttcttctcttttgggtcatgcttgttctccttttgccgtgatcttaaggggatgacttaaatgtgctccttctgattataccaaaactgaatctggttactgggcaaatccaccataccattgtagaactcagttacttagccaatgttttctctctctttgatcaacctgattgatg

SEQ ID NO: 120290 - DNA, 539 bp, Zea Mays
gtgaaattgggctcatgcttaggttttaactcttgttggaattttagaaaagcccaattcaccccctcttgggcatcgcgatcctttcaattggtaccagagccttgttgctcctagtttagcttaaccgctacagtaatgatgtccaacggggatggacctcctcccgttttttatggtgacgattttcctgtaacaccctaggtgttacttagggtttctcctgagtacccacattgtgacccattatcacatgtgttttagttggagcagaaggcaccaatcttgaggcgctaaaacttaatcaagtattttcaccctaagaaccataccctgaccatatgaagcttaaggaagaaaggaaatgccaaaaccctaacaaccctttctttagagcaatggagcactaaaaagaaactcagtaaaagaccaagaaaatcacattgtcatgacttgggccaattataaaaattgtaatacactaaataagctacaaaaaatagtaagagagtttgcccaaaagaatttttcaaaatccc

SEQ ID NO: 120291 - DNA, 544 bp, Zea Mays
cagcaagcataggtgacaatgtaaacatggcagttgaattagaagaagcattatctaaggtcatagagaacactttatcaatcatgccaaagtattgaatcacacaagcaatgcgttcagcaatgttaacaccattatgagacacttggatcaatttaaatcctaccacagacttctggtgcctaagcacgtgtccagtgccagcatagaactagcactcaactgagccttgcaaaatttgcaaatacctgcaatgcgcaccttcttaccattacgattttctgtgacttcagtgaagtcatcccaaacaacagatcgatgcttactagtgcttgaagaagtcaatgaatcaagttcattagagccagcagcatcactaaccagctcggcaggtgcccctcagggtcgacgacagtatgactgctaccgacaccgaacaaggcagtagcagcatctcccatgtcgtcgacgtcatcgggaagttgccctaactcaacaagctcatcgttgatggttctagggtactcgacgtcgtcgtcgtcat

SEQ ID NO: 120292 - DNA, 544 bp, Zea Mays
tagaactctggtttagactctatgactgaaatgtcttgaaccattccaagtccattcggtagcgctcgtcaatgttcgtcgtcttgacaatgttaagaggagtactgtttgttgcacgggctggcatcttccaggaattgtatacgaggtagtagaaaaaaaaaaggcgacacttgttgccgtctgtgttctgaaaatttcgagtgtcaatttcagcttgtttgttgtatggtggttgcacgggaaggttttaaagatcgatacagtacgtggtggtaagactgactctcaagaaccgcgcgtaccatttgattcggagctcgaacgttggctgataatgacaggctgcgtggaattccacaggaagtagaatatttgccatgcctaatggcactgggggggaaaaatgtcaggtatattcatctggtgattctgctttctcttgagacgaagcaggagccccctgtcagcaccgacacccaagacaacgtgggagcaggcaacaaagctggtggcgagccagaggaaggagctgctacacgga

SEQ ID NO: 120293 - DNA, 553 bp, Zea Mays
ttgctcctcgccggagcaatggatccaccctgtgtcgtgaaaaaggggtgtctgcactcctttatccggtaaatcctctcccctttagttcaccgcacaatctgggttgttgcgcacctcgtggtgatttgtttgggctgccaggcatcgagtattgctcatcgacggtcatggcaacatcgtagtgtcgtagagaccgtggttagcagtctgggcatgatgatcagggtggagaagtaggctagcagggtcgtaatagagagggctttgtgtagaatcagtcgtatcaagtattagagcctagggcgcggagcatacgacctctagccatggcgcgccgccgcgaaatcgtctctgggtcggtcaccaccgcatctggcttccagggttgaagacaaggcacgtccattgatttgatctgaacggctgggatcaaaccgtagatatacccttttagcactttaaatctaggccgcaagtcgtgcatccgagggctgggagtgggcactgtcgtggttggatcttgggcgttggcttcggatccaacggtcac

SEQ ID NO: 120294 - DNA, 1315 bp, Zea Mays
tggatggttacagttcttttttgggaggaaggacaatggtagcaggtttagtatgccttcttatctgataatagaaatatagttaataaataaatttgtgataaatgtgcttaaaaggaaggctcagaaggcggcgaacccagcgagcggtgtggcaaggctcacaagcgcgagagcaggctacactgcagtggttgcaatcctattcttttcctgaccaagtaaaacatagcagcaattcatttttaccatgaaggaaattctttgcaggtaacattgtattttactaaaactttttctttgatgtttcccttcttgatagtgtaaattgttctgtatccgattacaaatagagaacaatgaataactacaaattagataggataaacaaccttacaaaaatcctaaataatacctatccgttccaataacataggagtcctaattattttacttttagcgtaagtcaaattgtctagaaagttatacaaatatctactgctcccgttttaaattataaatcgttctacttggtgctatgcttataatttaaaatagaaagtacacaacactagatgacagaattatgataatctatgccatggtggatttaataaaaactattttaattttataattattgacgtaatttctatagacttagtcaatgccctatagacttagttaatgttaataagagaaagatagaagacttacatttataaaataaatggagtattactacaaatatattgagttattacaataaatacagaacaattatacttaagacaacatgaacctctcaatttagagcaaactatattataatatgaagaatacagattattgttgcaatgggatgtattcttccattttgtttattacataccatttttttaaaaatacatgctatctcctcaaaatgctgccatcagctttgtttggtcatcccatcaatttgctaggaatagttgtttgtcttcagcaatattcagtttaggatacacgacatattacttacattcagtaatttcataattttttagtaatggcatcatctggagaccaatcacattctgcgttctctcctttgaaggagcagcagcaggagtttgtagatgtgtcaagctccgagagatttgatatacatgcatttgattctccacctgctcggcgctctttgaggaaaagagcagccccatctccaccacagccttacacagatgaaaatcgaaggccagccaagcgccggcaggtatctaagaagggcaaggagaaggtggaggatgatgaggtgtgtatctaagtattt

SEQ ID NO: 120295 - DNA, 907 bp, Zea Mays
gaacggtctggacccctgtagctggtctcgagccctctggctcttggccatcttgtgtcgtcctttcgacgaccagcaccatgctcacctgttctgcagccgccgcgatgtataaatacaacggctccccaggttctggagctaccagtattggtagggacaccaggtgctgcttcaactcttgaaaggtttgttccgcctctttggtccaagagaatgggccggtcttccgcaatagcttaagaagggtagagctctctcagccagccttgaaatgaagcggctaagggcggctaatgaccccgtaagcttctggacgtccttgatacgggtcggaggcctcatcgcctcaatcgctttgatcttctccgggtttgcttcaatgccccggtgtgaaaccaggaaccccagcaactttcctgcggagacaccaaagacgcacttgtccgggttcagcttcgtgcgtgttgcccgtagcttgtcgaagaccagggttaagtcttccactagggtcgaccctctcttagtctttactacgatgtaatctacgtacacttccaccttgtccctaatcaggtccccaaaagtcttactcatcgcccgcacaaatgtcggcaaggcgtttttcagaccgtaaggcattacgacatagcagtaaaacccatccactgttacaaaagcggtatgcttcctatcttccctagacatctggatttgatggaaactagagtaagcatctaagaaggacaagaggtcgcacccggaggtagaatccacgatttgatctatacgtggaagtggatacgggtccttgggacaagctttattaaggctggtgtagtcgatgcacatctgaagcttcccatttgcctttggaacgatgactggattggccagccacactggg

SEQ ID NO: 120296 - DNA, 363 bp, Zea Mays
ttccagagccaaatttattgcttggccttttgtccacgagacctaagacagctaggttcgagaccacgagttctactgctacccaaaaattggctcaaaaaaatgattcaaatctgcaacagtgcatcctcaagctacgagttctgctactacccaacagaaactgacccaaccgaaggaagacaagtcccataagctgaagtggctgaagaccagaagctaaggagtcgtagggcatggaagccaaatccaaagtatagtggtgctgactggatgtaactaggtccacctgtatgtaatgaaagttgttttgagaatcttagtttcatataaaagggatccatcatctattgtaaggttttg

SEQ ID NO: 120297 - DNA, 655 bp, Zea Mays
gtagatgatcattcctgtcataacgtattggacttgtacttttcttccagctctagtcatcaagtcagctttccaccccgagagctggtcagcaatcttgtcgattatgtattgagtttgatttctggaaagcttgctcaaagacaggggcaggccaaggtatttacaggggaaagaagagatctcacacgggagacactcctgaagggtcgccacttcctcttccccacatctaattgggtacacactgcttttttggatgttggttttcagcctagaagcttttccaaaaatctctaaaattttgagaaccagttgaatatcagattcttttggatgcaaaaacatgatcacatcatcagcatacaaggacactctgtgttgcaaaggtctagaagccaatggatgcagcagattttcgagatcagcttttgaaattaaccatcctagcacgtccatgacaagtatgaacagcataggtgagagggggtctccctgtcttaagccctttttgagctgaattttttcgccagcaacaccattaagcagtacttgtgtggacgaagtagatagcagtccacacagaacattcatccaaatctgcccaaaccccagtttttgaagaacttcaaggaggaaaggccaagatactgag

SEQ ID NO: 120298 - DNA, 369 bp, Zea Mays
gtcagatcaaggaaatctacaacgcccaacgaatccactaaatatcatctatgtttccaaatcaaacaagcagacaacagaaaggttctctctgtctcatatgctgttgccactccaataccagtctaccaaactgaacctcagaaaaatgaagtcaagacaacagagcaatatctgacccaaaaacaattggagcgaaaagaaaataagacatgatccgagagtagccctttgccaatcagtagtcagacagtgcaaaaatgctgttctgaaaaataataaatgggagagggaaaagagacagaccattcacaggcttgttgctaaggtaatgaggtccatctgattgggagcaccctccttttcctc

SEQ ID NO: 120299 - DNA, 287 bp, Zea Mays
gaaaccatcctggcatcattgggtgaatagacgatgcttgctgcatcgccttttgggttgttttattcagctgttttgttttagcggaggactaggttttttgttggtcaatcgcgtagaacgaccttcttgctaccatatttggagagcagttgatcaaaattaggactgactttgaccagccgaccatgtgtgttatatgtgttttgcccttgcgtctcttttttgctttgtgtggaggccgacgcctctggccatgtgcgaactatccaactaagtcagttgga

SEQ ID NO: 120300 - DNA, 485 bp, Zea Mays
gacagagcggccatagtgctccgacttcatccacgacgagatcttttcaccaagggtcgttatccgcgctttactgggcgcgaatcacagcgccgacgcaaatccgagcgcgaggtcaccggcggcgaggttcagtgcatctaccgatctttttcagttactgtgccatgcgaattcccttcagtgcgcctgacagagcagattgagaagctccattctccatttttcatgtggagagctattgatccatctgcaccaaagttgtagctctataaaccagccttgattctgctatagcaaccataatcaaatactccctggttcctactcaaaatcgcttccaaagttcatcccaggtcactgtcagtaaaaattcagactcagagttgactaacagccagactttaagtccatttatctccaatttctgtacaacaccaatgcttagtcacttaatcaaacttgtacccctaacatagctctac

SEQ ID NO: 120301 - DNA, 603 bp, Zea Mays
gtccaatctagggataccttttagacaaacccaaacactgtgcaagcatgtagaaggtgtagaacgggatagtaagaagacaaagaaataagtcaaaagtaaaagaggatatcgaggcacttttttttgaacgaagatatcgaggcacgaggcacttaaatccatccttgacgccttcagcaaagtgtcagacccatgtaaactttgctaaaagctccatccacccaattcgttgtgaggacatagaccttgatcaagtgatctcacctttcttgggagccagaggcacttttccctgccgctaccttgggctacaatacataccaggcctctccaaaaagtgcatgtgcaacctctcatggaatgtggcagagacttccaggttggaaagtgttagtcagttttggtaagctaaaatcagggctagacatatgattaccttcccaatgtattctaaccagaataggtagggtatatgagctgattaggcaaggatcaatctgtgattgggtatttctataaaccctgtgatccttgcctatatatgtgtaacctctctaccctgttatgcaatgaatcaatgcagttctagcctcctcatat

SEQ ID NO: 120302 - DNA, 296 bp, Zea Mays
ctcccctagctctagagctaccagtattggtagggacacaaggtgctgtttcaactcttgaaaggctcgttctgcctcatcggtccaagagaatgggccggacttccgtaatagcttgaagaaaggtagcgccctctcagccagtcttgagatgaagcggctaagggcggctagtgaccccgtaagcttatggacgtccttgatgcgggccggaggcctcattgtctcaattgctttgatcttctctgggtttgcttcaataccccggtgcgaaaccaggaatcccagcaacttcc

SEQ ID NO: 120303 - DNA, 852 bp, Zea Mays
ttttctttttagagctttagggcattgccccaatcttagcattagcaaagacgaaagcatcagtttacagcttacaggttgaactcacctgtccgaaaatcccaaaaaaagctgcaaagaaacgttacaactccatacttaaacgacttctcttgacaccaatcatccttccgacacactcaaataaaaatacacctagggatccattgaacttaaacaagaaacagcactaccagaaacaagctaagaactaaggagctacagcaggggctgttaagaaaaatatatccttagcccctgcaagttcccaaaaaatgcctctcttccccgctcggactaaagcagcagtaacacttgggggtgggggatgccataaaaaaacataccgttttctgtgtttccatatgatccaggagccaacgatgatgagactatttaggctttcctccactgtccttccaacagctcattgttgcatgccttatctgctcaagttgaacattgattaatctgcagaataggagacgatgtggatccttggtattgtgcatgtttctactgaatccatgcttcctttgtgcacttttactggtaatctattttcattatggaaaaaatgaccactagtcttcttgatttatcattcttccacctgttgttattctacttggaggaatggtacctctagagaactttgcactttttctctgcaaagttctttaaaaaaccttttttactttttttcttaggcaattcgatgtggtgctgtgatattagttttatattttctctgattcgtgaacttgtaggtttaattcttgatggtccgtcttctgttgatgacttatggac

SEQ ID NO: 120304 - DNA, 557 bp, Zea Mays
gaagaaacttctcgtgttcctcgccggaggcgttcaaagattcaggaggacttgagtgacctcactccttccgaaaatgtcgtcaaacttcatggcttagatatgtctccattcgatgttttcctcaaggaagccatcccagagaccatgtcgagtgagctgctggaggtacatgttgtggatgttagtgtgtgtcgggtgagcgagcccccgagcattggttgcccctccttgtgatccatgggcggaggccgaggagaacatgagttctagagatgcaacacttccagttgccttgttgtctgttgggctacatgtcgacctgtcgcttggtgatcagtttatagtggacaaagtgttgattgaagaaagacacggaaatgtgtcgatccctctccagccccgaggatacgaggatagaggtgctgcctaccgagggaacagtgatgctacatgattcaccttcagctcccaagggtgatggtgcccgagtggtggccaagtttgttacagtacccaggagagcggctcaggcattttagaggttaatgtgccag

SEQ ID NO: 120305 - DNA, 287 bp, Zea Mays
tgaacaaccggattggcaaccaggtgacgcgactgaaaatgcaggctgacaggaacatagactgaaagttttgaaacaaatacaacaacatgatgaagagctgcagtgcaaagctttaagtaacaactctcctcctaaaccttgcgcagaagcttgagattgacgaggccgattcttgtgcggaggtcacagaaatgttcccgcggcagggctttcgtcaagatgtctggcaactgtccagttgtgctgatcggaaccacacggttcctcccttcttcgatgcattc

SEQ ID NO: 120306 - DNA, 1309 bp, Zea Mays
cccgttgggtacatcaagtggtatcaaatttcaggttgctcggtgagagctctccatcttccttgttttatttacctacagtccacttttgccaaagatatatttagagcagaaagtcacctaaaaacattttgagcctttgctttactacttagttcttgacttgttgaattcacggttgctgcatttgtgtcgagttgctggtccaaagtttcttgctgctagagtttcgagttcgcgccatcttgtttagatcaccatttttagttctctagctgtagttcaaaaaaccaagggaaaggaaaaggcaagtgcagaaaaaaaagccgtgctgatcataaaaaaagcacgtacaaaaaaagagaaaaaaatcgcagtaagaatattggtagataaaattccatgtgcaacaaatcaaagacagtgtgtgtgccaccgtttcacaattttataagtcagcttgctgttttgagtatttggtgatatcatttgtgtaacggctcgcgtctctattacggtttggactaggaccagcacaacaccattgtggaacgtttattcaacttgttgtggctaacgtggtactagctattccttggaactactgttttagcagccacctataaatccacaattttttctacaacaccaccaggttgtgctagcagccacggttgttgttcttcttgctgtttgccagcgccacttgctttgcgtggtgagaacttgtaagagcttgatttcttgctagtgaggcagtgtttatccatccacatcatagcaactactaggttgcattacttgtttttgtatctcttttgcactaaccatggcacaggatgcaaatgcgcgacctccacattctccacgaacagtgggcatcattcaacatttcgaacgtcaattaaggttgcacacagatgccctcaatgaagatgttcaagtcaccaatgagcgcattggtcaattagaaacaacacaaattgttaccaacaacacattaaccactttggaacgaacagttgctgctactaacacctctcttgcagcaattattgagcgcttagataggatggaccaagttgggcgtgaaggtaggcaacaaggtgatgatgatggccatggttccattgctggtaccgcaatagatgatgctacggagtattcagcagacaccgagcgtgatgaccgatctattaggcaccgacgacaccaacgacgtgatcgccatggcttgggtggtcgacctccacgacgtgaggtacgtgaaaatgatgattctctaggaagaattaaattctccatacca

SEQ ID NO: 120307 - DNA, 779 bp, Zea Mays
ctgagtctatgctactgagcagaggatgtcacaacaccgatacagaacagagaaggggcatacgtttctcactgaggggaaaggagggacatgcgacaaagtgtcgtcgacggtgaggaaggcgatgctccgggcgaggacaacgaggaacgatgctccgatggggaaaacgatggtgctcctcctcgattgttgtaggggcgcttcacctggggatgcacacctccgtgtgtagagcgagtggaaactgttgtatgagagggtatagtggacgaggtgattgtgcgatacgtggaggttttatggagcgaatggaggaaccgtcgctcgacgtacggagggaggtgttttaggatgttacatcggggatgctccggagtggtcataatgcaggctccagtgctcgtggatggtagcggcgctggttgcgaggggagagtgctcgggtggctaggggttcgaattggggtgagtatagggtatagggggtctccactaatactcgtgcgctattgattcgagggcggtggctccagtgtgagcaacgaggtcgtgctccagttgaatgcctgtgagcccacaccattaaattgcatggtgtcgggggaggaagagggggagaaacatctgccttgaatgctcatcacgaccactatcgagtgatggggaatatcggtgctcatgcgagggatgactcgatcgacgatggcgtgcccaagtccgggagcagagagatgtgatagattagggatggcttgttgggcattcgtggcagcgac

SEQ ID NO: 120308 - DNA, 355 bp, Zea Mays
gtgatccacatgctcttcctcgctctaagaatctcatcaagaagacataattgacccctcttggtattatgactatctagcctactaaccctatcaatattcttctctaaacaccttttgatcggtaaaagcaaaaacctatcttttacctttgtcttgagtattcaattccatctccttaaattatgaacaatggtcatccataagtgtagccaaccatgctaccttttaccatttgtccatagcttaaagttcctccataatcatcatcaagccacttgatcaatagcccaaatcaacacatggcttgataacactataatgatatgatccactccatgttatcacatggcct

SEQ ID NO: 120309 - DNA, 337 bp, Zea Mays
tttggccgtttttggcccaaaatggttgtcatatgcccgttgatcatgagcgagagtcttctattacttaccccacacatattgccttaacataaatcatattatttggattttggtggagccttcaatattaacgaaaaccgatgtattggttgttttcggccaacaatgtcagccatatgcccattgattgtcagtgagaggcttatattgcttatcccatacgtgtttctttgacataaatcacattatttggttttttgttgagatcgtttgtctgtaaaaaattcataagtgttatccttcgatattaacaaaaattcatgcggccaaaaat

SEQ ID NO: 120310 - DNA, 748 bp, Zea Mays
cgagaggtcaaacgacgtgaaaacggcgtttgaacgagaaatagtgccataggaggtttggaattcgaattgaggcatgaaatgacgtggaattgagccgatacttcacgaataggtttatatgggtaaatatgagtgaagtgagtgcttggtttgaatttaggcgaagaaaacggaatttgggcactcggctcggaaacgatcgctcgaaacggggaatttggtgaaattaaagcctggtatatcggattggcgtgaaatttggcaaatatgttactggaggtgttgtgaaggtgcctgaaaaatttgggttcaatcagagcatttttggctggtttggacatttcaccgaacacttggcatgcagtgaattagattttttggagatatggccatttgaggattgaaaccctcccaaagggagctagaaacctgcagaggtattcaatgggcacaaaggaacacatccaaccagaaggaatcacaggaattcacaataatttgaatttggatcacagaggtggaggaagagttcactgatcaatagaaaacaaagagaagggagagggagccagagctactcacctgaggggggaaggggtgagcaccggggagagttcgccggagggcagccgccggtgagaaggatcgccggagaggggagagatcgccggagagcagagagagacagagagcagagaggaacagaaaagcctctggctcggcttcgggctggaggcgatttttt

SEQ ID NO: 120311 - DNA, 488 bp, Zea Mays
ctggaattgattaaagattatgatttgtccattcattaccacccggggaaggctaatgtagtgggtgatgcccttagcaggtccgaggttccaaaggtggccttgccgttgatcgctgatctggaccgtttgggggtcgctttgtgttatgtcggcaccgctagcgaggagactcagatgcttattcaatcctctctcatggagagagtgcgtgcggctcagcagcaggatcgtctattgcaggaagctcgaaagagggttggtgatggtaaaccacgagagttcaccattgatgagaatgatttggttcgtttcaggggccgcctctgtgtgcctcagaaatcagaggtgaagatggatatcttgagagaagctcataaaacgccttacaccgtccatcctggcgaaaccaaaatgtaccgagatttgaagcaaaacttctggtggaagcggatgaaggttgacgtttctaagtatgtggctgcctg

SEQ ID NO: 120312 - DNA, 445 bp, Zea Mays
ctttttcaagagcttcattccttagtgtaataacttctgatcgaagatttccaagcgctagctggcagctttcatcttcggctttcttttgggcctttaaagccttgctcagaattaaaccctacaaaaataaacgatgagcacatactgaaaaggaaataaactacaaaaataatctgctttttaacaagttaaaagtgttcccaccttcagactgttataggcaaggctatctacgagtttgtccttcgtcattgcagacaaacctaactcaagcttcagatatcctatattgtctgccatccctcgacagacatcaatttctttattgtcatgcagacaataaaggaagtcatcctcatcatccccaccatacaccaatgaccctcgagggtactgcagatccctggcataatgtttcgctttggcaatttgttctttcaat

SEQ ID NO: 120313 - DNA, 555 bp, Zea Mays
gcaaccgtccctgctcccttggcgtcctccgtccagtcagccgcgacctcctctggccggctagcagcctccgtccatgcgtgaaattattggatgaggaaaaccgttctcctgcatgcatgcgattagtggaagacgaaaccgtcactagtgggctccactgcatgccgtgggaaacctccagcacacatgcgtggaaaatgcccccttccaaacatggccacgtgttagtcatccattagcccttcccttgtgcaagatcttctgtggcaagattctctaccgcactatgtgcggccaaatcctcagccagtcaatttgcgccacctcgcgtagtttgttaaacctccatatcctttgcattaaacgtctattttagcccattccaattgtgttaactttataataatgtccatattagtaatattatcttatcgtgtcacaagttttaattacttaattagtggtttattcaatatttatgaccttctaattaagactagtttatagtttatctcgcgcttttataaataaatgttaacttgattattaata

SEQ ID NO: 120314 - DNA, 382 bp, Zea Mays
tgaagagccaagggttagagccagacgccaggtgtttctgcaatattcacaaattatcatatcacacgaaggcgattgggaaagaacaataccacaacaactttggctgctacagcttcgtgccccgctcagaggccagttatttggtgccgacatttcggaaaaaatagccaggctcttggatgcaggaatggttttatgtgaagattgacctgagtcaaagggaggatataaaagggattattcagcgccctatatggtcttgcttcggcattaggaggccactcattgcacttgggaatgacgtgcaagcgtgccagaaagctttcaacatagtgtgcacttatatcggcacagaagacttggtccaagagcatattgc

SEQ ID NO: 120315 - DNA, 425 bp, Zea Mays
gtcaatagaacttgactgcatacacagaatattccaatgttgtacattagtcattaatataaggagaaacgacaggtactctctacatgtcctttagcttggacgtaataccattattcaaaaaacaagagaggttcatctgttgcattgagtgataggaagcagaacatcccagcttggtcatggcccttaggatgggtagggaagaggcggtgctctggtccatgactggtgccaagaccttgtccttcctccaagtcgatgagttgctggcttaaaacagcggagtgggtcgtgtttcttccatgttttagtcggtgatccgtagttagtctctagtggtgtgtgtgctgtattggggttctcccccctttcttttcttctattaatacaaagatgcgcagctctcctgcgtattccagaaa

SEQ ID NO: 120316 - DNA, 811 bp, Zea Mays
taacttcccttaatgaagaatgatttcgtctcctcctgtgttgattattttgcttcatagtcagttgatgattgtcgcgatatttattgtccgtgatgttctctatctgttatgcttgtgtcgtaacttggagttttcgaatcattcttccgtttgccttatctgtgaagtcgattcctctggaatagtagctgagtaaatcgggcatcatatcgtcgcttttaggggtgatggtcgagttattattgtcaacatttacgcttctgaagtagcgtccaaatgatgacgaagccacatcagcgttggaatgactgatgaccacgtcggcgcttttagaggtaacaaccgagtgacttatgacgacgtcggcgttttagagataactgccgagtgactgaagacgacgtcggcgttttagggataactgccgagtgaatgatggtaacgtcggcgttttagaaataacagccgagtgagtgatgataacgtcggtgttttagaaataacagccgagttagaacgggttgcgtcggccactttgaaggtaatagccgagtgatgatgtggcacaccggtgctttagaagtaaccgtcgggtgatgactgggcgctttttggaaacggtatccgacccgggaagatcccatatgtactacgctttcagccgcctctgctttccgtgccctagttcttgctttcctgcctcaagatcctctctgtccttttgcaattcggctctcgctctgttcgccggcggagttgagatggcttccaagcgaaaggcctcgagttcatccgctgcggtgattcc

SEQ ID NO: 120317 - DNA, 546 bp, Zea Mays
cgcggatcagacttgtgcaagttacgttcaggaaaaatggcgacggtggagctaatggtggaggaggacacatcaaggttgagtgagcttatcgcgcttgctaaggcaggattacatggggaagaggaggacgacacatcaaggttgactgagctcatcacactagctaaggtaggattacatgcgcaagaggaggaggacgagtttatgtctcaggctgtcgaagaagtagagtcctcttattacaagcagaagtgtgatgaggctaaggctgaggactagctattctcccaagctgcagatgaagcagaaaccagttattacaagagaaaggcagaaaagtgtgatgcaggacaatgcagcaagtggaacgaggttgttgttgaggattgcgcgatggatgactctgatgatgagttacttatagattgtgattctgattgaataagctagtagtgtgttatgtagtacttttatatccaatatgtttcagagccataatgtttcagattcataatgtttctattgcattgtcatgttttttta

SEQ ID NO: 120318 - DNA, 635 bp, Zea Mays
ctgccagaaggcgctggtgaagacacgatcacggtcggacacaatattgtcgggcataccatgtagtcgataaacctgatccaaaaaaagtttggcgactttgggggctgaaaaggggtgagacaaagctagaaagtgtccatacttggaaaaatggtccactaccaccaatatacagtccactgtacccgacctcggaagtccctcaatgaagtccatggaaatggaatgccacacatgaggaggaaccggtagaggagccaacagtacaggataacgagatctatctggtttggcctgttggcaggtgctgcacgactgaacataatttcgcactgcttgtttcattcctttccaatagaacaaatgtttaattctgttgtaagtcactggaaaaccggagtggccgccaataggtgaatcatgaagggccaaaatgatttggcgttgtatatccggactactccccagccacacgcatgctttataacgaatgattccctgagatagagtgtatggagcagcagcagttgcggatacagtcagtttggtcaagagttcctgcgcctgcggatcatcgctgtagcttgcaacaaccccttggatccacagtggagtaccctgagaaatgtgca

SEQ ID NO: 120319 - DNA, 735 bp, Zea Mays
tcccaactcctcgtcagctccatctttgctgagtactttccaataattttcactgcctccgcttccacctccctaacgaaggcggccgcatcccgccctcgcaacttaatggcgaaggcggggctcagcaccatccgattattcaagaagggcatcgggcgcagcttaactgcacctagatcctagccatgagcgagtggtcataccccgcacgtaataaactcttcggtgtgcgccctagcttatcctagctgcatgccaaagggcgtcttcacccttatctcccttcttcagcctaaaccatgggaaacacgatataacaatgcgagcacagaatagatggaggcagcccaggaaccccttcgatgtcctccaacgccatgtagaaccaaaaatcccaccaattaccccacttattcttggtgcacgacacaatttccactacttcacctagagtgtttccagtcctcggtgtgaaggtgcaaatttcaaactgcgcaaccttgccaccaatcaccttttttgctaatggagacaataattcttggcgaagacctcgaccaaaggctccccgtcgtacgaagtcactgcccacacaaacttcaccagggccaccatggcgttcagcattagctgatgaatctaaacctcgaaccgtcgtagcacttcaactatgaactggtgcgcgggcaaacaaagtcaggcagtgaataacgcttcgaaaacaacaaattc

SEQ ID NO: 120320 - DNA, 575 bp, Zea Mays
tcacatccaacaaatcacctcctatgttggctgccgactgggagatttcccacaaacaacctaccttggcctctttctctcccctaccaaacttcgcatccaacttttctcccccaccatcgcaaaaatagatcaataccttgcagggtggcaatcgtcccttcaaaacccaatgggccacctaatactcatcaactcagtccttgacagtcacctaaactacatcatgagcgttgtccaactccccaaaggtgcaggccataaactcaatcaacgtcgtcgcggcttcctctggttcagcaaagatgttgcccctggagctcgatgtctcgtcccctgggacacggtgcttggaagcaagtctgttggtggcttgagcatccaagatctcatgttgttcaacacttgcctccaactcaaactcatccaccgcctctacacttcatattgttcttcctatggtgtccgggtccgctgccacgcctgtctggcgagccttactagtgacctccccggcccacaatgggcatccctgcgctccctactccctatttatcgcgccatcagtacttgcg

SEQ ID NO: 120321 - DNA, 324 bp, Zea Mays
acctcaacaacctcctccaattttgtccagtttgtaaaggtaatcatgttctcattgaaaacaggcttgtacaaattgttcgaggctctaacccagaagtatgtgatgttgtagacgactccttttatcagaggcttgaacttttgtatgactggtgggaatattgcagcatggataccggttccctgcacaaagcagcgatggaggaaacaacaacataataacaattaatctcataccaatgccagcttccctttaccaaatagataatcgtgcagatgttgtacctcttcgtcaagcagcaccatatcacaatggagcaac

SEQ ID NO: 120322 - DNA, 774 bp, Zea Mays
ggaagaagtgcacactgatgagaagcgccaggagcgtttcttggaaggtttgattggaccgctaaactatcagctgcaaagtcatacatttcccaacttccagactctactgaacaaggcaattggccttgagagcaaaagaagggaattgtctgatcataaaaggaagtaccaagggcagaccagcagaaacacccagcaaaaccactcccaaggttcttagttccgcttcggaaaccagagtgggaacaacaactatcaagcacagcgctttggacaacaaagccagaggaacaatcaataccagaaccagcagagaagcaatactcagaccggccaaaagtctagtgggcaacagcagaatcgtcagggaagcacagtgaacaccctcggccaagaataacaatgcaactaccccagttcaaccgaatggctatttcaagtgtggcaaacttggccactatgccaacaactgccccaggcgtttacgaagctaagacatgacaaacatacctataagccttttgcgttctgcggcttcttcagctcatctcacttcttctaaagcaatatgagattctttttcattttgcctaatagcctcgtctgccatttctcggccaccattcatccatacttcagaataaaattttccactaagggcaatagcttcggctgaaggatccttaacgcgttgaaattgagaattctagctgaattacagccttcgcatgctgacagccagcttttcaaggagagagacagctcctcgag

SEQ ID NO: 120323 - DNA, 984 bp, Zea Mays
aaattatatgttaggaatagaattgtccatccatggccaaatgaactgtcaagctccagcatatcaaatgaatggtctttgtaggtttaggtgctgtggttgtggtattttatttgccaggggttttggatacaatttaacatgtgtgcagtcggttgtggttttacacttttattgtgatgagagatcctaaattaatgccacactttgttgagtagttgggcttgctatttttcaagttgagcttccttgtttcaaatgaaaatgtcctcattgggcatcccgccatatttcgtgtgaaggtacccagccatcaacaagccagcaggggtagtgcattggctaaagcatagtccagaggccgacaatgttgattgggttgtaatcttggacgcagatcagattattcgagggcccattattccttgggaactcggagcagagaaagggaagccttttgctgcttattatgggtatgtttttacttgttcagctattaactctgtattatccttttctgtaccaaggcagttttaactaattggaaagggtggcactccaaccaatcattgaattatccattggttccaatattctgtaggggcattgagtacctatccatctacttgggacttaactttgtttggaatagtggttttctaactagggacattgaagaacaatatgatctcggtggcagcagcggtggcagatccttagctggtcgcctaaacccgaccattgatgtgttggtggcacatgttgtgtcatggctccaactctacgacaatggaagcttgggtggcaatcggacgtcactgggcatgagtcgtgggctggtgacaggcgcaacaaagactggcagcttgaggccaccatggaacaccgtctacaatagaaaggggaagcggattgctgccgatgattgtaagtattgtggcaaaatgggccattgagctcacgaatgtcgcaagaagaagaggt

SEQ ID NO: 120324 - DNA, 485 bp, Zea Mays
gtgaaaatgagttaaggctagcacctacccctctttcaagagaggaaattttggattgcacaaaaaatctaaaaacaatttatggcaagaacccatcacataagacgataaggaatcagaaacgcaaggatgggaaaccattagtctttctgaaaaaggagacctatttggttcactcttccatattggaacgacttgcaaattcgatataattttgatgccatgcacataaagaagaatgtgtgtgaaaatataattaatactttgttggacattgctggaaaatttaaagataatcggaaggctcatttgaatcttcaagctttaggtattacaagcgaccttcaccctattgaactagaagccaatcaattttatttgcatcttacaccctactcggtgagccctactaagaagaaattgttttgtcaagtattaaaaggggtcaagtttccttatggccatgcagctgatatatggcataa

SEQ ID NO: 120325 - DNA, 360 bp, Zea Mays
caacacagacaaacacaacttcttagataaagaggaaagtagaataaaagggcttcccaactagataactaattttattagcattatcaagtaaaccaacgtgcaggggatacccacactctggcgacagtcattacaaagatccaaatccatcatagttcatcatgacaaacataaaaacacaggataagcaaactaccgtgtttaactaagactaactaagagtaagactaggactaggactataacttctatttttaagcattaattacaagatccgacgctgatgatctatggttctaaatttatcttggtcatgcagtcggggttaccataaacatggtatccacgccgaagtga

SEQ ID NO: 120326 - DNA, 679 bp, Zea Mays
attcactagtattcagcatgcaggcatcaaaccatactcatttgatccaacaaccctgcttttcagagtctgacacctttaaacccttccaaatcactttcaatttgaaaactttgtgaatgaaaactgttctaaatgattttatacctcatgtgagcaaacaagaggtacagataactagtgtacaccacacttaaatcattgaacctacctacatcaagcttctatttcatactcctatggtcaaagaaaaacaaagttctaaacaaactactcaagtatctatcaactacaattaatacttagaactagtccatacttaaccttatcatccaaaccaaaatgaattccatacttagaggcacaaaatttatttattacccaaaaaatcaccattgctacgacctaaatcaaattgtctctgttactttttcaaaacgtattaatcacaataatagtgtcgtcattaatcactaaaaccccttatcgtgtgtgttataaatggtaaaaggccagtcatctcaatgcaaagcaagacaacttttaatattgaaaaaataaaatagagtttccccagggctgcaatccacctacccaaatattaagcacattctaaaactacatagataggaaatgctatcatctgtaaatgataaaagaaaagcacttatcacaggac

SEQ ID NO: 120327 - DNA, 427 bp, Zea Mays
ataaaagcatatggatccaagtttgtgacaccataaaatggttgtccatatgtcggatcgggtgcagggtgtatacatatgcaggtagaggaggtagttgtccatacccatatatgacgatggtggtattggatcgggtggtagtgcccatgcactgtacaagtgttggtcacgtcgaggtggataactgtaactcgagccgactgagctatggctaccatcatcaacaagtccgcaaaccaaatgacataattgtgaatgaggtgctccccctagaactatatgctccagcgtcatatgttgggaggcatggctacccctagaactatatgctccagcgtcatatgttctagcatggctacccctagccccaacaccatatgctccagcatcacctccaccatcctcgtggctaacatcacagtcg

SEQ ID NO: 120328 - DNA, 421 bp, Zea Mays
ctagactgttcaatgtgaaattattcagcaacacatgcttggcgggcaagctcaagatgaggaccccatccccccggccctcgaggatggccatcagctccccctggtcttcttcgggctgggtcagcccatgcctccggcagggcttgacctaaatttccctccggagcctgcgggtggagagctgccagctcagcaagatgactttggccagggagattgggatcagtggattgtgaatgtccagcccaatcagcaggttccgtagcccatcttgccagaggagcaacccattcagcagaaagaactacaactcagtaaccagcactctggcttgtcgtctgatagctccattggtgctggtcagcttgcaccccttccgaatggtcattttgtggagaatggacatgtgctgcttggg

SEQ ID NO: 120329 - DNA, 372 bp, Zea Mays
ggtaccggaatagaaatgggaagagatcggtatgtattttatagttggactaccccgtactcaggatggctatgattcaatatgggtcatagtagacaggatgactaaagtggcacactttatacctgtgaagacaacttactcaggagcccagttagcagagttatacatgtcgaggattgtttatctgcatggagtaccgaagaagatcatatcggaccgaggaactcaatttacctcgcgcttttggaaaatactacatgagtccatggataccaagctaaactttagttcagcttatcatccgcaaacggatgggcaaacggaaagaacaaaccaagtgttggaagatatgctaagagcttgcgctct

SEQ ID NO: 120330 - DNA, 922 bp, Zea Mays
atccacgtgatcaatggcgtactaggagaggtggttgaatttattgagatactgcatcacagtatctcccccttgcttcagtcggatgaactcttctagtttcatttgtaacacaccttctgaaacataatgttccctaaatgccaacttgaattcctcccaagtgacttgatgtcccacaggttggatggcggagaagtttgccaaccaattgctgacgggacctctaaactgctgagcggcaaattggggcttctgaacctcggtgcatcaaattagcccaaatttctgttccattactcgcacccatttgtcagcttctaagggttcctctgccttgataaagagtggtggtcgagtttcacagaactccatataggtagtatctcgtggtccttgaggggggactcttcatccgtgttgttgaaattgcttgctcgccatttcgcgcagaaagcacgtgttgtcggcggtggcgttgaccaaggcagcgatagcctcagccaaggtaggaggtaccggtggcggattgggagtgtcctccctgccgcgggatgtacctaccccatcctgtgcacgggtctggcatggcatccgaggcaaagaaacatttggaaagtataacatgccaaacatacaccatctttatttcattgcggaacagtaataattatacatactccattatacaactcgacttccatacttattttacataagtacattacttagactatactactctagtcttcttcatccttagttgttccgttgcctgcttcaggagaccgttcatctgcaagattcatggaaggaggggctctaaaaaggtcaatcaccccatcagatcctccatttgctgttccagatagtccaactcccattgctgccacatcgggtggcacgttcgggtgcagccgat

SEQ ID NO: 120331 - DNA, 465 bp, Zea Mays
ggccgagtgacctccgataccatgaatggcccttcccatagcggtgacaatttgtgtcgtccttctcccgttagaattcagtgaaggaccaagtctcccactacaaaggatcaatgtcgtatagccttatcatgatagcgcctcagggtctgctggtatctagctgactgaattactgtattcaatcgctcttcttccagcacgtcaatatcttctagcctggtagcttatgcttcagctatgctttcaaagaccagccttggcgccccaaacctgaggtcgacaggtagcactgcctccaaaccatagaccatgaagaagggggtgttcccatgcagagctcggctgggttgagttcttaggctccaaaccacataaggtaactctctgatccacttccctgcgaacttttcattcttatcgaagactttcttcttgagtgcttccagtatcattccattagcc

SEQ ID NO: 120332 - DNA, 855 bp, Zea Mays
cgtagttatcaatctcaaaaatatttacaaagctgctaaccattgccaaggtgtaacttttggggcctcgaaagaaaggtcacctagaaatttggttgtcattttgatccatgctgatctgtgtggacagatcagtccacagacagtaggtggaaaaggttactttttgctagtggttgatgacttcagcaggtttatgtggattgagttgttgaagacaaaagatgaagctctacatttcttgaagaagatcaaacaaagggctgaagttgatcaggagggcagattgaagggcataagaactgatagaggtggtgagttcaattcaaatatgtttactgccttttgcactgaacaaggcatcaagcacttcacgaccactccttactctccccaacaaaatggggtagtggagcgtagaaaccagactgtagtggaaatggcaaggtgcatgatgaagagtaaaggggtgccatcaagattctggggtgaggctatgacaacagcagtctacttgttgaatagatcccctaccaagagtgtacagggaagaacaccatatgaagctaggtttggcaagaaacccagtgttcaacaccttaaaacatttggttgtattgctcatgtgaagaaaaatggcccaggggtaaacaaattgtcagataggtccactaagatggtcctgttgggttatgagtcaggtacaaaagggtatagattgtttgatcctaccactgagaagctgtgtatcagcagagatgtagtgtttgaagaaagtgaaagatgggactgggagagtgcagaaaagaatcagcagactgaaactacaattcctttcactacacagtttcagtt

SEQ ID NO: 120333 - DNA, 656 bp, Zea Mays
tatcattcgtacttgttcctctggctcttgtataatttcagagccaaagaactgtcgttcaccagtttgatcccaatacagtggagtcctgcattttctgccatatagagcctcaaatggtgacatcttcaaaactggcctggtagctattattgtaagagaacttcgcatatggtaagctcttatcccaactaccaccatgtttaagagcacagactcttaacatatcctccaacacttggttagtcctctcggtctgcccatcagtttgaggatggtaggctaaactgaaattcaactgtgtatccaagcactcatgcaacttcttccaaaaccgagaagtaaattgtgatcctcggtccgacacgatcttcttaggcactccatgtagacaaactatccgagtcatatacaattctgctagcttggctcccgtgtaattagtcctcacaggtatgaagtgagccactttcgtcagtctgtccacaatcacccaaatagagtcataccttgcaggagtgcggggtagtccaacaatgaaatccatatcaatttcttcccatttccactcgggtatcttaagcgggtgcagtaatccagctggtctttgatgttcggccttgactctttgacacacatcacacttagccacatgt

SEQ ID NO: 120334 - DNA, 442 bp, Zea Mays
atttttcaaataacttggtcaaagttgataagttagacttaggacaaaactcaagtgatctatacgtttgaacagagggactattcaagagagcatacaataagctatcgtcaaaatacttaaactactttgtcttcctccagtcaaaattacaagttagctccataaaagaaaacaacgaatgagccagtgttttattttatttttagatagcttgccaatgttgagtgtataccatctcccaaatacaactagcaataaactctacaatactaccgctaatgaacgtcttttggtgttaaaagaagttaccgttaaatctagaatggcatcaattcacaaaacaaaagaaaattcctaaagcaacatctattttggactgaaaggagccataatgttctcatctgagcacagagttgttaccctgacaaaatgagaaaac

SEQ ID NO: 120335 - DNA, 308 bp, Zea Mays
tgcagcctgttgcaggtgatggacatcgcccggtacaagtacaacccgcacctcaagtcgttccttctcaagttcatggacaaggagggggacctggtgaccatcacctccaccgaagatctgaggtgggtggaggacctctacccgcaggtgcccgtccggctgcacatcaaggaggtgagccccgagcgggagatcaccagggacctggtgatgccccagcagctgtcctgtctccctgagcgagagccgaacctgaaccactacagcgcccacactacctccgacgagtacgagtgcgggagctc

SEQ ID NO: 120336 - DNA, 353 bp, Zea Mays
agaggagataatcttcttcagaaactgtcttcagtcctaaacgaattactgttgcttagctggactgacaggggcctttcaaggtcattcccttacattttccctgtagcaacaccttaatttaatcataggaaacttgctcattgactatagctcttcaacccactacaacattccactgctagaaacacatggatcacaaactataaggttccaaagccaagcacacactctgaaactcttcttcagagagctgaactcaaatgcaaccctttaagtctgacaaggcatattagagagcattttactcacaattccatatgacaacagacccatctcccttaacaagcctt

SEQ ID NO: 120337 - DNA, 727 bp, Zea Mays
gtaaaagtagattaggtcgtggttatgtcgtcctttgttgactttggcacctttaatagggcaggtggtcatacgaactacattagatatgcatgttctggtatcagagtggttggccgaggtgggcacgccccggagcgttgcccgagacaccctcggtgagctagaaatgtgtttcccgcccgaggtcggcctcggatgagtcatgatttaggttccacgtggccatgttaaggttggggagcgtgtttgcttgtgacccattcttacccaagcgtctaggaactttagggttgtgatctgggtacccctaattatagtacttaacacgggtacaggcgtacagctatatactatccatatccgcatacttaggttaaaatatacccgcataaatactaatagatactctaatttggttcaataggcctagctgtcatagcacccatacatgcatatagcgttaacaatatttgtagttacattgtacgttctcgggtggataccaagtgcggactatccaacgggtaaaattaccctctcaggtatgtgtttgggtaaaaacttatacccagccagtttaggtgttctgatggtatgaatttatttcatagatatgaatatgaaattccattatctagtgggtatgtatccactgccatcaatggctattgggatagctaattgtgctacgtcgtcggccgccatcaccagcattcagagtttg

SEQ ID NO: 120338 - DNA, 414 bp, Zea Mays
ctaatgccgaagctttttgccgggaacatgaactgcactatcagacgaaggccagagcagatggtcttcataagaactttggctgctacaactttgcatatagaaaagatacaaaggctccagtaattggatatcgtaccaagtggccaaccgggtggacaaatgaatggttttatgtgaaagcggatgagaagaaaaggaagaagctgatgactatggtcattaagcctatgaaactaagcttcgggatgaccaggcccttgtgccatatgcatcttggctctccatgccaggtagccgaagttgagtttagggtggtagctgccgaaattagtactagagacctagtacaagaatatttggcaaacaagacatttccaacttccagcggttggagaatgccaaagaataaag

SEQ ID NO: 120339 - DNA, 437 bp, Zea Mays
accgtatggggcgctggattatacccttcacatcttctctcttactgaaatcatttctgacataaaaccactgtttcatccaagaacctagccatttctttcagaatgtttcatgagatacctcacaacagagcgatgcacaaagctatagcacccgaagttgttgtgatactgctccttcccaattgcatttgtctggtaggataatttgtggatgttgcagaaacacttggcatctggctccagcccttggctcctcatggcccaaataaaaaacccccactttaattaaagcttcgggagtaagctgatgaaggtatatctcaaatgtctttaacacttcaaccagcatcctgtgcaaggaaaaacgaaggagaaccttcataaaactcttaaagaccactacttcgtctgcttcaggaagatgaacaatactc

SEQ ID NO: 120340 - DNA, 479 bp, Zea Mays
ttgtgacaatatttttttccagctgtgtaggtcacattgacgatcgtcaatgacatgcaaaagtgtgctaagatttccttagacgtggcaaactgtggcgtatggtgtcggtgtttcgataatactttttataaaggtcaccttgcagaatataatacttcttatattttagcattacacaactattgccgactgcacatatcctcaattctataaaggtcaccttgcagaatgtgagtcaagaaatgacctagggagtgagccccactacaatggtaaaggaaaaaaggattcttcgagcaactcatgctcataggtcaaaactctcatttccacgtaagggttgtgtcagtgtttcgaacttagccccgacaagtaaatttgtgtctatgttctgtggtccggatggtgtactcaatgggcgcaagatttatattggttcaagcagaacgtccctacatctaatcttcggttgcttg

SEQ ID NO: 120341 - DNA, 467 bp, Zea Mays
accaaaacagaacatgcctttgcctttgtatttatttaattaagtgaagcatataaaatgctttgagtgacattaggttacatgaacaaggaattaggatactagtggaaaccaaaaacaaaacaataagacaatataatcaaggccatcgtgtggcagacatggctacaaagatgaccactcatccactagggtatatattatcggagtgctacttcatcaatcatgtttgccttcttcgctaggcttttttgtgagcttggtgcacaacacttcgcatgtcttcttgtcgccaggagccttattttctttggtgcactcctcgatgcaagcacctcttatgtcatccgcatttgagggttcttctggaacccacaacgatcttgccaccacaagaaaggtggcaaggaggagaaccaccacaatcatcttgttttgggccatcagtagtgcttctatttagaatg

SEQ ID NO: 120342 - DNA, 542 bp, Zea Mays
gccgggtcatccccggcaacatcctcgggggctgggcaagtgtcaacaccgtccttgaggaccaagttctctgcagtagccgcctctaaggctgatggaccctcagttactcccatgggaccaagatgatccaagtcagtctcctgaccctcaagaccgcgttctaaggtcgatgaggcacgacatgacctcaacccagcatcgagcacatcagcacaaacctccatcacaccatcatctgttggctctgataacatatcctctggaaccatatcctcaagagtctgatcaaaattcgctagagacaattcttgcagaccaatgagagcagacaaagcaggagaaggaactccactactttcaccactggcaacgtactgccgactgttctttcgagtcagagggacctcgtcctcttcctccccgtcgtcttcaccagcaacacaggcaacacacccattggggtcaacagcagatggagcacccccattgggatcagcaacagatggagcacacccatcgggatcagcgtcagtaaattc

SEQ ID NO: 120343 - DNA, 305 bp, Zea Mays
cttttgaacactaccacctcatccttttctggcttcagagtactttcctctccgccaaaacgaaccagctccttttttgcttcactgaaatagcccaacttcatcagcttagacatatcaccttcggtaatggtggatttcccaaactccaggtggctgggtttagatggcacgacgttgtaatcatcttcagattcaatttcctcagcatcaacctgctcagcttcagcggcaggtgcatcctccgatactatcgaccctgaccgttgcatcactttagagattggagcggttttggcaccttc

SEQ ID NO: 120344 - DNA, 426 bp, Zea Mays
aaagaccttgctctaagtttgtataattttatacccaagaggattgtcaatagcaggactatttatgaggcaattacagatagaaaatggatctctgatattaagggtccgctgacagtgggagtcttaacagattatctccagttgtggaatatgacttcagcttggcagctgcagcctgaggttaaggataaacatgtttttagtattgctcctactggcatctattcagcaaagactgcttacgaaggtttctttttgggatctgtggttttccctcatcagaagaaaatttggaaaacttgggccttgccaaaatgtcgcttcttcatctggctggttgcacaaaatagagtctggacaacagataggcttgctaaaagagggctgattcatcctgagaagtgccccctttgtgatcaagag

SEQ ID NO: 120345 - DNA, 389 bp, Zea Mays
tgaggagcccacctcacggaggtaggtagatgggcccgcgacggcgacacattgacagcggcgattcaagagaactctgcaggcgcacatgaaaaaattccatatgacgacctgatgattgagcctcgactagcgctggagcacgaggtggtggcgatacatgagtcatgccattgccagccgccctgacagtgtacgtgccttgaggcgtacgtgccttgaggcgcgatgggacgacatccactgggtccattgtatttagtaatggttccatcaaacagctggaactgaatatcttaggagcattttatagcataaccctaacccttaacccttaacccctaaacctaaccctaaatgtaacccttaaccctaacccttaaccacaa

SEQ ID NO: 120346 - DNA, 604 bp, Zea Mays
ggaaactataataggagctttagaggtagagaaatcagtggcagtaggttgatgtgagtagtaaatgttgtagtaactatatcacattgatcagtttatatagcctggagggtgtgggactgatgagacgcaccacttttgtccgacatctagtgggccacattaacttgtttaattttgtttttaataacatgcttagggaaggtgttgtttagacctttggcatgaggcctatgttgtttttgtagtttgatcttgttataaaaaactaaatccatgagggctattgttgggggtcctcattagacgaaggtcctcaaaatgtagtctcatcaattatttgtaagcccgtttcaggatcaacaaggtgaaatgccgaaaaccaccttcatctaggagtaacgtgcaactattgaggttcaaaggatgaaactacaagctctgacttagcgcaatgcacgtgtaacgaacaaaccagttgaagttgtgcaaaatttccaagacttgctcaacaggattaagaagggaaaatacagcaataccctcagcttactcagtagcacatatgtataggtctgagggcatgaatgtaatttggccaaag

SEQ ID NO: 120347 - DNA, 350 bp, Zea Mays
ctagtagctctaacacttcacatgacaaaaagaatcatgcctatctttatgctcatgttaagaatgtttctagtattgctcatcatgataggtgttataatcatgatgttttagctacccatcataatgctgcttttgattctcatgccatgtttgcatcatctagctctttttatgctcatggtaggagtagatctaggcaccatcatgtttcttctcatgtgcctaggaatgcatcaaatagaccatgctttatcaaacatatgacgcatcatttgttcactactctcgttgtaggcattccacttctcctgatagctcagcgatgcggcgactagcacgcgctcgtt

SEQ ID NO: 120348 - DNA, 527 bp, Zea Mays
gtggttccacaacaaccgtttgaattgatgacatggcaggtccaaggatggatgttacaattgtggcgaccctgaccacttcatcgccagctgccccaagaagaacaggctgaaggatggccagctcgaccatcctctggttggtgcaagggcaagcacgagtacacaaggacaagtccaaggagaggtttggcaaggaggcgctcaagaagaagtacctctataacgccaaggtaaggagtgttccttccttgccatcctcagcgacctcgaccatgacttcgatgacttatcttcttcctcgagcaacatcttgttaggtgggtcgaggacaagatgaacagactctacttccttgccgacaccgtgggaagcctcttcattatggcacttggtgagaacacggtaggtagcgacgataagtacatcagcgatgactccacctctgaggtatcactttccgacgatgatctcaccattgaggtagatgagctgatggctgcttcggcgagtcaggacaagtcgct

SEQ ID NO: 120349 - DNA, 469 bp, Zea Mays
cttggtttccaagcaaactagaagaagaatcctaatagatatggactcttcttttctaataaaccaatcctattctctaaaccaactcagtctcaaataaactagaggaaaaatccttatatatttagactctcttttcctgacaaaccaatcgtatttctgcaatatctattttaacacctttctaaactagattcatgcactagaataccacgctatagtatccttggatactgttcaattagagtttaatttgggccaacaccacttttcgacgtacataggagatgctggattaccggtcatattcgatacatttagatttttggattggtttgtttctatgacatcatggggagtgaggatttgttctattttggtgtcaagacatacatcttgcaatcatgagacaccttaaacaaacaaaatcacaaatacaagaataagttcaaaagccgaattgcaatgt

SEQ ID NO: 120350 - DNA, 696 bp, Zea Mays
tatcgtcggtcggtggctccttcttaaggaagccaccactggctgaccccctccttggcctataaaaggaggagttcgacccgagaaagaggcctccggacccctaaatccctagacgcacaagcaatggatggacctagacgagaagacacctagacggaccgaccaacatggggaggaggcaccgacgaggaaccagaggctgaaaccctatcgccaagccaagacttagctaggaatccactctgtaacccttagcaccacctccaccacaataagagacttgggagcctctcttccctctcgcccacttgtaacctctactacgagctttgatcatcaatggtattggttgcgcaaaccatcgatgactggaagtagggacgttctgcctgaaccggtataaaatttgtgcccaccacacacaccgttcggagcccagaatgcacacaataaatttatttgtcgaagcgaggtttgaaacaccgacacatctccacccagacctaggttttcttaagcccacatcaaatacaactcaaagtagagtagggtattacgctactgcggcccaaagcactctaagtccttgtgtgttcttgtgttcatccatctcatcaggcaaaccctaggcagccctctgttcttaggattagacgagtgcattccgccacctagctgaagtttactctccga

SEQ ID NO: 120351 - DNA, 302 bp, Zea Mays
gaacgccaacccggctgaaggggatgagcctccaaattcagccagacccgacaacgaggtacccgatgctcctcatacaactacaccgtgtacaaagggggcgtagggtaaccggcggagttaagcacttcccacaagatggaaggaaagccatcgcgagaaaggaagtcagaactgaaacgagagtctcctccacttgcgggggtgggtgaattcatctgcggaagggaatcaaagataaagattatggtggaaggaaaaagaaaaagagagcccgaatggttctaaagaaagtgggttag

SEQ ID NO: 120352 - DNA, 378 bp, Zea Mays
gtgagcgcatcggacgggagagagactctagggtgtattggacggttgagatcgtcggaaggcagaacaaagcagaggcagactacccttaccgtcttaataagtagtaatagaagcatgtgatccaattcaaaatctaataagattgaaagaaagtttgttgatccaatagcagccaagtttattcctggattctactggagggaagagaacaactacacaatcaaacgagaaatagaaaaggcattgagactgcaaccaaatagccgactgaaaaccgaatagctttcatttgaaggctggttcttcataccattaaggaacaagatgcagctataatttagatgtttaaaactaaaaactgtgaagatcaattgc

SEQ ID NO: 120353 - DNA, 318 bp, Zea Mays
gaaagagccaacagaatgatattggaagcactcagaaagaaagtcttcgacaagaatgaaaagttcgcaggaaagtggatcagagagttgccgtatgtggtctagagcctaagaactcaacctagccgagctttgcacggaaacactcccttctttatggtctatggttcggaggcagtgctacctgctgatctcaagtttggggcaccaagattgatcttcgaaaacatagccgaagctgaagctactagactagaagatgttgatatactagaagaagaacgattgaatacagtgattcagtcagccaggtaccaa

SEQ ID NO: 120354 - DNA, 414 bp, Zea Mays
aggaggatgaatagggtacgtgtaaattttcagctcaagaaactcttaaaatcttgagtggcagtgcctctctcaggcccgacactgtcggtgttctgaacgtagccaaacttgtacggaatcaaattgatatgatttcccacttctactcaaaatatgaggttcaaactagttaaacacatatatcagactaaataaagtaacaagggattcaaagagcacaacttaaaccctaactacttaaatgagcaactcaaatcagcacacaaagacaaggtatttatcccatggttcagatcgccacaaaggcttgcctacctccacgttgttgaggaaagccaataaggccaagggttacacacaccctttatcgatctcaagccaagagctctcgctcttagtatgggatttttt

SEQ ID NO: 120355 - DNA, 373 bp, Zea Mays
tgagcacggatgtgatgatgtccacacgaagacatagaagaagcgctaggcgtcaacgatgtggaggatccgtcgccagagagatggatccgcttgaagctcatggccctctgccggttgcggaggaagagatggatccacgacgcctgtgctactatcgaaatcggaactattgttctccttgtcgtttatgttgacaagctgcttgaagttcatggccctctgttggctgcggaggaagagatggatccaccagcgtctgcgctatcgtcgtcgacggtggaactattgttctccttgtcgtttgtgttgacaagttgtttgaagctcatgtcccatcatcgtccgcggaggaagagatgcctcgtgggct

SEQ ID NO: 120356 - DNA, 495 bp, Zea Mays
aaattttccaatagcctaatatatcaaattcctttgacttgggaatacgaccttcatccacataaagatcaagctcagacttagccttttcttcatcactgcacatctcatcgagctcttattccatggcagagaacaactcatccgtatatgtggaagcattagaaacacaagatgatgatgcattttgtccaccactagtaacaggtttaatgcatttgttgttgtactctctaatcagttcatcaaataatttcctcacattttctatctctagcattgctctactttgtgcaccaaatagacgtgtgtagcatgctttcaacattccaaatttgtatcttggatcaagaacaacaacaatagccattagatcatgaatgtcagtccaatatttatcaaattttgtaatcatatgacttgacatggacttgattaactcatcatcacactctagccacttgctcatgtatcctctaattgcacatatctttg

SEQ ID NO: 120357 - DNA, 468 bp, Zea Mays
tacaaactaattacatggaccttcaatatctaaaagatcgtgccatattaacacccacaaatgatgttgttgattccataaatgattatattgtttcccttatccctgagcaagcaaaggagtacttaagctgcgacaaagtaatcaaagcacctaatacacatgactcttatgatcttttgtaccccgtcgaatttttgaatacattgaatggaaataattttccacaacatcgaatagtcttgaaaaagggtacaccagtcatgctacttcggaatctgaaccaatctgaaggtctttgtaatggaacaagattgcttataacttctttgggtgacaaggttattgaaggccagataatgacaagcactcacaagtcaaaaaatgtgctcattcctcgtgtgtcattgacattgaaaaatacaaagtggccatttgtccttcaaagacgccaatacccaataaaag

SEQ ID NO: 120358 - DNA, 601 bp, Zea Mays
gctacttctttgatagaaattggaacgcctcgcacttttggactaactcggctgcatcattcttcgttgtcggctagtaaaacccggacctaaaagcctttcctaccagagtccttgacgctgcatgtacgctacaatcctcggcatgaatctcatctaacagctattttctagttgccgagtagatgcacttcatgaggacccctcctgcacctcttctatacagcaggccccctataatggtatagtgggctgactgtcttgcaatgcgctccgccgcagctttgttatctggttcttccttgttttttaagtatttgatgattggctctctctctagacattgggatctgcctctacctgactcaggacatggcattcctccatctgatctatggcaacactcggttgctgtatttcttggacaaaaaccccaggtggaacttgagcccgactggaccccagctttgacagtgcgttagccgctgcattgcgatccctttccacatggtggaattctaatccttcgaacttgtcctccagcttccacaccgctgcataatatttgcttattgagtcggtcgagcaatcccgatctttg

SEQ ID NO: 120359 - DNA, 621 bp, Zea Mays
agtgactggaatagtggataggcgtaaatttcggtgagagtgttactggaagtgtcttgagggtgctggaaaaaactagggtcgatttgagcaattttagctggtttgggcatttcaccgagcacctagcgtgcggggtttcagagaagcggtgaaatggttgtttcagggtgtgaatcctcctagagggagaggtgaacctgcaggagagtgacacaagagtactaggcacacacatgcacacttgtatccataagatttcttaggatttgatgaattgattcaagaggtgcgaggagctcctctcagccagtgaataaacagattgggagagaagagaggagaggagagaggctcaccagatggagtgaggagccaaggaagcgcaggagcacctcatcggagttggatgccaaagatcgccgccaatggggggaaatcaccaggaggacagagagcagagagcaatagagagaaagtggactgggctctactcgggcgaggggagattttttaaaaacgcgttatgggcacactagacagtatatagtgcatgtccggtccacaccagacagcacacagtagctgtctggtgaaccaccggacagggcaacataggaa

SEQ ID NO: 120360 - DNA, 512 bp, Zea Mays
gtcacaatagacaaatatggggtgcaagttctggatctaaataaggtaggttacaaagatgacccatcgatccttgctaatcgtgctgcacaggtcttctatgctgaacagatcatccctggcaacgagaagaaaagcacagacaaattgaagcatgtagtttttcctggaaaacaacaagctataggagttgatggtgtatctgatatggaggattttaaccaattcaacgacatgtctcttttcatagaccatccaaccaagataaggaacgttgagtgaagcatcccacataaaatgttgccctgggtccgccacgatggacaaggcagaataatagctccctagattataaacttgtcttgtaattaattattgttaggaccatgtctactacaagtttgagatcaatatatatatttcttcaatgtcctataatgttgtcataaaagatataaaagatacttttcagatcaatatatatatttcttcaatgtcctatgatatactgt

SEQ ID NO: 120361 - DNA, 370 bp, Zea Mays
gaacccttggatcggtggtgtgcgtccaagatcaagcgtgtgcgtggacatcctactgaccctccgattttgatctggcggtcagttgtgcgtacccattcaattaaaacttagatctaatccgagccaaccgctcccgatcggacggatctggttcatccataccccttcgtcgtgccgtttttgcataagagaccctctattttcacataataaacccgccgtccactacatagtattctgagtcttaggaacttatgcgcagaagtccctgcatttcctggtaaatgaggcccactccacagctctttaaattcagttatttaattatagaaattactttttaatacaaaataattgctagaacttt

SEQ ID NO: 120362 - DNA, 724 bp, Zea Mays
catacaaagtttggagtaaaatgagctcaaagttgaactatcagttgcactgataactgaattaaggttaccagtaactttggcaggactttgaggtcgaattggagtgagatctagtgatcaattgagtatagttactatagcaagattgtagcttgattatacggctacaattgtgttacagagaggttaacacattctcacacaaaaatctgagattagggcactacaaaccgtgctgtcagatgctctgaatgaccccctgatggtacagtgctagaaatatctttggtgcagagcacctcactgccggcgaccttgcgtttagatttgcgccaacgccgcgattcacgctccgttaagcgcagataacaatccccgggtaaaaagatctcgttgtggatgaacttgaggcacagtgaacgctctgtcgcttatccggttaccgacgacgtgcccgcacgaccctcaccgtcgtatcgctgttcctcgcggtcatgacacgccttcagccatctcaccacgtcgcaattaatcacaatacatagcccattggtcgcccaagaactttccatggtaacatccacgaattgcttgcgccagtaacctcttccctctccggccgccaccacgccatctccaattcacgggccaccgctctcgaatcctataaattgagcgttccatcagctccactaggtattcaggcatccaacacacccac

SEQ ID NO: 120363 - DNA, 653 bp, Zea Mays
cacatctacaccataaccagggtcgtttgtgctgtagaagggatctgtcgcagagccatgccccactgaactatggtttccgcactttcaatcctggtgagatacctcctattctgttctccatggactccgctttgtttatcattcatcgggttggagtttcgggtctcgggggccaggggatcgggcaccggtaatggcaattgtcgcgatattgccgcatttggcgtccgtgctgccgggtttcgagaagagatgcggcaaccactgataacgaaatagacgatggttctctggcctctcgatccagattagatggacataattagcgcatagatataccggttggacgggatctgatcctggccggtgatcgcaagttcaatggccgagatcataacattagataatggttcgattgtgggggatctgagtcgagcagcgtgatctgaacggttctggtcacatccgcgttattgcaagagtaattttgcaaaagactcactgcaggctgtataaatgcaactcgtgcatccatattttgattaaagtaaaaaaaataaatctacacaccctttaaaattcatatctcctatgttttaatttcgattaaacctgttccagttgcgttagcttcataaaaatatttacta

SEQ ID NO: 120364 - DNA, 899 bp, Zea Mays
cggacactaagcacttgcgccagtaaccttcccttcctccgaccgccgcgcgtccttcttcaaattcgcggccaccgctcactaggcctataaattgagcccgccgtcagctccgcaagatcatcacgcaccacaccacccagtattgcctccaatcttgcacccatgagctccaattttggatttcccccaaatccactcaagaacaccgtaaaacgcacctcaccacggccagctcgattcaggtcagtgcaaactttctgctccctcgtttaagtgtgctttggtgcctgtgatgctcgtcgacccgcccaattgaactaggagcccactagtcgtcgggaacgcgtttattgtaatactcaaaagtgtaataaagagaatagagataatctcaatggtttgtggcctctactaattattgcatgtgctcaacactagttaaaagtggatgaatagaacaatgaacacataattaatctgtgcatcatgctgagtttttatttggatgtgcatttgtgcttaataaaataaatataccattaatagcatctcaatggatccatagaatttaaagtttaacttgaaaataaaaccatgaaaatagggaagagaaaggaatattattcaatacaaataaaattatcattaaaatatctgcaccacagttgatatgatcaaaataaataattagccagtatacaaagtgccacaaagtttgaatttgaattgaagtttgaatttgaaaaagaaatgaaacagaaaataaaaagaaaaagagaagaaaccttacctgggccgactgtacacattctggcccatctcctccttctctcccgcacggccctgctcctggagatggcgccgacaggcgggacccgcaggtcagtcacatcgcg

SEQ ID NO: 120365 - DNA, 992 bp, Zea Mays
tacgagtattggaatgtttcgccctcatccatactcatgctaacccggcatgagaggcatgtaatgcataggctgagatgccgacacgttgggctaggaacgagcacaacccgttacaatgctagacacgaccttggcttggtgcccggtccccatataaactgagtgttaggtcaggcgttggtggtcttctctgaaccctaaccattctcatttttaatatgtcagcaccgctctctccctcaaccgtgtatcaaattatatctctacctcgactcctccatctctagcggcaatgcgggtggaaactatcattatcatagtcttgtcacgctgtttggacatctatggatatatgttcactagttcttgcatcttccttctatcctcctgagatctctaactctaaccctaatcccctttactcaatcctaagctagactatctaatgctcctcgctagtgactctagtgatccagttgtgtaggtaagttggtgctctagctcagtcccctttcttctttctccatgtcccctagatatagattgatgtaacattgtattgttctttcgttattggtctattgtaggtcatttggtgatgttggttagttggtgttgcgttagccattgaggagccagagccgttgtgaaagattttgtttgatatgctttctattatatttgatatgttcttcatattttagatttagattttagactatgtagatttaggtatagtgttgtatatctattggttgagttgtttttctccacgggctaccttgcggcccaaccactatgggccaccgtgccatattggcacaatatgattttggactactcttggcgtgagtgagccaaggtcacagccctggggtgggccatacatggcccagtggttttactatgttgtgtctgatcacattctgtgttgtgctctatcgtgcctgtgtcagattagacgacacgttttgatatttatacttaaa

SEQ ID NO: 120366 - DNA, 305 bp, Zea Mays
tggatatagaataattgaatccaagccattgccctctgatcctgcggcccatatcgcgtaccggttcggcacgtgcgtggattaatccgaaccctccacctcagatctcacggcccaaatttaagtgtaccccttcggctctggatatttgcttaagagaccttcaagttaaaagaaatcaacccgcagtcctggcagtggaagtctgagtcttaggacatttttcgtgggagcccctgcgctttcctgtaattgacgcctagtccagaaggttagaaaatccattaaaagtaaatagaaattga

SEQ ID NO: 120367 - DNA, 769 bp, Zea Mays
gtaggaatgattttacgttaagaatgacctaagtcaaagggaggatgtgagggggattattgaacgccctatatggtctcgcttagccattaggaggccagccactgcccttgggaatgatatacaaacatgccaggcggctttcaatacagtgtgtacttacataggcacaagggacttagtccaagagcacattgcttagagagtgtggccacttgcaaatgggtgggaaatgccaaggaggctgctgctggctctagccaaggtggtttagtctacctgaagtataccttcaggtacaggagccaatttgatgaaccgaatgatgactagctaaatgccatagaagagactagtgacgagctgcttggagcatattcaaaggccgaagatgaagccatgacaactgccttcggggcttgtggcaaaaagagattaaatagagtgttcgatgttatcgggtttgtgtacccgaactactgttatccttcgcggaaataagggaaaaagaggaaagctgctacctcgtcgacttctagtgcgtcgaggttaaaaaatgttaaagttttgacacgtcggcctaggcacattgaaacggccgacgtgccgaagctaattaagggggccactcctactgcagagccaagtcgctctatgctagtcgaagctaggataaaataggctgaagagccaaaactggagaaggcggcagagcagttaaaagcactgagtccaccatgcacaacggaactaccgaagccatcaagca

SEQ ID NO: 120368 - DNA, 954 bp, Zea Mays
ggttcaagaaattcaaagaaaaggttggcaaattaatttatggagatggttacaagatgagaacttgaaaaagtggaatgatatttgcattagtgctcaaagatatactcttgctcaagaagcacatgaccagattaaatggaagtgtgtgtgtgtgtggggggggggggggggtgcaaaaacagttctcggttaaaacattatataatcatgtggatacaaataattatgggacacatatgaaacatatttggaaaagtgaagtccctccaaaaattaaaatgttcatgtgtttttttggaaaacagatatttgttaaccaaggataatttggtcaagaagaagtaggtaggtgatgctacctgcagcttttgtgatcaggctgaatcagtcgatcatttgttccttaattgctctgtcaccaaggttatttggggtctggtggctaaatgcatcaatgtgaaggccattcgtagggatatcgagcaatgctggaggttgtacagcttaatgtccctgattcccaagcccccttctgcttcagtgcacgcaccttgtcccaagcgatcaagcagctcgccccagaagctctatcctccccgctatatagaaaagacctccttcttcgatcgatcaaggtaacgagtccagctgggatagagattgccgacattgagtatatcagttgtaaaccgcgtggcacatatggttcaaaacccaagtctgccatccaaccaggtattaatgagtcctgttgagatcatgggtgttagtaagtgctcatcaatattcatcggaactgttgtgcttttggaaaaaaaattgattttgagtcctgttgtgttcgagaaggcatcaaggatttgttttagcctttgaacatcctccaaatttgcacgtagcaatatcaatgtgtcatctacatactgcaacaccaggcatggttgatcatcc

SEQ ID NO: 120369 - DNA, 1237 bp, Zea Mays
tgagtggtttctcacggcccatctatagggtaaaggcccactaaaataggtttgggtggttttcatggccaatttaggggttaacggtccacaaagaggggaggggatagacttacgcgcttcgcccgtgacatactgcgaccgtgcaaattggttgtcggtgtttcatactagctctgacaagtaaatttatgtgtgcgtgtttggatccatatggtgtacttagtgggcgcaagatttatactggttcgggtagaatgtccctacatccaattgtcaaggaaaagatctataagtccctgaggctcaccagttagagaaagtattggggaaaaggtcttcagactaacagggtccactggtcagtagaagggtaagggaaacatctaccttagaagcacccgcccccgaataaacctagaggcaccgagggggaaagccactctagtggattcctcacctagctcaagattgacccgccataaatgagcgactacattaactatgcctagcactgagccatagttgaaagagccggtctgcctcccactcatgacctacgagcctctcagcctatgacgcactcatgacctatgagcccttagcctgcggcacactcatgacatgttgagcctagacctgagtgcataggccatctataggaccaacaatatgataagccatgctgatacccaggctacggaggctaggggtcgacgtggtgcagtgacagtaatgatggcatcggggctccacaccgcccatactgcctaccataaatgacagagccagggaagcccagacgaccggggcacaaagtaataagcatgatttactgtgggtagaacgcctcgttttaccacggcctggtagctccttctaagagaaggaaccaataatcgacccctaccttggtctataaaaggggagagtagaagacgaatacaatagaggacacacaagacacacaacacatgagggacagacgaaccagaagacccagaggaccatggaggccggagccgaggagcaaaccatcatgatgcccaaggcttagcagagaagctttagtctcgtagtccttaggtctagccatgcataagagatttgggagctcttcttccctctctcgtctgcttgtaacccctactatgaccattgagcaacaactgcgctggtagcgcaagccaccgaagactggatgtagggatgttctacccaaaccagtgtaaacctc

SEQ ID NO: 120370 - DNA, 839 bp, Zea Mays
aggtaggccgtggtttatgattgttggacatgtagccatcttgctaaccgtggactgcaatgatttttgataattgggacttgtttgataatattttagtggtggttattccgcgtcatgtgccttccctgtgcacgccagcacatacactgtagcctgagtttgtccactggtggttattgtgcggaagagagtttgttcttctgaatatctggttttctgtattgctttgttcaacgctgatgttccattgggcattggattctcgcagatataagtgtcaaagtgtgtgattttctttcctggtttatgtagaaccaatgcagctgattatacttgttccatatttactcttgcatgcctgtctctgcaaacgtatgtgcagaagtatttaatgctgtacacaactttcttctggtactgctgtcctggtaggtaaactctgttaggctccaacttacaagccatataacatgactaggtcgttttagttcagatgaaatgtgcacaaacaaccgttgtaacatgtcttaatagtactatgtcagcacagagctcattatttcttaccgactctgttttatttctcccacaggttgaacatgtcataagggaagaaaagttcatgcaagcatatgacttgattgaagtatactgtgaacttatagtagcacgtctgtccattattgactcacagaagtaaggcaaccttttctttctattatgcaaacttatatttgttgttccatgattttagttgtatagtttttttttattgatctgaggttatagaagcagcggcggagcacagccaacaaatgaggtatggcagtcgcggg

SEQ ID NO: 120371 - DNA, 280 bp, Zea Mays
ggccgcttgtggaaagctgggaaatgccgaaggagaccatcactgattccggtgagggtaatttagtttgattgaagtataccttcaggtttggggataagtttgatgagccaaatgatgactggctgaagtgcattgaagctactagcgacgagctacttggggcatactccaaggctgaggacaatgcattgttcgcagctttcggggttcggaataagaaaagattgaacagggtatttgatgctattagcttcgtataccctgactattgctaccc

SEQ ID NO: 120372 - DNA, 432 bp, Zea Mays
attcaagaattgccatgttctagagacttaaatcattgtaacactttgacaattgttagagttaaaataactaagtgagaactaacatgtagacttacaaatttttatacaagttattttgcacactaaaagtaccatactcaattaacaatgcattatctataacaatcaatatcgaagcgcttttcaccaatagtttgcattttaatttagacatcacctgagcactactacttttcattcgcaaccataaccatacacatttagaccacaacaagcaattcatcgcgactacaaacttaactaaagacatctaacaagttggttaacccaagcaacaacctaggccgctatacatcatacacattggtttgcctattattaccacaatccgagacaaggtttttttttcagccgtcggtcccaaacgac

SEQ ID NO: 120373 - DNA, 421 bp, Zea Mays
ctcgcaatgtctctctcactcggtcacgacgcaattgacaacaaatttggcaaccaccttctgtgctatctccttttgtatatatacagacaccccgcagtcgcataacccctcttctccctccccagatctagatcgcgcagaagcagacgtccctacacataaggtctgattggttacccgcaccatcatatcctggaccatcgtgtgcgttgactctatctaagattttgttaggttgcttgcacgcggagcacgcaacctgtctaagcagaagcaaaaacattgcattttaagactatttgttgcatctgctcgtacgcctagaaccgacgtatctcgccggtcaggctcgcactagcctggcttcccacacactaggaaccaatcaagcgaatagagattctatccctctctcccc

SEQ ID NO: 120374 - DNA, 499 bp, Zea Mays
aaataggtttggtaattaagattttttctcttagttactaggaaaggttggtttatgtttctcttgtcaatttttgttcattcttgctcaattttaactacattttggatctagatttttaccatgtgttagagagaagaatagctagttttttttctctatttcctcaaatgaggttgcttatcatggttagatattatctctcctctctcccttttcatgttctcaatttagcttatccaagatatatttagttgtttaatgaatagtgcatgtgtttgtatggatagagagagaggaagatacatttggtaattaagagtttttgtttattagttgctagaaaagggttggttgatatttctcttaccaatttttgttcattcttgctcaattttagccacattttggatctaggggtttcaccacatgttagagagaagagtagataggtttttgtatctattttctcaaatgaggttgcatatcatggttagat

SEQ ID NO: 120375 - DNA, 589 bp, Zea Mays
ctatggtctattatcacatgtgtttaactagagagaagggccaccaaaactttagaaccatggctaaattaagtaatgatcgtgatagaaagaataccctagctttttatgcatcttcaccttgaaaaaggttctaaaaccttagcacccccccttgagccattaaacccccaagcattggattagtgagaaggataagcaaatgaccatttcatgacttaaaccctttaccaaagttgaagtacatttatatatctacaagaaataggaaggcaaatattacaaaaaggtcccacaaaacccccaaatcaagcccccaagtggagagcaccctagagcaatccaattcttctctaagtcaaaaatcagcccactcccaaagattggagatgttcattaaattgctggcgccaaatccttaaggtccaaataacaaaaagagccaaactaccctaggcacacccctgaaaagtttgaaccaaaactagaactgtttgacacggtttgacacgaattttgtctcgggtttaacagtgctgatagacatgacttggcgccaccatatcttccaaaccagacccgatctccc

SEQ ID NO: 120376 - DNA, 493 bp, Zea Mays
atcctgtgcagtacaatatgccaacaactgatgatttagccatgcttgttattggtgatttctcacttgatacctttaaacgagacattatcatagagacaaggaattcagaattgaggcgtatttcatcattgcatccagcatatatggcctttcaatatccacttctattcccatatggagaacgtggattccaagttggtgttgtgtatagtggtctagaggccagggaaacaaattcaagaacacatatgactatgcaagactactattgctatcaatttcattacaaatctggccagccaaatccatttctgtcctacgggacattgtcaaaccaagctaaggttgatgctcgggcctgcattgatgagaatagacttacatacattttgtataaccaggatagattgcgaatagaaaacttgcaaggtatatcagatgctgttagcagaggttgcataaatggtgatgaaatggggaaaacaattgt

SEQ ID NO: 120377 - DNA, 505 bp, Zea Mays
acacacttgtgaacaactggggacacaatgttttgagggccttcgacaaaggcatccccccaatagtagcccctcgtgagattagtttgtttttcgttgacatgctcagaccgtgaaacaaatgaaggccttgtgccaaaggtccaaaaacaccttcctcgagcgcattattgaaaacaaaaataaatgtaaagcgtaaaaacgaagggttatatttttggtccataggacagtgagtaggagcacaacaattccttgacttttgtgcccagacgtacatataaacttgtcggtccaatgtgatccccatgacatttactactttgcacctaccttctgacgctcatttctctacctctaaagctttcttgcgtttgcaaaatctgtgcgagcttcaagagttagcctttgggattctaaatggctagggttcgtttgaccatggggattctaaatggatagggttcgttcgatcgcgaggttgatcactccaacttcatccgag

SEQ ID NO: 120378 - DNA, 533 bp, Zea Mays
gggatatcaaccatctagagccatccaatcgaatccgatcagttcagattagatctagttttatgcgaactggtacaaagctatggtcgtctgatcaaggatcgacgctctagattaaaagtgacgaagaggtacatttctcatctaatctcagtcgtcggctacggatctgacatctactagtgcatcctcctccttcgaccacacaatgcgttagtggtatgtaaaccacgatgatgctcttcggcgagctagggaaccaaccaaccctaactgcgggctcaggcctggtcagcatgtacatgtagatcagacaaaggcaaataaaagggagggcttagtaccatgatttggggcaacgatgaagccgaccacaacatagcaaagtctgcggcgccacaacgaccatgacgagcaattgtcgtcgacccaaccactcccacgggcttcatcgtattcctttcgcgagttttgtgcttcctccgagattggtccccaaggctagaccggtggccaaggtgaggatcgaccgc

SEQ ID NO: 120379 - DNA, 276 bp, Zea Mays
agcagtaggcatcacacttcctattgtatgtgtgtagactgaagactgtgcggtgcagatcagcatgtgttaaaacacaatctatggatgcttaggtctatagttatcagagagatgtaagccacattttagtgctcttagacaaattttgaaaatttcaaaacagaacagatcaaatttaagcaggtgaggactgaggagtgaggactatataaaacctacaatatttggtagggtagaaaatttcatcacccatcactggaatgccttccatca

SEQ ID NO: 120380 - DNA, 346 bp, Zea Mays
aaaaagatctcgacacggaggggagctcaagccttatcaccgtactattcactacgccacttgccgcgcgatcggccgagatgccctcaccggagttcgcctctcctcgcagtcgtgccacgtacttaagggtgttaccacgtcgcaagaggtcgcattggacagcccatttaccgccctgagtccttaccccgctgagcgccacggtagtcgagctccggtgactcatctcctcacagtcgcgagttcatctttgcccaaattcgtggcactcatggccggcctctataaactgagtgtcccccttgcttcgtctctctgttacgaacccagtgcaccactcctc

SEQ ID NO: 120381 - DNA, 640 bp, Zea Mays
tgggtcatcgtttgcactgcccacttgagccagatcatccccggcagcaccctcgggggctgggcaatggcttgcacttcccacccgaaccaagtcatcctcggcaacatcctcgggggctgggcaagtatcaacaccatccttagggtccaagttctctgcggtagccacctctaaggctgatgggccctcagttacttccatgggaccaggacgatccaagttagtctcctgaccctcgagatcgcgctctaaggtcgacgaggcacgggatgacctcaacccagcatcaagcacatcagcacaaacctccatcacaccatcgtctgctggctctaataacaagtcctctggaaccatatcctcaagagtctgatcaaaattcgctagggacagttcttgcagaccaatgagagcagacaaagcaggagaaggaactccactactttcaccgctagcgatgaactgccgactgtttttccgagtcaaaggaacttcatcttcttcctcctcgtcgtccacattagcaacacaggcagcacccccattgggatcagcaacagatggagcacccccattgggatcagcaacagattgggtacacccattggggtcagcgtcagtaaattcagtcacaggc

SEQ ID NO: 120382 - DNA, 410 bp, Zea Mays
gtaaaagtttgtcagttttggaatatttgaggctgtccgacagtgttggacatttgcacagcagtgtaggaccacagtagtgctgggctcagagcagcactgccgctcgaggatttaaccatttcttgagctgaaattttacaggttgtctattcaccccctctctatgcgtactagatcctcacatacaataacttgacccacatcacacataaggaaagagtccatgcttggtaatttccattgtatgatgcatttctcgggcataagcttcatcgctatcagtatgagtagatccttcgaatcgatggtagacttcttgaattcatgaaggtgcaaggtggccatggatatgggcttaatgctgatggcagggcctatgttatggtttggcagaatgcgcttgaggc

SEQ ID NO: 120383 - DNA, 690 bp, Zea Mays
ccgacttctcgtgatgtttcgtacgtcgtgtgcttctgaacgtgtgttgatttccccgtgcatcactccctctctattagttgtgtgatgggtttaggactttagggtgcttggtggtctccctgctggctgctgcagttttgtcggtagtaccgtagtagatttgggccatcgaaggcgagattttgtgttcggggtaactgataaatgtaggcgaaggttgaaatggccgtgttatgctgccgagggatgctttgatgtgatcattttgctcaaggacaatgatgctgtggtggtcatggacacgcagtgtcggattacatgtggcagtatgaatgttttatgatccgggtgtatggtgtaaatttaagctgttttcatatttgtgaacaattgataatcttatagttgaattcaataatgttgctgatcacatgttgaaacagattttctgaaagaagcgaatcacatacatattacttttgatgtcctcttgcccgtggatgttgcccttgtgcctttgcttattaggaatttactttaatgaatgggattcattttcttgtttctttacatagttttgattggtttgagtacctgatcatgtgatgatgattcatgagtaggtgatttcttaaatcacattctttttgtttgatgacaaatgcaagcatgccagcgaagaggcac

SEQ ID NO: 120384 - DNA, 372 bp, Zea Mays
tgcttattctgaaacaggtacagtttccacgattaataccagtacaacagaacaaataagaagaggagtcgatgtttctcaagcaaatatttgccctgtaatggtgccagctatgaccactgaaatccaggagcaacatgtacaacacgaatgatccagataaggtaggtcgagaatctctcctagctggtttaccataataataaaggatgcaaccatattagctttatatatactaataaaacaacagcgaagttagcatcgttctggtccaatttagctgcaaactgaataaacgatgaacccaatcgagcgcagctgagacactagacagatcgacgtgcagcctgagctttgtgaattgggggcgaa

SEQ ID NO: 120385 - DNA, 543 bp, Zea Mays
gtttgtacggttgttttgtgtttggtatggattctgatctgtgttgtggcgtgtaactaatgtgagctgagctgtatgcaatgcacctgcacaacaactgtagtcttcataattgtagcatcccttgcattgacaaacaaggaaaattgctactctatccaacctagcctaagagatggattggtattaagagggttcaattcgaatcacacagatattagatgaacacatcacaataaaaacatattagagaattttagctacaacaccagtagtagtggttgcgaggggctctatagaagtagaggtttttttctgaaattgcaactctggttcatcagtcctccagtgttcctcaccagaaaccagaaattttcttcattatctgcagcagtatggctagcctctctttgtaaaccaatggtcaaaaatatcatgatctagaactcgacaaggaagcagagaatccatgggtagattgctacatagagtagtggtttgggtggaggatttattttaggaagcgcacctgtatcgatcgtc

SEQ ID NO: 120386 - DNA, 746 bp, Zea Mays
tcgctacggattccacccagaccactcgcattgcaggtgatctggacgagaaataggaactcacgctcgttgccttcctccaggcaaatgccgacgtgttcgcatgggagtcgtcgcagatgcctgggatccccaggaaggtgatcgagcaccgcctgaagatcaaccccgacgccaggccggtgagtcagaagcctcgtagacaatctgttgagtggcaggacttcatctgaaaggaggtccggaagctgctagacgctggcttcatcgaagaggttcatcacccaatatggctagccaacccagtcatcgtccccaaggcgaatgggaagctttggatgtgcatcgactacaccagcctgaataaggcatgtcccaaggacccgtacccacttccacgtatagaccaaatcgtggattgtacctccgggtgtgacctattgtcattcttagacgcttactctagtttccatcaaatccagatgtccagggaagataggaagcataccgcttttgtaacagtggatgggctttacggctatgttgttatgtcgtacagtctgaaaaacgccttgcctacatttgtacgggcgatgagtaagacttttggggacctgattagggacaaagtagaagtctatatcgatgacattgtagtcaagactaagagaaggtcgaccctagtggaggacttaaccctggtcttcgacaagctacaggcaacccgcacaaagctgaacccagac

SEQ ID NO: 120387 - DNA, 309 bp, Zea Mays
tagtgcgccttcatttcattctctgaatatgcccataagctttagttgaacatactgatatgtaaatttggctcggtggctcaccgttattgcatgtgcagaatttatggcactggtctgatttatatgaaaatattttatattgttgtggctttagatttgtgaggttttttgcaactaaaagatcacgcgagatcattgtatatatctggtaagagatagtaaaaactaataattataaagtgtatggcaatcagtccagcgctttggccatattagagtactaccgctccatttatagtatttctc

SEQ ID NO: 120388 - DNA, 399 bp, Zea Mays
tatatgatatataaaaactgtagcaacgcacgggcaactaactagttaatgtaatatgattacagatgcagttttcaatactattgtaaatgggcattaatgttgacatgtggttattaatagtcatggctgttatagctaaaaccgaggttgttgatgcctcatatgtggtcgctaaaagctgcaaatttggttgttgatgctttttatgcggtcgttaataccccacaactaacgaccattatatatacggttgttaatcgaataacgtccagaatctacatgtggtcgttactacaattaacgatggaacatttaacgaccatcgacgaccacatttttgtggtcgttgtttacttttgacgaccacattttggctattaacgaccacatatccta

SEQ ID NO: 120389 - DNA, 746 bp, Zea Mays
ctaagacccttgctgttgcattcttcgtcgctgatgtagaaggaaattacagtctaatcctaggcagagattggattcatgccaaccaatgtataccttctacattacatcaaatgttaatacaatgggtaggcgatgatatagaataagtacatgctgatgtatcggcctgtatcgctgtggccgatgcccctgtactctggacttatgagactgctacatgtctcacaggagtagatttttctgattaccagttcataagtatagataagaagggtttcattcatgtaatgctagagccgatggagaatcggctaaatcctaaataaagtttaaatgatgagtacacacaaaattcatgagtccttggtcacagacagttcggcttctaaggccagatggtccggtttttcacaaaacagttcggtctttaagaccgaacatctaccacagtgtaaagacagtattacggatgatccggcccccgagaccggagagtccgccatcacacaaagatcatctgattcctctgtggggcacatgatagaggaattcagatatctcgataaactaggataggggtttacatcggccgatcgtttggaggagatcgacataggagatggtaaaactccaaggccgacttttgtaaacaagaccctggagaccgatcctagaaatgaaatgatcggtctattgaaggaatattcggattgctttgcttggaattacactaagatgccggg

SEQ ID NO: 120390 - DNA, 398 bp, Zea Mays
tgaggaaccagctagaactgccgatcgattaaagtgacgggtttaattcgtctctctctgtgattaccaatattcgtccgttgtttctcgttcttcgtcatgctgtcctgattgatgttagtgatttgctgtgagattcaaggccggccattgctagctcagggtttgtcaggcaggcaaatggacacctggcacatgagcttacctcatgcatgttcagatcaaggctagtgatcgggtcgttctcactggcctatctctgcctgtcttgatttaatcatgatgcttaccaaattaatgtgctaaatgacccggccgggacctcgcggtgatgatgcttcttcacatgcaagcttttgtggctttcagcagtgaccacttgtttaaattagccggtt

SEQ ID NO: 120391 - DNA, 490 bp, Zea Mays
atcctcagaggtcctggctgacacacctctggggatgctcatgccagcctccagagtgggtgatgggggtgaggcgctacccggaggacaaaggttcatcggggtgcgaccaaggggtggtgggtctcgcttgtccccgtcgtccccctcctttttcgccgcggctcctaactagggttttgttttctctagcaaacaacgttcatctcggtcctcttatgccgcacacgaggaaagtggtctccaagaggagagtgatgtctgccatcaatagggacgacggggcggtcgcgccgtcaggttcctctttgccgacacctccgccaggcgccgttagggtcggtgtattaggtttgtctctcccaatgctcccaaatggttctggcgcgagcccgacggaagcggctgaggttcacccctttctcctttttttatttttacagtgggcttggacgctgccctcatcaatgcacgagccacctttccctgg

SEQ ID NO: 120392 - DNA, 387 bp, Zea Mays
aaaggctccaggacccattgagctgggccgatggttgccgtttccgttcgcatccggccagtccaatagtcgcgctattcgttttcagaggatgagaggaagcccgcatcacgttccactctcgagtctccagttccctcacccctttattaccaggtcaggtgcgatctgagctcaaagatctatcgcgatttcacagcagagcgacaaaggcaggcaggttcaacgtcagcagttactcacctccgacgactagctactagctacgagaaccagtaacagtaatgcagtcttgttatattcgctctcgagtccaggcagtccaaatagtcggagcggaacagcctaacacactatcgtcttttctctctccctctctctctagca

SEQ ID NO: 120393 - DNA, 534 bp, Zea Mays
gggcatgggttttttccacgcatgtagtggaggctgcggttgtctagtataggaattcatcggcattccataaattggctgggactatgattactcatttgcaaccgatgaatcttgtttggcatgaatatcgtgtgatgggaagttgggaggaacgggtttatcaaatatgtgtgtcattctttttaaaatcattttgcatatccccaactaattgttgaaattgctcacgctattcatctacataaaccctaagagcgtgaacatcgtcgaatttacttacattgggtgtgagtacagcaggttgaagagatgtcaggtcacacttcttctgtcggacgagtttctagtgttggtcaaccttgaaatcagccaagaattttgcatctatttccgccagcacttttttcctaacgtcctctagcttctcaaattcttcagccaacaggttctctatagtcgactcaatgatgttgctgagagagatatcagagttatccttcgaactgatcatatggggtcgacctatgtcag

SEQ ID NO: 120394 - DNA, 298 bp, Zea Mays
tttgtacagcaattcttgcagttgcttcttcaattctgccaactcagcgggtggcatccggtaaggcctcttggaaataggtgtcgttcccggttgtaactcaatggcgaattcaatatcccggtttggtggcatccctggtaattcatctggcaaaatgtctgcatactcacagaccactgggatctttttcaggggtaactccatcatagcaaaaccacatgactgagtagagtcttgactgggcagaaacaaggtgaaactcccacagattggggaattgatttccacaatgcgg

SEQ ID NO: 120395 - DNA, 1035 bp, Zea Mays
ggtgcataggacggtaatggaggttggaggaggaagtgcccagtaccccacgcttacccgcatcaactatggtgaccagtcggtgttcatgaaggtgatactccaagatgaccgcccaaccgcaccaaggttgtggcacatggtgaacactggcaaaataaggacacaataaagcttgcctaggacagtctgaagtgcatttgtgtgggctccgaccacgtgcgccgagcaaggacgcatgcagctcgtgtgagagtatgaggctatgccattctaggaaggtgaggccgtggacttggcactgcgcctgtagtcactggtgagtcagctcatggtactcgccaaaaccattgtcaaacaacaaatcattgccatgcacctgcacgtggttctgaccaaattcacacagattgcgcttgtcgatctatccaccctcacagttgaggatgtgactgggtagctcaagtggagaactatgacacagtggcacagacgatggtactagaaagcttctcctcactaaggaatgagtgacccgtatgtgtgagcagcagccagtgcaaggcagggcttgtccagcagaagaggcgcagagtggtgacaaggaagaccgccaacatggaagatgaaaggtggcagcgctcgtaacagaaaagaggatgcgccacatgtctccaaccgcaacacttgccgcaagtgtgtcaagacgggccattgatctcaggattgtaaaaacactgcacgacagccttgtagtaggtagattggtagcatgctggtgtggtcaagtagtaagtgtgcttgtaattggtgtacaaaacatcttgtaaaagtgaagaccatgtatatatgcaagcatgtggaccagctgcatccttagctcaaggagcagcattaactagtgttcatcagttcatgtgtatgtgctccgatctcccctttacttctacctccagttgtgtgagcggtgaattaacaaagccagccaacaagtggggcaagaacccttaccacacacacacacacacacacatc

SEQ ID NO: 120396 - DNA, 704 bp, Zea Mays
caagatggcgctactgtcggtagtctgctaagaagaaaataagtttagatcagaacaaacatgtacattggctccagtgtctaaccaccaatcggtggattgacatgctaaaagaatctgagggacatacccagaattcccagcatcagcaatagccacatttgcagttttctgaccatcaactttcttgcccttcctattatggcattttttggttatgtgaccagattcactgcacacaaagcaagtcaggtatgcaaggtttttcttcttcttcttaaaatcagtgttctggttggcctttggtttccagtttgtcttgtttttgtttttcccaccagatttgccttcaaccacgttggcattagaggtaccactatccattggaccagaacggggtacatccttagatcttgccttctcctcaacatcaagagtagcaattagactttcaacagtcattgcctccttcttgtgtttgagagccatggcaaaattcctccaagtaggaggtaatttggcaatgatgtcaccaaccacgaacttgttaggcaagacatagtcaaagtgtgcaagttcccccaccagaagctagatttcatgagccggttccacgactgaacggtgatcgaccatcctgtattcatggtactgctcattaacataaagttcacgtccagcatctgattcagtatacattcggt

SEQ ID NO: 120397 - DNA, 492 bp, Zea Mays
cttaggcatccctaaggcccccttctacctcagggcacctagtaggtagggtccatcgaggccctaggcacccggctatcaggattctagggctcctcacatcctagggcacctgaccatcagaaccctaggccccctcgtgtcctggggcaccttaccattaaggctctatgctccctcacaccatggaacacctaactgataggaccctagggcccctcgcctcttggggcacctagtgattaatatgcctaggcctcacaattacaaggggcccttgtgccctagggcaccaaagtccttggagccccatgagcatcaatgcatcagataggtaaagacttgggactccgcgacctatgctagttaacaaaattagtccctaaaggatctgtatgccccaagggtggtcgtgtatccagatgtcatcttaggttcgtaagggttgtacgaatattagaggcccatcaagaattgtatagagccaaagca

SEQ ID NO: 120398 - DNA, 663 bp, Zea Mays
tatgctctagaagaagtggataccgatgaaaagcaccaagagcatttttctggaaggcttgattggacccctcaactatcagctatagagtcacaactttgctagtttcaataccttgctcaacaaggctatcagtctggagagcaagagaaaggagctgactgaccataaaaggaagtcccacactcaaggcagaccagcaggaatgtccgctaccagcaagacactcaaggctcttattctcgctccataggttagagtgagaattatcaaaatcaaaaccaacggtcaggtcatcaagctcagaggtacaaccaacaggggtagaggaccggtggaagtcaataggctcgtcagggagtcgccaccaacacccccacgaaggccaataatcatgtcgccctagtgcatcccaatggttgtttcaagtgcaaagaggttggacattatgccaacgcctatcccaagaggaacttctagacatcgcaagccactatcaatcagaggtcatccccgagtgtcccctcacgcaacacacaagacaagggactgtagagacagaacaaaggcagagtcaatcacataactgcagaatcagtctcaaatggagctgatgtggtgcttggtatgtttcttgtcaactcagtacctgcatcaatttta

SEQ ID NO: 120399 - DNA, 1288 bp, Zea Mays
tgactgggtgaagcttcaccctaggtgacaaatagagctggccgcgcgcacgcaaacacacatatatatacacacatttatatatagactcacctcaaacgttgtctgtccttgcagagaaaaaactgctttcagtttcacctgaggcggcgccacattccttatctcctttaaatcctcaaaaaactgatcagattctgataggctcataaatgaatagatgtacctatcttcgcatatattagactgcagggtcaaattaaagttttgtgttggtagatacgtcagctccctcattgtgacaacaagagtgtaagtggattttggtggcacaattccacttaggggcatccttacaaagatctgctgccaagactccattccgtcttctatactaagattaaaagccacatgttcatctgttttatttgttaggtgcagcgtgcacgggatcaacttgtgggcatggaagggaaagtggagtgtcagcgggtggacgtcaagcaaaagctcgcttgaccctggggttatcacctgcagaacattaccagggtggttattaacgacgacctccatatttccacatgatcacagcctaattaatcaagaaattaaagagagattgatcatgttcttcagctatgtagtttgatataagaacgaagaatggttggacccaaccaaatactagaaaaacaaggttgtaaaatatgccagtttcagtgcagggaccaccgttactacgttgcacgttgggtagtctttggttgtggaacacaagcatgtaatgcatactcaccaccatcaaccacacatctcgcttttcgatgtgtcaaactatcaaagagtggatttatagaaaatattatggcgatatgcatggtctagtgttttcatgtgtggacacaacaacatgtagctttatagtaagtttcatctagtgagctcacctcagaacttgtgccttcttgtctcatgtcctggcattcttggtcaccaacatccaggattgttaatgcagtttcttgtccaattacaaacctatccgacaaaaacaccattggtctacagctttggcataataggaagtgagaataattcaaaaggtgcattgcaagaatacaataaataaataaataaatttgctcctacatggtgatttgatcggcagttgcttttggcatggttcgatataaattttgcttgtagtacgcatcaacaatgcaaataaggaaaggctcctcactcgttataaaagtactagtactaaattctttcttagaaaatt

SEQ ID NO: 120400 - DNA, 786 bp, Zea Mays
atgccagcaactggttgtcattataggatgtgaccctggacagggaatgtcccaaccaattaaactttgctctgaagtgacctcaacataagtacttggtctgcaccaataagtgacaaaaggaactagccagactcagattcagattgactctggaagtggtgagtttatcatgccatctacattcatccaactaggggaatgctaggcctcaagggaaactatagagaaaagagcatgaaagggctaccaagcttgacaaaagtctagttttgtgtgaagccacatgccacccaacgaggtatcaacaagggccaataaaaaaatgtagccagcgaggattttagtcatcaaaggtggatgctacccttcaaattcacaaaaaagtgacctgcaaacaacactaaaaaaatgggcgccaaagaagcggtctctctgaaaaaaaatcaatcatgtgttgtgcaaattcaagtaaagcagtttgaaggcggagggtagctatccaccatcctcggcaaaagtgatggcaaaacaattgcctcggccatattcccaaaccttacccccaaaatattagccatatcccacattccccattgaaaagacgtgaatggcatgggacacatgactgaagggaggtctgatgatggtccgcctagcttcaagaggtcatgaggaagtgctaacctttgatacgcagacaatacgaggaagctgaagtacaagtgaaaatcgtgttgaagattcgagaagtgatgctaaacataccctttagtggcaccgttg

SEQ ID NO: 120401 - DNA, 317 bp, Zea Mays
cattctcatgcggggtgagcccccgagcccctgctcgatgcagaggtatgtctaggggactcatcttgtatttttagtttcactctcccccgcgcatccccttcatgggaatgaggggaggtgagttgtaccatgttttcctcgatgggctagcaatggctcttggtgagctacaagcaggtaatttgagtgaggccgtggttcctttcgcaagatctaagcgtggggtccgctggggaccgttctcatactctcgggccccgactcatatagttgttggttccattcaaccgaaactggcatctcactacctctct

SEQ ID NO: 120402 - DNA, 398 bp, Zea Mays
ccaggtatgccacctgatcgtgatatacaattttctattgaactattacccgaaactacaccaatttcaaaaagagattaccgaatggatgtcaaagatttaattgaactgaagaaacaaatagaagaattactagaaaaaggttttattcgccccagttcatctccatggggagccccagttctatttgtgaacaagaaatatggttcaaggagaatgtgtgtcgactatagaagcttgaacgaagtaacaattaagaacaaatacccgttacctcagattgaagatatgtttgatcagatgagaggagctaaagtattctcaaaaatagatctaagatcatgctatcatcagttgaagattcgaaccgaagatatacctaaaacaaccttcactac

SEQ ID NO: 120403 - DNA, 506 bp, Zea Mays
ggtagtcaaggccactttggtattctttccggcactccctctcaccgtgattggaggggtctttagaacagactgcctaatcctcccaattctggatttttagggatttcttcggcaggtgattttgttgtttcctctatagggattctacttgtcccgccttcggcattcttgtccttcatcaatatgctagtaagatctgatcccagcggacttaacatacgaaaaggtaagggtcgaatcattacctctaggattcctgtcaccccaatagatgacgccaaaggagtttcggtaaccttctttgatagatccgaaggacctttgtcaactcgatcaaccttcaacgtgtttcgcttcttgggggcaggggatcatggtcctgagtgaaaagattcctcctcgtcatcattttttctctttcacttggttgtggcacctttcattttattcttttctttaacatatctctctgcttgtctcttcataatactaatagtttgttt

SEQ ID NO: 120404 - DNA, 320 bp, Zea Mays
gaatgcatggcacagccaagcgttccttccttctgtggtcttcagtgaagcaaatatatctctatactttttctcaatgaacagatgagtggcaaacaaatgtaggtcgctgccttctggtgaaccatcatcgatcacttgttgcaactgcgcactaacctcaacacgcacagggtcggtctcagtagaggtgatggacttgttagtggtcattgaacgtgactcaaaagcctccacaaggcgtttcatgtactcttccctcgaatcttttttcctctttggtttaggagaatcatgacgcaccttacgcttcccagtcg

SEQ ID NO: 120405 - DNA, 624 bp, Zea Mays
ggtttgtaaagccctgaatttgggggtatacattttctcctccaatattcaccaaattcaggcgacgtcgaggacacacgcgattgttcacattcaggtcgcttggaggcgtaataccctacatcctatggtttttgtctgtgtgctgttgagtctctctaggttacagatggtgtctcaaggaagaagatgagtatgatgttcctacctcgttttcatagggtcccctcctcagccttattgccgactaaatcggagttacagaaaactaccacgactctccatgttctgcctcacgttgtgcttagctacagtcaaacaagtcgtccgttaatttcttgcgcgttgcatgcataggacatgattgacttctcacgtacccacacctgcgcctttcttggatgccaggggttcccttctgaccgaggcccatcaagcaccttttgggtggcccatcaagagccttttggatggcccacaggatgttctgagccgtggtaacgcgaggatatctgtccccacatgcggttcaggagagaggtatgcaattcgtagttcctctcacagacgattcatccctatagctagacagtccgaagtccagcaagaggtctgcagttcgca

SEQ ID NO: 120406 - DNA, 425 bp, Zea Mays
cggtcggaggtagaatggaccacctgattgatgtgcaggagggggaacggatctttcgggcacaccttattcaggctggtgtaatcgacgcacattctccacttctcgcttttcttttggaccatcacggtattggtcagccactcggggtggtaatctctcggataaaaccggtagtgaggagcttactaatctcttccccgatggccttgtgtttttctttgtcaaagaggcacagccgctgcttcgctggcttcaatctgagattgactcgtaaatagtgcttgacaacctccctaaggatgcacttcatgtaagagggcttccaagcaaaaatgtcattttccgcttggaggaagtcgatgagcgcactttcctattttggagagaggttggatccgatgcgcaccgtccgtccgtcggca

SEQ ID NO: 120407 - DNA, 452 bp, Zea Mays
gcacccgatcaaatcctgaccgctcccacatggatcaatgacataggcgttcctcctcatatctgtcgaaacagagcgacgaagcagagctcacgcggcggcgccatggccggagagagacatcctagcgatccacaacacaattctctgatacgaccgacactactggatgatagagaggtaacgaaacaggccagatggttccttgtcggagaacatcattgtagtggtgtcattcccggtgagggtggatccccacaaagaactcctccgacgagtatttgggcggagcgcaatcaagctcctgaggtgggaagagcacgagcaccattgggacgtcagtgcgatcccccaagccaaacgccgaggtcagaattccacacaatccgtggcatggccacgacgaacccaatctctcccctgtgttcatcgtgcacggcagtgcgaacaac

SEQ ID NO: 120408 - DNA, 295 bp, Zea Mays
aggtgtttgaagtgactaaaacaagaggatgcaaacctaaagatacttgttataggaactaggatgaagaagaaagaacaatataggtggttgtgccatgacataatatgaactatgtagagaagtttaagatggtaaagaaggctgcaaaacatgttgtgagtgagagggtcatgcctatgagaatatttaccaacacctaagtacaaacaaagaagagaaatacctatatgatggatagggttgatgaaaggaatgtgagagaccccaatcaagttaaatgcatcaatatgat

SEQ ID NO: 120409 - DNA, 500 bp, Zea Mays
taacaataataacatgaggctgatgcaggtgtcgtaactgaactccacttcttcgagtccagcatgcaccttcgttccttcaaacagctgccaaaggctcaaacaaagcttcagaacccactcttatgtgtctagtcctcaagaacctagatggacagaccaggggacatgataccactaccttcaatcaattcactgatacaatgaaggcgcccctatgattgaccaataaaaacaagtagatgatacatagaccgatctggccatgggatgaccctatatgcgttcccttagtcatccactgcaactatttcaaacaagtttgtcgtacattggtaaaagagaaaatgcaacatgccattgacaaaggcactgccacattccttttctatggaaccataacttccccatttctcccatccatcgaagttgctttaacagattgacgaatttctgcttgcaaactaaatcactttccttgtaacaattctcaaattaac

SEQ ID NO: 120410 - DNA, 510 bp, Zea Mays
tatgcaattggatggttcaagtcataaggctcaagttatcctagctcaagtaatggttatggtcacaagatcatgtttagtatcaaagtaagaacctggaaggactttcatatgtgcatatactttgatcaagtagccaaaagctagaatctaagaaagaactagactatgggtcatttcagcatttggaaaagttcttagtgccattggaatatattggaactcaaagatatggtgaaatagattggttatgagtttgacgttccaagtgagttttggagcaaattaaaggatgaaaaacagaaggaattggagttggagaaaactaaatagtgagtatccatgacatagaacatttgaatacactctaactatgtttgtctaagtcatagaaaagtgctcaaagtcagccaaatcgaagtggagaagaaaagaaaaaagtgtcttttctagcctgttcagcgacacaccggtggctctccaaaccgatcctgtggtgcactagcccag

SEQ ID NO: 120411 - DNA, 330 bp, Zea Mays
caacgggaaacctccaagttttgtggtgcttatgacaaagttttaaggctgaagcaaagtggtaaaagtgaagacgaccaggttcgaagcgtttccttattattgccctctattcgtactgtgtccttcaaatttgtaacccacttgtttcgtacactgtaggtcaaagatgcactacaaatgtttgaaggcatccacaagaaaccatttagatacattcattgctggtacatgcttcggaacgaggtcaagtggacaacttggctttccaatactgaagtcattcctcccaaagtggttcccaatgagacggacaatgtcagtacaccg

SEQ ID NO: 120412 - DNA, 409 bp, Zea Mays
cctttggacatttcaatcttcgagcataaaattgagcttctcgcttttctttttcagataatctttttcccgaagcatgtcgtataatataatcagtagcttcagatgatgtttcgggaataggaatggcggttcttccagtcagaattgcttccgcagcttctttctctatcttgtctccgatttccaaggatttctccttggcaggctctgggggcccagcttcggtctcggcttgaaccttggaagcttcggcctcaatgtgtgtttccaaagcttcgacagctttcttcggagtagagcttgaagtttttatcgtttctagcacatctaatacgttgaccattctctttctcttgggggttgtcgagagatccttttgtgccttcggtattgtcacctccgccga

SEQ ID NO: 120413 - DNA, 1411 bp, Zea Mays
ggaaatcccatacttttggctatctcccggcaaacgaatatatctttgttgtccaggagatagtacaggaaatcatcttcgtccgtgccattgaaaactaaggccgccttcggatattttagtttccgggcgtagtgcttggcttctaagatttcttcttcggataatattttccccgaagcatgtcgaataatgtaaccaacatctacagatggggcttcgggagtataagatttagcttcttctgtcacgtcctgcctcgctaccatgccaatatctggagtttgttgctcagccttatcctcaaacacggctggcttcgtctcaataggcactgaaggcccagcttcggcttcggcctgggctgtggcagcttcggcaactttcttcgtaggagcaggagtcaaggcttttgtggtctccatgacagcgtctagcatgctagccattctccttctcttgggagttgtggcgggagcctttgtcacctttggcaattctgcctctactggtgggctctgaatttttggcatcatcactgttttttccaattctggctctctggccgcatcatctttggcttaggctagcccgattataagcaccttcgacactacaatcgatccttcagcgctctgagtggagggagcaacttgttttgcttcgacagtggaagaggtcccatcaccaaattcaggcactatgaccgtttcaatatatcgaggtcggtgggtcaaaacctttattttcttgcccttcggcacagcagtggtggccgaagcggcagtttccctcttttttccttgtcttcttaaggggtagcagtaatcaggatatatgaagccaattgcatcaaaaaccatgttcaatcttttcttgccccgacccccgaaggctgaggacaaggcatcatcttcggccctggtatatgtcccaagcaattcgtcgctagtagcttcaatgcatttcaaccagtcatcatttggtttgtcgaacttctctctgtatctgaaggtatatttcaatcgaactaggccaccttcgctggatttagcagtagtctccttcggtatctctcagctatccacaagaggccatactctgtaggctatgtgctcttgaattatgtctcttgtgccaatgaaagcacatacattactaaaagtcttctgacacgcttcgacatcactttcaatagccaccttcggccttcgaaggccgaagtaagaccagatggggcgttggataatttccttaatatcctccctctcaatcagattgttcttaacataaaaccattcctccatctaggccctgggccatcttttccggtatgttggaaccgggtagcttgcattagagcgagcaatgaatccgtaacaaccgaagttgttgtgatactgctccttac

SEQ ID NO: 120414 - DNA, 284 bp, Zea Mays
gcgttgtgtactttgtatggtttggttttgctatgctggtgtgattatagtcggtcttagcgcagacggtttgatgctgtcatttctgcttttgttgtactggttcggttgcgcccttaggcggcttctgcgcggagtctttgcgatagacttcgggttttctcgcacttgttgggcttagtccggctgcacccttaggcgacttctgcgcggatagtcttcgcgatagacatcggattttttccgcacttgttgtgcttagtccggctgcacccttaggcgac

SEQ ID NO: 120415 - DNA, 496 bp, Zea Mays
cttggggagattcctgatgatgaacggcaggtccattttgaggtgcccttgaaccctagtgatgaagagataagcgctatgcttgatttgttggctgaggattcttccgacgctgctcctgctggggtgttggtagtggcgcccctcccagaggctgatacaactttggatactcagaagcctgtcaatacccgcccgaggcgcccttgtcgagccaatcaacctaatccttctgctgatgagcagaaaaagaaaaagagacgccttcggcgagtatccagtttggatcgggatgtcggtacctcggttcctaccgttgaagaaacgccagtgactgactttgctgatgctgatcccaatgggtgtacccaacccgctgctgatcccaatgtgggtgctccatctgttgctgatcccaatgggggtgctgcttgtgttgccaatgtggatgacgaggaggaagaaaatgaaattcctttgactcggaaaaacagtc

SEQ ID NO: 120416 - DNA, 599 bp, Zea Mays
gggagactggactcggaagatgggagaagagaggaacgagaaagaaacgcgacagggtatttatagcggcagtgtaggtggaagggcagagctgagcacgcggcttggaagatgcttcacaatttctttttgtttactctctgctctttcatgtattttgtattatgtacggagtatatcatttatatggcttggttttgggttttgaaattttatgggggattgagtatagtgcttgttgggattgttgggatttttggtatatgaaatcctgtcatgtagtgctcctagtctactcgtgtagaattacaaggtatcttttatggaaggaggaattaaataatttacggattaaaatttacgtgtagtttagttcgtgtataattaaaaggtatctttacgggtaaataattaaatattatagaaagaaaaatttacttgtcgttttcaaattattacagccgacgttgttcagagaagaatagcaggagcaggtaggaggaggaagagaggtaagacttggtaaggaagatagttttgcgtatcttcttacatgcctcacctggcatccattccctcatacattagcctctcggtgc

SEQ ID NO: 120417 - DNA, 296 bp, Zea Mays
gtctataccaccgctgctcggcccgcaggggcaactgaagatgtgatgactgcgtattttcccagcgtcctcgggcaagatgcgctgcaatggctacgacacctaccccgacactgcatcgacgactagagcgacttcagtcggtgttttatcgccaatttccaatctctctccgacaagccggcgcagccatgggacctcaaatccatcaggcgccgaggggatgagactcttcggtcgtacctcaaaagattttagaccatgagaaaccgtattcccgaagttgcagaagcagc

SEQ ID NO: 120418 - DNA, 313 bp, Zea Mays
ggtgaggcggcgaatggtgctctctatcgtctgccgccgcggccgccttctgagagctgaaggagcatggggaggagatccgcgtcagaggaacaggagatttcaaaatttggatggagaaattcagatcgcgccgaactcgattcgaaccacttgagtggagtggaggagctcaggaacaggagtggcggaacaaagacgctgcagaaggcgcagagcaacaggagctgcccccggcaaggagtgttcacttctagaaggttctagaaccctccctagtccctcctctccgcgccctgtctgctgcttgaag

SEQ ID NO: 120419 - DNA, 315 bp, Zea Mays
gttttcataaagtaggattatggttgattttatactagaataatgattgattttttattagaaggcttccataaaaataaagattgcttagcgatcaaataagtctctctatagaagaagagaggatgtatcaatctaatcaagtaaggcatcttgcctgtcctcagaggccatcttccacttctctctcctttgtctactccttgcccgtgaccacgactccaatgagccataggggctacacacatcggccatcgatctactacccatacaacttatgcaatttcgtaggattccagatcatgtcaatatggt

SEQ ID NO: 120420 - DNA, 407 bp, Zea Mays
tgcaggggcggtgctgtcccctccaaccctcacaatagacatgtcacgatagtatcttcccttcatggtgtcaatctgactttgtttaatggtcgactttccgaagatggtatggcttggccgccagggttgatcttcggaatcttcatccccactttccacatcatagtcaacaccattgtcagaatcttcagacaaatttgccattatttcgtttgtgatcttctctgtgtttgttttttccatagcttcgtaaaacccagcaagagcagggtccccaaccttcttctcctcagacattttcttctcttcagacatgcaacaagcacttgtgtatatcacgaagctcgcaaatcaagcgagagctgatagcaagagaattaaaatttgagaaaacagcacaagca

SEQ ID NO: 120421 - DNA, 624 bp, Zea Mays
ttaagtgaaatagtcataaaatgttactaagaatggacctacattacattcacacccctgaaataccaaaaaccctaaaaaggaaccctagaaaaccctaaacctaaaccctagggggctaagtgcaaaatcagtgcacttttggactaaagtgtaaaaaccatgataataaggtgtccttagtcatatggttcacaatcatgaagatttgcaagctaaaccctgaattttggacctatttgcaaaaggaccctatttgagttctaaagctaagtctgaaattcagtgttttgagctcatctttgtgaccttgtaacttccaaacaagaaggatttttccctagatcaccacatcagcattgtagacctatcaaaggagaataactttgtttaagagagtaagcatggttgttatgaagaaattggagaaaatgcacccaaagatgggctgtcaggctgtttgaagtctgaatttcagactagcagtgcaactgcaagaactttgggcacaaattcaagaatgatcgagcaagaatttgcctcgggttgttataccaagattatagctggatcctagagctataactttgctaaagagtgatgatcatgttactacataaaatt

SEQ ID NO: 120422 - DNA, 401 bp, Zea Mays
agaatttggtgcatgagggtatcaaactgttcaatgtattcagtaactgtatcactttgtgtaatgtggaaaaattgtctaataagagagttgtgttgatcacgctcaaagcgagcacacactgcagcacaaaactccgaccacggtgccagacgcaacaccggatcagatgactgtaacgagaaggccgctgacccaacaaaatgcattgttgcaatcttaacccaaagctcccggggtacgatgaacacatcaaaataattctcacttttagccttccacattttaggatgatgtccgtcaaattgtggaaaattaagttggggtaaagttgcagctaaacgtgactgatacgatgcccaataaggatcttgcgcatgaatcaccggagtatgaaagac

SEQ ID NO: 120423 - DNA, 830 bp, Zea Mays
agtggttggcgggttgaatacctgaaatcagaggggctctttagaaatttctgcacggcgaagggttattctccgcactggaccacacaatcacaaagcaatagagtagattagatcggatgggttataatccaggatttcccggttgtcgtccgattctatttttgtggcccagattaaatcgacgaaaggggatccttggatcgaatcctgaccgtggatcagccgatcgagggctgcctacgttcaccccaacccaagccgtgttgtcaccggagggggcagcgcctgcgcttatatcacggcgacgccatggccaacatactaaattgctgataccctgcctaaaacttctaccgaacatcgtttcgcgtagaggagacgataatagataagtggaacgggctctcaccaaatttctagatgcggagtgcgcagcccacggagagacacgtttccgcggtgcactacgagctttagcgagcaatttgcggcacaacgatgactctcgtgcccgattgcctgctcgcgcattatccacactggatggagatccttcctgtcccttcccctatcaccaggcgacactgaatgtgagatgaacgcgcggtggcttcgatccctcacggtcaacagtaatagcatttggtgtggcgcaaaggcatttgacgtgatggcgagacgagttccccaaccacagttttatacgccagggatgacggttgtaaccaactccagctggagtctggctggcacgcgcgatcggcgcagtttgttgtaaccaacgccagggatgacggttgtaaccaattctgtcgcggaggtcccac

SEQ ID NO: 120424 - DNA, 549 bp, Zea Mays
ggagttttcagtaactctaaacaaaattttctcatgctattaagaataaatgacatgttgattggttgaagtattggttttaccataaattacccatggttgtggagaaaggatagggtgtcagaatgttgaaaaggttttcgctagctgcgaagatgggtaaaagtgtgtttaagtgcaaaccttcttttctagatacacttatctcgagaaatgttgaaaaatcttataatcttgttgcttcacttcaaggcagatgtgaccttattaaggaatacatggacgctcaaatttggaaagtaggtgggtgacttgttaagctcgttaatggaaattgtactatgattgtacaactccctcatcgaaaggtaggaaatatagtgagcgtaagagcgctagcggtgagacttgataccctctccaattatgtcctcaatctaaaaataacaatacccaatatatcaaacttagactatgaatatagggcactgataaacactattgcaggttagttagcttctccttgtatccacattagggtaagagggt

SEQ ID NO: 120425 - DNA, 347 bp, Zea Mays
tggcattgccttcaagcatttctaagtcattctcattttgcacctcatcatcctcctcatcaacaaccatttcaatatctacttccattccgatcgcttcggttaagtctatctcaaatcgcccttcaagcccatcttcttggaagaactctccgtcatatgtgtccgggtctaagttataatcttcatcgtttggaataggtaatttaccgtgcggtgataccttatacacaacatcccaacccttaagatgttgtttcgtttggcacacatatggaagataatacacttgtgtggccggaaggtggtgtaggattcctctgtcatgtatagacgctggatcctcg

SEQ ID NO: 120426 - DNA, 598 bp, Zea Mays
ccgggtatcacagcctgtacgcgctgggggacgccttcgtcttgacgatgaaagggcccttccactttggctctagcttgccctaggactctgttcgagctgtccggatgagtacgaggtctccttcgctgaattcccttgggatgactgtgtggtcgcgccatgcttttgtttgagcttggtatttgtttagagcctgtagggcgaagacgcggtctccgtcgatgaggtccttcgaagtaggctcatctacgtcggggacggcggacgcgactgtgcgtggtgacccatgttttatttcttgcgggttcatggcctcagatccatatagaaggcggaaagggtgaacccagtcgccctgcactcagtcgtgttcagcgcccagaccgcttcaggtaacaggtcggcccacttgcctttcttgtcgtcgaggagcattttcttgacggctgtgaaaattttaccattggcgcgttccatgactccgttggattgcgggtggtacactgaggcgaaggcaagcttggtgccaatggagaagcagaaatccttgaaatcttggctatcaaattgcttgccattgtcaactgtgagctcg

SEQ ID NO: 120427 - DNA, 526 bp, Zea Mays
ctaaccattattacatcgttcagtaattatctacgtttaagaattcagtaatttttctttatgttatagcctgtaagtttatacaactgctggatttatcagatcagtaaattatagctaaagcatcaggttaatgcataataacattttttaccctgaatgcatgataacattttgacaaagacaaacaaaatgcatgataacattctgacaaggacaaacaggtgtacacatcatccggtatccctcagaaattcacaccatatccaatgaatatattaatctaacaccacaagcctaattttaaataagcatatgccgccaaaacttgtacatatatgattgtgcataggtgcatccaagttaattctgttagttgaacatagttttcttcactataagtgtggtcccagctctcaagaaactaaggaaatgactagagtggtctcttgctaggatatatacagccatataaaaaaagaataagctaattattgactactacctccgttccaaaatatatgac

SEQ ID NO: 120428 - DNA, 461 bp, Zea Mays
gtcagccctgctacacaagaggcggctgtgccaatcacggatgacaaggatggagatagccgggggtctgtcgaggcaagcaactgagcacgtccaagggtgagaagcgtggcaacgtctgtattactaggccgagttggtcgtgtaagggttagctgggccgagctgccgagaaagtataaaggatacaactcaggcaattgtaaggacatcgaaaaacagagaacaaaatatcaactcgttgccatcacgagaccttcttcccctcgtctccaatctctgttgcttcccctctttcttgctctatagacttctagaaggtgctaacatttggtaccagaggtcagcattctggatccgcttggaacagtgcctcagcgtccgcaatccagtgctatggattcattcgatgccactgctcgcaaggtgctcgacgaaatgcgcctgaaggaagcccgcct

SEQ ID NO: 120429 - DNA, 792 bp, Zea Mays
ttttctttatattcttgcccattggaggattggccatgtttccctttccttatgttgcatttcccgaagtctgttggaaatttgatttgttcttcttcggataggggtagtctttgatgaaatgtccagacttcccacaattaaagcagccacttgaggaactgggaagggcagggaaacgagcaccaggggcactgggctgattgttctgggcaggggcaggagtgggacggatgaacacgggttgcttgaagggatatgtgggtgggcgaggagaagaacgatttgggttgaagggacagattaccaaccttatccgcttttcagacccctgagatgatccttcacctacatatctcttgatttttccttggcccgaattcttggcttcaactgacagccttgctacacgtgagatctagacacgtagccattttgcgctggagtcggtcattcaaccctctcatgaaacaaattttcttttttaagtctgtgtccacttgatcgatggcgtattgggagagatgattaaacttgttgagatactgcattacagaatcttcccccgtgcttcagacgtatgaactcctccagcttcatctgtagcaccccttctagaacataatgttccctaaatgcctgtttgaactccgcccacgtgacctgatgtcctgcaggctgaattgctaaaaaatttgcccaccaagtgctggtaggacccctcaactgttgagcggcgaataggggcttctgtgtttcagtgcattggatcagcctgaacttttgctccat

SEQ ID NO: 120430 - DNA, 334 bp, Zea Mays
gcatcgaggtccaaactagaataaataacctcatccaacaagagaaagagcatctattagctcttgagtaagaaagttcataactacatgcctagcaggacccaattcacctctcgcttccatttcatagtctgtctatgagaagtgtgtggggaagcttggaagccagtgcacagacacactgcaaagtgcatatctgcactcgtcgctgtcaagtatagatgggagccaatcatgctcctgtacacctggtccatgggttcgtcgtcctcatcggcatccagctccgtcatggtggacacaggcatcaaaagaggcttggtctcacccatac

SEQ ID NO: 120431 - DNA, 904 bp, Zea Mays
ccttctggctctgtagtttgctgtggtttgtgatctcgtcttcaatattttttgtcgcttgcatttatggcccttcacgccttctttttcttcccattccctgacgtcctacaaatgacaaattacaggtctcttgttgctgacactacctggacttttcttctgcttatgacaaagacgaactgataagctggcattcgtagatcggtttcttgggagatacacatacagaagctttagggtcggctcgtagaatctctcagacaccgtcgttttgcatccgagaacttggtaagtagtatgagatgtccttcttgcggttttctgaaccaatgctcgtttaccttctgtttgtcatcagagaagatccttatcctacttgttgatcgaaattgaagtgtttgtaaagaatgctaagtaatgcgtttctttatgtgcatttttgtgatgaggttcgggggtttcgcctctgtgctgtttcattcactttggactaaattttcaacattttcttcaatcgataattactggcactgagatatttccccagcaaaactaattttatggaatgttgattacttgtttaactcccattgcaatttggtatccactctagttgcattatttaaagttgtgatgattactcatggtcagagtttgcagaaattaggggcttactttcagttttctgttttctaattgcttacgagctgtgattgccaattttcaggtcacttctaagtgcattttcctttgctgcaaaaggtgctgaataaactgtctgcacaagtcagtggtccttgaactacagggacctgatctgcagattcttccattgggtactgtttcatatttgaccactttgtaaattgtaagttagatatcttcacacccggtctccaag

SEQ ID NO: 120432 - DNA, 397 bp, Zea Mays
tgatttgcagtctgacaaccctacgtttttccataaatctgaagcatatttgtcttgggttagaataataccatcacataccttgtttacttctattcccaagaaatagtgaagattaccaagatctttgagtgcaaattctttctctatgtctttcaacactgttgtgatatgatgcctgcttctgtagaacttgcaataattatatcatcaacataaacaagcacaaaaattgtagtgatacccttgttatagaagaatacagatgagtcagcttttgatggtgggaagccaagatccattaattttgagctcagacgagagtaccaagctcttggtgcttgtttgagaccatagagaactttgtcaagcttacacacatactctttcttggatg

SEQ ID NO: 120433 - DNA, 346 bp, Zea Mays
cgcgtcgccgccgacggtacgtagccatgtcgtcttcttcttcatctgctgtgagtacgtctttagtcgaatcatcgtccgaagatagcttcagtgatttggtggcggttgagttgcacccgggccacacagtggaatttggcgtttcgaggatctcctcagttcgcgtgcaaggcatgcagcagctggggtattttggtaatggagttggacgagttccgggggcggaatagattctggagccggagggtgagatagttgtgttcgaggcattttttactgccggccttcggctacctgcgcatcgttttgtggcggaggtgttgcagaggtatgaagtgcagat

SEQ ID NO: 120434 - DNA, 317 bp, Zea Mays
tggttttctcaccaggcctctcactccctttcctgatgatgagggagtagctggagatgattatgcttctaatcctgagaccgatccagcttagcagatgcctcctccacctcctccttagcatggatagttctggcagcctggtcgtggatactttgatccttactttcaacagatccagcaagggctctagacacatatggatggtaggtttcagggcatgatgacacatgtagatggtatatttgatgccatgcaaactcactttgatggccattactctaccctgtgctcaaggttcaatgttgttgatgatc

SEQ ID NO: 120435 - DNA, 805 bp, Zea Mays
gtcttgcagggcaacactagtgagatacggtctcttgcgctgcattatatcacattccatccgaagaacaaagcattatcgctgcttgaagacatccaaagattcaaggtctaatggatgtagtttagtttagatatgtaatatattgtgtatacaatggttccataaactttagctgagtcatgtgtgtataatatgggtaaagacggtagacgttttttatgttatgtcaatgacaacttggggatcatcaatgtctaaactagaatattgtaccctatgtgtttgatcttcatgtgtgtttcatgcatttgattctgccaatttcctgtacaattttatgctgtcaacaacctcatgttatgcttgttttgtctcaactttatgatataactatcaccgctgtatagtcataagcttcacagtgtgaccagtttatgcaataaacaacgccgtgttatgctttgttgcccatacatttatgatacaattatcaccgttctatgcccatacattatgcttgttttgtctcaagtttatgatacaattatcaccgttctatactggaaacatctctttgtacaaccatgcttcacagtctgaccagtttatgcaataaacaacgccgtgttatgcatagttgcacatacatttatgctacattcgacaacgttctatgctttataagtttcacaatctgaacagtttatggccagtgttatgtattttcaaacttacatttatgctacatacgacaacgtcatatgctataaaacaagtcgatgtacattcataaatcttcata

SEQ ID NO: 120436 - DNA, 507 bp, Zea Mays
gggcaacccaaggtgaggtacttggtctgatgtaacctttctctgatagctcatctatttgcttcttgagttcaaccaactctagtccagatactctacaggctcttttagaaatgggggcaattccaggaagaaacactagggcaaactcaactttccgctcaggtggcatacctggtaaatctttcgggaacacatccgggaactctgacacaaccttgatagtcttgagtggatttgcctcactgttatcaatagccatctgatgacaacctcctttccttggctcgggtgagactaactcagccaccacttcttctcctagtggggacaccaacttaattgtcctcttatcacagctgataattgcttggtacttatctagccaattcatccctaggatgacatctattccctgagtacccattactatgaggttagcgggatactctatcccccttattttcacacttacattcaagcaaccactatcggctcgaactttac

SEQ ID NO: 120437 - DNA, 754 bp, Zea Mays
ggagtacctgttctgctcgagagaaaattagagctatgggaaggctgactaaatatatatatgtggcacacaagtcagtaacagatagcaatgctgaataaatgttccaagtactcgtcctagttgctggcctagaaaatgtaatagaacagttagaccaaagaacaagaaaggaggtacaagtatctagtgggaatgacagttctgtaaatagggcagatatttcagcactagtagaaatcaaaggcgtgtttcaaaaggagtaccatcaaaagagctcgaaatattctgaattttttccactgatcaaaaaacacaaagtatggaagcacacaaaatttcacttgaaacagagttgtattgtggcctagagaaattcacaaaggatctgtgaaattcctgaaaacacttaaacaatttttttaattatcttcccgatttttttgaattttttgaccgaaccaaacaggccataggccagtttgggtcaccccagaattgagtcaggaatctgctgtaaaaatttgagctcaaacggagcaccgagcgaaaagttatgcccgttttatggaaggtacctcaagttatggttttcaaaggcacaaatcggcaggaaccgaagcggcgactatggaacacagggttagttttagagataggatttgttttctagatatggttggtttagatataagatctgttttgtggatatggtcagttttagagatatgatctgttttgtggatagggtcgg

SEQ ID NO: 120438 - DNA, 413 bp, Zea Mays
aaactacctagtgacggttttgtgggtttggccacaaaatctaaggtgtggctatggtaggaatcagagatgaaacgtgtagccatcgtggaggttgcatcaagacgaagaaaatatgtgaatggatcatgatcgttaggtctatggtttaggtgttggaccataatgccctggctaagtggtctagctcaaaaatatccatggatatgttaggaacatgtaataagctctataaataagaggatgtctactctcaaccgaagatctctctagcttctaacaaatagtttagttttcaggctttctctcttgtagatctctccctcaagactgctagtgagatccacaaatattttatcaaccaaatatttatctgtgtaagttgaggcctagaaagtgtggccttaccacgg

SEQ ID NO: 120439 - DNA, 390 bp, Zea Mays
agtccgaaagtctacaggcgaagccggaccgacacaataatgtaccagaccgggtgcgcaacaccttacgaacacacccagatgcgcgaaggcagtcaaccttatcatacaaactacagttacacgcgtacagcgagggcatcacaccttacataggctcaaccttcggaatgatccccatctccctatagttaaatagcattatcctcagctcctcaccctcaaaaagccttcacaactccccctcacccatactcgccccaaccggcgaggacaacaattcttgcctaccagccctgcccacacgaagtcgaccaccatccaattcactcactctacgtttcgccaccgcccttcgccgcctacgcccaacattcgaaccatgcaaaa

SEQ ID NO: 120440 - DNA, 430 bp, Zea Mays
ctcatccatagaaaaaatatatactccagcatgatgcaacaacgattattaccctagggttttattaatacatgacatcgagttaactctctctctagaactttgaaagggacaaggcatagcaaaaaggaatggaaaagggaaggtaacgcccgaatttgttggatgttaaggaagaaaatttagacccccaaattcagggcgttacaaacaaccactccacaagtatctaccatcagctatcttaacatgtaaaggcttgggtaactgctgaacatattttactggtcccatcaaatgtgtactcatgaaactagctgaggttcctgaatctactagcaccaacatttgcttgtgatgtattgaagctcataatatggtagttttattgttctcactgccactcacttctgctaccgatacaaccaac

SEQ ID NO: 120441 - DNA, 485 bp, Zea Mays
atcctgactagccaaattagtcgttagctcctctaccttagtagggacatcatcggtggaatgtgatacctcagaagtagagacatcgctaatgtcctggtcattgccatccaccgcataatcaccaagggacatggtgcaaaggacacctatagtgtcagcgaggatgcagagtccatttagcttgtcctcgacccgcttgttagtctcctcatcgctttaggaagacgctgtgacattggagtcgtggtcgaggtcactaagggaggcaaggaaggcacttcattgatcttggccttctagaggtacttcttcttgagcgcctccttgtcgaatcctccattggtcttgtgcttgacagagatgtattctcgcttgcccttgcgccgactagagtggtcgtgcaggccagcatcagatttgcccttcttggggcaactagcgatgaagtggtcagggttatcgcagttgaagcaccatccttc

SEQ ID NO: 120442 - DNA, 522 bp, Zea Mays
gtctactgtagtgctatgtgtgggtgggacagaagttcggtggttttctcgatttgcgtgagaagatcttctaacgtaatgtcccgagctgtcttaccccgtagattgaattttgtagacaaaggttttgaattaattcatgcatacgatagtttattcatcttgttgtactacaaattactaattgtctaataagtgatgagtacaattgcttatgctcatctaaactttagcttattgttccatacagtacctattcatatatgcattgtaataaacgtatagtagttgtcgttgtgtaacaatgtcaggtacaaagtgtaccaagtaccaagttaggaggtagctcggcaagttggtgttcatgctaaaccggggcacaaataggagccatggtgcaaacagttagagaggttcagaccatagtgtgtgtaatatactgtcctcttgctactcaacaaatgatgaatataaatgagaaaaaagttgtaatcccaaacaccagtgagctttaagattcta

SEQ ID NO: 120443 - DNA, 410 bp, Zea Mays
caagggtcaaaggtgataatagacaaggatataaaggaagaggtaaatgtgcataaaagacccaggaatctaggtacaatcaagaatagaaataagataagtcttgcaagaggtaaagtataggatataaccatgggtgagataagtaagagaccacgcttgaactaaggtgggagattggaggttttagataacgaacatagcgtaatcaccaaggtaagattgagagatgagaagggtaaaggcaataagaagcaaaatcacaacaaaggatgaggttacaaactcgcgagccaaagaagaggatacgaccaagagaaagaaggtatgagacggaagaggggcgattttaaagggcaggtatgagacaaacatcaatgtaggatatagaggtgtcaagggtgcatatg

SEQ ID NO: 120444 - DNA, 342 bp, Zea Mays
tagagatattgataactttttctctttctttcttgatgcacaagtcttgaacttggtatctttgcatctgaagtctcacccatgtcgaagctagtggcttcaactcgcacaacttcatagaaaattacaaacatgctcacaaagtttacacacatgttttacaaatgatatagggatattgatgatttttctctttctttcttgttgcataagttttaaacttgatatctttgcatccaaagtctcacccgtaccgaagctaacggcttcgattcacaccttcgccgttcgcacactttgtcgaagcttagtgtccctaccgaatgttagcttcgttcgctg

SEQ ID NO: 120445 - DNA, 340 bp, Zea Mays
gggcatacgtagtcgctaccattggaaagatggcgacacttactttacttaaccaatacaaacatgaccacacaagcatgagcacaagtgtttaccacattcactttaatcgcccattagttacctatcattaaattagttaagtacacaagttcgctacgacttatatatagatagacttagttaagaaggaatagttacttaatcggggttcacaatcatccacagcattctactgcaagcatacaccccagagaacacacatgaggagatagtttaatcacaattacatattatactactttaatgacgttggttacttagtagtattagcagaagc

SEQ ID NO: 120446 - DNA, 603 bp, Zea Mays
cggataggatcaggttcaggtctctcgccgccgatgagctacgcgtggatccgtgctttcaccgccgtgattcacgctcagatcagttggatagcgccgaggtcagtaaatatctcgccgtggaaatgctccggccattattttactccggccaccgtactgagcagaccacggctggttcggatgagttcgccagagacagttgcttcacggccttgcgccacgtgccttggcacatccaccgcatcgccgtgactcgcattagccgcccattcatcgccggagaacttgccacggtaataggtcacgaatccaccgcaccagtaacccctgtcttctccgaccgccgcacgtcttcgtccaaatcctcggccaccgctcatgtctgctataaattgagcccgctgtgaactccatagggtaattacccatccatagcacccacgcttgccttcaattgtccaccaacgaccgcgaatcgctcatttcccccaaacctgctctctgccgccgtggtttagccctcgccgtggccggcttgctccaggttagttcaagctctttggtcagttgttctagtctccttaagacctcctaatgttg

SEQ ID NO: 120447 - DNA, 446 bp, Zea Mays
taaatatgaatttcacaagtttctagtattgtttttgtactcaaaaatcattttctacaataaattctgaattttcttaggcttctggactgggggcacaatttcacagaatccgagggggtcatgtgttaatttcaggacctctatgcgacgattctaacagcctactgtactgcgggttgaatccctgattctgcagggactattttgcaacttgacacgcgcgaattggtaagtttcattaccagccgccagatcaaaatcgaacgaccccgattagattctcatcgtatgccatatgaacccttagatcaggaatcgagggcggcgatttaaagtaaccgagatacgaccccgatcctagatgcggggatcaacggtgttcgcttagtggggaggaaaggggtatgttgtcttgatcccggccgtttgatcaggcatccaac

SEQ ID NO: 120448 - DNA, 428 bp, Zea Mays
cttggataaaattttttgggatgtttttataatggttttatttgtgatgtaggaggatgagaaagatgaagaagtaaccgaggtaataattcaggatgaggtgcctctagccagcttgcaaccggaagcacgaccgaaggtagaggcccgaccaaagcctaaagtagcctctgagggtacacctgttggggtactgacacatggtcaagtgggcccaaacacttagagatggaagagacgagctcaagtgcacgacaagacattaggtagaaactgtagtatctcgttatctgtgtcctgtcctgctataggacaggggtatttatagggccatttaggggtaggtgacccaaagtacattgctgccccccatagaaaaccacattctgacaacatgaactgtacaactgggtaattataatgtcgtc

SEQ ID NO: 120449 - DNA, 495 bp, Zea Mays
ggctgctattgcagctgctatatattcagactcacacgatgaaagtgatactaccttttgtttttgagaagtccaggtgattatgttcctgcccagaaagaaaactacaccactggtactctttctctttacaagatctccagcatgatcactatctgagtagttctgacgccacccctcttaggtatctacacccgaaatgctttgtgcctgatatgtaacggataatcctcttgacagcagcccaatgttctgcatttggtgactccataaatctactaaccattcccaccgagtaggacaggtcaggtctggtatttaccaaatacctcaagctaccaacaatactcctatatctggttgcatccaaactgtgttcaggtttacctgatgtcagtttcagatgttgctccattggagtgtaaactggattgcaacctgtcattccacaggcttcaattattttctctgcataggcactctggccaatggtta

SEQ ID NO: 120450 - DNA, 755 bp, Zea Mays
acaaaacacatggattcaacaatgtcgactcgcttatgtagggaagctcactctctaaggctaaagtcacttgactatagagtggagtttgaagtaaaaggtctggatagcaagactagtgaccttaggctaagattatcaagcttgtacatgttgacagagttgtcgtggttcaagtgttatggatgtccaactcatctctcatgtaaatcccatcacaacctccgctcgatgccatgccagtaggagagagagtgggagagaaagggaagagaggaaaatggagcttgctatcgcgcgcgtgtgtgtggcagttgatagtgtgggatattgggatgcgagaacaatgacaaggtttatgcggttagcggcaatgtcgacatggttgcggcttagagttatatatccaagacaccaggatgtcgggtaggtctagagcaagtgtggccatgtgcacaagatgggatgggcacacaaccgcacatggcaagaatgaccaaaccccagtgacctcaaagatccgcttgacaccatccttgtggatagagagataagcgacacaagagggggatcaaagaaagaaagatctagtagacccccatgtgctcaaaggtctattaggacccaatgtgcatggatatctgtctagtgtcagtcttgttgagaatatctaaatgtctagagggaaaggttgaatatcctataaaacaatttcgagggactcacaaacactagagcaaagtagttagtaaaat

SEQ ID NO: 120451 - DNA, 326 bp, Zea Mays
catctctcgattggatagcaccaacgtccctacacgggccccccattcgtgcctcataggggagatgaagaatcaaatgctgcattggattgaagaatccgggtgaaaatatcttctcaagcttacaaagtaacatagatgccaatctttccaagtctgcaaccacggtccgagatactcttttgcacaaagctaatggaagaaatagctcaactctaaaagcgctagccagacatggttagggacatagcctcgaaccatcgtaggaagaatccattcaatccatatgtggaagtcatgactcttcatccctaagactcacagag

SEQ ID NO: 120452 - DNA, 362 bp, Zea Mays
ggtagttatctactcctatttggtaaaatctagacacctgacaggctccgaaccagctacttgtctgtgtgtaaagggacttctcaaccctaaccgtcacaatttaacaatttcatgaagatcactaaaccaaaaccaaggcaacaatggcttggattgagtatatgtgtttacttcttaccatgaaagaacacaaacctatggcttgcgatagtctaacaactacatatccttacttttgcacaaagatttgttcaactatcattgcaatcggtgattcaccacaaccaaacatgttcatgtacataaacattagtgcattttaatttcaacaactcttggtaaccaggatgtaacctcat

SEQ ID NO: 120453 - DNA, 404 bp, Zea Mays
ccccgcgatcacttaagatttcttcgaagctctcggcctccccacttatccattcaataacgccttcggggtcgcctcgtatgaagttttcttcggtagagtaggcgcccacgttggcaaaactggtttttattttcttcacacagtctaaggatttttcaaagcatctttccttggatgtgcgaagttcttcaacgtttttctctagatgatttttccaatattcgctgatttctcggttagcttctgcaagcacacatttttctttagcttcggtcagttgcctccgaaggtcttcaatttcaatcttttgggcttcggcctgggatttgaagctagcttcatcttctttgactttgttaactagagagaataagattttgtctttttcaagaccttcgttt

SEQ ID NO: 120454 - DNA, 491 bp, Zea Mays
gtccaggagtttccgcagaaatgggatgactatctgcccttggcagaattttcttataataatagctatcaagaaggcattaagatggcaccattcgaagcactgtatggacgacgatgtcggacacccttaaattggtcagaacctggagaacgatggtatttcaggcctaacttagtcaaggaaacagaagcaaaggttcaacggataaggcaccacttgaaagaagcccaagctcggcataaaagttatgtagacaaacgacgccgacccttgttctttcaagtcaaagatcatgtgtacctgaaagtatcaccaatgaagggtgttaatcgattcggggtaaaaggaaagctgacaccccgatatattggcctgtttcccattcttgaacaatgtggaccagtggcatatcgacttcaattgccagaaaccttgtccgtagtacataatgtgttccatgtatctcaactgaagaagtgccttcgggt

SEQ ID NO: 120455 - DNA, 273 bp, Zea Mays
ttggtttgaagtttggctgaggaaaaataattttggcactcggctcgaaacagatcgccataaagatgaataggttgtgaaacaggtgtctggaatatcagataggtgtgaaatttgtcgtgagaggtactcacagtagttggagtgtgctggaaaaagttggggtcgatttgagctattttgactagtttatgcatttcaccgagcacttggcgtgcgggtttcttaaacgacggtgaaacgactattttagagtggaaaacctcccagaag

SEQ ID NO: 120456 - DNA, 387 bp, Zea Mays
cttgaattctagttggaagtatttgtagccccaaccaccccacatagccattggaaagaagtgaggggaaactacacttttctaaatggcaccagacctcttatagtgacaatctgatgtgccaccgaacctctgcagaccactctagcaggttaccattctgacctatcgggggcattggaccaggtccatgtggcacctgaccatcggcacatcagcacgaccgttggaatctgacttgtattattgaagtcacaaggtccggtgcaccaccagatcgggccagtgcgtaagctcttcttcagcttcaaaatgacatctctggtaaactactctgatgagccacttgactagtccggtgtgcccattggcccaaaccatcttata

SEQ ID NO: 120457 - DNA, 438 bp, Zea Mays
agaagatgcctgcagcgacaacatcatcggcgtccggcagtcggtctaatgtttctatatatgtggtgagtatccaaaacttcaaatgctaagcttttgttgtcttcacattctttgttgtatgctagattgtaatgttggattgaaatgcaggaaccaacaactaattctagagaggaggaagacaaggaggaggacaatagccttgacatggaggatgatttctctctaagcctatcttcagaggatggtgggagccaaggtgaagatgaggttcaggtggcacaagttcataatgcaaagagaggagtcaaaagggcaaagggtgatgttccattatctccttcaaagtgtaaggtcaagagggcgaagcgagccgattgctagaagtattttaaggtggtcgaagttcaatcaaagaagaagtttggggaaatg

SEQ ID NO: 120458 - DNA, 1099 bp, Zea Mays
taatttttatacaagttatttcgcgcgctagaactaacatacacatttaatcaacgcattcaccacaatcatcaatttcggcatacatgtatatcaaagcgcttttcacccactagtttgcattttagtttagacaccacatgagcactacagatttttacccgcgatcataaccatgtgcatttagactaacaagtaaaacaatgtgactacgagcttagcccaaaatcatctacaagtctgctaacccattattatagcactctaagacacaatatgtatatagcaatcacttaacgaaatcgactcctacttaacatgagttggctaatcacagtattagacttagcgaaccattttagacatcgcaactcaaaaatatgggttggagcagattaattagtttttcttaacccttttctcaactcaaattagttaacacaccagtcacccaaaatagcacattgttggggtctaacatagatgcatttacatatggcgtaaaaccccataagacttacatttgctactaaaggacctaaagcactcatgtgcatatgttatcagattgttcttcaatgttttgcaaggactgactcatgaacgctactcgcctccaataattattgggctgtgataacgctcatataagccttctaatcgatcaacaagacatttatctatccaaagggaatggaatgcaataattgaccaagcaaggcatcgatcttatcatgcacataaaagcatcacaagcatatttacgccacctatcggttaacttgatcaacacactacacatgttcttcgcccttcaaaatttatcgcacaatcgaatttatcccacctgctaatgacaccgacaagacctactgatatgttatttacatcacgagcacagttacacgccgcagactagtttctaacataatcctcatataactcgtaattcaaactactctccaataataaatcacgcacgacagatttcgccttaactgggttaatttatttggagcaccgcttagcgtaccactagtaccccgtattttgactcgacatataaacatagaggaagcgatgactacttcggcatgtc

SEQ ID NO: 120459 - DNA, 471 bp, Zea Mays
ttcaactacaacttaaactctatttatttacggaaagggtgcacggatgataaagctacagtcaattcgagaaaaggaaacatatataaaacttagaaacacaaacctgaaattgacagatgaacagccacacgagtagttctctattttgtaatccaagtttgtttgtgtttcagagaggtgtggtgttcagatttgagcgcttagagaggtgtcttccatctcatactcgagcatcgcaagatcagggcggggctggtgcgtagaatgggaagaatgagatggtgggacggtcatgcacttgcgatgggatgcgggttgatggtggtcctatgcgctggatggtgaagaggggattgggttgcaattccttctgtggcagcaagccgtggattgcgtttggggcgcggaggatatgggcggggcatccgcggtgcatgggaagaacgattgggcgatgggtggtcctgc

SEQ ID NO: 120460 - DNA, 295 bp, Zea Mays
cgaagctgtatgaagagaagaaagttgcggatcctttcatcgctgggttttatgagtccatggcaaaaacgaatatagagaaaattactaaggagatcatggagggtttgtccgaagattctaatggtagtgatagttatgacgtgcagagtggggatgaagattttgaggatcggccctggcggccaagtcatactatcttcggaaagtcgactatcaaacagagtcatattgacgccatgagggggagatatttttgcaacatgtctattgtcagagttggaggagatagcac

SEQ ID NO: 120461 - DNA, 839 bp, Zea Mays
caccagttgtgtgcatgcttcatgagccacctgaccctacctcgctgctacttgctatctaccccacatggagagatatcccaacaaactctacatgagtggactaccaggtcttccactccagcaaccgccacagctttagaacaaactatcttggaggggtggagtagtgttatggcaagtggagtcacacaagggcccacacaacactgtggagtgtgaacattgtcagatcagagagtccaattatgagcaatatgttgaatgtgttctctagctcgatcaagatcaccaagtctaggcatatcctgactaattgcgccccgatcaaagtacaaccctatccatggttgttgccttcggtcatagacgctatatcaatcaaggcaagggtcagcacggaagccaatgcttcttgctccggtaaccctagacaccaaaattcctaagaggatctgatctcctttatcgtttgagtggccgaaaacgcccaactctccatgacgtcggtagaccctaatggttctaccctaccggccaccaacatgccaccccaagtccctgatccacaaggaggaggagaaacaagtctaggcgatggcgctccacacacggactcgacgttgacgccgaccgccacaatccacccgggcccgaaggtatagactgtatactcccccaccttctcttccacctcaccattgcactagttcacgagtcaatcaatctatcgctaagaaccggacgagtctaagagtgaattctgctagatcctaaagtctatgactctatcacaataaacctagtatgatacctatatgtacattgtaaaaaactcg

SEQ ID NO: 120462 - DNA, 463 bp, Zea Mays
gtctctcactctgagtttgacgtcgtggacttccttatttgtgagatcgaggacaccgttttggatgggattcgcgctcgtagacagttgccatatgctcactacttatgccacatctttgcgcagctgatttagcctcctcagtttcagggcacacttgaggcctcacgcctcgtttttggatcctaccgtcttgcgcctgagactcctgtgccagcttctgctcctgtttttgactctcaggccgaggatgcagcttttcattagttcgacactcaggctatagcagttgatgatgatgatgatgatgatgatgatgattttggggttcctcttccgcctcctatgcctccatgctcacatgatcatgaggctgggagttctagtgctgcccctgctgcccctccggctatggaccctgctcttgcttcgattctccagtctatcactcagcagcaggctc

SEQ ID NO: 120463 - DNA, 398 bp, Zea Mays
cgatcaaagaaccagaaccaaaggagtcggtagggcatccaaaaccctgagcccgccaccagagccggagttgctgaaggtgtccaaaattcctgcaataactcccaagagaaggagaatggacagcgtgctagaagctgttatagaatcaagaaaggtacaaactcctgcttcaaagcttgataaagaaggtgacattacaaaaaaatatgacgaagctaggatatcaccggatattgccgaagccggaccgccaacttgtactgaagcaaaaccttcgggagctactttgattttggaaaaagaaagtgcacccaagaagattaaatctcctacccccgaagcgcctactgaagagctagattttatcatacgacatgcttcggggaaacagttgt

SEQ ID NO: 120464 - DNA, 529 bp, Zea Mays
ctccttctcctcatcctcatggtggcccaccgtctctgccacatacatcgcccttcagggatccaccttctccacaaccatcaagggatccacgaccatcaaaaaaatctaaagtttctataccaaaattagtgtccccgttcgagaagaaaaagaagagtaaatccactgctggcacagctcgttttttgaaagggattggacggagcctcacgtcagacactgttgatttggccgatctcgaggagtccgcaaaaaggctgaggcaatggccgcaaagataaagaagccaactaaggcagattataaaaacgtgcctaaaaaatacgtgtcgggcagaccactactcacttttgagaaactaatgaaggtcccggctaatattaaaaggttgcatgattggtacatgcgggcatcttcagttggcatcgacaccatcagtgtcaatataccagcccatgcttttattggttcaaatcaaaaatcctttgttacgttcgaggacatgtggttaatgatgaaccttcag

SEQ ID NO: 120465 - DNA, 986 bp, Zea Mays
cattccctcaggttgacacggagttcaacttaatcttcgggggccagggtcctaggacaacaagaggcaacaaaagcctatggaactccatgtgttggtggccatgaccgagcccctgatgccctataggtggttggagatgttgatcaccttcagccgggccgaccaatggctcggcattgatcacctaggcaagtaccctatgcttgttaaactagtaatcaaagccagctgagttaagaaggtgctaatggacgggcaagcaacatcaacatcaccttcctcgaactcttgaggcactcaggatctctgtcgctgaactacaagaatcagacactcccttcttcaacatcgtcctgaatgagggggagtacccacttggccacatatccttaccaatgatgatgttcggcactctggacaactatcacactaagtttctgcgttatgaagttgctaagttcgactgcgcttacaacgccatcatcgggaggcctaggctagccaagttcatggtcatcccacactacacctacatgatgctcaagatgcctggaccacaaggtgtcgtcacgaggaaggccgacttccaggcctcggcggagtgctaccagggtgctattcaaatggccctcgcgtcaaacacctcggtgtcacaaaagcagccgatggcggaggcgagggcactcccgtaggacgatctcttagtcctagtcttgaaggcgaccccaactaccgccaaaagaccgactgaagacaccaacaaggccaaccttggcctccccgacacgtgcaagatggcaaccatcagctctagcgtcaacgctgaataggaaagcacattcattcgattactacatgacaacagggacatgttcgcttggcagcctgtggacatgcccagtgttcctagggaactggctgagcacaaactgaagttctaccctcaagcgaagctagtatgacagaatctgcatcgtttcact

SEQ ID NO: 120466 - DNA, 421 bp, Zea Mays
ccaccatgtgcctttgagtttgaggatgctttctgagagcatcatgtgcctttgggaatcgtctagctcaaggaagaagaatttcgagagttgattcaaggagggcgatctgttagcgagtacatccataaattcacagaacttgattgttatgcaccagatgatgttagcacagaagtcaagaagatggcccgtttcttgaaaggattaagaccagaactcaagactatccttgccatccaagacttcctcagcttctcgcacctctcaaacaaggccatctaggtggaaagagctcgagaagaagatataggtcacctcaagagaaagtttcaaattctctgagcttaacagcaggacaggaaccagagggttcgaccttttaggtttccttccaagggtcaaacctcagcaagccagc

SEQ ID NO: 120467 - DNA, 459 bp, Zea Mays
tacagatgcgaagttgaattttagttcagcatacctcagatcgatggactgaccgaaaggactactcgagtattggaggacgtgttgagagcttgtgcccttcaacatggtagtagttgggacaagagtctaccttatgctgagttctcatataataatagttaccaggccagtctgaagatgttaccgtttgagactatgtatggtaggaaatgcaggactcctctatattaggatcagactggagaaagacagttctttggacctgaactcattcaagaggcagaagaacaagtccgtataattctggagaatttgagggtagctcaaaccaggcaaaagagctacgctgataatagaagaccactggaatttgaggaaggtgatcatgtgtatctcaaggtttcatcacttcatggaatgaggagatttaaagttaggggcaaattgtcccctcgc

SEQ ID NO: 120468 - DNA, 520 bp, Zea Mays
accaccatacctgtgtcttcccttacttggaagttcatcggagttatgacctcaagtctcgttgattccctcggcggccaaggggtattacaatgaggtggaggtcggtagtggcttcattgtcatggggccgaggttagggtcgaggcgtagggaggcaaggatgatggcggaggggcctagagagggaggcacaaaggggatggatatcgttcgctgcaatggtcgtctgagtctacacgaaagaggcgactagggcagaagtggactggggagaagcacacacacgtgcgtggggaggagagagtactcgagaaacgtgggcgacataacagatggtccagattgatgggagatagaacgacagaactagaagagacaacctacctctttcatacttaataagtagtaaagattgagtaaattttagtttgcgcacaccgtaaaatctgtgaagtcttgctcaggttatttttattggatatggattgaataggattgaaagaaattagtaagaatt

SEQ ID NO: 120469 - DNA, 481 bp, Zea Mays
gcccaatatagcaaatcttattcagtattcttctagagcatggatttttgtcataatgcaaacaagcataataccctctggtgactctaccagacaatgtgcttagcgctggataatcgtgtatgcaccatagcaatgccgcatgtagaataaactattttccagctcttgcatcaatagtatcgatacccaaccaaagatcctgcaactcgtcaattaatggctctaaaaagacatcaaaatcctttcctgggcattctttgccagggattagtagacacatcatgaagtttgattgctcaacacatacccatggaggaaaattgtaagggataacaaaaacaggccacatactataagaggagctcattttcccaaatggattgaaaccatctgttgcaaaaccaagcctaatattcctaggatcttctgcaaaccaatcatgctgcttatcaaagtccttccatgccttaccatctgc

SEQ ID NO: 120470 - DNA, 492 bp, Zea Mays
ctctgatcggtatttagctgggacagaagagattgggcttgcatggacaataccaacggttcaacgtcaagttcatcgttaagcaacctattttcgtacatgggatcattttgtgcagacagtttgggcaagttgaagtcttcaatattccctccactgttagaaaacaattgtgttagcttctttatcagcagcggcataagttgttctggtggcacaacgtagcgtggattggccagtgcgcgggtgagtgagcggtgaatgtcatccgtgaaatatagccagtacttatcaaataaagcacgaacattgccaaccgagcaatggagggcaactgttacaaagagttggcgtagctggtgtgatgaggcagagacgatggcctcatcaaagagaaggctccattcgttatcgctctcaagaaggcccctcgcctcacatgcctcgtgaaaggtaccatagaccgtgccactaaatgtccttagatcaaca

SEQ ID NO: 120471 - DNA, 501 bp, Zea Mays
ggaaattgtattcggttccgatatctgcagagaagatggtacactccgttggtaggttgtgttattcagtacctttgttaggccctgctgtattgatctgtcggccagtggtgtttaggtcatggtattggtgcatgaatccacggatcatccagtacaaaacatggatggttaagcttttgagtgccttttgcttttcagcaacggtggttggcattatctaatcgcctcaacgccttgtggtgtgcagagcaaaaggtcaactgacgcaatgacaaaagggctatacctatactcatcggcaactggatcgatgggacttgcaagcaagagtctctcagtttacagaaaagaaaaaaaaaataccacaaagcgacctagaggaagctcagtgtaattaatgtaagtgaacttttgtctgtcgattttggtacagggagcagagagatggtaataggaccgcgtaatttacagagacaaattaccatttccttcagaaga

SEQ ID NO: 120472 - DNA, 353 bp, Zea Mays
ctgctggtctttggtgtccggccttaactcgctgacacatgtcacataatgcaacatgagtagcaacatctcttttcaattcgtaccaccaatacttttccttaagatcctggtacatctttgtactcccagggtgaatagagtaagctgaatcatgagcttctctcaaaataagttggcgtaggtgttcaatttccggtacacagattctcttcttaaaccatactgtgccttgatcatcttccgtgaaatctggggcttttcccaaactaatttgtgtcttaatttctttgattttctcatcagactcttgtcctttacgaatctcttcttccaaagtagattcaacttcc

SEQ ID NO: 120473 - DNA, 527 bp, Zea Mays
attaatttgtccatatcagcacaccaaactatcaactaacactgtcaccagcaattttcttgaggagtaaaattgaacgcaaggagtatatcattaccttggggttgtaagaaagcacaaaggaaatttagtccaaataatcttcaaaataaatttatgttttcttgagtgctagcctaaactgccaaggtaatttcctatttctcattacaaaatcgctacggtaaccactcagttaattcctttggtatttggtcaaatgattttgtgagcagcagttttcaaggttcctctgaggggtacttgatcctagggatatatattcagttttctgctagtgacaaatataatattgttacaatccataatgctagtatcttcgatagctagctgccaagaagccgtgactttgtaaaatagtgcacgcagcatgagccgaaggccgaagcctctctattccgatcctcccatgatttgctccaaagccatgtgacccctacgaaagaaacgtcgggtgcaacggccgt

SEQ ID NO: 120474 - DNA, 557 bp, Zea Mays
ggatcatagggctcgggtggcggtgaaagttcagctacagtaaaagtaacaagttgttaatccgaagcaagaaaaaatatcaaagctatgaaacaattaaaatagctatgcgtctcgcacgctaagcagcctcttcggctcgtttagcttcttctcgagcttcatgggattatttttcgttctttttatagcttcatcggttatctctcgacctcccttcatccaaacgttggaatagaatttcccacccatcagagtagcctcagccgaaggatccttcgtgtagtctacagagaagacggtctccgtctgagttgcagctttaacatgttcacaaccagtcttttctaaaattgctgcaacccctctggcaccagcgaaggcgcataaatcaccacgatcgctaagtatctcgtcaaaggcttcagcttcttcgccgatccattcaatgattccttcaggattgcctctaataaatttttgctcagatgagtatgcacccacctttgcaaaactatcttttaaccttttagcacaatccaaggatttttcgtaat

SEQ ID NO: 120475 - DNA, 435 bp, Zea Mays
aactttacctattctcattgggggagactttaatattttacgatctccatctgagaaaaataatgatagatttgatcatcgttggccatttctattcaatgtcggggcgaaggtacacctgggctaatactagggataatctgacttatgagaaattggattggattttggtagctatagaatgggagggaaattccctagagcatcggtacatgccttgttgcgaaatatatctgatcatactcctctgcttcttagcacaggagttgtaaccgcccaaacaattccttcgttcaagtttgaattaggatggtttctgtggtatggttttgtggatatggtaaaagatatttgggtaaatgagacaagaggttctactccgttggagaaatggcaagccaagattaggaaggttcgccaacacttaaggggttg

SEQ ID NO: 120476 - DNA, 500 bp, Zea Mays
gagaaggagagggccgccacccatcaacccactgcaagtcatcgctgaagccatgggaagttctcaggaatcatcgacgggatgcagtggaggcttccataaactcgtactggcgaattagtagctcgggtccttggaattgctcgccggtgtcaagaaccctcgcggagccgccaaaccccgtcgtcggccctctgcaccgatatatcaccggtataatacccctaacctaactccatgtgatatcctcttcgtgcgaacactcttggactgaagtttgggcggttgtgtgtggcggtggtggtacccggctatggcgctgccgtcctgggatgccaggggtggtaggtgaacttgctacctcgatttgaactggacggctaggattaaaccgtagatatacccttttagcactttaaatataggccataagtcgtgcatccgagggctgggagtgggcactggcgtggttggatctcaggcgttggcttcggatccag

SEQ ID NO: 120477 - DNA, 326 bp, Zea Mays
gtgaagtcatctgtggaagtggatcaaacgtaaaggttatcgtagaagaaagaaaaatatgtgagcccgggttgttaaaaggaagtgggttagttcaaatttttactcctttaatttctaatcctttcgtgttttaaaacgcatgcaagctgaaaagagtgtctcctcaccgaatcagaatggtgcctttagggcatccttgaaatctaagactggcccatagggcctacttatttagccaccttttttccccactattcctaaggtctttcgtcctaggtctagcgttctagtcctgacgattccaataatggtttctaagcaag

SEQ ID NO: 120478 - DNA, 398 bp, Zea Mays
gcggttgttagcttcggcaactccgtcatggttgggggactctgcagatttggatgctcttctgccgttgagctctttgtttccgtctcttctatcggatcgacactagcttctattgtcacaacaggaattgtctccgaagccaaggggatagcttcggcctatttagcaatctctatcttctctgtaccaagcactgcagctgtcctctctaaagaatgtggcctcggcctgcgatttaaaatcttagccctcttcgacttaggcgcggtggaagaagattaagttgccatttttcttttcaacccttgtttttgggcaggaaagtagtaatcaggataaaaaatctaatcacatcaaagaccctattcagtctcctcttgccgtgagcgccgaag

SEQ ID NO: 120479 - DNA, 627 bp, Zea Mays
attaagcccatatgttgtctggctaactcagacccaaggacaatggaaagcttgcttaagcactaaggcatcgtaacaatcattgctgaagaagatgacacggagttctatgtcgcccataagtcggaacaagatcaccatgcatgcaacattatctacaaacatgaacagactcatgtatgtgtaggggtagaaataagcgtcaacttgtaaaacctaaccttgtcatataaataaggcaggataggtaacctacgaaccgattccacaccaccatagtcggatagagcaatccattttgtaatgccaaactcggttcaatatcatcaacacagagcacatgatgtatgtgttacacatttcgatagcccaaacctatataaatcttcatgttctgtcatgttgcacacgaaccatcaagctacagtcgatctcgccaaccacaaaaagaactatgtgatatatctcgtagtgtgctgtcgatactaaacaccgacacctagcgtgccaggtatgggagcccacatcgacatcagttagctccatgtccatcatcttcaccaacaccgtcaacttagctccatggccatcatcttcaccaacaccgtcggtcgagctcctcccagc

SEQ ID NO: 120480 - DNA, 387 bp, Zea Mays
gtcggaaggcacgtctgggtgcaattgagcatacaatacatgtacttcttcatgtaaagtagtacagtacacttgcaggttgtcgagggccgcactaagctctgccacacaagctcgagcttttgcttcgcagtcccaagcaatcgaacgcgagttgacggcccaatcaatggccgaatcccattctgaaatctcatattgcaagcggctgacgtcagctgacaattcagctatacgctggctgtcctgcgcccatgccctattccggtgacgtagctctgaccgaagttgttccaccttggcttctaggtctccaattgggtcattgctgccactactacttccttcatgtctgggagctagctgatggcgaggcacgccaaaagg

SEQ ID NO: 120481 - DNA, 576 bp, Zea Mays
aaaccttttatctctacttttctctttatctgagaagttgtgtttgcctacgttgggagtcagtaaagatgtgtgtttgttcagtgttgtgaagaactctatactcttttcttatgctgcaagatttgcaagattagttctgatgtgtgattgccttccgcagatgtcggaccaaaggcgtagaggagggagctgtgcctagccagagcagcaagccccgcaagatgaggcaccgaagccgcagttgcctccgcctactttgatgtcaatagagcagatgttcctcatgctaactcaggcaattcaggcaattaggtagaccttggcagctatgtagcaagttcaacagcaacctcagcctcaaccacagatgcagatgcctaaagataagtgtgcaaagttcatgagagttccccatgtgttcgttcattctgctgaccccatggactccgagggttggctgtgtaccgtggagcatgagttgcacaccgctcagtgcaacaaaagagagaaggttttgtatggtccacgtctgttgaggggagcagctcagtcctgctgggagtcctacctcac

SEQ ID NO: 120482 - DNA, 380 bp, Zea Mays
acctctatatcacctctcacattagatgcaatggatgaaagccttaccttaatccctcggtgcaagtgcaatatgtggttattctgtccagcgacacatgtggtgtcaggaccattcatccttggggcatcctagaagtgttgcggggctgctatgtaaggcccagttttagggccctgaggcttagtcactgcggtgtttagcccccagtgcacagggccacgagaatgttgtgttgatgctaagctgtaaggacctagatggctacagaggtgaacaacctataaaattatcctacaaactaatgattattattatagcatagttgattagtacaaactgtgacactgaagcatgtactttctctagctctaatttcc

SEQ ID NO: 120483 - DNA, 491 bp, Zea Mays
ctcaatttttcttcatgttccaggttgtgcaaatgtggactgagcttgggactccataaggttagtttttccttttcttctcttatgtatgcatatgttttgtgagctaggctagggtatgttgtggcctacccaaaaataccattagatctagcatttttgaaggtcaaagcaaagtttaatgtgagacatatggatgccaatgaagaattacccatcagggaatgccttcatatccccatccctgttaaacctcatgagcaaggtttcctccccattaccatccctgcatgtgcattccatatcagacgggttccatgtctcggacaaaagttatgttgtgctcagctcaagaaggtgcttgttttttgcatctaagccacatgcatatgcatctgatgcacatgtatctttggtctatgtgcatctgcaactaaggtgcttgtgttcttagcaatgggtggatgattgaggagaaaccattggcgatg

SEQ ID NO: 120484 - DNA, 567 bp, Zea Mays
cgaagacatctcttcttctttttctgcccctcagcaggagaagtgggctgattggcttggcgagggcgtttcgggtgaaaactgtcagacctctgaatatccaaagcttcgctagcttctgggaggggcgctaccaccggtgtttcagcacgggccgcatcagaggaatcttcagctaacatatccagcatggcacttatctctacatcactgggattcaaaggcacctcaaaatgaacctgcctctcgtcgtcaggaatttcttccagtgaggcaaccaaagcattaacttcttcgggagagggtcgcactctaaggcccaaaccgctatcaccggcaggaggattcgacacaaaactggtaaaggccttggaaggaggcagattccaggctgagtacgcaacaggagcaccaatgttcgacaccttgcctctgagtatcatttcgagccggctcaccaagtccacagcaggaattcttctgttggttacccgggttgaatcagccaggcctcggtacaataggccggatatgctctgtctttcagcagctgaatgttcttgaaaa

SEQ ID NO: 120485 - DNA, 447 bp, Zea Mays
tttgagaattgcacaatcaaggcaaaagagctatgctgataatagaaggagactactggagtttaaggagggtgatcatgtctatttgaaggtgtcaccaaaccaaggtatgaggagatttaaagttaaaggaaagttgtcccctcgcttcattggacctttcttgatcttaaagcgagtgggagaagttgcatatcaactgaagctacccgatcacctgtcagatgtacatgatgtattccatgtgtcccagctaaagaagtgcctcaggatacctgaggagcagctaccaatggaagaccttagtgttcaagatgacctgacttatgctgagtatcccatcaagattctggacactctgactcgagttacaagaaataaggtgataaagatgtgcaaagtagtcaccacggagaagattaagctacttgggagagagaagaagag

SEQ ID NO: 120486 - DNA, 299 bp, Zea Mays
agctacttgggtttatcgtcagtcatcggggaatagaagcaaatctagagaagattgaggccattatgaggatggagccaccacgatcacagaagaaggtacaaaggctcactggatgcatggcagcgctgagtagatttatatcaaggctaggcgaaaaaggaatgtcgttctatatgttgctcaaaaaggtggacaaatttcagtggaccacagaggcacaggaagccttggaagcactaaagaagttcctcaccacaccaccagtgctcaagccaccatgttgagctacatccgat

SEQ ID NO: 120487 - DNA, 326 bp, Zea Mays
ttttattggcggtgtatccgcccaactgagatcttgcggtgctactgttcctgatcaagcttcatctctgatgcagtggaaccctttgctgctccaaaaacagatagatgacctgaaggcatcgaatattggttagtgagctcacagtttccctagttgctttcactgcttagcttatctttaatcgtgtgtttttcttccgctgctttatcagatttggctcggcagtgctctgactttgaagagaagtactctcagagccaggccgacttagctcagacttctgcttttctggatagtgctcgttccctgaattcctctctgaa

SEQ ID NO: 120488 - DNA, 567 bp, Zea Mays
gttgagcaagatgaagatcaaagtaatttcttctggtgctttgtctcacatttccattgagcccaccttgcgagaccagatcattatggcccaactcagtgacaagggagtgcaaatcattaaggagaacctcgatcagaagacagagaagtacaagtgttttcgccaagataagaaggggatattatggtttgaagccagaatggtggttcctaaaaataaggatctcaagaagaaaatattggatgaggcccatctctccaaattctccatgcatccgggaagcaccaagatgtaccatgatctgaagcccctatattggtggaccagaatgaagagggaaatagctcagtatgtatcggaatgtgacacatgtcaaaggataaaggcaagccacttaaaatcagctggtgccttgcaacccctatcagtaccttcatggaaatgggatgacatcatggatttcattatgggtctgcccaacacctctcggcatcatgattcaatttgggtcattgtggaccgattgacgaaagtggcacattttcttccagtgcacaccactga

SEQ ID NO: 120489 - DNA, 405 bp, Zea Mays
tcaagttatgtttttgtaggcacgactagaaagcggcggttagggcaaaaattccctatctgcaatcacaacggttagggcaagtcaattaatggggtggatcgacttgtgatctgggtaatggtggatgggatagcggcgtatctgcaatctatctagggctggcgcggcggcggctagtgagggtagttgatctacgacgaagatacaccctaaaccagcaacacgactcgaccacgaacacgaactgaacaaagccaaactgaaaacgaaattgcaaaggctaaacaagggttctaggacaacagattttttgtatggcaattatctggagttataggatgaaaaacctaaactaaactagggtaagcctgacggtaatacctgagtctttgaataccactt

SEQ ID NO: 120490 - DNA, 274 bp, Zea Mays
ttgggacaagagtctaccatataatgagttctcttataataatagttaccagaccagtctgaagatgtcaccatttgaagctttatatggcagaaagtacaggactcctctctattgggatcagactagagaaagacagttctttgggcctgaggttattaaagaggcagaagaacaagtccatataatccgggagaacttgagggtagcacaaactcgacagaagagctatgctgataatcgaagaagaccactggaatttgaggagggtgac

SEQ ID NO: 120491 - DNA, 616 bp, Zea Mays
agtgtccgcctcgcctaagcccgtctcgggcaagaaggacaaaatttggggcaatacccatccgaagtctatcgggggacaaccacattcaatgcgcatacatatcccactcaggttgcgggtgtatagggacaacaagaccgcaatcacttcaaagattcaccaactatgattacacgtgcgaccactgtacatgcatgtcgtctgcaaactcccgatgggacgtgtaatatgacaagggcacagaccaaaccttgggcgcaaactccgcctcgcccgaagcagaaatcgccctcaggacgaaactctgcctcgcccgagcctagtcccggctacctactccccccgcgaatcccgcgagaggccactccttcaactgtggcacacgtctttgaacctcggaacaggtttgctcacaacctcaggctgactttcgcctcgctcgagcccggctctgacctcgaaatctataatggaggacaccccaacatcattaactaccccagagccgatgtaccttttaagaagttttttcccatccttaccactgtgacaaccactatggtatggcaacaccttgccagggggctcgagtatgtgatcgtgccctcggcct

SEQ ID NO: 120492 - DNA, 859 bp, Zea Mays
gtcaggcgagggtgtcgacaaccagctcaacgcaaaagggagaggagactgatggcagcgaaccaacgtgctggtggctgtgacaagctagacgggaagaaggcctccaaccgaggagaccactgaccacttcgagaagctccttgaagccccatgttcgaaccattgacactcggtccaacacgcatacaaggattgtggattacttgggaaattcctaagtaaggaggcactgtccagaaggggacctgagccctgaaaagacgaaaggccaaggggaagaggaccacgttcctcgccgaaactggctgcttgctgatctatgagaggtatgattactatgctttgtggaggcaccaaaaactcgaacgacataaggtgtttgacactcgacaagtagccctagcctccttcggttagtctgaccaacattgcgttcaatcaatctgccagctttgagcacattcctcggccgggatgatgcccgcttaccgtcgaccccctcgatggtatggcacgactgaccaaagtactcatggaggacgagggtagcaggatcgccgccctctactctgcctcgaacgacggcatgggtcttggtagactgtctccggcaaatcgggagaccatcactatgggcaccacagtgcgacatgcgtaagaatgtgacatcgaatgttgtggcccagccaagggagccaccctcgctccatagctatcggatgagctctgggccgtcggtgagaaggtcccaactgtgaagaaggcaagcgtgatcctcaagacggcagacgacataaagagggagccgctagaccccgagcgacccgtcgagcgggaagcgtgtgtcgggtccatg

SEQ ID NO: 120493 - DNA, 561 bp, Zea Mays
gaagaatcgttgttagcgtatgccctccacactcaatttccgctacctttcgatttccagcacgagtgaagcatcctcagtcaatgaaagtagaattggcaagcaccagtggtcggttttactggccagcatatggatgtagaattggctacggactacataattgcttgatgccccaccaggcaccagttgggccttttctttatactcccgccatcttcctgaaggatccgaaaggactgctagatgttcatctgtcaccatgattcttgtggtgggtctgctcaatgactttcgggctccaaaaccatatgttcacaggaccctatttcactactggagcatcaggcttctgtccagcaccatatgttctggttgtcttaaaactggagtaccggatttaaatgtggagttcgtatagaggacattaatactggttggtgtcccgaaccggtataagtactaagtttttagtatcggttgaagacaccaaacagtactaatttaatgtgcacaaatgtcattagtaccggttctagtaacaaattggtacaaaatttt

SEQ ID NO: 120494 - DNA, 368 bp, Zea Mays
atacaaatatccctatcacactatttacgcacaatgactcaatgttttatgccaaacggtatatactatatacgcaacatctatagcgtaactgttttatgtcatatcttttaacatcttatggatattatctttaactgccgccattatgccccatgcaagatccataaattccgcgcccatgtttcagagtaagcacgtttgcatgtggaatctaatccctatagttccgcccactaccatatgtttatcgccttgccattaaccaaccgagtcacggcgccgtcggtcctgcatgttctctgtctcgtctccatcatacccacgcgcgtttggttcagcggaccagaccctgttaccgacccagg

SEQ ID NO: 120495 - DNA, 509 bp, Zea Mays
gttttgcttagttatcgccgttgcctttcgccaatgcattcagtttgccttctgcagtttgctgtcacaataaacatgtataatttgcttcctacaattgacgtctggcagcagttcatttggacaacctacaacttctattcagaacagatagtatggttttgtagtaaacaaatggttacctattcctttccatactcaccaaaatacatgtctctcctagacctatagaccgtaaatctcatgtttattctgccaattaaggtgtgcttactctgccaattgaagtataggatgtttattccatgttcctcgatacaacgcacaccttcatatttttcctatttgtgtttcatgttttactccatcacccatgtttcattgaaataactaaccgtgcatacctatttaccacacataaagttgatcacttttttttgtcagaggtcaccattgctgctacaataggtatgaccaccatatttcctccataatcaccatacttttcc

SEQ ID NO: 120496 - DNA, 383 bp, Zea Mays
tgaagttgtacgcattcaaattcaaggtttccttacatagaccatgaggcaaccatgtaatttttattggagagcatctcgcaacatttagatcaaacaatcagtgacatcttttgcatagatcaaacgaatgtgttagtttgttcaagcaaactgttaactaatatgaatctacatgtgaggttctcaactacatagttttctggaccgggaacatgctcagttgggcgaaccatcgtgctaacgttgatgtcgatagaattcaccatagctcagttgacagaagagacaaagtacagtcccaaccgagcacgcgagtcaactcgttagagaacattttgctgtcagtgagtccattttgaggagcgactggtacactaagg

SEQ ID NO: 120497 - DNA, 1006 bp, Zea Mays
cccaagaagttatatgctaggctgctaacgtcggagagagtgagacccatgaccctaaaacatacattgtatacttttcagatttcatttgagtcaaagacaaaaagaaaggaaaaatcattttttggtatttgtcgggcaaggaatatgaaaaccatttattttgtttatatgagttactcctttccctttcctcaactgttctatatcttggaaataatctctgaggatgaacaccacggttcagttttagagaccacacagttcaccaagtatgatagtggtcgtttaccatttcttaactaaatatctgaaccattgttgttttgttcgagtagggaagggaagttgtgttcatctggcaatgtgataaaaataaatatgcattgtgttgttcttttactggataaatatgcaatgtgataaaaataaatttccttattattgaagatggacataaacggcgtctactagcccatccacgtcatcggaaaactttgtagccgttcaatcatggatcattggtccaccttcctcgcctgctctctcatacgcccctcgtgtataatgatccattgcgaaacttcgattatgcttttactaccgtccagatttatttggactgaagttcattgtagattctaaatatttgaagtactttaccgttgttgtggaagatgaatagatggttatattacggtcatacaattactttagcattgcctcgggtcatcatgtttctacatcatttttgctgtcaaaaatataaagcaaggcatatttaaacaatgtattataaaatgaattttcttgttttctagaaactcaatatagcatgttgttcttgcctcctcctaccttcctattttgtaaatctttgatagatttatttccttagttcctaaattgatgctccagtttgtgtgacctattttctacaggtttcaggatggcaggagggtttttaactcaccatcattacattggaattattttcggtatattg

SEQ ID NO: 120498 - DNA, 378 bp, Zea Mays
agccctacatgattctcatactgattaacactaattactcccgaaaaatcctcagaaactgctaatcctgctgctgttcatccccctgaaaatctgttttttttttacagccacatacccggattcaaacggtgataacttttaatttatatctccaaattgagcgcataaatactcgttggaaaggtaagacaaagttctacatgatccccaaactgatttccattaatttcccacgaaaaatgcccagaaactgctagaactactgctgttcaaccaccacctaaaattctggacagcccctctacccaatcgcatacgcaacatctaatcaactggattgcagcgcaaatgaacaagagatgaacacaaaaatca

SEQ ID NO: 120499 - DNA, 644 bp, Zea Mays
attccattctactggtgattctgaacatctgaattgactatctgtttggttccctgtatagccatgctttgctgctttttagccatgctgctttttagccctctcttctttactctttgctttgctgctacatactcttgctggtcacaagcagtacctaggatcaatgatgttgagctgagttctatggttacttttgaatatattcatacttgtttattagtttctgagctgtcgatcaatggtatatgatgcttcaatgcctctgggtggcgcatctcttgtatgtcgcagccgtggctcgtgtaagaatctgttttacatatttgcaactagcacatcactgtttagcgtgcttgatcatatattttctgagctatagatcaatgttctatgatgctagtatgcctctgagctatagatcaatgttctatgaatttcctttttagcaactagcacaacacatgtgagccaacttagacctctaatcttcttttctattttattactctagcaatggatcctgctattgcacgccgtcggctaattgcaaaggcagtggtccttgtagcagttatgtcagcctggttggatgcatggttgaggcaccgactgcatgctaggaggtctatcacttatggccc

SEQ ID NO: 120500 - DNA, 282 bp, Zea Mays
gttggaagagattggtatggatttcattactggattgcctcgcaccccgaaaggatatgattctatatgggtggttgaggatagatggactaaagtagctcacttcattcccgtcaagactacttataaatgttctcaactagcagagttatatatggctcggattgtgtctctacatggtgtaccgaagaagatcgtttcggatagaggatcatagtttacccccagattttggaaaagttttcatgagaatatggatgcgaaattgaattttagttcggc

SEQ ID NO: 120501 - DNA, 625 bp, Zea Mays
tgcttgcaccagaccgatgagctcgcgttcataagcaacgagcttcaagtgccatgtggcgaacggtctactgaagaaggcaattgggccgttgtcttgatgtagcactaccccaaaccctgaaccggatgcgtcacaatccatgatgaatgatttggtgaactccggaaggtgcaaaaccggtgctgtagacagtgcctccttgagtgctgtaaaggttgtggctgcttctgctgaccatgcaaaactgtcttttttgaggagtttggttaggggagctgcaattgtgccaaagtccttaataaatttgcggtaatagctcgcaattcccagaaatcctcgcagcccatgagctgatttaggtgttggtcaggcggtgattgcttcgactttgtcactgttcatagagacccctgactctgagatgacatgtcccaggtatacaatagaagtggctccaaagctgcatttagatttcttgacaaataaactgttggtgcgaagtaaagtcatcactgctctgacatgttgaaggtgggttcactaggacggactgtatatcaatatgtcatcgaagaaaaccaacacgagcgtcacaacaggggctacagtacagaattcatca

SEQ ID NO: 120502 - DNA, 699 bp, Zea Mays
gaaatgtgatcgatacaaagaagagttgtcagattattttaagcaggaggcaaataaagagttcaaagacctgatgtctcaaatgctatcaaatcctcctctagaattgatgcagtagttggcgggtgtgatgtttgttcaacagatgaccactccacagctgcaaataattccagcagctcaatcgccggcttccaccgattgtacaaccgtcccaagctctatcgcgtcaacgagaaataaggttcgttatccatttgatgacatcacaaggcatgtggcgtgcacactagttataagatatggtattaacaataatcgtacaaagaaagtaggaacaggtgttgcgatcctaggacgcaagtttcatggaagcgacattccagatgattattgcagggtagaagtgacgacggtcgtctaaggatccgaggacgacatgctagacatctctgggcccaaaggaattgggacacttggacaagccatcaaaaatttcatcctttggcctcgaagggatgtcgaattggttgatccaccaatgctgtcgtcgtcgcatccccaaccatctccgcctcctcaaactttagtacattttgtacatccatcatcaccttctcaatcttcacatgctgctcctcatcctctttctaacccaccgtctccgccacaagcatcaacatttaggacaccaccacc

SEQ ID NO: 120503 - DNA, 343 bp, Zea Mays
ggatttttctaccattttctatagattttcaaagctttactgaaaaagaaaaaggaaaaggttaaacagtattgggctggaatcaaaccaggcggcccagtccagaggggaaagcgcgcccgcgcgctggcatctttgcagaaagaccctcgggtttttagctaactagagaacgagcttctttactattcctatgtgtcgctgccagattacacctaagccctctggtttctaactctttgcaggatgaagtccacgacggcgtcgcgcggaggatgaactccggcgagcacgcagaccggccggaggaggccaagaccagtgcttagcgtcggcctaaacc

SEQ ID NO: 120504 - DNA, 744 bp, Zea Mays
tgacatgtcaactggtagtccttaagccataggttggggtttgattctcccgaatatttcacaatgtttgtgggcgctcgatacagttgagaaattggtgcttggagaatatggtgaccgaaggcctgagggcctaataggggtgggctcaagctttggtccttgtcttgatcaaaatgaccacaacggcttttgttgtaccaacgaccatcgccaggtattttggggactcgctacgcttggtttctaggatgtttcgagcatccctgactggtcctaggatttggtggagcgagggccgaaccacatttctgacactgtgctcaggctactggactgatagagagtcttatcctagttgtgttgttatagtgtgctggctgacctcgggtccactccatcgtgacatggagctcttagcttgctactagacaacgaggctaagcaaatcccgtaccttgcgctaggttctgcgcccgtttggcgtgttggcttcaagaagcttatcaaggaggtccatcgtgaccataatgttctggctcccttaagggactgtagtggtccgctatcatcttccataatctgttggtgatcgtctcatgccatggcatgcacgcgcccaccactttgccctggtttcgtcatccaccgttgtggcatatcttacccaccccttggatagcattggtcgcctcgagcatggttctattcagcttgtggcagcctttcttgtgctcgggcgag

SEQ ID NO: 120505 - DNA, 745 bp, Zea Mays
ctggagcttctgagacgggccctatctcaggaatgatgaaacattctgggttagttgtacaagaagaaagagttagttccaacagaagatgttgttgttaccgaagctgaaccaactactgccgaagctgacagtgataacaaagatgatgatggcattttaagtccgagcaagcccagccatattgagtttggaaaattatggttttaatgaagaaattaggatattttggagagaatgatgacgaactagttcggtttgctgagggaagaaaagtgattctagatccgagagatgtcgaagtcgtagttttcaaaagcttcttcaaagcaggtcttcggttccctctatacgagatgattgctgaggttttaaagaagttcgagatctatcttcatcaacttaccccaaacgctatagctagactcaacgtatacatatgggctctccaaagccaagggaagagtgccaacgctgaaggtttttgctgggtgcatgaactccactaccagactaaggctagagctgacgggctgcataagaacttcggatgttacaactttgcataccgaaaggatactaaggcacatgtgattggctatcgcaccaaatggccgactggctggacagaatggttttacgtaaagaccgacgagaagaagagagagaagcttatgactatggtgatgagtcccctgagaatgagctttggcatgacatggccactgtgcaatatgcaactcgg

SEQ ID NO: 120506 - DNA, 423 bp, Zea Mays
ccaaggactggagccagatgcaagatgcttctgcaatattcacgagatgtcctatcagacgaaggcaaccgggaaggagcaataattttggttgttacatcttcgtgcctcgttctgaggcaaattaccctgtgcccacgtttcagaagaagtggccaggttcttggatgaaagaatggttttacgtgaagaatgacttgagtcagaggaaatatatgaaaggaattgtccaacatccaatatggtctcgcttcaacattagaaggtcatccactgcacttgggaatgatgtgcaagcgtgccaagctgctttcaacaccgtgtgcacctatattggcacaagagacttagttcaagagcatattgcttacaaagtgtggcctcttgcaagagaatggaaaatgccgaaggaagcttccgctg

SEQ ID NO: 120507 - DNA, 590 bp, Zea Mays
gctatctggggattccagcgataatgatagctttgatgtggaaagtggtaacgaggatgccgaagatcggccatggagacgtagtcatgttgtttttggaaagtccagtgttaaacaaggacaaattgaagggatgaagggaaaatattttcatgatatatctattgcgagggctggaggagagagtaccgttcctcttcccgaagcagatgaagtggtggtttttaaaagtttcatgaaggctaggcttcattttccattgcacaagatgctggttgaagtgttaaagacatttgaaatataccttcatcagcttactctcaaagctttaattaaagtgggagtttttatttgggctatgaggagccaagggctagagcagatgataggtgctactgtaatattcatgaattatcttaccagatgaaggtaactggaaaggagcagtaccataacaacttcgggtgctacagctttgtgccccgctctgacacaagatatcccgtgccaacatttcagaagaaatggacgggctcttagatgaaacaatagttttatgtgaagaatgatctgagtgagagggaagatgt

SEQ ID NO: 120508 - DNA, 394 bp, Zea Mays
aatctcgatgccatcttcacacacgttgcagaggggttaatttagcacaactttgtcaatgggggcttcaggttttaagttagggattaaggtgaacgcgctcgagttctaggtgagggctgaaattcagaaatctgaattttcagatttccatagagagcttccacttgcatggccttttgggggattttaaacaattattttggccaaacttttctagtagttattgtagcttaattagtgtatttcaacttttataattggcctaagccatgatttcaagtttttcatggtctttttaccaatttcccccttttcacttaaatgacctagttaaggttattctagggttttggacattttccccactttgagtgcatgatatgattaaggc

SEQ ID NO: 120509 - DNA, 396 bp, Zea Mays
tgacgatatcccggccgacatctctactgcaacaggtcttcatgaccatgacgttgtggcagggactgctccaggtggatgaattttcaacgtctctaccctaactttcaactcgaggacgagctgttttcgtaggcagtgagagatattatgaccggcatcagctataagagacaccgggatcaggattaggaggcttaaagagccaagttatcattagataaggagatagctattagaagctattagataagagttagtaagataagatgagtggagggactataaaacaactatgtacgcctctatttggaatcaagcagaagcaattactattgctcgcttccggaggaagcaaggcgaaccctagctgccaccccttttcctactctcggc

SEQ ID NO: 120510 - DNA, 436 bp, Zea Mays
actagtggctattggtgggggcagccaatggacaactcctttctaatttctcagtgcgaaaacgatcatagcgattgtagtttcttgctgacacgaaattttaggaggtagggttatagttcgagtcccgatcagtttacagtaaggttttctagtcggttacaaggaaatctatcatgtagaatcttttatcttaggcatatcttgatctccaagcttcccttcggttggttgcttgtccagcaaggccaatgatgtaccctgtctcgtttgggcctcatatttgacgtcctcagcccaccgcgtgcttgtagtgggatcatatgtgggcggtgaggtatcctgggtccacatcaccgacacgacttgttaaatacgttaagtaccattgatggttaagatgaagatcaggttattggaaccctaacttgcatgt

SEQ ID NO: 120511 - DNA, 1091 bp, Zea Mays
ttgtcttctggcgggaaattaagatcctagcccaccgccggcacaggttgacccaaaccaaaaaactcaaaagggagctgctgaccatcctccgggaccactggcaccgggtcctcatcttgaggctgacccccagcaaagtttgttggatgatctcacactgcaccgtccacgagtcaccaataaagccatcagcttctgaaaaaacaatgaactgcgggacctcctccagagacgtgacccgcaccctgagcagagtcctgtaaacattgcatctgtcctcttcccacaagatcaatctgccaaaagagccaatagccgcctgcaagtattctgatgaacggtaatccagagggaatcccaacaacataagccagcattcccgattaaagtaaagggttctatgattccaagcgtcattatgtcgctgagcagtgaaggaagcatcgaggtactgttgcgggccgagcagaacaagattatctctttcaagaacgctgctaaactgaaccaaaacctgacccaggtgcgatcgctggatatctcgcaccccaagccgtctgtgctccacaaggtattctctaaccacatccctcaccgccgggaaagtaatctcatggtcaggtaaaggttgaatgttgataatagcccagtcctcatgcaatggcaggaggcgccgagtaactgacctggccataatctcccggtgaaggaccaccgaagcgctgaagcccggcgggagaaagggttcaggatcaacacgcctaaacgccatcggagcaggaaccgaggatcgccaaccatcagacgaagacggagcaggttggggttttggtgaggtgacgcccaaagaaagcgtcagggactgaaggggtgccgattcaaatttttttaatacctcccgggcgaactcctcgaagcaactggatatgggtggtccaccgatcagagacgcaaccggtgtgcgaaaccaggtactgtgatcaggagaattttggtttcccaccaagaaggcccgactcccaaaggcagggaacgaagtcagaggagaaccgaaggaagtattcttgctgggacaaaaaaaaatccaa

SEQ ID NO: 120512 - DNA, 391 bp, Zea Mays
agctcttttcgtagaatcgaagccatttcgtaatcatttgtcagaaacgatttatcttaaagcaaaagttattttcctgtattaaagtgttagtgtcagagctagagccatagaaactaatatttatagtttcttctctgtagtatagaaaacaactctatttttttggcgattttcgtagcaagccgttttaagaaaagctgtttgccagggctagcttttttcagaaaaaagctagagctgaagccctaccaaagaggctccaaatcatcgtgacaacgattaagatatcctaatgccgtgtattatcaatggatcaaacaaacattggtggcttgtcgtgaaggttgccagggctggaagtgcaagtgctgactcggttctagaagag

SEQ ID NO: 120513 - DNA, 375 bp, Zea Mays
cagaggggtcctgacgaacgaaaaatctgaggccccgtgcttataccatttctcacatcttctctttgcatccgaatgatgttgtttgccttttggttaagttcatttgaccataacaggatataccattttagttgtagcatgattagctgtagcaagattgaatttatttgctatcaatctgtatttgctagctgtatttatacaggttgaatctttcagctgtagcatgattagctgtagtaagattgaatttatacaggttgaatctgtatttgctagccatcgtgtggcgataacagattgaccataacaatgaatttatttgctatcaatctgtatttgctagctgtatttatacaggttgaatctgta

SEQ ID NO: 120514 - DNA, 849 bp, Zea Mays
agtcgccacctgggtgtaataaactcgcctagttttcttcatatttttgcccgctggaggactgaccacgtttccctttccttgattcgcattcccagaagtctgttgaaagttggatttattctgcttcagataggggcagtttttgataaaatgtccggacttcccacaataaaagcagccacttgaggaactaggaagggcgaggaaacgagcaccaggggcacttggctgattgttctgagcgtgggcatgagtgggacggatgaacacgggttgcctgaaggaatatgtgggtggacgaggagaagaatgatttgggttgaagggacgaattaccaaccatgtccgcttttcagaccccttagatgatccttcacccgcatatctcttgatttttccttggcccaaattcttggcttcaactgacagtgttgtgcttatagccctactataggtgagatctaggcacgtagccattttgagttggagtcagtcattcaaccccctcatgaagcaatttttcttttttaaatcagtgtccacttgatcgatggcatattgggagaggtgattaaacttgttgagatactgcattatagaatctccctcttgcttcagatgtatgaactcctctagcttcatctatagaaccccttctggaacataatgttccctaaatgactgtttgaactccgcccacgtgaccagatgtcctgctggctgaatggctaaaaaatttgcccaccaagtgctggcaggacctctcaactgttgggcggtgaataggtctttctatgtttcagtacattggatcagcctgaacttttgctccataactcgtaccca

SEQ ID NO: 120515 - DNA, 1169 bp, Zea Mays
cttcggttcaggcactgcaaagcaacacatgagctggggaaaagctgagggcttgatcaaggcatggaggaatggtcaggcatgatgatcctgctagttgaataacaggagcatagcaggactctgtttgtactactaaagaccatggcaagccatccaaggagagcctgtttgttgtggcgagactggaacctagcaggggaaaacaaggggtaatatgtttcacttatcttctgcatgtctactacgcaaggcatgacacagggagatagtactggtgtctaacaacacttggatagcagcaatacagcagcaaacagcccagccagcatttggataagtttaccacctcctcatcacttctatgtgtgtgcatgggtgccaagtaccccccttcagtaacaaatctccttagatgccaaacaccagaagcccctcgagtagatagtggctacagatatttttttctcagatatttctggagcagcactgaactgctactacttgactgcatactctacttcttcccctttgatctcccagttttccatagcaacagtgggagcacacataaaggaatctgtccaccaaacaaccctctaccaacttgtcataaggattatggctttataccccatggattagtcacaaaatagctccaaaaaaattggaaaatcacactagaccaaagctacagttgattcagtcaccgcagactgaaagtccaactttggacagccattacttcacttttggtgtgggatcacgcccaacatacttaaaggcacttattcactaacatatggtcttcaaactttctaccaaaacttaagtccaaaaccttattaattaagcagaacaagctccccaaacagcactcccaacactgatttagaattcagacactatgcaaaatctgaaaaaaaattccagaagtctgacagcccctattttaagcaactattactccactttttatgtagtaccaagccaaccttccctaaaggaacttattcactgatatacactcttcaactttgacacaaggagtatgtctcacaactctatggatcatattcaaaagggtttccaaattgcaccaaaacacacagtttgaggttctggtttttttcactgtctgaattccagaacagcactttgcatttttg

SEQ ID NO: 120516 - DNA, 739 bp, Zea Mays
agaagaggtgcaggaggagttctcatgaaatgtattcattcggcttgtaagtgcaatcaaccctgactgagggttttggtgattaaatgataaaacatacagagtttctaacaagtttgctcctagtatgtatacagttatcctaaagataggaggagcacagattccatatgtacacaaaagggaaagcacatcagattaaaattctacatcatatggcgtgcttcaagtgcttgtgaacaacaacagtttaaattttacaacttttgagtcataggaatcaccgttcaattaagagggatctgcaaaaattaagtaagttattgcgatgtccatcgctttgtcccacagtgccttcataataccacagtcatcctctaagaccttgatatcgcgacgagcaatttcaaactcctgcgaaacaagcttcttcaaggcacacaactctctgatgacagaatctcttgaagatagtaacctattaagtcatgacacttcgttctgagaaaccttcaactcgtctctatggcgatcaagctccaacatagtaaagcgatgactcctcttcaaagtagtaaagcgataactcctctccataagttggggatcattacaaaaggaagaccgactcattatgagtcggccaactgcacccttgatccaacactacattacattactaactaaaaccacattacactactaactaactacattatactactactaaactactacc

SEQ ID NO: 120517 - DNA, 440 bp, Zea Mays
tctaaaggcctagcttcggtttcagcttcaattgttgcagcttcgacttctgcctgctttgcttcagcttcgggttgcgctttcgaagcttcggcaatttttcttggagtagaactcaaagtttttgctgtttctagcacaacatctagcacattggccattcttctcctcttgagagttgcggcagaactcttttgtgctttcggcactgttacctctcatgaagggctcaaaatttctggcatttttatttcttcaatatttgactcttcagccttacccttatcagccttcgtctcagctagcttagctgaaggtagcttcggcattgtggccggctctccagtgttctgcgcaggcggaacagtttcttttgtttcgacagccgaagaggccccttcgccaaattcaggaatcacggctggttcgatataacgcgg

SEQ ID NO: 120518 - DNA, 681 bp, Zea Mays
aaggtcataaacagaggttgccatgcctttcatctagcaacagtatttgatgacagtgaggtccccctggacaaaggtcctaaagacgggtcaagccggagagcattagccttgcaattgctaaggaactactcctcagtggcaatccagacctgaagatcagtgccatcacactcgtggacgacgtccaccagctcaatagtgaccaatccaaggatctaagagattactacactatccatctaacactaggagaggagagtaagagacagtgtgccaatgaaaacatggacaacatagcgttgtagcgtgaggacgaggctacgttagcgggtataagaggaccccggttcaaggacggagattagggagcaaatgttccaaataccctacacctacacgtgaaggttggtgatgacgacagcctcatatactaaggggtgtcgaccatcgggtatgccgagggagtcaatgtcgaaacagccaaacagatggcgcttaacctcgacaagttgcctagcaagggtatcgacaacaacacattcatactcttaggcattgcgacgacacgttcatgctcctaagcaacatccacaatcgtcttggtagctcagtagtgtgggtttcctgaggcaaaagatgcctaggcctatggcagccaaacctaaaccgacaatgtcg

SEQ ID NO: 120519 - DNA, 607 bp, Zea Mays
gtacaaggttgagagcctagccaagctctcaagtcacccttacagacaaggaggaagccccctagggagatccctaactcattcttacagaagcggtttcacccctatagagagagaagatccttattaacactccccacattaattgttcatatgacgttgaatcgtcgatattctatgtatagactgaaggattagcatgatgttttcatgcattggctatattattgaaggttggagtatctagtgtatgctaacaatctccagttcagtatgtgtctgaaagccatgtccatatgttcactatctggattattagtttatggactcaagaagtaaaaggttgccccccctatattttcattgttgttttccagtacctgtagctgactacagtatgctctgctgatgttgtgttccctgtgccgtgtagaacacaccacaattacatagattctgttatatattagggtttgtacaacaacaacataaatgttttgatcaagactttgtgtccatcaatctgcctgactaacatcgtaatgggagtagttagtttgttcagcttaaacgtactttggataataatatgacgaacaaattgtaa

SEQ ID NO: 120520 - DNA, 468 bp, Zea Mays
cgaaggcctcctcatgccgaagtgtgatcgtatggggcgctagattatgccctttacgtcctccctcttactcagatcatttttaacataaaaccattgcttcatccatgggcccgacaatttttttccgaaacgtcggcacatgacgcctcacatcagaccggtacataaagttatagcatccaaagttgttatgatactgctctttcccaactgccttcatctggtaggacaattcgtgaatgttgcagaagcagttggcatctggctccagcccttggctcctcatagcccaaataaaaattccaactttaatcaaagcttcaggagtaacctgatgaaggtatatctcaaatgtctttagcacttcgaccaacatcttatgcaagggaaaacaatgcccatccttcataaaacttttaaataccaccactgcgtcagcttcaggaagaggaacagtactctctc

SEQ ID NO: 120521 - DNA, 439 bp, Zea Mays
atcaccaagcgctgcatcgcctcctctcgttgcaagagcacccccacccgaggatgttgtgcatgctagaatcaagtttggtagctatgagcagacataagggggtcacaactacttctctatgcgataatacaccctagggaatgctcaaaatacctcccccagagggtggtcgccacaaccctagatcactcatgaagaaagtgagggggcaacatgcccgccactctacacaaccatcaccaatcaccataggccacacgtctgcaattgggacgttatcataggcaacacttgcgagcaccatggtttatcgagggacaacaacgaccataataataactccaatgatggcagagctccaatttgacaactctagaaacattccccattcaaagagatacaaaaatagcaagacaaccacacgcaaggaactaaa

SEQ ID NO: 120522 - DNA, 502 bp, Zea Mays
cttccctaatttcatcaacaatcgaaagtacaaacaatgtgtgctaaaacaatactcacaacgatagtgggagacccgacattttgtagccttgcattgattctccatggacaatcacctcctttgcaataacctcgatatctccaaggtgagcttgactcaattcctaactcaaactcattattaatcgcatactgcctcatagccagtctgaattctttcatatccttgtacaaactaccaatgttcattatcggattagatcggttgcaaacaaatacccgttcttgtggtacgcaatcagtacagggcaatgcagctgtttcatcatcaaattcatcgcttcggcggacaccagatggtctactggtaaaagcatcttgcctttgagtagtttcacgttcatcttctgctagcaatcctaaccgatcaaacatcactgactcagaggcaatatcttgttctccttcttcttcccatctatcatcaatctgtattgccc

SEQ ID NO: 120523 - DNA, 796 bp, Zea Mays
taggggtgttacagagatcgccgttcaccgcgagtgtgccatgtcgtagtcgattcaccacatcgtcgcaagctgtaaggactcggtagtgaccgccgtagatagttagcctgtgagcgccacgttgcggcctctggtgactcctcccccttctcaccgtgagcgcttccccgttcaaatttgccctcctcgcagctgtcctctataaatcgatgcctcggcctatttgtctacttgttacgaagccagagcaccagccctcgcctccgatcatccacagtagcaccccaatttcgttttcccccaaatctactctccgcgccaccgcgagtcacctcgtcgtggtcggccgtctacaggtcttctctcgccctcctggtttgtgttttagtactctagtatgcttgtgatactcggcgaccccgccaattaaactataccccgcctagtcgtcgggaacacctctattttccctcggatcttgatgtcgtcgtgagcagaagaactccgggccggactcgtgcaattgagggatagatttggatccccaggggtggaattaggtgtagaccgagttagtacactggtcattgcgtattccggccggtgcaggttcgccggagcgcgcatgccgccgttcactatcagggacttggagttgtgaagagaaagaagtgtgagggtttaagtgtgaatgtcagtgagacacgtgaatagtgacgtggcttctttgctggtttttcaaatcggcaggggtctctacgcaaaaccaccgtcgcgggcgcgggtttccccg

SEQ ID NO: 120524 - DNA, 297 bp, Zea Mays
atcaaactatggcgtaagaccaaagtgggagacacgagattacaacttgcaatttccaaagaattaatcctccgattcaaaactgctcaagaggagcgtgtgctcacccaagaggaactggatctcctgaaggcactcaaagccagagcactgggacttgctgtaattgaaaaatcgaggatccatcaacgagctcgcctcactcgcattaggttgggcgacgcgaacactaagttctttcacctatttgctagctccagagcgcgtaagaacttcatccattgtctgcagccccca

SEQ ID NO: 120525 - DNA, 436 bp, Zea Mays
gttatagagaggctaccactcatatccagctctggctacttggtgccctgatctctcattcagagtttgatgttgttgacttccttatatgtgagatcgaggacacggtattggatggtcttcgtgcccgacgacagctgccatatgcacattatctctgttacattttcgcacaggtgatccagccaccgcagttccagggcactcttgaggcctctcgcctccactttggctcctatcgtcccgcccctgaggacctagtgccggtacctgatccagtgattgacactcaggcaaaggatgcgacttaccatcagttcgagactcaaggcacagcggtccctgatgatgatgatgattttgggattccgcctctgcctcctgtgcctccacgctcccatgatcatggggccaggagttcccatgctgcccctgc

SEQ ID NO: 120526 - DNA, 626 bp, Zea Mays
acgtcgctcagacgggagcagattctgacagataacgagtatactgatggatagggaatagcaattatgtcaaaaagatccgcatcacatgcaattagaatcccacctggcgctccaagagatggtaaatgaatcgtttgagcagctaacttgtaacccagtgtttcctttagaaggttattattccaactcattatctttgtctcttgaagacagacaatagttgccccagaagagagaatcgtatgtttcacacttgcccttttagctgggtcatttagccccctcacattccatgacagaatacaacagttggcattcattaatcaaaagtagttcccctacataaccaagtagagccacacaagaggaacactgatgaagaaacaggacctgaccagacaaccagcgtcagcagcacgctaccagctgggaacaacatgcaacccacgtctgaaataacgacagactgaaacaccgacagagcaagccaaatgaaaaaacaccgctgacaatcccacaaccttctacccaaagcagtcatcaaaagcagttgggagacccacagactattacacatgcgagataacattctgcaccagaccgacccacacaattcctaaaac

SEQ ID NO: 120527 - DNA, 766 bp, Zea Mays
gcacggtcacacccattgggatcagtttctgcacggttacacccattggggtcagcttcaataaggtcacacccattgggttcagctggtgcaaggttacacccattggggtcagcttcaataaggttacacacattggggtcagctggcgcgcggtcacacccattggggtcagcttcaacaggtacaccaccattgggatcaacctcagtaaggatctctgctggtacttcttcacaaacaggagtagaagggccggtgtcttgatccaagcatgacagtcgtcgaagttgcctctttttcttctttttctcctcaacaggcgcagttgggcgactaactgggcgaggacactttgggcaaataccctcaggctttcgggtgtccactgttttgttaagctcttgtacaaccgcaacagccattggttcaacccgagccgagtcagaagattctccagccaacatattgagtacaacatctatttcttcatcatccagacttgccgacactgaaaagtgaacttgcctctcatcattgggaagatcacaaagagaagcaaccagagacccaatgtcttcaggagagggtcgcactctaagacccagaccactatcaccagcaggagggttggacacgaaattgaaaaaggacttaggaggtggcagattccaagcatagtaggcaacaggagcaccaacatttgatactttgccccttaagatcatgtctagacggctcaccagatccttagtaggaattttcc

SEQ ID NO: 120528 - DNA, 1036 bp, Zea Mays
gataatagtagtccgggtacacaaacccgataacatcgaacactctatttaatctctttttgccatgagccccgaaggcagttgtcatggcttcatcttcggcctttgaatatgctccaagcagcttgtcactagtcgcttctatggcatttcgccagtcatcattcggatcatcaaattggctcctatacctaaaggtatactttaggtagactaaaccaccttggctagagccactagcagtctccttcggcatttctgacccatttgcaagtgaccacactctgtaagcaatgtgctcctagaccagatctcttgtgcctatgtaagtacacactgtattgaaagccacctggcatgtttgtatatcattcccaaaagcactggtttgcctcctaatgctgaagcgagaccatatagggcgttgaataatccctctcacatcctccctttgactttggtcattcttcacgtaaaaccattccagcatccaggagcccggccacctcttccgaaatgtgggaactgggtagctcgcctcaaaccgaggcacgaaactgtaacaaccaaagttgttgtgatactgctcctttccggtagccttcatctcataagacaactaatggatgtcgcaaaaccatctggcatctggttccagtccttggctcctcatggcccatacaaagatccccactttaatgatagcttcgggagtaagttgatgaaggtaaatttcaaaggttttcagaacttcgaccaacaatttttctagggggaaccgaggcctggctttcatgaagcttctgaaaaccaccactttgtcagcttcaggaagaagaacattattctcccctccggctctcacaattgaaatatcacaaaagtatctccctctcattgcttcgatctgcccttgtttaatagtcgattttccaaagacaacatggcttggtctctagggccgatcttcggcatcttcatttccactttctacatcgaaactctcactatcgctggagttttcagatattccagc

SEQ ID NO: 120529 - DNA, 987 bp, Zea Mays
ctattcttgttgtggcatgtgatgaatcagatcctctatatccttgtttgcagcaaactatctatttggaatacacagttttatcagctcgacgctttgtatcatgctttcttatactgaacccaacctgaccagcatatgtgttatacatgtcataagcattcttttcagagtcaaaagacatcccaatttgaggaacgatcagagttggttcagcatcatctaccacctattaaaatgcgttcagaataaaagttctattacaatacaaaagaattgttatgcatagttctattacctctgtatcttcaggtattgatatgtcattagcctgatcttttgcactagtagtcatcgaagttgctttacgtgtctgctcttcctgaacaagtattatattttttgcgtagaccataaatgaccaaactacaggtgaaacagatgtgatatcaaataaataattgattctacatgtgtgttctgctgtctgtcgcctccatgatccccaagaatagcagaattgtcatcagtaaaagggagcacaaacttatttgccatgccttcatgttcatccatgtctttgtatctttttcgtggtgattagaggcgtcaacgatactcaaagaatatacaatgaaagagaatttttgtggagataaagatgttaacaagacctcaccaaaatataggacggtccggtcagcggcggcgacggtgacggttacttcctttctttacccttccgtgaattatatgggctctttccttttcttaaccttccgtgacctgtataaatcgattcagctcagctcctattgttactaaagccgagcaagaggccgagcgagctgactgtacgaagccgagcccgagataaaggccactgaagctaggctagaggctgatgctgatggcgtgggcccgcacgcattgtttgtctggggctgtaataccttcgttctacgtccggtctgtactgaatttttt

SEQ ID NO: 120530 - DNA, 562 bp, Zea Mays
agtggacggccggagcgtccggtgacttgctacggcagcggtggatgattcacggtgaggacacatggtgtccgtggctagagcggtaattcgatcatcgaatccgagctagagatctttttaccacgcattgatccaggtctcggcggcaccaatcgtggcgcgagctcaaatcacgatggcgggacatcagcggcgagcacacgacacttaggatcttcttcagtgtattgtaccatggcgatgtcaattccgcgcgcttgacagagtgatttgaagatcatttctcttcggctttcgttcaacaacctatcaggctgaccacagcaaagttgttgtccatcatattagctttaattttgttataaggttcttgctcatacctccactcgatcaagcacaattcagctctaaagttgatctaacgccactgttagtctaaccttaggccaacatccgacggacagcccaacttctaggccattttactctaatttctgtaaagctctaggacttaaacacttaatcaaacttggactactttaatagctctacaaatttg

SEQ ID NO: 120531 - DNA, 530 bp, Zea Mays
tgcttggtttgagcgattcatctctgtcatcacagctgctggtttttcttctagtgaacatgatcctgcattgtttgttcatgtctctccaaaaggtcgcactttacttctattatatgtggatgatatgctgattacaggtgacaactcagaacatatttctcatgtcaagcagcatcttagtaaggaatttcagatgtatgatttgggtccacttaactatttcttgggcattgaagttcagcagactctaaaaagtttttatctgtctcagtccaagtatatacaagatcttcttgatcgctctggaattactgatacacgcacagttgcaacaccaatagatattcatttaaaacttcgttcgaaggatgtgacaccactagcagaccccactcgatatcgtcaaattgtgggtagtcttgtttatttcaccatcaccagacctgatattgctcatgttgttcatatgttgaaccaatttgtatccacaccaacctcagttcattatggtcatttgctttgtgtgc

SEQ ID NO: 120532 - DNA, 411 bp, Zea Mays
caccacgtcgtgggcaatgaaataggttatgatcattcaagccctttactatcttaggtcggactgtggctagttgggatgatccaccttctctagtgtttcctcgacaactccctagggtgtctagtctagcaacacctcaatgggtccacgtggcactactaccattattcccactcctgtgtatgatccttttggtgcgcataacactgaaggagcctcattgaggacaccatggatgataggagattgatgtcctttgatgtgtgccactctcctagccataatacaaagctctatataggcaacctctagcctcaatggtccatctcagtagtggacatcatgatggccatgacattgactcaactttgtatcgttgtccctatcaaacctctcgatgttgtagag

SEQ ID NO: 120533 - DNA, 447 bp, Zea Mays
atgtaatcaatgctctcttttaaagcttcgggagcaggagtggcaaccttttcaaacgaaatttgctctgtggctttttcttctgttgcctttcattcaaattccgcaggttttgtgtcagcaggcactgagggccccgccttggttttagcctgggttgttgtagcttcaacatctatttgcttagtatcagctttgggttgcgttttgttagcttcggcaaccttccctttgggagtgagacttgtggagtcggttgtctccagtacatctaatacatttaccatcctccttctcctaggagttatggcagaactcttttgtgacctcagtgttgttgcttctgttgaaagacttaaagtctctgccatctttgttacctcttcagttgttgacctttcagccttatctttgtcaacctttgtttcaactagctcaaccgaaggt

SEQ ID NO: 120534 - DNA, 404 bp, Zea Mays
taaatggctatttgcaaggaattacctaaactcgccaacgacgtcttcattcctgatttcaattgtaaccatcttatttgcatcctttttgatcggtgactgttggaactcactgacacgtggccgagcgaatccaaacagtgagagaacggaaatgctttgatgcttaacaacacattggattagggcaacagtgtttttcagcatccccatcagggtacagtgcgggggtattttaggtaaccaggggacggtctcaccttggtaaatacaattatgcccctgattaccaacattattcctagaatattcccccctcgagggttattacaggtcattacaatgtgattaagtacaacatggatggacacaccattaatcctacctacgatgtgacttacaag

SEQ ID NO: 120535 - DNA, 867 bp, Zea Mays
aaaaaaatctgaaacttggtgtgttatcttcttatgtgctgctgcaaaatagaaaaatataaaaaaacatttgaaaaagaaatcgcaaaaaaagaagggtagcacataaccagaaacgccagtgttctgtacacggtgattattttgccccaagcatgttttcttgctacacccatatacttgtatctcctttcttatgccttgatccaactgttctattacattttctaggccagcaactaggacgagtacttggaacacttattcaacattgctatctgttactgacttgtgtgccacatatatatatttagtcagccttcccagaactccagctttctctcgagcagaacaggtactcctttgcaatcacacccacactcgttggacagtcacaccggtcatcatttgtcacctgcagtgctggtaagaacgttgtaagagcggagtaagacgcttcataatttgtattccaccaccaccaccaccaccctgagagatagttgtagggttcacattgtttgttgcctttttgtctctgttttgtgctaacaatgacaggaccaaagaatcaaatggacaaggacaaggggcttaagcttaacgacgatgagtgtgtctctcggctagaattgaaggagatgatacgtgcgatgactgaagcttttaaaaaataccaggactctgtggcgacatcctatgagcagcttgatcgacgagttgctgaacttgttacatgcatggacgtactggaggctcgtcccccccaccaactccagccccagctcactctcctgtggacgacgacgacgatgacgacgatgtttatgcaccgctgcgacaacgcctcacacgtaatcgacaagg

SEQ ID NO: 120536 - DNA, 671 bp, Zea Mays
aactcttctagtttcatttgtaacaccccctccggaacataatgttcccggaatgccagcttgaattcttcccaagtgacttgatgtccaacaggctggatcgtggaaaaatgcgcccaccaggtactagcaggccctcttaactgttgagccacaaacaggggcttttgcgtctccgtgcatcggattagcccaaacttctgttccattactcgcacccattcgtcagcttctaagggttcctctgccttgacgaagagcggtggtcgagttttagagaactatagataggtagtatctcgtggtacctgaggaggaactcttccttcgtgttgtttaaattagttgcccgccattttgcgcagaaagcgcgtgttgtcggcagtgccgttgaccaaggtagcgatagcctcggccaaggtaggaggtacgggtggtggattgggagtgtcctccccgccgcgggatgtacctgccccatcatgtgcacgggtccgggatggcatctgaggcaaagaaacatttgaaaaatataacatgccaacatacaccatttttatttcattgaggaacagtaataattatacatactcaacttttcttacttattttacataagtacaatacttagactatactactctagtcttcttcatccttagttgttccgc

SEQ ID NO: 120537 - DNA, 483 bp, Zea Mays
tgcccagcgaataggtatccatcgttctcatcatcatcctcatcctcttcgaatatgacaccctcatcatcatcacctgaatcatgaaaatatgagccacgtaaaagacaagggcatctagggtggggaaaatgtaatgtgaacaaagatttttaacaagtaccattggaaatgaactttggcttcgtttgtgtatggtccactccttgttcaaccatacctgcactcacacgtttagtcggactacatgctatcatcgtcgtgcaatattcatttaaaattggtagtaattaccattgttgtggatctctgcattcagatggggttgtgtccaatcgtcttcttccatagcgtcacaaatagtatcctcggtcactgtagccacgttccttgcaatgccggcttcaaattgttggtttcgacggcctaaggtagctggtcgtgtctcagatagcacatgatgtctacgtcttagtggctcag

SEQ ID NO: 120538 - DNA, 633 bp, Zea Mays
agaacgttgcgagggtgacacgcgacttgaggcggtcgtcgctgagatggagcggtagctgcaactgctccatgagaagaaggcagctgaggcttgccggttgaaaatggaggacgaggtgaaggtaaagttggaggaacaagaggtcatgagtgctatggaggcagcgatggatttgagggtgtagattttggagtcagagctagctgctgccctatctaggatgagggaaccgaaggctagggtattggctaggagagagagtctcatttggtgaataaagaaaacgataagagccaatcacaagtcttggcagccaacaacaaataaagctcgtctcttgcagatgttcaaaatctcagggttgaattgagcacattggtgaaggagtagctaaggcatttgatgctgaaatggctaggatcaatagtcaattggagaatctaaagaataaggttgagaaaatctatgctgacaaggaaacaactgagggttccactagtgagaaggatggtgacatcaggaagctgaagccagtctactttgcaattgaagatagggaatgccacaattgtttaaaaaaggggcacttgagttacaattgtcccaatcctgttgtgcaaatcaccaatt

SEQ ID NO: 120539 - DNA, 425 bp, Zea Mays
ttctgtctcggctgtgctgtcttcaaattctctctgataatctgtacttgcttttctgcttcttggagaatttctggaccaaatacttgactttctccggtctgattccaataaagcggtgttctacacttttgtccataaagtgcttcaaatggtgccattttcagacttgcctggtaactattgttatacgagatttctgcataaggcaaacttttatcccaacttctaccatgctttagagcgcaagctcttagcatatcttccaacacttggtttgttctttccgttttcccatctgtttgcggatggtatccatggactcatgtagtattttccaaaagcgcgaggtaaattgggttcctcgatccgatacgatcttctttggtactccatgcagacaaacaattcttgacatgtataac

SEQ ID NO: 120540 - DNA, 920 bp, Zea Mays
ggagttttgagacttggagttgttgcaagcaatgaatatgactttggtgtagctcttgtatgtcttgaaagctagttagggtgtatttataactctaaccaccccacataggcgttggagagaactcagcgaaatcaacctaacaaatcaattcttagggcaccacttagttgaaagttgagacaaagaaacatatactgttggtcatggccgtgtgctccactgttgcagtcagatcatcgttgcaagagaactcaaaggctacagttggatctgattcgacaccggcaattggaggacgatatgctcccgcttcttgagggatcgcgccaccgaagtacaagatctctcgcatcagcttgctgtcacgaggcacttgcatgtcaagtctggacggtccattctgccgccactgcctctacttcctctaccaccaccgtcgccactgattcctctcccaccgacgccacctctgcttcctctcccaccaacgctgctctccactccaccgccaataagagcacgtagtcgaataaacgcaggaaacaactacgaagcgcgggaacgaatagaccggggaggaaatcttgtcacggaaaattgcgggatgctaggactcaaatacgggacgcgtgaatatttgggagaagataggaaaactgttggatgtggtatttctgatttctatggctaaaacgagttttggggtatgtttatgtcgctttttagacttgctctaagatagataagtctagtggagaaaaccaacgtggcacaagacggtccccacacaaccacctcggcccgacgcttctaacgacctctgtcctcctctagtgacctttgtcctccgttcaaagtactctcacaaacactggcggaagactcttatggcaaggtatgacaaatgtcatattttg

SEQ ID NO: 120541 - DNA, 971 bp, Zea Mays
tagaagtagggaaaaggggaggttacaaagctgctggaaagagtttggtattcaaggaggccggcagtagcacgccatctaaggtagctgctgcgccccggcctcgattcaaacggctatcaccggaagaactagcagcgaagcgtgcaaagggggaatgctatcactgcacagagaagtactcagtggaccacaaatgtgctgctcgaggggttttcttgctggaattagaagatgacactggagaagaggaggcagtgactgagctgggcatatcattgcacgccctgacaggaattgatgtgggggagactatgaagcttatagttctaatcaaaggagtgccactcacagccctggtagacaccggttccacacacacattcatcacagaagcaaaggtgtctgagctgcagcttccactggaaaggcgccaaggagcagtaagggtcgccaatggggacaaggtcaccagcccaggattctgcacaggattattcgtacaaattgctgaagagcggtttgccctgacttgctatgctctaccactagaaggctttgatgtggtgttgggagtccagtggttgcgttccttaggcccgatcctatgggacttcgaacgtctatcaatgacgttctggaaacaaggacgcaaggtgtgctggacagggatgggtagctcaaaaccccgctgttgtgtagtttcagagggcaaggaattattggacaacttgctgcaatcatacgaagatctgtttgaagaacctcgtggcctaccaccagcccgacgccatgatcaccacatcagactactacccggcacagcgccaatagcagtgcggccataccgctacccccagctcttaaaggatgagatcgagaagcaatgtgaggacatgttgcagcaaggaattataagggaatgcacctccgcattctcttccccagtgctgctagtaaagaaatcagat

SEQ ID NO: 120542 - DNA, 361 bp, Zea Mays
catacccagattcaaacagcgatatcttttaaaatataattccaaatcaagcgcataagcacttgttggaaagataacataaagccctacatgattctcatactgattaacactaattactcccgaaaaatccccagaaactgctaatactgctgctgttcatccccctgaaaatctgttttttggacagccacatacccggattcaaacggtgataactttcaatttataactccaaattgagcgcataaatactcgttggaaaggtaaggtaaagttctacatgatccccaaactgatttcccttaattcctcacgaaaaaaacacagaaactgctagactactgctgttcacccacca

SEQ ID NO: 120543 - DNA, 723 bp, Zea Mays
gctgtggtcactgactttgttttcaagaacattcagccactgaaggacagggcctatctggcatatctgtatcgagggctagccgattcaactcgggttaccaataggagaattccttctgtagacttggtaagccgacttgaaatgatcctcaggggtaagatttcaaatgttggtgctccagtggcatactcggtctggaacctacctcctcccaaagctttcaccctttttgtgtcaaatccgcctgtgactgatggcaatttgggccttagagtgcgaccctctgctgaagaggtcagtactttggttgcttcgcttggggagattcccgatgatgaacggcaggtttattttgaagtgcccctgaaccctagtgatgcagacataaatgacatgcttgatctgttagctgaggattcatccgacgctgctcctgttggtacgttggcagtggtgccccttccagaggttgatacaactttggatgtcccgaaacctgtcattactcgcccgaggcgccctagccgaaccagtcagcctgagccttctgctgatgagcaaaagaaaaagagaagacgcctccggcgagtatccagctttgatgaggacgccggtaacttagtccttgctgctgaagatgtgcctgcaaccggccttactgacgctgaccccaatgggtgtacccaaactgttgctgatcccaatgtgggtgctccatct

SEQ ID NO: 120544 - DNA, 369 bp, Zea Mays
aaaaaataaaaattaaagattgtggcatcttccccaaggttaagttggataatgaagcacctcaatctttcagtgatgataaaagaaagttgccgtggccagaattgagttcctcaaaccactcagtatcacgatgtaatcagaaggtaaagactgaatgtcttagtcagaggattccagacattgatggtgtggcggtaaaccaaaaagttgtgggtatgtgttatacatcgccagaagtatcgaagatctctgttctagtaaagaaagaaaactcttcatcacctgaaagtttttcaacggtctgtccactgcatccgtgcaaaattcgatctgattccgaaggtgtagccaatactggagcaaatt

SEQ ID NO: 120545 - DNA, 376 bp, Zea Mays
gttggtcaacagatatagcatgatatggtgccactcttcatgtcctttcgaagtgagggagtaccttctaaattaaattgcacttgcaggttatgttgaccactttgttataggtgtattctgagggtggtctctttgagaaggctaagggattgctaactgaattgtaagcctcatgctttgtttagaaatgaggtaaaacatgtgttctcacacacagaagtacttattgtgcatacttgcgtggagaacaaatcgataggtagaggtaggactgctagcgcctctgatatttctttgttctttatctctacacctattaagtcaattgctttatcctcttatgttgaaaaatattcttgaacctataaaattt

SEQ ID NO: 120546 - DNA, 621 bp, Zea Mays
gcgggaagctgcccgggatgaccccaacccggcgtcgagcacatcaacacaaacatccatcgcgccaccacctgtcagttctgataacagatcttctggaaccatgtcttcaagagtttgatcaaagttcgccagagataattcttgcagaccaatgagggcagacaaggcaggagaagggacaccactactttccccactagctatgtaacgccggctgttcttccgaatcagagggatttcgtcctcttcttcatcatcctcatcaacaacacggacaacacaccccattggggtcagcgtcaaacgggtcacacccattgggatcagcttcagtaaattcaggcacgggcacttcctcagcaacaggagtagaaggaccggcaccctgatctaagctagacacccgacgaagacgtctcttcttctttttctccccctcagcaggaaaagaggcttgattgactcggcaagggcgcttcgggtaaacattgacagacttctgagcgtccaaagctttgtcagcctcagggatgggtaccaccaccaatgtttcagcaggagcggcatcagaagaatcctcagctaacatatcaagcatgacacttatctctgcatcac

SEQ ID NO: 120547 - DNA, 410 bp, Zea Mays
gccaaatcacgttattttgctaattaaattattggcattattcgtattcattctcagatggttactatatagtatatacctattgcttcttaatggatggaatgttttatgaatgctttacatgatgtgttgaaactggctgtgcaatttaattacccaataggtatgcttattcctttacaactttgtacatggtcttttgcttgtgtgtttactccagttgttttagcattcgcattagtaactatatttcggtgtgtgctaatttgcctttgcaatgttgtgaaacggtgcctgatgtcaatagacacattttcaaatgatgatctcattcattcacatgcaactagagatagatttggtcaattaaccatgtctctgatgggacatatccattcattcaactgttc

SEQ ID NO: 120548 - DNA, 450 bp, Zea Mays
taattagtcttttcatctcatcatggatttcttgttgcaatatgatgtagatgtacacatatgcgcttataatcctctgctaaatggcggatcatctggcagctaggatatagccccatgacgcaacatgtgcgctatgtggatagactttacagtcggggttgcacctgttcatggaatgtcttttctccaagcttgtctggagagaggtagctcacggggcagtaatccaagggcttaggccaagcgtctagggccaccatgactcggtcctttagtggtggtcattcttagcaatgattccatcttgtagtaggaatggtttgcggtcccttctaatccttgttaattggtccctatggagggaaaggggtgcgaggagacctccacctaaatgttggcagggactagacatttagctgcctccgcctagatgttggcagggactag

SEQ ID NO: 120549 - DNA, 616 bp, Zea Mays
tttcaatgctcctttgcagcttaaatggcttatttctactcttatgcaatctcagatttacttatccttaatttcttcagtttgattaacaaagctgtttgatgtgtattatcttatgtttttctttctaattcaaagggttaagttagtttagttgccttttagcatattcatcttaatttgcctttgtattgtttaatcaaacaatagtaaatttaatgccatccagatcttaaaaatttcaaacacaccggttgcattatacctattcacttcatgaggcttagttttattgtagttctttacatgtttgtacttttaggtatgattcattcttttttggtaataagtaggatatgaagcatacgttttaatatatttgtgtgggtatggctttgtttgactgaaacaaactgatgtccaaatttgcttatgtcaatgtttattataaaaactcgacctgcggagggtaagactgccccacggcattacaattaagaagacttcatgcagatcgagaaaaccccaaacctccgtcccaccatatacaacggtaccgtagcccatgtgagaacggtcgcggccagggctagaccttagacttgtgcgttggcgt

SEQ ID NO: 120550 - DNA, 2936 bp, Zea Mays
gcgatttagaacaaacacacaccggagacaacccaacctaaaagccccagcaaacacacgtcctttccctcttctggcatgcggtaaagattcctaaactgcaaggaaggccacggaatgataacttacccaacttcttaagtacgtaaaaaagagatccttctccttcatgaccaatcagatggctaatgtacttgcaagggccttctttgtaacaacggatattgggagtgattggaaataagattctcaaagtgtgcccttgtttaatgggaactgctttgacaaggacctgcaagggaacaacttgcataaacaagtgcacaagcatctgtagctgcaagtctcctttgtaaactcatatcctgtaaatagcaaacctggagatgttcaggtgtacatggatgaccaggaaatgaaaatggcttcctcccaacatctctaatatcgcaaaacttattttcaacaaggttctgcaggttatcaaggctatctgcaaaatacaaaagatatgagaagcaaaacaaccaaaaaaaagttttaacagcatataacttgtaaggaaatacagaacagtttgatggagaaccttttccatacacaacgagttgcatcaagttagctgagtagtgtgaatcataaaatttaataagctcaagccttgtgtccaatcctttctcctttgctttaacttcaagtgtgttccaatttcctaatcaataagaattctgaatatcagttctaaggaattgtccaatatttcaagcaagcagtgagaatcagttccaagaaattgtccattatttcaagcaagcagtgaaaataagttctaaagatttccaatatttcaagcaagcagtgaagcatatatcataaaagaactctttattacattgaaacatcatttattgttgaagcaaagagatatcatgtcaaaatgaaatttaataagctcaagccttgtgtccaattttatttctatcactatcaaaaactgaaataaaaggtttctgtaaacaaccagtatgaatgctaaaataaagagatgtcatgtcattcaaagaaatataaaattagataggaaatgagcagtgtattctaaatgtcattaatcgtatgtaatgtaagaacagaaaggaaagggaaaaaatgttcagaaaacaaccagtgctaaacttatgataaggatgattctctgcacaaagatgcttctgaagctgaaaacaagaaagaacagatacaaataaaatcagatctctataattaacttgtctgattatttaacatgagcttggaaaatgcaagtacctgactcattcgccaaggatctgacaagaggtttttctgattttctaaaaatgaaaaatggaagttagaaaattaaagtgtcattccagtaacagcaacagaaaaaacaaaaagatatcacataccagagtcaacagcttttatttccctaagtgtagcatctggggacatcaatggcttgataaaaaattgggcaaacctaagattagatggcacaagcataagtgaaatttctcacaaggaaaataaggttaaaaaataaagaatgcaacaggacgtacctatctaaagcatcgtgcaggctatcactgttcacatcaaaatagaagtttgtgtgttcagaagatgtgaaagcattcgttgaaccaccatgctacaagaaaacacccattatccaagcactttaccataagcaacacatagcgacataaatttagtgtagaataaaatgcatgggtagtccctaaacttgtcctagggtaccaaccagatccccgaactctaaaaaggtatttttagagtccctcaaaatatcattgccaggttccaaacttatcatatggtgtcatccaggtccaaacaaaggtggtcccacatgtaagcctctaccgtccacctccatgctcacacatctctttccctcttcctctctccacactccaagcggcactgcatccccatccaaacttctgccttcatcatcatccacatcgaaggtcacaacatccacagtagtgaaggtggctaggccgaacacctaggcggatggctgctttgctagtgagttctcaccgcagtcaataatgaggtgtggaccaaacctccatggcatacaactcagggcatggagatgatcagggcccatttggacctagacaacatactatggcaagttaggtgacctagatgacactcatgacaccacgagacaagtccgacctaacaatggcatgttaagagcttgggcccttatattggcatgatatattatcatcttttggtcttaataatatcagtcctaagagaagggatacttgttttgtggactggtggaggaaagctcctcacagggtccataaaaacaagagaaaggggttcagtagtattatcattcttggagcctggaacatttggaggcatagaaataagtgtgtttttgaggggaagcatcctcgcttttcttctctggaaggaggatatagggatgagctccatctatggcgcttggcaggggctaaatacttaagagccatgtttgatcctggttagatttgaggatctctcttcttctgcaccgcttgtgtgcgtctgcggtgtgctggtggcctggagtgtgtgcaggcctagtatcttttgggtgtgtgtgtgtgtgtttgcgggtgtgtgtgttggttttcctttttgtatgattctggccatgtgcctttttttcttctcctattaatacaaagatatgcagctctcctacgtattcgagaagaaaaaaagagcttgggccctagaagacactcaaggacaagtttaggaacctaaaaataaacttatgggtgttcagggacctaaatgaaacccaggacaagttcaaggactgctcatgtattttacttttgagtgtatgaaatctgcaa

SEQ ID NO: 120551 - DNA, 3488 bp, Zea Mays
cgaaatgacaatttagtgttcaatctgctccccatcgaactctgacaaattggctgcagtttcaaaaatacacgttgtcccacttgaaacaccctttcagatcttcctttgtcagcttgttttttcatccgatcttgagccctttgaagatgtaacttggcccgttggagcataagttgtcttgttgccagatatgtttgcagatcagcactttgacattgttcaatagttgacagtcctaactgggatggagtgtggccatacaaaacctcaaacggggactgacccagtgcagtgtgaaaacaagtattataccaaaactctgcaagagatagccaattggaccactgtttagggcagccatggacaaagcatcgaagataagcttccacacattggttgacccattcagtttggccatcggattgggggtgatatgcgctactgaggcataattttgtgcccaccaacttaaacaattcctgccacaagttactggtgaatattggatccctgtcagagatgatagacaatggtaggccatggagtttgtagacctgtgataggaacagcttggccacagatagagcagtaaaaggatgggacatggctaggaagtgagcatattttgaaaatttatctactaccaccaatatgcagttgaagcgtcgggatgtaggtaatccagaaataaaatccaagctaataacttgccaagcctgatccggtatgggtaatggcaatagcagaccggggtatctatttctgtcggccttggcctttgtgcaaatctcacaagactgcacgaactccttgatctgtcctttcatgccagcccagtaaaacagcttcttgatgcgatgataggttaccgggaacccagaatgacctcctataggactgtcatgaagggcagtcatcacctttaattgcacttggttactgctacccagccaaatccttcctttatgcttgatcactcctgataccaaagtgaatggctctattgtatcccctgcagcaagcgtactcagaatgctcttagcttcctcattctcctcatagctgttagtcacctcggtgagccaacttggtaccactgtcgaagttgctaacacgttgagttgcagtttggaaccatcagtgcataggtttggccgtctagaaagagcatctgccacacggttttccacccctttcttatatataatgcggaattggagacccaatagcttggttatggctttttgttgccagatagtcgacaacttttggtcttctagatgggttaggctttgctgatcagtcttgataaaaaaattctccatgttggaggtaagggcgccagtgatcaactgcaaataaaatggctagatattccttttcgtaggtggacaatcccaagttcttaggacctaaagctttactgatgtaagctataggatggcctttttgctgcaaaactgccccaatacccgatccacttgcgtcggtttccactacgaattgttgtgaaaaatctggtatggagagaaccggtgcttgcaccaatgctgccttcagagcttcaaaggctttctgagcttcatcattccacacaaaaatttggtccttcttgagcaagctagtaaggggtttgctgattatgccgtagtgagcgacaaatcgacggtagtacccggccatgccgagaaaactcctcacctccttgacgttgttgggaatgggccagtctcgaataacctgcaccttttctgggtcagtggcaatgccttctgcactgatgatgtgtcccaagaactcaagggtggtctgtgcaaaccgacactttgacagtttcagtttcagctgatgatcctttagtttctgaaacacttgtttcacctgaagaacatgctcctccatgtctctgctgtagatcaacacatcgtccaaaaataccaccacgcacttcctaagaaagggggtcaaaatcttattcatgaaatcctgaaaggtggcgggtgctcctgtcagtccaaagggcatcacacggtactcgtaatgtccgttgtgcgtctggaaagctgttttgaattcatcaccttctttaattcgaatttgatggtacccagacctatgatcaagtttcgtgaagatcttagtcccacatagctcatccacaatttcatcaaatactggcatagggtacctatttttcaccgtatgggcgttaagacgcctataatccacacataaccgccactctccgtccttcttcttcaccaacaatacaggggaggcaaacgggctcgagctatgctgtataactccttgctccaacatttcaataatctgcttttcgatctcatttttctattggggggtgtagcgatatggtctaagtctgaatggttgggctccagataacaatggtatcgtgtgatccacttctctgggaggaggcagcccagcaggtttgtcaaacaactcatggtattcttccaccaactgagccatttcaaaaggtatgttctggaactggcccttgtcttccacactcaactccaatatgtgttcccaggcctcttgtttaagaatccaatttaactgcaccttggatagttgatggcaggtgctcaactttggaaccaccccttgtaagcgtacaactctcgattcatattcaaactccagccacttaccaacccagtgtactttcatgggactgtgggcctctagccagtccattcccaaaatgatatcatacccacttaatggcagaaatttgaagtcagtatggaaagtgatccctccacacaaccactggcagccaggtacaaagtatttgctccaaagacatctcccatcagccacttttacttgaacaggttcgagtatgctctgaactccagtcacctttcccatcagatggtcactcataaaactcgttgaactgcccgagtctaccagaactagcagctgttggcgttgaattaacgcccaaagacgcacggttcgattaccctcacttccactgactgcattcaccgaaatggacaacactgcttccccatcactatcaatgccaccctcagtcacgaacttcgtttgttcctcttcttcgcctgtaactgttagagcccacatctcctcaactaggtgtagggtacggtgttagaacagcggtgtgcatgcccccattttcccccacatttgaagcatagccctttagcttttcgatatgccttgagtgcagttaatttactgtcctccagcctgcttgcagaaacagggtaagcaaccctgttagtggtagctgacaacgatgatcccgccattgttgtgcccttctgcaacggcttggaaaatccccctccatcttgcctccgatgttcacggcgtcccgaatgcatcagcacgtcctcctgcaacagggcgagggagcaagcagcatccaagttgtttggtcgttgaataacaacaacagacctaacctcctccttaag

SEQ ID NO: 120552 - DNA, 619 bp, Zea Mays
atgccggtaagatagccattgttgcattctcaactttattagtttcatgcttattctatgtggtgccttgtagcttctacggataaattttctaaactcgaagacactaagattcgctacgagcctgacctccgtcgggttaaaacaactcttgatggcgaccgagaggccaataatgcttcactacgacagaaatttgacatggagaagaaaaatcatgaggtaacttgttgtgaactccagctcgcctactccatttgtcgaagcgctacataatatgtcccaatctgcaggatgaaatgcataagcgagaagagaagatccaaagcttgttgagtgaggtgactcagcagaaggaacatatccaaactttgtcctccacaaagtctactctcaaaatactacgtagcttgtcagaagaccaatccaaaaagtatatggctgtgaagtccttgagaacaactgtaaggtgttcaaatttcttatgataaagccatggacaggctgaagcatgttgttcggtaaaaaacagtggtctccaatattgatgcttacagagaaattacgatagaaacaactcaaaaattagagtctaatgtggctagaggtgagggagctc

SEQ ID NO: 120553 - DNA, 371 bp, Zea Mays
agtgatcgtctgcttgcttgctcgtttctaaattgatggagcggagaattgagttgtccgtgtttatggcggcgacagcgtccatgaggatgcatgtcatgtatttgtagaattgcgacaaccttcgctgaggcttggagagctacttctgcggtcgtgatctgaagaaggttctcaaagcatggacatctcttagctttagcggattattctaatttacatatgtttccatttcaatattaatcttattctgttaacaacatatttttttaagtaacatcatatttatcttcacaaatatgtttagaattttttacatacatatatttttttcaatgagtagttatgccaaatttgcaaattaagtcatg

SEQ ID NO: 120554 - DNA, 547 bp, Zea Mays
tagatgaatctattaaaatgcatctacgttcatacgagaaattagctgctcctatcttttcatcgcaagagtctaatacagagccacccgcgtcaaacacatcgactataaatgggtcacccttgacccagccatcatatggtatgccgatgcacactttcgtgccaccatcacagccacaaccactaggcacgcggcaagtactggatgcggccggaccgtccgagcatcatctcagatagtccggttataccgtggaccgtccggcgtatttcgccggaccgtccgaccagatgtaggcccgcacacaaaccgcccaggtcgcaccatacatggccggaccattagggtacaaccccgaacaattcggccccatcacggaccgtccggtgcatcacgctggaccgtctggatatgttgcggaccgtccgctatcttacgtcggaccatccgaatatggtatgaaccggccaacatattacgccagaccatctgactctacacgagtccacgcgcagactgcccaagtcgcgccatatatgaccga

SEQ ID NO: 120555 - DNA, 810 bp, Zea Mays
gtagaatcttggtcttcaaaatcagatataacggtgcacgtctattttaaaaacccactctcatccatgactggtttgtttcatagaaaaaaccctgatagcatgcaccgttagatctgattttaaagctcagtatcctatatgtgtacatgtgcaccaagccttcatatgcatcagataccatcccgaaaattggtaaaactataaatgacaccttgtacctaataagagagaaggcaagcaagttatcggcagccaaacaacaaagcaagcattcacaattggatgatcacgtcccactggacagacagattcgttcggtttcggtctactcaaattcctatagaaaacaaacaagtacacacattaggagaacaacttcataaaggtctcaagtcgttgattgttctgggcgcctggactctatgaacttactggaataggtgtgtttgatggtgtgtctcctaacctatctagagccctaatgctcgctggtgaagagctgcaggtttggggtttggccgaggccagagatacttcttatctcctcgcccttcgaccgcggtagatgattgtggggatggtcgtttccttgatgtttcttaatacaatgatgtggaactctcctgcgtgcccggtaaaaaaacaagtacaatcattcaccagaccatacatcggcacatcgcgacagatatctggccacatcattcatctcatgcaccggcgaatgcggtctctaagcaacaacggtgatccccaatgtaaacaaccttagcaggcgcggacttggccagggacgcgcgtaacggg

SEQ ID NO: 120556 - DNA, 477 bp, Zea Mays
ccccctcatgcagtcaatgcaaatgcatggagctccctgctaggagcatgcaaagtccatggaaaggttgaaattggtcaactcgctgctggtcggttgttctcaatggaagggggggatattgggaactatgtcattatgtcaaacatctatgcagctgatgagaaatgggatggtgttgagaatgtccgaaaactgatgaagtccatcgatatgaagaaacctgcagggtgcagctggatagaggtcgagaagaccagacacttgttcatagcgagcgatattaatcatcaagataggtcttgtatctacgatatgttaggaagtctgtatcagcaaatcaaagatacacacacacagaacatgacaatggtgaaatctatgtgaccacaagttgcaaaaaagaagaagtgaagcgctcttcatctgatatgtgcccagtggcttgtctgactccagttgcagggcttccacttc

SEQ ID NO: 120557 - DNA, 359 bp, Zea Mays
gcttaacgacgatgagtgtgtctctcagatggaattgaaggagatgatgcgcgcgatgactgaagcttttaaaaaatatcaggactctgcctctacatcctatgagcagcttgatcgacgagttgatgaacttgctacacgcatggacgtactggaggctcgtcccccaccaacaactccagccccatctcactctcctgtggacgacgatgatgatgacgacgatatttatgcaccactgccacaacgcttcgcacgtaatcgacaaggtatgggaggtaatggtagacgtcgtcatcataatcctcaaccaaaccatgatccatttgctaaaattaagttctctatttcaccattca

SEQ ID NO: 120558 - DNA, 489 bp, Zea Mays
tttgacagccaagatttcaaggatttctgcttctccattggcactaagcttgccttcgcctcagtgtaccacccgcaatccaacggagtcgtggaacgtgccaatggtaaaattttcacagccgtcaagaaaatgctcctcgacgacaagaaaggcaagtggaccgacctgttacctgaagcggtctgggcgctgaacacgactgagtgcagggcgactcggttcacccctttctgccttctatatggatcggaggccatgaccccgcaagaaataaaacatgggtcaccacggacagtcacgtcagccgtccccgacatagacgagcccacttcgaaggacctcatcgacggagaccgcgtcttcgccctacaggctttaaacaaataccaagctcaaacaaaagcatggcgcgaccacacagtcatcccgagggaattcagcgaaggagacctcgtactcgtccggacagctcggacagagtcccgg

SEQ ID NO: 120559 - DNA, 484 bp, Zea Mays
cgagcaagtgggtacggtgaaactcatccgcgaccgagcccgagtcgatccaggcgccaggatctttactctccttagttatccattcgtattgtgcacgaatcatagcggtcggcatgaatcgtagcgcggaggttgccggcaacgagatacgcggtacctgagatttttctgctactgtaccattggaacctcttttcagtgcgcttgacagcctaatttgcagggcctagatctcaaatctttatataacaacttgctaatctacctgtaacaaagttgttgcccgatgatccatctacaatcttgctatagcaaccatagccaaacactcactagatcatggtcgaattccagttcaaagattgcccaattctcactgtttgtctgaattcagacctagggcagtttgatagctcgactttgggctcattttactccaaattgttcatgtgaccattgtttaatccctatagcaaagttg

SEQ ID NO: 120560 - DNA, 616 bp, Zea Mays
ctcttctccatcgtccttttcctttgccccgctcatcgattccagccagcacggagtgcttcatcgccagttagggggttgcccaagcttaattttccctcatttgatgggaccaatccaaaatcatggcagaccaaatgtgaaaaatattttgacatgtacgccactgatccagtcatgtgggtgaaggtttccaccatgcactttgagggtgtagcatcacgctggctccagtctgtagaaccacgcttaccttctatgtcttggcgtcagttctgtcagtgtgttcaggaacggttcggccgtgagcaacatgagattgttattcgccagttgttccacatccgccaaacatcatctgtccaagattatgtcaaccgtttttgtgaattagtggacgttttagtaacctatgaacacaccacagaccctctatattataccatgcgcttcatcgatggattgcgtgatgacatcaaatctgttatacttgtccagcgccctagcaccttggatactgtttgtgctctcgcattgttgcaggaagaggcggacacttcacgacgccgtgaataccgtgtttctgacggtccaagcccaacgaagcattatgtga

SEQ ID NO: 120561 - DNA, 418 bp, Zea Mays
ttcggcgcggcggaagaggtcgtagtttcgattttcctctttattccttgtttccgagcggaaaagtagtagtcaggataaataaatccaatcacataaaaaactctatttagtcttcttttgcctcgagcactgaaggtagtgttcatggcttcgtcctctgccttcgtataagtccccggcagctcatcactggtcgcctcaatggcttcaagacattcgtcattcgactcgcaaaattgacttttgtagcgatagctatacttcaggtaaatcagaccaccttcactggaaccagcagcggtctccttcgacatctcccagtcattaacaagaggccataccttataagcaatgtgctcctgaaccaaatctttggtgccaatgtaagtgcacactgtgttgaaggccatcaaac

SEQ ID NO: 120562 - DNA, 286 bp, Zea Mays
gatgctgtttggtattccaaacctgaatattatgtcttgtatgaattccactgccttggctgaggttaaagaggcaatgggcttatactctatccattttgtgaatttgtcaatggcaaccagcacgtgagtatagcctccctgagctttcttgaaaggtccattcatgtccagccccaagcatgcaaatggccatgttataggaatggtctgcaactgatgtgtagacaaatgttgttgctttgataagaattggcaagcttcacatttctggactaactcggca

SEQ ID NO: 120563 - DNA, 294 bp, Zea Mays
tgctcatcagagccctgtactcctatattgttgcacgtcaactggagtcagcgagcgcagagcaaacggagctcgacgttgaggagacgttgccgaagaggaagctaggtgagggcgagcagatcaagaggcatatggaagtcggcgttaccatcaggtgatggttcacccatgggcgatggcatcatggggacaacccaggctagtcggcgaaccagtgtcattgcctcattggtgcaagggtcaggggcgctagagctatggacgagagcgggcgatgagtatagatgatcg

SEQ ID NO: 120564 - DNA, 559 bp, Zea Mays
gaagcagtctgggcactgaacacgactgagtgccgggcgaccggattcactccttttcgcctgctatacggatcggaggccatgaccccgcaggaaatcaaacatgggtccccgcggacaaccgcttcagtagtacccgacgtcgacgagccaacttccaaagacctcatcgacggtgaccgcgtcttcgccctataggccctcaacaaatatcaagcccaaatgaaggcctggcgtgacaacgcagtcgtcccaagagaatttaacgaaggggacctcgtactcgtccgaacaacccggacagagtcacggggtaagctggaaccaaagtgggaagggccatttatcatcaagatgaagttgtctcccagcgcgtacagattaacaacacaatctggcgaagacctggaacattcctggactatagatagtcttcgcaaattttttgtttgaaccctcagggccatcacgcccttgtaattcgccaaacattattattccggcccgcactcttttcctcccagggggtgaggtttttaatgaggcggagccatgtaat

SEQ ID NO: 120565 - DNA, 432 bp, Zea Mays
gttttactagatgacttcacacatttttgctggacatttccccttaagcacaagtctgaggtccgtcagcatattgctgattttattccttatgttcgcacacagtttagctacactattaaatgcttccaagctgataatgggacagaatttgttaaccatgccatggatgaactccttgctgcctatggcatcgtttttcacctttcttgtccccacacttcaccacagaatggcaaggctgaacgtattctccgtaccctcaacaactctgtgcgtaccctgctccttcatgcgtccatgccacccaagtattgggttgaggccctcgcagctgccacatacttgcttaaccgcagaccttcctcctccatacgccatgaggttccatacacccgtttgtacaatactcctccttcctatgagcacttg

SEQ ID NO: 120566 - DNA, 681 bp, Zea Mays
aaagcggggacgcttgcggcggcaagctactgaggagaatgtattacgctccccttcagatatcccaggagagacacaccccgaaggtgacagtcctagtgcagttgtgcgcacaaatacttatgatagcacaaggactgcggaacagccggtcccagaaaatttgggaaatcagtatggtccgggcgattcaattgatgaaattgccataaactatgccggatagggagaattatataatcgaaagactactcatgtcgacattaattttgtctctaaaatcgctgctataagtaatgaggatcctgaaccaaagtccatggcagagtgccagaagcgctcagattgggtcaaatggaaagaagcagtagagacggaattgcgctcgctttcaaagaggcaagtattcgggccagccgctcgcacgccccccaatgtttcctctatagggtacaagtgggtattcgttcgaaagagggacgtgaataatgtggtggtgagatacaaagcccggcttgtagcacaagggttcacgcagagacccgacattgattatgatgagacttactccccggttatgagtggcataatgttctgatatttaataacaccggtagcaggtttaaacttaaaaatgcagatgatggacgtagtgactgcatacttgtatgggtcacttga

SEQ ID NO: 120567 - DNA, 726 bp, Zea Mays
cttccagtctagacatggcctactccggagtgccccctacacctagggccagtgctgcctctgctactcatggttagatgggttaaaattaaacatgttaggagaatggaaataccacataagcttagcttttggcaccaacttttgaactaggctgtaggatggatctcctagtatgttgtaacccggaaaaacctgtatgagcaatgcaatgaatgaatgattatctttgttcggttcggtataattttgtgtcgttattctcctcatgatatgaagtcaccacttgacatcttgggtcgaagtaacaatgacagaatttctattttcagatggcagctagaccttgtcgcggacaaaacgagcaagttcccccactacctcccccggctccaatgatgcaagaattaatggctcaacaaaatgaaatcatgtggcagctggtgcaacgccagccctaccctcagcagtttggtggatggcagcagcaacgcccaccagctacagttacctatcaagagttcctgagcactcaaccgccgctgctcaccaagatagaagacccactggtcggcggacgctaatgtgtggcttagggtcatggaatctaagtttccccttctcataggagcttgccctaacatcgcaaagactgcttcgccatgtagcagctctgtggacctgcaaggacatggtgggaccatttcctcgccatgctgcccgccg

SEQ ID NO: 120568 - DNA, 346 bp, Zea Mays
ggatcggttgcgtcagacggtacagtcgcgtccaacagtctcgctgtacccacacgcggccacaacacggagctgacagctgagcgacgtggtcaacgctcgtaaataaataggttcaccggattttgttttaatttctttttttcccctttgttccgtctcgtctcgtgtatccatccctcgctcctctactcccatgtcatcgatccactatccatctcacagttactatctactcggacctcttcatagaccataggggtccctcacactataaggcacctataaatccccatggaccagccctcacgcataagaacacatgtctctacaagtccctaggaag

SEQ ID NO: 120569 - DNA, 395 bp, Zea Mays
ggcatctaggccaaaaaggcaaaggattgttaccgtgacagaagtgattgaaacaacaccaccaagggctccagctccgaaggtgccggcaattgaaagcacgacagctactgaagctgtgccttcggaggttgccgcagaagaaaccagagccgaagatgccaactccgaagatattaatttagagagcatagctgctgatatagataaaatgctgctaaacatggccgctgaagaaactgatgcagccaccgaagagaccacggccgcaaaacccaagaaagaaggaataaccgaagatacttcggaagatgaaacttttgacttccgaaacttagttggccaagagctgacagaagctgaaaaagaggaattaaaagagtatgctatatctt

SEQ ID NO: 120570 - DNA, 357 bp, Zea Mays
aaaataatcttgacctcgagtttaagaggaactagggaagaggtggggaaattctatgcgtaactcttcttctctttcccaagtagcttcatcctctccatgatgactccattgcactttgcacatcttgatcactttatttcttgtaacacgagtcagagtatcaaggatcttgataggatactcagtataagttagatcatcctgaacactaagatcctccataggtagttgctcctcgggcaccctgagacacttctttaactgagatatgtgcaagacatcatgtacatccgcaatggtcgggtagttccatttgttaggcaacttcccccacttgctttaggatcatgaagg

SEQ ID NO: 120571 - DNA, 370 bp, Zea Mays
acggattccacgtgcggaactcgcgatccgatcgagagagcgagtagggcaggccggcaggaggaagagcgcgcgcgggagaggcaggcagggccacggccagcagccagctatactctgtctcgaggagctccgtgtgtgattcgattccgcgcacggcgcacgtgcttatccctctcaccagttgtctagtacgtagttgtgattgagcgcgcgtgcatggactgtgaatcatctatactcctaggaatgctagtcatctgacgacgtgtggacaccagtgtttgctatagctccctgcctctagattagatcttgttagtagctagagtcctgactaagggagggtgtgtttgatcgatgagcgcgg

SEQ ID NO: 120572 - DNA, 448 bp, Zea Mays
aggataatgttgttcaactacacggagatgggtatcatcccgaaggttgagccaatgtaatatatgatgccctcgctgtgtgtatgtaaccgctatttgtatgataaggttgcgcaccttcgttgatccggccgcgctcgtgggcgacttctgtacagagagtcttttggaaaggacttcgattttgcgggcctattattccggctgcacccttagacgacttttgcacgaagagtcttttggaaaggacttcgattttgcgggcctattattccggctgcacccttaggcgacttttgcacggatagtattttgggaaagacttcgatattacgcacttgttgtgctattccggctgcacccttgggcgacttttgcacggagagtcttttggaaaagacttcgattttgcgcacttgttgtgctattccggctgcacccttgggcg

SEQ ID NO: 120573 - DNA, 902 bp, Zea Mays
gcgactcaccatagagcagaccaaccctagatcacgcacgcaaccggccccaaacaaggtctgccatgtcgagatcattcccagcggcgttcaccggcggcaccgcggcgttcccaatgagacactgcagtagagatgaaaagggcagcgtcatgagcttcactggcttaaggagattaccgaacacaagtgacacaggtgagcaactcctcgagacgacccgaccacagtgagatgagaaactgatgagctcagtcaccaaaaaaggagattgacatgcgatgaacaagagcagatcgaacctgatggccggggagagtaaacaccgacgtgaacatgaaccacaacactcacacgatgcactctcgctagaactcaagaacgagaagagacttcactgccctggccctgcagcgactagataaaagggtagtgcaaagtgattgagctcggccggttcacagtagagaagactttgatggcgccagcacaacatggctcaaacacgtggctaagcttccaagccccacgccaacatgcaagcagcaccaaagcatcgaacttgggctggttcacaggcacaccacaaatatccactctgcccagaaattcagacatagaggagagcagataaggacccactgttcccagacagtccaaaacttagatatttcagtggggagaggcatctcccttggccacgcattttactcttatctccatccacatatttaaagtaacacttgcagggaaaaggatcttctttatttaccaactgaaactctgaattcaaccaaatcaggcctgctgctcccattcccctcctcactgtttaagccctttgattttaaattccccttaacaatagaccagacttacttaaccaaaattactatccaaac

SEQ ID NO: 120574 - DNA, 550 bp, Zea Mays
aagaaacagatgatcgaaggaaggtgaagagaacaatggtgcaagcaggctatttatagagggcagaagtgaccgtccacttcctaccacgccctctgaacagtcgcaaacattcaataagcaattcaagccgcctgaaaacgagtcacgcaacagacgccgcttcgcgtaacacgacaccatttggactaaggtcaactgctcaagcgatatgattatgccccacgatcacgtcaagttaatactccaggacagtgtgctaaacgctctgcgtaccaagatgttccttggtcacacccactgggggggacggccaggaatttccaatagattttctgaacaagtcacatccatatagtatacacaatgaatgtattgaggcagaaggaagatatcggcattagatcaaaggaaatccaaatatagctactgaagtgcaagtctagtcagcagaagcattgaatcacagatcaaggtgaagaccagccgagagccatctaccagacgtccaatccgtcaccgatcaaataaatttcaaacctaacagggc

SEQ ID NO: 120575 - DNA, 453 bp, Zea Mays
tatccccactccgcaagaagttttgttatggattccctggatctattatttgacttcttggttaggttgataggatcgttctttagtattaagattttcgattagatcggtaagggcaatattatattggttttctaatccctaatattgctatataacccttgacttcttatacttttgttttcttgccattatattgccatccttgcgcaatatctaccttgatatactgaattctttgtctccctactcctacttgataatacctctctattttgtctccttgataatgctttctccctaactcacttcatatccttggttgtatcatttatcctcactttaatagttcatggttatcttatttcactattggccaccaacaaatatgtcttgtctaactccttgataattcttacccaactccttgatgttattatatctttcttacct

SEQ ID NO: 120576 - DNA, 542 bp, Zea Mays
ccccctccctgcctttcagctgtttacatgatagatagaggttctgccaaattgtggcctgtgacactccaaacaattcatgcaaacaaaagcagggatttgccggtctaccattacatcctgaaaccatcaagctgtgacatccagctgcaggcggttttcttgaaaccataggtatgaaatgaaaccatgggcatgcaatacttcaaacatgtgggtggccttccttctagtgattggcttcccttttctcctcactactgtcgtcggccagctctccactacagctcccccgaactcgtgggaacttaccaatctagaagccatacctatggacggagcggtcgctagcatgcgacctgtccttgaaaacagcgcaaacctgtacaggaccttgttcggcttctacaccacggatgggcattcgtttgttctctctgtggtgtttctgggacccaaggctccagtcatctggtctgccaaccccgacagtcctgtgagcagcagcgccgtcctgaatttcaccagagaaggagacctgc

SEQ ID NO: 120577 - DNA, 487 bp, Zea Mays
cccgcctagacgacatcaatgtcttttcaaacatcctatcacatattcacacttgcaggaggtgttatatcatgaaaaatcctaaaacaaaatgtcaaaaacctaaaacgacgagccagtcaaacgtgacaaaaaaaccaaacgaattataatttgtgagagagggagtatttaaggttcatgcgttcgggtagctaaagaagtagatcgtaatctaaaaatgtacaatggaaacattgagggacttgcgacaatgagaagcaggcccggtagtggaatgtgaggccagcggtaacaaccgctacggtgtaaataatcgtcctatttctctgtcctaccaaccaaacacaaaactgaaattcactgcatcttctcaacatcacctgcaatcaccatctcaggtagtgcaagagaggcggaaccatcctattccaccaacactacctacagtcatcatctcagaacattcggcgaccatgcatcagcg

SEQ ID NO: 120578 - DNA, 522 bp, Zea Mays
agcacaaacgtccctgcacagaaatgatgttatccacatgtgtctatgcctcttgcgacagagttgtcaacagtgggaccatttggatcctgtaataagcttcatccttgtaaaacgaatcatttgtaccaaacaattctattccggagacaggtttacaaatttgagtcaatgaacctgtagcactcctcgatgctgaaaagcagtcattagaaactaatctcttgtttgtactgattggactattctttaagttgggattagcttctttggagctatttttcgtctatatatgctaatttgaattagtgtgttagctgatgatgaatgttgctccaaggctgtaatatcaacagtggcatatcaaacaatatttttggcacagatatatccagtgcaacttcttaattgctagatggtcgatattgtttgccatagttgctattaggaattctggactgcttgctcaccatatgttttgtgcgtatataacttgttattaggaatcagtcacatcacgac

SEQ ID NO: 120579 - DNA, 558 bp, Zea Mays
ttctcggcatggtgacccttgcagcatgtcgcacaagggcctagttaacccgaaggataggtccagtgggctctaaactatcttttccttcttctcatcaactctaacataaaaccactcattcttccagccggttggccattcggtgcgatagctgaccaccggggtcttcatatctttgcgataagcaaagttgtaacagccgaagtgtagcccatcttctctagccttcgtctgataatgaagcttgtgcacccagtagaaagctttggcaagcgggtccactccttgactttggagagcccagataaagacgctgagcctaatgatggtgttaggagtcagctgatgaagataaaattcgaaatcttccaaaacatccccaatcatttcatgcagaggaaacctcaatcctgctttgaagaaacttctgaaaactaccacctcatcattttctggcttcggagtggtttcttccccgccaaaacgaatcagcttcttctcggcttccccgaagtagcctagctttaacatcatgggcatatcagcctcagtgac

SEQ ID NO: 120580 - DNA, 375 bp, Zea Mays
ctaatgtagacatgtagtgctttaacgttgtactgctattattcggatatccaagcatgctgcgataatccagggacaggattagctaccagttattgtaaaaaattagccatagtgtggtgggtagtgtgcaaacaatgttttgcttctttttagagctaacttaataatgcttgtagtgtacaagtgatcatagcaattgatcagtaggtttgtttatcaagacatttgtttttctttattcactttgacttgccattgcgttaaagaaatcagagtagcatgattagataaatatagtattcagccacaattgttttctagttgttcttcgatgctagttgcagtttcttattttataatggtctatttatt

SEQ ID NO: 120581 - DNA, 470 bp, Zea Mays
gcaatcgaacaagttcattctttttcttttctcccttcagcttcggcatattccattcacttaacgtcggaaataccccattgtctaagtattcttgcactagatctctagtgctgatctgctcagccacaactctgaattctgccacacctcttggcatggtgatcccgacgtcatgcggcataggggcctagtcaacccatagctcaaactcagtgggctcagtactaacgtcttcagcttctccctcttcttctcatcggccttgatatagaaccactcacttttccagccggttggccacttggtgcggtagcttagcaccaaggccttcatatccttgcggtaagcgaagttgtaacagccaaaattctcatgaagcccatcttctctggcattcgtctgataatgtagctcatgtactcggcagacggcttcagcatttggatccattccctggcttcgaaggg

SEQ ID NO: 120582 - DNA, 617 bp, Zea Mays
gagaagctaagtcttgtattcgaaggagagatgccctggcgtctgacgtgacgacgaaccatgcagtagattcacgcctactgattctacgtagaatgccagggtcgaggggttgtctgtacgcctgagcccccgagggacaggccgtccatgccgtagtggttgtaaatagcatcagggtatgggccaaaggctacttacagggtgtgtcatcatcctggcgcgtgatgacgtcgagattctctgcaaagctcattgagatcagagtccctgttttggttgatgcagaagtcttcccgaggcgctggctgagccatgcgctatagtcgggcggagtggctgtctgcgtgatttgtggcacagtaggtggctgaggccgagctcgggcgagacggagaacttgttcgaggattgagcctggggtcgggcaaggaagagcggttgcgcccgaaggctcgtctgcttggcttgtcatgttaggtgtcccatcggagggcattaggcagcgtgcgtgcactgtgatgtaggcgtaatcatatcattgtgttggacgtgactgttgtcttgtctgctactgttttctgctgccacagtgcgggttggcacatgcattaaat

SEQ ID NO: 120583 - DNA, 348 bp, Zea Mays
gataggtgtcgacatatttgtgtcccacatttaataatgatctccgtcatttcccaaaacgaaagattcattgtcccatattcccaacacaatgatattgcgcgcattgctaggaatttcatcatcaagatgaacctcttcgtgaggcaaatcaccatcagggtgaattaatcggaggagagttatcacagacaacgtgaatctgcaatcagaacatatgctttgactaaggtcgatggatcatatccgcaggcgtcctcgcagaatagatcaaatgccaataagtcaaatgtggatatgatattaatcccgggtatatccacattacataaggtagaagcattcaaa

SEQ ID NO: 120584 - DNA, 486 bp, Zea Mays
agacttttgagatttacctgcatcaaattatccccgaagctatcatcagaatggggattttcatttgggccgtgaggagccagggactagagttgagtgcgaaatgcttctgtaacatgcatgagctgtcctatgagacgcaggctactggcaaagagcaatataataataattttggttgttgcggcttcgtgcctcgctctgatgtgagctatccagtcccgacgtttcggaaaaggtgtccaggagcctagatggaagagtggttttatgtaaagaacaacttcgttgaaagagaagacatcaaggggatcatccaacgccctatttggtcccgcttcggcatcagaaggccagccactgctcttggaaatgaaattgatgcatgccagaaggcttttaacagtgtatgcacttttattggcacaagagacttagtccaagagcatattgcttatagagtgtggcctcttgtgagtaactggg

SEQ ID NO: 120585 - DNA, 628 bp, Zea Mays
caaaattgacaaccataatatttgtctcttgtctcatatattaactatatccataccataagttgtaacaataggttgcaccaaataaatagtggccaaatacaaattaatttgataacatagctcacaatcacagcatcctcgtactagcttggattgtgataacatagataataaactactcaggactagcaaattattggaagtttttttgccatcgtgtacccctccatcccctccattgatgcaagcaatggttagctaggctgacgacgaatcacgacgacaaggaacctgttggaagtgttcaaaacaataattagtaaagctacaataacttggttaatcattagtggaagactacaactgtagtgcctacagctacaactacagcacaactcctagcaagcagcatcagcagcaaccatcagcaagcagcaagcagcaacacgcaacaagcagcaagcagcatgcagcaagcagcaagcagtagcaacaacacgcagcagcacgcagctagcagcggcaagaaacaaacagtagcacgcagcaacaggaagcacgcagcagcaagcgttctactctatctctaccagagaaggcagctgcaacaccagcctaacaagag

SEQ ID NO: 120586 - DNA, 831 bp, Zea Mays
atgcatattaggactagcataagagaccaatcacaccttagatcttgtttagatgcacaccacgaattgaattttggtgaaagtcaaactaatttccactttgatctacttcgatacatgtggataagatgaatatatgcatattcaaacaagaccttagcatgtttctatataactctttctcttaactaaggataaatatagtatttaaaataaaaataaatatgcatggaacatgcaaccacaacagacataatacctccaacataagtctaaatttagcattgcacatccatggttcctagccaccacaattctccaccacctccaaacaccacgaccttcccccatcctcccctccaccactcccgcctagcccttcgctccaccaccttcgagactcccccttcgccggtcggcgtcgttggtggttggagagatggggcagcagcgtacgttggtgtatagcttcgtggcgcgaggcaccattgtgctagcggaccacgccgaggtctccggcaactttgcatctgttgccgctcagtgcctgcagaaacttcctgccaacaacaatcgtttcaactacaactgcgatgggcacacattcaactaccacattcatgatggatttagtaatgcacattgttcttgcatcgctttattctctctctctctcctcgcatgcttataagccaatcgatcctgctatttgtgcaacttttatttgatggcgagatttgttatgcattggtgaattaaagtcggccttctttactttttttgcttgataaagataatgaagaaaccaggtccagtgatgatttttaagag

SEQ ID NO: 120587 - DNA, 323 bp, Zea Mays
cgaccttggcctcagacgaggttacggccatttattacaactaaaggcagaatattgccttgacccatcatatgacctcaccaaagaacatcaaagactaaatcaaagctactacaaagttaaacgcaacgaagatccccatccgaaattacgaaaaaactatagtagcaccatctccacattacgacatgaagactttattaactcttggtcctccctcttaagctgaagctatgcccagaagtggcaccaataagttgccatgaaggttacctgcaaacatgatttaggagaagatttattgaaaaccacatcattcctac

SEQ ID NO: 120588 - DNA, 957 bp, Zea Mays
gaaaaggttaaaccctatttccctttcacaatgcaacaattgtggtccatttgcttctgcagtaaagatggcacaactcctggaattccatgtttggaagctccttacaaccatccccatgaatatctaggcagtgactcatcataaccctgaacccatccatcccaatccatatgtcagccattgcttcaagtatttgcttaaaagagtacccaaataacgacaaactatgatcaaagtcgaataatatatccaccaaatctatgtcatccacaactcttatctgcacatcttcaatagatagataataattcttgactacagcctcaccttcaacatactccaaatcttccattgcagtaccaatgcttcgaggaaacggtgatggctggaaaagtggagaggaagaggcatccactaatgccaccacattcttgtttggctcgaacaatacaactccaggaattattctaacagctcctaccgttgccacaaccactacaatttcagcaacagatcagggttcttcagggtggtacctttgggatggtgttatgatcagcaccccttcacctgaatggaaaacattgagataactcctttccacaaccatatctctaattaaacctctgcgcatactcaggttagatgaaaactcctcatcccactgaattttactaagaatttcatcaggcaaaccttaagcatcactaatccatctcactgcactcataactatcacctgcaccaaattccctgctacttcttttccaaagagcatttcctcttccccagtcccaccatctgctaactcaacctgcatcacctcatccacaaccccttctttagataccacaaggtaatcttccacctcttcttcactaatttctctaacctgtagtatctcccaatcctcatcatcaaccttaggggcacttataatctcgcttgcaccat

SEQ ID NO: 120589 - DNA, 598 bp, Zea Mays
ggaaaggggtggcggccaagtaggggcaaaagggggaaaagaccaccactagggttttctttgcgggagaaaagaagcgacgccacagatgactccgacttagcatccaacggcccacaacccttttcctacatccacgcaccgaagatcaacctttggcaacatttttttgggatattacactctaccaggggggcggctgcaatccattggggagaaggggagggggcggctagggttggggaggagagggggggctcccatccaccggatcgagatcaatggcccaaactcgctcttttctttgagctcccgaccccagcgaaaaaatgccaaaagatctactgttttctgaggaatgcctcctgaaactccaaaccccaatgccacagaacatgaaagaaaagagaaaaagaagtttaacttcttttcagaaaattggggtatcacagttcactcgcctactcaggttagttgcataccgatcagggaacatcaacatcttgatccactgcagtacttccttcctttgggccctgctgaggacgaaatcggccttaggccttctccatgtctttccaccactaggcggctttca

SEQ ID NO: 120590 - DNA, 490 bp, Zea Mays
gcaagctcgggtgaggcagagttatgagttcccgtcgagaggggtctcaggcgaatcgtggtttactctttcttgtcctcggggaatgagttcgacgtttgtcttagggttaagcgtgttttaggggcgtaatctagttacccctaattacgatacccgacagaaaggttcactccggaaggactagccttcggttagtcctaagacatcgagcccggggtcatacgagacggagacaaaagggggtcaagagggtcgagaagaaggcacatgactaacccatcataaataaccgaccacattaattgcgcttggcaccgagccacaaagggacagtcggaccaccttccactcatgacctatcgagcctagacttgagtgcgttggccatcaacaagacccgtaacacgacaagatgcgtcgagacccaggctacgacagctaggggtcggtgtggcacatggacgataatgttgatgtctgagctctc

SEQ ID NO: 120591 - DNA, 690 bp, Zea Mays
tatcagacgcactagaaggaattcgcatggtacagtaacctgacgaagatcgctaggtttagtgcaccaccatcggtgatcccacgccgtgatcctcgccggcgttgcgattcgtgcccggtggcgtgtagataactgtgtagggtgaaagatctcgcgcaggggatgaaatcagggcactgttactgctcagtcgttgtacccacttgcgctgcgacttggctagacggtcatcgccgtggagatctccgttcaccgtgattgcaccacgccgtagtagattcaccacgtcgtcgcaagctataaggactcggcagtgaccaccgtagatagttagccagttagagccacgttagcgacctccggtgactcttcccccttctcaccgcgaacgcctccccgtccaaattcgccctcctcacggtcgtcctctataaattgatgcatcgacctgttccgtctacttgttacgaacccagtgaaccactcctcgcgcccgatcgtccaccgtagcgccctaatttggaatttctcccaaatccactctccgcgtcgccgtgagtcaccctgtcgtggtcagccatctccagatccgctctcaccctctcggtccatgtttcggcactctcgtggtcagccatctctgtggtgtacgtggaatgaactctagaatggtgtttaggttaaatt

SEQ ID NO: 120592 - DNA, 493 bp, Zea Mays
ctcgtttgccatcaaagaaaggcttgagtcgctctagcaagatgccttaggtgctaaagtcaaagcatttccagaaactgctaagtacgagggtgacgatataagtgttcaaccacctactccgttgaccccttcgacagtttcccatcgatctaatgaagatggattctattgtcccgatgtcagtgatgagtggtacttcgacgactttgataggtccacacgtcatagttactggaatttggtttagggagttaggaagtgatgcaattacatctaggtggcttctgacgccaagtcgtgtttggttatgcgatgtgctacaatgaataaataatgttgttagtttatgtcgtatggctagtagttgtcattagcaagtattttgtaaggacccttgttgttatttggagtagtaatacaacgctgtgaacatgtcgttgccatgattttcaatccgtgcatgaattgctcacatagttatggatctatg

SEQ ID NO: 120593 - DNA, 703 bp, Zea Mays
taagattattctatattataaatcactttctaaaattctatttactgaaaacaagggctaaggactgctggtacaaattctacagagcgcaggggctagtttataaagatccaggactcaatagcaattactttacattggccgaggacagcgggttgattactgtgaagatcaggggctctttagcaatttgtacacggctgaaagggtattggtggatcaccggccgttcgatcggtaatcgatggttcagattagatcttggtgccccatgaaccggtaaaccacagtcgtcggattcgcgatcaacggcaaggattttatgtgggcgagattaaccagagaccgttggatccaaatccactacacaaatcaatttgacccaagggttattctaccttctaatctgcaccgtccaaagggagatcaacggcacacaaccatctcccacctcccgaccaccctgagcacgacagccatattttgcccacgcagagagctccggcaaggcacccccaaatcgaatcccgcacccaaaagtttgatccgagagtttctaactgcaatcgtgcttaaggagaatgagctgaggagcatctaaccgaggattaacgcacagacgaagctgtccccgcaccatggcggatatgtgttgttgcctagaccgtcggtgagaaattgccatacccacggcaacacatgg

SEQ ID NO: 120594 - DNA, 572 bp, Zea Mays
gtcgttgtcgacttaagccgattgctcagttagcagggtatagtggtcaccctaagtcgagtaagcgtgagcatgtcacaccgtcttaagacgtcgccgacttaagccaattgccccgttagtagggtatagtggtcaccctaagtcgagtaagcgtgctgatttcaagtctaatcaaatcgaagtcagctgaaagtcaagagtctgaatgcctttgaaaactaaaactttattgacgatgaagtcccctgattacagagtacaatgttgcttcaagaatttttgaggcctccctagggataaaactttctaagatgctctatgttccatgagttccccacttccgtgccatccatttgagtaagccggtatgatcctggccgagtgaccgctgacacaaagaatggcccttcccatagtggggacaacttgtgtcgtccttcccccgttagaattcggtgaaggaccgagtctcccactgcaaaggaccagtgtcgcacgactctatcatgatagcgcctcaaggtctactggtatctagccgactgaattattgtgttcaatcgttcttc

SEQ ID NO: 120595 - DNA, 503 bp, Zea Mays
tgtagtcaatgcacatcctctttgttctgtccttcttctccacaaatagcactggggctgcccaaggtgaggtacttggtatgatgtagcctttctctaacaactcatcaatctgcttcttgagttccaccaattctggtctggacactcgataggctctcttggaaataggggcggtgcctggtataagctctatggcaaattcaaccttcctttcaggtggcatacctggtaactccttgggaaatacatctgggaattctgatactatgttgatagcttctgatggtttaatctcctcaatatgggtggtgacttggtgacagctttctttccttggtccagacaagaccaactctactaacacttcttctcctgatagggacactaacttcaccgttctcttgtcacagctaagactggcttgatatttggttagccagttcatccctaggatgacatctataattgcatcctggttacccataactattggatcagcg

SEQ ID NO: 120596 - DNA, 662 bp, Zea Mays
aagaagttgaggtcctcgttgatttggatccccacatcgtgccagaaaacacgagcgatggggcagtgcaggaggatatgcgacgtcgtttttcgaccgacggagctcatctgagacgatgtctttcctcagcaggttcgcaagtttatccctcgaggggcactgctataccatacgaaggcaggggtgggagagtcttcatgatgccctagagacaagacagacaggagtagagatctttggtgtgtaggcgtccggtggagtcaacagcgaagtagtggcgctcgtcgggggaggtattgagctgaaccacatcaagagcattatggagggaagctagctccgaggctacgtgggaaggcaggtggacattcaaagaagcagccagaccccatcgaggagatcaactaccgtgatagttgggtagaatggcaaaaacctcgctgccatgcgagacatcaaaccagaaggcagtgttgcggccatctcccaccacacagattgtgatggcccgttagagggggagcaccttcctgaaactgctccagtgatgtccctagataggctcattatattcgccgtgcaagtaaaaccccggacccaagttgcccttgatgaagtcatcgaggtgtataatctatgcagcatcttcaacagcaagc

SEQ ID NO: 120597 - DNA, 649 bp, Zea Mays
gatgaagggggcagaggagttaaaaggaagagaactgtcagcattctgaataggcaggccattcgttcagttaaagaggaccagaagactttgaaaaagcaaaaaactctatcggagccgaaggaatcggctcccaagaaacgaaaacttgccaagttatcttctgaggagacgaaggtacaatatgtgtcgaagcagattatgagcccttcttcgtcatctgctgctgaggtcttggagattttgaaggtaatgactgaacctttcccatttgcactgctaagtcctctaaggaaatcgctttggctgcagagggggaaaacaggggggggaagaagcggcgtatgatgaatataatggaagctattgaacagactccaccctcagcttcggcggacaaagctactatacccgtcgacgccgaagttaccaccacagccgaagccgatgatctcgcaaccaccctgtcaaaaattgacagacttatatcagacgtggttgctgagaaagatgtagccacagtgccttctgataaggggaaaagaattgaagaaacctcttcggaaagtatgaatttcgaccttcagcacctgggcggccaacaactttctgaagaggacatatcagaattaaaggaatttgccatatc

SEQ ID NO: 120598 - DNA, 405 bp, Zea Mays
aaaggaattgcagcggctaaaactatgattgagaggtattttatgtatgctacgcaaatattgattataatattttattcgacctagctatattaaaaggtatatatcacatgcacaaataaaattagtacttagtctcaacaggtttgctactcggataatcatcgtttaattacatgagttaattaacatgagctatttcgggtgaagtgaattattaccacataacaatgcgtgtgaacggcacgtgagaattttagcgagtgatgcgcgggaatggcaaggcgagtggcacgaatgcgtgcatgtgcaggggtacacgaggtagacgagggttagacgggcatcgtctacgggtagacgaacagcgtcgaaaccccaacaacgtgttgcgcatccgcgaag

SEQ ID NO: 120599 - DNA, 377 bp, Zea Mays
gacatttagagatacctttatattattactcctttacatttagagatacatttagagaaacaggactttcaattggccacgacatttagagatacctttatattattactagtatgttgcattgttgctacggttattatatagtggtactatattttctatatatcatgcagtagattttgtttaaataagatttgttcagacatcttccaaatctttacaataatactataccgagggagaccgcaggtccatatgtggtcttttgtcatcattttttcatttgatttggtgcctccatggtctatgtatggatgtcatatttctcatgacatgatcattgctagcttagccatattgttcatttgaccatatta

SEQ ID NO: 120600 - DNA, 482 bp, Zea Mays
tgcggactcacttctcttttatgggatgaactgggtggcgggtgactgagaattgaggccacgcagcagattgacgatgatctatgagtcaggacgagtaggccgatgttgcgcagcacattgatagtggccttcatcttctggtagtactcatcaatggagagatccccttaagtcatgaagtagaactcatgactatgaagatggcgcgagaagccttgttcttctgaaagaggcttttgatggtgacctagagttggcaagtagtctagttgtgtgcaatgtcaaggacaaggaggtagttgtcaatgtaggagccaacgatcatccactatggattagttgggcacgcctctgctcccatggatgtgcaagcgaagatgaacttgccacacagggagaggaagaagggagaacttggttgatagttatggtgcttcaacccgaggatcatgggaacatgggacttgatgaagatcatc

SEQ ID NO: 120601 - DNA, 370 bp, Zea Mays
ttcaaaggcacaaataggcaggaaccaaagcgacggctatggagcacagggtcagttttagagataggatttgttttctggatatggtcggtttagatataggatctgttttgtggatatggtcggttttagagatagtatatgttttgtggatatggtcggttgtagagataggatctgttttgtggataggatcggttgtagagataggatatgttttgtggatagggtcggttgtagagatatgatctgttttgtagacagggtcggttttgtaggatggaagcggatggacacaatgaaactgaaccaaaacaaatctaatccagcaaccaaactcaactagtacacgaactcagaactgcggact

SEQ ID NO: 120602 - DNA, 734 bp, Zea Mays
ggccggcaagctagaattcagcccagtctcctcttctctcgcatgcgcgcccggcccatcctagcgtaccacacgcatcattggacgtgacactagcaagccaggcccacttgtcggccactcagcgtgcaccagtcattcttctagctgacgtgtggggcactctccccagccttgtttgtcttccacgtcgcggagctttcggcgaggaacattacaacaaccgccccgatggggtgagccaactggggggggatcctctctgctataaaccaatgcggtagggtcgcctaggccatatcgacccaccccaatcgcaccaggagcaatagccgagagccacttcgacgcagagtgtgaaacgagagtgagagcaggccgccggcatgggaaatcggaaccgcgacaagtctgggcttgggactcggctttgggggatcatcgcacctcgtagaaggcgtgctcctcattgattcgggcgaagttcactggagccctgtgtaatttctcgtcgtcgagcctaatccaccacagatccgctcttccaagtggattgcccgcctgcgcgcatcatcctcggtaaggtttcctcacccgcattcgcttttatttccgcatcgtgtagagctgtttgggttagaggttggggcgctaggaccgtagactcgcctcatcggtgaagtcctccgccgtggtagtcttacgattcgacccttggttcctgggccatagat

SEQ ID NO: 120603 - DNA, 504 bp, Zea Mays
tgaggaacattatccaactcatgacctagagttagctgctgtggttcatgccctaaaaatatggcgtcattatcggctggggaatatctatcatatttacacagatcataaaagcttgaagtatatttttacccagttcgagcttaatatgagacagagaagatggcttgagcttattaaagattatgaattaaagattcattatcacccagaaaaggctaatgtagtggcagatgcgttaagtcgcatggcttcctgccattgtctgacgatgaagacttctgacattacgttatgccaagaaatggagaagttgaacctgggaatgatgcaacaaggaacttcatatcacttgaagcttgagtcagtcctcctgcacaggataattgacgcacaaagaaatgatgaggggatgaaacacattcatgagaaaatagaggtcagaaaatccatctgcttcagaaaagataatcaagatgttgtatggtttaacaaccccatagt

SEQ ID NO: 120604 - DNA, 328 bp, Zea Mays
agccacaccgagacctagcctacggaggccaggggtcgacgtggtgtagaggcagtaatgatggcatcagggctccatgctgcccacgccgtccgccataatgagtacgagcatagacgactgggtgaccgagatgcatacagacaacacggcttcaccagaataaagcactttgttttaccatagtatagtatctccttctcaaggaagctaccagcggccaacccccaccttggcctataaaaggaggaggtcggtcacgaacaaaggatgacacgagacgaaactctggatggctagaagaggaagacgactacaaacgctcgac

SEQ ID NO: 120605 - DNA, 460 bp, Zea Mays
aatgttataaacatacagactcccatataaataccgatatttttagaggtatcaaggaccacacaagtttcatactaatcctcgtctatgcccctacataaagggaagctcacgtgagagccaagcacttggttaggtaaatatgtagttagccatgggccttatccacattaaagtggtgcttcacttttggccgcattcaaatgctccccaccatcttcactatcgagttttcggtagaaacatcgtgggccttgtttcctctagtacatggtggcatccacaccactaacgcagttggtgtgatctcacaagactctcaccccactcaatataattaaaacgacatgtgcaagcattgagggatttgaggggtctattcctcacttctctgaattctctcactagggattaacctagaacaaaagcactcaagctaatcactaagtgattctattaa

SEQ ID NO: 120606 - DNA, 555 bp, Zea Mays
ccaaagtcggtggtactggtggcgggttaggagtatcttcccgaccgcgggaagtccttgcaccatcatgtgagcaagtccgtgatggcatctgaggcaaagaaacatttggaaaaaatataacatgccagcacacaccatcatattacattaccaaaatgtaataattatacagactccagcgtacaacttgacttcagtacttattttacataagtataacacctaaactatactattctagtcttcatcatcctttgttgcttcatttcctgttgcaagagaccgttcgtcagcaaggttcatggaacgagggggcctaaaaaggtccaactccccatcaggtccttcatttgttgttcctgatggtccagctcccattgcagcagcgtcggaaggcacatccgggtgcagtcgagcatacagtacatgtacttcttcatgtaaagtattgcagtacacttgcaggctttcgaggactgcactgagctctgccacacgagctcgagcttttgcttcacggtcccaagcgatcgaacacgagttaatggccca

SEQ ID NO: 120607 - DNA, 583 bp, Zea Mays
aggcgaggaagccaacacccgtgaggcctatcggaccttgaagatagactttgacaagaagctaaaggcactcgcccccaaaaagaagatccagaagaagaccactaaccagagatgccagacagagaagaagaagaaggcccctctagccctacctccccccagaatagatgactggtccgacgaagaagatgtatccctagccagcctcgatgatcttctcaaggcatttggggacaccttagacaaggaactcgcaagtacctcgaagaacgctctcgtgtagtcccacctgtagtaatcttatgcttgtaatgtgatggtgtaatgaataaaataacttggttgaaaacaatttgcatgtgcatgatagtgactctcttccctggcagatggcttcggataaaaccacgcctaccgcctcagggattggagcaggtttcccccgaagagctgaaggggaagtcgttagagaagaaagtgaaacccacctccccgcacctccacccctacccttagacctagcccaagttctagccaatctccgggaactccccatccttgtcgcccccttcttgttgtt

SEQ ID NO: 120608 - DNA, 552 bp, Zea Mays
ccctgctggattgttgggatcaatccagaaaggggtatatgactgatgtctggtacctttgtcaaatttaaactgggtcacaacctcaatcatcttcatgataaacggagcatgaagacaccccttcaaaggaaagcaggcggcatgaatgattacctgccaaatcatatcaaagacatttatactttctgagctgctgggtttcatgaaagagagaaagaccttgctctctccaagaatgttcatctgattacccccttttggaatgagggtcatcctgcagagggagttgatgtaacgataatacttatgaatgtttgtagactcccaatacttcccagactaagaaagatgaagatctttggcttcatctctagtaggctgccggaaatcatgtatcttgatcttgtcgccagagatatcattgtcagaaaagccaagaatgtgagcaaatcgacgatagctcaccttataccaactaccttcaatgtaaaagttcagataagggtagttgtatggactctgctcgtcagctggctttatccacaaagt

SEQ ID NO: 120609 - DNA, 552 bp, Zea Mays
attcgggttgcaatttggcagtttcggcaactttccttgtaggagcagggctcaaggttttcgttgtttctaacacaatatctagcacattcgcaattctttttctcttaggagttacggcataacccttttgtaccttcaacactgtcgcctctgttgcggggctcaaaatctctagcatttttattatttcttcaatttttggcctttcagccttatcaaccttcgtttcaactagcttgactgtaagcaccttcgacattacatccggctcttcagtgctcagcgcagacggaacaatttcttttgttttggcagctgaagacgccccttcgccaaattcaggtatcacggccggttcgatgtaacgtggccggtgagtcagaaccttcatcttcttgcccttcggctcagctgtgatggccgaagcggcaacctttccaaaaacagcaatctttctttttaccccttgcccttgcagcgggtaacaatagtccgtgtatacaaagccaatagcatcgaataccctgttcaaccttttcttattctgac

SEQ ID NO: 120610 - DNA, 607 bp, Zea Mays
taggaggtcttaaggaggctagaacaaacgaccagagagcttgaactaacctggagcaagctggccacggcgaggatgctttcacgacggcagaaaccgaatcggggagaatgggaaattggagagttctaggggatgattcgaggcaagcgtgggtgctatggatgcgtaattatcctacggagctcgcagtgcactcaatttatagagcccgtgagcggtggccggtgaaatggatgaagacgcgcggcggccggagataacagggttactggcacaagcgcttagtggctttcaccgtggcggtccctccggcgatcaccggataagcctaacacgactaaccgcgacgtggtaaggcgcctgggcacgtggcaaacgatcggcaggctgccaacgccaggagcttatctgcgtaggccgcaagacaagggggtacggcggccagccactcgagttatccccaagcgaagatctttttacctaggagcattatccaatcaccggtgagcacgaatcgcaacggcggcgtgaatctaggcgcacggtcgtcagcggtcaggtgcactgcaccagcgatcatgttcagggcactgtaccattggag

SEQ ID NO: 120611 - DNA, 317 bp, Zea Mays
tggaaattattaaaccactgtcctagttcaaacctacactagaaaccataaggagaaattaaagtgaggaaaaaacgaataagggtaattaatgtcatcctaaaacccttgtaatttgtccactgaaatatataaagacaatacaaatccactatgttatccccaatgaaaacctaagcctaaagagtaataagcctaacccactagaagccccgcatggctaagaaaccctaagttactcctcaacttagttttctttttagcataatgttatttaatcctgcataatcatgacatccatgttcattgcattcgat

SEQ ID NO: 120612 - DNA, 437 bp, Zea Mays
cgccatatcaaccttgctagcgagcggagcggaagcaatattgcaggagagcagagaaggcctggatgcagaaaagcaaaaactagggcacggaacacggaggcgtgcgacagtgcggtacatatggggttttttcgggccaggcgccacttccaaaacgttggcatgtcatgtcatcacccggccgttatttctaaaatgcgggcatgccatgtcatcacccggccgttatttctaaaacgcgggcgttccacatcatcactcgaccgttatttctaaaacggccgacgtggcccattttaactcagcggttatttctaaaaacggtgacgttaccagacttcactcggcaattgtttccacggccggcgtggcccgttatcactcggctattacctataaaacgccgacgtcgccatcgatcactcggctattac

SEQ ID NO: 120613 - DNA, 327 bp, Zea Mays
ctttttgccttctatcgagtcaaaggtagaagaggtagcctctattgttgaaacaaactcctcaacccttgtctctggcacatctaacgaaggtgtcaaggatacctcaacaacacattgctccctggccatctctaatgaaaagcgagtgattttcaactggctaaggctggttcgaaaatggcaaagatgttcaaagcaagcttcgaaggtggagcaagctctggcagcagtaaatgcaaacaacgaaagtcatgccaaggatgctaggtgtcaccccctttaatatgcgtgattttttaatttaactgttgcactcactaacca

SEQ ID NO: 120614 - DNA, 347 bp, Zea Mays
atcattcattgctattgcactgttgtgctgttaaaaaatttgaccatagccaaagctttgtgcattgcgctctcgagcaaacgcttcattgtttaaggttagcttcgtcaaacggtgaaatcattgaaatggccagagtgcgatcaactgctagagtgtctcgtgagggggacgaaaccgaagctgccgaaacaacgccgatttcagaagtaatgaagcaatcaggtctggttgtggcagaggaggttgctgacgaaggtgcttctaatgccgaatctgaacaaactatggttgagggtgaacatgatgatgggagtgaagaagactacaacattctgatcccgaca

SEQ ID NO: 120615 - DNA, 277 bp, Zea Mays
gctgggatgaatgtatcccttttgctgaagatctgcgatctgaagcttcagttctgctaactcggtcggagccatgcggtatggtctcttcgcgatgggtgtcgttctagggatcagatctatgtagaactccacttctctttctggtggcattcctggcaattcttctggaaacacgtccatgaattcttctactactgatatactttccgttgctagattgaacatcattgggtcactggcgggtggctgtgcctgacaagagactgactttccc

SEQ ID NO: 120616 - DNA, 490 bp, Zea Mays
ctgcgagtgctcctcctctttgaaggtaaatcaagcctcggcctttggtaaagcgacgctactctcctcatcccaccacccaccatctttattcaattatctgcaattaagaacactaaactaataagcacatataaagaaggcgtaattatctaccgtaaatccattcaaccaaagatgttcccccatgaccttctttgtttgtcttttcctgtttgcacatttactgcagggacaacaaattctactcgctcctttagcagcctcactaaatgctcgttccaagaaagcatcagtcttgttgatccattcattggtgacctgaccctgacctgagcggcccatgtacatccactcaaggtcctccatcgcctaacatatatagtagagagtaacataaacaacaattgcatctacacaacgttcctactctctaaatgcttgtaagagaatatgtagggaccaactagtaaaaacaatataaaacaat

SEQ ID NO: 120617 - DNA, 768 bp, Zea Mays
gaagaagaggaagtcccattaattcggaagaatagtcggcgttacagagtcagtggggggaatagcgatattccttctctagctctgtcttctcttgttggcttgcaagaattatccatagcaaattttgatcaggctctcgaggatgttgttcctgaagatatgctgtcagagccaactgatggtgatatgatggacgtctgctctgacactccagatgtgggattagaggtatcccgggcagcatttcgtgcatcgtcgaccttggaaggcggtcttcggagccaagaggttggtcaaggtcgctcaattcccatggaggtgactgagaatccttcagccttagaggtggctgttgcagagaacccagtcctcaagggtggtgctagcggttgcccagcccccgagggtgttgctggcggttgcccagcccccaagggtgttgccggtgatgatccagctctgatgggcagtgcgagctgcaacccagcccccgagggtgtccgagcgagctccccttctcatacctccatggatgtccacgtcgggtcttctccaccacattttggtggcataatagcagcacatgcttcaaatgagggagtcgccttagaggtcggcgcaccggatgctagagttctgatgcctgctagtggtgttgaattaatccctggcgatgttcttcagattgtcccggttgatattccttcgtcgagccaccacctagcttctcgtgacttgggatttccttcgttcttttctaatctt

SEQ ID NO: 120618 - DNA, 321 bp, Zea Mays
gttttcgtgaagagtattgtcgtcgtcccaccgttgatgatcttaggcgagttttagctaagggagaggaggggattttcgggcacgatggagagtatagattgcatgcattgaaagtagaggaagtcttccgttgaatggaaagggccctttacaagggggaaattagatccccaaccatcatgcttgcctagcatgacttacagatttggcatgttgttggggttagcggggttgaacaacaatgtcaacatgcacaaccaatcattgttggccactgctatgctcaaaagagagtgaatggatgtgagtacaaccaag

SEQ ID NO: 120619 - DNA, 518 bp, Zea Mays
gcggcttatgtcagtctcaagcttcgggaaaccaatattttttgacagagtaccaataaccttcgctccgatttgatctcggacgcagcccaatttttcatcgtcaacaccgccgaagagtagtgcccctggttgatacccgcaggatatggcgtattctctcaactcttctttctcagcctccgataattcttgcccaattaagttttgaaagttaaagttttcttcttccgaagcttcttcagctatttccttctccttctcaggtactgtagccatggtttcttcagcggctgcaacagcttcttctgtggccatatccagaagtatcttgtcaatgttagaaagtgtgctttttaaatgttcatcttcggctgtggaagcttcggcagctgcagcttcagtaggtgcagcttcggtggctgttgcactctcaacaactggtgccttcgaagccgaagctgttggtggtgtcccttcaataacttctgtcactgtaacaattctttgttttttcg

SEQ ID NO: 120620 - DNA, 540 bp, Zea Mays
aagggaccccccggtctcggaacgccgacagggtgattgtggatagactgacgaaagtggctcacttcatacctatgaggactaattacacgggagccaagctagcagacttgtatgtgactcggatagtttgtcgacatggggtgcctaagaagatcgtgtcagaccgagattcacagtttacttctcggttttggaagaagttgcacgagtgcttggacacatagttaaatttcagttcagcctaccatcctcaaactgatgggcagaccgagagaaccaaccaagtattggaggatatgttaagagcttgtgctcttaaacatggtggcagttgggataagagcttaccatatgcggagttctcctacaataatatctagcaggccagtttgaagatgtcactgtttgaggctctatatggcagaaaatgcaggactccactgtattgggatcaaactggtgaacgacagttctttgggcctgaaattatataagaggcagaagaacaagtacaaatgataagggagaatttaagaa

SEQ ID NO: 120621 - DNA, 511 bp, Zea Mays
ttgaatagctctctgataagtcgctccagcgtttttgaggccgaacgacatgaaggtatagcagaaagcaccgaatggagtgatgaacgctgttttttcctcatcttctttcgctaggctaatctggtgatacccagagtagcaatccaagaaggacaacaaagaacatccagcggtagaatctaccacctgatctatcctagggagcctgaagggatcctttggacagtgtttgttgagatccgtatagtcgacgcacatgcgccaatccactttattctttttgagtacaagaacaggattggctaaccactcgggatgtaacacctctctaataaatccagctgcgaccaagcgagccagctccgcgcgaatggcctcccttttgtcgggcgtgaaacgacgtaacttttgccgaataggcctcgcctgggggtagaccttcagtttgtgctcgaccagttctctcgggactcccggcatatccgcaggttgccatgcgaatatgtct

SEQ ID NO: 120622 - DNA, 327 bp, Zea Mays
tgtgcctgaatcagatcagtgactcaattggtggtcagatgttcaaaactaattccctttttcttttggaagaaaacaaacttctacgccacttccaatttcccttcatgaacagacttctaatgagcattttttccaggagacaggagctatgttatacaactagtgttaaaaggcagtatggccaggactattagaagttaagcagctcacagtgatagtgtgaacaagatagaaagctaacccagtcagtagtgttggggtttgcaccagcttctaacaagcacttgatagcttcggttaagccttcctgtgcagccgttgcca

SEQ ID NO: 120623 - DNA, 530 bp, Zea Mays
gctgtccaaaaaaaaacagattttcaggtgggtgaacagcagtagtattagcagtttctgggaatttttcgtgggtaattagtgttaaccagtatgagaatcatgtaggtctttgtcttatctttccaatgagtacttatgcgcttgatttggaattatattttaaaagatatcactgtttgaatccgggtatgtcgctgtccaaaagacaaaaaaaacagattacagggttcatcttgtggactgttttgggctaattagatgttggaatttaattataaattgtatacaaaacttgtgggaattttatgtagatgcctctggagtttttgtttgttaccactgctgtcataagtttaaagttatgaaattattaagcagcgtcgctgcagtttggtgggtgtggggagagatgtaacccgcggcagggtttgagtttgtgcgtaggtgcggcgttgtttatgagcctgattatgtgaaattggtgcactaagttgtctttcaaaaacaggtggtggacttccggatcg

SEQ ID NO: 120624 - DNA, 695 bp, Zea Mays
gacaacttttattttactcgatcttttaccaacattacaccaatacacacactagcacatctcaagaccaccaaaagcaaggctggctggctacatggctgatattcatataattaggattgaactgcaagcgtttggtcatgatcgtatgcttttgcgtggcatgcatgcatatatgaacgactatagctagctcatacagtcgccaacagccagccattcaccaacacaaaagcttcctttgtccattccaatccataaaccctagcaagacctaagtacgcaggtgaagaaaagtttggctccgatccagagcaagctaggtagcttcatttatggtttgcatgcatgcaacgcttctttcatatcccggccgggccaccgaacctctcagaacgacacatacgtctctctctcttccaaacgacaacacatatcttgatccaacagcatcagatcagccacactgctagatcatgctgcccgatgtatatgcggctggcctgcaccacccaccgaacgtacgtacgtatatacgtggccggcctatatatagtatcggatccaaggctgctggtctgctagttgagcttgagcaaggagtcatcgagtggagagagtgacacacacgacacgtacgcactacattggccagcgtacgtagtagctagctagctgcaactagatcatggcag

SEQ ID NO: 120625 - DNA, 728 bp, Zea Mays
ctgacagtgactaggaccaagtttgggagctattttgagtatgatttagtgagaattaaagtatggttgctatagcaaaatcaaagttggattataggacaacaactttgttaaaggtggattaacaagttatcatatgaatattggacatcttggcactgcaaattgctatgtcaggcatcctgataaggtttctgatggtacagtacatagaaagatctctggttcagccccccgcaccatcggtgacctctacgcaaggattcacgctgatcatggcgattcgtgcaggactcgagcaggataatactgggcgggtgaaaagattggagggggagcggatttggtcgcggggtgaagcttatcaaccgcgcttgtagccgtgcgacgtggccggaccgccggtgtcatcgtggaaactccgacgacctcaattatgccatgccgtggctctttactgcacagtagtaaccatggcacgcctaggctcaccatctcagaaccgctgcaccggtgaacgccacaactgagccaccagtgaccttcttcctctccgaccgccagcacgccatgccaaaattaggagccacgtcccttggaaacaataaattggtgccccagcctgctccgctaagtaattgtgcacccagtgaaccagccctcacctccaatcatccctcacaactccccaatttgggattcccccaaatcagtcaaaaacaccaccg

SEQ ID NO: 120626 - DNA, 733 bp, Zea Mays
agccgacaagcatcacaagcaatcgtgggtgttgaaacacggacaaggagggcgagagcggacctagaggtggctggccacggcggcgcgcacaacagatttgggggaaacacgaaattagggtgctacggtggacgatcgggagcgaggagtggttcgctgggtccgtaacgagtaggtggaacaggaggtgcctccaatttatagactccagccaagcttatcacgaattttggattaagatcgaggttaccgtggccaggatattttacggtggcttgctcactgtggcgcgcgagagggaattggtccagggacgataaccagttgcttgccacaacccttacaacgcggaggagatatcattgcgtgtcacgaccagagaaatggtgagctccggtgatgccaacgcgactgaccgtggccatacacgatggccggtctggctagtgactgggttcacccctccctagatattttcaccccgtcccggtgttatctatctctcccgtggaagatcacccaggcgagcgtgaattgcggcgaaagatcaccggcattaggttcatggcaccggagatctttccggtcactgtgccatggctatcttcgtcagtccctctgtccgagcaacttgcagggccttgtcctcaattttttgtgtggcaactcactctcctgcctgtatcaaagttgttgtccaatgtactagctacaactttgttacaaagac

SEQ ID NO: 120627 - DNA, 449 bp, Zea Mays
tggagagtgagttctcctctcgatctagtggtggtgtggtgactgtgagagggctagaggattatccctttacaagtcgtgattaccatctacctgaatcctccttttagcgcgacatgtattcttgctcatccggaattcagttgcccctcatctaagttgtctctgggtatctagcacttctggtacgctcaacctccctgcacgaggtagtagcgcatgacttagttgtctggtctttgcctccccaggtcgagctcatccagcttggttgtggcccgagggcatgccttgctaggcaagtcatctggaggcccatcaagcggtccatgaagtgtttctgcactctcgcccaaggtcagcctcgggcgagtcatgactgcttctcccgcctagagatggcttcaggtgagtcatgactacttcttccgcctgaggttggactcggg

SEQ ID NO: 120628 - DNA, 602 bp, Zea Mays
caagcatgaaaatgacatgttcagcaacccattcaaagttgctgacatcgatccctataaaacattatattgttctttaagaaatatagcaatttttcttggatgaaggaaaggatgtccgtgtaatgttgtactacagcctccaaagacatgctgtttgttaagaagtactagagttataaataatccatatgctgagagttttgtaccctcttgctaacctcctttacttattattattgcattcattagctaggcttctgcatgacgagtcctcttgcagtaggtgaaattgattagataaacttcattccacatttgacgtgtagatagatagatatacgtaggttcatatgagtgacgttgtagaaagagcctacgatagttttcttattgacccaacgaaccacctgctgcgctaaggccacacattgcccaaattaagtcacctcccggttaactacggacttgctcctgaacgttctgtttgtgcatttctttcatccctagtctagtcaagttattttaaccatcagtcatcctagaatgcgttgagtttgtgtatagtttatgatcctatacattggcttaacactataaat

SEQ ID NO: 120629 - DNA, 1449 bp, Zea Mays
acttcctcagatgattccaatctgctgctccttctcactccttccgtagctacgccttccataggaccaccttttttaccaccagcaatcatgctagcatcctcaacattgctcagatgcaatttctttttatcttggacgggtgaaggaataaattcatcatccttgatgaattcatccaactcctgtgaatccaacagatcatcctcactatcattgaattcctcatcctcatttccctgactatcaaggtaacctttagggtcttcagaacctttttccattttcatgctgtcggaatgttcagacagggaaccagcaacattggccttacctgaagaaatttttaagggagattttcccttgatatccttgccagagtcctcatcaccactcttggcctttttagcatctttgccaagagagatctcaccaaacccttgtctatcaaccgaagccctcttgcccagattaacagagtcatcattccaaccttcatcagtaatattgtcaattttgaagtaaatgtcatacaaaaaaggtttgacaccaacttcaatgataggagggatcatagcaacactcttcacatgaactttaaacctcacaatttctttagagtttaaagagttaatatccacttcttccactgctccaatagtggatcccaattcacaaatggcctgatagttttgtaactcttctggcacattctcagcaacaatccacacagaatgcagtttagatttaggcttagcctgagaactccaagaagagacagagattttggctccagacaatttcattttcaactcggggaaattaatcatttcatccaatctctcttgagaggggaattgcatgagaaaaccagaatggcacttagtagctttccaagtgcggccccaaggaaagtgaaaaccaaaatccttctccagatcatcggcggtgatcagaccctcaactatcttaaccaagccaataaaactacgtttaggtttgttggataggggtttggcgaaatgagaggaataaaaccctagcccatctgccgccataccaacaatcggcatactgggcttattctgtttgggaagaacacaccgagcagtgttgtgggtttctttgcgacagatatcgcaccacaaagacttaaagcactccctagcatgatgaccatctaaaccacatttctggcaaaaaaccctacgcaccaactcattctcagattttggaatagggggcggggggttttgaggatacctggcaaaacagcatcaccaggagtggaaacggtaatatcctctttgacctcagattttccggatccagacttcaagcgccagctgaggttccgattctttccccacgactgagaaccctgcggcgcctccttcggaccccatcgatcccagttagggtttcgatttttcgaatccatcagagccg

SEQ ID NO: 120630 - DNA, 480 bp, Zea Mays
cgcgagtagcggttatgggtagcatattgtaccgtcgctggtaacgagtacgggtttgtaaatgttctacccgcgggtttcaaacctgttgccatccctacctagatggttggacgattcggtcatttggctcggacggtccatgattagagtgattagattaatttaggctggagttatatcatgcatggttaatctaacaaaatcaagagaaactattggatctcgcctaggattgggtctagacctccaccctatatatatgaaggggtacgactgattgataacacacacaatccaatcgagccaatctatctacattatcatgccttaggagtagacgtagcgtagctttatttgtagcttccgaatctcaatcttcacctaccttcggctctacgtcatctagagccgctttaggtggcctgtcgaccccaaagtaactctatgatccctcctcctcaacgggtccctctcgag

SEQ ID NO: 120631 - DNA, 756 bp, Zea Mays
gtggaattgagccgatacttcacgaataggtttatatgggtaaatatgagtgaagtgtgtgcttggtttgaatttaggcgaagaaaatggaatttgggcactcggctcggaaacgatcgctcgaaacagggaaatgtgtgaaattgaagcctggtatatcggattggcgtgaaaataggtgaatatgttactagaggtgttgtgaagatgcctgaaaagtttgatttcaaatcggagcatgtttggctggtttgggcatttcaccaagcatgtggcgcgcggtggattagggttttggtgaaaaagctatttgaggattgaaaccctcccaaagggagctagaaacctgtagggatactgaagagatacataggaacatctcccaccacatggattcacagaatttgataggaaattgagtttggcactcaaggggtggaataggctttacagagttgtgaaacagagagagagaggagagggagagctgctcaccagagaggaggacaggcacaagcactggaggtcgccggtgagggaagattgcagtcagcgagagagatcgctggagaagtgactggaccgcctgagagggcagagagctagagagtggggaggaaacagagagcctctggctcggcttcgggctggaggcgattttttaaaacgcaatatgggtgcaccggacagtctacagtgcctgtccggtgcacaccggacaacgcacagtagctgtccggtgaaccaccggacagc

SEQ ID NO: 120632 - DNA, 436 bp, Zea Mays
tgagcacttgggtgtctatagctactagagatgaggctcaactctcttgatatgttcctcggttctcacactcctcaaatggttagttggggtcctatttataatccctaaggagagatatagccatagcaccctcaacaaccactacttatcattatattggaccattatgttagggtttgatgcctctcaaagacgacaatgtcagtattatggaagcataacctttgccaactttcagggccaatttttatggtgtataaccgacacctaccatcagaccagtgcgacgacccattttcttctgtagaacttctttagtgacaatttgactctgtatctaatggttcatcgataattgaaaatgatcgttcaacacttttgagtgtgattgagtgaccatatggttcgatgcccttgccacggtggccccgat

SEQ ID NO: 120633 - DNA, 554 bp, Zea Mays
gttgtgttcatgatttagaagtaatcgtgttgtgtgaagattaggtttaagatacagattattatgcgaggggtgttttagtgaatgtataagttaggtgtgattgaataagttctatatttgtggaatatggtacattagtgatgcagtttatgttactagcattttcttctcagtttgcttgcatttagctatttggctttcatctcctagtaaagtgtattggttgacaagtatatgatgtatggtcaaattaataatgtgaaggttaggtctagtgtttctaacatctagtcgataggttcttctagagttgtctatgccgattttagttaattggtacaataatgtcttgttttagtagttgttggatgctatgtttgttgattgattaaatgtcataaatagaagttgagcgcttaagctaaaccctaaacactagccctacgagggatcagtccaatttggtgagctgcctgcaatcacaggttaatttggtgagctgcctgcaatcacaggttgaagtggcccgaaggggtttttgtaatgtgacc

SEQ ID NO: 120634 - DNA, 640 bp, Zea Mays
cttggcgatgttgtttgtgcatttgtctgactcgagtgcaaagctgaggcatgcgacgtatctgtatttgactccggtgggtgatgtaatgatcgccgcggcgcctacacctgtgtgacaccatgcgccatcgcattggatagtccagaccgtttctgcgtgttcttgttgcggccccacaggtcctgtccagtctatgatgaaatcagccaggacttgtgatttgattgctattctaggctcgaatgtgatgttgtaccctgagagttccggatttctgagcagctccccaagacccctgttggaagtgactcgtactttgtgtgtctggaagtaatgtcttagcttgcgtgaagccaagatgactgcatatgttattttctcaagtttagtcatgttgcattttgaacttgtgaggactttggagacaaagtatactgggcattgctgagccttgccgtccttttccttttcttggaccagcgctgcgctgactgcgctgtgcgaggccacgatgtataggaggagggggagtgctgggtctggacatgttaaagtcgccaagtcgaatagatattgtttgagagactcaaaagttgctgcttgctctgggccccagacgaaggctttcacacctcga

SEQ ID NO: 120635 - DNA, 406 bp, Zea Mays
gtgatattcaaatgtcattggtttgaccctgaagtgacgagatggacacattctaatcttgggctagtcgaaatccgacaggattccaccttagcaggagacgatgtctatatcgtggcccaacaggccacgcaagtgtattatctcccatatgcgtgccaaacgaaagaacatcttaagggttgggatgttgtgtataaggtatcaccgcacggtaaattacctgttccaaacgatgaagattataacttagacccggacacctatgacggagagtttttccaagaagatgggctagaagggcgatttgagatagacttaaccgaagcgatcggaatggaagtagatattgaaatggttgttgatgaggaggatgatgaggtgcaaaatgagaatgacttagaaa

SEQ ID NO: 120636 - DNA, 314 bp, Zea Mays
atagggaaatcagctagcgatagtccaggtactaaatctaaacttaagaagcccaatgtgcccaaacaaccgagaaacccactcagattatcaatctggcacaagaggctagaaaaactcagtgcacaagagctagagtcgagaggcatgacatgggcctctaatgggagttctcaagatccaggtaaggatgatgctttttgaagaagtggagcaaaggcaaacaaaagaaagaaagcaggtacaagacgtttgggtgaaagatttgccccagctcaacaaagctattggtcattgcatcgtccatatttttc

SEQ ID NO: 120637 - DNA, 448 bp, Zea Mays
gttcgcactccaagctggaccgaatcccccacagaccaggaagtaactgaagcaggggctttgctagctgaagttggattgctgaaagaaaggggtttgactgcagaagctgtggtcgctgattttgttttcaagaacattcaaccgctgaaagacagagcatatccagcctatctgtatcgaggctttgctgattcaactcgggtaaccaacagaagaattcctgccgtggacttggtgggccggctcgagatgatactcagaggcaaggtgtcaaacgtcggcgctcctgttgcatattcggcttggaatctacctccttccaaggcctttaccagttttgtgtcaaatcctcctgctggtgatagcagtttgggccttagagtgtgaccctctcccaaagaggttagtgctttggttgcctcacttggagaaattcctgacgacg

SEQ ID NO: 120638 - DNA, 709 bp, Zea Mays
tgaccgttgcgctagggtgggtgttcgcaaatttttgggtccctcgagttccgctagtgaccatacttgtagccttcgaggcgtaggtattcacagtctcgaccagcttccccgtcaggtcctttcgttcacgttgcgaagatggggatgaattcgtcccatcgatgctttccccaaggtatagccatgggggtctctggttacgttgtcctgaggccccattcccgtagagggtgcctcagggaagtacaagcggtgtgatgttgtgttttgcttaggactcttcgatagaaagttgcagactcaaagcatgttgtagaaaagggaaaaacatagttggtttcgcgatcagagcttccattcattatcctgttgagtctgtttttcgttcatcctacctcgtccagttcctggtacacttcttgtcctaaaagttaccaacgggaaacaagcagaagggaaaggaagagaggaaaaatcaggagaggggagaccaaggtatggtctaggttctctcctccgcttaccgtgtttgtggccaagagcgttcttaacaacacattttatttataaccgctcgagggtttcacaaagagggcgcagagccgctccggtcggtcatctacaatgtgatctttgggcacaagcatgcacggcatcttgtcctaccgagactgtcgacaaagctatggtggtcggtcgatcctcc

SEQ ID NO: 120639 - DNA, 507 bp, Zea Mays
atttactcccgctactgtgctttttgattcgggagcatcccattcatttatagccactaagtttgtggaaaagcatggcatcccctctacacccctagctatccctttggtcacccgaaccccgggatcagacctcctatgccaactcaggtgctcccaagtcagaattctcttaagtggggtagtgttcctggcagacttaaccatcttgccatcccaagggattgatgtgatcctaggaatggattggctcactaagcacaagggtgtcatcagctgcgcaagtaagaccgtccttctcaccgatcgccaaggaaaagcagtttcctatcaagcccagccgcccgcaaacgatccaatgatgtttaatctggcagcagaagacatgtccgtaatcgaagagtttgtggatgtatttccgaaagagttgcctagaatgccaccagaaagaggagtggagttctatatagatctcattcctggcactgcgcccatcgcaaagagacc

SEQ ID NO: 120640 - DNA, 395 bp, Zea Mays
cacggtttgtgaagggtttaaaaggggagttgcaggggcatgtgatggcccaattacctcggacagtggatcaagcaatactgttggctcatatacagcaagaggtgatcgaaatgaataaggccaaatttcagaagaatttcctaggggacaaggtgatggtgaatacaggaaaaagagatcctagagcaagagtggtttcacctgatttggctatggagaggcagttaagatattttcgaaggttgaatggtttatgttttgggtgtggagagaagtacgagccaggacatcaagcaaaatgtcccaaaagggaggggcttagttgcaccatttgactatagaagatatggggttggtattatcagacgaagtgctgcaacagctagattagg

SEQ ID NO: 120641 - DNA, 399 bp, Zea Mays
ggtttttttgtcgcaaacttcttccgatgctacgattttgatgatggcgacatatcagaatttgttgtactggtatgttactaaattagtgttttgatcatgcatatattactcctccatacatcttcttagcattaattcaactattatgactatttcaggatgaaccattggaccaacgtgcttttgttctgcattacctgacctttcatcgcaacaacagggtttaccccttccctgcagaactgatgcctttcaagtatgttctaaggaaacgacgttgtttgaaagccaagacttagatatcatagctgaacaagattccctctgggatcccaaactgtttatgttacttcttaaggcacttatgtcaagtgttgctcatttgtatgctactcc

SEQ ID NO: 120642 - DNA, 619 bp, Zea Mays
gtttggttcacaccttctaaactaaagtttagtaacttttagtccataaaataacaaatagaatgacctctctaagtgctcctaccgtgcgcttctggcacaacccatttgtgacatgtgaggtcattgattttttttccatggatccaacatacgtgatttgagaggtcatgatctatgtatcagaagcgggctctaagaatgtgatttgagaggccatgatctccaacatacgtgatctaccgggctgggctccatggaatcagaagcggtcgaggccgggttggagccccacccgttcggccactccaccgctgactctgttacggacagtacctaagagcatcttcaagaggaactcttataattgtggccttaaaagctaaattggacctgatttaagttaatttggatcaacaattttttctcaactccaacagcaactcctaaacccacgtggtagttaactccgtgagattagacgcacaggaataggtcccctgacttagagcatctccaagagaggacttaagtcgggtcctatattcaaatataggagttaagatctcaaaatagctttcaacaaagttgttattttataattttttatcaaatgaat

SEQ ID NO: 120643 - DNA, 301 bp, Zea Mays
atcctcatccgatgagcaattggatctcaacaacaatgtcccttatgctcagcactatactcacgaaacacacactcaattgactgggcagtcaacttagtccactcacgaggtgggagaaacacagcatacaaccaaacatatgaagacttgaatcctcaggtgtcttgccacaaagacgcttaaaaggaatccctccttgaagagttgaggaaggctagatgtttgtcaagtagcagtagaaacaacctcagcccaaaagtgaggaagaacagaagaggcaaacataagagcacgagca

SEQ ID NO: 120644 - DNA, 521 bp, Zea Mays
gtattttgcaaataagaccctagtgtagggtacttaaccttaaatggggattagaagagcaaaacatggactaaatagagaaaaccccaaagcttaagtaaaatggtcataaaatgttcctaagaatggacctacattacatttacacccctgagatatcaaaaatcctatttggaacccgggaaaaccctaagcctaaaccctagggggttaagtgcaaaattagtccacttttggactaaagtgcaaaaaccatgttaataaagcatcttaagtactatggttcacaaatatgtggatttgtaagctaaaccctggattttggacccatttgcaaaaaggaccccatttgggttctatgctaagtctgaaatcagtgttataagctcaactttggagctttataactttcaaatcagtgagaattcaccttagggcaccacatcaaatttgtagacctaacaaaggagaacaatttttcttaagagtgtaagcaaggttgttatgaagaatttggagat

SEQ ID NO: 120645 - DNA, 533 bp, Zea Mays
caaaaaaattcgagaagataattaaaaaattgtttaagtgttttcaggaatttcagagatcctttgtgaatttctctaggccacaatacaactctgtttcaagtgaaattttgtgtgcttccatcctttgtgtttttggatcagtggtaaaaaatgtagaatatttcgagctcttttgatggtactcctttggaaacgcgcctttgatttctactagtgctgaaaaatctgctctatttacaaaactgtcattcccactagatacttgtacctcctttcttgtgttttggtacaactgttctattacattttctaggccagcaactaggacgagtacttggaacacttattcagcattgctatctgttactgacttgtgtaccacatatacatatatttagtcagccttcccatagctccagttttctctcgagcagaacatgtactcctttgcaatcacacccacgctcgttggacagtcacaccggtcaccgtttgccacctgcagtgctggtaagaacgttgtaagagcg

SEQ ID NO: 120646 - DNA, 461 bp, Zea Mays
gccagggccagggccagggcagcggccgtgcagctgcaccgctatcctactggggcggtgctctacgagacgtagcgacgtgccacggatgacttcgtcgctggcctgtgttgtgttgaaataatggtaaataaatgttgttattcagtttggatttggaattttgctcttgttggcgaatttttgtttcgccggtgcttgtttcctgtcctgtttcactttgttgacccatcaaaatcagctacgccatgtccagacatgttcggaacatgcgttctactagcatgcaagctggctgtcagtgagaggaggtaacatttgaatgaatcggtaagtttttgtttgtatacaagcgagatctgattcacggtacaaactgctgctgctgcgacgaatctccgagaatgcgagtgagctgaacagagaggagagaaaacaatgtgggctgcctagctgcatcg

SEQ ID NO: 120647 - DNA, 345 bp, Zea Mays
ctggaagctgttttgaggccttcgaaggtagcgacgcttgcaccaacgaaggtttccaaggacaaagtcgatgaaccgaagatgaccgctaacgtagatatttcttccaacttggacaaggatggacctttggagtccattccatcaaaagaataatctaggagcctaccagataaaatggcactgccaaaacctgaagtggcgccacatgaagatcttgaatacattattcgccatgcttcggggaaacaactaacgaaagaacaaattgtcaaagtgcaatattatgtaagagacctgaggtttcctcgaggctctttagtttacgggggcaatgacgaagat

SEQ ID NO: 120648 - DNA, 474 bp, Zea Mays
atggatccatccaaaattctgatttggaacgtgcgaggtctcaattctcgtgctcgccaagattccgttagagatctagttctgtccgttaaggttgagatggtatgtctgcaggaaactaagatgcaatatattgctagaagcaccttagtctctgttttgggttctgaatttactgagtatgttttcttgccttcggatggggccagtgggggaattttggtggcttggaaaaatcatttgagatacacagatgcgagcagagttgataatcatagtgtgtccattcagtttcataagcaggaaggaggtacctggtggttaacctgtgtgtatggtcctcaaggggatgaagagaagatctcatttttgcaggagctaagaaatgtcagagagggttgcaatggaccttgggtcgttgctggggatttcaacttaatttacaaaacctcgaacaagaacaacaacaatttc

SEQ ID NO: 120649 - DNA, 448 bp, Zea Mays
atttgctttgtatgcttcgatacttacgcgggacacaatcaagatgtttactctatgattctgatagtccacttcagctacatgcatactctgatgccacttgggcaagtgaccctgttgaccgttgttctactataggttactgtattcttcttggatcctctcctattgcctagaaatccaagaagcaagcagacatatctcgttctagtgctgaagccgaactttgggcccttgctactaccactgctgaaattatttggctgcgctggctattggctgatcttggtgtttcttgtgacactcctacacctctattatgtgataacatgagtgctatacagatttctcatgatccagtgaagcatgaacttactaaacacattggtgtcgatgcatcatttactcggtctcattgtcagcagaagactattgaccttcaatatgt

SEQ ID NO: 120650 - DNA, 617 bp, Zea Mays
ggaagcaagtaaaaaaacgaccaagaccaggaaagcccaagcctatgacaaaacaatgtctatttttgcttactggtatcgtattatagatgttttttttttctgtttgtcttggcttaactgactttggcgggtaagtgctttggcacatccagtcccaacaagcaaattttgtgctcataatgtaaaaattaatccaatgcagttggtctcacagcacatcgtttatctttggtggggctctacctctacttcacaaatgctctgtatctgtatcttggtgggcaaaggcgcaaagctgcatcagccatgagtccatgacatcagagacggttatgctgatatgcatgcatggtattccccttacacaaaaccgtaatatctcattctcattcatactccataatctctgcgcataggccatcttcgattctttttatatttaataaagacgccatcttggagctaccataccaagatgcagaaatgtcgtgcaaaccaaaggcaccgaagaacagtcgagacctagctttgttggtaagccaaacctagtcttcaattctctaggacccaaaaatcgtgtcttaaactgtcagtctgtcactgccagaaaatgc

SEQ ID NO: 120651 - DNA, 403 bp, Zea Mays
cttctatgcttgatattggcaccaaacgtggtatttacagggacattgagtagagggggtacttgtaagatagtgtggagcaatggatcttctaggtgtgatcgattgacctccttaatggttggtcaactcttggatatatcgcctcatctcctatgcactcctaatggcgacaaacaaatatcttaggttgttcaaagcaatttggtctctcggctaggtcgactggcctcactaagctccacccaaagtgagcccaacaacatatttcgtccatcctaaggcagtggattggtcattagtccacatgatcttgcatacgagtttttagtaaagtgaaatttttttggacttgttgtatggacccatgaatccaagtgacctccatttggctccatcgtgt

SEQ ID NO: 120652 - DNA, 308 bp, Zea Mays
aaaccattgcctcatccaggatcctggccacttcttccgaaatgttggggcagggcgtctcgcatcagagcggtatacgaaggaataacaaccaaagttgttatgatattgttcattcccaattgccttcgtctggtaaggtaattcgtgtatattgcagtagcagtcaacgtctagttccagcccttggctcctcatcgtccaaataaaaaccccgattttaattaaagcttcgggggtaagttgatgaaggtatatctcgaatgttttaagcacttcgaccaatatcttatgcaaaggaaaccgaa

SEQ ID NO: 120653 - DNA, 457 bp, Zea Mays
taaaaaattgtttgggacatttcatcgaacaacctgcacgcatagctcatgtatgatgtatttagaagaataggtggggaggcgacgggacccgacagatatagacatcgtcgttatcagcacgaagtggaggatgatgtgtgcaagaagttctagcttccgcaagcgtagctcggacgaaacacagtagtggctgcgtttgcatggcggcggcgacgacggagaggctgtagggtaaaagaatggagggagaaatcgcaggtgaggcaaggcgaggaaacgaacctggcacaattagaattgttgctggcaggcgagaagaacgacatgttcgatgagtgagaaagccatgtcggtcgtcccaaaaaacattggatggatgcttttgtactgaaaacgcttcgagagactaagcgagcagactatcagatgtaagctagcagccgagcgatgcgca

SEQ ID NO: 120654 - DNA, 414 bp, Zea Mays
tcttttggatgtctgcttccttgatcctcaattggtggtaaccgaaccttaggtctatcttggagaaatacttggctccttgaagctgatcgaagaggtcgtcaatccgagggagtggatacttgttcttgatggtaacttcatttaacgagcggtaatcaatacacattctcatgcttccatccttcttagagacgaacaagactggtgctccccaaggcgatgagctaggacgaatgcaccccttttgctgaagatctgcgatttgaagcttcagttctgctaactcagttggagccatgcggtatggtctctttgcgataggtgccgttccagggatcagatctatgtagaactccacttctctttctggtggcattcttggtaattcttctggaaatacatccatgaatt

SEQ ID NO: 120655 - DNA, 612 bp, Zea Mays
aaatttcagaagacatttaaagagtcatgcactgaatggctataattgatagaaacaatgtgcaacgagattcttgggaattatatgaagaaggaagaccagttgatgactgtcgccttcggctctcggccgaaacgaaggttgaaccgtattatggacgctcttaactttgagtatcctgactatgaaaggcttgacgaagggggcaaaacaaaaagagttgtcagtattttgggtaggcaagctacccgatctgtcaaggaggaccagaaagattcgaagaaacagaagactctttcggagccgaaggattcaactcccaagaagtgtaaactcgtcaggatatcttctgcggatacgaaggtacaagatgtgccagagaagactataggtcctccttcaccctctgttgctgaagttttggaaattctgaaggttatgactgaatccataccatttgcacttctaagtcctctaaggttagatctgactagccttttacgatcaaaggaaaccgctccatctgtggaggagaaggttggggggcagaagaaacagcggatgataaatgtgatgcgagctattgagcagacgccacccccagctacggcg

SEQ ID NO: 120656 - DNA, 493 bp, Zea Mays
ttgctcgacaggacctggtcggcccatccgccttgcagggttgctcagcatgacctggtcatctggtccatctcacaaagttgctcggcaggacctggtcagcccgtccaccttgtagggttgctcgacgaaacctggtcgatttagatgggtcattaagggtcatgggctcactttgggtaccccattcctgggtaccatcagtagccccgaaccttcgtgcaatccttggagttgttcggaggctttcttgttggcaacttgagttttaggtgcacgtaagagcatctactagatgcagcccccgagccctcgagtaatttcatggagttgctcgaaggctttttgccgggatctagggtatcgggtgtgcataatcgcatatgctagatgcatcctctgagccttcgagtaattcgttggagttgctaggaggctttttgccagtaactagggtttcgggtgtgcgtaaccgcatctgctagatacaacc

SEQ ID NO: 120657 - DNA, 903 bp, Zea Mays
ccagccctgacatgattgaagatgaggcatgtgaacatcgtgtccaacgcttgaaaatcagactaaatcgaggtcctctcaaaatcttgccaacattaagcacccttgttgtcgtagcttcgtcaggtagaaacagaagaaaatcttctggcttggtttgatgaatcttcatatcctcggtcttgatgttgaaactgtgagcaacttcctcgatcacctcagaatcagtcacagttggcctggttcccactattgtaacgaagagagccctcctgagatttgcctcttctcgtgccatgtcagcactgaactcaagaatacaggatgaccttgtcccccaacccatctctccctgatcaccaggcctcggatcaggggactggctaatcatcggagctatggcttcatcagacgaggtcagagacgcctgaccaggggcaacgataggcttctttgaacctttttcgtgcttcggccgtcttctctttcttttgttgcggaggcatctatgagactccccctcagcagccatcctaggggaatcctccatcttcgcaacaacctctggtgtgttgatcttaacccacaccaagcgtcgcctacgggggacagcacacgccgaggttgctgacgaggccccgcgctgcaccgagaggcgctgccacacagacccccttgcttgttgtttttccaatctctgccacactgtcttcttgctctgcacttctcgacggcctggacacctgacagcctgatgtccagtcttgaaacacttgaaacagcgcgtgggtcgacggcagacagcagcaaagtggtcggaggagaagcagttgaaacaccgaccccgaagatccacaggggactctcgacgaggccgatgatcacctcgacacctcctcttac

SEQ ID NO: 120658 - DNA, 491 bp, Zea Mays
tatgaacttgcctggtaggctagagctgcatgaggaaacagtgcatcatgcactattaaataacttaacaaaaatactttgagtttagcatttttttagagaggctgcaatgcaatcacaattgtgaaaattaccttgacaatatctgaggaaaacatgcaacaatgccaatagctcgacatgcagctgatcttacactaggaaccatatcatttaacgccgcatgaacctaaacaagaatatttcaatacaaatatacatacaacgtttctgggtaagaaaacacaatggaatattgaaatagactaatgagattcccgacttacagaagaagaggtcacatagtctctcttattttcaggcagggagaagaatacatcagaagtcatgccagcaaagcatgtgagggatgctgtcctgacctagaaataaacagatactttattcaaaccagggaaaacacaaacaaattggtcctagttctagctact

SEQ ID NO: 120659 - DNA, 411 bp, Zea Mays
ttctaattcatgtggattggattatattgggcaggattgaaacggattttgatttgctatggatttaaaccgacttaatcctactcaatccaagtgtattagctacaaaatgaacgagcccttccatgggttagccccttgtggcaaaaggcaagatgtttattttacctgactgctgagtgaactcggtttggtttagttttcagattgtagaaggttcatctgtattctgactgacgtacgtctgtaggaccagatgcttcttgggcctgaagacctgtcagcgtgatgcgatatagctgagaggcgagtgccgttgccactacagaaaaggttggcctaatgggatgggcattagcatttgttttgatgtacacgttttgtataaacaagagaaagttagcatgtctg

SEQ ID NO: 120660 - DNA, 302 bp, Zea Mays
acaagatattccaatacatgatagcgaactaaacactaattagtaagacactgcaacgactatacgcaagcgctagctattcgtacgttatcgacgttcaacattaacaccattgaaaaggcaacaacaatttatttatttacgcaacacaactacgacatcacaagtacgcgcactttatttatttggatacggcttttcattagttctcctattgatcgcgcaaaggcatcaccgaccacacaagtccaaccaagacaacataagcttgaacacgacataggcattactaactacggaac

SEQ ID NO: 120661 - DNA, 542 bp, Zea Mays
ctgctttgcaccatagactgcactgtttgcagagcggagtatggatatgggatgggtaagctgctggagataacctaagggattggtgatggcgactttgctttaggttatccttctgctgattaattgccttgctcactaatggtcagtttgagttcatattaataactaagtcttggttgagaaccaataaacctgtcaagaggttgctgaagagggttcatattcttctcttgcaatgctttcagtgagggaatctgcattacttgctccattcatgagaatgcactttgtgtcactaagaccgtcttcagcagttcacctatatggtaacccaaaaaacactgctttgcaccatagactgcactgttcgcagagcggagtatggatatggggatgggtaagctgctggagataacctaagggattggtgatggcgactttgctttaggttatccttctgctgattaattgccttgctcactaatggtcagtttgagttcatattaataactaagtcttggttgagaaccaataaacct

SEQ ID NO: 120662 - DNA, 273 bp, Zea Mays
tagttctattcaaattaaagtttatgatggcacattgaagacccttactaatgtttgcttgttttttgcaccttacaattttgtgaattgtatgtattgggcaaaacataagagagtcagtttctctttatcgactcactgcactaaaggtattcttgactatattcattctgatatttggggtcaggctcctcactcttctattagaggttgtgataatatgatcacttttattgatgatttctctcgcaaagtctaggtttatattctaaa

SEQ ID NO: 120663 - DNA, 396 bp, Zea Mays
gtcagttatttagttgggcaatccattcgtttccactttcctctttatctgagaagttgtcagtgaagatggttaattgttcagttctatggagatcttctatacatcttttcttatgttgaaagactgtagagtcagatttgatttatgagtgtgatttctacagatgtctgagaacaggcgcagaggtgcgaggcgtgctcagccagaacagcaggcaccccaagaggaagcagccccgtagcagcatttgccactgccaccaccgatgaccatcgagcagatgttcttgatgcagacccaagcagtctaggcaattggtcagacattagcagccatgcagcaggtgcagcagcagccaccaccacctcagcctccagtgcaagtccagatgcc

SEQ ID NO: 120664 - DNA, 308 bp, Zea Mays
ctcgtatgacaattgacatgcaggtggaggagcagcagcggctgcgatgcggtgcgagcttgtcagttttgtcatgcatggtcaggaggcctggcctggcacccacagaacaaataatgcaattaagcagggccaggcagggcgagtgagatgagcagtgcacacatgcatggggatcctgccaagccgcttcaagttacaggctagctagctagctccaagtacatacatgggtgtactactacgtacgtaccattggtaaccatgcatgcagcgacaagcttctgcattgcagtggccagtgtggg

SEQ ID NO: 120665 - DNA, 321 bp, Zea Mays
aaaccttgttctcccctcatgcacttaaacctaaattaatgcattagaccaactcaaccatgagtagaagagctaactccaccattagagtcatgatggattgcataatctgtctatccccacctaacatggaacatatttttgacctacattatgtagtctatctcacccatatctatcttaaccatattcccccaacttcgatgatatacactaacctcgaatcaatgagactaaggctggagaagaaaagatcaacatcgacaaggaaggatataacagtcaaagcgaatctcgagatgaatcgagacttaaacattt

SEQ ID NO: 120666 - DNA, 477 bp, Zea Mays
taggagtcctcatgaagtgcattctttcggtcactgggaagcaactgttagatgagatccatgccggacagtgcgggatacacacaacatccaggactcttgttgggaaggtcttcaggtctggtttctactggccgacaacaaagagtgatgtagccgagttagtccagaggtgtgaggcttgccaattattatcaaagcagcagcatttaccagcacaacaattgcagaccatacccgtaacatggccatttgcgtgctagggactggacatgattggacccttcaagaaagctcagggaggatacactcacatgctagtcgccattgacaaattcactaaatggatagagtacaaacccattgcttctctgacttcagctaaggcagtggaattcatacaagatataatattcaggtttggaataccgaatagcattataactgacttgggatccaatttcactagctctgaat

SEQ ID NO: 120667 - DNA, 438 bp, Zea Mays
gcgacaacacagtcatcccaagagagttcaaagaaggagacttagtactcacaagaaccatcagaacagagtctcggggcaagcttgaacccaaatgggagagcccctacatcgtcaagaccaaaacatcgtcaaatgcttacaggctcacctcaccatccggcgaagacctcgagcattcatggaacatagataacttgcgaaaattctccgtctaagtcccaaggcccgagtgcctttgtaattctcgaaacaatgtcaatcaggcccgcactcttttcctcccagggggtgagatttttaatgaggcggagccatgtaatataataccgcaaagcccccaagcaaaagcagtcaaactggcaccacatccacgggtgtcgaaaaagaccgcgacaacagccttcgacattcgacgcacaatacagtccctgcaat

SEQ ID NO: 120668 - DNA, 649 bp, Zea Mays
gcctggcttccacagccggccggccttgtatagaaggataggatagagtgatttgggggaggagtccatcaatcaggatcctgtgattgagtagggtttcattttgcctcatgacctcctcccctatatatgtccatgtatttcctgctgagagtcatgttcctgctgagtttccggtggcggcgttcctgctgagcgtcgcgttcctactcagttctttgggaaccacgaggctcgcaccctccaactcgacgcagctttccacggcttcaaccaaggcgacctccctgttcaagactactgccacaagctgaaagagatggctggactccctgaccaatctgggcacccctggcgacgaccggatccttgtcttcaacattatccggggacaagaagtttgagcacgtcggcaccaacatccgacgctactcacccttcccagcctttcttaaggtgcaggatgatcttgttttggaggagctcaacatggagatggcacatgccaccgccacagcttgtcgctgctccaccacccccagcgcccactccacctacttcgaaactaggggctcatccagatccggctccagcacgaaaaaaaggggcgcgacacaacagcggtggtcacggccggggtaccgctccc

SEQ ID NO: 120669 - DNA, 503 bp, Zea Mays
tgaggaggacttaaggatgctagaacaaacgaccagagcgcttgaacgaacctggagcaagctggccacggcgagggcaaaccgagcggtgttcttgagtgggttgggggaaatgcgaaattggagctctctggtggaggatctgaggtgcgggtgggtgcgctagctgcttgaatacataacgaagtcgatgatgcacttaatttataggcttcgggggcggtggctctcaatttgatcacagcgtgctggcggccggagatagggaagaatacgagtggttgtgaccgtggcgttcaccggtgcaacgacgcaaggataacactcctaagggagccatgattagtatcgcatagtaataagttatggcgtggcacaaccggggtaactggagcatccacggcgacgctggtggtccagccacgtcgcgacggctatcggcacagtgataaacttcaattcgcgatcaaatccattcccccgtgagatcttttaccttcccg

SEQ ID NO: 120670 - DNA, 568 bp, Zea Mays
ggggcttgtttcaaaccatacaaagctttttggagtttaaaaacatggtttggaaacttggaactctcaaaaccagggggctgcctaacatatacctcttcctctatatacacattcaaaaagacacttttgacatccatttgaaaaagcttaaaaccctttgaagcagcaaaggctaaaaggatcctaatggcctctaaatgggcaacaggagcaaaggtctcctcataatcaattccctctttttggcaatacccttgggcaaccaacctcgccttgtttctcactaccaaactatcctcactctgtttgtttttgaaaacccattttgtaccgatgagatggcagttagaaggaggtgaaaccaaaacccaaacctggtttctttcaaaaatttcaagctcctcatgcatagcattaacctagttaggatcagataaatcatgtccaacatctcggggctcaaaagtagccacaaaagttgagtgagcaaaatgtgaaatgtgatgtgacctagagcgagtgacttgctcgtgaagcttcccaatcatctgctgaggtgggtgac

SEQ ID NO: 120671 - DNA, 359 bp, Zea Mays
ggtatggttttataattatcattggcttgaatatagtgtcaaaaaggatgttgtgttttgtcttgtatgctacttgtttaagaaaggcagtggggcagatacatttactacaagtggttggagaaattggaatataagagacaaagcacttcttaaacataaaggttctaaggcacacgctgcagctcaagagagatacaatggctttgtcaatcccaatgttgcaattgataatcgtattgacaaatggagtgatgaggatctttatctctataagatcagattgacttattcacttagatgtttgaagtttcttttacatcaagggttggcatttcgtggacatgatgaaagtgaag

SEQ ID NO: 120672 - DNA, 414 bp, Zea Mays
gaagaggttacctatcgtatttctctcagatttagtctacgatccgcaataaaccctgctttctactttaagtccgtggtcacacccacacaagtgctttattccactctaacaaacaaataagatttactagtgacctaagattcgcgaggaactatttaatttgagtgtggaccgggtgactgtgtttaaagagagaataattgtcaaagttaacataaacaaagtggtgttggtgtcattttcggccagattaccccatggtaagacccatctagaaaagtataaagcactctagattctttccctttttaattaggccatgtctatttagcgattaattacaaaacgtggaatggagctttttagggtccctttggcatggctctgtctggttccaactccaactcatcg

SEQ ID NO: 120673 - DNA, 463 bp, Zea Mays
ggtagccatagaaagtcgtcagggtcttcatagctacctcttcggtggtgtcgtccgtcctgaatcaagggaacgccaacctggctgaaggggatgtgcctccacagtcagccagactcggcaacgtggcacccaatgctcctcatacagctgcactatgtacgaaaggggcgtagggtaaccggcggagttgagtacttcccacaagatggaaggaaaaccatcgtgagaaagaaaattggaactgaaacgggtgtctcctccattggcgggggtgggtgaagtcatctgtggaagaggatcagatgtaaagattatggtggcagaaagaaaaataaaagagcctaggtggtttaaaaggaagcaggttggatcaattttttactcctttaatttctaactcatttagttttataatgcatgcatgctgaaagtaatgtctcctctccgaatcaaaagggtg

SEQ ID NO: 120674 - DNA, 566 bp, Zea Mays
gcaatccccatccctgcgagcgtgaagatcaggccgagctagcccctgcagtccccatggcaacctatgttcctgtgtgcgtgggcagttgcaaagaggaggaagaaatgccacgctcgatcccacccctgtccaattctccgtggctaagttttgtgtggcctagtgtgtgacttgtttgcaaccaataggaatacgccacatcactttaaatccgtgaatcactaattatatgttagctcttgcgttataaatatgttttgttttgttccggttgcgttagaattgtaacgacgttgcccacatgttttagttaattaagtggttatttatttacttatcctataattagtaaagtagcaatctacttaaatcaatttataattttagttctgctttacaaatacatgttaataagattatgcctactcgaatgtttttaattaatacttgtttatcataaaggcgatgttggttagtggtccccgcgtgtcgcgcgtgctgtttgcgcgcgttaccacgcgttgtcttcgcgtgtcgcgcgtgcggatcgtgcgcatcgctgc

SEQ ID NO: 120675 - DNA, 348 bp, Zea Mays
cccaaccttctttgctagcaaggctgccattggcttggcaatcttggagaaaccttcaatgaaacgccgatagtaactagccatttcaatgaaactcttgattcctcggacatcttttggtgctttccaatccagaatcgctgctaccttctttggatccacaactaggccatctcggtttataatatgacccaagaacaaaacttcgctgatccagaactcacacttgctaagtttggcatacaactcgcaatctcgtagcctctgaagtactttcctcaaatgttcctcatgctcttgctcattccgggaatttataagaatgtcatcaatgaacaccactacaaa

SEQ ID NO: 120676 - DNA, 569 bp, Zea Mays
tctttgcggatagacgattctggtccgttgacccgaaggtgtggtggtggccgacatcgggaattctttgatcttgttgatcttgtgtcagggagggaggtgcgtattagggctagtgagttggggacaaggacccagggcctcgtcgtgtgttggtgggggccgtaagtggtgattgcgccttgaatcaagttagcgagtcggtctttgggcttttttacaagggattgagagctagagatcatgctatttaattgcaaggagcgagggctgatcccgaaggaggatccctcttgtctgtgacttcgtagtttcacagttatgtaataacgaactcacgttgtttgcacatatgttgtgtgtgtacttgtgcatagggcggtttcacggcagtcgtcgtcgatcgaaaaaaattagtgtagaacactgcctctcccccttgtcgattgggggcaaatgctagactttttattgtattattgtataagcttcataacatgcgactcacttcatcgagatatttggatctgactgcgctcgtcataaatgtcttgccttgaggcgttgtt

SEQ ID NO: 120677 - DNA, 531 bp, Zea Mays
tttctttgcgacaaatatcgcaccacagagacttgaaacaatccctagcatgatgaccctccaccccgcattttttatagaaaggacgatgaatattatcaatctcttttttcaaagcagggagaggggttttgagaatacatgattggcccccatcgccagaaggagaagtcacaatgtcttccttgatgtcagatttaccaagatttggcttcaatctccagctaagattcgattcttgttccaagattgagaaccttgaggcacttccttctgtccccaccaatcccaattagggttttgaccttttggatccatcttcaacacggacgccaagcgaggcagaggtggccactcttcttccactaccggaggacgaatcggggactcgaaccagccgccgtggaaactggagcgaaccgacgacggaagagaccaaagccgagagagcgaagaggcgagatacggaaaggaataagattcgacgaagtcagaaggaaaccctaacgcagtacttgaagaagtcatcgc

SEQ ID NO: 120678 - DNA, 760 bp, Zea Mays
gtgaaccagtacgcattgatagccataggatcgaagatcgacggtctgtatttaacgaaggccaatccattcttacccattcgatcttgatcggacggatcaccgatcgtatggatgaaatggtacacaacttctaatcatggccgcccatgagctgatcaacggttgatgatcacccttcacctcacccactcaaccccgaacacactcgcggcagtgctgcccatatgccacagcggtggatggccggagtcggtcaatccggcgccccaatggatcaactcgagcgcggatgagtcctatacatgtagaaggataagccgaactggttggggtgccttaccagggatttctacgacgataggttgaccggccacagtgcacggtagatccgcgacagaggttgaagtgcggtgagcaattgatgtcgccccgccagcggatccaccctgtcgcgcccatgaatgtctccttcacgctccgatgttgtccctcgccctgtccacgtgccccgagcggcgacacaggcgaattttctcccctggcagcgataccttatcctcctcacagcgtcggctctcgattcgtgcatgctagtgctctgatcacgtcgacggtggtgtgtgatggatgaggaaggtctcccggtacttatagccatggatgaggggtatggtgttacacccgagctggactcacaaggatcttggtgagcttgttatcgggaagacgaccctgacacactggtcccgcatgccag

SEQ ID NO: 120679 - DNA, 414 bp, Zea Mays
aaccgagccatcccttgatcttttcactacctatttaagtgtaatcggggggagaaggcaagagcaaaggagagatccttacctctgtcgttaaccacggtgtgtagcttcaacgtagttctattgctttcctttccccaaactataccctagacgcgaccaattcctttggtcaagccactcaacgtgtctggtgaccacgtcgccgatgcatcaacctcacgtggctaggcgattacagtatggctcaacacataagaagcaatgttctagtgtccttataggctggtgaagctcaccaaggaatctgtttggtctttactttcatagtttgattgcaacacgagtttgacgccacatgaactgctctagtgtcaacccaccaaaactctgttggaccgatgtcaattcatg

SEQ ID NO: 120680 - DNA, 524 bp, Zea Mays
ccatggctaaaataactcacactagtgtactgtggactaatcacctgtgtatctcaacataaacacttattagtccacataagttgtcaatcaattaccaaaaccaaacagggtctcacagccctactagtggcctgcgcactcaggcctagtcctgataggtcatgagtgcgccattggccacgggacgtgtgggccataagtgtgccacagtttgaggggctcgtaggccatgagtacccagtggcatgaggggtttgtaggttattgagtgagaggcagacccgtggccctgctatggctcagtgccaagcacagttaatccggctggtcatttatgtcgtgtcggtctctagtcaagtgcaggatccactcgagtggtttcccttcgacacaccctatccttccatctagttccaccacgcccgaccctaggctcggtgccgcggggttcatccaggacaagttcttctagggtagacgttacctatctcctccgactaaccatcaggccccagttgcca

SEQ ID NO: 120681 - DNA, 419 bp, Zea Mays
cgtcgtggaattgcgcgggcgggatgcgaccgctttcgtgtgggaagtggagtcggaggccattgagattgttggaaaatatgcaccgaagactaaaatgttaaggagctgggatattcccggttccaacatcaggttgaaccatgtctttgaattgaataaattgccttatgatccctacccggatggggactccgctgatgctgatgattatcgaagcaaacaagtgaaaccccaggacgacgaaggcccctcaaaggagaaagctctggttccaaccatttgaaagaggaaattaggtatggggatgataagactaggccgagggccactgggtgttttgttgagtagttaatggaaacgtccgcgtttcctacagagctgatgtcttcgcccgagcttcagacacttcttcgcgc

SEQ ID NO: 120682 - DNA, 300 bp, Zea Mays
gtaaaacctttggaaacagaagaaacggaaattgcaaaggcaaccaaaaaaatgaaaatgtcagagccaattttggttgaagaaattgatactgctgcccccgaagcaccttccagaatatacgattatatcgttcgacacgcttcggggaaaagattatccgaagaagtttttgaagctaataactatgccaaagaattgaaatatccgaagggggcactagtgttcaattggaccaacgaagatgacttcctatactacctcccagacaacaaagaattatccgtctgtcgggagatg

SEQ ID NO: 120683 - DNA, 530 bp, Zea Mays
gcttgtgaaagttggtatccatcagtgtgccccaaaatacatcaaattggagctgagtgtgaaagaattgaatattggtgtctgagggcagagcatattgattgatagtcctcctggagcaatattctaccatagagaacctcctctttggataagtccatcctgtgatgtcaatcagatagtcaggatgagcatgtggaacatcttctgtgtccatagagacactacccccagctgaagattgggcctctgagtctgtggttggattgtagtctgcatcgtctgcacgaggactctttgatttgaaacgaccggcaagcttcttccgaagaccacccagaccactacaatagatgtgagaaataaccataggtgaattgttgataacgccacaatcatagagaaagaaagtgcaactttctgtcagggtccggactatccgcgctaaagggccggactgtccgtgcctacctgacggacggtccgcgaccatccaggggtgattctctagaaccctagctgccctaatc

SEQ ID NO: 120684 - DNA, 326 bp, Zea Mays
tgacgtttccttgtgtcaagggcattgcattggcacgagagggtattagagtacaactagtggatgaagatgtcattgggctacctactgaccttttgtgataccaggtttcctataatcccctctactcaaggcatacctagtcgtgtttatgttcactcaagaaaaacaaaacacatcaatatgccacatcgttcctcaaaataaaataatgaccatggaaaatttagccaaattacgtgagtgaactgtccaaacataggttaaggttgtaaggcaccttttttccaccatacatttgcgaaaaaagttggaatataaagaat

SEQ ID NO: 120685 - DNA, 554 bp, Zea Mays
gtgaaaggcacaacatacatgcgaaggctacgtcgttttacggtggagccgaggctacaccctgtcaccgcctgggcccatttgtaagcccctctttagggtaggttccgtagtatgtttagtctgattgtaccttgcaccactgtaatgaccccgtagggggaatattcccgggatgtagcaggtaaccgggggtataacggtacttagggacccacctacccgcccggttacctataaaaacaaacacactgtatatagtcgaggcgcacataacgagaaactacggttccctacctattgtttcattgtgcacctgagctctcctactcccaagtgttcgggtccacttgtccacgtgtcatccgggcccaacatttggcgaccgcaaccataccaccaccatcaataccaaaacaaacatccatactaccctcaacaacaaaaccataatcccttccccccaacaaccatgatttcaacaccaagaaaggttagccctgccaccaccaccaccaccaccacggcatgcaaaccaacacctaccactccgc

SEQ ID NO: 120686 - DNA, 786 bp, Zea Mays
ggttgatatataaaaaggaacaaaagaagacggctacatttttatagtctacatttttatagtgtttggataaaagtaacgcggagacgaggtgaacactgtagcaacttttgatgacgacatggtctaaaaaatcgagaggacgatgtcacctccgcctatcctacttttgacctcaacccaaacacaagattatattttccaatggcggagtgaatttgacgccatgaacgcaaatgtgacatctccagatctccttcaagtcagttcgtattcaagcagacaggagaacatttgggcaatcagggtcccccatgtgtcagcagtggcaagcatgaaagctattcctgacaaagtgacaaccccccctctccctcccaaaagaaaaagataggagcgaaaacccctcaactgtgtgtgttaattcggtgggtgaccgaaatgtcaactgctccagtacacgtgtgtagacgagggtccagaattgtgttacagccaccgtgtgcgacagctgtaccaaaccaagtcccgtccactgacctgactgattcgatgcgccctcatccatcagcctgccacacccagacgctgccaaactagcaggcagtcaaatcatctcatgcactaacagtaacagttaacaggtgagaaaacaaaaatctcgcgccacaacaagctttctgaaccatccaacacgacgatggaacggcttcacgtgccgtgtgaccaccgtttcagcaggcagcaggcttcagcagcacactggcatatcgacgtgccaccgtc

SEQ ID NO: 120687 - DNA, 548 bp, Zea Mays
gcttagccagcatgcggggtggcgaggatggaacatgtgccgaacatggcctgtatttgaggctccatgcctaagtaaatcaagaactaatatctgaaccttcaagtggtagattttgttgattcaccagtttgtagtcactacatagtagtgcaggtgcagctcctgcaaggtaaaaggatcttctcaaccagatatcaagtagtccaaagaaaagtgataattttacaagatgtgataaagcctaagtctttcgacaaatatcaaattcgatatataacctttgcatttttgtgccagaacagaagtttaacagaacagttcagttacgtgagaacaagagaaaaggaagtcatatttttaggtctttctaatgctgttactgacaaacataacagaaaaagtaggcaaatgatcaggcacctaattgcacacatgcggcctgactatacatatagattatagggcacactttaatcaagaaagtcatctttgaggtatactacatgaccaaaataagcaccaaaagatttgtttaaactttaaac

SEQ ID NO: 120688 - DNA, 622 bp, Zea Mays
gaagattttggaacagtgcccggggaattttgggcaggattctgtccccagtcttaatggctctgcagacccagcgacgacgggcccccgtcatttttgggatctttctctctcaggaaaaaataacaaatatttggtctctcggggcagaagtgcaaacagccttttggctctttccccaataagttcgcgaatgcatcctgggagtatcccccgtgtttatggttcaggccccctctgctgtcgcttactggtgggcccccttccccgccctcttttaacaattttggtgagttctttcaggcggttctttcgagtagcaacgcttcgccttccacggaacttgcactgttcacaaaaccccattccgctccactgtcgtggaagaatttgtcgccttcaagttctccgttgagtgtagtgcttcctccgccctcgcgattcgctactctcagaaccgctgaagaaatggcttttcgcagagttgatcctgcgccgttcctcccccatggctttgtggcgcagcaggtcgatcatcgttaaatcatggtacgtactgtgactcgtcctcaaccttctgcgcatgaagattggggcattgtgcttgttcaaccattgccgg

SEQ ID NO: 120689 - DNA, 504 bp, Zea Mays
gaaatttttggaaaggatagataaacatgtgaactacaacttttatgtagaaccagaactgtgcgtgcagtcctaactatggcaatatttcactttattttccacctagtgtttacaattaccattcactcactactctagctgttttaacacttaaccatagttattcaaccgatggcgtgatggctacaaagtcatgccatcacttcaccttaaaatccaaattaaccaaacaattctaatcgaacttgccaactagccaattgcattctaatgtatttttcataccaccactacaccacataccgcatacatggaatgactcattcacatttcacatatatttttaccaaaacattctccgcatcgcttgccacttaaaactaagctttacgcaacacaggacatccactaatcacgaatatcaccatcacaccacatcgactcgattcaaaataaccatacatgttcatcacatgaacggagcatttcaacaatcattct

SEQ ID NO: 120690 - DNA, 534 bp, Zea Mays
atttaagtataccaacaagatgcattcctatcctaatgtttctatagcttatcaaatcttatttactatggtggcatcaaataaaaggagtttttcgatgttgaaataattgaagaactatttgatgtctataatctctcaagaacgattgaatcatttggccacctacgtattgagagaaagaaaaatattagataagattgatatcaacataatcattgacgactttgtaatatgtggttgaagccgatcgtacgtccctccgctgtttctgtttgtgcgcgcgtgccctgggctaattcgacgcacacggccggggttgcatcggtcacggctgtcctgtaataaaacggcactaaatcacattgtaatatgtggttaaagaacaagccgatcgaacgagtagcgcgcgccagtcagtcagtcgttcatcggcgtgcaagttaccgtcatcgtcaagaagagctagctaggttggtcatcccatatgttaagttccggctttgtgagtagtacgtagtagtagtactacta

SEQ ID NO: 120691 - DNA, 679 bp, Zea Mays
cactggcaggaaatgagttgtcttggttagcctatccacaatcacccaaatagagtcatggtgtcaagaggtattgggcaatccaacaatgaagtccatgctgatgtcttcgcatttccaagaaggtataggaagtggttgtaaggtgtcgggtgtcttcaatgacttgctttgatcctttgataggtgtcgcactcagacacgtacttagcaatctccctcttcatcctagtctaccaatatagggatcggaggttgtggtacatcttgtttcttccagggtgaatggagaatttggagagatgagccttgtccaaaatcttcttcctcagggcttgatccttgggaacaacaagatggtcttcaaaccacaatgctcccttgctatcttgatggaaacaattgtacttctccactttccgggtgagcatctccttgatgatctgaactcccttgtcctcaagttgtgccaggatgatctgaccttgcaaagttggcttgattgagatatgactcagagtccctggagaaatcatttccatgctcaatttgctcatttcatcacacaaggtggtgattcgagaagccatggttaagcagttgcattgagatttatggctcagagcatcggctaccatgtttgctttttctaggtgatagtgcacttccaggtcataac

SEQ ID NO: 120692 - DNA, 370 bp, Zea Mays
gttgtgaaggtgcctgaaaaatttgggttcaattggagcatttttggctggtttgggcattttaccgaacacgtggtgggtgtgatattagggtttcggagaaatggccatatgaggagtgaaaaccctcccgaaggagccaagaacctgcagggatacacactagggacaattgaacacatttcaccaactggattcacaagaattgacaagaaattgagagatggacaaggggtggagacttgagtgccacactgcctttcaaaccgagagcaggggtgatagaggaaaggagagggggaaggactgctcaccggagagggaacggatcacgagagcaccaggtcgccggagagacgccggtgggggg

SEQ ID NO: 120693 - DNA, 1327 bp, Zea Mays
gctcgatcgaggagggaaaaaaaacaaaagggaagcaggcaggtcgtcgagaggggaggatcggagaatgcagcagcagatggcggcgacggtggaggagcagatgatggtgaaggccatcagggaggagtcgtcgtgggaggtcctccccaagcgcatccaggcagcgctggtctccaaggaagaatggcaccgcaggtacgtaaatgtcagcgacagatcaaaccccgacaattagggggcgtttgtttgaactactgatagttgctgttgacatctgttaaaaatgcgaagagaattagaagcattatatgcgtccttaaaaacgcaatgattctagctacctaaaaagagcagaaggcaatggacacgatgaaaaaaatttgcaaataaccataatcaatatctctacaccatgcagttcgtgaataccaaatttgttgcagaacataattcaaagccatcatccctgttgtataatgagcagcgacctttttgattgcacagcgcctcattcatttgttgtcacacatgcatgtctggattcctctggtttacatacaaatattgccacagggttgtgaattactgtatacgtaagaggttgccatggagctcctgtttcgccagaaaagtatgcaaggaaggggactactatgaggacctgatgcgctatctccgcaaaaaccttgcagtacgttgtccacatctttcttcttccgatccttaattagtcagttattttaggatatcccgcagaaaagagaaaaatctgtatcctgtattcctgttctgatgatatcttgtttataagctacttgtacaagtaactgggaaacttatactgaacagcagagttcctagccaggcttcaaaacgatcataaacaattttaatctacctgtttccatacttctttctttctttcttcgaaatgctaaatactatgactgaagcttgctcatgtaacacagttcttttactaatattcttaggcccgtgggtacttttgtaaaacatctatatcatgactgccatggaacaatatttttgcagttatatccataccatcttgcagacttcatatgccgagtgatgaggatatcacccttcagatattactgtgatgtccttttcgaagctatgaagaatggtaaccgtttgttatagataacattaatttttatgccatcgcattccactagttcagctgccgtcatgcctaaaaccttaattaatagggatatttcaatactttccaccatgaaagaaaggaatgatataactcgtaaacatcatttcttgagaacctacgacacaatcttcg

SEQ ID NO: 120694 - DNA, 376 bp, Zea Mays
atgtgacctatgccctacctatcaatgactttagaatatagaaataagtatacaagtatcaactggtgaaagaacactcgtatgagaaatgtgatagtagatttaggactcaaaaataatattgactcaaatatacatacaccatatgatgtaattcgactaacacaaactgaaagtgctgcagttggatgatgaaagaagctagtagcaactaaatttaatatattatattttaataggttgtaagcgtttagttgtcaactaaacttaaacaagatcacttctcatatgtcaaagtgtaaaaaagtaatatttttagatacagtaatgtatggctctaaaaaaatttctagacgtgcctttttacttgtcacac

SEQ ID NO: 120695 - DNA, 801 bp, Zea Mays
aaatgggcagactagcttcccgaagtcatatgggcgctgaacacaacagaggttcacaccttttcgcttgatgtatggattcaaagcaatgacaccgcaagaattgaagcatggatctccacgagcaaactccacaactactcctgatgtcgatgagtcaacctccaaggaccttatcgatggagtccgtgttattgccctgtaagcattgaaaaaatactgagcgtaaacaaaggcatggcgtgacaacactgtcgtccccaaagagtttgaagagggggacctagtccttatcagaaccaccagaacagagtcccggggcaaactcgagcctaaatgggaagggccattcatcggcaagactaaaatgtccccaaacacctacagactcaaatcaccatccgacgaagacctagagcactcatggaatgtagacaacttacgaatttttttgtctagaacactaagtcccaagtccttcgcacctttgtaattttcgcagacactattttagtcgggcgcacactcttttcctcgcaagggtgaggtttttaacgaggcggagccatgtaataaatcgccgcaaaaaaaccccaaaaatgaaagcggcaccacgaccgcgggatgtcgaaaaatactgcagagtcagtcttcgacattcgatgccaaaacagtcaccgcaacggcaagcctcgtcagccattacgtgcgacaagcacagtccaggcagaagtcacctaagggcgcaactaggttattataagtgtgtagtcatcctagagacacatatttttatccgag

SEQ ID NO: 120696 - DNA, 1000 bp, Zea Mays
taagaattaagccctgcaaagagaaggaaaacaattaagtatgacaaataaaatactccattcccaaatttaaagttaacttccatacctttatgctattgtatgctaggctgtcagcgagatcatccttcgacaaaatcaaaaggccatcttccagcttcggggatcccatgctcttagctatctcccggcaaacagatatttctttgttgtccgggagacagtattagaagtcgtcatcattacttccgttaaatactaaggctccctttggatatttcaattttttagcataatgccttgcttccgcgacttcatcttcggacaatttcttccccaaagcatgtcgataaatgtaatcagtagcttcggcctgtgcttcagaggcaggagattttgccttttctgccatatcttgccctgttgtcagaatagcatccgaagtttgctcatcggcttcctcttcagctgtgatagttttcgtctcgctaggcactgagggcccagcttcggcttcggcttgtccagtttcgtttttggcttgcgctttggtagcttcagcaattttctttgaaggagcagggctcaaggcctttgtagtctccagcacagcatccagcacgctgaccattctcctcctattgggagttgtggcagaagctttttgcaccttcggcagttctgcctctgtcggtgcgctcaggttttctggcgttttatcacctttttcaccgatggctcttcagtcttaccatctctagcttcgactgagccgactgtaggcaccttcggcactacagttggctcttcagcgctctgcacaatcggagaagttcttcttgcttcatcagctgaagaggaccctgcgccaaattcaggtactttggtcggttcaatataacgtggccggtgggtcaggaccttcatctttttgccctccggctcagttggggtgaccgaagtggcaatcttcctctttttctcttgccctcgcagcagg

SEQ ID NO: 120697 - DNA, 416 bp, Zea Mays
gatcctaaaggagttattcaatggatcggcgaagaggtggaagcctttgaagaaatacttagtgaccgtggagatttttgtgccttcgccggtgcccgagggattgcagcagttctggagaaaactggctgtgaacatgttaagactgcagcccaggcagaaaccagcttctctgtagacgatacgaaagaaccttcaaccgaagctactttgatgggcggtaaattttattccgatgtgtggatgaagggtggacgtgagatggccgacgaagccattaaaaagaatgaaagaatctcacgacgcccgcgagaaagctaaacaagatgaagaggatgccgagcgcgccatgattatatgtacttttatttaaaacattttgccttgttgttcgtttttaccttcgcaactcatca

SEQ ID NO: 120698 - DNA, 804 bp, Zea Mays
agaccagtcggactattgcacccgcttaagatacccgagtggaaatgggaagaaataggcatggatttcattgttggactaccccacacccctgctgggtataactctatttggatgattgtggacagattgacaaaagtggctcatttcatacctgtgaggactaattacacaggagccaagctagcagaattgtatatgactcggatagtttgtctacatggggtgcctaagaagatcgtgtctgattgaggatcacagtttacttctcggttttggaagaagttgcatgagagcttggatacacaactgaattttagttcggcctaccatccccaaactaatgggtagaccgagaggactaaccaagtgctggaggatatgttaagagcttgtgctcttaaacatggtggaagttgggataagagcttaccatatgcggtgttctcttataataatagctaccaggccagtttgaagatgtcaccatttgaggctttatatggcaggaagtgcaggactccactatattgggatcagactggagaaagacagttctttgggcttgaaattatacaagaggcataagaacaagttcggatgataagggagaatttgagaattgcacaatcaagacagaagagctatgctgatacccggagaagactactggagtttaaggagggtgatcacatgtatctgaaggtgtcaccaatttggggtatgaggagatttaaagttaaaggaaagttgtcccctcgctttattagacccttcttgatcttgaagcgagtgggagaagtt

SEQ ID NO: 120699 - DNA, 403 bp, Zea Mays
cttagtacttccaggatgaatggaatatcgactaagatgagcttcatccaaaatttgttggcggacttcagcatctttgggcaccactatgcgattattgaaccatattattccttggtcatcctttctgaagcaatttgctttgccggcttctattttctcatgaatatgcttcattcccttgtcggttctttgggcatcaataattctctatagaagaactgactcaagctttaattgtgtcaaagttccgtgttgtatcatacccagttcaacttttccatttctggacatagggtgatgtcaggggtccttattgtaagacaatgacaggaagctttgtgactcaatgcatctgccaccacattggcttttcctgggtgataatggatttccaaatcat

SEQ ID NO: 120700 - DNA, 381 bp, Zea Mays
gtgggccgatggtagaaaacacatagtccatctcagagaaaaatcaagctcattagtgggagatagtgctcaagagaacaagaaactgttcttatcctacatgacatggcgagatatcactatgggtgcaagagagatcgagacaccagtatcccttgtggtcagaggagtagccaagaaagacacattgtgtggagcaaggggcgagtttgtgggtagtgatggtgaatagattggggtagcaagcacaaccaaatacccaaaggtgctcgtaggaaggcgaggtgccatgtagaggaaaatagagtttagggtgcgagagcgttttggtggggatgtggttcaatagatacataatggtgtggagcccctaaacccaac

SEQ ID NO: 120701 - DNA, 508 bp, Zea Mays
ggttcgattcatctcctcatcctcatctccaagtcccaagaacacatacatctcatcctcatcacagattctaaacatatcaccctgatccccattatccttattttcagcattctcaataataaagctacttcagtcaatagacatggtgtcatcatcattaccatccatgatgcgaacacgcaattatcaccacctatttctagtgttagcacaaattattacacataatgatgaaacagatgctgcaaaataaggtgctgccacaagagctgcgacagaggggaggggatatgttacctgcagaaggaagtggcgcgacaggatatcacaggcttggacgaccccctatttccaccagctcgacgccggctcacatccgtctgtgtaggaagagaaaaggttacagagtgtagggaaagggcaagagaaaggatacagagggaaatgggaagatcacctgaaaagggaagaaggtcgtcgtcaacgtcgccgatgtgccgcagcg

SEQ ID NO: 120702 - DNA, 396 bp, Zea Mays
ggaaaatggcgccgcgacgactctgggtggaattgggaggtgagattggggctacacggccataaggaactatagtttcaccgtgcacactcaatttgggaagaggtggtagaggcagtgcgaattttgggcttcaatcaactcactggtggagatgtgaatacctcgccgtggttcatagcgctatttatagccacggcggtccggctaatgattagcgaccgtggaaggctttgcatacgcatggtaaccacgtatagaagaggtacagtaagggaggagcaaggcatgggtgacaccgcggcggaaagcactgagtcacggcaatcgctggtgaatatcttcggccagcacgactgagctcgcgggatgatgccacgtccaaagttcccctcc

SEQ ID NO: 120703 - DNA, 382 bp, Zea Mays
tggggatttatgtggaaaacagctagctgatcgttttctactaccagctgataactcacaggctacgcagattttgtcaggtatgaaaaacccaaatattactgctattagctctttagcagattccatttgtgccaatagacttgagaagttaggttttaaattgggatctagcgaggctgctgttaatatgtcaattaatattttgaaaaaaatggaattagacaggatgactgcgattaataaatcagtatgcacgtcagattcccttagtggggaagatagcaatttgggcttgcctggtaatggtagcgatgatgagacagataaaataaatgtcgatgttttagacctccttattaaggatgtagcggaagtggat

SEQ ID NO: 120704 - DNA, 657 bp, Zea Mays
tccacatcattgagcgaggggcatttaatcaggaggtgagatgtctgacctacaagattagcattgctgctattctggctccccttcagtttccctcggacagcagtcttactccttcagatgagaatgagtttcatggtgaggagggtggagatgtccagggtccgtccaatccccggatccgacagccgcaccctttgcagcgtcagcctatacaccatcgcctcggttcacatcagagactgggcagagaacggtctgtagctatgcatggaattatgatggaggcaccggttctagctctggaagatggtgctgctgtctgtgttggtgatgggctgctgacctcacctggaccttcctcgcctcagcacagaagtttggctgagccactggagaaggctgggttgagctcgcccctttctgtcactcaagtgccatgcatgacaacctcaaagattaacttagctgggtcgtttgggtcggctgttgtggggtcgctggattctgtcctccctatttcgccctagcgacacaggactgttaatgggtcgctggaacaggctggtgcgaattcgccccatcctggtggtccatctgctgctttggcccccctgagagtctactcgagaagcagattcagaagcaaacacgccc

SEQ ID NO: 120705 - DNA, 608 bp, Zea Mays
aaagttttaggtcatttttagctggtctaaattttaggcatgttttagatctagttgttggaaataacagtaatttagtgatgaacaaaatgatttcgacaataataaaataagcagcaacatgtttcataaacgcataactcactatcatttcacaatctagtgctattgattgaaagaatacgagaataaccgacagggaaagatagccattatcatagtggggttggtggcgctagaacaacacaaaagtagggaaagcagaacaatgagaacgacaacatcggcgtgaagaaagcagataaacaacgagcagttgcgacgacgcttcttcccaaaaaccttgtacgagtcctacccgtgcagggacataagaggatataggcttcggagattctgctctcctaccccgatggcacgttggtggtgggatggggaagacaaaggcatcacagcgctctggtgtgaagagaaaaaggagtactgaggacaacgtctcgccctctatttgtacacacgacgcgacaaaacagacaagtaatcagccgagtaatcacaacactaacgtgacaatcaatcacaattaatacgagaataattgcttacca

SEQ ID NO: 120706 - DNA, 382 bp, Zea Mays
ctggaggtgggtgatggcgtgccaaccgttagatccatggtggacgcgtgcaattagatccgggtgggtgatgatcttcataccgttggttttccaatgggcgtatgggatcgaatccagggcgtatcgcttcaggatgagatctggaccatggatcccggatcctgcggcccggattgaataccagttcacatatgatggtgatctaatccgagccctcaaatgccgatccaacagttgaattctactcgtaccccttcgtcttggacgatttgctaaagagaccctgcctttttcacaaatcaacccgccgtccccgcgggagtagtctgggtctggtagattttgcgaattaaacctcaagcttcttagtaaatgacac

SEQ ID NO: 120707 - DNA, 779 bp, Zea Mays
cagctgtcaccccacaccaactggggtgatctcattccatttcgcaagtgtctcgggggtatctcggtcggaaagctggggcctattctttaggattaggaggagccgtatgaagcaagcttggttcctctagattcagtttggtggcaatccgtgccggcggcagagcgcggcagctggttttttcgttagattcctcccaccttgtttgcattgcccctgacgcgtgcagtaatgcttacctagccttccgatcgttcagctcaagagaagaatgagagatccgttcttcagtggggagatatccaatcatcgatatgcgctccaaaatgtggcagattggtgaagacaaatgccgtgtttggatttagcctaggcgatgatttggttcgggtagcacagggttgcctgcttgctttgtgctgctggaacggaaatgcgtttttcgtagtggtccgttgatctttcaccagtgtacatgtacggcccatctcgctaggcctgattgctgatttcccttaattatttatttatgctgttggaattggaacctgggagtactcagaagtaaggacaatcacatggctaggtcatggcttgtgttagggatttttgtggttctctgataaactttgctggccttagtgcatgctgttcttttgtatcctttattattggaatgattggtagaacggtagtggaccatttgtcttagtgtgtatcaatccatggttccgtgttgtactctccttttagatgtttattaaagaacatgtcag

SEQ ID NO: 120708 - DNA, 493 bp, Zea Mays
ggaaaatcagctaaatcctaaacaaagtttaaatgatgagtacacacaaaattcatgagtccttggtcacggacagttcagcttctgaggccggatggtccagtctttcacaaaatagttcggtctttaagaccgaacatctagcacaacgtaaagacagtatcacggatgatccggcccccgagaccggagagtccgccatcacacaaagatcatctgattcctctatgggggacatgatagaggaattcagagatctcgataaactaggacaggggtttacatcgaccggtcctttggaggagatcgacataggagatggtaaaaatccaaagccgacttttgtaaacaagaccctagagaccgatcctagaaatgaaatgatcggtgtattgaaggaatattcggattgctttgcttggaattacactgagatgctaggattaagccgagagatcgtagagcatcggctgcccattaagtccggtttcag

SEQ ID NO: 120709 - DNA, 453 bp, Zea Mays
tatccatttagtgaatttgtcgattgctaccagtacatgagtgtatcctccttgagctttcttgaagggtccaatcatatccagtccccagcacgcaaagggccaagtcactggtatggtctccagttgctgtgctggtagatgttgttgctttgacaagtactggcaagcttcacacctttgaaccaattcggctgcatcactcttcgctgttggccaatagaatcctgacctgaagaccttccctactagtgtcttggatgctgcatgtattccacactgcccagcatggacctcatccagaagttgcttcccagtagatgagagaatgcaattcatgaggacgcctaatgcaccccttctgtataatgtctccccaatgagtgtgtagtgagccgactgtctggcaatgcgctcagctgcatttttatcatctggttcctcttcattctt

SEQ ID NO: 120710 - DNA, 355 bp, Zea Mays
aaagaatcagtgatatgacttcattgaagagtatgcataactagagatgaattcaagctagacataggtagagaatatgaatgatcccatgaccaatatttttcatgatttggtgcaaaccccaacttggcaattgtttgttaaatattcttctctcgtttgcttccattgcaccactttcttgaacaccatcattgtgagcttgaatacttatttaggaacccatgccaagacctattatctcagtttctctgcactaagcttccagaactttttttcttgccactttgataaaccaactgagcatatcaattttgtttccgggttggacaatggcaagtctttcttgattttg

SEQ ID NO: 120711 - DNA, 434 bp, Zea Mays
ggtaaatatgagtgaagtgtgcacttggtttgattttaggcgaagaaaatggaatttgggcactcggctcggaaacgatcgctagaaacggggatttgtgtaaaattgaagcctgggatatcgaattggcgtgaaatttggtgaatatgttactggaggtattgtgaaggtgcctgaaaagtttgggttcaattggagcaattttggctggtttggtcatttcaccgagcatgtggtgtgcggtgatctagggttgaggtgaaacgaccaatttagatggtgaaaccctccctaaggagctcaagacctgcagggggatacaatgggacacaaggacacacatcccacacattgattctcaggaatttcacagattggatataaggaaccaaggggtggaataggagcttcaatgggctggaaacagagagggg

SEQ ID NO: 120712 - DNA, 278 bp, Zea Mays
tctacgtacgtacggggttaactgacattttaattatcatcagtcccgtcgatggaatcccggcggcagagatctgtggctgtcattgtgctaaacaatctctagcctgggggccgcggatctagctagagcacccagcgagacggacaggtgaaaaagcaggcagcggccagcacacaggcacagcggcacaggtgaattctgaaatggagatcctgatgggtccattcacacgttcagtcttcagagtgcagtaggaggactgtaggagccgtcgg

SEQ ID NO: 120713 - DNA, 657 bp, Zea Mays
gttagatctagtgcttcgtctttggtaagttgctaatcttttgtttgtgcttgtgatttgtgtttgtcgcctctggatctgtggttgaacggacaaaccctaatctagtgccttatgttctgtgttcgcagccgtgagggaccgatttgagtttgaaccctaatctagtgccttcttgttccgtgtttgtagccttgagggaaggatctggtgctccagctttggtgagttgctaatcttgtgcttgtccttgtgatctttgtttgtgctccctaatctaatgcctttttgttctgtgtttgtagccatgagggaccgatctagtgctccggctttggtaagttcttaatctggtgcttgttcttgtgatctgtgcttgtgatatgtgtttgaaccctaatctagggccttcttgttatgtgtttgtagccatgagggactgatatagtgccccgactttggtatgttcttaatttggtgcttgttcatgtgatctgtgcttgtgatctgtgttcgaaccttaatctagtgccttcttgttctgtgtttgtagccgtgagggaccgatctagtgctcggggtttggtaagttcttaatctagtgcttgtgatctgtgcttgatggccgtcgacgacactgtggctggccaaactggc

SEQ ID NO: 120714 - DNA, 459 bp, Zea Mays
tgtttagcgaaaactgaaactctaaaatagagatagcgaataaactttaaatcaaagcgtggccggtcataaaaacaggaaccctaaaacgaaggaggcgtcaaaaaaaatggcggtgcgcggctggtcaaaaaacaggaaccctaaaacgaaggagccgtaaaaaaatggcgatgaaccggatcagcagctatgtctagtgcacaacagagaagggagcgtggatgagaagtacctgtaggtcgtggcggcacaggacgctaggacgaacaggcggcggagcgggcggtgctgtccatgtcgtccaggcaaaggttgagcgcggtggactggtgggcaagaaacaatgaatacagatgaagtttctagagccgtatggaatgggaaaaggcactagagctccgacggcttgtagcacctgggcagacagggatcgtagatgaaaaatcggacggtgta

SEQ ID NO: 120715 - DNA, 644 bp, Zea Mays
gaattcttcaccgtgtttgagtctccgccgcgggatcgcgccgtcgcgtgggcagactcatcaccaaacccattgtgagtacaaactgtctacccgaattcaccatcatactagccccattttgcacctggcgacttgaccgatcgtgcaccttgggccagcagggggggtagcgtagccatggcgcaccgtcgcggccttgggtttggtcgccaacattcatctaggggaggaagacgtagggtgcaccttaggatcgggcgtctacggttgagattaggcggaagaataccccttcgctacgtttagttatgaccgtagatctggatcagacggctagatacaaatctgcggtgataaaatctctaccgttgagtcttaatccaacgatcccaactgcatacggctttgccgcgctgggaatctatccttaaccctagagtttagatcgggcggtccagattaaaagatacctcttcgccgcggcgtatttactaaagagaccttaggaaatagggaaatcaacccgcagtgctgcaaatagaattctgagtctcggtttattttgcgctagggcccctgccttcctctgtaatattgcgcctagtccagagttcataagaaatggttaaataaaaactgaa

SEQ ID NO: 120716 - DNA, 471 bp, Zea Mays
ctcctatcagtgaaaaaattcttaggtgcgctaacaaaatgcatggagaagcagggaggaggcagtatgacagataaatggaactgaatttcagcatttagctttagtaattttgtaaaataagttgaaagcagataatacttgttgtttggctaatggacaaagtaaactacaaaatcaaaaatcaggtaaacagtttcagatgcacatatgccctactctactcaatgagtaaaataaagtggatggtgcaaaaattaggcagttaatgaattcgactgtgcaggaatcaggtaagcagacatcagacaaccaatgaattcaatgagcaaaataacaaaatacccgtcaggtcggttgcttgcaacgactcttgctttgttaggattcaccttagttgtgcaggggactgcgcaaaaaacaatgctggttatagggacacggaaataaagtgtcacacccgaatttaag

SEQ ID NO: 120717 - DNA, 681 bp, Zea Mays
tgttcctctgcttcttgtataatctctggtccaaataactgcctttcaccagtttgatcccaatacagtggagtcctacactttttgccatataaggcctcaaacggtgacatcttcaaactggcctgatagctattattatatgagaactctgtatacggtagactctcatcccaactaccaccatgcttaagggcacaagctcttaacatatcttccagcacttggttagtcctctctgtctgtccatcggtttgagaatgataggccgaactaaaattcaacttcgtatccatattctcatgaaaatttttccaaaatctgtaggtaaactgtgatcctctatccaaaatgatcttcttcggtacaccatgttgagacacaatccgagctatatataactctaccaattgagatcccttgtaagtagtcttgaccggaatgaagtgagccactttggtcagtctttccacaatcacccatatctaatcatatcctttctgggtgcaaggcaatccaataatgaaatccataccaatctcttcccactcccacttggatatctttggtgggtgtaatagtccagcttgtctttggtgttcggccttaactctttgacatacatcgcacatagccacatgtgcagccacatctctcttcaatccataccaccaatatttt

SEQ ID NO: 120718 - DNA, 823 bp, Zea Mays
ggtatggagataatcatggccgcgtaaagatcttggcaccagataaactcaaagttgatcgacggggagttcgccgcacccacttggattgcggtcggccgaattggtcctcgccggtgctggccgcttaccgaccatgcgccacgtgcccgggcgtcttaccatgtcgcagttggtcacattaagcatatccgatgatcaccggtgagtccgccacggtgaaagccactaatcgtttgcgccagtgcccctcctcctctccgaccgctgcacgtctccatcgaattcaccggccaccgctcaagcacgctataaattgcgcacaccctcggctccgctaagtagtcaagcacctaatccagcaactcgtgcctcaaatcatccactagagcgcgccaatttcaaagttcccccaaatcagtttctgccaccgtgaaagcgtcctcgccgtggctagcttgttctaggtttgttcataccctcttctctctcgtctcagcatatttaggctctcctaatgctgctcgacccatttaattgaactagactgcctcagatcaccgggaacatgtttgttcatctgttgtctgcgctgtctctgtggactggataatttagagctccgctagtgaaattgattgaggggaaacacttgttaagggttgaattaggtcttagccgaattagagcaccggtcgttaagtatcgtggccggtatgagctcgtcggagctcggttctccgccgtgcgacatcgtggacttcgcggtgtgaaggaatagaagcgcgggggtgtatttgcaagtgtcagtgagacaaacaaa

SEQ ID NO: 120719 - DNA, 304 bp, Zea Mays
ttatttataaagaaaatcgctgatattttgagtcacgatttgtagcgataatcaaagggtcgatagtatttgtgacacggtgtgattcgattcgaagcacgagatatttgatctgctgtcagaacacatgattccatggtcacggtaatttacccgagaatcgaagctcaattataattctcggacgcgcagtcacggttttgatttagcgaatacttggaatcagatgaatttgcacccgtcatttatatccaaagttttggatcgggcaagaaacgacagaccgaaataaactgatttcggc

SEQ ID NO: 120720 - DNA, 345 bp, Zea Mays
accatcacaagcgcatgctaagcacgtagagaattggtacagtgaggaagaatcacggtgccgaggacaccgcggcagaaaggattaacgcgatggccgccggtgaatcactccggccgagcacaggagatggcgccacgtacgattcacccttttcccggcgttatccgtctataccgtgcacgaatccgggcggcgatcaacggcggcgagctgagctggcagtctgatccatcggggcactgtaccatggcacatcttcgttagtcgcctgaaccgtcccccttccaccgactagctctcatgattcttgtgaataactgggcaaaattccttaacaaggtt

SEQ ID NO: 120721 - DNA, 708 bp, Zea Mays
tattgaggcattacagtagatgggcatttctctccccctaatgccgagatgttctaaaagcatacagataaaatccccaactataatcatctagttctggccaatgtatgctattgtggtgatttatttgggaaatcttacgcacattacagataggggttttatgcggtgagctttgtacttaaattaatgtagtggcatgaatactacatattagtccttcaacatgaagggttactctcaacattcagcgagacacgcaacaacaagttgcttcgtggttacaattctgccaacttattgttattattaccaaatgcacaatcgatcattgagatttagactaatatgcacaacactattttatccataagggtccttcaggggctcatgcatatcattcgtcgtttggagccatttgttgacttcagatcattaagtaaaaatgatcatcatggtctagcgctcacaaggacattcactggttgcattgtgctttgaggcacataggaaaaatgtgtgtgtttatattggtagtaaaatgcacgacattcggccaatgctgccaagcaaagatttttatatgcagaaatgtatagtccaactcgttgttatcactgcccatggtttacccaattactcataccgctctgaaattgggtatcgattaatgcaacatttttaggtataataattttgagagagaac

SEQ ID NO: 120722 - DNA, 370 bp, Zea Mays
ttggtggtatggactaaagaaagatgttgcttcacatgttgcactatgtgatgtttgccaaagggtgaaagcagaacatcaaagacctgctggtttactgcacccgcttaagatacctgagtgaagtgggaagagattggcatggacttcatggtgggattaccccacacatctgctaggtatgactctatatgggtgattgtggataggctaactaaagtagcccactttattccagtgaagaccatgtattaaggagctaagctagcagagttgtacatggcacggattgtatgcttacatggggtgccaaagaagattgtgctagaccgaggatcatagtttacttctcggtactggaagaagttgc

SEQ ID NO: 120723 - DNA, 466 bp, Zea Mays
gaatgccgtcttcggaatgtctgaaggtcggatcctgagctgatgataacctgacctcagatctatcttggagaacacactggctcctctcaactggtcgaacagatcttctattttgggcaaagggtacttattcttgatggtgacctcattcagagctcgataatcgatacacatccttctggtgccatctttcttctccacgaataggacaggggcggcccaaggtgaggtgcttggccgaatgtaacctttctctgacaactcattgatctgcttcttaagttcaaccaactctggtcctgatactctgtaagctctcttaaagatagaggcggttccgggaagaagctctatagcaaactcaactttccgctctggtggcatacctggtaaatcctttggaaacacttctgggaattcatacacaaccttgatactctcaattgggtctgcttcactgcta

SEQ ID NO: 120724 - DNA, 484 bp, Zea Mays
gtcccctcgcttcattggacctttcttgatcttaaagcgagtgggagaagttgcatatcaactggagttacccgatcatctgtcagatgtacatgatgtatttcatgtgtctcagctaaagaagtgcctcagggtacctgaggagcagctaccaatggaggaccttagtgttgaagatgatctgacttatgctgagtaccctatcaagattcttgatacactgactcgagttacaagaaataaggtgataaagatgtgtaaagtgcaatggagacaccatggcgaagacgaagctacgtgggagagagaagaagagcttcgcatagacttcccccatcttttccctagatattcttaaatctcgaggacaagattctttctaaggggggtggatttgtaatatccaatttgtaaacaatttggagagagaagatctcattatgtgtttttgccccatactcactgtaacctggtaataaccata

SEQ ID NO: 120725 - DNA, 539 bp, Zea Mays
atgtgggtttcgtagtttaccggttaagatattacgaatgtccatcgttcaaagcgtatttgcacttgtggaattttggtggtccagactgggtcagagaatggcaaccgttcgttgaggaagaatcaaagtcttggaaggtggtttcctgacacagtaaaaagtttgtttcctttgctgatattgctcgtaaacccgctctgtcgggtgcaaattatgtgcctctgggcgttcggaattttctaggctatcaaattcggctgcaaagtcaagatcttcagttttcaacaggatttcgtatatgaagcatcactccaatgatcgaactggtttctgtttaattattcttctcgttcttcgaagaacacagcgaagaacccgcgctggggtggcagaggggtttctggacattttcaaattcaaaattaagtaacgggcgcattgagagtcaatttaatctgccaaccttacgagattctcgctctcgtccttggacccctagaagctcttttggcggcccaagaaattattaggcccgc

SEQ ID NO: 120726 - DNA, 304 bp, Zea Mays
cccatgtagctataggatatgtcctattgaaaacctagctctagttctctacggttggtagcgatgctgtcttcaggcttaaccacaaccacaactcttctgcagtgtcctgcttgcacctcctatggaggcacaaagaggttgctggatgatgtctgttgctagtgccctcctcgaggttcgttgatgcatcttctcgttctctccaatcatcggtcctctaacccttgagattctcttctagaggcgtaggggtagacgattgtcgtcagttatatcatgctgatgttacaatgcccatgtt

SEQ ID NO: 120727 - DNA, 683 bp, Zea Mays
ctatgagtttagatgggatgatattagagtagagacttgtttgtcagaaagacctggtagccttgaatctgggctttacctccctcctatcccagagctcgtttcgaaacaaggacacaatttttccttgatgtgaagtacctgagattttactgcaactagcaaatgtgcccacgtgtttatgaaaactatttcaaatgcgatgggaatattaattgaattctcaatatgtaaattcatatatatcaccgataatttctttagatagaaaaagtgggatagtgaattatttaatggatttataagacgtttatactgcaaaacattccgtaagcaaattatgaaaacacatccataaaaggttgatagtacatccaaaatgaactattgggcttcttttgctgctaggattgggactttgtttgctttgcctgccgtcatcctcccattgaactacctttctcgttgattacttgcattgcatcatccgctcttctccacgatagaatatttgaatttttgcaaccaacaagagttgcatctttgctattttgccatctaagcctatgattcgtgggtccgtctctgtctatgatttatgggtctgatgtcatattagtgaagttcactgctgatgattgtcaaattgcaaatccatttactacaaccctagctattgccgg

SEQ ID NO: 120728 - DNA, 492 bp, Zea Mays
tgctaacagaatttgataactaaattgaagatagtatttcacaaggaaaatctattccacgctcctattgtttatagtaggaaggaatagatgaatggagagcattattttcccatatcttgatcaaataaacactccaatggatgaaaacagtcacaagtttcaactggacataatgcaattgggtgactgataacataatcaatatattcatttgttggcaggccactaacacttaacgaaaggtttatcttgtcactggaagtttaattttgtaactcacagttacttttgattattactaccgtttcaactctatttgtttttcaaacaattattattgagatagtcaaagttcctctacgtaagataatttgatactggtatataattattggatcacaggctaatggtatgcaaaatatattgttgttcatcagaaatcatctctatgaagtgtcacactaccaattactaagttcgagaaaaagg

SEQ ID NO: 120729 - DNA, 423 bp, Zea Mays
ctggaacagtatggtctcttgcaaccatgcaattgtgctacccacctagatcataggattgtacatatggtcgatgataattttgctagccaatgaaatcactcaagatgacacgcgtcaatgaccatcaatgtcttatcctgtagagaggaggagccatgggggtatggacatctgtgtcaagggtgtaacaaaccacatcgttgtcgtctagcagagactagcgtgacacccaaattgcacggctcgagttcttttgtacgagtaaacagaacaagaaacaaaactgattattattgttatgtttagttttatcctatgctaggcatgtagccgtacacttgtgtgtatttggatcatacactccaggtgtcgaggtgaagaagagaggagtagtgagatcaatttgtggtagtagttccg

SEQ ID NO: 120730 - DNA, 287 bp, Zea Mays
tatcatgtttagactcatcaaatttgcttttaattctagtccaaatatcatgtgcatcatgaatggattcattataatttgatatgaaggcatgataatcttcattgctaagagaattactcaagatgtcataagctaggtagtttaagcaaaaacatatttgatcctcctcagaaatactttttctattataactagaggggaagatactcttgtctataatttgttctaattgtggatctacggttctaaaagcatttatcaccctagtagaccaagaatcataa

SEQ ID NO: 120731 - DNA, 418 bp, Zea Mays
caaggtaaattaattcattttcccagtagtgtttccaatctagccttaagtggtagaatcttcaagccgacatacttcgttcacaagtgacataatgggttagtagacataaattagttttttttcttttacagattacatagtacagatgctcacaaaatatacacttccaagaacacacgcaagcaaattcaaatcgtatgagtgactttaaagattggatcaacaattttttgagattgacgatgctatcacgcaggcgtctctcgttgtagaccagtacgttgtctactactgaaatcataatatcagtaaattctaaaatattcactcgtacatagagtcaaactcacaaaatcgtaccaataccactataaatatggcgacattgcttcatttctgaatagaagcgacataa

SEQ ID NO: 120732 - DNA, 411 bp, Zea Mays
gttagtcgtcattgaaaactgaattatggccaccagtgaactaggaagaatttggagatcaaattgtgaggaattgattaggtaactgagtaagatctttataacaaacttgtagttggttctttggacgacaatattgatgcagacaagtgaccgagttgttacatgaaaaatagagaatgaagctctccaaatcgtgctgtcagagcgtctgatgaagatcgccatggtatagtgaccataaagatctccgatgtcgtgagctcaacgccggtgatctgtcgccacaattcgtgcccgcctgggagattcgtgctgcgagaagagtagataacatcggggcggtgtgaaaatatccagtgtggggtgaatcgggtcgctggccggaccggccgtcgtgtcccgccgcgg

SEQ ID NO: 120733 - DNA, 590 bp, Zea Mays
tggaaagagctctgactctgctgactgaaccgtgatggggcgggtccagctggtctactgaagtttggtcccttgggtgggaatccaaatgatcgagtcttctggtgccggtcttgctgctgagcccggaggacttggaactttcttttgagatgccctttttcttccttctttgccctttcaacttgcatggccttgttggaaaggtgagagaaactgaggaagtcttggctagccagaattgtcttgagttctggccttagtccctttaggaagcgggccatcttcttgacttcggtactgacgtcatctggcgcgtagcgggctaactccgtgaacttgtgcacatattcactgacagatcttccgtcttgagtcagttctcggaactcgtcttccttaagctgaacgagcccctggggcacatggtgctcccggaaagccgcttcaaactccgcccaggtagcatctctgatggtgacgttgaaggtatcccaccaggctaaggccatcccggaaagttgatggcggccagttgaacatgctgattttctggacatccgatggcttccagctttcttttaatcggg

SEQ ID NO: 120734 - DNA, 554 bp, Zea Mays
ctttggtgacctaaatagggacagggtagaggtatacgttgatgacatcatggtcaagactaagagggggtcgaccctagtggaagacttaaccctagtctttgacaagctacaggaaacacacacgaggctgaacccagaaaagtgcgtctttggtgtcaccgcagggatgttgctgggattcctagtttcgcaccggggcattgaagcaaacccagagaagatcaaagcaattgagacaatgaggcctccggcccgaatcaaggacgtctagaagcttacggggtcactggccacccttagccgcttcatctcaagactggccgggagggcgctaccctttttcaagctattatggaagtccggcccattctcttggaccaaggaggcagaacgagcctttcaagagttgaagcagcaccttgtgtccctaccaatactggtagctctagagccaggggagccgttgtacttatacattgcagtggctacagaggtggtgagcatgatgctggtcattgaaaggatggcacaacaaccccaggggagtaaaa

SEQ ID NO: 120735 - DNA, 299 bp, Zea Mays
ctagttcacgtcgcgccgtggcgtgggtttcgtgcatccaatgaggtcctgggcatgtttatccacggtgatgtagaggtccacctcccggaacaattgttcggaggtgacgggtgctttctggagtatggctcggacgaaggccgagtcattggatccccggtagaagtcttcgatcatcgctgcctcgatgacttcgaggatgcggttcctcatggtcggaaacctcttgaagtacgatcggagggtttcctcgctctagcgccagatggatttgaggtcccatggctacgccggct

SEQ ID NO: 120736 - DNA, 351 bp, Zea Mays
gctcagatcagttggatagcgccgaagtcagtaaatatcacgccgtggaaacactctgaccattattttactccagccaccgtactcgagcagaccacgactgattcggatgagttcgccgaagacaaccgcttcacggccttgcaccacgtgcccgagcatcttaccacgtcgcagtcgatcgtgttaagcctatccggtgatcgcgggggtgcttgccacggtaaatgccaccggtcccaagcgccagtaaccctcttcttcttcgactgtcgtgcgtctttgtccaattccccggccaccgctcatgcctgctataaattgagcatgtcgtgagctccgtaggataat

SEQ ID NO: 120737 - DNA, 419 bp, Zea Mays
gccagaacttgttcttcttatcggcgttgaacgactcgacgaatgcgagattgtccttgaacacctcgaagcgtcgtgccttctcggctgcatccttgtagacgcggccatacaccgccatccacctctcatgcctctcggccatggctgcatcgtcgctcagctcacgagccgccaggacaggactagggaagctgcaggcgcagccagtaaggatggcaaggaggaggaggaaagccctggagctcaccatgatctatatatgatgctggtgagtttgttttaatttcttggtggttgctctttgcaatggatgatgctgtgtgtggaagtgaggaggggagcgttgtgtttatatagcacctacatctttgatggagtggtcattttcaatgctgtgagtgcaggccaagttgact

SEQ ID NO: 120738 - DNA, 1071 bp, Zea Mays
gccctagttgccagagacctttctccagtgcgctcgctgaccgatgggtcccagcctatcaggggccgaggatcgtatccccgacagagggttttcaccatttgcagagcgaaggacaactacgtcgcgtggagagaggaattgtggctcacctgtagggaggaagggagcgacgcacgacgaaaatgttgattaataggtgtagaaataaatgggctaaccctgataaggcatgtcgacattattatctgttaggcaactcacagggacagaaacaaactttatcttttttgggtaagataaaacgaaagtgtctctagccgagttgtttaggtggtttgtgtagtttctcacacgggtacgctgccgctgtgtatggatgggacgaaggttcagggattctctcaatctgcatgagaagatcttcttattaatataatgcccggtactgtcttaccctattttttacggggagaggaaactacgtgcgaagtagtagtgcttggaaaaaattactacttctccggttcttgtcaagctggatagggtgttttgctctgtggactgggagcagcaattccctggttgcttattgcaaagtgcagcctccgatgattcagaccattgtcctcttgttttaggtctgaaagatgtgttccatggcaaaaaacgattccattttgaggctttctggcccaagttttatggttttcaggagactgtttcttcaacttgggattcgatggaagcgactgcttgccccctggagtccctagctcttaaattgaaagccactgctagaggcctgcaaagttggagtgaccgcaaagtgggaaattttagtaagcagcgtgcgttggcaagagagattatctaccagttcgagcttgcgagggagttcagacagctttctgagttggagatttggctgttaaacagactcaagaagcattctttggcattggcgtcgctcattcgtacagttgctagactccgctctagggtgtcttggttgagacatggtgatgccaacaccaagtttttccatgcatgtgctcgttataggaagaa

SEQ ID NO: 120739 - DNA, 646 bp, Zea Mays
atcgtacacagttacggctatattcccgtttgaaacttgttagaactgttagaaaaaggcaagtctggatggtccactgcccatggccggacggtccgagacctggcaacataacgcacctgagccctgaccagaccactttaacatgggcaaacggtccgccctccaaggccgaacggtccacctaggagacattactatctaggctgaaaccccagatagtccttagtacattttatcaaaaacacacagtctctgccgaaaccatttggcacttgcagatggtccgcctaccttgtccggactgtctgcacaagcacacagggacatgtgtaaacttgcaatccctctggttaggaccacggacggtctggccctaaggcccggacggtccgcagtacaaaagccaaattgccccgagaaggaccacttctgctagtccactgagtgagtcacgggcggtccaccaactactgaacctggtagggtttctgatcctaccaggaacctccgtcagtctgtaggggtgagcagcggcgcgagagaggcacgggcggtgctggggcgccttgatcggtggtggtggctggcacaacaatagacttgatctctcaatctctcagctccctagaggaacccagaaata

SEQ ID NO: 120740 - DNA, 308 bp, Zea Mays
taacatatatagtgtaccttgttctctaattaattaatcatctaattattctcctctagcatggtatcaaatttccaccaaccttacccatgtgtcctattagagataggttgagggatgtaaccttagcatatatagtgtacgttgttctctaattaattaatcatctaattattctcctctagcatggtatcaaatttccaccaatcttacctcctcccctatccgtcaactcctctctagccaccaccaccagccctacctccctgactactcgctaatcctcccatgaccaacgtgtaacaccc

SEQ ID NO: 120741 - DNA, 417 bp, Zea Mays
tcttatatattcccagaatgagcaagagcatgagaaacatttgaaggaagtactttagaggctacgagattgccagttgtacgccaaacttagcaagtgcaaattctggatcagcgaagttctgttcttgggccatataataaaccgagatggactagctgtggatccaaagaaggtagtagtgattctagactggaaagcaccaaaagacgtccgaggaatcaagagtttcattggaatgtctagttactatcggcatttcattaaaggtttctccaagattgccaggccaatgatagccttgctagcaaagaaggttgagttcaagtggaccctagcgtgccaagaatcatttgagatgttgaagcaaaagttgacaacaacgccggtattggttatgccagatgttcacaagcc

SEQ ID NO: 120742 - DNA, 695 bp, Zea Mays
gccaatggaaaaattcgtaaatccgtcttgaatgaatacccctggactgtccattcagcagaaggaaacatgtgtgtacaagaaactcgactattgtctgcaaccttcaccgagaccggagataataaacgagatgcacccttgagatgagcagtagctgaatcactaacaaaagagtgtgtgatgcctgagtctatcagaatagagatggattggccctgacagatgccttgtaaccttactgtgtaaggagcagaggttccagaagttgctgacagggaaatagccataaattcttaaggacgtgttgtattatcagcctctgaaactgcacgctctgcatctggttcatggaacaaatcccacatttcttccaatgcatgcaactggattgttgaagagcatcggtggccatgagaccatttttcagcacacttgtcacagagtccacgagcgcaccgatatgcttttaacgaagccaatttatcctccccaggtcgcggacgaggcgtctgtggacgtttacccccatcagtaggaagcctgtctgatggtgggggtcgaggtaatggtaatggttgctggatagaggagccccgagcgtaaaatgatttccgagcatccgaacgggatggttccatctcctcttcctgtaattgggcaacagcacaagcagaatcgagagtagccggtcg

SEQ ID NO: 120743 - DNA, 424 bp, Zea Mays
cagagaaaggagtttaggaagggcaccatcgtcatgaagggaccgcccaagcaacgtagtgggatagaaattatagaagagcataggaaacttgtcctagacgatagtgggaaaaggtatcaaggttttggtgaggagcataaatggactcacatatgtggcttgtgggagctttcttatgctaagtcattgattttgatgcacaacatcgacaccatgcatcaagagagtaacttttgccaagcccacataaatacatgcatggatttcccggataaaataaaagacaataacaaggcacacatggacttagccgtgatatgtgatcgtccaacccaagtgcttagagaaaacagaggcaaaccaaaagctgactattatctgaaacctaagcaacggaaagaagtgatgaagtggatgaagg

SEQ ID NO: 120744 - DNA, 324 bp, Zea Mays
tgctaaaaacacaaaaacctcataatatggactaaatttcccttaatcccttatgcactatacattattgaatgacatagatttagatatgcatggttattcaatgaagtccaaggtctaatttaagccatattatggtgagtgtctaatatagaagaatcaaatccaaattaactagaaagagtacatcacatagttttggattgttgaccatatgataagattcatttttcttccaattcgacttttacttcataatcaacaattgatgtataccctcaagtgctccctcttccttagtggctacacaagtcataaagaagg

SEQ ID NO: 120745 - DNA, 921 bp, Zea Mays
ctaattcagccaattgctccatgttctcctggatattaattggagtggtccttcgcagccaatcctgagtgcaaacaagtgcttccaccatgaatggagtaagagatgtcctgaagtcatcaaggattcttccagacgtgctaaaaactgattctgaagcaacagttgacaccggaattggtagcacatcacgagccaagtgtgctaataccgggaatcttgaggaattcaccttccaccatcctaaaatatcaaacttattatcttctggttcagtatcttcatcaaggtatttttcaagttcagatttgttgttgccaccgccatagttgtgttgttttagtttttgtgcaattaaggacttcatccttccgcctttggactgtcttgcttcttgagaatcattggctggtgttgttgcatcaggtggagcataaagtctcctatattcttcaaacaattgtcgaacacatagtttaacagcagcccaaaccttatgtccattttcctcactaaacatctcttcaatcgctagctttgtgtattctgatagtttgtatcttggatccaaagctgcagcaacaaaaatcagcatgttcatattctctttttctttctccttccccttccctctctcattcacatttctaccagtttcgccaagaggttcatgccagtttccccaatacttatcatacttgtctttcattttctggcccatttcttgtcatagaaaatcatcactattaatccaattgttaatcaaaaagtggacttcaccaatctcaaaaaagaagttgtgtgaagtgacatgcaaagaactagaaatgcgttcggtgagataaaaaaaatgtccaaggaactcagccatgttctttgcattctcccagtcttgttcatcaggataccctgggcctcctt

SEQ ID NO: 120746 - DNA, 481 bp, Zea Mays
ctcgctcgaggcatttcttgaggcttatccggtcctacaattcattgtttacattcacctgtttcggtgcggctatcgacaaaatgataaataatgacactgcaccttatgttttcaaaattaatggggtcgtgcatcataggattggcaccctacttccacagcgtgggacacaaccaaaatttgcccagctgtacatatatgacacggaacatgagacccagaacaggctaggcatgtttgagaccgatgatggcgctggtggccagccagaccctgaaatggcgtcgtcgctgctcgatatgctgaatgaaaacaactcacttgtcaaagcgtttcgatacacgagagagcgccttgagcgcgagggtgatcaaaagataatactcagattgctaggctgcaacacacgccatgatgtacaatacatcctaccctcaaatggtgagatcgctgccattattgttggtgactacatgac

SEQ ID NO: 120747 - DNA, 386 bp, Zea Mays
catcactcgggtttataggcatctcaaagtgaacttgcctttcatcattggggagatcaccaagtgaagcaaccagagcctcaacttcttcaggagagggtcgcactctaagacccaggccactgtcgctagcaggaggattggacacaaaactgaaaaaagtcttggaaggtggcagattccaggcagaatatgcaacagcagcaccaatattcgacactttgcctctaaggatcatctccagacggcttaccaaatccacagcaggaatcctcctcttggtaacccgggttgagtcagtgacaccactatacaaataagccaggtatgctctgtccttcagtggctgaatgttcttaaaaacaaagtctgcaactacagcttcg

SEQ ID NO: 120748 - DNA, 446 bp, Zea Mays
ggacaatgttcaaatacctatgccgatacgtccattagaagaggtaatatctttaacaactatattgatttgcggttatacatataaatgatttataggtttgtgttattggcttatgattgagcttaaaatgtgttggcaggtacaggttaatttgcaggatcacgcaaatatgaatgagagtgatgacaatgaacaaaatgatcatgctagaaaggtaataatggtattatactgaatgttggactgcataatattatatgctgagaaatatttacttttgaattgcagaaactggattttgcagtcgatgggataagcttggcaagaccaaataactcaaaaccaaaaggaagaacaataaaggggagtgaacaaaaggttattaaattgggagcaaaaggtacaaagaaaatgaccaggaaatgccagaagtgtggaattgc

SEQ ID NO: 120749 - DNA, 502 bp, Zea Mays
ttacacacatgcatcaaatgtggcactagtcagattactcaaatgccatatcctaaaatagcatgccttgattctaaatgttttatcagttaactatgagaaacgtaaggtgtaccatgcaatgttatctagtcatctcattaattgtcctggacggacgccggtccccaacactcggctgggcactctgacttgaccagagcgatcagaaaacctggtaacctaattaatcatctgactagctgttttgaccgactaaatttactgggctagctgttaggctcaagcccaataggatttctctcttatacctcccactcatactctctcacctcctcaccccgtgagacgccatccaccaggtagctgtgtgccggctactggtcgcctctgaagccattcctactgtcctgccatgctagagctgcatttcttctcatcctcccttctagttctagctgttgtgcgcccatggctcctccctccagatgttgcttctttt

SEQ ID NO: 120750 - DNA, 317 bp, Zea Mays
tatggagggagacatggtggacttgctggaggtagaggtcgtggtggtcctcaggccaatgtggtggtcactagaggcactccctctatcaccctaactagagaacaagctaaacaatgggaagaatggcataagggcaaagaatctgagtgtccaactagcacttcacttggttctgtggcaactatatccacctagcactttggtaactttgccaactatgcccatttgggcataggtactcaggcgcaagctcttgcatcttcatgtaggggtcatagagatttggtaatagattcacaagcatccaaacatgt

SEQ ID NO: 120751 - DNA, 872 bp, Zea Mays
gtagctgcattatgtaagttatttctctctctttttttacgaagtctgcttgtggtaggttgttgctttcgctaaccaggtggcatttagcacgcttgtggaccgcgtgatttcatagttgcgctttgagaagaaatagctagaagctaaggttgagcgccttcggaccaagaataccgaggctatccaggacaagtctgttgccgagcttaaaagtcaacgactcttggagaatgctagcacccttgagaaaagaaatgaggaccttagtcactagctagtcgagctgaaggacacgatgtccaagtcgtagtcagaaacccaagccgctcaggagcgcaccactgccttagagctagaagtaaaggccacaaaggcctatcgcgagaagctagaggctgcaacgcagggcgacatggaccaagctcattcactttttgttgaggcatatcgcgacctaggtgctgagacatcccccttctataagtctgggaggagctggacaccctcttcctcgactggctgtaggaggaattggtgagtctcccggcgatcgctacagggctgatgtcttacgcctcccttgtcacctgcgagggtgctgccaatgccctttcccacgaaggttgtcatcattttgaggtctttgagcagagcgactaggacttcaatcgggaggttttctaggttgtggacgcatccttgaagcagtctgttggtgcactgttcgatcggatgtggggtccacatggtcgctctgccgttagggagagggctagccgagcaatggagcaggcgaagaccttttctagttgtatggaatgttgtgtttcatgtttgtgatttctgatgcgtcatttttttgttcctca

SEQ ID NO: 120752 - DNA, 393 bp, Zea Mays
aacgctaccatgaccgacaggtccgtggtagatcattcaatgttggcaacctagtgttaagaagggtcatggccaccaaggacaaacacaagctcttcccaccatgggagggatcgtttatcgtcgcctaggtcctactcctaagagtctaccgacttaaggacatcaacgacaaccacttgactaacgcatgaaacatcgaaaacttaaggaagttctacccttaagtgtcatttctattcatgtactttcatactatagcaaacagaacatgtcgaccaagtcaccacattctgcttgggggcaagaaaatggcggccatatccacgctcttctatcttaaggaactctagcgtactcacctgtcctaagatacatctacgcccagaagga

SEQ ID NO: 120753 - DNA, 513 bp, Zea Mays
acactggcttggtttctgtgtagccaattcatccctaggatgacatctaacccttgagttcccattactactaggctagcggggaagtctatcccccttatttcaatccttagattcggacaaatcctatcggactgaactttccccccaactgaattaactcttaaaggtgaaatcattggttctatggggatgttatgtgattctacccaagatgtagaaacaaaagaatgtgtggcaacagtatcaaataatacttttgttgggtaggattcgactggaaacatacttactgccacgtcctgagtatcctggattgcttcggcctccaggtggttcacctttccatggttgtaggcctgaccacgacctcctggtgcttgctatggcgctccttgccttactggagtactgactgttggcgactgctgagctgcatcttcttggggtgcctgctgttccggctgagcacgccttgcacctttgcgcctgttctcagacatctgtagaaag

SEQ ID NO: 120754 - DNA, 561 bp, Zea Mays
gtctgaggctgtgagtggtggtccagctaaaaaggctttccaattgttgggttggctacaccagcgggaggtttccatcttaattgattcaggcagtacacattcttttgtgaaccagtgcttgattcaacaattacctactgccctgttagtggaagcacatatcaaggttaaggtggctaatggaggtattatgcactgctcttccgttttacctcgagctgaatggacgatacagggttatgtttttcaccaagatttgaaggtccttcccctgcagcattatgacatgattttgggaatggattggttggaggttcacagccctatgcatgtgcattggcgtcacaaatggctttctattacatatcatggatctttcgttacattgtatggctcagactatggggctagtgagagcttgctaattcagatatcatcagtgtctgtacccgagcctgcaagtgagagctccaagttttaccctgagattgagtccttactgtcccagttttcttctgtgacttcggctccaactttgttgccaccagtaagaagttg

SEQ ID NO: 120755 - DNA, 450 bp, Zea Mays
tgcagttaagcgcaatgtatgaattaattacgacgatggacatggacctccaggttttgaagcaaaccttgtcgtcatcgcaggtgtccggtccaaagcgtcacggtcgtcgtcggaaccgaaccaaaccaagacgctggatttttctcccaggccggaaagccaaggcaccaagctaccgcatcgcattactggctctgctagctagagtagaatagtctgtccgtgatgaggcagctagcagcatgttgttttaatttctgtgcatacgacttgtaacagttggcatgtgtttttggttcatcggaaaaaaattgccggattccgaatgtaagaccacttgtcgtcgcctgatgaattgttcaatgtgatgtcctgaatgtcttcctgcaattgtatcaatcatctgtggcttgctgggatatataagaggtaggtggaagagaaaag

SEQ ID NO: 120756 - DNA, 895 bp, Zea Mays
ctgaatagtgctatgctaaaactaaggcgagggccttcttatgttgacaatttcagtcaaatgctcctagtcagattgaatgtttgtgtggacataaacattgtattgcaaaaagtatacatattgcaattttcaacatgctattacagactcatagacaagtcgaatataacaaacataatagatgaagtcttactaaaacaacattacataaagtcaagggttcttgcttacaaagccttacataaagtgtgacctaatcacacctaaattaacaacaagtctgacttagacaaatcttacattagttattactaaataacaacaactaacatcaactctcactttgaaatgcttcacatggtacgatcccaccattcttcgaaatcccaacccatatcctcagaatgatgtggcatgctaggaacttcaaggttctcccaaaaatcttgagcctaaaaaatcatttcccacaaactcttcgactcaaaatcataattgttttcgttgtatccttcttcggcgcagtcatctaaagtgtaaccatcttcaatgtaaccttctttggtgcgaggatctattgactcaaagaccaccgaagaagtgattgtgcctaaatctcgttggcaaactaaagtagctttctcaagcattttacatatatggtcaagatgattcacaacatttttttgccttcagaccttgcactttatcaggcatggagcacaaccttgacacgtcgtgtaagagagaagtttgacgcctcatctcttgtatgacatagcacagagagttcttaatgttcacatgagtaaggtaatcaacgctatgctgcaacaaaatgcaatgtcactatgttagttactgatctacaataaatgacaacatattgcac

SEQ ID NO: 120757 - DNA, 1018 bp, Zea Mays
gcccgccataaagagcgaccagggaagcctagacgaccgaggcacatacagacaaacacaactttaccaaggtcgaacaccccagtgtaccacaatagagtagctccttccttgggaagctaccggtattcgacccccaccttggcctataaaaaggaggaggtcaccaaaacatagaggacgaaggggacacacatacatacatgcacacggacgacgagaccagaagacccagaggctgaagccaagggagcctaggcctgagagcactagtcgcctacaggaccctcaacacgatgggccgcatcgagacctaggctacgttggccaggggtcggcacgacatagagacgtcaatgatggcgccgatgctcttcggcacccacgtcgcccgccataaagagtgaccagggaagcgtagatgatcgaggcacatacggacaaaaacaactttaccaaggtcgaacaccctagtgtaccacaacagagtagctccttcattgggaagctaccggtatttgacccccaccttggcctataaaaggaggaggtcgccaaaacatagaggacgaaggggacacgaatacatacatgcacacggacgacgagatcagaagacccagaggccgaagccaaggtagcctaggcctgagagcactagtcgcctacaggaccctcaacacgatgggccgcaccgagacctaggctacgacggccaggggtcggcgcgacatagagacgtcaatgatggcgccgatgctcttcggcacccacgtcgcccgccataaagagcaaccagggaagcctagacgactgaggcacatacggacaaacataactttaccaagttcgaacaccccagtgtaccacaacagagtagctccttccttgggaagctaccggtattcgactcccaccttggcctagaaacaggaggaggtcgccaaaacatagaagacgaaggggacacacatacatacatgcacaaggatgacgagaccagaagacccagaggccg

SEQ ID NO: 120758 - DNA, 742 bp, Zea Mays
aattgtatgaacatggatgcaaggtcaccaccctatgtgatgagttgtgcaagctgaacctagaagtcgtttcctccggtgccttaagttaaatttcagtggagcccaccttacatgagcagatagtcatggcacagattggtgacaagggtgttcaagtcattaaggaaatgatcaaacaaaaggtggacaaatacaaatgcttccgtcaggacagcaagggaattctatggtttggagaccgattggttgttcccaagaacccagagctcagaaagaaactattggatgaagctcacctttccaaattctccatgcaccccggcagtaataagatgtatcatgacctcagatctttatattggtggaccagaatgaagagggaaattgctaagtatatatcggaatgtgacacctgccagagagtcaaggccagtcatttgaaggtggcaggcactttacagccccttcccataccatcttggaaatgggaagatatttgcatgaattttatcgtgggattgcccaatacctcccgacaccatgattctatttgggtcattgtggataggttgaccaaaacagcacatttcttgccagtgcataccacccacaagacagagaagtatgcagaaatctatattgatcaaatagtgcgtttgcatggaattccgaagaccattgtgtctgacaggggagcactgtttgtggcacgcttttgggagcagctccaagaatcact

SEQ ID NO: 120759 - DNA, 322 bp, Zea Mays
gttcgggaggctgaaaagttattcactgacctgaaccaattcgcctccacgggcaattgataaatcaagctagaccagccttgctttgttttccattgagctttaaatattttactatttgttggttctaaactttttattcctttaagtttgttggacatgtgtcatgtttaatttgagtctgtaactatcagttgttctcctgtgaactacctgtttaactcaactgcacaccagaacctttatttatttccaatgcagtggcgaagctcgtacgtttatttcattacatacccttttttttatgatcagtgacatgtct

SEQ ID NO: 120760 - DNA, 465 bp, Zea Mays
gttgacgagtgacgacacgagagtttcttgcagcatgtagtttggctaatagaggactatataagataatatctcattatgtcctgcaatgccatttaatttcttcttgctagattgaaaacttgcaccggtgagttcacttcgccatcaaagattcttctatacctcttcttccaaatgctccaaagcagtatgcataaccaatgttgcaattggtctcctcctttgtctagcattgtgaccttgcaatgagaccaaccaccaatcttctgttgcaaccggatcccctatccagctcaatttctaatctacaaccaaacctccttcgcatacggaaactgcaagcaaaggtgctcatcacttcatcagtactgtcacggggatgttgtgccaacccatggtcaatcaggtccacctacaatatttggtgtatgtgttttatatatgtctagatttattgtcatc

SEQ ID NO: 120761 - DNA, 475 bp, Zea Mays
agtgaacagtaatagacgcctattcccaatctctcttgcacatgtaaactccccaaggaaagccattgccagtctgttcccctgtacaaatacgtacaccatccatcaataaaaagttaacattgttttcttaacaccaaaatcatcatcttaaacaaccgcgatttcaacacattatcagcacgctccaaaactgaattccacgacaatcaacgaaacaataacaaagagacgtcaactaaagccaatccatcggagaaggaatcatgacttctagatagtcgcaccactgacactatactcacagaaataaagtatttccaaactcttaacagaaaaaaaggaatgtcttgacaatagctgatagagagatactttggtaattggttttggtcgagcctttatcactctcccaatgggaacacatattgtgattggggatttgttattatatctcgatttaatgcgaaccttg

SEQ ID NO: 120762 - DNA, 408 bp, Zea Mays
gctatcccctaggtggggcccatggtttggatttgatagtcacctagagagggtaaatatgcgacacctgaatttaaacacttaaaacaaaaaactagatcccaaattagcggttagagcaagaggaaatataatccgagtaagggagatgagttctcttgcaattgttgatcttattaatgaggaattaacttggggagcgacacaagtgatttagaatgaagatcaaagcaagagatctttaagacgtagagggaagaacaaatcgcaacaaaacaaacacaaacaaagacacgtcgatttgatttacctgaatttggttcgaaggaacctatgtctcagttaaggttcctcaaaggatggggtctcttttagcctctcaagtgattccaatgagcaagattgagc

SEQ ID NO: 120763 - DNA, 314 bp, Zea Mays
caccttcagtctaggagcagtcttctgatttggaatcgtctcctgcattgcaggccaggagggaactctacaccgcacagcggctccaccggggaagaaatcttccctggaatcgccaaaggcggccgcgggaaaattgtgaactacaccagcaagaataccgtcgggagaacaaaggggtgtggtcccgcacaaggccaaacccggaagtgccaggatgactatagctcgattagccacgacttctccagcacgactaactccattgtccacctcgcccactaaggtgtggacatggatcactcgacggaggg

SEQ ID NO: 120764 - DNA, 353 bp, Zea Mays
taatatgagttcctaggtattgtatgctagtcaatctgctccaccaaagattttggagtgtaggattcggtctatgggccatcatttgttcaggacaatcagtgacccagctgagaaagccatatttgtagagctacataagctaatttgtattctaatatgttggtcgagccatattttctaacttaatcttaggcatagcgatagcctagatcactctgtctctccctaaaaagtacagctccaagaaattgatgtgcgacataatgacagctaaggaagcgccacacgaccacacctaatctgaaaagtctacttgaattatttgagtgtgtcatatcttatctctgttt

SEQ ID NO: 120765 - DNA, 500 bp, Zea Mays
gcaggtgtcccgttggcatcatcctctgggttctggagagagtagatagcaaaagaagaaccaaatacaaatttcgcgggccatgcgagctgttacgactcatcagctgcgtttttggagccttcctcttctgctgcactgtctgcttcttctccgcgtgtgaagcgtgatggagttgttggggttggggaggaagcgaccgcgccgctgaaagcgatgcagcagccggagccgatgctcttcgatcccagctgtatcctcgctcagcatgcaaataaatcaaaaggcagcgcagcacggccatttctcaagctgaaccttcacccccaatttcacattgtgcttcgtgaatctggtagctttggccatgaaaatacccaaggtagcatatatatgccattaggttattaggttcgtttggtagcatggactcatcaccccgctaccatgcattagacatcttttatttttgttcctttgtgtgcattgcacatcccttt

SEQ ID NO: 120766 - DNA, 287 bp, Zea Mays
ttagtgcagtctctctttgcctaccctcctcacgcaggggaagcggccacagctcaaatcatcctagtggtggttttggtgcctgagtacctgtgtagtcatctttgcatatgaatttgtgcaagcctttattttggttatatttgatggacaatatgaattaaacttgatgtctatgggttggtgaatgaaatacttgatttgtgagatatgattgtagatttaaatgactatatgagtaatgatggtgaatttgaaatgttatgcgaatgaggaatgtgattatg

SEQ ID NO: 120767 - DNA, 833 bp, Zea Mays
tgggacattggtggtggcgcctctcccagaagctggtacaaccttggatattcagagacctgtcagtgttcgcccgagacgcccttgccgggccaatcaacttgaatctcctgctgatgagcagaaaaagaaaaagagacgtcttcggcgagtatctagtttggatcgggacgttggtccttcggttcctgctgctgaggaagtgcatgtgcctgagtttactgacgctgaccccaatgggtgtgctccatctgctgctgatcccaatgggtgtgttgtttgtgttgctgatgaaaatgacggggaggaagaagatgaggtccctttgactcggaagaacagtcggcagtatgtcgccagtggggaaagtagtggagttccttctcctactctgtctgccctcattggtctacaagaattgtccctggcaaactttgatcagactcttgaagatatggttccggaggatctgttatcagaaccagcggatgatggtgcgatggatgtttgtgctgatgtgctcgacgtcgggttggggtcatcctgggcagcgtcccgcgcctcatcgaccttggagtgcggtcttgagggtcaggaaactgatttggatcgtcttgttcccatggaagtaactgagggaccttcagccttagaggcggatactacagagaacttggtcctcaaggatggtgttgacacttacccagcccccgagggtgttgccggggatgattcggctcgggtgggcagcgcaagccactgcccagcccccgagggtactgccggagatgatccggctcaagtgggtagcgcaaactatggcccagcccccg

SEQ ID NO: 120768 - DNA, 555 bp, Zea Mays
aagaaaacaaaacagctcctgagctgaaggcgacaatctctaaaaagcaaaagcttgacacagcgccctcttctgagccgaaggtagatgagacaggagaagaagctcctctgatgccctctgccgccgaagcagccgaaattctgaaggtgatgactgaatccccgcccttcaagctgctaagtcctctaggatcagaactgacaaaatttttacagaggaaagaatagccttcggctacagaggagaaagttaaagaacaaaagaagcaacaaattgtaaatgtaatggaagcaattgaacaaacactgcccttagcttcggtggccaaagtagcgattcctacggatgccgaagctgaagctgaaggtgctgccgaagccaaagatgctaatgaagccaaaacaacaatgtgagatattgataggcttgtgtcagatgtatttgtagatgtgactgtggagacaaatgtagctctagaagaaaccatggccatagtgcctgataaaggaaaagaaattgttaaaactccttcggacgaatgggattttgacc

SEQ ID NO: 120769 - DNA, 669 bp, Zea Mays
atcagattattttttgtatcttttaccgttgtgccgatccccctttttgtagggcttaatcctgagcaatgccttaagggcacaaaagaacgctaaggacgaaagatgccagatagcccttgggaaccttcgttcggaggttatcagattgaggaatgaagccgtagaaaaggaccaaattctgctttccttagtagacagaatgaggattagcgaagccaatcttgctacacagttcgaagctcatagagccaaaatttaaaacttaaagaaaaagcttatggaaaagaatgaagattttgaagtggctaaagcaaaacaagaaataagtgaatggactagcgcaagactgcaaaagaatgtagataagctttgggaatcgaagaagaggtattacgaaaaatccttggattgtgctaagaagttgaaagatagttttgcaaaggtgggtgcatactcatctgagcaaaaatttattagaggcgatcccgaaggaatcatcgaatggattggcgaagaagctaaagcctttgacgagatacttagcgaccgtggtgatttcagtgccttcgccggtgctagaggggttgcatcaattttagagaaaaatggttgtcaacatgttaaagctacaacccaggcagagactgtcttctctttagacaacat

SEQ ID NO: 120770 - DNA, 914 bp, Zea Mays
aggagactactgctgaatccagcgaaggtggattagttcgattaaaatacaccttcagataccgagagaagttcaacgaaccaaatgatgactggttgaaatgcattgaggctactagcgacgagttgcttgggacatataccagggccgaagatgatgccttgtcctcagccttcgagggtcggggcaagaaaagattgaacagggtttttgatgcaattggcttcatatatcctgattactgctaccccttgagaaggcaaggaaaaaagaggaaaacaaccacttcggccaccactaccgtgccaaagggcaagaaaataaaggttttaacccaccgacctcgatatattgaaatggtcgtagtgcctgaatttggtgaagggacctcttccactaccgaagcaaaacaagctgctcccgccgttcgaagcgctgaaggaccgattatagcaccgaaggtgcctacagtcgggccagcagaagcaaaagatgatacggacagagagccagaattagaaaaaacattgatgacgccaaaaaaatttagcccaccggcagagacagaattgccgaagatgacaaaggctcctgccacaactcccaagagaaggaggatggccagcgtgctagacgctgtcatggagaccacaaaagccttgacccctgctcctacgaagaaagttgccgaagctgtcaaagcacaggctgaagccgaagctaggccttcagtgcccattgagacgaagcctgccgcacctgaggataaggctgagcaacaaactccggataccggtatgacagcagggcaggtcgtgatagaaaaaggtaaagctcctgctcccgaagctccgtccgaagatgttaattacattattcgacatgcttcagggaaaagattatctggagaagaa

SEQ ID NO: 120771 - DNA, 344 bp, Zea Mays
tattctgtgggttgaactatgtttagttcaaattactctgtgaatggttaatcgaggagtgattataatggttgcgcttactttacatattacctcttgtatgcctcgataaccatgactgtaggaagatctccatcaaaactctgatcgattatgtgtgttgtatcttcagcttgaaatatcatgcacacacatagggggagcttttcctacattctgagttttattggaatttatctatctctcggacagaacttcaaatcaagataagtcctatgaaactcatctctaaaatccttcttatacctaaggtatgagggagatttggaaaaacaaaacttctc

SEQ ID NO: 120772 - DNA, 386 bp, Zea Mays
aaatggttaaaagcaacataattgttgttgggcttcttctatcaacccaaaaaagcaaaatacaccttgtcgtccgtgcagctttttcgagtacagtcatattgtaggcacgcaaaaaagcgaaatacaccaaaatcaaagtatagaattgaatcacttttgaaatatgtgtaccttgccttgcattcgaggtagcagtagaagaaattgtcgatgaggctgagctcgccggtgatgtccaagatcttcagaatctccacaagccggatcacattgtggtaacaggtgcatgtaatcgggtacagagctctgaaatcaagaaccaataagcaatcatattgtgcaacaaacactacatgaacattagaatagatgaatacactaca

SEQ ID NO: 120773 - DNA, 488 bp, Zea Mays
aaaatacacgaatgcatcaaaatttgctatatctataccctaatgtcctttttacccatcggatactgggttagggtactcattgcctaccactaccgttgtgaatttttttaacaggaatcggtacaaatatcacaagaaattaacaaaagatctaaaaaatagttacttgaattctggttaaagcgggaaagaagggatagttaatggactgcaactgcaagttccaattttgggtcagactcaaaagctacggaaactggctcatgcattatccatccaatttcgggccggactccaaagcgtgcggctgggcccaaatctggatgcagtccagctgcttaaatccaacgccctcccttccattcctttctcctggcgcgtaattatccatcttcctctactgcctactccgtgctcgctcgctatcggcttccgcgatcaacccggtctctcttctcctcgccgatcgaatccatccacagctc

SEQ ID NO: 120774 - DNA, 517 bp, Zea Mays
acgtgtcacccgcttattatggaagtggatcgaaacagtgtttacgatagcatacgacctacgtctaacttgcataaatttcagttacgcccacgatcagcgcgcccacgatcctataatatagcagatacacgcgcgaactcgccgtgaatatcgcgcccacgatgatggaaatgtgcatgggagaaggaaagaatcccacgcttccagaaaatttatacagcaataatcgggtgttagggtgcgagtggcagaaggaagtaccctgtactgaaagatggcagcgccatggggtaaagagccgatcagagagtacacgaagctgacatcagttcatcgatcaaatccatacttggatatcgtatcaatggtgcagggagatcaaccagtaggaaaacagtttggctcggatgcatatgcacatgggcaaacagaaactgccggaggggcaattactccaccagcagcattgagggtgccgggtgttgatgatcacagcacatctgatgcatcgagg

SEQ ID NO: 120775 - DNA, 608 bp, Zea Mays
ggcccgggtgggcagcttggcttatcgcttgcaattgccggattccatggcaggggtacacccagtttttcatgtctctatgctgaggaagttcttgcaggatccggaccatcagattgagatggaaccaattgtggtgcagcaggatctgaccttggagtgtcgttcggtgtgtatcttggaatcctcggagcatgttttgaggaagagatcaattaagtatgtcaaggtcttatggactaatcagtctgagcgcgaggctacgtgggaacttaaggagctgatgcggcagaaatatccggaactttttgttgtgggtaagtgttgttgattcattaatttttgtcccttttgtcattccgatagaagcgtcagaattcgaggtcgaattctttttaagggaggtagagtgtgattcccggtttgcaaagaggagaagtggaggttattctttttgttctttttcctcattcgggtgatgcgctttgggaatttggaatttgtggaaaatattcacctgtaatacagtagaatttctttggttagttgtttgcgacggggtcgggagctgtcacatgggcgagtcgggccttgaaccttgatccagc

SEQ ID NO: 120776 - DNA, 303 bp, Zea Mays
ccaggcaactcttccggaaatacatcctcaaactcttcgattacagacatgttttctgctgccagattaaacatcattggatcgtttgtgggcggctgggcttgacaggaaactgcctttccttggtgatcggtgagaagaacagtcttgcttgcgcagctgatgatacctttgtgcttagttagccaatccattcctaggatcacatcaatcccttgggatggcaagacagttaagtctgccaggaacactaccccacttaagagaattctgacttgagagcacctgagttggcacaggagg

SEQ ID NO: 120777 - DNA, 490 bp, Zea Mays
attcatgtgggtatgatagctagagaggaagctctaaacatacatcacgcaaaatattagttatctaagtcttcaagtggtgcttttgtttgtatcaattgtagattttaatggatgttagttgtatgtaatccgcagtatcaaatcttcaagcacgatctatctagtcgtgttgtgacgtgtcatacgttgtatctaagtttggggcacaacacgacacaactattcaactcgtggcggcctggccttttctttcttgccagactggtgcttcaggcttctattttcgagcgcgtggtgactgagtagccttaaagggcctgcctcaaattttcagatgtctagagacgaccttgtcaagctttacggcgcattctctatgggcaggaattttacagcagccttctaaactcctttcgaggtaattaagatggagaattttttgtgtttgtcatgcctaataaggttgaattttctttaattgaagtgt

SEQ ID NO: 120778 - DNA, 683 bp, Zea Mays
cggggcaaaagtcgcctaagggtgcagccggactagcacaacaagtgcgcaaaatcgaagtcttcttcgaaagactatccgtgcaaaagtcgcctaagggtgcaaccggactattacaacaagtgcgcaaaattgaagtcttcctaaaaagactatccgggcaaagaccgactacaggtgcagccggaccgacatcataaacgcgctagatcaagtacacaagtcccccacggacacagccggatcagcgaaggcacacagcatcatcatccaaattatagttacatacgtacagcgagggcatcacaccttacattggttcaactttcggaatgatacccatctccctatagttaaacaacattatcctcagctcctcaccctcaaaaagacttcgcaactccccctcacctacactcgccccaaccggcaaagacaacaattcccgcttgccagccctgtccacacgaagacgaccaccctccacctcactcactctacgcttcgccaccgcccttcgccgcctacgcccagcactcggaccaggaaaaacttcagcatccgtcacacgcggagaagcctccgccgcagccacatccaaggccacaaagtaatccaagtcctcacccgaagactcttccgtccacacaaccgaactcccagaatcatcaaactcaaaaaac

SEQ ID NO: 120779 - DNA, 398 bp, Zea Mays
ccgattgctccgttagtagggcatagtggtcaccccgaattaaataagaatgcaggtcgaccatgaacaatttgagtattcttgaggtctttttattgatgatatatttcccagtttacagagtacatcgtcgtaccgatagcttttgaaatacagctaggggtaaaacttcctgaggtgttctatgttccatgagttcccaatttccgtgccgtccatctgagtgagacgatatgatcccggccgagtgacctctgctactatgaatggtccttcccatataggtgacaacttgtgccgtccttcccctgttagaattcggcggaggacgaggtctcccactacgaaggatcaacgtcgcatggtcttatcgtgatagcgcctcagagtttgttggt

SEQ ID NO: 120780 - DNA, 454 bp, Zea Mays
cagccatggtgatgggagaggtgatgctggattatatggtgcaggagagagtggtgcaggatggagtggtgcaggagattgcaggcccactggaggaagtcggttcactcatgccacacaagattcttaccttgatgcacctcagcgggagacaataagtggccgacatcgttcggtttcattttctgtccaagatggaatccatagctcaagtagctctagttcttttaacaatctgtttggacaagacccaatctataacccttatgcatggcaatggcaactggggcagggaccaccaggcgaagtgccaccatcgatcatgtatgggtacggacaccctacaccgccaaattcaaatttgtcacatatgtatccaccaggaccacagcatgggtatgtacaagttccccctacactggtatgttattttttgcttcgtcgataagtattt

SEQ ID NO: 120781 - DNA, 562 bp, Zea Mays
ccgctactgtactttttgattcaggagcatctcattctttcatagccactagttttgtggaaaagcatggcattcccactacacacctagaaattcccttggtcacccaaaccctagggtcagaccttctatgccagctcaaatgctcccaagtcaggatccttttaagtggggtagtgttcttggcgaacttagccatattgccatcccaagggattgatgtgatcttaggaatggattggttaaccaagcacaagggcatcataagttgtgaagataagactgttcttctcactgaccaccaaggaaggtcagtttcttgtcaggctcagccacccacccaagatccaatggtgtttaatctagcaacagaaaacatatctgtagtagaagaattcatggatgtattcccagaagaattgctaggaatgccgccataaagagaagtagagttctacattgatctaattcccggcactgcacccatcgcaaagagaccataccgcatggctcccaccgaattagcagaactaaaactccagatcgcagaactccaacagaa

SEQ ID NO: 120782 - DNA, 359 bp, Zea Mays
aggctggtcttcgaaaacatagctgaggcaatagctactagactggaggatattgatatattggaagaagaacgattgaatacagtaattcagtcagctaggtaccagcaaaccctgaggcactatcatgataaggccatacgacatcgatccttcgcagtgggagacttggtccttcaccgaattctaacgggggaaggacggcacaaattgtcgccgctatgggaagggccattcatggtagcagaagtcactcagccaggatcatatcggcttactcaaatggatggcacggaaatagggaattcatggaatatagagcatctcaggaagttttacccctagctagatttcaaaag

SEQ ID NO: 120783 - DNA, 282 bp, Zea Mays
gacgagctgtctttagctctttgttctgtttgagcatgaactaatctatgaattcgaacattgacttctttaatacgtcttgggacagcttgcctctttccttgccatagctattaggtaactccaggtaaatgccccggtcagtctagtttcttaggctatgtctagcggcacgcgacgtctcgcatgcgcattttgcatgatcacatcgcattattcatgtttccctacagatcaccgatcacggatgccgtcgtgtaaaatgagcgtctagccgcccgg

SEQ ID NO: 120784 - DNA, 322 bp, Zea Mays
gagaattcttgccactacaacaagcgtctgttctttctgctgaactctcatcattatgcttcaccggtgaatttatatgtggactgaactttgccacacttggtggagttactattaaattctcattgtctgctttaatctttagctgtgatgacctttcaaaactcagaacaatctccttgtgaatcgacacgataggaaatttatcttgttcaaattttccaataacttcactagattgtactactttatgcaaataagagtttagaagacaccgtctcactgaattttctgtgtcattgttcacactaactaccttaac

SEQ ID NO: 120785 - DNA, 657 bp, Zea Mays
ggaatcttcggtcagaggtcatcacactaaggaatgaagctctcgagaaagataaaatactattttccttagtggacagacttaaagctagcaaagtcaagcttagtgcacaaatcgaagctcacaagaccgaagttgaagatttgaagaagaagcttgcggaaatgaatgaaaattttgaagttgcaaaggcgaagcaggaaataagtgaaatggaaagattaatggtggaaaagaatgtcgaagagcttcgggactccaaggaaagatgctatgaaatatccttggaatgtgccaagaagctaacatatagttttgcaatggtgggagcgtactcttcggagtagaagtttatccgcggtgatcccgaaggggttatccagtggatcggcgaagaggccgaagcttttgatgaaatactcagcgatcgtggagatttctgcgctttcgccggtgcatgaggggtcgcggcaattttagagaaggccggttgtgaacatgttaaggctgcagcccagccggaatctattttctcggcagatgacaccaaggacccctcggttgaagcctctttgctaggcgggaggttttactctgatgtttggatgaaggatggtcgtgagatgcctgatgaagtcattaaaaagaatgagaaag

SEQ ID NO: 120786 - DNA, 390 bp, Zea Mays
acaaaaaaacaatgagcaaaaaattgcaatatatgtacataagacaaactctatacttacaaggacaacaattgagcatccgtatatcgtcgtggagacgtttgtggtgcttcggttatgccacttctttgccgcttcacaaaggtcattaaatattagctggcaccaatccgtctcatggaaacggtgcatttcttctatcagaagcacttcatggtttgttatgccctagctagcagttggaaacaacagacggttgaataagataaggaagaaacatctgatgctaaggtcatcatcctctcctttccttaaatgatcctatagcaatgtcacattgaactcgtctttagccaaaccaagctctgacctcaagttacttgctgcaac

SEQ ID NO: 120787 - DNA, 456 bp, Zea Mays
ccccacccacgatttggaattggcagccatagtgcatgccctaaaaatatggaggcactatctaattgagaacaaatgccacatcttcactgatcataagagtctgaagtatatcttcactcagccagacctcaacctccgttagagaagatggcttgaattgatcaaagattatgaccttgagatccattaccaccccggaaaggccaacgtggtagcagacgccctcagccgaaaaccttttgggataaagggaaccaactttttagaagattggaagaaggaatcagctcagctgaatgcatgtctgagagacaacggtagcctagaagtcaagccaatgctagaagaccacatatgcaaggctcaatgcctggacacggagacagcgaggcttatggaaaaagctcgcaaagagcaacttccggaccttaggacagatgaacaaggagtcct

SEQ ID NO: 120788 - DNA, 734 bp, Zea Mays
gagctcacagcatcactggcaacgaccagggagtttgccgaactctagaagaacatgccataggacgctccagatgctcgaaaagtcagcatcggtaccttcaagtccgctgaggacacgaaggaggtcctagtcgacgcccaccaacccagccaagcaagtccacatgggggtagcgctctctagcaaataggaaggcacgttcgtcgacttcctcagtctaaccatgatgtctttactgggaagcctgtggacatgcccgggatcccacaagaagtcatcgagcactctctaaacatccaaccgacggccaagccaattgcccaatgtttctgccatttcaatgaggagaagcgcaaggccataggcgaggaagtcatgaaactcttagcggcaggatttgtaagagagatacaccacctagtgtcgatcgttaatcatgtacttgttaagaataaaaatggaaaatagaggatgtgtgtcgactatacgtgccttaacaaggcatgtctaaaagaccccttctctctccctcacatcgaccaggttgttgactccactacaggatgtgaactcctttcctttctagatgcgtactcgggctaccaccagatcaccatgaaggagagcgaccagcacacaacctccttcatcaccccattcggttctttctgctacgtctccatgccttttggtttgaaaaattccatagcaaaatactagcgatgtatgct

SEQ ID NO: 120789 - DNA, 420 bp, Zea Mays
cgtagaatgggaagtactcgagcatcgcaagatccgggcggggctggcgcgtaaaatgggaagaatgagatggcgaggtggtcctgtgtacttgcgatgggatgcgggccgatggtggtcctgtgcgctggatggcgacgaggggattgggttgcgattccttccatggcggcgaggcatggattgcgtttgaggcgtggagtatatgggcggagcatctgcggtgcatgggaagaacgattgggcggggtggtcctgcgcgtcgttggcgatgggattcctgcgtgctggattgctgcgaggcgtggatagcagcgaggggatgtgtttccttctgtggcagtgacggaattttttccttccatggctgaggcattaatcgatgaggggattgcggcgaggaccatgcgaatgcagggg

SEQ ID NO: 120790 - DNA, 342 bp, Zea Mays
attctggtccagatattctgtaagctctcttaaagataggggcggttccaggaagaagctctatgacaaactcaactttccgctctggtggcatacccggtaaatcctttggaaacacatctgggaattcggaaacaaccttgatactctcgatcgggtctgcttcactgctatcaacggccatctgataacaacctcctttcttcggctcaggtgggactaactcggtcaccacttcctctcctagtggggacaccaacttgattgtccttttatcacaactgatagctgcctgatacttatctagccaattcatccctaggatgacatctattccctgag

SEQ ID NO: 120791 - DNA, 321 bp, Zea Mays
ggagactgaatcaaaagctttagtaatatccagcttgatcatcagacgaggatgcctttgttggtgtagaaatttagccgtttgctgaaccaacatgaaattatcctggataaagcgacccttaatgaaggcattttggtttggagagaccaaatcgttgagtcttgaaagccaagcgagtagccaatatcttggtgattagatttgcaaagttgtgaacaaggctaataggtctaaaatctttgacctgatcagcaccatctttctttgggattagagtgataaaagcagaattcagcttacgccccgtttggatcactg

SEQ ID NO: 120792 - DNA, 1308 bp, Zea Mays
cttaagtcttgttttacggttctatcctataattattttgtgaaccgagtaacgttctaagaatagtgaacttaacggcttaacctgggagtgtcttaactaattttggacgctgatgtttttaattgatagaaacaatattagctctaacacagtggggagttgaatgaagccacttttggatcagggccagtgtgacaaataactgaagtattgtgttgctcatcatgagagcaaatagtctactagatttttctctctcgaatgtgcagtgcaggtgagctgaatcattgcattagaaagaagagtacttaaaagcacacacccagccactgacaccatcaaggcatcaacttacaccactgtctcatgtctatttccatgcacaccacaaagaaaaaccaaaacgacaaacacttataatccaatggtcagatgatgacccaaagctggatctcatctctagtgagctgcatgacccacttgatgccaggcaggatgatgagataccattaaaacacaattatttcgatgttttccaaattattatccaagcaccaagagtgatcaaagaatttagtccagcctccatagagctcgtcaccatgttaatcgtcttgagtcaccaatcgtcaaattgtatagtgggcggatcactggaaaatctgggaggccaaaatgtataagtagcaatggacattgagaagatgcaagaggccaagatgcggtggatcatctcacttttctgatcacatagcagacagcactccagatgtgccaactcctgtagagctaagcgatctgctgtacagaattgttatgggctactattaaccaatggaagaactggcatttcttgggggtccatgaattccatatcaatttccatggctcaaaggggatgtatcctatgtaggaatccatgaagttgactatgggggtggttactggtcacaccgcaggtgaggcgcagaaattagccgccacaatctgtggcgagaataatacccatttgaaatgcagttttttgtggtggccaatgatcagttgtcaatcaaacttctacgtgatttttttgtggctctccacaactgtggcatgacttttggtggctgggaaccaaactacctctttgtctaaaactgtacattcccatagcaatttctaatggtgctcatcctgtacaccatgttgtatctccacctcagctgctaggttccattgttatgaccgataactcctatgcgcgccagaaaatggtccacacagacattgggtcaaaactacactcgacgcgaacaatacccg

SEQ ID NO: 120793 - DNA, 368 bp, Zea Mays
gacaggagcagacgaaactgtgggcgcagcaagcaaagttgagattgcagaggaaagaattctatttggagcatggattccctcttggtgctggcgaagaggggcctcaagttcccaatcgggcggaaactgttcatggctgcgacaatgccggtgctgctgccaatgtcaatggcagctgtaacggtggtaggcagggataccctgaggttcgctacaagaggaaggtccagaagtacgtggttaagaccaagcagccatcctctggccctgctactgcaggggctgaacacaagcctgaggagaaggtcacttctgatgctagctcagaggccgatcatcacgacgaagctgccactcctgccaat

SEQ ID NO: 120794 - DNA, 677 bp, Zea Mays
tcggactcacatcgagcgattaaattatatagtaggtactcagacacgtcgatcagactacgttattaatcgactgagttatggcattggctgagcactggttgcgccctggcaacacgacgcaatatttgtgtcgttcgaacttggctgcgtcatgtgattgctatgtcgcgctctccattaatcggattgctcccgttgagtcagaccgccattgctgagtcgcgtattttttgcatgccctgtaggcactgtctctgccgcgagccaaaattgcgcctgttgcgcacgttgcgtggatttatcgtgtaccccaattaccgagccataattgtgtctgttgcgcttattacaaaggcttgctatactgtcgtagccctgatggccgcacacacgttgacgccagatacgctagagcttgtagtcgtgtggattgtggtgggttgttcaaggtcctgaagtcacattatgtgcaaccttcgtaaacaattttgttttcactttatattttgtttgattgtgttgtatggcatcgtatatttatttatattgccaagtggccataacaactatattaaatctgggaaattaaatctaaatgcaatggaacacagataagttaaatctctgctctctcctcgtgcataaagttttacccgaagtaacctgaagaaatt

SEQ ID NO: 120795 - DNA, 390 bp, Zea Mays
tgaacaggagaagaaaccaaaggccgaagccccaccgccaagccaagacttagctataaccaactttatagccacctccaccaccaataagaggctttggagtctctcctccaactttcgtcggcttgttacccctgctacaagttttgatcatcaatgatgccgttagcgtaaaccaccgatgactagagtggcgaggtggcccggggaatgtttcttctcgagccacccctcaccccctttcattttaagtgtggtaaaggagaccgtaaccattgtagttgttgcgccttagataaagacgcttaggactcaggactggataagttagaatgagatcaacacaacaacctcctccgtacacttacacccctttgtttctcttttaac

SEQ ID NO: 120796 - DNA, 682 bp, Zea Mays
ttcaagcaatccccttctctgtgccacctcacaaaaagatggtagtgtgtcaccatctactgtccttagatccgcataggaggtagcactagtgacatgatttaagagaacacgaagatagaagcgcccccctcagatggatgagcatagactattctaccgacttgtccactcgtattttgtttcctcttttgccacaccttgccctgctgcaaagtgtaccactcagggaagtcacaataaaggataccctaagcctcctcgtgttgcctatttgcctcaaaatatgccgtaagcattgacctatcaacacctagatgctggacaacatgatttactttagcacgctcgtgaaatgacaccatgtgcatgttttcaagatggagctgtagttgcatcactagtggagagatttgacttaggtcaaagctaaatatcctccatagggcttctagaggggtcacccacctagcatctctatactgtttgatctcatcaacgtcaccatcatccttgtttgcatctcggacagccacagacgcatgatcatggcctttccatatgtatttgaataggtatttgacagccttgatgctactgcacgcctcaacattgatgtgacagttgaagagacaaaggaggtgaggattataagggacaacccatctattgtccaaatcgc

SEQ ID NO: 120797 - DNA, 440 bp, Zea Mays
cagtccatagaacaagtgaacaaagcaatcaggcaatcaaccaatggtaattaatcaatgaagagagaaaagcttcctaacggcaagaagagaaaataaaagaaaggcagcaagaacatgcatccactaacattttatacattaataaaatggctaggaagactaaacaaaagcaggtagcagcaggagcgagtgaataatccaggtcatgagggccaccagcccaccgccaccaccaaatgacgatggctgattaggatgtgtcatgtgtgtgtgggaggggtcaaacaagtacactgccgaattaaataaaagctgcagatgcccatccaatggcgtccaggcgtccagctgcagatgaccacatcaccttggctggctccagcttagtagtacagccgctccattcagatcactgttcaacaactgctgcatgttct

SEQ ID NO: 120798 - DNA, 379 bp, Zea Mays
aaatgaaataagagaagtccttttattaatatatacagtttgtcgtacacaatttagttccagaaaagcaagaaataaaatatctaaaagaaagtccaaaacacaatgaatttagtggcccaatctgcatcccaaaaaaatatggatgttactgtgtatactcgattttgtttttcagtttcaactaatgtatttcccattcagataatcaagccatataacaattttcaccaaaaatgaaatatttagtcacagttgtacccttcagaagaagcttttgctataactaaaaaaaggtcagcacaactttcaccatataataatttcctttgtcaaatacaaatatatttgaacatcgaccaatggccaaacaaaggag

SEQ ID NO: 120799 - DNA, 357 bp, Zea Mays
tggagaaatgcactcgtaccatgtgtgttaccttaaccttgcctgaatcattaatccactgaatgtggtatggatgtggtcgtggacgtgtggttaggccaagcttcttgaccaaatctgaactcaccaaattattgcagcttccaccatcaataataacacgtgcacgccgattcttgatggagaagaaagtctggaacaaattattgtgttgttgcttctctgatgattcaggctgagaactaagaacacgctgcaccatgatgcttcgaaggttcgtcgtagcatcagcaccaagcatggcatcatcattagcagcaacatcactggagtcatcatcgtcaccctcaccgtcgg

SEQ ID NO: 120800 - DNA, 364 bp, Zea Mays
aaaatgaatctgtttcgcaaagtaaggcagtctgtcctccgaacaaatccctgttgaagcatgctgacagatcgacctccagtgctggtgatagcaaacaccggacacccttgcggccttgccagacatgacaattcgacagtggaggggctagaggaagagaccgagctgcaggcatgtcatggcgtttcaaatgatcattttatcgaacactatggggtgtccattgagcatttgcagctccagcccaccatcagcgccatgccagtacccctcctgctgcacatctgtgcttcgtatccttcttgcgccatgtgcctacgccatcaatgcatgctctgctcctccacatgctgcgacattg

SEQ ID NO: 120801 - DNA, 346 bp, Zea Mays
tgtacacattttagtgtaatcgtaaatttgtttcataacgacaaatgtggtccaaaaattacgccataaaaatcgcgtgcgtccgatcgtgcgcgggttatggctcggacagttttttgcgtaaaatgtgatccaaaatagcgtaaatgggtgtgaattttagcataaatcgttgatctgtttcgtaacaaattatagagtttaaatcgcgcatgtttagcgttagtttccgtgcatgtcgcatagaagtttttgaacgtaaaacacatcgacatgaccatttactatgtaacaaccaaaagacaacacatggttcagaactcaaaaataagaaacttgtcatttc

SEQ ID NO: 120802 - DNA, 813 bp, Zea Mays
cggtaatggaggtagaagaggggccgattgtgctccactgcggagaccagtggtgcgaggcgaggacacgcagcaacttgcaagcagctcaagcggcatgggcggcggcggtgtcaacaactgcactaatgggttgcacaaggaggggttggaagctgatgcagagcagatcgcagggaacaagattgatgaagctgaagctggagcacatgacaacaagaagctgaggaggggtgatcggacaaggaagctaaatcccaagtactatggcgccaactggctgtaatagggctcacttagttttgattctcagtataaagagatacacttgctctattgtaaagtgacttttggctattggcaaacttgaacagaaagaaatagaaaatcacaaacctgctgccgagagaaatacagagagtgcttaacatttgtcccaagtatttttggatgatgtgcttgtctatagttcaagcctggaacttcacttgcagcatttaaaggcagtgtttcaaatactcagtgagcatcacttacacttaaaaagatccaagtgtttgatggctcaaactaccttggaatttctgggtcatgtgatcagtgcacagggggtttccactgatccaggcaaggtgcaaattgttcagaattggccagctccaacttgcgttaaggacctccgcagtttcttgggcatggccggctactacaaaaagtttgtgcgtcattttgggattatcagcaaacccctcactaatcttttacgcaaagacacagtgtttgtgtggacaagtgaaactcagcagtcctttg

SEQ ID NO: 120803 - DNA, 624 bp, Zea Mays
actgtagttttagccacgtagggatttgtttcctctgccttcatctacatatgcttcattatatgactcttcctacatacttaaactaaaaacagcaacaacagttcggtaaatgttgttctctggggtgggcaagctagcttattccctggagaacagatctacaacgatggtcagtcctctccacagatcctgatgtttgttggcacgcttgttaagaaatacgcgggtatactaactctaagcttttgcatttagtgctttttttatagttgggacctaatgctctttgttttagatggactgtgcttgtctggaggctcaccctgtaagtggtacattaatcctgatgttcctgaagcaggtgccctcatggctaggtaatattctgctatgtctgctgcacgtataagactgttgtttgtcttcgctctgttctaacttgagcttgactcattgtatgtacaaaccagtgcgaggaaagcacatagtcccattaagtggaacgaggttctgtcttcgaatcagcctatgcctcatgttcctgaggaacagaaaatcgcttacatcagagatctgcacccatttgagaataaggtatgttccatgtttcattcacttcgt

SEQ ID NO: 120804 - DNA, 468 bp, Zea Mays
atcgtggagtagcccacaatctggagctatggctgcccagtggataggatgcaaaagctgaccgacctcagcgatgctctctgccacctgattaatcacaaaatgatggatttcggtgtgattggtgcttaccacgccttgagggtggcaccgctgatggattgctgatctctagatctatcggatagccctaaaggcagacctattggggatgttgatttgtgatgtcagaccgaaggacgacaaaattgactagagacttcgggagatgactaggatcttagattcaacgtatttgatcgtaggtcatccttaggtgctaccttcgattgacatagtggatatgttaaactctcttctttaggttcccatcttggtatcctggccttactattttcttatggtttattggttcataattcaatttccacatccgcctctcccacgcattgctcccggaggatgcga

SEQ ID NO: 120805 - DNA, 398 bp, Zea Mays
ttgatgggcaccttgacttttttggttatatgcatctttgtcgcctctccgcaaggaggaagagggggatcgtgtcatgctacccttgatgggcaatgagcatgacatctccagtgagctgctaatgggtcatccgagtggaggcctgagctccatttgataggagtcggctagtgttctagacacacaccctaaaagtacatgtgggcgattcgactggtcctggtcccgttcgatggggtccgagggcacgattgcctccctccgatgggataccgtcacgaatcacccctagggtctcggatatgtcttagggtatctcgggatcgcagcctgagccttggccgtgtacggacatacccacagtcatacctgactctatgttctggggcggttgt

SEQ ID NO: 120806 - DNA, 672 bp, Zea Mays
gatgtgacagttgaagaggcgaaggaggtaagggttgtaagggacaacctatctattgtccaattcacaccctcgaaccttttccttacacccatcatcacaacgtctataaatagggtacgaatccttcccttgcaaggttgcttcactgtaaggtcgggggtattgattcttgcatgatgcacgacccttagtgcatgggcagttagggtttagcgaactacacggaccatgcattatatgcttgataaccatctttcgcagttgaggatacttgttggatgggatctcagctgagatcaaaaggtcgtactgctcagggcacgttagcttgtacttcctctacatgatgagtagaaaatgggcatgtggcaaacctcgcttctgaaactccacgacatagacgtaggcacaaaccttaccaagaatatcatgtttagtcagcctatgctttaactcctgtagttttgcatgaaagacacgcactacaagatctggacgatcctgtggtgtctgctcagggaggagctccctccttatctcatcccagttggggttacatgtcatggtaagaaatatgtctggtttaccaaacttctgcaccatagccataacatccatataccgatgtctcatgtcacgaggaccgccaataaacaacagagacaacac

SEQ ID NO: 120807 - DNA, 796 bp, Zea Mays
gcaagtttgcttaagggaggctagcttgatgttatacagaaatgggagtaaaatgttctccaagttgccctgtcagtttataacatcaggttcagtttcagtaaactaaaaccatggtccctatatgatgtgcctcactttgcggcaccataactcgagacctatgaagtattaaccctagaagtttacagcaaagtgaaagaccaatgttcagtgagcaagtttgatgtggggaggtagctctgtccctatgaagaaatgagagaaaaagagggtgaatctggctctgcagtcgaactgaagtagatcaggcagtctgaaaatatctcaggaaaaagatctacatccactagctgtttccagatgacttccgataagtgcagaacaaaaaaaggattcagtcctggtaaaagggggtgttttggacgatttttacagcccaaggggtgttttggattggatcaacctgcagcctgacagcaatgactcgcctgcttgtactgtgttggtttgctgtccatgggaggattgaccacctctgcgatttccctgtgcatctacccctacgtggtggtcatgcaaagtgttatggatcatgttggcacccgttattcctccctgaaagcctcaatgaagccccaagcaagccactaactcctatgccttctcatagtgtgcaaaagttcaaaacctgaactccctcatgttgcgactgtccccatagtctcctcaccgtgtcatatcgttcttctacacttagattacttcctagacgtttctcaaccctttggctcca

SEQ ID NO: 120808 - DNA, 460 bp, Zea Mays
cctggttttaacactccactgacgagctcggcgccacctggctagaatcttgatattttttccagcagacaagttcttggttctagagtcttttgcccctgaaaggcaaaaaatgttgctacgagtatatagaacaagttgtgcatacatgcaaaaaaggagaatgttggacctaggaaactgattgctaaagaaaactcaacagaatccacaagagctaaccaaacatcataaccaagggttagaatagtaaggccgccagtctactttaattgaaatgcgaagcagtatgaatttgtaaacagataacctatcaacaatgaactagaaaagtcttgacaatggagccatatgccataaatcagaaactgatactgacgtaatgaatagtcaaataggagttcctatttccaaacgcacatgcaaacaggctcagaatttagttgcactaagaatttct

SEQ ID NO: 120809 - DNA, 499 bp, Zea Mays
agaattagaccattgctaggttgatgaatgaaggcggggaaatagatacagccgatacgactcctattccagaaattatgaaggattctgatatgattggctaaagggaagagaaggacactccagagaagaacgtttctgatgccgaaggtaataccgatggagatgatgccgaagatgatgccgatatcttaagtccaagcagacccagtcacattgaattttgcagatccaccgtgaaatctgatgatttggttttaatgaagaagcttggttatgttggaaagaacgatgatgacttggtgagattcgcaggtgacgaaattattccagagccgaaggatgatgaggtagtggtgttcaagagcttcttccgtgcagggcttcgattcccattgtacgagatgattactgaagtataaaaaaggtttgaaatatatcttcatcagctgacgccaaatgcgatagagagacttagcatctacatttgcgctctctc

SEQ ID NO: 120810 - DNA, 661 bp, Zea Mays
attatctgctagtggttgtccaatatatcatgagtatgacccgtcatctttgcttttagctttggaaggaaccgactacaacatcatgtttgtcaggtagaaaagttgaacaggagcgttcgtatatcatcaaccccatgatgtttgttattgcaggctcgaccaaagatatatgccaaaatgatgcgcgggcttgactctggtcccggcaccggagatttatgccaaatggtgtcagacaattttcacgactcaacgtaggataaccaatgagcagtgaacactggtaggaggggcatcttgcaccaaaccatgctttttgcttggttgttataacagtttggagcacaaaatttgactgttcgggcttatgttttatctagttaggctgatctcttatttcaacctttatttcaaacttctttatatatacaaacagtgttatctataacgttatcaatgatttgtttaagaaataaatcatagataatgctatttaggaaataaattatatattagaaaataaatagttggatattaagaagaaacaagtatatctaggatctgagagaccaaatttttataatcgtttgatgtttttttcatataaaaaaataggaccgtagttgcagggtggtttatggtccagagcctatatttt

SEQ ID NO: 120811 - DNA, 456 bp, Zea Mays
gtagtttggtttatcgagcacagaacaaatcaggaattcagaggaccgccagccactcaaattggatcactcttctacttctccttctcaacatttgtatttgctcatagggagaggattgtgaacaacttgtcaagaattacagtagtagtttggctttttgtggtgctaatattgcagcagagttatactgcaagcttaagctcaattctcactgtagaacagcttcaaccaacagtcaccaatttagatgaagttatcaggcgaggggattatgttggctacctcagtgattctttcatgcctgagcttttgaaaaggttgaaaattaatgaaacaaaaatgatcgctttcagctctcctgaggagtacaatgacgccctatcaactagaaaagttgccgtcattgttgatgaaataccatatctcaaagtgtttctctcaaagtattgccac

SEQ ID NO: 120812 - DNA, 685 bp, Zea Mays
ttcgaaacaccgacaattggtgactatagatgacaatatagtcgcataactagaacataggattgcatatcgtcaacatcatgtagcatagtatagttgtagagaagtagaggatgcttgccaattagctctatagagaggctaagactagatacgagcaaagacgctaggctgaggcatagcaacgtctgactgatcggatgctcactttgtttgacaccatctagggtcggtaggactagttccagtagaactttctaacacactgtgtgagtacctttccattcttcaagcacatcctttaatagaaagagattcaatgcatccaccaccatttagatggcacctcctaccaccctatagactctcgtgaccccaactatatagtttgatagatttcaattttatagtctgtatctgtttgtgtcatctatgtaccctactacacttgacttctattcaccagtccaggtatgaccactggttttgatggtatgtcacaagcgatgccaatttcagctctattgacatcgtccgtcactatcatgattgtcactacaccatctaccttgacagtcttattcggtttggtcactagagccactccttagacaattgccttgaatgtatcactagagccttcaattctagttgctcccttaactggtataatagggacactacc

SEQ ID NO: 120813 - DNA, 613 bp, Zea Mays
gcaaactttaggacctacatgtaattattttaaaccgcgtgtggacgatgggttcaattcggagaaacttagggtctttttaatgacacggcacgacgaagcagtatggatacttatgggccgtgcgatcgaacacggacaaacccgattagactacccagggcacggaccagcacgcgtttgggcttgttgatcaacgaatcatcgccccagatttttattaaacccgaacgcatcccaaccacatgataccacatcaacgctctgactttcccttcctgaatgggtatcctttggtctaatcttggccacatatcccagatcggacggttgccgtgcatcgtccccatcgggcaccagaagtggtggcgctcgagcccgttcacggcaacgatcttgtcagtgatacccgattcgagcaccaggtacctattctatgagattatccgctctacgcattgccttccacgccacgattcagtcctacccacaaacggtgcctgattattcgcccccgacaccaacctccatcaagcgatagagctgcgacgctccccatgctccggtgagcaattgctgttagcccacacccccaacgctagtcaagtcggtt

SEQ ID NO: 120814 - DNA, 617 bp, Zea Mays
attgtttctggtggggctgataactcagtgaaggtaaaattttgagcatgtccgtttaatcgtattgcaaagtattcgaagatcataaaacccaaaaattaaggcatcttacaaattacagcatgattgttgagatagacaatctcgtaatatcatgatataaaattttaccacatatttcctgatcattaaaattttgtttaaaatatattgctaggtctgggatttgacggctggaaaactcatgcatgatttttgtcttcatgaaggtccagtcaactgcttagatgttcacccctatgagtttttattggctacaggtaaatttaggtcctatatactcacacaggatgttgatttactaaaataagatttctattatttttattgaggacctattactccctcatgcttcttatttgtacatcacctgtagatctaagtaacatattccatgttgtccttttcaaaacctttgcaggttcagttgataagactgttaaattttgggaccttggaacttttgagttgatcagttcttctggacccgaggtaccatatctatttataacgactcacaaaattaattgttcatatccccagttgaagctattcta

SEQ ID NO: 120815 - DNA, 410 bp, Zea Mays
ctttggcaaagagggagggcagcattttcgctcatcgtcgccaaagaacggcgatggcaatactcatcattacatcggctcttccttcaggataagatcagcttcccagaaattaaacagcatcaacttcaactcttccccttcaaaaaggtcccacagatccccttccccaatacacgacccagacgtcgacaccagtaatccgtgacgggcaccttgatctagtcgtggtccgatccgaagatgtgatctctccatgcccattttgctatgtcttctaacaccttgtgaagactcaccgactctttgttttgacacccccatcttttttcgcccccgcaagtcgcccgggaatgcacctatcgaagtcaacagtgctttgcggggggcggtcctcaatggagacttcg

SEQ ID NO: 120816 - DNA, 511 bp, Zea Mays
cgccaggagtcctgggaggtcttcgacttcgcctcccgccacataaaaccaataatcataccagttgccccacttgttgcgggcgcagggaactagctccacaacttccgccgatgtcttcccagtcctcagcgtaaaggtgcatgatccaaactgtgcaatcttgcttccaacttttcacttctgccagtgcaaacaataattcttggcgaagacctctacggagggctgaccgccatacgaagtcactgcccagacatacttcgctagggccaccacggcattaggtgtcaattgatggatctgcacgtcatacctctgcaacacctccgccacaaaacgatgcacaggtaaccgaaggccggcagtaaagaatgcctcaaacacaactatctcaccctccagctcaggaatctcttctgcccccagaactcgtccaactccattcccaaaataccccaactgctgcatgtcttgcacacgaaccgaggagatcctcgaaatgccgaat

SEQ ID NO: 120817 - DNA, 683 bp, Zea Mays
gttcggcaaacctagatcaaagccaggccagaaagcctaggatcgagtggaacactcattcttggtcaggaatcgatctacctgagaggacatttggatttgttctaggtggagaagtgagaatggggagtcaaaatcagatggatttgttcttaatctggatcaaaacgaacaactagatccgggtcaaaatcagatgaatttgttcaacctagaaggaggctggaaacatgccaatccggcagatgcgaacgcaccctaaatcagttttcttacctggtggaacagacatgagagagacgcatggcatgtaccggggtcatcctgtaatcgttggtgtgcctggatccactgtctgctcgccacatcaaaacctgtcatcttgattcatggatgtctcgagccctggttctcatgcaaaaaggtattgaggtagggagaccctatctcttcctacctcttcctccttgtcgctgacacccttcaagcaatcctcggacataatggtgcagtcctccaacccttgatcgctagacaaaccgggcatgtcatccgttatgcagatgacacgctaattgttataaaagcatcaatccatggaggaggtcagccaggacctacaaaggaacacacatacttgcacacggacgacgagactagaagacccggacgtaggaaccaag

SEQ ID NO: 120818 - DNA, 476 bp, Zea Mays
gcagaactctgattcttccgcttgggagccattgcaatctcgccggcgggtcgaacaagggcgaaatcagaggaaaacagagtggttcgaggcagaaacgtgaagttagggctcagaactcaaaagcgcacgacgacatgagtataaatggggttttcccgggttgggcaccatttctaaaaagtgccaagtcatcactcaggaaaatgagaattccgacatagctcgactgttacctctaaaacaccaacaacatcaaacaccactcggtcgttacctctaaaacgttgacagtgtctgccatagctcggctgttatctttaaaacgccgacggggtcaaacaccactcggtcgttacctctaaaaacgccgacagtgtcttccatagctcgactgttatctctaaaacaccgacggggtcaaacaccacacggtcgttacctctgaaacgcaaacagcatcaagcaccactcgg

SEQ ID NO: 120819 - DNA, 672 bp, Zea Mays
ttaaaccattggtttaatatttgtactcaagggagactagtggatacaattacttcatactcctactcgaaacatgagcagttgccttgatggcatcgcaccaagaaacctagcaccacacctcttagagctagtcccaagaaagaataggtcggttgcctgtgagttcaatggtgggaattggatcgggtctttgagaagcaagatcacattgtcggttcaaattgaagaatttgtctccctttggattagactccaagatttttatcttcaactgtaggtctcgaactccattacatggaaatggagccttgacagtgtcttcatagttaatttagcctacaaagtgcaatccatcaaatcttgcagccacatcaaatctagtcttgtatgggaggtaagggttgacccaacatgtaaggtttgtccttggattcttctacaggacaagctcctcactatgaacaatcttgccactaggggctggccacaccatccaagtcgctccctctacaatcttgccactaggggatggccacaccatccgagtcgcaccctctacaatgggtccctagagactaggggtgggcattttaaaaccaaaaaccaaacccgaactcgaacccgaataaaccaaattatcgatctatttgggttttgaggttcaggttc

SEQ ID NO: 120820 - DNA, 649 bp, Zea Mays
ttgccaggcacgaccaccacatggtctcactgtttgaggcctagcagcaagaggcaaagcacctctaggcctcgcatgacgtcttcgaataggaagatcatgaacaccatgagagaggcggttcatgttctttctgcttagatcagaaacccatcgctcatctctcttcctcctaaagtaaaaagcagccagatgcccatccctctcaaaatactcacaccggaacctccccactctcttaggtggaatttgcttgtggggtggagctttcttcttgcatggctggtggctctatgaaggggatcactagatatgttgggaaggttatcaagtatgttcttgagatggttaggttttggaatccacacttgtttctaaggatgggcttgttagggactgtcggcccaatagtcaatggtccagcccaactatctgatggcttgtgctacaaaggagcaagaagtagagcagcatgaatcaacgattattgagagagcacaagaactcctttctccggaacctcctcctctactgttcttcttcttcctctcgatcctccatccatagccttggcctctcttgcgctagtgctctactcatccgattagactgctaccttgctgcaaacctcccttctcttgaggttatg

SEQ ID NO: 120821 - DNA, 356 bp, Zea Mays
ttttgtaacagtggatgggctttactgctacgttgttatgtcgtacggtctgaaaaacgccttgccaacatttgtgcaggcgatgagtaagactttcggggacctgatcagggacaaggtggaagtatacgtcgatgacatcgtggtcaagactaagagagggtcgaccctagtggaagacttaaccctggtcttcgataggctgcgggcaacccgcacgaagctgaacccggacaagtgtgtctttggtgtctccactgggaagctgctggggttcctggtttcgtaccggggcattgaagcaaacccggagaagatcaaggtgattgaggcaatgaggcctccggcctatatca

SEQ ID NO: 120822 - DNA, 472 bp, Zea Mays
cgtgcgcccggattcgcgtcggtcgccgtgattcgtgcctggcacgcagtgatatccatggggaggtaaaagatctcacgaaggagcagatgtggtcgcaggggaggcttatcaccgcgcatgtagccgttgcaacgtggccggaccgccgggttgccgtggaaactccggtgacctcggttgtgccacgccatggcttgttagtgtgcggtagtaaccgtggcacacttaagagtacaacctttgagccattgcaccggtgaacgccacgaatcctttgcgccagtattcttccccctctccggccgccgcgcgtcttctccaaattagccaccaccactcatgaatcctataaattgagcgtgccatcagctccgctaagtaattgtgcatccagtgaaccagctctcacctccaatcatcccctacagctccccaatttgagacttcccccaaatcggtccagaacatc

SEQ ID NO: 120823 - DNA, 389 bp, Zea Mays
gtgcagggataactctcactggtcgtgtatataaggccgaggagttcccctactattttcatctcatctagcccacctcactcgcagtttccaatgtgtaaacctcatttcaatactagaatcaccatatgaagtagggtattacgcagctctcgcgacgcgaacctgtataagtctgcgtgcctttctgtcgtgttgcaacacgaaccatcgagtcacgatcaacgacgccattctacttaaaagcacctcgtgggtatccacatagtgtgtggtcggattgcaaacaccgacagttggcgtgccaggtagggggtgcgactttgataaatgccaactccatggcagtcacctttaaagccatggccaccttcaatcctagagagatc

SEQ ID NO: 120824 - DNA, 653 bp, Zea Mays
cacggccacggcaaggagtgggggcaaagttgtggggtgatcatgtcggtcttcgccctggtaccgctccggctgataacgacgggtggggagcctcattagggtgcgacggaaacatacaccgcacctgcgaaggagagcgtatcatggcgactacgaaatatctcgtcgaacttggcgtcgctaccgagttgttgccccaccacggccatcaacacccgagcttcggtccacggtatggagtacctcaatcggtccgctaagacttcctggttgtgttgcgctagttgcacgctaggattaggccccgggtcaccgaatttcttgtctccgacgagtgtgtcgccgcttttcgtgtgtgcgttgttcgggtcgacggcaaggggtaggagataagctctggggcattgatctttgtagcaacggcccagatcgaccgggggaatagctacctcagagttttatccagaccgtcggattcaagtggtgcggtcatgattggaccacgacttagttgctgcttgagtcgttgatctcaaatccgagggtcagcatcgcgtgcggatccagaactaattggattcgttggattaggatcgggcggccctaggtgcccgataccccttcggccaggggattatgcaaaagagacc

SEQ ID NO: 120825 - DNA, 381 bp, Zea Mays
acggccttgacctgaagtactaccctcgccattcgaccgacggtgctggaggtgtgattgtctcgcaagttggtgagggcaatcccaagctgaacaacatggtcaacctggccgtcgtgctcaacacagagttggaccacgtccttgacgagttgggcaaggttcaggcgaaggttgcggaattgcgtgcttagtgcggagcacgccactatcttgatggtggttctcctacccctgtcgggattcagcacccttaccgttcatcgtcctgtggtcgcttcgactatggtaccccagactgcaggacccggatagatttagatccatagatcgatggagtcggagcctgtaataatgcttaattcagtgtcttagtttaat

SEQ ID NO: 120826 - DNA, 534 bp, Zea Mays
cggtgaagtctgaccacagttcagtgctacatacctcacttgactcatgggtgacctctaagtctttacttacacgaggcgattggctctagcggcaaagtctgaactcagttcggtgctacatgcctcgcttgactcagggtgcactcaagccctactttacgaaggcaaccaccaaaggttgcactctgacccatgaatagcgttatgcactctcgctacgcttcgacaactgagagttaattcttacttcatggcatagataactcaaacaaatctccttcacgcatagcaactatcctacatttttcttttcatgccatcaaaatatccttaactaacatgaaggttacatgtaagttttaatagggtcttcaaagttcaatactcaaaattacatgatcaaacatcaagctcgctgaccacttcgataactcgggggctaggccatcgcccgcctcaccgactcactacttcaccagcttgggggcagcaccgtcatgcgcctcgctgactcaatactttgctgtctcg

SEQ ID NO: 120827 - DNA, 375 bp, Zea Mays
ccacttgaaagaagctcaagctcggcagaaaagctatgtggataagcgacgccgacctttgatctttcaagtcaaggactatgtgtacctgaaagtttcaccaatgaagggtattaatcggttcggggtaaaaggaaagttggcaccccgatatattggtccatttcccattcttgaacagtgtggaccagtggcgtacagacttcaactgcctgaatcattatctacagtacataacgtgttccatgtatcccaattaaagaagtgccttcggattcctgatcgaaccatcgatgtggtggatgttgctttggaactagatttgacttattcagaacatcccattcgaggtttggatcagaaggacaggatcac

SEQ ID NO: 120828 - DNA, 473 bp, Zea Mays
gggcgaatacccttaggctttcaggtgtccactgttttgtcaagttcttgtataaccgtaacagccattgcttcagcaggggtcgagtttgaagattctccagccaacatatcgagtacaatatctatttctgcatcatctgaactcgccggcatctcaaaatgaacttgcctctcatcattgggaagatcacaaagaggagcaaccagagcctcaatgtcttcaggagagggtcgcactctaagacccagaccactatcaccagaaggagggttggacacaaaattgaaaaaggacttaggagatggcagattccaagcagagtaggcaacaggagcaccaacatttgatactttgcccctcaagatcatgtctagtcggctcaccagatcctcagcaggaattttcctgttggtaactcgagtcgaatcagtaatgccactgtacaaataatctgggtatgctctatcctt

SEQ ID NO: 120829 - DNA, 575 bp, Zea Mays
caaacgtataggaggagtcgtataggacgtagagagagagagagatggagagtcgtaggcagccgcttgatgtgcggcccacatgctgtgtgaagggaaggggtgccaactaggatcgcccgctactctccgtgtgtcctccttattacccgtccgcatctctttacttagtcttttttccgcgtctcactaaaaaaccatatcagagttcatgtgctaattctaatcacaattgtcattcatgtctctcttgcgattatgaccacggtaacacggtaactatggcagaggaaatggcgttgtatgcatgcttctcatttgtgcgagtggcaactaagtaaacaaattgaggaaatgatgttcggtgtaaagtaatactttccctctctccctcttctctcttctctctctctatccctccctccactctctttcctctctcttccctttccatctctcctctcctctctcttccctctccctcctctctcttccctctccctcctctctcttccctctcccttctcctctctctctccctccctccactctctttcctctcacttccctttccc

SEQ ID NO: 120830 - DNA, 404 bp, Zea Mays
tggccctaaagatagagggttatgggtgctctccagtcttcgtcattattaggtttgcaattctttgaccttcgagatcttttgtgatttggaggcctttgggatttcttacagctagtgtgctgattgtgtggaagaacacatctgaaggtaggggtcgcctttcgctgctgcttttgctagcatgtcggcctcttcattcttgccccgctctatatgttgtagtgtgaaccctttgaactaattctccaggcttcgcatagctgataagtattgcataaggactagctccttggttgagcaaactttttcaatttgtttggcgacaatcttgagtcggttttgactatgcaggttgttacccctaggtctctgagtttccgaagtcctagaatgacatcctc

SEQ ID NO: 120831 - DNA, 274 bp, Zea Mays
gatggagggctgtacacaccaccacccaagcgcaacagcgacaacgactcaccgtcgagcaaagccaaggcgagtggaagcttcggcaacccggcgacaatgacaacgaggaggctcccgctcccgatgctgacaaggacgaattacgcggtatgggcagtgaggatgaagtatatcctgcaaactagcggtgcatggggtgctgctgttcgtggggctgctgaggccgtagatgatggcatgaaccaactagccttgccgatcatctgccaag

SEQ ID NO: 120832 - DNA, 405 bp, Zea Mays
ggttccgcaactctcccccagctgggaaggacccttcaaggtaatgggagtgcaccgacctaaggggaaccatctagctacagatggaggagcaccttaccccgagaccaagtatctctgtaagttctatccatagagcaagactaaggggtcgagcctgtttccttttcttgtaactagataatgcatacgtgtacgatgacccggtggggcctgcccccataaacccggactattggtctgcacacatgcgcgacaagttataaagagaaactaccccctcagctgcactcttgcgatagttccatcttgctgctccatggtcctacctcgcagttttccagataatacttttagctaacccacccgtacggtttccatctgtctgacatggcggcatccgaa

SEQ ID NO: 120833 - DNA, 381 bp, Zea Mays
ggtcgagtctgggcccatcactcggaagggcaaggcggtcgttgacctgagtactggcgatcacccagtcgtttcgctagttctcccacctcgcgccgccaagggaggcgatgtaggtcactgttggatctagccttgtctggaagtagtaggccccaaggtggtctttgcccttcccagacctcaccagcacaaaaaactggcggaagagggaagtgcaagctgccactcccacgaacatctcacagaaatggacaaagatggccacttagaggatggagtggggtgtgaggtgctagagttgaagtccgaactcctccagcagcagcaggaagaatggcaaaattggtagcgccaacccacagaagagataggagacga

SEQ ID NO: 120834 - DNA, 381 bp, Zea Mays
cattaactcgaccactgggaagcaactattggatgaaatacacgccggacaatgcgaaatacatgcagcatccaggactctggtcgggaaggcttttagatctagtttttattggccaacagcgaagagtgatgctgccgagttagtccaaagatgtaaagcttgctagttcttatcaaagcaacaacatttacccgcacagctactgcagactattcctgtaacatggtcttttgcatgctggggctggatatgatcaaacctttcaagaaagctcagggaggctatattcacgtgttggttgccattgacaagttcacaaaatggatagagtataagcccattgcctctttaacctcagccaaggcagtagagttcata

SEQ ID NO: 120835 - DNA, 415 bp, Zea Mays
gtttgactcaattgactcagttttgtctccgctaaatttttgagttgattttgttcttgcgttcttcctttcactctctctgtggatttatgaagaaccatcgagttcttgagttggggattcatttggggattgtgggttttcatttgtgaagaaccatgggttgaaggaacggatcactagccttgatcgcttctcagatccctcacctccttcacgtccaaacctttttgtcttcccttgtcctgaattctttgcctccaccgatatcaccattcttacgaccctgttgaaggtaagatccaaacaggtagctatctaccgctgcaccctattgctcaaaccccccataaagtagtttttcttctttaaggccgtgttgacttgttctatggcatattgagataggtggttg

SEQ ID NO: 120836 - DNA, 297 bp, Zea Mays
gttcactatgtgtttgtgtgctcgatttaaggcttccctatgcacttcccatagataggctgttaaatagatcatgaggtacctacatttcactcctgagtttggcttatggtattcctcttcgtctgttctgtctttgtgcgtttattaagatgttcattttgcgggatgccgcttggatcacatgtccgcctctaggactttccagtttctgggttcctctatggtgtcttggtcttcttgcaaacaatttagcgttgtccagtctacctcggctaagtatgttgctaccactag

SEQ ID NO: 120837 - DNA, 359 bp, Zea Mays
gtcacaggcatcaacagacaagggcatgagagaaaagatgaaggcgtgagagagccagtggtatgagtgcaatgaagaatggagttgtgtccaagattacacgcggtaaaaaaagatatagccaagggtgaggtaagtaaaacaccgctctcaaattgggataggatattggagattatagatcacagacataatgtaatcaccaaggtatggtcgagatatgggaaaggtaaaggcaaaactaaacatgagcacaacaaagggtggtgttgaaaactcaagagcgatgaggaagagtatacaaccaaggggaaaataggtaaaatacaactttaaaattgagatagaagagagaaggt

SEQ ID NO: 120838 - DNA, 507 bp, Zea Mays
ctcgcttcatcttctctcgaaattcccgaggagggtcttttcttgggtggatctgctacacggtgcagattcccctctttgtgcgctatgcacaagatggttccgaagcagaacataactcctaggctgagggttatcttgttcttgaagatgatggccatggagttagctttgatcaaagacacaccacctacctggcgcgccagctgtcagtgtttagtgttcgaccgcacagccgagggtaccctcgtggtgcttttgggtaggacggtgtcgtagatcgtaactcgatggttcgcgctgagggcacgaggaaaggaaagagtcgggcaattttctgtaggttcgggcccctttgaggagcgtaataccctacttcctgtggtggctttgtatgtgtggtgtgtttacaagtggtgtctatcaaatggacaggtgctaatgagatgaaaatgatggggatccccctaggccttttatgcacgaccgtatggcactccctgcgca

SEQ ID NO: 120839 - DNA, 725 bp, Zea Mays
caggaacatgacaaagtgagtgatgcaagtccgaaggtgatggtagcgctcgttgaggccacagagaagattgaggacgagtgtgcgatgggagacactccctggggtcaacagaggggggccaccatgcctttcatctggcgataatactcggtgacaaagaggtctccctaaacgaaggtccaaaaggcagcgtcgaggtggagagcgtgagcctcacggttgccaagaaattgttcctcgacagcaacctagtcctgacgaacaatgccaccacattcgcggacatcctgcaactcaccgatgacggtccccgggatcccggagaggaccacactatccatccaccaccaagatgggatagtgagaaaagccatgtcaatgaggacgaggtcgcgtcgcgggcgtaggtggaagaaggcagatcggggatgagaaccagagaacgaatgttctggacacccaccgcctacgcgtggaggtggcgatgatgacaacctcatactccaaggagggggcgtacggagaggctcgaggcagaaagagccaagtaggtggcgctcaacctcagcgagctgcctggcaagggtatcagcagcaacgtgtccgcactcccagacgagagaaacgacacgtttgcgctcccatggagcaaccacaatggccttggcagttgtgagggccacaatgaaggtggattgggcagccacaacatccgagggtgg

SEQ ID NO: 120840 - DNA, 479 bp, Zea Mays
gaaaagattaaacagggtatttgatgctattggcttcgtataccctgattaccattacccactacgagggcaagagaaaaagaggagatttgccactttggtcaccccagctgagctgaagagcaaaaaggtgaaggttctgacccaccggccgcgttatattgaaccggccatagtgcctaaatttgacgaaggagcctcgtcaactgccgaagcaagacaggctgctccaattgcacaaagcgttgaagaaacaactgtaatgccgaagacgcctacaattgggccaaccaaagctaaagatgataaggccgaagagccatagattgaagaaataatgaaaatgccagaaagtatgagcactccaacagaggcgaaactaccgaaggtgcaaaaggcttctgccgtgactcccaagagaaggaggatggccaacgtgctggatgctgtgctggagactataaaagccttgaggcctg

SEQ ID NO: 120841 - DNA, 602 bp, Zea Mays
gcaatgacatgaattgatgaagttaaatttgtccgaggctaactcagctgatgcttgtatgcttcaattgacatatgttgttgtaatgctcttgcaaacttttgctcgttattttttattcatctatgtccatctctattttctgtctatgggccaggccgactacggccatctgccaaacacattctcggtttggcagttgggcagttggcctattagccaagctgtcaaaatgggtcgcgaacacgatctcgcctgggccgagcttatttcgtacaggaacacaaacaaagtgacttgcaccaactgatgcatcttgttcgtcggagttcttattttgaccaaaacatgtgcacgcttctacggtgatagaacacgtccaatgcgttatagccctctttggtcgctctctaccacccctgtccaatgtgttatagccctctttggtcgctgtacactgggcacatccgttgttttgtgtatgtcctcagacacgctacattttttttcttctaaatgttgtatctggtgcccaatcagatgtggtgtctaatgcacacctacacatttggtgtaatctgctgctgaagggtagccctttc

SEQ ID NO: 120842 - DNA, 339 bp, Zea Mays
tttcaacgcgctcatggaaaccaaaatgtagttttgctggtctatatttttgttacatcatcactcgttcgagtgatggtgaagatcacatgatgaatctagcaattattatatgatgtagccatgtcatcttgctcgtactgaacagacaacatgacaagatgatgtacaggcaacactatctactaacagctatgcagaaattccatgtgcaccctccagatatctccagatcacttcagcagtctgaaactctgaatcttttgttgaaccaagacttctccttcctccctattgacatatattttatgatatgcacttactactacttgtatccag

SEQ ID NO: 120843 - DNA, 490 bp, Zea Mays
gtcggtagctgatgtggcaaactttgactggtctgccaatttcattcgtttgaatttgaaatatttcttaaagaagaacaaaaatccaaaaacctgaattatcctatagacagaggggtgtttggattcattcatacgctttcatctccagtttctcaagccccttcgtcattcacacactttcgtctccattttgattcagttactttcaaacatgtattccgatatggatcaaaggcggaatctcaactatgaaacgttcacagatttggtcaatgattgatctccattacgttctgagacccatactcttgtggggcaagtcttccttgacggtcattcttccgtccaccatcggcaagaggaagttccttctcgttcccatggcctaactcctcacccactcttttcttattcatatgctactcctccatatccataccggccaagtgtcaacactcctcctcctattgagcctccaacaaccgac

SEQ ID NO: 120844 - DNA, 439 bp, Zea Mays
agcttgtccatcaaccattgaaggtgtgatctactacacagcgcatctactgtcatatcaagaatgttagagaaacctttacgtcttatagcctcacgttgtctttcattcaaaatgttaatgcttgcaatgacatcttgagggttacacctcacattgagcctttgttacacaatataaaacatgaaataattttgttattataaaaaaatattcagaaccttacaaatatgaaattgtttgttgggtatgcataacattaacctgttggggtagctcctcatgtttaatcctctttgtcacaacttttcttaaaactcttgtatggctttcagaaacattacgcttcttcagtgctggcatgaagtcatcttcatcagaatcaagctgaactgttttattggtcaaattttgactgtcaacatttggaggatttcca

SEQ ID NO: 120845 - DNA, 728 bp, Zea Mays
ctaggaggcactggtaaaagcaggggtggtaactgaaacgaccccgttttctgcgatgctggaaaactggatttttacacttctatgatagtcctaggaattcaagctatcgtagaatatgagattccagttgccatcacatccataccaaaatttaagcgtgatagtttgcttacatcccctaacacttggggtaaatatcatcggctcgcaagcgtgatagtacttctagcattcagaatatcagagtagcggtcgtggtccttggtcctccacaggcatcctttagcgttgctccgtagcctagtcggaccatccgtcgtcggcgaagtcgtactccggctcgttctttcctgaacctgccgataagtgtgtaggccaccgtaacatccccgagcatttagccagcggtggaatctagtagtgataggtggattttggtttcctagcaggcatgcgacaatatctaaaataccgttgtagtatttagatataaatcaggtatttcggtctcacaccaccggttcctggcttaactcacacacgcacaccaccaagttccccattcccagccacacacacacctcaccaccttcatcggcacatcacccatctcactctcagtctaaatctacgacaaggacagctcccacccgtccttgtctcaacggcctccagctagatcctagatcaggggtagaaaagaagattcccgggctatgacgaga

SEQ ID NO: 120846 - DNA, 705 bp, Zea Mays
gttacttagggttttcactcaagactacactagtgaacctatcatcacatgtggttaatttgagcaaaagacaccaaacttggggatcaaggtcctaagaaagtgtaacccatcttagaggtcatgccttgaccttaccatgcacctaaagaggagagaagggctcaaaccctaattcaaatcccttaggcaaatggagccctagaggggagtttagcaaaaaggctctgtaaaccacattgtcatgacttgggctaattataaaagttgtagtacacttaataccctacaaaaaatagaaagagagtgaccccaaaaagatttcagaaaaaccccaaaaaggtcaccaaagagaagaacataaaagaaaaatcaggtttttctcaagttcaaaaccagccctctttcaaagatcaaacatgttcacatttttccaaacctcaaaaccatatggcccaattaacaaaatggcgcctaaatacccctaggacactctggaaaaatttgaaagcaaacccaattggtttgacatgtgttggcgcccattttccaccagaaaagtctggtcggacagacccaactttacctcattgtaacttgccaacccaaggtcaaatccacttgagcactgcatgagatacaacaggtatacaacaaggaagaaatcttatacagggattttggatagatacgaagagatcacag

SEQ ID NO: 120847 - DNA, 541 bp, Zea Mays
cgtgtaccccaattaccgaaccataattgtgcctgttgcgcttattacgaaggcttgctgtgttgtcgtagccctgatggccgcacacgcgttgacaccagacgctagagcttgtactcgcgtggattgtggtgggttgttcaagtcccctaaagtcacattatgcgcaaccttcataaacaattttgtttggccctatattttatttgactgtgttgtgtggcattatataaatatatcgccaagtggccataacaactatatcaagctctatagtgcttcgaaatctgggaaaataaattgaaatacaataaaacacagataagttaatttttttgctctccctcctcatgcataaaagttttatccgaagcaaaccgaagatatataatgcatgaaagctttttggtacaaaagacatcacaaattgggattttattagtaagcaataagaccttaccaaatgatttaaggctataaatctcagttatacattgctcaaccagatgttgacacgttgctctctttgttgttgaacgac

SEQ ID NO: 120848 - DNA, 667 bp, Zea Mays
tgagagttttcagaagtttaataaacaatgaacattacactttgttggctgaagtaacacattttgggtcacactacgatgaatcagtctggtacatttagtaaaatgagctgttgttctggacagtgttgatccaaaattaattcccagaagactgacactttaaggcactatggaagcgagtccgtagtgtagggattacaaattaatggaaggtgaagatcctctggccctaatactaagcacaaccaaatttagttcgaccaagtatgaacgacattcagcgggtgagtaccatacaattgtgtaaccctaaaaggcagaccagatccgcggaaatttttgaactggggattcatcgggtcttttcggatgaaatttcttacggttgaaaggattagtggattgctgtagtaataagttgttcaaagttgtgcgcaagataaacataaacaatacgggtccaagggcgtacctcaagatccgaagatttgggcggggagaagaggaatccaacagctggtttgcggatccgatgaaggcgtcgatggtcggacggggaaacgaaccaagcgctcgcgacgaacctcgacggagccggatttgcggccgcttcgtcttcggtcttgaccggagctggttggtcaccacctccacttcgtcgtgc

SEQ ID NO: 120849 - DNA, 939 bp, Zea Mays
aaagtttttaatgaggcaatatcaacatacgcacatgctatatcatctatctatccattttttcctacaaggtttttttggaagaagatgtttgcatgacggattcattggatatgattctaatacttcaacgatgatcacgtcaagacatggactcgatcaagggggagtgttgaggatcagtgacgtggattaatctcgtccattaatctagattagcagttaacaggtgaagggctgtgtctgtctgagatagcactttcacgtctgttcaagatgtatatatatgtgtacacagtcattaatgaaagtttagttctctccatttcgtcatttcctcaaacatagggctcgtttggcgtacttgctccgtctcataaaaagcagacccacctccttaaaatttaaagaatgtgatttctgaccacatgttccgtctcgttgatgtagagaatttaagagcgtacgtaaagaagcaagatcagctgaaaattaatcatcaggcaaagtgcgacaaggcaccgtgtgtgtgggatctgttgccaaatggatctgacctgcaagctggtccagggcagggtgccaggagtcacacgctgacacatgcatgccactgaggaagcactacactgacatatctatatatccttcgcttatcatctatcagctcgatcagccatctactgcaagcgggagacaggcaacgcggccgctgctgacagccaccatagcgacgtgctaaccagtcattgcaaatgaaatcgattcttagtgtacttcgtgtgttgtttgtaggtgtgatgccgctcctaatgggtgtcaatgttttcttcagattttgtgtacgtgcttcactttgctaccgatcgatgattaaagccatgctcggtctgcatctgctgcgtcgattaaattttctgaagcttgatcaaatctgca

SEQ ID NO: 120850 - DNA, 821 bp, Zea Mays
attactactagttaactccggagtgagtaggtatgccaccgccatagagcgtgcaagccactatatgctgacaagattgtgaggacgaataggacgaacatgcatcatgacatataactttaagttaaaccccctatgtagtagctttagtacgtgtttcgtctaccctgttcatgctacctgtctttgcctttctatgctacctttccctgttgttgaagactggaagccaagtttagtttgtgggcagaataccttacgctgcagccagaaggacgttaagttctcgggttgagttccgtgaggtatttcgggcacatcatatatcgaaagaccttacggaaataaagttcaatgagttcttaggtcagaagctatgcaaagaagagagtataatggggtattttgagaggtttacacgcctatcccagtgtggtttggattttgtggatattagtgagaggaaaaggtaatacttcctacgtggttttaatgtgaagcttcaactcctaatgacaacccagttcgacataaggttataataaggtcgttagtcaagctgttctgggagataataaggttcgtctgcatcaagagtttaagtgaaagaagaaagaatatacccgatgttaagaagtttccagaggtgttccccaagaatttgcttggtttacctccggaaagggtcgtggaatttgcgatcgagttgcagtccggaactccaattaccctagaagtagtaagatgaaccaagatttggaacagagattttggtggacctctggcttataaggtgcagctgccagagaatctttcaacag

SEQ ID NO: 120851 - DNA, 774 bp, Zea Mays
ttggtgcagaattttgtggccaaccactggccgggggctggcagtggcagactggtgctgtcggctggagaagaagacatgaagatggtggccgctggttgattatttaaagagaaaacgagatgattgtttaggagctaattatttttttatttgatttctctgagacaagagctcttgtatgagttgtatattaagacgggggcaatttattggttggagaggagtggtcatccgttagccgattcgcgcagcgctcactcgttggctgggaccgacgcagggaatggagcgaactgacatacggatgaatgagaggccactgattaaaatgaactgatacatcttatttgggtgtcgcttggaaattaaattctcgtgcacaagtagaataaaatgaatcgaggttgatcggcttcggattcggcatcgaaataaaacgagttggattaaccaaaatcattgccaatgttgattttcgaatttagattggacacagagattttaagccgagttggataaaaatttattagagaacgacacattggagattccgcttgagaatacggacttagattaatttttggacatagatcgaacatcgagaaattggattcggacatagatcgtctagcaactgtcaagcgtttgattaattgagctttagacgagatttataaatcgagattgattatcaagtttgcattcgcgtcgagaagaaaagttttaacaggctccaaattcggcctttctagagattgaataaaatcagaa

SEQ ID NO: 120852 - DNA, 325 bp, Zea Mays
gaaaatgaaaggttttgacacaccggcctcggtatattgaaatggccgtagtgcctgaatttggtgaggggacctcctctactgccgaagcagaacaagccgatgccgcctcttggagcactgaagggtctaatgtagtgccaaaagtgcctacagtcgggccaaccgaagccaaagatgattcagccgaagagccaaaagtggaaaaatcagtgaaaatgccaaaaattctgagctcgccagtagaggcagaatttccgatagtgcaaaaagctcctgtctcagcttccaagagaaggaggatggccagcgtgctagacgttgt

SEQ ID NO: 120853 - DNA, 689 bp, Zea Mays
attttatggttttggccaagctgttcttcttctgctcattaaatgataaagcaaatccaagtaatgatgtgttctcaggtcactgtgctgccaaatattattcggtagctgcaataatcttctattgacagttcgaataaaatcgtctattgacttatcagtgatatgctgggcagcaaaaggtgtcctctagagattctgacattgacaattaactacttgtcataccaactgtgatccatatttacacctttgtgaatctttctcttagtgcttctttagagaaaagagatttggctactccttaaaccaaaggtcacttagggaatctatattctatatctctgtccaataggtgattcttgacaattttcattagtctgtctgtgggtgaatacttctggattatggtcgaacttatgcagatgcgacaactgaacttcctatttcagaacatcttcaactgcatatgaatatctgctatgtgatttctccttgtgcttgtcattttgtgtagtgagtgagatttagatactaaagatagttccttgcccagaccatttgatatggctatccaagtatgctactttgatcagggcagcacatccactccttcgcaatttgattaatttatggaagcgcttgcatgctttatgtgtaaaatttgactcatcttcaaagaggctggt

SEQ ID NO: 120854 - DNA, 389 bp, Zea Mays
acaacagagagcagaaactcacatcacttcgccacgtggcaggcatatgatagttctttttgaggtaaccctgtcgttatagctcactgtcattgttagacatgcccttttgagtaagctttgctctgctcatgtacgagacaaagtttatagtattattattattactactaggctgcttgtagagccgtcgtcgtagttctaacttctaaacgtcgtagacatcaaacgtgacaagtggggaaacctgcaagtactcctacaaataaccgtgtttttatatactcctacacagcatccgtttccagaattctactgttgttgtatatcgtcaagtgacatggacagttactttttggataggacgcgagaaaatattcaagcccaac

SEQ ID NO: 120855 - DNA, 750 bp, Zea Mays
tagagacctgttgtatcctctctactccagatgatttcttcgtatgagaacagtactatctgttgttgaagacgaatcctaggcggataacagtcttgtttcgttcttgccaagcagttatcatcatttgtttcatgaaaagctagttatatggtgatttttcccagataaaacgaattcttggccttgtatgttctattccaaagcttctcttttttttttgctgaacaatgaagagatcgaaataatgatttatagaacaatttggtatataatatgaggagaaatgtttgccttgctggcaacaccacaaataattaattattattataagttctctctcaaaattataatacctaaaaatattgcataaatcgatacctaatttcaaaatggtatgagtaattgggtcacccatgggcaatggtaaaaacgagctggactatacatctctgcatataaaaatctctgcttggcagcattggcctgatgccatgcactttaccaccattatataagcgcaaattctcctatgtgcttgaaagcacaatgcaaccaatgaatgttcttgtgagcgctagaccctgatggtcattttacttgttgatctgaagtcaactaatggctccaaatgacgaatggtattcatgagcccctgaagaagccttatggataaaatagtgttgtgcatgttagtctaaatcttaatgattgactatacatttggtagtaataacaataagtttgcag

SEQ ID NO: 120856 - DNA, 555 bp, Zea Mays
ggacgccctcgctccagccttaaggtgtagtagagatttgacataagcgccagatacatggaattaaccgagaacttcttattttggtgtaaatcccactcacccacatctttcgcactattaacctgaacaaccaccaccagcgacaccaatctaaaccaagcctcatggttcgcccccgtcaaacctcgcttaaaagaaacattcagcggtactgacctggaaacataagccaccgaactcccttttttcctagtcagattatagagagaagggaaacgatccttaagcttgaaattgcccacccaacggtcctcccaaaatctggtattggttccattattaaccctgaacctaatgaagtccaggaacttatgtttgactttcattagacccgaccaaaattgggaatcgcccggttttctcttcaccgccccaatgggtaggtcctttaagtacttgcgttttaacagagtttgccacatcccctcctcattgatgagcttaaaaagccatttgctcaggaggcattgattctgaacgtccagatttttc

SEQ ID NO: 120857 - DNA, 458 bp, Zea Mays
ctgcggaggggataagaggggtcgacggtggcggtggcgacgtgagcggacgggttgacgacaacgtgagtgagagggaagaggtggtaggacactggggaggggggaggatgatggtgatataaataatattgtgtattggattttgagtaagggacaatgggttattcagcgatctgagtcattggttttgatggtatgttaagtctgattgtaatttgtttagtggatttagtgaaggttatgagtacgaggtgatttggttaggcagattttgcaaactttgaactgatgagttatatatttgtataggtatagaggtatatatatagatgcaagcccatgttcgttagggcatgtacaatgatatttaatatacatgctcttgaggtgtctaaatggtgtatttgcaaaaaaattatggagtcgtctctccataaaaagatgtctctggctcg

SEQ ID NO: 120858 - DNA, 409 bp, Zea Mays
tttttactatagtacgtataatatattgttgcctaaattaaaccatgagaactactagatcgctgatggatcatagatagaatggaaaaaagcatacattcaggacgatggggagagagacattggtgagtggtgagtgagcagtagtaagtaggtggggagcccctgtttaatctttgacacaacaacagcgctaattaagatggggcgttaaaatcaggcggtgactttttaaggtggccggtccaaggaacggatggatgattcaagcagatctcttgcttacagctcaagcatggaggggagatctggcgagaggaggatgacgaggggtggatgacttggcgttgaatcatgcatcaattctccaccgcgcttaccagttgcagcagtagctagtgcctgcgtg

SEQ ID NO: 120859 - DNA, 363 bp, Zea Mays
actgacgggaataactaattcacattagcaacaccttaattcccatcaatttttggccgacgggaatttctttattttctgctgtgacacgttgtgtcatacaagaatggtgcacgtctgatgataggaatgacatacaacaagggctgctcgctccctcgactttaaaggaatgaggtccgaggtataaaggcatatgaactcagtttgtaatactcctcacacaagcacgagagccaagagctccaccctgtcacacacgaaaatcagtaacaaagactttagcaacatattggatgtaggagttctctcataacccatataaactccctttcttaggcatatcaagagcaaagccattga

SEQ ID NO: 120860 - DNA, 481 bp, Zea Mays
tgcatcccgaccaagttgggaggatcactgtccagtgtatgagcgcactatatcgcctacaggccctgcagagcgatgccatagcacacctcactgatcttgctcagactactgagatcactctcgacagtcgagaggacttcgtggtcgacttgtcttcgaaattggtggagaaagatctataggtggaacagttaagccagcgcatcgcgaccctagagcagcagggggaaatccgggttaacactatcgatatcctggagatctagctccacgatgtgcagaaggtacttgaggaagccaacgaccacctggagatgcatcaccaggacatggaggcaaacgaggctggaagcgagggagaagagaatctcgaggaattagaaccagctccatgtcgaaatgcgactccctccggaatgcccccttcacccgcatctagcgttgcctctaccactcagggttgacgggttagttgaca

SEQ ID NO: 120861 - DNA, 539 bp, Zea Mays
ctgacgtctgacagattttgggactggtaagacgcgtgtgatctggtttgacagtctgctgatgaattgctcttgagcactaatctccacagaatcttgtgttgctggaaggtcatcctcagatggaccaaccaactcagcatcaacgtctaaggcaatagcctccgacggagccgcgtgtgttgctgccacatctgatagggaggaaggtagcgttccagacggaattgccaacacagcatcaacatctgagaggatccttagacggaaccgtgtcagcagctgccacgtctgagggggagggaggaagccagtgacaggattgggagctccaaccccttccaaagtcaggacgttcttgagcctttgacgagagtaaactttcagttgcttcgccttcacaggtgaagtaaggaccttgtcatcagtcttctctatcagcctaggagacaaggtccccccatcggattccaatgttctcattagatctgatactgccatctccgagctaatgttccgctgctgcatgttctcatctc

SEQ ID NO: 120862 - DNA, 415 bp, Zea Mays
cttgaccttcctgcttgggccatcaaagcaattgataagctgaggaagggcttcctttggaggggcaggaaagagttctgtggtggtcattgcctcttggcttggcctaaggttacccgtcccaaggagctgggtggtcttaggattagtgagctaaagaacctatgttgggttctgagagctcgttggccatggctacagaaaacagaccccagtaggccttgaacggacttccccactcgtgtatgtaaggtggttaaaaatctaatcgctgcagccattattactaagctcggtgatggagccaataccctcttctggaaggacagatggttggatgggaaatgtattaaggacatagctcctgcagtgtttgatttggtgcccccgcgtcttgccaacagacggttggtca

SEQ ID NO: 120863 - DNA, 747 bp, Zea Mays
ctaacatgaatgtcgaacattaataggtcaaaggacacttgcattgttttagacacggaggatcaccggagcatgagggataatacaacctaggggcctttagccctcagggttgggtcaggagtcagggcacgacctaagaaacttggtggaggggttggtctaggtaggtgaagactaggtgatgttgtgcggtggagacctcatagagttctactccaaggagcaaccatagcacagggagtaatcgaggaaatatgggttgggcgacaacatcgttcacctcagtgcaacgctcaatgttgtcttcctatgggctagggaacaaggacattgcgaatggtgatgacggtggtggtgctatgtaaacagtggacacaatgagttcaactatggaggaaagagagagagagcgagaaaacaatggcaaacactaggaatatctcattgaggcagagctctagtacctcccttatgttggtgaggtgcttagtgacaatcatcattttggcgacaatgacatgtgcagacaaagggtagagaaatggcctaacggctgcaactactaagggcatccatgggtcacagtgtcgggtggcaagtacttatgaaagggaggacatcatgggtgcaatggaacccgaaccacaaaaaggaggctaaggtcaccgtgacgtcatgcgtggtatccacacgacgatgatgattggaggtaggagaaaggagcgctactaacgtgtgggcccc

SEQ ID NO: 120864 - DNA, 407 bp, Zea Mays
aattctcaattggggtcctttttgcaaatcattccaaaacttagggtttggcttgtaaacctttccaaatgtgaaccatgggactttatatgtcttgacattgtagtttttaaactttagtccaaatgtgcactgtttttgcgcataggccctagggtttagacttagggttatccagggtttcaaatggggttttggtatcccaggggtataaatgtgattcaagttcattcttgggaacattttatgactattcccctaaagcttttaggttttctcaatttgggttatgttttacccctttaatccctatttagggttaagttccctatccagggttctatttgcaaaatgctataacaatacaacttgtttgaaatttttacctagtaaatgcactctaggtg

SEQ ID NO: 120865 - DNA, 433 bp, Zea Mays
gacaatttgaagcatagagttaggatttagatgagtcaggttgagggaatagaaatcgaggagaccacagagaaagggagaaaccgacagacccaatcctttggtcaagaagggaacaaaaacaactgtctcatgagtgtcctctgtcgagacagggatcccctgccaaatccactaagagcacaactccttgggtaggagaacaccgatttcgacaagatgaagaagattcaactttgaaacaacggaagcataattacgacagaagggaagctggctattgggatcaatagaggaatagcgggcgtagtgaccccctgtttcttcttcctgggtgccatcctgatctcacgagcatgcaagctcgagcacgacgcaggggcaagcgagagcttgagagactagaatgtggcgatggaaaagcagagttagg

SEQ ID NO: 120866 - DNA, 510 bp, Zea Mays
gcttgagggagcttcatgggttcactagagtctatgcacacgattgaatttagatagaacgaggataggaaagtgggtcgacagagagggtgttcgtggcggcgttctacgggacgactgggtgttccggagtttgagcttaagtaaagttcaattggccaacaccgtgagcaacacgaggctaaagacaagataaaacaagagacaattgggtgagtactgacccgaggagggctgcccacgaaggggtcctttacggcggcgctaagaacggtgaggaggagattatggcctaactcagtccctcggtgaaattgggtggtttgcgcaagcactcgtgtgtgtgatgcagtgaagaagcagcgctcgggctcaatttctatagggatgaccggaggtggacgagattcaatgatcttccagtgcgctgacgagctcacccacgtgggcagggccacggcgagcgtccggtgaacaccgattaactagacagcgccacctcatggttta

SEQ ID NO: 120867 - DNA, 510 bp, Zea Mays
ttacaatatgctgatgatactattttcatgattcaagattgtttagaaggagcaagaaatcttaaattcattctttgtctttttgaacatatgtctgggctgaaaatcaattttcacaaaagcgaaattttctgtttgggtgaggctaaagaatatactgatttatatgctgacattttcacttgtcctattggtagccttccaatgaaataccttggtgtgccaattgataataaaaagattagtaaatctctttggtgtcctatgttggaaaaaatggacaaaaggttggctggttggaaggggaggttcttgagtctgggaggcagattgacccttttgaacagttctctttctaatgtaccgctgtacatgttatcgatttatccggctcctaaatcagttattagaaagttggatttattcagaaaaagtctcctttggcaagggggttcccagaaaaaaaaatgcatttggttaattggcagacagtttgctcctccaaaagct

SEQ ID NO: 120868 - DNA, 654 bp, Zea Mays
cagaaaccatattttcagtttactgaaactgaacccagaattgcagactgtcaaggcaactttaagggtattttactacttattttacatggtaccaagttaatcattgttaagtaaacttgtacaccaatatctactattcaacttttctataaagatcccagtccaaaactgtccagaacagccaccatatagttccaaagttaagccaaacactagaattcagatatgttcactattccttatctgaaaaattccaagcgtctgacagcccatctttaggggtcagtaactccaccttctatgtaaaactcaacccatcacctttaaacaaacttgtgccctcatagataacccacaattcctctataacaagtatggcccaacactccactgatcatccacaaaacggcccaatgttagaccaatcatacacatttctaaaatatgaactgcactaagtttaaaatttcagatttgaagataaggtctttgagacaaatttttctactagttccctatggacttagggttgggtgagttaatccattttgtacactaagtgtaactctataggtttgctgtagtaatcaacctcaatccataattaaattcaacgttatcaaggtctaagcctaactagctcataattcc

SEQ ID NO: 120869 - DNA, 304 bp, Zea Mays
cttttcgcgagattactgaaccgcatcttcccgcgaacggcatgctactcacgtcggcgatcctcgtctatccccgtctttcccttcggcgtccaactcgtaatcttgggcccacgggccagctctgaccgtcttcgtctaattttatctaaccctgtctcgtgcaactcgccgcgcagctgtctctctcgctcggccaggacaagagccgccgtgaaattgacaaccacctctcgcgccctctcctttctatacataccctctcctttctatacaatcgcacacccctgccatgaaccccttc

SEQ ID NO: 120870 - DNA, 743 bp, Zea Mays
cgagtcagcccggcctgtttaggcttgcctgcaggcttggacaggaaaacgaacccgcgggcttggaagacccgactcgattttctaaccgtgccggacgagccgagcctaaatcgggatgggcttgaccaggtccgggcaggtcatctctgatttcaacctagttagtgaaagagcaaatactctaagcactgatcatcacaactgctgcagcaccgaaaagggtttgccaaaccttacttgttcactacaacaacgactaactctaatgaaggtatgaacagcagcacgtgctagttttatctatgttcttgtgtcctaactagagcataatgatcttacaaaaatgacgtattagatccaccagcaagcaagaatggcgcgaagatgaacttaaccaaacaaaacctagtattgcactcaactagctctcttccattctgaaaagggaaaaagaaattgaacggttgtgttcgacagtccaacgaagagagcgtagcaagccaaactctcgcgctccagcagagagtattcgcaggacaagcaatggcagctacgacactaattatcttattattacgtcgttcccacgcaaccgaaaaaagttgagtcttgatcaaatgatcagtaccccccccccccccccccctgccccctgccctgctcctttaatcctaaaatagataactttatagaattcaaatgtttaaattttgttctaaagtacttaactttctcaaggt

SEQ ID NO: 120871 - DNA, 349 bp, Zea Mays
tcaaatggatggttaatgctgataacatagattacttaggcaaatttggactctactccgagaaattcttttcccacataatacactctactctaaaattggtgtcatataccaactcgtccatatacaacaacctaacctacatattcttgacaggttacataatatatctatttcaaacaaagattctaacctacctaactaacctacatgttccaacctgacctatatatctacataatttatatatcccaacctaacatcaaaccagatctagacctatctcatgttcaacaatcaagtacctaacaaaatcccctaaactcggatggtaacaccaagacctaag

SEQ ID NO: 120872 - DNA, 531 bp, Zea Mays
ctcttgattccacccttcttccactcctcgacatccccaacatcagcggagccttcttcagaatatgatccgtaccgaagactgtttagctcaaacacgcgatgtagcctaacatttgaaccacgtatatcctagcttttcggtgtctccgtctcgtcgaatatttactaagaattttacgttgtattgcgttgcctaatgccatgcaacacaagaacaaggggattaacgttgtgttctgaaatatttattacattagcacaacacccctgttcgtttccggattgcagtacatgcaacaatatcatatatccaaggtttatcataagaggtaattggctcttgccttatgtttactctatttctgcgccattgtgtccttacacgaactaatcggtgacataccatttcctataagcacgcttcattcgtgtgccgcgtttgctacatgttgccttccctgtgtagcaacactttattgatttggtttacagaacgtcctttatgtgtcgacaaaaaagttgcttgtac

SEQ ID NO: 120873 - DNA, 601 bp, Zea Mays
tcactctttcttcaagggttttccaaggtaagtgacatgtcgccctgatgtggtctccgatcgtgttaggatggtatgatgtcaccatcttacctcggtagatcttgtactaagtattgttgttggtaagatttgctagttatcatatgcattttcaatctatacatttactcttatgcttcatgctattagattgattttacattgccacatgtgtatccctttattggttgctacatcctacgacatgctagctacacatgtgcacgtggcaactcaaaagtctgataagcgtctagcaccatatcttacatgtttagtctcgttgtttactccggttggacgtctttggaggttctgatccatgttcgtgtgcatgctcaacagttctcagtgacgaatttttctagggttactgatatgatacatgcagtagattggatctgggatgttcctatagactgtttattgtttatctagccctagatttggtcaacgatgtgggtagtaacaatgctcctctagcccgctgctcccttcttggccatacatgtagcctgcatcgctttagagtaagcaaccgtcttaagcatgctttaga

SEQ ID NO: 120874 - DNA, 495 bp, Zea Mays
gggatttttgcatagtttaaagtggtaactcatttgtattgacatatcgagaagaattgaacgaatgcgttgctccagaatcaaataatatagctgcaggaactgaattaatataaaaagtaccgatagtaatatcagcgccggtagcagtagcatcagcactgacttggttgactctagcaatactgaaccccctgccggaagccgaagtttgttgcttgccctgaatattgcttcgagcgggtgtgttggggttcctcttcgtacaagcattgaagtagtgcccaacctcaccacacttgaagcaagtggtgactgtactctgtccagcaggtctcgccggggtgccagtgggggcagtctgacgagtatgcggagtctgcggagtcgcccgtggtgtcacatgagcaggtcgttgataggactgttgccctcctccatgacgagctggtgtaccctggggtggaacatagcgaggacggatgctactactcc

SEQ ID NO: 120875 - DNA, 290 bp, Zea Mays
cgcgggcggatcctcctcctgctcgtccctgtctctggcgcgtgctttgctcagcttggaattgtaataacaaggcctcaatcttatccaatccacacccttacaagtgtatcggagtggagcctctcttgtgaaatgcatcgcatgcgtgcttgcagccatgtgcgcttgtcagtgttgctgagcccatactctttttagtctccaacatatgcccccctgccttttggtgaaggttgacgaaccaaaagcatatgaactaaacctgatgtaagtcaccggcttttcaa

SEQ ID NO: 120876 - DNA, 286 bp, Zea Mays
gtttttccatgtttcaccgtttcatgaacgcctgatcactggtcttcagtgatttgcttgacagtaccggattgaaaagatctatcaagattcacgaacgccgtttaacctggttaaacgaggcgacgcagaaaccgttcaagctcgtgtatctttggacaggacttcatgatgcaactacaacttgcgaagattatcatgtgttaagattgaggtttccttaccttatgcagcaacatgcatgggggcacgatgcatcttcagccgggggcagtgtcatatccca

SEQ ID NO: 120877 - DNA, 294 bp, Zea Mays
ttcgtggaatgaggaggtttaaagttaagggcaatttatccccacgctttattgcacccttcaaaatccttaagcgagttggggagatggcctaccagcttgagctaccaaatcatctgtctgatgtacatgatgtattccacgtatctcaactcaaaaagtgtctccatgtcctggaagaacggttgccaatggaagaacttagtgtgcaaggagatctaacctatactgagcatcctgtcaagatccttgacactttggctcatgttacaagaaagaaagtgataaaaatat

SEQ ID NO: 120878 - DNA, 415 bp, Zea Mays
gttctcttatgtttcttctgatcaccattctagaggatttaccatatgatctttcagttactacttaaacaccaaacattagtgttgtcagtattttttctttccaatttattcatgagttgctatagaacttcacacaaagacctacaagaacaaaggataagaatggaacgaaatattcctaatatccaacgatactaatggaataattcacctttcttgccacttttattttaacaaatgaatttacatgatcatgtctgaactaccagtaccagatatggcaacttgtgcacttgtgtagtctttgtcatatataagatttgcattcttttcattatcatattgcctttctgaattagtagttgattgcaccaatagcccctccaaactatagagaagtctaacaaagcag

SEQ ID NO: 120879 - DNA, 292 bp, Zea Mays
cttcttcagttgagacacgtggaacacattatgtacatcagacaaagtttcgggtagttgaattcgatacgccactggcccatatctttcaagaatgagaaaaggaccaatatatcgtggtgcaagtttccctttaaccccgaaacgcgatacgcccttcattggcgaaacctttaggtagacatagtctccctcaaggaaatataagagcattcgtcgtttgtctgcataactcttttgacgagcttgggctttcttcatattatgaattattttctgaaccttttcttcg

SEQ ID NO: 120880 - DNA, 608 bp, Zea Mays
cggtattccttgcaaaagcgttgatccaggtcttccagctcatatggacgtggctgagggatcttcagccctagaggtggctgctgcggaaggcccagccctcgagggtggcgccggtagcgacccagtccccgagggtgttggagcgggctccctttctgctgcttctatggatgtccacgttggatcgcccctagtccggttcgaagaggctgtggtgacacacgtttctatggctctcgctggtcaagtcgctttagaagccagcgtatcagacgctaggagcctgccgcctactgatggggctgaagttcccccaagtcatgctcttgagattattcctgttgatctcccctcatcgagccatgcaccgactcttcctgctttgggtcttcccctgttcctttccaatcttcaggtgagtcaactttttgctttttattgttcgtactggcgaattatcttttttgcttatctgtccatgaccactggattttattggcggtgtatccacccaactgagatcttgcggcgctattgttcccgatcaagcttcatctctgatgcagtggaaccctctgctactccaaaaatagatagacgacctg

SEQ ID NO: 120881 - DNA, 374 bp, Zea Mays
agctgatggagttttaaaaaaaagatgtctgtcgtctcctagagtcaatggccatgcaatcttgcgtatattttggtcgaaggttttctaataggattgacttgtaatcatgaacctctagtgtactggtgtgtggctgtttggagggatctatcccttcagagagcagtgtgatgtaacaatttgtgattgccctaacctctctcttttgaggcagcagacggcaggcatggggtggtggatcgagatcacggtcacgcgtgaattaaagcacaaataagctgcaggctgatgatatgaatcatgatggcacaacgaccatcgctggctagctagctaggacgtagcctaggtccacaccatgcatggtgtag

SEQ ID NO: 120882 - DNA, 584 bp, Zea Mays
aacgttcataatcaggatattcaaaatttagtgcatgctttacccgattcaatctccgcttcggtcgggagccgaaggctgtagacatcaacttatcttcttttttcgtatagttccctaaaatctcattacacataacttcgatcgcgtccaaccattcttcgcagggttccttgaattgttttttgaatttaaagtgataaggcagccgaacgagttcaccctctttcttctctttttcaagcttcggcataccccacttcctcagctttaggaatactctgttggctaagtattcctggaccagatccctagttccaatatgttcgaacacaattctaaactcatatacagcatcttggcatggatcccccggtgtcatgttgcactgaggcctagtcagcctgaagattagcttcagtgggctctgaactagcttctccttttcctcatcaattttaacataaaaccattcagacttccaaccggtcggccatttagtacgatagctgaccaccggtgtcttcatatccttccaataagcaaaattatagcagccgaagttctcatgtaatctgtcttct

SEQ ID NO: 120883 - DNA, 548 bp, Zea Mays
gtcatcattcggttcatcaaatttatctccatatctgaaggtgtatttcagtcgaaccagctcaccttctccagacatggtgacagtctccttcgacatttcctagttctctacaaatggccatactctgaaggctatatgctcctggattaaatctcttgtaccaataaaaaagcagacagtaccgaaagccttttggcatgcttcggcggcttcgtcaatctcaatcttcggccttcggaggccgaagcgggaccaaatggggcgcataataacctccttaacatcctccctcgctaccaagtcgttcttcacataaaaccattcctccatccaatttcccggccatctcttcctaaatgttggtactgggtaacttgagttgggacgggataaatccataacaaccgaagttgttgtggtactgttctttacccatggcttttgtctcatataaaagttcgtgcatactgcagaagcactttgcgctcggttctagcccctgactccttactgcccagacaaaaatccccatccttaatatagct

SEQ ID NO: 120884 - DNA, 807 bp, Zea Mays
cagggcggctctgcctctccccatatccctggagatcttttgactgcaaaggcaacccctcctgtggttaaccagaatgcgacgcccttggaccaggacgttctccacaacgcgacacccttgaacctccattcaagtaacctggggttggttccttctagaaccctgtggtgtatgcccccgaaagtatattccaaaagatgccgggttttacagcagcaccctcaagttttgttggtcgactctcaaatagttttgagctctggaaacgtttatgtggatgactccatttcgccttcggattcgcccatctcagatcagctcagatcttccttcagatgcagggttaccaagtctatagtgcatatcttgccagctccttaggctggtagaccaggggctgcaaactcctctgctgttcctccacgtcgcagccggtgtattgccgaaattggcgtcgagaacctagccgcttccagcgatggtcagacaagatttaggaagacggtgttgagggtccttcacgtgattgacgagaacgaaggcattgatcaggatgctttggattgttacagtaaattgtttgacaagcctctctccccttcccatattcaggcgcttgcagccctttttggctggtctgcccctggggtgggagagtgctgatcatgttcccagatgttatttgtttggtcgttattatctgtggtttttcattatgaatccttcaaaaattgtttgctggaatgtgagaggcttaaattctaagactcggcaggatgttgttcgcaacttgattaattattt

SEQ ID NO: 120885 - DNA, 349 bp, Zea Mays
agcaattgaaggaccggtgaggcgatcagagggggtgaatgggagccactacaaattctcaaactacgagaacaacacttgtgacttgattcccaaagtgaccccaaacctcaagggactcacaaacaaccagatcattgtgtatttcaaactagtgtcaattgaacacacccaaaacctggaaaatagaggaacccaactgtctgccaaaaattagagccaaaaactcaaaacagagggcgtgacagtgccagcctgaggtccggcattgccaggcactcaaaactacccagacaaatctcaaactttgcaaaaagtttgcgtggggagaaagatgtttactgttgaa

SEQ ID NO: 120886 - DNA, 525 bp, Zea Mays
ggaaaaggggggtggcggccaagaaggggcaaaagggggaatgggccaccactagggtttctttgcgggagaaaagaaacgacgccacagatgactctgacttagcatccaacggcccacaacccttttcccacatccacgcaccgaagatcaacctttggcaacattttttggggatattacactctaccccccttaaaaaatattcgacctcgaattcgaccactccaaacaaaacatccaaggtaccccatatagcaccaccatttaaaacatgggtccattattggacttaattgacacaagaacttctacctcggactaattgtctaaggaaactacaccacctgacatcaagcatgaaccaacatgtaatgaagctcaaaacaagtcatagatgcaatcaacactaagatttcatttcatcaaatttggatgcagccatacatcagcatcaatgtcttaaaatgacactcttttatgaaggggtaatatgcactaagcacaacctttaccaacttcaac

SEQ ID NO: 120887 - DNA, 769 bp, Zea Mays
ggagaaaggaattggggcgctacggtggctaatcggaggcgagggctggcgctctagcttcgtaacaacctagcggagctcactggggcatcaatttatagagtgcgatcgcgaatatgatgaattttggcgggaagggcgggcagtgagaaaggggaggagtcaccagagttatctctcgtggcattcattggggcactgtcacaggcgattgatagactacctatggcggtctactgcgatgtggtaacaccactgactatgtgacacacgggcggtaagcggccaacaccggcggggatcatctcggccagccgcagaataagtgggtacggtgaaccatccaatgaccgggtccgagattatcctagcgccaagatcttttactccccgcgattatccactttgcgccgagcacgaatcgtggcggccggcgtgaatacaagtgcggggatcaccggcggcaaggttaagtgaacacaagatcttcttcagactattgtaccattgaaaccttccttcagggcgcctgacagagcgaattagagggcttagttcttcaatttttatgtgacaacttgaccagccctctgtagcaaagttgttaatctataatccagctacaattcgactataggaaccttggccatttgcttactcgattaagctcaaatcaattccaaagttcatcagtgttcactgtcagccatgttcagtcttcagtagtgactgacagccagactttaagtccatctatctccaattttta

SEQ ID NO: 120888 - DNA, 754 bp, Zea Mays
tgcttccagtgcccgtaaattccacaattacgacaccttcctttgcgtcgcggtgtgcccttagatgtcaatttgacaacaggctccttcttgtcaccttgagacatgttcttcggcttggcctcggtgaacccaccttgacgatctcctcgattcccagaggtggatccttccggagcgaggcggtggcggtacttggcgaactactgattctcagacaggaacagtttctctgtcttctcagcgacagtatcagcgttgagacgatcttcagcggtgcgcagacgccccaccaattcttccactatcagattgttgatgttcagcaacgtctcaatcgacacagtgatttgattgtactgcttcggcagaacacgaaggatcttcttgacgacgcgagtttcatccacgacttcaccgagaccacgcagattctcagccagcaaattgatttgtaggccgaactcgtcaatgagctcgccattcttgaactgaatgttctcgaattcttgcagcagcttctgtgcatgtgattctttgatgcgatctgcaccctgccgcatactcttgactgcatcccaggcctccttcactgtcttctttgcccccagcgtcgtccacatctccttcggcactgaacgcagaagtgcgctcattgccagacgatcctaggtgcgcttcactcctacgccgccctgctcgatgatgtcccagacgtccattgcctccagattgcactgcatcaacatagccc

SEQ ID NO: 120889 - DNA, 313 bp, Zea Mays
ggagtcctcatgaagtgcatttcctcgactactgggagacatctactagatgaaattcatgccgaatagtgtggaatacacgcagcatccagaactctagttgggaaagtcttcaggtctggtttctattggccaacagcaaagagtgatgcagccgagttagttcagagatgtgaggcttgccaattcttgtcaaagcaacatcatttaccagcgcagcagctgcagaccatacctgtaacatggccatttgcgtgatggggattggacatgattggacccttcaaaaaagctcaaggaggctatactcacg

SEQ ID NO: 120890 - DNA, 307 bp, Zea Mays
ggagacgttagcatatatatactctgttagttgagtatataagacgaagggcaacgccgcttaactcatccattcacaccaaagtaagcagtgttttatggctttttttcttctaaaaagagacaactttgcgcgtatcatctacgcgggtctgtttctctgccttgtactgcaccgagtatttatcattgaaaagttagttaacaccgggaccacagtttgtaacatgtgtccaacaggagtactccatctttgcttcgcgcaccccatcgtcgtccatctcccactccccaaatgcaccttcctg

SEQ ID NO: 120891 - DNA, 427 bp, Zea Mays
cagcagccaggtttctatatcagctcatgagacggacgcttctgccacggatgggttatagggaggctgccactcatattcaactttggctccttggtgctctaatttctcactcagagtttgatgttgtggattttctcatttgtgagattgaggacaccgtactagatggtctacgttctcgtcgatagctgccttatgctcactatctgtgtcacatctttgctcagctaattcaacccccacagttccagggtactcttgaggcctctcgcctcatctttgggtcgtaccgtccagctccaaaggatcatgtgctgacacctgctccagtgattgatactcaggccgaggataccacttttcaccagttcgagactcagggcgcaacagtccctgatgatgatgatgatgactttggggttcc

SEQ ID NO: 120892 - DNA, 377 bp, Zea Mays
ggtagtttagaaaatggaaataaccctcaataaatagaggcttagggttgtttacagccatctcttggctgccatttggattggagcacttgtttagaactcctagttttttctctaggtagtcaccagtttagccaaggaatccacatcgattttgtaactgtcgactgtgtttgtgatctacaagttcaatccgaggaagggtcatcagtatggcccacaagttttggtcacttctcgatctcagttttgcatccgtgctaaaatttggagttgtttcgatcttgtgttcttcccttctcttgtggatttgttgagaaccttcaagttcttgagacatgagtgttgttggggattgatttgtgaggagatagact

SEQ ID NO: 120893 - DNA, 559 bp, Zea Mays
gcctctggtacacggtggtgaccgtgacacaaacgcggttgtgggaggataaaacagaggacgagcatcatatgggagagtatcaagaaatagagagagaatagtggagagcaccatatgaaagaagagcaccatacaatccatatggatatccatatgggtatggaggagggtatggataagtgaaagatgaatgaggaccatcggtggtaggagtgggagcatcgattgtggtaggatttttattgggggaggagaggataagagtatgcaaacagaggatgtggatttagggaacgaggatgagtagaaacatccttccgatgaggatgtatgggagaaatgacgtcgaagaagatctgcaccacaccgatagggttgacgagacgttgtggagattggtctttgatcatgtgagattcggattgaatgattggacttcactttatatccatattataatagagagtgagaggctataatatgaaggaacatgagtgaattgatggataagaaatgtgaagggatccaaacatcctcccctctatttatagggcgg

SEQ ID NO: 120894 - DNA, 368 bp, Zea Mays
aaggggagagggactcccttttatacttcaagggacggtccttacatgagtgagagagagagagctcttcagctaatgccttgcactatagtgtggtgggcccccttaggtcaatttcggggcgtgcctgcgtgtggcatgattccttctaacatgtcatgtgccaccgtactcttggtatggcattctatcttgttcgtccggcatgcgagtccctgtagcttgctctatgcctgcactgtcgtacctaacggatcccgcagaacgtgctctcggtaaggttgaggttcttgttcagtacgactttatcttccgtcaatgcccttgcgtcaccctccagcatgcgtgagtatgcactaggcgtgttg

SEQ ID NO: 120895 - DNA, 1035 bp, Zea Mays
gtcacatatatatagaggggtcgccccaacctctcagattcgatctgctaaattccagtaaccaccccctagaatctctatacgtgcaaccgtatggagttcacgtagggcacgtccattactctcggttgacgtggtagtctaattgtggtacttgataaccaaataaacaaaaggcaaaaaatgaactgccctttagagcatgtcatgacgcgatcgcgcatcgtcgcaagtcacaagtcccgtgaaaaataacgcgaaaaaactcaaaacatgagcgagcgagcacgcgtggcagcctccatagccctttatttgtctcttgtgaagagtagtgaacactctcacttataaattggttatctcctacctagataagcaatatgagactaaagccctcatgccatccctcacaccaccttggcttccttatttgaattgggccaccctcaagtggaccaaattccaacaatcctcaccaaagccaaggtctccaatagactcaatttatgcactttcatataccagatttatagtgcagacctgttatgggttgtgctacaccttgcattacaggattcacttccttacgacattgtaatggacaaagccttgaattgctagtctagtgtaagtaggtttcacttataggcatcactgatactaggctgcctaaagccatgcctctgattggagcgttatagtcatgctctcgtgtcttttagtgtacttttgagattacccacatctcatagaccatgacctcacagtcaaactcacataggtgtaaagtgtaccctttaggacagtactttgcctttacaggcctcagaatacattaagaaaaaagtcaacctcccttgaagtaccaagagtatgcatcttctatcgataaacaagtaaaatgatgtactcccttgttatacaaaaatattttgttcctcccaattactaatccacgggatctacgatcaaatagattgggttgccactatatgataacatcacgtgggctttaatcccatttcccttgat

SEQ ID NO: 120896 - DNA, 886 bp, Zea Mays
atttttcttgaaggagtagaactcaaggtttttgctgtttctaacacaacatctagtacatttgccatccttctcctcttaggagttatggcagaactcttgtgtgtctttggcactgttgcctctgttgaagggctcaaaatctctagcatttttgttatttctccaatttttgacccctcaggcgtcgcctcaactaacttaactgaaagtaacttcggcattatggccggatctctagtgttctgcgcaggttgaacagtttcttttgtttcggtagccgaagaggccccttcgccaaattcaggaatcatggccggttcgatgtaacacggtcggtgagtcagaaccttcaacttttttcccttcagcacaggcccaactggggtgtctgaagtagcagctttcctctttttcccctgtccccgcagcggatagcggtagtcagggtaaatgaagccaatggcgtcaaaaactctgttcagtctcttttttccccgacctccgaaggctgcggacaatgcattatcttctgccttggaatatgctccaagcaactcatcacttgtagcttcgatacacttcagccagtcatcgtttggctcatcgaacttatccccaaacctaaatgtatacttcagccggaccaaatcaccttcgctagagttagtgatggtctccttcggcatttcccagctttctacaagcggccacaccctgaaggctatatgttcttgaaataaatcccttgtcccaataaaagagcaaacagtgttgaaggccctctaacacgcttcggcggcgtcatcaatttcgaccttcggccttcggaggccaaagcgggaccagatgaggcgcataatgacttccttagtgtcttccctcg

SEQ ID NO: 120897 - DNA, 439 bp, Zea Mays
ctttatcctaaccttttcttgttgctaagacaccaaaagaggtacccaagtcctgattgctccatttcatgctcatcttctcttttccaccttgagactgtacaagattgctcaagaaacagttagtctcaaaagacacaagttatgtgtgctccccctcaagttgtgcatcaagtatttgaatgacttgcactttgcacattctagcttcctcagaactagaggggatcacaacataccttggtcaaggcatactctatcactttcatcccaaagagatatcaattaaataccaaattgaaagccacttaatacaaattgaaggctaaatgaaaggttgactaaatgcaacaatgcatgcctcaggagcacctaagccaattgaatactcacaggaagtctaacatttacacgcaacttagacatgcttcatacttaa

SEQ ID NO: 120898 - DNA, 661 bp, Zea Mays
cagtcatctagcttctggttgcattcccatgctaaggtgatgaaccaccattttattcatgcacaccataggcttcttggttcagatgtccagaggcttgaatccatcttgatcccatgctggttcatacattccatcattcctaagtacattgaaacaagaactcaaaagcataggctcattcaacataggctgattattaaacataaggttagcgttcacctgagaatgaatttccttctgcaattgtttagctctactccttgtaattggaccagctatatcaagtggagtttcatttgaagatgattgaatgctaggtatgtcctcattagcctcccccacttgagaaggagtcgttctcgactcaggctcaccaacaaatggaagcaaagtctttgacattgaatgttgtactcacattggaatattcaggtggcagctcaattttgtatgcattatcatttatcttttggagaactttgaacaaaccatcaccccgaggagataacttactcttacgctgttggggaagagatcctttcgtagatgcaaccatacaaggtctcctggttgaaatgtaaccttcttacatttgtttgtgtgctttgcatattgtgctaatttcttctcaatattctttcttgtctccgcatgtaac

SEQ ID NO: 120899 - DNA, 510 bp, Zea Mays
gtcaccggtgaagttatcggagtccgctgcggtgaacatggtactgtggccggagttgtttaatggccggagtctatccacggcgaggatatttacgcgaccccaagtgctatccggttaccagtgagtgcgaatcttaacggcggcgacgatcccggcgcgaagtcatcggcggcgaggggagcggttgatctgatctgtccaggcactgtaccatggcaatgcttaatcagtgtgtctgacagccaagatttagggccagattcctcccaattttctatggaaacatccccaagtctctgcatcaaagttgtagtgctacataccagctacaaatttgttatgggaatcatgctcaaacttgcattggatcatgtttaaatctgagccctaactccatgccattccactgttaatctgaatttcagatttcaagcagtctgacagtccaacttcaggctcatttatctcaaaattcttcatggtaccaaggcatgagttctatagcaa

SEQ ID NO: 120900 - DNA, 315 bp, Zea Mays
agcagtatcaccaggcttcatgtcactaaagtttgaactaccagttccattattgtaccttggtttggcaaacgttgtagatacccaaactacttaatcatcaagaacaatatcagagtctgtagattgtggtgaatatgcatttcgatcagcaccaaagctgtgtgtgaagcattgctttgttgcgataaaagatctcattgccccagttaataactcaagatcagaaggccccatatgttcacttgatttcaagttagcaggaaaaagactacagttagttggttgaaacacttttaatagagaatgcataaa

SEQ ID NO: 120901 - DNA, 291 bp, Zea Mays
gatgaactctggtgtggttgtgctggtggatttatgcaacgaccggtgctcccgagcggcgtacaccgaattaaaccctccctgaacgattcccctaacttaatttcacgattggtaagctatcaagctctgtccacgtgaaccgcgaacgatgaggacaatggtacgcgttcccggtgatccctggcggtccggttcaattaaaggggtcgaggggtttgcggggtacctaaggatgctagaacaagtagcagagggacttgagctaacctgaatcgagctggccacggc

SEQ ID NO: 120902 - DNA, 671 bp, Zea Mays
gtttcctgggtgtacgaccgtggttaggctagtgctcgggccgtcacagcaattgggttccatgcaccagtggtcatcggggcatcggtggccaggtgctcggtcaggggccaccgcggttggggcaagtcgtcacccagctcggactgaggaagaagaatagagcttggccgttggatttggaatctgtgaccacaattagttttgcggcttgaatagttctgagccgtggggataggaatcaactgtcacaattagatctagatgagtcatgggttccggccttcggatcgaatctcggtggccaagatctgtttgcgcgcatcgcttcggtgtgtgtgtggtgcgccatccgatgcagatcggacatgggagaatcgatcaccctgtttttagtcctatccgtccatcgtggatcctacggctagtactgcgtaccggttcatatcgggccgatctaatctggtcggtcagattgtgatcggatggctgacaatcaagcataccccttcgtggtgtaacaattgctaaagagaccctagggaatcaactaataaacctgcagtccacctctgagttgtctgagtctggggaaaaatttctggatttgcccccggagttctctgtaattagtgctcggtccggagaacaatgaaaattgataattagtt

SEQ ID NO: 120903 - DNA, 275 bp, Zea Mays
aggatgaaaacggccggtaacggtcggaaaaaacctctcaccgttttcacccgcataaatttttgttcggtcggaatcggtaaacgggaaagtcagaaacggataacggtcggtaaattccggtatatcgaaaacggataaatccgagcaaaatagctcgaaattgatcggaaaacggtaactgtaatcggaaaagctcacaataaacaaatcctaaccacacagatgttcattcacatccacatacaagtctcattcacaaaagtacacaaaac

SEQ ID NO: 120904 - DNA, 384 bp, Zea Mays
gccttccgtgagcaccacgtaccctaggggatagttcaactcaaggaggatgaattccgggagttaactcaaggcggaaggtcagtcagtgaatatgtgcacaagttcacagagctggcccgctacgcgcctgaagatgtcagcaccgagtctagaaagatggcccgtttcctgagaggattaagacccgagcttaagaccatcctcgccagccaagacttccacaacttctctcacctctccaacaaagctattcaagtggaaagagcaaaagaggaagagaaagggcacatcaagaggaaattccaggtcctccgagcgcaacagcaagaacgtcaccagagagctcgaccctttgggcttccacccaggggtccaagcttc

SEQ ID NO: 120905 - DNA, 530 bp, Zea Mays
gttttagaggtaatcagccgagtgattaatggcaacgtcggcgttttagaggtaacaaccgaatgacttattgtgatgtcagcattttagaggtaacagccgaatgattgatggtgatgtcggtgttttagaggtaacagccgagtgacttattgtgatatcagcgttttagaggtaacaaccgagtgattgatggtgatgtcggtgttttagaggtaacagctgaatgattgatggtgatgttggtgttttagaggtaacaaccgagttagaatgggccgcgtcggtcgttttggaaataacggccgagggatgacatggcatgccagcttttttaggaatagcggctgagtgatgacatggcaggaccggcattttctaaaaataaccatcgagtgatgactggtgctttctggaaacggtatctggcccaggaaaaccccatatgtactgcattgtagcgcgcctctgctttctgtgccctagttcttgcttttctgcatccaagctttctttgcgcccgtgcgata

SEQ ID NO: 120906 - DNA, 584 bp, Zea Mays
caataattttataaaattatagaaattggaatgaataaatttggactccatatgaattttctaggaattttgcaagttctagttaatatcttcatattaaaaatccatttcctatgtatttttctgaattttctaatcttttggactgggcgcacaattaccaaaatcgtcaggggtctcagcgcaagttttctaagactcagaacgaccctggtgcagacggcgggttcattactaagaagttcagggactcttttgagatattgccaagcgaaggggtattatggcacgtgaaccgcacgattacgatccggtggtccagattagtttgatccgcatccgaggacccgcggatgatccagaccgtaggcacacagatctacggctaggatatattaacatgaaggggtatctcgtctctaatctgagcccacaattcggtgatcgacgactcgcattcagttaccatcagatgtaatcctatccatctgttcgccgatcaacgactcacacacgtcgtcttccccacgaccacacatgggatgatgcatgagcgtcccacggcgtgacctcgtcggcgatca

SEQ ID NO: 120907 - DNA, 435 bp, Zea Mays
tcttcatggctgccgcttcagtggtgtcgtccgtccctaatccaactgtctcagaatcaagagaacaccaacccggctgaaggggatgagcttccaaagtcagccagacccgacaacgaggtacccaatgctcctcatacaactgcaccgtgtacaaagggggcgtagggtaaccgctggagttaagcacttcccacaagatggagggaaagccatcgtgagaaaggaagtcagaactgaaacgagtgtctcctccactggcgggggtgggtgaattcatctatggaagggtatcaaaggtaaagattatggtggaaggaaaaaaataaaagagcccggatggtttttaaaggaagtgggttagctcaagttttaattctcttttgtgtttataatgcatgcatgctggaagtaatgtctcctctccaaataata

SEQ ID NO: 120908 - DNA, 613 bp, Zea Mays
cagcaaggcaggtaactctgctgctctctccgaataatatgtttttcgtcgatgagtcagaacctttactttcttctacttcggtgcagtggaataagcttttaatgcacttttcctttttaaccccctcttctgagcagggaagcagtaatcagggtaaataaatccaatagcgtcaaaaaccctgtttaatctcctctttcctcgggcactaaaggcagaattcatagcttcatctttagctttggtatacgctcctaacagttcatcacttgttgcttcgatggcatcaagccaatcatcgtcaggatcgccaaattgatttctgtaccgataagaatacttcaaatgaaccaaactgctctttccagcattctaacttgtattagccctagcatccttcgacatttcccactcggcagctaggggcttaaaactccaactttaatcaaagcttcaagagtaagctgatgaaggtatattttgaatcttttcagcactttgactagcattttatgcaagggaaagcgaagcccatccttcatgaaaatttggaataccaccacttcgtctgcctcaggaagaggaagaatgctctctcctccagctctca

SEQ ID NO: 120909 - DNA, 760 bp, Zea Mays
caaaatcgtgccacaaatggtgctcctctgtctgatactatagtccttggtatcccatgcaaacgaactatctggtcaatgtagatttccgtatacttctccgtcctgtgggtggtgtgtactggcaagaaatgagctgacttggtcaatctgtccataatgacccaaatggaatcatggtgcctggaggtattgggcaatcccacgatatagtccatgcaaatgtcctcccatttccaagatggtatgggaaggggttgcaaagggcctgctgccttcaaatgactggctttgatcctctggcaggtgtcacactcggatatgtacttggcaatctccctcttcattctggtccaccagtataaggatctaagatcatgatacatcttgttgctgccggggtgcatggagaattttgaaaggtgagcttcatccagtatcttctttctgagttcagggtccttgggaacaaccaatcgatctccgaaccatagaattcccttgttgtcctgacggaagcacttgtatttctctgccttctgcttgatcatttctttgataacctgcacacccttgtcttcaatctgtgtcgtgactatttgctcttgcaatgtgggctccaccgagatataacttaattcacctgaagaaaccacttccaggttcaacttgcacaattcatcacacagggtagtaactcttgcatccatgttcttacaattgcactgggccttcctgctcaaggcgtctgccacaacat

SEQ ID NO: 120910 - DNA, 643 bp, Zea Mays
actagttttgccgaacacccggatcgcacgccgggaacggaacgacggcaaggtcgagctccgcaatggctggtcccccatctcactcatcacgctgcacaccggtgcatctgcccgcctatggccaaggggaggttgcaggggtatgcttatgtgcaccgaggggttgcgcaacgattggggatgcaagggcgtccgtttcccagtgtccgtgggttccacggggttcagttccgtggccgacagagatcagtttagtccatggagcgcggatggcagaaagccgttgggggaagaagaagacccgaccacagggccccacgggtcggtgagtgaaggagagcatgcgtgaatcaattgagcggctggcgagctaggatttggggcaggcgcagctgataggtgattgggctgagcggcgtggaccgagtgtggaaaatgggctggaatggggaagttgagagaagaaaagaataatgcccacggtgggaattgatccgggccggccagtggcccacgtgggcgcgagagggagaggctgtgttgggctggtggtataggattttggcccaaacgtggttagtcttttctattttcttgtctatttttaaattgctatattcaaatctacttttggatttca

SEQ ID NO: 120911 - DNA, 740 bp, Zea Mays
aaaaaatcaaggcaaacaattctgctccaaaaaagttaagttgtgtttcgtttgctgttcagttgtgtttccttcatcacttaggagcctttagttagctgctcaaacaaaatctgcaaaatcctaagactctgtagaagtattctaaacatacttccacttaaaaatagtgcatatctaatttgatcccaaaaaagtagcacaccagacattaaaacccagtccgcatgatggcacgatgccaagaaagcacaaactgcaattgataggaagtcatcaaacaaatccacaatgattgtttgccatgggtaggcatcctcaaaaaatgagggtgtgtaacaatgtgagcgcccacccaaaaaccattgtgacaaacacccattggaaaagtccgaggaacaatagaaaagccccatctaacaccaaggcagaagacctgtgtcaaaccaaaacttgaacgtaaagacatgtgtcaaaccaaaacttgaacgtacctttgaaccaaactaggaacatacattctgcagttgcggcaacaagtaaaccagacgcgtaccttttagcatacacaattcaaccagttttttcgcacaaacatcacgaaataggaataacttagtgtttttgttttaaaaagaatttagcacacgcagctgcatagtatgtgaaacctggatttgtggattgatttcagttacaaactcataccgattgcaaatttgggtcacacacatgcaaac

SEQ ID NO: 120912 - DNA, 279 bp, Zea Mays
tagagaaggaatatcgctactcccccactaactatgtaacgccgactattcttctgaattaaggggacttcctcttcttattcttcttcgtcctcgtcaataatacgaacaatacacccattgggttcagctctggcaggatcacacccattggattcagctctgataggatcacacccattggggtcagctctgacagggtcacacccattgagatcagcatcagcagggtcacacccattagggtcagctccagtaaaaagttccattggtacttct

SEQ ID NO: 120913 - DNA, 344 bp, Zea Mays
caccgccttaagtcatcgtcgacttaagtcgattgctctgttagtagggtatagtggtcaccctaggttaagtaagcgtgagcatgtcacaccgccttaagtcatcgtcgacttaagtcgattgctccgttagtagggtatagtggtcaccctgggttaagtaagcgtgagcatgtcacaccgccttaagtcatcgccgacttaagtcgattactccattagtagggtatagtggtcaccctgagtcgagtaagcatgcagattgacaataaacagttcgagtgcctttgagaatgaagtctttttattgatggtatattttccaattatagaatacaatgtcg

SEQ ID NO: 120914 - DNA, 324 bp, Zea Mays
attcatcaccgttcgatgcttggagcggtattgtggggtccgcttgcgtcctagggtcacgtaggagcattccccttgagcacataagtgataggggccgaagaattccttgtcggtgtcaaattcctgccgtagaccccccaccaatgggagcaatcgtatctgcgcaccggatctcggtgagaactctttcccctggttcgttattgttttctctaagtatagtccgcacccggtgaaagtctatggcgggatcgaggtttggggcatcaccggtgatggcgtccgccatactctgcgagcgtggggtggaaaacgagtggt

SEQ ID NO: 120915 - DNA, 421 bp, Zea Mays
gtttgctttgtgcacgacaatcgaccttcagtgggtaaattggatccgcaagccgttaagtgtgtttttgttggttatgcatctacacaaaagggatacaagtgttgggaccctattaggagagggttatttgtaagcatggatgtgactttccatgaatttgaaccatactattcaaacaagtgtgatcttgatcacttctttgatgagttctcttcagtcaatgaaagtgattgtagaggggtggaagtaactctaaagaaggagagaatagtacataagaagaggcaattgttggaagaatcccatctattgcggatgagactaatggtttcaaggaaaggaatgaggttcatgaagacaatgaagttgtagtcgttgggacaattccatgtcccaaagaatacacaggagggaatca

SEQ ID NO: 120916 - DNA, 515 bp, Zea Mays
tagtcatttgaaggtagttggtaccttacagcctcttcccataccatcttggaaatgggaggatatttgcatggattttattgtgggattgcccaacacatcccgacaccacgattctatttgggtcattgttgatagactgaccaaaacatctcatttcttgccagtacataccacccacagggcagaaaagtatgcagaaatctatattgaccaaatagtgcgtttgcatggaataccaaggaacattgtgtcagataggggagcaccgttcgtagcacgtttttgggagcagctgcaagagtcactgggaactcaggtgataaggagctcaacataccatcctcaaaccgatggtcagacagaaagagtaaatcacattatggaagacatgttgagggcatgtgtgttacactatggtaagaattgggataagtgcctttccttggcggaattctcgtataacaacaactaccagtccaacctaaagatggcaccttttgaggccttgtatg

SEQ ID NO: 120917 - DNA, 437 bp, Zea Mays
tgctgctcctgctgggacattggtggtggcgcctctcccggaagctggtacaaccttggatattcagagacatgtcagtgttcgcccgaaacgcccttgccgagccaatcaatttgattcacctgctgatgagcagaaaaagaaaaagagacgtcttcagcgagtatctagtttggatcgggacgttggtccttcggttcctgctgctgaggaagtacctatgcctgaatttactgacgctgaccccaatgggtgtgatccatctgtcactgatcccaatgggtgtgctccatctgctgctggtcccaatgggggtgttgtctgtgttgctgatgaaaacgacggggaggaagaagatgaggtccctttgactcggaagaacagtcggcaatatgtcgccagtggggaaagtagtggagttccttctcctgctctgt

SEQ ID NO: 120918 - DNA, 415 bp, Zea Mays
tgatggccagactgaaaggactaatcaagtacttgaggatatgttgagagcttgtacccttcatcatggaggcagctgggacaagagtctaccaaatgctgagttctcatataataatagttaccaggccagtctgaagacgtcaccatttgaagctttatatggcacgaagtgcaggagtcctctatattgggatcagactcgagaaagacagttctttgggcctgaacttattcaagaggcagaagaacaagttcgtataatccgggagaacttgagggtagcatagaccaggcaaaagagctatgctgataatcgaagaagaccactggagtttgaggaaggtgatcatgtgtacctcaaggtgtcaccacttcgtggaatgaggagattcaaaattaaaggcaagttatcc

SEQ ID NO: 120919 - DNA, 431 bp, Zea Mays
ttcggttgtgtggacggaagagtcctcggatgaggacttggattattttgcggcattggatgtggctacggcggaggcttctccacgtgtgatgggtgctgaagttcttcctggtgcgagtgctaggcgtaggcggcgaatggcggtggcgaaacggagaattagtgaggtgtcacgaagtgataggcgtcattgtggtgaggtggagggtggtcgtcttcgtgtggatgggtctggcaaacgggaattgttgtcctcgccggctggggcgagtgtaggtgagggagagttgcgaagtctgtttgagggcgatgaattgaggataatgttgttcaactatagggagatgggtatcatcctgaaggttgagccgatgtaatgtgtgatgccctcgctgcatttatgtaactataatttgtatgatgaggctg

SEQ ID NO: 120920 - DNA, 369 bp, Zea Mays
catcacaaataagcatttacttaactaaccataaaaaccagagagagacaactgatgaataaattaagcagatctgctcagacaattacactttaactacacaagcagttaacaagcagatatatcttgtataaatttcagtacatcacaaataagcatttacttaactaaccataaaaaccagagagagacgattgatgaataaattaagcagatctgctcagacaactacactttaactacacaagcagttaacaagcagatatatcttgtataaatttcattacatcacaaagaagcatttacttaactaaccataaaaaccagagagagacgactgatgaacaatcagacaactacactttaact

SEQ ID NO: 120921 - DNA, 414 bp, Zea Mays
gcgaaagggtattctctattattgcccgtaggatctagatcttgtggctcagattagactacccactctgcgaaccggtatggacccgcggccatcggatccttaatcgacgaccaagatttaaaacatccgagatctattcctatgcatccatctagaatcggacggtgcagaatccccaggccgaagcgttattcacgtgcaatcctatccctccatcccaagatagatggcccgcgtcccttcttcccgcgacgcaatccacgatggcggcgcccgagccttcccacggccgcgccatcgccggaggaggtcaatcccaagctccagtgcgccaaacctcgatacgctaggtgcagaatgaaattgagatgaaggcgaaccagaggagcaggtccttacccagaacccggc

SEQ ID NO: 120922 - DNA, 414 bp, Zea Mays
gttaccaggccagtctgaagatgtcaccatttgaggctttatatggaaggaagtgcaggactccactatattgggatcagactggagaaagacagttctttgggctagaacttatacaagaggcagaagagcaggtgcgaatgataagagagaatttgagaattgcacaatcaagacagaagagctatgcatcaacccagagaagattactggagtttaaggtgggtgatcacgtgtatatgaaagtgtcactgatcctgggtatgaggagatttaaagttaaaggaaagttgtcccctcgcttcattggacctttctttatcttaaagcgagtgggagaagttgcatatcaactagaactacttgatcacctggcagatgtacatgatgtgttccatgtatctcagctgaaga

SEQ ID NO: 120923 - DNA, 365 bp, Zea Mays
gcaggtctttgaagggtggtccttgttctctccatggaaaacaaaatataaatttcctagttgtgcattgaactttccttcaaaactttggcctcctctccctcctcttggagctggtgggaaaagttgcttttcgaggattgttgttgtgttcttgattcttgatgctgacttcgttgtccttaactagacttatctttattttggcttgggttatggatgctttggatgtgtcttggatgaaaccttcctccaaagcccctggctatcattgtgcatctttgtgcctcctcccttctttggcaaaaaattattgcctaccctgatgtactcatccattttttgtagcagcttctctaggaaat

SEQ ID NO: 120924 - DNA, 914 bp, Zea Mays
agcaattcgggggctctagtgagtaattggaggcacgagtgggtgtgttgggtgcataattacatagcagagccgagggtgtgctcaatttataggacccctgaacggtggcccatgaatttgagatggcgcggtggcggctggagagaagggggtgcactagcgcaagcaattggtggctttcaccgtggcgagctcactggcgatcaccggacgtgtgtaatacaagctactgcgacgtggtaagaaaccaaggcacgtggcgcacgatcgttgagcggctaacgccggagatgatgattccgaccagtcgcagtccaagtgggtacggcggcacaatggtgagcaagcccgagctaatccgagcgccaagatttttacccttcttcgttatccatctacgctaggcacgaatcaccgcggctggtgcgaatccgggcgcacggctcgtcggcggcgaggttcagtggattggggatatttttagtgcactgtaccattagattctcattgagtcagcctgacagagcaacttgtagggagatttgctcccaatttcatgtagtgactcgacctgctctctgtgtcaaagttgtagccctatgatctagctataacctttctatagcaaccatagccaaacaattattggatcatagtcaaatcccagcgcaaaggttgcccaacttcactgttatacaatattttgtctctgcattatctgacagtcagacttcagacccatttgactcctaatcttgtacaataccaagacttaagcacttaatcaaatttgtactcctaaagtagctctacaagtttgatgtgttgaccctaggcaaattcctcatatttttagaaatacagagctccaaagtcagccctgttcactggttttggacttaggcatatga

SEQ ID NO: 120925 - DNA, 483 bp, Zea Mays
gaacggcgccacctcatggttacatgtgccatgtcacggaagatttttactgcggccgcaattccgagcagtgcccacggcatcggtggcgttcttatccccggcgaggtcactgaacctaggtcgacatcgtgcctgctagcccgaattcaaatagacattacgccctatttcatgtgcttacttgcaaatcggtccgatcgaagttgtgcattaatcaaggttctttcactttgttacaacgatcataccgaaaatccccatggattaagcacgcgatgatgcccaagttggctcaataacactgaaccttggcttcagtcagatgcagtgatcacatttctatccccatcagaccgactgacagcgctacttcaaggcattgttactttggttttcgtacaacaacaacccaaccttactttagcaaagttatgcttctatatactacctccaacttcctcacagtgaccttggacttaa

SEQ ID NO: 120926 - DNA, 467 bp, Zea Mays
gtcggttgtgcattagtagctatacccgtttgtacttgcagatagaattactaaattgttattctttggttgtctgcgaactgttgcgagatgaagaggtttggtaattgatggtttatcgtgcatagcaaaaggctcttgtgagaaactaatctttatctacactactccttaagacattactgacctaaactctaccgtcccttcctaatcctgatttagctggaactcaatatctttagttggaactcaatatctttagctggaactcaagcatcggtaagggggtggtgtttatgctgtcagagtttgtgaacttgagaaagttcagataagtaatgtttgcactgaagaaatgaattgggcaaaagaatccaaaagttcaccttcttgcactaattgtaagtctttctgtgattatgtgcactaactgtaagtctgtctgtatttcttcaggtgactcgttc

SEQ ID NO: 120927 - DNA, 702 bp, Zea Mays
gaagaaatagattattcggtcatgccatctaaacccagccacctggaatttggaaaatctacagtctccgaggctgatatgcctatgatgacgaagctaggctatttcggggaagctgagaagaagttgatttgctttggcggagaagagaccatctcgaaaccagaaaatgatgaagtggtagtttttaagagcttcttcaaagcagggttgaggtttcctctgcatggaatggttgcggatgttttggagaatttcaggatttatcttcattagctgactcctaacgctatcgttaggctcagtgtcttcatctgggctcttcgaagccaaggagtagagccacttgctgaagccttctgtcgggtgcatgaacttcattatcaaacgaaggctagagaagatggactgcacgagaacttcgactgctacaattttgcctaccgcaaagacatgaatacaccgatggttagctaccgcgctaagtggccaaccagttggaaaactgagtggttttatgttaagattgatgagaaaaaggagaagcttgttcagagtccgctggacctaaccttcgggcaaactaggccccagtgcaacatgatgccggggacatcatgcccaaatgctgtgggcgaatttagagttgtgtcccaacatattggaactagagatttagttcacgaatacttagccaacatg

SEQ ID NO: 120928 - DNA, 535 bp, Zea Mays
gccaagtacatatccgagtgtgacacctgccagagaatcaaggccagtcacttaaaggcagcaggccctttgcaaccccttcccataccatcttggaaatgggaggacatttgcatggattttatcgtaggattgcccaatacctccaggcaccatgattccgtttgggttatcgtggacaggttgaccaagaccgctcatttcttgccagtgcacaccacccacaagacgaagaagtacgcagaaatttatgttgatcaaatagtgcgattgcatggtattccaaagaccattatatctgacagaggagcactgtttgtggcacgcttttgggagaagctgcaagaatcacttggaacccaagtaatccgaagctcagcataccatccccaaacagatggccagaccgaaagggtgaatcagattctggaagacatgttgcgagcatgtgcactacactacgggaaggattgggacaagtgtctgtctttggcagagttttcttacaataacagctatcagtccagtctgaaga

SEQ ID NO: 120929 - DNA, 903 bp, Zea Mays
tcatttcatacatgaatgcatcgaagaagggaggaaccgtgtggttccgatcagcacaactggacagttgccagacatcttgacgaaagccctgccgcgggaacatttctgtgacctccgcacaagaatcggcctcgtcaatctcaagcttctgcgcaaggtttaggaggagagttgttacttaaagctttgcactgcagctcttcatcatgttgttgtatttgtttcaaaactttcagtctatgttcctgtcagcctgcattttcagtcgcgtcacctggttgccaatccggttgttcaagtgagccatgcatgtagtagtggtagattagtgagccagctacttagcgtggacatggggatggacgcgtcaattgcgtgcttagcggctggattattgtaacaatcaattacctcttcagtaagtataaaaggaagaacagagaagttgcaggtttttgtgcagaaccaaaaatagttctccactctctgtccaatcgtgatcgtgtgcgttttgcaagtagttccaagcgcgatctcatttgccggaccatgacggcgtacagcgccgggtcttcgggctaacaatgtctgggcaccatggctaattgttagctagctaatttttagctcaaattacttctagtgcatccaaaacaggagagctaataggtgggctaatttcttagccaattatttaattagttgtttgccaaccatagtttatttgggctagtttttagccccaactaataactagccatgtgtaccaaaacaggtcctaagtataaatagtcgtctagcccatagtgacaatgaacagtcaggacttcggtagagatagattaaatttgatcctgatgaactctcccctcttctatggaagagattcgattatgcatt

SEQ ID NO: 120930 - DNA, 536 bp, Zea Mays
ttggagaagttgggtactgctgcctacaagctccagcttcctgcatcggcagccattcatccaatatttcatgtttcacaactcaagcctcatgttcctaacaacattccagtattcagggatttacctaccgtagcattctctaaagatgttgtttctatgccagaagccattttagaccggcgtttggtcaggaaagggtctgcagctgtaagtctgtaactcaagtgttgatcaaatggatgggtcttctagccgacatggcttcttgggaggattctatcgtgctcaaatctcattttgcacaagcaaccatctagggaccagctggttcttcagggggaggtattatcatggatggggatggtggcgactaagcacaggagtttaattctagaaacacaattttgaaatgtagttggtgggtcgtattggaccgtattgtgattgtggtggccgactggtatataagttaggcttgtaatagttctgagacacgaaaaggaagaaaacaatactgcttgtacctttcttct

SEQ ID NO: 120931 - DNA, 483 bp, Zea Mays
gtatcacccaggttggaggatgtgctctaggtggtcacaacggtcgtatgtaatggcatggtcagactagtcaaggaaggtcgttggcgctggctgagcctagagtacctcacgtcattctgacttccggtgcctcctcaacatgtattagtcaggcccaccgaagatcagcaaacactcggtttcataaggcaaagtggccctcgctttctcttgctcgccatcccagtggggctcgacccctttatcgagtggtgctcctttgctcaggaacttcctaagtaacatgcagtctttgtaggcatgtcggaccgtgtagtggtggttcggacatagggcctcgtgtagtttctcgaaatggtcgatggcgtccttggtcgatgatctctttcccttttggcccggcgcagctaccaacatttcgtcatgcctccgtttatccttctttctcttatcgggccatcctccggagcctccgacggg

SEQ ID NO: 120932 - DNA, 559 bp, Zea Mays
ctatgacctagaggtacattatcacccagggaaggccaatgtggtagcagatgccttgagtcagaaattgcaatgcaactgtattatgatggattctcgcatcaacaccctatgtgatgagttgataaaaatgaagattgaagtaattccttctggtgctttgtctcacttttccgttgagccaaccttgcaagaccagatcatcatggcccaactcagtgacaggggagtgcaaatcattaaagagaacctccgtcagaagatagagaaatacaaatgtttctgccaagatggaaagggtacattgtggttcgaaagcagattggtggttcctaaaaataaagatcttaagaagaaaatcttggatgaggcccatctctccaaattctccatgcatccagggagcaccaaaatgtaccatgatctgaagcccttgtattggtggaccagaatgaagagggagatagcccaatatgtatcagaatgtgacacctgtcagaggataaaggcaagctacatgaaatcagctggagctttgcaacccctatctataccttcg

SEQ ID NO: 120933 - DNA, 516 bp, Zea Mays
gaaatatgaaccataattttttggaccaataatgtagaatggtgttctcgaaatagtcaactagcacatgattaatgatttgtccttcaagtaatatgagcacatgattagtgatcccttcatcttagtgctccactagtccttcgacctccgctcctccaagatccttgcgatgctcacccaacataagaaggtagatgcccattgcctgtgcagaatgatgatccatctgatatcccacatgagtgaggatcatgtcttgaccatggtttcgtatgatgttccatatggttcccattcctgatcaggaacaaattttgacgaaacgtggaaccccatatggttccactttcttggattcttagcaccgaccctcatggagactatgcgccttagcacaacccccaacacacacacacaccaccaccactacactaatcatagaacaaaaagagaatgacatagatgtccaacaagcatgtggcccataaagcctagcacgaagcctgattttta

SEQ ID NO: 120934 - DNA, 705 bp, Zea Mays
aacatgaacacttacttagacagttgctgcatatacgccaggtcactagtgtcactgattatattgagcagttcgcacaacttgtagaccacctcaatgcttatcagtcacaggcagatcctctttactataccaccaaatttattgatgggttgcgtgatgatgttcgtgctactgttttagtgcaacgccctcgcgatctcgatactgcctatgttcttgctcagttgcaggaggaggtgcacgacacgcacaagcctcgcgacaccaagacgtatgccagaggtgtaccgcggccatatgtttcttcgggcgccaccttggacatcaaaaatccatcctcagccaagctggacacatcgacatctaaaccctccacggttgaagatagattgactgcattgtatgcttaccacaaggcaaaagggctctgttacaagtgtgggctgcaatattcccgtggccaccgatgtgctgattcagtccaacttcatctcgttgaggaagtttggcaatcccttcaattatctgatgaagaggacagtcctaattcacccactgctgaagaggccaatatgatttccttgtcacaggctgccacagtgcgtgctgacgcccctaaaaccatcagatttctgggccatattgggggaatggacattctgatactgctggactctgggagttctgtgtccttcatcagtc

SEQ ID NO: 120935 - DNA, 391 bp, Zea Mays
aacaggccggatctggcctgagaaaccttacaggtccattaatcacaaggcgggaagtcaccccgccagattcgtgcaccgcagagtagcagccttggggactgtttctcttctccatcgttacttgtcccgccacttcaaaatccggtgaaggtgcgccatcaatgtgaggagacgcctctggaagcgcttcagcatgaaggggctcctcggtcgtcagcggcattaattgcataacacgcagagtatctccagaattctccctcgaggcgtatggcggcgcgggcgcttcgaagtcgcggcccaaagacggctgcggggcctggcgaaggtgcagcgtcctcacctcggacgttggagacatatcagtgcccagtgttaaatgcagatc

SEQ ID NO: 120936 - DNA, 464 bp, Zea Mays
ggccatctccatcgccaactagttctccagtagtcggatatttttttcgaatgcaaggaaatcacggatgatactctaaacaagtaactgcacccacgtttccagggtatttccataatttccgcaaccgtaccgatattgtaggtgtttaacttcaatacaaaacaacactacaacttcttacgcacaatgcctcaacattttacgccattctgtatatactatatatgcaacatttatagcgtacctttttatgacaatccattcatcatcttattcgatattatctttaactgcctcaattaaacgccatgcaagatccattaattccgcgcccacgtttcagattacacacgtttgcatgcgaaatctaattcctataattctgccaattaccaaatgattcccgcctttccattaatccacccgtcacggcgccgttggttctgcatgtcctctatctc

SEQ ID NO: 120937 - DNA, 568 bp, Zea Mays
gtggtgaccgaattagtctcgcctgagccgaagaaaagaagttgttatcagatggctgtcgatagcagtggagcagatccgattgatattatcaaggttgtgtccgagttcccagatgtgtttccaaaggacttaccaggtatgccaccagagcggaaagttgaatttgccatagagcttcttcctggcaccgcccctatctttaagagagcttacagaatatctggaccagagttggttgaacttaagaagcagattgatgagctgtcagagaaaggttacattcggccaagcacctcgccttgggccgcccctgtcctattcgtggaaaagaaagatggcaccaaaaggatgtgtatcgattatcgagctctgaataaggtcaccattaagaacaagtaccccttgcccagaatagaagacttgttcgaccagttgagaggagccagtgtgttctccaagatagatctgaggtcaggttatcatcagctcaggatccgaccttcagacattccgaagacgacattcattaccaagtatgggttgtatgagttcacagtgatgtctt

SEQ ID NO: 120938 - DNA, 300 bp, Zea Mays
ccaggtgctgctgcttgcctgctcttctactttgatatgcctgcccgttttccctttttttctacgcgtgtcagctccagaagaacatcgcattcggcgttaccattagattacaataatgacggggccagcgaggtttgtcgtgatgcaaggttgcaagcacggcagattcgccttgctctacagaagcacagagaggaccagcacggctgccgattgagcgcaggagatcgatcacgatggtaacgagcgatctgctagatttaaatatggtaggcactaacattttatttagtcaag

SEQ ID NO: 120939 - DNA, 656 bp, Zea Mays
gaagcctataggtttttcgagatgaccaggggcttcggagggagacttcatcccaggaatgtctgatcaattcacaactctaataccagtgatgaaagggccagcaatgtttagcatagccaccactgttcttagtcttcaagcatgcaataaacttctttcagaccaccggcaccgaggggcagaggaggaagaagtttcagtggaggaaggtttggcaaccaacccagaaagttgtactatcttttttgtggcgaggataagggccacacaacaagaacatgccaggttataatttagaagcagaaggaaattgctgaagctgaggtgcgatagagtcagccgaagcaagtcctccacactgcttcgtgttattccccatacatcctagaatacgtaggcaatcaacaacctacgacttctgttgcttcggcaagccattccccaacttcctggccccagttgccaccaccaccaccactgatccacaatcaatagccagaagggcgtaatcatattcagcaacagcgcgactttcgggaggagtccgaagcttgcacagtcaacaacactatgcctaagtcgaagcatatttactaaaaggaatacagtgccccagccaaggaatatgatgatttgatgtatcttaactcttt

SEQ ID NO: 120940 - DNA, 671 bp, Zea Mays
attctttgtgcgcggcatcctgaactaaagtctggaaaggtcacacgagaggtgacgatccaggcaggacgggagacggcacacggtcacacaaggtcactgaaatgacagaagaggtgagcacgtattagtcacatagtcataagcatttgaaatgtgaataaatacatacacagagagatatggcacgagacaggacgatcaagaagtcaaacgacgtgaaaacggcgtttgacagacaaatagtgacataggatgattggaattcgaattgaggcacgaaacgatatgggattgagccgatacttcacgaatgggtttatataggtgaatatgagtgaagtgtgtgcttggtttgaattttggcgaagaaatagggttttgggcactcggctcggaaacgatcgcgcaaaacgggaattttggtgaaatttaagcccgggatctcggattggcgtgaaatttggcaagtaggttactggaagtgtggtgaaggtgcctgaaaaatttgggttcaattggagcaagtttggctggtttgggcatttcaccgaacacttggtgtgcggggagctagggttttaggaatatggccatttgaggtgggaatgccctcccgaaggagctaaaaacaagcagggatacacactagagatactagaactcatttc

SEQ ID NO: 120941 - DNA, 434 bp, Zea Mays
ctacaattttattatagcgtttgcagaccatggcgtatgcagtccagcagtccaaaactaaacacatcatttccccctctcttttgtttatttctcttaagcttgcttggattctactgtttcatggcgtatccagaccatagacaagcatcagtgtactgcatacatgcctttcactcctttagtcctttagtatatatataatatttatgtatcatgcctgggaactttatgtgacaaatcgatttatgtatttgtatgtttgaaacttttttgtggatgtgaataaacaaccatgtgtttaagacttatgtattatgtggttaaaacctatgggtggacatgtataaccaattgtgtgtggataagaataccaggtcatccccctataaccatttcctcgttcggtcagaatgcagcatagcggcggcgac

SEQ ID NO: 120942 - DNA, 654 bp, Zea Mays
cagtttttgtgtcataactctctgtgtatgtatttattcacatttcatatacttatgactatgtgactaatacgtgctcacctcttctgtcatttcagtgatttcgcctgctcgcttgcacatctcctgtcctacctggatcttttctctctcgagaagttcccaggtagctatcactctatttgatgacttatctactgctctctactctcgcttatcttttcactctatcttgcagcagtcagttcaggatggtgagggcaaagaacgtcacaccatcaggggaggagatgacgaggaccctccttgccccttcatacaggtcaagggcaagaccgtctatcttgagcagcaagagggcaggaagaaaagtcgcctggaccgagccgcacgtgcagcggcatcagcaacaacagatcaggctgagaagggagaccagctctagatttcttctgatcagattgcctatcgagtttgtcgcctcgcgtctcggcctcgctccactgctcccccactccttccgccatagtctccactccacctcccacttcgctagctcttgtcgctcacgagccatccaccacacccgctatgtccaccacctccaccactccaacttctactgctccagctcccgtttccggtcgcctattc

SEQ ID NO: 120943 - DNA, 481 bp, Zea Mays
agtggatgaagccgaaggggttgtcgtggacgactatggtgtaaacactgtgcagctccacaatgtagactacaaagatgactagtgggttctagcaagccgtgtcgtacaagtatcctaccatgcgatgcccaaggaaaatagcaagaagtcgatgaggcatgcagttgtgtcaggaaagcagagaattgcgggagctgatgggatctagagtcctgaagaatataacacctacgaagaggttgggatctttatcgatcatccacaaaagatcaaggccgtcgaggcacgcttcaacaagaccaagatgatgccctgggcacgaaacgacggtcagaacaagtccgtgggagcgcccaaaccaaaatgatgtgtacggcgcacatatatgcaataatgtagtgcatagaaccatatgtatatccatggttaattaactacttgatttttaaatatatatatacacacacacacactccgc

SEQ ID NO: 120944 - DNA, 1504 bp, Zea Mays
gctccggaggaatgtctggaagctctactggaaacacgtcggcaaaatcacacaccacacagatgtcccgcacccgcaaggcagcctcaccctccaccaccatggagaaaaaaatttccgacttccttgaccggcgatccggaagcaattgcgccaacaaggataacgtgaactttggggaacttcccaagaataccacctccctacccgacgttgcctgcaataacactgtcttccaaaaataggatataattgcgcaatactgagataaccaatccatacccaagataacatcgaatgcccctaaggaaatcacaacaagattggccgaaaagacctcatcagcaagaatgacggaacacccctgacaaactaaacagctactaatggagccattagcagaactaaccaaaattgggtgacccaacctctgcaccgaaagaccagcccacgacacaaaattctccgaaacaaacgaatagatagcgccagaatcaaaaagagcatgggccacaaacaaatcaactaaaaccgtacttgtcaccacgtctccttgctctctgccatccgcagcgggtagcacataagctccggaaatacccgcagaagaggaagctcccggagtgaaattaacagaagaaccccactgagccgtcgggtgaggcaaacgcggagctccaaactgagacaacataggagtagtcggtgcaggagtaggcgtagccaaatactgaggaaaaccctgcatcggcacgaactgagaagtcccaggcacataaaactgctgcggaggaagtggaattgaaaattgctgctcagcacttgacatcatgttgacagtgccctgagaagaggaggaagtcactggctcccatctgagcttcccattaggattcctcctacacaccacatccttgtggtcttgactgcagatagaacacctgccactccactggcactctgcacggcgatgcgcatcaccacaacagaaacacaccagccccaacccgggcttaggaacagcccgaaacctctgagtacttcctcccgaagtacccgagtcagaagatttgccacggtagggatggtggcgctgatgctgagacttgcccctcttgtgggctggacctccagtgttgcccctcctcgcgtcctggccacaaggctgatcaacacccgaagacttctgcgactccatggtatactggtgttgcatctccacacccagtgcctgctccactgtagtatggaagtccaccaatggaaaggctcccagggcatgcctgatagaaggttccaggccctgacggaactagcttgccttctccatctcattataagccatatgagggacaaagcggaccatcttgttgaagcccacttcatactctgtgacagacttcttctcttgcttgtaggattgcaaatcaatcttcatttcctccaggaaggtgaccgggtagaacctcctttcaaactacctgatgaagacatcccaagacag

SEQ ID NO: 120945 - DNA, 650 bp, Zea Mays
gaccatttgtctaaacgaccggcccggtgaggactacatgattgactcttcggtaatggtctttcttctatcgttttgtgtcgaagtctacgttcgatccaccggtaatcatatgaatgacccctcgaaaaggttgatcggtgaagtcttcttgtttgggtgttggtggtggtggtggtggattttggtgatgtggtggtgttggcggtaggggttggatttcttagtgttgctggtacatatggttttgctagtggggatggtaatgttcattgtggaattggtgctagtgatattgttgggggtggtaggtgtgtgcgacaactctttggttgtcagctggttgatttctggtcatccaatctttggtggccttggttttagggcaatacctacgaggtgtgctgagtcttcaccgtagaaaagacagtaaaaccttcgctgttgcagaactctgcctttgcctctacctctagtgttgctaccgtggccctgttttgtggggtactcgtggcgacgagcagtgtctctagtctactactgattggcgatggtgttcacttggtctggttgcggtttggccggtctgagtctgactacgtaggcctaacccatgtcctgctggactgtggagtgtccttgggtttccg

SEQ ID NO: 120946 - DNA, 784 bp, Zea Mays
gccgcaccattgccggtaagaaactgtcctgcctcccgctcgttaccccttgttacacaacaccgagaatcataggtagatgctcgccctagctacgtgaatcgctcgcgggaaccatagcgtctctgcaccgccacccccggtcagaccctgcctcatcgattggcttcacctcacacatcatttagcacctaaaagcttgagaaaccgagcactagagcatgggacgcatggttcgccggtgaagctccgtcgtagtttgtggccggcgccgtcggggccagctgggaaagctttggttagcgtcgagcgttggatgagctatgggtgtctgtgattagatctaggtggcacttcgctcgtggtaggatcgtgtccgtcggtgggcagatcaacgcttacggaagtttatgactttgttttcctcgtagcaataggatgatgatcggacgacggagttcggataccggttcgtcatggcttagatctaatttgcagcgtccatttgcgatcgtgcggccgatattacaatatatccttcgcccatggctttttgctaaagagaccccagggaaagacataataaacccaccgtcctatgcactgttccctgtgtcttgggagttttactcagcccctaagtgttctaggaaatgaggcgcagtccagattattaggaaatcaggaaaaagaattagaatatgagtttttaatatgaaaataattgctagaattggtataattcatagaaaatctatttttagtccaaattaatccgttccat

SEQ ID NO: 120947 - DNA, 780 bp, Zea Mays
cttttctgtcgactctgagcttcaagtaacctcttgcggatcagggaaactttctcttcggtttctttaacaaagtcgggtccctctagtgtcctttcccctacattggaccacattaggggggtctggcactttcttccgtacaatgcttcgaacggtgacattttgatgctggcctgatggctgttgttttatgagaattcggcatacggcaaactggactcccaattcttgtcgaacgtcaacacacaggctcttagtaaatcttcgaggaccttgttgaccctctccgtttgaccatctgactgagggtgataagcggtgctgaaatctaacttggtgcccatagcttgctgaaggctcttccaaaattttgaggtgaactgcgtccctctatctgacactatcttccgaggaataccatggagcctgactatctctttaagatatatccgggcaagggtggctcctccaaaagtgttttttactggaatgaagtgggccaccttggtgagacggtcgattattacccagatagagtcattccctttttgcatccggggcagtccggttacaaaatccatgcctatttcctcccacttctattcaggcactgggaggggttgtagtaggcctgcaggtttctggtgttcggcctttgttcgctggcaggtgtcacaccgggccacatactgtgctatcccctttttcatccctctccaccagtatctggctttgaggtctaggtacatcttggtggttcctgggtggatggagtaa

SEQ ID NO: 120948 - DNA, 832 bp, Zea Mays
aatagctgcaaatctggagttcatttcgttgaactacccatccatatgattttgaagatcttaagggcatccatccatatgtcattgcaggtcctagaaccgcccattcatgtgagtctgaagcccctactgcatattatgaaattaagaatcaaaatacccaggggttggctaccaatttactactactactattgaggtggtggaggaggaggatgcatctactgagctacatctggctgatgggcatcctactcatcatcatcacatgcaacctacccctagtctaggaaagaagttagagacctagattaggaaaggagtcataggtctatgagtgaaagcagtgtcattcttgaaaggtctaaagaaagtatgagccacttcacatctcccctcaaacctggtcttccccttgatcaatgccatgatgtatggggcataggccaaaatctggttcttgtccatcttcagatcgttgagctgcctgagcataaaggtcacgacatccacggtggatgatgttacaaaatttgtctctaatcttgctcttatccccactctagggaggatagtaaccctagctatattgttaatgtcagctgggtgatgcctaagttccggggtctcaccaaatcgcatagcaatccctaaccttgcatgcccataatactgctcatactcttcatacatgtcttctccatagagatcacaactagcagaaatgaaaacatagttcaattgtttgtcataggaaaataaggaaaagtagaataataccttcggcaccctatcatctagacaatggtcttggcttcaatgtcaatctctg

SEQ ID NO: 120949 - DNA, 557 bp, Zea Mays
catcacatgaacacatatataagaatataaaaaacttacaccactataatcacatgcgcatgataagctaataatcagttcataatagctccacaacatgttcattacagctgattaataggtctaaaatagattcgaaacagtctgaggtagttgctattacaatacacacacaaatatgtatatataatggtgctaaacattcagctatgagcagcaccatccatctccttaagccttattgatcagcttagaagacgtgcaaaagaatgaggcatcaccaccgccataaacatcacctggccactgagcaaaataacaggcaaccacctaaggaattcacaccaaaacagccagccaacaacaccacccttccatccacaaaagagtacctggttgagcctaaaacaagtgcaaaacatatcagctaagtacaagttgaaacaataaaactaatgatatgtgaatcacctaatcacttcacagtagtgttgaatcactcaaaaacttgaatacccatgactgaaatgttgtttcagctgaagcggataagaaac

SEQ ID NO: 120950 - DNA, 475 bp, Zea Mays
gtttgacagccaagacttcagggatttctgcctctccatcagcaccaagcttgtcttcgcctcggtataccacccgcaatccaacggcgtcgtcgagtgcgctaacggcaagattttcaccgccatcaagaaaagacttctcgatgacaagaagggtaaatgggccgaccaactacctgaagtggtctgggccctaaacacgacagaatgtcgggcaaccggattcacacctttcatctattatatggatcggaggccatgacgccgtaggagataaagcatgggtcgccccgaacaagcacatcagcggtccccgacgtcgacgaaccaacgtctaaagacctcatcgacggagaccgcatcctcgccctacaggccctcaacaaataccaggcccaaaccaaggcctggcgcgataacgcggtcgtcccaagagagttcaacaaaggagacctcgtactcatccgaaccaccc

SEQ ID NO: 120951 - DNA, 714 bp, Zea Mays
taaagattatgatctgtccattcattatcacccggggaaggcaaatgtggtggttgatgccactagcaggtccggggttccaaaggtggccttgcctttgatcgcagatctggaccgtatggggattgctttgtgctatgtcggcaccgctagtgaggagactcggatgctcatttaatcatcccttctggagagagtgcgcgtggctcagcagcaggatcttttattgcaggaagctcgaaagagggtgagcgatggtaaaccccgtgagttcaccattgatgagaatgatttggtttgtttcaggggccgtctttgtgtgcctcagaaatcagaggtgaagatggatatcttgagagaagctcataaaacgccttacaccgttcaccctggcgaaaccaaaatgtatcgagatttgaagcaaaacttctggtggaagagtatgaaggttgacgtttctaagtatgtggccgcctgtgaggtatgtcagcgcgtgaaggccgagcataagaggcctacaagtttattgaagccattgtaaattccagagtggaaatgggagcatatcaccatggattttgtggtgggcttacctcgttctcctcgaggcagggatgctatatgggtggtagtggatcgcatgactaagtctgcgcactttattcccatgaagaccacaaattcaacttcagagttggttcccttgtatatgaa

SEQ ID NO: 120952 - DNA, 1044 bp, Zea Mays
aggaagaccccgctcggacaccctcgggggctgggtcatagtttgcgctacccacgtgagtcggatcatctccggcagtaccctcgggggctaggcagtagcttgcacttcccacccgagccgagtcaccctcggcaacaccctcgggggctgggtaagcgtcaacaccatccttgagggccaggttctctgcagtagccgcctctaaggctgaaagcccctcagttacttccatgggaccgagatgatccaagtcagtctcctgaccctcaagaccgcgctctaaggtcgatgaggcgcgggatgacctcaacccagcatcgagcacatcagcacaaacctctatcacaccataatccgctggctctgataaaaggtcctctggaaccatatcctctagagtctgatcaaagtttgccagagataactcctgtagaccaacgagagctgacagagccggagaaggaaccccactactttccccactgacaatatactgccgactgttcttccgagtcagagggacctcatcttcttcctccctgtcgttttcatcagaaacataggcaacacacccattgggatcagcatcggatggagcacccccattgggatcggcagcagatggagcacccccattggggtcaacgtcagtaaattcaggcacaggcacttcttcagcagcaggaaccaaagtaccaacgtcccgatccaaactaaatactcgccggaggcgtctctttttctttttctgctcatcagcagaaggatcaagttgattggctcggcaagggcgtctcgggcgagcactggcaggcttctgaatatccaaggttgtaccagcttctgggagaggcgccaccaccaatgtcccggcaggagcagcgtcaggagagtcctcagccagcaaatcaagcatagcacttatttctgcgtcactaggatccaaaggcacctcaaagtggacttgccgttcatcatcaggaatttccccgagcgaggcaaccaaagtgttaacttcttcggcagagggtcacactctaa

SEQ ID NO: 120953 - DNA, 600 bp, Zea Mays
atcatgccacacagtggtaggtgttggcaagggttgtagcaaacccgcggggtgtgatttctctgtcttggcctgctggcaagttgtgcactgttggatgtagtccactacatcttgtttaagccctttccagtagaagaattttttgattctgtcgtatgttgccaaagtacctgagtggcctccaatagcactatcgtggaaggagagcagtctggttcgaagggctgaattgtgtcctatccagacttggttgtggcgcttgatcaatccttgctgcaaggaatacccttggtcatcaggactacagattgccaatttgagtaacagtgcctgtgctgctgggtcagtggcataggagttgattacttcctgaatccaactcggtatgatctcagtgacagtagtggcgagagaagagtgccccctgcgagaaagggcatccgctgccctattttccttgcctttcttgtactgaattttgtagttgaggcccatgagtttggtcatggctttgcgttggaggtccgactgaagctcttgttgctcaaggaaactgagagctttgtggtctgttcgaatagtgaatggtgttctttg

SEQ ID NO: 120954 - DNA, 967 bp, Zea Mays
gaaaaaggaaaaagatgaatagtatcggactgtagtcggcccaagtcggcccgagaacggggaaaacgtgcatccgcgcgcgcccgcgttgctaggtttgcatagaagaccttagtcattcgaaaaactggttaagagccctgcgccctatttttatgtgtcactgacaccttgcactaaggtcctctggtttctatttcttctccaaaacgaaccctggcaacgacgtgctcgttcgccggccatctcttcaccggaatccatcctaatcgacgaagaccaccggaactacgcatcggatcaccatccccgagccttggtgagtctagcccatgccttaattgaactaatccggccctcgattcacctacccacgatgacggcgatcaccgaggtcaaaccgaggcgttcccgacgagtaagagcagtctagctcatttagttgagctgacaagcatcacaagcatgtgagggtgctaaaacacgaataaggagggtgagtgcggacctgagagcggctagccccgacagggtgattcacggcggcgcagatgatcaatttgggggaaacccaaattcttcggctatggtggctaatcggatatgagagttagtgtcctgggttcgtaataacttggcgaagtagagtggggcatcaatttatagaagctttaggcggtggctccgaatttgggaggagagtggagcttatctccctggtgaggcaatcacgaggctcactatggagcgcatgcgttcaccttgcgaccgtcactatctcgaggatgccacgatcacggcaatgtggtgaatcaggtgactacgtgtcccttgttgcgctcacggcgagcaccggcgacaatattttaccgaccgcgcgggaagtgggtacggcggtgactcagccctagccaagaccttcttccccgagatctttttaaccctcatggttatctactctttatcg

SEQ ID NO: 120955 - DNA, 617 bp, Zea Mays
cagttgcaaaagggtccggtggcctttcgggctgcctagatactttgaggcctcgacccctagtgctctagaaactctaagggtaaaatatttaagtccccaaggcaccttaatccatagggcactgactagagatcaagtgctcggggcaccatgccctagggcaccatgggactaagtcctcgaggcatcctatgtcccgaggcacttataagtataagtcttcagggtctttcatgtctcgagacacttattagtataagtccgcgcctcgtgtcctagatcacttataagcgtaagtcttcggggctccttatgtttaggggcactataatcccaagtctcaggtgcccttagtgtcctaggttaatatggtaatgggtgctcaaggcaatccatctcctgagcaccaacaaaacttagtcgtatgaggcccttcgctagccctagggtccataaagagtctccaacctcatactccgagagtggtcgggacttgggctctctagagtttggatccccctaaggagctaagcacttaggatagttaagttgaatcctatcgcaaagacaagtatgtgtctagtcccaccaaagacggtatggtcctaggagat

SEQ ID NO: 120956 - DNA, 466 bp, Zea Mays
tgcagccccataagctttgccatggctttacgttgcaactccgagtgaagctcctgactacccaagaagatgagagccttgtgatcagtctggatttcaaactcgcgccgttgcagataatgacgccaaacgatccacagccataatcagggcaatgaactccttctcatagatcgacagcttctgattggtaattcccaacgccttactcaagaaagctataggctgcccctgctgcatcaacaccgctcctaccccatcatcacaggcgtcagtttcaacagcaaatggtatgttaaaatcaggtaatgccaataccggagtggaaaccatggcctgcttcagacgctgaaaagccatttcagcttctggtgtccacttgaaagcccctttctgcagtaacttcgttagtggccgagcaattatcccgtacccttgcacaaagcgtctgtagtaccctgtcaac

SEQ ID NO: 120957 - DNA, 449 bp, Zea Mays
gttatgtatgtgaaaaagtattgtaatatgtgtaccgcagttcactctaatgtaaagaaaacagggattggttttgtaaaccaagacaaatttgtactaagtaacgtaaccatggacacaaaagttttggaaccaggactcttattgttaggattactagcaacaataagagtctaagtaacaacagtgtatgtaaacataatttttgacataaatggttcagaaaaggtaagattgcacaaataaaatctaactacatctcaatattggcagtaaaacaaccagcatacaatacatagaggctttgaaactatgaaaaacaacatttagcagtttgttagtaaaataattactttgaaatagagtataggtataaaaaagtggatgtgttcagctggagtctagtacatgcactacgggagagacaaactttgtctagcgctaaatat

SEQ ID NO: 120958 - DNA, 409 bp, Zea Mays
tccggctgctaagctttttctcgaatttggcctccactgttttccaatcaccaattgtcaacctacggtggtgcataggaatcccaagatatctgaagggcagacctccacaactacaaccaaacaaccttgtgtacctcccttcaccctctttttccttcccataacagaatacctcactcttgtgaaagtttattttaagaccagataactgctcaaaggcacataatatgagcttcatattcattgccttttctagatcgtggtccataaacaaaattgtatcatcggcgtattgcagaatggaaagccccccatctaccaaatgcggcaccaagcccttgatctggccattttcctttgctctattaatcaaggtagcaagcatgtccactaccaagttaaagag

SEQ ID NO: 120959 - DNA, 327 bp, Zea Mays
cccgcaggggcaacaggaatagcttgcctcagaatggccaactcctgctgcatggcctgcatcgtggctaacattgccgccggactcatagaatccccactaggaacttgtgggctgccacgagccctacgaggcggcataactgcagccacaggggtaagtgtataagtaaataaaattggcatagcacctcatcaaataatgtcaaaccagcactgacaatatcataatatatcaatagtaaagcagaaaacccatcctatatgtgcagtgtgtcaatttatcattatttcacttgctaggatctacagcctattcctttgatac

SEQ ID NO: 120960 - DNA, 546 bp, Zea Mays
tatccaggatttcttgcattggtgttaaaccactcagttagcatggaactttttgatgcgggggactctaggagagacgctaaggtagtacccggttcataccaaacatagttattgttgggcaaatggacaacaagacgttcaaccgcaggtattctaaaatgaatgtcgaactcaaaaatacgccagatggcttcacatatggataggtatcttgcatcgatatactcttgaatttcattgcgaggagctacctgaggttcaggcgacgcattggctgtctttgccgtcacctcaaaatatattttcgctcgatcacttcctttagtaacgtacttaaacaagtatttaatcatgtttgatttgttacaccactcaacgttgatatgtgcacagtattttttgagcaaggccatgttataaggaacaatgttcctgttatctagcttaaccccatttttaacaatgtatctatcatcatcgcgtctcttatatatcacgaatccaaaatcgtcaacgatagtctcagcctggaaggacttaggg

SEQ ID NO: 120961 - DNA, 952 bp, Zea Mays
tagtaatcgctgccctcgtgtcccacggccacctccccacgatggacgacctagagtttgtggagatggccggtggagatggggacctcatctacgacacgctctgcacggactccgactcagatttaggtccctctgggagcgatgatgagtagcgcccccggtgacaaggggaacgaggaccatccggacaccatagcttcatcgacagtcctagcaggacaggatgccacgcatggtaggaccggaggaaacaccggatgtaatgattatggcaaaagagctcgtagtagatgaccggtcggagagcttccgcaccttctttgtaaaaccaccgaacggttataaataaagtgtgttgtcaagaatgctcttagccacaaacatggtaagtgggggagagagcctcagtcgcaccttggtctcccctctcccaattgtttcctctttcctttcccttctgctcgtttcccattggtaacttttacgacaggaagcataccaggaaccggacgagccaggacgaatgaacaacggactcgacggagtaacgagcgaaagctccgatcacgaaactagctttatcgttttcccttttctataacaacgcgctttgagtctttgtaacttttcgttgaagagtcttaagcaaaacgtaacatcgcaccgctcgtgcttccctgggcaccctcgataggacggggaccttaagataatgtaaccaaagacccctgtggctgaaccttggggaaagcatcgagcgggatgacttcgtccccatctacgctagaaatagacctatggggcgagcaatgtgaacggaaggacctgacgaaaagctagtcgagactgcgaatacctacgcctcgaaggctacgataatggtcactagtggaactcgagggacctgaaaatttgtgaacacccatcctggtggaacggtcgctaacaa

SEQ ID NO: 120962 - DNA, 563 bp, Zea Mays
atcctgatacagggggtccggcaacctgcgggtccggttctagagaatgggcgcttgtttcctggagtagtccggggctgtgtagccgcttagcctggtctcgtaccctaagcttgcacctccaccactctgcaacaggtgctatttggagctgtgatcttgtaggtccgggcataaggcttggtttcctaggctaaatcctgcaggtcctgttgcatgaatcaaaggatggcagataccagacgatgggtcctatgggtgtgctactaacacttcctagctgaagctgtgtacaggtccaggtcctagtcgagactacctcctaggggtcgggtcaccaactctttcttaggtatactggtatccagcctcgacacgtcgagcctacatcccaggggggccaagtaccagggaggagttggtaacgccacacacagcaaggacaaatagcatacagataagtgctaatactgcttgataaatagtactcaaaagtatcttacaaaaccaaaaaatattacaaagccgcttcccagcgggacccttgccttctctctgcagat

SEQ ID NO: 120963 - DNA, 504 bp, Zea Mays
ttcagatccgatttctactggccaactacaaagagtgatgttgccgagttagtccagaagtgtgaggcatgtcaattcctatcaaagcaacaacacttacccgcgcaacagctgcagaccattcatgtaacatggtcgttcgcatgctgggggctggacatgattggacctttcaagaaagctcagggaggctatactcatatactagttgccattgataaattcacaaaatggatagagtacaagccaattgcctctttgacctcaaccaaagcagtggagtttatacaagacataatattcaggtttgggataccaaacagtagcatcactgacctaggatccaacttcaccagcgccgaattcttcaatttctgtgagcaaaggagcatccagattaagtatgcatcagtggcacacccaagagccaatggccaggtagaaagagccaaggaatgatactggaagcactcagaaagaaggtattcaacaagagtgaaaagc

SEQ ID NO: 120964 - DNA, 397 bp, Zea Mays
gatgaatggctcgaagccattgaggtgactagtgaggagttgctgggggcttatatgaaggctaaagatgaagccatgaatactgtctttggtgcccacagaaagagaaggctgaacagattaattgatgttattggatttatctatcctaactactgtattctagctcggaaacaagggacaaaaaggaaaattacaacgacgacctcctctattgtgccaaagccaaagaggacgaaagttgtaactcatcggccgaagtcatatttttagaaagggctgctatactgcctgctgccgaagctaccgaagagaccctctcagctttggaggtaatacctttttttcttgttttgaattgaagaatagttaatctattactgcttttggagttttt

SEQ ID NO: 120965 - DNA, 332 bp, Zea Mays
atagattgtgaccagagtagcctggacgataaaccacaagaagtgtacgccgctgagatggtttggccaaagcaggccaaatcttcagtttattcctctctacattcggttcaaaagaaatagcaagaagaagataaatttacatttaatgtcagcaaatgtgacaaaatatttgacgagttacttaaaagcaacaacattaaaataaatcatactattccatctgctgacgagcttaaacgtcatgtttattgcaagtggcataattcattctttcatgccactatatttcaacgatggtctaatcggccattaacgagagccgatttaag

SEQ ID NO: 120966 - DNA, 441 bp, Zea Mays
tgaagatgtactttagactcttgtgatcagtgaagatgtggcatttgttcccgatcagataatgcctccatatttttagggcgtgcactatggctgccaattccagatcgtgggtagggtagttctgctcgtgcggcttgagtaagcgggatgcataagcaatgactttctcattttgcattaagacacaccctaagccttgcttggaagcatcacagaagatgacaaaatcctggtgtatatctagcagagtcagaactggtgcggttgtaagcttgtccttgatgatttggaaactttcctcacatttgggggtccacacaaacttattgtcctttttgagaagttcggtcatgggttttgctatgctggagaatcccttgataaagcggcggtaataccctgccatccccagaaagcttcgtacttcactgacgttgg

SEQ ID NO: 120967 - DNA, 393 bp, Zea Mays
ggggatttgtgctttaactcttgcggtgtcattgcctcggatgcgtacatcagacggaaaggtgtgaacccggttgctcgacactctgttgtattcagcgcccatatgacttcgggtaattggtctgcccatttgcccttttttgtcgtcgagggggttgttcttgatagcactgaagatcttgtcgttagcgtgttcgacgacaccgttggattgtgggtggtagacagaggtgaacactgccttggtgccgatggagctgcagaattctcggaagtcctggttgtcaaactgcttgtcgttgttgactgtcagctcggatgggactccgaactggcagacaatgttctgccagaagaatttctgcgtggtctttgctgttattgtggagac

SEQ ID NO: 120968 - DNA, 290 bp, Zea Mays
agaataatgttcctcttctcgaagctgatgaagtggtgatttttagaagcttcatgaagctagacttcggttcccctagataggatgttggtcgaagttctaaagacttttgaaatttatcttcaccagcttacccccgaagctattatcaaagtaggggtttttatatgggccatgggaagccaagagttagatctagatgctaagtgtttctgcaatatccacgagttatcatatcaaacaaaagcgactaggaaagagcaataccacaacaattttggttgctatag

SEQ ID NO: 120969 - DNA, 401 bp, Zea Mays
gaaggagaccgctggttctagcgaaggtggtctggtttacctaagatacacctatcgctacaaaaatcagttttatgagtcgaatgatgactagcttgaggctgtcgaagctaccagcgacgagctgttgggagcttacacgaaggcagaggatgaagccatgaccactgccttcgacgctcacggaaaaaggaggttgaatagagtttttgatgtgattggatttctttatcctgattactgttttcctgtccgaaaacaagggtcgaaaagaaaaatggcaactttatcttcttccactgcgcctaagccgaagagagctaaggttttgacacataggttgaagccacattctttagaaaggacagctgcaatacttgatacaaagaggatagagatta

SEQ ID NO: 120970 - DNA, 336 bp, Zea Mays
aagaaatgtcttatgaggtgggggccttaggagataatcaagggggggtttaggagttttagggtttctaaccttgggttaaaaattgggatgttacaaacctaccccacttaaaagaatatcgccctcgagattcagactgggcttgagaaaaggtaagggtattccctcctcaaagagtcctcactctcccagtcagcttcctcttctccttctctgctccactgaactttacagagtctcacttctgagtttcaggtctttcggatggctgagtcaagaatcttcactggcttttctcagtactgcagatccttctgaatctgaattgcctct

SEQ ID NO: 120971 - DNA, 575 bp, Zea Mays
caaatattcacgtggactcttttgaaatattgtcacgcgaaggggtatcatcgcatgagaaccacacgatccgcaacccacggatcagattaacttgtctccctcactgattcgacatggagagatggccgttagatctgacatccacggaccaaggatcgcccacaccgtgagttagcttcagccttccgatccccgatcgacgacctagaattgatgagcctaaagagttatcttcttctaatctggaccgcccattgacggatcaacgaccccaagcacgcataggtacattctaatccccattgcatgccacggctccgacggcccctacatatcttcctcctaccctccagcccgaggcggtgccaccaacatcacaccgacgagctcgctggcgcaaggttatacggtgccccggtactccactccattcaaaatccataaaagaacaagaagtagacgagggagtcgatggagaagtattcaccagctactggagctccaaagtatgccgaccacggagattggcggcatggcgacacggtggaacaccgatgaggaattcccagcaa

SEQ ID NO: 120972 - DNA, 499 bp, Zea Mays
gccaatagccccgacagccggggacggatgaaggggcgttcccttgggttgacagggaggtcaacttcatctttggaggccatgggtcccaggagaataagaggaaacaaaagctaacggatcgacaagtgctgctagccgcgaccagtcccccatgacaccctataggtggtcggagacaccgatcacctttagtcgagctgatcagtggcttagcttggatcaccacggaaactaccctctgcttgttaacccggtgatcaaagatagccaggtcaagaaggtgttgatggatagggaagtagcatcaacgtcaccttcccttggactctcgaggcactcgagatctctgtcgccaagttataggaatcagacactcctttctttggcatcatgctgaccaaggggaataccctcctagccacatctctttgcccatgacttttggcactctggacaactaccgcaccgagtccctatgctttgaagtggctcgttt

SEQ ID NO: 120973 - DNA, 457 bp, Zea Mays
aaagaatcatgtctaaaacaaaggaggttttcaaaaggaggaaaaatgttgaaaccctaattaagctaattaagtagaaaagaagaaaagggatgatagaccatgaaaaacttgaaaccatggcataggccaattataagaattgaaatacactaaataagctacaataaagattatgaaaggttggccaaaaatagttgttaaaaactccaaacaagccattcaagtggaggttcaatggggaaatctgaaattcagatttctgaatttttagcctttgaaccaaaaccgagcacgttcaccttgatccttaactctaatccttatgcccccattgacaaaaatgtgcctaactaacccctctacctcataccagaagatggcatcgggacgcgtgctctggacacgtcaaacccaggatcttctctctgtgctcggcattgagacaaacccgact

SEQ ID NO: 120974 - DNA, 732 bp, Zea Mays
tgttgtgtcttagtttttgcggggggtttttgcgtgtatattacatggctccgcctcattaaaaacctcacccccgggaggaaaagagtgcgggccggaatgatactgtttggtgaattacaagggcgtgttagccctgaggattcaaacaaaaaatttacggagattatcgatattccaggaatgctccaggtcctcgccggatggcgttgttagcctatacgcgctgggggacgccttcgtcttgacgatgaaaggaccctcccactttggctccagcttgccccgtgcctctgtccgagttgtccggacgagtacgaggtccccttcgttgaattctcttgggacgactgtgtggtcgcgccatgcctttgtttgagcttggtatttgttgagggcctgcaaggcgaagacacgatcttcgtcgatgaggtccttggaggttggttcgtctacgtcgaggacggctcaagcgcttgtccgtggtgacccatgttttatttcctgcggggtcatggcctccgatccatatagcaggcggaaaggagtgaatccagtcgcccgacactcggtcgtgttcagcgcccagactgcttcaggtagcagatcagcccatttacccttcttgtcgtcgagaagcattttcttgatggtcgtgaaaattttgccgttggcgcgctccacgacgccgttagattgtgggtgatatactgaggcgaaggcaagcttggt

SEQ ID NO: 120975 - DNA, 1273 bp, Zea Mays
cgccggctgagcaaggagaaagatgctaccaactaggcaaagacagaggcccagactacctgggcggaggcccaagccatccagaagcgagctgctgagctagagctggaggtgaagaacatgcacgcctaccatgagagggtggatgttgccacacgggttggcttggacaggacacatacactttttgttggtgcttatcatgatttgggcgtggagatggctccctttgacaagtcatggggaagtggggacccgcttcctcggctgggtgcaagaggagttggagtccctcctttctatcatgatgggtttcatatcttatgcctcccttgttacctgcgaaggggcagcaaatgccttgtcccgtgagggctgtaggcacttcgaagcctttgaccatagtaatgaggacttcgactagggagtgttctaggttgaagacgacgtgatgaaacgttcggccggggcgctatacgatcggatgtggggtccccacggtcgcggagtcgtctaagagagggttggttggatgtggggtccctaatgattgttctttttgttgggggaggatgctttttatctaatttctaatgctttgatgtgttgtattcataggcgatgagggacgaagagatcgaagacctcgctcgcttggagagcttagtgactacacaggatgctggcgcggaggcagatgtggaagagcagtcgtcgcacgtgagggtcggtggtactgacctcagagcagcggggacctcgcagccatctacctctaggtaggtgtaaaagtaggagtaggcttgatgtgacaatacatttgatatttgttaatacttaaagtcggctgttgtgtaggttccggtgattgggcctacgcaagcaaattttggcttcttagacaaggggaaagaaattgttggggctgttgaatgtgttacaccattgtctttccggagtccaatggggcttagcgatgagggctatgaatttgattcatggtcgtcgagtagcgaaggacggttgggccccttcgcaaagatggatgaagagtcctcggaagaggatttggatttctttattgtgttagatgtgtctgcgacagaatctaggatggggaagtcttcatctagggctccgatgactgtggcgaaaagtaagagaagagtcgatgtaccgaaacaaaggctagggaatgccggcgcgccaccaagaggaggcgaaggctctcgaaggtgtcatcatatgggactgtgagggcctcacccgcggg

SEQ ID NO: 120976 - DNA, 690 bp, Zea Mays
gccatttcgactaagatccagtgagaatctgcctagggttgctataacaaagttgtatagttattaaagaggaataactttgttataggtgtttgggtttggtaccacatggaattgggagaaaatggagctccaaagtgctctgtcagccgctctgaatgagctctcccatggtacagtgctgaaccagattagactgccagcgtggagttctcaccgccgatgactccctccgccgcgattcgtgtcaccggcatcgggattcgtgcttggtggatggatagcgtcgtgggtaaaagatcttcgtcgtcggtgagctgaacgccactccggctagccgcaatccctctccccttgctcaccgcccttgaataaaggttctcaccgccatcaagccttcgccgttgtccgccgcgtgtctcagactgtctaccgcatcaccgtgactcacccttgctctccatcgatcaccggaatagtcgccatgacggttgacacgagttcacttgcaccagtaacctttccctctctggtcgccaccgcgccatcttcaattcaagcgccaccgcccctgggatctataaattgagcccgcagcgagctttgcaacatcatcacccacccagccaccgcgtctcgctaagcaatcattctcctgagctcgcgaattttgaattcgccccaaatcag

SEQ ID NO: 120977 - DNA, 1140 bp, Zea Mays
gattaccaccttttggcgtttcgccgacgactgagaaaaccctgacctagaacctttccatgcctgcttcatattttgatatactcgtgccttttcttccacaactatagccacacctattgcccgattgaaagtaagatcatagcaagtggccatcttcttctgtaattttgagttgaggcccctcataaagcaatatcttttcttgatatccgtgttcacatgctctatggcatactgagaaaggtggttaaatttcccaatatactgcatcacattatctgccccttgcctaagtctcaaaaactcctcaagcttcatttgcaaaaccccatcaggaacatgatgagcacggaaagcttctttaacttcaccccaagtaacctagtgatctggaagttgtatggcgacaaaattggaccaccaagtgctggcagctccgcgaagttgttgtgcaccaaatagagacttttgtacctcagtgtactgaataaggccaaacttctgctcaatcacctgtagccactcaattgcgtcaagaggctcttctcctttagcaaacactggtggccgagtctccataaattccatgtatgttgcattcctttgctgattctggggaatacgaggcccaccctaattgttttgatgatgagcaatctcatgcaaaaccctagcattatcagtagtggcattcactagggcaacaatggcatctgccagtgtaggtggaactggtggtggtggagggttgatatcagcttctgcatcaccacgagatgtgccagccccatccgacccacgagtacgcataggcatatggagtaaaacaaactcatgaataacatccataaccatgaaatatattacatggggcaggtacatggagttttattcattacaataccaaaattgacatagcttattatcctatgcctacaatagaggtcacgacaccatacacatgtcacattaaccctctatatcactagctatctcagaacattactacctcctggggactcaccacctggtacaaacatagaagctggttctaggtctaggtctgcgtcgggctcacccccatcagctagcaccacaccaccctctgcttctgcggctcctggcacatcattgggg

SEQ ID NO: 120978 - DNA, 365 bp, Zea Mays
aaaatctgtcgaccgttggtttggtgatgtagggctgagatataatcctaagtaccggttcggcctgatcttcttccggccgtccgatgcggatggtgcgtgtagaaagcgatctgagaaattttaaatctgggcgcttggtcgttgatccaacgactgagatgtcgtagcacttcattaaggaggtcgtttaatcgggtgcgctggagtctgatcctacggctagaattgaagcataccccttcgcggatacattttgctaaagagtccctgggtttcttaggaataaacccgtagtccttccctaggttagctgagtccgggcgagtttgcgagagggcccctgcactcttcagaaattggcg

SEQ ID NO: 120979 - DNA, 452 bp, Zea Mays
attccagttaaggtggcagatgggactattatccagtgttcttcgctgttgtctcaagccacttggagtgtccagcaatgctctttcactcaggatttgaaggtgctacccttgtcgtcttacgacgtgattctaggcatggattggttggagcagtttagtccaatggaagtggattggaagtttaagtggttgtgataccttatcaaggaacagcagttttgttgcaaggcacatctcagaacgtccctggtgacttattcatccatgttgctgtgttgcaagaatctgtacaggcttcccttcatcctgctgttgctgaactgctggatcagttttcagtgattttctcggtacctacttcattacctcctgttcgaaagtgtgaccattctatacctcttgttcctggggcaagacctgtcagtatcaggccatataggtacccacct

SEQ ID NO: 120980 - DNA, 464 bp, Zea Mays
caggagacggctcacgggcaggcaaggtcactgaatgacagaagaggtgagcacgtattagtcacatagtcataagtatatgaaatgtgaataaatacatacacagagaattatggcacagaaaacgagagatatggtgatcgagaggtcaaacgacgcgaaaacggcgtttgaacgagaaatagtgccatggaggtttgaaattcgaattgaggcatgaaatgacgtggaattgaggcaatacttcacgaataggtttatatgggtaaatatgagtgaagtgggcgcttggtttgatttgaggcgaagaaaatggaatttgggcactcggctcgaaattgatcgctcgaaacggggaattgtgtgaaattgaagcctagtatatcggattggcgtgaaatttggcgaatatgttactggaggtattgtgaaggtgcctgaaaaatttgggttcaattggagca

SEQ ID NO: 120981 - DNA, 433 bp, Zea Mays
gaaggcacaaagaagtttcaaggtacgagcaggaacttctagacgcaagagcgcgaggctagcagccatcgcttggccgcatggagacattcagagccgcgcgcgccaagtgctcatgaagcggcttggaattctaccagagtcagactctgatcagatgcagaaccgggcgactgacgaggagctcaagcgctacttcaacctgttcaatgtcctgctcacccacctagccaccaaggctttggtagccctctgcggattggaagaccctaatgaggctggcctacagtcatcttgagttgtggcatgatgtcgtgggaaactgctttgccatgttaggtttgtttattgtcatctgctttgtctgtggaaggtgtgcgcccttctgcttgttccaggggatgtgatctgccacttgtatcactacattagt

SEQ ID NO: 120982 - DNA, 433 bp, Zea Mays
caattgtttacgagcttcagctttctgtcgtgaccatcaccgaaatggctgaagactagaaaagcactgatcccacactcgctagcttctacgaagccatggaaaggaccaatgtagagaagatcaccaacaaaatattagctgggctatctggtgattcaagcgatagtgaaagcttcgatattgacagtgagaatgaaaatgccgaagatcagttgtggagaccaagccacgttgtttttcggaaatccacaatcggacaaggtcaaattgaagcaatgaaaagcaaatactttcatgatgtgtctatagtgagggctggacgagaagacattgttcccctgccagaaggtgatgaagtggtagtctttaggagcttcatgaaagctgggcttcgctttccgctccacaagatgctggttgaagttttgaa

SEQ ID NO: 120983 - DNA, 604 bp, Zea Mays
aactggtgtctgctagtggatggaaatcaaagttgaggtgccaaaaagaaaatctgcagtctgctgtgctcggtggtgatttttatccaggtgtagctgacacatgcacgcaggcacgtcgcacgcactagatagtgagatcgtgtcgtcagatcatcggatcctgggccatccatcatatatatttttcagagagagagaaattaaaaccacagcatcgatattagacatgttttcattaagttcatacaataagtgttactctcttacacacatatatattctcttttgctccaaattataggatattttaccttttatagatttgtaattttcttatggccacggatatattttatgcctaggtatatagttgtcaacgtcctgagaaatgcatctctaagatacattttagatttgtaatggtgttagcccaaaatttttgaggatatgtgtcctggctcagtgtgctttgttgtgttgcaccgacatggcttcaccagcacacccagtttgatagggcggtgacctctcacatcggcttacaacaacactaaccacgcatcgcatcacgagcaccacaaaagatcttgctcgatttatc

SEQ ID NO: 120984 - DNA, 437 bp, Zea Mays
cggggtatgagaagatttaaagtcaagggaaagttgtcccctcgctttattggacccttcttaatcttaaagcgagtggggagaggttgcgtaccaattggacttaccagatcatcttgcagatgttcatgatgtctttcatgtgtctcagctaaagaaatgtctcagggtacctaaagaacaattaccaatggaggaccttagtgttcaagaggatctaacttatgctgagtaccccatcaagattttggatactgtgactcgagtcacgaggaataaggttataaagatgtgcaaagttcaatggagtcaccacggagaagatgaagcaacttgggaaagagaagaagagcttcacatagattttccccaccttttccctagatcttcctaaatctcgaggacgagattattttaaggggggtaggatttgtaat

SEQ ID NO: 120985 - DNA, 568 bp, Zea Mays
ggaaaactgccgcttcagccaccaccactgtgccaaagggaaagaaaatgaaggttctgacgcaccgaccttgatatattgaaacgaccgtagtgcctgaatttggtgaggggacctcctccactgccgaagcagaacaagccactcccgctgctcagagcgctaaagggtttattgtagtgccgaaggtgcctacaatcgggccagccgaagccaaagatgatgcggccaaagagccaaaattggaaaaaacagtgaacatgccagaaattctgagcccaccagcagaggtagaattgccgaaagtgcaaaaggctcctgccgcaactcctaagagaatgaggatggccagcgtgctagatgctgtcatggagaccacaaaatccttgacccctgctcgtactacgaatgttgccgaagctatcaaagtctaggccgaagtcgaagctgggccttcagtgcccattgagacgaaggctagcgcgcctgaggataaagctgagcaacaaattccagataccggcatggcaacagggctagatatgatagaaaaagctaagtctcctgc

SEQ ID NO: 120986 - DNA, 576 bp, Zea Mays
gaaagtgcagaactcctctgtgtattgggatcaaactagtgaaaggcagttctttgggccataaattatacaagaggcagaagaacaagtccggttgataagggagaacttgagaactgcgtagtcaaggcagaaaagctatatcgatacccaaagaaggtagttagagtttaaggaaggtgatcacgtgtatctaaaggtgtcagcgatctagggtatgaggaggtttaaagttaaagggaagttgtcccctcgctttattggacccttcaagatcctaaagcgagtgggggaagttgcctttcaactggaactacccgaccatctagcggatgtacatgatgtcttccatgtatcccagttgaagaagtgtctcagggtacccgaagagcaactgcctaaggaggaattgagtgttcaagattatatgacttatactgagtaccctatcaagatcattgacactttgactcatgtcacgaggaataaggtgatcaaaatgtgcaaagattagaatttccccaccttttccctagctcattgtaatctcgaggtcgagattatttttaagggggg

SEQ ID NO: 120987 - DNA, 752 bp, Zea Mays
ataaagacactaagcctaacaatggctttaggggtcagctgatgaagatatatttcgaaatttttcaagactttccctatcatctcattcagaggaagtcggagtcctgctctaaaaaaactcttgaaaaccactacttcatcatccttcagcgctggggtggtctcttctccggcaaatcggacaagtttcctttcagcttccccaaagtagcccaacttcatcatcatgggcatgtcagctttagacacagtagatttatcaaaatctagatggctagggtttgatgggatcaaaatactaaaatcttcttcatcctcttcaatatcttcttcttcaacaacattctgatcagcttcggcaacagcagtaccttcgtcagtttttccctccatcacaactatacctgattgtttcataactttggaaattggcactgtctcggtggcctcggtctcttctccttcacgagtcacccttgcagtcgaatgtactctggccatctgatggattttttgtggttcttacgaagtttgacatttcttttttgcagttttgacgaagaatactcttttgacgaagttaactctaaatgatgaagtgttcacttgagagtgcagtgaaaaagcttcggctatggttaaattttttaacagcacaatagtgcaacgacaatgaatgttgtggtaactctgcaccaacctgtctgtttatatagtgctgtaggtgggaatgtgaaccgccaaatcgcc

SEQ ID NO: 120988 - DNA, 520 bp, Zea Mays
tggatttgcacagatctgaagtgcaagggttggagaagaagcttgatgaagtaactgaaaatttcaatgtagaacaaacaaaacgtgagatatctgatatggaatgattaagggtgtagaaaaatgtttaggagcttcgtcaggctaaagaggaatgatataaggttgctacggaatgtgctaacaatttatggcgcattctccttggagcagaactttatccgtggtgatcctgacggggttatccagtggattaacggcgaagccaaagcttttgaagagatcctcagtgatagaggagacttttgtgcctttgccggtgcctatgaagttgtgtcggtccttgagaaggttggctatgaacatgccaaggctgtggttcagccagtattctcgctctcagccaacgatattagaaacccttcggccgaagccgctgcactaagtggaaatttttattttgaagtctggctgaagggtggccgagagatagctgttgaagctatcagaaaaaacaaga

SEQ ID NO: 120989 - DNA, 419 bp, Zea Mays
gagattcgctctaagtgcgcgtaacatgcacatagcgtggtcgtgcgtgtggatcaggttggtgccttgtgagatccctctttagagccagcaggggagtagtgagccaggagaagagatgggatgtcgccgccatggtcctgctcctccactgtcattcagtgtgcgcggcatggtcgaaggtgatcacaagatccagagcaagaagccaacggagtctccatggggaatctcgacctcatcgtcagggaattgctcgtcgtcgtgcaacgtccgccatggagccaatgcaccgtgttggaaggaccactgtcaccccaatccgaggtgagaacccctccgtgacgttcgctgttcgctcctcgtcgtgtaataacaaacatggtggggaatcatgcactagtgcggggaagcctgct

SEQ ID NO: 120990 - DNA, 385 bp, Zea Mays
gagagatcgagtaccttaaggggtaaggattgaggcaaataaatccaaaaccagtttaccacgagcatgaaatgacagaacgggtagaagctctctggctgacaccaagcacgcatcacacaaacgcacacgtggccattgatctgttcaacaggaaaagagccaaccggccggtcggactaaaaataaggccggccggcagtgcctgtcccttgcagccatcgccaattcgccgcgttatgctttatttacgtgttcttggtatacggatggaatggatatatatattctttccatgtgtaattttatcatcaggatctctctgttcacacttcacacatgcatgctgagtgactgaaatactaccaccgaaaccatagcatgc

SEQ ID NO: 120991 - DNA, 1793 bp, Zea Mays
tatgccacaacattagcaactcctcggtattcagcctcagcacttgacctggatacggtagattgccgtttggaagaccatgctacaggattgtccccaagaaacacacagtagccggaagtagaccttctggtatctggacaccctgcccaatccgcatcagtgtatgcaatgatacctgtactggtggaacgacgaatttcgagtccatactcaagtgtccccttgaggtaacgaagaatgtgtttgagtagtgctagatgggaatctcttggtgcgtgcatgaagaggcaagcttgttgtacggcatgggaaatgttcggacgagtgtgtgttaagtactgcaaagccccggctatgctgcggtatatagtaggattttcgagaggaattccagaatatgcggagagtttggcctttgtgtcgatgggggttgaaacaggattgcaatgagacatccctgcacgttgaaggatatcttgagcataggaagtctagtccagaaaaagaccggaccgagttcgtgtgacatgaatgccaaggaatgtggtgagggttccaagatcagtcatgtgaaactctcggcagagtgcagatatgatggttgtaagggtggcatctgaattagcagtaagtataatgtcatcaacatatagtaataggtatgcaacgcgagtaccttgatgtagaatgaaaagggatgagtctgccttggatgccacgaagcccatagtgcgcaggtaaccttgaaatcggaggaaccaggttcttggtgcttatttgagaccgtacaaagacttatttagcttgcatacatgttctagattcgaaggatcaacaaaccctgatggctagcaacaatagactgtctcagataattccccatgtaagaaggcattcttaacgtgtagaaaggtctagacacctgtggcccttatgctcggcagaatatccaaggaatagacatggggtggaacgatgagataatttgtgtggcatagtggatgacgtgttgggatagcacaaacatccgaaaattcgcaaatgtgaatagtcaggaggttcaccgaaaaggaagaaataagggatggaaagaccaagtgatcagcatggacgtcgatttatgagatacgtagccgtgctgagcgcctccacccagaactcaggagggatagatgcttggaacaacagtgtacgaagaacatcgttgattgtgcgcaaggatctttcggccttgccattttgagctaatgtttatggacaggaaaaacgtaaagtaacaccacgagaggcaagaatggcacgcaaagaattattatcaaattctttgccattgtcacattgaagtgactggaccgggaggaagaatagcgtgtgaacatatgtaagaaaattggagagagtgcttgtagtatcagacttatggcgtaaagggaacgtccacacataatgggaatagtcatccaatatcacaagatagtatttgaagccagtaaaactatttatttgggatgtccataaatcacagtgaataagctgaaaaggaaatgaagttttggtggtggatcgtgcaaatggtaagcgcacatggcgacccaattgacacgcctcacagacatgagttttattgcttctaagaggaactgaaaactgagataaaatcttggatagactatgatctccaggatgtcccagccgacgatgccataaggtgtgggatgaagaagcggtgaatgccgtcggagaagacgtcctgtcggagtggaaggggtagaggtctccagaactagtgg

SEQ ID NO: 120992 - DNA, 491 bp, Zea Mays
gaacgtcaaggtggacaggccgaccagaattcggaagcccaatagtaaagttagtgggccggattggacccagtagttatctcgtttttctttttgtggctgatctggattgagtggagtatttgaggtggggtttggagtaggtaaaaggtgacttggagaagaaggctggccggctgcgtccggagaagaggcggctcgccgtcgtgtaagaactccagatacttttcataccctaaagatcttcgtgagaggagacgggtgccgggagcggtgctcaactcatcaacaacccagcagtgatcttacagaccaccaccgtgtactcagagagagacagaccgcctgcgcgccgccgttgatcggtgaccacaccaacgccggggttggatgagagagcagtgaggatcgccggccgccacagaaacccccgttcactcactacgggaatacaagccccagacgaccgacaatttctcgtcggagcttca

SEQ ID NO: 120993 - DNA, 320 bp, Zea Mays
gtggttcttcactccccagcattaccttctgttcaggtctcccgatctggatctagcaaaatactgaaagtctatcacagaaggattcggcccaagcttcagcttcaggaggttaatacctgtgacatagctaacaactttatcgagatggtcaccaaacccctatcaactattttgtcgacaccagcatctcctaagccgaagaccagaaagaatatttcaccaaattttgttccaagaagatccaggcgtgtggccaagttacaccctttagtggtaattttgctgcttacactatctgcatgaagtttgggttgaag

SEQ ID NO: 120994 - DNA, 274 bp, Zea Mays
atagaaggtctaaccctggggtttgggtgaccaaagggatttctaaagatgcagtggggatgccatgcttttccacaaaactagtggcgatgaaagaatgatatgctctagaatcaaaaagcatagtagcgggggtaaattcgactaggaactcactaagtactactccacgggcttgctgagcttcttgggtgtcgacgtggttcactcgagccctgccgtggaactgggtcttgcttaactggctgttggtggagggtgccttggaggcggg

SEQ ID NO: 120995 - DNA, 322 bp, Zea Mays
gagtccctcggcgaaattggtggtttgcgcaagcactcgtgtgtgtgatgcggtgaggaagcagcgctcgggctcaatttatagaggggtgcccggaggtggacgggattcaaaagatctcccagtgcactggggagctcacccgcgtgggcagggccacggcgagcgtccggtgaactccttttagccggactacgccacctcatggttacatgtgccacgttgtagaagatttttaccgtggccgcaagtccgagcagtgcctcagtcgcggtggtgttcttatccccggcgaggttcactgaaccacggtgaacagtgc

SEQ ID NO: 120996 - DNA, 629 bp, Zea Mays
gtttgccgagggttcaatggaggaagatctagatcgcctgatagatgactttgatgccatcacgaatgttgtgcttggggacgtgtccgtggaagagaattcatagcctctcgtagctttgcttacgatcccttcggtctcgacacttcgttatcatggcatttttgcattgttgacgtgtgtggattttgggtcccctagatgcaggcttgtgccaggttgctttaagagggcgcttttcgtgcggctttcacccatgcaccacactcgtgcgaggcgagccctcgagtctccactcgatgcagagatctgtctggtgggtcgtctcatctttttagtttactctcccccgtatatccccttcatagagatgaggggcatgagtcataccatgctttcctcgatgggctagcgatggcgctcgatgagctacaaacgggtaattcaagtgaggccctagttcgttccataggatccaagcatggggtccgctagggaccatcctcatactcacaaccaccaactcatatagttaccaatttcgttcaactggaaccaatggctcgctgactctcttcacattaaattgtgagtcagaccatcctcgaactcgaacacgagctagtgac

SEQ ID NO: 120997 - DNA, 389 bp, Zea Mays
tgtccccgcagcgggtagcggtagtcggggtagacgaagctaatagcatcaaaaactctattcaatctcttctttccctgacttctgaaggctgcggataatgcattatcttctgccttggaatatgatccaagcagttcatcacttgtaacttcaatacacttcagccaatcatcgtttggttcatcaaatttgtctccaaacctgaaagtgtatttaagctggaccaaatctccttcgctaggatcattgatgatttccttcggcattttccagccttccgcaagcggccacactctaaatgctatatgctcttgaattaaatctcttgtaccaatgaaaaagcagacagtgccgaaagccttctggcacgcttccgcagcatcatc

SEQ ID NO: 120998 - DNA, 274 bp, Zea Mays
aggaaggatattttgatgatcgtgagcagtatgccccgcctccccaccaagggaaccgggtcaatcctcttcatatcctccaccccatgatccatcgggcagctatccccccagctcagcctggggaagaaaactttgcggctaacttggcgactcaattctttgatccgactcctcctcagtggtgatttgtggttgatggttctctccatttttggtgctagtttccaaaaagggggagaaggtttgtcagcttggcagcttggcttggtag

SEQ ID NO: 120999 - DNA, 2489 bp, Zea Mays
gtcggatacatgaaattggctatttggccacggaaacgtgtgctatagctcgtgggaggccaaaacacctttaaggtgctctggggaccaaaacgcgggtggtggaacgcgtacataaaaatggtcgcacgaccatgaaaacgtgtgttgtagtttacgggaggccataaatagccttaccagtctgagtggccaaatcatgggtggcggacgggaggcatgaaatcgctgtccgacaacgaaaacatgtgtcacgggaggccaaaaatagccttacgggcctccggagactaaaacgtgcactatggtttggacactaaaattctactatgtgtgcaaacttacgggcctccgggtactaaaacgtgtactatggtttggacactaaaattctactatgtctgcaagcttactatggtttggagactcaaacttcattttactatggtttggagactaaaaccttttagtgttggtgtttaaggttagggtttagggataggatttggggtctaggttaccataaaaacgtgtgctatagctcacttgtgtcaaaaaatgtcgtaacggcctccccggtctaaaacataggtggcaggtcggatacatgaaattggctctttggccaaggaaacatgtgctacagctcgtgggaggccaagaacaactttaaggtgctctgggaccaaaacgcgggtggtgcaacacgtacttaaaaatggtcgctcgaccatgaaaacgtgtgctatagcttacgtgaggccataaacaaccttagcaatcttagtggccaaatcatgggtggcggacgggaggcatgaaatcgttgtttgacgatgaaaacatgtgtcacgggaggccaaaaatagccttactggcctccggggaccaaaatgtgtactatggtttggacactaaaattctactatgtcagcaaagttgatatggttgggagactcaaatttcagtttaccatggtttcgacactaaactcctttagtgtcgatgtttaagtttagggtttagggataggatttagggtctaggtttccataaaatcgtgtgctatagctcacgggtggcaaaaaaatgccataacgacctccccggtctaaaccgaaggtggcaagtcagatacataaaattggctgtttggccacggtaatgtgtgttacaactcgcgggaggccaagaaccgctttaaggtgctccggggacaaaaacacgtgtggcggaacgcgaacataaaaatggtcgctgggccatgaaaacgtgtgctatagctcacgggaggccaaaacagccttaccagtctcaatggtcaaatcatgggtggcggatgggaggcacgaaatcgctgttcgacgaaaaaaacatgtgtcatgggaggccctaaaacctaaaccctacagctcgtgggaggccaagaacaactttaaggtgctctggggaccaaaacgcgggtggtggaacacgtacttaaaaatggtcgctcgaccatgaaaacgtgtgatatagcttacgggaggccataaacagtcttagcagtctcagtgcgcaaatcatgggtggcggacgggaggcatgaaatcgttgtttgacgatgaaaacatgtgtcacgggaggccaaaaatagccttaccggcctccggggaccaaaatgtgtactatggtttggacactaaaattctactatgtcagcaaagttgatatggttaggagactcaaatttcattttactatggtttcgacactaaaatcctttagtgtcgatgtttaggtttagggtttagggataggatttagggtcttggtttccataaaatcgtgtgctatagctcacgggtggcaaaaaatgccataacagcctccccggtctaaaacgaaggtggctggtcggatacataaaattggttgtttggccgcagaaatgtgtgatatagctcgcgggaggccaagaaccgctttaaggtgctccggggacaaaaccacgtgtggcggaacgcggacataaaaatggtcgctgggccatgaaaacgtgtgctatagctcacgggaggccaaaacagccttaccagtcttaatggtcaaatcatgggtggcggacgggaggcacgaaatcgctgttcgatgacaaaagcatgtgtcacgggaggccctaaaacctaaaccctaaacccttaaccctacagcttgtgggaagccaagaacaactttaaggtgctctagggaccaaaacgcgggtggtggaacacgtacttaaaaatggtcgctcgaccatgaaaacgtgtgctatagcttacgggaggccataaacagccttagcagtctcaatggccaaatcatggttggcggacgggaggcatgaaatcgttgtttgacgatgaaaacatgtgtcacgggaggccaaaaatagacttaccggcctccggggaccaaaatgtgtactatggtttggacactaaaattccactatgtcagcaaagttg

SEQ ID NO: 121000 - DNA, 563 bp, Zea Mays
ggtggtatcttcggcatcgacaggcttagctacttttgtcgtcgaagctgggggcagtgtatgttcaatagtttgcaacacatttatcatccgtcatttcttctgccccggccttctcttccgcagagggagcggtttcctttgattgcaaaaggctagttagatctaaccttagaggacttagcagtgcaaatggtatggattcagtcattaccttcagaatttccgaaacttcagtagcaaagggcgaaggaggactcatagtcttctctggcacatcttgtgccttcgtatcagcagaagatatccccacgagttttcgcttcttgggagccgaatccatcggatccgaaagagtcttctgtttctttgaagctttttggtcctccttgacaggtcgggtagcttgcctaccaagaatacttacaaccctttttcttttgccccctccggccccttcgtcaagcctctcatagtcagaatactcaaaattatgagcacccataacatggttcaaccttcgttttggccgggagccgaaggcagcagtcatcaactggtct

SEQ ID NO: 121001 - DNA, 561 bp, Zea Mays
ctttggagtcgatttaagcttgatcgagtgagcaaatgaccaaggttcctataattgaattggagctggtatataggagattaactatgtaacagacggataagggagttgccacataaaaatttgagaacaaagcattgcaagttgctctatcaggcgctctgatgaatgctttcgatggtacagttactgaacaagatcaggttcagtgtatctcaccgccggtgaattggtgacgcgatcctcgccggtgcagcgattcgtgcgctctggcgtgcggataatggtcgccggtgaaaagatcttgcgcagggatgaagtcggagcactattacgcccagtcgtcatacccacttgcgctgcgacgtggccaaacggtcctcgtcgtggagatcaccattcaccatgattgcgccatgccgtaatcaattcaccacgtcatcgcaagctgcaaggactcagcagtgaccgtcgtagagagttagccagtgagtgccacgttagcgaccttcgatgactcttcccccttctcaccgcgtgtgcttccctgtccaaattcaa

SEQ ID NO: 121002 - DNA, 276 bp, Zea Mays
tagtgattaattaaggaatgtccaagacttaccattgcagtctgttatgcgagggatgaaggcattccactgtagcacattacttgagtctttacccccgcatgagacgtaagacgtaggcaggtcaaaggtagtgttccttgaaaccatgtacacacataggcaataaggacccttttctagttcatgaattggccagatgtcgatggaatagaggagggcgtcgcagcatgaggcagtagggttttgtggtgccatctcctgacaggagtgcag

SEQ ID NO: 121003 - DNA, 630 bp, Zea Mays
cgggggtggattacctgaaaaacggggatggctactgtttccagcctgtggtccaccgatcttgcgcttccagtcttccatctcccggcgcttcctctcagtcatgatagtgctatctatcagatgttgaaatgtaaggaaggtatggttcatcaactggtagtgaaggggtcaaccaaaccactcaagaacctgtactgcatcttggcatcagtgttgatgtcctcgggtgcgtagtgactagttgcagaaacttgtccttgtactcactaatagacaggggcccttgcttcagtaccaggaattcttccttcctcactatcattaaaccttcaggaacgtggtactggcggaagttgtttctaaactccttccaagtaatggcttcacgatcggcatagtggcgaggtagggctcccaccaggactgtgctactccccgtagcaaacggggaccaaacagaaccttctcgcggtcgttgcactaagtggtttgcagctcccgctccactatatgcaaccagtctttagtgtccaaggggtctgcagaatgggcaaacataggggggtgactcctcatgaactctgcacgcttgtctcttggcatctgcgatatctgcacttacgattg

SEQ ID NO: 121004 - DNA, 435 bp, Zea Mays
gcaggattgaggaaactgcagtctgcactctgcaggacctcatcataaaccagttttcttcaaaatagcctccaagatttgtttcgtaacaacaaatccttggttgcttactgtgggcaaacatgacctggacacctagtacatgataggtataacataactaacgcatatcgtcgtcaccaggcatgtgtcatttggcaacgtgatgccgaagtactagatttcctgctggacgacagacatggtaagcaactaattacggaactagtataagttttgctgaaggacgaccctgtttctttatctgcctggtaacttagagcggttttgaagaagacctgacacgctaccatagctaactatagatgttcaaatggaccggtccgacccaagcctgttgatgcctagcatgatttcaagcaagcctagcccgac

SEQ ID NO: 121005 - DNA, 440 bp, Zea Mays
ctccacttgagttggagtgaatcgttcacttgcagcattgaacgcagcatcgaggcaaatctcccaaactttgcaccctatgctctaaagatatgtcgacatgtgatgttctagtacgagtattttgttccatcgaagaacggtggcttgtcagaaccatgtaccatgtcgcctatgtggatttcgaaccgattagggaatggaaatccttaactggctccgatgccaatttaggaccagtgaggcaaccagagggggatgaatgggagccactgaaaaattctccaacttgagaaaacaacacttttgacttgattccctaacccaatccaacctctacggacagcaaaaacactctacaaaagagtagatcaaccacggatcgattgactactccaaccaagttccgtagaatagaataagctcaatgggacctaaaa

SEQ ID NO: 121006 - DNA, 279 bp, Zea Mays
gcccaggaagctcagtagcacctagagtagtactcggtgagttcttggtagaatttacccctaccgtagtacttattgattttggagcatctcattctttcatagccactagttttgtggaaaagcatggcattccaactgcacagttagaaatccccttaatcacccggaccctagggttagaccttctatgccacctcaagcgctcctaaatcaggattcttttaagtggggtagtgttcttggcagacctagtagtgataccatcgcaatgaatcg

SEQ ID NO: 121007 - DNA, 382 bp, Zea Mays
gagacctaatggactatgaagctatgctatggcataccctaagcacaacaaattaagcaactagtaatttgtaaaaaaaataaaaacaatcttacatatcttttatggcatctacttgtctactcctgactctacccatgactcctcgcactcgataaatcatatggtcacataaggatctctccaacaatccccctatacaactccccttatatgtactatctacaatatattactttatcccactaaaagattcttccctatttacaatttctctccaattatttcccttatttatcacccctataccaattaactcttaaagaaagaaaatagttgcatcccgttatgtatcccatgttcttcttcctctatttgtctt

SEQ ID NO: 121008 - DNA, 459 bp, Zea Mays
ctaaaacttcataaggtattattcaaggtttacagccactcacccctagtcaccttcagcatttgagaagatgattcccggaggtcgggcgaagtcatgacctcctcagacctagcgcacgcctccgccaactcctcaacaaaacacctcgaggcctttggactcccaataccctcatcatactttcacatccattttccttttccgggtcaccgcagttatagccttccccttcgtgtgcccaggtcttcgccttcttccctcggtcatccctggcatcggcatagcccccctctaggaatggaccataccgcaggacattcaactcgaaaactcgtttcaacctgacatacgagcctcgtatatcccaactccttgttagctccgtcttcgttgagtatttaccgacaattttcaccacctccgcttccacctccctgataaaggcggtcgcatccc

SEQ ID NO: 121009 - DNA, 324 bp, Zea Mays
caccaataggggtggactagaactgttttcccagcctttttgcaaccaggattctttaatctcagtcttgttgatttaccaagtattgttataaaaccctcctaatacaatcttgggtattcaactgtgtgccgtggcactgaatttttatgaacacacataatcctttaattggttccaacatccaataaggttcttacttatctactaacagaagagattaaccgcttattgaattctaagcacgaaagtttccacacatcgtgaacagtgatgatacattcatttagctgattatttaccaacagaaatttaagagttttc

SEQ ID NO: 121010 - DNA, 364 bp, Zea Mays
cagagagttgtcgtgtcacaaaggtggcagtgtcacaaggttaagtcccgaggtaaaaccatgtcaagagtgtgtcaaacggtggagagaggtttccaaactttgccacggcgtgttcaagggaatttggcgccactttgatatttggacttgtttgatttgagttttgaaaaatagagaacgcgattgatctttggaaaggggctgaaattcagatttctgaatttctgaatttcccccaagtgcattagtttaggggctgttttggggattttgaaaagttcaaatggcaaaacttcctgactatgctttgttggttaattagtgaactaaaactttgtaatttggtttttaccaaaatttt

SEQ ID NO: 121011 - DNA, 651 bp, Zea Mays
ggaacagtgtcatattcagtggaacgggtgtctactgttgaaccacactcacacgttcaagccctcaagcatccactatggcgttaggccatgaatgatgaatttgcagctctcctcagaaatcggacatggcacttggttcctcctcgttccggtattaatgtgattgattctaaatgggttttcaaactcaagtataaaccggatggctctattgaccgctacaaagctcgactagttgcaaagggctttaagcaatagtacggtcttgattatgatgacacttttagtccggttgtcaagcctactactattcgggttcttctttctttggctgtcacacatgggtggtcacttcgacaaattgatatccagaatgccttcttacatggtgttcttaatgaagacatctatatgaagcaacctcccggttttcaggatacccatcaccctgattatatttgcaaactcgacaaatctctttatggcctcaaacaggcaccacgggcctggttctcacgattgagtactacattgatccagttgggtttcattccttctaaagcagacgtgtccttattcatcttcaaccgggaaggtattcacatgtatattcttgtatacgtggatgatatcattattgtgagctcc

SEQ ID NO: 121012 - DNA, 454 bp, Zea Mays
ggaaggaagtacttcagtggatcaagatgttgatgttccctgatgggtatgcagctaacctaagtagggggtgaacttatctactatgcgagtcttagggatgaagagtcatgacttccacatatggattgaacagattcttcctgcgatggttcgaggctatgtccctgagcatgtctggctagcgctttcaaagttgagctatttcttccatcagctttgtgcctaagagttatctcgggccgtggttgcggacttggaaagattggcacccgtgttactgtgcaagcttgagaagatatttccacccggcttcttcaatccaatgcagcatttgattcttcatctcccctatgaggcacgaatgggggggcccgtgcagggacattggtgctatccaatcgagagatgtgtaaagactattcgaaagaaatgtagaaataaatgcaaaatc

SEQ ID NO: 121013 - DNA, 800 bp, Zea Mays
taatgacaaccattatagctctgttttcaccgcgaaccagcataggtcgtcaaattgcaacctggatgacggacttgcgtgaccagtttcccactcaatcccctccaattctcacgggatcccggatcaccaaatcagctctaatggtgtaagctgggacgaaccagctgccgctaatcactggtggagagaaccgtagcatcgcaattatgcccacatcatctccccccgtgtcataatttaatttcgtggattccgctctaatgacggtcattatagctctattttcaccgtgaaccggcatgggtcgtcaaattgcaacctagatgacggaatggcgtggccagtttccccctcaatcccctctaattctctcgggatctcggatcaccaaatcagctctaacggtgtaagctgggacgaaccagctgctgcaaattactggtggagagaattgtagcatcgcaattatgcccccatcatctccccctgtgtcataatttaatttcgtggattccgctctaatgacggccattatagctctattttcaccgcgaaccagcatgagtcatcaaattgcaacatggatgacggaatggcgtggccagtatccccctcaatcccgtccaattctcctaggatcctggatcaccaaatcagctctgacggtgtaagctgggacgaaccagctgctgctaatcactggtggagggaaccgtaacatcgcaattatgcccccatcatctccccccgtgtcataatttaattccgtggatgccgctctaatgacggctattata

SEQ ID NO: 121014 - DNA, 339 bp, Zea Mays
caaggatccatgtagggtctcttccctgctcgaaatcatttcttttccatgtgagtcccgagcttagatatgcttagggtgaggagaaaagcttatgtcaagtcgggtctgtcactctgcttgggtcgtgacaaaaaccaggccaaagcgtgtcaaacagttttggtttggtgtcaaacttcaccaaggtgtgtctgaggtaattaggcaccactttgtccatatgaccttttagttttgagtttaggagctaggtgaacacggtggatctttgaaatcgggttggagagacttagagaaaggttgatttctcccttggagttctctagttggatgatc

SEQ ID NO: 121015 - DNA, 604 bp, Zea Mays
actaaaatgttcggggtaaaataattcgaatcgcgcgaaatcgtgcgcggggttatgatccaattttccccttcagcacactgttttggcgacgaaaccgcgtatatgttcgtagatatggtttcggctaatattagtgggtgaaaattgcttcgatatacatatatgtcgtgtttgatgattgtggtgaatgcgtcgactaattgtgtatggtagttcacgcacacgaaataacttgtataaaaattagtaagtctacatgttagttctcatttgataaatttaactataatagacggtaaagttcagaataattgaagtctctaaaacatggcaattcttgaattatatagaagctgaaaatgattagttactgttttggactgcacgcagtgatttcctcgtgttgaatgtttgatgaacaaaatcatgttttctgtagagaagtcatatagaaaagttgtagataaccttattatcctacttctgttaaaatttgacagccagaagtctgatcgtttagttgttatgctgttcacaaattcagtaactgaatctgtacaaattctgtacagatttcagaaactgcattgtttacttaatt

SEQ ID NO: 121016 - DNA, 337 bp, Zea Mays
ttctacttgaggactagccttttctgcttggtcgtgttgagcctttgcccatttctttggagaacaagctatgagtgagtttatctttttctttttcctttctgctatatatgttcatgtggtgatgttaacaatgcactcatcaaggttcaagggagagattgcgaacataaggttgagttgtaccttgtggttcgagttgatgatgagtgttgtcaataggtagtgtcgagtatcgtaattaggggtacctagatcatgtccctaaaacaagcttaagcccaagaccatcatcaaacccattcctcgaggtcaagagagcataaaccatgcttcg

SEQ ID NO: 121017 - DNA, 615 bp, Zea Mays
aaattttaataccattttcatgttaaaatagagatgctatgtaataaacaacattattacaaaattataggaactggaatggactcatttggagctagaatggatttcctatgaactaaataaatttctggaattattttaacactaaaaatcattttccaattgaatttctgaatttccccatgcttctgtactgcgcgcacaaaaacagacgagtgcaggggcatatctacaaaaatgcccagactcagtgagcaacaacggtggacggcgggttgatttcttaaaaagccggggtctcctttacaaaatctgctcagcgaaggggtaagttctaatctggaccgttcgattaggtgtggacgcgcgagattagatctagcctttcccgaaccggtacgcgactgcagtcgttggatcccaaatcaacgcacccgatataaaacagcaaggtctaatcctatccgtgcaatccccgatcgacggtcacaactccatgtggcgaaggggtacgctcagttttaatcacacccgttgatcactgatcttacggtgcccaactcccttccccgccgtgacaccagacaccacggtgtccgcggtggcgccctgaac

SEQ ID NO: 121018 - DNA, 643 bp, Zea Mays
cgcggggaggtagctttggacgtgttgcgctctcgcggacctagccagagcctagtcggagataattcaccggcggccaccgtggctcggttatttccgccgccatgtcatccatgcttgctcgtccctcactgtgtcccttctttacgtggtaaccatccacgaatagtgtaatccgtggccatggatcgttagccggaccaccgcgcctttaaatagccccgccacccacggcgagatcttcacatcttcactagtgaactcggttgaagcgcaaattcgcggaatcctctccacctctcccaaaattggtagtgcacggtgaaaccatagtcctttgcgaccgtgtagacccaacctcacctcctaattccgcccggacccgtcgcggcaccgtttcccccttttctatcaccggcgagcgaaaatccttcgcgctcagtggccagctactcccaggtctgctcctgctcgttttaatcatgattcagcacctatatacgctcgtgatactcatcggctccaccctccttgcttggccacactcaatcacccggaacacacgaacttgtgttcggtattccccgccaccgtggactgactaagccaggtccataaccattcattctaagctcgttctaag

SEQ ID NO: 121019 - DNA, 283 bp, Zea Mays
aagtctaccgcgaagacttaccgtgcagaagtcgcctaagggtgcagccggattagcacaacaagtgcgaaaaaccgaagtccactgcaaagaccatccgcgcctaagttgcccgagggcacagccggacaaagtgcaacaaaagcaaaaaacgaccacaccaaactgtccgcgccaagacctaatacatacgcaccagtccagcataacaaatacacctgaccaagcacgtaacgccttcgcgagcatagccaaatgtgcgagggcacacaacttcatcaca

SEQ ID NO: 121020 - DNA, 702 bp, Zea Mays
ttacagatggattaataagttgccacataaaaatttgagatcaaggccctgcaagttgctctgtcaggtgccctgaatggagctcccatggtacggtactgaacaagatcgcaggttcaatgcacctcgccgccggtggcctccgcgcctggattcgcgccggcgatgcgattcgtgcccaagggcgcacggataacgactcatggtaaaaaaatctcgcgcctgggatgaagtcggggcactatggccgccctgtcgccgtacccacttgcgccgcgacgtggccgcgcggccatcacggtgatgatcgctgttaacccgggcacgccacgctactgaccttgttaccatgtcgcagttggtcgctgtagatagcccctctgtcgccggggacttagcccagtgaatgccatgttgagcggcctccggtgactcctcccctttcttaccgctagctcttctctgcccaaattcgtcgtactcgcgatcgctctctataaattgagcgttcaacgtgctctgttaggttgttatgcgccagtgcatcgctcctcgcctgtaatcgtccaccgtagctccttaattcgcaatcttccccaaattggttttccgcgccgacgtgtgtcctcgcgctgtggccagccatttccaggtccgctctcgtctgcgttgtccgtgtttcagcacttccgcatgcttgtg

SEQ ID NO: 121021 - DNA, 412 bp, Zea Mays
aaaactctcgtccctgatttcactttaaccccctcatcctgtagaaccattcgtattgggagtttgcgcggtgtctcgatagttggtggccgccggtaatggccaccaccgtgggagccctgttcacgccgtcgggtctgaccggcaggggtaggagacgagatagtctgcggtggatgcatctaaaccgttgaacgggtaattaacgatgggatggggcacgggcatagctgttggaggaatggatctgagccgtagattggatcggatccaatggctggtgcagttaaagtgggtgagtgctttgtagccgtaggatcttgatccgatggcctgatgtgcgtaccggttcgatgccgtcccgatgtgatctgggccctccatctctaatcgggtggcctgggctcaaccg

SEQ ID NO: 121022 - DNA, 580 bp, Zea Mays
gggagctcctgcgcgctgggggagaaatgctcctgctctcgctgctgaattgcaagggaagcaaggatccgaccagggagcaaaggagagataaaaagggattagcggtacacgccattggttgcaaagggcggcattaccaactggccggctgcagttactggcgagcaggtgcggcatgcagccattggccgacgtagccggtggccgggtgttggctgctagccagagcaagacatagcgtacgggagaaaataagacagctactggtgaaatatttaaggagaaaaaggctgattgctcacgagctaagtaactttattttattttttctgagacaatagctcccgcctgagttgtctattaggacggcgacaatttattgattggagaggagtggtcatccgttagccgatttgtgcagcgctcactcgttggttgagaccgacgcaaggaacggagcgaacttgcatacggatgaacgagaggaaataaaatgaaccgagacattttatttgggtgtcgcttggaaattaaattctcgtgcacaagtagaataaaatgaatcgagatcgatcgg

SEQ ID NO: 121023 - DNA, 567 bp, Zea Mays
ggccgattatactattatcagagatgatgaacatgtggtttctcagtttgattttggtcctaaagacatgatcttcaccaaacccaaggaatcagtcaatcatttgaagttgttgtttgtgcgcgaccacattgatgggacactaatttctaggatgctaattcatggaggtgcgactgtaaatttaatgccttactcattgtacataaactgaggtaagaaagatagtgagctgatcaggaccaacatgatgcttagtggcattgggagcaacagtctgatcgaggccaagggtgtcacgtccgttgaactaaccatcgggacaaagaccctcgctactgccttctttgtcgccgaagtagaagcaaattatagtatcgtcttaggtagagattgaattcacgctaatcaatgtgtaccttcttctttacttcaaatgttacttcaatgggtaggtgatgaaatagaaaccgtgcatgtagacacatcgacttgcattgctatagccgacgcccctgtgcttttgacttatgaaactgcaaaatgtttaacatgagttgatttttc

SEQ ID NO: 121024 - DNA, 443 bp, Zea Mays
tccgcaattgattgagcaactcttagcaagaggaactactcttccgtacttcgatttcatttatactagttctaacgctaaccctggtgaagtttaatgttcgagtttataaattttaggttttacctattcacccctttaagcggtttcaatttctttgtgggggcaataaatatttcttgtggtcagctttggctataatcttgtcggaccatacacttatgacctatgcacacctcttatggtatagaaaatacacttcactcatttacatcatctatctatacccctataaaactcatcacttcaaacaaagctacaaccacccatcaaatgtacccaagttaaatcacgccatcaaaagcaacgctccagatcacttcgtttatctcctagcttttaatcatatcgaacggctagtgtttcgtagatcatccctcgtg

SEQ ID NO: 121025 - DNA, 516 bp, Zea Mays
tctcacgagcagcctgccaaagaaacttatcctgactagccaaagcagtgttcagctcttctatctcagcggtgagatcatcggcggaaggtagtacttcagaagtagtgtcatcgccgatgtctttgtcgtcgctagtgccgaccgcgtcctcactaagtgccatggtgcagaagcctcatgcggtgtcgacgatgaagcacagctcgttcagcttgtcctcgacccgcctctcagtctcctcgttgctcgaggaagatacaacatcatcagagttgtggtcgaggtcgctgagggaggtgaggaaggcgcactccttgatctttgccttctgaaggtacttcttcttgagcgcctccttgtcgaatcctcccttggacttgtacttgctggaggagtacttgcccttgcgccgaccagagtgatggttgcacgggatagactccgatttgcccttcttggggcagctggcaacgaagtggtcgggatcgccatagttgtagcatccgtccttgg

SEQ ID NO: 121026 - DNA, 1238 bp, Zea Mays
tgggcttcatataggtgcgtggagccccggccaggttacgtagacgagccgagcctggtcgcaccgaatggaccgatccaggcggcccgcattaatgcactgcagttacgcaagtataatagtcagtacaaatatgcgtaaacaaacgtgggccatttgtccgaacgtggtccggtgacgtgttaaccgaaaaatggggaagcgcatttaaacagacaattacgacaacttaaacctatgtataaaattgcataaatggctgttactcacacgatcagcgcgcccacgatcctagaattcagcggataatggatatgcgccgtgaatttcgcgtccacgatattggatatacgcatggtaaagaggaaatattcgtaagcttccaaaaaaagtggacaacacgaatcatttgttagggcgcggctgggtgaagggcgtaatctgctctggaagatggcggcgccatggggtaacaagtcaatcagtgagtatacgacgccgacatcagttcatcgaacaaatcaatgcttggatatcgtaacaatggtgcaggaagaacaacaaggagggaaccagtttacctcagatgcaagtgcgcatatgcaaacaactactgctgtagaggcaattactccaccagcagctttgagggccccgggggttgatgatcaggccatatttgagacatcgaggatgacagtaaatcaaggatgacagcaccttaatactatgcgtactattggtgagcatgaacaggacacaccagtgattctgcagagacatgtaagtaatattgaactgatttggattttcagtatagtaggttaaattgtatacaatagaatgcagctagagttggtatgacattcagtggttatattgtgcatacgctgtaaaactatggtcagaaaaatgttatattgtacgtacgatgtaaaattatgtaggacaccatacatgatacaagttatggaatatatgaacatacaaaatatattttatatttttgcacaggaagttacaattgatctgaggttggtacctaaagttggtatgacattcagtggtgtggatgaagcatataaattttatagtaggtatgcatatgaagttggatttccattgaaaaagtatagggaacggaaaaattgtaagtggttgaattgctcgatggaaggcaagagtgcaataaggggaatatcaaacccaaaggtacgtagtaccagctcgaagcggac

SEQ ID NO: 121027 - DNA, 428 bp, Zea Mays
gaaagctttccggccccgcctagaaggccggaaagaaacgatcaatcccatgagccatatagggtaaatggcaatgcaccacatagctcaaaccaatggggggaaagacaacatgctaatatccagccaaccccacctatatttaaccagagagtcggtggtctcgcaccagctgtcatcgatatagtgagggaggaaatagccggggcgttccgagataagctcggagtaagcatggtgcctgagggcaatcatatcagaaaccttatgacagccgatttgatcaccacccatacccccaaggaaccaggatacctgaattcgcaaaattttcgggtgaccaagaaaaaaacacgcgcgaacacataggtcagttcttagcacaattaggagaattgaccgacacagaagcatttcgcgtgcattta

SEQ ID NO: 121028 - DNA, 473 bp, Zea Mays
ttacagaagcatctagcatctggctctagcctttggctcctcatagcccaaataaaaacccccactttaatcaaagcttcaggagtaagttgatgaaggtatatttcgaacgtcttcagtacttcaaccaacatcttgtgcagtagaaaacgaagcccagccttcatgaagcttttaaaaaccaccacttcatccgcttcgggaagaggaacagcgctttctcctccgactctcacaatggatcaatcgtgaaaatatttttccttcattccttcaatctgtccttgtttaacactgtatttccaaaaacaacatggctaggtctccacggccgatcttcggcatcttcattttcactctccacatcaaagctatcgctgtcgctggaatccccagatagcccaaccaacatctcattcgtgattttttcaatgttggtcttttccattgcttcgtaaaaaccagcaactgtg

SEQ ID NO: 121029 - DNA, 388 bp, Zea Mays
cgccatttcttcgcaaaatgtggagaggagggccaggcgaaccttaagggagggttcctcattggtgatgaatgatgtgacggtctgaccacagcacctcgcggcactgcgacggtgagcaggagaaccagacgaacgagtaggcgcaatcgagcatggatgagttctacacgtggagcgggtagaggtgaactcggaagtcgtttgcttactggtaaaaaaacggttggctcctgttgacgatggtgcatatacacatggcgacaacctgccaacaacggcgagcaattcaggctcaccgcgaagcctgccatggcgacaaactccctgcacaggagaaacacacaatcacgaatttccccatgcacaacatcggcacagggcgctg

SEQ ID NO: 121030 - DNA, 384 bp, Zea Mays
ttcagtgacttcggtcaatcattccggcatcaaccatcctagttattcctgtaaaacaaagacaaccaaggcagacgcgtattggtcgctaggtgaaccaatggggaatcaccagaattggtcgcacccagttgcagtcaaaactgaagtggaactgactggggttaggaattctgacttcataataatgtagtactgtactaggtaacactgtcattcacttagcacggagtccgtaaaacaagccaccgatcacaaactgagactgaagagcgtcttcctacgaatgtgaacgtcacgatcgtaaccaccggtctttaggatctaacacccatgattaatgtctagacaattagtagaacggccactggagcaacagctaat

SEQ ID NO: 121031 - DNA, 525 bp, Zea Mays
gaccaagtccctaccaatcaaccatgcgagatggagtggacaaccaagtccctaccgagcaaccctgcaaggtggagcgaacgaccaagtccctgccaaacaactctacgaggtggaggtgccgaccaagtctctatcaaacaaatcagcaagcaggggtcccaatcagatattgttgatccacgtcagccacgacacgatgcatagtcaccaaactaagtctagcggcatggtataccgaagggatgccgggaagtatctatcatgtgacattatgccatcgtatacaatctatgccttgtgggaccggtcaaacccagtcgaggtgaacctaagcatcagagtctccacagtaacccgcatactgggcaggacagaacaatacaccatatcgagtgtacccatacgcacgctaagagaatgacacaaggtttctgacaaaaggcaaggtcgcgccgcgcatgaccaaagacatgccctgactgtctcctgtgggcacgcctgatgtcactatgggaacctcaa

SEQ ID NO: 121032 - DNA, 360 bp, Zea Mays
gcgagcgacgacttggtaggtgtctttgaatctgtgcccagcagcagtggcactccattccacatggcgcgtactggatccaatgtatacagtcatgacacacttcactgtgccatgctcgacgaattcacgaccatcatactctggctgactcctgattctgaggcaaactgtgcatgctctcagcaacttggggaaaccatcttcattctggcaaaagctggtttggcaacgaacctccatctgacttctgagagaaggaaaggggaaagcatttttgaaatgaagggatgagagcaagaattttttttaagaaaatagtttggactcaaaaacttttggatcaagctaagggttacg

SEQ ID NO: 121033 - DNA, 381 bp, Zea Mays
tcagttgggtgggctgcttggctaggccatttcttctccgccctagggaaaggttttcttagggacgctggagagtttgtgccatggctcgccccaccaggatccttatgatgaaacattaacctttgatgggtcgctgggctcgcttggtccatcttcaccccatcacaattccttggatgggctgctggagatggccaacctaaactcaccccatcatctctctctaattttaaaggacactatgaaagggacgctaggcctgaataggctctcttcgccccctcaggcccagcctaaggcaacactggagaggcttgtttcttggctcgccccatagaattgcaactgaaagtgaagccccaacaagtgatacctatc

SEQ ID NO: 121034 - DNA, 453 bp, Zea Mays
cagggggtgagggttcattgggtgtctgtatctcatgtagctgagcctgacttgattcttctgtttgggtatccatatgtttcatggcttttgcttgtggttgagatgaactaatcatgtatccaaacatttttctattccttttgttgttcttcattccattcatcgaatatctcggtgactcatttttctcgttcatggttgttaaggtaggagtattgtcattggcaccatttacttcatttccattggggttcatcatctagtcagaggataaaagagttagtgagacagactgcataagaggcttgtatgacattaagatgaagagtgaacacaactttttgattttcaagataagattagtcaaggaacaaggatggtttctagcttcctcataaatcaagagtttacatgtgttatattccttaacaaagatcttttgaactttat

SEQ ID NO: 121035 - DNA, 418 bp, Zea Mays
ttttccaatctctacaccaagatgctaaagcacatcatttgttatagatagtatatacttgttatgatacccagccatctataaacatgatttttgttataataaatgacaatggatggaagggtaaaagaatgtggttagaatacacaatagtcagtccatacaatggtatggttacataggaagcatgttagctttatgtggatctttaatttaagagggaaggagattggggacatgcaaatgagtcaagcaaggggacgtgattgaggcaatgctaacagatgaggaaaatggacaggtgcctctcatagaaactctacatatttgccaaaattgaagtgaatgtcatatagaagtgaattgacaaaaatagattttgatcacatgacctgcttggaagccaagtgcatttgcg

SEQ ID NO: 121036 - DNA, 680 bp, Zea Mays
ggcacgggtatttgcagggacgatgctgagcagttgctaagtttgttacaaggtgggacccggggttagattccccaagctggcagttcaaactggaagactggaaatgtgaaggacggggacgctggcgatgggatgctagcagttcaaactggagggctggaaagtttggtttgtgaaacctttggaagttcgatgacattggtgaaatcattagtatgaatacttcacattgacactgaatgtaacgcacgaggcacaaaataacacttgcagaatccggtccatccaccggcgaatgtagttaacatgatatgaatacaatatgaatagtaaaaattagcgattggttagccgagcacaaatatcctatgaaatattaattgcactttcgcctttacactggaactaggcctgatcgaacctataagccgacaggcgttgaaggcaacaataagccttgcccagttctagttcatatttcgtgttgatgactgtggacaacaaccacaatttcgtgttcttgatgggccgagttcttcgaagaagcctagcccagaagaaagaatccttttatggctgatcggtccaagttatcgcgtgacagaacttgaaaaattatttctcttaaattgtggtttcaatttcgtgttgataattgtggacatcatctctaaata

SEQ ID NO: 121037 - DNA, 320 bp, Zea Mays
tggacagagctccaacagagaacaggagcgtgcgagagggagaaaggcaagtgagcggcacaagaaaggctaacgagcggtcccaaacaagagagagactttaaaacagcaattatgggcacaccggatcatgaacagcgcactgtccacatcggacaagtagtgcaggggaagtgccattcgaggccaagccaaagcaccggacattgcacagtgcagtgtccggtgcacaccggactgttcggtgagccctaacttagggtattttgaaatttttctaggaagcgccaaaacaaatcccaacttataagcacacaaaa

SEQ ID NO: 121038 - DNA, 951 bp, Zea Mays
aggttcccggtccgagcgctgggcgtaggcggcgaagggcggtggcgaaacgcagagtgagtgaggtggagggtggttggcttcgtgtggatagggctggtaggcaggaattgttgtcctcgccagctagggcgagtgtaggtgagggggagttgcgaagtctgtttgagggtgaggagctgaggataatgctgtttaactatagggagatgggtatcatcccgaaggttaaaccattgtaaggtgtgatgccctcgctgtacgtatataactataatttgtatgatgaggctgtgtgccttagcttatacggccgtgcccgtaggggacttgtgcactaggtctagcgcgtttattatgtcgatccagctgcaccctcaggcgacttttgcactgatagtcttgggaggaagacttcgatttttcgcacttgttgtgctagtccggctgcacccttaggcgacttttgcacggatagtcttttggagaagacttcgattttgcgcacttgttgtgctagtccggctgcacccttaggtgacttttgcacggatagtcttttggggaatactggttttgtgcactttttgtgctagtccggctgcacccttaggcgacttttgcgcggactgtcgcacgcgagggtagccagcgctgcccctcgtggtgacttcgtgtttgtcgaatgccgaagaccgtcgatgcggtcttttttcgacgttgtaattttttgcgggggattttttgcgtgtatattacatggctccacctcattaaaaacctcacccccgggaggaaaagagtgcgggccggaataaaaactgtcttgcgaattacaagggcgagctagccctgaggagtcaaacaaaaaacttgcgaagattgtcaatgttccaagaatgttctaagtcttcgccggatggcgttgtgagcctgtacgctctgggggac

SEQ ID NO: 121039 - DNA, 731 bp, Zea Mays
gccgggcatgcgccaaaagcgcatgacatcaaccgcgggaagcaaagtcctcatcctgagtgccgcgccaacacgattacaaatcgagacaatcttacaataaacacagcacacagtatgccatcgtaatttacatacataaaacaaagggctcgttggccacatcgtacaagtaatacaaatcatattttgccgccctccctctctactgtgaaacgggggagggccacattttcactcactatcgcaacacacgagcgaggccagcaaaaatgctacatcagctccaccttcggaataagacccgcctcccggaaattaaacaacatcattctcaactctttgccctcaaataaattccgcaagtccccctccccaatacacgtcctagccgtcgaagacagtagatcgcgttgggtaccccgatctaatcgaagatgggatcgctccatacccatctggcgacgtctcccactttgtgacatcccaccaacactctgcttcgacaccacctttcacctgtggtggtcttcggctatcgccctgactggggaatagacccctcgcgcgcatcagattgcagcaaggactccgatgcggccaaatccaacacaacgaagtagtctaaatcttcctcagaagactcctcaatccacgagaacgggctcccaaaatcatccccgtccgaggaccacgactcagtttcagaaccctcgcacacatttctatta

SEQ ID NO: 121040 - DNA, 543 bp, Zea Mays
tgaaaagtgtatataaaatccttatatcctcgacactttattctctcagtagatgcgcatcattcatggataaaaagaaaatgtcgatgtatggcttccgatccgtctgtttgcgtctcgtccgtttatgctactgctgtagtgtagtttaccgtgtgtctgtttaatcaactgtttattgcatgtatttaatcattgtttaatccgtttaaatggccaattaatttcaatgaatagccaaattaacaggatcgtggctgtctactttaaatattgtttagattaacactgaccgtagcaagatagatgatgcctttcgtttcaagtcggcgcggcatagcataatgcatgaatgtaggtgattagacattcctagcttttattcctcaagtttgttagcgctcccggccggaggtgctcctggagctgttccgcgactccgcctaccaaacgggcgtccaaaagcaacagctccacgagagaagccgcgtaaatcgcgcggaaagatggcgagggtgggactgtgggagaaggagcgggaaa

SEQ ID NO: 121041 - DNA, 704 bp, Zea Mays
gcatattgtacaatattttatttaaatccactaaaagaacgatgttattcaaataaaatagatatgtttatttagatattctattgcaatatatattactataacttgtagattgttattattgatttttaataaaaaaaatatttattacactgctttggatttggtacagggcctcaaatttctctggcccggccctgcctacatgctctcctcgcttcccgcccatctatagcctctcacctcctctcccccccgctctcgctttctcctccccgccggcgtcgccacacctgtttttctcgttcttcctcaccttcggcgttgcttccctggttctcatgtgtttcttcctccttgttccctcagatttgtgcaacctagtgtgcactccattgaatcgaggtctcctggtcttcttcgtcctccgcactcgttgttcggtactcacagtggccgttcgtgggcctctcctcccccacaccatcgcttgttgtgccctccccccctctgatcccggtgctattttttgggtccgatcgtcggtgttggccatgatcctcgacagttcgtccctctcctcttcctcgccctaacctcctgtcaatccggtcccttgtcaagtttgcactcgtcagtctcctctcgtgtattaagctgtgaaagagtctccttaactaatgaggaatttggttctatactcg

SEQ ID NO: 121042 - DNA, 531 bp, Zea Mays
cctcgacaccttcctgatcaggtataggtcaggtggcacgccagagctagtaggtatgtttcagaggaggaggaggaggagaaagaggatgtgccctatttggttcgtaggaatcgtcgtagcaaggccagcaacgatgtcccagaccaagctctctcagggctggttagccttcagggaatgacaatgtccaccattgaccatgcattggaggaggttattctcgaagtcctcttgttggagttttctgaacctggaagtaccgacatccgtatagaggtcccggaagacgcacccttcgctagttttctggctgggcaagaaataacctcgtagtttgccatgcatctccaacctttaggggtgctttatttcgtgagaatgctccgatccccgagggtacaactgaggattgtccagcacttgagggtgtgactaaagataatctagcccccgagggtgctactgaagatgatccagcccccgagggtcctgaggctggttcttcctcggctgtctccatgaatgttc

SEQ ID NO: 121043 - DNA, 568 bp, Zea Mays
tggttagtgagatggaaataaaaatggtattttattgatatatgtgtttagatggggattattgttggagataattatagacaaatagaaggtgcattttgggtggataggcaaaagatgaaatgggtctccaaaaatggatggtattgttggagttagcctaaaggaaaataatttatgtccaatacaaatctagctagtgtgccatcatcttaatcatagtgggatgaattagtgaacgtgatttagctgtgtcagtgttaatgaggatagtaaacattgataaccatgatccagttgtcatggactcaccaacatccataaatgttggatccagtggtagacgctaccgacagttgacatggtgtgggacggtcaatatcgaccatcatagctctagcaacaaagtgatacacctggttgagcttatcgatcaattgatgatgtcggtgggaccgtgtcggttggtaccactcgtcttattggagcccatgttgttactagtcaggtgtgtttggtaccgaccgtctactcgtgatgtgatgtctcttgattaggtagcattatt

SEQ ID NO: 121044 - DNA, 520 bp, Zea Mays
cggcaggagaattatgcgaataaatgacattgaccattaatttttcaagtcaaagatcatgtgtacttgaaagtatcaccgatgaagggtgttagtcgatttggggttaaaggaaagttagcaccccgatatattggctcattccctattcttgaacgatgtgggatggttgcgtacagacttcggctgctaaaatcactttctactgtacatgatgtgttccacatatcacaattgaagaagtgtcttcggatccctgatcaaactatggatgtgtctgatgtttatttagaaccagacttaacctattcggaatatcacatccgagttttggattagaaagaccgagttactcgaaaaaggactctcaagttttacaaagtacaatggaaccaacatacagaaaaagaagctacctaggagtctgaagatttcttagaaaagcattttcctaagttcttagcctcttgtaacctttagggtttatgcactttgttgtaaagctagaacaaacccccac

SEQ ID NO: 121045 - DNA, 301 bp, Zea Mays
gatttcttaaattccaggactgcgcatcaattttcagagagcacaggggctagcgtgcaaacattcccaagactcagttttaacgcatggtggacggcgcgttgatatctagaaaagacaggggtccatttataaaacatacccgcgaaggggtaccgcaacatatgggccactggatcgaacgcggacggctcagattttatttaacgcgatctaatctactccgttgaactcaagatggatggtctggatcttagcttcaatgcgacgactagagatctgatctccaacgtccatcacg

SEQ ID NO: 121046 - DNA, 373 bp, Zea Mays
gaacaaagatatcagaagttacaagtccttcggcagaggtgacagtgccgaaggcacaaaaagatcttacagttaccccgaagaggaaaaggatggtccatgtactagatgtactggaggaaataaagactacaagctctactccaagaaaaacagccaaagtttcaaaaacgcgaattgaaacaacacaaactgaagccgaagctgcaaaaagtcatgccgagaccgaagctgggccctcagagcccgctaagaagaaatccctggaaaaagaagctccagaacagaccctattagaacaagctgccactcctactcccgaagcatcttccgaaattgtcgattatgttgtacgacatgctttgggaaaaag

SEQ ID NO: 121047 - DNA, 430 bp, Zea Mays
ggccaaagagcctaaggcgataggggctgatggtgaggtgtcttcgcacttagagtcaaagaccccacctttaaagatgaaaacgacgaatgtcattaagtccgaaggaaaatccttgaaaatggcaaagaaggatattgggagcgtgtcagcctcatcacttggggcaacacaaattttgtaggtaaggacccaacctttacccttcgacacattgaatccactaggatcagaccttaccagtttcttaatgaccatgaagggtaaagaaggcgaaggcgtaccaacgatggcttcggctcctcagacttcgcctgagaagatgccaaaacaggggtcctagatgtcatctatttgcaaagctatatacaaaactccatccaagggagacaagaaaaaaaggagtattagagttgagtaccaaagctat

SEQ ID NO: 121048 - DNA, 417 bp, Zea Mays
ggtacatcaagccaccaaagctgaacgccagctgcaacaagatgctaagagcaccaagcccttgtcatatggtgcacgaaccatgactagaggaagcaaatcaatctcaaggtttactgctgcatcctccatgacaaaaggttcaactggaggcttgtgatccaatattcaagacaattctagtggaaagaacggtgctgctccaaacacgagttacaaaccagcagcatccacttcaacatcagtgagttcaacagccaagagtagtggtattcagtgcttcaagtgtggaggtcgtggtcatgtcataaaggagtgtccaaataatcgtgtgatccttgtgaatgatgatggagaatatacatcagctagtgaagaggaagctgaagcaggaaatgtagaagacactcataaaat

SEQ ID NO: 121049 - DNA, 978 bp, Zea Mays
gaagggtttcaagtgtgttcctgagatggttaggttttggaatccacacctatttttgaggaggggctctcacaggctccttaatcactctgtctctcatacgggtgataggcttaggtgggggattttgataagcttgggaatggatgaaggtttctctgaaggtgtcaaaccactgcactcaccaaccttcccaaagcgagtgacacccatccttagcatcaaagcttaaccccactccgttagttccctcatgaagtgactgaccatcatgcccgactagggctcactgcatgacacccaactcaagacagatcgaaggtatgtgttttcttccttgatccttttcttgtcatgtcagcgggacgtaagggaaaactgcaaaccctcacaaagtgcacactcgcaggtgcaggggcactcactgagctagccttctcaagcaaagctaccctagcgtctctctctgctagctcggtctgcaagccaggacaaatggtacatgcacccaacaagctagacctagatctcaactagccgtgctcatctagcaaggtggcatacttgctatgcaaactggtgatatttgacatgtgtagagcgcactcatgacatttagtctcgtcggacaccacaacttaagctttagaagactcaagttccctaagtgtgctcccgtacttggatctaaactctctcctctcacgagcagcctacctaagcaacttatcctgactagccaaagcagtgttcagctcttctatctcatcggcggaaggtaatacttcagaagtagtgttgtcaccgatgtctttgtcgtcgctggcaccgaccacgtcctcaccaagtgccatggtgtagaggcctccagtggcatcggtgatgaagcacaacccgttcagcttgtcctcgacccgcctcttagcatcctcatcgctcaaggaagatacgacatcatcggagtcatggtcgaggtca

SEQ ID NO: 121050 - DNA, 273 bp, Zea Mays
cctttcatttaaaacgcgatctaatctcggccttcagatttgaatccaacggcccgtagtgcagcgtaccccttcgtggtagcatttttactaaagagcccctctaagatccttaaaacaactcgccgtcccggggcactgttctctgtgcctcggggtttttacattggcgcccctgtgttttatagaaaatggcgcccaatccagagagagctgaaaataggaaattaatattagaaatcgatttttaatacaaaaataaatctagaaact

SEQ ID NO: 121051 - DNA, 1228 bp, Zea Mays
gaaagaattgagtatgacaaatgaaatacctcattttcaaattcaaagttaacttttatacctttatactattgtatgctaggttgtcagcaagttcatccttcgataaaatcaaaaggccgtcttccagcttcgggaatccgatgcttttacctatctcccgacaaacggatatttctttgttatccgggagacagtacagaaaatcttcttcgtcactaccaatgaacactaacgcccccttcagatatttcaatttttgggcgtagtatcgtgcttctagcatttcttcttgggatagttcttttcccgaagaatgacgaataatgtagtcaatgcttttgttcaaagcttcaggagcaggagcttcaatcttttcagatgcaatctgctctgtcattttttccttaggattagcaagctccatctcggtgggcactgaaggcccagcttcggcttcagtttgagctagcgcaacttcagattctgcttgcctagttttggttttggcctacgtttttgtagttgcagcaactttccttgcaagagcaggactcaaggccttcatagtttccagcacagcatccaccatgttcgccatccttctcctcttgggagttgcggcagaagccttttgcacgttcggtagttttgtctctgttggaggactcaaaatttctggcattttcattatttcttcaatcttcggctcttcagccctatcgatcttcctctcaactcactcgactataagcaccttcggcactacagtcggctcttcagtgctctgtgcaatcgggacaatttcttttgcttcggcagctgaagaggtccctttgccaaattcaggtatcagggccggttcaatataacgcgggaggtgagtcagaactttcatcttcttgcccttcggcttagctgtgatgaccggagcgacaatctttctcttttttccttgccctcgcagtgggtagcgataatcagggtatacgaagccaattgcatcaaataccctgttcaatcttttcttcttccgacccccaaaagttgtggacaatgcattatccttggccttggagtatgccccaagtagctcgtcgctagtagcttcaatacacttcagccagtcatcgttcggctcatcaaacttctccccaaatctgaaggtatatttcaatcggactaaaccaccctcactagaatcggcagtagtctcttttggcatttc

SEQ ID NO: 121052 - DNA, 974 bp, Zea Mays
cgaacctggaccacctctgatggggttctagagcgctaattataggtgctggccttctcccaagcccagcggccttaccagataggcccaaccattgggctaggatagacgaccattagcatggtggctaagggtagtcccgaggggtctgccttgacccatcagtagtgggtaccccaatcttgaggtgccgatagtggcccccgggcccacctcgggtgaggtggcaaacccataggtggggccataactactccttgcttctaagtcttcatggctgtgccccctgcctggtgactcgaattgaaaaggcatccctacatatggcccgttatggtgcttaatggcgtacctatagggtcctccttctgattgccttcaatcctatagattatgcttctagaccttaccgaataggatttctagaaaccgtcccttggtcagggtagggttcaggcctctaggggccaagtaccaggtactagaacaactattctagggtggcgaagcatccaggcttagggtataggaccaggctaagcagctacatggctccggaccacccccaagaacgtggtcctttcccctggcctatccattacaagggaagtcctaaaaccgagtgacaaggtggaaacataatccaagattcatgaaagcaactgaaattagatcccgcacagggttttaggtgagtggtgctcgagccttacttcctattgtaaagacaagtcttttccctcagctagacccctgggatattggtaacctcggagacttgaggctatggtcagactaggggtcgatccttgttgtggccaaggatcggtgcttagcagcgcacccttgagatccttaccttgttgtattcaatccttcgaatagtaatgtttattcttgtcgatcctagtttaggaccatcccttgagcttgaacaaggttcagaccgctaagcacccagtccaagatatttg

SEQ ID NO: 121053 - DNA, 688 bp, Zea Mays
caatgtgcgctccctaaaaatgcccatgcaagtaaaataattctgacaacacgaatcaacagtgtaggccagttctcctgcactccagatgagggttttatctatcagatgaagcctctttgcagaaacgattctgaaaatctgtttctgaaaaggacactatgtgataaagataagtttcctgctcagctggaggggattaaaaacgagataatcgagaaatgcgatggtttgccactggctattgttactctagctagcatgttagctactaaacagagaacaagggaagaatgggagagggcacttgattcaatccattctacgcacaagaaagatagtagcctggaagtgatggacaagatactgtctctgagttacagggatctacctcacaacatgagaaattgcttgctgtatatcagtacatttccagaggaccacacgatttacaaagatgctctagtatggagatggatggctgaagggtttatcgctgaaacacaaggctttactttggagcaggttgccgagggctacttctacgagtttgtgaacaggagtttggttcagcccataaccttgcgttcaagatatgaaatgcgtggagaaggaggttgccgagtccatgacattgtactgaacttcctcatctctcgtgcagctgaagagaactttttaactacgc

SEQ ID NO: 121054 - DNA, 788 bp, Zea Mays
cggtgctctacttcggctgagaccaaattcaaaccctaacaagagtttcccctcaactaatttcactaacggcgctctaacacgctctgtccacggtggcagcgggcacgacgaacaatcaaacgcgttcctgacgatctaaggggtcttagtctaattggcggggttggggagcatgaggggcacacaagaacactgaaacgaaagggcagagggtatgagcggacctgagacgagctagccacgacgaggcctctttcacggtggcggaaagcaggtttgggggaagtgggaaattggtgagctctagtgatcaattgagggcacgacttggtggcttggtgcttgactaccctacggagctcatggcgtgctcaacttatagagttcgtgagcggtgttgcttaatttcgacgaattgcgctggcggtcgagaggggaatgagtcacggcggtgatctaccgtggcaaccgcagagcgactgaactacggcggtcattggatggtcacttcggctcatactgacgcgataaacctcctaaggcgttggcgtccacccggtgaatggtgaacacgccagtgattgccgctcggccatgtcgtcggtgtgcactgatgaaccatcaagcacatagtacattccagcccatccgcgatgagatctttcaccccgtgatcgttatccatgtttaattcagtgtgaatcacggcgatagcacaaatctgcacgcgtggtcgccgacggcgaggtctctgagctggcgatccaatccggttactgtaccat

SEQ ID NO: 121055 - DNA, 313 bp, Zea Mays
ttttggatcacttggagcgcatatacaattgttgagatgtatgtgtcaacacttttagcttttaaagaacacaattctccaattgacatgaagtcgttttctcatgtacccttatgattcctcgtgaaatcccaaaacgagaatcaagggcttctgataacctagcctcatcagtgcgcactgagctagattgtgaatgtcttccattcataggataatccatatcctctaggtgtccaccaacactcggttggttaccaacgaatagatggtttgcatttactatctcagaaggcctagccttcagctgctt

SEQ ID NO: 121056 - DNA, 796 bp, Zea Mays
cagagttggaccatgcccttgacgagttgggcaaggttcgggcggaggttgcggaattgcgttctgaatgcgcggcacaccactatcttgatggtggttcccccgccccaattgggattcagcacccttacagttcaccgccccgtggtcggttcgactatggtaccccagactgtaggacccgcatagatttagatccatagatcgatggagtcgaagtctgtaataatgcttaattcagtgtcttagtctagtcagtcttagttagagttagtttggttatcttttgttggatgcttgtcatgatgaacatgtaatgaagttggatctttgtaatgattgtcaccaaggggtgggtatctcctgcaacttggtgtagttattaataaactcagttatttagttgggtaatccattcatttccactttcctctttatctaagaagttgtcagtgaagatgatcaattgttcagtgctgtgaagatttctgtatatcttttcttatgctaaaatactgcagagtcagatctgatatgtgtgtgatttctacagatgtctgagaacaggcgcagaggtgcgaggcgtgctcagccagagcagcaggcaccccaggaagaggtagctccgcaacatcatttgccaccgccacccccaatgaccattgagcagatgttcttgatgcaaacccaggcagttcaagcgaattggttagacattagcggcgatgcagcaggttcagcagcagccaccaccacctcagcctccagtgcaagtccaaatgccacaagtgcccag

SEQ ID NO: 121057 - DNA, 1134 bp, Zea Mays
ataccgaatcgaacaactcctttagtaggtgataccctgagaaggacttggtcacccactgcaaattccaaattccgcctcctcacattagcataactcttctaacggctctgagcggccaaaatattctgacgaatttcccgaaccttctcagaagtttgctaaacccaatcaggaccaaccagggatctctctcctaaagtctcccagcacagaggggagatacaccgcctaccatataaagcctcaaatggtgccatcttgatgctagcctagtagctgttgttataagcaaactctgccaatgcaagatgatcctcccagctacccttccatgacagaacacaagcacgcaacatatcttccaaggtttggatcgttcactctaactgaccatccgtctgagggtggaaagcgacactaagtgaaagcttgatacccaatgcactgtgaagactctcctagaatttggatacaaatttggagtcttgatcagaaacaatggacataggcaccccgtgaagcctgattacttccttcatatacaagggaaccaattctgaagttgaatttgtggtcttcatgggaataaaatgcacagacttagttaagcgatccactaccacccatatagcatccctgccccgaggagaatgaggtaagcccaccacaaaatccatggtgatatgctcccacttccactccagaatttccaatggcttcagtaaacctgcaggcctcttatgctcggccttcacatgctgacatacttcacaggcgaccacatacttagaaacgtcaatcttcaaccgcttccattagaagtgttgcttcaaatccctatacattttggtttcgccagggtgaacggtgtaaggagttttatgagcttctctcaagatatccatcttcacctccgatttctgaagcacacaaagacggcccctgaaatgaaccaaatcattctcatcaatggtgaactcccggggtttaccatcaccaaccctctttcgagcttcctgcaatagacgatcctgctactgagccgcacgcactctctccatgagggaggattgaataagcatccgagtctcctcactagtggtgctgacatagcacaaagcgatccccaaa

SEQ ID NO: 121058 - DNA, 298 bp, Zea Mays
caaagttggatattagggtccatcatcagctgtcagtaatcactgtgatacttttcatatatgtcaaaatttatgtggatggtaaaatgtaacttgtggtgcagtatactatgccactatctaatactgtcactcctcgcccttaaccctcattgtacagcttcagcctttcactttaatgaaaagtgagtgcaccaaccatgtctaggagaaatgatgtatttagtgctgctattgtttatttcttcacaaaaccatcaagctagcttgcaccctcattttctattgttggttctta

SEQ ID NO: 121059 - DNA, 335 bp, Zea Mays
cttaagaaaaattgttctcctttgtttgctctacaactttgatgtggtgacatagggcaaagaccctagaatttgaaagatacaaaggctcaaagttgaagcaatcacactgatttcagacttaggctatatagaggtcaagtggtactttttgcaaatagccccaaaacttagggtttcacttgcaaatccacatatttgtgagccaaaggacttaatatgctttaacattatagtttttacactttagtctaaatgtgcatagtttttgcacataggcccctagggtttggacttagggttttctagggttcaaatgggggtttttggtatct

SEQ ID NO: 121060 - DNA, 617 bp, Zea Mays
ggccgataaaggcaaaggaaaaaaatattatcattggtgacccttgcgcactaaatctatcacatggagtggttactcagaaggctccgaacgaaagaaaggctaataagaccggaggcgctgaggggcatggtaatccaggtatgcctaaattttaaagttttggaggtgaaggtcgtgataaacaaaaggataaaaggtcaatggttagttttgagcaacttctggctaaatatcataagcaaatcaaggcaaagagtgttgatcaaactagcaatgctaagtcatctaaagtgcctttgaagtcatcaagatcacctccgaagtgcaaatatagaaaccaagattagcgaggcgaagggtttcttgcatcagcaacatatcctccttttaggccgctaatgccaatgcaatacagttcagctcctttgtactttaatccttatccatcttggcgctggtataattcaaacacttattcttcatattttagaccacataaccgagtattcagctcatagcaattctgattttgagaaacaattatataacaaagaccgttttatggataagaattggtctagaacacgaaataagaatagagtggtcaagcaatt

SEQ ID NO: 121061 - DNA, 606 bp, Zea Mays
ctctaccccgcctttggatgacaaagaagaaacgtctttctctaccttatcctcattcttttggaaggctttgttatagaacccctgagtctatcaccatactcctttagtttgataggatagtatattgaaataagctagacgcagtagacgataaaatagtgttatactataataataacaacaatgtgatggtgatgtttgatatgtttgagttggatttttgtttgagtgcaatggtctgatggccataagagcattaaaaaacataaacttaagaaattcccctctagaatcttttctactccccacttggtgaacgctcgtcaaggacccaacaacaataggaaccagcatgatcaatagataccaccaccaccaccgaatcccaacatggaatagttcatcgccgcccagatgtagtttttgtaaggactcactgcaactgttcaacagattcagcagaagcagctgaatcaacagcatcagcagcaacagcagtatgcaccccccggctagagataagcaccgggattttatgaggcatcacccgccaacattctctcatgcggttgatcctctggatgccgatgactggctcaaagt

SEQ ID NO: 121062 - DNA, 477 bp, Zea Mays
cttttagattggtcttcccgtaaaactgttcatacaagttgtcagtttctcgaacctagctccgacaagtaaatttgtgtgcgtgttccgggctccggacggtgtgcgcggtcggtgcaagattgttactagttcaggctgaacgtccctacatccagtctttggtggcttgcactactagtaccattgctgatcaatgcttgtagtaggggttacaaaggagcgaaagagagaggagaggctcccaagtctcttgttgtggaggaggtggagctaagggctacagagtggagtcctaactaagtcttggcttggtggcggggctctggcctctgggttctcgttggtgcgtcctccttcctcccgtcagtacgtcgtatctacatcttctatgtccgtctcggtctccttttttgtgtttccctttcccctcatctagggttcgacctcctccttttataggccaaggagggggac

SEQ ID NO: 121063 - DNA, 477 bp, Zea Mays
gtgaaagtcatcttcgcatttctgaccccaatcaaacttcactcctttcttcaacaactcagtcattggtttagcaatcctagagaaatccggaatgaatcatcggtagtatcctgccaaaccagaaaactccgaatctaccgaatggtggcaggaggctttcaatccatcacttcttgtactttctcaagatccactattatcatgtcctgcaaaatggtgtgacctaagaacttgatctcccttagacagaaatcacatttggagaatttggcatacaagcaatgatcgctgtcgctaaagtactatgtgcaaatgcatagtatgctcgtcttcattttttgaatataccagaatatcatcaatgaagaccaccacgaatttgtccaattccggcataaacactgaattcatcagatacatgaagtatgtcggcgcattggtcagcccgaaagacatcaccaagtactcataaag

SEQ ID NO: 121064 - DNA, 441 bp, Zea Mays
tatggaagcatgctctttgttattgggtcgaccttggcaatatgatactgatagtttacatcatggtcgttcgaatcattattctttcatgtttaaaggccagaaaatagttatacatccaatgacccctgaccaaattctgaaagatgatcttagtagggctgctaaaactgcacaacaagtcaaatctccatcagtcgcacctgttacatctgaaataaagttgaatgctcttgttttacttgctacacgtgctgattttgatgatttacatgagactcatatgccctgttatgcatttgtatgctcgcgtatgcttgtttcgtttgatgatgcaccgtctttggatataccccctgttgtggttaaccttttgcaggaatatgttgatgtctttcccacggacttaccaccgggtcttccaccactccgtggcatcga

SEQ ID NO: 121065 - DNA, 474 bp, Zea Mays
ctgctagagacagcttaacaagagcgaaaatgctattagtacgaagatgtaagaaagtggaattttggaaagatacaatgacattggtggtgtaagaagactggaatttcggaaatatgaatcaatatatgtgttatttttcacccagtttcaattggtatggtcataatcatgctagtaatactattaggcctcgtttgggaacacggaaatcaaccgatttccaagggacaggtagcccacaggcaaaaaatatctctgctcttcgtatgcatgtctaggaggcttatgtatgggtttgctgaccccgagtaccaacaattttgatggggtagggttccttcgacagtcggttttgtgtgccctgcgactctctccgtccttgcctctacgctgcatccactattgacgccacatctttgacccgtcactgccagattgtatctctcttgtcctcgcctctgcaccaccgtt

SEQ ID NO: 121066 - DNA, 577 bp, Zea Mays
aagagcttcacgaatccaaggaaaggtgcttcgagaaatccttggattgcgtgaaaaaattaaaaactaccttcgccaaagtgggtgcctactccgatgaagaaaacttcatacgaggcaaccccgaaggcgtcattgaatggataaatggagaagccgaagccttcaaagaaattttgagtgataggggggatgtttgtgcgttttccggtgcctggggaatttcagccatcttggagaaggctgaatgcgatcacattaaagccatggcctaggccaaaaccgccttctccgtggatgatacgaaggatccttcagctgaagcaaccttgatgggcgggaaattttacaatgatgtctgggtgaatggtggccgagagatggcccatgagattattaaaaagagtgaaaaagacacacacgacgcccgggcagaaacaaagcgagctgaagaagctacagaacgcgaaagacgtataggtattatgttttggttttgagcttcggtacttctttttgtggcttcgtactaatcaattttacctacttcagctgaactatctccgccaccggaacc

SEQ ID NO: 121067 - DNA, 685 bp, Zea Mays
gcctgcgtcgctgatgcctcgccgacagtcttggctttgttcaaacaagccgcaagcagcaccaccgtgttcgaaggcatgaatgctgccttcctgaggaagagaacgaacctaagtaacaccatatggagcttgatgggcatggtcagagcttctttcttcacggaggattgctgtcgaatctcgctagagtccagtgggcctggagttcatgagaccaccaggctgatgatgaactacatcgcgctgctgtggagcaaccagggcgctctcaacttggtcctgcaggatcaccacttcagcgtcttcgtgtccgaggatgaaggcttcaactcggtggtcagcctcatcatcgacatgatctccagcttggagaaacatctcgtggacgcttcccattccattgcggaacatggattgaggtacatattcttgatgaacaactgtgatttcatcacgcagcaggtcagatccttggaccttccggcctggtttccgtcagacgacagcaagattcagggctacatagatgcatacctgcacgcctcttggacaccggtgctgtcttgtttgtacgtcgacatacctttcggtccgcgaagatacgcgtcgctatccaaatttgagtcacaattcaatactatttgtgactcgcataggctctggaaggttccagatcctgagc

SEQ ID NO: 121068 - DNA, 339 bp, Zea Mays
tcgtagccctctgaatccgttttgtatatcaccagagctcctctctcctgagagcatgggggttaagctaaagccaatcaagacacgagccaaccttaaagcataggaacaggtgatgagaatgcgtaggaactgatgcgcatcccttgatttttttgtgctgaagtgacatagctattgtttccgtgatgtacataagacaagaggttagtcgggtcagggttgggtgggtggtcgattccattgatttgtagcctttaaaacagttgtacattgtcacagatttatttgttgaagggagaagaaataataaggggagatgagatgttgccaaaagtt

SEQ ID NO: 121069 - DNA, 280 bp, Zea Mays
caccgtacccatagttcatagcttgtaatctcatcccaataccaagatcgtcacaggacgtagagtgttacgccattctcgcggtctaaacctgtattagcctacatgtctccctgtcgtgtcaccacacaaaccatcgagtcgcgatcaacaacgccatcctgcccaaaagcatcacgtaggtaacctcgtggtacgcagtcgggtaataaacaccaacacttaccatggagctcatgccttcactgttccacaagcacaacccaaagggtgccacgac

SEQ ID NO: 121070 - DNA, 368 bp, Zea Mays
catccatctcccgatctccggttcagatcgaaccgacgaagggatgactctagatctaatctccactgttcctggacggatcaacagtcacccatccccttcaccacaccgacgtagagtcttggcagcacccaagcacacggcgtcgccatggccggagttcccctcagtcttgatccccgtgcctaaactccgatccgaaagcagtagtaagcagtggtaacggtagggtatcgctaagggagatgctcaccgagattcgaggagcgccgaaatctactcaccgcggtggaacccgatgtccaacgacgaattccggtcgtcacaacagttgattcctccccaatcggccacgggtgcatcaccaa

SEQ ID NO: 121071 - DNA, 626 bp, Zea Mays
gggaaatgccgaaggaatccatcaccaagtctagcgaaggtgaacgggttcggctgaagtatacattcagatatggggataaattcgatgaaccaaacgatgactggttgaaatgcatcgaagccacaagtgatgaactacttggatcatactccaaggcagaagataatgcactatctacagccttcggaggtcggggaaaaaagagatttaatagagtttttgatgctattggttttgtttagcccgactacagctacccactgcggggacggggaaagaagagaaaagttgctgcttcgaccaagattgctgcttcggccattccagatgaacctgcgccgaagagcaaaaagttgaaaatccttacccaccggccacgttatattgaacccgccgtggtgcccaagtttggcggggagacttctttagctgctaaaccaaaggagcccattccttctacacagaaggctgaagaaccggctaccatgccgaaggtgccttcagtcgagcaggctgaggcaaagactggtagagataaagccgaagaaccaaagactgaaggaacaaagatattagaaattttaagcccttaggcggaagtaacagtgtcgaaggcaaaaaaa

SEQ ID NO: 121072 - DNA, 516 bp, Zea Mays
acaaacttcattatcaaaccaaggctagggcaaatggccttcacaagaactttgggtgctacaactttgcataccaaaatgataccaaggctcccgtgatcgggcatcgtacaaaatggcctactagttggacaagcgaatggttttctatgaaggctgataggaaaggagggagaaggtcaaggacatggtgacgagtcctatgagattaagcttcgacatgatgaggcctcatgttttatgcagacaggctccccacgctaactagccgaagtccactttagagttgtggcagagcatatcaacagggatttggtccaagaatatttagccaacatagttttttcaacactaagtcagtttccctcggagtagggccttgaaaccccttcggcctcttccattggcgtgacagagatcttggaggtaatgactcaacccttaccctttgctatgttatatcctctggggtcaaatctgaatagtttgttacagccaagggagaaaaatactgag

SEQ ID NO: 121073 - DNA, 559 bp, Zea Mays
tttgtaataaaaaactaacatgctgagctcagatgctctatttttcctctgcatatatgtaaaacatgcttgtgtcctcctcttgtctggggggggggggtgatcggttactattgggggttatttctattcactgagagctcaagcattgcaatgtattttgtgttgatagacgtctttacttcagtataaaataaccctgacctcaccgggatgaactatagtcttctttacgaaaggtgaccatgcttcctattgaactgcatgtaaaataatagtttgttatctggttcacacttatgtggctatcaagagcttgcaaggacagtccagtttacacaggatctttgctggatttgctatttatgatacttccgaattggatacatatttcacctgtaacatgtttttttgtaacttgaaataacacaggttgtgagtttattgcaagcaacttaactcttttatctatgtcaagaacaaagtagttatagctcaaataatacatgatgtcaggaggaacttactgcatatggcatttagttgtgtttcatatttc

SEQ ID NO: 121074 - DNA, 1294 bp, Zea Mays
tattaccgtcaggcttaccctagtttagtttaggtttttcatcctataactccagataattgccatacaaaaaaatattccgctgtcctgtaaccctgtttagccttgcaattttgtttcagattgctttgttgaatttgtgttcgtgtcgagtcttgttgctggtttaggtcgtgtcgtaatcgtagttcaaccgctccatcgctgttatttgtttccgctgctatcccatccaccttacccagattacaagtcgagacaccacattactcgatttgccctcgctagccgccttgtgtgaattctcgccacgctagccctagattaggttgcaagccgtattgcattgcagcccctccttgtttcatcatctagcgcttacctattgcttataccagggaggtttgtgcccctgtgctctatagccgccgctacggttcctaccaatttgtgccctagaaaaccataacttgaggtaccttccataaaacgggcataacttttcgctcggtgctccctttgagctcaaatttttacagcagattcgtgactccattctggtgggacacaaactcgcctacggcctgtttggttcggtcaaaaaattcaaaaaaatcgggaagataatgaaaaaaattgtttaagtgttttcaggaattttagagatcctttgtgattttctctaggccacaatacaactctgtttcaagtgaaattttgtgtgcttccatcaattgtgattttggatcagtgataaaaaattcagaatatttcgagctcgtttgctggtactcttttgaaaacgcgcctttgatttctactactgctgaaaaatctgcgcaatttacagaactgccattctgctagtttgttactttttatcttgttgtgcttcgataggacacgtcttagccagcaattgtgatttgtgctttggacacttattgaacttcgctaatctgcactcgattttgttccacattcacatacatattgtgcctgtcctacagctccacatactatatcttctgatcaatacagatttgaccttgcaatcgcagtttcactacctcttggtaagtatcatgaaccagcctccgattgtaccattctttgcttgtatttcgtcatacacttgtaagagcttggtaagatacattagcgcgtgttcctgtgttccactcgagaggagcgtgtagtgagattattagggataaccttcaccgtttgtttcctgtttttgtgtttcgatggcaggcgacgacgaagaagcaaggatccctacagacttcga

SEQ ID NO: 121075 - DNA, 311 bp, Zea Mays
tcccttgaacacaccctggaaaagtttgaactcaaaccaaattcgtttgacacggttttggcgcagattgacctcgggaccagacattctgacactggcaccttggtgacgctacaactccctgtccctagcctaaaaccgcgcgacgtccatacacaaaagacaaagcaaggtcaggtgaacaaatccttcacaacgatcttgcccaaatttgcgaagatttgcacccaatcagcgctagaacttgggcagaggcaataggcacacgtgttcgaccgtggctgacaccttcggttcacgcccgttcgtgc

SEQ ID NO: 121076 - DNA, 602 bp, Zea Mays
agtagacttagaatggacgaatatgtttgaaaaacaaaacatcttgcttgggattattagttactcttcatgcagtagcactacagttttgtcacgactatggctgtgcagtagaccagtactaagggtctaacagactaacaagtgtaaaatgcccagctgtatgtgttttgttagcatctgtgcttgagtgcttctaagtttgcatgggatgctgcacaatctgttgatgttgttggaatccacaagcatctgaaggggtattcagattattctttcattctgataacgcagaggagggtgctgttgtggttgctggaagcctgaaaccattgaactgattgggacgcactggcttttaattattataggtttttgatgtgcccttgctactgtgtcttcactgatttgtttcatttgtcttgacaatacacttttttctttccacctgtctggatgctttttcctgtgtcaggaatgtgttatttctgtctaatgctgtatgcctcaaaatatagcacatcatctagccactactggtgatgttggcaatgctgctggtaaaagaatggcagtacataggagtacaaaatggaaaaatg

SEQ ID NO: 121077 - DNA, 548 bp, Zea Mays
agaaggaagcaaggcgtacaggttgtacgatcccgtggcgaatcgggttcacatatccagagacgttgtcttcgatgagggggtgttctgggactgggaggagtctcggactgggactagcgacatcgagccattcacagtggagtacattgtcaccaagtccttgtcgggaggagcagggtcaagcaacgacatcggatcactctatgcgccaagaacgtcgtcactagcatcggtgtcatctgcacagaagccggtggaatatgtggcaccaccaaccactgatgacgcccttgatgcagatgtcgacagcgaggtagttcctagataccggaagattgagaatctcatcagagatcctcaagttgctggactggcagcgcgtgacgtcgacattgcagagctcaacgccatcagtgcagaagagccgagcacgttcgcccaagctgaaagggaagcgtgctggcaggaggcgatgaacgaggagatgaagtcgatcaatgccaataagacgtggtccctagaagatctcccatcgggccaccgag

SEQ ID NO: 121078 - DNA, 333 bp, Zea Mays
atttggacaagttaggacagagttttacatcggttgatccttttggggaagttgacataggagatggtagcagtctaaggccgacttttgtaaagaagaacctgaaattcgatcctaggaacaaaatgatcaggttattaaaaaaatactctggttattttgcttggagttatactaagatgcctagcttaagcctcgagctagtggaacattggttacctatcaaactaggttttagaaaagcaaaagccaagaccattttgtcccaacttgcatcttaggatcaaggataaaatacaccgactcttagagcctgactttattagtccttgc

SEQ ID NO: 121079 - DNA, 1226 bp, Zea Mays
gctcgagaaatggtaagtgtattctctcctcagagagtcctcactttcccaggtggcttcctcttctccttctctgctccactgaaccttacagagtctcacttctgagttgcgggtccttcggactgctgagtcgagaatctttactggcatttcccagtactggagatctttttgaatctgaattgtctctgcctcgatgtggttctctggtacttgcaggcatttacggagttgggacacatgaaacacattgtgaatatctgacatggattctggtagctcaaggcggtatgctgtgggtcccactctgctaatgacggggtaggggccaccgaaacgcggtggtagctttcctttcatttggaaccttttgacaccacgcatcggggagaccttgaggtatacgaaatctccttcctcaaatatgagttctcttcgtctgttgtctgcataacttttctgtggactctaagcttctagtaacctcttgcggatcatggcaacattctcttcggcttctttaacaaagtcgggtccttctagtgtcctttcccctacattggaccacattaggggggtctggcactttcttccatacaatgcttcgaacggtgacattttgatattggcctgatggctgttgttgtatgaggattcggcgtacgacaaactggactcccaattcctgtcgaacgttaacacacaggctcttagtatatctttgaggaccctgttgactctttccgtttgaccatctgactgggggtgataagcggtgctgaaatctaacttggtgcccatagcttgctgaaggctcttccaaaatttcgaggtgaactgcgtccctctatctgacactatcttccgaggaataccatggagcctgactatctctttaagatatatccgggcaagggcggctcctccaaaagtggtttttactggaatgaagtgggccaccttggtgagacggtcgattattacccggatggagtcattccctttctgcgtccggggtagtccggttacaaaatccatgcctatttcctcccacttccattcaggcactgggaggggttgcagtaggcctgcaggcttctggtgttcggcctttgttcgctggtaggcgtcacaccgggccacatactgtgctatctccttcttcatccctctccaccagtatctggctttgaggtccaggtacatcttggtggttcctgggt

SEQ ID NO: 121080 - DNA, 1066 bp, Zea Mays
ttcgggcgctggttctcaaggcttctggtgaggacctcaatgagtcgggtttggttggccagaacttgggctaagtctaatggcagctccggaggtgcggggaggtgggtctcactcccttctccaccgacttctccttcagctcctaggggggaccttgctccaatcccagaggcggtaggcgtggttttatccgaagccatctgccagggggagaggatgactactatgcacatgccaaatttttttcaaacacgttattttattaatcacacaagttcattataagcatacagttaccacaaatcacactacatgcgagtgctttctaaggtgcttccaaattccctttctaaagtgtccccaaattccctaagaaggtcgtcaaggctagctagggacatatcctcaacgtctgacaagttttctatcctggagggaggcagtgttggtggggcttcctcttttcgttctatctggcatccttggctcttggtccacttccggatcttcttagtgggggcgagcttctttaacttcttatcgtaatccatctttagggttcggtaggcttcacgagtgttggcctcttcaccttttgctatttcgagactttcttggagggacgccttctcctcttttaatttcttgatttgttgctctaggctctccactcgggagtttaggtgggtgcagtgggagaagaggtcatcatagtggttgtcaagggtgtggagatatccggccatgtagactatggtggggtcatcttcagtaggatctcttcctaacagggcctgaagtcttttcctccaggtaggggtatttttgttgctgggtggaaaataacgaaggggtgtctcaaagacttccctgctgtagttttggcatagctggcggagggcttttcgggcaacattttggcaagtgtctgggaagcggtgtccagtgaaggtgacttggaaaggagggtgatttgggtagtttcggctttctcccaggtagactgccatagagcatttttcagttccattctcgtggtattctttccagacgtactccggct

SEQ ID NO: 121081 - DNA, 397 bp, Zea Mays
tagtgtagtagcttcggccgaagggtttctaacatcgtgggctgagaaggcaaaatctggctgaactacaaccttagcataatcacagtcgaccttttccaaaacagacacgaccccgcgggcactggcaaaggcacaaaaatcccctctatcactaagaatctcttcaaaggcttcggtcgtgccgttaatccattggataactccatcgaggtcaccgtggatgaatttctgagaatgcacgaactttggaaaagttgttcttcaaattcttagcgcattccatagccacatcgtagcatttttctttagctgcatgaagctcgtaaacatttctctgtgcccttgatcgttcgatttcacatatttcatgctttgtcagctccacattaaaatt

SEQ ID NO: 121082 - DNA, 538 bp, Zea Mays
cctcttagtctataaaagagtgggcacttgcgtagcagggggaggacacacaggaccgaactcaagcccatcttgggactcaagaacggggcattcacacttgaatccctacggaggcaactccaaccaattctagactttcttaactctcaacaatactactcacaaagtaggggcggacccacaagggttctaggtgggtcatggcacaacataaggcaaccagacatcccactaccccccatttcagccccacaatcgactagagcctgagtcgtcgctgtcatcctagcgttcatcacaaccagccagtcgcccccatcaggccatgctgtggctgccaccatgtgttaggagccatgctgatgtcactcactgcacactcccaattctcagcttcccacgcttgtggtctcgcctggccaccaccctgtggcctcgcctgcacactggccttctaggtgagcatgtctcaactcacacctcctattctacttcgtcgttgtggtctctatgtggttagatgtatgatgagcca

SEQ ID NO: 121083 - DNA, 474 bp, Zea Mays
gtaaattgagacatcgttgggacatgaaagaacacgaacatcactaatgacaatatgctcacagacgaagtggagatcaatctcaatatgcttcgtgcgctgatgttgaactggtttagtggacaagtagacatcactcacattgtcacaataaactacggagcttttggtcaagggacttttaaactcctgtagtaattggcgctggtaggaagcttcggcgacaccattagcaactgccctgtattcggcctctacactagagcgagacattatagactgtcgcttggagggccaacagacgaggttgtcttcaaggaaaacaacataccctgaagtagacctgcgagtctccgagcatcggggccaatcatcatctgtataggggcagaccagaggtcgtggatgggtgaaggaggagacaatggctaagtatcccacaaaggtagcacatgatacacttgaatgtcgaga

SEQ ID NO: 121084 - DNA, 898 bp, Zea Mays
cacaaagcttgaagaggatctaaatcacctgcattaccaattataccatgcaaggaatgaaaggtttcttgcggaaaataagccaggatacttgctacctacaagatcagattgtcaaccctccacagcttgcaattgtacatgggaagaagtaagttatcttcaaagtctaatatctctttaaagttaccctttttaatgtgaaattagtgattgtttctttgtcaattttctaagcctgaacaaatgttaagagaattgatattcagagattatcactcagtccaagaagatttttcaactgaacctgaagatcaacaggatgatgaaaaatacgttaaaggtagagaacgtgtatctctaaatatgctgctagaaaagcaccaagatatttcttcaactgggctgtttgtacaccgagatgaagaggtcctactctgggctgcattcaaatttctcagtttcaagtacacatcttgggacttataaaaattacgttttcggttaacaaaactctaactgtatccctgcagatgcaagaggcatgctctatggaaaaagaaggcgaagaagatcagaagatagatatgttaccatttaacctgcccaatttgaagaaaggcaacatgagtgaaaatctgtggaataatccaaatcagctctctgaagagatggtgctctccatgaaagatatattccttaatttatctacatcttccaagatgtcaccagaggagcctttttctaattcatcttcatcagcagagcatctatctggttcaacattgactactttgtcggattcatctgtaatagcctcagtgcagcccagtccttcaatgtacctgaaccacgatgatggtaactttgacccgtacaatgttaatggaaaggaagc

SEQ ID NO: 121085 - DNA, 844 bp, Zea Mays
taccaataaccaccaacttggcactgcgaattatgcaggtatatataaagaaccggactaaacaaatggtttgaacatctaaataaatggttacatactaaaaaccaatcattcttgatgcagggtttgaaaatatcccaattctgctttgtgggaacgaggttcacctaaagaatagacaggtgaaagcaaaacaagtgatgttccacaagaaaaaagcatgcggtactatgactcagcagctacaactttgagaagcctttctttgtaccttgcctggaagcttgctgggtgagtctcgtttagtagccttattttttattttactggaccaggaccaagccaacgtattttgttgtgtcagtgattccaattgtctctttgttgaaacccctgctctcgcttctcttgatgtcacaattgacattgctacccagcagcaataagtgctcggaaaccataatttctcactcatttgttgaccctgaatgaatcttcatactacttggccttttcaggcatgaagccgaactggcaactgcggcagcccaatcattaccagatgacaatgacgacctgatcgagtagatgttgcattatactactttatctacatgtctcgcccaatgagtcttcttataagttctcgtgtcctaaactttgggatgatgaagtttttttagctaaccgtcctgattagttgggttccatcagatgtgatgaactagcttcattgcaatggttatttgcttaattgctttgattgccaaataaaatgcatgttttctttgtgtttttgtatttcacgaaatagtaggcatttattggggatagatggagatgg

SEQ ID NO: 121086 - DNA, 650 bp, Zea Mays
ggaaaatgcacgcgcgcccgtgctagcggctttgcgaaaaagcccttgttttactgaataactgggagcggggttacgtcactgtttaacggagtcactgacagatgcagaaaagtccctctggttctattccttcgcagaccgagatccccgacggcgacgagcgcagaatcgagctccggcgagcttgtaccagatgacttacgccaagaccggagctctattttggcttaaacctaattcaagcccgaatcaacatttcccctaagtcaatttcatagctcgagctctaaatcaccctgtccacggagacagcgcagagaacggacgaacagaaatgttcccggtgatctagggcagtctagctcaatcaagcgggtcaaggagcattaggagaacctaaggatgttgaaacgggagagcagaggggataaactgaccggaattgtgctggccgtggtgaggtctctcctacggtgttcttgagcagttttgggggaagttcaaaattcacgctcgctggtgaacgattggggctgattcttggtggctggatgcttaactaccttacggagctcgaggtgtcttcaatttatagagcgcaatagcggtggccgggaattgcagcgatgacgcgcggcggtcggaga

SEQ ID NO: 121087 - DNA, 499 bp, Zea Mays
ggaatcactaattgagcccgatcaccattctagagctcggtccacgtacacccgcggagcttaagacattcccgacgcgttcctaatgatctagcgtagcatagcttaattggtcgagccaacgagcatcacaagtgtgtgggtgttgaaacacgtacaaggagggcgagagcggacctggaggtggctggccacggcacgacgtcacacgatggcgcagacaacagatttgggggaagaacgaaattctccggctgtggtggctaatcgaggtcaagggttggcactctagctttgtaacaaactaacggagctagttgtgcactcaatttatagtatccatgagcggtggctccgaatttggaaaagggaagctggcggccgaagaggggggtgagtcaccagcgcgaactaccgtggcgttcaccggggcaatgtctcaggcgatggacaggctacctacgggggtctactgcgacatggtaacacttctaagtac

SEQ ID NO: 121088 - DNA, 402 bp, Zea Mays
gttattggtccttatcttgtaaatcttattcatgagaaccctaggtataccaaattgtcacccgaataaattcttggtaagtttgtgagcgggcacatgatggtagaagaatcaaggtacgtcgacgacatcgccaacggacctcttctcactacgaaccgcaactcgttcactcaaagcaacaaccaacaaagaggcactccccaacaaggtggcacaagttaaggtggtcaaccttgatgaggacgaaatgtcgcttgtgatcaagcgcttcaagattgctttgaagggacgcaaggactacccccaacaagaacaaatcaaggggaaagtgttcatgcttattctggtaattttattgctcaatatcctgataatgaaaatgaccaggaccaagacaag

SEQ ID NO: 121089 - DNA, 389 bp, Zea Mays
ctacaggggaggcataaccgacccaaggttaccctagaacatgctctaatcggactaattcgggccaggatgtgcctgaccacggtgaccgcgggtacagaactcagatcgaggtgttccggttgattaggtgaagtcaagctccaagagctgggcaagtaatgatcacaagcacatgtgggtgctgaaacacgaacaacgagggcgaggacggacctggaatcatctggccgcgagcaggtgattcacggcggcgcagtcgactgaattggggaaaaaacggcgttgcggtggctctgggtgaaattgggggcggggattgaggctacacggccgtaagaaactatgctttcactgtgcgtaaacgatttgggcaaaggtggagaggg

SEQ ID NO: 121090 - DNA, 576 bp, Zea Mays
cagctttaacatgttcatagccagacttttctaaaattgctgcaacccctctggcatcggcaaaagcgcagaaatcaccacgatcgctaaggatctcatcaaaggcttcagcttcttcgccgatccattcgatgattccttcgggatcgcctctaataaatttttgctcagatgtgtatgcacccaccttcgcaaaactatctttcaatttcttagctcaatccaaggatttctcataatacctcttcttcgactcccgaagctcatctacattcttttgcaatcttgcgctagtccattcgcttatttcctgttttgctttagccacttcaaaatcttcattcttctcggcaagctttttctttaagtttttaattttagctctatgagcttcaaactgcgcaacaagactggcttcactagccttaattttgtccaccaaggaaagcagaattttatccttctccgtggctttgttcctcagtttgataacctctgaccgaagcttactaagggctatttggcagctttcatcttcagcatttttctgtgcccttaaagcattgcttagaatta

SEQ ID NO: 121091 - DNA, 579 bp, Zea Mays
ggaagacaagcgtgttgagaaaccgaatctcaagctttcggcaactcatagatgcaacaatggcgaaagcatgggagcaactacaagaacatatcgttgttggccctcaccatggaatggaaaatggatctccattcatagcttcttccacgatctcaataggatcatggaagagcacctagatgttgaattcggtggatccttcttatccttgagcgtcactatcacttgaaccctaatcgagaagatggcaatcaatgaagaatggaaagaagagaggtctagtagagtagtacccatacccgaggagttcatcagcttgagagcactaacatgctcgttgtaatgatggacatgctctcaaagaaattggaagagcgaccaataaaagaggtgcaacatgtctaggccctggatacccacctgacatgtgaggtctgtgggaacatagaaccctcagggaatagctgaactgagactcatctggtggaggcaagcttcatcaatgctagatgcaacttcaacaatgggtatcttcctcaagttggatggaactcatgccccaacattcctttctca

SEQ ID NO: 121092 - DNA, 381 bp, Zea Mays
ttcggattgatgcgcggcgctcgggatcacggtttaggaacggcggcgatggcctccgccgtgttcctgtacaagcgctgtcgcgggatgctggtttggggcgggtgcctcaggccattggatcacgaccgacggctaggatcactctatgcacaccggttggtcaggatggctttgtagccatcgatcggtggatggaggggtaagattagagttcgcttcaatttaatctgcgccactgatctactgatccagcggctggcatatcataccgcttcgctttaatggatgatctgattgcgaccgcagaactccgatccaacgaccagtagtgaccaataccccttcgtcttggacgattcgctaaagagcccctgcagt

SEQ ID NO: 121093 - DNA, 403 bp, Zea Mays
aagctatcccctcgctttattggacccttcagattctttaggtgagttggggagatggcctatcagcttgaactactaggtcatctgtctgatgtacatgatgtattccatgtatctcaactcaagaagtgtatccgtgtcccagaggaacagttaccaatggaagaactcagtgtgcaaggtgatctaacttatacggattatcctatcaagatcattgacactttgactcggattacaaggaataaagtgatcaaaatgtgcaaagtgcaatagagtcaccatggtgaagatgaggctacttgggagagagaagaagagctacgaatagaatttccccacctcttccctagttcctcttaatctcgaggtcgagattatttttaatgggggtaggatatgt

SEQ ID NO: 121094 - DNA, 526 bp, Zea Mays
gttattaccttgctggcggtgttggtgtggcataccttttgtgttttgatgaagacggcgatgtaggtgcaaatctctggtggccgcttcatcataattaccttcttcatcaaacaccgcatcatcgggaagtcgtggacgaggaggtggtggtggcggtgcttgttgttgcgtctccaaccagcaagtctgtcgacgatctgggacaatcgtcgatccagccactcgtaagtcttgccaaggttcatgtcaatgaaggcatcatgcattgacttgtggaccatctcctccatttgctccttcaggagcttgttgtttgcctcaagatcttggcggctaacacattcatcaaagtctgtagggacccttgcttcttcgtcatcgcctgccatcgaaacacaaaaacaggaaacaaagggtgacggttatccctaataatttcactacacgctcctctcaggtggaacacaggaacacgctctaatgtatcttaccaagctcttacaagtgtctaacgaaatacaag

SEQ ID NO: 121095 - DNA, 513 bp, Zea Mays
atcctctggggagggtcacactctaggacctggactgccatcttgaacaggtgtgttggagtcaaactcagaaaaggggctctggggaggaagatttcaggcagaataagataaaggggcaccgacattcgaaatcttgcctctcagcatcaaatcaattcaactcaatatgtcttcttcaggaattcgtctgttggtgactcgggtagggtcattgaacccagtatacagataggccgggtaaactctatctttcagaggttgaatattttgagacaaaatcaacaacaacagcttcagcagtcaagcctctgtctttcaatgcgtgtatttcagcaagcagcactatggactcagcaagttatgaatatgtaggggcctctgtccagctgggcgttcggacgtcaggttgcctccccgatcggggaaggagggacttgttgtggttctccatggtaaaccactcgaggcgccatcctttgatgttgcccttcaaagggatatcaagatatt

SEQ ID NO: 121096 - DNA, 596 bp, Zea Mays
attctgcttcggatatggacagtcttttataaatgaccagactttccatagttgaagcagccagtagaagaactagggagagcggggaaacgagcaccaggggcacttggctgatttgtagaagtgggggcagtggcagggcgaatgaaaacaggctgtttgaacggataggagggtggacgaggcgaagaacagttctggttaaaaggtcggattaccaacctggttcgcttctcaggtccctgattagacctatcacctccaaaaccctttgattttccttggcctgtgttcttggcttctactgccagcaccgtgctaacagctctgctgtaagtaagatctaggcaggtgccattttccgttggagccagtcgttgagtcccctcatgaagcaattctatttcttcaggtcagtgttcacttgatcaatagcatattgggataaatggttgaacttgttgagatactgcattacagtatctcccccttgctttagtcgaataaactcctcttgtttcatgtgaagcactccctctggaacatagtgttcacggaatgctatctcgaattcttcccaagtgatctggtgtccg

SEQ ID NO: 121097 - DNA, 382 bp, Zea Mays
gttaaactacaacgaacaatatcaaatcgctaatctctaacaatgtttgtgacaaatgaagataatctaagtgttgcaatcacttaaactaaaatgtacccaacgaatgatacattagataatcaagaacgcgtaggatcgagtacaaggaaataaaaaagggcaatacctcgatccggagattgggtcaagaactcccaacgagatggaggaagatgatggaaaacgccgggacaaacggatctccaacgactcttccaaaagtgtgagggcacaagagagtttttggagtggagtgtgaaggtgagagaggagaatgagagggcggcggcggctggaaaatgagactgagaaggggaggggagagaggaagagaaataaa

SEQ ID NO: 121098 - DNA, 484 bp, Zea Mays
cattgcttctctaacttcagctaaggcagtggaattcatacaagacataatattcaggttcgggataccgaatagtatcataaccgacttgggatccaatttcacaagctcagagttctttgatttctgcgaacaaagaagcattcaggtcaaatatgcctcggtggcgcacccaagagccaacgggcaagtagaaagagccaacgggatgatattggaagcgctcagaaagaaagtcttcgacaagaatgaaaagttcacaggaaagtggatcagagagctgtcgtatgttgtttggagcctgagaactcaacctagccgagctctgcatggaaacactcctttcttcatggtctatggtttggaggtagtgctacccgctgatctcaagttttgggcaccgaggttaatctttgaaaacatagtagaggctgaggctactagactggaggatgttgatatactagaagaagaacgattgaat

SEQ ID NO: 121099 - DNA, 457 bp, Zea Mays
agcaaaagccgcctaagggtgcagccggatatgaacaacaagtgcgcgatatgaagtatctactataagacatccgagcaaaagccgcctaagggtgcagccggacatgcacaaatgtgcgacatcaccctaatggcacaaatgtcaagtatgatcaccttaaaggtgcgaagtctcttttatctgacacggtcgaacaaaaaccacctaagacgcaaccaggtacgcgtcataagcgtccaacatcgccactgaaagtgaggtccccatcccatttcacaacaagaaatgtcctcatagtttacatacacacaacaaagggttgtcggccacactgcaaaaataatacaaatcacatcttgttgccctccttctctattgtgagccgggggagggcagcgttttcactcactaccgcaacacgagagcgagggcagcaaactcgctacatcggctc

SEQ ID NO: 121100 - DNA, 609 bp, Zea Mays
cgcttttcctcactccaggatgcgaagatgagagttcgcctttgctctttcaaggcaggcgagggtcgccgactacatgtccctactcgtcgcaccgaccaggttttcgtaagcattctagatcaacgtagccacgagcgcgggcttcggtggcctcgcttctcgctaccagaatatcgctagtggaacgctcccttgccacattttggtccagtaggaggcggagcctgtctgccagcatccccgcgaacgattgaaaacgtgaaagtcggatgacaggggattagcaggaggaacgtttcccgcacccagctacccacacacggcttaccacaagttttcggtacgtggttgaaagttgatcgaggttgtctcacaacgccctctcacacgcatcgccctcctcacacaaatctctgcacagggctagggggtcgttgccctcagtagagagatctagagcaagtcggacgcagctcgatcatcaagccccgacgacacaatctgaggctccccgcgagtaaggagagacaatctcccccttcggtctccatcgtgccggcgaggtcggctaaacagagggagagaaaatagaaaggtaaagctcga

SEQ ID NO: 121101 - DNA, 330 bp, Zea Mays
accagaccaagtcactcaactagtgtcacaagatgcaataaccctatgaactgcactatgggtgctccagtcccacccaaatgatgaactacaagataaaagtgagcggaatgtatttctctgatgaactcgttggacataccactagacacgtcttgcaagcattgagtcgatctgtgcaattttacaagatctctaagtgccatgtctaatgtggtctcctatgctacatcgaacacatctggggcactatagagcagaagtgcgcatttgacatgctgtcttagtgtcctatataggtctagtgggccatctggcgcctcactgaac

SEQ ID NO: 121102 - DNA, 503 bp, Zea Mays
acaaatactgtagtgttacccttgttatagaaaaataaagatgaatcagcttttgatggtgagaaaccgaggttcaccagcttggaacttaggcgagagtaccatgctcttggtgcttgtttgagtccatataatgctttatcaagcttacacacatattgtttcttttctggatcctcaaaacctggtggttgctgcatgtagacttcttcttcaagaaaaccatgaaggaaggcattttgaacatcaagttgtcgaaggctccaacctcgagagatagccatagatagaataatacgtattgtagtagctttaatgactggactaaatgtgtcttcataatctattccatattgttgcttaaaaccttttgcaactaggcgagctttatatctatctaagcttccatcagccttccttttaattttatatacccatttacaacctatcacatttgtgcctttttttggtggaactagatgccatgtttcgttattcatcag

SEQ ID NO: 121103 - DNA, 799 bp, Zea Mays
ctggtcgtctacatgttctgcctgcaatgcccttgtagtggtgctgacagtcccctccttcggacgccacttgccccccaagctggcgcgtgcagaaacgtcatctttagagcctcattgtctttctaggtggccagatatggatctaggccggaccagacgacacgcacctgggaaaccatcgacccgccacgacgtatcgtcctacgagataagatctgtagaggcacctgcagaccgatgttagaataaaggcaaagtaggaatgaccgggtggatatgtgatgaagctggaagctgtagtttgtatgccactggtccaaccctttgcacaattgtgtagggaccgaaaaacttgaaagctaatttctggttagatcttgcagcaattgaggcttgcacataaggttgcagcttgagatatacttgatcccccaccttaaagaccagttcagagcacaacttatccgcttggcgcttcatccaggattgagcatagagaaggtgttgctgaatcaatttggaaataagctctcgatcctgcaaccactgtttcagattcgttatctcgacggtagtcactgaatccacaccaaaatgtcggggagcatggccgtaaagcacctcagaaggagaacgtcccaggaccgagtggtagttggtattataccaaaactcggcgacagcaagccaagatgaccatttgcctaggcataaatgaacaaaacatctgaggtagggttcaatgcactggttaaccctttctgtcttgtcgtccgattgaggatgataggccgag

SEQ ID NO: 121104 - DNA, 480 bp, Zea Mays
cgggattgctacgtcaaggcgcagattcggtttactccgtcgaggttgtggtcgtcgatttgggcggcgcttcctcaggtggataatgagagaaaggaagagtggctagagcgcgtgagaagtggaagatgatgcgatcaccgtccaatttagattgagtggatgggattagatctgggggagcaatcaccgtggaccgttgatcgggtatctaacgcctggggttcagatcggttgtgatacgttggatttagatctagcagtatatatcgcataccgattcagcgtaagccatatctaatctgggccctcgattttgatcgaacgacccaaatagctcgataccccttcaccgtgtcaaattttctaaagagcccctttactttccttaaaccaacccgtcgtcctatgccatttaaaaacccttacggttaggtcctattttatgcgagatagaccctggactcttctgaaatagtg

SEQ ID NO: 121105 - DNA, 329 bp, Zea Mays
actattcttcttttaaagctgcttctgcagctttggttagtagtcgagtaacagcttcgtccataatagcttcggccatcttagtaatttcatcttccttctttgcctcggggtcggccaatgactcgatgggctatgggggaggagacagttcggctgcgatataaaacgtaaataagttcgaagtcacaaaaataaaacataaagttaaaagcaattaggcaatacctatccgcctttcgagttctgcagtcttttcagctgcctctgctgcttctcttgcatcatgagaatctttttcgctcgtttttattatctcgtgggccatc

SEQ ID NO: 121106 - DNA, 314 bp, Zea Mays
ggcaaatctgtcgctgccggtggactcaagatttctgacatttctatcactctttccacctggggctcttcggccttatcatcttcagctttggctggcccaactgtaggcatcttcggcactacggttggctcttcagcgctctgtgtaatcggagcagtttgtgttgcttcggctgctaaggaggtccccgcaccaaatttaggcaccacgaccggttcaatgtaacgtggccggtgggtcagaaccttcacctttttgctcttcagcacaggctcagctggggtgaccaaagtagcaatctttctcttttt

SEQ ID NO: 121107 - DNA, 367 bp, Zea Mays
cccatccagattcttcccctctgtccactgctccacaacagtacgaatttggatatttcccgtggggagagcagccactagcacctaggctaagcacttcccccttatcttcatttattaaaactacaagtgaaatcacagggagacgagattcttctttagttttccccaattcagactctggttcactgaaacagcactcatttctccattgcaccctccctgttcaggccctctgatctaccaattcttcgcagcaacagaccactctcccttaaccaaaattattctctacttgtagctctacctattttatatagcaacgcatgactaaaaacatatagaacaaaagttatggtaccccaaa

SEQ ID NO: 121108 - DNA, 536 bp, Zea Mays
cgcacttggaaaatttgttgatggcgaccaacaggtgtgtgaagcccccaggtgccttctgtagaggaccgacaaggtctaacccccatgcaactaaaggccaagtgattggaattgtctacagggcttgagctggtaggtatgtttgcttagcataaaattggcaccccttgtaggagcgcacaatcttagttgcatcgacaactgctgttggccagtaaaacccttgcctgaaggcgtttccaatgagggttcggggcgtcgtgtggtgcccgcaagccccgtagtggattttgcctaacagttcttggcctgacagatgtggatgcatcgctggaggattctcgagggactgcgtcagtacaactccttttcttccccaagtagtatgaatgtcttggcatgccaagccagtcgcctagcctcggccttgccgagaggtagttcccccggaggaggtactctaggtacggggtctgccagtctaacactggtgtggcctcaccctgttctccatcaatccgtatggcttcggg

SEQ ID NO: 121109 - DNA, 715 bp, Zea Mays
ggcgtcagccgtaatgatgattggtgcagcccaacaacgccacacgcgtgactctggaccctagccacacgtcgccctagagcaacccacaccatagccaccgccaaaggccaccacactcgatcgtccaaatccacacttgatctagctctcaccaacacccccatcccacctgttggctttggccctaacctccaaacgtcgttcatgcatgtacgggagcacgacaccacgacgctcccccacgttcatgagtggttcggccacccgacgcccatgccctcttctttataaataccaccgccactgcactatgctcgaggtcctaccctcgaccgctaggctgcctctctgccctctgctcgtgccaccaccaatgtcgtagcagttgtcgacaggtttctcgtgtttgtagcccgtcgccattatcgagttttgtcgggtaagtgtcgacttcaaaacctgcacccaaagcacatcatagttcgctcttttacccatccttttgccctagttaccaccatcctagtagttggatcgccgctcgtgtttacactcgttccaatgatgctagaccacttctagaatcaaaggaatccccgataagttttctagtctaatcttgataaccgtgcactcattaggtcgccattggcacctttctagctcactgttgtcatggttctgcatatgtcgaaccccagcaccaccgaac

SEQ ID NO: 121110 - DNA, 585 bp, Zea Mays
cgaagaacgttccgcgccgtataacggggactcgaatggcggacttgggttgtcgctgccagatccttggcgctcggccgcggcgagtggactggagagagaaaagagagaagggagagaatcggtgatgaagaagacgcccgacatcacttgatcatgcgttggacggtaaggattaaaggatagggatgaagaaaccgggaccataggatggtgagtggagggggtagattaatctcgcgtacccgccgttcatcactaatcgcacggctttgattagaagcaggaaataccccttcatcccaaccgttatccaccgtagaccggcaatctgacgactaaagcgaaatagtggggatcgtgcgctgtgagtcgtcgatctcagatccgacgatgactcgagaatcaggatttatacccatcgccggtctaatctgggcgctcggggttggatcggacggtccaaacatcactgtaccccttcggcctggccattttgcataagaaaccctgtagttaaaagaaattaacccgccgtcctcattagcagtagactgagtctagggaattttttctgcgctagcc

SEQ ID NO: 121111 - DNA, 941 bp, Zea Mays
aagcactctatacctctcatatgcctaagtcccaaaaccagtgaacaaggctaactttggagctctgtatttctaaaaaaataaggaatttgcctagggtcaacacatcaaacttgtagagccactataggagtacaactttgcttaagtgattaagcattgttgttatgcaaaaagtggagataattagccctaaagtctgggtgtcagaccactctgagactgaacattgactgacagtgagttctaaggaactttgggctcgattcttgtgcaaggagttaagcaaatgggcaagatccctatagaaaatttgtagctggtatatagggctacaagtttgttacagatggattggcaagttcttgcacaaaaatccaagatcttggcgttgcaattctgtctgtcaggcgctctcaatcaggttttcaatggtacagtgttcaaatcagatcgccgggttcagttcatctcgccgccggtgatcccgcgctgggatcctcgtcgccgatgcgattcgtgctctgtggggtgcagataactcttaagggtaagaaatatcgcatcgtggatgaactcaagccactgttccgctccggccgccgtacccgcctgagtcacggtcgcttcggataaactcaccagagttatccacctcgcgaccttgcgccacgtgctttggtgctttaacaacgtcgtagtgagtcaccttatcccactcgttcatcgccggtgagcttgccacggtgaacgccacgaattgcttgcgctagtaacctcttccctctccggccgccaccgtgccaactccaaatcacgagccaccatccccgaatcctataaatgagcacaccctcagctccgctatgtaattatgcacccaacacacccactcgtgcctccaattactcaccagagagccccaatttgaaactttcccc

SEQ ID NO: 121112 - DNA, 332 bp, Zea Mays
atatgataatatcatcaatgaataccaccacaaacttgtcaagatagtccataaacacactattcatcagattcatgaagaagcctggcacattcgttaggccaaaagacataactgtgtactcatacagcccatacttggtaataaaagtcgtcttcgggatgtccgaaggttggatcttgagctgatgataacctggcctcatatctatctttgagaacatgttggctcctctcagctggtcgaacagatcttctattctaagcaaggggtacttgttcttgattgtgacttcgttcagagctcggtaatcgatgcacatcttcctagtg

SEQ ID NO: 121113 - DNA, 434 bp, Zea Mays
gcgtgtcattccattaagagagaaaagaaaaagggtaagtttgatccactaatatgccatattttatcaatatccggaataaggaagcagagcaatagtagcctttgtctagccatgacaattactttaggcataaaacaaaacatcttttttgttggaacaataactggtacatctctactcagtcttcactgatttcgcaatgtctaatagtctagaccctggttgttgctttctgaaaacaatatattacgatcgattttagctccttatttaatgacaacatacaagatcaaccaacagttacagacactgaatatcaaagcattggcttggttcaagcccatatatgggagaaatattgtcaaacataataaccaattcaacaaagtatagtttgactcatgcaaaagaggggagccaccacgcaaaag

SEQ ID NO: 121114 - DNA, 731 bp, Zea Mays
ggcggaccgacgcatagctgtgcaactagaaccgagtcagcggcagcttccactagcaacctagccctaggatgatcgaggcgacatgacgctcgttcgcctccccgggaccaacgacacaatcaccgacgagagggtagggggacatgcagagtctcctctcttacccccgattctgagcaatccagtggccttcaaacttaaaagtctccaacgtcgacaagtacgagcccaagcacgacttgggaggctggttggcagtctacacaaccgttacgccgggctgctggggcaatggaggatgtcatgatagtgtacctgcccattgtcctggggcaggacgcgctgcagtggcttcgacatctaccacgacaatgcatcgatgactgggaaaacttcagccgtcggtttgtcacgaatttccaatccctctctaacaaaccggtgcaaccatgggacctcaagtccatcaagcgccagagcgatgagaccctccatttgtttcttaggagatgccaaaccatgaggaactgcattcctaaagtcacgaatgcaactgtgatcgaggatttctattgaggatccaatgactcggccttcatccgagccatcctccaaaaggcactcgtcaacttggaacaactgttccggcaggcggacatctacatcaccgccgacaagtgagcccaagacctcattggaagcgtgaagcctgcacctccagcacccag

SEQ ID NO: 121115 - DNA, 285 bp, Zea Mays
aagttaatggagttaataattgaccaggacatcatcttgtctagttccaggagcagatgagcctaaaaaatgttcaagcttcctccatcaagctccctttattccaaatccctgaacaacaagctaggatacacccaattcagttcttcaatctgtagccgctcttggttctctccgtccctctctgcattagtatgcaccatcaccacaaagaaagtaggagctgtctgctgcttcacaataaaagatcacaacacttgccactgttcttcagttacagtattg

SEQ ID NO: 121116 - DNA, 617 bp, Zea Mays
gcgaggctgtgctcgggcggttcagggccgtgtatgagaagatgaatcttgcattggatgggatgccttactctgagattggcatctccgatgaagtcaaggaacaggtaatgtgcgtgtgttatgtcattatgtgccaacattttggtaaaatggaatatctgacgcaaaccgcaactgcttcggtgatttcaggttgagctcatcaatgcgcaactgaagaggtgcaagaagagaagtgatacccaggacatggaactctccatggattttatgatgatactccagaacaaggacgggaatgcagatagagctatattggaaaggctagccaagaagctcgagctgcaaagcctggcggatttgagagcggagactatggccattaaaaagctcatcaacgagaggaatggccagcaaccagaaagcaccaagcacataatagaactcctcaacaagttcaaggagattgcaggcatcgacgagaagaacatccttggggatgtctccataccaaaatatctggagaaatgcccgtctttgatgatcccaaatgaattcctatgtccaatatcgctggagatcatgactgaccctgtcatcatcgcgagcgggag

SEQ ID NO: 121117 - DNA, 762 bp, Zea Mays
gacttatgtgcaaaagagccacactctttctcaaatgcctaagtctgatttcagtgatattggctcaactttggagccttgtaactttcaaactatagagtttttgccctaggtcaccacatcaaaattatagcctaatcataggagaacaactttgcttaaaggtgtgagcattgttgttaaggaaaaactggagataattgagcctgaagttggactgtcagactgcctgaagtctgaaattcagattaacagtgtgatggaatgaactttgagtatgaattccaccttgatttagtgatcaaatgagcttggtccctatagtcgaattgtagatggtatatagctctacaactttgctataggtcactggatgtgttgccatttgaaaatcagagaaaaagtggcttaaacttgctctgtcaggcaactgaatggggggctctgatggtacagtaccggttaactgcagaagatcctgaaaaccccctttttgctcgtcgccggtggcccgtcgccgttgattgccggtcgctgtgattcatgcgccgtggccatcggataagtcccgcccggtaaaaatcctcgccgccggtgagctggactccactccgatgactcccgtcgtacttcccccccttgcctggcagccgaagcggattaactcgccggtgaccaccgcctcccggccatgcgccgcgtggcttagcctttccaccgcaccgccgtgacaccttaaggctgtcccatcgtcgccgggga

SEQ ID NO: 121118 - DNA, 673 bp, Zea Mays
gaggatttctgtgctctattagcttctcgtggcacagctgctgtgtttttgaaggccgaatgccctcatgcaaaaacggttaacaagccaaccttcagcctttcaacgtcagttttagttgatattcccgctaaagcccgaagtatcggaaacagatttattactcaaatttgggcaaaaggcgggtgttagctagctggaggcgaagctcggaaactgctcgactcagtatgaaacttttatctttgttttttaccttagtttacctttattagattgtcggctgccttatacctttatctatctgcagaatggtggtgccgaagactgttagactgaagcatgttccgaaggtcctgaagactaagattcctgtcttgcatttatctgtggaaaaacttagaaattcctgtttggcaaaagattgtaatcgagacttgaacagaatattgtacatatttatccataccttgtaatataatcctacctcttcgtctatgtatgaattgctttgttgtgggcgaaaccaacacttataatttttgagccgaaggcataacacaccttcccttcttttcgttcacatcgaagcattttttattaaagacgaagcgcctccatataccatgaagtttacctgagaagaagcatcttcgtattcaacaaagcattt

SEQ ID NO: 121119 - DNA, 453 bp, Zea Mays
tgcctgtgacgtaggccagtgggcggagcatgacgtaaggactctgggccgcgtggcctatgcatttattgcggagtggatgcgccgcctgtccaccctgctgacaggtgatgtgtccctttggcatttaatgcgtcctgtccactccgctggcagacggcacccaggccatacagcaggcggcatgcttgtctaatctgaacagtatgcccatgctgtaggatacgcagatacgctatgtccacgagcacttgtgcattaccagggaagcttccctagcacaccaagactacgcggaccacgggtgtcagagcgcgggaagattgctccagcagacaaccattgctgccccaagtcttacatccattgcgcccctgggcccacatgtcggggctcagcacccttgtacacgccccccttgagctataaaagggggaacatgcaacgttacag

SEQ ID NO: 121120 - DNA, 379 bp, Zea Mays
gctctgttccgcccgcctttcacagatgggtcgcgacgttcaccagcagactttactacagcagcgaagtacttatatgagctcgtcagacggacactcctgccgaggatgggatacagggaggctaccactcatattcagctttggctccttggtgccctggtctcccactcacagtttgacgttgtggacttcctgatctgtgagatcgaggacactgttctggatgggattcgtgctcatcggcagttaccttatgctcactacttatgccacatctttgcgcagctgattcagccacctcgatttcagagcacccttgaggcctcacgccttgtgtttggatcttaccgccctgctcctgagattccagtgccag

SEQ ID NO: 121121 - DNA, 584 bp, Zea Mays
gaaggtcgccagcggcacggacacgagcatggaagtctctggatcaagacggaaggaggaagcgactgtcatgtcatggactattatcatcctccacctttagaggatgatggatgcatggaaaattttagcattccctttatcgaacgttgctggagacgtactggaagctcaagcgcgctagatatacccgagaggacggtttagcggcttttgctagagagcctaagaatcgttccttcttgacgacagttggttcgccacctttgcaagccccacattgggatataagcactgctttgttttggagaccgtgcaagacattgagatcgaacacaatgtgcttctttaggagctcatgagcaaggttgcttgacactaacatctcgttgttgacaattaagacctccatgtgggtagcgggcatgatgttttttatgtgtgtatcttggtgaggcaattccagtcgaactgataggagcgcacgacgttgtttgagtcgaagacaaaaaagaattcgagagaccgagagcaaagcattgcaatatgttgcatggcgactatgtcttatggtgctgcttgtc

SEQ ID NO: 121122 - DNA, 465 bp, Zea Mays
tgaggctgatccgacaaaagttgcgtcattttacgcccgacaagagagaagctattcgtgctgagctagctcaattagttgcggctggttttattagggaagtactgcatcctgagtggttagcaaatcctgttcttgtactcaaaaagaataaagtggattggcgcatgtgcgtcgactatacagatctcaacaaacactgtccgaaggatcctttcggacttcctagaatagatcaggtggtagattcgaccatcagatgttctatgttgccattcctggactgctactctggataccatcaaatcagcttggcaaaagaggacgaagaaaaaactgcattcattaccccatttggagccttctgctatacctccatgccgtttggcctcaagaacgctggagcgacttaccagagagctattcaaacatgcttagccgatcactagggcaagcgggtataag

SEQ ID NO: 121123 - DNA, 364 bp, Zea Mays
cccgccacagagagctcggtacggcggccggagttgtttactggccggggcttatccacggcggcgatatttaggtgaccccgagcattatccagacactggtgagcgcgaatcacctcatcggcgggaatcgtggcatgagggtcgtcggcggtgagggtcactgaacctgattcgatcggctactgtaccatgggatgcttcttcagtatgcctgacagtcatagtttagggccaattctctctccatttcctatggcatctcacccgaagatctgcagcaaagctatagagctacaaaccagctacatttccactataggaactgaactcagttgagcactagatcatgcttgaattcctg

SEQ ID NO: 121124 - DNA, 811 bp, Zea Mays
gtccagtgctaccacgtgtggtaaacacaggaggagacggaacctcccccgagcaccattcggacccccagccaagggaggtccggagctgtcacgaggaaggttggtctcaatcactactccctacacaaggcgatgctaccacatgttctacgacgtgtgacgtatgccacgggggaaagcctgacgtcagcctccaagtgtaaagttcctctgcattaactgcggacgagacatatacctgcccaccctagtggcagtcagtgcgtccgcagtacacaggtcgtacaataactcgcgcgttaccaaggtgcctctgcattatctgcggacgagacatataccttactgcctcagtggcaggcggtacgttcgtagtacacagactggttagtaacttgcgcgttaccgaggcaagaccattgactccctacgccgcttggggtattatcattacaactcccaccgtagcccacgagttaccgaggcaaggggaaacaggcagagaagacaagacgacgttgcctgatcacccctacatgcagtagcacgttagccttcgtcgcaatctacttctatgccccgcttcgattagatggggcaagggcacgacaagccaagaggtctacacgaacaccaagagaagatattcgttctccaccgccgcttcgcttactctatgtctagcaatagattactgggcccacttgtcggggcttgatcaccatgtacatacctcaattgggctataaaagggggacacacacgcagactctcgactcacaaagcaaaacaactcacagtggatgta

SEQ ID NO: 121125 - DNA, 1197 bp, Zea Mays
cgagacttcactggacggccacgctgacatcgaaggcatggacgcttcagccgcgcatgtggcgaacctgctgtcctccgagccatctgatggtacgtaccgtacgtactagctaactctgaacaggattgcaatagaacaactaactgttaacgctgactgactgacgagaaaatattgcaatgcaatgccagtgagccttgggataggagggttcagcatgggcgctgccgctgcgctccactccgccgcgtgctacgctcacggcagattcaccaacggtgtcgcctatccgatcaacctcagggtcgtcgtcggtttgagtggctggcttcctagctccaggtatggtataataaataatccggaagagagagagaaaaaaaacaaaatatgcatggttatggttatgttaatacgtctccttaaaacgcatcctgaatcggctgactcttgttcgagatcatcaggaccctaaggagcaagatcgagagctcgcagctcgcgcttcgaaaagcttccggcttgccaatcctgctcagccatggaatgggtcagcacacagcatagcatccaccgacgcgtgtgttcggatttgttgattcatctgctgcaagctatgaatgaaagatctaaagcaaaacatggtttgttttctttttatttgcagccgatgaggttgtcacctacaggaacggcgagaggtcagctgagattctacggagctcgggattccagtacacctacttcaaaccctacaacgggtactgatgctatccagatctctcatggacgtcagttttttctcccccccagaggttaaggagtcacaaaatgctctttttttttatgcaggcttggtcactacactatccctgaagagatggacgacgtcagcaagtggctgaggtcaacgctgggactctgagcggcctatctcgtggctaatctcaaagtcaaatacgttggcatacatagagaaagagagagagaggtattgacaatatgcagagggtttgataggctatgtgatttgtgagttgactgtcatggcttggtaggctgtaactccacgcgcttaatttctctcactgatacatatacataccatgttagtttaccggtaatgtaccctgttactaccactaaagaggatgcctgtaatgcagtatttgtattgctcggtttttaaataca

SEQ ID NO: 121126 - DNA, 350 bp, Zea Mays
atagtcttgttttcgtacaggagtgtacgttctctactgatttgagttgggatgattgagatatatagtggcaacagctcagttaccaatatattcaactcgatgcagcactcctttgttaattgcaagaattgcttagtaatatatcaggtgccacgctgatctgagctctcagctgcatttgtacttgcacgctgtcatttttaaacacacttctaattttgtggtttagttgtttaataacatgatataattaatcatgtatatatagactcaaaaaaatatatctatggactgacagccaattgcacccatatatacatgcaattgttttcatgtttcaatgaaaa

SEQ ID NO: 121127 - DNA, 579 bp, Zea Mays
gtggatgtggaagatgatggttcagatggaaaatcaggaatggaaggaagacacatgaaagaagtggattctatgggataatatgagtgagtggacttgttgtgaaagaagggacgattttcattgaaactcgcatctctagaaattcgaatacgacgagtagatagatcataacaacggtagcctttgtgttcaggactgtatccaagaaagacacactcgacagattgagcagtcaatttagtccgttcacgtggtggtaacaggacataacatagacatccgaacacacgaagatgatcatatcgtggagatgtcccaaaaagaactttacctggtgttttgccagaaagtttagatgatggttgtctattaatgagatacacggcagtggaaacagcttcactccaaaagtgtgaaggaacaaaagaagatatcaaaagagtacgagcactcccaataatatgacggtgtttgcgttcagcaacaccattttgggcatgatcaccagggcaagaaagttgaggcagagtaccctctaaggtcaatatctggcgaaaattattagataaaaattca

SEQ ID NO: 121128 - DNA, 752 bp, Zea Mays
gaaacaaccaaggacaagatgggtaaaaccacactctcgaactgaaatgggagagagaaggctttgaaatgcaggtacaagataagcatcaatgtaaatatcgagagatgacaatagttaaaggtaatataagatagaatcacaacaagggatggggttgggacaaaacttacaaggcgacagaaggggaagcgatcaagggagggataggtaactcaccacttttcaagctaggttggtaaagaggaggcttgtaaagagtaatttcgaagtaaccatctaggtaaggacataaataacgcaagggtcaaaggtgataaagacaagggtgtaagagaaaagatacggtatcggagaaccaaggataccaacacaatgaaaaatggagttagcaaaaggcttgcacgcgataaaggagatgtagccaaggggagataagtaaaacgccgttctcatgttgagatagaaaagaggagacttaaaaagtagacataacataagcatcaaggcaagatctagagattacaaggtaagggagataacagacaaaagcataacaaaggatcgagttaaggcaagacttgcaagtggtagaggagaggatacgactatgggccagataggtaaattgccactctcaatttgaggtagaagagagggtattctaaaaaaacaggcaaaaagataagtatcaaggtaaaatcaatagatgacaaaggtaatgggggtaacaattaaaaacacctcaaggg

SEQ ID NO: 121129 - DNA, 563 bp, Zea Mays
tcaaccatgatttgttgaggggtcataggcttgaatacaaactttctccctttcaaatctagtgtgtactgatttgttcttccacaatgctgagaatatcggtcatattgccaaggtcttcccaacagcaagtgacacacaaacatgggtgcaacattgcactccactgtgtcaacaaactctccaatcttgtacgaaactttcaccttataaccaatcttgatatctccttattcattcaaccattggacatgatatggatgagggtgtcgctgcaacttcagatcatgcctttcaaccatctcacgacttacaagattatgactacttcctccatcaatgatcacctttactactttgtcttgcacttttgatcttatttgaaaaagattatgtcgctgtccaatttcagcttctttcatttgaacgctcaatatttgtgtaaccacaagagcggtactatgctcaaattcacatcctgtatgttcttccaatttatcagtgtcatctacatttcctgcttcagatttctcttcactagctgatgtatattctccatcatc

SEQ ID NO: 121130 - DNA, 505 bp, Zea Mays
ctggtttttgacttagagaaaaattggttgttcttgggtgttcttcacttgggggctgaatttgagaattttgtgggacctttttggattactttctttaccatttcttgtagatatattaatgtacttaaactttggtaaagggtttaagtcatgaagtggtcatttgattagctttcccactaatcccatgcttggaggtctaatggctcaagaaggggtctaaggtttgagccactttttccaaggtgaagatgtatgaaaatcttgggtatttctgttgtcatgatcattccttaatcaatccatggtttataaggttttagtgcccctcctcccccacttagacacatgtgataatagaccataagtgcatgtattgagccagggccgtgggtacactacaacacatatagccttctatgacgaatacatcgtgacaatagaccaaactgtcataaatctctcctatttatgacgttttgttgggatcgattgacttcag

SEQ ID NO: 121131 - DNA, 448 bp, Zea Mays
gttgggtttgtctcactgtcgaacactgagagaagatcccgagtttgacgtgtctagggcacgcgtcccaatgccatcttcaggtatgaggtataggggttagttagacacatttttgttaatgggagcttagagttttgagatagagatcaaggtgaacgcgctcggttttggtttagaggccgaaaattcagaaatctgaatttcagatttccccattacacctccacttgaatggcttgcttggggtttttaacaaaccattgtggccaaacttttataatctttattgtagcttagttagtgtattccaatttttataattgtcctaagccatgattccatgtttttcatggtcttttatcccttttcttcctttctacttaagtggcttaattagggttggtctagggtttcaacattttcccctttttttatgaatacctca

SEQ ID NO: 121132 - DNA, 455 bp, Zea Mays
aatcgatgttgtttttaagacagcggtgatgaggggagaaaaattatcatgggtcaggtaaggctttgggtgagcaacctttcctgatgacttttatatatactcgttggtggactgaccttggacaagtatgtcggcgacgacgggtggaatgggggacggggtccaagccccagtcagcctcatgccatcacctcctccgcgaccgtggcaggtgggtatggcttcttctctggtgtgggaactgtcgatgcgaagggttcggcactgatgggactctgatgggacgttgccatgcccccgatatagtcgctgcaaacaatgttatagggtgattgcattctaggaaaggacgacacttgatgcaaacgatgttattaatcttactccatgcattcgagataaaatttctcataatcatcctgcattatgtagatgttagtatatgaaaaccc

SEQ ID NO: 121133 - DNA, 763 bp, Zea Mays
ctcagcacctttggttattttgctgcctttctaattccggctcttttaccgggcttgtactagcttcgatagacatcgcaggagttgtttctgtggctgagggggcaccctctgcactttcaataagcttcggcacctcggccgtcctaataggcctcggcctacatgtcaagaccttggccctcttcgacttcggtgcactagaagaggttgaagcagcaactttccttttccccttaccttcggataggaaaatagtaatcagggtaaacaaacccaataacatcaaaaaccctgttcaacctccttttccctcaagtgccgaaggcaactgtcatggattcgtcttctatccttgagtaggctccaagtagatcatcactcgttgcctctatagcgtctagccaatcatcatttggctcatcaaattgacttctgtaccggaaactgtacttaagataaaccaagctagcctgactggagctagcggcagcttccttcagtatttcccattcattctcaagaggccatactttgaaagcgatgtgttcttgaactaaatctctggtaccgatgtaggtacatatggtgttgaaagccattaggcacgcttgcacctcattcccaattgcaattgatggtcttctaatgccgaaacgtgaccatatgggatgttgaatgatgcccctcacatcctccctctgattcatatcattcttcacgtaaaaccattgcttcatccaagagcccgaccacttcttcc

SEQ ID NO: 121134 - DNA, 644 bp, Zea Mays
ctcgcacaaagccacaaaagcggtcatatgttgaactccattagggttgaggtggtgtagtcggatcttgtaatagtgaagaagccccaccaggaacgggcaccacgaagccccactcgtggaaatgcatgaacgaaaccacgcagctcgtcgacggttttggaacgccctcggagccagggagtaggtggtctccttcatgtaggaggctacgagaaatgagcgcatccaggtggctttgatcaaccaaggagcggctccagaatcccatgatcacccaagagcgaatggcggtggtagggattcaaggcgagaggcaggtagcggtgatggagtaagagacacgcgacgccctataagatgaatagggaaccaaagcaaagtggcgcctcaaccccaaattgataggagcgacccaccacgacgtgaccttcaaattgaaggcacgacccagtaagcaataaagaatctaaactaacatgttgccgacaatggtgaacaggcctggtccaaacaagacgcccacccccgaggttccgacctaggcgcctggcgacaaccatgcggcgcaggtacgacgctgagtcccgaagccgcacgaccatgcttggttatgatgactcatctcgccttgtcgattcgtg

SEQ ID NO: 121135 - DNA, 444 bp, Zea Mays
gcgtcccggctgaatgggcatacacactctaatcctagccacttatttcatgatcaacggtagctcaactcctcacccctatcaaatctaggtcacaaatcatgggatcgatagcccagacaccgtctttcccatggcaccctccatacgcacacccagggtgacgatttcgcacgctagattaagaatccgatgaagcacagagggcgatcttaccaccgatgaagtgagcagatgacgacggcgcatggaggaagcaagcagcccggcacatgcgcgcggtttcgtgatgaggcaccgaatcgggagcatcgatacccgcattaccacccatggagggggcattatgcgctgagcacccgaccccacacagcgctgacacaagacacgattcccccaacactctgaagacgaacagaaactacgaggtttgattggtgttga

SEQ ID NO: 121136 - DNA, 346 bp, Zea Mays
ctgtccctagttcggtgctacacgcttcacttaactcagggtgcgctcaagccccgcttaacgaaggcaatcaccaaaggttgtactacgacccatgaacaacgttacacactctcactacaccttgacagcacagactcaattcttacttcataactcaaacaaatctccttcatgcatatcaattttcctacattctctttcatgccatcaaaatatccttaactaacatgcaggtcataggtaagtcttaataagatctacaaagttcaatactcaaagttacatgatcaaacatcaagctcgccgaccactctaactagcttgggggctaggtcatctctcg

SEQ ID NO: 121137 - DNA, 356 bp, Zea Mays
aaagaattctattgttgatgacctcggccaccctagcaaaagcgatcatacactagctagtaatatatcacactaaggtaaatgacatgtgcagtgatgtcatttcctaatcccctcttccgagcatggtctatccaaattgaatcccagattttttgtaatgaggaaaaacactctcaaagctatagtgcctcttcccccttttcgtcttgttcgatttgtaattaaggctttattctgttaatctgttccacatgggaattgagtgcgattgaatcccatgcaagtcaaaatctctcttatccccttccatgtcctaatatcccgtcaaacgaaccttgcatgaaggatcaaac

SEQ ID NO: 121138 - DNA, 380 bp, Zea Mays
atcttcctttaatacaataaatccatctctaacaataggccaaatctttcctcccatagctttaagatgcattgacattcttattttccaatagtcataattgttcccatcaaaatgcgaccgttttccaatgtgcacattgttgttactagccattttgtccaactccgggatgataaaatccacaatcaatggaatccttggctctgataccacttgtaggatctaggacaccgtctagaggggggtgaatagacggttttgactaaaataaagtacactagagaaatttaatcaaatcgacaagagatataaaattactagccttgatgcgacaacaaatataatgattaatttaagctaacaccacaaatgataga

SEQ ID NO: 121139 - DNA, 333 bp, Zea Mays
cgagcagcctatgggtactcaacattttgaacttccagtggatgcccacgccgagggatcaacaccaccagctgtacctaagaagcctaatcaacaaacaaagctagcaaacttcattgttgatgaggacacgagggtgcttggcttgctgtaagttgtgatcccataattaacataggccagaagcgtcaagggttttggagacgaattactgaggcctacaactcaagacgaggaacattgcccaaaaggtcgacaaaatctttgatgagtagatgggatactatgaaaacacagtgttctaattttgctggttacatgatgacagtcctc

SEQ ID NO: 121140 - DNA, 572 bp, Zea Mays
aggagaagacccgacgtgaacatccatggaagtatgagaaagagaactcgctcggacaccctcgggggctgggtcatagctcgcgctgccccccccccccccaccccgagccggatcatcaccggcaacaccctcgggggctgggtaaacgcaagcatcatccttggggaccgagttctctgtaacagccacctctaaggctgaaggactttcaaccacttccatgggaacgaagcaatccagattggcctctcgactcttaagaccacgctccaaggtcgatgaggcacgagacgctgctcgggataactctaacccggcatcaggcacatcagcgcaaacttccatcattccaccatctgcgggctcggacaacagatcttcagggactatgtcttcaagagtctgatcagaatttgccagagacaattcctgcagacaaacgagagcagacaaagctagagaaggaacaccactactctccccgctggctatgtagcgccgactgttcttccgaattaaggggatttcctcctcctcttcctcatcctcatcaataatacggacagtac

SEQ ID NO: 121141 - DNA, 529 bp, Zea Mays
gaatttttgtgtttgaggtcgctatatttgtcaaacagtctgttgaagttagagcagaaaatctgtaacagacatacgtgaatttttttgatactcttgagttgtttcttgtttttgcggcacttttgtgaaaaagagaatataaaaggtaagtgcacaaaaaatcaacacaaaacaaagaaaaaagaaaaaatcaaaaaaagagaaaagtgtgtgcataagcaggaacaccattgatctgtgcacctctatgattcatcttatttctatcttgtttccttgctgtacctaaatccttattaccttatttgtgtcctacttcaactgttctaatacattctctaggccagcagctaggatgagtactttagacacttattcagtattgttatctgttactgacttgtgtgccacaaatatatattagtgagcctttccaaagctccacctttctctcgagcagaacaggtgctcctttgcaatcacacccacactctttgggctatcacatcggccactatttgctacc

SEQ ID NO: 121142 - DNA, 494 bp, Zea Mays
caagttcttgttaaattttcaagggtacaggcaatacacagaagccctggcagaattatcactctataggcagtaggaaaaagagacccttcgagagtactataagaaattcctcttattgaagtcgcagctgccttcggttgatgaccacatagctattcactatgcaatcaacggccttcgtgcaggtgttctatatagccactgcataagagacccacccaaaaacttgcaggagttatatcaacttttcgaaaagtacgctcggtcagaagagcaacaccaaaggaaaatcgagtcacaacgaaagcccaaggacactccccagtcgagcaggacatgggtcaggccttcgcaaccggacttaggccagcaaaaccgcacccagtcccaggtgcacaacatcgcaaatcaacaacatattggggacaccgctcgtcgtcatgattacccttcgtagcaaggccacgatagtaacacaaccagaggcaggg

SEQ ID NO: 121143 - DNA, 343 bp, Zea Mays
cttatcctctacttcttagaatcctcaatgttttctttgccctgatcgctttttcttctaacaggcttggaagccaaactcgagaagctgcgccgttgttcgggttgggcttcggattttatcggggcttgtggctcttctcttctctgatggagcgcataaacgatgtcccgtgtcgtgttcggggcgtcgttggcctcgacgctcgcttatatatgtgccgccacagtgctgctcgtcggggagcttaggaccggctgtgacctatatgaggtcgtcggccctccatcggtcttactggacaaaggtacgaaggagatgctggagtactatgataatgcgt

SEQ ID NO: 121144 - DNA, 508 bp, Zea Mays
cttattctttgctatagtcatggctgcagcaacctcaaccaaggctggcttctcatcaccatcaaccaatctcagcacgacaagaagcggtaaagaagctctaagacaatcctcaattgaattccaaaattcttgagagaaaacaatgtcatatgcttttttacctgcctctgttttggataccttggattgagtgaaaacatcacttgaaaatagacctttcaatgagttcttgtgcttgtgcaaactcttcatggtaaggaagacaatagcaaatctagtagcagcaggtctcacaagatccatcccatttgtacgcaccctcatttcactaagtatcctctcatgtctataaataaaagtggtgacatgacgagcacgagcaataagcttcttaaaatccttcagttttcctatgtcctccaacataaggtccaagcaatgtgctgcacaaggagtccagaacaaggtaggaatcctctccattaaaatcttacctactgcctta

SEQ ID NO: 121145 - DNA, 407 bp, Zea Mays
gatacaggaagattagtaagttgtcacatggaaaatggagaacaagactcctcaaatcacgttgttagaacgaatgagcatgatcgccatggttcagtgatcataaagatatcaggtgccatgcgctcaacgccggtgatccaccgccacaattcacgcccacctgggagattcgtgccaggggaagagtagataacgtcagggcaaggtgaaaatatcaagtgcggggtgaatccggttgttggccagaccggccgtcgtgtcccaccgtggttaatcgtgctagcatcaccggagttcaccgttatccggccaggcaacgtgccttaaagccttaccacgtcgcaatagaccgctttaggtagcttgttcatcgtccaagacactgcctcggtgaaagccacgat

SEQ ID NO: 121146 - DNA, 306 bp, Zea Mays
ataaatacctatatatgggtgttgccataaaacacaacagcagtcaacacatctagtctcgtttcttcgtgcctactgtgcctgccgcatgcgctacttcatccatatcatctgtgtgcatcatcaatcggtagagcaggtcttcggaactgtcgccttcagcgatctagccaggagagggcgagtaaggtttatgagaagcgctctacgtgactcaaccccgtcactatggtttgtctgcctcctcgtcacatggcgttttacgttgtcggtaacaacgaaacggtgttgaacgttagcgtcaac

SEQ ID NO: 121147 - DNA, 523 bp, Zea Mays
cttccccttgtagttacttatctattttgggtaaaataatcgcttggtacctattctcacgagagtgtaaccttgctacagatggcccgcacgtggttgactgcccgcaagtccactgggggaaaagtctcttgccaccagttagcccctcgggaggctcgttgccacaacaagttcctgttggagtttgggatgcccacgttgttgtagcggatactttactctctaggatatccggaggggaaggagcctcgctactattgggataaggagccactctgtgatgggatgctagtctacgtgacagctgtggtccgtgctaagggtgatgaccctaattggggcggctggcacttcgagagtaagggtcggacacccaaggagggagctgacagggccgcatacatggtattgcaagagatcatggagaggtttctaggagagctcgctattgcgatcgccagggtctttcctcggggtgacccttacacctcggtgtggaatcagccaaagggaggtgctc

SEQ ID NO: 121148 - DNA, 824 bp, Zea Mays
gaagcgaactgtgttgtcgacgtcgtttattggtggtcctcgtgacatgaaacgtcggtatatggatgctatggctctggtgcgtaagtttggtaaaccagacatctttcttaccatgacatgtaaccccaactgggatgagataaggagggagcttctccctgggcagacaccgcaagatcgtcctgatcttgtagtgcgtgtctttcatgcgaagctacaggagttaaagcataggctgactaaacaggatattctcggtaaggtccgggcctacgtctacgtcgtggagtttcaaaagcggggtttgccacatgcccattttctactcatcatgcagaggaagtacaagctcacgtgccctgcgcagtatgaccttttgatctcagccgagatctcacacaacaagtaccctgaactacgaaagatggtgatcaagcatatgatgcatggcccgtgtgggtcgctaaaccctaactgcccatgcactaagggtcatgcatcgtgcaagaatcattactcccggcctttcagtgacacaaccttgcaagggaaggactcatacccgatttacagacgtcgtgatgatgggcgtaaggaaaaggttcgaggatgcgaattggacaatagatgggttgtaccttacaacccttacctccttcgtctcttcaactgtcacatcaatgttgaggcgtgcgggagcatcaaggctgttaaatacctgttcaagtacatatacaaaggccacgatcgtgcgtctgttgttatgagagatgcaagcaaggctgatgatgatgtagatgagatcaagcagtacagagatg

SEQ ID NO: 121149 - DNA, 1353 bp, Zea Mays
gccaaatattcctcgctagaaaattgaatatttacaccatgtgccaaccgcctacctattttgctctgcttggtgcgaaagcttcggtctcctcctgtccgtgtccccttagtcttctgccattcccgctatcgcggagcgcgcgggggtcatgcttgttgcctcacctactccagaggcgtcaaaggtttccgtctacttctcatccaactcttcgatcactttcttgatttttgccacggtggcggtgctggagctgaggtctaaggtttcgaacatgcggtagaagcaccatataagcctttccataatggaattccaaactagaagatggaatatttacagttagttagaagaataatccattttctgatgccaaatattccttactagaaaattgaatatttacaccgtctgccgcccgcctacctatcttgccctgtcgggtccgaaagcttcgctctcctcctgtccgtgtccccttagtcttccgccattcccgctatcgcggagcgcgcgggggtcatgcttgttgcctcatctgcttcagaggcatcaaaggtgcgttgctactcctggcaacttttggtttctcattttctccatggtttcttcctagagctttttccccaaccactgatggagcagcaggtgattcagatttatcgacagccgttggaagagccggacatgttttgggcgccgattgagctcagcatcgcgagtgacagccaccacggactacaggtacgtaacgaggatcgcctcctcgattacacttatccattggtcttcagttgaatctgggcaaaaatgatgtatcgtgagcgatgcctactgacgacacaccgatatgaaaagttgtatcatgactgataggatttgtttgccctgtccacaatatgtatcgtgagcgatgcctactgttctccgtgtgaatggctgtatcatgactgattgggttcgtcggccctgtccacaagttgtatcgtgaacgatgcctattgttgttggccttgtccacaaaatgtattgtgagtgatgcctcggacatcatcaccaccctaagccacaagacaccgaccctaaaaaaggtatggggtcttagacatcatgagtcatgatacaaccattcacattggtgtgtcgtccctgctgaggcatcgcttacgatacatcatttgaacagggccatgaaatcctatcagtcatgatacaactattcatatcggtgcgtgctgaggcatcgaaggaaaatgatacaactattcatatcggtctgatagaaccatgcgtgctgaggatacaaccttaccgatagaattttacgatcaaaacaaacacaaagacagg

SEQ ID NO: 121150 - DNA, 329 bp, Zea Mays
gttgtatgccaaattgtctaaatgtgatttctggctgagggaaattaaatttttgggtcacacaatttctcaggatggggtatcagttgatcccgagaaggtacaagaggtaatggattggaaacctcctaccacagtgagacagattcagagttttctgggattggcagggtattatcgacgattcattccggatttctccagaattgccaaaccaatgactgaactgttgaagaagggagtcaagtatgattggagccagaagtgtgaggatgcctttcatacactaaggcaacacttgacgacagcaccagtgctagctcaacctg

SEQ ID NO: 121151 - DNA, 373 bp, Zea Mays
ttgtttttcctgatgaaatgggtgcctattgatctttaagcaggtccgactactatgcatctaagagacattgaaacttgaatgaagcgaagtgttccaagcatgatcagttgtcccagcttttccttgactagtctgacaatgctatcactttcggtggatccaaccatcctgagcacgtccgtagctatggagatacccgctcattgagaaccccatcgtcagctccctacaactaacaaaggtattaatggatggggggcagcaggatcaacatcctcctctattctacgccttcgacgccatgtgcattggccgagactgcctatggcccatcggaggccccttccatggcatcattctgggaagacaa

SEQ ID NO: 121152 - DNA, 572 bp, Zea Mays
gtgaagatacaatgaacttggaaactttgtgatcgagcccctatgttgctttagtaaatgtgtcttgattcgggcacaatgttgttgactgtgcgagactcctctcgaatgccacactgttgttgcgcttggcgatgcccttctggttgctggttatgagccaaggtaggtgccaaaggtggtggtggtggtaactgggcccatgcatcttgagaatgacttgccaaagaacctgatgcccatgggttgttggttgcccacatattcagggatatatggcgaataacatgaggcagtatgcaagacttgctttggctgattctttcgcgcttcggcttcagcgatttccttctgcttttggatcgtgacttggcacgtccttgttgtgtgtcccatatcctccccacagaataagcagaacaatctcctaggttgaatgttgaaccttcctccaaagcttcttccccctctgcctcttggagctggtggcctgtatgaggtttgttgcattcccgacgattgtgagcattgctggctgccctgggtgtggtttgccctgtcatcatttgtgc

SEQ ID NO: 121153 - DNA, 438 bp, Zea Mays
ggatgatgtaatcaatgctctcttttaaagcttcgggagtaggagtggcagccttttcaaacgaaatttgctctgtggccttttcttctattgccttttcttcaaattccgcaggcttcgtcttagcaggcactgtgggccctgcctcgctttcagcctgggttattgtagtctcaacttctatttgcttagtatcaactttgggttgtgttttgtcagcttcagcaactttccctgtgggagcgggacttatggagtcagttgtttctaaaatatctaacacatttaccatcctccttctcttaggagtgttggtagaactcttttctgccttcagtgttgttgcttctgttgaaggacctaaaatctctggtatttttgttacttcttcagtttttgacttttcagccttatctttgtcaaccttcgtttcagcta

SEQ ID NO: 121154 - DNA, 428 bp, Zea Mays
tctttggaatatctgaaggtcgaatcctgagctggtgataacccaacctcagatctatctttgaaaacatgctggctcctctcaactggtcgaacagatcttctattctaggcaaggggtacttgttcttgattgtgacctcattcagagctcgatagtcgatacacatccttctagtgccacctttcttctccacgaataggacaggggcggcccaaggcgaggtgcttggccggatgtaacctttctctgacagctcatcgatctgcttcttaagttcaactaactctggtccagatactctgtaagctctcttaaaaatgggggcggtgccaggaagaagctctatggcaaactcaacttttcgctctggtggcatgcctgttaagtcctttgggaacacatctgggaactcggacacaaccttg

SEQ ID NO: 121155 - DNA, 407 bp, Zea Mays
cagtgaacaacactccacaagcaagtgtttgtaaccagtagccagtgtagtgagaagtcgagattgaaaaggaaagaagagttgtcagtagcttgtgaacccccattcagatctgaaactaactcgagttgtgattccctattagcagaagtcttcctagatcctatattgtgggccaagagcaccatcagggctgcgataacagtgagaatggaccaaaactatggtgggcaagagctatttgcccagaacccaatttgcaaaattgtgaatgcatatggaagcatgaaacatgtatgaatatgcacgtcgtacctgcgaacacatcgaagaagctaatgtccctcctgcaagaactcgatgacgcattgcctatggtcaggttttcactaaaccccatgcccatg

SEQ ID NO: 121156 - DNA, 592 bp, Zea Mays
ccggatgtgggcggtggagattggatgtcttgataaccccttcgtgacgaaatctgggtcgtcgatccgtgcgccagcggtttggatcgaatccaacgtgtattgtttcgttgatcggatgctgaccctcggattcggatcgggtggtctgagtgctctagcggccgcgatctaatctagacggttggatcatatcgggcggctgtgatcgaagcttaccccttcgcttggaatactttctaaagagaccctcgtcttttcctaaaccaacccgccgtccacattcattattcactgagtcttagagaacttcggtttaggcccctgacgtttccagtatttggcgcccagttcagataattaataaaacagagaaaatcatttagaaaatagtttttagtacatatttaaatgcagattcttgtttaatttgtagaaaattcatataatgtccaaatcagttcattccagtttctataattatataatattattgtttatcacatagtacctctggttttgacattaagtcacattaaaatttatattctaattaatcttatatcaaatacataaaaccttagaaaaatca

SEQ ID NO: 121157 - DNA, 570 bp, Zea Mays
aatgtaactggaggtttggctgggaccgatgtatagatggggaataataattatcaatatgttctatgtactccgcaccgaaccatccggtaagatacgctgactgttcggtgatgtattcggactgtccgacgctatgcgtggacggtccgaattgatcggttagggtttgcgcgagatgcggtggctctggcgctgacttcggtaattcggttcgaaaaatgggatcggccgccgctggcccagacggtccttagttgagcgtggatggaccggtcatgcgtagatcggtggatttacccctgatttgcgcaggaggttgtggttgtctagaatatgtgtctatcagcatcccgtaaaggggttgggattggtcgtgccaatttagagccgatgaatcgcgtgtgttttccctcgtttcaaccttatgcaatggaaaatttgtgatagcagatttatcaaatacacgtgctagcctcttataatcatcttgcataccccctaatatttgttgcatttgttcgtgttgcttatctatgtaatatataaaagattggatttcgtttgttt

SEQ ID NO: 121158 - DNA, 590 bp, Zea Mays
tgcaaaatgaattttcaaataagaacaaagaaaacatgacttccatggaagataaaatttcatttatatggggagaggagccttgacaccaactctggaagactttggcaccttctaaatgcaaaatgttcctattgttggccatcaaaaaacagatgttggacagctgacacactcgctaagagagggcccgatcatccagacaaatgtccactatgtgatcaagaagaggaaacagcacaacatcttctaacatcttgtctggcggcaagacaagtatggttcatcttgttaaacctgttgcagctcataatttcagtgcctcagcaaaatgaacgcagctttgctgactggtggcgcagaataatgaaaagagtaaggaagcagcagaaaaaaggagcaaattccctcagcattcttgctgcttggtctatctggaagcatcgaaatgactatgttttgaaaggagtttctccttctattaacacaattcgagatgccataaaggatgatcttagtctttggggtttggccagggctaagaggttacgagagcttaatctcgtgcttacttcatcagcaagctaagt

SEQ ID NO: 121159 - DNA, 398 bp, Zea Mays
gtcttattgatcctattctccatctatatattgtttaatagattgaatatcgtcggatttacttacattggagatttgagacaaaggtagaagagatgcgatctcgatctctccatgtttggtaatcttctggtgacgatccaccacgaagtgtgctaagaaattctccttcgtctcctcttgaaccttggcgagttggccatgtgcatcctcttccacttggcacatgatatccttatacaactgttgctcagtgaccgacaggttctcaatagttggcctaagaatactgtcttgggagacatcagtgcgttctttagaagcggtcatttggggaccaatttttagtagatctagacaccctcgtccttagcaaagtcaccaaaaagtatgttgcc

SEQ ID NO: 121160 - DNA, 1530 bp, Zea Mays
tggggaagccgagaagaagttgattcgttttggcgaggaagaagctattccgaagccagaaaatgatgaggtggtagtttatagaagttttttcaaagcaggatcactacaagagaaatgagtattaacgataggatatgtggtcgttaatagccaaaatgtggtcgtcaaaagtaaacaacgaccacaaaaatgtggtcgtcgatggtcgttaaatgttccgtcgtttattgtagtaacgaccacatgtagattccggtcattattcgattaacgaccggatatataatggtcgttagttgtggggtattaacgaccgcataaaaatcatcaacaaccaaatgtacagcttttagcgaccacatatgaggcatcaacaaccttggttttagctataacagacatgactattaacaaccacatgtcaacattaacgtccacttacaatagtattgaaaactgcagctgtaatcatattacattaatagtatatcaaagacaggaaactaaatttcatttcagcatgcaccaacaaacacttcacagctcatatatgaacctcatttgaaacaagtataaattgtattaaccaaaacaaatctgattattacatatgagatgtatttccatatagtataaaatctgaaaaatctttacatcaatgatcacactaggactatttgtctaactactacttaatctgttctttagttcttcccactcctgttccatacggctcatacgactgtttgtagatttattttcttctcgtagctctctattttcttcttgcattgctcttttctcatcctcagactgtttcaacttttctatcaattcagcattactaatgcatggacttctaaggtgtcttgctttcacgccaccaccatatccaacaatgtgatcctgtctctttgaagggaagcacttatccataagttctgcattagaaagagaaggatctaatgatatttgttcctcaagttgtgcctacattcaaagataccttaatttcagagatttgtattattatatatcaccaataaacagaaatatatatgacttcataagctcacatgcttgctggagaattcagaatctagaaaactgccaccctttgtgtgagtcatgaaaaataaggcatccaaacttggagggttgttatcctttccgccccagtatatgcatggaatatatgtaatcaaaactaacaagtaatacaagaaaactaatcaatatgtttagataaaatgtcaaatacttacattgtcataaattacttttctaaatggtttgctgccactgtgatggacgattgtcaagttagatctattttttgaatttatcttgctccttgcctagaatgcaatgaataattagattaatatacatgttaacaacaccatctcagcagtaaacaattaagaacagtaatgggcagcaatatagcacttacaatgaactccttactatagaaatgttctttaaccaaccactcccagtcagcttgtggaaaatcttcagggc

SEQ ID NO: 121161 - DNA, 284 bp, Zea Mays
cttacctcattagccgctcttttagagtcaagccgagcattaagagaggaattcaaagaatttgcgtcgtctaaagaagccgaaacccgggctaggtcgatctgaccttgggaatacttctcctcaagctcagaatactgccgggttgagtccatttgatactgaagatgtttcgcctcgagctcagagtacctccgggtcatatctggcaaaaagcaaccgaagaaagatacacaatcaaaaaacaaattaatcaatcggccaagaaagaagcaaaggtacca

SEQ ID NO: 121162 - DNA, 516 bp, Zea Mays
cagagagctgccatacatggtctggagcttgtgaacttagcccagtcgagctctgcatggaaataccccgttcttcatggtgtatgggttggaggcggtgctgcctgccgatctgatcttcggggcacctaggctaacctttgaaagcatagttgaggctgaggcaaccaggctagaagacattgatgtgctggaggaggaacgattgaacacggtaaatcagtcggccaggtaccagcagaccttgaggcgctaccacgacaaagctatgcggcacttatcctttgcagtgggagacttggtcctccaccgagttctaatgggggaggggtgacacaagttgtcaccaccatgggaaggaccgttcatcgtagcagaggtcacacgaccgggatcatatcggcttactcagatggatgatacagaagtggggaactcatggaatattgagcacctcagaaagttctacccttagcgatgcctcaaaactcctgagggaaagttgtatgtcgtagc

SEQ ID NO: 121163 - DNA, 752 bp, Zea Mays
attggagaaaatcaagcctaaagtctggttgtcaggctggttccactctgaaattcagactttcagtgtaacagagccatctttgggtttgaattcaaccttgatccagtgctcaaatgagttcaatccctatagtcgacgtattgctggtttgtagctctacaattttgctgcagagcttggtatgagttgtcattgagaattgagagaaagtttagctccaagtttggctgtcaggttcatctgactgaacatatcccatggtacagtacctggatcagattagatcgccagtgcaggactctcaccgccgacgaccgatccccgccatgattcgcgccaccaccgttgagatttacactaccagtgattagataagcttgccagatagtaacccttcgccggaggataattccggtgaatcaccgccgtaccccatgtgccttgtggcttgcgcagataaactcgtcggtgaaccgccgtcgcacggccttgcgccgcgtgtccaagccttgccaccgcaccgccaccattcactttagctccccgttgctcactggaatagctgccacgacgttgaacacgtatttactgcgccagtgttcttcttcatctccggtcgccagcacggctcggccgaattgatcaccaccgctcgctatccctataaattgaaggccgggactgctgcgctaggtcatcacgaagccgacacacccgttcttcccctcaattgcccaccatagccggag

SEQ ID NO: 121164 - DNA, 477 bp, Zea Mays
cccccacttgttcttggcgcatggcacgagttccacaacttcacccgaagtcttcccagtccacggtgtgaacgtgcacgtaccaaactacacaatcttgccaccaacaaccttcttctgccagtgaaggcattagttcttggcgaatgcctcaaccgaaggctcaccaccatatgtggcctgtgccaacataaacttcgccaacgccaccatggcatttggcgtgagctggtgaagcctgacataaaaaacaaatcaatgtggaggcagtcgaagaccagaaatgaaaaacgcttcaaacaccaccaactccccttcaagtttcgggacctccttggccccttgagcgcgtcctacaccgtctctgaaataccctaaacactgcatttcttgcacgtggctcgagtagatcctggatgtaccaaactccaccatatgccccggcaatagatccacaaccgtcgccgaatcgctaac

SEQ ID NO: 121165 - DNA, 317 bp, Zea Mays
attgttggggctgctgaatatgttacaccgttgtcttgtcggagtccaacatggtttagcgatgagggctctgaatttgattcatggtcgtcgggtagtgaaggatggttgagccccttcacaaagatggacaaagagtaatcagaagaggatttgaatttctttgttgctttagatatgtccgtggcggaatctaggatgggggagcctttgtctagggcccaggcgactgtggcgaaacgtatgagaagagtgggtgtaccgaaacaaaggctggggaatgtcggcgcgccaccaagaggaggcgaaggctcctg

SEQ ID NO: 121166 - DNA, 326 bp, Zea Mays
cggaaagattactaagagcaggccaatcattgattgtaacgaacaacaaggctcgtaggtcaaagtgttcctatttgtactcaccccacacacatacgcctgcgctgttacacaaaagtagaagttcatcaaccaatgtcctcaggtacacatcaatgtcgttgccaggttgctttgggccttggatgagcactggcatcataatgaactttcgcttcatgcacaactgaaaggtcctaaatggctagcagggggtgaatagcctaaataaaaactctacaaatcactagaataaagtggttagtataataaatggcataaagtga

SEQ ID NO: 121167 - DNA, 595 bp, Zea Mays
cagcatacttctctgccctgtgggtggtatgtactggcaagaaatgagctgtcttggtcaacctatccacaatgacccaaatagaatcgtggtgtcgggatgtgttgggtaaacccacaataaaatccatacaaatatcctcccatttccaagctggtacgggaagaggctataaggtaccggctaccttcaaatgactagctttgactctcttgcaagtgtcgcattcagatacatacttagcaatttctctcttcattctggtccaccagtacaaggatctgagatcatgatacatcttgttactgccggggtgcatggagaatttggaaaggtgagcttcgtccaatattttcttcctgagttcgggattcttaggaacaaccaatcggtcttcaaaccatagaactcccttgctgtcctgacagaagaatttgtacttatccaccttctgttcgatcatttccttaatgacttgaacacccttgtcaccgatctgtgccatgactatttgctcctgcaaagtgggctccactgagatataactcaaggtacctaaggaaacaacttctatgtttagcttgcacaactcgtc

SEQ ID NO: 121168 - DNA, 719 bp, Zea Mays
ccattggtggtgtacctgttgaagccgaacccaatgggtgtgaccgtgcactagctgatcccaatgggtgtgaccgtgcgccggctattgtccgtatttttgatgaggacgaagaagaggaagaagtttcgataattcataaaaacaaccggtgttatagaggtagtaggggggatagtgatattccttctctagctctgtctgctcttgtcagccttcaagaattgtccataacatattttgatcaggcccttgaggatgtcattcctgaagatatgctgtcggagccgactgctggcgacatgatggatgtttgctctgaaattccagacgcgggattagaggtatcccgagcagtatctcacacatcgtcgactttggagggcagtcttcgatgtcaagaagttggtcaagattgctcgactcgcatggaggtgattgaggatccttcagccttagaggtggctgttgcagaaaacccagcccccgagggtggtgctggtagttacccagcccccgagggtgtcgccggtagtgatccggctctggtgggtagtgcgagttgcaacctagcccccgagggtgttgccggtaatgatctggctctggtgggtggcgcgagctacaacctagctctagagggtgtccaagtgagctctccttcccgtacctccatggatgtccatgtcgggtcgtctccgccacaatctgatggggta

SEQ ID NO: 121169 - DNA, 399 bp, Zea Mays
cctgccgaagggcttagaacttctaatgtttccgtccctttgattatcggttcttccattttgtcagtctttggcattacaaccgactcttcaatcctctgcgaaagagcaggtcctttggcttcaatagctgaagaagtctcaccgccaaattcaggcactatggccggttcaatgtagcgcggttggtgagtaaggaccttcaactttttcctcttcggtgcgggctcgcttgaagcagccgaagcagcagccttaccagaagttgcactctttcttttctgaccccgcggcgggtagcgatagtcagggtacacaaatccaatagcatcaaaaactctatttagccttttcttttttcggctcccgaaggccgcagatagtgcattgtcttcagac

SEQ ID NO: 121170 - DNA, 515 bp, Zea Mays
cgaacttgtcgaggtagtccatgaacacattgttcatcaagtacataaagtaagctggcgcattcgtcaaaccgaatgacatgaccgtgaactcatacagtccatacttggtgatgaatgttgtcttcggtatatccaaaggttggattctgagctaatggtagtctgacctcagatctatcttcgagaacacactggctcctctcaactggttgaataaatcttcaattctgagcagagggtacttgttcttgatactaacctcattcaaggctcggtaatcgatgcacatcctcttcgtgtcatccttcttctccacaaacagcactggggctgcccaaggcgaggtactcggtctgatgtagcctttctctgacaactcaacaatctgcttcttgagttccaccaattttggtctggacactcgataggctctcttggaaataggggcggtgcctggtataagctctatagcgaattcaaccttcctttcaggtggcatacccggtaactcc

SEQ ID NO: 121171 - DNA, 315 bp, Zea Mays
gtctaatcagggccaggcaaaaaggcaacggtttattctccggccttctaaccagactcctccacatgcaccatccttccctttcaagcagccgataattattcgtcccaataaagcccccactgccccaagtcagccgggtgccccaggcactcgattccctgctttgcccagctcttcaaccggatgtttcaactgtggcaagtctggacatttcatcaaggactacccatatcccaagcagaatcaagcaaataatcagcaaggatcggggaattcatcacaaagcaagggaaatgttaagggcaaaaattt

SEQ ID NO: 121172 - DNA, 615 bp, Zea Mays
gtcgatctacctacacgcattcgccgaaggagggcagtagctgatacagaaccagagatgaatcctcttcctgttggatctaatgttgttgttaccgcccaaatgcaactgctgcaacagatgtccaacaccatgatagagatgaaagctcaactccgccaaatccagcagcatccaccaccaccaccacccagggataagcatcgcgagttcatgagccacaagccacccactttttgtagctcccaagacccactacaagcagatgactggctgaagtccaaaaaagaggctcaacatagcccaatgcactgacagggagaaagtactttatgcatcgggtcgcctcaccggccccactgcagattggtgggatgcatattgcaaagcgcatgctgctgctgacaccatttcctagacaaaattctccaccatcttcagaaactaccacattcttgctggtcttatgaacattaagaaggagttcctatccctccaatagagaggcatgtcagtaagtgaataaagagccaaactcatctagctatcctggtatgttcctgtggaagttttagatggcgagaaaaagcaggaactatttctagaggaattgat

SEQ ID NO: 121173 - DNA, 435 bp, Zea Mays
gtgtacttcatcctggggcctcttctcccagcgtttatctgattgctagtttgcatcccttcgtggtgctggtggtacgggcttcgcgtctccgatgaggtcttgagcccgttcatccgcggtgatgtagacgtccgcttccttgaatagttgttcagaggtggtaggtgccttttgaaatatggctcgaacgaaaactggatcgttggatccccagtaaaagtcttcgatcacagctgcctcagcaacctcagggatacagttcctcattgtttggaatcttctgaggaataaacgaagagtttcatcattctgccgcctgatggatttgaggtcccaggctgcgctggtttatcggagagggactggaagttcgtgataaactagcgactaaaatctccccaatcatcgatgtagtgtcagagcagatgccgg

SEQ ID NO: 121174 - DNA, 277 bp, Zea Mays
gctgagcgtggcgttgcccttctggctgttgactgtggcccaaaggtgctagcggtggtggtggtggcagctgtgccaaggaagcttgagaatggcttgccgaagcaatagaggtcgtaggctattggttgcctacatactccgggacataaggagaatagcatgaagcagtgtggcggacttgcttcggttgactctgccgcgcttcagcttcagcaatttccttctgcttttgaatggtaacatggcatgtccttgttgtgtggcccttgtcctc

SEQ ID NO: 121175 - DNA, 658 bp, Zea Mays
ggctgaaatgtatcgaagctacaagtgatgaactgcttgggccgtactccaaagcggaagataatgcgttatctgcggccttcgggagccggaaaaagaagaggctaaatagagtttttgatgctattggatttatgtatcctgactaccactacccgccaagggggcagaagagaaagagtgcaacttctgggaaggatgttacttcagctgctccgagtgagcccgctccgaagaggagaaaggtgaaggttcttactcaccaaccgcgctatattgaaccggccacaatgcccgaatttggtggtgaaacctcttcggctactgaagccaaagaacctgtgcttacatagaagattgaagagtcggctgcaatgccgaaggcatcctcagccaaattagctgagccgaaggccgataatattgaagagatagaggtcgaaagaacaaagctattagaagttataagcccttcggcagaagtgacagagccgacagcacaaaaagatcttacaatgacccccaagaggaaaaggatggtcaacgtactagatgtgttggagacgataaagacttcaagctctactccagggaaaactggcgaagcttcaaaaacgcagactgagacaaaactaaccgaagccgaagctgtaaagaa

SEQ ID NO: 121176 - DNA, 442 bp, Zea Mays
gtcatttatctgcgtacccgcggataaaaaacccgttgggcatggttttggatacgagtctgtacccatggatacggatacgggtagcacttgatatccgtggatatttttaaaacggatacgaaaaatcaatatccatacccaaatacccgaatatctgttaaaatatcttgtactcccatcccaaatacgggtagcacttgatatccgtagacaattttatatttgctggacaaatatgatatcatgtttgaatttgctagacaaattctgtatggcttttatgtttttatcatatttaaatttgctggacaaatatgatatcatgtttgaatttgctggatttaaatattttgtatgtgtagtgggcaaacggatatatccgcggatatccgttacccgcgggtaacggatgtggatactgtttgttatccatagcggg

SEQ ID NO: 121177 - DNA, 770 bp, Zea Mays
aagattcctatagcaaaattgtagctggtatatagggctacaagtttgttacagatggattggcaagttcttgcacaaaaatccaagatcggcgttgcaaatatgtctgtcaggcgctctgaatctggttttcgatggtacagtgttcggatcagatcgccaggttctgttcatctcgctgccggtgatcccgcgccatgatcttcgtcgccgttgcgattcatgctctgtggggtgcagataactcataagggtaagaaatatcgcatcgtggatgaactcacgccactattccgctccggcctccgtactcgcctgagtcacgaccgcttcggataaactcaccggagttagccacctcgcgaccttgcaccatgttctttggtgctttaaccatgtcgcagtgagtcaccttagccacccgttcatcgccggtgagtttgccatggtgaacgccacgaattgcttgcgctagtaacctcttccctctccggccgccaccgcgccaactccaaatcacaagccaccgtctccgaatcctataagttgagcacaccctcggctccgctatgtaagtatgcacccaacacacccactcgtgccgccaattactcaccagagagcctcaatttgaaactttccccaattcggtctagagcaccacgcttcgtgagctcactgtggccagcgtgctacaggtctgttcatgccctctgctctcctgatgctcctcggcctgttcaattaagctagaccatgctagatcatcg

SEQ ID NO: 121178 - DNA, 644 bp, Zea Mays
ccaggtggaaagggcacgagaagaagaaagaggccacctcaagaggaagtttcaagttctccgagctcagcagcaggacaagcaccagagagttcgatcttttgggttcccccccaaagggtcgaacttcagtaagccaacatggtccgctccatcatgtttcagccagcctggtcaaagttccctccacaccccatctattgcaagcagccaacctccaaccaatgcttgttggcactatggagaccccagtcattacaagaataattttcctcagttgaagacatccgtacctgcatactccaactcggtgaatggccccaagaatgtttcagcacccgcctccaagtcaccctccaccaacagctagctaagcaagacccagtttcacggcagggcttgagtgaatcacgtcgatgcccaagaagctcagcaagcccctagagtagtgctcggtgagttcctagtcgaatttacccccgttgctgtacttttttattctcgagcatcccattctttcatcaccactagttttgtggaaaagtatggcatccccactacatctttagaaatccctttggtcacccgaaccccagggttagaccttctatgccacctcaaatgctcccaagtcagaattcttt

SEQ ID NO: 121179 - DNA, 324 bp, Zea Mays
cttattcctaggccaacaccgtctttgttgggttgcagacgtcttcaaccacttagacatgtccatagaaagttggggactggtctcagcctgcccctaggtgcagcaagcgctttctcccaggtgggacccatccggtctagtggctgctagctacatcttcggggatctagctcgtcttccattattgttggcaatggcaactcccttcttgttcttgcctagagccactctcttcttccagcttcattctctgatgacctctttctctcccaccgacagtatgtcgttgacctcctacaacgggtgggcatggccaagttt

SEQ ID NO: 121180 - DNA, 858 bp, Zea Mays
gccagagctgcatgtcgcctcgcccttctgtgtgcctcagccaaccgaagacacctaggggtcgagtagagatcgtgagcggaagagagaaccagggacatagccaccaccaacgccattcccgtcttcgcctggaagctgggggcttgggtcgagtctggaggcttgtggggttgctggtgaagcgttcgcgaccgattggggaagaatcgaccatggagtcgtccggaatttgtcgccggacatcgttttccaccgcgcatgtggaaagcattgggcgcctctctgagtctcggtaagaatcatcctcagtaatcgtatcgcgttggcttcgcgccactgctttcggattagagtttggaaccaggaatcgggctcgggacgatcgccggtgatggcgccgccatgtgggcgcggccgccgctgtcacctggtctcgggtaggggagaggagttgcctactgttcgatctagttcgagcggtctggaatagatgggcgtaccgattcgctcaggtgcaacgggagtcgttggatctggatccattgatcgactacgattcggttcagaggcaagaatcacactgtcgataggtgatcgtgtggacagagttagatcacgacatttttaaatttagtgcgttgatcgtcgatcagacggttatctacgtgtaccggttagatgtatgggtagatttaatcttagcccttcggtacagattgggcggccaagagctcttcatactgtttcggccgggacatcttgcaatcaggtccctgggattttagtaaatgaacccacggtccactgcttatacaaaagaattacacacgtgccttgtgaatttgtaagctgacc

SEQ ID NO: 121181 - DNA, 405 bp, Zea Mays
tgacgtcgaagcatgccagaaggcatttagcaatgtgtgcgccttcattggcacaagagatatagtccaagagcacatagcctatagggtgtggccacttgttgagaactgggatatgccgaaggagactactgccgaatccagtgaaaatggcttagttcgattgaagtataccttcagatttagagagaagtttgatgaaccaaatgatgactggttgaaatgcattgaagctaccagcgacgagctactcgggacatattccaaggccgaagatgatgccttgtccgcagccttcgggggccggggggaagaaaagattaaacaaggtatttgatgcaatcggcttcgtataccctgattatcactacccactgcgaaggtaagggaagaagagaaaaaatg

SEQ ID NO: 121182 - DNA, 839 bp, Zea Mays
acgccttcatgccattttgactctagaagagcaacaattgtatgctatttggctaaactattgttcccaatatctgggttcacatgcctcctactgcttgtctacgttttattctttaagaagaagacttcaagaagagcacatctaccgcaactttcttttggtgagcattttgtgaaagttacttacaatgatctagcccaagcaacaggcggtttctcagaatccaacttgattggaagaggaagctatggatcggtttacagtgggaaattgatggaaattaagattgaagtggctgtcaaggtttttgaccttgagatgcaaggagcggagacaagcttcttggcagagtgtgaagcgctaagaagtattcatcatcgaaatcttgtttccatcgtaactgcatgctcaagtatagatatgacaggcaattctttcaaggctttaatttatgagctcatgcctaatgggaacctggataaatggatacatcccaaaggtgacgagacagttccaaagcgtctaagcttaactcaaagaattgcagttgtcgtcaatgtagctgatgcattggattacttacaccatgactgtggaaggcccactgtccattgtgacttgaagccgagcaacatccttctcgatgacgatatgaatgctctcttgtcagattttggcattacacgtctctacgccaatcctcagtcaatttgggcaggttcaattagttcgatcggtgttaaggggacaattggttatatccctccaggtatatatatatatccccatctctctatatcacactataaaattgtatcttttcacgatttacataa

SEQ ID NO: 121183 - DNA, 497 bp, Zea Mays
cgacagcgacagtggctaagacacgggattcctctccggcgtggatctcctctggcgctcatcttctcactggtattcttcttcctccctatctggttctatcgcacctaggacgtttagggttcttggttcttgcgtctgcgtttagggtcttggttcttgcgtctcttcctggatctaaagtatttaggagattaggttcttgcacctgccgtcattctccacgagttcgttcttgcgccatcaagctctattttcttctacagttgaaaattccctcgtgtgtggagccgaggtgagtggtggctcatatcgctttctatgggtcaggtaggggacagtcctggacttctgattttgggtttgtttcggtgcagatttcgtcacttggatacgaattttcacactacttcgctgaattaaatcttcaggcttttctctcctgtagcaaatcttcaggcttttcgattcgaaatttaaaaccccgtcagatctgt

SEQ ID NO: 121184 - DNA, 725 bp, Zea Mays
tatcttggagaaatatttggccccttgaagctggtcgaagaggtcgtcgattcgagggagtggatacttgttttttattgtaacttcatttaaagattggtaatcaatacacatcctcatacttccatcctttttagtgacgaaaaggactggtgctccccaaggggatgagctgggacggatgtaccctttttgttgaagctctgcgatttggagttttaattctgctaactcggtaggagccatgcggtatggtctctttgcaatgggtgccgtaccagggatcaggtctatgtagaactccacttctctttttggcggcattcctggtaactcttctgggaatacatccatgaattcttctatcactgacatgctttctgctgatagattaaacaccattggatcattggcgggtggctgagcctaacaagagactgactttcctttgtggtccgtgagaaggactgtcttgtttgcgcaacttatgatgcctttgtgcttggttagccaatccatccctaaagatcacatcaattccttgggatggcaagacggttaagtctgccatgaacactaccccactttaaagaattctaacttgggagaatttgagttggcatagaaggtctgaccctggggttcgggtgaccaagggaatttctaggtgggtagaggaaatgccatgcttttccacaaaactagtggctataaaagaatgggat

SEQ ID NO: 121185 - DNA, 329 bp, Zea Mays
taaaaccttgagagaaaccttcatccaccccaaacttgtcaagctcactcctcccaaatctgccacccctattgtgagagatggagtgcctaaggagcttatgagagcccctcctcagaaacatgtgtggtgttcaaaacctaaccatctcatgaatacacttgacaccttgccagatatctctagtgatccccttcctagagcccctcagtcacccaaaaagacccactcccacaaaaatattgcacctaagagagaggtgagatttcattatgattattgtgagagcgagggtcatttggctacgttttgctttaggaggaagagag

SEQ ID NO: 121186 - DNA, 379 bp, Zea Mays
gatggtttgatctggaatccgaaggcacttcttcaactgagatacatggaacacattatgtactctagataatatttctggcagttgaagtcggtatgccactggtctgtatcgttcaagaataagaaacgggccaatatattggggtgccagtttcctttttaccccgaaacggttcacacccttcattggtgatactttcaagtatacatgatcattaacttgaaagaccaaaggttgacgtcgcttatccgcataattcttttgccgagcttgttcctctttcaagttgtgtatgatccattggactttttcttccgtctctttaaccatgtcaggcctgaaaaaccatctttatccgggttcagaccaatttaag

SEQ ID NO: 121187 - DNA, 331 bp, Zea Mays
agaatgggaagaatttagggtttggttactttctcctcccttgttttgcttaatgtggctaaggtaggtattttaggatgatttacacttaattagggccttggttcctaagtatggtgccttttgctcaagttaacccacatgtgataatacagcttgtgactttgctgagtaggaacccttagtaacacggggtgttatagccctcccccttaaaagaatctcgtcccgagatttgagtgaagatcctcaggggtgaggatgcaagtaaccttctgcttaaataaggatagtatacccactgagttgtcttgggaaattggttcttcaa

SEQ ID NO: 121188 - DNA, 591 bp, Zea Mays
gatatgctgagagcttgtgcccttaagcatggaggcagttgggacaagagtctaccatatgctgagttctcttataataatagttaccaggccagtctgaacatgtcaccattttaagctttaaatggcagaaagtgcagcactcctctctattgggatcagactagggaaagacagttctttgggcctcagattattcaagaggcagaagaacaagtttgtgtgatccgggagaacttgagggtagcgcaaactcggcaaaaaagctatgctgataatcgaagaagaccactggactttgaagtgggtgatcacgtgtaccttaaggtgccaccaattcgtggaatgagaagattcaaagttaaaggcaagttatcccctcgcttcattggacccctcagaatctttaggcgagttggggagatggcctaccagcttgagctacctgatcttctgtctgatgtacataatatattccatgtatctcaactcaaaaagtgtctccatgtccccgaggaacaactaccaatggaagaactcagtgtgtagggtgatctaacttacacagagtatcctatcaagatcgttgac

SEQ ID NO: 121189 - DNA, 472 bp, Zea Mays
cgccaagtagagaagcatgaaccaacctgcagatggctggccacggtgagaagctcacagcggcgcggaaaaccaatttggggggaatcgcgaattgaggagctacagtgaacgattggaggcgaggagcgatgcactgggcgcgtaacaacctagcggagcacgctgaatgctcaatatatagtgatcaatagcggtggtgcccaatttgggtaagacacgctggcggccggagagagagggaggtcacagacgcgagttatcgtggctttccctgaggcaatgactcaggcgatagacgtgctatctactgaggtctactgcaacatggtgaaacgactgatggcatggcataaccaagggaaacggtggcacgacggcggcggtcgcgcagacatgtcgccggtgcaagtgggtacggcgaggctggttctatccattcccccgcggatctttttacgtctatggtaat

SEQ ID NO: 121190 - DNA, 416 bp, Zea Mays
ggccagtacctgttggtcaaacattatagctgttcaacctgaaggacatcttgtcacatgggtagagttcaagcaagcgttcagggaacactacattccatatggtgttctacagatgaaactggaagagtttgttcgctcaaagcaaggagacttggtgatgcaatatctcgccaaatgcaaccatctctcctagtatgctatagagcaagttgacacggacctgaaaagaaaaattgtttccttagaggtctgatgatcgactacaacgaaaaatggccacttgcctagatctcacttacagcagggccgtgagcacaacgcttttggtggaagccaagaattcggggtagggaatgacaaaaagttttgggcgtgaagggggtgaaggatcctctcaaggatccgagaagcgg

SEQ ID NO: 121191 - DNA, 480 bp, Zea Mays
gctgggtggaaagtagcgaaggggggtttcaacgattactttgttgtagttctgacatagctgtcggagggcttttcgggcgacattctggcaagcatctagaaaatggactccggtaaaagtgacttggaaggaatgttggtttggatagctttggctttcccctaggtagactgccatagagcaccttatcattctgccctcgaaatgttccgtccagacgtattccggcttcttgcggattcccatgcggagtgcacagcttcgcaagaggcgtgggaacccttctacttctgagcagtaggacgacttaatggccagagagtcttccatctggaataggaaaagaagggtcttgttaaaaccggggaagggaagagaaaacttttcttgaggtaaggggtattttctttctaagataagttttaggatcagggctgcgacctacggccagtcctatgggctccgataccacctgaa

SEQ ID NO: 121192 - DNA, 492 bp, Zea Mays
gggaatttggggatttgcactcttgggaattgaaataaaaatacatttccaatttttaatgtaatatattgagggcgaaattatatgaaaagatagaataaatattgttgagttctttggaaaccaagtgtgggttgctaaatccttcaggtatgcttatattcataatcatagctaaatgtcttgttgtctatttacattccttggttttatgagtccttatggatttttgctttatgcatctgttaacagagaaatatgatatgggaggcaacagcttttctgttggatgttctgaaaccaaacttgccagagcatgcttttcttcaaagcaaggttttcatctttgtcgttggaacacgaatggttgcgcttggatgtttacattattcttttctcagcagtttctgtctatggtggcgtacatcctctgcaccagtttttttggaagtagcataagactatgggctggctagcataaacaagataaga

SEQ ID NO: 121193 - DNA, 474 bp, Zea Mays
cccttttcagcctcttgccccgatggactatcttcctttggttctggcatttcctagttagcccgaagcggccaaacgttgaaggctaagtgcccttgcataagatttttggtacctaggctatgtagctgcacaccgtgttaaaagctacaagggtagcttgagcttcgtcattcataacacatgccgacctctttatgccgaagtgtggttttataggtatctggattatatctcttatatcctctctctattctcaagattattctttacatagaaccattcccttgtccaagcattcaaccatttgattcggcatgccatggcaggatatcgagcatctttccagtatgcgaagttgtagcagtcgaagttgttgtgttcctgctccgtcccatttgctttcttttgataatgaagctcgtggatttggcaaaagcagtcaacatttggctctacgccctggctcttcac

SEQ ID NO: 121194 - DNA, 507 bp, Zea Mays
ctttattgtttcactagaatcgtatcgatgcgttggtacgaaaacaagatagtgcctgggccactgttgagatcaacggtgacatttaggccaataatatgccaacgcagtataagcccaaatttttttgtattttagccttttttttttaacaatttcacgtttagatgtttagattttttggacggcttaatgtcgttattggaccctctactcggcgccgcagcttgtggcgtcaaggtacatgcggcgctggcgtggtatggctgacttggctgccttcaatcaacatgtctttctcactcagttgcacgcagacaaccagcaagattctccaacatctgtttctcggctctagccgcctccatttccattaccctcttctcctttgccaccttcaatcgtctccgctcaacacgcatcgggctatcacaaccccgtgattctatgaacctacgcgtctcctatctgtgatctttaatgtaggaatcgacgatctgagatcca

SEQ ID NO: 121195 - DNA, 805 bp, Zea Mays
gtaaagcgcactaaaacaatgtgcaccaacatattttgatgcgataggttgctaagattgccatggaacaacaagtgttgacttacctgagctacacacacactcttcttgctttcttatataaattgtgtgtaaagtatttatatatgttgtgtgctgctgtatatactgataccacttccaaggcaggttagcggtgtacatatcgaatgcttgatgaaaaacaatcttagaaaaacaatcttatgtgtagttacgaggtcacaccgccggagaggccggctcccgtaatgcctgcccattttttcgtgatcgcacacccgcgcctgcggcgacgtcgactcagtgagatggggtggtgccgtagcactacgatgcaggataagctcgctcgcgtcacggtggagtgcatgatttgctacaaaatgtgtggtggccgacggccatttgataggcgcacaagtcagagaactagaacctttttcttttgcaaattcttatgatattgaattaaagtagtttggcgttccttactcaagggtgcagtaaagtgataaaaatagaatgttctctttgcaaaacaatattaaaataaaatgctagactctggtgggcgctttgtaaaccaacatatacattttgtaccttgctcatgatttgtatgcagataactaaaactaaccgcagaccgaatgcatataaaactaagctccttaatgcagagagctatctttaggtggagcgtgggtttaccaacaaggcacttgtgctagctacaactgcaaactatgcacctctgtcttta

SEQ ID NO: 121196 - DNA, 768 bp, Zea Mays
taaaaattaagagctaaaaggaataatattttggaatgaagggagcaatattttcttgtatttgtatttacccttgtcaattatgattcatgaatttactaaaacattagtatatataattatatttatttaaccacctgcagacagttgtgttcttaggatcctacctgattcggttattggtgctagtgatcggtgggcctatgtcaggaatgtggacacctggagcatggaaagattgctctctcagggtcaaggagaagaacataatgcacttactttcgttgtcggtatcaacgactaccaatggagctgtgcaaacaccatcctggctaagttgtctgtggcagtggcacctccaccatttatgggggtttactggtttattttgtggctgcaactagtggattctcagacaaccaaaagcaagaaaacaggtcctggaggcttggggggctctcgatgctcctgattccatgctgtgccacatccattaagctgtaatgaggtgattccaatcgtgtcagtgttagtattcagagccttgtatttgatatcattgacacattttaccttattgttgaacagagggcaagctgattgttgttggggattctcactgtctgaagacagcctctcttgcagaaacactgatgtgtgtttgtgtccccatcagtaggtaacagacttaagctttatgggcaatgaaggatccccagtcttttgttcagagataatatctccgaagttaagagacatgggcctgtt

SEQ ID NO: 121197 - DNA, 709 bp, Zea Mays
ccgacgagtaagcgtcgtctagctcatttagttgagccgacaagcatcacaagcatgcgagggtgctaaaacacgaataaggagggtgagtgcggacctgagagcggctagcctcgatggggtgattcacggtggtgcagatgaccattttgggggaaaacccaaattctacggctatagtggctaatcggagctgagagttagtgtcttgggttcgtgataacttggcgaagcagagtggggcatcaatttataggagctttaggcggcggctccgaatttgggagaagagtggagcttatcttcctggtgaggcaatcaccgaggctcaccgtggagcgcatgcgttcgcctagcgactgccactatctcggggatgccacgatcatggcaatgtggtgaatcaggcgactacgtgtcccttgctgcgatcacggcgagcaccggtggcgatattttaccgaacgcggcaggcaagtgggtacggcggtgactcagctccggctaagaccttcttccccgagatctttttaaccctcacggttatctactcttcattggcacgaatcgtgacatcagcgtgaatcgcagtgcggaggtcaccggcgacgatgtacctgaacttggcgatctgatccaaacattgtaccatcgcgctgccattcagtttgtctgatagagccaatttgggggcaatttgctcccaatt

SEQ ID NO: 121198 - DNA, 289 bp, Zea Mays
caatcttcgctccggccatggccctcaccatgcctgcacacgaccccgaagacgagaggtacatattatttataagactttatctaattaaatggtgtagttgtgtggttgaaatgcccagcaatctttttagagataattttattgatttgtctacgttcatcaaaatcatactgtctgactattttaccatttcgtcttgtgctaattggcattggtaccttaagacattgctttgttattgactttctatcaacatgtcattttctcctcacagctaagattcaag

SEQ ID NO: 121199 - DNA, 422 bp, Zea Mays
ggttgagtcagctagacctcgatacagataggccgggtatgccctgtccttcagtggctgaatattcttgaagacaaagtcagcaaccacagcctcggcagtcatacccctctccttcagcaatccaacttcagctagcagagcccctgcttcagccacctcctggtctgtgggggactcggtccaactcggagtacgaacatccggctgtctccctgaccgtggtgggagggaattcccatgattttccacgataaaccactccaagcgccatcctttgatgctgtctttgagtgggatgtcaagataatcggttttcctcccgcggcgcatctccaagctcgcgccccctaccagttggtgctgacctccggccatcccagggcgacagtgatacaaatatttccacaggccaaaatgcg

SEQ ID NO: 121200 - DNA, 366 bp, Zea Mays
caccccagatgcggagggctattgacaagtgctcacccaagcggcgaaccaccttctccccctcactcacccactgaatgatcagcgccactccatcaacaatcggcgagacgcacggagcaacattaacacttcacgcggtcgtcggaatgaagaagagatgaggcggcgagaagagtacgatcaggatcatggtgcgctatcacacaaccatgccaccaggactgagtcagcagtggcctccaccaacggtccagccccgggtcgatcgagacgacacaacgcccgacatcagtcgccttctcggtaccgttgacatgatcatcaccggaaggaccgagtgacatgtggtgtctccgcccatac

SEQ ID NO: 121201 - DNA, 640 bp, Zea Mays
atatctgagacaaagatctgggcactgttgaatcagatgagctcgaatgaatcggtgggggatttgatcgcggagaggtaactttggacgtggcaccatcccacgaactcagtcgtgcgtggccggagatatcccaccggcagtcgccatggctcggtcactttcgccgcggtgtcacccatgcctcgatttccccttactgtgcctcttctatacgtggttgccatccgtgaacaaagccttccacggtcgccgatcgttagccggaccgccgtggctataaatagcaccatgggtcacgacgaggtattcacatctccaccagtgagttcagttgaagcccaaattcatggaatcctctccacctctcccaaaattggtagtgcacggtgaaaccgtagtcctttacggccgtgtagccttaatctcacctcccaattccacccagaaccgtcgcggcaccattttcccctttttctgtcaccggcgagcacaaattcaccgtgctccatggccggaccactctagtatggctctatatgtctcgtatgttgttttagcagctctgtgtacccatgaaactcattgtggcagccatttgaccaattcgggtgtgattgagtgggaacgcgggctcggc

SEQ ID NO: 121202 - DNA, 365 bp, Zea Mays
atcgcaatgcctgttcctactttcttcgtgtgattattgttaataccatatcttataaccagtgtgcacgtcactggccttgttatgtcatcaactggataacggaccttatttcctgttgacgcgatagagcttgggatggttgtacagtcggtgcaagccggcggttgagctgctggaattatttgcagctgtggagtggtcatctgttgaacagacatcgcacttgccaactgcagcatcaattctagtggaggattcgatagcatttgagacatcaagtctttaaactctttctttgcctcctgcttaaaataatccgacaactcttctttgtatcgatcacgtttcttgtacaaaccttc

SEQ ID NO: 121203 - DNA, 993 bp, Zea Mays
aggcggaagggtgtgaacctggttgcccggctctctgtcgtgttcagggcccatataacttcaggtaattggtcagtccatttgccctttttgtcgtcaagaagccttttcttgatggcactaaaaatcttgccattggcgcgctcaacaatgccgttggattgtgggtggtacacagaggcgaagacaggcttggtgccgatggaaaagcagaaatccctgaagtcttggctgtcgaactgtttgctgttgtcgactgtgagttcggacgggactccgaagcgacagacaatattttgccagaagaatttttgagtggtcttcgatgttattgtgcatactgtcctggcctcaatccactttgtgaaatattcgacagcgacgaaggtgaacttgaggttcccttgagctctaggcagtggtcaaacaatgtccagcccccagcgttgaagtggccatgtatgggcgatgagcttggtgaattgcgaagggctgcctaagcgaggagagaacttttggcatgcttcgcatgaccttgtgactcgattggtagtgcaaattaatgcgggccagtaaaatccctgacgaatcaccttggcagcgagggccctgggtcctgagtgggagccacaagttccgctgtggacttcttggaggatttttatgccttcggttttagttatgcacttcagcattggctggctgatcccctttttgtacagctgaccctcgactaatgtgaagtccctgcttctgtgctttagtcgtttggcctcattacgatcggttggatgatagtggccttggaggtaaagtgttattggggcccgccagtcttcggccatgatgatgtttacgatgcggtggcctttggtgtcctgagttatttgcagcccttcggggtcgcggacagctggcgtgccgatgatgtggtagaacacgtccgagggcaaggtctcgcccttggccgctgctttggccaacgcgtcggcc

SEQ ID NO: 121204 - DNA, 469 bp, Zea Mays
tcgaattgttatcgtggaggagagtttgctcacaatatgagacggtgtctgttacgcgtgttccggtaaccgatccctaggcactgtttgctgcatacggtgaattattactctaatgcttgagattagcttataatggcgcgggagacgaacaacagaaaagatgacgccccaaagatgacttccttaaaaatgtggatgcctctcttttatttcgaccaagggtaaaagggcaaccactttacttgcattagatgccttgtgttttttagatatcttacggactgtatccgagttatgatacatgtatggtctttccgtgctgcagtacgttaccagcgagttaaagaggggtttctcacatgatacgaagattcatgcctagcatcaccggtgaatacgataattctgtcgttaatcagttctgtagtaatcattccattgttctttcagcttccaacgtttaggg

SEQ ID NO: 121205 - DNA, 348 bp, Zea Mays
ggaaccagatgacaaaaatgtagccgagcgcatcgccagacagtcagcccactacacactcattggggaaacattatacagaagaggtgcatcaggcgtcctcatgaagtgcattctctcatctactgggaagcaacttctggatgaggtccatgctgggcaatgtggaatacacgcagcgtccaagacactagtcgggaaggtcttcaggtcaggattctattggccaactgcgaaaagcgatgcagccgagctagttcagaggtgcgaagcttgccagtacttgtcaaagcaacaacatctaccagcacagcaattgcagaccataccagtaacttggcccttcgc

SEQ ID NO: 121206 - DNA, 332 bp, Zea Mays
gtgtgtttgcacggattgccccggaccattgtttttgaccgaggagcccaatttgttgccagattttgaaaacaactgcaagagtcttcgggaaccaagctaatcagaagttcagcttaccacccatagactgatggtcagaccgagagggtaaatcaggttctttgaagatatgctgagagcttgtgtgatcgattgtggcaagaactgggataagcacctctccttggcagagtttgcttataacaacagttatcaatccagcctaaggatggcacccttcgaagctctctttgggagaaggtgtagaacacccctcaattggtctcagc

SEQ ID NO: 121207 - DNA, 636 bp, Zea Mays
cattaattaaatgctaagactatcactataaattataaacttatataaatcctcaggaaagatgacaagatcttataattcaaatggatactcattaaaatatatataacccgtacatccattaataacatatccacaagaaaatcaatgagtcaaacgggaaatgatgaaagaaaaaattgcacagttattgagctctgttgtgggagcaaaacatcagacatgtccataaaataactatgaactgcaatctaaatatatcatccatcttgtgcctgcaatctaaatatttcattcagaacatgaactgcatagagtaaaatgttatttgtaatgggtcagccatggtgcaaactaagatatcctaaatgagatatttagttatatatgagaaagtgtttaagtgctacagtaaattgcaggttctaatgtatagcttaaacacatcaaagagtttgatatcaaaaatactataattgataattcatagttgataactgatgatataatacatgagttgcttggctcaaacaaacatgcaaaagaaaagggtcggtagttaacctaggaattctgatagccatcaatttcatttcattatcttcttgcatctaatctgtgccggtcaaaactcat

SEQ ID NO: 121208 - DNA, 396 bp, Zea Mays
ggttcagtccgataagatgtgtctgaatctaaggattgaaataagggggatagacttccctactaacctagtagtaatgggtactcaagggttagatatcatcctagggataattggctgcacaaaaaccaagccactatcagttgtgataagaggacaataaagttagtgtccctatccgggaaaggagtagtaactgaactattcatgcctgacctagaagaaggagcctgtcaccatttgtctatagatggcaaggaggccaacctgatgaaggatattagaattgtgttggagttccccgatgtgttccctgaggagttaccaagcatgccacccgagcgcaaagttgagtttgccatagaggttatcccatgcaccgcccctatttccaag

SEQ ID NO: 121209 - DNA, 973 bp, Zea Mays
gtggggaaagatttggcctattgtcagagatggatttcttatattgaaggaagatgaaccgtctctcaatgatcatgacaatattctaaccaatgatcaagcaatgaatgtattctatgatgcattagacataaatgagttcaaccgcatcaaaaatctcacaaccgctcatgagatttggacaaagctaatggaaattcatgaaggaaccacaattgtgaagagtgcaaagttatatgtatgcaaaggaaaagtttgaacaatttctcatgaaggaagatgaaagtgtatccgacatgtttaatcgcttaaatgaaatagtgaacgagctcaagggacttggttttaatgtaccgaatgtggatttcactcacaagttccttagatctcttccgggaaaatatgacactattgtgaccatgttagtaagaagtgatttacctctccaaccgaagtaattggagaaattcttactcaagacatattcaagaaatctcaagccgaacctatgagtttggctaaaaaggtgaaaggggaatcaatagctctaaaagctaaagtttcaaaggcaattgaaaaagaggaaagtgaagatgaacgaaatggaagtgaaagcgatgaggaatttgctctctttgtgaagaaattcaacaaattcatgaggaaaaagaagggtcaacctagaaaaggacaaacatcaagaagaaatgtcttcaatgatagaaaatgtttagatgtggggaacctggtcacattgccatgaattgtccaaacaagaagaacaaaggtaaggatggagatgataagaagaaaaagaagttctaccacaagaagagggatggcaaagcctatctagttgagtgggattcggatgcaagttcggatgaggatgatgatgattcttcttctaaattaaatgccggaattgcaatcaaggaggctccctcacttttctcatctcctcattgtctta

SEQ ID NO: 121210 - DNA, 364 bp, Zea Mays
gaaaaacctaggcggctgatgccatgtgagagagtctagtccaatgaaaccctagctacagtacaggtaaattagggaacctaatgggccagacccatatacactctaacactatatacatccaaatacgagcaggtccatattcatccaatcaaatcaaaacagcaaaagttcgaatgttcgatccaacactaaaaaacccaaagtccctcaaaaaacccattccctcctggctctgtccaggacaataggaggaaggaggggagcaggtgctaccttcagatgacaagctcatcttgactaagggagtgagggtcactggctcactgctcatctcgactggagacgccgatgcaggtgactg

SEQ ID NO: 121211 - DNA, 357 bp, Zea Mays
caagtccggtgtatcatcggtaaaacactcgacacctagagggcttaacagttagcaactagtttccaacgactagttgatatggaaagcattggacgtgttcagtggcacactggtagcgaaccgaacatttccgctggtgcccagaaaagtctatcacttttcaatggctctttaagtgtgagagagtctataaataacctaaccgaccatttctaagtgtgggaccttatatacattgccaaggagttgagactttattctatagctcttagaaacccaaatgtaatagaatcccttggtgataaacataggtgttttgcgtagtgcttaagctagctagaccgctgctatagc

SEQ ID NO: 121212 - DNA, 326 bp, Zea Mays
ttcttcagaacaccatgcaagcatacaatctaggacatgtataactctgccaacactgcactgctatagctgatcctgactagtatgaaatgagccacctttgttaagcggtccactactacccagatggagtcataaccggctcgagtgcgaggcaaaccgactataaagtccatcccaatctcatcccacttccattgaggaatgtgtaatggcttcaacaaacctgtaggcctttgatgctctgccataattctctgacaactgtcacatatgacaacatacttcgcgatcttccttttcacaccgtaccaccataatctttc

SEQ ID NO: 121213 - DNA, 418 bp, Zea Mays
cttgcagatcacatcgctttaggaaatcttgaaaaatctggtctgtacacccaatcgatgcacccaatgggtgtgtctccattgagtagtgtacaagtcttgtccaaaaataggagcctgatgtgatggaaaggcagtgctgcgcttgagcggatgactttactatctcctggtgccgtcttgcgtgaataggtgtcagtcgtctgctccttctcttggaaacttgagcgactattggagtctttgcgactgttcactcaatgggtgggaaccgaggagccaaccattgccatctttaaatagcccgcatacccgtgtctgctttcttcactcgttcttgcctttttgcactcttcttcgcctactcttcccgctcgcccgagaaagcatggccagtggcaaaggtggcaagggaaag

SEQ ID NO: 121214 - DNA, 1053 bp, Zea Mays
atcagtgtaggttagtgagggcaacgtgatttttagttattactctgagcaagttttagctcttatgttaatgcataagctttttgtatctcctgttcaacagcattgttgcctagttcatgtattatatattagttcgatacatgcatagcgtgattgataatacctgaatgaatttgaagacatatatgaatgagttccttttcatgagcagacgctgccactggtagttggacttgagaagctcaagcctcttgacaccgtaacttgatgtacaaagagctgcaggatgattgtgatgtcggttgtatggaacagttaattcctgatgcaatctcttaccaataataaatgttttgaaggcttcagcaaattttgatacagaaacaaattggtatggataatcatagtggcaccaatactgctgttgatctttcttggacaaaacctgcgatgaaagaaacgtgaatccacgagaaattccagtcggtatagaattcaaaagtgaagaggtgtgtacttcttgcaaaaaatcagccacgttttttctttctggacacctgaatcccatagcaccaaaaaagtcaactgcatattcacgtggaccttggtatacgatttgaccttcggctataagaatgacatcatcaaatagctcatatgtttccggagctggctgaagcaaggatatgattgtagttccgtcaagagcatgtgttgaattccttaggtatttgataatctgatatgtagttgcactgtcaaggcctgtcgatatctcatccatgaacagcacgcgggcagaaccaactagcaattcacctgcaagtaccacaatattagcacaacttgaacactgaaaagagcgtgctattttgcaataactaatttcagctgacagcgctagcatacttaaatggcagtaatatgcagtcacctgttgtcaggcgcttcttttgccctccggagatccctttgatcatttcatctccaacaatagtatcagcacagacgtccagtcctaaaatcttggctagatcaaaattagcaatc

SEQ ID NO: 121215 - DNA, 406 bp, Zea Mays
cgcggacttcattgcgccaccgcggttgtgctggggaaggaagacgacgttggggccattggatctgtttaggacggtcaggattagactatggagcggagtcgtgtataccgtagatcttggcgtgcacggtggtgataagtccagtcataccggttgggggcagtttgatccgcgtcgttagatggagatcagacgtgtacacataggcctcggtcattttgaatcttgaccattgatgtgtaaaccaagggttagcagtacgtactggttcgggcgagatccgatttaatctgggccgtccatgttggatcggtcggccgatatatattcatacctcgtcggttggccgcttttacatatgagccccattgttttcggtaaatcaacctgccatccacccaaa

SEQ ID NO: 121216 - DNA, 389 bp, Zea Mays
gattaaatagccaatcgatgttgtattgtctctcgacttaatcctagtatttcaatgtaattccaagcaaagcaatcagaatactcttttaatagaccaatcatttcatctctaggatcggcctccagggtcttgtttacaaaagtcggcctcagaattttaccatctcctatatcaatctcatccaaagatcgaccgatgtaaacccatgtcctaacttgtcgagatccctaaattcctctattatgcctcctttaggggaattaggcgctctctgcgcggctgcggaccgtccggcctcaaaggtcggaccgttcgcgacaccggacccgtgctatagcacttgctggcagtagccagactgtccgtccttaaggaccggactgtcc

SEQ ID NO: 121217 - DNA, 341 bp, Zea Mays
gtgggtcgtccttctccaccgatatgtccatgatccactgcttcgtttggccggcaggaaagcccctgcctcctcctccatgcctaccctacttgtccccttgtcctacaggcccactcccgccctgccattctcgacctcgctaccacacgctccctctcatgcctcctccctgcactttcacgcctggcgctcgctgcagccaccgtctcacactcctacccgctcttcttgttttgttgctccaactgcacctccaccttcgcgtcaaaccttccaccccaccgacgacgctggagcagactcaccactgctcatcccccacccaacctaggttcttg

SEQ ID NO: 121218 - DNA, 310 bp, Zea Mays
gccggatgtatcctttctctgacagctcatcgatctgcttcttaagctcaaccaactctggtccagatactctgtaagctctcttaaagatgggggcggttccaggaagaagctctatagcaaactcaactttccgctctggtggcatacctggtaggtcctttgggaacatgtctgggaactcggacacaaccttgataacctccaatggatctgcttcactgctattaacagccatctgataacaacttcctttctttggctcaggcgggactaactcggtcaccacttcctctcctagtggggacat

SEQ ID NO: 121219 - DNA, 490 bp, Zea Mays
gaagttttgttggagatccgttcatctcggcttcctccatcatctccctcgatcttgttgggatttctgtgattcaaacttcggatcgaggtattaccctatttcatttctttttactcgatctcactcattcttgattatcttgtgtatcatttgttgggtacattttagtttaggtgcttgcaacacttagactatcttcgtttgtctcaaacattgttagagtttagcggtttgatattgttcgttgtagttgaaccgctcgcatgaacggttgaagtgcatgctcaatatcatacgcgtctctactcaaacgtgtttgttaagatccttgctcatcataggttctatcttttttaaggatggtgcgtaggaggaatccttctattgttgaatctgactcctcagacgaccaagagattcatggagatactcccccacgttccagatccaaacgtgggcgaggatctgacaacatcatgcaaggtgg

SEQ ID NO: 121220 - DNA, 631 bp, Zea Mays
ctgcgatttagtatctccaaaggatggacattgtgaccactcagatcagaggaagtaggaagagtagcaaagacaagagtgtagtctagaatatatggtttcagttgtgacacatggaataccgggtgcacctgagcaccaatcggcaactccaaacgataagccactgcacccacacgctccaatatcttgtaagggccgaagaacttgaaggcaagtttaggacatgaccgactgaccacagtgtgctgggtatacggttggagtttgagcaaaaccatgtcactgacgttaaactgacgttcggtccggagccggtctgcctttagcttattgcggttctcggctgcggcaagctgctcccgcaacattaaggtgaactgagccctttcctctaacagctgtgccacatcaacgatagcatcagatgggatatgaggtgctgctgcaaacggagggtcataaccgtacaacactttgaaaggagaacaagccagtgaagtgtggtatgtggtattgtaccaaaattctgccagaggcaaccaattcttccatttagaaggttgagcatggactgcacacctcaggtacatctccacacattggttaacccgctcactctggccgtcag

SEQ ID NO: 121221 - DNA, 433 bp, Zea Mays
caaaaacatcccttaacaagtgatttggcaggtttactcaaatgaatacaatgaaaacagaatgcttagatcggaaacttgcaatgtaaataattagcagtacaatgattctgaaaggatgaaggataaaacatgaatgtcctaataggcatatgaacaaatagtctagtagcaggttgtaatgtcatctatgcatatacctcatctgtctctgagtcagcctaaaagaacataaataacacagacaatgaaacggaaaagtaaggttactcagcttaagcaaaaaatgttccgagactccaaacttacttgtgtcatcacattatgcagttggcatagtcagtttaggatagctggggatctgagattccatttccttgtatgttgatgctgctacctgcaacaaaacattacaaagaactggtttaaaaat

SEQ ID NO: 121222 - DNA, 1342 bp, Zea Mays
cgaaatattaggcatcaaaatgcttttaaaaaaagattggcaggagagaaaatatttgacacattcaacaaataatggaataactaatagctaagtggaattacgcagagctcaagcccaaaggcttgctcggctgctgctactctggaaagtggaaacacgcagagctcattatattaagattgtgtgctgcaagttcttttctggatcacaccgactagtgcgtgcctacttaacaagtttagagacctagaaatgagttctcaaagtttgtggacctaagtggcacctcttgacaacttcaggagccgtgcaggcattttaactcttatgttattgtgcaatgtagtgttgtcttagaattttttttccctaaacatgcaggagagctgcgtgtcacttcattaattggtagaaaacaatctgattacatgctgactttggccagtaagaaataaattattttcaggacagaagaaaaatcgaggctgatctttttggggggaaacttcatggagtcgctgctactaatgctcttgagctaggaattgatgttggacatattgatgcaacattgcatcttggatttcctggtagtattgccaggtcggtgaagaatgacatattcaatgaagctcaatgtttatcttgtcaccctgctaagatacaaaattttaactgcagcttgtggcagcaagccggtaggtctggaagaagagctaaacaatcactagccatttatgttgcctttgagggtcctttagatcagtatttcatgaagttcccacataaactatttggcaggtcgattgagcattgccaagttgattcacataatctaaaggtttatagatatgtgtttattttattaactaattggcaagtataaataccttgagaacctaacccttctcttttatctcaaaaattgaaatttattacaggttttagaacagcaccttccttgtgctgcttatgaacatcccttgtgcgtgcaatacgatgagtgctactttggctctagtctcgatagtgtaatgacaacccttaaagacaaaggttatatcatcaataatcgagctggacctttttcttcaagcatgtggaactatattggacccgaggtttgttcattctttatttgtatcctgtaacgtgtcttattttgtttttgtaagagaagtattgtctttctgcagaaaagcccttcacaggctgtaagcatacgggcaattgagcaggacaggtataaagtgattgacaagttaaatagtcgattacttgaggaaattgaagaaagtaaagccttttttcaggtatatgttctttcactacatatcat

SEQ ID NO: 121223 - DNA, 287 bp, Zea Mays
ggccgtggtgcctgagtttggcggggagacttcttcagctgctgaaccaaaagagcccattcctcctacgcagaaggctgaagatccggctataatgccgagggtaccctcagccgagctagctgagtcgaagactgataaagataaggtcgaagagcctaaaattgaaggaacaaaaatgttagaaattttaagcccttcggcagaagtaacagtgccgaaggcacaaaaaagttttgcggcaactcccaagagaagaaggatggcaaatgtactagatgtgttag

SEQ ID NO: 121224 - DNA, 965 bp, Zea Mays
aaaacagtgaatagtattggaccaaatctggcccaggtcagcccaataacagcagaaacgtgcccgcgcgtgcgcccgcgtcgacttttgcaagaacaatcctggcttcttgaataacctaaagtggggtcgcggcactattaactcatttactgacattttcataatagcccctatacttctaattctttacattccgaggacctcgacggtggacggcgacgcgcagagctccgacgagctcgcataccggccaattcgctcaatgactggcattctactttggccgaagccaaattcaagacctaccaatggtttcccccaacttaatttcacaaatggctacctggtttgctctggccacggtgaccgcatgggcaacggaagaacacgggcgttcacggcaacccagggcggtcaagttcaatcaaaggagtcgtgaagcttgaggaggacctaaggacactagaacaatcgaccagagtgcttgaacgaacctggaataagctggccgcggtgagggtgtctctgtggtggcggaaaccggattgggggatgtaagaaatttgtggtctctggtgaacgatttgaggcaatacttggtggcttggtgcgtgatcatcctacggacctgaccgcgcgctcaatttatagaagacaagagcggtggccggtgaatttgggagggacgcgcggcggccggaggaacaagaagttactggcgcgcgcgattagtgtccgactaccgtggcaagctctccggtgatagacggagggttacagcaagtcacagcgacgcgggggatgtgccaaggcacgtggcgttcggtcgacgggcagccaactccggtgacttatccggaccggccgcaaagcaaaaaggagcacggcggctagccggattagtgcccatagtccaacagtggtgacgatctttttaccccgcggcgttatccgggctaaag

SEQ ID NO: 121225 - DNA, 413 bp, Zea Mays
cttacgcaaaagttgcgctgcgaaggggtatatgcggatagtgcccgtccgattaatatctgatggccccgattagatcctaacctatgtgaatgagcgtcaacaggtgaccgcccgataaaaatgcaacaacccataatctatccgtgggtcggatcgcagggcccgatccatccgttggcccccagatcgacggttctgattcactgaaaccacacgccaccccaagatcaaatcctagccgctacacacggatccaacgatcccgacttgttggccccgcgctacatcacagccgcattcagtgaatcatacggctacccatcatcgtcttcaccgcgcgcaagaccacgacgcgacccgacacgccagtacggccaacggcgacgagaagcaccacattcaaactctcc

SEQ ID NO: 121226 - DNA, 359 bp, Zea Mays
ccaaaatgttttctttatggcgctagctacgcggcctttcgacgctctcatgggacaaaaataaagaaaaaggtcgtcacccactcacccgtcacagatatgctacataattattgggatctaattctactattactataattccaacccctttttttggttagcggtaatattttttatttaccaacagcgcgcaccagtactaataataacatcatcgtcgtcttcaagttctgacttggaaccatgcatgcgactcctactaacgtaaccatgctggaactgtgcggacaaacaatacaatgcagccctcttccggtccctgctgtacgaggcctgcgggcggaccatcaacccgg

SEQ ID NO: 121227 - DNA, 389 bp, Zea Mays
gcattaatagagcctggcaccgagccatagcggaggtgttggtctccctcccattcataccccgagcccctcgaaccacagagcactcgtgacctacaaaccctttggaatgcgatgcatttatgtcccacgcaccccagcctacggtgcactcatgacctaccaggatcgggcctcagtgcgtagacctctggaagggtgcaacatgacaagccacatctagccctaggatatgaaggccaggggtcggcatagcttaaatgatggcacttcgggccccatgctgcccacaccatccaccataaataatacgagacagtcaggcaaccgcgagcacacgtggctttaacccatggtagaacgctcagttttaccgtcgctcgatggct

SEQ ID NO: 121228 - DNA, 807 bp, Zea Mays
atcaaagacaaaacttggtcggggacaggagcaccacaagatctcaacttggcagatacagagttgaaaacattctgcaagctcaaaagttggcaagagaacctgtttgtcaacacatataataaaaggcaaagattggctcacctagaggatagaaagaaataaaggaagtccctgagctggaagcatcgaggcactgtctgtcgatggagcattgataaggacaatgttgagagcatcactcggggagaccttagctccaacaacaggcgacggattcccagcatccgggtcactggcctctaagctgaccggactgacaagagcagtagataaattcgtcaccacgggttcctcagattgaaccagtggcgatccgacgtgaacatccatggaggcaaccgaagaggatccaagctcggcactcttgggggctgggtcatcctcagcaccacccttgggggctgcatcgccctcaacaccaccctcgggggctagattatcctaagcgggaccctcacaagctgaagcaccctcggtcgtaccctcacaagctgaagctagacctccttccatggtcgacgaagcgtgagaaactgtccgggtgtatcacctagaattttcaagattttctgaagaggtgatacccacaaaatatacgcaatgaatgtaccacgacaaaaagaggatatcgactgaaacgggaggaagcccaaatgtggttactaaagcgcaagtccaatcaatagaagcattaaagtacagggcagagtagtgtgcagttgaaggccctctgtctcaaccagc

SEQ ID NO: 121229 - DNA, 657 bp, Zea Mays
gccttcgggagccggaaaaagaagaggctaaatagagtttttgacgccatcgaatttatgtatcctgactaccgctacccaccgaaggggcaaaagagaaaaagtgcaacttctgggaaggatgttacttcagctgctccgaatgagcccgcaccgaagaggaggaaagtaaaggtacttactttcgaccgcgctacattgaaccggccacagtgcctgaattcggcggtgaaacatcttcggctactaaagccgaagaacctgccctcacacagaggattgaagaaccggctacaatgccgaaggttaacaaaattgaagaacctagaatcgaagaaacaaaaatatcagttctgagcccttcggcagaagtgacagtgccgaaggcacaaaaagatcttatagcgaccccaagaggaaaaggatggtcaatgtactagatgtactggagacgataaagaattcaagctctactccagggaaaactgccgaagcttgaaaaacacaggctgagacaaaactaactgaagccgaggctgcaaagagccaggccgggactgaagctgtgccttcaaagcctgccaaggagaaatccttggaaaccggagaaaaagaaacggaaaaagaagctgcaaaacaaattctgcctgaaaaaac

SEQ ID NO: 121230 - DNA, 446 bp, Zea Mays
aacctctgctatttctttctccctcgtacaacacccactatacgcagaaaaacctcgattcgatcttgcctcccccatgtcaggccgaccgatgatggccgcaccctctctctccttcccagtcctcctgctcgcctctacctacacctttctcttacaggagggggtggagcccttacatgaggaatttattgataaagaaagtgttatagggagttctggtctgttagcgggtgatgtttgtgctaatgtagctgattcaagtttcgtgttctgtgcagtctctatggtttttagggatagattttgtgttccttggtattacggtttgatggtagacagtagtactatctctccaagaaagcaggtgcagagcgatctcaaggtccgcctagcgatgctaaagccggcaaaggtggagaggatggtggtgattacgacttgca

SEQ ID NO: 121231 - DNA, 733 bp, Zea Mays
tcggcttctttcctgccgcaaaatttctacggcactaggtgttcgtgtcaggctgtcagtacatcatcggatgcctgaagccgttggccatatgggtagttctgctaggtctagcctactccttactttgttcgttctggtttgttcttgctctcttttttaaccggccgtgccttccctgtttttaagtactgcaagttgtagtgtaggactgctgctgctaaagtgcatgtgacgtgtgtgttctgatggtcgggtaggtatatgattagccttctggggctgcgctgtgtctgtgtgtatcgattactctttggaaccacttctctctctctatagttgtactgggcgcgagctgggaaagccctctcgctgacatgaacatcccaaagggcaaatgttgcaacgtgcaacaaaatgttcgtgatggacgagcggcgcctctggaagctctgcatgcccagcgacggctgcgccagcagagctctcaaaactgcgtaatctctgctcgaacagaggttaaatcccgaagaatttcgttcgtgtgggctggccgctggctgtgttggacacatgaaaccggggttctaagttcagcatgtgcatcgggagcatcacgccgtttcctttggcacgccactccctaactggtactagcactgcgtgtacgtgtttggcgacaccccggtggcgtttgtttaatcatcgagcactccaaactgtcctaggtgtg

SEQ ID NO: 121232 - DNA, 870 bp, Zea Mays
cgatccagcacagatccactataatgcatagtgggtgatgcatgcctaatggtggttgtttagtgttagtttgggcatgttggaactaagcaattgtcgatgccatacactagaagtgaagaatgttgttagcgttaggagtagaggtgtcaatggggaccgatacccgttaagccatggagaatttctctattagatttagggtatgggaagattttaatttccatttgctgaagttaggtatacatctatttgaatcaacagttacagttcaacagaaactccttccgctatagtttgttgcatgtcctacctttttcctaaactattttccctaaattgacatactctctagaaaatctatccaaattttgaagatcaaatctgttccattgaactattcatgacatatatcttggtattgctttttgtcatcagaatatattttgaactcagtaaaagttatacacgatttttttagacaatactaaagcaagttgtaatcaagaacacttgaggtgtgcgccaattgccacatttagatataatcattataattttggtcatcctatatgtgtgcattcatctatgcattctaggatttcaattagtctcaatcttgtagtatttgttccttcattgtcaaatcacttctcatctaactactatgcttttttaaccatcagaacgtaactccaacagtatccatttataaaggttttgatagcaaactttacatattcatatcatgttaaggttgtcacatgtgtaaaggtgaagagatcatgcatgtcattccacgtagatgaaaagaattcctatataaaatgacaccttttcttgtaggtagtggaaagtatctttccagca

SEQ ID NO: 121233 - DNA, 287 bp, Zea Mays
agcaaggatcaaaggaaagccaaatatagccgataaggtacaggtctaatcaacagaagcatcaaagcacaaagtgacatgaagactagtcaagggtcatctatcgaacgtccaatcagtcgcagatcaaataaattacaggacctagcaagatatgggcagatcgcgtactcagcctcaaagacaaaaatgtgtgctgacctctaaagcatagtgttaataatataatgcggatctccgaagacattcgacaaaaggaaaggatgattcccagaaaaggcacgaaa

SEQ ID NO: 121234 - DNA, 531 bp, Zea Mays
tgcaaaaattacaaaggtgttgaggccttgggactagacaaagaatttgtgtaggttatccacattccccgagtgctctaagtcttcgtcggatggtgaagtgagcatgtaggcgtttggggatgttttggtcctgacgatgtagggcccctcccatttgggttcaagattgccccaagactctattctggtagttttagtgaggactaagtctccttcctggaactctctggggatgatggtgttgttgcgccatgtcttcgcctgcgcttggtatttgttcagtgcctctagggcgaggacacggtctccatcgatgaggtccttagaggttggctcgtcgacgtcaagagtggatgtggggcttgctcatggggatccatgctttagctcttgcgacgtcattgcttcagatctatacatcaagcggaaaggtgtgaacctgatcgctctagattttgttgtgttcagtgcccatacaactttgggaagttggtccgcccatttgtttcttgttgttgagtagccttt

SEQ ID NO: 121235 - DNA, 988 bp, Zea Mays
ccaagaccggcgcccagcttcggcctaaaccagattcagggcctagggaacgtttcccctaggttaatttgaggaacgacacacagagacgccctgaccatggtgaccgcgggtgaggcggatgaccataagcgttcttggcgatgggtggcgatctggttcaattaaaggagtcgtgcagcttgaggaggacctaaggacgctagaacaatcgaccagagtgtatgaacgaacctagaataatctggccgcggggaggatgattatgcggcggcggaaacttagtttggggaaaaaccaaaattctagctcactggtgatcggctgggggcgatactgggtggctgggtgtgtgatgaccttacggagcttacggcggcttcaatttatagggagcggtcgcgagcacaacgaatttgagcggcggatcgtgatttgtaaaacagggtgagtcactggtggccgcacaacgtggcttttaccgtggcggcaccgccggcgatcaccggacatgcgaagcacggttagccgcgacgtggtaaagcgtctggacacgtggcggacgacggtgatggctcaacggcggtgagaatcttatctgagggatcggtgagcaagggggggaggcacgacagctagccggaatagtttactgaccggagcttatccatggcggcgatatttacgtgaccccgagcgttatccaagcactggtgagcacgaatcacctcaccggctggaatcgtggcgcgagggtcggcggcggcgaggggataaacctgagattcttcttcagtcactgtaccatggcgtcccatttcagttaacctgacagagcaacttggagcatgatttactctcaatttccaataacaactcctcccaagctttgcagcaaaattgtagagctataaaccagcaataatttgactacagggcttgaactcatttgagcactagatcaaggttgaattcatactcaaagttg

SEQ ID NO: 121236 - DNA, 530 bp, Zea Mays
cagcaatccaagcccctgcgcccggaggtgacgacccgaacgactctggtgacgatgatgaagacgacgacgaagaagaagaagttgaggaaaacatcaacgatgaagccaacgaagaacagtaggaccactacagggggttatggcctgtcattgaacattatacctcaatgttcgaggcagggcacttccctaacctgctgcaggatgttctgcatgcgttgggaacctatgtccgacccctgtatgagacaaggcaagtgtatgagcctcctcgggcttgctactacatcactcgcattcatgtcagggtgatggatgcaggtgatagagggttcatgactctgtcagctcatgagtctctgacgccgctatccacctacgttgcttcggtcagcgatgctgctaggcgaactctatggtccctcagccacacctactggtagcagcttcacaacacgaagtacaggcatcttcctctgcgtattcgtggagaaagccagactagtattgttccaagtggagttgga

SEQ ID NO: 121237 - DNA, 555 bp, Zea Mays
caagggttggaggcggcggcttttacgcccacgacgaggaggctctgacaagacgtgatacggcaatagcggtacccaaattgtatttggtttcgtttcacttctgtcacggactcaaaagttaaatccgtggtaacgctacggttccgataacagagcatcagcggcgctagtgaggaaaaagatggtgtggtcgccgggagaaggaaagactgcgtagataaatcactcaaggtgatgacctaccgtgaaatgacttaaaaataacttacaaagacaacgtaaatttgttaagtcattttagaatgggtcacatgaggtgacaattgttatatatcaccttagatgaaggttcacacggacgcacctggacgcctgatcgctcaatcgaccaccatcggacgcacccaaccgaaggcatccacactaatcgagcccaattcatgagtggatccatttacccggtatttttataaatttacaacccggttgacagttgttggtcacttattcttaaatattgtgaatcaagaacaagacaacacaattattaaa

SEQ ID NO: 121238 - DNA, 458 bp, Zea Mays
tgacgagttattccggtttaagtgtcgctgcctttaaaccgtgattcatgctttacctccacaattccaaattcatcctctcgcatttgttgaggatcaaaccattcacaatcaaataacacaaacatgaattctttggccccaccaagagtgtactccgttatgtcttgaagaaacaccataatagtcatgagtgcctctgtctgcatttgtggcagttgctactactccactgtttgtcgtggctgcctgcgggcggattttttctaattttgatgttcgaaaacggtatacattaatatcatagcgggtatattttcttgctttcaactgaccatgtgatatctgtcgcaaatcatccgagactacagagtcaagtttcttacactacatagagcagaaaaaaagatataggtaaatagcaagtcgtatgtgcaaacgaagtacacaaaggaaaa

SEQ ID NO: 121239 - DNA, 414 bp, Zea Mays
aaaagaatgaggaatgcaacttacccttaaatcaattcacaattaaaataaagagaggtcaggaatttgtgtagcagcctgatagatgaattgggaaaaacagtgatacccttaaatcaattcacaaaagtgtgaagatagacatagttgactcacaattaaaataaagggagatcacgaatttgtgtagcagactgacagatgaattgggaaaaaacagtgacacccttaaatcaattcataaaagtgtgaaggtagacaactgtgtcgcaacacattttctttctaatttaacaatttaccgcgactaagaatggtattagatcggagtactttaccacatacacagaagttcaggatagagacaccgaactgaaaaaacacaatgtatagaagtatggactaataagacaa

SEQ ID NO: 121240 - DNA, 640 bp, Zea Mays
gctggtacattggacaacaactttgatacaggcaggagagtgagtagccacacaaaatttggagaatgaggccctgcaagttgctcggacagaaggactgacgaagatcaccaaggtatagtggtcggaaagatctccagtaccgtaaacctgacgccggtgatcctccgccgcaattcgtgctcgcctaggagattcatgccacgcgagagatagataacgccgggacggggtgaaaagatccagggaggggtgaacccagtcactggtcagaccggccatcgtgtccagctgtggttagtcacgttggcatcaccggagctcaacatttctccggccgtgacacgcaacgatctctcctccgtgtcgtaagggtcatggcaagcaaccggctatttgccctgaaccgtttccctcttgcgcgccatggtgagcaggccaccgtaaaatatcccggccacgatgacctcgatttcgatccaaaatttgcgatgaacttggctgaagtctataaattggagacacccctattccgcctactcgttacgaacccagtgaaccactcctcactcccgatcgtccaccgtagcgcccctaattcgaatttcccccaaatccgttctccgcaccgccacgagca

SEQ ID NO: 121241 - DNA, 291 bp, Zea Mays
ctcggggaggtcaaccattaattatagtgcaaacgtacgtaaccgggccgttctggcttggactgctcggtgctcgatgcacatctttctgataagaagcccagcctgcatcctcctacggaaagcccacttgagccagcccatggaccagtccatgtagcctacctgctcctatctctatctgcaaaccactactacgagcccataaggggccagtccatatggcgctcaacctgaattatatgttacaatacttgcatacaatgcagattttccattgctaaacatgtt

SEQ ID NO: 121242 - DNA, 481 bp, Zea Mays
gatagagagtggtgcaaagcgctaggtgcagtcacgcagagcgggtggtggttgatggctcacggctaggatctaggagcctagaaggagtcatgtgttgtgcatagcgatggagcaaatatcttctagtttggtgggtcggaccaaggtacgacacaagctaaactatgccatatcggtccctctgcccctacgtgtagctaaagtcataggaacccttgtatccaaagaactagctatagttatcaaggagctagatattgtcgagctatagtctgcctcccatggagtactcatatagttcaagtttgtgaagaatatgatggaccaaagtgtcaataatatgagtaacgcaaggtacatcgatagttaagattgctgggacttgacacatgggctcgagcactcaagggcaggtgagacaaactatgcacgtcaaaacaaatgacaggggagctcaaacgtcttatcaagcatgtct

SEQ ID NO: 121243 - DNA, 550 bp, Zea Mays
aaactttagcctccgtgttaagtgcttcagcagaagcaggagttgatgttttaacagactccataacagcatctagcacactagccattctccttttccttggagtcattgcgaggatgcttaatggcttcggcagttccattgtgcatggtggactcagtacctttaactgttataccgtcttttccagttttggctcttcagtcggatttgtcctagcttcgactggcatagagcgacctggttctgtaataggagcatccccctcacttagcttcggcacgtcggtcgtctcaatgcgcctaggtcggcgcgtcaaactttaaccttttttgacctcgacacactagaagttgccgaggtagcagctttcctcttcttcccttgctttcgtgtgggataacattaatctaggtacacaaactcgataatgtcaaacaccctatttaatctctttttgccccgagcaccgaaggcagttatcatagcttcatcttcggccttcgagtatgctccaagcagctcatcgctagttgcctctatagcatct

SEQ ID NO: 121244 - DNA, 371 bp, Zea Mays
gagacacagcaatctgggtgcactatggccgtggaggagtcagcaacacacgcggtgattgcaagaattaggagggcgacaacttgccatgttaattaccaggacaaaagtgattctgaatgactatgaatctgactgaatctccaatgtaatatttcaattttatcttattttataattctgtgtaagttaaactcaataatgactgtgtgactgttctgaaaacactagacacacatgaccaaccaattgcaacatcatagttgcgatggttgcaactgtatgtatacacaggataatagatgaatatgtgttatctgtttacgtctagacatataattaaaatctatcttgttttattatcatataac

SEQ ID NO: 121245 - DNA, 1101 bp, Zea Mays
aacatagaacacctcaggaagttttacccctagccgtatttcaaaagctattgggacaacaatgtactctgtaaactgggaaatatatcatcaataaaaagacttcaagagcgctcaaatcattcattgtcaacctgcattcttacttaactcagggtgaccactataccctactaacggagcaatcggcttaagtcgacgatgacttaagacggtgcaacatgctcacgcttacttaactcagggtgaccactataccctactaacggagcaatcgacttaagtcggcgatgacttaagacggtgcaacatgctcgcgcttacttaactcagggtgaccactataccctactaacggagcaatcggcttaagtcggcgatgacttaagacggtgcaacatgctcgcgcttacttaactcagggtgaccactataccctactaacggagcaatcggcttaagtcggcgatgacttaagacagtgcaacatgctcgcgcttacttaactcagggtgaccactataccctactaacggagcaatcggcttaagtcggggatgacttaagacggtgcaacatgctcgcgcttacttaactcagggtgaccactataccctactaacggagcaatcggcttaagtcggcgatgacttaagacggtgcaacatgctcacgcttacttaactcagggtgaccactataccctactaacggagcaatcggcttaagtcggcgatgacttaagacggtgcaacatgctcgtgcttacttaactcagggtgaccactataccctactaacagagcaatcggcttaagtcggcgatgacttaagacggtgcaacatgctcgcgcttacttaactcagggtgaccactataccctactaacagagcaatcggcttaagtcggcgatgacttaagacggtgcaacatgctcgcgcttacttaactcagggtgaccactataccctactaatggagcaatcggcttaagtcggcgatgacttatgacggtgcaacatgctcgcgcttacttaactcaggttgaccactataccatactaacggagcgatcggtttgagttaatactaacttaaa

SEQ ID NO: 121246 - DNA, 457 bp, Zea Mays
gcaaccagtgcataatgtagtggcccattgagtccctctataaagtgcccttgcttcttctcttcatcagccacttcatcaggagcatatcttgatagttgaatgaatctgtcatggtactcgctgactgacatgttgccttgcttgattgacagaaattccttcttttttatcttcatcagtccagctggaatgtgataatttctgaactatgtggtgaattccgcccaagtgatagtatcagcagcgtcatggcagcaatataagaatcccaccaatcagcggcaggaccagttagacgaccagaagcatagagaaccttctcccggtcggagcattgggcaatatttagcattttctccaccgactttaaccagtcgtcggcatgcagaggatctggagagctggcgaaggtaggtggcttgtggttcataaattcctggtgcttgtcccgggg

SEQ ID NO: 121247 - DNA, 352 bp, Zea Mays
attcaagcacttgagcaacaactcttcattagtccttcaatatagctcattactatgcatgataaatgagaatgcactccaccgaatacttctaccaactttagcatttggatcacatagtcattcgtataggagtatctaaatcatccaaattggattcaagttcattggagtaaaagttgagccaatttgggcattctccaagaataccgacatgacccacctcaggaactagctccaccttttatgtaaacaatcctacaaagaaatagaaaacctatcttggacaatttcattaaccgacttacctagggatggtagtggatacggatatgggtagataaccgcggtt

SEQ ID NO: 121248 - DNA, 372 bp, Zea Mays
gtcaatcttagaacgtagaagtgcatatcgcagaacggtggaagcagattaggcatgcagattgcagaatggcagctgggaacagcttaacagaatgacaaatgggaacaggtacttcgctaacgattctggtggcgtatggttgagcacttgtaatggtaacgttaatgtaaataaataacagtggtatctattaccatgggaatgaaaagcgttaattgtttggatagatatggtaacgttttccattctctttgtgctgtttggatagttcggtaataaaacaacaaccagaacacatatggggtttggttgaagcgagtgaagcaaagataatatagatgaagaaaattcagaaacaacaatatagcg

SEQ ID NO: 121249 - DNA, 452 bp, Zea Mays
ctggctaccgaccctccctagtatttaggtgttgcgtaccttgcggcgttcctaaaccctgagttccacgaacccttcatgccatcacaaccatcgccagtggggtgaaattgggagagagggagaagaggtcgccgccgcaccgattccttggatcaccgtcgtctggactaccagaaaggtgcgattggctagcgcggtggtgcgtagattgtctgtgagccaacctcttggcgcggggtcatcgggactccactaaattcgtcgccggaatatcctacgctactaccccgggcgggcggatgtggacaacccacctggacacccatatggctggtacgtcttcaaccatcgtatacctagcttgctccgcaatcgattacgagtatcgtgggttggaatcttgggctggttcgcggaattgtatctccacggcgggtgtggaaagggcg

SEQ ID NO: 121250 - DNA, 378 bp, Zea Mays
tcgacatttaatgagccctgccaccccactggcaggcgatgtgccgcctcagcatttaatgtgccctgtccactccgctgacaggcggcgaccaggctatcctgcaggcggcgtgcctatccattccgttggcaggcagtacgcccgcattgcggcatacactgtgctcatcatcactcgtacgttgccattgaagcttccgctgcacgccgatactacgcagactgtggatatcagggcacaaggagattgccctggcgaccaacattagtcgttatgtccctgggcccgcatgtcggggctcagcatacttgtacgtgcccaccttcagctataaaaggggaggcacgcaacgttacaactcaagctcatctaggc

SEQ ID NO: 121251 - DNA, 317 bp, Zea Mays
caagtccccaacagctatatcagtatttggaggtacttcttcggccccttgcttggctgtggcaagcttcgtctcaacaggcattgtgggttcggcttcggtcccagcctcaattgctgcagtatcagtttgagcctgcgcctcagcactttcggcaactttctttatggaagaggggcgtttggagtctgttgtttccaagatgtctaaaacatttaccatccttttccttctaggggttatcgcagaacttttttctgccttcagcactgttgcttctgctgaaggacttagaatctcgggcatctttgctgctt

SEQ ID NO: 121252 - DNA, 1048 bp, Zea Mays
cggatactcccatcatctccactatcgagattccagcaaaaatgtcgcaagccttgttccctctagtacacgatggtggccacaccccaaacacgattggtgtgtgttgggggcctctttggccaaaggtctttaaaacatatcggttattcctaaatctgtttcaggtataacaaggtaatagctgaaggataccttctatcagatatcataatgaggggtacccagattatgcccctaagcatacctaacacttgagtaccgaaaaattagaaagcatgttccccgagatcaagcagggttgaatcacgattcatttgaggccccgctcaaaggtcgctcaaaactgcatctcgcccgagcccatccatgagcgaaggctgcacccgtgagaaatcctcgactcgctcgatggccccccttcactaaaagcaatttccatctcacccgagctcatctcagatagaggacagcctcatgcccagccttagccggagatctcgggaaccatgaatacgtgtgcattaaatgcaacgatatggatatctgctccatatgacactgcagtcaacagaggacgatgggatgggaccacggtcccatctactttcaccaaccacgatgacgcacacccacgaataccagacactgctcccccactctggtcactgttctcgaacaactccggatggtacatgcaaacgtctaggcatagcctcaccctcgggagagaactctgccacacccgaagacggctttagcctcgagagaaaactctgcctcgcctgagctcaatctcagccaactgccttggaagtagccaccaactcccgatgaatcccgcaggaggtcactctggcgactattctaaaccactcactacacgactgtgtgcctaggcacatgcccaattgtggcctcgggagaatcctccgccttgcccggcctcaatctcagccaactgccctggcagtagccaccaactccccacgaatcccgtaggaggccactctaacgactgttctaaaccactccctacacgattgtg

SEQ ID NO: 121253 - DNA, 303 bp, Zea Mays
catcatcccaaaaatgagttgggccacgcataatggcaaaacgtgattgtagaactccaaaagctcgttccacatccgtctgtattgcttcttgtggtttggcaaagtatttactcttatttcctcatggctctagtatgtttttaccaatgtagcccaagatggatatatcccgtttgcaaggtagtatcatattgtataatcatgaccatttatattgtagttcactttaagagcttctccatttgctagctttgagaatagtagcgaccgatgaagaacgttgatgtcattgaaagagcc

SEQ ID NO: 121254 - DNA, 701 bp, Zea Mays
cgattcttgtgttggggtggtctcagcgtccactggagaagattgagtattatcttctaagagttgccacatctcctcgagcacatgtaactgcactgtaggggagcaacgatgcccgggagaccacttctccgcacacctgtcccctcgcacgccggtaggccttcataggcgcaagcttatcgtccagttgacggggatgtgcagcctctgttgggggaggtcaaggtagaggtagaggagtttgtgtgtgctttggcaatgagggtggaatgaacttgcgagtttccatctgaggtggctctgagacctcctcctgcaattgaacgagagcacaggcaatatcgagagtaggaggtctgtgtaaaattacagaagacttaatatgatccttcaactcatcgataaaacacttggtatagaataaggggtcagttttgctctcgtatgccgctagctgatccactaatccagaaaattcttcaatgtaaggaactatggtggaagtctacctaatatggaatagctggcggatcaggtgttcatattgatcacgcccaaagcgttctaagaccaagtgactgaattcagcctagctacaatgtttgacacgagtggccatggaatgaaatcaacgcgctgcggcacccgtgaaatgcattgtcgcgacacgaatccacatattaggatcaacaaagtag

SEQ ID NO: 121255 - DNA, 388 bp, Zea Mays
cacttgccagagagtcaaagctagtcatttgaaggtagccggtaccttacagcccctccccataccatcttggaaatgggaggatatttgcatggactttgtcgtgggtttacccaacacatcccggcaccacgattctatttgggtcattgtggatagattaaccaagacaactcatttcttgccagtgcataccacccacaagacagagaaatatgcagagatctatattgatcaaatagtgtgtctgcatggaattccgaagactattgtatcggatagaggagcactgtttgtgacacggttttgggagcagctccaaaagtcacttggaaccactgtgattagaagctcagcgtaccatccttagacagatggtcagacagag

SEQ ID NO: 121256 - DNA, 319 bp, Zea Mays
tctgccctggtactgggtcctgctctgctgactgttggagggaggtgccttggaggcaggtgccgagggaatcttggggccattcatcgagttggagtaggtaggtccgggtgccttcaactgggggcagttattcttgaggtgactggggtctccgcagtgccaacaggcatttgctggcggttggttgcttgcaaccgagggggcctgaaaggagctctgaccctgctgactgtaacgtgacggagtaggtccagctggtctagtgaagcttggtcccttgggtggaagcccaaaggatcgagctctctggtgacgg

SEQ ID NO: 121257 - DNA, 571 bp, Zea Mays
gttttaaatatctggtcgtgcctcttcaagacaaataatgaagtgtgccggtgctggtagtctgagcgtcattattacttcttttgtccacctctgctcgtgtcgccccttgtcctttgtagcctaactttcagctttccttcatcgttttgtgtgctttataaggcatcgggggcttagggctaggacccgtaggagtgggggtgaggcctaggacctgtcggtcatgagtgggaggtggaccgactctttcccatgtcgtggttcgatcgatgccaggcacaattaatgtgtcatgcacggtactgatggcgagaacattccttcggtcagacgcagaatccactcgagtggctccctagcgatttgtctaatccccttgctaggcttcgcctcttccgaccctaggcgtggtgcacaagggtcatctggggatggattcacctagtcaggcatgtccttatcttctctttgactcgtggccccttgagacatggggatctgatccccgacataatggttaaagcatgcatccgcaattgcaacgacccggattcaattcttagtctcg

SEQ ID NO: 121258 - DNA, 346 bp, Zea Mays
ataactataacaaggagatgtccagacgtctgaatgaactagttggaaagggaaaaatgaacgtgattcagaaacacgaaaaggtaatctagtatgtttgcccaatcgacaagaggagcaggaatgagcatcagctttattacattgaaaagacagggattttaaaatatgggaggtgactggttgtccaggatgacccagtcgctgatgccataacgacgccatcgaggatgcagtgagagcatgctggtggggaagacggagtggatagagatcgccattgctctcacatcggagaatctccgctttggaaggaagatccttgatagaaaaaccacaagggtca

SEQ ID NO: 121259 - DNA, 724 bp, Zea Mays
gtggcggtcggagagaagagggtgtactggcgcaacgattagtggcttgtaccgtggcgagctcaccggcgatcaccggatatgcttaacacgatctactgtgacgtggtaagatgcccgggcacgtggcaaacggcagtgagggatcaacgacggtgagatcctacccaagcgatcggtgaacaagggggaggtacggcggctagccggattggtgtccagctcatcgacgatgatgatctttctaccccgagacgttatccacttatcctgagcacgaatcgagacgccggtggcacgaatcgtggcggagagatcgtcgacggcgagagggaagaatcagatgatctgatctatttcaggtcactgtacaatggtgttcttcattcagtgcttctgacagagcgatttgtagagccgtttacttccaattttatatagtaacttgattgtctccctttagaaaagttatagccctaagatccagctacaacattgttatagcaatactaagcaaattcttgctgatcatgcttgaattcatgtccaaagtcactgtagttgcactgtcactctaaaattcagactttaatagcctgacagtccatctttgggtttgattatctccaatttcttcataacaactatgcttacactcttaaacaaagttgttctcctttgataggtttacaaatttgatgtggtgacctagggtaaattctca

SEQ ID NO: 121260 - DNA, 1048 bp, Zea Mays
ctttatgtaaataatgatgtagccctagggagaccttggtctaatgtatagttttcatcccgacgtccttctttacgcaaatgaatacttacgtcgggtcttccttcgagaggtggcgtgacatgtggcctaacatgatggtggggcaggcttgcttcctcgtccagtggatcttttccatcggtcccaagtagcagggttttgcaggatggcctttatttaatcgtgtcgctcaccctatcttgtccaccttgctttcggttcctcggaccttcgtcttcttcgcttagcctgtccttattttgctcgggtcttctgtcgctcctcccgtgacggactggcgtcgatccctaacgagtcaggggaaccttcaagccctcgttgggcgtggtttactggatgaaggcgggtggttgattccgaacgctgaggaggccccaaccccgcctcctggttatgtggtttcatttgttcgtttccatgagcgaggtctcgttgtcccccttcatctctttgacatgactctcttcaagtacctgcgggtgcaactccattttctaaacccgaacgagatccagcatatgcctgccttcatcgctctacgtgaggggtatccggacgtcgagtccaacctcttcttatgatgatacttcttctacgtcgagctattgcagaagagaggtgagcaaaggataacggaagcgtggccaattgaatgccccaacatccgcctccgcaatggaaggtcgcgtgagtacatcccgatccccctttccctttctaacaagggctggcacaaacgatgttttagttcatgtgcatatgattactaaatttagtttcctgatggtctcaatttgcttgtttttctttcttcagcacacatgtctgagggattcaatgttaacccattaggcatggacaataacgttgttccggttgacttggagtctacaatagcaagtggactatcagccatttcaaatttgtaatggcgagataacatcataattttaaatttataatggcaattggagcagcaagtgca

SEQ ID NO: 121261 - DNA, 283 bp, Zea Mays
cttggcgtctaggtggagagcccgggcgtcccggttttcgaggaactgttcctcgagaacgagccatgcttgtcggcccatgtccgcctggtcgtggatgatgttctatagctcgatggtgatggtgccgtggagccacaagagcaccacactatccatcaggcaccaggatggagacggcggggtaacgaggtcgtcgaggacgtggttggtgagagcataccgccggagcgtgaggacctgaccctgtcaacgagggtagtgggctatgggaggacgccgg

SEQ ID NO: 121262 - DNA, 396 bp, Zea Mays
ccacgttggccttttcgaggtgataatgaatctcaaggtcataatctttgatcagttccagccatcttctctgacagaggttgagatctacctgagtgaagatatacttcagactcttgtgatcggtaaagatgtgacatttgttcccgattaggtagtgcctccatatttttagggcatgcactatggctgccaattccaaatcgtgggtgggataattctgctcatgcgacttgagtaagcgtgatgcataagcaatgactttctcattttgcatcagaacacaccctaagccttgccttgaagcatctcagaagacgacgaaatcctggtgtatatccggtagtgtcaacacgggcgcggtcgtgagcttcttctttatgatctggaaacttt

SEQ ID NO: 121263 - DNA, 318 bp, Zea Mays
cccacctgacataaaacaagatcttgatctacctcatgtagtctatctcatccatgtctgttttaaccatattccctgaccccgatgatatacactaacctcaaatcaataagaccaagactggagaaggaaagatcaaccccatcaaggaaggagagaagtcaaactcaatcttcagatgcattaccactcaacacggaattctttccaatcataaacttgcttaccctaggctattcttgctctaacctacccatcttttataataaaatgactatacatatatatacccatgccttcctaatcacgtactcgttt

SEQ ID NO: 121264 - DNA, 377 bp, Zea Mays
ccgtgaatgagaccgggagccagccccgtacccacttgccttgcggccggtccaggtaacctcgttggagtttgccgccttccatgcgaatgccacgtgcctcgaagctttaccatgtcgtagtaaaccaccttaggtagcttgatcatcgcctgagacactgcccgggtgaaagccacgacagcttgccagcgcgccttctcaaaattagatgccaccaccgtgggattccataaattgatgccccagtgagttctgctaggtgattacgtacccagtgaaccagccctcgcctccaatcgttcaccatagctcctcaatttggaatttcccccaaatcgggttttctacgccaccgagaatctctcaccgtggcc

SEQ ID NO: 121265 - DNA, 364 bp, Zea Mays
gtttggtattgttcattgtagttaaactgctcacatgaacagttgaagtgcatgctcaatatcatacgtgtctttcctcaaacgtgttcgttaaaatccttgaacatcgattacctctctcaccatatgttcctctttttatcttaaggatggtgcgtcgtaggaatccgtctgtagttgagtccgactccgatgacgacgctcaagagatttgtgaagaaactcctccacggtccatatccaagtgcgggcgcggatctgggaatgtgctgcaaggtggtgaggccttagggtctcatggtgctcgtggtcgaacggcccagaatccctccggtcggtctcgacccgcggccaatccacaagc

SEQ ID NO: 121266 - DNA, 689 bp, Zea Mays
taggtgccttaggtccttcagtagcaaatgtaagacttatggagttttacgccgtatgtagatgcctctatgtcagaccccaacaatatgctattttaggtgactggtgtgttaactaaattaagttgagaaatggttgagaaaagctgactaatctgctccaacccatatttttgagttgcaatgtctaaaatggttcgctaagtcgtctgtggtaattagccaactcatgttaagtagtcaattgtgttaagggattgttttatatatgttgtatctcgtatttcgctaaaaataggcaagccgacttgtatgttatttagcgagcctatgtcgttgctctagttagccgacttgttagatgacttggttaagcgcgtaatcacgatgaattgcttgttgtggtctaaatgcgtatgattgtggtcgcggatgaaaagtagtagtgctcatgtgatgtctaagttaaaatgcaaattattaggtgaaaagcgcttcgatgttgattatcgtggggaacacgtggttaattgagtatggtaaatctagagcacgaaatgacttggataaaatttatgagtcaacttgatggtcctaatttgactaatttaactctaatcaacggtgaagtgttagaataattcaagtctctagaacacaactaattcttgaattatataggagctgaa

SEQ ID NO: 121267 - DNA, 519 bp, Zea Mays
cacgatgccaagcacaggcacagccgaccaaaggagcggagactgatgaatgataaacagcctgctgctgcctacctgcctgcgtatgaaaagcgacgagcgacgaggatcatgaaccaccatgatggcggcgtcgagatcgggatccatatgcatgtgagagcaagacgtgaccatctcctaccttttacagctcacaaagacgaagctcggaggagctggtgaccagaccttggggccatgcatggatcactttcccaacccttgttatcgagtatagagtaggacgggcggataaaatactagatcccgagctcggaaaatatggcgtcggtgcaagtggaggccaatcatggccacggtgctgccggctctccaccttggaagctttatcacaacccccactacaccccgcggggcaggggcacccatctctcctcatcctgctgctcgccctctccttgccaagtccgcaggagtcccgagccccctcctatgatcattgcgctggacgacgag

SEQ ID NO: 121268 - DNA, 338 bp, Zea Mays
aacattttcttctctataaaccatttcaataggcatgaactgaggataagagacatattctcaccactatgtcgacccgaaacatggaggaaattgataattctcttctgtatttcccaatcatcatcttcccaatgtactgtgacacacatgtagcctttattctgatttgatgtccacatgtccatagtagcactcatgcgacaattgagggttttgaaatacttatacaacacatccttttcatgcaagtagagttccagaatttctttcctaatagtgacacgtgacttcataggaaaggtaggcttcaatgatttaatgaattccacaaagta

SEQ ID NO: 121269 - DNA, 358 bp, Zea Mays
ccactcccttgcctcctagaagcacatgcatccttctggaccagcttaagtaattattactatcttctaacttcatagcatttggcacaagttccaacttcaactcagatgggcctgtattggtcttggcactaatcagccctaaccccatcagctcctggatcatattcctcatcttactttttgtaatcccacctgaaccgccaccaccaactgcagtcttcattgcattctcttcttcctttctctttgcttccatctcctctgtactcatcttcacagaaatcctagaacaagcagcacaacctcactgagtgactggacaaaaatgtgcagtgagcacacgatacaactagca

SEQ ID NO: 121270 - DNA, 372 bp, Zea Mays
gtgtactgcgtaggacggcgggttgattttagggaaagccgaggggcctttttgcaacatcgcacgactgaaggggtatcgtgtgatttcagccgcccaatcttattcaacggcccagattaaatcttcataactctgaaccgatacgccacagggaccgttggattatcaatctgcgcccaagattttatgaagcccggaccatcctaacccacggattcagatccaatagcgtacaccaatttcccccctaatctaatctcatccacccaatccaaatcggacggcacatacatcgccttctccctctgtcaacaaataagcgacagtgcgcaccagggggatgcaaacccaccgagcgccagattcgca

SEQ ID NO: 121271 - DNA, 521 bp, Zea Mays
gtgatggattgtgcagtaatgtccacaattgcatatgcatatacacctagacataagggaaaatatttataaaatagacaacacagaatattccctattaaaaaatatatctagtttaatagatccttttttcttaaaagattctctcttatcttaatagatccatcttatcttaaaagatactctcttaccttaatatattcatctcatctcgaaaagattttcatcttatcccatctaatctaaactaacccaatgtgacccactcaaacaggttagttaatactggcgaaatggattagaccctatccacatgttttaacttaattcactctacactaaattaagaatgaccgaccagctcggcctcatgcaactatcttaaacatctgatggttgcataacccctctgttttaacctaacaagagattccgacctacctacacctatctcaaaagattctaacatatcctaataatatttattctaccctggtagatctatctaacttaaactagtc

SEQ ID NO: 121272 - DNA, 2129 bp, Zea Mays
tgaagagaaaccacataatcctgcggttgttgtgtataatgccgatgcaataacggtaccactctctttgtatagctaccaaacccaacatcatgccatcctgggtccaagttttggcactgcagtactttagcgaattcaacattatcgtgcagctgtgcggccaaggattcatttgtgacacaaagctaagcctgctctttgcaaatgaagtcacccttgtatgaattttcctcaactccatttaaaggcaacggttcttcttgtgcagccccttgcacttcaaccatgttgttttctgaagaagagacttctgatgcagcaagctaaaattctctgcaatccaaaacatagcctccatctgattttactacatcctgtatgtttcttttgacatcatctcttttgcattcctctagagactcttctgatacaacaagctgatgttctccaatagcctgaacactgtccccatatgatgttaattcaccctcaaaagaagttagggagccttgacttgaagctgaagcttcatgctgcatgacattttgcatttcaactgtattgcaagacggagacgcttctagaataggaggctgaagctgtctgtcatcaagaacatgattctcatctgcttttggtggcttttcttctattatttcagcttgagctccagtgcattcctgagaagagtcatcagatatagcaagacaatgctgctcactggttgagacatcatcccatttgattctagctgatccaacaaatcatcatgcccagtttcctcatcccgaatctcattgtcagaccttgcatggaacacttgatcattagctaattgttgccgcaaatcattatgtgaattgaagtcatgtagcatgttctcattacaaatcacatcttcaaacaattcatcgaacacttcatctgcagctccaattgaccccactggattcaccctcgactgctcatcttgaaatggcatctcaactaacttctccaacgaaacaccttgcaagccatgtccagccagcgagtctccatcccaaaccacagcagcaggaggcacctcatccagggtagcaaccttcgatgccataacatcgatgacatgactcaagcaatagaaagaatagttgaagggcgcatagctctcgaagccgctcgactctagatcgatgagaggctcctcaacgaacacaggcccctcatcaaagacaggctgctcatcgaagatgtcgccattcccgtcgtagtgcctcaccatgagccgacgtcgtggctcgtccatggaactgcgcctccaccaaattggacccaaacaaatccaactgagcatcatacactgttgatttgcaaacaacagatccatgttatcaagtatgcgctgccagtttacctcctccttctcaaaagccttctccatggcatccaacagaatttaggtttatgcagatggtttgggaggcgtcgtggtgaatgacactgatagacaaccgaataccaaacaagggaaccgccaaaacagaaggactcacacgcaccttgcgaaacaagagcaccacagtttcgatttggaagaaaatccggacacaccttttgtcgaacaggtgaaggacccgaagtctactgccacctaagccgatcgatagccattcgttagtgatcaacgagcaccgtggaagcgtcgaaggacgccgcgagccgtcggagaagaacccttgcgcgcgaaattgtagtcgccgaggacgagatcgccaacgaggaaacacgacccgcaccgcccacctctgaggaccagagctttgataccacttgtcacgcccccttggccggcacggcatcgccgacgtgagtgcgcgcagtcatcacagtgagatcgccggtaaacaacacctggaggtaaatttttaactggattctattcgatctccatctcctgcttgattgttgcctttgtaaacttgacttgggccttgtactgggttactttaaaatagtgggccggatgttacaaggaaatgctccagttccacgccgtcgtggacgtggtacgtgttagagctactggaatggggagaggatgtgtggggaataagaaggtgagcatgagaggaggtaggcagaca

SEQ ID NO: 121273 - DNA, 409 bp, Zea Mays
tggattcatcttatcttgagagattcgtcttatcctaaccagtttacttctctcatcctaaagtaacaactatgatcaaattaatgagatcttatctagattaatctggtcatacctagaccccattcaacataatctgatcaaaaattaattaggtcttatttagtcaaatctagttatgctaaactaatgtagttcccatccaatctaaactaacccaatgtgacccactcaaacaggttagttaatactgataaaatggattagattctactcctataaaatatgtttaactaaattcactctgcactaagttaagaatgactgaccaactcggcctcatgcaactaccttaaccatctgatggttgcataacccctccgtttgaatctaacagagactcagacat

SEQ ID NO: 121274 - DNA, 311 bp, Zea Mays
attcactatttttgattgctagttttaaagctttgtgatgatctttcaaaaacttggtgaaaatgttaaaattcgaatgcattttagttctaagattttttgggctcaactggcttgaccagctgaacttcggagctgaacttcagctcagctgcttttaaccagtttttttaccaggaccatcctggttaaaaccggttgaaccggcatagtggaccggttgaaccggtctctgaccggtttgtccgcgcaggtctgtccgcgcaggcctgtccgcgtaggtctgtcagctgcaccttttttcagtcgcg

SEQ ID NO: 121275 - DNA, 532 bp, Zea Mays
ggaaaccggctgatgccgggggatccgaacaacgtcagtcaaccagtataggtgtcagtagtgctggaaatatagacgggtattttttagtccaacactagcatgaggagcccaatacacgatccgacacaaataatatggatcaggcttaaatacaggtctaggtcatgcctcaaatttcggatatttgggccccagcacatcactcacataaggtctcgttcgtttcgggctcatccggccgttccagtcctcgttccggctggaaaaactatccagtttggaatccaagcctgaactatttgtttcaacccgaaataaaaacaaatgcaatctggtttaagttttcccttcttttatgactcggtagaaatccgattctcttaccacctggatcaaattctaggctgaattgagtggtccgctgctttctggccttgcaaccgtttccggcctgaagcctttccgggcaaaatatgatctgcgcagcgtgctgcatgtatgaatgcccgccagccgccgcggagctcac

SEQ ID NO: 121276 - DNA, 344 bp, Zea Mays
cgctaatgttgaagaagaaagtgatcttcgactatctaaatcgagctatattgatatgggtgatcccttataaatcgtagtgaactaaaggttttgagaaggcttaggtatattgaggatagatacttaatccattttgttggcttaggtttaagagcttcttccgggcaggccttcggctaccgatgcgcaagatgattgctgatgtgttgaaaaattatgaaatctacatggaccaactaaaaccgaatgcaatagtgagacttggcatctttatatgggttgtatgaaggcaaggtgcacgagccgatgctcagtgtttttgtcatgaactacactaccag

SEQ ID NO: 121277 - DNA, 1031 bp, Zea Mays
cccttttgaagctcaccataataatcctgaacagacttatccccttgatctaaacgcatcagtttcttatgcaattctctatgataagatgagagaacaaatctatcacgcatagcatcctttaggtcatcccaagtagttggttctctaccatcacccactaaaccagtccaccaaatgatagcaaaatcattgaactcactagtggcttgtctaacctgatggtgttcaggcacaagatgggaggcaaatttttgctctactgtcatctcccaatcaagatatgcctcagcatcataatgacccaaaaaagaaggtatgctgaacttaatcttagcaaaagggtcatcgtgaagatgattgttattaccttgctggttgtcacccatacctaccctgtttcgacgaagacggcgtcgtaggcgggcgtctctggcagctgcctcatcaaaattgccacgtgcatcgaaaatggcatcatcttgagcctgtggtagaggttgctgatgccatggtggatgctgctagggttgtggtggtggaggaggaggctactgatgtagtggacgtgtctccaacgtggcaacccgatcgacaagctcggttatccgtctctccaccctatctagcactttgccaagatccattgcaataatcgtgtcatggatagatttgtggactgcttcctccatattttcctccatacacttgcaaataacatcgaagtcttcgcggctgacacaatcggaaaattgtgtgggaatgactacctcaatctcgtcatcggatcctgacattggaaacacaaaaacaggaacaaacagtaaaggttatccctaataagcaactacgcgctctctgggtgaataggaacacacactaccgtgtcttaccaagttcttactcgtatctaatgaaaacacaatgcaaaggatggtacaatcggaggctggttcgtgatacttaccaagaggtagtgaaaccgcgattgcaaggtcaaatatgtattaatcataagatatagtatgtgg

SEQ ID NO: 121278 - DNA, 555 bp, Zea Mays
aaagaatactaagcatattgtgaagctaaaaatgatgttattgaaaaaatatgttgttaatagaataagattaatattaaaatggaaacatatgtaaattagaatcattcgacaaagctaagagatgtccatgctttgagaaccttcttcagatcacgaccgcagaagtaggtctccaagactcagcgaaggttgccgcaattccacaaatacatggcatgcatcctcatggtcgtcgtcgccgccataaacatggataactcaattccccgctccatcaatttagaaacaagcaagcaagcagccgatcgctcacccctggcccatacgcaccaatatgactccaaaactatgttcgaatcagtatcgtcagcactccacgtgcaactaataatcgagaccccctggcctaagcagatcgattgatcgtcagagtcagagagttcgtggtacatgtatcttaactaccatggaacgacggggcacgatgtagagcggatagcgcctccctatgcggaacggcatccgcgccacatctctcaactacagcctcct

SEQ ID NO: 121279 - DNA, 412 bp, Zea Mays
ctgcccctaaggatcatctcaagtcggctcaccaagtctgcagagggaattcttctgttggtaacccgagttgagtcggctagccctcgatacagataagctgggtatgccctgtctttcaatgactgaatattcttgaagacaaaatcagcaaccacaacttcagcagtcagacccctctctttcagcaatccaacctcagctaacaatgcacctgcttcagctacctcctgatctgtgggagactcggtccaacttggggtgcgaacatccggatgtcttcccgaccgggaggggagagaattcccgtaattctcaactatgaaccactccaagcgccatcccttgatactgtctttgagagggatctcgagatattcagtcttcctcctacggcgcatctccaagctgg

SEQ ID NO: 121280 - DNA, 593 bp, Zea Mays
ggtaggtgggggttgctatagcgtgggtgagtgacacgacgctattggaagaagattgtatggagagagagagaatggtatgcacagactatgtaatcactcttgtggcgtcaggcgggttgtcacaacaaggtgtcgcgacgaagtcgatgaagcaacagttaccgtatagatgttcaaacgggtcggaccgcccataacccggtaagattttggtccggctcgaacacgacccacacggtggttacggggctgtgcctaggcctaggcatggtgaggcggtcacgctcaaaccaatcgtgggcccaactaaccacccaccggcccaatccacttttccttgcgcgtcccacgcaagcattcatatccacacacgaaggtcgactcattatcgtgtgggggctcgcagcccaggacgtcactgcacgaacccccatcttgctcacgctgtcagctaggacctaatcaccagtcatttttcctgttcgcgcgccttacctctgcatactgcgggtgggacccgcgcgtcgaattgcaagtccgtcccacggtctctcaccatatgcactgcaggtgggaccgcttcataggtt

SEQ ID NO: 121281 - DNA, 704 bp, Zea Mays
attaaattcaaggttcacagaccacaaggaatcgacctagaatccatcaaacataggcctagaaagttcaattcgatcatgtcgtggtagttgcaattagggcgaggctagctctccactgcacttgtgtacaagagtaggtttggagttcatggtgctagtgtgtgtaaaattgtagatctattgcatgccataatctattgtcggtaagagggtgtggggtattatgcacactatagcccaaacctctataaaaatttgtgtgttaagctcttgatgtcatgatcgcatagacgtactctatgaggctaatacatgctccatgctcgccaagatattatttatttagtattcttgataccctagtgtctccattgacatttggcatttttcatggggagcttggatactttagtagggttctgctcgcatgacatctcaattttctctccttgtggaccaaagctctcaaactctagctccaataactctaactgtgacccccgatactgacaccatcaatttctagttgtcttgtcccccactacctcatgtagagggcacattttagttggtgcacaaaacgcttcactgatagagtctgtctcttcttatgcctcttcaaggacacactgcccataaagagtgttgcatcatgaatctctactagcacacaaagatcatgatcatgcatgacaccacac

SEQ ID NO: 121282 - DNA, 461 bp, Zea Mays
cacattcatgtcagggtgatggatgtaggggatagagggttcatgactctatcagctcatgagtctctgacgccgctatccacctacgctgcttcggtcagcaatgttgctaggcgagctctgtgtctctcagccacacttaccggcagcagctgcatgacacgaagtacatgcatattcctctacgtcttcgtggagaaagccagaccagcattgtcccaggtggtgctagagaagatcgcctcaacaccctcgttagtgtagtggcaggtcttaacacaaacctagacagtgctaccctggacctctctagggtacatttggagctagagcatgcacatgcaaggattgcagtcctggaagctcaactggaaggaagggatccccctaaagcccaagtccctgccatggctttgtcccctccccgcaagaggatccgctatggagaaccaggatccatc

SEQ ID NO: 121283 - DNA, 640 bp, Zea Mays
gtgctagcttggagatgcgccgcgggaggaagactgagtatcttgaaatccctctcaaagacagcatcaagggatggcgcttggagtggttcattgttgagaattatggaaactctctccccctcggtcaggaagacagccggacgttcgcaccccgagttggaccgagtcccccacggatcaggaggtagctgaggcaggtgctttgctagctgaagttggattgctgaaggagaggggtctgactgctgaagctgtggttgctgattttgtcttcaagaatattcagccgttgaaagacagggcatacccggcttatctgtatcgaggcctagccgactcaactcgggttaccaacagaagaattccctctgtagacttggtgaaccgacttgagatgatccttagaggcaaggtgtcaaatgttggtgccccagtggcatactcagcctggaacttgcctcctcccaaagccttcactctttttgtgtcaaatccacctgtcactgatggcagtttgggccttagagtgcgaccctctgctgaagaagttagcgccttgttttcctcgcttggggagattcctgatgatgaacggcaggtccattttgagatgcccctgaatcatagtgatgcagag

SEQ ID NO: 121284 - DNA, 533 bp, Zea Mays
gtaaattacaaggtgggaggaaatcgttgggtgttggatagtggttgtacacaacatatgattggggatatgaggatgttcacccaaatgagtgaggaaggttgctcaacctatgatagcatcacttttggagacaaccgcaaaggaaagctcaaaggtttgggtaaaattgcaattttactgttgatgatgttctcatctctagtgttgatggtagcaatctaatatttaaaggttttagacatgaaaatctttatcttgttgatttttcatctaatgaggcaaagcttacaacttgtctattctctaagacgtcactaggttggctttggcatagaagacttggtcatgttggtatgagacaattgaatcaattatccaagcatgacttagtttgaggtttgaaggatgtgaaatttgaaaagaacaaattgtgtagttcatgtcaaactgggaagcaagtggtaaatactcatgcttacaagagtcaaatgtctactcatagaccattggaattacttcacattgatctc

SEQ ID NO: 121285 - DNA, 971 bp, Zea Mays
aagccactccactaaccaaccttgccaaactgaacatcactcccagacctagaagcaaagagtattctcagtccgccagttctcctcttgaactaactgaccaccatgcccaattgaggctcactacacgacacccaactcaagatcaatcgactccgatcccttagtcaagttccagcactcgtccttcaccactcccggtccatcgacccgagacgctacctattggcaatcactcatcatcaattcgaaccataagggaaaagtcagccttgtgttcgcaaaggctcattatggtttcttgttttcatttaatctatgaaattagcttggcatacgaggcatctgtgtgtactttaaatgtcattatgtttaaactttgttgggtgtgtttaaagatccgggcattgttgcgtctgacgggaagctcaacgagagtccaattcaagcctgtgcataccatctaaaggagtcgttgccactagacctccccaataaagcttttgagtttaaaaggatgtgcggactttgtggcggaggcttatttgcctttttcattagattctgtctttgttgtgttgagtagcttttttgttggttgctcgtgttgtcggctgttgtgtgctcctgttgctagagtgttgttgttgttggtagggttggtgtagttttttgctctagcagttgttttttgttgtaatcctctttgggaggttgttgattgccaattttgggctcttctcttttatcaatataatcgacagctctcctgctcggttagtttcaaaaaaaagctttgtgtgctacttatttacgtgtgtgcagagcctagctaatttatatactcgtgacttttgctaggtgctacacgtatgtggatttatatgcaatctgtgaaggtagtcgatgcatatacggatgaggcagcaagtagtactgggcctccgagtgagccatgggcctataaggcc

SEQ ID NO: 121286 - DNA, 465 bp, Zea Mays
ctggctatataatgttttacgcgacgctcatgctgcaccacgagacgggattccaaaggcagagcataagccccagccttttggagtgctgcactagctagtccactggtcttctagagaactagctagctagcgacaccagcttagattccacaatgtagtgaattttactatcgtgtgggcatcaattataattgcatggttaaggttccactttgtattgcaatggtctctctttaagtcgcatatatagagcagcggtgattcaggaaataggaaatggtcacctgagtttgtggatgttgaaatggtcttgaagatatccagggtaaagctccatctcatgcttcacctgatcaatctaatcaaggcattttttagtagaaacagaagttatgagaagaaactggaaactgttggcataaagatagcttgtgaagatgaacctccaaccgaaagaaaact

SEQ ID NO: 121287 - DNA, 476 bp, Zea Mays
gctcacaccattctgcctctaggttgggctctggctatgtgtcgtcatacgttcacatgcgacggtggtgggggtgatgtgttgtgggggcggctggtgtttggtgacgaatttagagcgagctccaagcaccaagcggcagcgagccatggcttcttggtccagtgcaggaatgttgggcgtatatatggctgcagagggatgacagctaagtgttggacaatagtgagatgacaatagaattacattttatcagtgacatgtttaaataatctgactgttggtttttaaattgtttgctatgtgaaaacattttctcaagcattattttatgcttctactgcagaggtctgacagtagtgtggccgagctggcaaagactgttgtagaaaagaagcaagttccagatattataggttggttatgctttgtgtctgcatgcagttgagccatgaagtttattatggaatcacata

SEQ ID NO: 121288 - DNA, 394 bp, Zea Mays
gtttggccacattcataacatgccctcttctttcctttcctttgaaacttatcatttttcctcacaaacttcttgaaggtttttatgaacatagttgtgtcttcatcacttaaactatcttcatcacttgatgtttcgaccactttctttgccttgtggtctttgttcttcttgggtgaatcttgttcatttgagatcaaggcacgagtgtctcttgtcttgattggggcttcttcagattcatgttgttgaatttttgctaatagttgatgaggtgtcatttcctcatagtcatcacggttccttatcatccttgctaaactcttgtccttttctttgtatgctctcataaatagtctagtgaccttgtagtcactccaatcttcacttccaa

SEQ ID NO: 121289 - DNA, 274 bp, Zea Mays
gatcaaacaaccttcagaaattacaaaactttacaggaatgattcttaggtatattgatatccttgaagaattaaggcccacaaaactcgaaaccatagcaaatctgaatacccatataccatcgagggaggcaaagttttctctataaatcctcctaaggatgaaaatcgtgctcgtgatgaatttgcccgattcacttgacagaagttgttcatcacaggaccttgcaaggattcaacccaataaaccagccccaaaacattaggaattcaa

SEQ ID NO: 121290 - DNA, 841 bp, Zea Mays
agaaaactggactagtacagcgagttgtggatgagctttttatatgtttaggatcatcagcaagcacgtggactgtgaagttgtcaatggtaacataccagcctcatgctgattcagaatccacattgctagtttctccctccttagttgttagggtttgctgaagctgaatagtaaaataagttatttaccatgtctcaggtggagatatatttggaaaaggtgaggttagtatttgatagagaatttctcatacttcctgtctgattttttttaaagtgcttctatggagaggatcaacttttatctgttcatatctcagggaccttcttgacttgtccaaagacaacctgcagatcaaggaaagtaaaacccaaggaatttacatttctggagcaacagaggtcagagtgaagaacatgtcaccttccttccattctaattttctgtgatattcagaaagaagtacttggcatcaggacctccatgctttcactttgatatctggtatctgttcaattacccctgcagatatctatcctcaacagttcagatgccttggagaacctttctgtaagtcttcttgagctttacttggagtgcctttctataagcagatactaatttagttttgttgtcttgtttaaattacagcaaggaattgccaacagagctgttggggaaacacgtatcctctgtttgtaaatctggagtcctgaatcagttattctaaatttgatatggtatgccatctttaatgtaaacagaaatgaacctggctagcagtagaagtcactgcttatacattttctcagtacaatatggatgcacttcagatgag

SEQ ID NO: 121291 - DNA, 338 bp, Zea Mays
caatagcacagtacaagaccatactctctccatgataccaaagacacggaggcggagagggagagtagaccacgaaccgagagcgagagtggacgggtggggtggagggacaagggcgaagggttatgcgatgcacgcgtagtctgtagtcgtgctagcagttggaacggaccgtgccgtgctaaacacgacgtgccgatttagggggcgttcggttatctgggaacggtggctgaaaacaattccgagccatattgcttttttaatctatgtaagttttggtcaacctaaaaaattccaagtccattccggaagaaacgaacagggccttagcgggc

SEQ ID NO: 121292 - DNA, 400 bp, Zea Mays
cgtccgatcgtggacgaacggccagggaactccctcccaaccccatccacagcggaggtctcatcggcggagcaccgcccgacgtctgagtgcccgactacataaccacgaggatgctacaccatgtttggaacactgcaagttgcaaggtagagcgctcgccagagatggaggcatagggacacatgtccacgtgggttgtcgttctacggtggaggcctgcttcgacgagcaattgtcggtggtaaagcgttcaccgttgagcgaatttgggcgcggacggacgaggaggaacaggggtagactcgagaggaaactcacgatgattggagcagcgaagatggttatccacgttgcccgacggtgcggtccaagctccccactgctacctctttctctc

SEQ ID NO: 121293 - DNA, 1627 bp, Zea Mays
ctaatacctgttggacaactagctgagaatcaccaaatgccttcacatgttttactcccatacaatttaaaagttccaaaccgaacaaaagggcctcatattcggcttgattgttagtacaataagtttttaatcggctagagaagtcgaaggagacattacttggtgaaacaagcacaatagcaattccttgtccttcattgcaaaccgatccatcaaaatataaagtccagggagtaacagtgaggtatgatatgtctagtttatgagtatcatcaatccgattttatataataaaatctgctacgacctagcattttcatagatttcaatggttcataggccaagtcatattctatgagtgcataaacccatttaccaattctatcactcataatcgggttttgcaacatgtatttgatcacatcggtttgaccggcaacggtgcaatgactagacagtaaataacatctacacttggtgcatgcataaaacagacataagcataacttctcaataaaagtgtacctcgtttcagcatcaaccagcctccgacttaagtaggttaccacatgctcctttccttcggtctcttgcatcagaacaactccaataaccttatcttcagctgcaatgtataatctgaacggtactcctacctgcgacacttttaacacgagagccgaagacaaatactttctgatgagatcaaacacttcctgctgttctgcccacaggtgaattcggcatcatttttaagtcgaaggttaggagtgaaggcatcaatcttcccggctagattagaaataaacctccgtaaataatttatcttgccaagtaacttctgcacttcaagcttacaggtcagagatcccacattccgaatggatttaattcggtcagggtctatctctataccatgttcatgaatgatgaatcctaagaacttaccagccgacactccaaaagcacatttatgtgggttcatttttagaccataccgacgcattttattaaaggctttgcgtaaatcagctatatgagaactatactcagccgatttgactacaatatcatcaatgtagacttccacagtgttattcaacagctcgtaaaagatcaaattcatagacctctgataagtagcaccagcatttttcagactaaatgtaatgacaacccactcaaataaaccaatgaagcttggacatataaaggccgttttagacgcatcttcttcggccatgaaaatctgattatatccggcattactgtcaagaaaactaataattctatttcctggcgcattattgatcaacgtgtcggctatgggcatgggatattcatctttagaagttgctttattcaaattacgaaatcaatgcatactctgagcctacttgattctttcttctccaccagcacaatattggagacccactctgtgtatctgtaaggtctaataaattagcttctagcagccgatgaatttcgtcctttattcgtggtagtaggtctggacgaaatgttctagctttctgcttaaaaggtctgaaaccggacttaataggcagccgatgctctactatctctcggcttaatcctgacatctcagtgtaattccatg

SEQ ID NO: 121294 - DNA, 281 bp, Zea Mays
gctgcttcggagcccatgtggacgtggcctctaccccttgtcgtcccctcctcagtcgtcagataataagacagtgttgcatgagtgattccgtccctttcaaggtgccactacaggttcggccatccatcgtatgccacgatgtcgcgtgtcgttcctgaacataccccatgctcatcatagtcttcgtcccagtccgtgtgtggagcttgccaacaagcaaagtctcatcagcttccatatactgtctactagcaagtctagcttttctcttcaattag

SEQ ID NO: 121295 - DNA, 539 bp, Zea Mays
ggggcaacctacaacatcgtcgtgaccagctcgaccagagcttcatcatcgcgctttcggttcgtcaattagatcttcagttcatcgtaaatctacgaaaaatcaagatgtctagcagcagcacggatcgaagggattggttggacggtaagttgatggtaggtttggggtcgcatgataggcttggcgctttccatctgatagataaccaccaccatataccctttaaatgcaagactgtcatactacacaaatttaatagtagatacaatcatgataagttgacaacagttaggttatgtctttgtaaacaaaccttttccacctttaaggaactgatctaactaatcagattgtgtcatttctgtgcagccctactaatttattaaaaatatgatatcttttgatcaaaataatttattttaatttattcaaattgacttaggttcatattaattttgcgtatacagtaacaacattgttttaatcacaccccatgttttaaataattattatttaaatatttgtttaattaattt

SEQ ID NO: 121296 - DNA, 336 bp, Zea Mays
ccacaccataaacatggttggtgcggtcttgcaagactcttgccccactcgatacattgagggatttgagcatgtttaacctcactctaatcaactagccataacctagggaatcccaattaagtggtttaactaatctaagcactttgtaaagcacctatgataattactgagtgattattttagcatttgggtgtttcgagctaaaggatctatgtctcaacacatgcactatgtctcttagctctccacacatgaaaatgctaggttgggtgggtatatatagagcctcaagcccaaaaagtcgttggaaggaagtagatttttctgtgtcac

SEQ ID NO: 121297 - DNA, 348 bp, Zea Mays
ataattcagcctttctatcttaagatttccaacataaaaatcattgaataaatgcacaatatccatttgaattgtatcccaaaaattttgaaagaattcagcaggaaaaccatcgggaccaggggcactattatgttttatctcgaaaatcactttcttaatctcatcaactgaaaaaggagccgtcaggaaagatctatcattgtctgacaactggttcatattgaaataagtcatattaatactagataacaccgaagggccaaagagatctttataataagaagtagcaattttattgataccttcagcatcgtttacagagactccttcatgattcaagaaggg

SEQ ID NO: 121298 - DNA, 581 bp, Zea Mays
ttctgttaatttcactctgggagcttcctcttctacgggtatttccggagcttatgtcctacccgctgtggatggcagagagcaaggagatgtggtgacaggtacgatttcagttgattcgtttgtggcccatgctctttttgactctggcgctagctattcgtttgtttcggaggattttgtgtcgcgcgctggtctttcggtgcagaggttgggtcacccaattttggttagttctcctaatggctccattagtagctgttcaatttgtcaggggtgttccgtcattcttgctgatgaggtctttttggccaatgtggttgtgatttccttgggggcattcgatgttatcttgggtatggattggttatcccagtatcgcgcagttatatcctgtttttggaagacagtgttattgcaggcgccgtcgggtagggaggtggtattcttgggaagttcccctaagttcacgttatccttgttggcgcaattgctttcggatcgccggtctaggaagttgggaatctttttctccatggtggtggagggtgaggctgccttgcgggtgcaggacatccggg

SEQ ID NO: 121299 - DNA, 828 bp, Zea Mays
gccacttgtacctcctacactggctgaggctatcgctgccttggtcaatgctaccgccgacaacacacgcttcttgcgtgaaatggcgggaaatcaatttcaacaacacggcggaaggggtcaacctcaaggaccacgagacaccacctatctagagttctctgagacccgtccatcgctctttgtcaaggcggaggaacccctggaagctgatgaatgggtgcgggtgatggaacaaaagttctggctaatccgatgcactgagacacagaagcccctatttgccgcccaacaattgagaggccctgccagcacctagtgggcaaacgtttccgccattcaacctgtgggacatcaagtcgcgtgggaagagttcaaactggcatttagggaacattatgttctggaaggagtgctacaaatgaagctggaagagttcatacttctaaggcaagggggagattctgtgatgcagtatctcaacaaatttaatcacctctcccaatactccatcgatcaagtggatacagacttgaaaaagaagaattgcttcatgagggattaaatgacagactccagcacaaaatgactacgtgtctggaccttacatatggcagggctgtcagcacaacactgtcagttgaagccaaaaatgcgggacaaggaaagtcaaaaggatatgcgggtgaaagatcaactcagggacctaaaaagaggacaaggttggtaatccaacctttcaattcaaattgttcttctcctcgtccgcccacatatcccttcagacaacccgtgttcattcgtcccactcctgcccccgcctagaac

SEQ ID NO: 121300 - DNA, 619 bp, Zea Mays
agccttgccggttactatcgcaaatttaccaaacactttggtattattcccaagcccctaactaatttactccgaaagaatattatgttctactagacacaagaacatgaagtgacatttcagtgtctcaaattagcccttagtcaggccccagttcttgctcttcccaatgtctctaagcagttcatcttggaaactgatgcttgtgccatgggaattggagcagtgcttatgcaagctggacatccactcgcctttttcaataaggcgttgagcccaaagaccacaggactttccacttaaaagaaggaatatctagctatcttgatggtcgttgagcactggcgttcctatctctagcatgccgagtttatcatccacactgatcaacgtagtttggttcacctcaacgagcaacgactccaacaaaaggtgttcaccaaattgatgggcctacactactccattctatacaaaaaaggatctgacaatcgagtggctgatgcattatcctaccgtccaccccatgaggcatcctgcttagccatttccccatcctgggtagctcgagtgttggattcatacagccaggatcctcatgccacacagttgttagcca

SEQ ID NO: 121301 - DNA, 479 bp, Zea Mays
tgataatgatacaggctgtagcctacatactagtttttcaacctaaattggaccacacaggtactcggtgctccccatggatgttgaatgacatagaagccatgagtggcaggcaagttgtaatgcagggtattattgccagaactgcagacagaaccttgattggagtgtgatgatactgaaaatcagctgcttgcacattggaaacatgatgacatatctgaattacctgaaactgacaggtttgcacaagtccttgttgttttgtgcactctttctgtcagctgatcagtaactctgacgatcaaaaccagacctcatcctgtccaatgtctcctgcaaaaattaatatcctctacgtcgatctgaagatcgtttggttagcttgataggggagatacgtcgaggtttagcccaatctcaagattggttgcgtagcttgacaggttgatgttctgcgtttacggccatgaattcat

SEQ ID NO: 121302 - DNA, 737 bp, Zea Mays
ctaggttccagctctttgggaaaatcaactccaaataggctcaaattttaaccaggagctattctaagggtatataatcttgccacaaatttttatgatttttggacctagggttttatttctaaaattctaaaatgcttgatttgaacatcttcaaaggataaataatcctaggctcgggataaaaaccttgaaattatttttattatttactctgtgtttttaggagtctagcaaacttagtctcgtgagtttatcaattttcactattttctataaatttcttaggctgctagtataaagaaaaagaaaaacgatgaatagggttgggccgattctggcccgagtcagcccacaatagaagaaacgcacgcgcgcccgtgcccacgttacagatttgcgtgaaggcccctaggtattcgaataactagtaaagaaccccaaatactattcacgtgtctcattgacaattgcacataggccctcagcttccctcctattcacaaactccagtccacggtcgaatcccaactagcgttggccatccaccgcttagacccatcgacggcgaccatctccgatgaaaccgagcctacaaatgtggttcccaagacttatttgctatttcccttaagttaattgaccttaattcatctagggcttcactagccatgctgatggcggatcgacgagctccggtgaggtgtatcgaggtttctagcacgatagggttcaat

SEQ ID NO: 121303 - DNA, 576 bp, Zea Mays
ggaaaatctatacgaagctcttcttctctttcccaagttgcttcatcttcatcgtggtggctccattgcactttgcacatctttataaccttattcctcgtgacacgagtcagtgtatctagaatcttgatggggtactcagcataagtcaggtcatcttgaacactaaggtcctccattggtaattgctcctcaggtaccctgagacatttcttcagctgagatacatgaaagacatcatgaacatccgcaagatgatccggtaactccaattgatatgccacctctcccactcgctttaagtttaagaaagatccaataaagcgagggaacaactttcctttgactttgaatcttctcataccccggagtggtgacaccttcaaatagacataatctccctccttaaactcaagcagtcttcttcgggtatcagcatagcttttctgccttgactgtgcagttctcaaatattcccttatttgctggacttgttcttctgcttcttgtataatctcaggccccaacaactgcctttcaccagtttgatcccaatacaatggggtcctgcacttt

SEQ ID NO: 121304 - DNA, 342 bp, Zea Mays
gtcaagtgtctggtactctggttatccaacgcataaaaaaacaatgtcttgtgttctctatagtataggaaatcagggaaagttctcctaatgttagcctgcctttgggttttccagaaagctacctttcttctggcaatgataaggtgctagtttgtcaccttaaacctttccagtttgtcgccaagtccagtcaggttgttattttcagtttttctccttcgttgccataaagctagagacgcttaagcttcaatgtggcatctactcatcacatgccctgtttgatgttcacagaaagttctttctccttgttctgtaaagatatgtttggtactcgac

SEQ ID NO: 121305 - DNA, 341 bp, Zea Mays
cgtgatgtaagccagcggacggagcctgacgtaagacctctgggctgcgctatctctgcatttattgcgaagaagacgcgccgcctgactatcccgctgacaggtgatgtgccccttcagcatttaatgtgccctgtccactcagttggcaagcggcgtccaggccatcttttaggtggcgtgcctgtccattccatcgccaaacagtatgcccgcgctgcaaggtgcactgtgcccatccatcaccactcgtacaatgccaggaaagcttcccctgcacgccaatgctacgcagatcgcggatatcagggcgtaaggaagattgcactggggacgagcat

SEQ ID NO: 121306 - DNA, 619 bp, Zea Mays
ggctgcccgttgcagcatactgtgtctctttcagcccaagtgttcctcactgatcttggtcgtcgtccttgatcgccaggcccttcttttgcaggacagagaaaatggcgacgtgttgattataattcatgaagaatgcgtgtcaggctggaaggaatgccatggaatggccggtgcctgcatttgctgtggatgatgagccaccagaggaggaggaggagcgcagattctgcgcttagttgtccacacgggagtcactggtaggtggtgatgacgaagtggtggtggggatcaggaggaggagatctgctggtgttgggcagcacgtcggcgtgttgtttggctcgtcaaatccgatgcaaagcaggcatgtcttttacacctgttcgcatgtatgaagaaattggaattaaggaaatggaaaggaaaataagagacaaacaagagagtaaaactcacggatgcaatttgtttttgtatatgatcccgtggataaagtctgtgttcttagctatgatatttctaccggtaaactgatttaccgtacgcatgtttttttgggtctgcatctgattaccctgcatatttgcttaagcaggtggcagatgatctttttttt

SEQ ID NO: 121307 - DNA, 441 bp, Zea Mays
gccaggagggagaaattgtcgatgtttatcgaaggacgaatatttgccaccctttttcaaccaaatgaacctaagagcttccttgcaaactgggcatggaaacttaccgtgaacacaccaggcgcataatagcccatacgccggtaagtcatgcatggagtactggtaccaaacatgcattttgaagtttgtctttgtagctcggtcatacgtccataccccttcctcccaagcacgtaccaattcatcgataaaaggctccatgtacacgcccattttattccccgagtgtccgggaattatcaatgacaagaatatatcctgcctttgaaagcacacaccgagggggatattgattgggataacaaacatgggccaacatgtgtacggggcagcactcattccatagggattgaacccatctgtggtcagcgcaacacg

SEQ ID NO: 121308 - DNA, 718 bp, Zea Mays
gctggaatggcgaggagcagcagcacgacgtagaggatttccggcgacagcacagacagcaagtgactgcaagccacattgcgcaactcagtgcaggcagcagtaccaagggtgggaggcggaagtggagacgaggaaaagcttctgcgcggctgcgtccatgatttataggctagggagggaggtcaagcgacgttccaaagaaagaggaaggggaagcgtcgtgttttatatgcgagggagggggagctgtgcggccgttgatgaatgtcgtcgtgaagagctttgaagaccattaatggaggaggaaatgacgtgaacacaaaatggtcgctgcaactcaacgcagcataatggggaggaggcgagcagctagctgtgcagtggagagatgaacagacgagacatggtggcaggacgctgcttgctccattatggacgaagcgaccagttgacagtgcgacgtccatgaaacggaagtggcggctgcgatcctgagcgagtgcacaaccgtgagagaagaaaggagatagaagaagaaccatagagaaaatgatatgtgggctcgggatccaccgatcagcattaaaaaaacgaggaaggcaaggttgtatgtgggttgggctgggcgtgagactttctgttttttattttgatttttttaaagagcataatatatagtgtatatatatacttcagaaattccaaataatattag

SEQ ID NO: 121309 - DNA, 800 bp, Zea Mays
ttttgccagaagaatttttgagcggtctttgatgttattgtggatacttctctagcctcgatccactttgtgaaatattcgatggcgacaaaggtgaatttgaggttcccttgagccgtaggcagtggtccaacgatgtccagcccccagcgttgaagtggccatgtatgggcgatgagcttggtgaattgcgaagggctgcctgagcgaggggagaattcttggcatgcttcgcatgacttcgtgactcgtatggcggtacaaattattgcgggctagtaaaatccttgacgaatcaccttggcagcgagggccctgcgtcctgagtgggagccgcaagttgcgatgtggacttcgcggaggatttgtatgccttcgattttagttatgcacttcatcatgggctgactggtccccttcttgtacagctaaccctcgattaatgtgaagtcccggcttctatgctttagtcgtttgggcctcattgctattgcttggatggtagtggccttgcagatacagagttattggtgcccgccatcttcggccatgatgaggttgacgatgcggtggtcttcgacgtcttgagttatttgtaatccttctgggttgcgtatagccggtgtgccgatgatgtggtagaacacgtcggagggcaaggcctcgtctttggtcgctgctttagccagcgcgtcggcctcttcgttcctggcgtggtcaacatgttgtagggtgaaacccttgaattgtctctcgagactacggacggctgtgagatattgcatgagcgtggagtcttt

SEQ ID NO: 121310 - DNA, 477 bp, Zea Mays
acgcacccaacacaccagcccatgcctcagatcgaccaccagagcgtcccaatttgggatttcccccacatctgtcaagaacaccgcgtgtgagagctcaccgtggctagctctccacaggtctgatcatgccctcctcgctcttgttttagcatccatgtgtgcttgtgatgcttctcgacccggccaatggagctagaacacgtaggatcaccgggaacgcttcgggttgtccgttgatcgcgttgtcaccgtgggtagagagattaggggataaaaccttgaaattggttgaggggtaatggttattaggggtcgaattaggtgtcaaccgctccagagcaacggtcattgcgttttccggacggtcttggctcgccggagccgctgctccgccgtcctcagtcggggacttcaattcgtgaagaattagaaagtgaagggcctctacgcaaagtgtcagtgacacataggaat

SEQ ID NO: 121311 - DNA, 309 bp, Zea Mays
acgatttccaaggaaccccccatggtctaactcttcgcagaccgaggtccacgacgaggaacaacactcgccgaacttcggcgagcctattccggccggatgctgccacggctggagctcccgtgcgacagagaccaaattagacccctaccgcacacttcccctcaatcaatttcatcattgggactttgaatcaaccagtccacggtgacagggcggatgatcggagggatgaaaaagttccgaccaaccgatggcgtggatgaccaaattgaagcttggggaagcatcacgggtttactagaggtg

SEQ ID NO: 121312 - DNA, 1905 bp, Zea Mays
tctcaactggaacatgtccgaatctcccgtaccctagttgcagtaacacagtgaaggtcgaatagcctcaaatcaccctctagaggtgcaacattagttttgtcgcgctcctgaaagcgagtaggtggaataggtggagtgaatgagggagtggaggtagcagtggtaggagtgatagaggccgcgaatgtggtggaatctatgggtgtagtggaggttgctggaagctctgaggcgggtggtggtggtatgatggcaagtgtggaggaagtcggtggagtgataatggaagatggagtgataggctgaggtgagggatcaaggatggctggagaggaacataactgagacgactgatgtctgacacggtaggcaatctgatctgagccaatctaaatacttccccatgctccaccctctcagttgttgctgctgctatcgctgctcgaatagatttatcaaatttgtgcttcttcttgcctcttcgctgctcttaataaattgccttgcccttatcctgtctaggagggcaaggagggtcctaatcatcacctccacctaatggacccaggttcttgatctaggccatactatcactgagctgagtccaactctgatactgccaatagttgactgcgcacacattacccactaacacactgcatgggaatagagaagatgaggaactacagataagatagtcctttgtagcaaagcatgagatacgaagataaagtgaaggatttgctacctagggcacgtctctcgagggaaaccaagtagggaagaagaattgctcgagcgggcgcgtcgtcacattgaaatgacagaagaagtgagcacgagttagtcacatcatcatataaaatgaaatgtgaactaaaacacacacacacgagttacaagggtttggagcaaagagctttggcacatagattgatatgaaggtaggcataatcaatgggagattggagcatggatagaggttgagcaaaggatgcaaaggtggtgtatgaggatagagaggtcatagggttcaaggtgcttttagggcattgatttgaagttgaggctcatagaggtttttgaggtttgaggaggataacacaaggttcaaaaggattttgatatcttgtacatgggcatgaaaggcacaagtgaataatgatctaataggagagggagaacttttatgcataggtggtatgaagattaatcaagggatgggggaccttgagaagagaattgccaagatttgggtatggacaagatggttgtcatatggtgcaaattaagtggaggtaggtttataggggaacatataagaaggtggagggggcgagatggtttctagctttgaaatagaggtttagctaaactagaataactatggaagggtgtgatatacaatggggaacaaaggaaagctttttggctttaagtactagttggggcaaaagagcaaacacttggtgtgcaaggagactaggagaggagaaaacaacactgaggaaagggacaaccccataggaatatagaacctgtaggagaatgcaccaccacacagatagggaactgaattcacaaggataagatcgcctgagagggaacatagaggatgattcaaagggtgtaacatggatgagagcatgagtgaaggagatcatgcagacatacaaacacatgctcaaggggatcaccagagcggaaaagaagctctagggcatgggcacaaggtcgacggggagcagtaagaacaccgacgaagacgggaggtggcggcggcaaactagatcgagcagggaaggcgaaagagaaagaagacaacattgaaattaaaaaaagtgaaactaacacgcgggcccgggcgaggaaatggaaaagggcaagcagttatgagcacat

SEQ ID NO: 121313 - DNA, 286 bp, Zea Mays
tttttgggtcacacaatttctcaggatgggatatcagttgatcctgagaaggtacaagaagtgatgaattggaagcctcctactacagtacgacagattcgaagttttctaggattggcagggtattaccgacaatttatttcggatttctccaggattgccaagccaatgactgaattgttgaagaaaggagtaaagtatgaatggagtcagaaatgtgaggatgcctttcatacactaaggcagcatttgacaacagcacccgtgctagctcagcctgataaca

SEQ ID NO: 121314 - DNA, 394 bp, Zea Mays
caaaggtctagtgggcaacatcagaatcgtcaaggaagcgtcgtgaacataccggccaagaacaacaatgcaactaccccaattcaacccaatggttgtttcaagtgtggcgaacttagccactatgccaacaactgcccaaggcgtaatcaacagacacctcagaagaacaacaacgagaggactgaccagaacacacctgctcgtggatctgcacagaacaagtctcagcagaaccagagtagaagaagagtcaaccatgtgacagcggaatcagttcctgaggatgccgacgtggtgtatggtatgtttcttattaactccatacctgcatcagttttatttgattctggagcatctcactccttcgtaacaaagtcatttgtggaaaaac

SEQ ID NO: 121315 - DNA, 349 bp, Zea Mays
gctaaatcagaccaagtacctcgccttgggcagcccctattttatttgtggagaagaaagacgggacaaagagaatgtgcatcgattgtagatctttgaatgaagtcactatcaagaaaacaagtaccccctgcctaggattgaagatttgttcgaccagttgagaggagctagtgtgttctcgaagatagatctgagatcaggttaccatcagttcaggattcggccttcggacataccgaagaccgcatttatcaccaagtttggactatatgagttcacggtcatgccatttggtttgacgaatgttccaacttatttcatgtacctgatgaatagtgtgttcatg

SEQ ID NO: 121316 - DNA, 395 bp, Zea Mays
gacttagacccttcattgttccttgaggcatgaggtgcctcgaggacttagaccataagcgtctcatggatttggggcatcgaggacttagatcctgagtgtttgggacacaagggtcttcaagactagatcatgagtgcctttgggtactgaggggcatcaacgtcttacatcatgagcatcctatagcttgaggggtttcgagttattggatcacgaacaccacggagcatgaggggccacaaagattcttttaactagggatatcccgagacactaggggcttgagcattgtaatgccctaggatcaagaggttcacaaggtccttagtagttttgaacgaacattattatagatgcaattcctccatgtatctcgaaatcaagttgctagg

SEQ ID NO: 121317 - DNA, 396 bp, Zea Mays
ttttcacattaaaaatcattttctaatcacttttactgaattttataattctctggactgggcacaagataaccagagaccacaggggttattctacaaaagtttccgagactctaatctccctgccgatggactgcgggttcattacctaaaatcccgagggttcttatgtgaaatgcgacggtgaaggggtatcgcggattctaaaccatccgatctaaaccaagggcccagattaaatagatctcacccgaatcggtaaggcatagcagtcgccggatctaatttcaaccgtcgagatttaatgaaccgggatcaccctgcgtccgcacgatctgagatcgacgtctgtcattactcccggcaagggttacgcgataaccgatccgatccgca

SEQ ID NO: 121318 - DNA, 1043 bp, Zea Mays
cgagtgaccaagtcccccgccgagcaagtctgcgaggtggagggagtgaccaagtccctcgccaagcaggtctgcgaggcagagtgggcgaccaagtcctccatcgagcaagtctgtgaggcggagtggtcgaccaagtcccctgttaatcaagtccaagtgttgggctagagccgcaagcatacatcgaccacagcagaacgtgacgccaagaccaagtgcaatagttgtagacacaattgtacgcccctttttcttataataagcataccgcactatctgatgggacaaggcggcttcagtaggaggcgacctcagcaccagagcctccacaatatccagtatgacggaaacaacaggatagggtgccatatcgatggtcgaatacatatgcgtagaaggacaacatggggcccacgatgatgggaagaaaacatgtcgtgcacgtcgagccccagggctgaaccatgtgaccagccgcgcattaccgcagggacatcagccacgaacccgccacatgaacaggagtaacgagtggcaccatattaagaagcactacttcgtacgaccaggagaaggggggccgccacaacagacgaaggactttttctacctttactctatctcactctctctctctctctaaaagagaaagcaatgtaaggtctgtcccttaagatacaaaagggaagccctctcttcctcttgcaaacaacacacaagttgtaacatgtactaccacaatactacgatcaacactacactagactagggctttggcctgaagcagtttaagccatgtgtcccaagttcatcgttcgagtcctaatgattcaccattcagagtgagctcgcactaacatccccaccgaacacaaatcttattgtccctcggtttctgaaaccacgacagttggcgtgcaatgggtaggcgatgaagtagaaatagtacatgcaggcacatcggcttgcattgctatgactgatgcccctatagtttggccttatgagactgcaaaatgtttggcaggagttgatttttc

SEQ ID NO: 121319 - DNA, 421 bp, Zea Mays
gcaccggatgtggaaggtgaggacgtgttggtctcgtagtagaccacattcatcatcttcttctttttattgacatccttcttcttgtgcgatgttgaggatctctgggattattctttctctttgcacttctcgcctgatttacaacttaaaatacaaacataaaccctgggttagtgttagaacgggaataagaaagatcggagtgcaggagagagttcttctttcacaagttgctcaaatgatcgtgaattactttgggagcaactcaatttgataagaaatcaagaacaagcaagagaactagagaggagagagaggaagaaccaaatcgcaaatgaggatcaaacacaaagacgcaggtgatttgtttcatgaggttcggttccccattgaggagtccacaaaggacgagtctctt

SEQ ID NO: 121320 - DNA, 443 bp, Zea Mays
caaactgccccttttgacaaatcgggggaggaggtggggacccgctttctagggtggctgcaagatgagctagagtcgctcccgtccattgtgacgggtctcatgtcctatgcgtctcttatcacttgcgaaggggctgcgaatgatttgtctcgagaggtatgtaggcatttcgaggtctttgaccaagcgaacgaggacttcgatcgtggtgtgttctagattgaagatgacgtgttgaagcgctctgttggggcgctttttgataggatgtggggccctcacggccgcggcatcgaccgagagaggtcagaccgagcgctggcacaggtatgttatggtttggagaggggtgttgtgtgtgttcgttgttttgaaacattgttgtgctatcttcgcaggcgatgaatgaagaagatgtggaggacctcgccggccttgac

SEQ ID NO: 121321 - DNA, 308 bp, Zea Mays
gctgcctcctaagtgcttgacccgtaatcattcggtttggttggagacgtggaaggagaggccaggcatggtttcggcttggcgtggctcgtcaactccgcattcacggggccgttgggggtggtggatagcttaaaattgtggctcagcgagaaaagaaaaaaattcggtgatcagtaaaatagaggggattcaattctctggatattcaaaattgaatagaaaggcagcccggtttcacagtgcgttggagtacatgtgacgcgaacgtttcgaagagcgcgtcaatccatccgaatccgaaagca

SEQ ID NO: 121322 - DNA, 409 bp, Zea Mays
gactcagtgaatccagtactgaacgcgggttgtttttaggaaaatccgggggctcttatgcataataggcggccgaaggggtatcgcaatatctgggccgttggatcgactacctacggatcagattagatattcataactgtgaaccggtacgcaactcaagccgttggatcaaagatctatgttctggattttattagggtgcgatcagatctagttcatccgatatctaatcaacggctcggatttaacctaacgaaaggcattcaacacttaatcagggtcgttcattctgatcggatggccatgattctacagcgctgaagggggggactccgattaaatcggagccacacattctccgatcaaaggtcagcacactctcttccctcccaagctctggtcatgg

SEQ ID NO: 121323 - DNA, 758 bp, Zea Mays
tatcaagagtccgggttctaccacggatttcctcgcttccgctcaattagcacgccggcctccctgtcttgcagcgcccatgcgccggcctccctgccgtgctgcgacatgtctaccagctggtgtacactgatgttgattgggctggatgcctggatacgagcaggtccacctcgggctatgctacactccttggtgacaacctcatctcttggtcttccaagcctcagaacactgtcttcaggtctagtgttgaagtcgaatatcgccctgtggctaatggagttgccgaagccacatggctgtgccagctcctcctggaactccaccctcattttcgccgtgcaacactagtgtattgtgacagtatcagtgccgtctacatgacctccaaccccatccaacatcaacgcgccaagcacattgaaattgatctacacttagtcagagaacgggttgccgccgatgctcttcgtgtcctacatgtgtcggcgacatcacagtatgccgacatcttcaccgagggcctcccatcctctgtcttcaacgaattcaggaccagtctgaacgcgtgcagtggctgacgatctgactacagggggtgttagtgtgtgctatattttaggcagtttaggtggcaaggctgcataggcttgttgccttgtgcgcctgccccttctttggttaattggtctcaataggcaaggatctctctgataggattgtgtaggattgtttcctattcctgtgattgtgta

SEQ ID NO: 121324 - DNA, 795 bp, Zea Mays
tgaaatctgtatagaaattggacagattcagttactgaatttgtgaacagcacaacttctaaacgatcagacttatggctgtcaacttttaacacaagtaagataataaagttatctacaacttttctatatagcttttctacagaaaacacaatttagttcattaaacaaatagcacgacgaaaacagtgcgtacaatcctaactacgacaatatttcacttcattttccacctagcctttacaattaccatccacttgctactctagctgtttttaatacttaattatagttatttaaccgatagcgtgatggttacgaagtcatgccgtcacttcaccttacaattcaaattaactaaataattccaatcgaacttgccaactagccaattgcgtgctaacctatttttcataccaccactacaccacatactgcatactcagaacaactcattcacatttcacatatatctttactaaaatctttcctgcatcgcttgcaacttaaaactaagctttactacgcaaacacatgacttccagtttaatcacgaatatcatcatcacaccacattgactcgattcaaaataaccctacatgttcatctcatgaacggagcatttcaacaatcattctaaaatgaactaactccattacacaacttgtattaggagcctacttgaccactcgatgtgtctactcgaaatcgagagcacaaccaacactgttcacgcaggaatttcagtttgcaagtacgagaggactcaactaaattaccaaacaaaatcatag

SEQ ID NO: 121325 - DNA, 317 bp, Zea Mays
gtgaaatttgttgaggggaaacgattgttaggccttgaatttggtttcaactgaagtagagcacctgtcatcaagtaatccggccagtacaagctcaccggagctcggccctacgctgttcgccgtcgtggacttcgggcggtcaagaaatagaactcgggggatgtttttgtagcatgtcagtgagacatggaaatagcgccatgactcgattccagttattccaactgataggggcctttctgcaaaaccagcagtgagggcgcgcgcgggcgcgctttcgccagtaaatgggccgacctaggccagtttcagcc

SEQ ID NO: 121326 - DNA, 2541 bp, Zea Mays
gtgataagaggtattgtaccaaaattcagcaagtgagagccaggtcttccacttagttggttgagcatgaactgcgcatctcaaatacatctcaacacattgatttacacgctcactttgaccgtcggtctgtggatggtatgcagtgcttaaattcagcttagtacccaaaatcttgaacaattgagtccaaaaggcactggtaaagatcttgtcccggtcactgacaatagacttgggaaggccatgcaaccggaccacctgatccaaaatgacctgagccacttgggaagcagtaaatgggtgtttcagggcaataaaatgagcatacttcgtgaaacgatccactacaaccaggatagtatcacatccaccagattgtggtaacttctcgataaaatccattgtaatatcctgccaggcaccttgaggaatgggaagggggtgcagcaaaccagcggggtgtactctttcgcctttggcctgctggcagatttggcattgttgcacaaaatcagccacatcagatttcattcccttccacacaaacaacttcttgaggcgatgataagtggcatgcatcccagaatgacccccagccgcgctgtcatgaaccgctgccactaatttagtgcgaagagcagaattctggcccacccaaatcagacctcctttcctgatcaccccttgagataaagaataaccgtgttcatcaggattatggacacatagccgagccaggagagattgagcagcaggatcagtcacataggaatttgtaacttcttggatccaaagtggttgaacctcactgactgctgttaatgccatcactgcccccacccgagaaagtgcatcggcaaccttgttatctttaccttgcttgtaaaccactttaaactgcagacccatcagcttagccatcgcctttcgctgcaactcggaatgtaaatcttgacttcccaagaaactgagagccttgtggtcggtccgaatttcaaactcactccgctgtaaataatggcgccaatgatcgacagccatgatcaaggcaatgaattctttctcatatattgacaatttctgacttttaatgcccaaagccttactcaggaaagctattggtcggcccctctgcattagtaccgcccccactccatcgtcacaagcgtcagtctctaccacaaaaggaatattgaaatctggtaatgcaaggaccggtgtggacaccatggcctgcttcaacctctgaaaagccatctctgcctctgatgtccattggaatgcccctttttgtaacagcctggtgagaggcctagcaatggcaccataaccctgcacaaaccgcctgtagtatcctgtcagaccgagaaagcctctgagatctgtgacattcaacggcttgggccacttgagcatagcatcagttttcttggggtcagtcgctaccccattcccagaaataatatgacccaaatatgacaactccttttgaccaaagacacatttcctttctttgagatagaatttatggtgccgcaaggcagtgaaaaccagcctgaggtgctccaaatgagattgccaattggggctataaaccaggatgtcatcaataaagaccatgacaaacttgcgaagaaaaggagctaacaccaaattcatggcacactgaaaggtggccggagcgttggtaagaccaaaaggcatgactcggaactgatagtggccctgatgagttttgaatgccgttttaaactcctcggatacacccatgcgtatctgatggtaacctgaagtcatgtccagactcgaaaagatttcagtacccgccaattcatccagaatttcctccaccactggcatgggaaaccgattcttaatagtcatatcattcaatttgcgataatcgacacaaaaacgccatgtaccatccttcttttgcactaagaggactggagacgcaaacgggctcacgcttggagtgatcaaaccagatttcaacaaatcagccacctgtctctcaatctcggtcttatggtgaggggaatatttgtagggccgagcattaactggtatggatcccggaagcaaaggaatgtgatgatcaaatggccgagatggaggtaagactgtaggtgcctcaaaaatatccatgaattctcctagcaacccttgcaaatctgtatgaatttcgttgctgctcgctgccgtcacctcttccagcagagcaaacacccagatatcatttccacgcaaccaccgctccacttgtaaagaagatacctcctgcaccacttgttgttttggatgattccccaccaactggacctcgatccctttgtccacaaaactgatcacctgagcgtcccaatcacaatgcatagggctgtgccttctcaaccaatcataacctaaaatagcatcataggcccccagccctagcaccctcatatcattctggtatgtgtgtccgttggcccaccactccaatgatcgcaccattgtgtcactatacataatctctccattggccaccctcac

SEQ ID NO: 121327 - DNA, 523 bp, Zea Mays
tttggctactgctcagaatttgttgagggatcactgcactgatgtggagctccatcctgatacggtgaatcgacacgacttctcttccttcaaggtttttggatggtgccgacgtccacacctcattccaaatttgttggagctctttgttccagaacctttgatgatgacgcctggctctacctcacttgagagaagattgcttgcttaccaagtgactacccatgcgtctctgatctctccgctggtgcatagcgctgctgcacctccgccgccggcgtttgatgatgatcaggacaccgggcctcgtcggcgtaggctgaacagttcagttcagatggggcatgctgagtccggggaagcacttgcagcacgaaggcccgtccgtgaaatacttggtgttgccccggtctctgttcgacatgtggaggctggattgtatggcggtggcgtttcttctcctaaaggagcgccttccattgccttggttactggggacacacatgcaaacgctgtggagccg

SEQ ID NO: 121328 - DNA, 355 bp, Zea Mays
atgacattgtggtcaaaactaggtgatccgagggtctcgtagttgatcgtgggctaacatttgaaaggttaaaggctaatgacatcaagttaaacccccaaaaagtggggctagaaagggaaggcaccagactactagcctagcctctcaaaaactttttacgtcctttacgttcttcacatccttctgacatgcgtggctgcactaatatctttcccattttgtctgccagattaatgtagggcctcgaaagagccgaaggaaacaaaaacaaaccatgccaccatttggaacacccctgcccaaggaaccaagtgaacaccaagaaaacactaaggtcttccatcctagtaag

SEQ ID NO: 121329 - DNA, 937 bp, Zea Mays
caagaatgaaggaacacccctgacaaactgaacagctactaatgggccattagcagaactaaccaaaattgggtgacccaacctctatactgaaagaccagcccgtgacacaaaattctccaaaacaaacgaatagctagcgccagagtcaaaaagagcatgggccacaaacgaatcaactgaaactgtacctgtcaccacgtctccttgctctctgccatccgcagcgggtagcacataagctccagaaatacccgcagaagaggaagctctcggagtgaaactaacagaagaaccccactgagtcgccgggtgaggcagacgcggagctccaaactgagacggcataggagtagacggtgcaggagtaggcgcggccagatactgagaaaaaccctgcatcggcacgaactgagaagtcccaggcacatagagctgctgcggaggaagaggaactgaaaattgctgctcagcacttgacatcatgttgatagtgccctgagaagaggaggaagtcaccgggtcccatctaagcttcccattaggattcctcctacacaccacatccttgtggtcctgactacagatagatcacctgccactccactggcactctgcacggcgatgcgcatctccacaacggaaacacaccagccccagcccgggcttaggaacagcccaaaacctctgagtacttcctcccgaagtacccgagtcagaagatttgccacggtaaggatggtggcgctgatgctgagacttgcccctcttgtgggctggacctccagtgttccccctcctcgcgtcctggccacgaggcagatcaacccccgaagacttctacgactccatggtatactggtgctgcatctccacacccagtgcctgctccactgtagtatggaagtccaccaacggaaaggctcccaaggcatgc

SEQ ID NO: 121330 - DNA, 552 bp, Zea Mays
atggtgtggaccttggccggatccatggccacccctcgcggatatggtgtgcccaaggtaggcgacaacatccacgccgaaggagcacttggagcgcttgacgaagaggcgatgctggcgaaggaccgcgaggacaacacagaggtgacgcagatggtttgcccaggaggcgctgatggtagacggatcggaggtcgagcttggtgaagaattgggtgccatggagttcatctaggatcttgtcagcgactggaatggggaaggtgtccttgatggttatggcgttcagcgcacggtagtcgacttagaaccgccaagatcggtccaccttcgtgacgaggcccagggatgagaacgtagagatgctgcgctgaataatcccctagtccagcatggacgcacattgacgctccaattcgtccttgtgcaaacagggtattggtatggtcgaacggccaccggtggcgccctcggcaccaaggtgatgctgtggtcacgactgcgcgatggcggcaggttgtgcagctcatcgaagacgtcgtcgaaatccac

SEQ ID NO: 121331 - DNA, 354 bp, Zea Mays
aataaaagagcctggatggtttgaaaagaagcgggttagctcgaatttttacttctttagttcttaatccttcaaattttataatgcatgcatgctgaaaataacggctcctctctgaaataaagggtgctcctagggcatcctttaaaagctaaggactggcccacagggcctacttacttagccacctatttccccctctattcctaaggccttttgtcctaggtctagcgttcgagtcctgacaattcttatcagtttctaagcaagttttagatttttaaaattggtcttcatggtttattgtccttctctgtggtggtatttgctccgataccaactgtggcagaacca

SEQ ID NO: 121332 - DNA, 491 bp, Zea Mays
cacgatgcacagacgtggcggcaccgatagccaatgcggcagcgccatggttgaccaggcacatccaccctcccacgatgcacagacgtggtggcaccgatagccaatgcggcagcgccatggtcagaaattgtcaatcggcattctgccgacccaactagggtgaaacttaaactataaggaagaggaggaggaggcagactggccagggcaatcataccagtgattcagcgtgtgggtgggtccgacaacgtgttggcgtgacttctcggcccaatccaaatccgacaagcaattgccaatgctacgacggtcgatcccccctgccacgcatacgagcgcactcctggtgatgcggcgaagcctcccggctcgatcctaagacttctacggcgatgaatctgaggttcaactgtagcggacgactcaccctcaacaacggcggctatcctcgcacagtgacctcgaaaaagggttaggggaatgcgata

SEQ ID NO: 121333 - DNA, 453 bp, Zea Mays
aattaacctgctcccacctatgtttttgagttgcgaagtctaaaatacttgctaagttttatactggttaaccaacttgttagatgactttagttaagctcgtggtcacgatgaactgcttgttgtagtctaaatgcgtgtggttatggtcgcgggtaaaaatttagtagtgctcatgtggtgtctaagttaaaaggcgaactagtgggtgaaaagcgtttcgacatacatgtataccgaatttgattattgtggtgaacgcgttgttaattgtgtatggtaattctaggcacgaaatgacttgaacaaaatttataattcgactgattagccctcttttgattaatttagctctaacaattggtaaagtgttagaataattcaagtctctagaatgcggcaattcttgaattgtataggagctgaaatttagtagttgctgttttggactgc

SEQ ID NO: 121334 - DNA, 333 bp, Zea Mays
cgtgttctagtgctaaagtttaacattatgaaaagcaaagttgaggttcctacacactaatggtcatggagtcgggatgggtgggggagggggattagacaaaatggagagttaaggggccaaatatggacttacttcagagacagggtgacaaattagaagaaaataaagagcacgtgcaggcttacaagagctgtaacatggcaaaaagaatacttacctgttatcaacaacaatcattagttcatcattgcatgcagagcagcagaagcttgcctgcataaaagtgataatcaatatgtgttcaaatttgactatgttatacatcatgac

SEQ ID NO: 121335 - DNA, 816 bp, Zea Mays
cctgtcaaccccagaaagcctctcaaatccgtgacattctgtgggtgcggccacttgagcatagcgtcggttttctgagggtcagtagccacgccctcacccgatataatatgacccaaataaatcagctcctttttaccaaacacacatttcttcgctttgagatagaatttgtggtcccttaaagcagcaaagaccaacctgagatgctccaaatgagaaggccaagtggaactataaatcaatatatcatcaataaagaccataacaaatttccgaaggaaaggagctaacaccaaattcatcgcacactggaatgtagctggagcgttagtaagtccgaaaggcatgactcgaaattgataatggccctggtgagttttaaacgcagtcttaaactcttcagagggtcccatgcgaatctgatgataccccgaagtcatgtccagactggtaaagaactgagtaccagcaagctcatccaaaatctcctcgaccaccggcattggaaaccgattcttgatagtcatatcatttaacttacggtaatccacacagaaccgccacgtaccgtccttcttttgcactaaaaggaccggagacgcaaatgggctcacactgggggtgatcagtcctgacttcaataacgcagcaacttgcttctcaatctccgtcttatgatgaggagaatatttgtagggtcgagcattgaccggaatagctccagggagcaaaggaatatgatggtcaaatggtcgagatggaggcaattcagttggtgtaacaaaaatgtcactgaattcccccaacaacacc

SEQ ID NO: 121336 - DNA, 589 bp, Zea Mays
ctccgtaccaaggaagggcacgtgtaaatcacgtcgatgcccaagaagctcagcaggctccgggagtagtactcggtgagttccttgttgaatttactcctgctaccgtacttttcgattctggagcatcccactccttcatagccactagctttgtggaaaagtatggcattccctctactcctctagagtttcctttggtcacccgaaccctagggtccgaccttctatgccagctaaaatgctcccaagtcagaatccttttaagtggggtagtattcctggcagacttaaccgtcttgccatcccaaggaattgatgtgatcttagggatggattggctaactaagcacaaaggcatcatcagttgcgcagacaagacagtcctcctcaccgaccggcagggaaagtcagtctcttgtcaggcacagccacccgccagtgacccaatgaagttcaatctagcaacggaaagtatatcagtagtagaagaattcatggacgtatttccagaagaattaccaggaatgccaccagaaagagaagtggagttctacatagatctgatccctggaacagcacccatcgc

SEQ ID NO: 121337 - DNA, 384 bp, Zea Mays
gagagaggggagagcattggcgcaagagctgcgtgtctgtcaccgtggcaggcttaccggtgacgagccagcaatatagagcggcttactgtgacgtggtgaagcttcaaggcacgtggcaccctatcggtaggcagccaactccggtgagcttatctgagccggccataaagcaaggggggtacggcggccagcccctggcattatccgcggtgaagatctttttaccctgaagcgttatccgggcaccagtgagcacgaatcacttcgccggcgcgaatccaggcgcgggggtcaccggcggcaaggtgcactgcaccagggatcttcttcagttcactgtactatcagaacaccatttagagcgcctgacagagcgaaaag

SEQ ID NO: 121338 - DNA, 947 bp, Zea Mays
tgaatatccatttatttctgcatttccagatgcaccaagacatggttatgataatttacattcttcatgccactttcagtcttgctctaagtcgtggtattgcaagcaccagatccaccgttcagggtggggtaataccgaccgtgagccaacattttttatcaaaattgcatctcaggaagaggtgaagtaacgtttcttctcgttgcagtatgcagttttcgcatgtgtaggaatccagaggcatgactcgttgtttgagaaaagttctagtgtttaacctgccctttagcagtaaccagaaaaaacttatgctttggttggcattttgttttccatgtccaggagtatactggatgggtccactcctctccagccatatgtgtatataccttctgggatggataaagacttgagcctctagcacagagccatctatcttgttggtcttcatttgggagatttgcaatcgattcatgaaggtgatgaagttgttggaaggcctcttttgataggggagtgtgaaacattttatggatatcagctgctcttgcttggcttatagtgatgtccttgttggaagcaaacgaccaaagcttaggaaatatttcggatttacagatattgccccatttgtcatgccagagtaaggttgttcttccgtcccctacctccacctgagctagctccttgtagatgtgtagagtttttagaatgtctttccaccaaaatgagcttattggtatctctgtagatactgcgttgttgtggtaatggttggcccagattatgttaacccatgggatgtctaatctgttgaaaaatttgtgtaaatttttcatcaagagggccatgttctgcaattctaaatcaatcactcctagtccaccttgcttttttggtttacatactaatttccaggcagcttgtggtgtattcttctcatt

SEQ ID NO: 121339 - DNA, 786 bp, Zea Mays
tgtttctcaaacttaaaatgataaggtaatcgaacaagttcatgtttcttctttgttccctttagcttcggcatgccccaatcacttgatgttggagatgtcctgttggccaggtattcttgcaccaggtccctagtgctgatttgttcagccaccaccctgaattctactgtggccagctggcatggtgaccctggctgtatgttgcacacgggtctggtcattccgaagtttagagatagcgggcacataaccatcgtcatcagtttcccccttttcttctcatcagccttgatataaaaccattcacctttccagccggttggccacttggtgcataaatgaaaactggagccttcgtatccttgcgatacgcaaagttgtagcaaccaaaattttcatgtaaactgtctgccctggccttcgtctggtagtgcagttcaagcactgggcagaatgcttcgccatctgggctcatcccttgacttcggagggcccagataaagacactaagcctaataatggcgttaggagtcagctgatgaagataaatttcaaattttttcaagacttctcctaacatctcattcagaggaaatcgaaatcctgctctaaaaaaactcttgaaaacaactacttcatcatccttcggcgctggggtggtttcttctccagcaaatcggacaagtttcctttcatcttctccaaagtagcccaacttcatcatcatgggcacgtcaatttcagacactatagatttctcaaaatctagatgactgggtttac

SEQ ID NO: 121340 - DNA, 436 bp, Zea Mays
ctaaaatgttcacattatgttccggctatgaaaacttgcagttctctgcgatgctagagttgcagacattttctttttttatcagtgttgtaaagtactagctcagataagatggcgtgtcaattcagtttaccagtcaggcttggctagttcgcctgaagttctcgtgggatgagcagctgtagacctacagttctagctctgatattctgcaagtctttgtaggttgtagaaactaattttctcccacctgtcaaatgtttatggaaactgtttttctctcgcttgtcaaaatgaacgtggagatgacaaagactatattttgttgcttctttggtatcggctccttgtgaagggttgatcaaataggcaaatagaggtggtgaatgtgaactaataaaaatatttgtactaagtaatcttgatttaattttca

SEQ ID NO: 121341 - DNA, 848 bp, Zea Mays
gtatgagatacaaagaatatggatcctaacctagggattcttgccttaggcttccatatcctttgccttggtgttgctaatcccttacttgtcatgtaggaggggatgacaatgttgcaaccactccctgacatattttatagtttggtgcttgactgtaggtgttgtctgctgccatggagcctttcctaggttacaattctttattcttccttggtatgcaagggtcctcatacattaagaagttagtgagtggactaaaagccatttgctttgttagctcatgaagttgtttatcctgatgcatcatgatatatgtgtggtgttgccaagggagcaatcgatagtgcctcatggctgtggcatcggatggcaatgtagtccttataagtctctcatgattcgggtgccttatagattttatatctagctattgccttagctcaatgagcttgttggacctaaaccaagattaggatggctgctcgggttagggtaacgttggagctccttgtttgcttggaattcacatgtcctgtcagagccctcgaggctcgagcgatggtagcatttgccttatatagtcagccaagggttgcttgcactatcatgttcttcaccctaggacctagaatacttcaatattagattctcaccacagccctcaagtccaaaagtgataggaagaaggatgcaatggaaccatttttggggcgcaagagaaagaggaaatacccacactacacttagtagacaaaatataatagatctagcaagttatatcccttgagacatcttagattggtggtggagttctaataagggtgtgtttggttggagagtcaaat

SEQ ID NO: 121342 - DNA, 789 bp, Zea Mays
gtctcgatgggacgcaaaatggcctgctcatcttatcacgtgcggttagcgtgatggtgcggttaaccgctctgaccactgcttacaccttttcccctacgtattcctcgacacgtcttccaaagcgacacgagccctgcataacgtacttatgtatagtcttcctcatagtgccctaggtaggggagttatcgacgaggcagatccccctatgaggtttgtgcgacccctcctctaggcgtcgcttcatgttcccatttctatgtacacaaataatatggaggtgtttagagtcggttctgctcaccatgccttctcacctttgcatcagctgcctccttgctttagcttccacgttcttggatccatcttattaactttgtggcaatggtgtcattccccacttgctcaatccgagacagtcgcctccttggccaggagaggaaagggttccttccccccaaggaggtctctcgatggaggttggagaaagaaggcgatgtgtcgctgccccaagatgatgaggtggtgatgatcgcgcctttctatgagtgtgggttcgagcttcccctgcattccttcgtccgagggctactattcttctacgggctagagattcagaaactccatcccaactccgcttgcagatggtgtgctgtatcaccctatgcgaggcatacctgaggatcgacctccattggaagttgtggcagtacttcttcagtggtagggtgaccccaagccgtggcaaccaactatatgtcggtttggtcaacttccaactccgat

SEQ ID NO: 121343 - DNA, 533 bp, Zea Mays
tttattgtaaccaggacccagatgagtaccttcgctcgttcgttcgaagatttcttcgtcttcgagcccagacaccagcagtctaggacgacattgtcatcgaggacatggtcaaagagcttagactagggccagtagcccaatactttggaagacaacctccacactctcttgagaaattgttgcggaagatggacgaatacataagggctgacaatgatttctgccaaagaagggaggaactacacagatacaccgaagcagctaggggtttgggggaaggttccaccctaggcatgttcgaagcattcacaacccgatgcagggtgaggaaaagatggcccagtctcaagaacagtcgggccaacagcaagtaagctcacaacagcaacctttgcgcaatatattttgttcacctgctccaagaggcagaattggaggccgaagttttggtggtagattcaatgcacctcctggttgttttgtggtgaggactgtaacacccctggtgttacgataactaaaaccctgac

SEQ ID NO: 121344 - DNA, 609 bp, Zea Mays
gcggccagatggataaaatattaggtaattgggtacatcgaaaagaaatagcgtaacactaagtgccaaagaaactcatatttagcagactagcggtggaaaacaagaaaaaggagtattgttttacttctcatagtaacataggcaatttggctacgcagtggccggatagcggataattgatatatagctattggctgatccaatccccaatcgttgcttatccaaacccaagattggggaaaacaatatggcaaagtattaatactatttcctttgtgttttttaaagctcgacattgttcagtgtctccatataatagtatagatttatattgttttacttctctttgctacaacaggcttatatctagcaactcgactctagcataatcgggctagcttagctcaaacaagaattgcacactactggtaatcctatttttgtgtcatccataatttgaaacaatttattgtgttttgcaaacaacggtgtctggatctatttgtactgttgggtgaacattttgtattgcataatttgtaaaatggaaaggtataaaagatgaattacagatctaaaatgactgaatgaaacaaatgttgggtg

SEQ ID NO: 121345 - DNA, 752 bp, Zea Mays
ttcttcagctcaccgattcctaaagacttggttacttacataaagaatgacagtagtgtaataccacgcatcggtgcactaagagaggcaagttacttcacaatgtacctttcactatttgagctttggcagaagttccttataatgctgttatttcattaattgcagatgaatttggaattcttcactattgacatgcaggtactcaacctctgatctattccatttcactgcattttgagacagatctatgaattttgtctccgcttttgctgtctgctgcctcagaaaagtacatgaactgattttactatttctttatttttggttagtgttcaacaaaaatattatacatagggttgtgaccattgtataagttatacagagcaagtggatgctgtcataaacaatgtcatcgttagatttgttagacattttggagcttctgcatttgcactgtcaatgaaaaataaatgattcaaaactttgtgaggatggtatacatattcataatgtccttgaaagtaaaatcatggaaatgaatttaactaaacatgttgggtgcatttatatttgcatgttattgtgctctttgtctatatacattgattattatatgccatatatgcgcagggctttgtaactgaccatgatactgccctgattgatttatacggtccaagtgaacaaaattccaaaaagttcaacgatactataagcacaatggctactcgcattgcgactacatttgc

SEQ ID NO: 121346 - DNA, 376 bp, Zea Mays
acttgccgccggcgatccccgcgcgtggattcacgccgctgaggtgattcgtgctcactggtgcccggataacgactcggggtggaaagatcttcaccgctgttgagcttaaggcactgttccgcccggccgccgtgtccgcttggctcacggccgaattcaaataagttcaccagagttagttgcctgccgctcggatgacacgtgcctagacgcagtacttcgtcgtagtgactcgctctagcacatccggtcatcgccggtgagcacgccacagtaaatgccaccaatcgtttgcgccagtgctcttccccctctccggccgccgcgcgtctccttcaaattcacgagccaccgctcaagggtcctataaatt

SEQ ID NO: 121347 - DNA, 492 bp, Zea Mays
tgttaggtctgaaattaatttgatcagtgacagattggacgtctggctggtggaggtagatggctctcggctggacatcaccccgctctttgcttcaatgcctctgctgattagacttgcggttcagtagctatatttggacttcctcccatctcagctgatctcttccttttgtcgtagtacatttattgcgtatactgtgtggatatgacttctttagaaaatcttttgaaaattcttggcaacacacccaatgggtgtgcccaaggggtgtcttggtacgcagagcatttagcacattgtcctggagtagtaacttgatgtgaccgtagtgtgtaatcatattgcctgagcagttgaccttggtccaaacggtgtcgtgttacgcgaagcggcgcctgttgcctgactcattttcaggcggcttgaattgcttattgaatacttgcgactgttcggcgagtgtggtagaaagtggacggtcacccccgg

SEQ ID NO: 121348 - DNA, 1294 bp, Zea Mays
atcttctcaaggaatttggggataccctagagaaatagttcggtagtacctcagggaacgctctcgtgtagttccacctgtagtagtcttatgcttgtaatgtgctggtgtaatgaataaaatgacttggttgaaaacaatttgcatgtgcataatagtgactctctcccctggcagatggcttcggataaaaccacgcctaccgcctccgagattggagcagggtttcccctgagagctgaaggggaagccattagagaggaaagtgaaacccacctccccgcacctccacaactacccttagacctagcccaagttctagccaatcaaacccgactcatcgaggtcctcactcgaagtctggaaaatcaacgaccaaatggtggaagaccgcaagacagaatgggggatttcctgagactcaagcctcccacgttcgccggatcaagcaaccccctcgatgcagacgattggatgcgcacgatcaaaagaaagctggaagtcattggttgcccagaaaatcagcgtgttcaactggctgcccaccaactttccaggatggccttatcctggtgggacaccttcaacgtcaccatcagagatgctacctgggcagaatttgaagcagctttctgggagcaccatgtgccccaaggacttgtacaacttaaggaggacgagttccgagaactgactcaagacggaagatctgtcagcgaatatgtgcacaagttcatagagttagcccgctacgtgccagatgatgtcagtaccgagggcaagaagatggcccgtttcctgaagggactcaggccagaactcaagacaattctggctagccaagacttcctcagtttctctcacctttctaacaaggccatgcaagttgaaagggcaaaggaggaagaaaaagggcatctcaaaagaatgttccaggttctctgggcacagcagcaggacaggcaccagaagactcgatcatttggattcccacccaaggggccaaacttcagtagactagctggacccaccccgtcacggttcagccagcagagtcagagctctttccatgccccctcagtcgcaagcaaccaacccccggcgaatgcgtgttggcactgcggtgatcctagtcacttcaagaacaactgtcagcagctgaagccactagaacccgcctactccaactcggtgaatgaccccaagaatacctcggcatccgcccccaaggcgcccttctccgtcagccagcagaacaagaccccgtaccaaagaagggcacgagtgaatcacg

SEQ ID NO: 121349 - DNA, 546 bp, Zea Mays
ggaagttgggttcggttactatgcttatgagtcactgacagtttgcactaaggcccttaaacttctattccatcgcagaccaaggtccacgacgaggaacagccctcgccgcaccccggcgagccaattccggtcggccaacgccttggctggagctccaaagcgacagggaccaaattagatgcctaccgtacccttcccctcaaccaatttcacgaacgacgatctaccctgctctgtccacggtgacagcgggcaccacgggtaatcaatctcgttcccggcgattggtggcggtttagctcaattgggtggatggatgagcatcagggaagcctacttatgctgaaacaaggtaacagagggcatgaatgaacctggaagtggctggccacggcgagcttggttttgcggcgttcttcgaccgatttgggggtaatcccaaattagggagctgtggggaacgatcggagctgagagttggtttactggatgcataattacctagcggaacatgctgaggcttcaatttatagaactagtggg

SEQ ID NO: 121350 - DNA, 369 bp, Zea Mays
gagttgtccactttatgtccctacaacgtttcaatttttctcttaagtaaggtggtaattttccagcgcatgtagagttgtccactttatgtccctacaatgtttcaatttttctcttaagtaaggtggtaattttccagcgcatgtagagttgtccactttatgtccctacaacgttttcatctgattgtctgaatgctcaacctatcatcaactgttaatcaccaactgtcttattgttctactcaagattttgtcctttagaatgtcgttgtatcctttgctgaacaaaccgatatttaagggcatatttgtaatctgtttgtttgcatgatatatatgaccaaggtttttttttcaagtatttgc

SEQ ID NO: 121351 - DNA, 371 bp, Zea Mays
aaagatccaaaagggggatggatcaagccgcccagtctctgtacccacttggtctgcggccagccgagatgatcctcgccggcgttgtccgcttaccgttcgtgcgccacgtgcccatgagctttagcacgtcgaactgaaccatagtagtaagtccgtccatcgccggaggctttgccacggtgaaacccacgataacctgcggcggtgactcacctcctctctccgaccgccagccttttccatcaaaattcggagccaccactctcggacactataaattgagtgtgtcgctagctctgttaggttgtcacgaagccagagcacccgccctcgcctccgatcgtccaccatagcgccccgattcggga

SEQ ID NO: 121352 - DNA, 355 bp, Zea Mays
tacctctctacagtccaatcaatattaactacatcgatcgaacctcatattgcgcaactcttataatttactatctcaaatacaaccatagcacgacatgcacttgagactctttgttcaagttaacgcaatcacaactaccatacacatgcgtaccactttttcccccacgtacttttaatctatgctaaaaccatactcgtgcacataccaacttacaaacccatgcacaacgacaaaactgacgaccatctcactacaacatctaacaagagctgtgaatccttaacatgttcacacccgactttttctataattgtcgcggctcctcggcaccagcaatagcataaaaatc

SEQ ID NO: 121353 - DNA, 519 bp, Zea Mays
gaaatctcaaactagccttgaaaaaacttttgaagaccactacttcatcctgtcctggcttcggagtagtctcttccccaccgaaacgaaccagctcttttttgcttcactgaaataacccaatttcatcatcttaggcagatcatcttcggagatagtggatttcccgaaatccagatggctgggtttacttggcgctgcactataatcatcttcagactcagtctcctcaacattagcttgctctgtttcggcgacaggtgcttcctccgatgttaccagcccagaccgctgcatcgcttctaaaatcggaacagtctcagtagcttcggtttcatctccctcactaccaactctggcagtggaacgaactcttgccatttgattatgaatttcttgaaatttttgttgttgacatttttgatttttccgaagctcttcctcttgtgacgaagcagaatcaaaagcggtgcttcatttgagcacgatgatcaagcttcagctatggttaaatttttg

SEQ ID NO: 121354 - DNA, 633 bp, Zea Mays
cttatgctccttgatctctccaataataatctgcttggctccatcccttcttgtttaatggaggatatgagtaacctcaatgtattaaatttgaaaggaaatcaacttcatggaagattaccaaatagcctaaagcaagattgtgcattcgaggcattagacttcagcgataatcagattgaagggcagttacctagatctctagttgcttgcaaagatttagaggtttttgatatcgggaagaatcttattaatgatgcatttccatgttggatgagtatgcttcctaaacttcaagtccttgttctaaagtccaacatgttcactggggatgtggggccatctatttcagaagatcaaaatagttgtgaacttggaaaacttcgaattattgatttggcttcaaacaatttctctggattattgcgaaacgaatggtttacgacgatggaatccatgatgactaaagatgtcaatgagacgttggtcatggaaaatcaatatgatctacttggtaaaacgtaccagttcaccactgcgatcacatataaaggatctgatataagtttttctaagatattgcggaccattgtccttattgatgtttcgaataatgcattttgtggccctatt

SEQ ID NO: 121355 - DNA, 502 bp, Zea Mays
ccgaggtgcggccaaccagtgattccggccccaaattggttatacgaggttcgctacgcgccaaatagaggattgcgaagcacggggaagcattcatacagtggttttgggtgtcagggatacactccgcaacgagcagcggatcgacggcatcgtccgaccatcggtgagaaattgtcgataccgtggttgcagtcttcaccctgctatgcgcctcctacgtgcgacacgatcatccgaatgcccaggaccatgcatagaggacataggggcagcgagcgcttggatagatctctgtgggatttctcagcgagcaggaccggccgcaccggcgcctaggttcgcaaggatggtcccagcttttatacacacaggcggatcaggactgcggacaatccctcctgcatgggcccaccaaatcacaactgacgcccactaatttggccgagctcgcgtgtggggttagttgcaaccatcagcgaggttcacggcgaggttgggg

SEQ ID NO: 121356 - DNA, 715 bp, Zea Mays
ctttgtcaggggcaaaggttgatggtgcccgaggcaaatttgctttcctgcatggagacagagtcctcaatctgccaatgttttatctccaaggtagcattcctgcttcctgtagaccatgcagtgtatgacaaaacttacctctaattaatttgaatataaggacaatacatttttaactgaaccatcctgttgtcctttccgaaatctgaatggtcctaatattgactgtataactagtggtataatctcatcttacaaagtatatctagaaatgccatctgtgttggcctttttcaccgtagtgaggactattttatgtcgatggcgtatattttcaacatagtggaattatattaaatgttctgttatggaacttctgcaggagttgttttgtttcctgaagcttccctacatcttcgagtattccagcctagattagtggaagctattgacaaggctattaatcatgttgatgctccatgcatgataggtgtggtgagtgccatttctcattgttgtgatgcattgttacattgtcgttttaattggctatgacccaatgtcaggtttatgtttatcgacacacaaatgatggacattatactattgcttctgtcgggacaatggcagaggtgtggtttctaagctatttaattactagttatgtcatgtgcacctttggtcttcctccttgttgaattgtttctactac

SEQ ID NO: 121357 - DNA, 374 bp, Zea Mays
ctccttttcgtttactctcggcgtcgtggtctccccgatgtggatggggggaaggtaatttggtcatgttgttttttgggcttcgttgagaattgcttaatcagcttggatttcagcgacgcgggataaaaaatgttgtttcataggattaacttattagtgccatgttttcatgtcagcattccgtacgtgtttgatggaagtatggacaagttggcgggagtaaaagtaatgatgtgtgattaggtataagggaatgcgcgggagtacaccttctctgttctaccttccatgcctagtctagttaagataacgttttctccatatataagtatattgctcctttaaaaacattgtttcccaataacctataa

SEQ ID NO: 121358 - DNA, 616 bp, Zea Mays
ttcttgaacacactattcatcaggtacatgaaataagctggcgcattcgttagaccgaatgacatgaccgtgaactcaaatagctcgtacttggtgataaatgcggtcttcggtatgtctgaaggcctgatcctgagttgatggtaacctgaccttagatctatcttcgagaacacactgactcctctcaactgatcgaacagatcttcaattctaggtagggggtatttgttcttgatagtgacttcattcaaagatctgtaatcaatgcacattctctttgtcccatctttcttctccacgaacaaaactggagcggcccaaggcaaggtacatggtctgatgtagcctttctccaacaactcgtctatctgcttcttgagttccaccaattctagtccggacactacataggctctcttggaaataggggcggtgcccggtataagctctatggcaaactcaactttacgctcgggtggcatgcctggtaactcctcaaggaacacgtcggggaattctgacacaattctaatatcctcaagcaggttggcctccttgccatctacagacaaatggtaacaggctccttctaggtcatgcatgaacagttcag

SEQ ID NO: 121359 - DNA, 882 bp, Zea Mays
gaagtttcccaagtacatgtcgtgatatggttgtattgagataataagttataagtgttgcgtgatatgagactcgatcgatgtagttaatattgaattggcctgtagagaggtggtgacatgctgaagtagtcatcgcttcctctacggttaagtcggagtcctgcgtgatgatgttatttatgggggtgaatgcgtattgaaatattttatgttgtgcaatatgattaggaagatgaaggatagatatgttgtttcggaaatgttagccaatagattcggacaggcgtgatagaggttgagtcacttatgttataaaattgatgctcgacatgttaggtctcctaaaatgtggtgttttaggtgacttgtgtgttatcccattttaagttgagaaaatgtttaagagaagctaattaatttgctcccacccatgttttgagtcgcaatgactaaaatgggttgaatgaacttgagatgtattacaatagctgtgtgtcgtgccggtcatccaaaaatggcgaaaggtggtgtgtgatagtaattgggaaatagtcacgacattagccaactcatgtcaggtaggagttgattgtgttaagtgattgttatatatgtcgtgtcacgaattatgataataataggcaagccggcgtgtatgctgtctagcgggctgtgtcgttgctctagctagccgactcgttagatgactttagttaagcttgtagtcactttaaattacttgttgtagtctaaatgcacatggttatgatcgcgggtaaaaatctatagtgctcatgtggtgtgtaaattaaaatacgaactagtgggtgaaaagcgcgttgatatgcatatatgccgaaattgatgattgtggtgaat

SEQ ID NO: 121360 - DNA, 275 bp, Zea Mays
ggctctgtatggcagaaagtgcaggacaccactgtattgggatcaaactggcgaaagacagttctttgggcctgagcttattcaagaggcagaagaacaagttcgaatgataagagaaaatttgagaattgcacaatcaaggcaaaagagttatgccgataataggagaagactactggagtttaaggagggtgatcacgtgtatctgaaggtgtcaccacttcggggtatgaggagatttaaagttaaaggaaagttgtcccctcgcttcattg

SEQ ID NO: 121361 - DNA, 510 bp, Zea Mays
gtgaagtcgtggtagcaccaggtgccaacattaggttattaatagattactataaatatagatatatgcaacatggatctataagtgcaatggcgagctaagatctcattctcctcgaccgtcgcacatatcttccgaccagatatgttatctatctcgtttgcctccctagacccatagcggtatgttcctagtatgttgatgtcactggggctaggcaggctgatgtgtgcaggggttaatgtgatatctatgtgtcaactccaacccatacagtagcgggtgtattgccgactgagtggtgcttcatgatgtcatcatccactcatatgagataaccaccttagtaactcacgttacctagagcgggtattaaatgcggcatagcgtggttaggtcgttgtgtgcctcggtagcgcgcaaagtggtcttgttggctagttagatatatgtcgcactctacatgcgatagagcacgccatggcctgacctcattaaatgcgagcagcg

SEQ ID NO: 121362 - DNA, 756 bp, Zea Mays
ccctaaacattaaaccccaaaccctaaccctcaaatcaaaacccgaaatctcgaatcccaaaagcctaatctctaaaccccgagccccaaaccctaaagcctgaacattgaaccccaaaccctaatttgtgaaccctatacctcgaaccctaaaacaaagacccgaccaccaaaacacaaaactctaaaccccaaactccaaaccctaaaaagtaaagtaaggctgttttggcctcgcgtgagctacaacacatgttttcatggccgaacaaccaatttagtgtccaaaccatagtacactagtgtccgaaccattgtacacgcatttggccccggaggccggtaaggctatttttggcctcccgcgacacatgttttcatcgtcgaacaacaatttcattcctcccgtccaccacccatgttttggccactgaaacaggtaaggatgtttttagcatccagtgagctatagcacactaaacctcgaaccccaaaatcctaaaccccgagacccaaaccctaaaccatgaatccggaaccccgaaccctaaaactaaaacccaacccccaaaacacaaaacctcaaatcctaaactccaaatcctaaactccatatcctaaacaccaaacttcaaatcctaaaactcaaattgaaatcctaaacctcgaaccccaaaagcctaaactctaaacacagagccccaaaccctaaagcccgaaccctgaaccctgaaccctaaattgtgaaccctatac

SEQ ID NO: 121363 - DNA, 1017 bp, Zea Mays
ccagatcatcatgattcacctacaccgaaggtttagacgttcttcgacctcatcaaagcatcagaagagcctcttcacgggcacaccgatgtgacctagctgatgtcaatcaagtccaagtcttcattctcaattaattgttacaaggagctcatggatttgattagcgaggttcttcctacgggtcacaagatgcccaaagacatgtaccagtctaagaaattgcttgaaggtcttggtatggagtatgagaagattgatgtttgctaggacaactgcatgctcttttggaaggaacatggcagagagaagaaattcttaaaatgtggcaagttgaggtacatggagcttgtaaatgaagatggggagaaggtggtgacaaaggttgcacataaacaactttgatacatgcatctcactcctaaagtgaaacgtttgtttctctcgtggaagaccgctatgcacatgaggtggcataaagattgtacagatagataagatgggttaatggtgcactcatcagatggtgatgcatggaaggctcttgacaactttgatctagagtttgccaccgatgcaagaaacgttcgtatcggcttggcaactgatggtttcatgccttcaatatgaccgctgcgtcatattcatgttggcctatcattgccatcccgtacaaccttccacctgttctttgcatgaaatatgagtttatgttcttatgtcttgttatacctgggcctgagcatcctggcgtatgcatcaatgtgatgcttcaacctctgattgaagagttaaagaagctatgggaaggagtggaagcctatgactgctttaagaagcagaaattcaatctacgggttgcatatttgttctcggttcatgattttatggcgtatggtattttctctggatggagcgtgcatggtagattggcatgtccttattatggtcaagatacacattgtttttgtcttagtgctggtggcaagatatgttactttgattgccatagatgtt

SEQ ID NO: 121364 - DNA, 1258 bp, Zea Mays
ggttaataagatatgtggcagtaaggaaggcttcatcccaaaatttgagaggcacggaagcatgagctaacaaggctaggccggtttcaacaatgtggcgatgtttgcgctcggcagatccattttgttggtgagtatgagggcacgacacatgatgggtaattcccaaaacacgaaaaaaattattatggagtttttgatactcaccccccaatcagattgaactattttgattttcgcatcaagaagacgctcaacgttggtttgaaaaagttggaaaatttttggagcctccgtgcgatcatgcataagatatatccaagtaaacttagtaaagtcatcaataaaactaatataatatttataaccattaaccgaaacaggtgcaggaccccaaacatctgaatgtattaactctcaaggagctaaagtccgatgaacagctgaaagatacggcaactgatgactctttgcaacttcacacgcattgcaaatggacctagtggactcttgaggacatgaaatattattaagccgtaaaatagactgaactacttgtggggacggatgaccaaggcgtgcatgccattgggcacgactcgggagggagcgactggtgagggcttgcttcaactgcgcaacatccgaaggagtgaggtgatagagaccccctttacatcggccgcccaacagtgttttccttgtgagaagatccttaacaagaaaatgctacgggtgaaattcaaagtaaactttgttatcaagggtaaacttatggacaaagagtaaatgtttggtaatctcaggaacatgcagaatgttacgcaatgcaagaggccgatcacaagtattaattaaggaatgactagtatggagaattttcaaacctgtgccgttcccaatttggacttgatcatcaccatgatagcgttcccaaatggccaggcgatctaaatcactggtgatgtgatcagtggcgcctgtatccggaaaccaatctgtatccaccttgtacgaggatttggcggcaacattagcggatggttcttcgtcatcaagggaggcatccattcggtaccagcatcgacgagcagtgtggccggcaacttcacaaatttgacagatcggaggtccagagccacgaccccgtccacgaaaaggcgagccacggctccggcccctagactaaggagtaccacgaccacggtcagatcgaccgcgaccacggaacgagccacgacgcccaacaaaatttgcc

SEQ ID NO: 121365 - DNA, 446 bp, Zea Mays
acgtgctacaaacggtgctcctctgtctgacacgatagtcttggtattccatacaaacgcactatctggtcaatatagatttctgcatacttctctaccctgtgagtggtatgtattggcaagaaatgagctgtcttggtcaacctatccacaatgacccaaatagaatcgtggtgtcgggatgtgttgggtaaacccacaataaaatccatgcaaatatcctctcatttccaagctggtatggggaggggctgtaaggtacctgctaccttcaaatgactagctttgactctctggcaagtgtcgcacttagatatatacttagcgatttccctcttcatcctggtccaccaatacaaggatctgagatcatgatacattttgttactgccggggtgcatggaaaatttggaaagatgagcttcatccaatattttcttcctgag

SEQ ID NO: 121366 - DNA, 488 bp, Zea Mays
tgagattattagggataaccgtcaccgtttgtttcctgtttttgtgtttcgatggcaggcgacgacgaggaagcaatgatccctatagatttcgatgaatgtgttagccaccaagagcttgaggcaaacaacaagctcctgaaggagcaaatggaggagacggtccacaagtcagtgcatgatgccttcattgacatgaaccttggcaagacttacgagaggctagatcgacgattgtcccagatcatcgacagacttgctgtgttggagacgcaacaacaagcactgccgccaccaccacctcctcgtccacgtcttcccgatgatgccgtgtttgatgaagaagataattatgatgaagcgaccaccagagatttgcgcctacgtcgccgtcttcatcaaaacacaaaaggtatgccacaccaacaccgccagcaaggtaataacaatcgtgctcctgacgacccttatgctaagattaaattttc

SEQ ID NO: 121367 - DNA, 736 bp, Zea Mays
tcgagaagggccagaggagtgtgtaaatcagcttgaaaaactcaaccaaaaggggaaatccagaaaacaggatccccttgagcatccaaaactcgataaagaccctttttaaagcgcacttcatagtcatcctcaaggagtttcaaaatagaaagctgattgaaatgcaaatttgaaaccaaaccaacatccttgaggacaaaactcttgttcacttgaacggagccatgcttatccctaaatgtgatgtattccttactaatcactgggtcgaggctagagaaccatttgatgcttccggtcatgtggcacgaataacaggaatccatgagcgatgtgttttctgtgcctctgtattgcaacaaaaagacataaggtgagcaaatggtacaacattggggttagaatagtgcgaataatatcagtgttgtggcacgagttttccatgcctctgtattccatgagccacgtgttttccatgcctctatattgatcaggctctatctataaaaggtgttaggaaaaacaccagccatccttggtcccgaagggaagcgatgaccatagaaggaaattgtggtctgctggggaagtgagattcaaagccactgtcacagggtccttggccatatggcacacgacccacaccccgccaggcatgaccaccctgtggtctcactagttgaggcctagcagcaagaggcaaagcacctctaggcctcgcacaacgtcttca

SEQ ID NO: 121368 - DNA, 276 bp, Zea Mays
gggatatcttcgatagaaggggtgatttctttggatgcggctccgaccgagttgaatgtccccttgaatcggccaatacattgggtggcaaagtcgtagcatttatcccgaagacttttgacagtttcgcttaattttgcattcttcttagcttctgcttcgacttatgcattcagttccttggattcgcggtcgaagctctctgatctcttatccaaggttgctcgagcttcatctagctctctgctcaatttatcattttgagactgcgcctcg

SEQ ID NO: 121369 - DNA, 532 bp, Zea Mays
gtaattgttgaacgtgcgtatcgtgaattcatcaccacggttggtgcggagcatgccccatcttttgctcagcctccacctcagcgcgtgcatggaagccatggagttgaatgatggtcgttgtagcctcgtcctttgacaccaacaacaacaacatgagccacttggtgtgactcttgtcatcgataaggaggaacaacatccctatatacgtcttcagggtgctcgaaccacacaagtttgcgtgcatcaggtcaagcagatgcggcacacaatacttgttggtcatagggaacagacatcgtcgttgcttcttagccaagcagctctcagacttggttgacatggttgatcggcggcagtctatgcacctgaccacccttcaacagttcactcaccccatggaacctgagctatctgaagttggccattgctagtccaccgccgagctccaggcagagaggcacacgagctacgcgacgttgatatcgactacataggaactcgttgaatgtcgcaccttgactagcaa

SEQ ID NO: 121370 - DNA, 407 bp, Zea Mays
aaaaaaccactgtccgaataggtacgcgttttcatccctatcttctatgcgtctaaagccacacgaccaccattccctgctcccctgcatgcctaagtcgagaggtgaagaaggtgaaaaactttgtgctacatcctgaaatctaagcataattttgtataatttcttgctatgatttttattttataaattatgtattgcgatccaaacaactagtaattgttttattagtttcataagtttgttctaaatacttcaaaatcagtatttgcaactattcacatgtttacttttggatatgtgcataatttgatgggtttgcctaaataggattacttagaattactatccttattccttgtttaaactgggtttaattctatgtttagtaatatcactattgctca

SEQ ID NO: 121371 - DNA, 608 bp, Zea Mays
caggaaagtggatcagagagttgccgtatgttatctggagcctgagaactcaacctagccgagctttacatggaaacactcccttctttatggtctatggttcggaggcagtgctacccgctgatctcaagtttggggcaccgagattaatctttgaaaacatagcagaagctgaggctactagactggaggatgttgatatactagaagaagaatgattgaatacggtgattcagtcagcccggtatcagcaaactctgaggcgctatcatgataaggccatacggcatcgatccttcgcagtgggagatctcgtcctccgccgaattctaacgggtgagggacggcacaaattgtcgccactatgggaagggccattcatagtagcagaagtcactcggcctggatcatatcgtcttactcaaatggacggcacggaaattgggaactcatggaatatagaacatctcaggaagttttacccctacctagatttcaaaagctattgggacggccttgtattctgtaaattggaaaatacatcatcaataaaaagacttcattctcaaaggcactcaaactatttactgtcaacctcacgcttactt

SEQ ID NO: 121372 - DNA, 608 bp, Zea Mays
aagttgcagactgctattcagtttcgatggcatcgcccatgtggttacaggaagtaacagatgcatacaaggcccatccccaagctatgaagttgcttacatctttagctatttctgaccaggctccttacacgcttaaagatggaattattaggttcaaaggccgtgtttggttaggacacacttctgaaatgcaaaccaaggtaattgtggcccttcatgccagcgccattggaggacattctggcttcccagtgacgtatgctcgggtcaaacagttgttctattggccacatatgaagcaacatattcgagatttcgtggctgcatgtgttgtgtgtcaccaggcaaaacctgatcggtctcgttatcctggtctgttacagccactgcccgtacccaactatgcgtggcaagcgatttctctggattttattgaggggctgccgcagtcaggccactacaactccattctggtggtcgttgacagactcactaaatatggacatttcattccattgcggcacccattcaccacactcactgtggcacaggccttcatgaccgcagtttaccgccttcatggaatgccagagtctatcgtctcg

SEQ ID NO: 121373 - DNA, 456 bp, Zea Mays
gtgcaggtgacggtcctccaccaatggagaagcggaaagaaccggcttttcctcttaaaacaatgccactgcatgctaacggctggttgaacgacatgaagctgtcctcgcctactgctgtccctgtgaacattggtagcaacagtgttgcttttgatcccatctaccgagcttggactgtgagtctacatcttacctactaacgtactgagacactcgtagtcgtagctgtaagagctggcattgacagccagtttccttgtcatttgcagcagaagtatccttcagctctgaacgcgtttgaaagaattgttgcctgcggcaaaggcaagaagattgcgctgttcttggattacgatggaaccctctcgccaattgtcgatgaacctgacaatgctgtcatgtctgatcaggtaatcgcgttgtagcatcaaccaatctcttaatcaaattaag

SEQ ID NO: 121374 - DNA, 573 bp, Zea Mays
gaggatcttccgggtgcgagtactgggtgtaggcggcgaagggcggtggcgaaacggagagtgagtgaattgtcgcgaagtggcaagcgtcattgtggtgagatggagagtggtcgtctttgcgtggacgggactggtaaacgggaattgttgtcctcaccggctggggcgagtgtgggtgaaggggagctgtgaaatctttttgagggtgaggaattgaggataatgttgttcaactacagggagatgggtatcatcccaaaggttgagccaatgtaatatgtgatgccctcgctgtgtgtatgtaaccataatttgtatgataaggctgcgtgccttcgttgatacagccgcgcccataggcgacttctgcacggagagtcttttgggaacgacttcgattgtgcgcacctattattccggctgcacccttagacgactttggcacagagagtcttttgaaaaagagttcaattttgcgcacttgttgtgctattccggctgcacccttaggcgacttttgcacggagagtccggctgcacccttaggcgacttttgcacggagagtcttt

SEQ ID NO: 121375 - DNA, 807 bp, Zea Mays
attgtgatgttgctgatggcgatgataaatattcgatccacctcacagaaagcctgaaaatgctgatggttgttcgaaagataaggagggccccccctcgccttctagaagcacgaaaaattctgatggcagtggcgaaggggatggaagccgaggctcttagaatcaacaacgtgccccggaaacttcaggtcctgtgccccggaaacttctagaagcacgaaaaaacttctagaagcacgaaagataaggactgcaacgaagctgcaggggatttgtctcccaagatggtccatacttcctagatacaatgaaacctattgacgtagagcctcggtgaggtgatactattgttttttcaagttacacttcaacatgccgttgcttatgatgaaatcgagagtacacatctcaacttggaacccgagaaatgattggatgtgagacagttttggccacagttgtgttcatctcagacatcaattttggctgagttgtgaacatgtacagataaatccccgagaaaagaattggaagttgagtatgaattcctttttgtgcagcattatagtaggaaagctaatcctactttttattgaattagtgtagtaagactaacagaacttagggccgaaaaaatgcatgccccgttctcgaaaatcgaaattgtttcctgtgggaccattggctaagctgttactcttgtagaagtggcaggacaggtcattttggcgtcagtagcattgtaatctcatagaactgtgattcgtggataatgcatgatgcaaaatccaactgaggctttgt

SEQ ID NO: 121376 - DNA, 385 bp, Zea Mays
tatgatgaggttgtgtgccttcgcacactcggctatgttcgtgagggcgttatgtgcttggtctggtgtatttgttatgttggtctggtgcacatgtagtcggtctttgtgtggacagtttggtgtaatcgtttttgcactcgttaggcttcgtccggctgtaccattgtagtcgattcgtcgcacttgttgcgctgtccctgctgcaccctgaggcgacttctgcagggatagtctttgcgggaaactaggatttttcgcacttattgtgctagcccggctgcacccttaggcgattgttgcacgggtagtcttcgcggaagacctcgatttttcgtatttgtagtgctaatccggcggcacccctgagcggcttctgcgcgga

SEQ ID NO: 121377 - DNA, 524 bp, Zea Mays
gcacctcgtggtgggccaccttgaggcagcgcttgttgccatacgcttcagtccggccgaagatcatggggcaccccgtcgttttggggcaatccacacgggggcctcctgttctgttggcttggcgggctcctctggcttcaccttcttagcagacggtttgcagatgaagcactttaggatatcacattcttagagcttgtggaggatagggaagtcgtagttctggcacgacgagtccattagcttctagaaatggttgcgttcgttttcagcgatggcctgggagaccgatccaccgtgccgacttcctcttcattgcgtcggggatgatggttcctccggcgcttgtcagggtgttcccgacgctcattttcactgcttggttcgccggcattgcatgggccttttcccttgcaaaagatggtccctacggcgtcctccccgtcagcgatcttggtcgctatgtcgagaagatcggcagtggtatttggtcaccctcactcaagcttgtagaagagcgc

SEQ ID NO: 121378 - DNA, 1590 bp, Zea Mays
taggggtgtagaggggatgtcatgcttttccacaaacttagtggctataaaggaatgggatgctcctgaatcaaaaagcacagtagcgggagtaaattcaacaagaaactcaccgagcactactcccggagcttgctgggcctcttgagcgtcgacgtggttgactcgtgctctgccctggtactgggtcctgctctgctgactgttggaaggaggtgccttggaggtaggtgccgagggaatcttggggccattcaccgagttggagtaggtaggtccaggtgccttcaactgggggcagttattcttgaagtgactggggtctccgcagtgccaacaggcatttgctggcggctggttgcttgcaacagagggggcctgaagggagctctgactctgctggctgtaacgtgatggagtgggtccagctagtctattgaagcttggtcccctgggtgggagcctgaaggatcgagttctctggtgacgatcttgctgctgagctcggagaacctggaatttcctcttgaggtgccctttttcttcctcttttgccctttccacttggatggctttgttggagaggtgagagaagttgaggaagtcttggctggcgaggatggtcttaagctcgggtcttagccctttcagaaaacaggccatcttcctggacttggtgctgacatcgtcaggcgcataatgggccaactctgtgaacttgtgcacatactcactgacagttcttccaccttgagttagttcccggaactcgtcttcctttagttgaactatcccctggggtacatggtgctcacggaaggttgtttcgaattctgcccaggtagcatctctgacggcctcactgaaggtgtcccaccatgctagggccatcccagaaagttgatgagcagctagttgaacatgctgattttcggggcatccgatggcttccagtttcctcttgatcgtgcgtagccagtcatctgcatcgaggggattgctggaccccgcgaacgtgggaggcttgagtctcaaaattctcccatcctgtcctgtggtcttccaccacctgggcgctggttttccaaacttctagtgaggacttcccttctccgccagcttctccttcagctcttaggggaaaacctgctccaatcccggaggcggtaggcgtggttttatccgaagccatctgccaggggaaaagagttactactatgcacatgccaatttctttttcaactagttattttattcattacatcagttcattacatagtacagcacacagctaccataagcttattacacaagagtgctatcgagggtactaccgaactccttctctaaagtgtccccaaattccttgagaaggtcatcaaggctggctagggacatttcctcggtgtcggacgagtttcttatcctggtaggaggtaggtctggaggggcttcttccttctgctcagtctgacaaccttggcttttggtcttcttgcgattttttcttgcggggacgagattcttcagtttcttgtcgaaatccattttcagagtgcgttaggcctcacggatattggtttcctcgcc

SEQ ID NO: 121379 - DNA, 461 bp, Zea Mays
ggccgcccaacctcggaggaaccgccgtaatgcgctcagctttttattccatctttggaccgagttccggcccttacatgtattagcccaaatttccttgatatggtcctgaaaaccttccctttgtagccaattcagttcaaccttgaatttcttcttatttccaacgaaggcaggatagccagtgttaagaagcaagggggtatggtcggatacgcctctatctaaggcttggagtgttaccaaaggaaacttaaattcccattctgtagacatgagtgctctatcgagcttttcataagtaggtatggggagggaatttgcccaggtatattgtctacctgttaggtctatttctcttaaatccaagctatctatcacagcattgaagagaaaaggctagggaccattaaacctgtcattgtttttctcctttctgcttctcattatattaaaatccc

SEQ ID NO: 121380 - DNA, 362 bp, Zea Mays
agcagagcacgtatgaggacaaaagacacgttcgagctccccatatctcatataatctaaatccacggtttctctctcctctgcaggtctataaacacatccatatgcgtgttccactgaaaacactcgaacgtttgcacgctcacaatgacattgtaaccacacaaaatacgcatgcatacaaggaccgctgaagatagtttgcctttctcggtgcccaatagatcatgtaatggtcatacaaaacattttttatactgtatgtattgtttacaaagtgaagattgaaataggagctaagagcagcagagtgtgtatgagaataaaagacaatctcaagctcctcgtatctcccataccct

SEQ ID NO: 121381 - DNA, 445 bp, Zea Mays
gcacggagacgggcaccgacattggagtgaagcgtagagaaagggaaaacttcttcatcaaagatgacatctcgagaaatgtatactcgcccggattgaatatcaagacacttataacccttgtgaaggttgctataaccaaggaaggcacactgcttagaacgaagttcaagtttgtggcgattgtaaggtcggagattgggccaacatgcacaactaaaggtgcgaagagagaggtagtctggtttttgttggagtaaacgctcaaagggcgtttgattatcgatgactttgctaggcaaatgatttataagaaacgtggccgccataaaagcctcatcccagaatttcaagggcattgaggcatgagcaagaagggataacccaacctcgactatgtgtcgatgtttacgttcaatgaccccattttgttgatgagcatgag

SEQ ID NO: 121382 - DNA, 550 bp, Zea Mays
tggtataacaagacataagaacataaactcatatttcgtgcaaagatcaggtggaaggttgcacggtatggcaatgataggccaacatgaatacaacgcaacaatcatattgaaaggcatgaaaccatcagttgccatgccgatacgaatgtttcttgcattgctggcaaactctggatcaaagttgtcaagagccttccatgcatcaccatctgatgggtgcaccattaacccatcttgtttgtccgtataatctttgtgccacctcatgtgcatagcggtcttccttgagagaaacaaacctttcactctagtagtgagaggcatgtaccgaagctgtttatgtgcaacctttgtcaccaccttctccccatctttgtttataatctccatgaacctcaacttgccatattttaagcacttctcctctctgccatgttccttccaaaagagcatgcaattgtcctggcaaacatcaatcttctcatactccatgccgagaccgtcaaacaatttttttggactgatacatgtcttggggcatcttgtg

SEQ ID NO: 121383 - DNA, 289 bp, Zea Mays
ctcccttgctaatgtcaccaaggatttgatccaccggattatcctttgaatgttgatgcggacttggcttggaggtggtacttcttcctcctcccttcctttttgttcttgtgctccaccttgatccatgccatcgtcttgatgtacctgttccttatcttgagttgggggttgcaccatcattgagaaagaaggttgatcttgcacttgttgttcatgtggtcgcacatcacctatcgccatagtccttattgcggtcgtcaaaaccttgttttcatctatgtcatca

SEQ ID NO: 121384 - DNA, 369 bp, Zea Mays
tctgctccaccagaacctgtggttgtgacgactcccgtgacattgggtccctccacatcaaccttgggatctgttcttcctacggctctgtgtactcgcctccaagcaggtatccgcaaaccaaaggtttacaaagatggtaatgtgcgttatggaaaccttattatttgtgaagaaccaaccaatatatctactgctttaactgatcccaattggaaataagctatggaatctgaatttttagccctaatgcaaaataatacatggcatttggttccccttgtcagtggccgaaatctcattgattgcaaatgggttttcaaactaaaaagaaaggctgatggctccattgatcgacataaagctcgg

SEQ ID NO: 121385 - DNA, 336 bp, Zea Mays
gggggaggagtttgtacggctgtgctacaaagtgtaaataagtccgaagtcataaaattataacataaagtcaaaagttagtagtcaatacctattcgcctctcgagatccacactttgctcagcggtctctgccacttttctagcatcgtgaatacctttttcacttctccttatgatttcttgagccatctcccgaccgccattttccctcgtcttcagcgcttttctgcgctctgagggcattgctgagaataagaccctgcaaaaggaatgtgatgataagaaacaaacacacgaatttctaaccaggcaaaaagtttattttctcaccttt

SEQ ID NO: 121386 - DNA, 684 bp, Zea Mays
gaggaacagttgccaatgaaagaactcagtgtgcacagtgatctgacttacacgaagcatcctatcaagatccttgacaccttgactctcgttacaaggaacaaagtgataaaaatgtgcaaagtgcaatggagtcatcatggtgaagataaagctacttgggaaagacaagagaaattgcaagtagagtttccccgcctttttcctagctcttagtaatctcgaggtcgagattatttttaagggggtaggatttgtaaagcccaaaatgtgtgtaaaaaataaatataaataaatatatatttaagggataatgttttgggaattatgtgatttccttcctttgtgcatactcatttaatggaattatattggtcaattaacaaataaataaatactaaaatatacatctcatgctggatttttatattgttcatataactgaagtttgaattcaaaacataatggaattctctactacttattaaggctctaatagtagtctgccattcccatgttctgccatttccgtgttctgccattcccatctgcacactccacacacattcctctcgtgaaaacccattcccatctgcaccctcaacacacgccattcccatctgcacactccacacacattcctctcgtgaggagccattcccatctgcaccctcaacacacgcc

SEQ ID NO: 121387 - DNA, 532 bp, Zea Mays
tcgcttttgtctggtaatggagttcatgaattctaaataagcctttggcatttgcacttaaaccttggcttcgaagggctcatatgtaaatgttgattctaacaattgcatttggtgttaattaactgatgaaggtatatttcaaatctcttcagtacttcatcaatcatttcatacatcaggaaacgaagcccagcccgatagaagctcataaatacaacaacttcatcatccttcggtttggtatgatctcatcacaagcaaacctgatcatattgtcatcctttcgaccaatatatccaagtattttaacacgtttagatcttcggcctttacagtggacttgccaaacacaatatgactatgtttgctcggacgaagaatgctaggatctttttcgtcacaatcggcttcagcttcagaatcaccttttctgcaacatttgcttcttccccagcctttggctcaacaatacccgactccctcattgcctcagaaataggagccttctcaacagtatccatagtctcac

SEQ ID NO: 121388 - DNA, 378 bp, Zea Mays
aagccagtcgccccgcaaggttgtctcatcatgggctgggaaaagactacaattgaaatgggccagcccaagaaggcaatgggctcgcgcccggatcgtccgtggattatgcgtaatcttgagagaggcgtccgtctttcccacgcacgacaccctcaaacatcagggatagatcgggatgaagccatcgggttttccttaagataagcaaagttagttcactatttgctaggagataagccggaagagcgtgatcagcgtgtgcgtagggagtgccccacggtcgtgtatataaggcctaggggagaaccccatcattttcatctcattagcacctctccattcaggaaacaccacttgtaaacacaccacacaaag

SEQ ID NO: 121389 - DNA, 423 bp, Zea Mays
gtgaagccgaggtgttgccggggtggtcatcaaataagttcagtgccttgatcgatggaacttgggcgtgtctaggatatgatttgggggtttagtactactaatcgcggctgctcaatatggttgatggtgaactaaggatcactgggtaggttcctgcctttccctccccggttgctctttatataggcagagaaaagatcaaaggggttggatgcttgaacttgcagcaaggacagctatgaactctagatgcagtcgtggctcccccaaacagatccacgcaggttcacagagtatggtcacgcaggatgaagtttatccgtggccaaaagagagggcggtgaagataggatggcactgttctggatatttgcacaggtgatatttcagtgatgagcaaatctgaatacccctgccagc

SEQ ID NO: 121390 - DNA, 475 bp, Zea Mays
attgtcggtcgcgccctggtgtcatgttggggaagatgcacgtgcgctgttggatccttatttgagggccaggattagatccaggggtgggtgagcatctggtcgttagattaggatcttgtggaccagggcgtataccggttagatgaagtggacttcggatccgggtcgtagatcatggattttgtggctgaaattgcataccggttcgctatttaatctgggccctagatccttggatggatggcccaggcgcacctgagttcactaagtcgtggcacttttgtaaagagcccctgagtttagtaagaatcaacctgcaatccacagggactgtagcctgagtctggtatttattgtgctgaagcccctgtcttctctggaatttgaggcgcagtctagacagggaataaaattataaaatcatttagaaaatgaattgctaatgtgaaaataaatgctagaacttgtttaa

SEQ ID NO: 121391 - DNA, 661 bp, Zea Mays
gtttttttcctatggtcccctctttagccttattctcgacttaacaggagttacagaaaaatgccccgggtgcacgatctccatgttctgtctcatctgcaccatgttgcgtccggctacagttaacgagtcgcccgtcgatttccccgcacactgcatgctcaggacgcaaccgacttgtctcacacctacgcttggacgtttgtagttcccatctgattgaggcccgctaggcaccttttaggtagcccactagtggcctttcggatggcccacaagacataactgatctatggtgacctggggcatatctatcccccacaggcccccgaggcttaagctagtttctgaatataattggctcaagattccctgaagtgaattctgattcagatggtgagttcttgttgagtagactggttgcttcctctgagtggtgcacccaatgggtgtagccccccgagctttgagccaacttgagtagcaatcgactggaaggtcccagagaattttccttcaatggatcgctgtgttttctttgtaccgagttgattgaggatttgactagctaaaatccgctcacttgtgaattgcctagatgaacctcactctggttcggttgactacatttttattgtagatcgatcagttgaaaataact

SEQ ID NO: 121392 - DNA, 371 bp, Zea Mays
ggggaacccagttcacatccaaattctggacaagccttcagaaagctatgggcaccaagctagatttcagtaccgcttatcaccctcagacagatgggcagacagagagagtcaacaaagtccttgaagatctgttaagagcatgtgtgttagcttttgatagaagttgggagtccagtctaccctacgcagagttctcatacaacaatagctatcaggccagcatcaagatgtcgccattcgaagcactgtatggacgaaaatgccagacccctctcatgtggtccaacgtgggggaaaagcactagaaggacatgcctttgtcaaagaggcggaagagaaagttgcactaatccgcagaaggttgcttg

SEQ ID NO: 121393 - DNA, 416 bp, Zea Mays
acagttgaaagtggcgaaggattgaccgccgccaaggtcggggccgccatccttgcttcctttctcgacttcgccgtggccaccactttagcgacacgagctttcctcttcttggattggcccgtcacgtctacaacattgtaaactaggacgaacgccttcccttacagatccattgctactgcaatgacatctcgaatgttatgcgagtatggatatataactaaatcccttgctactctggctagcggaacgtccttgcactcgcacgttggaggcatatcccttacaatccatcgtttcgcactcctcgagccaaccttcataggacgacagagtgcccatcaacgtctaggagcggacatgaacccatgtcggcgtcttcttcgctttcctcctcttcaggcaccccttat

SEQ ID NO: 121394 - DNA, 358 bp, Zea Mays
gagactggactatgatgtagatggcataagcttattgcatccaaataatgcaaggccaaagggaaggacgataaaaactagtgaacaaagagttctgaaactgagtgcgaaaggagaaaagaagaagactcgaaagtgccaaaaatgtggcattgctgatggacacaacagtcgaacctgcttgtctatagaggaaaatagggttaaattggctagccttgccgatagaaaaagaggacgaccgcctgggtctagaaacaaaaaatcaacaatggccccgcagtggaatgagacatccacatcaaaaaaacataaacataccgattctgaagaacatggttcggatgacgataatttg

SEQ ID NO: 121395 - DNA, 3322 bp, Zea Mays
gccttgtaaaagtgaatattggttatatatcagacatcaccctaccacatgcagctctattaatactttaacaattcagttttcttgaaaaagggcctgaaaataaatgaacatcaaatgtgtattacaagtgtatatgtcatatactaccataacccctctagacatctagttttgtattttgatggtcaatcacatttattcatatcaccattttgctaattgatccactcctgtgacatagttataaaccaaattccagtctaaaatagctacatgtgatcaccaatgcacaaaagcataagcaattaggccttaaaactaatggatcagcagtagacaaggtggtcgaggggaaatgccagaaaaaaaaatacagtacccaaaatatcgtcagtcttctcagatcttatttcatctagtggagagctgatgtctttgtctataaccccattggtaagaggacaaccagtaggttcagtggcattaggctgtgacatgcttaaaccattagagccatctcccacagaagcaatagtggcagcagagatatctgaaccttgggcatcgtggctatccatacaaactggctttttcacagcctcttcatcgcatgagtaaccttgaccatcctgctcaactccgcaactcggttccttagatgactcctgatgacaatggtcacgatcctcttctccgtttacactgatgggcttctcagacagccttttcgtagatgagaagcctgcatcttcaacatttgtgcgaactggatcctcaatgggctttttgcgggatgaaaaacctggatcttctccatttctgccaattggcttaatgtgttttttctgggataagaagtcgtcctttgaactctgtggagtggacttcttgacttgatgtttgtggaacggggagctttcatcattttctaaattttttgaaatgactttcctaacttgctctttgccagatggggagtctgggtcgtccttcgaatgtctggagatcagtttcttaggtcgctctttgtggaatgaggaacttaaattgtcctctgaattcctgggaatgggtttcttaattcgctctttctgtaataagcaacttcgatcctgtgaattcttggacatggtttttttaacttgatttttgaagctcatgtcatcatccacattatttgaattgggtctcttaactttctctttgtgggacaaatctatatcatcatctggatacctcaaaacaggtttcttaaccagtgctccagtgcagaaatttggtctaattttctgtccaatcttaatcgggttttctgttggtatgccctcatccctcagttcctgaaacttctttcgtgccagctcctgtatggaatgagcctacattcccaagcatagtacaaaatgttcaatgccaataatcaaatcatggtattgtaagcgcataaagtttttaaggattctatacctgtctgaagtaaattgtatcaggtgcattgtactgcatcgcattgctgcaaattaagaacacatcgtcctgcaattttaaaataaaaaccattgcgcagataacgatcaataaggtgcactagtgctcatcatttgaagcacttgtcattcccaaaaaagaaggaagaaaataacaaattggtacaagcttttcctattcaatacacatttgtaaacagaagttcaggtcagattcattcagttatgtttcagtgcttcattcagccattcgcatcatcttcaaatattttgcttcaatagtcaagctatggccatactagttcgatgattactaaccaggggtgtaaacagatcagacacgggcagatatctacacatacgaacacagatagttgggtttcttctcggattcagatttgggtacgggtagtgtcagataagatgtaaatggatatcgacatacatatatatccaattttgagtattcggataaggcatggatggaatgaccagattcggatgcaaatatccatttagtatgtgaattccttcagttgaatagtcgatcaagaaatattcataccatttacatccctattagtaaccagctctgtgatggtttgtagaccacacccagactagccatccatggacaaagatagatcaccggaatgaaacttactcgaaagcaaagttgtaatatttgtagtgaaccttctagagtctatattcatggtatcctgatgatcaaagttttaacaagcttactgcacagaggccaaaagaacttcttttgtgacttgagcgagtaacaaagtacatcttggaatttcatagatcagttcaacttgcccagcctaaattcgctacaagacgtatccgaatattactcgatttcaacaaacttctttgagctactatcgagatgtttcagctttagtatatcctttactaggacttaaaaaggtacagcatgatcttagctcttcacaacaaaaccagatgagacatggtcagcgactcgctcaagcccaatggaaccagtatatcccatatagcctggattcattcacatgtccaccaatggtgattctatgactagaaatcactagtattttgttgcatgctgtgaatgtaagcctattttggaaaaggtaacttttgcagggcagaataacactggttaatgactatttgcatgagccagcacaaatgtagtacaaacagacaaagcggaaagctatccaccttgcatgtgcacgaaattgtcgtgaaagggaagaccaagaaatgtggttccaaatgcatgataaaatggagaagtccagctacctcacttcatttgtcaggctgcacgacaaacctgactcccttaggcaaatctaacgttgggaaaccgttacacatgaaatttgctgacaacaaaagtaaaatgaactgaaaggtaactattccatggccaacaaatcacaacatgatatttcattatccattcgctacctaaatatatgaccaaagcctatcaatctgacctcaaattgctcaaacgagcgatatgcattcctggcaagcttcttcctgacggtgccgaagtccattgggtgctcaatcacatcatgataatcaggcagctgtgtcaatcaataaccacgatattaatactcaacagctccgtaccaaacaaattggcaaatccaggaagcatgggaaatgaatatgggctcttacctcctctggatccactggctcagcaaacactccataggtatccttcctgcggaatataacagtggcaagaggggggataaatcgagctcatcaaaacttgatgcaacaaatctcatcttgtg

SEQ ID NO: 121396 - DNA, 759 bp, Zea Mays
cactggaactcccagcctcatgatcatgagtgcgtggaggcataggaggcggaggcggaggtggaaccccaaagtcgtcatcatcgtcatcgtcatcatggactgttgcgtcctgagtctcaaactggtgaaaagtggtatcctcggcctgagtatcaatcactagagcaggtgccggcataggatcctctggagctggacggtacgacccaaagatgaggcgagaggcctcaagagtaccctggaactgaggggggcgaatcagctgagcaaagatgtgacacagatagtgagcataaggcagctgtcgatgagcacgaagaccatccagtacggtgttctcgatctcacaaatgagaaaatccatgacatcaaactctaagtgagaaactagggcaccaaggagccaaagctgaatatgagtgacagcctccctgtaacccattcatggcagaagcatccgtctcatgagctgatatagaaatctggccactgtggtgaaatctgccagagaacgtcgtgacccatctaagaagggcggtcgaaacaaagccgcgatgtgagctgtaccaggagcaactccgccgtgagggcgacgaggagggtcagaggtgccatagcacatgctgtgaagacgagtcgatgacttgtggaatccaaacacctgacgaatctgactggcatgaatggtaacatcctctcgctcaaatcggaatctcatccagtggtgatcagggtcgatccatacagtagcataga

SEQ ID NO: 121397 - DNA, 479 bp, Zea Mays
tgaaggtggagaaaatcttccatctacataattatttagaggagaagaaacttgcaatggcatctcttgagtttgaaggatatgctctgatttggtgggagcaacttcttcatgatcgtgaagaagatggagaggaccctattattacttggcaatagatgaagcgagaaatgagaatttgttttgtgctgaagcattatcggcgtgatctttttgataaattgcagaatttgaggcaaggaagtttctctattgaggagtattataaggagatggagaaggccatgattaaagccaatgtgtatgaagacgaagagtaaaccattgcacgtttcatggctgggttacaccgcaacattcagcgtattattgagtttcagccgtaccaaagtcttattgatttggtacatcaagccaccaaagctgaacgccagctgcaacaagatgctaagagcaccaagcccttgtcatatggtgca

SEQ ID NO: 121398 - DNA, 849 bp, Zea Mays
gggttaaccacgcatcaactcataacatcacaacttgtttgagattttacctagtgaatgcaatctaggtgtaacaaacacatgttatgccaatgctcatgatgttatgctcaagttttagtaaaagtaacaccagaggtgttatagagagagacatcctaatggttggtctcggtaaccttgagcatcctggtcgtgtacaaggaatctcaaataagaaaggatggaaggaaggattcggaccacagtgggaaggtttgtaaaggaaacgtgatcaatataaagaagagttgtcggattattttaaacaggaggccaacaaagaattcaaagacctgatgtctcaaatgctatcaaatcctcctccaaaattgttctcttcctcatcctcttgaagacccatagtctacgccaccagcaagggatccaccttctccatagccatcaagggatttgtggccattaaagaaatctaaattccctataccaaaattggtgtccacgttcgagaaaaagaagagtaaagctactgctgctggcacagctcgatttttgaaagggattgctcgggacctcacgtcacatactattgatttggccgagcacgaggagtctgcaaaaaaggataaggcaatggtcgcaaagataaagatcccatctaaggcagattataaaaatgtgcctaaacaatatgtgttgggcagacctctactaccatttgagaaactgaggaaggtctggctggtattaaaaggttgcatgactggtacatgcgggcatcatcagttggcattgactccattagtgtgcatataccagaccttgcttttattggtttggaccaaaagg

SEQ ID NO: 121399 - DNA, 350 bp, Zea Mays
gcactggggctgttgtcaaatgctgccttaacgtatgaaaggcatcttcgcacttttggctccaattatacttgacacccttcttcaacagttcagtcatcggcttggcaattctagagaaatccggaataaatcgtcgataataccctgccaaacccagaaaactccgaatctgcctcactgtagtcgggggcttccaatccatcacctcttgtaccttctcaggatcaacagatatcccatcctgagaaattgtgtgacccaagaatttaatttccttcagccagaattcacatttagacaatttggcatacaactgatggtcacgcagcctctgaagtacagtatgc

SEQ ID NO: 121400 - DNA, 623 bp, Zea Mays
ggaaaattagtttcacaattttagcatttttctacatttttctacatatttctaaagctttcccgaaaaagaaaaaggaaaatattcaatagtgttgggctgattccggcctgaaccggccccacaacgcaggaagcgcgcgcccgcgcccgcgcgcgacggcagatttgcacaggggcccttggggttttaactaacggcgaacgaggcctttcactatttaacacagtcactgacattttgctgaagagccctccaacttctaagtcttcacagggagaggtccacgacggcggtggtcgcagggacgctccggcgaggttctggaccggtcgattgggacaatggctgggttctccgagcggcggacatgaaatcggggttaccatgatcatttcccctaacttaattgcgcttataatcaactacggagctctggccacggtggccgtgagcatcgcggcaagacagccgtgttcccggtgatgggtggcggtctagttcgattaaaggggtcggggagcatcgcagatgcatgagaacgctaaaacaagggagcagaagacgggaactggccggagtatggctggcgacggtgaggctcgtttcacggtggcggagaa

SEQ ID NO: 121401 - DNA, 1483 bp, Zea Mays
gatatggtgacgaccaaggtttggttgacgccccgacggaaggcttccacctctggttcatgaatatggtccgcgaaatgctcgaagcgggagatcaggtgtgggggatagatatcctaaaagtcgcctagaggggggaatatgtaaaacctaaaatttacaaactttaaacacaaacttcaccccaggttagcactagaaccagttcatgaacatggtccgcgaaatgctcgaagcgggagatcaggtgtgggggatagatatcctaaaagtcgcctagaggggggaatatgtaaaacctaaaatttacaaactttaaacacaaacttcaccccaggttagcactagaacgagtataatgaaaattagagagcgggaggagagttcttcttgcttagagttgctcaatcagttgcagattacattgggagccaactcaaaacgatcacaagcaagagaacaagatagaggagagaggaagaacaaaatcgcaaagtaatgatcaacgcaaagaacaaggcgatttgtttcccgaagttctgctctgaataatgtacgcccctgttaagtagtccactaaggacgagtctctttcaaccctttctgccggggaaatgatcctcggtccttgggacccaccggtcagtgagcacgctaaggaaagagcccctcatccctagggcccattagtcagtcagaagaggctggtgagccaaccctttaaggacccgccctcagtccaatcccgcagcactgagcccggggtcaggcgtggcggaaccagacaatgaaggatgggcatgtcagaagggaaccgctcgagtggatcctgcgctcggacttggactggctcgctataaatgactggtcgcattaaccacgcctgacatcaacccacagcgtgggtgtcgatccacttcccactcatgacctacggacccctccggttgcatagcactcataacctacgaacccccaaactgtggtgcattggcctgcggcgcacttatggtctatcggactaggcccgagtgcgcagacctcccgcagggcactatacgacgggccttaccgagcctcaggctatgaaagccaggggtcggcgtagcctgaatgatggtgcctaggaccatcgatgcccccatgtcatccaccatgataaatatgcgacagctaggcaacatcgggccccacgagcacgatggtctcaccggggataaaacactggctttacctctaccttacggttccttcccagagaagccactgctggccgacccctctcccgacctataaaagggagaggctcgccttagggcaaggaggactgggagacaaccggatgcctttagacggagacgaacccataaggacgaacaggaggaggagcgcagacgaggaccaggaggccagagccccgccaagccaagacttagttaggactccatctttcagcttctaagctccacttccaccttgataa

SEQ ID NO: 121402 - DNA, 538 bp, Zea Mays
gacaaccccgtcatggctgggggactatgcagtttcagttgctgctctgtctttgaactatctagttctatttcttctacctgagcgatagtagcttcggcagtcacaacaggtattatctctaaagccgagggggtagcttcggcatcttttctgtaggaggcagtgcaacagccctctctaaagaatgcagcatcggctgatgagtcaaaactttagccctttttggctaccatgcggccgaagaggtcgtagttgccattttcctcttcgttccttgtttccgtgcggggaagcagtagttaggataaataaatccaaccacatcaaaaactctgtttattctcatttttccttgagcaccaaaggcagtgttcatgccttcgtcctctgccttcgtataagcccctagcaactcatcactggtcgcctcaacgacttcaagacattcatcattcggctcgccaaacttacttctatagcgatagctgtatttcaagtaaactaggtgaccttcactagaaccagcagtggtctc

SEQ ID NO: 121403 - DNA, 331 bp, Zea Mays
gtgagtagatgtgtgcatgtttgagctgaatatatagcaagcagctgcaggggcaagcaagcatggtagcgtacgtcctcgggaagcagcatgcatatgcatgatctatatacgaataaaataaatagcaacctgatctggtcaagacgaaactagtagtagcattagcagttacctttaatcacaattgacttcggaactcggctcaacgtggcttttgtaaccaccaccaccatttgacggcgccaccaatcactgatcttgtcgtcccaaaaggaccgatcgtatccttgcgtatcactgtattatcaactagtcaggtgtatatgtg

SEQ ID NO: 121404 - DNA, 496 bp, Zea Mays
atcgttcagctcaaggaagatgaatttcgagaattaactcaaggtggaagatctgtcagtgagtatgtgcacaaattcacagaattggctcgctatgcgcctgacgatgttagcacagaagccaagaagatggctcatttcttgaaagggataagactagaactcaagactatccttgccagccaagatttcctcagcttctcgcacctctcaaacaaggccatacaagtggaaagagctagggaagaagaaaagggtcacctcaagaggaagttccaggtcctccaagctcagcagcaggacaggcaccagagaattcgatcctttgggtttccacccaagggaccaagcttcaacaagccaactggacccactccgtcacgtttcagttagcagggtcaaagctcctttcaggccccctccgttccaagcaaccatccgccagctaatgcctgttggcactacggagaccccagtcactacaagaataattgcc

SEQ ID NO: 121405 - DNA, 656 bp, Zea Mays
gtggttaacctttgtatatggtccccaaggggatgaagagaagatctcttttttgcaggagctaagaaatgttagagagggctgcaatggaccttgggttgttgctggggatttcaacttaatttacaaagcctctgacaagaacaacaacaatttcagcagagctatgatggggacgtttaggcgctttatcaatgatctcgcccttaaagaagttcctctccatggtcggcgttttacttggtcaaatcaacaactggagcccgttctggtcaggttggacagggtcctatgctcagttgactgggagtttcttttccctgatgtgttgctgcagagttctgcttcccaagactctgatcattgcccattaattctgtgtcttcgagataataaatcagggagtcgacgttttcattttgaggctttttggcctaaattggagggatttcatgatattgtgtgtgatgcctgggactctgttggaacatcgaattgtccttttctcactcttcactataaactgaagaagacagccaggaggttgcaagcttggagtgataggcaggttggtcacattagatctcaactagcattggcaaaagaaatttcacataagctggaatttgctcaagatgaaagggtgttgactccgg

SEQ ID NO: 121406 - DNA, 488 bp, Zea Mays
gtcaaaagcaaagatcacttcaagttttgaaggtagagaggcaatgaagaggaagttgcttgccattattaatcggaggtggcaagatcaaatggaggtgaagttgtatggggctgcattgcttttaaatccaaataagttctttgaacttcaaaaattgatccaacaaaaagggaggttggtaagatgagggcagcattcaatgaggtgctatggaagatggttgaagattatgaccttcaagctataatcagtaatataaacaagctgatgagtatatgaatatggttggccctgccttctcatcgccattagcaattagagaacaacaaaaaagagcccgagtaagttccattacctcattaatgatttaagttttgtatggctggcaacactaattcaacttctcttctcttttttagttcgttggtgggatgcatatggtggccttgcatttgagattcaatcctttgcaaagcgcattatta

SEQ ID NO: 121407 - DNA, 529 bp, Zea Mays
tggaagatatgttgagagcttgtgcccttcagcatggtggaagttaggataaaagtctaccatatgctgagttctcatataataatagctatcaggccagtctaaagatgtcaccgttcgaagctttatatgggaggaagtgcaggactcctctatattgggatcagactagagaaagacagttctttgggcctgaactgattcaagaggcaaaagaacaagtccgtatcattcgagagaatttgagggtagctcaaaccaggcaaaagagctacgctgataatagaaggaggccactggaatttgaggaaggtgatcatgtgtacctcaagatgtcaccacttcgtggaatgaggagattcaaagttaagggcaaattgtcccctcgacatattggaccattctgagtttttaggtgagttggggagatggcataccaactcgagctacctgctagtctatcggatgtgcacaatgtatttcatgtatctcagcttaagaagtgtctccgtgtccctgaggaacagtt

SEQ ID NO: 121408 - DNA, 341 bp, Zea Mays
gaagaagaagaagttccactaattcgcaagaatagccgactctacagaggtagtagaggagatagtgatattccttctccagccctgtctgctcttgttagccttcaggatttatctataacagattttgatcagacccttgaggatgtcattcctgaggatatgctgtcagagcctactggtggtgatatgatggatgtttgttctgacattccagatgtgggattagaggtatcccgggcagcatctcgcgcgtcgtcgaccttggagggcggtcttcagtgtcaagaggttggtcaagattgcccgactcccatggaggtgaccgaggatccttcagc

SEQ ID NO: 121409 - DNA, 466 bp, Zea Mays
aacaaagcaggaaatagcgcaacccccaacactccgagcgaagactacctcccgcaagccaggagcagagaacttgttcacccgaagaaccccgttgtccacctcatccacaaaaaaatggacgcggattacaaggaaaaaagaaacaaacgagatgaaggcccgtcaagctgcccttctggtacctccgccctcaaaggagaacagaaagaagcttgtcgtcacgaccactccattctaccccgacgtcctcttcatcggagggagagtggaatcgtcccccatctccaacgatgaaccaactgtgcctggggaagaaccacctcagcgggaagctcgtcgacgaaggaaccgacgccgtaacgcccagcgacatcatgaagccagagaacgagacccggcgcagtctgtatcacgagatgagatctcagaggtgggagaaactccagatgaacgagtcttcagg

SEQ ID NO: 121410 - DNA, 321 bp, Zea Mays
tcagaaaacgggccatcttcctggttttggtgctgacatcgtcaggcgcgtagcgagccaactctgtgaatttgtgcacgtactcactgacagaccttccaccttgagttagttcctagaattcatcctccttgagttgaacgatcccttggggtacgtggtgctcacggaaagcagtttcgaattctgcccaggtagcgtccctgacggtcgcgctgaaggtatcccaccatgctagggccatcccagaaagttgatgagcagccaattgaacacgctgatttttggggcatccgatggcttccaatttcctcttgatcg

SEQ ID NO: 121411 - DNA, 808 bp, Zea Mays
ccaccagatcccgcaccccctagccagctaggacaggaggacgtgaggaattagacgtcgaagggacagatgggtgcaacgatgagcccccaaagcaagagtggaggaagttgtgcgtgagagctagcccccgaaggtggagctgtagagtgcgacaacagtgtcacagtgaagagagtcccccttggtgagctccacgaggatgagatcattgtggaccttgtggaaagaagactctgcatccacccgatggggtggcggcgcataggcggaagctaaacaggggtgcaggggtcgccaaccacttcgcccatcgacagcacgctaggatgccacgtgactactgactagggttggagagcccaacggcaacacaagaacaggagcagaggcagcgatggaggctcagttgctgctaaggaatgtgggggagaaagtgctagctaggggatgagtcctaggtgcgtccacgaagagaggggagtcgccagccatggtgggaccgcccagtaaggctgacggctaggggaagatgctatctgataccatattatagtgaaacagaatagattgattgatgtatcggttttcccctagccctaacgggttgtacatgggttgggctctaggtccatcgcacttaaccacagtcagccatacaatagcacacagtctaacaatttcatatattataatacatgtgaggttctaatgaccagctgccagcatggtggcgtgctattttctccaaaattctacgtggtataacaacacaacttctagcctacgaataactcaatgccgaaaa

SEQ ID NO: 121412 - DNA, 273 bp, Zea Mays
ctgatttattccaagaccaaggccgagcatgagcagcatctctgtctcgttctaggtgctctaaggaagaatcagttctatggcaagttgaagaagtgtgccttttggctgtccgaagtggctttcctggggcacgtgattaatcaacagggcattgcggttgatcccaagaatgttgcggcagtggtggagtggaagagaccctctagtgtctctgaaatccaaagtttcttggggctcgctggatattatcggcgctttgtaccaaatttt

SEQ ID NO: 121413 - DNA, 639 bp, Zea Mays
cgaagatcgaactgctagggacctccagccagggaaaaggatcatgttctcgggggtggttcggagctgggtagccgcttagcctggtttcgtaccttaagcctacaccctccatcaccctagaacagttgtcatagtacctaggactgggtcccttaaggttcagacctcgaccagatgtaagggttggttcctaaaactctgatcggcaagctccatctacatgattcgaaaggttgaacacaacaaattagaatcctcgagggtatagtactaagtgttgatcttgagttgtgttcaagatcgatctctagcttgatcacggcttcagaagtgcatcacagtaggggtacaacagtaacaggcaagacgattaaccacccagtcacgcaactcgcgcgtgacatggcgagtgggtcgtatcatgtcccatcagagttgcccatgccaagagggatcatgatggctagtccttccgctacgccaccctagtaagttgcgtcatgtcaagtcaggtaaaaaccaaaacacgcctcaatctcccgcgtagagcaaggggtgggatgagcaagctcctagagagccgcaagctaggtaaccggctcataggccatttgctcagctccacgtccaaggttg

SEQ ID NO: 121414 - DNA, 398 bp, Zea Mays
ccccgcgcgccatcctctggtaagagctgtataatgtgatatggcgattagattgtgtatatggcgattagatatgattgtgtggcgattagattgtgatatggcgattagattgtgtatatggcgattgatatggcgccatcctccccgtcgtcctcacgccgccttcctacgatatgattgtgtatatggcgattagatatgattgtgtggcgatagtaaaatagtttctatataatgtgataatggatatggatgtcgattaaatgtgattgtcggccatcgtgccgttgatatatgtgtggatatcagccattgtgttgtcagttttatttgcaggttttggaaacctccccgtgcaggggaggtgctgccgaaattttttattgacaggcttg

SEQ ID NO: 121415 - DNA, 642 bp, Zea Mays
ctgctgagctcggaggacttggaatttcctcttgaggtgacctttttcttcttcccttgccctttccacttgtatggctttgtttgagaggtgcgagaagttgagaaaatcttggctggctaggatggtcttgagttctggtttgagccctttcaagaagcgggccatcttcttggcttctgtgctgacgtcatcaggcacgtagcgggctaattctgtgaatttgtgcacgtactcgctgacagatcttccaccctgagttagttcccgaaattcatcttccttgagctgatcgatcccttggggcacatggtgctctcggaaagcagtttcaaactctatccaggtagcatctctgatggcagcgttgaaggtatcccaccaagctagggccatcccggaaagttaatgaggagccaattgaacacgctgattctctgggcatccgatggcttctaacttcctttaaatcatgcgcagccagtcatcagcatcgaggggattgctggatccagcgaatgtgggaggcttgagcctcaggaaatctcccatcctgtcttgtggtcttccaccattcgggcgttgattctccagacttctagcgaggaccttaatgagtcgggtttggttggctagaacttg

SEQ ID NO: 121416 - DNA, 861 bp, Zea Mays
gaatttgtgtttagttggggagctagtgcggactcactctgaatggtgaatcgtggggatttgaagagaatgggatgtgagacggtggattatactagtttaggctcgcatcgtagtctagtgtagtgctaatcgtagtattgcctgaatagtgttacatcttgtgcgtgtgtttgagaaggaggagggtctgcccttttatagtttatgggtagaccttaccatagggacttgtttgctattcataagggcgctctgccgccccaggttgaggtagaattcccgatgccgtccatagggctgtgagtagtcgtactcctaatttggcgtatcgtcctacatgcctaccatacggggccctgtagcgagtccttcgttgatgtctttgtagaagtgcacagtgggtctcgtgggatagccttgtgactcgatcatgcacggcacaactccgcctatcatgatgagccctatatcaccagcttgcatacgtaggcatacgcttggcatggcgcattgttctgtcttccctgatatgcgaaccactgttggactcaagggttgatgtccccttgcagttgaggttgattgaccccacagggcagtgggggcacatctgaggtcgtacgtggaggcatctggttgtgtttgatagcaacctcctagcgctactttggtatgctgcatgtacctctagatgtgggttggtgacgacatgtcttgtcatagctgtcgtgggtcaacatcgtcgagtagggtcctctgcctcttagggttggctgattcggagttggtcgaccgccccacctcatagggttgtccgacgaggagttgatcatcccgccccacctcgcagggtttctt

SEQ ID NO: 121417 - DNA, 558 bp, Zea Mays
aaattattagggataaccttcaccatttgtttcctgtttttgtgttttgatggcaggcgacaaagaagaagcaaggatccctacagtcttcgatgaatgtgttagccgccaagatcttgaggcaaacaacaagctcctaaaggagcaaatggaggagacggtccacaagtcagtgcatgatgccttcattgacatgaaccttggcaagacttacgagaggctggatcgacgattgtccgagatcgtcgatagacttgctatgttggagacacaacaaccagcaccaccaccaccacctcctcgtccacgtcttctcgatgatgcggtgtttgatgcagaaggtaattatgataaagtggccaccagatatttgcgcctacgtcaccgtcttcatcaaaacacagaaggtatgccacaccgccagcaaggtaataacaatcgtgctcctgatgacccttatgctaagattaaatttactataccatctttttcgggtcattatgatgctgagggatatcttgattgggagatgacgatagaacagaaatttgttgccca

SEQ ID NO: 121418 - DNA, 430 bp, Zea Mays
gtcggtgtggtcactcatttccaaaagctcgctcgctcgctcgctcttcctctcctcatcacgagtcttttgaaaactatactactacttgcatggatcggcgcgtactgtgcatcaggatcatgctcgcgtagacgccttggcccattccatggccgtatgtccctaccctctcgtacgtacgtcccatgtgcattacctccctccccccaacttggttctgccgggggcaccacgtactccgactgtgcaactctgagatcgcactctgttgatctgttccggcggtcaggcatgctggtcttcttggttccaaagatgcggcggtctagacgtccactactcctgttgctcccaaactggtcgtcctcctcttcgttctcacacccctttctcgtttgcgtctttttgggctgacgctgtccctttt

SEQ ID NO: 121419 - DNA, 362 bp, Zea Mays
gccaacacgagaagctgtcgtaaaaagaaaaacacagagaagccaccaggccaccacgcctccagccaggagagagagatgcacgcaggaccgaacggacgaacagttccaagcgccaaagccatgagagaagtccaagcccgccacaagccacgcacaatagaggaggacctagcagcttccacacaacagttcgcacgtgcaacatcagccagcatccgcattcacctaacaacatttcccctacaaaaccccggatcatttgctttcagtgcttactggaaaatctgatggttattccggatgacgaagtcgtgaaccatacgcttactatgcttaccagaagatcggatggttattcg

SEQ ID NO: 121420 - DNA, 303 bp, Zea Mays
aaatgattgacgaaatagtgaagaaattcgaaatatatctccatcatcttactccaaatgcaatagttaggctcagtgtttatatatgggcccttcgaagtcagggtgtaagcgcaaatgacgaaggttgaaccgggtaatggacgccatgggcttcgaatatcctgactatgaaaaatttgaagaagaagctggaggagtaaaaaagaatagggttgttagtattttgaaaagacaagcaatgaggtcaattgaagaggacaaaaagaaaactgtatcaaagaaacaaaagattagagaaga

SEQ ID NO: 121421 - DNA, 597 bp, Zea Mays
cgggaagcttcgaatgtgcatagactagacgagccttaataaagcttgtcccaaggacccatatccacttccacgcatagatcaaatcatggactctactttcgggtgcgaccttttgtccttcttagatgtttactctgggttccatcagatccaaatggctagggaagatagggagcataccgcttttgtaatagtggatgggctttactcctatgttgtaatgccctacggtctgagaaacgccttgtcgacatttgtacgggcgatgagtaagaccttccgggacctgattagggacagagtagaggtattcgtcgatgacatcatggtcaagactaagagagggtcgaccttagtggaagacttaaccctggtcttcgacaagctgcgggcaacacgcacaaagctaaacccagacaagtgcgtctttggtgtctccgctgggaagttgctgggattcctggtttcgcaccggggcattgaagcaaacctggagaagatcaaagtgattcaggcgatgaggcctccggcccgtatcaaggacgtccagaagcttatggggtcattatccgcccttagccgcttcatttcaag

SEQ ID NO: 121422 - DNA, 363 bp, Zea Mays
gagaaaacacggacaacaacaatagcggaaggagataaggctaggtggaatcactgatgtgcacgagccgactgtcggtaccgactagccaagctctaacatcaatcgatttggccagctgatcggttggactgttgactccttagtccagtaggtaccaatcacattggagctgaaccgatcgttacctacccacgcgttggagaaacggttggaccgaccgcctatagccactatcacgttctgattggtctatatcgttttcaagcccaacaagttcaaaaaatctaaaatttccaaaaatccaatctataaatagatggagtgtttaggttcattcacacatctaactcttcaatttgc

SEQ ID NO: 121423 - DNA, 364 bp, Zea Mays
ggttattagtgcgagtgcgactcgatccggtgatgctcataagcgtttgccgtcgaggcggcggctcgctccgtgttcgttggtgatgtcgaatcgttggttgctgcctgtggttttgttcgtgcggtcgtgccatacacaactcgttcgattaaattcgctctcgggcttatcaattgggagagtctgttcatgcggatctctgttgctgatcagtagcaggtggagtctttgtgcttcgagccttcgacgcttccaatgcacggttgcctatgaagctatgctcgtcgaccctatttgttcctgtgatctgaatttctgttttgctgaaactcaatctccctatgaaagcagcagtacttgc

SEQ ID NO: 121424 - DNA, 464 bp, Zea Mays
ttccacaataatcaataatccaactggctgctatttaaatagacctcaatccaccgatgcacagcgccacagcccaacccaaacctcaacagagacatggttttcggttcttcaagcaaaagaaagcgtgcggatgaaaaataagatgatgatgatgtggggctgcggctaatggtatgagacatccacttctagatgaagttaatattattggtgttccgagtggaaaatgttggtggaacaaaggagtggcagtgtaaacattgcaagaaatcgtacaaaggtagtttaactagagttcgtgttcatttgcttagtccattacctggtaaaaagggacagattgcacgttgtatgtcattgcaaaacaatcccaacaagagcaaagctttgcgggaaaaggtgaaataagctgatagtaaaggatgtcatatgagatcaacatcagggacgtccactccgaa

SEQ ID NO: 121425 - DNA, 346 bp, Zea Mays
agctgggctacttcagtgaagcaaaaaaggagctgattcgttttggcggagaggaaattactccgaagccggaaaagaatgaggttgtattgttcaaaagcttctttaaagcagggttaatatttcctttgaatgggatgattgctgatgttttgaagaagtttggggtttaccttcatcagctgacccctaatgctatcgttagattaagcgtttatatttgggcccttcgtagccagaaagtggaaccattcggtgagggtttctgccgagttcatgaattacactaccagactaaagccagaggagatggtctacatgagaattttggctgctacaactttgc

SEQ ID NO: 121426 - DNA, 324 bp, Zea Mays
cgtgtacagtgcatggttgtttataggtaaccaggcgggtaggtgggtccccaactacagttatacccccggttacctgctacatttccccgcaacgagatcgttacaatgtggtgaagtacagtaacttagacacactctggaatctaccccagaagctttgttcggttgataggggttaaatccacaagggtatcctatccagggagggattgagtggatccctcccatgacattcaatccctttggggagggggtttaatccctctccctctctaattcaaatattggaaaccatgtgttcggttaatgcagggattgcaa

SEQ ID NO: 121427 - DNA, 274 bp, Zea Mays
tgtttttctaggattcacatgcactatacgcgcttggtagaatgcttaaggcattcatctctttcatgaacaaaacacgagcaaatttatttttcagatcaataggcggacaattaagcccactaactaactaacttcgtagcagtcataactaatacactaacaggccctagaattgttcagattcatccaaattataaaagtcagaagacaaagcgtcactatgacctttttataacaaataccagaggcactgcttcattttgctttgtgg

SEQ ID NO: 121428 - DNA, 271 bp, Zea Mays
tgtcaataatgcctttattcatgggcatctgtctgaaactgttcattgtgctcggcctgcgggatttgaggactccacacctcctgactatgtttgctgactcaatcgctcactgtatggtcttaagcaggctccttgtgcttggtacagtcggtttgcttctcatctactgcaacttggatttgtcgaggccaagtcagatatgtccctctttatgtatcacaaagggaccgacatgatgtatccgcttctttatgtggatgatattgtg

SEQ ID NO: 121429 - DNA, 724 bp, Zea Mays
cgggggaattttagtcgggttgctactactgggatttggttgagatgacatgaccaaggacatgtctagatatcgttcatgttagagctttttattccttttgattgatttctttatgtttattttcaaggtaccatgcatactggtacatgtcagtagccctcgagccatcggctaagtcgtgataattgatcgagggcttttttatgggtcatattaaatctatagcctttatttccatatactagtgtttttatctagattttttcatgggtcattttatgagtgcatttttttaaacaaatctcctctccttttctagagggtagattcatcgggcgcacgcaatgtgtctagtggacgtagcccccgggctcctaggtgattttgtaaaagtgagttagggttcaaactagcgatactcttatcttctctagaaggcagactcatcgagcgtgcaacacgtccagtggacgtagccttgagccctcagctaattttgtaaaaaattaattgagaattgaaactagtctttaattgtgattggttatttagagggcatggactttgaacccttaagtggcctttctttacattcttggattccacttatgcttgctagaccttcccttagggtcagttgggtgtatttggcacgtagacctctaggcccctaagtcggtgcattggatggattagaagtcatgaaaaccctcttattgga

SEQ ID NO: 121430 - DNA, 588 bp, Zea Mays
atgccccacgcaggtaaagacaaaggtaacaggatacaaacattctccctattctttatagattcttcgatacttatttccttcctgcccttcttccatatatcagataagaattttttagtccactttgaagcctcgttggtcgatattcggacgtggtcagcagaaactctaaaatcagggtcggtacaaaccttcagatgattgcacccgactttcagcaaaactgaagcagtgcttcgggcgcctatccatgcgcaatagtactcttgtgctgagagaacgattttataagcacgagtttcactgagcacccaccgcattaaaccctccaagtcaccatctgaaaattcttatctttagatgaagctccggcagaggagaaggtcttcaataattcattatagcatctgttgctgagggtgtacagtttgccaccatgattcaatagttttcattaagttgtctcacatgattcacttcatctttgagatcatctattctcacctgagcggtgtcaaggttaactgctgcttcggcagttcggcagatgcttgcattatcttcatcgtttcagcttcatattcc

SEQ ID NO: 121431 - DNA, 567 bp, Zea Mays
atgtcggggaggaagaagggtgttagccattaatgttaggattggtggggcctacgccggttgaagtcgcgccgccgtagggagacctgtgcgccactttggctctggccggaggtagatgatgccctgagcaccattggattgagtatgggcgtgtaggattagatggtgcggtgagtgatggcttgccgtcgtggatgattaggcgtcatcgcgtcgtcacagttctcgaccggagttgaggagagagagtgacgagggtagaagaagcgctctgcacgggagcaccgccgccttgtgcctgtgtgctggcgggtggtgaagatactgtcctagccgttgctgccgtgatgggcggttgggaggaatgggcgctagaaaccgtagggattgaatccaaaggccaggcgtggatcgcgattcataaaaccttaaccgtcgatctcagatcttgcgatccttaatgcgtaccggttcagataagtggcagtctaatctggaccgcagggagtagatcggacggcccgagatgcttcataccctttcgcgaatgcatatttttataag

SEQ ID NO: 121432 - DNA, 707 bp, Zea Mays
cacctaccgaggggaagaaaaagaaaaagagatggcttcggcgagtgtcgtgtttggaccaggatgctggcccttctgctcctgctgctgaagaagtaccggtggaactctttactggagctgatcccaatgggtgtgaccctgctgatgctgatctcaatgggtgtgaccctgccagagttgaacccaatgggtgtgaccctgttgatgctgatcccaatgggtgtgaccctgccagagctgatcccaatgggtgtgtccctatgccgtttattgtccgtattgttgacgaggacgaagaagaagaagaggaagtcccattaattcggaagaacagtcgatgttatagagtcagtggggggagtagcgatattcgttctccgactctgtctgctcttgttggtctgcaagaattatccatagcaaattttgatcaagctctcgaggatgttgttctggaagatctgctgtcagagccaactgatggtgatatgatggatgtctgctctgacactccagatgtgggattagaggtatcccgggcagcgtctcgtgcatcgtcgaccttggaaggcggtcttcggagccaagaggttggtcaaggtcgctcaattcccatggaggtgattgagaatcctttagccttagaggtggctgttgaagagaacccagtcctcaggggtggtgttggtggttgcccagccccc

SEQ ID NO: 121433 - DNA, 1105 bp, Zea Mays
aacatcggtgtacagataagcagggtacattctatcttcaaaggctgaatgttcttaaaaacaaagtcaacaacaacagttcaacggtcaagcctctgttcttcaacgcgtatatctcagcaagcaataccttggactctacaagctccgagtctgtcaggacctctgtccagctaggcgttcggacgtcgggttgtctccccgattgagtgggaagcaatttgttatgattctccatggtgaaccatttgaagagccatcccttgatactatctttcaaaggaatatcaagatattcattcttcatgccccggtgaagttccaaactagcacctccaacaagctgatgcttacctccggccatcccgggccgacaatggtaaaggtacttccaaagcccaaattgtgggggaattccaaggaaagcttcgcataggtggacaaacacagcaacttgaagcacaaaattgggatttagatgcgtaagatttagagagtaaaattcaagaaggtcgcgaaagaagggagaaattggcaaggctagtcctcggataagaaaaggtacgaaaataaccgcctcgtgcgtatcctatgtggggacagaaactccccgctagatccaccaggaacatagttccttaggcggtacaacaccaatttcaacaagatgtaagagatcatcttcataaacaacagagacatgattatcagagaaagggagttggctatcaggatcaatcggggggatgactggcgtggtagcattctgtttcctcttcctgggcgccatcacgatccttcaagcagcgtggctcaagaacaaaacgcaaaaagatgtgggagctcaggaagctagaaagcgacggaggaaaaataagaactagggttcaacggccaagaaaacattgacaagaatttaggttggcacactgagtcgggcatagaattacaggttgtgtggctcggacgagttttaagcatagcaaagtaaaggggctcggtcagtatctctagaaagctaagactcgtcaaccaggtgctttgggatcaaactgtcaggtaaaaggacagagtgcacaacaacgaaatggcatcgaacaagctt

SEQ ID NO: 121434 - DNA, 581 bp, Zea Mays
ggcggaattctggttctttcgcttgggcgccatctcaaatctcgccggtgaactgagcggaagcgagatcaaagggaaacagaggaggtctggaagcggaaagtaaggctagggctcagaaagcagaggcgtgcggggcacggtacaaatggggttttcccaggccaagcaccaattctaaaagtgcctagtcatcactcggctgttacttctaaaacgccgacgtggctcgatataactcaactgttatttctaaaacgccgacgtcaccggtcttcactcggctattactcctaaaacgccgacgtggctcgatataactcagctgttatttctaaaacgctgacgtcactggtcttcactcggctgttatttctaaaacgccgacatggctcagtataactcggccattacttctaaaacgccgacgtcactcgtaatcactcggtcgttatatctaaaacgctgagatggctcaaaagcactcggttactctaaacacaaatacagtcgatcagctaattgcaaaggaaacggaggaaaaacaagaaacacgcacaaaacgaggagaagtcttctgc

SEQ ID NO: 121435 - DNA, 413 bp, Zea Mays
gctacccctccctctccgctcgaatcgctcgctttggctgggtgctttgttaatcgtttcgttttttcgggggtgggggtgggatttgctggtgtgcttatgatacgaacagtttggattagaggatgcgaggctttgtgttttaggggaggttttgggattgattgtgtcgggaggagtacgaaattttgttttcttatcggcggatgttggtggtgaaggtccatttcaaatttggaaccttcgggtgactgggatttggagcttgtaggataggatttcgtcttctcgggttggtggtcctggtttctgttttagtgatgatggtggtgaaggtccagttcaaatttcgcattcggataactgagatgtggagcttgtaggatagggactttgtcctctcgatgttgtgc

SEQ ID NO: 121436 - DNA, 434 bp, Zea Mays
ctcgacgatcctccctcgtcggtaagtcacgcggttctagaatggtaagctcagtttggacatcaatactcggtgatggccggtaagctttgagccttcgtcgacgctctaagcctagccctgtctataatcctcccctgattctttgctcccctcctcggctgctacctcctaccatctgttattccttatcctcatcgccatcggcgactccagtgcttcagttgtgtttggtaagtccctagatgtttgttctttagatcgggtgatgtttctttggttctggattctggtgaatctagtggagatgcttgtcgatctggtgatgttattagtataaactccagtgtcgcagccgtcgaggagtcggtctcgccatcctaaccctaaatcccttatcctttgttccttccaaattcttggctccctcctcg

SEQ ID NO: 121437 - DNA, 463 bp, Zea Mays
ggagaatatacatcagctagtgaagaggaagctaaagcaggaaatgaagatgacattgataaatctgaagaacatacgggatgtgaatttgagcatggcactactcttgtggttacacaaatcttgagtgttcaaatgaaagaagctgaaattggacagcgacataatctttttcaaacacgagcaaaagtgcaagacaaagtagtaaagatgaccattgatggagggagctgccataatcttgcaagtcgtgagatggttgaaaagcttggtttgaagttgcagcgacaccctcatccatatcatgtccaatggttgaatgaatcaagagatatcaagattggttataaggtgaaagttccattcaagattggagagtatgttgacacagtggagtgcgatgttgcacccatgtctgtgtgtgcaatatgaccgatattctcatcattgtggaataacaaat

SEQ ID NO: 121438 - DNA, 399 bp, Zea Mays
atgtgtgatgtttgtcaaagagttaaggctgaacaccagagaccagctggactactgcacccacttaagatacccgagtggaagtgggaagagattggtatggacttcattactggattgcctcgcacccagaaaggatatgatgctatatgggtgattgtggatagattgactaaagtggctcacttcaattcctgtcaagactacttataaaggctctcaactggcagagttatatatggctcggattgtgtgtttacacgttgtaccaaagaagatcattttggatagaggatcatagtttacctccagattttggaaaagttttcatgagaatatggatacggagttgaattttagttcgccctacctcaaactgatggacagactgaaagatct

SEQ ID NO: 121439 - DNA, 313 bp, Zea Mays
acacatgaaatgccaatgcttatgatgttatgctcaagttttagtgacagtaacaccaaaggtgttacatccttccccccataaaagaatctcgtcccgagattaaaagtcctagggtaagtaatggaaaaggaaatgcttcacccttttatttccttattcttggtacaaggcaggggtggtatggggctcactcctttattacaacaattgtatacactttacaaattacatgaggctaaaaggtctgggaaattcttttctaaaaagtctcgagtttcccatgtagcctcatcttctgaatgctggttcc

SEQ ID NO: 121440 - DNA, 366 bp, Zea Mays
gttgtgctgcttgctgcgtgctgctgcttgctgctgcttgctaggagttgtgctatataaaaggtttagttcttgcatagcatttggaatctacttagagagcaactacatgattaaccaagttactgtacctgtagccactgcagttgtagtcttccacttatggttaaccaagttattgtagctttactaattaattgttttgaacacttccaacaggttcgttgtcatcgcgatatcgttgtcatgataaccatcacttgcatcaatggaggagatggaggggtacacggtggaccaaaaaagcttccactcatttgctagtgttgagtagtttattacctatgttatcacaatccaagctag

SEQ ID NO: 121441 - DNA, 387 bp, Zea Mays
cctatgtaagttttgaacccgattttctttaaaactatttcaatttatttctttttgttaatagagatagtcagtgctcctaccattatacattaaaaagaaggtagtcttacgtaccgtaccagacagtgtatgcatttgaaagtttgaataaagaatgaagagacccagttgcagatcgcactctcgttggaggctgtgtttgtggtacagacgagacgacagatggattggatggatggtatgaacttgcttggaatggtacggacgtacgattgttggaagaagagaggcaaggtggtggtgatgctgcagtgccgcgcaagcagaaaaaatatatgacaccgaaccggaccgggtccgttcttttgattctttggatcggtc

SEQ ID NO: 121442 - DNA, 1009 bp, Zea Mays
taagcgtgagcatgtcgcaccatcttaagtcattgtcgacttaagccgattgctccgttcgtagggtataatggtcaccctgagttaagtaagcgtgagcatgtcgcaccgtcttaagtcattgccgacttaagccgattgctccgttcgtagggtatagtggtcaccttgagttaagtaagcgtgagcatgtcacaccgtcttaagtcattgctgacttaagccgattgctccgtttgttgggtatagtggtcaccctgagttaagtaaacgcgcagaaaacaattcgagtgcctttgagaatgaagtcattttattgatggtgtatctcccaattacagaatacaatgtcgtcccaatagcttttgaaatctagctaggggtaaaacttcctgagatgctctatattccacaagttccctatttccgtgccatccatttgagtaaggtgatatgatccgggccgggtgacttctgttactatgaatggtccttcccatagtggtgacaatttgtgtcgcccttcccccgttagaattcggcggaggacaagatctcccactgcaaaggatcgatgtcgtacggtcttatcatgatagcgcctcagagtctgttggtacctggctgtctgaattactgtattcaatcgttcttcttctagtatatcaacatcctccagtctggtagcttcagcttcagctatgttttcgaagatcaatcttggtgccccaaacttgagatcaacaggtagaactgcctccgaaccttaaaccatgaagaagggagtgtttccatgcaaggctcggctgggttgagttcttaagctccagaccacatacgacaactctctgatccactttcctgcgaacttttcattcttgtcgaagactttctttctgagtgcttctaatatcattccgttggctctttctacttgcccgttggctcttgggtgtgctaccgatgcatatttgatctgaatgcttttttgttcgcagaaatcaaagaa

SEQ ID NO: 121443 - DNA, 517 bp, Zea Mays
gcaggagttatatcagctgttcaaaaagtacgcccggtcagaagagctccaccaacggaaaatcgagtcacagcgaaagcccaaggacactctgtagtccagcaggacatgggtcaggccctggcaatcagactcaggccggcaaaaccgcacccagtcccaagtgcacaacatcaccaattagtagcagactggggacactgctcgttgtcacgaataccctccgcagcaaggccacgacagtaacgcaaccagaggcaggggtagaggtcgaggcccgtagaagcgaaggttctattgtcttttccatggcgaagactcggcacacccaaccagggattgccctaaaaccaaagccacaaaggatcgaatgtccagaaaccaatggctaacaactaaagagttatcacccacacctaccatccccatcagtacaaccagcaccaattccataatgaacatttccatactcaccagcaaaaccacaatatataccagcaacaccaagagatcctag

SEQ ID NO: 121444 - DNA, 938 bp, Zea Mays
gcgatctgtactaccctgatccgtccgttttggcggctacgcaaagtgttcccggttacttttactatcaaagtacaatagtactggccgacattgatgcgattctcccgcccgtgcttgagtccctactactacctatatggggcgaaccgcaggacgatccgcccggccccatgaataggatgaatacgatgcaccatttttaatatagcaaaagaaatacaagtggacggtcctaggagaccacctatagtatataggaataaaactgacacacaacacaacaaacagtacacggcaaagaaaaaacaggcgtccaccagccaaactctcttggtctcttcgctttgaactttgcttttgatcttttgaatgagatccagtacctaccgaccactttttagctgaaatgtgcatggatttttttatgtttccaaatccctcaatctaggctagatccattgccactagactatatctaccaccatctcactgcgtaccagtctgtatctactagcctcagcctttatctaccttaacttttcactgttcagcctttgaagttagcctatacccacatcagtgctcatagtcgtccacgtggtatgatcctccacactcattctcaatgattatattgtgcataacgatacatgcatacatgatcacaccgagtactagttggaagaaagagcgacttagggttccgagaatatgaaattgatccttgacgaccctaaatctcttctccacgttctttcatgcctcatcttgtacgtagcgaacatccattgctttgagtctatgagagtgaaacagtcttcacgaacaccgcccatcgagggtttatggcaccagcgaggtagtatccctggttgtacgtacttgtagacattcaccgtggagttcacgtttggtgcttctcccttaagcacgtc

SEQ ID NO: 121445 - DNA, 303 bp, Zea Mays
ggcacacgatccaaaagctttgctagttccattctttatcaagcatggcacctacataaaaatgtgactgacatggtagtactggagttggtaaggtgtgcgttgagaacatataaaatagtgatgcaaagaagatgcaaaatgaactgcagtcataaaattcctgtgaactgcagtcataaacatgtgactgacatggtagtactggagtcaggcgctataaaattctctgatccagcttcaattttttatgtttgaccattgatcctcatagtactggagttctacctagcagtcataaac

SEQ ID NO: 121446 - DNA, 381 bp, Zea Mays
caaaatggaagcacacgtcttttttccacccatttctcttcctagacaacatactctaagtgacgcagctcaataggataataattatcaacatcagcccacaaacattgcaattcctggacatactctaccactgatcgctccccctgtttgatattatggaggcggtcttcagtcttcaccatcaacataacatttccagctcttgagtacatttcttcaagtgctttacacatttctgcagcacttacaattgtatcaattgtactagcaattgttggaaacatagaactcaacatccatactaccatcaaatagtttatagcatcccagcatttccactcagcacttgacttgtctttgagctcaacaacaactcca

SEQ ID NO: 121447 - DNA, 507 bp, Zea Mays
caagagcaagtcatcgcaaccttcgtagacatattgttgttgtttggtttgtgggggcaagaactataagcacaaccctgaaatacatatacaagctaggagctttacactggcagagaaaaggatgtgatcatgcaatataatggcaaatctgatggtttttattagagtgggtgtttctttagtagcttgaacttggttacagttgtagcaaatctgacaggcactaagtttgacttcttggcctactcgtcggcgctcaagcatttggtacttggtcaggtctacttattacacggttctttcttgttcaagtatccttgtcttcatggtggcaacatgattattctggtcaccatgggaaactatactctttacatatttggatattctattgttgttgtacatttgttccatggcatacattttcatatgtgtattaacaattgcatatgcatttggcaggatgacttaataaggccatgtcatagcgaaatactatttctt

SEQ ID NO: 121448 - DNA, 277 bp, Zea Mays
tatctcctttcattgcctagtgcaagatatatatagagatagggggttcagctttgagtaaatggctgcatgcgcatgctctagtggatttagtggctggttcacgcatctttttagcttctggcagcagttactaaaatgagcataactccttattggaacgtccaaataatgaaccgtttgatgggctgaaaagtagacctgaaggcgcttccatccacttatagaacgccgtctaactccttgtattctgtccgcagtgatgcttggaattcgt

SEQ ID NO: 121449 - DNA, 467 bp, Zea Mays
caaaaacttgggcccgctggcaagcttcttaggctttaggtggactgcgggttgatttctaaaataggcagagactctttagtaaattgtactagacaaagcggtatgggaaatttctagccgtcggatcatcagccagaggtcaggattaaacttgccctctcccgaatcggtacgcaatataggccctacgatcacagatcgacatccatgattcgtaataccggaatttaatcttacacgtacactcgtcgatcaatgaccgaaatagccccggactgaaccggtaccctcttctaatccgagccatttaatcaatatcggacgataactgtacgtcttcctcgcttggtcacccaaagcggcgacgcccaatggccccctagcggcgatcacgccggcggcaaccgacctgggcatcaaagttgcactagagggactatcggctctatgccctgccctcacat

SEQ ID NO: 121450 - DNA, 467 bp, Zea Mays
gccagatgacaagaatacagccgagcacatcgcaagacaatcagctcactatacactcattggggaaacactatacagaaggggtgcgtcaggagtcctcatgaaatgcattctctcagctactggaaagcaacttctggatgaggtccatgctgggcaatgcggagtacacgcagcatccagaaccctagttgggaaggttttcaggtcaggtttctactggccaacagcgaaaagtgacgcagccgagttagtacagaggtgcaaagcctgccagtacttgtcaaaacagcagcatctaccggcacagcagctgcagactatacccataacttggtcgttcgcgtgctggggattagatatgattggacctttcaagaaagcccaaggaggatacactcatgtactggtggctatcgacaaattcactaaatggatagaattcaagcccattgcttctttaactt

SEQ ID NO: 121451 - DNA, 437 bp, Zea Mays
ggggtaagaggatgaacacattccgagcaaacgacggcgaggacgaccgaattaaggctggggaaaggttcacgggtgcaccagggtctacgaacattctttgatttaggtagaacaacacccgaagagcgggtcgacggtgagggggggggttacggcggcgttttacagagcaaccgcacgttccggtgaaaggtttcggcttaagttcgattggttggtactgggagcaatagggggctaatagcaagcaagaacatgaaacaattgggtaagtactcactcgaggaaagctggccacggagatgttcttcgcggcggagttaagaacaagggagcgagggatttggggactgcgtgggttttctggtgatcttgagtcgggcgcttagttgctgagatgtgggatacagtgaagaagcaacgctcgccctcaa

SEQ ID NO: 121452 - DNA, 307 bp, Zea Mays
taaattatggttgggtgatatattaggtggtgtttggtttcagccacggaggggtaacgttaatggaatcagatgacactgtgatttgattcagcgtaagcgaaaacgtattttgtttggttcacgtcactaaccaaagtcaaatagctgaaatcggattacagagccaaaggagcggtaacaaaagtgtatgtcccgtatctgattactttgtatccgattacacaggcggccgacaccaaacaaaatcagatggaaacacttacagctgaaatcggaatacgttacaattacacggaccaaacaa

SEQ ID NO: 121453 - DNA, 536 bp, Zea Mays
ggctcaagcctcccacattcactggatctagcaatcccctcgatgctgatgattggctgcgcacgattaaaaggaagttagaagccatcggatgcccggagaatcagcgtgttcaattagctgctcatcaactttccgggatggccctagcttggtgggataccttcaacgctgccatcaaagatgctacctgggcagagtttgaaactgccttccgagagcaccatgtgccctaagggattgttcagctcaaggaagatgaattccaggaactaactcaagatggaagatctatcagtgaatacgtgcacaaattcaccgaattggcccgctacacgccggatgacgtcagcaccgaagccaagaagatggcccgctttttgaaggggctcagaccagaactcaagaccatcctagccagccaagatttcctcagcttctcgcacctctcaaacaaagccatacaagtggaaagggcaagggaagaagaaaaaggtcacctcaagaggaaattccaagtcctccgagctcagcag

SEQ ID NO: 121454 - DNA, 337 bp, Zea Mays
aggactaacacacgtggctttcatgctcaagatccacaccagccacgacttagctcaaatatctgctttgtccagttattcaaatagagagtagagcagataagggctcattgtccacaaatatccaaccaatccactgaatacagacaggagtagagacagacaaaaactctactgtggtaggctcaaacaggtgcaaaactgatatttttctgcagagggggactgaacctcgagccccatattgcccaccccaagtctatctcagtttgtgcacataagtggaggacagcagggatgtgaagatctttcttcagatttttgtagcaactcccag

SEQ ID NO: 121455 - DNA, 627 bp, Zea Mays
ttatgtaagcgtgagcatgtcgcatcgacttaagacgttttcgatttaagacgattgctctgttggtagggtatagtaatcaccctaagttatgtaagcgtgagcatgtcgcaccgacttaagacgttttcgacttaagtcgattgctccgttggtagggtatagtaatcaccctaagttatgtaagcatgagcatgtcacacagacttaagacgtttctgacttaagccgattgctccgttggtagggtatagtaatcaccctaagttacgtgaacgtgagcatgtcgcactgacttaagacgtttccgacttaagccgattgatctattctagggagtccaaaggggtccttcggacaatgcttattgagattggtatagtcaacgcacatgcgccaatcaactttattcttttttagtacaagaacaggatttgccagccattcaggatgtagtacttctctaatgaatcttcccgatgccaggcgagctaattccgcccgaatggtttctcttttgtcaggcgtgaaatggcgtagcttctgccagatcggccttgcctgagggtacactttgagtttgtgctcagccagctctctcgggactcccggcatgtccgcaggttg

SEQ ID NO: 121456 - DNA, 701 bp, Zea Mays
aatttcttgtcttcgctccaacgctgccccttggaacgtccccgctgtctgatcctaggattgtcgtggtatgcccaccacggctggttcgggtccaatctgttctagacgcgcaaggctggcaggaggttgacaaccgccagtcacgtaagcagcacccgtgggagttgcggggccctcgtcgttagttcctactgatctccgagggctctgtttcaattgcttctcgtcggagcattgtgctgccgtatgcaacaagaagactcgctacttcaagtgtcgaagacttggttatcgctcctattggtgccccgacattggcagagctgtatggcgccgaaagacatgggcagtccatgtgcccatcctgctaataaggctgcacatgagactcccttggtggtggttgacgacatcactgtgggtgacgcgacgttcattgctttgggtagtgatgaaggcgggatcggcaccctgaaggcccatggcaaacgacgccgacgtcgtgtcaaaaggaagtgcattgttggccctgacgctgatggcagtggacataccccagcgccagtgattgctgctgtcacgatggagcctatgcatgctgctggaccccccatcgacctcttcgcatcattgatcgctcctaaaggatcattctgtttgtctaggtcgtgggtgatccatcagctgtatcggtctac

SEQ ID NO: 121457 - DNA, 385 bp, Zea Mays
cttatttcgcgaggcatagagatcgccctaagatgagtaatcgcaaacgtgcttgtgttgggtcgagtagacgtgagcgcgtcgtgccgatttaagtcattaccgacttaaaccgactgctctgttagtagggtatagtggtcaccctgaattacgcgtgagcatgtcacaccgccttaagtcatcgccaacttaagttgattgctccgttagtagggtatagtggtcaccctgagttaagtaagcgtgagcatgtcacaccgccttaagtcgtcgcagacttaagtcgattgctccattagtagggtatagtggtcaccctgagttaagtaagcgtgagcatgtcacaccgccttaagtcgtcgctgacttaagtcgattgctc

SEQ ID NO: 121458 - DNA, 411 bp, Zea Mays
gttggagatgctcttataaaactgaaatcacacttcacaaaaaatgggcatattctgcagaaagctcagctagcctagtaaaaatcagataaacaagtcattcactaacagaggatcccaaaatttccttgtgtgtgtttatgcgtgaagatgcacggcagacctagaggctgcaattcctgcctgcgggcaagattcatgagcagccatgatgaactgtggtgaagcaaataaggcaccttcaggctaaagtttctcttggcatgtcatggtggtggcgaaggctgaagggccaacctctacagccacacgttcccagtcttttttagcaggcccaaagtagctgagcatcatatgagagatgagatgggatgcatgcccccagaaaacaagaattggaccctacccttt

SEQ ID NO: 121459 - DNA, 361 bp, Zea Mays
caagtggaaaaacaatgaaaatgccagaaattctaagcccaccagcagaggcaaaattgccgatggtgcaaaaggctcctgtcgcaactcccaagaggaggaggatggctagctgctggacgccgtcttggagaccacaaaggccttgagccctggtcctattaagaaaactgctgaagctgccaaagtccaagccgaagccgaagctgggccttcagcgcccattgagacgaaggatgtcgcgcctgaagataaagctgatcaacaaacttcagataccggcatgacagcacgacaagacatggcagaaaaagcaaaatcttctgtccccgaagccatagatgaagatattgattacatt

SEQ ID NO: 121460 - DNA, 704 bp, Zea Mays
actcaagggtccagtgtagaattcaataacaagcgatacaagaaagatcactaccaaagggtcaatcatgtcgctcccactagctcggtggcccagtggtcccatgtcctacttatctttgatgcaaggggagtcgatctttgcagtgcgccccatgcacatgcgctggtaataaactgcaatgtcgctgggtgggacctgcataaggtcctcatcgacaatggaagtcaagcgaacatcatattcttccatttctttgaccgcaagagcataaatcacagtttgctcttgctagccgacaatcccttttatgacattggagaaaaagaaacattcccgctggcaaaatagaactaccactgtcccttggcacaacccccaacaccaggagcgaataggtaaccttcgacatagtcgacatgatctacccatacaacgccatcatgagaagagagtccataaatacacttgagacaaccatccatggactctatctatgcatgaagattttagaccccaaggcgtaataaccatttatggggactagcaagttgcccgcaacatcaaaagagacttcgtccctagacaccacaacgtagatttcctttccaccgaaggtgaagaccccgagagcccttgcccaaaaaaagcaaagccaaacaaggcttagatacagagcaacaaggaggccaagaaaatcccac

SEQ ID NO: 121461 - DNA, 314 bp, Zea Mays
tgtgttggctgctactcagaagtcctatgtggcaaggagatattcctcagtaccttgtgagcattgcaagaagcacactcatcggtctgaaaattgttttgttaaatttccagagaagttggccgatttccgtacacgacaggcaggcagctcgtggtcgtggcaaaggttctgcacctagaggttcagttgctattgcatctacttcaccagctacagcctcgccatcgtcttgggctcttgactcaggggcctcctttcatgtgacatctgatcagacacaattagtctcttctacacctgtcacagaaaat

SEQ ID NO: 121462 - DNA, 392 bp, Zea Mays
gcgagatagagtcatgaggcgaagtcatcttctcctcagacccttagcgaacaggggtcgagcaggacgaaaagcatctatcccccacgcttggtggtccaatgagacaagattggtaccatgggggccaaacagattcaattgtttggatacttgcttcctcttgttgataccgcgtcgtgtcatacccgtggtattcgcccccaacaaaggtggagggtgtctcctagtcacgagcatgcgtgaaacaaaagactaggggtggtggctgccaggagaaaaggaaaaaaaagatagagacttctcccagacctaccatatgatagtccaaattgacaggtatcctaaaagctcatctagaatccaaaatccaaactagaaaagttaggaat

SEQ ID NO: 121463 - DNA, 403 bp, Zea Mays
tgccaggtccagttctccggccttgtgatgtcgttggatatttcggcatcggttccttcgtcggcgggactcccgctgaggaagttcctctccaggtatggttggttcgtcgttggagatggggggcgactctgcccttccaatgaagaggacgtcagggtagaatggaacagttgtcgtggcgaccttctttctgccctcctttgaggacgaaggtacagaaaggacagcttgccgcctttcaatctcattcgtttctttcttcctcgtgatctgtgtccattctcccgttggagaggtggacaacgaagttcttcgggttgacgagccctgggctcctagtttactgaaggtgatctttttctagggcgctggaggttgcgcctttttcctgctttgcccg

SEQ ID NO: 121464 - DNA, 621 bp, Zea Mays
ttatagctaatatatctttaatctgttttcaaatttatgtatgcccatagttgattagttagttggtgatttggatggttctggagtatttggcttgtagcatatctgtttttttaatgaaagagaaggtatggtggtgtgtttgggacaattacctgcctttcatgggtgaggattagtttgattcgcaaaattgggtctcttacaaccctatgcaagtgggggtctacattagtgattaaattggacaaaggtgagctgcaaaagtgaaattaaggttaagtaggtggattaatgcaggttaaattctaatgtcataaccttgtaaagcacacatcatggaaaccagacggcatcttgtattcttagttcatcctgcattcctgcatcacacacagctgaccaaacagaacactgacttgtatcttctcttgttcaaaccagtttgggttgaggctgtattttactggagtcactgctacaagtagaaattgaaagatagctattttatatagaagaacaggataggaaaccagaggtgcttgtaccaaataggaaatactactgatattaccgaagttacaattcacttgagtaatacataaattatccatgaagtta

SEQ ID NO: 121465 - DNA, 373 bp, Zea Mays
gaggaggcagagcgagccttccaagagttgaagcagcaccttgtgtccctaccaatactggtagctccggagccaggggagccactgtacttgtacattgcagcagctacaaaggcggtgagcatggtgctggtcgttgaaaggacggagcaacattcctaggggagtcaggaggttcccctaggagaaggtggtagtccaaccaccacggaccttgagggcctggggccacccataggggtcgggaccatacagaagccggtctactacgtcagcgaggtcctccatgaggcgaagaccaggtaccttaagacgcataagcttatctacgctgtgcttgttgcgtctaggaagctgcgccactatttccagg

SEQ ID NO: 121466 - DNA, 411 bp, Zea Mays
cagatggctattgatagcaaggaggcagattcactcgagactatcaaggtcgtgtcaaagtttccggatgtgttcccgaaagatttaccaggtatgccacctgagcggaaagttgagtttgccatagagcttcttcctggaaccgcccccatttctaaaagagcttatagggtatctggaccaaagttggttaaactcaagaagcagatagatgagttgtcagagaaaggttacatcaggccaagcacctcgccttggggcgcccctgtcctgttcgtggagaagaaggatggcaccaggaggatgtgcatcgattatcaagctctgaatgaggtcacaatcaacaacaagtaccccttgcctagaatagaatttctgtttgaccagctgagaggagccagcgtgttctca

SEQ ID NO: 121467 - DNA, 310 bp, Zea Mays
gcaggatgcactgcaatgctgcgacacctaccccgacactgcatcgacgactggggcgatttcagtcggcgcttcaccgccaacttccaatctctctccgacaaaccggcgtaggaatggagctcaaatccatcaagcgccgagagatgagactctccggtcatacctcaaaagatttcagaccatgaggaatcgtatccccgaggtcgcagaagcagcagtgatcgaggacttctaccggggatttaatgactcggccttcgtccgcaccatactgcagaaagcgtcgactacctccgagcaacttttc

SEQ ID NO: 121468 - DNA, 519 bp, Zea Mays
attgccccacccggcacagcgagacgaggcgagcgactgcgcacgtgtgtgtgggggatagatatccccgagccaccatgacttggttatgctctatgggccacttgcaaggcctccattaggtcgtttgagaagcacccagtgggccttaatcgggtgcaaccgaagacgatcgaaggagacgcatgtgtgggcgtggagtcttctaggatcgtgtccgcgcatgcagtgtacgtgcagacctcacgaagaccaactaactaccagtaaacgtggcatagctctagcggaagcatgtagatagatatcgtgttccaagttgtatggggtgatcccttcttagttagatataagctgagagggaacccctacgaaaaaaggtagaaccacataccatagtcatcctccaactctagaaaccctctataatccttaatatcactgagcaatatacatcccaaagcacactagacaaagggtattacgcgatcgagcagcccgaacatgtataattcgttg

SEQ ID NO: 121469 - DNA, 622 bp, Zea Mays
gactccggtgacgcgcgcctgtagatcctccgctctacaaccattcggtatttctgtacattggttattgccatttgcttcaagacatggcaagcagcagcaggagtgaagaaatcgaagtggttgatgctgaagcaaatttagagcagcagcaagatgacaagcaacaagatggagctgtcgagccagagaacttgacagaaggagcaagtgcacaacaacacggaaacaaacgaacaagatctgtggcaaattcatctacagatcaatcgcaaccaaactctcgcaagtccaaggtatggaaagacttcacgattatttcacgagaaggtgaatctgaagtggctgagtgcaagcactgtaagaaaaaatttgctgctaacactcagaatggaacatcttctatgctgaggcatgttaaaacaaaacatcccactactagagctgaaatgggcaattatttcttaaaaactgaaaaggatgatgatgggtcagttgcacttaaaaattataaggtggatttgcctgctgttagaactggaataactatgtttctgcttggaggtgcacatccatttacagtagtggaagaacacgacttcaaaaatatgcttagtttagc

SEQ ID NO: 121470 - DNA, 394 bp, Zea Mays
aaacttactgcatagttcgcagctcatacagcctaagttgaagatcttcggaaaaagcttgccgaagctaatgaaaactttgaacttgcaaaggcaaagcaagagataagtgaatggacaagtgcgaggttggaaaagaatgtgaaagaccttcatgaatcgaaggagagatattctaagaaatccttggattgtgctaagaaattgaaagatagttttgcaaaggtgggtgcatactcattggagcaaaaatttattagaggtgaccccaaaggaatcattgaatggatcggcgaagaagctaaggcttttgacgaaatacttagcgaccgtggggacttctgcgccttcgccggtgctcgaggggttgcagggattttgcagaaaaatggct

SEQ ID NO: 121471 - DNA, 398 bp, Zea Mays
tatagatagatataaaagtccttgcatttatgggttggcttggctaggatgatctatatcattatctggcgatcagccatataatcttcccgtaaccccttctagaacacaaaaggacagacaaggtgccttagaatggcattatcgagcgacagaaccagactatttccaccatgataagcaatctactaaagagccaaaatatgtcagcgatgttctaggcgaggcagtcgccaccatcatcttcctgctaatcagacacccaccaaggtcaatgacgacatgacaatgtatgtggcctaacatgggcataagttgagtgttcatttcctacgttctttcaggtgtgtggtgtacgtcaaggtgaggaagccacacctaaagaagcttgacaatca

SEQ ID NO: 121472 - DNA, 804 bp, Zea Mays
cccacgatgcctcctgtgttcgtgtatgtagagtacaaggatgggtatggagataagtgtggtgggacctgaattttggtggcgacaactgtaataccacaaagttagtaactgaaaataataatttgtaggtatagaaatacataaaggtaggacttgtgagaaaaaaataatttgtaatctttggaaaagcacattagggagtatctaaaaacactaacagaaaccaattttgaatatagaaggtttaactgagtagcaaacatgtagtgagatggtgtagaggaggcttaagtgggtttacttctgattttgccggtcaaagtttaagagtctaaccaagagtgtactaatgtatagacattgcatctcggtaccgaaaatgaaatcattagtaaacacattgcaacataggaaaaagtatcactatactaacatattttattatcctaatggacaaatgagtatggaaacacagatcttaaccaaattgattaagtgtgtacccgggtgactaaaaaataaagtgtgcatgcacgaactatcaacctggcaaaagaaaacccatgtcgtagcctacaatgagcaccagaaatttgcatagtcaaaacatgagaggagtctgatcttaacctaattgattaagtgtagaaccaaggtgactaaaaaataaagtgtgcatgcatgaactgtcaaccagacaaaagaaaaccaatactatagcctgcaatgagcaccaaaaatttcatcctcaaaccatgagaggagtttggatgcgcacatacaaattccatccatatgtac

SEQ ID NO: 121473 - DNA, 316 bp, Zea Mays
gttaatatctcaatattttgtgccttttctgttgtaaacgtctacaataagaacgtattgcgcttccttttccttacgggtgtgttgctactggttgatgcatttgttgatgagggattcattgttctaatgatgttctcataacctgtttttaaatgaccttcagttaattagttagtggataggccaagggaaacaaagagagggagaagtatacttcacttcatggttagttattcatcacgaaggagagagagaatagatggttttgttaggcacacacatcacacatgtgcatattatacatgcatatatg

SEQ ID NO: 121474 - DNA, 334 bp, Zea Mays
ggccaatttcgtcaaagaagatttcaacccgcaaagagcttctagttaggtttagcattttagcgttttgtttgtgtggcgtgctgggtttctagtgggctgttttgctagtgcttcttttcttttctttgccccctctcccctagtgttgtttttcctttccagtgtttgtaagtgtctctttctaataaatttttggccatggcaaagctcttgccgtgtcctttaaaaaaacaactgacggctgggcgtagggttgtagttttagaagaaccatgtcatcaacttaaaactagcgctttgttcgaaatctgtctatctgaatcttcatttg

SEQ ID NO: 121475 - DNA, 386 bp, Zea Mays
ctgagttatcagatttgagagattgaaaaatggaacccttaagagtgtagataatcaaaaaataatgacggtggatgcacccacaaattaaagccccacatgctgacatgtttttggtagtgcaataagcacccaaaacagatgaggcatatcacatcacatcacatcatgattcatggaaatctcatcaccaaggttggaaaatccaatccctaatccccatgaaagttaattaaagaaagaaagtaagaaaacatagtagtaggatggttgctcgaatgctcctaccttggattgtgctgacgaatcagctacacttgatgtcttggaaaatgacgctgaggttggtgcccctcagcatgggcggggtcacggtaaacatcgtc

SEQ ID NO: 121476 - DNA, 726 bp, Zea Mays
tattattatagtttctatgggtgcaggaatgaataccattcattatttgtagaaaggacaaattgatctcagtataaatcgtaccatataaaaaacgaacggtgtggatgtctttgtaattggaataagggatatgctaaatagaagaaatgatacaagaatgcataaagcggtacaaggaattttaatatgtatttagatttcataaatgggcaatagtaaaccagcttaccttttacagactttgatactacagaggctgcaagaatcacctgtgatacataaacaggaaaaagattcaatagtcgtattcttatggtatgaataccaagacaataaattatgctcatcaattatttaatcgtagctgccgtctacttttgctaaaagagagtacgtactctgcggaggaaaaagaaacaaaaataattcatcatagttgttgtctactttcgcttaattacttagagaaagggtagaggatggatcgggtgcaatgtgaagccataccatctaaaacaacaccttagtatctattgacaaaatatagtgatgacaagaaacaactaattccttttgttccagaaaatggtattgacacgcataagtataaaacctatctgtataatgttcgtgtacactccaacacctacctatgtatgaacatctcaactgactaaaccagcgtgaattcatcggttcaaaataaatcaggggcgctctgag

SEQ ID NO: 121477 - DNA, 351 bp, Zea Mays
atcttttgcaaccagggaccagagtctgtgcgaaaaatgatacatgcaaaaaaaagttgaaattgcgggattgaaatgcatgatcggataaatgaaattacgggaaaatctggacgccgtcaacagatttttaattgcgaaagatcactgttggacattaattgcgaaaggtcacaggcaggtgcgtgctgctaacgatgaaaggtttgacttcatctgatgacaagtctaccaatctcttagcaggaccatcagcagattctaatgtggctcagttaatgacgcacaggggggtcaagggctgaaaaggttgccggtaggacatggcaaaatgagctatctaggaattac

SEQ ID NO: 121478 - DNA, 326 bp, Zea Mays
cggccctataaacccggtctgatcataaatcgctcataatccaatgaggtcacttatgtaaacccggtccctggtgccctctgtggtccaacccagtaagagtctatcttataatcctagacattctcgggatctctatgcctcgagcatccggaaaaaagaggaagggttttgctcccaatctagctctaggtgcacatgatccattatcacatcctcggccaaggtacatttttctctttctacctccctcttgagtttcttagctccgttgttatcatgaaatctggattatgtgaccaactttgctacttagtttatatccc

SEQ ID NO: 121479 - DNA, 856 bp, Zea Mays
accattctatcacacaccatagtttcaccattaggcaccttcaccttaactagagaacaaaccacctctactaaccgcaactgatgcaccatgtgagcactgatgaaatttgatgaacttcctgagtcaatcagtatcactaaagtctgtttgctcatagtttcacttaccaccatgctattctcattatccctaccaaccatatcttgcaaggacactttgcaacacatttcttccttctcatcctcctgctccaattgttgcagaacttcatcaattaacactgtggaatcttcttcagtaactatgccatttagctgtgcttgttccctcttggtacagttagcaagatgaccaagttcaaacttatctccacaagcatagcacaacccatctagttttctaaactccctcacttgtctttctttggataaatcatcatctcctgtttgagcccttccttcatctctaaatccagtattcaacattttgtctcccacatatggccttgttaccttcatcttacccctctctagcacctcttgttcggtttgggccaacaaaatggctctatccaccgttgaaggcagttgtacctctaccacactttggatttcaaatttgaggcctctaacaaattgggtcacaaaatatgttccatcatattgtgggttgtgaactgtgacaccatatctggcctgctcaaactctaaaatataggcagcaagactttcaatttgtttgagtgacatcaatctccttaaagcctttggatatgcagtagctccgaacttagctattactgccccctcagactcctgccaacctccaattccgtttctcattttgtaactct

SEQ ID NO: 121480 - DNA, 627 bp, Zea Mays
tcatactgtgcatccagggtgagcaggtatgcagtgaggtacacgactgtagggtcgtcctcaagcagctgcttcccttccaatgcacgcatcctggccatccaaacaggacgatctctctgaaagggcagaaagaatctgagcggtgtgtcggccacttcttcttcatagatcttacacagggccctcaatgccttgcgagcgacgacttggcaggtgtctctgaatctgtgcccagcagcagtgacactccattccacatggcgcggactggatccaatgtatacagtcacgacacacttctctatgccatgctcgacgaattcacgaccatcatactctggctgactcctgattctgaggcgaactgtacatgctctcagcaacttggggaaaccatcttcattctggcaaaagctggtttggcaacggacctccatctgacttctgagagaaggaaagggggaaaaacatttttgaaatgaagggatgagagcaagatttttttaagaaaatagtttttgactcaaaaacttttgatcaggctaagggttacgtcctgcggccaacctaacagctccgataccacctgaagcgtccccaatcctctaggactcaaatgtgata

SEQ ID NO: 121481 - DNA, 614 bp, Zea Mays
gtcatgacatccactattgccatggttgcccgggcgacggttgtttagactgccaaacagcctcccgagtcttgcttgggctcgtacttgtcgacattggagactttgaagtttggaggccattggattgctcagagtcgaaggatgagtacggagactcctcacgtccccctatcctctcgtcggtgatcgtgcgttcggtcccggggaggtgagcgagcatcatgtgtcgccttgattgtctcggggtcgggcttctagtggaagctaccgctgactcagttttggttgcatggctgtgcgccggtgcaccatgttaccggtcatactccctcgtcgccttatctcatcctcgtgacgacgatcgcgtgaagcgttgatgttgcttcgtgcgtctcgtcgactattgatggcgtgatgcaggtcgttcagagggtgagctagaggcagaaggtggtttgctgccttggtgagcacttgtcgatagccctccgcgtctggggtgcacggtagatcattagcgatgaactcccaccttgctcggtgtatttagtgctcgagcgaagtcagggtacatgttccgagcgaggagcgggttttcgcattggagtcgg

SEQ ID NO: 121482 - DNA, 301 bp, Zea Mays
agaagggccagaagaatgtgaaaaatcagcaccgaaaacttgaccaaaaggggaaatatggcaaataagatccccacgggcatccaaaactcgagataagccctttttaaagcgcacttcatagtcatcctcaaggagttgtgaaactaaaagcagattgaaatgcagattcgagaccaaagcaacatccttgagaataaagctctcgttcacccgaatggtgccacgagaaacaaccttacctcttgacatatcctcaaatgtgatgtattccttaccaatcacggggtcgaggctggag

SEQ ID NO: 121483 - DNA, 441 bp, Zea Mays
gccttcaatctcttcatcaggctacagttagaatgatgtattaatgtgtggatctagaggctgcaccggcagttggctggctcacctatctatcatggtggctgaatgctgatcgctatcaacgagtgggttaagtcgtactgcatccatcattccgtccggagacaataaacatattttcatccgtggaagtgaatatttacaaattttatcaacaactagtcaaattatattggttatacgggtcatagatgcatgatgtttttttaactatttaagaattattaaatcatatacaaatacatttgttctaagtgcctttataagatgatatttttcacgttcacggttgaaaaagtgtgacgtaaagaagtggccaagcatcacatattgtattgtgattgttttggttagcagtggcacaaccggaagtagaacagt

SEQ ID NO: 121484 - DNA, 786 bp, Zea Mays
gtcggaccatatgatcatgacaaaacttccatgcaaaagatgatgtatgcagtatgcatgacaacaatatgagatcctccacccacatgtggtaaacataaacttccacttcctcaaaatgataaaacaacacgtgtaacatgctcaaaccacatcttcaacataagaaaataatggaacatgaataacttcgagccacatttcacacaatggagtacaagtatgaatacatttgacatggatgtgatcaagcataggacacataaatcaatcaacggtataaatcaccactattttacttgccttcaccggggagtttggacaaagccctactaagtgcgatccggaagtccaccacctgtttttgaaacacaacttagtgcaccaatttcacataacacgctcataaacgacgccgcacctacgcacaatttcaaaccccgccgcggtaacaactctccctacacccaccaaactgcagcggcgctgcttaacaatttcatatctttaaaattatgacagcagtggtaacaaacaaaaactccagaggcatctacataaaatttcccacaagttttgtctacaatttataattaaatttcaacatctaattagcccaacacagtccacaagataaactctgcaatctgttttttttcacagcaacatgcccggattcaaacagcgatatcttctaaaatataattccaaatcgagcacataagtactcgttggaaaggtatgacaaagctctacatgactctcatacttattatcactaattac

SEQ ID NO: 121485 - DNA, 2169 bp, Zea Mays
attttggtactggcaaaaaaaggggggcaggatatgctagttaggtcttagatgcaaggtaaaaatatgggctttgatatttgagagtaggaagtaaagcaccaacaaaaaagtaaactcaagtaacagaatacagaactttagaaagttttaacctggtaagcatcttcatacttcaaaacaactggctgaggttcatcatctacgccaggcttttcaagatcttcaagagatgcatcaggatttgtcttccaaagctcttccactttgttaatttgctgtgcactaatttgccgagctcttagctgctcctgctctgaaggtacctgaagaaagtaaattgtccaaccatcagaaagttcctagctatgcacaaatgcatgacagaacaacctaagaaatcatcatgagacccttgcctttacaagccatgacaagaaacacctgtcatcaataagagggcaccactggctgagatcccaattcatatccttcagtgcattaacacttaaacacggctctctgcataaaagaacgacaacattctccaattttgctgagataaacccaagaagaaatacattccgacagccacagttgtagcattcaaggattgtttctcccaaagggctatccttgtgaaggcacacttccttatgctttgccctaacctgcaaatgataaacatatggttatgaccatgtatactgaatttgtttcatttaaatgggtaaaggtaggtggattcttacacaataacacaataagcatatgattcagaatgagtgatctagcctacactcaatgcatttatttgtatacaaagcttatgggtgactgtaggtagcaagtatatgcttataatcaactaggccaaacgttcactgttagagcattgacatttgacatcgtagatcaagctagaaattttgacgcattgccaaaccactgaagcttggtttacatatatatgttcttttcggtgagaagaatcatagtctttctagaactagataaacttgataggatatcatcactgttctcccaccagactctctccatccttcatttcacttctaaatggacccatgcctcagcttttgtactaagcatttttcaggatgtacttgtaccagtccttggtttgcttggacaaccaccacaacacaatgccaaaacatcaaaagtgtgtccactgtccaaggacaatggtgtgcttgcatgctgcgagttgcctaaaggatagcaaagctgcttatgaaacaccacagagcctctcaataaggaatcagggttgcaatataataagttgtagaaacagatgtgttgacaattttttttaacaaaagttatatccatgttgctgtcataatgttgtgttctacactcctactcatacggtttgagatggtcttcactgaaaattaaattaaactgatagcaaactatttagacagtataagtgacaccttgcaaatgggacttaacaattaagaccctagataccaaataggaacgaaatgtcttcactgcaaatacagctagcttcctaaccaactatttaaacaatatgtccaaggaccctttgcaaatgggtctgaacaataggaaccactttcacaaaatgtatcaaccattccattagcacaaaaaatcaaaagttaatactgctactgcacaacaaaaccaaatacgcacatctagcaatcgtcgcattcccattgcaatgtctcccacagatacaacagtatactacaaatttgcttattctcaacctaattcaagagataattaacatgacattctcctcagagttattttatctatagttctatacttatttccaccagaaaaccttccaagtctaaagccacatcaatgcagcatggctaacaaattacagcaactagatacaccgacactatggcataccatgaaaaatacaaaaactaactaaccgactcatggcatcaatttaccaattttaagatggtaccgatcacctccttagccacccccgcatataatacgaaagacatgctgctacttgctacaacatctgagcaatagtttacttatagagccataaagtgcaccccaataaagcatgatgtcttcttttaacaactaaaaggcctagaattgattcaaagcagactattgtgaaac

SEQ ID NO: 121486 - DNA, 362 bp, Zea Mays
ccacaatatatatgtttcattttctaataccagtatatatagctaatgttaattgaaagttctttttgccacttgcgcaatatgctgacgtgttgtgcgccattgccttccatttatccattcattaatctgcaccggttgttgtgaagtcattatgcatgtacactatgtcatttggtactatatatatatctagaatctcgaaagttaattgagaggagcagagttggctcatgttacgttggcttctttctctagtggaggataagaaaacaacccatttgctgaagttttctagagtcaaacatataaatgcttttgtatgctcttccaacctactaccgcacacagttttccttagc

SEQ ID NO: 121487 - DNA, 271 bp, Zea Mays
gggtgggcactgactctgtttctgatatccctaccgttgctgttgaatctattgtgggtagttgcttgaaatgcgggcaagactgcgcttccctgttgtggtcctcccatcttacgcttttggtctttcatctccttatgctttctcttagtcatgatcgccctatcgattaggtgttggaaggtggggaaggtgtggttcattagctggtaatgcatggggttgaccagacctctcaggaaccggtattgcctcttagcatcggtgttga

SEQ ID NO: 121488 - DNA, 496 bp, Zea Mays
cataacatgagctgtaagctgacaacaggaacatgacccaaaactttattttgctggacagttacgcgcatcatgaagaactaattgtttgcagatcttgcataagcgtggcagtcttgcttgcttcattttgctaccacttacttctttgcttttcttaatccttttgcttctcccctttgaacagatatccgttggaggatgaaccatcacttcatttggaatatggcaaccgatgaatgcctcatattcatcctgcctagagtgtgtagttgtcggcaaaatctgatgtagagacgcctcgatgttacaaagaccagacaataagaaatccatgccttcctcagcgttgttggctttttttatcaaatcttcaaacttgttccgtacacttgctatttttttcctcatcaccaaatcatttggctctaggatcttgtcatgcaatatgtttccgtactcgtcgtagacacaatggctaaaagcaaataagtta

SEQ ID NO: 121489 - DNA, 279 bp, Zea Mays
ttcgatcagttgagaggagccagtgtgttctcgaagatagatctgaggtcaggttaccatcagctcatgatccgaccttcggacataccgaagaccacatatatcaccaggtatggactatatgagttcacagtcatgtcattcggtttgacaaatgcgctagcttatttcatgtacctgatgaacagtgtgttcatggactatcttgtcaagtttgtagtggtgttcattgatgttatcctcatatattcctagaatgagcaagagcatgaagagcac

SEQ ID NO: 121490 - DNA, 347 bp, Zea Mays
atttttctttctattctgtttctcccccctccaagaactgcaggcactgttttttttttaggtcacgacggcagaatagcatgctatcttctctctgttgcgtatgcataacaaacatctagatgaattttaatctaaagcttgtgtcgacgcaagaagctggcacggagtagatgtacctgtttgcataaacaaagacaatgctagctatatacatggggatgtcgcctgtcatgccagagggtgcaattagttggatatgtccgtcgttctgggcccatgctccgtagtaccattctcctccccagtgctgcctctcctctacttttgatgccaccgctgccggc

SEQ ID NO: 121491 - DNA, 693 bp, Zea Mays
ggaatcaaatgaaaatgccgcaacaccttctgaggactcttatttctttggtcaccatctttccatcttgatgaaccacactgggcactcattattttttgcataatcctttcgaaacaaaacacaattgttaggacacacatggattgattcatatccaagtcccaatgctttaataagtttcttagcttccttataagatgttggtatagaacaatgtgggaaagccaatgacaacaactttagaatagcagagaacgcaacattactgatctggtaacgagatttgatatgaagtaacttcactacaaaagaaaaccttatgtatgatgcgcctgggtgaagttcttgcgtcatctcattcaatacagatgcaaacatagaattatgtgcacctccctcttcagctctgaaaaaatcttgtaccatatcaggcaatctatcttcaaggttttcaggctcattcatacgaacatcctcattcatactataaagttcatgtagatggccggcttgttcactcagttcagcatccgattgttcttccctatgatgtatccacgtaatgtatgtgctcgccattccatgaatatataaatgatcctgtatctatgacttaggtttggcaagccgattcaaacactttctacaaggacatagtacctcctcactatcatcaaatcgctctgaaat

SEQ ID NO: 121492 - DNA, 326 bp, Zea Mays
attatacataatttgaaagaagcacaagctcgacaaaggagttatgcagacaaacgatgtcaacccttatactttcaagtcggggatcatgtgtatctgaaagtatcaccaatgaaggggtatctcattttggggtaaaaggaaaacttgcacctcggtacattggtccatttctcattcttgaacaatgtggaccagtggcgtaccgactccaactacccgaaacattgtctgcagtgcacaatgtgttccatgtgtcccaattgaagaagtgtctttgggttccagatcgaaccattgaggtgatagatgttaccttggaaccg

SEQ ID NO: 121493 - DNA, 903 bp, Zea Mays
ccaaggtagcgacgaaagctacttacgaattcgaagaagcccagctcagggcgcatcggggggcactcaggggctataggcatggatatatgcgccgccccctgtgcctccatctgtatttccaaagcttggctcacccatcgttagcatccgagtcgcttggaaggaccccggcgcctggggacagaaaatccttccacacctcgtataggggcacagatcaagcctccagaggagccacccttccattgacgcccacacctatgatgtctttctttcggaggaagagcacccccaacagattgctttggattcgagttttctcctgaagcgtaacatcgtagcaccaattaatgggagcctcgaacgaagtgctccagttgacacctcggagctgtggccccagaaaaggcctcctaccggcatctcacaaataaaaccatcacctatacttgcccttgttagaaagggaaagggggatcgggatgtactcatgcgaccttcctcggtggagacagaaggtagcagatctgactggccacactttcattatccttttctcctccctcttccgcaacaggtcaatgcagaagaagtaccaccataaggtgagcttgagatcgacgctctggtgcccctcacacagggcgatgaaggcagccatatggtggatctcgtttgggttcagaaaatgaagttgcacctgcaggtgcttgaaaagagtgatggaaaaaggatgaagagggagagcgagaccctgctcgtggaaacgaacaaagaaaccacataaccgggaggtgggttcggggcctcctcggcccccagaatcaactacatgccttcattcagtaaaccacgcctaacgagggctcaaaggttctcctgactcatcaaggattggca

SEQ ID NO: 121494 - DNA, 816 bp, Zea Mays
ttattacccggaactgcacctatctcaaaaagaccttatagaatggatgtcaaagatttagttgaactgaagaaacaaatagtggaattactagaaaaaggtttcattcgcccaagttcatccccttagggagccccagttctatttgtgagcaagaaagatggttcgagaagaatgtgtgttgattatagaagtctgaatgaagtaacacttaagaataaatacccattacctcggattgaggatttatttgattagatgaagggagctaagatattctcgaagatagatcttaggtcgggatatcatcagttaaagattcgagcagaagatgtacccaagacagccttcactacgagatatggattatatgagtttttggtcatgtcgtttggactgagtaatgcaccggcatatttaatgaacttgatgaataaagtattcatggaatatctggatcagtttgtggtcgtattcattgacgacatactgatatactctctgaatgaagaaacacatgaagatcatctaagactagtcctacaaaagcttcgtgagaaccaattatatgcaaagttcttgaagtgtgatttttggctgaaggaagttgctttcctaggaaatattgttactgattgtggaattaaagtagatctaggaaagataagtaaaatactaaattggaagcaaccaaaggatgcgtccaagatcagaagttttcttggattggcaagatactacagaagatttattgaaggtttttctaagttagtgaaaccccttacctcactactggagaaaggtaaagagtttaag

SEQ ID NO: 121495 - DNA, 571 bp, Zea Mays
aaatggcaagagtgcgctctactgccacggttgattgtgagggagatgagaccaaaactactgaaactgttccaatatccgaagctgtaacactcctggtgttactgtaactaaaacttgagcatggcgtcataaacattggcattgcatatgtttgacacacctagagtgcatccactaggtaaaaaatttcaaacaagtgtattgtttttagtattttgcaaataggaccctggatagggaacctgactctaaataaggctcaaaggggcaaaacttaacccaaatgaagaaaacctaaaggctttaggggaatagtcataaaatgatcccaagacttaagtggaatgacacttagacccctgggataccagaaaccctaattggaaccctggaaaaccctaaaaccaaaccctagggacctatgtgcaaaattagtccacttttggactaaagtgcaaaaaccaagttaaataagtatcttaagtcatttgggtcactcatatgtgaatttgcaatccaaaacttgagatttggacttaagtgcaaaagagccacacttgaccctttt

SEQ ID NO: 121496 - DNA, 635 bp, Zea Mays
ctagaaacgattgttgtgttagtgataaattgatttctgaccctactaacgtgatcttcttgtgttgtttctggattgatgcttgggcatccgttagaaaaagagggaaaagatctggtggagcaagaaaacttcagaatcaaagacaacaagtaaaatctttaaaagggctcatgggtggaatccagttgacagacgcatctagtgattatggcgcgttagtaggtccttttggatagttttttctgtgaactttagttaggttgatttgctatctgtgtccttgttgggttcgcgactgtcctatcatggttgtgttcctgttgattcctcttggttatcttttgatggtcgttattattagttgatactctgttttacggtggaagtttttccccgtatcgtgtttaccccaattgatagtcgcatgcttgttatcggctttttctgttttggtgacgggtgtcgtcatataagaactctgttcctttctagggtgtcgtcatgtaagaatctgttcctttctatttcgtaatgaaataggggttgttccacttcgtcaaaaaaaactctgcagccggtcaatgcaagtaggtgggattgcttgtgttgtgtcaattcggacccgcacccgc

SEQ ID NO: 121497 - DNA, 913 bp, Zea Mays
ggttattcttgatatccattccagagatttttcctctacttgattctccatagcatctgtttttgctagcatgttgagactgacctctactgtatctccctatgaactcgttaacacaactactctccttgcacatgatatcattccgtcatacttgactagacaattcattcccaatatcacatcaatgccgcaagatttcaagactattaagtcaaccataaagtctattcccatgatcttaaggttaacattggaacattgatatgtggcttccatttcacctcctggtgaactaacaagtagtttctttctcataggttgtttaggaacgttatgtttttccacaaatattttggttatgaaagaatgtgatgcttctgtatcgaacaaaactgaagtgggtattgagttgataaggaatgtaccaagtacaagttttggttcctcctgagctgtctcagccgtgatgtggttgaccttgactctgctctgactccgttgcccttttctttgggtgttgcgtgcaggcgtgttttggtcaaaccttggattattgttcctttgaggcgtctgttggttgtgctttgggaagttgttagcatagtggccaagttcaccatacttgaagcatccactaggttggactagagtagttgtattgttatttttgaccggtgtgttcatgacacttccttgatgattctgctaataaccactagacctttgaccgatctgagagttgttcctctgttggttctagtattgattgcttctctgtctttattgtccagagcgttgcatttgaaaattgttatttccactctgatttccagagcaaaaatgagaaccctcagagttgttatgcggacgagtgttcctgctagattgtccctagaatttactcttgtga

SEQ ID NO: 121498 - DNA, 336 bp, Zea Mays
tatccgagccatatacagttctgctagcttatctcacgtgtaattactcctcaccagaatgaagtgagacacttttgttagcttgtccacaatcacccaaatagagtcatacctagcagaagtgcggggtaaacaaacaatgaagtccatgccaatttcttcccatttccacttgggtattttcagtgggtgaagtagtccagcgggtctctggtgctcggcttttaccctccggcaaacatcacattccgccacatgtgcagcaacatccctctttagtccataccaccaatacttctgcttcaagctctggtacatcttggtactacccggatg

SEQ ID NO: 121499 - DNA, 356 bp, Zea Mays
aacaattcgacagccaggacttcaaagacttctgcttctccattggcaccaagcttgccttcgcctcagtatatcacccacaatccaacggcgtcgtggagcgcgccaacggcaaaattttcacggccatctagaaaatgcttctcgacgacaagaagggtaaatgggccgacctgctacctgaagcagtctgggcgctgaacacgaccgagtgccgggcgactgggttcactcccttccgcctgctatatggatccgaggccatgaccccataggaaataaaacatgggtcaccgcggacaagcacttcagccgtccccgacgtagacgaaccaacttccaaggacctcatcgac

SEQ ID NO: 121500 - DNA, 441 bp, Zea Mays
ggcagaagaacaagtctgtataatcaaggagaacttgagggtagctcaaaccaggcaaaagagctacgctaataatagaagaagaccactggagtttgaggaaggtgatcatgtgtacctcaaggtgtcaccacttcgtggaatgaggagatttaaagtcaagggcaaattgtcccctcgctatattagaccattcatgatctttaggagagttggggagatggcataccaactcgagctacctgctactctatcagatgtgcataatgtgttccatgtgtctcaacttaagaagtgtctccgtgtccctgaggaacagttaccaatggaagagctcagtgttcagggtgatttgacttacacggagtatcctgtcaagattcttgacactttgactagagttacaagaaataaggtgataaagatgtgcaaagtgcaatg

SEQ ID NO: 121501 - DNA, 357 bp, Zea Mays
ggaacaaaagggacttcgtatagtttgttttggtgtgtagacctttcggaatataggtgttgatggctttttaggtgaatttgaacatggtgtttctgcatccttggataggccactgggtttttgcagcaaataactttcaccatcttaaatactccatctattttattcttggtatttcattcataactctgggctatgtctcaaatagtcatgtagcagataatgaaggtttcctcttatcactcttatgtgactagtaggataatctgaattgcttacttgctactggctgagcagagttttgtatttgtggactagattttaaatattgttgaattggttgtgaggcctttg

SEQ ID NO: 121502 - DNA, 598 bp, Zea Mays
taaagagaagaggaagatcctgccaacaaacatcgagaagggccagaagaatgtgaaaaatcagcactgaaaactcgaccaaaaggggaaatctgcaaataagatccccacgggcatccaaaactcgagacaagcactttttaaagcgcacttcatagtcgtcctcaaggagttgcgaaactgaaagcagattgaaatgcagattcgagaccaaagcaacatccttgagaataaagctctcgttcacccgaatggtgccacgacaaacaaccttacctcttgacttatccccgaatgtgatgtattccttaccaatcacggggtcgaggctagagaaccattttgagcttccggtcatgtggcgcgaacaactggaatccatgagccacgtgttctccaggcctccgtcctgcatcaatagtaagacacggggtgagcaaatggcacaacgctggggtaagtaaactgtgaagaatactagtgctgcggcatttgcccctgaaaagtgttagggaaaacaccaaacatcccggtcccgaagggaagcgatcaccacaagaaggaaattgtggcccgctggggaagtatgaaccaaaac

SEQ ID NO: 121503 - DNA, 391 bp, Zea Mays
aaaaaagttatgctgaccaaagacgaagaccacttccatttcaagtcagagattttgtgtatcttaaggtatcaccaatgaagggcgtacaaagatttggagtaaagaagaagcttgcaccaagatatgtaggaccttaccaaattattgagagaaaaggggaagtgtcctacaagattcagttgacagaagacatgagcataatctttctagtatttcacgtctctcaactgaagaaatgtctcagagtacccgaagaaagagtagaagccaaagatctaaagattgggtcagacttagtgtatcaatagcaacccatcaaaattttggacactaaggattgaatcacaaggaatagctcggtcaagatatataaagtactatggagtca

SEQ ID NO: 121504 - DNA, 398 bp, Zea Mays
tgtcgatgaggtctttagatgttggttcgtcgacgtcagggaccgctgatgtgcttattcagggcgacccatgatttatctcctgcggcgtcatggcctccgatccatataatagacgaaaaggtgtgaatccggttgcccagcattcggtcgtgtttagggcccagaccacttcaggtagttggtcggcccatttacccttcttgtcgtcgagaagtcttttcttgatggcagtgaaaatcttgccgttggcgcgctcgacgacaccgttggattgcgggtggtataccaaggcgaagacaggcttggtgccgatggagaggcagaaatccctgaagtcctggctgtcaaactgtttgtcgttgtcgactgtgagcttagacgggactccgaatcgg

SEQ ID NO: 121505 - DNA, 497 bp, Zea Mays
gtcgctaaggcattggcgctctacttcgagtgcgtcccacaccaagcatcagcgacccacaccatgacatgggggccgagtttgccagtcatgtgtagtgggtgataggcgaaaggtgtgaaaaggtgggatctgaactatcatgcacgcagaacacgggcaaatagtacctccttgggaaccgcggtggtggtaaaaaccattttactagtgcggtggtgacgagcatcacgcgcatgatcgggcataccactaggagtgggggtcataggtcatgtgagtcgcggagacagatgtgacatcaagcatgacaataggtgagctacgactagtttggcaacgagcgtgccaccgctgtacgccagtcacgatcagattgcttgacatgagatcgtagttgtggcctcacctgtgggttcgtaacatctcctgaggtgggccctgggccactgtcggtaccctgaaactgaggtaccctctcctactgtgccaaaggc

SEQ ID NO: 121506 - DNA, 292 bp, Zea Mays
ttggcattggcacctcaatttttgctgaaggacttagaatttctgatgtctttgtttcttcagccctcggttcttctattttttctgtcgccggcacttcggccagcccttcgatattcggcaggggggttggttctttagcttcggtggtcgaagaggtctcaccgacaaattcaggcactgtggccggttcaatgtaacgtggccggtgtgtgagaacctttacccttttcctcttcggcgccggctcgctaggagtggctgaagcaacctccttcgcagaagatgtatt

SEQ ID NO: 121507 - DNA, 707 bp, Zea Mays
ctggagttgatagggcagtacccagtgacatgggagggacatggccctaggacgcgtggccccaactctggatgttgctgcaaactgtggcgcgcgtaaacaggagcaatagctaaccgcgaacgggtccttgacatgcaaatgatttctctttgttacgaggggatctgaggtaggacggagtagctacgactaggctggtggtggtggactggtggtggacggacgccatgcgacatgcgcgcgccgctagattcgatagggcagtagctggtgacgtgggagggacacagccctaggacgtgtgggcccaactctggatgttgttgtaagctgcggcgcgtgtaaacaggagcaatagctaatcgcgaacgggtccttgacatgcaaatgacttctctccgttatgaggggatctgaggtaggacggagtagctacgactaggctggtggtggtggactggcggtggacggacgccatgtgacatgcgcgcgtcgctggagttgatagggcagtacctagtgacgtgggagggacatggccctatgacgcgtggccccaagtctagatgttgctgcaagctgcggcacacgtaaacaggagcaatagctaaccgtgaacatgttcttggcatgcaaatgatttcccgtattttaaccgtattttcctggtccacaaaacaaccaaggaggcaagcccgttaggg

SEQ ID NO: 121508 - DNA, 396 bp, Zea Mays
tgaatacatgtgccatatatcatatgggttaaatttggattcaattgaatgaaaaaggatctttaaaacgttcttttttacgtcataaggactctgtactacagtacatagtgaacagaggaagtattacctcaaaagcatttcttgacacccagataacagcaacacacgctggttgtgttaaaaatgtgcaaggcataaatattgtactccctccgtcttaaaatatataagggatctagagttcaaaaattgtaccaaaatacaagtattctggagcctccctcctttgtctttttagcagcaaatattgagattcctttttaacttggcatcactcaaacagacactcagtacttaaggaaaataacaactgaagtactccctccatcctaa

SEQ ID NO: 121509 - DNA, 808 bp, Zea Mays
gttgtttaattcaaaattgaacaaagccataagagctcataaatttggaaccaaaccattactactgtaactattggtggagggattttctacgcctttcattgttgcagggcgcgctaagcgcgccttctgttctagtaggatgaaatgacgacggggattgctgtgagaatacatgtggtgccactattaacctagcttgctcataggtagtctgatagcctataaggtataaatacacttatattacctacgattcatcctgcctggtcatttggtaagtgcccgacccgccatgtacaatctttagcctttggaatggttttccaagtacaagaggaagctaagagattgtatgatacaactctaagccactaggttataaatacagtcaagacaaaatatgtatagagagtcgtatagctcgtctcttgatttttttacttacccctaaataatggggttgtacatgctcttagggcgtagtccctgatggtcaccacccaacccatgccaccaccatccgccgtttggtgctagcggccccttcgccatcttcttcctttcttcttccaattcatctccaataatttgtgccttcattgttgtctcctgtcgtggatttgcaatagatggatgcatcaccccctccatgatgacaccattgtacgtcgttgtcacgacgacagtagcctcctcatcatcatcatcactttccttcctctgtcatggttgcccccaccaaacttgcatgcctcagcacaccgcacacttacactaacacctagagacttggtggctcgaccgc

SEQ ID NO: 121510 - DNA, 525 bp, Zea Mays
tccctactctcgtggcgtagttcagacttgagtcgctccactctggcctccaaatcccttattgggtcgttacttccactgctgcttccttcattcctagaggccagtagatgccggggtacaccatgaggtcccgttgctttgcgctgagtggtcttggttcgcgccatatcaccataagggaaaaaatttatttagtgtagtttaaacatgatgcatgcataacctaataatcatggaatcaaattttcgttgatcccttatttcctatgcatactattatttagcactctgttacccgacttcaaaaggtaagttactaccagaaagtggtaagataagaatgaaagaatgttcaaggtaagtattttaaaattattttgaagtactacgtaatgtccgaagagacgcgcttcgctctgataccagctttcacagaacctcccaaagtattaggcccgtctacagatgtccttgtcctaaggacctcagacagtcatgcaggtgcgtgtaatcactcggcaa

SEQ ID NO: 121511 - DNA, 404 bp, Zea Mays
attaaaaatttaatcatttcattaaagttttagtgggcacttagggaggtctggttgtaggggtgtgtgtaacattattcccttctactaatctcctttttcattttctatttatgcccttaaggtgggtttgaactaccataatgatttagaaatttccaaaaaatattgtaaaaattacagtgggttaacattgatcactgttgtctattctacaaatttgaggttaagcataattaggataaactctaggcaaaaataacaaaggtgagggtagatggttactttgtactacaactctcatttgggtgggggttttgcactaaaagttatttttgctggcatttatgggtaataacatgcttttgtgccaaaaatcacagaaggcgacttaatggttattt

SEQ ID NO: 121512 - DNA, 986 bp, Zea Mays
agcgtaaaggtctcacagttggtgaacgctgatgactaagccatcagagtcaaaggtgtcacttggcatgctaacattcccctacctagcgggccaattgtcgtggttctggatactaggggacaatagaatttgtgatcgatagggatgctagagcagactcactccgaatggtgaacccaaggattcgaacatggagtttatacgggttcaggctctcgccctagtggcctagtccagtgtagtgttgatcgtagtattgctttcaggactatgttacaactggtgtgtgtgtgtgtgtggaacgaaggaggtggtcctacccttttatagttcaagggttggaccttacagaggggacttgtttcctatcggtaagggcatgatttgttgccttcggtagcccttctaacgtcgtcttcctgatatcgccttcggggtcgtgcgtagccattcacttgatatggcatcccaccttatctgctcggtatacgggtcactatcgcaagtccgatgctgaggtgcctatagcggcgcttagcgggtcccacgggacagagttagggtatgtcttggggggcgagcgtggcgtggccctacctttcgtcatgaaccccgcgtcaccctcggtatggtgcaatgatccgtcctgcccggtatgcatgttactatggagactttgatgcttaggtctcctatgatcgaggttgactggttccacaaggcagaggcgggaaacaccagagaccatatgatggtgtaccgtcacatcgatggagacttctcggcaccccttgcgtatgttgtgccattggtttggagagagtttggtgatgacgtgaccagacgtggatcaacaatactcgtcttgttctcacaccgggcgagcgcaaacgtatatgaacggtcatccggttactgacaggcgggctcaggagcccgggcccacgaatgtgcactgaattacaactttgtcaggacctccg

SEQ ID NO: 121513 - DNA, 503 bp, Zea Mays
ctacttgtgaacttgtcaaggtaaccattctcttggcacatgagattactccgtcacaactcttcaactagtcgactctaagaatcacattgatcccactagaccttaggacaactaggttaaccaagaagtctattcccataatcttaaggttaacatgaaggcatgagtgtgtgactctgttttcacctctaggtgaagtaattaataacttcatctttaggggataacttagtatgctatacttttcgacaaaatgcttcgttatgaaggaatgagatgctccagtatcaaataaaactgatgcaggtattaagttaacaagaaacataccgaacatcgcattagctccttccagaactgattctacagtcacgtgatcgactctgcccttgctctggttctgttgtcctttgccttgagtgttgtgggagggtgtgttctgggctgacctctgattgttagtgtcttgtggtgtctgaaagttcctcttgggatagtcg

SEQ ID NO: 121514 - DNA, 411 bp, Zea Mays
ccggatttgtgctggtcatcgggattcgtgctttgcacgcagaagatttctacgagaaggtaaagatctcacggaggggaatggataagatcacggattggagattatcaccgtgcttttagccatggcaacgtgcccggactaccgacgtcgccgtggaagcgccggtgacctcggttgcgccatgccctagcttgttaccatgcggtagtaatcgtggcacccttaggagtattatgcttgcgccgttgcaccagtgaacgccacggttacagccaccgtggtcttccctatctccggccgccaacacgatgtgatcaaattgagagccaccgcccccggagtctataaattgagtgcaccatcgacttcgttatgtattcaagcagctagcgcacccgtccgcacctc

SEQ ID NO: 121515 - DNA, 737 bp, Zea Mays
ccatcccggtgcctaccctccgcaagttggtcagggctgcggggctgggctgcattgctgagaactccattggagtggtgcctcttgttccggaatgattgctgctcccccactgatcgtctgttgcgggctcctctcccgtcgaagctgttgtcggtcttttgccagtccctggtctgttgtgtcactttgtagcccgcctaagtctgctatcaggttgtatgtgtctctgttcgccgtatgtcagtgtggtgtgtgcccctctcctgttgtaatcgtgtgcccaattggtgtctggtcggttcagtcatgagtccagtttgtaaaagttgtactgtgctgtcttggaacgtccgtgggttagccgatccggataaatgcattatcgttcgtaatgctatttcccttgcctccccctctgttgcttgtcttcaggaatccaaactttgcgaactaaactgcttcaaagcgcgctccttcctgccaactagacttccctgcttcctctgcatcaacaccgtgggttccagggggggcattgtgaccgcctgggacagcgtcgtgttcagccttgcgtccagcatttcacgcccttactcccttaccaccacgctcagctcccccctcacaaacacaaccctcaccatcacaaacgtctacgctccgtccaaccaccaagactccccagccttccttgctgaacttgcagacctcctccccagcatctcaggtccctg

SEQ ID NO: 121516 - DNA, 363 bp, Zea Mays
gctgagataggtggtcgtctatttgcagtgctcgttgatgaggctcgggatgcatcaattaaggaacaaatggttgtggttgtaaggtatgtaacatcttttactttacattttgttgtttttagttctttactaatattattttccttgcttcactttgatgtaggtatgttaatgataaaggccatgtaattgagaggtttcttggtgttcaacatgttcctgatactacatcatcttcattaaaggtagctctggatgatatgctagcaagatatggtttatctatttcaagagttagagggcaaggatacgatggagcctcaaatatgagagggcagtttcatggattgcaaagattgg

SEQ ID NO: 121517 - DNA, 342 bp, Zea Mays
ccgaagcgtgtcagaaggccttcaacactgtttgctccttcattggtacaagagatttgattcaagaacatatagccttcagggtatggccgcttgtggaaagctgggaaatgccgaaggagaccatcgctgacaccggtgagggtaatttagtccgactgaagtataccttcaggtttggggataagtttgatgagccaaatgatgactggctgaagtgcattgaagctactagtgacgagctacttggggcatactccaaggccgaggacaatgccttgtccgcagctttcggggtcggaataagaaaagattgaacagggtatttgatgctattggctt

SEQ ID NO: 121518 - DNA, 1010 bp, Zea Mays
gcaaggtttgccacggtttatggagttctgtttctcttcttcgctaccttcctggtctcacacacagaattatttaagcagtcgcttacatgggcctcacgcccttacacatcatccggcccacacggcccaacaccttacagaatattgagaattcaaaaatcaatcgatgccgtctcctgtcgctggaccggccatgacatcttccccgccgtcatgaattgattgtccccaatcaagagcctctggaaaccgagtcttcaacacatcaatatcttcccaagtagtagcatcatctggtagctcggaccaggccacctgaacttgtaccacaggcttgtgaccccgccgaactaaacgacgatccagcaaccgaacaggatgaacatcccggccagacaggtcgaccaactgagagatgtcagaaaaaactggtgtatacttgggtgtaaatggtttaagctaagacacatgaaacaccggatgaaccaaagccgtagaaggtaaatccagcttataagcaactgatccaatacgttgcagcactttgaagggaccaaagaatttaaaagcaatcttgggatgagctcggttgaccactgaactctgaacatagggttgcaattttagaagtacactatcccccacctgaaagtcccgatccagtctgaacttatcagcttgatgcttcatgcgattctgagcagcagctaagcgagtcttcaacaactccgaataagccagcctctcttggagcaaatcctgaacagattgatcagtgtctcctaacagatgaggagctgcagctaagactggatcataaccatataaggctttaaacggagagcagcccaaactagtgtgatatgcagaattgtaccaaaactcagcaagagccagccatttcttccatttggtaggattgtcatggatagaacaacgcaaatacatttcaagacattgattaaccctttcagactgtccatcagtctgaggatgataggctgtga

SEQ ID NO: 121519 - DNA, 533 bp, Zea Mays
ctttgggcgagcactatcagatttttgagcattcaaggtttttccaggctctgggatagttgcaacaactatggtttcagcagggaccaagtcagaagaatcctcagccaacatgtccagcatagcacttatctctgcatcgcttgggtttataggcatctcaaagtgaactttcctctcatcattgggggggtcaccaagtgaagcaaccagagccttgacttcttcgggagagggtcgcactctaagacccaagccactgtcactagcaggaggattggacacaaaattgaaaaaagtcttggaaggtggcagattctaggcagaatatgcaacaggagcaccaatattcgatactttgcctctaagaatcatctccagtcggcttaccaaatccacagcaggaatcctcttgttggtaacccgggttgaatcagtgacaccactatacaaataagccgggtatgctctgtccttcagtggctgaatattcttaaaaacaaagtctgcaactacagcttcaacagtcagac

SEQ ID NO: 121520 - DNA, 597 bp, Zea Mays
ggtggatgaaccatcagtcagatgactatggagcttcaggtttcgtagttataaatgttattcgttaagattattcgcttccgctataaccttggtcagtaataacatatttgtatgatttatttaaagtattatgtgatggtactttcactgatgacgtcgttgtgtatgtaaatttgatccttacgcatacatgattcgcattcgattgtgttcttaaaaccggactcgacatcactgaagacaaccatttaccaaacataaatcaatacatgtggatgatgggtactggaagtaacgctgagagaatgcattaaaacttgcctgcatgccgtgcttccataaagcaacatcaccgtggcggtgacctgttataaccctacgtgatgagaatatgtttagtggtaggatttcatcgcatccaactgactgacttgaacaaattaaatgagtaactatttaaatatcaatattatgctatatgtgcacctaccatgactctgttggatcagcatctagagagatcagcatactagaaaaatccttggcagggttgaacaaagtccatatgttaattaaaggttggactaagttttc

SEQ ID NO: 121521 - DNA, 825 bp, Zea Mays
tcaacagaggtctttactgaagtgaccccaatggtggtgtacctgctgaagttgaccccaatgggtgtgactgtgcaccaactgaccccaatgagtgtatccgtacaccagctgaccccaatgggtgtgatcatgttgagactgaccctaatgggtgtaaccttgttgaagctgagcccaatgggtgtgatcctattgaagctgaccccaatgagtgtgatcctgcaccatctattgtccgcattttttacgaggacgaagaagaggaagaagttccgctaattcgtaagaatagccggcggtacagaggtagtagggggatagtgatattccttctccagctctgtctgctcttgttagccttcaagatttatccataacagattttgatcaggcccttgaggatgtcattcctgaagatatgctgttggaaccgactgttgatgatatgatgaatgtttgctctgacgctccagacgtgggattagaggtatcccgggcggtatctcgtgcatcgtcaactttggaaggcagtcttcggtgtcaagaggttggtcaggattgcctgactcccatggaggtgactgaggatccttcagcctcagaggtggccgttgcagaaaacccagcccccaaggatgacactggcggttacctagcccccgagggtgtcgccggtaatgatccggctctggtgggtagcgcaagctgcaacccagcccccgagggtgttgccggtagtgatccggctccgatgggtagtgtgagctgccactcagccccgagggtgtccgagcgagctctccttcccatacctccatggac

SEQ ID NO: 121522 - DNA, 302 bp, Zea Mays
tttactatcactgaccttattatctatgaagataatattactttatgttgtttagatgaaaaacaagttatgaactaagtctaccatattccacatttctaaatgtgtttgagaataggtatggaatgacttagtgatttgcaaagatcaggggaagtttcccttttgatcggaataacttgcctatacatcatgttgtactcatttctttgcatgagtttttctcctatttgggtttctcattcaaagtttttaacgaggcaacatcaacataaagcctatgtcatatcacctatttttcc

SEQ ID NO: 121523 - DNA, 604 bp, Zea Mays
gcgggttagtgggttgtcacacaaaaatttgagaatgaggccctgcaagttgctctgtcagaatgactgaataggatcgcgatggtacagtggactggacaagatcacgggttcagtgcatctgtcaccgccggtgatctccgcgcggcgattcacgccaaccgccgcgattcgtgctctgtgtgaagtggataaccgtggcgggtgaaaagatcttgggtgagaagaacataggcctgagctagatcatcatcgtgcccacttgccgcgcggtcagtgaaatatcaccatcagtgtttgccgtgatcgcagtggaagacacgtagtcgcctgtttaaccatactgtcatggtcatggcaagcaaccggttaccatcactgaaccatttccctctctcgcgcgccacggtgagcaggtcaccatagaaatatcctggccgcggtgaactcgatcccaatccaaaattcgtgataagcttagtcggggtctataaattggaggcaccccctgctccgcctacttgttacgcgcccagtacaacacttctcacctcaaatcatccaccctagcgtccgaatttggttccccccccaaatcggtcat

SEQ ID NO: 121524 - DNA, 605 bp, Zea Mays
ctctagtggtcttcttctattatcagcgtagctctttagcctggtctgagctaccctcaacttctcccagattatatgaacttgcttttctgcatcttgattaagtccaggcccaaagaattgtcttcctctagtctgatcccaatatagaggagtcctgcacttcctgccatataaagcttcgaatggtaacatctttagattggcctgttaactattatgagaactcagcataaggtagactcttgtcccaactactaccatgctgaagggcacaagttctcaacatgtcctccaatacttgattagccctttcagtctgtccatcagtatgaggtaggccgaactaaaattcaacttcgcatccgtattctcatgaaaacttttccaaaatctgggggtaaactgtgatcctctatccaaaatgatcttcttcggtacaccgtgtagagacacaatccgagccatatatcactctaccaattgagatcccttataagtagtcttgaccggaatgaaatgagccggccagtctatccacaataacccatatagaatcatatcctttcgatgtgcgaggcaatctagtaatgaagtccatacta

SEQ ID NO: 121525 - DNA, 391 bp, Zea Mays
cgcatttctggcaattttaatagccaattgctttcaatacctcttggaaaacctcctcactttgatagagagggcaatttttggtggagttacaaaatgcttagtcgtatgttttctctccaccctagcatttgggatactgtagaaaattgaatgcaaataccggacggtgatgatgaaaatttcaacagcaccccctccttccacaccctatgcagtgcaatttaacagcacgagatctttgacattcaattgaagccccatctctccaatcaatagtgcacccttataaattgagacctcttgtaccccctactcacttccatttgagctctcgaccactaacaccctctccctacaccatcagtgccaccactgcaatccaggatca

SEQ ID NO: 121526 - DNA, 783 bp, Zea Mays
ctgaggagacgtgtaggggcaggacatgcggaggtggacgccgcgagagaggaagaagtcacgggacacattgttatagaactcacgcccgttgtcacactggatgcttcggatggtgcgactaaactgagtggagacccaagcgaagaagtgagacagggtgggaaaagtgtcagacttctgacggagaggaaaagtccacagataacgcgagaagtcatcaagaataagtaaataatacttatagccataaatgctaattacaggggatgtccatacatcacagtgtatcagataaaaaatgcctgctgctccagaagaggagatggggaatgggagcctaacatggcgacctaactgacaagcatgacagaggtgctcaaaagatcccctacaaccggaaacagaggtgttgctggagagtttggacatcacatcacgaccggggtgaccgagacgacgatgccaagtcatagaagaggcggcgacagcaagaacacgcggggcagaggtcggtgtagcggaagcaggcaagcgaagtgtgtagagtggcccggggctgtcacaccgagctagaagggtcctggtggcaagatccttcacagaaagaccaaacaggtcaaactccatggaacaagagttgtcagtagtaaactaacggacggaaagaagattttgaataatgtggggagcaacaagaacgttggataaacggaaaggaccgggaaggaccgcgtcaccgacggaggtgacgggaagggcagagccgtttccaaccacgat

SEQ ID NO: 121527 - DNA, 274 bp, Zea Mays
tagttgggaaggtcttcatgtccggtttctactggccaactgcgaagagtgatgcagccgagttagtccagaggtgcgaagcttgtcaatacctatcaaagcagcaacatttaccagcacagcaactgcagaccatacccgtaacatggccatttgcgtgctggggactagacatgattggacccttcaagaaagcttagggaggatacactcacgtgctggttgccatcgacaaattcactaaatggatagagtacaaacctattgcttctct

SEQ ID NO: 121528 - DNA, 534 bp, Zea Mays
atgtcactaaatgcaaagaatgaagtgtgttggcaagtcaaaacaacactataaataaaacagctgatgaacagacattcaagacacaaaaggatgcacaaccaaaccaacaaacaagtgaccttggaacatgttgttgttgtgagtgctatggaattccttatcgccaagtcaatgcaaatgaaagtgaaactacaaaatagaagaaccggattttattttttggcataaacagacaaatgtctccccaagaacaactaatagcagattctctcatacctaatgcactgtcagttgatgaattgcaaagtattccaaaaaggaaacatcacaaggatgcccagccccaagaagaaacacatgagtgttacatcgatggatggactattacttgctcacagtttcagccttgtcgtcgcatcaggtccaagaaacgaaaagtgaaacatggaaaaagtcaagaaataacttcaagaaaagcttgctatcaatgtggacgtgaaggtcattacttccatacctgtcctgagaaaa

SEQ ID NO: 121529 - DNA, 387 bp, Zea Mays
gtgtgattatagtcggtcttagcgcggacggtttgatgctgtcgtttctgcttttgttgtactagttcggctgcgcccttaggcggcttctgcgtggatagtcttcgcggtagacttcggttttttcgcacttgttgtgctagtccggctgcacccttaagcgacttctgcgcggatagtcttcgcgcgagactttgggttttttcgcacttgttgtgctagtccggctgcacccttaggcgacttctgcgcggatagtcttcgcgagagacttcgggttttttcgcacttgttgtgctggtccggctgcacccttaggcgacttctgcgcggatagtcttcgcgagagacttcgggttttttcgcacttgttgtgctggtccggct

SEQ ID NO: 121530 - DNA, 788 bp, Zea Mays
caacgattggtggccgtggcgtttcgttccagcgcgccactgtcccagtggcggggccagttgtgggagtcgaggaggtggcctccccaccgcggcagttggaaggctcccctttattgctgacgacaggcataggagccaaagattatgttgtgggagtcgaggaggtgccttccccactgaggcagctggaatgcccccctttattgctgacgacaggcacaggagccgaagatggttttactgggcgttgctacaagtgtgcctggacggttgtcaaaagggacttcttggcagctctgtcagtaattctccaggggggttcttccaagctttatctccttaactccgcatatgtgactctcctaccaaaaaaggctgaggctgtggaggtaaaggattttagaccgattagtttaattaatagttttgccaagattatcaccaagattttggctaataggcttactgaaatcctccctaaattggtctcccccaatcaaagtgcattcattaaaggaagaagtattcatgacaattttatgatggttcgagaaactgcaaaagctattcacaggcagaaaatttctagaatcttgctgaagttagacattggcaaggcctttgactcagtttcttggcatttcctccttgaagttcttgaacatgtggtgtttggtctactctggcgtaatctaattgctaagctgttgtgttcctcctctactcgggtgttagttaatggggaacctggagacctcatttgtcaccagcaaggcttgcagcag

SEQ ID NO: 121531 - DNA, 469 bp, Zea Mays
agcccattctaactcggctgttatttctaaaacgccgacgttaccatcattcacttagtagttatctctaaaacgccgacgtcgtcttcagtcgctcggcagttatctctaaaaactctgacgtcatcttcaagtcgctcggcagttatctctaaaacgccgacattgtctttagtcactcggcagttacctctaaaacgccgacgtcgtcataagtcactcggttgttacctctaagagcgccgacgtggtcatcagtcattccgacgctgacgtggcttcgtcatcactcggacgctatttcaaaagcgtaaatgttgacaatagtagctcggccatcacccctaaaagcgacgatatgacgcccgagttactcagttactattccagaggaatcaacttcacaaataaggcaaacggaggaatgattcaagaaccctaagttatgccacaaacataacagatagag

SEQ ID NO: 121532 - DNA, 951 bp, Zea Mays
cagtagatggctcttggctggtcttcatttcgctttgtgcttcaatgctcctgttgattagacttgtacttcatcagctatttttggctttcctccgatctccatcgatatcttccttctgtcttgatacattcattgcgtatactgtgtggatgtgactgcttgggaaaatctattgaaaattcctggacgtccccccaatgggtgtggaaaagggacggcttggtgcgctgagcgtttagcaaactgtccctgagtagtaacttgacgtgaccgcgggtgtagtcatatcgtctaagtagttgacttgagtcccaatgggtgtggccctgctgatgctgaactcaaagggtgtggccctactaatggtgatcccaatgggtgtggccttgctgatgctgaaaccaatgggtgtgaccctgccagagctgatcccaatgggtgtgaccctgtgccatatattgtccgtgttgttgacgaggacgaggaagaagaagaggaagtccccttagttcggaagaacagtcggtgttacagagtctgtggggggagtagagatattccttctccagctttgtctgctcttgttggtctgcaagaattatccatagcaaattttgatcaggctctcgaagatgtcgttcctgaagatatgctgtccgagctagctgatggtgatatgatggacgtttgttctaacatcctagaggtggggttagagttatcccgagtagcgtctcgtgcctcgtcgaccttggaaagcagtcttcggagtcaagaggttggtcaaggttgttcaatttccatggaggtgactgagagtccttcagccttagaggtggctgttgcggagaacccagtcctcaaggatggtgccagcggttgcccagcccccgagggtgttgccggtaatgatccgactcgggtgggtagcgcaagctgcgacccagc

SEQ ID NO: 121533 - DNA, 484 bp, Zea Mays
gcttacacgcggtaaaggagacgttgttgccaagggtgagataagtaaaatatcgctctcaaattgggataggagattggagattttagataacagacatcatgtaatcaccaaggtaggatagagtgatgagaagggcaaaggaaataacaaacaagagcacaacaaaggatagagctaaaaactcgcaggtgacaaataagaggacacgaccaagggaaaagtagctaaagtacgatgcccagattgagatggaaaagaggatattttaaagacgatataagataaacatcaaggtaagatatggaggtgataaggataaaggtgaggatggtgaaaaacataatccgtggacagagttaaggcaagaatcgcaaagtgccgaagtggagaaaacaaacaaggataagataagtgaggttccgacagaagagttgaagtaaaaattcattatcgaaggaagttacaaggaattaacgagatt

SEQ ID NO: 121534 - DNA, 564 bp, Zea Mays
agggtggtgaatgtgtccgacttcaaccgaagcgggaaggtccagagaaaatgggaaaaatcatctagaatcaccaaatagtatttataaccagaaagactgagtacaggggaggtccaaagatcacagtgaaccaagtcaaaagcttgctcagcccgagaagaagaagtagtaaatgggagacgagtatgtcggcctaactgacaagcatgacagagaccctcaaaatgtcccctactacatgaaggatctagactactggtaatcttggtcatgacgtcgggtccagggtggccgagacgacgatgccaagtggtggaggaggtggtggagaccaggacatgaggtgaagacacgccggcggtggatggctggagcgtgtagagcggccccgagctgtcacaacgggcgagaggggtcctggtggccacatccttcacagagaaaccataggggtcaaactcaatggaacaggagttgtcagtggtgaatcgacgaacagaaagaagattgtgagtgatgtggggagctacgagaacatcgttgaggtaaaatggcccaggg

SEQ ID NO: 121535 - DNA, 400 bp, Zea Mays
gaagtctgagaggaagatattagaggagaagaagttgtatgaagagaagaaagttatggatccttttattgctgggttttatgagtctatggctaagacgaacacagagaaaattactaaggaaataatggagggtttgtctgaagattctgatgacagtgatagttatgatgtggaaagtggagatgaagattctgatgatcagccctggcggccaagccatactacctttggaaaatcgaccatcaagcaaagtcatattgacgccatgagagggagatattttcgcgacctgtctattgccagggttggaggagacagcactgcccctgctcctgaggagaatgaagttgttatttaccgaagcttcctgaaggcaggctttcggtttccgctgagc

SEQ ID NO: 121536 - DNA, 509 bp, Zea Mays
gcctggggggccaccacgtgcactggtggtgtttcaagggcagggtagtgccaagatccacgtggtccactgtgtcgacccactagtgggttccacgccgccaaggctcaactcatcgaccagcaacacaagcccatggcattcagggtaggccgcgtcggccagcagctaaagctctacggagttcggggtagccaccgtcggccatcttcaagcttcgacatttcggctaccactaaggcaacacaggcttctgcttgcccttcgactctaatggacagctgcgctccaacaaaaataggaaagaggctaacaacagctacaccttcatcaacctcaccacgacgaagcagcctgtcggctgagggaggccctcatgggggcccgccacgcgcactattgaattttcaatgccggcaccaagacccaactcgtcggccattgctcaagctccatggtgttcgaggcagtagccatcagccaccatcaagctctggccttggctatcg

SEQ ID NO: 121537 - DNA, 734 bp, Zea Mays
tttattgtctgggaggcaatacaagtaatcatctttgtcattacctccataaactaaagagccccgaggatacattaagtccctagcataatgtttcacttcagcaatttgctcgctgcttaactttttccctgaggcatgtcgaacaatataatcgaggtcttcaaccgaaggtgtttcggttcttggcaagttttctttccccggcaagctgtcaggcataatcttcgctgaaacagatcccgaaggatcagatacaaccaagccaggagcggtttccacattaatagtcatcttcggctcgtgaattgtatcttcataaattttggtatgacaggtggcaccatctttgcaggtcttagaacaacttctagtacattggccattcttttctccttctaggagttcctgtcgggtcagatattgccttcgattgatcttgcaccttcatctgttcttctaccttcagaaactattccgctctcaattccataatagcaacaggtgtttcagccaatgtggttgttgtgctttccttcacctgttgattaaaaaattccaaaaaaatattagagcattaacaattcagttaaaagttaaaagaaaattcgaaatttgttaccttcggaggcacaacacccacttcaattatctcgacatattttgccttgctagcttcagcagctaataggataggcggttttgttgctctctctcaatatagtacatcctcg

SEQ ID NO: 121538 - DNA, 524 bp, Zea Mays
cagcaatcagtctccaatcccttttcctatatatcaattatactggggtcattctttccttccgccttggcttgcaccatttcctctgctccgcacgtttgcttcttgcacagtacctccaccgaacatgcatttttgcagagctgtattcagggacgacggagccaggaaaaaaaattagtaggggctgaattgaaccgctatagcgatataacttgactaaatcactcataagcttacaagaggacgctgattgaacgttttcttgaaatagtattgttgtgtatgccaacgctgcaagaccacagaacgtgttcgtgttatcgccaccttgtcctgaactcatgaaccgactggaaaccatcggtttggtttaggattcccgatcgtattggcatttttcaaagacgcaggagagaaaaaaacattgctgaaagtgtctttgaaatgcacatcaacccacttgaataccataattccaatttggatacaatgtccactcccacgcacttcacagttatggc

SEQ ID NO: 121539 - DNA, 376 bp, Zea Mays
ttgatgtactgcttctgctatgtaccgtgctacctgtacatcaacaaatttgttattttggttagttatgattttcgtctgcttcatcctgtacttatttggctaactatatgtttacaccaaacatagagtatataattcatttataagaacatgtttatacatacgtgtatgtaaaaactgcacggatgtatacagatgtatgtttgtgttgaaattcccatatggacacacgaggttaatcccactttgcttgtattttttcccatatgcctcgtgatccattaacacaactatatgcttatacatttcagtagatcactattcattaggataaacgtgtttatacatagaaatatgttttcgtaaaaaccgg

SEQ ID NO: 121540 - DNA, 526 bp, Zea Mays
gggccccagatcctcatgactctgtgctcgacctccatgcccgaaccattctcattcagctgtcccaagctgatgatagagttcctcaacgcagggatgtaatagactccggtgagcagcctgtgctcaccagacgcgacggtgaatacaactgaatcgacgcccttgatatctacgccggaggcgtccccaaacttcatgaagcctcggacgctagagtcgagatcggtgaagaactcccgttggccggtcatgtgatgagtggtgccggtgtcaaggcaccatcctttgatcatgtcgttgctggagccgtcgtcgaggaaagcgtgtgctttcgattcatcaagatggaggagtgccgctgcagacggtgccgctggaggtagctcgatgcttgcatgtgctagaagcagagcttcctcctccgcctatgcgacgttggtctggccgcgtcgtggctgccgacattccctggcccagtggccaagcttgtcacagttgtgacagccgtcatctcgtgccgact

SEQ ID NO: 121541 - DNA, 783 bp, Zea Mays
gtagatatatatgtatatataggaaaaatatgtacttagaaaagtcaatgcgatgcaaaatgtatacaatttaaaatggagggagtagttctctcgcggtgaacatgcttccttttgtcaccatgcatgcatcttgaagaccaacacactaacctagctagttttttttttttttttgcagtaggccggccggtatataatcgaatgttctagccctttaaatattcaggttcagaacttcggatactgctggctgagtgcatgcagccatgcaccacagtttggtctgacgaactaggcatattttaatattcggatactagtacaacggctccactactagggctgagtggtctccttttctccccttggatccctccatgcctgggcccccacattgttcagcaaagccaccggccttgtagttgtaaagaaggtctcaccatacatctgatttgacctgcacagtcaagttttttttaacttccccagtggaaaaggcactgccaactttactacatacactatacgcttcattggttgccggcctcccctccgcctactcgcctgcgtctctagaaacccgtccgactcacgtctccgtcgatgcaggcattccactgaaaaaacacttaaaatacgcccacacgtgcaggctgagcttatgtcatacaagtaaccaatcacaggctcaagtttgatcaacgcatgcgctaagcttggacatggctgaccggggtatatatctttactagacagtagaaaggcactgagcgagtgcaa

SEQ ID NO: 121542 - DNA, 396 bp, Zea Mays
ttgattgctaatttttaaagttgtctgtcataaaaaaataagtgggtctattttctatttttttattgaactagcgacataaatcagtaccaacaaggcaacaaccttacctgacgttttggatgattggagttgtcaatcggtcgcggtgacggtgtgaaggcaacacatgaggtgctctagcggtgcctcgacacaagaggttacctagtggtttcaacatcaagatgtttggatgctggagatggatttgtgatcaaagggatggtgggacaacgtgaaacaacggctggagtatgcttttcttgatggacttagcaccaaggttggtttaggggttctcaatgaggttggtaaatataaggtttgttggtcactcgttctcaaatgttgtga

SEQ ID NO: 121543 - DNA, 297 bp, Zea Mays
atccatatgcgccaactcccaagcacgtacttgatgctttgtcttgtgtacgcagaatcagattgggcatctccacagcagcatccaggccagcaacaaacatgtaccaccccttctgcagatgtccaatgcaatcccttctctctcgtttgggaacgtagctgctgcacttgactcgcggatggatgagtcagaccagacaggaaattctggcgtctcagattctcttcccaatccttcacggcaaaacatgcgctcgaatcatttggttcagtcttcaggactccgtgagttgca

SEQ ID NO: 121544 - DNA, 337 bp, Zea Mays
ttgtctcacgaacggtttcacgtcgtgcaacattatttagaccccggacgttccaacagagaatttctaagttgacccctgccattagaaaaagaaggaatcccacctgacaacaaaacagcagttgtatgaagaaggaaatgccttcacattacccttaatttggggtcttagcaacacacgacaggaattcagcaaagcaacaacagcgaacattccccagactgtagcaaacgcagcaaaataacagtaggcgtatgaagaaggaagtgcgttcacattacccataaattggagtcttagcagtacacaaaagtaactaggaaggacacacaac

SEQ ID NO: 121545 - DNA, 421 bp, Zea Mays
tgagtggtgacttccaaagtttgacgccttccaacattggtgttgcccgaagcccacccgacccgactcctccctcccagttccaaatttccaatcctcctcgatcccaccagtagaaccctccgcttgtttcttgctcccggttcttggatcgcggaactgctccaaaccttttcttggatcgcggaaccactccaaacctgcaaaagtttgatctttgtcgactgcttcgggttctaggacctgccgagtggtatttaggcaaagaaggctctgtcggcagtagccgtccttgtgattggttccgggacttgggttttagctcccaaacgagacccccaggcgcgtctgcggcgagctggttgctaaagaaggtaggtgtctcgggggctattacaggaatctacaacaccggcctcgc

SEQ ID NO: 121546 - DNA, 569 bp, Zea Mays
gaattttgtagcagttcaaccggctggacatcagatcacttgggaagaatttagactagccttccgtgaacactatgttctagagggagtgcttcacatgaaacaagaggagttcattcgactaaagcaagggggagatattgtaatgcagtatctcaacaagttcaatcatctgtcccagtatgctatcgatcaagtaaatactgatctgaagaaaaagaattgcttcatgaggggacttaatgacaggcttcagaggaaaatggcaatctgtctagatcttacttacagcagagctgtaagcatggcattggccatagaagccaagaacacaggccatggaaaatcaaagggatttggaggtgacaggtctaatcagggacctaagaagcgaaccaggttggtaatccgacattttaatcagaatcgttcttcacctcgtccaccctcctatccgttcaaacagcctgttttcattcgtcctgccactgcccccgcttctacaaatcagtcgagtgcccctggtactcgtttccctgctctcccttgttcttctactagctgcttca

SEQ ID NO: 121547 - DNA, 566 bp, Zea Mays
ccgaagcccaaaacccaaaatacccgaacccgtacccatttagcccaaagcccggtactcaaattatttctgcgggtaatgaaattgaaaacccgaatttagttcgagcctaatcgggtaacgggtcgcggtacccgaagtacccataatggccgaagttaattttgttgtgcgtcttgtagcttttctataggctttcagccaaaagaagtccagttgccaagcccactaatgccccaccctggagccacgtagccactacccatgaacatccaggctccaaacatcacccaaactagcccacgcgcagcacccaaactagccaggccgcccactgtcccagctcccaaccaagcaccaggcgctcctagggctaggaaccctagccgccgcagcgccgtcgatagccggtcaaggctccaacgctcctcggctccgatggttgatgcttcctccgctctcgtcctcgttcgacactctgactgaccgtcggtgtggatcgtgctgtgctaatgcctcctctccttcattcatctgccatggtccttgaccagctagaagttccc

SEQ ID NO: 121548 - DNA, 850 bp, Zea Mays
tacggcgtcagtctttcctcggttcctcggcgaatcagctccgttgaagtgtggttggccgtcgccaggagtcgttggagtcaatttgagtaccgcgggtggctgccatcgcctcgtgtgtggctaattgctcaccggagcccatatccactacgggatccgccacttcgtgaaccggccacgccacgacccgagtgcaggtgagaaaccattctgatactacctgtgttcccaagaatgtgtagaaccaagaatcatagcttgcaatttcgtttagccaaagtaatgcgtcgccggggttgttgcgctacccttgggccgctgatcgcgtggtcatggcgcttcggtgccctaactccgattaatattgtttcagccgaactcagtagggtactagctacgtgttgggtcaactttcctctagcctagcatgctggatcaccgatgacctgactccggcaatgtctgtcgccgtgagattggcgcgcgccaccacctttccccgtcggaggaggggaaaatgaccctagtcgttgatcctcctttggacggcttagattagatcgcgcttaccggttggggggaaagtcgtggatcgtccgatcgggatatgtcagcctagatcaggtcgcacttcgttgcgtatccatcgtagatcttggatctaacggtcatcataacattccagctcgcctcatgtagcagttgatcctcagcgcccagttataatcggacagtcgtaatttcgagataccccttcggtcgtgcaaccttgcaaatggacccttcggtttctagtaaaataacccgcactccacacgtgttgttccctgagtctggtgccttttgc

SEQ ID NO: 121549 - DNA, 680 bp, Zea Mays
gaggactgggggagtcgtcagaaagttcttgagtgcttcaaatgcttactgtgcctctagagtccactgaaatctgtccaccttcttgagtagcttatataatggcatgcccctttcgcggagtcgtgagatgaaacgactcagggctgccatgtagcctatcaacttttggaccttcttctgtgatgttggaggctccatccataggatagcgtcgatcttctcagggttcgcctcaatcccccagtgactgacgataagacctagcagcttccccgctagtactctgaacacatatttgtccgagttaagctaccagcggtagcgcttcaagctgttgaagacttgctgtagatcgtcgatgaagttctccgagtccgtcgtcttgatcacaacgtcgtcgacataggcctccacatgtttgccttagtggtcagctaagcacgtctggatagcccgctgataagtacccactcttgcaattccacctcatcctatatatatatatatattattcagatggaggggaacatgtgttctggatccaagagttctatgactatgatgagttttaggtctgcgatcaaccagtcaactgtggagggtttgctggtggattaatacaccgtatcagcgttgtaataaatactttgttcgttattaataaagcaccgtgtttt

SEQ ID NO: 121550 - DNA, 434 bp, Zea Mays
cagtcgcaagtattcaataagaaattcaaatcgtctgggaacaagtcaggcggcagacgccgtttcacgtaacacgacaccatttggacggaggtcaactgcttggacgatatgattacaccccgcggtcacgtcaagttactactcaagggcagtttgctaaacgctcagcgtaccaagccgtcccttggttacacccattggggaggggacgtccaggaattttcaatagattttcccaaacagtcacatccatacagtatacgcaataaatgtatcaagacagaagaaagatatcgatggagatcggaggaaagccaaatatagctactgaagtacaagtctaatcaacagaagcattgaagcacaaagcgaaatgaagaccagccaagagccatctaccagacgtccaatctatcgccgatcaaataaat

SEQ ID NO: 121551 - DNA, 363 bp, Zea Mays
gcaatattccagagaaacgcagggtcctccgcgcaaagatccctaagactcagtacgcccctgtcgtggactgcgggttattttctataaagcatggggactcttttgcaaactcaccagggcgaaagggtatcgagttcactaagccatccgatcacgatcagaccaccaggattagatctccaccaaacatgaaatagtacgcgatggtcgttttccgatcatggatcaacggaccaaaaccacccacgccaacactcgatcccgaccactagatccgatccaactcccacgatttaatctggccaaagggtaagttgtttctaatcgtggccgcccaactagatccaacggtcaccagcc

SEQ ID NO: 121552 - DNA, 286 bp, Zea Mays
atcatcccgttggctctttccacctgcccattagctcttgggtgtgccactgatgcatacttgatctggatgctcctctgctcgcagaagtcaaagaactctgaactagtgaaattagatcccaggtctgtaatgatgctattaggtattccaaacttgaacattatttcatggatgaattgcctttgctgaggtcaaagaggcgatgggcttgtattctatccactttgtgaatttgtcaatggcgactagtatgtgggtatccctcccatgagctttcttgaag

SEQ ID NO: 121553 - DNA, 282 bp, Zea Mays
agatgccaaaggacatgtaccagtccaagaagttgctctctggtctcgatatggactacgaaaaaatcgatgtctgtgtcaataactatatgcttttctggaaggagaccgcaaatgagaagtgtacagtatgtggtgagcgtagattcgtaaaggttgaaaacgatgatggtttgaccgtgacgaccgaggtagcacgtaagcagctttgttgcatgcctcttatacctcagttgaaacgtttgttcatctccaagaatacaacccgacacatgaggtggc

SEQ ID NO: 121554 - DNA, 846 bp, Zea Mays
atgagatgataggagaagttttaaagaattttaagatataccttcatcagttgacacccaatgcaatcgttagacttagtgtctacatatgggctctccgaagccagggtaagctttttaccaagtgcacgagctgcactaccagaaaaagggcaaagcggatggtcttcataagaactttggctgctacaactttgcatatcggaaagatatgaaggccccggtaattggctatcgcaccaagtggccgaccggttggacaagcgaatggttttacataaaggcggacgagaagaaaagagagaagttaatgactatggtcatgagtccaatgaaattaagcttcgtgatgacaaggcccttgtgccacatgcaacttggctccccatgccatctagctgaagtggaattcagagtggtagctgccgaaatcagcactagagatctagtacaagagtacttggcaaataggacatttccgacctctagtggctggggaatgcctaagaaaaaggaggggggaaggtacgaacttgttcggctcccttatcgattcaaatttgagaaacagttcaagaagccatgcaaagagtggctagaaatgatcgaaaccatgtgtaacgaaatgcttggcaactataccaagaaggaagaccaattaatgactgctgacttcggcacccgaccgaaacaaaggttgaaccgggtgatggatgcattaaactttgaatacccggattacgagaagcctgacaaaggggtcgaaggggtgaaaagaaaaaggactgtcagcatcctgaataggcaagccgctcggttagtaaaagaagatgaaatttttttgaa

SEQ ID NO: 121555 - DNA, 529 bp, Zea Mays
attcacttggtcgatggcatactgagatagatggttgaacttattgagatactgcattacagtatctaccccttgctttaaccggatgaactcttcttgtttcatatggagcactccctctggaacataatgctctcggaatgctagcttgaattcctcccaggtgatctgatgcccagccggttggattgctgcaaaatttgcccactaagtactggcaggccctcttaactgttgcgcagtaaatagtggcttatgcgtctccgtgtagcaaatcagcccaaacttctgttccataactcttacccactcatcagcttctagaggttcttctgctttgatgaagagcgggggtcgagtctcagagaattccgaatatgtagtatcacacagtccttgaggaggagctctcccaccatgcagttggaactgattgcccgccatttcgtgcaagaagcgcgtattatccgcagtggcattgaccagggtagcgatagaatcagccaaagtcagtggtactggtggcggg

SEQ ID NO: 121556 - DNA, 317 bp, Zea Mays
taggtaggcgggttttaacctcagccgttggcccggcatccgacggccaatccatcgtcttcccaggaacttgctcagaggcggcgccatggcctgaccggcggcaaacacgccgatgcacagccatcaaacccaaccggcgactatccctaaatccgaaacgtgctacacaaagcggggtaagagctgagttcaccagaggagcccttaccagcaagcgtgtagccgaggccctgctctattttctccctgaacgccgcatgacagcgccaagccccctggtaggcggcgcccgccggcgagctcgctgctgcagg

SEQ ID NO: 121557 - DNA, 450 bp, Zea Mays
ccaacacatgtcaaaatggacatcatttttcttacctgtatttctgcatgtggttgttgaacttataggatcttcagaccataacactgagtaaatatgttgttcaacttgtgtaagtgtttgttcagtttgaggatacgtacagtgtttggctaaagcaagactaatgttgcattcatttgtgtattcaccgcttactgacacgtgggggaaattgagctccaactgagatccctcaatgcaacaaacaaaagatatgggctggaacctgaaaagaagcactacgattgtgttgttgatttgttagacaaagctgttaagtttttagtgtctgtaggctcataataagtcactaaaccaatataatttaaatagaccttccctcttctaacttaatttacggagctgaaacggttcgccatatctgtgatcagttagatttagaatctg

SEQ ID NO: 121558 - DNA, 391 bp, Zea Mays
gtttgtacccgcaagatatagcatactctttcagttcttctttttcggccttcgtcaattcttgcccaagtatatcttgaaagttgaagtcctcttcttccgaaatatcctcggctttctcctttccctttccagccactgtgcccgggatctcttcaacagctgcagcaacttcttccgcggccgcatccagaagcattgtatcaatttcagagagcgtggcatctagattcacatcttcagcggtttcagcttcggcactttcggcttcggcgggtgcacctctgcagcagcagagctctcaatggctagagtctttgacgccgatgctagcggcggcgtctgctcgataacttcaactacacgaataattcttcatttttttggctca

SEQ ID NO: 121559 - DNA, 487 bp, Zea Mays
atttattttactactattagtttataaacttgtacgactggaactatggtgtttctccgacctctaattttgcagtaactgctctgttcttgatagcattacgatcgtacaagattgtgtcgtcaatgaaaggtgattggcaatttgttacgtgatattggagtgatagtatagggtatgataattgatcgatcatgcatgtccatggtttgttgtgtgaatattgctactcgtttcaggcaaagtgcttacacttgacgaaacaattcatctcaacatggaaatagagcaatgacctgtacatatcatatccagtagggtaatcctactacagagcacacacacatctactattgctattggtgtaaatttgacactatccttgcggatatccacgcagcaggtacggtgctttcccgttatttcagattctgactacctttggtacgtatattatcagcagtgccccgtcctccatttcatatat

SEQ ID NO: 121560 - DNA, 477 bp, Zea Mays
ggaagtatgagtttcttttatgtcaagccatctgataggctggctaagagatggttgcagcaagggtgggttggagtaagaaaggtttaggtgaagaaagaccgcaatctagatggtggattctgacttgtttgaaggtctagcctggctttcatattttcttgacgagcttgatcttatttcttctttggtcttggtgtcttaaactagggtttagaaggtttagataggtagattgttgtgaatcataaaataggttagggtttacttttgcttttaggttgtgacgaagaatagaaaggtttacaagcaaactatcaaaaaataaccaatcacacttatgtgacgaagaacaattaaactatcaagagatgaacaaacaataaaggggttagaaggacaaaagagaggtttgattggatattagacaccttgattagttatatccgattatgtatagatagcggatagtattat

SEQ ID NO: 121561 - DNA, 1015 bp, Zea Mays
ctttcatcgctccattctggagtctccctgaggctgagaggcagacctacttccagatgccgaccagcactgatgaggctgagatggatgctgttctcaacatgctggctggagaatcatctaactctgcccgcacggagttgatggctattgcgattgggtagaaccttggtgaagacgaagaagttcagatcctgaaggtgctcgtcgccagcgatcacgccggacaagctatctggctgcgcctgatgaggagaaaagagaaagatacgactccaacggttatcatgcttagaacaagatgctggtccctcaacatcactcctcggtgatggcccggcgagcaccaccctcgaggatgatgttagaggctgtgacgatgctagggttggcggttgtgtgcttgatgaggatgaagaggaggaggaagaagaaattctcttgattcataagaatagccatcgtagcaggagtagtgtcatcccgatgcagaccctatcaggacttgtcagcctctaggggttgttgatgtctccttttgaccatgcgttagaagagattatccctaagaaccttttatcggagccccctgaggttgatagttccatcgtccgctcagaggtcccggatgatgttcctttgccatgcgatcctgtcgggcaagaggtaacccagatagtttctcacgcttcattgaccttggagggcggtctagctcgtgaggacatgctggtcctcgacactgctgatcagagttacccagctcctctgggcacggccgagtgtgctttagcttcagatgttgccgctaaggacaacccagcccccgagggtggtgctgaggacgacacagcccctaagggtgctaggccaggctccttttcgactgcttctatggacgttcacgttggatcaccactagttcaatctgaggaactcgtggtgacaaatttggctgccgctctcgtcggtccggtcaccttagaggctagtgacccagatgctaggaatccgc

SEQ ID NO: 121562 - DNA, 317 bp, Zea Mays
atctaaacatacaattatttgccttgtggtttaccatatttgtcataattagggtcagcaacctatgcaattcatatagccaatttcataaactatcttaacatgggtgattttttcatatagccaaattgaacacaagaaacctgacatgacatcgaccttgttgtgtacaatcacacatgcacgtttgcttgcttaagcttgtaagccatgcatgccaatatctacacggtatgactcagtgaacttgacctcgcgtgtgtttttttccatgtgttttttttcaaattgaacagccacccatcctgctactaatt

SEQ ID NO: 121563 - DNA, 340 bp, Zea Mays
gttacaaggacagaacataatttgtatatattgagaactaaggaactttctctatatttagaggacactgttggagggtatagagaagtgaatctttcctatatacagtgtatagaacactttattcagttttgctacagtcaggcttaggccctattatgagtcctttaaaacacggagccactagatctcttaaaatgaacgaagtcgtcactggcgcctcactgtcatggtcacatcatctacaattaaatcttgaaatggatccaagaagtacctgcatcaagttagagatttcacccttgaatggcaaattttgttacaaggaatctaactaact

SEQ ID NO: 121564 - DNA, 365 bp, Zea Mays
ggtgatcagtttttcagttgatggagaagaggtcaaattgaaggggactgggggacagtgtggaagagtggtggaggtgtctactatgcatgtggacaaatggttaaaaggaaatgatgtctgggctttggccttgctggaagtaacccccaagtctgaggaaccaactgttggtgtggagttgcagaatctgttggatgaatttaaagagatgtttgctattcccgcaactttaccccctgctcggccatttgatcaccacattcctcagattccagggttagtccctgtgaatgccaggccctataaatattcaccagcccacaaaaccgagatagaaaggcaaatttctgaattactgaagg

SEQ ID NO: 121565 - DNA, 540 bp, Zea Mays
catacaacctcaaatgtgcccccactgccccgtggggttagtcaacctcagccgcaaggggaccttatccctagagtccgaacagtgactcgcatatcagggagacaggacaatgtgacatgccaagcgtatgccaacgtatgcgggctagtgacgtgtggctcgtgacgactggcggagctgtgctgcacacgatcatgtcatggtgctgacccacaagacccacctcacatttctacgaagacatcagcgaaggattcgctacatggactcgtatggcacgtaggcaaaacaatacgccataccgagagtatggctacgcacggccctagagacggtgtcaagaattctacctcaagcaggggcggcaaagcgccccttacgaatagaaaacaagtccctattgtaaggtctacccctgaactattaaagggcaggccctccttctcaaacacatgcactagttgtatcattattcaggcaatactatgattagcactacactggactagggcgcaagcctaaaccagtataacccac

SEQ ID NO: 121566 - DNA, 571 bp, Zea Mays
cttcgggagcaggtgtcgagggtttttctggaaggctctcttccacaagattttctagcgtagtttccaaaggtcccgcctcagcatgagcagaagaagtgctggtagtgaccatctctctggcatcttcaattttgccgccagaagcttcggcagatgtaggaggcggcgttttcacagattctaaaatagcgtccaaaacactagccatcctcctcttcctcggagttcctgttgtagtagctgacagcttcggcagtgctgtcaccatcatcttagggttgttctggtaccttttctgctaccttttccgattccagctctctggtcgggtctgcaatagcttcagtaggcatagcaggagtagtctatgtggcagtctctgtggctagaggggtggtttccgccctttccattcacttcggcacatcggttgtctcgatgcacctcggtctacgtgtcaagaccttgattttctttgtcttcggcgcaccagtagatgtcgaagcagcgactttccattttctcccttgcttttgaacgggatagcagtagtctgggtaaacaaacc

SEQ ID NO: 121567 - DNA, 586 bp, Zea Mays
gccgccacgggaccaccaccgcaacaatgcccaggaggaccgcctgggggctgagggatcttcggggtaccccatggctctggggtggtctagtggccacccaacttcaaggttttgaatgtcgacaagtatgagcccaagcagcaccttggtggttggtcgatcgtctactcgacgaccgctcaaggtgcgagggccacgaaggacgtcatgacggcatacctgcatgcccatcatgctcgggcaggacgcgctccaatggcatcaacaattaggccgacttatgtgactggtttgttactaacttccaatctcttaaccacaaatcgtcccaaccctaagacctcaaatccatcaaacgctagaacgatgagtcccaccgctcgttcctaaagtgtttcgagaccatgaggaatcgcatccacgacgtggttgaggcggccgtaatcgaggacttctactgcgagtccaatgactcagcctttgtcggagccatcctccaaaaagctccgtcaacctcggaacaacttttccgagaagcggacgtctccatcaacacgagtgggctcgagatcttatgggtcag

SEQ ID NO: 121568 - DNA, 626 bp, Zea Mays
aaaaaaccatccggcccaagcgctttgttatgttccatatggaatagtgctgcccaaatttcttcctcagaaaaaggcgagaccaacaatgcgttttcaacatccgaaacctaaggaatgtcatgtatttgggactcatctagagcaacatatgttgcatcaggtggcccaaataagcatttgtaatatgaagttatatgcttcattaaagttgcatccccatgtatcactttatttccatcacgtagttgaaaaatcctagatttcccactggcaactagatggaaatacttagtgttggagtccacatgtaatagatctttagtttttgctctttgataccatttaatttccttttctcgaagcagttgggctaagttatgttggaggacttgtttcaaatcaaaattttctactgacaaataggtcccctctgcctttttatccaaaaatccagcttctttaggatttctttattttcttttttgtatgctccactaaaatttttagaccaacccttaagatattgacgtaaacgcctaattttggcctgccaacactctatcagagtgtttccctccgtaacagcacttattagtatacaactagaggaagtagcgatgttg

SEQ ID NO: 121569 - DNA, 479 bp, Zea Mays
taacaagacataggaacataaactcatatttcatgcaaagagtaggcggaaggttgtacggtatggcaatgataggccaacatgaatacgacgcagcggccatattgaacggcatgaaaccatcagttgccaagccgatacaaacgtttcttgtatcgctagcaaaatctggctcaaagttgtcaagagccttccatgcatcaccatatgacgggtgcaccattaacccatcttgtctgtccatacaatctttatgccacctcaagtgcatagcggtcttcctcgagagaaacaaatgtttcactctaggagtgagaggcatgtaccgaagctatttatatgcaaactttgtcaccaccttctccccatcttcatttacaagctccatgtacctcgacttcccacattttaagcatttctgctctctgccatgttccttccaaaaaagcatacagttgtcctggcaaacatcaatcttc

SEQ ID NO: 121570 - DNA, 419 bp, Zea Mays
gcagttaatatccgggtctgttacaaccattgccggtaccagaccaagcttgggatgtgataagtatggactttgttgaaggtcttccacgatctgcaaatgcaaacaccattttggtgatagtggtcaccttttctaaatatgctcattttatacctttgctccatccttattcagcattgaaagtggctcaactatttcttgattcgatctataagctccatggccttcctcttgccattgtgtccgatcgtgatcgcatatttaccagtcggctgtggcatgagctgttcagattggctggtacatcattgaagatgagttcctcgtatcatccacagaccgacgggcaaactgagcgggtcaaccagtgtttggaaactttcttacgcagcttcgttcacgcttgcccatccaag

SEQ ID NO: 121571 - DNA, 302 bp, Zea Mays
gtaaactgtgtgagcgtccggtacagactgagcatacctttctgaccacatcgaagatactttccttgcatccgtaacaaacatagcagggcccgaagatgagctcaactgttggaagaacggtgcattatgttttactcgaataggcaacaagtcattattgtggactatccatgatttgcatacatctctgcacattcctatttgtgctagatgtgcacatatatctactcccttggcccccctattaatgtggatgtggtcctgtccacaaaagactcttgtgtcacatcgaggaggag

SEQ ID NO: 121572 - DNA, 870 bp, Zea Mays
gtcaaggccatgggctggtctccctatccgagtgcaccgtaatgcaaaggccctcgttgatgtggctattacctcagtggtaggcagtggtgaatctgtgaagttctggtctgatagttggctccttggtaaaactgtggttgaacactgtccaaccctgatccaaatgatttctagaagggctttaaagcgaagaacagtagccgaggggctcacaaatcgtcaatgggtgtcagatattcggggaggattgtctgtaacggtcctagtggagtatctgcagctatggaacttggttgatggggtagttctgcaacctgacatcgcagaccaacacatctggcgcctctctgcccatggtacttattgtagcaaatcggcctatgatgctctctttgttggctctatcccttttggcccttggcgacgtgtctagaagacctgggcccccttaagatgcaaattctttgtatggttggcaatcaaaaacagggtttggacaactgatagactggcaaaaagaggtttgccccatccagttgcttgccctctgtatgatcaggccgaggaaaccatccagcatattcttgtctcctgcgtgttcgctcggcaaatatggacgtccatactacacaatttaggcctcctagccattgtacctcagcctggatgcactcgtttctcaaattggtggtgccaaagtatcaagaaagtggagaagagtctaaggaaaggtcttaattccttgatcattttggtcgcttgggtgatttggaagcaccgtaatgcttgtgtttttgagggggttgtgccctgcacccagcgagttcagagtgctgtgattgaggagggcagcgtttggtgtttggc

SEQ ID NO: 121573 - DNA, 754 bp, Zea Mays
accgatgactcaatggcgttctggacggagcaccgtagtactgttcaaaaggaaaggtttgtgagcgtcactactataaaggaatcacgaaacaccgtttaagggaacgggtttataccgtggagcaactggaccacggagaaccgagggatctgctgctgtggtcaccactgttagggctcacttcgtgttcaagatttcatagtggaattagaggactgggcaaggttaagggcttgaccaagatgcaagagagaggttgcacatggtgaagaagctatgaaatcaaccggagctcggtagagtttagtttgggcttacacacactttggcaagacataatagtttgcaagtttgttgtgggttcacttgtgccttatacagaggataaaggagagccaaaatgttccacctatcccctacatggtcaccacatcaaggtaagacatagggaaaggatgaatacacatttattgcatgttggacagcacatcaggcaaccaagcaaatgagtcacctatagatagacttttcatttccctaagttaatcctcagtgtgatggagctatggcaggtgaaacgcccccatgaggtaaatttatttctatgacagctcaccaagaaacaactagaggctctagtggagggagatccttccttcagatattttactcagcccagatttacctccatttttctcccatttttccacataaggacagacctatctcacttaaacaaatctgttcactt

SEQ ID NO: 121574 - DNA, 503 bp, Zea Mays
tctggaaaagctccctctttgagactgaggtagttgatcataactcgtttgggcacactattcgtttccaatccaaactaaatgggtaagtctggtggctctccaacatttatgccccttgctctcctcatggtagagaagcttttattgcctggttttctaaccttgaaattgatgatgacaaactttggattttccttggtgatttcaacatgattaggtcccttgaaaatcgtaacaagcagggtggtgaccctattagaatgctcaatttcaatgcggcaatcagtcagctgggtttacaagaaattcctctcagagggcaagctttcacttggtctaatatgcagcgtcatcctttgcttgaaaaattggactggtgcttcgtttctcctgcctggtcttccatgttcccggccacctctgccttttccctggccaggagtgcctcggatcatgttcccaggatggtcaacattcaatctaacgttcccaaaccgccc

SEQ ID NO: 121575 - DNA, 356 bp, Zea Mays
gtcctagttaatagatcctgtatatacttgcgttgtatcaagaagactccctgcagagtgtgtcgtacctcaataccaaggaagtagtgtagggaaccaagatctttgacagcaaagtcatctcgaagctgatgaagaaggcgagtgacaacagcatttgaggagctaataataataatatcatccacatagatcagcatatatatacgaatgtcttgcttcttgagaataaataaggagacatcggcctttgatggggaaaaaccaatgtttatcaacttgtcacttaatcgagaaaaccatgctcgaggggcttgtttgagaccatatagcgacttatccaatttacacaagta

SEQ ID NO: 121576 - DNA, 370 bp, Zea Mays
tcccattcacaaatttaggaggaacatcctccttcttgtatatcgggatattgattttaagacgtaatgattctcgagtatgaatcattccatcttcttcccatacttcgaaattgtctatttgggaccgtgtgcgtactccacgagatgttgattccgcttttgattgatctgtcataactctcttcaatttttgcaggtagcgtgtcactgattctgacggtttcttgacattgttagtggcgattcgctgatgaattttctttgaagtagttggcccttcaacattggtgtcaacctttgcttcctttttgatgtttgcgtcgacattctgaggaacaatttgtctacgtccccctcgtcgagttcc

SEQ ID NO: 121577 - DNA, 312 bp, Zea Mays
ccccgccgggacgcaagctctctccggccttttattccggatgagattctagaaaacccaacagcagcaagcaaagcatgcatgcatgtctttgtgtgtggtattaattgtggtgcacgaaagaaagcaaaagacgcaagaaaggagggggagaatctgatgatcaatttggtgagctaccaacgtgagcttccactcctgactcctctctcttgttgtcaggcaagaagatgcgtgccctatgaagagcttgtttaatgcactgctgctacttgctttattctcggctggttggtgcgggatgggtcgatt

SEQ ID NO: 121578 - DNA, 304 bp, Zea Mays
aagcacttctgctcatgtcaaagtgggaccttcagaagctgtgccagaaaaatttgcgaaagaaagccttccggagaaacccacaacatctgctcccaaagcaccttcccaggacaatttgaattttatagttcgacatgctttgggaaaatagctatcggcagaacaaattgccgaaactgcacattatgctaaggagctgaagtaacccctggggtccttagtatactgaggagataatgatgatgatttcctctactgtctacctgacagtaaggagatcaatgtttgtcgtgaaataatg

SEQ ID NO: 121579 - DNA, 419 bp, Zea Mays
gtttgactataatacagtgggcctcaatggaataacttgcaccaatcaaccaaaaaataatttgcagtcgaagaagactgtctgcataaaagcaggacaaacttcttcccaatcagcattctatattccatgtagccgatcacgctaaactgtatgaaggcgacctgttgttaacttgttattattcaatggttcccgatggggactttatggcattagcagaaccgtatttggcaccccaatggtcaatgcagagttattaaattcgtaagtacgatatgcatatatagttgtatcgcatgacgtaagaactactggttttggtcgagaaaaggaagtgatggtgaagtgttaatttactgctaggagagcaggagtacagcattcctccgtaagttgtgcttgaacttctctgattt

SEQ ID NO: 121580 - DNA, 279 bp, Zea Mays
agtagggtctaaaactgtaaatgaccttagcatgagttgaacgacttaatgattcatccatctattgctctcgtagttctgcacttggttcaccaggaacttgagcctgttgtacatttcttgtgtcccttctccccacttcatggtgaacctcccaaattcaccttcgatgagctacatcttagtgattttggtcatcgtgttgccctcgtgtgccgtctttaatgtgtcccatatgtccttggcattctacatgccattcaccttgttatattcttc

SEQ ID NO: 121581 - DNA, 475 bp, Zea Mays
tcctttcattgctggattttatgagtccatggcaaaaacaaatacacagaaaattactaaggagatcatggagggtttatccgaagattctgatgacagtgatagttatgacattgaaagcggggatgaagactctgaggatcggccgtggcgcccaagccatactatcttcggaaaatcgactatcaagcaaagtcatattgatgccatgagggggagatattttcgcgacatgtctattgtcagagttggaggagacagtactgcccctgccctggaggaaaacgaagttgttatataccgaagcttcttgaaggcaggtcttcggttcccgctgagtaaatttgtggtcgaggtattaaagatattccaaatctttctccatcagattacccccgaagcaattatcaggatggggatatttgtctgggctgtaaggagccaggggctggagcctagcgtgaagtgcttctgc

SEQ ID NO: 121582 - DNA, 336 bp, Zea Mays
atttggcaggcttgcacttcattcccaagtgcgattgatggccttctaatggtgaagcgtgaccatataggacgttgaatcacacctctcacatcctccctctgattcagatcatttttcacgtaaaaccattgcttcatacaagaactcggccatttctttcggaatgttggcacaggatacctcacatcagaacgaggcacgaagttgtaacaaccgaagttattatgatactgctccttcccaatcgctttcgtctggtacgataactcatgaatattgcagaagcacttggcatttggctccagcccttggctcctcatggtctaaatgaaa

SEQ ID NO: 121583 - DNA, 603 bp, Zea Mays
tgggcagtggcttgcgcttcccacctgagccgagtcatccccggcaacatcctcgggggctgggcaagtgtcaacaccgtccttgaggaccaagttctctacagtagccgcctctaaggctgatggaccctcagttacttccatgggaccaagatgatccaagttagtctcctgaccctcaagaccgcgttctaaggtcgatgtggcacgggatgacctcaacccagcatcgagcgcatcagcacaaacctccatcacaccatcatctgctggctctgataacagatcctctggaaccatatcctcaagagtctgatcaaaattcgccagggacaattcttgcagaccaatgagagcagacagagcaggagaagaaactccactactttcaccactggcgacgtactgccgactgttctttcgagtcagagggacctcgtcctcttcctccccgtcgtcttcaccagcaacataggcaacacccacattggaatcagcaacagatggagcacacccattggggtcagcagcagatggagcacccccattgggatcagcaacagatggagcacacccatcagggtcagcgtcagtaaattcagg

SEQ ID NO: 121584 - DNA, 447 bp, Zea Mays
cgagagcatgcagcttttcctttccggagccacagtagaaaaccaggtgacgccgcttgtcggcttgcgatcgcaatcgtgttgttgcacttgcacgcgtgtctctgtttgaaccgaaaaggctagcaaaagctgcagtgcatctcatgcatggatgtggcgcacgaatggcatggcgggtttttttaacatatcggcgccacaccgcacggccatagattgactattatttctaaagctctgatttaaagcgggccggagatcgatcgatcgagaggagcgatgctgcagggagtggggaggaggtacggtacgtgcctcgtttctttaggaaaaaaatatataatggaccatgcgtgtattcctcctcctcctcctcctcgtcgtcgtctcgatctcctcccgacgtccgtgcgtggtggttgatttattggagccccattttgg

SEQ ID NO: 121585 - DNA, 290 bp, Zea Mays
tattgctgaggctgaagaagctgatattgaggaagaaaatgctgatgaagaggaagactacaacactctagtcccgacaaatcccagccacttagattttgaaaaatctactgtctctgagggcgatgtgccaatgatgatgaagctcggctacttcgggaagacagaaaagaagcttcttcattttgccggtgaagaaatcatcctagagccaaaagatgacgaagtggtagttttcaaaagctttttcaaagctggattgtggtttccgcttcatgagatgattgggg

SEQ ID NO: 121586 - DNA, 973 bp, Zea Mays
acgcctaccgcctccaggattggagcagggtttcccctaagagctgaaagagaagccggaggagaagggagtgagacccacctccccgcacctccagaactacccttagatttagcccaagttctagccaaccaaacccgactcattgaggtcctcactagaagtctggagaatcaacgcccaaatggtggaagaccacaagacaggatgggagattttctgaggctcaagcctcccacattcgctggatctagcaatcccctcgatgctgatgattggctgcgcacgattaaaaggaagttagaagccatcggatgcctggagaatcagcatgttcaattggctgctcatcaactttccggaatggccttagcttggtgggatacattcaacgctgccatcagagatgctacctggacagagtttgaaactactttccgagagcaccatgtgccccaagggatcgttcagctcaaggaagatgaattccgggaactaactcaagatggaagatcggtcagtgaatacgtgcacaaattcatagaattggcccgctacgcgccggatgacgtcagcaccgaagtcaagaagatggcccacattttgaaggggctcagaccagaactcaagaccatcctagctagccaagatttcctcagcttctcgcacctctcaaacaaagccatacaagtggaaagggcaagggaagaagaaaaaggtcacctcaagaggaaattccaagtcctccgagctcagcagcaagaccggcaccagagaactcgatcctttgggtttccacccaagggactaggcttcattagaccagttagacccaccccgtcacatttcagtcagcagagtcagagctcctttcatgccctctcagtttcaagcaaccaaccgccagcaaatgcctgttggcactgcggagaccctagtcacttcaaaaacaactacccccagttgaaggcat

SEQ ID NO: 121587 - DNA, 359 bp, Zea Mays
agctttggttcctggatgtggaatggtaaattatttcattcttctggcagatggttccaccagatactactgtttccctcctagtttctctccagtaaccaagtctgactaaaatatgactattactttcaccttaggacaccagtcagtataaattataatgtgcctagttttctccatatatcctttgtagtcattgagagccgatgtgatgtgccttgacaataacagtacccaacttgccatagtacaagacattagcaatatcagccttttgattgagattttatgtgtaatggtaaactgtacttaggggtgataagggatcacgattcaaatgtttcttcacaaaaagttag

SEQ ID NO: 121588 - DNA, 752 bp, Zea Mays
gtttgcatcaagaacatctgctcaatggtcatcgagggtggcggtggcaaatgctgctgcggagctgcctcttcctagggtgcctgctgctctagctgagcacgcctcgcacctctgcgcctgttctcagacatctgtagaaaccacacacatatcagatctgactctgcagtctttcagcataagaaaagatatacggaaatcttcacaacactaaacaattgatcatcttcactgacaacttctcagataaagaggaaagtggaaataaatagattacccaactaaacaactgactttattaataactacaccaagttgcaggggatacccacaccttggtgacaatcattacaaagatccaacttcattacatgttcatcatgacaagcatccaacaagagataaccaaactaactctaactaagactgactagactaagacactgaattaagcattattacagactctgactccatcgatctatggatctaaatctatgcgggtcctgcagtctggggtaccatagtcgaagcgaccacggggcggtgaacggtaagggtgctgaatcccaacaggggcgggagaaccaccatcaagatagtggcgtgccacgcattcagcatgcaattccgcaacctccgcccgaaccttgcccaactcgtcaagggtgtggtccaactctgtgttgagcacggcgaccaagttgaccatgctactcagcctgggattgccctcaccaactggcgag

SEQ ID NO: 121589 - DNA, 402 bp, Zea Mays
ggttagtatcacaagaactaaaggaagtagaagcatcatatgaacgatcatgtttgaactcatcaaatttacttttgatcctagtccaaatatcatgcgcatcaggaatatgttcattataatttgtaatgaaggcatgataatcttcttcgcttagagaattacctaagatgtcaagagccagatggtttaagcgtatacatctttgatcttcctcggaagcatcataatcagagggtatgatactcttgtctataatttgttctaatcgtggatctatagttctaaaagcgtttagtacactagtagaccatgagtgatagttagaacaatcggaaaataatatctcaagagttacctccttccgagttgtgttcttgttcttttgggatcttctttgag

SEQ ID NO: 121590 - DNA, 372 bp, Zea Mays
ttaaatgatccccgacttaagtcgattgctccgttagtagggtatagtgtgcacccttgatttgtatgcgtgggcatgtaacaccgacttaagccgatccctgacttgagttgattgcttcgttagtagggtatggtgtgcacccttttatctgtatgcgtgagcatgtgacaccgacttaagtcgattgctccattggtagggtatggtgtgcacccttcatttgtatatgtgagcatgtaacactgacttaagccaatccctgacttaagtcgattgctccgttagtatggtatggtgtgcacccttcatttgtcctgggcctgctcattagcggttgttgggaccttccccttccgaaggtcctaaaac

SEQ ID NO: 121591 - DNA, 399 bp, Zea Mays
aaaaaatgagcgcctttgaaataccatcacaatgcatgagcattttggagttggttaatgattatgaaagtacaagtcatggaataattttaggcctctgtgctgatcgcttttgcacttatattatgaagaaaagtagtttggtatagtttaagattttaattcatgatttgagcaagtatattatttattcattaccgtgtctaaaatgtgtacacgaattattataacacagaacattatggacataaaaaagaggcataaagcggaagttccttgcttcgactttgaaaattttagccgaaaggggttcaaggagcttcaagtatccgaggaaagtggagtggtaaagtatatatccatcccaacctctttagtacattttactttgtttcaaca

SEQ ID NO: 121592 - DNA, 784 bp, Zea Mays
gtcaaccaccacagatttaatagaattcctcttcgctcgatcattaaggcctctcacattccaacacaaaaaaacagcgatctaacattgacaaatagtaaatccatctgatgagaccaaccagcaaaaggtcctaacattgccccacaagaggcacctgccatccaaaaagcgcagcaactgcagcaatatggctactagagagcccattctcgaatagccttgcataaccgttggcatcctcaagagagatgttctccaatgcatcacaaaaacccaattgtctacagacctgggcagcagaactagaacccaactctggaggaaacttggccactctcctgctacgcctgggaatgaaattagcaggcacagacctcctcctcctattggtgattcgaggaggtggcagcaaactattaatcggcttagttacatcattcttgaactcttgcagctgtgatgaaagaacactctcctcatcctgaactggctctagaacaagcttctttctcctggaataaaccttgaggcagggagaatcatccttacaaccatgaatcatcttgctgagaaaaatcgaagacattctgttcagaggttctacagtccaaatatttcctagcacagaaaccccaaactgagcagacaccttcactctgaccggaaggacctcagtcacctgattcccagaaccaggcggagcagatgacatagattgaacagtagacaccagctgaacagcaggctcacaagtaacagtgccaacaagaacccatgagcc

SEQ ID NO: 121593 - DNA, 597 bp, Zea Mays
gatgtgttgtggcccttggtccgcaatgacattagttcactaagtgagtgccatatagttgggtagttgggttctcttttcctgctctttccctttaatccatctatgcttacctcttttctttctctacccttttcctcttgtacttgcccagttggcagagtccgagtcgaatcaaagaatctatgtgccaaccttgttttcttgctattcttcccttgaaacacaataccatcaacctattcatgtcaaaatacaacaccatccttgtttcacgctagctggcactccctttctgatataaatgtctaaatgtccttgtttcatattttctctttgtatatatcatgaaccgtgtgaaaccttgtctcactctcccttttccccctacctagatgaggaatcccagtgaagataaagtggatgaggtcaacaacaagatcccaacctcaacagtggtgaaaaggaaggatgagtcacatagtatctgctgaatggaatgaagaacaacaagagggccagaaaaatgttgggtacaagattaaaccgcctcaaccgcaagcagaagcgccaaagctcgtgaatacccaaacaaga

SEQ ID NO: 121594 - DNA, 723 bp, Zea Mays
gttggatagggggtcaagacaccggtaccctttgtgatgcggcgagtagccaagaaaaacacacttagcggaacggggatcaagtttgtggctagtggtggcagagaggttgggatagcaagtgcaaccgaacacgcgaaggtgttcataggagggtactgttttgaagagggagaagtgaggagtagaaaagtgaagggtcttggtgtgtagaatgttgagaagaagtgttgtcgtgtggagagcttcaacccagaaggttggtgggatgctggcctgaaagagaatagagcgaatggtgttattggtagtaccgatgatgcgctcagctttaccgttctgaggtgaggtgcagggacaggacatgcgtaggacaccgttggtgaggaagaatgtttgggagctggacttgtcaaacttgcgcccgttgtcacattgcacaattttaattgtgacaccaaattgtgttttcacataggcgaaaaactgagtgagagtcaagcatcagactttaggcgtaaagggaaagtccataagtaatgagagcaatcatcaagagcaactaaataatatcatcaagaacgactaagtaatatttgaaacctgagacacttaaaataggagatgtccacaagtcacagtgaatacgatcgaaattgttaaccgcacgagaagtagacgtatgaaacggaagacgaacatgacgactcaactgacaggcat

SEQ ID NO: 121595 - DNA, 551 bp, Zea Mays
ttggcttgtactctatccacttcgtgaatttgtcaatggcgaccagtatatgagtataaccttcctgagcttttttgaaaggtccgatcatgtcgagcccccagcatgcaaacgactaggttacaggaatggtctgcagctgctgcacgggcaagtgttgctgttttgacaagaattggcatgcctcgcacttctggactaactcggtagcgtcactcttcatagttggctggtagaaactggatctgaaagcttttcccaccagagtccttgatgcaacatgcacaccacactgcccggcatgaatttcatctaatagctgtctcccgctggccaagtggatgcacttcatgaggactcctcccgcgcctcttctgaacagcaaaccccctatgatggtgtagtgggctgactgtcttgcaatgcgctctgctatagccttgtcatccaggtcctcttcattctttatgtacctgatgattggctctcttcaatcattgggatctgcctctggctaactcagggcgttgcattcttccatctggtccgtg

SEQ ID NO: 121596 - DNA, 825 bp, Zea Mays
gtcaaatactgtcgatgtattgattattgatgttgtcaagttcagaatgtagtaaaattagcatattcactttccatgaagagagagataagtgtacttaacaatgaaatcttttactactaggcatcatgatgtggacaaggtatctcttgagttattgacttcatatggacaaggtatgcagagtctacaccaactggcaacagagagaaatcatcagttcatgtacaggttatgtgagaacagttgcatcgtcaggcatatcagtctttcacttgtgcctctccagccccatgcctatcttctgttaagaaggatgcagtcctgtcatcatttccccttctcatcccacaacttttttaaattttcaataccaccacttctcacatgattctatctcctagcaaaacagcacacttccacacgctcaaaaccgcaggtgccatctaaatattatttttctcatcttgtaatctactgtcctaacaattattgtggtgtagcaacatcaggatactgtagctacccaaatgtattgatgagtgaaggacagagcgagggacacaggctagaggcacgctgatcctggatactgtcaagttactatcatacgagagatttataatgcttgcaggtatattgccatagtgttgagatcgtcttgtacatgtactcatgctgtaggggttgatacgtactttcatagtggcaggacctatgacctaagatcacaccatgggtacaacgtagttgataaacggtgtagctgcttgcactttataatgcttgcaggtatgttggcaaattcaggcgtgactacaagga

SEQ ID NO: 121597 - DNA, 334 bp, Zea Mays
tgtgcgaggcttttcttgggattctcccccacttcggactttggaagtatctttatcactgtcggcccgggatggctgcggacaacaccagcttgttggcagtgcaagtttagagcttcgccggggaaggaaagtggagtatctcgatattcctctcaaggacagtatcaaaggatgacgtcttgagtggttcatcgtggaaaaccactacaactctccccctcggtcggggaggcaaccagatgttcgcacacctagctgggtagaatctcctaccttttcggagataacagaggccaaagtattacttgctgagatctacttgttgaaggat

SEQ ID NO: 121598 - DNA, 379 bp, Zea Mays
aaagaatgagattgctcgaatgattctatgggcaagtactgtacagccgtccgaaaactagaagacaaatatgaagggctggaatttcatcatgtggaaagagatcgcaacgcatcagcaaacgcgttgtcgaaactaggatccagttgaactcaggtcccacctggagttttcgtccaggaggtgccacgcctgagcatttccctagatcaagcagaagagtgcaatgttttgagccagccagagtcggactctaatcactggagggagcccatcatcaggtatataaagaatgaagaggaaccggatgataaagccgcagcggaacgcatcgcaaggcagtcagcccactacaccctcataggggacgcactgtata

SEQ ID NO: 121599 - DNA, 279 bp, Zea Mays
cgcagcggcgcagctcaaaattcctgccctctcgccatcaaatcatgcgaaggatttgctaaacaggccatccatgttttcgtcatctgtcagtgtcaggtacttgcaaattttctagaaaccttctttagagatccgactaatccattccgtcgatcgagtcccgtccgctccatatggaagaaggcggccgccatgaccatgacgcgggcgaccgcatcagcagcctacccgacgacctcctcttctcaatcctcctccgcatcggatccattcgcg

SEQ ID NO: 121600 - DNA, 287 bp, Zea Mays
ctggatgtcaaggcggcaacggaacgcatcgcaaggcagtcagcccactacaccctcataggggcatactgtacagaagaggtgcgacaggagtcctcatgaagtgcattcactcggctattgggaagcaactgttagatgaaatccatgtcgggcaatgcggagtacatgcagcgtccagaactctggtcgggaaggcttttagatctggtttctattggccaacagcgaagagtgatgctgtcgagttagtccagagatgtgaagcttggcaattcttatcgaag

SEQ ID NO: 121601 - DNA, 469 bp, Zea Mays
agaacacaaacctgagagtatttggccaatgtctcctgagcacaaacgatggctacactggcatgttgatacgaacacatagcacatttttccgcctccacagcggattcaagaacatcaagcatcaaaaccacatggttgcctactgatgatgtggcgcagagatcaccagctatcacacaggcggcagtagaagcattgatggtgtcacgagctgcttcaacgaccgcggagaacttctaggcacaaagctcagcgacagattccatgccgaattccatggctgtaaaccctatggttatagaggtaacaagtggaaaacgataggagatctcaccagcagcggcggcgcatgatccgccctcggcgcaaggagatctctgacgagagaagggaagggaagcgcgttggggaaatgatgaactcgaacaaacacagagagcgagagatagaagacgacgcccagggt

SEQ ID NO: 121602 - DNA, 474 bp, Zea Mays
aaaaatcagagcaagaaacgcaaggaagtccgagcagcaatgctgacctgaggtctggaaatgcatcgcacacgggcggcagtgccaggcaaggaaaaatgctagagaattctcaaactttagaaaaagtttgcgcggggtagaatatgtttactagtgaagtatgaacccaaaaaaacctaaaatcgaagtgcggatcagaaaacccgagagagatggggttttgttggggttttctcaaaacaaactcaaatgagaatcaactcggatcacgaccaagaactgcaccgtaacgacatatgtaatgatccaaagagtctatttccacccaaatcaaaccacaacactacccatgttacaagaactcaagggttctccacaaatccacaagagaaggggaagggagaaaccaagaacacaaaacttctgaattttagcaaggatgcaaaactgagattgagaagtgaccaaaac

SEQ ID NO: 121603 - DNA, 495 bp, Zea Mays
gatttatcggaagtacacattccggtttagggatcggtttgatgagtcgaatgatgattggttggatgctatagaggcaatgagtgatgagctacttagagcctactcgaggggtgaagatgaagctatgacagtcaccttcggtgcttgagggaaaagagactgaatagggttttcgatgatattgggtttatctaccctgactactgttttcttgtttggaaacaaaaggggaaaaggaaaactactacttcgacatcttctagtgcgccgaaggcaaagaaagtgaaggtcttgacacgtagaccacgacgcattgagacgaccgatgtgccgaggcttattgaacgtgcaggggttgctccttctgccacaaaactaggtcatgttgtgccagtcgaggctagtacaaacctggtcgaagagccaaaattagagaagacaacagatcagttgaaggtgttgagcccactgggtacaataggattaccgaag

SEQ ID NO: 121604 - DNA, 743 bp, Zea Mays
aagacattacaagatctgcccgtttctaggaagcaagccaatggacatttaatgtagcgaggagtgctaattatctggtgagagtgctcccttagagctaaagcaccataatgcatgaggaaggtggcatgagttggtggggctcgatacacgagtcgttgccactatggggccatgtgtcatgtgatcctttaggaaacaagctatgatgcaattaatacaaggtgagtggaggggtgctgggtacctagtaaaggtgggcccttagagccaaattggcacattacgatttggatgttggtgcatgcttataaaaggttgtcttgcacctacttgtgtttaccttaccattcttgccttgtcctcctgatgccattctttccttcttctccttgtttctaccttgcttgtgtacataagcaccctaccagcaaaactgatgaatagagcactaatgttcatcatcactcttggtaattcccatgctacatggccatcgacgactgtgtgcatgcactagtgaccaaggaattattgcaagattcatcgacgtagagggtgaagacggaggtggatgaagtcaagcctcatgcatgaaaggttgtggtgatgctctagcacttcgagtgtgagctcaaattgctgctccatcccttcttacgggggatgttgtggtactactggctagagctccaccacctcaatccaaatagcattcttcacattgtcgtcttcatgatgct

SEQ ID NO: 121605 - DNA, 592 bp, Zea Mays
gttcatcgtcagtcaccggggaatcgaggccaacccggagaaggttgaagccattctaaggatggaaccaccatgatcacaaaagaaggtccaaaagcttactggctacatggaagcacttagtcgcttcatctcacgactcagagagagtggcatgccattttacaagctactcaagaaggtggatagattctagtggactccagaggctcaagaggcattggaagcactcaaaacattcttgaccactctgctggttctcaaaccacccaactgagctgccgccgaccgatcagctgaagatttgatgctataaatctcatgcataatccacgtggtaagcaccgcgttagtggttgaacgggcggaagaagggcatgcacatccagtccagcatcatgtgtacttcatcagcgaagtcctcgggccctccaagattagataccctcaagtccagaagttgctatacacagtactcctcaccgcgcgaaagctgcgccactatttcgaggatcacaaagtcgtagtggttataggcttcccaataggagacaaactccgtaacagagaagcagtgggaaggacgaccatg

SEQ ID NO: 121606 - DNA, 338 bp, Zea Mays
cgcaaacctgaataaaaatggcaaagagtgtcctcatgtccctctactatcccacaacgctgcaatcccttctgaagctcagcataataatcttgaacatatttatcacttaatggggacgtgggttatggatctttcatcaggaggggtaactttcgatttggtggagatgtcacacaaacgatcaggcttccaatcaacacaactagaaccctgcaatcgcaacaccacttctcctctcgttatcaaccgtgcactgcgcgattgacctcgccacgagggctaattccttcctaagaagacacaatcaagaacaagaaagaacacaatctggaata

SEQ ID NO: 121607 - DNA, 291 bp, Zea Mays
cgacaaaaagaaccagcagtttggatagaatagacacactaggcaagctcaaacagtacataagaacacttagttgttttcatcaatccaattaaaagaggatgtatggtattacccttcagtggcttgaacctctttgaaacccttgttctcgagtgtgatcttcacaagtgaccaaccaatagtcgagctaggtcccaaccaagattggtgagcagagaaagtgtatgccatagtcccctaactaaaccttaccagaggtacatcattgtaccctagctgacaatcgac

SEQ ID NO: 121608 - DNA, 839 bp, Zea Mays
accatagagcgggttgtcggcaggctagagtaggttgtggttgatgcccatttggtcgaaggcatgcagaaaaatgatgttggcttggcttccgttgtcaacgaggaccttgtgcagctcccagcctgtcacattgcaactgatgacgagtgcgtttgtgtgggacgtgctacgacggtcgacgtctcttgcattgaaggttaatggtacgtgagaccacttcgtctgaacgacaggtcatgtgactaccacatgattgacccttcggtagtgatccttttttgtcgtttgttctcaaagtcagagctggaccctctagtgatcatgtgaatctgggtgctgttgttgtggaaagagattggggttttgctgctgggggtaatctgggtgctcgttttgatattgatgctagttgtactgttggggttgataggtatgagcgatgactctttggttgtcggtcggggcgaccctggccattcggtcttttgttgctttagtctcagggcagtctctggttgagtgttctgagtctcatcatggaacagacaatagaatattctctgttgctaaggcccttggcctctgcctttgcccctggcagtgctgccaccgcggacttgttgtgggggatagtcttgacgacgaggagtgttttctcctagttgctgctggtttgcgatgttgtgcacctagagctgggcacggtcttgctgggctgggtcctgctgtgaaggtctgatccatgtcctgctagattgcagagtctcctcaggctttcgctgagactcgacttttctttggtggagctcttctggtcgggcacacttttcaaaaag

SEQ ID NO: 121609 - DNA, 430 bp, Zea Mays
ttcagatgtatgagggcatgccattgattcttttgggaattataagtattatgtgagctttattgatgactatagcaaattcacctagatttatcttcttaaacacaagtccgaggtgtttgataaatttcatgagtttcaacaacttgctgaacgacaactaaacaaaaaaatcctagctatccaatctgattggggaggagagtatgagcacctaaattccttttttagcaaaattggcatagctcatcatgtctcttgccctcacactcatcaacagaatggatccgctgaacgcaaacatcgacacatagtcgaagttggcctctccttaatggcgcaagcttccattccattaaaattttgggaccaagccttcttagcagctacctatttgataaataggattccaagtcgtgtgatcaaaaac

SEQ ID NO: 121610 - DNA, 1246 bp, Zea Mays
gggggggggggggttgggtcagggggagaagccatgatgatcgattggttccattttcctcatttttagatatatttggtgttactgtaaacgtaaatgcaaagcaatatgattccctggcggagttctcaaaacttgtttataactatgtaacttatacatggcaggtcaagcaaattacgaataagcccacaaagtgagaaaggatcagaagttattattgatttagaagcactgtctggcttcactgaattttttcttgagatccaagataatatatttccccatcgtattgctgcttttggagtgtctttacaacctgtttcttataacttgcctgtgccatcacaagtagtactaatagctccaagatatgttctttcaaatgagtctgatgctgcaattgctgttcgtcaatgttttgttgaggtgcgacacttatgctgtaacatgttttgttgaatgttgagatccaagataatatatttgtagttactctcatctgatactagtggatgtggttaccaattatgtagcacggcattgatggattgacagttgaagctaaacagcgggctgctttacagacatggaaacctgggaaaaaacgagaagtaaattactttgatttatttgttaagaagcacagaaatgtttttgaggattctcacatttttatccagttctgtccaaaagaacctggatacagttggtctggaccaatctgtgtttcatcaattggtcgttttttcttgaaatttagaagattagaaggaatgctggaagatggtattaaaagagaccctttgaatgctgggaagctgaaactatttgcttctgtcgatgttgctcaagagacaacttcttttgtgctacacttcactaaaccaccgaaggttacactcccatatcgaatagaaaattacttgagcgaatcatctatcctgtatttccagaaggtgcagatccttttttagctttgttattctattccatgagggaatcaatcattgtcatgatattactgatacatatattaatttgatctaggattcagttgattcagatgtattacaccctcaagagtcagaacagtatgcttgggatgatttaagttcaccgcgcaaactggttgtccgaattgttggcaagtttttgactcctaatgacatatttatttattatattgattaatgtattattttggtggttattattgatagaagtggaaaccccaaacccctaa

SEQ ID NO: 121611 - DNA, 913 bp, Zea Mays
tggttgcagtctattgaacccaagctgccttatctgtcttgggaagaatttggcaccttgattcaggaacgtttcgccaagaatcaacaccagtttcttttgaggcaactatttcatatcagacagttgtcctcggtttcagcttatgttgaagaattttcacaactggtcgaccaattgactgcctatcagaatcaatcagacccattgtactatacattgaagtttattgatggtcttaaggacgacatcaaggcagtggtgatgttacaaagacctcaggattttgattctgctgcagtgttggcacagttacaggaggaggctgcggatttattaagaaagagggactcacggcgtgcatactctggagtttcgtctgctgctagagactctaaaccacccttgaacagcaagcaggaggatcagaaacctggtaacaccagcactgaggccaaattggcttcgctatatgcatatcgcaaggcacagggtctttgttacaagtgtgggctgcagtattcaagaggacataaatgtgctgacacagtacaactgcatctagtggaagaattgtggaacatggtgcctgtagccgaaccagaattgattacctcagatgatgaacaagaggctaagttgtgcatgctgaccctgtctcaaacagcagtcgagaatggcaactctcctcgcaccatgcgattcatgggtcatatagcaggaatggagattttagccttgttggactcagggagttctcattctttcctcagtgaagcagtggcagcacagttggctggcgttacactgatggacaaacctgtcaacgtacaggtagccaatggctcaaagttatcttgtgcttatgaattggtgaatgccaaatggtcaatcagtggagtatcattttctt

SEQ ID NO: 121612 - DNA, 457 bp, Zea Mays
gcaggtgattgtggtaaggcccaggcggctggagagtgagttaccgaagccactgaaattgtaggttgtgaaagtggttgttggttgcccacatactctggaatgtatggggaataacacgaatcagtatgaagaacttgcttcggttgactctgtcgtgcttcggcctcagctatctccttctgtttctgtatggtgacttggcagtttcttgttgtgtgccacttatcctctccacagaataagcaaaaatagtcttcttggttgagagttgaaccttcctccgaagctacgtcgccctctgcctcttggggctgcttgtttaaaggagctctgttgcgcccctgttgattgggaactgtgctggtacccttggttgtggttgcccctgtcctcactttgactgggattgtgtattgttctaacatgccttgggtggagccttcctcgaagcccc

SEQ ID NO: 121613 - DNA, 708 bp, Zea Mays
gtcgggtctgttacgccatgttatcacgaagccaacgcacccacgcttgcctccaattgtccaccaaagaccgcgaattgctcacttcccccaaactgagtttccaccaccgtgaaagaatcctcatcgcggccagttcgattcaggtctgctcataccctctgccctctcgttttagtgttcttgtgtgcccctgatactccccgaccaacttgattgaacttggatcccttagttcaccgggaacgcggttgtatgtccgcgatgcccgctgtcaccgtggccagagcaaattgggtagccgttcgtgaaattaagtgagggaaattatccttaggtcttgaattcggtctcggccaaagtagggcgccagtatttgtgtgaattggccgatacacgagctcgtcggagctctgcacgatgccgctcaccgtcggggactcggtttgtgaaggattagaagttctgggggtttctgtaaggtgtcagtgactccagaagcagtactgcgaacccacctgcagttattcgcaacgtccgggacctatttgcaaattctacgcgggcgcgcgcacgggcgcgcttctgtctgtagtgggctgacttgggccgctttcggtccgctactgttcatagttttccttttctttttctaccagagctaaagaaattctgaaaaattgtaaaaaaatgataaaaataccaaac

SEQ ID NO: 121614 - DNA, 455 bp, Zea Mays
cgcccagtcctagatgtgacaacacaggcgactttgtacgctcctacgcacatcggcgtaccagtctatgctgcaacccttaccaaagccttcgcccatacattgacaagatagggagaaggggaggctggtcaaggaatccgcacgatgaccaagagaagatctttgtccgctgacaacaccgcacaacgaccaagagaagatctctattcgccgacgacatcagttgttccatgcagtatgtttttattactatattcctaggcccacctgtcagggcttagcttccttgtatgtgccccgcttgggctataaaagggagggtacataactttacaagggactaggaggtagaggcacacagactccctcaaagaccctcggacacacgcagactcccattcctgaggcaatacaactcacaatggatgtagggtattacactttggtggctc

SEQ ID NO: 121615 - DNA, 344 bp, Zea Mays
cgatgcacatccggagtttcccgtttgcttttggcacgatgactgggttggccagccacacggggtggtgaacctcttcaatgaagccagtgtgcaacagtttccgaacctcctcacagatgaagtcctatcgttccttggactgtctccgaggcttctggcttactggcttggcgtttggatagatcttcagatggtgctcaatcacttccctagggatcccaggcatctgtgacggctcccaagcgaatacgtcggaatttgccaggaggaaggtgacgagcgcgagttcctatttctctcccagatctcccgcgatgcgggtggtccgggatgggtctgcg

SEQ ID NO: 121616 - DNA, 499 bp, Zea Mays
tcagttagctttcttacaggtggacccacagctcttacatgtgaggcccacttcactgactttccccttcccttcttccaaatccaatcggccgtcagtcggcacaacgaagaacactcgctggggcacactattcgtttccaatctaatctaaatgggcaagctggtggctttccaacatctatgccccttgttctcctcatggtagagaagcttttcttgcctggttctctaaccttgaaattgatgaagacaagctttggattttccttggtgatttcaacatgattaggtaccctgaaaatcgtaacaagcagggtggtgaccctattagaatgctcaatttcaatgcagcaatcagtcagctgggtttacaagagattcctctcagagggcaagcgttcacttggtataatatgcaacgtcatcctttgcttgaaaagctggactggtgctttgtctcgcctgcctggtcttccaacttcccagccacttctgc

SEQ ID NO: 121617 - DNA, 595 bp, Zea Mays
cgcggagttattttttaaaagctttaccatcatgaatagtcctaggaggggtgttggcataatagagtttgaggtagacaccatagagacttgttaccgtgagctatgattctagaagtgggtggaggagttggctctgattaccatgtaaggaaacatggcaccaggtttaagttgttcatcctgacctattaagccaagggaggctgagcagattacaatatgacttgaagtccaactcgagtacaactaccttaaccaactctaatgctaactctgctatctctgggatagatcaaacttgattctatttttaatccgagtttaaggtctttctctattatatcacaaccgtgtagacccctgatctgatatgaccataaccttacaagcacattatattctaacacttaatgcaagccagaaagagaagtaccttgtgagcaggaagatcaagatccttgttctctcggataactttccaaatctgttgtgaactaaacagaaaacctgaagcaggaactactcctcttctatcacctgcaagacctcctggtgcaattgaatttgaaaatctctgcctaagttgttgaac

SEQ ID NO: 121618 - DNA, 487 bp, Zea Mays
cccacccactcccgagtggccacaccttgaaggcaatgtgttcctggactaagtctctcgtgcctatgtaagtgcatactgtgttatatgcagcttggcacgcttgtatgtcgtttccgagggcaagggttggtctcctaatgccgaagtgagaccatataaggcgttggataatccccttgatgccttccctctcaaccagatcgttcttcacatagaaccattcttgcatccaggctccggccatctcttgcagaatgttggaactgggttgcttacttcaaaacgggttacaaagccataacaaccaaagccataacaattcatgcatattccagaagctttttgcatttggttcttgtccctggctcctcatagcccaaatgtaaacccctatcttgatgatggttttgggggtaagctgatgaaggtagagttcgaaggttttcagcacttcgaccagcatactatctaaagggaaccgaac

SEQ ID NO: 121619 - DNA, 571 bp, Zea Mays
acatgcattgcttattgtcacaactgattgtacattaattttcttcaatgtaagatggcactttcaaacaaaacgcaacatgacttgcaagaaagataaaatttcatatattaatagtatgtacaaagcattcagatattaccggtagaaatagaaatataaaaaaggaagatctgttataaatcaaatgtgaagggtaacatagtacaaaatgagacacaaagtcattgcaattaaagatatatttgatttcacaaaccagtaaaaaaattgtaacaaagcaaggtccattttatggttaatgctaagcataccaaaagagctgcatcgggtcccgaacacaactgtgtcaggctgcagtctgaatataatctgtcaccatgtggtgtaatccatttagaatttggcttcatgaataaagtagatgctctcgagatacttgtttcaggaacaaagtaagaaccctaaagtgagaagcacacaatttaatcatcaatatgtttattgctaccattgtggagttctaagtcaagataataatgtgaggagaggcagaggtagaccgaagttg

SEQ ID NO: 121620 - DNA, 333 bp, Zea Mays
atacaagcaggaaaaaaagacggttacagagtatgaagtgggctttaacaagatggtccactttgttccacatgtggcctataatgagatagaaaaggcgagccagtttcgtcagggcctgagaccttctatcaggcatgctctgggcgcctttccgctggtggattttcgaactactatggagcaggctttgggagtggagatgcaacatcggtatacaaatgagtcccagaagtattcaggtgttgaccaggctcgtgaccaggatatgaggaggggctacactaggggtccagcccataaaaagggaaagtttcaacaccaacgccacca

SEQ ID NO: 121621 - DNA, 499 bp, Zea Mays
ggggtgcatcaggagtcctcatgaaatgcattctctcagctactggaaagcaacttctgggcgaggtccatgccgggcaatgtggagtacacgcagcatccagaaccctagttgggaaggtcttcaggtcaggtttctattgaccaacagcgaagagtgacgcagccgagttagtccaaaggtgcgaagcctaccagtacctgtcaaaacagcagcatctaccagcacagcaactgcaaacgatacccataacttggctgtttgcgtgctggggattggatatgattggacctttcaagaaagctcagggaggatacactcatgtgctggtggctatcgacaaattcactaaatggatagagttcaaacccattgtttccttaacttcagccaaggcagtggaattcatacaagacataatattcagatttggaataccgaatagtatcataactgacttgggatccaacttcacaagttcagagttctttgatttctg

SEQ ID NO: 121622 - DNA, 409 bp, Zea Mays
tgcctaaatttaggatatcctcttgatatctcccagttgacccttcatgttatattaaggcaaggctcaatcaaaggaatctacccccttctagtggagatgtgaaggatcctattttagggccttgacctccattcacctacatagagactgcgatgtcgtaaatcgaggtcacttcctcgtcaaacagaggaggtgtagaggagagcaaataagtgtggcatggggaagacgaggtgacatagacaaatcaaggggtcgcaccagcttgagggtggcatgtggccccttgatggtgtgggtaggtgtgtgatggattttggtgcatcattttggtgtgcttctatgtagattggatggcaccaaagtggaagagatggaactatgctcgacattgagccccaaggca

SEQ ID NO: 121623 - DNA, 379 bp, Zea Mays
aggaagagcccttgaattcattctaagataagcaagcatatcctttgacaccaattccggaactcttgcacatttaactgtgtcaccaaatccaccagcaaggtgttgtttgaaccgctttattcctgcagggactatcttttgacagaaaatacattgcacaaaatctttctttgtgggatctggccaccatccataattccatccagggtcttgtgatcgagccttccttttagaatcaacagcttgtgcagccagagcagggggtagtgctgcaatagccttttcagtgagagaggcagcatctggagcaaccgatgaagcagtaccaccagcaccagtactaccaccagcagatgatgtcgtggctaggatagca

SEQ ID NO: 121624 - DNA, 384 bp, Zea Mays
ctcgccttgggccacccctgtcctatttgtggagaagaaatatggcaccagaaggatgtgtatcgattatctagctctgaatgaggtcaccatcaagaacaagtaccccttgccagaatagaagacttgttcgaccagttgagaggagccagtgtgttctccaagatagatctgaggtcaggttatcatcagctcaggatccgacctttggacattccgaagacggcattcattaccatgtatgggttgtatgagttcactgtgatgtcttttggtctaaccaacgcaccggccttcttcatgaacttgatgaacagtgtattcatggattatcttgacaagtttgtggtggtattcattgatgacattctgatatattctcaa

SEQ ID NO: 121625 - DNA, 336 bp, Zea Mays
gaatctcttcattccacgaagtggtgactccttgaggtacacatgatttctttcctcaaattccagtggtcttcttctattaagcgtagctcttttgcctggtctgagctaccctccaattctctcgaattatacgaacttgtttttctgcctcttgaataagttcaggaccaaagaactgtctttctccagtctgatcccaatacaaaggagtcctgcatttcttgccatatagagtctcgaacggtgacatctttagactggcctggtaactattgttatatgagaactcagcatatggtagacttctatcccaacttcctctatgctgcaggg

SEQ ID NO: 121626 - DNA, 703 bp, Zea Mays
cccagttgcaagataatataagcctcatcctccctctgctgaaagtagggccttcttagcccgaaccgggataaaccttgtgtttcatcttgcatcaatccatccgggcagggacacgcagcataaaatttactagtgggttgagggtcccccgggtccaaaacaccgacaatgataaaataaagttactaaagtgtaggcaatattattatgtagctaacgtaaattaaacggactaaaattagtaatatatgagtttactaagttttagatttaattttatatttaaactcattttcggatttatttcacttaaattaataaacccatggactgcggtgtagggtcttgaagaatataggggctatctcgtaaataacaggacctgaattaaacgttatttaactctctttggacggtgagttattttcaacatatgataggggctctttatgaattttaccacagaccacacacgcgtgcgattctgggtcgccagatcacgatccaatggctaagattacaaagcgaaccgatacgatgttttatccctccggtcttagatccacgggcgagaagcgtccacgccctgatcaagcctaagcccttggattaatgatcagcgaccacggtttaatatgtcgaaacggtatctcggcttctaatcatgttcattgctttatcgatctacggttcgtgctca

SEQ ID NO: 121627 - DNA, 428 bp, Zea Mays
ctttatccagaagagtaagggtgatctgaatgatggccatcttcactttgaagttgccaaccgtattgcgtctccaagccataagagctttggcagtgcgaaccatctttacgtgcagtcgaaggatggcatcatctgtggttactgtagaattccaagcttgatggactacctcgttgaacccgtcaatctgaggccaaaaagattcgaacctaaacccttggtaaaaagtacccgaagagtggcttcgcaatagaagcgggcagtggtctgaagtcatggtgcacatggaatgtatgtcagccgaggggaacaggtcgtgccactctgttgttgcgaagatcctatcaatcctagtcatggtagggctcatttgttcatttgaccaggtgaatgctctatcagtgagctcaaattcaaggagatgc

SEQ ID NO: 121628 - DNA, 433 bp, Zea Mays
aagacataacacgaaactcaaattgtccgtggtgtgtttgaaacattgttttgtgttggtcttgaggtgccatttggatttgatgaaacccagcacgtagatcaagtgtagagaaccatgcagctccatgtaattcatcaagcaattcatcaattacaggaaccagaaaacatgtcttaactatgagggcattgagatgtttgtagtcaacacagaatctatatgtgttgtctttttcttgaccagaataaccagtgaagaaaactcactcttgctcttctaaataatatcggaggacaacatctcctggacctgtttctcaaattctgtcttcaatgctagcgcatacctataaggtctcagatggaatggttgagcacctggtaataggtcaatatgatgataacagtctcttggtggaggcaaccctgaa

SEQ ID NO: 121629 - DNA, 539 bp, Zea Mays
gtcgtcccgagatatgttcggttatcctttatggcatcattttgctccaaatgcgtttttatattatggaggagtgcaaccgaattattatacatatggatagttgtgatatattattgcttttatgaagccaaagtacttcaattgttggtagttatgattcttactataatttgcttcgcttatatttattcatgggaagaacatgtttatgatatttactaatctctgttcgattattgcttaattgcaaactacataattagtgttgtcgaatagtttcaactaaacgattcatttgttagtacaaccaatactcgagcttatacatcattgagttggttattatgtgcttcttccatgtgagcaagttctatagttcaataaacatctttggtctcagtggttgatatggccgatgaatccttacgaatcttctttgctgcagatggttcgggcactaaggctggacaggcgcgaacagtccggttacgacgatcggacggtctgcgaatgactagaagcagcaacgacctcag

SEQ ID NO: 121630 - DNA, 697 bp, Zea Mays
cgttttctgggtcgtctcttttgtctacctggtttcagtgccggttccatcgggttttgacgcaagagtagaggacttggtaggtcgttgtgttgtgactcattgttggagagcaggaccgatttcagattgaggacaatttcagccaattttgcaggaacccgtaaaacccatccggagaattttccctgcgcgtcccatgattaggagctgcggctggacagtgccctacgctctggagttttagtgcgaatcgttgccagtttcagtcaacttttgatggagcccaggtgttgagcgccaatttgggagttccagctgacgctgcagtctgcattcttctaaggccatcagtgaggaattttcgttccttggtggcagatgggttcctccagctctaaagtggacaatgaggagcccgtgaggcgctccaaggacaggaggcggctcatgaagcagctggtgcgccgccgcccagagcttgcagctgcgcacattgcatacctgcacgccctccgcaacacaggagccactctccggcaatttgtggagctggagtctgctttgtcacagcagcctccggtaggccttgcggcgccgccctcgcctactccacagtcgctgccgcagccgcagcccccgccacctcctgaaccctcactgccaccctcgccacaccccccgccgcctctgcctt

SEQ ID NO: 121631 - DNA, 622 bp, Zea Mays
tgattttgagtgcatgtgtcgcaagaaatgaattagtgcgcatataggcgatgaatgggtgtgatgaaatggtgacatgccttcgtagtcatcatgtcgtctgttggtggcctaactgaaggtcttagagaagggtcgattacctgtgtgttattattgtcaccttgcggttctgtatgaattgcaatgtgaagtagtaggctctctatgtgatgctagatgtctaggtagtgaattgtggtgctcggaccgtcgagatgaaggttaagtcgatcgatgccgattaagtagttaaaatgattaatggaataatcatgaggctaaaactagaaactagtgttctcgcacccgtttgggatgttgtagcccaattgcgcatggttatggtcgcggaagaaaaatattagtgctcttgtgatgtctaagttgaaatgcaaattattgagtgaaaagcgtttcgatgtacatatatgccggatttgatgattgtggtgaatgcgttgattaattgtgtatggtagttctagcgcacgaaatgactcggatgaaatgtgtaagtctacttgttagccttcatttgattaatttaactctaacaaatggtaaagtgttagaataattc

SEQ ID NO: 121632 - DNA, 715 bp, Zea Mays
gggatcagcaacagatggagcacacccattgggatcagcaacagatggagcatccacattgggatcagcagcagatcgggcacacccattgggatcaacatcaataaattcagtcacaagcacttcttcagcagcaggaaccgaaataccaacatcccgatccaaactggatactcgccggaggcgtctctttttctttttctgctcatcagcagaaggatcaggttgattggctcggcaagggcgcctcgggcgagtactagcaggcttctgaatatccaaggtcgtatcagcctctgggaggggcgccaccaccgatgtcccagcaggagcagcatcagaagagtcctcagccagcaaatcaagcatagcacttatctctgcatcactaggattcaggggcacctcaaaatggacttgccgttcatcatcaggaatttccccgagcgaggcaaccaaggcgctgacttcttcagcagagggtcgcactctaaggcccaaactgccatcagtgacaggtggattcgacacaaaaagagtgaaggctttgggaggaggcaggttccaggctgagtatgccactggggcaccaacatttgacaccttgcctctaaggatcatctcaagtcggttcaccaagtctgcagagggaactcttctgttggtaacccgagttgagtcggctaggcctcgatacagataagccgggtatgcc

SEQ ID NO: 121633 - DNA, 339 bp, Zea Mays
tattattattattattattattatacgtgcatactcctacagatccatgctcccggcagctggagaagaagggtgcgtccccaccgccaccaccaacgctagctcccggcgggttcgggtcaggtgccatagccgccatcacagtcgtagcttgtgtggccattgcaggcttccttggatggtgtgtctactactcctagttttgcagtccatcgaccaaagcgcgagatagcatccatcaggtccacccctcaatttctgaattaattaattattattacaaccacgcgcatactaattaaatcagaacatgtgaaatggagatgatgtgtatcctct

SEQ ID NO: 121634 - DNA, 508 bp, Zea Mays
tttcgtagtgtagtgcacatgcccgcaacatgtcttccaaaatctgatttaccctttccgtctggccatctgtttggggatggtatgctgagcttcgtagtacctgggtcctaagtgattcttgtagctgctcccaaaagcgtgccacaaacagtgctcctctgtcagatacaatggtctttggaataccatgcaaccgcactatttgatcaacataaatttatgtatacttctctgtcttgtgggtggtatgcactggtaagaaatgagcagtcttggtcaatctgtccacaataacccaaatggaatcatggtgcctggaggtattgggcaatcccattataaagtccatgcaaatgtcctcccatttccacgatggtatgcgaaggggttgcaaagggcctgctgccttcaaatgactggctttgattctctggcacgtattgcactcggatatgtacttggcaatttccctcttcatcctggtccaccagtataaggatctgag

SEQ ID NO: 121635 - DNA, 368 bp, Zea Mays
ctcagaagagcgccgaagacgaaggctgtacaatggctcttaacaaccttcggtatgaggtgattgaactaataaacgaaggtctagagaaagacaaaattttgattttattagtgaacaaagtaaaggaagacgaggctaattacaaagctcaggccgaagcccaaaaaccgaaattgaagaccttcggagacaactggccgaagctaaagagaactgtgcgctcgcacaggctaatcaagaaatcagtgaatattggaaaaataagctagagaaaaatgttgaagaacttcgcgaatccaaggaaaggtgctttgagaaatccttggattgcgtgaaaaattaaaaactaccttcgccaaagtggg

SEQ ID NO: 121636 - DNA, 346 bp, Zea Mays
gttgtgtgctgctgccattggattgcttgggcgtgcttatatagttgccaaagcgggtagcacaaaatgccttgcttggcgggaggcaaatctaaagctggaacacgaatcaaagggaaagagaaagaagataaagagcaaagcgttcgatgccatcaaggagaaagagacgattgtcttgtgttgcataaacatgaagccattatggcagtcactggataccagggtagggtgttcatcaaagaacagcacaaatggatgctttagtaagagtgacatatgatcaagatctgaagatttaactatttattaagtcaggaaaggggcgagaaaaagaagagtgcgg

SEQ ID NO: 121637 - DNA, 738 bp, Zea Mays
cgaggcaggggcagtggatgctgagcaggcgaaggtcctcgtgcatacactggcttgcgaacttcggaccgagtaggctccatcacctcttcctgcaattgggcaagagcactaacagtatcaagtgtggaagggcgatgtaaaagcacattggatttaatagtgtccttcagcccgtcaataaaatgcagagtataaaacatgggatcagttttgttctcataagctgatagcttatctataagttcagaaaattgttcaatatagagtgctactttcgaagtttgatgaatgtgaaataactggcggataagctgttcatgttggtcacgcccgaaatgttccaacatccaagtactgaattccctccaactagctcccttaagctttctctccatagattgccaccaacgggcagctgggccggagaaatgctgcacagacacccaaatccacatgctggggccaactccataaagatcaaagtaatctttggacctactgatccacagtcgtgggttatccccgtcaaatgtgggaaagtgcaacttgggaagcgacccgagattaggtgtggttggtgattcgactgtgtggcctccaaactgataaggtgcagcaccgataatttgcggtgaagctgataactcgaatttgggtgtaccattgggcgggagttggtttcgggcatcgaaaagcccaaaaccatgctcccgacggtgagttgcagcgccttgc

SEQ ID NO: 121638 - DNA, 463 bp, Zea Mays
ggggctttctttttggatggctgaggagctctaggaagggaatcactagagatgttgggaaaggtgtcaagtgtgttcctaagatggttaggttttggaagccacacttgtttctgtggaggagctctcataggttcatcaatcacactatctctcacaggggtgacaggcttagcagaggtggttttgataagcttgggagtgggtgaaggtttctctgaaggtgtcaaaccactgcactcaccaaccttgccaaagcgagcgacactcccatccttagtagcaaagcctaaccccggtccgccagttcccctcttgaactgactgaccatcatgcccaattggggatcactgcacgacacccaactcaagatagatcgaaggtatgtgttttcttcctcgattcttgtcttgtcgtgtctgcaggactcaagggcagattgcaaaccctcacaaagtgcac

SEQ ID NO: 121639 - DNA, 476 bp, Zea Mays
aaactaccaactattccaaaagcatagtagcttaataatatgctgatagacccatctgagtagaggaccattggagttggctggtaccttctctcaggggtgcgcgtcacctgttcgacagaatgtgtgggtcaatttgcaaatgtctgtcttagcattgggtacttggcagtccagaagttagcctatccaaaagagcacaaccggcatcatcctgtagcagaaatagtttcgtttgtttagtacgccttcatggttattccatagagtggatgcacgttcagtgctttaatttagttttcaaatttcttttgcaccttcaattcatagtgagacatcgagttatagttctagcaaactctctgtatggctgcacctaaacatttttatttgaaggttatttgatattcattttcagcttgcagtttagaaatggtctttggattccctggtagccaaggttattgaagggtaat

SEQ ID NO: 121640 - DNA, 349 bp, Zea Mays
cctataaagatgccctcgtatctggctccaggcgcctccctacactaatcaaggctccttctcataccacgacaagctcaagagccccagaggctgtcaagataaaggagaagaagcaggtcggtggacccttggtggtgcagaatctgctggtgggatcacatcaggacgagcttggctggcaggtggttgagcgaaggaagaagacccaacatgtgcatcttcctcgtcgagggtcccttgtggacctccgaggtaggtgcttcaactgcttttcttcctcccatcttgctgcggtgtgtcgccgtcctacccgatgctttcgttgctttgagtacgggcatcaagt

SEQ ID NO: 121641 - DNA, 328 bp, Zea Mays
gtgctaagttgaactgcattggctaagttgaactgaatttgagaaagttcgtcaaactttagctcaacatagacaacgatggtggatactgccactgtggcaagatatttgtctaagaatattctattgttgcaacattgactataaatgcaactagttagtagtgccaaatagtcaaaaatgctaattgttgtaacatcatacttaccataatccaattatattcctaagaggtgtagttagcaaagtactcctgctactacctatagtactcttcatgcctcatgttggactcattttttgccatgagtgccatgcaacgacatcg

SEQ ID NO: 121642 - DNA, 840 bp, Zea Mays
ctgggagacaacggtagcctagaagtcaagccaatgctagaagacctcatatgcaaggctcaacgcctggacacggagacagcgagacttatggaaaaagctcacaaagaacaacttccgaaccttaggacagatgaataaggagtcctttggttcaagaaccgtctatgtgtaccaagaggagaggcacgggaagtcctgctcaatgaagctcacaactcagcctactccatccacccaggaaccaccaaaatatacctagacctcaaaaccagatactggtggagagggatgaagaaagaaatagcacagtatgtggcccggtgtgacacctgccaacgaacaaaggccgaacaccagaaacctgcaggcctactgcaacccctcccagtgcctgaatggaagtgggaggaaataggcatggattttgtaaccggactgccccggacacaaaaggggaatgactctatctgggtaatactagaccgtctcaccaaagtggcccacttcattccagtgaaaaccacttttggaggagccacccttgcccggatatatcttaaagagatagtcaggctccatggtattcctcggaagatagtgtcagatagagggacgcaattcacttcaaaattttggaaaagccttcagcaagctatgggcaccaagttagatttcagcaccgcctatcacccccagtcagatggtcaaacggaaagggtcaacaaggtccttgaagatttattaagagcttgtgtgttgatgttcgacagaaattgggagtccagtttgccgtatgctgaattctcatataacaacagccatcaagccagtatcaag

SEQ ID NO: 121643 - DNA, 615 bp, Zea Mays
aacaatagtctttggcacgccatgtaaacgaacaatctccctgaaaaataatttagcaacatgtgaggcatcgtcgttcttgtggcatggaataaaatgtgccatcttagagaagcgatcaacaacaacaaaaatggaatcgctccccctttgagaccaaggtaaccccaaaataaaatccatggatatatcttcccaaggtacatttggaattggtaatggagtatatagaccatggggattaaggcgggacttagctttcaagcaggttatgcagcgctcaacatgccgttggacatcacgtctcatatgtggccaaaagaaatgatcggaaagcatgtccaatgtctttttcacaccaaaatgaccagctaaaccacctgcatgtgcttcctgcaaaagaacaccacgaatcgagcaagctagaatgcaaagtttgttagtccgaaataagaatccatcatgaatatagaatttatcccatcctttttcagcaatgcaatgagagaaagattcattaaaatcagagtcatcagcataaagtgttttaattgattccaaaccaagcacttttgtgtctagttgtgtaaccaaagcacatcttcttgacaaagc

SEQ ID NO: 121644 - DNA, 394 bp, Zea Mays
gttctggtcccacaggaattaacagcttgatgggcatggaatcagtcattacctttcaaatttttgctacttcggcagcagagggcgttcaaggagcttcttctcttgtctcatccaacttcggctcagcaaagggagtcatgtcaagcttccgctttttggagattgccgctttcggctcaggagctgattttgccttcttcaaaatattctcatcctcctttactagcctggcagcttgcctatttaggatgctgacaatccttttccttttaaacccttcgacacctttgtcaaacctttcatagtttgggtattcaaaatttaacgcgtccatcactcgattcaacctttgttttggccgggtgctgaaggcagcagtcattaactggtc

SEQ ID NO: 121645 - DNA, 466 bp, Zea Mays
gccaggtgttatattctggaggaaggagaaagcaccgtgaccgtagataggaaactcagtggttcagatctgtagcaggatacccattcgtgggtgtgatctgggcgatcgggggctagagtatgccgtgggggctagagtatgctgtggggatcagacatccgttgatccatgatccgaaggctgttatcgcataccggttcggtcctaatctatgtgcatcggtttataatccgatggcccatattcatcgataccccttcgccgagttcttttacaacggggtccctatgcttattcgaaatagaacccgcggtccatcctcgggtgtagctagagtcttgggaatcttccgagttagcccctattctttcaagtattattgcgcgtaacccagggaacagagaaatcagataattttaattatagaaattgatttttaatacaaacataatttagaaacttg

SEQ ID NO: 121646 - DNA, 620 bp, Zea Mays
caggaggaagacgaaggtttccgagaacaaggcaatgtcgatctcgcgaacaagccgatgtcaatttagcgaacaagctgagacatcaatggactctgtgacgatcaagcagtcacatcgtgtgccccccaaaacctgatgagctgcctatcccgagcaggatctcaagaacacagagccgggaaaacagaatgccatgtagcagtgtgtgacagggcgctaggaaattctcgtggatcactagataaaagaatgatccagtcatatataaacgcacacgggaatgtgaggagatgccatcatgtaaaacagcagtcataaactagccataacaatgactgttactagtaactccaagacataaaaatgtttgttactagtaagccatcaaaatgatcgttactagtaactccaagacataaaaatgcccattactagtaacttatcattaatcttcaccttatcctctcataatttcccttggaagataaatggggttcacccaaaatattctaataatctccatcaaattccaatgcacgtgtaaaatactcttagctccaatgttatatgatatatcagtgtttcgatggagactgttaagtcaaacatccatctag

SEQ ID NO: 121647 - DNA, 485 bp, Zea Mays
tgccttcaatgcctctagatccaccatatctcacattaagtgggcctatagcctactcattctttgagagttgccttaggtttggcgtgtgttggtgccacttctcaatctccgccccagtctatgtgagcgctgatgtctgtcctcgaaactttggaacatacccgcaagtactgatacatgtgtctctcccattcacttgatgagatactattcgagagttgttagatgtcaccgtttctttttcctaggatatattgaaaaaatactgcttcaaaaaacgcaccctcaagaaaggtacatggaggcccattactaagcccatggtggacatctctctgccctctcttggccccacaaaatccaccaaggaaagtgcctctttgtcttcaggtgccttgggcaactgttgaattcctcatactgagaaaacaccaacctttattggaactgcctgccctccttgctccacactttgtatctcg

SEQ ID NO: 121648 - DNA, 788 bp, Zea Mays
aaaaaagtcaagtgcaagtccagtttttttagcggaaaccaggctcaaaaaccacacaactgaggaaagtgtctactcatcctgcacacctttggtacgacgctcaaaacagctaacaacttcgacttgatcgaaatgatccaattaggtagtgtttggttccggagctagttggaatgaagcggctctatccgggatattttaggaacacggatggtttaacattttagcataattttcctttttagagtcactctgactctgtcctaaatggaaccaatccaaacaacaaattgggagtggagcggtttcatcccaccatactccggaaccaaacactaccttaataactcagctgcccaactaaccactcaaacgcaaagagattcaattgacaactaatgaaactgaaaacccctcaagccaaacaactagctctagcaaacatgagagcacaagcaaaaagctcgatgcgttgccgatcatcaccaccaccacaccttggagcaacaccaagaaacgatggcaagagcgcaaaagcgccacagcggagatggaaatggaaagtttcctactgaaaaccccagcacgataggagaagaggtacaaagagccaaagaggacgcctccaagaaggtagtggcgtccacagatgtcaccatccgagcttgcacccagatctcaagcatcccccacccatggcgaccctccagagccccgcacagagggaacccatcctgaagaaagatgctagtgacgaaatgcaaacatccctgccagcaccggac

SEQ ID NO: 121649 - DNA, 558 bp, Zea Mays
gttaattccttgtaacttcctttggtaatgaattttacttcaacccttctgttggaaccatacctatcttaccctttattattctctccacttcgccactttgcaagtcttgccctaactctgtccatggactatgcttttcatcattatcatctttacccttgtcacctctatatcttaccttgatgcttatgttatacctgttctttaaaaccttctctcttccatctcaattttatagttgtattttacctattttcccttggttgtatcctcttccttgtcgcttgcgagtttttaaccccatcctttgttgtgctccggttgggtactacatttacctttctcatctctcgatcctaccttggtgattacactatgtctgttctctaaaatctccaatctcctatccaatttgagagcagtgttttacttatcctacccttggcaatatcctcttctttatcgcgtgaaagcctggacgtgaccccattctttgttgtactcataccactggctattcaatgccttcatattttctctcatacccttgtccgt

SEQ ID NO: 121650 - DNA, 301 bp, Zea Mays
cttccccttgacctgcctgaaggggcgaggatggtcctcatcgtctcctccccctgatgtcaaaatattcttcgtgcgcaccatcctgacctgaagactacataggagagaaaaaactaagcacgagacgatagcagtcgataggattacaaaagagtggagaactacctggaaatctcacgagagagggagagaatccaggcaggacaggagatggctcacgggcaggcgaggtcactgaaatgacagaagaggtgagctcatattagtcacatagtcataagtatatgaaatgtgaata

SEQ ID NO: 121651 - DNA, 1072 bp, Zea Mays
cccgggttttttggaggaggttgctgcttcatgggatcaaccggttcagtcttcttgccctctggagagggtgtcgatgaagcttaaaagattagcgcgaaggttgcagtcctgggggcatagtgcagttggaaatgtcaattctcagctggggctggctcgcgaggtgctgcacaggttggagatggcgcaggacagcaggccgttgtcctcagatgagctatggttgctgcagaaattgaaacaacactgccttgtccttgcttctttggaaaggacagttgcacgcttgcattcccggttgcactacttgagagatggagatgccaacacaaaaaaatttcacctacaggctcgcttccgcaagaagagaaattttatttcccatttggagaatgaagggaggacagtcaccagccatgaacaaatgcaggaggttctggatgattttttctccaatcttttgggttctaatatccagagaccatattctcttaacctagctgcttgccacatagacgctattgatttgagttccctggaggcacctttctctgagaaggaggttcgcgacactattggtgctctcccatctgataaggctcctggtcctgatgggtttactggaaaattctacaaatgttgttggcatattattaaatcagatttgttggcagccattaattcactccatcaaggaaatactcacaagttggggatgctgaattcagcttatttaactcttctccctaagaaagttgatgccttgtctgcaagagattttagaccaattagcttaattcatagttttgctaaattggtcaccaaaatgcttgctaatagattgggaccctatctgcaggagttggtggcatctaatcagagtgcctttgtgagaggccgatcgatccatgatagttttatgttggtgcagcattcaattaaaactctccacaagagagtctctagtttgctcttgaagttggatatctccaaagcatttgactcggtctcttgggccttcttgattgaagtgctttcatatcttgggtttggtcctgtgtggcgaaat

SEQ ID NO: 121652 - DNA, 493 bp, Zea Mays
gatcctaccgtcctgcgcctgagattcctgtgccagcttctgctcctgtttttgactcttaggccgaggatgcagctcttcgacagtttgccactcagggtacagcagctgatgatgatgatgattttggggttcctcctccgcctccgcctcctctgcctccatgctcacatgatcatgaggctgggagttctagtgttgcccctgctcctcctcaggctatggaccctgctcttgcttcgattctggctcacctggcggccgagcaggcccggttatccgagaggatgctctcgatgtttcagaacatgcaggacaggcaggatgcacttcagcagcagctacttcaggatcgggctgagagtagggcattcatggctcttatgcttcagaagtctggtgtctcagtacctccggttcagtccgctcctcctcctccgcttcacgctccagttgtgccatcgattttgtcaggaccccctgttggtacttc

SEQ ID NO: 121653 - DNA, 619 bp, Zea Mays
cgctgaacaatcagtcgcataaccatatgttgtatcgatatatcagtcggcataaaatgtccaggatcaattggccccgcgcgctcacttgtccattggcgcgaaaaattcatcaggcgcggccctcttgcagtccaagtcctagtcaccgcttacttccacccagccaaaccctaggtacttcttttcttcttcccaattcttcccagccaccgcccccgtccgcgtagtcatcagaaaaatgctgcgacaaccacgcgttcgctcatctcctacctctcgcccctcacgctccaacacgccgtgcgtcctctgtccccaaatcaccgtgtagggcaactcagtcgtgcatcctctatcacaaatcaactgttccttccccgagttgctgctgcagtctccaagatcccacccgtggtgttgccgacagctctaggtatttgattttttgctatctccctgtccacccaagcccttatccatctaacctgcttccttgttttagacgagagaatccaagaggtagtgaaggacccggacaaggggagcagctcgaacaggttctgaaatgataggatgtatgccaatttaaaatactgcaggatattaaattgcgctt

SEQ ID NO: 121654 - DNA, 456 bp, Zea Mays
aatgatctgagtgagagggaggatgtgaggggcattattcagtgtctcatatggtcgcgcttcgacattagaaggccatcaattgcaattgggaatgaagtgcaagcgtgcctaatggctttcaacaccgtgtgcacttacatcggtacgagggatttggtgcaagaacacattgcctacaaggtatggcctcttgtgaatgagtgggagatgtcgaaagaaattgctgctggctccagccaaggtggtttggtttatcttagatacaccttccagtatagaagccagtttgacgagccatatgacgattggttagaagctgttgaggcaatcagtgatgagctgctaagagcctacacgaaggcagaggatgacggcatgaccgttgccttcggtgctcgacgaaaaaggagactaaatagagtttttgatgtaatcgggtttatttatcctgac

SEQ ID NO: 121655 - DNA, 529 bp, Zea Mays
ggataagtttgtggtggtcttcattgatgatatcttggtctattcaaagaatgaagacgagcatactgagcatttacacatcgtactacagcgactgcgatcatcgcttatatgctaaattgtccaagtgtgatttctggctgagggaaattaaatttttgggtcacaccatttctcatgatgggatatcagttgatcctgagaaagtgcaagaggtgatggattggaagcttcctaccaccgtacggcagattcagagtttctgggattggcaggatattatcgacgattcattccggatttctccaggattgcaaagccaatgactgaattgttgaagaaaggagtaaagtatgaatggagtcagaaatgtgaggatgtctttcatacattgaggcagcatctgacaacagcacccgtgctagcacagtttgacaacaccaagtcttttgatgtttattgcgatgctccaggcactagattgggatgtgtctcgatgcaagacaacagagttattgcctatgcatct

SEQ ID NO: 121656 - DNA, 318 bp, Zea Mays
ggtatacgtaggtacaataatatattatgtaggataaaatgtgggtaggtcagggcaagaatagcctagggcaagacagtttatggtgagaaaggactccttgttgggtggtcatgcctgtgatgatcgagtttgacttctctcctttcttgacgaggttgatccttttccttttccaatcttgctctttggtgtctctatccgggattgggacaagaggttaagatagatctattatgtaggtcaagttgttggatatggccgagttgatctagatcaccaatttaggcttaagtgtatggacttatcctttgtacc

SEQ ID NO: 121657 - DNA, 404 bp, Zea Mays
gtctctgaacctatgaggcgccgcgagatgcccaagttgagtcagggtaattggtcgaaatctgattctaaaggaccctttccattgccacctccaccccaggttgggcgctctattccaacagtacctgaccgccgactagtggctcaacccaaaaccatggaagaacgcatgtcagctttgcgtgcgtacagaagggttaaaggattatgtgaatgttgtgcggagaagtggtaccgagggcacacttgtagcactattgttcagttgcaagcaatgcaggaggtttgggagtgacttcctgaggaggaaacatcatccccaactcattcgaagacttctccagaagagcagttgttctctgttactttgtctgcagccgtgttggatgacaaaacaaaagg

SEQ ID NO: 121658 - DNA, 273 bp, Zea Mays
tccaatttattccacaacacatgaaaatcttccaatgtaaaagtttcttagtttttgatactctaccactttgatatatgcactttggtccaaaagtgtatagaaattgatcccatctctcagagcacaaattatggtttccagggttcttattagggttttaagtgttctaggatttatgtgtcattcaaaccttccaagtttagccccctatgaacatttccactaaacattgagagcatactcaatttgctatcgcacacatccacatac

SEQ ID NO: 121659 - DNA, 539 bp, Zea Mays
cgaaaatcatgtatcttgatcttgtcgccagagatatcattgttagaaaaaccaagaatgtgagcaaatcgacgatagctcaccttataccaactaccttcaatgtagaagttcagataaggatagttgtatggactctcctcgtcagcgggctttatccacaaagttgagtagaattgagcaataacttcatcattccaatcatattggaatgtcatgatactcttcatctttttcctttcaagggccctcaatgcctgtgtcatctctgggtccccaatggcctcacaaccttcccagttgatatagcgttgaagcaggataggttgatgcttcttggggaggatcacagaattataaaaatccacgtgatgaagcatccaaaagcggtttccatcaatcctagcatcgcgaatgcgcaatgcaggattttggaaacagagatcctgaaggagaacagagcctccactggcagtgaaatcagttactggctcattgccagcacgccgagcctccgcccggtggaggaccaacccacg

SEQ ID NO: 121660 - DNA, 444 bp, Zea Mays
cccgccacaggggcagaaaagaaagggtgcaacctctggaaaggttgccgcttcggctgctccaagcgagcctgcgccgaaaagtaaatagttgaaagtcctcacccaccgaccccgctatattgaaccggccatagtgcctgagtttagcggggaaacttcttcagctattgaagcaaaaggacctgctcctacgcagaagattgaagagttggctgcaatgccgaaggcaccttcggccaagttagctgagccgaagactgataaaattgaggagccaagaatcaaagggacaaaaacattagaagttttaagtccttcggcagaagtggcggtgctggaggcacaaaaaggtcttacgacgactcccaaaagaaaaagaatggcaagtgtacgacgacttcagtaaaagcttcaagttctattccttgagggaaaattgtc

SEQ ID NO: 121661 - DNA, 319 bp, Zea Mays
gtcaatccgaggtagtggatacttgttcttgattgtaacttcatttaaggatcggtaatcaatacacattctcatgcttccatcctttttggtgacaaacaatactggggctccccaaggtgatgagttgggacgaatgaaccctttttgttgaagttctccgatctaaagtttcagttctgccaattctgtgggtgccatgcggtatggtctctttgcaatcggtgcggtgcctgggaggaggtcgatgtagaattatacttctctttccagaggcattcattgcaactcttctggaaatacatccatgaattcctcg

SEQ ID NO: 121662 - DNA, 710 bp, Zea Mays
attgtttattcaacacatatgtgggatgggtctcttacaagaccacttgaaccatcacattcaccacacattatttcaatagtgcccataaatgtccgaacttcaagctcgtgactttcattttgcgattattggttcagcctcgattgcatttatcaatgacccgataagagagcttaaagcactcatgcctaggactttgttttggatccctttgcaatctatagaggcaagataggtgtcgacacatttgtctcccacattttataatgatctccgtcatttcccaaaacgaaagattcattgttccgtattcccagcacaatgatatggcgcgcattgctaggaattccatcgtcaagatgaacctattcgtgatgcaaatcaccaccagggcgagttcatcggaggaaagttattacagaccacatgaatctgcaatcagaacatatgctttgactaaggccaatggatcatattcgcaggcgtccccgagaatagatcaaatgccaataagtcaaatgtggatatgatattaatcccgggtatatccacatctacattaggtagaagcattcaaaccaatatggttactcctcaacgatttctagcaaactccatatacacaggagtacacactgaacgacaggttcagtttggcttttgtgcgtttaatagaatattgaggcattacactatatgggcattcc

SEQ ID NO: 121663 - DNA, 769 bp, Zea Mays
ccatccggaggctggagctggagagcaggacggcagcagctcatcggccgagcaagccggctagctgccctgccctgcatgcccatgtcgacctagctgggactgggtgagttaagggggcttgcatggctattggccgccggatcacagattaaatgcttaattgacgccgaaatgttgtgtagtgcgtacccgtatgcacgatgcatccagccatgctgatgccgagtccaccgtcaggaccagcacgtttattggcttgttgcatgatcattacttgcagattgcgttggaacttggacgatgggcccaaaccagctagctagctagctagcttcctgtcaaggataactgagagactgaaaggctgtccggttttctctgccctccaaagaagcaggcttaatcatgagagttttcagctgtcggctgtcgccctcactgttcggacatgcatgccatgcatgcaatggcagtggaagtggctgtgttatgaccctgcaaattattatagctggtctgaactcttgactcgagcaagtgcaaacaaatcttgtgtatcaatctagatggtttaaaggtcaggtacttcaaagtctttggacacaatcagttttttcgcgaacgtttgacatgaatccttagagtatcttcagctaaggatgacaaattttccgtggcatggtagggtgatgacctaaaacttaatatggcatggtagctgtgttgttcagtgtggtttcttatagttgtgtagtgatggtggtgg

SEQ ID NO: 121664 - DNA, 433 bp, Zea Mays
atacggccaaccgctcggcctctgcctcggctctcagcaggaaatcagcgaccacaagtcaacaatgcagtgcatcgtcatatcaatcacatgacgccaaaacatctccccttggaatacgacgaccttcgacttcacaacgtacatctcctaggtgtataaatagggcaacatagttcttccaaagggcaagcggacacgcagggcgaacactcagtagtttcccactaagtctttagatattggcacttgcctcaatcagttccagggacttggggacttcccctctcccgttgtgcttgtaatccctactgcaggcactcaggtgcgagtaatataagccacatcccctctctgctggaagtagggctttacattgcccgaaccatgataaactgtttgtgtcaactcgcacaccatctagactctgggc

SEQ ID NO: 121665 - DNA, 369 bp, Zea Mays
tcaccaacagagccatacaatctatctagtagtgtgccatgccacggtaattttgcaattatcatggcatggagtagtcataattttgtttcttcaaaaaatgcatattagcatggtttctcaattttcgttaatgaaacaaaaggtgagattgatttaaaaatgcaagtagaactttccttttattgcaagaatattactctcctacagatgtgatgcgcattatgtacaatttcccataaatcatacatatgcttcattgtgtgtgggaggtgtttatacagcatgtatgctcaggtttgatccttgttatatatagttggcaatgacagctaggatggtttgcccaaacaacaagatctccatata

SEQ ID NO: 121666 - DNA, 470 bp, Zea Mays
tgcgtagagagcgatgattggtttggcagggacactatcagtcacaccgtttgttggagaggagagtgtggaggaagtcgatatgactggtggacgcgcgcgtggggtgggaccatacgagtgagcgaagagagggggcgtacatgatcggatgtttgagggagtagtggcacacacagaggagaccgcacaagggaaggccgcacgcaaggaagcagtggtggtcacacacaggtggcgtgaggtgggtggttacacggttgtgaaccggtgacacgggcgagaagctcaggtagagagacctagactcttgataccatgtagagagaattagggaaaacacgcttacacctaattagagggggttgctttcatatatgtagtctggtacaacctgaagtacaagtaacatgatatacatgtgttagactatacatatctctaacactttctttaggatagatattgct

SEQ ID NO: 121667 - DNA, 282 bp, Zea Mays
tctttgggtaggagtgtcgttgttcgtcgacgacccccaccgttgcatctacatcgttgttgactctgtcggtacgcgtctcatgcgcatagtctgtgagttgttcgacacctatgagctgcattggcaaacctgtcgctggtctgcaccacgttcgtcttcgagtccttcgccgacttcaagcaccaccgtcgcactacagttgcgttgtcgaggaccttcgtggctctcccgccgcggcaacctcaggatcctcgatgcatcgccgcacctacctcttcg

SEQ ID NO: 121668 - DNA, 454 bp, Zea Mays
aagcatagatgatgggtaagagtgtttgtgcttatgctcaaatgttagatatgcatttttcaaatatcgacagccatatggacacatatgttaatggctgccaaaaaaactttaaagtccacatgttaactataattttagacagtcgtggtaggacatttatcattttagatagctgcaaacgtaacttaactttcaactacctatgtacaagacccatcacatgtctatattatcattttattcagatcgttcatgatttatagttaacatgttgcagtggctcaacattccatttggtccaattatggaaggtccatttgattcatgtgtgctcctggattatcatttgcacctaacagtaatatgtgtctgtactacaatgatcatcttctattgccagtctagcgcatgttatgcttcttgatgttatgacttcacatcaatatgtcca

SEQ ID NO: 121669 - DNA, 616 bp, Zea Mays
ccctcgaatgttggttggtctgtcgggtgttttctcctttttgaccttcatttcttcctacaatccaggggcttttcatatgcactacgagtgttgcaccgtgatctttctgtttggtgggattctggttttgtgtgtggcatgccatgatgcatcaatgttgaagaaatggacccaacttggcaaaggttagatgcctcaagccgttgctaaggaaggaattaccaaagtgatgatttctaggattttgagcaagaatcaccgtccctttactgttgatcatctcctctttttatagggcacaattataacttgtgtatgtttctttttcccctaatgtactagtagaacatattccaaaatatcctaagtctataagacttagcttcccaagaacatcgagagccttttacacgccaaccacctttgatcatggacttcgtcaagctgtgagagggccaattaagcctcccttttgtatcttgaggaatggcactcttctgatggtttatcatgtcgggtgaaggccctcaacatggtcatctccaacaagatcgatgaagacctttggggcattagtcttgtgatcttcgagcaagccttcaatgtgatctgc

SEQ ID NO: 121670 - DNA, 371 bp, Zea Mays
atgattcatggtctactagggtgataaatgcttttagaaccatagatccacaattagaacaaattttagacaagagtattattcctcctagttatgatagaaaaaatgcctccgaggaagatcaaagatgtattcgcttaaactacctagcttatgacatcttaagtagttctcttagcaaagaagattatcatgccttcataatgaattatgatgaatctattcgtgatgcgcatgatatttggactagaattaaaagcaaatttgatgagtccaaacatgatagttcattttttgcctctacttcctttggtatttgtgaaactaaccctttgaaggaagaagaagaaaatgaacgatggagaccaaac

SEQ ID NO: 121671 - DNA, 352 bp, Zea Mays
aagcttttctagctacctctttcaccattcattggtttgcggatctctccgattcattcccaactttcatccaggaagcgatctcggtaacccacgataaatccaaatcctatcaaaacagctgttccaatccaatgaagatatctcaacatcaattgactattcttatcggaagcttagtctaaaccaagaaacaagtgtttttcaatcgctagtactctggcgaagggaggattcttcagagcgggatcaatggacaacagagatttcatagctacaaaggagatgtcaaaagaccaaacctgaacccccaaccagtacgttacaaacggagggtggagggaccaatccc

SEQ ID NO: 121672 - DNA, 422 bp, Zea Mays
gctttgtcaaaatttaacgttaaattcaaacttgttatcaatttcgaaaaagttaaaatattgatttcaaaaaatatggttagatttatgttttttcttgaaaagcagaggagaattgcgccccatttatatattaggaggaaggaaacaaaaggtctcgagaagacccaaaatacaagacactccttacgaaggctagaagcatacatgtagggatccataacacagcaaaaaactaaaacaacctagctgaagcccctaagcagtaggagaaggggcagccaaaaagtaaagacctttggcacccatttttgcttttcctcatctacaaactcaaggttagatttatgttatggttatattccaaacttacatatcaaatgagggtaaatttgcaaacagttaataaaaagaggggcaat

SEQ ID NO: 121673 - DNA, 488 bp, Zea Mays
gttcgtgctaaccacaaattgtcctacaagtattttagtccttatcgcatcacgacaaagatcgacagtgtggcttatatgttggagttgccccttggcctctattcatcccattttcatgtttcccagcttaaagcccgtgtgccgcctacagtcccggttggtgcctcacttcctgatgctaacatcgatatgcaagttcccatttaggtactcgctcgacgttccatctcttgcggtgccagtactgttcctcaagtacgagtgcgttggtctggtattgagtgggccaaggccttgtaatgaatagaaaaggaaatactgggtaccggaaacaggcatgaaggaaaacattgttgctcctatctctcttgttcttcttcttccttcccatgccatccttcctcttctccttctttagaagccatcttccaggttgttgacagagccccacccgctggattcgtccctggttatgcttacacctg

SEQ ID NO: 121674 - DNA, 522 bp, Zea Mays
cttataaccaatctatgatttctaataaaccatttggttaatgtatgtgcaaaaatctccttttatgcacttctgatatatgcactattgtagttgtatccacatctaagtgtaattattgctgtagtaatatttctatgcttattgttgcttatttctaacatactttactacttagtacaagtgtagttgcatgtgaaaatgcaagtgttgctgcaagtggtttgcgaggtggaagaccatcatctggtacaggcagtggaaaaggatcagaaggggaaggacaggggggagaagactagctgcatgtgtagggatagatcattttgtgcttctgttaaacttggaatggtaattatgttgcagactttatgttcaaattttatgtgatggtaattatgttggagacattatgtccaaattttatgcgatgttcaaagttctgccaaaatattgcttttactttttatcacgaaatgtgtcgaaaattttggaaaaaaatgaaataatgtcgagatttaa

SEQ ID NO: 121675 - DNA, 500 bp, Zea Mays
gttttgagtgctctagggtttttgtgcaactcaaatccatcaaacatagtttcttatgaacattttcaataacttttgaggtaatactcaaattggcctcacattcacccatatggcccaagcccctggttaagtaccctattctagggttaagaacacttcaagtcaccacatcacacttgttttgaagtttttgcctagtggatgcattctaggtgtaacaaacataatgacatgtcaatgcatatgatgtcatgctcaaattttagtcctggtaacaccaggggtgttacatccttcccccataaaagaatctcgtcctgagatttaaggtcctagggtaagtaatggaaaaggaaacacgtcacaactttatttccttatttatattacagtgtaggggtggtatggggcttattccaactttacaataaggtattcaaatcttacaggttacatgaagctaacaacctaggaaaatttttctctaagaaatcttg

SEQ ID NO: 121676 - DNA, 837 bp, Zea Mays
ccaagctccacggtaaacctccaccgctcacgcggaatcagcgcgggtggttcaacaaaccatcgtggatctcgcagcttgctctgactcagactttggccgctaccctgggtataaaacccgtgctgcccccctctcgccatctaccttgtgccgcagcttctttcgcctcgtagcagcgccaccgagtggaaagggcaaggaggatggagccactgcaaccagatctcgtctgcgcagtcactcagaccttctgcgtggtcgagcgggttgtctgggtgggcagcattgtgactgcaagagagggagaaacgtgttcggtcgctggaaccgtgtgggcgaacatgccaccgtggaggagagagagatgcaggaagggagaaaatagagcagggcctcggctacgcgcttgctggtaagggctcctctggtgaactcagctcttaccccgctttgtgtagcacgtttcggatttagggatagtcgccggttgggttttatggctgtgcatcggcgtgtttgccgccggtcaggccatggcgcagcctctgagcaagttcctgggaagacgatgggtttctggccgtcggatccaaacctgtggttgagattagaagtcgcatgccgatcgggctgtccattagatcgagatcgggtgtacgggtttccatctcggctatttaaatcctgagtgttgttatttgatcggaaggtccatatcgtgtaccggttcaggataatatagatctaattccgagccgttgaaattgatcgagcgacccatatccaacaataccccttcggccgaacaaatttacaaaagagaccttctgtttt

SEQ ID NO: 121677 - DNA, 415 bp, Zea Mays
gaggaggtaggttccaggcctagtatgccacgggagcaccaacatttgaaactttacccctgaggatcatttcaagtcggcttaccaagtctgcagaaggaattctcctattggtaacccgagttgagtcggccagccctcgatacagatatgccggataggccctatctttcagtggctgaatgttcttaaaaacaaagtcagcgaccaccgcttcagcagttagacctctttctttcagcagtccaacttcagccagcaacacacctgcctcagccacttcctgatccgtgggagactcagtccaacttggagtgcgaacgtctggctgtcttcccgaccgggaagggagagaatttccacaattatcaactataaaccactctagacgccaccccttaatactatctttgag

SEQ ID NO: 121678 - DNA, 557 bp, Zea Mays
gtttgcagttcttagatggggttgagttaacacttgtactggggaacatatatttgttcgcaaccctatgcttggtgaaaagtagatgtaatgcaagtggaatttataagagccgaaagagctcatgtagtagtgtaattagagaatgttgtagtgcaagctcttagttacttgaataacagacctttacacaaaagatactcgaaactatttcactatctgtcatatacaatcttgtttagggtcaagagtttatttagttgtactttttcatacgccatctgtttaatgggatgaatattctatctaatgaggtctctcttttgctctcatgtctggtggatggcgtcatggcttgcctcctacgtgttaccttggttgtatggcgatcggtagtttaagaatatatgttggttgtcctgctctgtagttgttgcttgttgcctctgcctttttcctatagtattggtcgagtacacgaagatagtgttgatacaatagcttcctcaggttttcactttcactgatacagtagaggctccgataaaattaccgaa

SEQ ID NO: 121679 - DNA, 325 bp, Zea Mays
catgcaaatgatttctctctgttacgaggggatctgaggtaggacagagtagctacgactaggctggtggtggtggacttgcggtggacggacgccatgcgacatgtgcgcgccgctggagttgatagggcagtagccggtgacgtgggagggacacgtccctaggacgtgtgggcccaactctggatgttgctaaaagctgctgcgcgcgtaaacaggagtaatagctaaccgcgaacgggtccttgacatgcaaatgatttctctttgttacgaggggatctgaggtaggacggagtagctatgactaggctagtggtggtgg

SEQ ID NO: 121680 - DNA, 688 bp, Zea Mays
atcaaactactattaaccaataaatttataaaggagtagcatgataaacattaacattaacacctagagcacgatgacacgaatccaatgctagtcgaatcacccataacggacttaaaatgaataaactatgaattaaacaagatttcctattcaaaagtaattagagtttaaacctaattatgaatttcaaattaagcggtggtgaactcaccggaaaaattccgatctcctgctgccgctcactaatcactgccggatctagactaggagcgagaggaaggctagggctctttacctgactagataagcacgacgcggaagacttgttgagacctgaagacagcatacagcgaaaatctggcactgtaaactggaagaggaccaaccagtgcccaaaatttccgattacccgcgggaaaaactccatgagattcttgtgcaactcgcgaaccggctcacaagagtagcaacgctctgatctcggcgagattcggtggcgggtgaaactcacggtagctcgcggattcaatgaacaaagcacggaaacaagagctagcactagatacgagttgcgtaaggtgatgcgggggggcctggtcctcattttatagtctgtcctgacgtgggaagcacgcggggaaaggagtccaacggatgaacgccatcggacagtgatcgatctgaa

SEQ ID NO: 121681 - DNA, 294 bp, Zea Mays
gagaccagttgaggggtgttcgacaccttcttccatatagggcttcaaagggtgccatctttaggctcgattgataacagttgttataagcaaactctgccaaagagaggtacttatcccatatcttactgcaatcgatcgcacaagcccttagcataccttcaagtatttgatttaccctttcggtctaaccatcagtctgggggtggtaagatgaactccttattagcttggttcccaaagactcttgcaattgctcccaaaatctggtaatggattgggctcctcggtcag

SEQ ID NO: 121682 - DNA, 873 bp, Zea Mays
caattgtgcgtgctaattccttctcactttcttgcaaaagatggtcacgcctgatgaattcctctggaagcacccttgctcagttgttagaagttgaactggttggcatccctgcacatgcctgggaagtacccaccgtggagagtttgctcagcccttttgcatggttagagagtgtgcatgaagatacactgcaactaagagatctcagcagcttccgttgttctgtttggtgtctggaccctgtcagcatacctcctgctagagatctttgggttgttgaacctctgcaactgggtattggggatggttctggtgtcagatcactggtctacccggttagcattcggtggaaggctgctgctggctctgaaaattcagctccccgcccccctccatcctcagtgatcactcctgcagaacctcgtcgacatttgcgctcccgttctccgccggcatacagaggtcagcgtagtggaacttcctttggtcatgctcaaggcacagatcattacgttcagggttcgtcctcctgccatggctttcgtgaagctagctgcagggatcctcaggttgtgcagaatatgactcttgagccaccccatggctcggttatagctccgacgtcctccattcttggacctcctgatgccggtttgcagacgcttgagtctggccaccccacacccttcgctcctggctttaccgatgatgctggtggtggattatgcgttgtgcagaatgtgatcttggagccacctcctggttcggtcacagttctgatgctggtatctactcacaccacatcctccactcagggtagtctcgaagttgatgatggtctcctctgcgttgagcagaatgtgaaccttg

SEQ ID NO: 121683 - DNA, 1007 bp, Zea Mays
gtgatggatattggctcggtacgggtagagtcggatgattccccggccagcaggctaagcacgacgtccatctcagcatcatcggtgctaactggcatttcaatgtgagtttgcctctcagcctcgagaagattccgaagtggggcaatcgaggtatcaatatcctcgggggagggtcgcactctatggcccgggctaccataacaagcaggagggttggagacaaatgcagagaatagcctatctagaggtaggttccacacagagtaagataaaggagcaccagcatttgagaccctacccctcagaatcatatccagtcggctcagcaaatcctcattgggaatctgtctgtttgcgacccaggtggaatcattgatgctggtatatacataagcgggatagattctgtccttcaagggttgaatgttcttgaagacaaagtcagcaaccacgacctcagcagtcagacccctatccttcaacaagcagatttcaggaagtagcgttttggcctcggttatctctgaaaaggtgggagactctacctaattgggcgtacgaacgtctggttgcctccctgaccgagggggagggatttgccgtgattctccacgatgaaccactgaagacaccatcccttaatgttgtccttgagagggatatcgagatattctactttcctcccccggcgaagctctaaacttgcgccgccgacaagctgatgctgccctctagccatcccaggccgacaatgatagagatacctccagagtccgaaatgggggagaattccaagaaaagcctcgcacagatgtacgaaaatggcaacttgcataatagagttagtgttcaagtgtgtcagatttaattcgtaaaaatcaaggaggactcggggcatgcttgagtttgccgtcagcgcggtgaggcaaaccacgacccctcctccctctacccatggttggttagataaggagaaagcgaagaagaagaaagcaatagatgat

SEQ ID NO: 121684 - DNA, 480 bp, Zea Mays
ggagccaaaaaaagaagaggctaaatagagtttttgatgctattggatttatgtaccctgactaccgctacccgccacgggggcagaagagaaagagtggaacttctgggaaggatgttgcttcagccgcttcaagcgagcccgcgccgaagaggaaaaaggtgaaggttcttactcaccgaccgcgctacattgaaccggccacagtgcctaaatttggcggtgaaacctcttcggctactgaagccaaaggacatgctcttacgcagaggattgaagagccggctgcaatgccgaaggctgacaaaattgaagaaccgagaaccaatgagacaaaaacattagaagttctaagcccttcggcaagagttgaggcgccgaagacacaaaaagatctagcagcaacccccaagagaaaaaggatagctagtgtattagatgtgctggagacgataaaaacttcaagctttactccaggaa

SEQ ID NO: 121685 - DNA, 463 bp, Zea Mays
ataatggcgtcataagttgcacagataagaccattcttctcactgaccaccaaggaaagtcagtttcgtgtaaggctcgaccaccaacccaagatccaatggtgtttagcctagcaacagaaagcatatctgtggtcgaagaattcatggatgtgttcccagaagaattgccaggaatgtcgccagaaagggaggtagaattctacattgatctaatcccaggcaccgcaccaatcgcaaagagaccatatcgcatggctcccacagaattggcagaactaaagctccagatcacagaacttcaacagaaagggtacattcgtcccagtccatctccttagggagcaccagtcttattcgtcaccaagaaggatggaagcatgagaatgtgcattgactaccgatccttaaatgaagtaacaataaaaaacaagtacccactacctcggattgatgacctctt

SEQ ID NO: 121686 - DNA, 444 bp, Zea Mays
ggaaaatgtcacagaagaaaaagaatatgaccatcgatcgccaaagctcatctatattgacattggacagtccgttgttaaacccaacgaggtaaaagttttgaaaaagcttgggtatattgatgataagagcttgatccgttttaccggtgaagaaactactcctaagctataagatgatgaaattgtggtgtttaaaagcttcttttaggtagggcttcgactgcctatgtacaagatgattactaagtgcaacataaatatgaaatctacatgcatcaattaacactaaatgtgatagtcaggctcaacatttttatatgggccatgcaaagtcaaggtgcatgtgttgatgccgaagccttctgtagagtacatgagctacactaccagatgaaggttgggccctccgataagctgcataataacttcaggtgctataac

SEQ ID NO: 121687 - DNA, 554 bp, Zea Mays
ttcggcctataatttggcttcagtttgagcaactttctttgcaggagcagggctcagcgccttcgtaatttctagaacagcatccagcacgttggccattatcctcctcttaggagttgcatcagaagttttttgcgccttcggcagtgttgcctctgtcggagggctcagaatttttggcacttgcatcattttttcagcctttgacccttcagccatatcaatcttaccttcgactgccttgactgtatgcatattcggcatcacggtcggctctttggcgctctatgtaatcgaagcagactgtgttgcttcggttgctggagtgaaccctgcgcccaattcaggcaccacggccggttcaatgtaacgcgaccggtgggtcagaaccttcacctttttgctcttcggcataggctcagttggggtgaccgaagcagcaatctttctctttttctcctgtcctcacagtgagtagcggtaatcggggtatatgaagccaatcgcatcaaaaaccctgttcagccttttcttccctcgacctccgaaggctg

SEQ ID NO: 121688 - DNA, 521 bp, Zea Mays
ttacctagtagtattgacttgttattagaacgttcccgttgacttcccgtctcccgcttgttctgcctaaccctaggcttattaaatccccttgtctgtagctgggcaaacgttgtctttttgttcatctcctgttttctatccgtatgcttcggtgcgtgcatggagggcttgcctggtgggttggtgggaaattacccactgtttgttcaggaggagaattcctgagaagtcgatttattgccattaatctctacctggcatggagtttagactttggatggtctagcatttgtacagatgatgtagagttgtagttgaacagcatcatagtcggttacctggtccacgttcgatctctgggcacgtcactttcagtgtagctgataaatttgatatttcaccggtgaagttttcttgtattataggaaatttgcgtaaccattatgatcaagttgaacatgtcacactctttggacggcaacgggccaaagtcatgcaaaagagatgtcccaatttcc

SEQ ID NO: 121689 - DNA, 891 bp, Zea Mays
cctcccgggggtgaggtttttaatgaggcggagccatgtaatatacacgcaaaaaatcccccgcaaaaattacaacgtcgaaaaagaccgcatcgacggtcttcggcattcgaccacaacgaagtcatcgcgagggggcagcgctggctaccctcgcgtgcgacactccgcgcaaaagtcgcctaagggtgcaaccggactagcacaagaagtgcgcaaaatcgaagtcttccccaaaagactatccgtgtaaaagtcgcccaagggtgcagccggactagcacaacaagtgcgcaaaatcgaagtcttccccaaaagactatccatgcaaaagtcgcccaagggtgcagccggactagcacaactagtgcgcaaaatcgaagtcttctccaaaagactatccatgcaaaagtcgcctaagggtgcagccggactagcacaacaagtgcgcaaaatcgaagtctccctcaaaagactatccgtgcaaaaaccgactacaggtgcagccggaccaacataataaacgtgctagatcaagtgcacaagtcccccacgggcacggccggatcagcgaatgcacacagcctcatcatacaaatcatcataccaattaaatttacacacatacagcgagggcatcacaccttacattggttcaaccttcgggatgatacccatctccctgtagttaaacaacattatcctcagctcctcaccctcaaagagacttcacaattccccctcatctacactcgccccaactggcgaggacaacaattcccgcttgccagccctatccacacgaagacgcccacactccacctcactcactctacgcttcgccaccgcccttcgccgcctgcgcccagcactcggaccaggaaaaacttc

SEQ ID NO: 121690 - DNA, 831 bp, Zea Mays
cagcgcacaataatgggatgcgatggcccttcttatatagatgatcaccgtgtacaacgatagtaacagcaggagataattgaggagagaataaaggagacacacccttaggatggaaagggttctatcctaaccatatatacgagatacatgctatacatctaacacccccctcaatctggacgtagagtgacaatgttcagattgcgtcgaaaagagttgaaagatgtcaccggaagtggcttggtcatgatgtcggcaatttgatccttcatggagatgacccgaacgtcaagttggcgcgtagacacacgctcacgaacaaaatgataatccacttcaacatgcttggatcgtcgatgaaaatttggattggcggacagataagtagccccaatattgtcacaccagagtgtacgaggtcgtgatagggtgataccaatttcgcgaagaagcacttgaagccaaatgagttcagctgtggcatcagcaatcgccttatactctgcttccgtgcttgagcgagaaacagtttgttgttttcttgagctccacgaaatcaaattgccgccaaaaaagattgcaaaacccccggtgcttcgtcggtcatcggaatcgcgtgcccagtcagcatctgagaaagcgctgagtagcgaggagccagatttagtgaagtaaagcccctgatcaatagtgtcatgaagatatctaagtatacgcttgaccgcagaccagtgctcagttgttggagcagagagaaattgacacacacgattaacacaaaaagaaatgtctggtcgtgttaacgcaaggtactgcaaggagccaacc

SEQ ID NO: 121691 - DNA, 612 bp, Zea Mays
ggaaaggtgatgttgttgctgctgccaccatcgaccagtaccttcttaaccaggctttcccggattacagtgtcgacgagtagtgggtatttgccggtgtgatcgaagttaagatactgatcagctcggctaaaggatattgtgtgctccgaccaacggtaaggagctggagcgctgtttatggccactagaacttgtcaatgattaagtttttgttgccttttgctttcttgtgccccgtggcatccgaatatggcattgagctccctgtcaatgcgtgggaaagctccgcctctacccccttcctgttgatgaggctgcctaggctgattaggctctcctcaaggtgggggaggcggtagcggctggaatggtcagccatgcctgatggaggttttgaaatccctgcagttctgcagggtgtgccacatgtccttgtggtacaggcactgggagttgaggatctcattcagtgtccttacccctccatgaggtgcaccgcgggctcgagcagcaggtggcccggtggcgtgtacctcctcccagggtctcttctcctaatgtttgtctgcttgctgattcgtgtcccttcgcggtgctagtggtacgggc

SEQ ID NO: 121692 - DNA, 713 bp, Zea Mays
ggtgattccatgtcgtgatcgttgtcgccgttgcgattcatgctgagtaaagtacagatacctactagggagtggaaatatcgcatcacggatgaactcaggccactgttctgtcccgatcgtcgtgtccgcctgactcacggtcgatttggatgtgctcaccggagttagccacctatcagccatacgccacatgccttggagctttaaccacgtcacagcgagtcgtcttaacctgtccgatcatcaccggtggtcacgccatggtgagggccatgaattgcttgcgctagtaacttcttccctctctggccgccaccgtgccatcaccaattcacaggccaccacccttgaagtctataaattgagcgtgccctcagctccgctatgtaatcaagcacccaacgcacccacccgtacctccgattatccaccaacgagtcccaatttgggatttccccaaatcggtctagagcaccgtatcgtgtgagctcaccgtggccagcgtgctacaggtccgatcatgttctctgctctcctgttccagtatcctaatgtgcccctaatgcttctcgacctatccaattaagctaagacccatcagatcaccgggaacactccttgttatccgttgatcgtgctgtcaccgtgggcagggagaataagaccttgaatcttgaaattagttgaggggaaatgatggtcaggagtta

SEQ ID NO: 121693 - DNA, 389 bp, Zea Mays
ttgcggtaacggaaagggagtggattggatcctgtcgtcgttgagagcagaataggacgtctacatgagcatgcaaaacatatgaaagtatgaaacgaaatcgaaatgcggtggtggggaatatatgctcccattggtgggaggaagcaagagcgcagaaataacggtccacgtgtgccgggagtaatccgaatgaatcgctacactttgggggaaaacaatttggggaaaaaaattctacacaacctagatgcaaacgtggcctttaacagccccgcacatccaccactccatgcagcgccacgattttactacgatggagcagcgtatcattcatagcgctagttttctccacgcatcgaatgccacttggattttctatgtccccg

SEQ ID NO: 121694 - DNA, 547 bp, Zea Mays
ggagtgttaccacgtcgcagtagatcgtcgttggtagcctgctcattgcctgggacattgcctcggtcaaagccacgatcgtgttcgtcggtgactcacctcctctctctggccgccagcactcttctccaattcggagccaccgctctcgtaggctataaattgagtgcatcgttagctccgttaggttgttacaaagccagaacaccagccctcgtctccgatcatccaccacaacatcctaatttgggatttcccccaaatcggttgtccgtgtcgccgtgtgatgccacgtcgtggaccgccatctccaggcccgctctcgccctccttaccctcatttcagcacccttgcacgctagggatgcttttcggctcaaccaattgagctagaccgtgcttaatcgccaggaatgcctcgatttgtccttggtgttcgacgtcgtcgtgggtagaagaactctagaccggattcgtgcaattgagggatagattaggatcgccaggagtggaattaggtgtagaccgagttaggacactggtcgtt

SEQ ID NO: 121695 - DNA, 685 bp, Zea Mays
caagcgcacaacatatcttccaaggtttggatcgttcgctctgactgaccatcagtctgaggatgaaaagcgacactaagagaaagcttggtgcccaatgcactatgaagactctcccagaatttggatacaaatttggagtctcgatcagaaacaatggacttaggtaccccgtgaagcctgattacttccttcatatacaaggggaccaaatctgaagctgaatttgtggtcttcttgggaataaaatgcgcagacttagtcaagcgatccactaccacccatatagcatctctgccccgaggagaacgaggtaaacccaccacaaaatccatggtgatatgctcccatttccactccggaatttccaatggcttcagtaaacctgcaggccgcttatgctcggccttcacgcgctgacatacttcacatgtggccacatacttagaaacgtcaaccttcattcgcttccaccagaagttttgcttcagatctcggtacatcttggtttcgccagggtgaacggtgtaaggcgttttatgagcttctctcaatatattcatcttctcctctgatttctgaggcacacaaaggcgacccctgaaatgaaccaaatcattctcatcgatgcagaactcccagggtttaccatcgccaaccctctttcgagcttcctgcaataaac

SEQ ID NO: 121696 - DNA, 529 bp, Zea Mays
tcgccacgtttttgagtttgacctctcgatgctgcgtcctctccgctcgacgcgtctcctgccagctgaatcggtccaatatgcatctcctcacccggttccttcctgcctgacgcctccttctcaccctgtgcctggttggcagctgaatcggctctccctccctgatgccgcctccttggtccatgctaaggtccctggcaggcatctgaatcggtcgtccctccacatgcctttgatgtctctccgttcctccgagaaggatgaaaaggaacacggccgcctcaggtgaagaagtgcaaaagaaggatttggaagggccgaagtggtctacaaatggtttgtgttttcaatgaaaagaacagagactaaaataacagcagaaagcagagggggctatctaaatgtacacagagaggggggatttgtcagttgaaagcagaccccccgccccccaaaccccaagaaaaaaaggggttatttaataaacaaacaaataggagccatattctaggtaataccccctcca

SEQ ID NO: 121697 - DNA, 575 bp, Zea Mays
ggaagccataggggggacctgtggctggattgaatcgtcatctacttaactaaactaaggacatcaaagatcacgctggccatttcaatcagcaggataactgtcttcatatacattagtatcatcactagttcactacataagccatgttgtgaaacattataacaaaacatagactactgaaccaattaaacccatacgttgcacatggttgccaaagccaaacaaatcatatttatactagaaagaaatgcactgctggtccaaacttttcccacattctcatctaggtccatgaactctcaaagtgataatctggaattctgggtcattcggtcctttcaactagttcattctaatcatggactctcaatgtaaatttttcttgtggcttgctgccctccaaagctgctggacagcagatcggctacaaaaacgagggcttgagcatcctgatagttgccctctttgtgaccaggaaccggaaacaattgaccatctgctggcagattgtgtttttacaagacaactatggtttcggttccttgggcaggtcaacctgcaggacctccctt

SEQ ID NO: 121698 - DNA, 705 bp, Zea Mays
aacagttgcaaggccctgccagcacctggtgggcaaacttttctgccatccagcctatgggacatcaagtcacgtgggaagagttcaaactgacatttagggaacataatgttctagaaggagtgctacagatgaagttggaagaatttatacgtctgaagcaagggggagattctgtgatgcagtatctcaataaatttaaccacctgtcccaatacacattgatcaagtggacacagacttgaaaaagaagaattgtttcatgaggggattaaatgacagactctagcgcaaaatggctacgtgtctagatctcacatatagcagggctgacagcacaacactgtcagttgaagctaaaaatgtgggtcaagggaagtcaaaaggatatgcgggtgaaagatcaactcagggacctgaaaagaggacaaggttggtaatccgacctttcaattcaaatcgttctctcctcgtctgcccacatatcccttcagacaacccgtgttcatttgtcccactcctgcccccgcccagaacaatcagccgagtgcccctagtgctcgtttccctgcccttcccagttcctcgagtggctgcttcaattgtgacaagttcggacatttcatcaaagactgcccctacccgaagcagaacaaatcaaactttcaacagacttccaggaacacaaatcaaggaaagggaaac

SEQ ID NO: 121699 - DNA, 350 bp, Zea Mays
aaataaaagaagtagacccttccaaggtggaagcagtatcaaaatggaggcagccgaccaacgtcagtgaagttcgaagcttcctgggaatggcagggtattaccgccgcttcatcaaaggattctccagcatagcaagaccaatgacagaacttctcaagaaagaccataaatttgtgtggaccccaaaatgtgaacgaagtttccagatcataaaggagaaactcacaacaacacctgttctgtcactaccagatattcatcaagattttgtcgtcttctgtgatgcctcgaggcaaggcttagggtgtgtgctaatgcaaaacgagaaagtcattgcttacgcatcg

SEQ ID NO: 121700 - DNA, 605 bp, Zea Mays
gggggataacgcaatttgaggagtatcgacgttgtgctgcccgactacaacaccaagggctgcgctgcgccttagcgatagttacactgcctccaatttgcgttgttcttgctgtgccaagaacaaccttgaacctacaagcaaatcaaagaacaagcaagaacaagtggacaagcaaacaaccacacagaccttgcccaaaggagaaatctgatacacacgaagttggggttctgaatccgagaaaatcgggtggtctaatcgacacacgcgtttgcctgcaagtagcagcaactaaacttacaaccaaacaaaacccaagtctcaaatggtggctgctggtggtttatataggtgggggagcaaccaagaggcgtggaggggtttaaaccctaacttagaatgggcccctagtggtctaaacaagatacaagggcctcagcccaagattgggtctaagcccaagactagaagactgaatgtcattttggcaattctgcttaactcctttggaatttcgtcttgaggttgaatccatctgaaagtagagttcaggagctttccaacaagtactcatgggcttcaaacaatatttggagctaaga

SEQ ID NO: 121701 - DNA, 360 bp, Zea Mays
gtctagtttatgagtatcatcgatccgatgttctacaataaaatctgctacgacctggcctttcatagatttcaatggttcataagccaagtcatattctataagtgcataagcccatttaccaatcctaccactcataatcgggttttgcaacatgtatttaatcacatcggtttgactggcaatggtgcaatgactagacagtaaataacatctacacttggtgcatgcataaaataggcataagcataacttctcgataaaagtgtaccttgtttcagcatccaccagtctccgacttaggtaggtcaccacatgctcctttcctccggtttcttgcgtcaaaacagctccaaaaac

SEQ ID NO: 121702 - DNA, 611 bp, Zea Mays
ggaatagacaccttgtaccctttgtgcttgtgtgcatcattgtattacttgtattagaggggcttataatcttgtgagattataccaaatgtgtttgtggtgtagcagccactatgtactggaggaacgaggttcacaatatttcgactggaaactcgatagtgaagatggtacagtgcatctgggagagaacacatcagagatccaattgagcatggagaaggattgtgacatccacctgaccgagagcttagccctcacataggcttctcttgcatggggctctaataaggatcagggaaaagcttgtgtgcttctcaacacctcgataaaaattctagagttatcaatgagagtttatatctccatcgtatttaaatttctgcatttatattgtgtagcttagttatatgttttaccttcctaggttagttattaaactagtgaatagctttgaaaattagcttgcatgacccttttgtgagagagaaaacaatacttagtcaaaatcgtagcccttttacgatagagataacaaaatttagtcaaaattgtagttatgcccttttacgcttgagataacaatatttagtcaaaattgtgattataca

SEQ ID NO: 121703 - DNA, 397 bp, Zea Mays
cacaatgtggtctcacatgtttttgtttttatttttgctattttttcactaaatttgtgatgcctgatataataacgcgacctaaagagatggcttaaaatacagccgcatctccaaatcgattttgtagaggacttcatgttttcagccgccgcctctagaaatttgtttttttagagatggcgaaacaaactattcctccaaagtattgatccccgttgttttagcgttgggtgacggtgcttggagctcggaatgccttgaatttgaagggaggttgtcgtctctgttggttggcatgtttctcacctttccattgtgctccatcattgagaatggctttggatcggcggcgtagctacgaggggtggagtggatgcacaataattgtggtgcg

SEQ ID NO: 121704 - DNA, 727 bp, Zea Mays
agaaatatcaaacacgaagccgtcgtgatctctggagcggagaccgacgttccacctatttccatcgcgcctctgatttctacatggtaccagagcctagggttaatcatcctagcaatggcgtcctcaaactcgtcatcgaatcctctccttggtgttcaagtcacagagaaactcactcgccagaatcacggtatgtggtcggcgcaagttcttgcgatcttacgaggcgcaagactggagcggtatgtcaacggcaaagccgtcgctccatctgaagaaattgatgagaagcagagcgacggcaagatcgctaaggtttccaatccagcctacgacgaatggttcgccacggaccaacaagtcctaggatttcttctcacctccctgtccagggatatcttggcacaagtcgccattgcaagaaccgccgctgaagcatggaagatcatcaccgacatgttcgcctctcacacgcgtgcacgtgctactaatgtgcgtcttgccctcgccacgacgaagaaggacaacatgactgttgcccaatactatggcaagatgaaggggcttgcagacgagatggctgcagcaggaagaccccttgacgatgaggaactggtgatgtatatctgcaacggtcttgatcttgagtacaatcctctagtttctgctcttgtaactagactagaacctgttactccttcagaattgtactcccaacttttga

SEQ ID NO: 121705 - DNA, 541 bp, Zea Mays
ggagaaaattgtgaaaggtacgaaaccaagaaatgcagctgttgtacagatgtaagaacgatggactccaccacctgaaggtttcctcaaaattaattgtgatggagcttttctaccagagctgaaagtaggagcatgggggtttgtcatcagagaccatactggtgatagtatagcagcaggtgcagggaagttatacagagctttccaagcaatgcacgctgaaactgttggttgtttagaagcgctcaaggctgctcgtgatttaggcattggcaatattattttggagaccgattgcctcaacctgatgaaagccctgaagtcaacatcatttgatctatgcgttgaaggatggctctttaaggaattaagacatcttatgttttcagattttatttcttgttctgttaagcattgtaatcgtatttgtaatacaggtgcacattctatagctcactttgctttatctggggacccggagcttgttatgttgtggacagctcccctcccaacctttataaacgatgctttggtccgc

SEQ ID NO: 121706 - DNA, 759 bp, Zea Mays
ctcttgcattgctaactatccacggactccttcataagttcattacacacgagtgctatctagggtactcccaaactccttctctaaagtgtgtccccaaattccttgagaaggtcatcaaggctagctagggacatttcctcggtgtcggacgagttccctatcctggtaggaggtagggctggaggggcttcttccttctgctcagtatgacatccttggcttctggtcttcttgcggatttttcttgcgggggtgagcttctttagcttcttgtcgtaatccatcttcagagctcggtaggcctcacgggtgttagtttcctcgccttccgctatctcgaggctctcttgaagggatgtcttttcccttgtaagttccctgacttgttgctcaaggctttccacccgggagtttaggtgagtgcagtgggaggcaaggtcatcatattggttatcgagagtgtgaaggtatccagccatgtagacgatggtggggtcattctcggtagggtctctccctgacagggcctaaagtcttttcctccaggcgggggtatttttgttgctgggtggaaagtagcgaaggggggtttcaaagattactctactgtagttctggcatagttgtcggagggcttttcgggcaacattctggcaagtatctgggaagcggtgtcccggtgaaagtgacttggaaagaaggatggttcgggtagtttcggctttctcccaggtagactaccatagagcacttctc

SEQ ID NO: 121707 - DNA, 662 bp, Zea Mays
gtaactcatcactagtagcctcaatacatttcagccagtcatcatttggttcgtcaaaccggtctctgtatctgaaggtatatttcaaacgaattaatccaccttaactggacccgacagcagtctccttcggcatctcccagttatccacaagtggccataccctgtaggctatgtgctcttggatcaggtctcttgtaccaatgaaagcacagacattgctgaaagccttttgacatgcttcggcatcattttcaatcgccacgatcggccttcgaaggccgaagcgagaccagatggggcgttggataatcccctttatgtcttcccttttaaccagatcatttttgacataaaaccattcctccatccaggccctgggccacctttttcgaaatgttggaaccagatagcttgcattagaacgagcaatgaatccataacaaccaaagttgttgtgatgctgctctttgccagtggcttcgtctcgtacaacagttcgtgcatattgcaaaaacactttgcgctcggttccagcccttggcttctcacagcccaaacaaacaaacccattttgattgtagcttcgggagtaatttgatgaagaaagatctgaaatatcttcaacacttcaaccaaaaatttgctcaatgggaaccgaa

SEQ ID NO: 121708 - DNA, 772 bp, Zea Mays
tgcgtggcggcgggctagggtttcgtgcgtcgtgagatcggtgggtgtcgctttggatgcagtgtgaataccgggctatgggggtgggttttgcaacctctgcaggatgacatcaggagggtatgggagttgagtcgagcgctgctacatcggttgcattcctgtgcggcagtactagcatagatgcggatgccattgttgtcgaggctaccattgttcgaggctaccactgttcttgttcggtggtgcatgttgcattcctgattcctgtaatggagtacgtttttggatgttaggcgattggcggatccatgaatgattagaaacacttagcaatttttacatacagctaattgttggttcacaaacaattaagaagggttacatggaatttggtgtgtgtgtggattgggggttgaactgtcagcgctcctgttctacagctcaccttgtttgtatgctcgtgacggttaacttctattaaccatattccggcctttatgtaacaattggcataagaatgcagcataatttccactatgctgttatgtaccatgtgattcttgatcatatattctaccctccattactagtatctagatatcagaatgtcaaatgacttgaacctatttgcttagcgggtcattgagttgtatacttgtattgtcaaaatctggctgccacattctatagttgtgcaagaaattccatgcacacacgtgtcatgcgtggatggctgcctacaatctagcattagttgtgcttgaagatg

SEQ ID NO: 121709 - DNA, 321 bp, Zea Mays
actctaatgtagaatccacaaacttcaaaattcacaatttttgtaccttcaggctgttgtatgcaaggctatccgcaagatcatccttcgtcatggcacagaggccagcttcgagcttcgaaaaccccatacttctggtcatttcccggcagacggataattctttgttgtctgggaggcaatacaagaaatcatcttcatctgtaccattaaacactaaggcccctttcgggtatttcagttctcgggcatagtgtttagcttcaaaaatttcttcttcagataatctttttcccgaagcatgtcgaataatataaccaa

SEQ ID NO: 121710 - DNA, 433 bp, Zea Mays
cttgtatgatttacaaggttgtaatgttgcagtagctttcgaagcagatggatgggagttcacactccaaggtttggatggtctgggtggttttgcacttgagaaattttgcagtttgagcagagaactgcacaaaaaatacttggttattacttaatcaaatacagaagcaaatatactaagcatactcaaggagagaaatatttaataagcaaacctgcaaaaatcaaaatgtggtgttattgggacaaggttcaggaggggctgatcttcgctctgtacatttgctttttgttgatctttctccttttcttgttgagaattctgtttgttcactatattgtttcaactcttcagggagttcagtctcagatgatgcagcagatgcgaatgaaacaataataatgaagcgtcccgatcctttgggactcaa

SEQ ID NO: 121711 - DNA, 356 bp, Zea Mays
agcacccttagtggctagatttggtcttcctatggcatcgattgagccaatgaatcccatgcaccgtccaacaatgtaccaccgacaaaccctaacgcataaggagaacaaggaataaagggaggaccctaggccccgatcacctctagcgcccttagtggccagatttggccttcctatggcatcggttgagccaatgaatcccatgcaccatccaacaacgtaccaccaacaaaccctaacgcataaggagaacaaggaataaagggaggacactaggccccgatcacctctagcgcccttagtggccagatttggccttcatatggcgtcggttgagccaatgaatcccatgc

SEQ ID NO: 121712 - DNA, 1165 bp, Zea Mays
cttggacagaaataacttcattgtcatcacagaaacccagatgcctgcagacctgggcagttgcttcagaaccgagttctggaggaaatttggccaccctcctgcttcgcctttgtataaaattacttggtagaggcttcttccttctcatgggagaccgtggagttggggcaaggcatcaactggtttagtgaccaaacactggaactcgcacaaaggcgaggagattaccatagaatcctcaagagccgactgaaccaaagtgccatcctgatcatccaaaataggtgatctcaacctcctggagtagaccttgaaaacaggtggcttcaaatttcatctagcagaagaaacactgtcaacacaactcaccgcagtcccaagccctgccaaaatcgaatcctccctctgacccgcagccaaaacagaagtggcaccatcaataggataatcgggtaccacatcatcatacaaggtcagaacaccaggcgccgccagctcctcaaccgcaacacacgggagggtaggggcatcaactggtcctgccaacgaatccgaggagacaggtgccgccaaaacgtccactgtagttaaagggcaacccgaatcaccagtagccatcaacacatccaatagctccacatcattagaaggtccatcacgcgccgacacggaatgaatgcgtgggcccagccgcgagtgcaccgaagctcgaggcaaggaggtctgatcgcccagcctccacacccgccgtgcacgtcgaccctgctccggttcatcatcagagatccggtggaggtggcggcagctgttcctccccaatgacacccttcgacccaataatcttcactatcacatggaacaccaacgagcgtggaatccaaactccgtcttcatcgaggaccgccggctccacagcatgcaggtccaacacctctggcaaccccacgggagagcggcaccatgatctcaacctgatgactgacaagtcctccccgccgatagaatccgggtgcaggccctaaatcaggcagtatggaccaagcaaaacctccggtgtctccagtccccataggtgagcagggataccacggagctcgacgtcaatgagggaagacaagacactgcttcccgaagcaaaagcctgcctagaccatctcttaac

SEQ ID NO: 121713 - DNA, 733 bp, Zea Mays
gtttcatctctacacatgtgaaggatcgaataggcgacatagggggtgaatgagatccaatgaactttattctttcaaaattggaaagcgaacacttaacttcaatggaaatgaacgaattgctcaaactaaaaacacatcaatcaactagtgatttcatgttttaaaaatgctcctaggacttacacgagaccaacaaaactaacggattgcaaaatggacaccgaaaagtccaaaacgaccataaattgtatcactttctaatgatgtttttaggagcttgaaatttagctttcgaatgcaaaatcgacccaaacagactccgattgagctgaaattctgcacacacctttaaaagtgaatttctaaggtgtccacaaaatttgaactcaaacgggtttaaacttcagcagcagatcaaaaaacgtgaacttgacttggggttttgtcaaacaaccaaatctgttgggaacctacccacgaaatggatcagctcatacaacaagttttgcaataatgccatgatagtttctaatccgaagattatccccaaaaacgccctcttaaactcttgaaggtaaggatcaactcaaataattaaactagatgggttgaaaagagaagaaacaacttaaaagacaataccatcagatttgaaacaaaatgaaacatcacgaggactacgtgtggttatggccacacttcctcaaaaatccatagacttagatgtcat

SEQ ID NO: 121714 - DNA, 281 bp, Zea Mays
aaacggtttcgtaaaccgtgatggggacctaattccctcgccgatggataccatttccacggtggcgaggtctgctccatctatctctcatcctcttttgtatcgcattaatcctttcatgccccttaaatgctcaaccgtgcatgttttatccaatgcctctcaaaacgagtataagagcaagtacaataagataatgtaatcgagctgcaagagatgtcacactaaatttatagtgttgtggacgaaagaaaagtgcggagagagaaaataggttgttc

SEQ ID NO: 121715 - DNA, 895 bp, Zea Mays
gaaatctggacctgaacttgctctgtcaggtcggctgatggtgactcccatggtacagtgcctgaacaagatcagaacaccaacgcatctcaccgtcgacgatcccccaccgtgattcgtgccctcgtcagcgtgattcgcgattggatcaactggataacacttgaagtcatgtaaagatcatcaccgtggataagttccggccagtaaagtattccggccaccgtacagagctcgccgcggtggaacccgataagcacgccggtgactgccgccttccggccttgtgccacgtgtctaggcatttccaccacatcgccgtgacctgctctcgctctccgttgatcaccggagtgactgccatggtaataggacaccaatccagtgcgccagtaagctcccctcctccgaccgccacgcgtctttgctaaattcaccagccaccttacttctctcttataaattgagtgtgtcatcggctccgcaaggtagtcaagcaacccacacaccaacttgtgccttgaattgtcccctagagaacttcaatttgggattacccccaaatcggtcaagaacaccgtagaaccaaggttgctgtggtcagcgcgatacaggtcctctcatcttctctactctcttgtttgagtgttctcgtgaacccgtgatgctcgtcgattaacctgattgaactagaccgccgccaatcgccaggaacacatggtcctttggttcatccgcgcggtcaccgtggccagaccaaattagatcgccattcttgaaattaagttgggggaaatgctcgggggggggggggactcaattcagtgtcagtcactcgggagcaccagtcttggctccctccggccagtctagctcgccggagcttggctccctg

SEQ ID NO: 121716 - DNA, 1076 bp, Zea Mays
ctaatttagctatactatcctcaccctctttaatgtagtgatactgattttgtcgctgtcggccattgtaagtatctgtcatccatttatttcgtatccgagctctctgtgtgtacacatttttttaatagcggtgggtcacaactaacttatctacgtcatcctcgccctcttggacttgagttgcattttccttcaaaagcgtcctttggtgtaaaaagcatcctttggtataagtggtactgattctttggcgtcgtgctgcatagcatcctttggcgtgtagtggtactgatttttttttgtcgtcgtgccattttcattcaaaagcatcctttggtgtaagtgatactgattttgtcgcttcgtgccgcatagcatcctctggtgtgtagtggtactgattttttgcgtcgtgtcgtgtatagtccatatgctcgctagatttcgtctacacataacgcattcttgctacatttcctatacacatgatgtttattttgtatttatagtacatcaccatataatcgatcgtgcatttactgcttactgctttgtcattattaaattaatttgacagtaaattatagcttgggagtgtagtggtactgattttttcccgtcctgccgcatatagtccatatgctcgctagatttcctctacacattacgcattcttgctacatttactataaacatgacgtttattttgtatttataatacttcaccatataatcgaccatgcatttactgcttactgctttgtcattattaatttgacagtaaattataatattcggtttggaagcacgggcttcatcaaattttacatatttgctcgaggaaaaaatctgcttcatcaagatacatttgattacacattccttttcctaatagtgtcctccaatataactttttcccaatagtggtactattacatatttcttctttgcataactatctattgctttgtacatttactctaaacattatgtgtgcttgctgcattacctctaaacaagacgttcattttttgaatctatagtaccatagcacatatttgtccacacattca

SEQ ID NO: 121717 - DNA, 575 bp, Zea Mays
tcattcagactccagacaaggcaaactagtagtcgatcgaaatcgtctcgacgatatctatgcatctacagtctccgatcatcagtaggacacaccatattaggattttaaacatggtttggtttttagggtattatattctaccccccttaaaagaatttgtcctcgaattcagcccacttctacaaatcaagacattcaccaacggtaaaactcggtcaaacaccctaaatagactcttatagtagactagtagccttgacgagatcatgaaaagaggttttcaagaaataacccctaagtcggactaatttaccaaagaaaatgacacaccttgactacaatcataaaacaatataaaacgaattcccaaggcattgtcataggtgcaatcaacactaggatttgccatcattgaatttggatgcagctatacatcaagatcaatgtcttaaaacaacactctttttatgaagaggtgatatgcactaagaacaacccttaccaacttcaacaattcattttaattcaattgtcaaacatccacaccagatgaatgtataagaagatcaaac

SEQ ID NO: 121718 - DNA, 686 bp, Zea Mays
cggagattgtcaatattccaggaatgctctaggtcttcgccggatggcgttgttagcctgtacgcgctgggggacgccttcgtcttgacgatgaagggaccctcccactttggctccagcttgcaccgtgactctgtccgagttgttcggacaagtacgaggcccccttcgttgaattctctcgggacgactgtgtggtcgcgccatgcttttgtttgagcttggtatctgttgagggcctgcagggcgaagacacgatctccgtcgatgaggtccttcgaagttggttagtctacgtcggggacggctgaagtgcttgtccgtggtgacccatgttttatttcctgtggggtcatggtctccgatccatatagcaggcggaaaggagtgaacccagtcgcccgacactcggtcgtgttcagcgcctagactgcttcaggtagcaggtcgacccatttgcccttcttgtcatcgagaagcattttcttgatggccgtgaaattttttccgttggtgcgctccacgacgccattggattgtggatgatatactgaggcgaaggcaagcttggtgccaattgagaagcagaagtctttgaagtcctggctgtcaaattgtttgccgttgtcaactgtgagctcggacgggactccgaatcggcaaacaatgttttgccagaagaattt

SEQ ID NO: 121719 - DNA, 354 bp, Zea Mays
cgacaattaaacatgagagagagaatgcattgcctttgcagtgatggtgatgttgaggcacgagtctgtgaatggtagaacactagtgtttatgatggcgaggccctgattctcaatctcggagatgatcatcactagcactcctcttctctccttgcagcatattttcaataggacggtgtcgccatgaatgcttgcatcaaccgtcgggttgaacccacccgcaccaaaggcactcccgctggaggatgaggcgtcaatatcagttgatatatgacatttgctctcaaagtcagtgggctcatacgttctcctttcccttcgcccctccagggccttcaccttctcctcgag

SEQ ID NO: 121720 - DNA, 712 bp, Zea Mays
agtaatatagccttagttttttcttacccaacctcaattttcacctctctttggctctacgttgtctaaattcgtcttaggtggcatgccaatcctaagacaactctaggatttctcctctctggcgggatccctcccaagaggtgagattctggttttttgcaaaaaagaagactctgcaccatagcaggccatccaggcctatgcgcgaaccgtccgaaagcgtctgaaagcatgcagagaggagcatctcctacgacaaggtcgtggaccgtctggtgcaagatcacacagtgcaccacctcgaggttcataccagtgtttgaccacaaatcagcgccaatgcgctttttggcgactccactgagaatgatagtgtctaaatctactaaaaattgctcccaaatggcaggttctaaggatcgcactgatgtctccctagacaatatccttaggccgactgttgagaacctatcagccgaggaacaacaactatataaggatctcatgagccaagtagaagaggatgcaaaccaccaactcgccaagattcaagaggagacgaaggagaagttcttagcacacttcactgtggatcaccaccaaaagattaccaagcatggagagatcggaatcgcatctcttgtacctttgtctcaagtcctcaatgtaagtaaatctgacgacatccaatctattaaacaatatgtag

SEQ ID NO: 121721 - DNA, 347 bp, Zea Mays
taccaagagagggcttgtgcagtagaatgcagttattactgagaatgtgtcgatggtcttgactgatgaaatcttgcaacaacttgagcaagaagatgagcaacaagcagtgtgttgtcaggtatctgttcatgctctatcaggtattgtgggtaataaagtatgaaggtgagagctattgtgcaaaagtagtaatggtgatgttggtggattcggggagtcctacgagtttcatcagtgataacatggttcaacagttgggataatctgttctgccttgtgaatctgttattgttaaggtggccaattgagattctatggtctacaatacaatggttaaacagttg

SEQ ID NO: 121722 - DNA, 507 bp, Zea Mays
tggaaatcttcgatcagaagttattacactaaggaatgaagctcttgaaaaagacaaaatactgctctccttagtggtaggctgaacactagcgaagcccagcttaacgcacaagctgaagctcacaaagccgaggttgaaggtttaaagaaaaaacttgccaaaatgaatgaagattttgaagttgcgaaggcgaaacgagaagtaagtgaaatggaaacagcaagggtgtagaaaatgttgaagaacttcgggattccagagaaaaatgctacgaagtatccatggattgtgcgaagaaactaaaagatagctttgcaaaggtgggtgcatactcattagagcaaaaatttatccgaggtgatcttgaaggagtaattcaatggatcgacgaagaggtcgaagcttttgaagaaatactcagcgaccgtgggaatttttgtgccttcgccggtgccagaggggttgcagcagttttggagaaaaccggctgcaaacatgttaagg

SEQ ID NO: 121723 - DNA, 404 bp, Zea Mays
ttggcttgctgcctttggatggcgtagtcctcctgacatcgtctgtagggtcgtgcgttgtcgtacccctagtatggcgttccatcttgtccatttggtatacaaatccctatagcttgctcgacgtcagcgttacggtacctagtgggtcccacaaagtgggcttatggtaaggttcaaggtcgtgtccggtactgcttcatcttccgtcataccccttgcgtcattataaaacatgcataggtatccacccgatatggggtattgtctcgtcctttttggtgtatgggtcattgtagagactctggtgctgaggtctccgcgactggagttgatcggccccacaagtcagtgagggtatatccacgggattacatgggggtgttccatcgtgtctgcttaag

SEQ ID NO: 121724 - DNA, 340 bp, Zea Mays
gatttgtaaactaaacaattctcaaactaattgttaccaggacaaggtctgtgctgcttcagcttgtttgaaaatatgatcagtatctaaagctgcaggcaatatgctacaaccattatattttgacttgatgaaccttgcacgaaattgttcttgaatctaattctaaatttgcgctgttgtgatggattagcagtccagttccactgtggtaattctacgggagtgtaaaatgtgaccctccattaagaataaaaaacaatgtaagcagtccagttccactgttccagtttagctggacagttgcacagagcaccacacttccatgctactgttttat

SEQ ID NO: 121725 - DNA, 648 bp, Zea Mays
gaagcatgaaaggttggttcccaagccaagtatcttcccaaaatctgatttgattaccatccttaaggataaaagaacccaaacttatgaaggattctttgactttcattagccccgaccaaaaatgtgaatcccctggtttccttgtaactttggacaaagtatcatttcttaaatatttttgtcgaagtaatttttgccaaaggccatcttcatcaaataatttaaacaaccatttactaagtaaacacttattctgtgcatctatattctgaattcctaactccccttgctctttaggttggcataggatatgccatctagcaagtctatattttttcttatgttcatccccttgccagaagaatctagaacggtagtagtctatttttctaggactccccttaggacctcaaaaaaagtcatcataaacattactacactagtcagtacataattaatcaacacaagacgacctccaactgacataagcttccctttccaactactaagtttcttctcgatcttagattcaatgaatttccaaacattattgctcaattttcgaaaatgcatagggatacccatatacttaaaagggtaatttccttttttacacccgaacaatcgaacataactatcttcctc

SEQ ID NO: 121726 - DNA, 1224 bp, Zea Mays
aagccataagcaatcactctgccttcttgcatcaacacacagccaagaccaatacgtgaagcatccgtataaactgtgaaacacttaccgctctcaggcaaagctaggataggggcatccaccaacttgctctttaatgtctgataactgacctcgcaatcgctggaccagatgaagagaacacccttctccaagagtctagtcaagggcttagcaatgctggaaaaatttggtacgaaacgccgataatatccagcgagccccaagaaacttcgaattttagagacactagagggtctcttccactccaccacagccgcaacattcttgggatcaaccgcaatgccctgctgattaatcacatgccctaggaaagccacttcggacagccaaaatgcacactacttcaacttgccatagaactgattctcccttagggcacccagaatgagacggagatgttgctcatgctcagcctcgatcttagaataaatcagaatgtcatccaggaacacgaccacaaagtcgtccaagaactcatgcaacatcatattcattgcttccataaaagcagcaggggcattagttaagccaaaagacatgactatgaactcataatgcccatacctggtgcaaaaagcggtcttctcaatttcctcctcacgaatcctcagttgatgataaccagagttcaaatcaattttggagaacacctgggcacccctcaactattcaaagagaacctcaatacgggggagtggatatttattcttgatagtcacttgattcaaagcgcgataatccacacatagccgcttgcttttatccttcttctcaacaaacaatactggggaagcccatggagacctgctaggcctaatgaaacccttagccagcaaatcatccaattgccacttcaattcaacctgctcctttggggccattcgatacagagccttatgaatgggctgcgtacccggaatcagcttaatctcaaaagctgcatcgcactccggaggaatgcctcgaagctctgccggaaacacgtcagcaaagtcacacaccacccggatgtcctgcacccgcaaggcagcctcaccctccaccaccatggagaaaaagattcccgacttgctggaccggtgattcggaagcaattgcgccaacaaggataacgtgaacttaggggaacttcccaagaataccacctccctacctgacggc

SEQ ID NO: 121727 - DNA, 369 bp, Zea Mays
ccgcggtcctggacattgccgctggcaatggctggaggagggggaagagggcgcttggcccttggatggtaaaggtgcggttaagattagatctgggggctggtagatttggaccgttgatataagatcgaacggtcgggtgttttgggcgggattcgaagttagtaaccgttagatcaacatcctggggctctgatgggatccgcatgcgatcatactgtgggccgtggatccttgatccgatgggtagcagggcgtgcggactcatttggggttgggatctactccgggcccctgatttccgatcggacggccagaaaccttagatacctcttcgcggatccgttttgcataagaacccctatactt

SEQ ID NO: 121728 - DNA, 437 bp, Zea Mays
ctttactttcagccaacagaaacctgctctgaaggccttccctactaaggttcttgatgttgcatgtattctacattatcctgcatggatttcttccagctgatgctttcccacagctgaatggatgcatttcatgaggactcctgctatccctctcctatacaacaatcctcctatgtaacataatgagctgaccgccttgcaatacgctcagcaacaaccttgtcgtctggttcctcctcattttttgatgtatttgataattggctccctctagtcctttaggtctgatctgcctgatccactgccttatattctttggcaggccctggtgtggtgctcggctatcatatctcctggacaaagacgttgggtggaacctgcggccggctggaccccagctttgacagtgcatctgctgctacattgcaatccct

SEQ ID NO: 121729 - DNA, 627 bp, Zea Mays
agtagtgatgcaaagtttagagccctattgtgaccaacccttgtggttttggactatgaactatgtggcaacgttggagcccatagtacagagaatatgttttataaataggtttggacttggttctgcataaaagtgggagtaaaacacctctaaacttgctctatcagccaaaaggtatgcagatttagttgactgtttctaagtaatttagtgtgtttttacccacatttggagctctatggtaattaatatatggagtatgagccctatttcatgtagaaaagttaaataccatttgaaggagagtaagtcttatgcaaagtgttagccttgctgctgtgtaaaatttggagataatggtactgcaatcctctatgtcaggtttggcatggagctgtgtcagttagctgaaatcagtgtttcagtatttttgttaaactttggagcactataaccattgatctgtgtggttataagccaaggaccctatagcaaagtgataggggactagatagtgaacaagtttgtttaggaatgcttgagctgtccttgtttggaatagggagaaaaaggtgttcaaactgcctttatcagacatgtgaagtgcaggtctgatgcagtaat

SEQ ID NO: 121730 - DNA, 527 bp, Zea Mays
gggttgcaatggtttgggcatggggccttgagtagttttctgaagtggttggtggcctccttggcctaaggcttccctcccatttgaccggtcgtggctactagcgtttcgtcatgttgtcgcctgtcctttttcttcctcttgtcgggctgcttgccaaagcccccgtcgggatctttgtcgtgtttagttttttttcttatggtggtcgaagatcgccctcacggtgtcttcccccagcgcgtggttagtcgcgatatcgaggagctccttcatagttcgtgggcttttctccccaagttgtgtaccagagtctcactcgtggttcccgagatgaaggcgctgacaatgtcagcgtcggttaggttagttagctcgttgcactattgtgagaagcatcatacatagtctcttagggtcttgactggcttctgtcggcagttcttaaggtcccatgggttgcccggggcgcactgaaaattactgacaaaactttcctcgaggtcaacccaacttggatacatctg

SEQ ID NO: 121731 - DNA, 557 bp, Zea Mays
aaaagatcgccggattcagagaaccgccgccgacgatcgcgcactacgatccgtgctcgcctagaagatttgcgctcggtctggagttgataacttcggtggatgaaaacatcctgggtgaggtgaacatatgccctgagctggtcagctggatgcccacttgcccgcgtggtcagttgaaatatcgccaccggtgttcgccgtgttcccggtgaaagacacatagtcgcctgattcactgtggtgtcatggtcgtggcatcccctgagtcgtgctcgtggtccgatgatggcatgagctccacggtgagccgctgtgcgttattcaccgtggtgttctcatacaaaattggatcacaccacgggcaacccctttaaattgagtgctacacacactagctctgcccatccgttacgagcctagtccaccccctcgcttatccctctccttggccattgcctgagaatttggaatttctctgcaatcggtcgcgggcgccgccgtgatacacctcaccgtggctagcgttcttcaggttacgtcgtgcccctttggtt

SEQ ID NO: 121732 - DNA, 328 bp, Zea Mays
gaaaggttgaagagaaaggaggagcttcaatggtagaagcttcaatgataggaggtgcactcatgacctattattgtaacaccagaatacatggacttgtttaaggctgcatcactatggctgtttgtgggcattgtcgtgcctgcatgagaacaaaatggaggataaacactatatggggggaatacagcaacatataaaggaggagcaacatgcgatctacaaagaggatcaccatatggatacatgtacaagtatagaagagggtatggataagcgaaaggttgaagagaaagggggagcttcagtggtagaagcttcagtgatt

SEQ ID NO: 121733 - DNA, 671 bp, Zea Mays
cgtttaaatccgcctctgaataatcctcgcactgcacatagggttgggaaaggcaccacatatgtcgggggttagatgggatgttagggaaccgctcgagtggactccacatctagccaaagaacttctctagttatcaatactgtgctcatcacattaactgcgctcatctcattaattatgactggcgctgagctgtggtatgcaagatgacggagggaagacaagaggattggttacgaaggctaggagttggtgtgggtagaggtggacatgcagagcaatgatgatgcttagattcccgtcgtcggcacgcttcaccaaaaatcttaaagaggcatggtggagatttatgtgaatggataatgatacacggaaaggcatttaccgagggataactatttcacaacaatcccttccgagagaagcaatatgtaaccttccctctccttggtctatgaaaggaggagggttcgcttgacaaaaaacggaccaaacccaagaaccaacaattgatacatagatcttttagcagagcaacccttagagacttgggatctttgcttctcttgccctcttgtaacccctactacaagcaatcaggtgtcggtagcacatgctaccaaagactggaagtagggacgttcatcctgaactagtataaatcttgc

SEQ ID NO: 121734 - DNA, 632 bp, Zea Mays
cttttgaaatgtttccacgcgaaggggtatcatcgcatgagaaccacacgatccgcaacccacggatcagattaactcgccgccctcattgattcgacatggagcaatggctgttagatctgacatccacggaccaaggatcgcccacactgcgagttagcttcagccttccgatccccgatcgatgacccagaactgatgagcctgaagagttaccttcttctaatctagaccgcccattgccggatcaacaaccccaagcacgcatcggtacattctaatccccgtctcatgccatggctccaacgacccctacgtatcttcctcctaccctctagcccgaggcggtgccaccaacatcacaccaacgagctcgccgccgcaaggttatatggcgccccgatactccactctgttcaaaatctgtaaaagaacgggaagtagacgagggagtcaatggagaagtattcaccagctactggagctccaaagtatgccgaccacggagattggcggcacaacgacacgatggaacactgatgaggaattcccagcaacaaggcaacaacctatgaagaaaatagtggatgcgcaaggtacaggtagaatcgaagcgattgggaaggtcttac

SEQ ID NO: 121735 - DNA, 653 bp, Zea Mays
ctccggcaagagcacacgcgtgcgactgctggtacgagggctgaccgatgccttatcgtggcatgacctgagagacaaccgggtgtatgcactaggacaaatgagacagagcatgactcaacacgatgacataaaaaggggagcaacatcgactgcaaactctggaggatgaaaagtaacaagacaagatcgatgccccttccgaccggttcgagcattgtccctatgtatggaaattgcccctcctttgacatataaaaggaggaggagcagtgggtgggggcaacagacacaagtaactaacacttgcagttcatcaaactccatacttcctccgctctccactttagaggtttggacctcgagtcctccctcacccgactttgtaatccacccccatcgtaaagttgatgttgactttctttcattataagaatggtgtcatttgcgtattgtaaaattgggaagtccttagaggagtagatgtcaattgtgcatctcaagaaacatctacctttagcctgtgaggaacactttaggcccagttggtaatcccaactaggtctggaagaccactttagtctcaagtgtctaacacagaactagtgtgtagggcctttattcttggattcatagttctggcaagaaaacaa

SEQ ID NO: 121736 - DNA, 631 bp, Zea Mays
ggggtgttgcgccttcgccccaacagagaagcactctcatacaaagtggagatcattttcgacatgcttcgtgtgctagtgctagaccgggttgatgcagaggtagacgacactaatgttgtcacagcaaacgagtgtacttcagtaagcaggttgtgaagctcctagaggagttgctggagcgagcacatcccagccatgctattaaccacagcgtgatacatggcctcaacacaagagcaggagaccacatgctgacactttaatgaccaggaaataaggttatccccaagaaacatagtataaacagtggtgaattagcgagtgtctagacaccttgcccaatcggagtcagtgtagacgatgagctcgctcaaaaaagaaagttagaggagaacctcatagtacatagtgtcatgaaggtactagagcatctacatcacaacacccaagtacggctctcgtggatcatgcatgtggagacacacctactaggtagcattggagatgcccgatctagtgaaggtgaggtacttgagcatccctacaaggctcttgtaggtagtgaggtcatcgaccagggcaccatcgcctaagggaagcttcgtctaagtgtccaccagactagcac

SEQ ID NO: 121737 - DNA, 349 bp, Zea Mays
aaagaacctagaagggcctgccttcatcaaagagacggaagagaaagttgccctgattcgcaagagactactcgaagcctagagtcggcaaaagagttacgcatacaacaggagaagagaactcaatttcgaggaaggtaattttgtctacctcaaagtctcccgatgcatggagtcaaaatatttcaagcaaaaggaaagctagctccgcgattcgttggcctctatcctatcatcgacagaatagggccagcagcttaccgccttcagttgccataatccatgtcagatatccacaatgtatttcatgtataccagctccggaaatgcttgaaggtaccagagagtc

SEQ ID NO: 121738 - DNA, 697 bp, Zea Mays
ctttgatacccactaatctttgtgctctcaattagctctaaactaatctttgatacccactaatatttgtgctctgaattggcctaattaatgatcaagtggtcatggtgtatgtcaactaatcactttctcttcatgtactactaggttataattatttgatgtggagtataaacatgcttcttgtaacatacatactgatggttaggtacctatcctagtcgtgtttgcaggcctttcagattgaaccgattacttcaacggtgtcatacatgattggtagggatgtgatggaggggagggggcaatgcaggtgcaggtgcattccgaatctccttccctttctccggattctattgttctttgtttcctcctattcgtttctgtagtgagaaatgtcttcggtaagatttggttggtggaaattcactgcatttacttattattgtctcccaatttcctcttcatagtcaggaactttctggttcagtggaaatgtggaattgtaccaatgtagagtctagaataagtgtgcccttatcctcccagttagcataatgtgggtacttcgtttgtcatgtatggggcatagtgcaatacaaatccttttgttaattaataatgattcagggatgcctcgttgtccatgtaacatccaaactgcccacacacacacatcaaattttggcatgataac

SEQ ID NO: 121739 - DNA, 473 bp, Zea Mays
ggccatctcatgcgaaacgttggcactggattgcttactttggaacgggttacgaagccataacaaccgaaatttttgtgatattgttcttttccaatagccttcgtctcataagacaattcatgcaagttgtagaaacatttcacattcggctgttgtccttgactcctcatcgcccaaatataaacccctatcctgatgatggcttcaggggtaagctgatgaaggtagacttcgaaggttttcagtacttcaaccagcatactatccaaagggaactaaagccccgctttcataaaacttctatagacaaccacctcgtcagcttcgggcaaagggacattactctcccctccagcccacacaatagaaatgtcacgaaaatacctccctctcatggcatcgatctgtccttgtttgattgtcgatttcccgcagacaacatggtttggcctccagggccgatcttcggc

SEQ ID NO: 121740 - DNA, 340 bp, Zea Mays
ctccccttctcaataacattcatgccgacagtttctaattctaacgcgccaccatttcttcagcaccattaatgacgttttattttgtccgttctttctgggttctattagcatcaatggagcatcaatttgcctctaaactccctctctcctcttctatgaaaactgcagtgccgaattccttttctcctgctcgctcggctccacattccctcagtcctctgtccgagcagctgctgcttgttcatgtcgccgctcaccagaatcaacctctgctcgccggagatgtgccttggcatgtgccgtgactctgtcccataccgagactgctccctccgtc

SEQ ID NO: 121741 - DNA, 307 bp, Zea Mays
cagccgtcacaaaaggtaatgacattatgtgacggtactctaaaaagtcgtcacaaggtacataatgtgacggtcgttatatgacgacccttatgacgcagcattttcgtcataagatgctttttatgaccaattttgtactaaacatgacaatttacttttgtcatacaaaaccattttttgtagtgcaagggtggaccatccgtagtatgaagatcagaaatcggacaggaaatgtgttgatccacgcacttgtactacgaattgtccagatccaagtcaactatcattcggaccctgcacatac

SEQ ID NO: 121742 - DNA, 458 bp, Zea Mays
tacaagcaccgacataagcatgttgcttcagtaaaccatattgcataaactcccgtaagtaaatagaagaagtgaaagattaggtagataaaaaagtactatgtagtcactaccgatgaaggggtcattgacagcaacaggaaacacaataataatgatttcatgagtaatcgtcatatacaaaaggaaataacatatatgctttcaatcatcccacaacaatctgacagtaacaggagcttagagagtaaccttcataattctagaaccaaaaacaacccactcagtcaagattgtaaaaacaaataagcatgcatgtaaaacaaatacggaccaacaagaccaaaaagtatggctaggtaggcagccatcataaattgatgtgttgctggctcatgagtgcagggtactatccaatttcattaacgaacaacatgctttaaaccacatatatccac

SEQ ID NO: 121743 - DNA, 362 bp, Zea Mays
aaaccatacttcgatcgcttgtaagtatttgaacattgttgaaaatttaacacgaaaatgagaagatcaaggtccacacctcaacgggcacctgttgttagaatatagaaagattaattatttaggcctgcatgccttgttctgtatagatagaggtgtattctaattataggtagagttgtaaccgaacaagagtagatatagaaccctgattggttaccactattgtaactgagttggactccaacttgttggcagtttatgtccatataaatatacatcatgcggcctcctctcgaggatatacgcttaaccaatctggtggttttctctcggctgtcagtcaacaagtagcttaaaaa

SEQ ID NO: 121744 - DNA, 530 bp, Zea Mays
cagaaagccccgaacggggtgatgaatgctgttttttcctcgtcttcttttgccaagctgatctgatgatacccggaatagcaatctaagaaagacaacaccgaacacccggcggtcgagtttaccacctggtctattctgggaagtccgaagggatccttcggacaatgtttgttgaaatccgtatagtcgacgcacatgcgccaatccactttattcttttttagtacaagaacaggatttgctaaccactcgggatgtaacacttctctaatgaatcctgccgcgaccaagcgagctagctctacacggatggcttctctcttgtcgggcatgaaatgacatattttttgtcggatcggcctcgcctgggggtaaaccttccgtttgtgctcggccagttctctcgggactcccggcatatacgcaggttgccatgcgaatacgtctcagttatcttgcagaaactggacgagcgtgccttcctatttgtcatccaggctggaattgatgatggcagtcttgcgctc

SEQ ID NO: 121745 - DNA, 397 bp, Zea Mays
cgaagccctgccttcataaaactcctgtaaacaaccacctcatcctcttcgggagcaggtgcagcgctatctcctccagctctcacaattgaaatatctcaaaaatatctccctttcatagcgtcaatttgactctgcttaatggatgattttccaaagatagtgtgacttggtcgccagggccgattttccgcatcttcgtcttcactttccatatcaaatctcccactatcgtcagaatcttcagacaaatcagctagtatctcatttgtaatcttctttgtgtttgttttttccatggcctcgtaaaaaccagccaggggcaggatcagcaaccttcttctcatcagccatttggtgggaaattgaacaaatgccgaagctcacacaacaagac

SEQ ID NO: 121746 - DNA, 345 bp, Zea Mays
tttgggctaagggcgggcgtgaattggttggacacgaagcccgaaagctgcttaacacagtatggaattttacctttgttttttaccttgatcttctcttgtcaaatttctgattaccttatactttgctactctgcagaatgatggcaccgaaggtcgataagacaaagctaattctaaaatgttgaagaagaccttaggatttgcttttgtagtcatctgtaggaacacttgaaaatcctttgtatcatatgacaaaaagttgcgattgacactgaacaaattattgtaatcatttgtaaatatcttgtaattccattttaccttttgcttcatgtatgaact

SEQ ID NO: 121747 - DNA, 304 bp, Zea Mays
cgagaaagttgaatctcctactcccgatgcacctgctgaagagcttggctttattattcgacatgcttcgggtaaaaaattgccagaagaggaaattgtggaagccaaacactatgcccaggaactgaagtttccgaaaggggccttggtgtataatggcaccaacgaagatgactttttatactgcctcccggacaacaaggaaatatccgtatgccaggagatagcaaaaaacataggatttccgaagcttgaagttggcctttctgctatgtcgaaggatgacctctcagacagccttgcg

SEQ ID NO: 121748 - DNA, 630 bp, Zea Mays
tacaggtaatcgatactaaagacgaggtagaatccaccgaggttgatgtgaaagcagttgatggcgaactcttcctgattgaggcgcatgaccacgttgcatatgtcatgccctcgtagggaacatatacatggccacaatgcatgtatgtcctctgtagggaacacgatcaccattgttcatcatgacccacatgttggtgttctctcttgtcgctagttcgatgtgatgcataactcttaacattaatgaagttgtgagttgagctgatgtctaggagggcaaggagctgatgaccatgcatatgccgatgataacatggagggagacgatagaggcatcaggcttgtcattaaggcctcaagggcagtggtaaagctagagaaaactgaaggggtgcatataagatgaaaatttacttattataactggtatcatactttttaggggtgcagggtgtatgcatcctcggttgcatcatcaagcaggtagtcagcgacctcaagttacaacaaatgttggcaccggtggcctcacatatatagttcattgtagttgtaaaatagtcatttgcgatgacgctcagtcatctcagcaggtgcgaggtaacataactagtgtaagctgcag

SEQ ID NO: 121749 - DNA, 340 bp, Zea Mays
taattgtcgaaggtgcactttgtgcttctgcacattgtctcattcgtcgcatgtgatgcatcgcaatacacatcaaatcccttgtgaatgtctggcattaccaatattggtgcagtggttaaccttttcttgagttcttcaaaacatttctggcatgcttcatcccacttaaactctttacctttctccagtagtgaggtacgaggtttcactgacttggaaaaaccttcaataaatcttctgtagtatcatgccaatccaagaaaacttctgatcttggacgcatcctttggttgcttccaatttagtatttcacttatctttcctggatccactttaa

SEQ ID NO: 121750 - DNA, 465 bp, Zea Mays
gaagcaagcaagcaaacgttcttggcaacgtgggtgggggttgctcagctgtgtgtgtctgctccggtcttcgtcgccaagaaatcgacggaaatggcaatcgccgtctcctgtgccagatcgtcgtcctccattgctattgctattcgagaacagaagagcactgacttgtgagttcctaggctaacgtgcactcctcggaatcacagaaaggactggtgaggttaccacatttatttcatccaagaaaaagaaaataggcttatttctttgtagaacaaggaaagaggtctttgagatatatcaccacaaaagaatagcagtgaaaagaaaattgttacctgcatttgttttaacattttttttttgcgaaagaaaggaaaggaaagaagtcgttttagacatgatagattttattgtgcatctaaaagctgcttttggtactgctctacgaattctggtcta

SEQ ID NO: 121751 - DNA, 798 bp, Zea Mays
gggatttcttacacccataaggtgctcaaatacctagggtaatggggttttcatcattttatttttgtaatccaagactttttatttcttctaacacatcaaacatgtatatcttggcactcatccttgtgttctttttattcgacctatttcttgggttttttatgtctcatcccctttggccgattttcttttttcagcattttgatgagctacaaatcatggatttcaggtgtttctagtggttccaaaactatatagcacaatatgttcttagtaatccattaaagaaactaggatgtaccttggctaagattacatttttgtagctagtttttttctaccatacgatgagttctttatgtttttatgcctatcaccagtcaaaggtcatcaatttttgcattagttttgggataaggttccaatgattttggttggtcttgctaataaaatgtgtcttatctaccaaatgtagcttttaaagtgtcgcgctcccaagccgatttgacatttttgtgagctatagctcattggtttcatgcatatttggtgttctagaacgatcaaaatctagtcttctaaaggcaccattaaagtttattagacatatcttaattgatagaacatttttctagccagtttcagctccccaaacaacgagttctttcgatgttatacacacatgaggaactcaaacactagggatcatgtgtttttgttgttgttattttggtatgtgattcctaagattttagtttgctctagcatgtcaaacatatccatcttggcactcag

SEQ ID NO: 121752 - DNA, 379 bp, Zea Mays
agcgacaatgctgccctcccggctcgcgataaagagggagggcagcaaaatgcgattagtatttatttgtgcaatgaggtcggtggcccttcgctgtgtgtatgtaaagtatgacaacattgtttgttgtgaaatgagatggggactttgcttgccacggcaatgtatgggtgcttatgacacgtacttggttgtgtccgtgggtggtttttgttcgaccatgtgagatagcagtgatcgtaatagactttgcgccattagggtagtgtttacgtgttcggctgcacccttggggggcctttgctcggatgtcttgccgtaaatacttcgtatggcgcacttgtagtgtatatccggctgcacccttaggcggcttttg

SEQ ID NO: 121753 - DNA, 904 bp, Zea Mays
aacaactacaccattgtggcaagtaactttgtcggttacttttggcatcgagtccaacttctctagtgagtccctgcactatgaggtagctaacattaatgcggctcacaatgccatcataggaaggcctcggctcgcaaaattcatggcaaatcttcactacacctacttagggtctgtttggttcagctatatattcctagaaatctgattctagctgtgagctatgagaaaattgatgtgaactgatgattgtgaagaactggattttatttggttgaaatagctgtcaactatggattctatgaagacatgaaaatttataatgtggatgacatgaatctggaaaatctaggacattacgtgattctgaattgaactagagaaatccatagttttttaggaatccattatgacgttgtacccgttgggttgagattccagtttttacagcgaatttggtttataaagctaaaccaaatagacccttgtcctcaaaatgctaggacctaaaggtgtgatttctgccaaaggaaatctaagacaatcttacacctgtgatgaggaagaatgtagcctgatggagtctcaagtaatacgagctgagtgcaacagcctcaaggcagctctcgcgttgcacccctcgagcaatggagcagtcgagaacttctcgcccccactaaagaggatcacaaacttgcaggctgagtcctctcttactaaggaaatccaacttaacccaatagataccaccaaagttacccaaatcgaaaccatcatggaaccaaaataggaactcacgctcacctatttcctctaggacaaccgacatatcttcacctggaagcctttctgccatgcctagattctcaaggcaactggtcgagcatacattcaatgtgag

SEQ ID NO: 121754 - DNA, 551 bp, Zea Mays
aatggcgtgtgggttcagtgattcagggtttaagtggggtaactgaagaagattaccttgtcactgctggtttccctaataggtgtgagttgatggtatggaggtggtgcatagccaaggggctagagatctcagctctgctggaagtatccaagttgggattgttttggtgagctgtaagtagtgaagccctatttgctggctttggctggagtgaactgcacaacaaaggttgtagtggcttcaccccctgtaaaatatcagacctgggacttcccttgtacttagccacaagtggtgtttccagctacccttctcttatctgctccttctattgcctttgttcctggataaaagagacatttgggtactatgctgtgaaccagtcttggttcattgtcctggctgagtttatggactgatgaggtgtatgtgcttgttttccacgtgttggagtcatgcagtgctgtcaccataggagtttctctccaccagatgttgaacaagttcagtgaacctccgcttttgcctacttattcagtgtgctgtgc

SEQ ID NO: 121755 - DNA, 651 bp, Zea Mays
attcgttggcgactgctcctggcagctctccattgaataaggagaacttgagctctctctgtttgatctgtttggcacatggtaagttccttagatcaacattgacaaactttgggtttgtaccttactactatatgactgtgcttgaaatcgttggcgactgctcctggcagctctccattgaataaggtgagagtgagaccacacatcactgctaccatgtatatgtgtgtggatgtgggtgggtgattatatacccagatgggatgggaacatcagagtctgtcaacgccgtgtacgcaaggtgctcggtgactccactgttcatgcttaccctggagcttaattgtttgggtcagctctctctgtgagcatgcttagtttgggccagcaagtaattaagctgacgcatgtgggtggtaatttgtgacttgcaatacgctgaggtctctgcagctgctcgcccacctcgtcgctgtcgccctgtccattttcttcttgttaatagcggctggagtgttgctgttggtggatgctcttccttccctggccctgctggtagttgatttgagtagcagtggcagtgtcaacagtttcctttgagaggtaggtgctgtgcattattgctcgtctggcatggtatgctgatac

SEQ ID NO: 121756 - DNA, 283 bp, Zea Mays
acatggtacttagggaggtctgtaactatgctctcaaggattgtactcaccagacttatctggtgcggcatcagtgtacacactagattctacctacagtaacgactagttttagagacttgacattgtgaaggcaccaacgtgtccaatatagtgggttggtgagcattggacatgttcggtgcctatcacagccagttttaataaggacaaaactgaacatacactatacatgtaatccgatcgaaaatcacatgtatagcgacaacatacaatgaattat

SEQ ID NO: 121757 - DNA, 342 bp, Zea Mays
ctcttgacaaaaacttgagatgctatgaagtgttcttttgttcctagaactgcaccacactccttcgccaatgccatcacatctctaatggagcacccattgtcctcctttcttgccaaagactcaatggatgttgtgctcttctcacttgctgtcacaagtttgctcaattgatcttgcacccaatgtcctcccaatgacttgggctttttacccttgtcctttcgaccaacagaaacatgacactttcctttagcagttgtaggggaaacctcttcacattcttcatagtcttcatccttgtcatcattggcctcatagtctccatccttgtcatcagtg

SEQ ID NO: 121758 - DNA, 317 bp, Zea Mays
cccatccaaagtccaaaccaaacccactggctcttgtccggtgcccaacaatcaacgtcatattgtcacgcagacagaatgatccgtctagcctgtcaatagaacgcatatgaagccagcgcatgcgcacgaacttgtttggatcatctaagactagcttttagcccactaatttgctagaacaaatttaggtgactaacttaccctctctagaacagccgtcagttagggtgtaagccaaaagttaacctttatgtgaataaactctattgtttttttcgacagtgttctaagcctatctccagcggttcccctat

SEQ ID NO: 121759 - DNA, 399 bp, Zea Mays
attgcagggtgttggagctcatagatggcaatctagatcaattcaagatgacttgatgatttagagtccaacctcgaccccaaaaaggccaaaaaggggcaaaacaatgaggaaggataagtatgtaggtttgagtgcttagataagtttcataaaccatttactatgtgttcggtactttggtttggtctctaactaaatttgtagagaaagtgtcatttcaggctctgtttgaggagaaatagaaaagctggagaaagattaagaaagatgtaagttcccgagccttagtcatttggattactatctaattatgtgtgtctaagttacaagaaattcatccaaagaggtaaagtcaattggagaatgaatggagggaaaaggacttagaacctgcta

SEQ ID NO: 121760 - DNA, 468 bp, Zea Mays
gacgatgttgtgtccgttgatccggaaacgaatggtcgtggttagattgacggataccctttcgacgctttaaatccaagccattgatcgtccatctgccggcctaggtgtgatctcatttaaaagcacgtgcgtgcggtggtggggacctggtgcggaccatgtgcaccctcatcgtgtgtgcctttgtgtggcatggttccagccagtagttgagtgctcgtgtccttatgtcggcatccgaggtcagtattgcaaagaagcccttgagcttaaaggaaaacatctcgtcgtccaagccatgaagataagaatttaatttaggtcctataatttacacaacagacccggatctttctataaatagagccacagtgcaggtttatgggaaaacaaaataaatatttgataaaatgatttcttttataaaaatgaatctgaaatcttgtaaaattcatatctccctca

SEQ ID NO: 121761 - DNA, 483 bp, Zea Mays
ctctcttaggttcttctttgttgcctcggggtcatggggttgtggtgcttgttgtgtcttcgtcttctattcgggtcctaggggacgcactcggttctgtctcgggtctctactctctctctgaggtcggcctataagaatttatcttagcttttttcttgaacaaaataatggttctcaacaacttaagggtatttggttcgcacctcctaaactttagtgacgtaagtttagtcacttttagtccataaaatatcaaatagtgtgactaaaataggtctttcaaatagaatttctagggattatagtccctaaagtttaagaaggtgactaaaggaaccaaacaccccataagtcctaaaatggagaggatagagtggcttgagctcctagagtcatttggttgtcccttttatcttgccaagcaatagatagacataaaaagcaccagggaggagctaactacactctcgaagaattgag

SEQ ID NO: 121762 - DNA, 368 bp, Zea Mays
gtgcgactcatcttgcagaccacgggcgacgcagtgggagatacttgggcgattgggcgccacaccaagacgctcgcggctagggctcagctgcctgccggcgcgagcacacgttagcacggtgtccaggcagccggcacaggaaacaacgcaccctctagcgacacttaacagcacgatgggagagggagaaataattgaaacaccttccacataggtcagcagggactaatctgggaggaggctttgagaggcgagactgttgccagcgagctcgacagccttccaccttcacccagccgccatcatctctttcatgttggcaaaggaccgaagacttgtaggtgagcagcacatccttataagaa

SEQ ID NO: 121763 - DNA, 476 bp, Zea Mays
tggagcccctcgtaaggatgcccagacgaggaccaagcccttggttgggtaatttcatggatagccccgggtcttcacacgcaagtggtgctccagttctggcctctctcggatgctctccaccatctccactattgagtttccgactaaaataccatgagccttgttccctttagtacacaatgatgatcaaaccataagacaattggtgtgatcttgcaagactataacccatccgtacaactactactatggtgcttgcaagcaccaagggataagaggtgtctaaccctcacttctgacactatgacaaaacctagagcaagcactatatgcaacgatctaactaacaaaagcacttcacaaaattatatacactaattaccaaatgatctttgagtacttgtgtatctagagatactaggaatgagcatcatcttacttgtaatgcttctcacctctcacacttctcaaat

SEQ ID NO: 121764 - DNA, 532 bp, Zea Mays
gtgacatgattataattgcatcatgctggcttctattggtttgtgcatttaaatttaagtctgactttcaaagaaagtttgaatttgaaataaattagaaaatagaaaacaaaagggaaaaaagagaaaagaaaatgaagcggacctagggtcgaatcttttccacggcccaaaccgcaacatcacgcagcccatcgcttactgtcaccgccaagcggggcccatgcacctgccattgcccatgcacgattactcccttcactcgctggcgggtgggcccagcgtcgggcgtcttcttcctaagtctgattcaaagccaacttgagtttgttgcagaatgccgtcgggaatcatggggttctgattcagacgaatccccacctcatgctccgccttagggtctatataaaccacccacgaacccccctccttgttcccaactgtgctagaccgtcgtcgaggtatctctcatcgagctgatggggaggatggggaaaactcacgaccaccgtcaacgcccctcaacctcaaa

SEQ ID NO: 121765 - DNA, 388 bp, Zea Mays
ggctaccaccctcgatgggctggccgttatgatagtagggaggatcagtgcccctcccctgagccgccgggtccacgggtcttcagcactggagagcaccattcccaccccggttttgggccctgactactatcactaagtgtttaggggaaatgaagctattgctctagctcgctgactaccaactgatctgcctgctcgggggaatgaattatgacagcctcatcatctgtaaccttcccctctttctgtccggctctgcccaagcctggctcgagcacctcccgccagcacaaatccatgactgagaagacctagtcaggatcttcagggggaacttccaagccacatatgtccgcccaataaactcatgggacctccaaagctg

SEQ ID NO: 121766 - DNA, 553 bp, Zea Mays
cgagaattccagtggtgatcccctacgatgtcttcctctcggtattagcttttcctatgcaatttctcaaattattgcaatttttagggtttacataaatcggtccctgatcttttcttggatagatctttcttcaaattgattgatggaatttgataggattgtcacagtgaacgctctataaaaatttggtttcactcttttggatattttcgcctaaatgttgggattcttgtttggagcccattagggatccaaaatcgcctctaaccagtcacgaaccgcccggccgtgtagcgcagaccgtctgacccttgatgcgcggaccgtccggtacactagcgcggactatccaccccatgacagatcaccccattactcatgctgttattctttttcatttgttattatcttggtattgggattatttatattgtgtttttagtgaactcgatggtctcaagaagaagctggcaaggcgatttctgtccatacgtcgtcgtgtagacgattctaactacaatcctgccacagactccgaaacccaatcctc

SEQ ID NO: 121767 - DNA, 709 bp, Zea Mays
tttatttgtgaagagggaaggggctcatatgcaaaagaccatggccgaaagggtaaggactgctctgggtcgccagattagaagtctacggttcagattggactataccattttatgaatccatatgcatccatggccataggatcaaggatccacggcccgaaactttcgtaaatcgaagggggggtacgcgattctaatctcgaccgtcaacacagggatcaacgacggggatcggattcagtcaaaccactacccgacccaatccgaaccgtcactagagaatccaacggtccgcgccccatcttctaatctcggccgcatagctagatccaacggccgcgagcacgtcaccaacctgccaccagccgtccggacgaccgacggcgagcagccgcacggtggcgccatggctggagttcctaggcccccgataccacaccctaagcactaaacaaagagcgctacacgatgccctacttgcgacgatttcagcgagcggtcacgtaccccacaatgtgtcgccgacgagcttgaccacggtgagcggcggatctgcgaaatcagttgggcaccggcgtgaaattaggccgccatcccgcgcccgatgcaccgacccacaatctccaaggtttctgctgcgcaaacgagtcccccccccccccccgtgatggccgaagcacagcgcggcttggaaggtggacggcag

SEQ ID NO: 121768 - DNA, 576 bp, Zea Mays
aagagatacacattggacggtgtaaaatcaatctaataatatgaagctcaatatcaagattgaaactacacaagataactagtagatcttgccaataactatgcttagtacaagatctacaggggtaaggtgatgacactgtactaccttaacacaatctattagagatcaaatctggacatcatgacacttaccttggggaaaccttgcaaaaggggtggggatctatcgatgagatgagaagcacacgctgcttgggttaacgaatgccttctgcttattattgttatcattatctggtacattttatagtccttagccttaaagtggtaaccacttcctaactgattttaatctaatctaatctaatacctatcgaagatacatagcgtgtaaggcctatccttttacatagatcgaattgctcctactatctgcaccgatcggttagaaacagttgctccaatccagttaggatttggtgctaacacgttccccctagtttcgctaaaatatttttataccaaagctaaaccttttgccttggaaaattttcatcacgtgtcagcggtcaag

SEQ ID NO: 121769 - DNA, 895 bp, Zea Mays
tgaagtcctccctatcatcgagggtgatctttgccgcttgagcgagtccggtaaggtgcatcatggcgtcgctttgcaaggccttcaggtggtacagtgcactcatgcactggacgatgattctcccaaccagatcgggatgcatggcccacacatccttcatgtggctcactctgttacaccacatcgggtcatccctcttctcggcggggaagagtcctggtgggtgcatcatcatctctaatgggtggtatccacagaaggtcgtcaaagctttttatgttgcggccttggtggtgtcgtccgccctgaacccaacagtctcggagtcaagggaacgccacctaggctacagagggtgagactctagggtcagccaaaccctacaacgtggcacccgatgctcctcgtacaaatgcaccatgtatagaggggtgtgggtatccatcggaggagagcacctcccacaagatagagggaaagccctctcaggaaaggtagtcaaagctgaagcgggtgtcctccatcgacgggggtgggtgaagacatctgtgaaagaggggtaagtgtaagtgctacgggagcggtaagaagataagtgtggttaagttaagggaggttggtcaacttatattaatctattccaactcattttcctgctactcattcttaactaatgttgttatgtcatgattcaatacattttcttcaacttttaattattcctgttctataatgcatgcatgctagaatgaacgtcctctcatcgatcataggggagctcctggggcatccattctatcctagtgtcggcctctatggcctacttacatagccacctatctaccccactattcttaaggcctttcgtcctaggtctagcgttctagtcctg

SEQ ID NO: 121770 - DNA, 460 bp, Zea Mays
aacgggatgatattggaagcgctcagaaagaaagtcttcgacaagaatgaaaagttcgcaggaaagtggatcagagagctgtcgtatgttgtttggagcctgagaactcaacctagtcgagctatgcatggaaacacacctttcttcatggtctatggttcggaagtagtgctacctgctgatctcaagttcggggcaccaaggttaatctttgaaaacatagcagaagctgaagctactaggctggaagatgttgatgtactcgaagaagagcgactgaacacggtgattcaatcggcacggtatcagcaaactctaaggcgctatcatgataaggccatacggcatcgatccttcgtagtgggagatctcgtcctccaccgaattctaatgggggagggatggcacaaattgtcacctctatgggaaggaccattcatagtagctaaagtcactcggc

SEQ ID NO: 121771 - DNA, 504 bp, Zea Mays
attcagtgaaccttgccggcggtgatcttcatgccacgattcgcgctggcgctgcgattcgttctatctggggcgtggattacgaccggcagtggaaagatcttacccgcagatgaggtcgtgtgctagccgccgtacccacttgctttacggtcggtcgaaataatcctcgccgaagttggccgcttgcctcccgagtgccacgtaatcggaagtgttaccacgtcgcagcagaccgccgtaggtagcacattcatcgcatgtgacagtgccccggtgaatgccaccatagatagctccggtgactcctcccctttcttactgccagctcttctccgcccaaattcgtcgtactcgcaattgctctctataaattgagcgctcaacgtgctccgctaggttgttacgcgcccagtgcaccagcccttgcctctaatcgtccaccagagctcctcaatttgtgttttcccccaaaatggttttccgcgccaccgagagcttctc

SEQ ID NO: 121772 - DNA, 409 bp, Zea Mays
gatttaatgaagttaatatgacactcaagaaggtgattctgttgggcttaatccctgctcttctcatctctgcaaacagctcaagtgcctcaactgacagcccatgcattgcgaaaccagaaattattgatgtccatgaagaacagccttttctgaatcttcaacagatagctgctccccctttcttcggtcagccctttctccataatttgattaagaacagggcaatcaccagtgacagagcttgtcattagtccaaggtctaccaagtctctatacattccatggacccaaacctcctagattagaggttatggcatccaaaagttgactgcaaaatctggttaccatttctgtttgcctgaaccaattttcagttattcaccccattgccttctttctgacaggg

SEQ ID NO: 121773 - DNA, 548 bp, Zea Mays
tcaattgcttgctagcaacctacatccttgttgtggcaagtccaagctaggtggtccatgtgctaattggaaacatattccaagcccacaattaggataccataagaaccacactagataggcactccaacaagctatggttccactagagttgaccatcatgaatctcccatgcaaatgagcacaagatgaacatcgtgaatctcccatacaaatcatgactatagccaacaacaatgtctaatagctgctcaactgtcccacaaactctaggccatctggttgtcaataatcactaagagtaacaacaatataaccatcccaaatcactcgactagtgccacaagatacaataactacacgcgatgaactaggagctctctaatctcacccaactattgatttacaatatgcaagtaagtggagtgcatttattttaaagagatgatcacaaggggagtgtatttatcttaaagaggtgatcacaagtgtacagaaagcaaggatgccatcgaagactgaccaagggctctatttatagccccaca

SEQ ID NO: 121774 - DNA, 367 bp, Zea Mays
aaagtagcacaagatattcaaatacacggtagcgaactaaatattaaattgtaagacaccataaacaaccatacgctaacgctagctatctatacgtcatcgggcacaagtcaacattactggaaagacgacgaacacttcctataattgaccaacacaaacacgacatcccgagtacaggcatttaccatgttcactttaatcgttcattggttacttattattaaactaattaagtacacctaaatttgctaggacttatatatagacaaacatagttaaaaaggaatagttacttaatcgggttttacaattgtttactaggcaaactcttattagaccttaaccaatttagttcactaattta

SEQ ID NO: 121775 - DNA, 363 bp, Zea Mays
tgatgttttgaaaatttacgtgacagccaaattcatgcttgtgactttcctcaagcagctcttgcttagtcgtcttagttgcaaaccatttgtgattattttctttatttagaagttagcccaccttcatttgatgtctttttttcagtcatagcatttcctgattaccttcctaaaccttctctgtattaccatcttagtatttctttgtacttcagttaagtgctaatcctgtaatttatggtttattaatagcatccccaaaatttaaaatgatccaagcattagttttcagaagccatttgaaacccctgctccttaagttgtaggcctttatgccttagggattggaaggaactagac

SEQ ID NO: 121776 - DNA, 581 bp, Zea Mays
ctacacttaacgccccagattagatcccaaaaccattgaaccgatatttaaaccatggccacacgatctccatctaagggtccccgtctgataaaagcgatgtgataaccgctgaccgaccattgcgagatcgacgacccagatcacacccaaacaaagagttatgacggtctaatctccaccgcccgtgacctgatcaacgtccaccaccccgccttcctcccctagcgatcgaacgcggcagcgccgtggccggtaatgccgcgtagaggctctggttcttcatactcaaaattaatcggtgctacgcaatgagagggctaaggcaaacatgtgggagatgatcccaccgattattacgtggccgatcacctcatcccacggcacaggtagctctaggtaaaaatcttgactctggcgaggaatccatgatgtcctatggctctaaactgacacgggtttggtgtacacgacgaccgatacagggcgagcacatgatggaggtcttaccggctccgagagtcatggagatgtctgtccacgacgatatgcggtccatgatgcccacacctcaccagcga

SEQ ID NO: 121777 - DNA, 1435 bp, Zea Mays
cggggaagggaaagataagctagtagataactgtgttgtcgtgccctgtactttttagctgccaacgacatctttctcctctccctgcagtcccgaaggcataggcacgcaacgcagagtcaagcagcgggcgcaaacgtgagtggcggtcctgtagagggtggagcgggcgagcggcggcctacggagaagcgatacaacggggaactcacacagaagctttggccagcgtgagccaagtccatgggctagaacaagtatggcgtgtgccatagctatccgcgtccgtctgatcagggcgggtagttactcacgatatgcatgcatgtgattgaggtgattaggttagcatctccaaaaggctgttaatctgaccgctaatatgttttttaggaagggaaacataaaaactaaggtccaacagatatcgtaaatctgccccaaattttagcgacgctaatccttcgtgacgagctacgcatatcttcgcggccgtgatgcgcccccaatctccccttgcgtcttctcctgcgcgccatcaaactattctcgcgtgtttcccttttccacaagcctctcccccagtcggaggtcctatgtgcgatggtcgcggcttgaggttgcggcggtggcggcctaatgaatttgagatgcagccaccgaggtcagttggcccggtccggcaggggcaaggatgacgcgactacgagcagatgtatcatgtcccgtccatcggcgtccagcacacccgatggatcagcagcgacgagcagatgcatcctctcatggtctcatggaaggttaggtaccagaccgtcctcatctggcagcccttggtgacgagcattcagatccccttttgacagtcccgttcccttgcagtgacgacctgtcaacaacctttgaacacgcgaacaccagcaactcatttgtcaatggtatgaattttggattctttgttttgatgaaatgatatggataatttactaccttgcccgtctagcttgcacatcaggtctttttttcaataaccttgcagggtctataagtttgtacttaagttttgtccatttagaaattctcagtttgttaaaaattctcagatttaaatttctggtgtgctcagaatggctcataaatggtgtttgttttgtgtagaaaacatacatatctgcagtgttgcaaacgcagaagtgaggttgtctctgcaggtgcgaaggtcatgttgtcctcttgtcagccacatattgtgctagtgattttatattgtacaccgtcattgaaaaatgacccaccatttatttgccatggtcacacttatagctagctggtttgcttccggaagtaatgtggcttcttcatcgataaatgaacagaactgcaattattacattattttggctgaattaaagttaacaagtagcctagtacgtga

SEQ ID NO: 121778 - DNA, 468 bp, Zea Mays
ttctggtcgattttattacttgaagtcatatttggactgcggacataattttactaaaggtgcagggctactctacaaagttttggacccggttgtagtattcttcccacagctagggactgcgggttctatttctaaatctcccaagatctttttagaaaatgtgacggaacgaaagggtatgggcagatctggttcacccgatctggtttctacgacatagattagaacaggatttcacgactgaggagtcaaccggtgccattgatcatgaaactgacgaccgagaaacaaccacgccctaccgcaactctacaccacccaatactaatcctgcggtgaagatcaatctcgcagaggtggtacgcgtggcctaatcctagccgcacagtgtggaaatgatggtcgggatataatggcgcgaatggatatacgggaaaccaatcacacttgcaggatcatgatcgg

SEQ ID NO: 121779 - DNA, 493 bp, Zea Mays
cccaaaggcgagacgaagacaaggccgccaccgaccccttccttcattagcgagccattgaagtacatgacctagcacttctcctcgtttggcgcaggttttgattggatttcgatccattctgcaacaaagtcagcaagtacctatgttttgattattgtctgcgggacgtaggaaatctcgtattccattagctcgcgggcccacttgacgattctcctagtggtctccggattatggatcacttctcctagggagaacgatgccactacagtaatgcggtgcgattcaaactaatgtttaagctttttcttggtaatggggacgacatgcaggagactttgtgcctagaggtagcatgtttttgtgtctgttaagacctgacttacaaagtagatggggcactgtagcagacaaacacaccctttctcctgcctttcgactacgagtaccaaactaaccacctacacggtcgctgcaatgtagagcaaga

SEQ ID NO: 121780 - DNA, 311 bp, Zea Mays
ttatgccaaattgtcaaaatgtgatttttggctaaaagaaatcaaattcctgggtcacactatctctcaggcaggtatagctattgatcctgataaggtgcaagaggtgatgaactagaagctgccaacgactgtccgtcagattcaaagttttctgggattggctggttattatcgaagattcattccggatttctctcgaattgcgaaacccataactgaattgttaaagaaagaagccaagtttgtttggggtcagaagtgcgaagatgcctaccacacattaaggcaacatctgaccaccgcaccgg

SEQ ID NO: 121781 - DNA, 522 bp, Zea Mays
tgaatttccatggtttattccctgactggactgtgcgcactaaatcagaggagtgcaggggcctctatgcaaattatcctaagactcggaatacccagcgctgaactgcggcttgataagcaaaagcaccagtggctattttgtaaagctagccagctgaaggggtatgcttacctatcaaccgccagatcgggtttcaacggtcttgattagatgcaccaagggacgaaccggtacaaacccgtggtcgtcggatccaaatccaacggtggcggcctttaaagaggtgggacggttctggtccgcccgatggcgatcggacgcgctagatcgctccacccaaaccgacatcttacatttaatcagcaccgtccgtttatggatctaggactatcccttcatctccttctcatctgatctaggccatgagcctcacatctaacgaccatgacactgccttcctcctcccgagcgtatgcatggtggcgcccgcgcggttcatggtggtgctccccggcgagc

SEQ ID NO: 121782 - DNA, 396 bp, Zea Mays
gagcacccataactctctacctctaggaccataaccaccccatggtggcagaggccaaaaggttgaaataccggagtcgtgagtttgcaataatagaggggaaactatatagaaagggactcaaccaacccttattcaatgcatcacagaagttgaaggcatcgagctcctctaagaagtccacaaaggtatctacgtttgtcactcagggactcgggccctcgtcgccaaagccatgcgtcaaggcttctacaatcttggaattgtgtgcgcaacaaaccccgtagtgtgcttgtgcgaagcatgccaaaagttctcacctcaaactgaagcaccttcacagttcataaagctaattgtccacacttggcctttgcaacgctagggccttgacat

SEQ ID NO: 121783 - DNA, 272 bp, Zea Mays
tgagccctaatgccgaagctttctgcagagtgcacgagctgcattaccagatgaaggctagggtagatggtcttcatgaaaattttggttgctacaattttgcgtatcgaaaggatacaaaggcactagttcttagctaccgcaccaagtggccaactagttggaagagtgaatggttttacatgaaggcagacgagaaaaagagagagaagctgatgagtatggttatgagtccacgactttaagcttcggaatgacgaggcccttatgcc

SEQ ID NO: 121784 - DNA, 609 bp, Zea Mays
ggacgagctgacatgggccctagagactaaagagcacccttgaaacgacaaaactgggtttttacacaactatgatagtcccagttgccatcacatccataccaaaatttaagcatgatagtttgctttcatcccctaacacttggggtaaatatcactggctcgcaggccggcgcacacacacgagtacttctagcatccagaagcttagagtagcagccgcggtcttcggtcctccataggcatccttgagcatagacccgcaacctagtcgtaccacccgtcgttggcgaagtcgtactccggctcgtcctctcctgaacctgccgataagcgtgcaggccaccttaacatcccgagcatttagtcagcggtggaatctagtagtttaggtggctgttggttttctagcaggcatgcgacattatctaaaatactgctgtagtatattagatacaagtcaggaggtccggtctcacaccaccggttcctggcttaactcaccaaacacacacacacacacacacacatcaccaaataagtcccttggatcgtccttgaccgtggacacgactatacatatagatttacactttgcagaggttgtac

SEQ ID NO: 121785 - DNA, 452 bp, Zea Mays
cgaagttgcaactgccgaagctgagacggccgaagatacaaatatggagggcgctttttttgatattgaaaagatgcttttaaacatggctgcggaagaagctgctatagctgccgaagagactctagcccagtgctcgggaaagagaaggggaaagagaaggagattgccgaagatactttggaggaaaaggattttaattttcataacatacttgggcaaaagctgtctaaggcagagaaggaagagctgagggattatgcaatatcatgcagctatcaaccaggagcattgctctttgttggcgttgacgaagagagcttaggatgtctccgggaccggactggagcgaaggttgtcagcactttatcgaagagtgttggctttccgaagcttgaggccgacctcagtagataccagcgacaacatatcgctggcagcttgttttattc

SEQ ID NO: 121786 - DNA, 539 bp, Zea Mays
acgaaatgtgcttgaagctaagagacagatagccgcagctgtttcagttgaaagatatgctagaagatggttgtgtcgttgtgcatatttgcgtcttcgttctgcttctcttgtgatccagtctgggattcgctatatcttagcagttcagaggttgcggcacttaaagaatgctaaagcttctactgttatccaggtctttctcatcttgattcttctgaactctaatttttttaatctctctctctctctctcctcatcagttttaacttgccaagttgtggaattgtttcattggatcgagatttttattatcgtttgtaaatctcaagtaatattgtatctataaacttttctgatttgatctttgttcataaagatgatgtatactgaccaacactgttaatttaatatataggcttggtggaggatgcagaagctctattatttccatcagcagtatcgatgggcaacagttctcatccagtgttgttggagacagaagcttgctaaaagggcattgcggaaccttaaacatg

SEQ ID NO: 121787 - DNA, 623 bp, Zea Mays
cttatatggaccagcaccacgtggcatcaatttagactttcttaactctggaaatctatcttttctcaagtgcaaccacactaaatcacccacttctagcttaacttgttttctacctcgactaccagcaattctatatttttcagtcatcttttcaatgtttgctttagttgaagcatgaagtttcaaaataaagtcagcacgctccttagcatcactatgtacttgctcggtagtaggtagaggcaaaagatcaataggagcacgagggttaaaaccatacactacatgaaaaggacttaccttggtggtggagtgttccgcccgattatatgcaaactccacatgtggcgaacactcttcccacattttcaagtttttcttcaatattgctcgcagcagtgcagacaatgttctattcacaacttctgttagtccatcagtttggggatgacaagtagtagaaaacagcaattttgtccccaattttttccatagtgtacgccaaaaatgactcaagaattttacatcacgatctgaaacaatagtagaaggcataccatgcaaacgaacaatctctttgaaaaacaggttagcaatatgaatggcatcatccgtttttg

SEQ ID NO: 121788 - DNA, 805 bp, Zea Mays
gtattttctatattgtttttcctactttcctaagtcactggactaggcgcataattatcagaaactacaggggctaactagcaatgtttccccagactcaggattccccacagtgtggactgcaggttgtttatagggttctatggggtcttttcagtaaacttgccacgacgaaaagggtacgggataaccagatccggccgatccagaaccgagggcccatatcaaaagccatcacataattgaaccggtacgcaatattaaccatcagatagagattcgatggccaggaaccaatgtaaccgaacagttattctatgatctattctcgaccgttcgatacacaactagcggctgcgatcacaccgaatgacgggctatgttgtaatcgaatcctaaccgtccacatcagtttgatggcccagattgaatgaggtcgcaatctaatcctgatcgtcgcttacgaatccaacggccctagggctttcttccaccacccgaccgaggccgagcagtggcatcccagcccaagccagggagctcaccggagcaccccaatatagcattcccgggcatgattaaccctatggcaggtcaaaaattaaagcgggcatcaatagcgaagcaaccgggaaggagctcaccgtggatgacgtgcacaggagcatcgtccatgacacagggcggcccgcggcggcgttatgtcgacgacgagcaattgcgccaaatccgaagcttccccatggatgccgatgctttgtatatcttctactcaacctagtgattccccagagccacaaatcca

SEQ ID NO: 121789 - DNA, 614 bp, Zea Mays
ggggaaccgagtcaagccagacttatgtgtccacagatgctgctcaccatatcccacaaatccaccttctgtattggccacgagccccatctatctgttgacgaatttcggcaccagtcatcgttgcaggtgggcggtctatcactacgacaccttttgttacgttcttgatgtctaggcggaatggatggttaggagggagaaatggtcgatgtttatcgaaggatgaataatttccaccctttttcaaccaaatgaacctaagagcttccttgcaaattgggcatgggaacttaccgtgaacacaccaggcgcagaatagcccatacgacgataagtcatgcagggagtactggtactaaacatgcattctgaagtttgtcttcgtagctcggtcatacgtccatatccttcctcccaggcacgtaccaattcatcgatcaaagctccatgtacacgcccattttattccccgggtgtccaggaattatcaacgacacgaatatattctgcctttgaaagcacacaccaggggggagattgattgggataacaacatgggccaacatgtgtacggggcagcgctcattccatagggattgaacccatctgtg

SEQ ID NO: 121790 - DNA, 1037 bp, Zea Mays
atctcttatcaatacaaccaccacttgatacttctacatagaggatagaggtaggagcagcccctaatcttcagctttcatagccaactgcccaagaatatccataaacctagccaattcacttctccaatcgccttagtctagtaaaagcaaatgccctatgcatgtaactttaccttgcactttcttttccacttctgcacttccatccatcatcttcacatgttgagcacttgcacttcatggtccttgccatctccacttcacggttctatatatgtggctcaactatcttgtacactaaatcgcctattcatctcacatgaaataaattagtctggcattcaattatcaaagccaaatcaggtctttcactccagagctcctgcttgactagttgccgctcttccgtgatgtttgccacctcttccacccccagactgcagtggtatactttcccccaatctatttttagtgctaaaattggggctttctcaaattgaattatttgcttctccatatgcgcatcttactgtaatacgcggtggtggcctatgaccgccaggatgtgtctacaacgcagtacctatggctataagttgcagcttcctccacaactggtaggccaatctcccccatgcaggcgcgcacaggagagggaaggctctcacgcgtgagaaactgagaatcgcctgcgggccgcgaatggcgagcgagcacggcttgagaatctgacgatggaggaagcttggatagtggaagggtatttttggagatcaatttgtagatgctggtggaagcgttttctttcctatactggccttctcgaaacctgtaggagttgctctaacaggtaagcatcatcagcccctccttgtccctcagtttgtaatacagcaatttcagatatggacatagaaaaactctaggtccaccactgatagtaatcctctaccatcaaaatatattttatttgttttcgaaaataaataagacaatgttaagagtacatgtagaaccttctaaacatctgaact

SEQ ID NO: 121791 - DNA, 432 bp, Zea Mays
gttgagttctcatgtttgcaggaaatggatacttttctagcatgatgagggatgacaacattcaaagaggttttgatactcaaagcaatacatgccccgaaattcagtcacaatcaatgctagttggtccaataccccccaacgcaagaccgaacaataagagatccaaaaatttaagtgatgaataagacaaagttttggtttcagcgtggctcaatataagtttggatcctattgtgggcaaagatcaaaaaggtggaaggtattggtctcgtatatacgagtactttcatgaacataagaagtgtcaatcaaagcgtacacttaattctcttatgcaccaatgggagacaattcaaaaatgtgtcaataagttctgtggttgtctatcacggattgagttaagacgtcagagcggtactacaatgcaag

SEQ ID NO: 121792 - DNA, 653 bp, Zea Mays
agtggtatgagtacaacaaggaatggagttaagataagactcacacctagcaaggacgaggttccgaccaagggcgggataagtaaaacacttccctcgaattgagatgagagagggaattttaaataacagacataagatagtcattaaggtaagatggagagatggcgaaggtaaaggtagtaacagacaacaaacggtggattaaaaaaatcgcgagcgacaaggaatatgatacaactaagggaaaataggtgaaatgcgactataaaactgagatggaagagagaaggttttaaaggacgggtataatataagcatcaaagtaagatgtagaggcgacaagggtaaagatgatgatcgtgaaaagcataaccaaggatagggttaaggcaggaatcgcgaaatggcggaagtggagaaaacaatcgagggtaagataggtaatgttccaacagaagggttgaagtaaaaactcattacccaaaggaagttacaaggaattaacgagattgtcaaggatgtgcaaaataaaatgaccactcatggatcatcaagaaacaagggtggtcaaggacaagtaaaataaaatatcttaaccagaccttgggatataaaggtaagcataaaaaaatgagagtatgagagatttc

SEQ ID NO: 121793 - DNA, 280 bp, Zea Mays
tgcttttgtttgagcttggtatttgtttagagcctgtagggcaaagacgcggtctccgtcgatgaggtccttcgaagtgggctcgtccacatcggggacggctgacgggagtgtccgtggtgacccatgttttatttcttgcggggtcatggcctccgatccatatagaaggcggaaaggggtgaacccagttgccctgcactcagtcgtgttcagtgcccagaccgcttcaggtaacaggtcggcccacttgccctttttgtcgtcgaggagcatcttc

SEQ ID NO: 121794 - DNA, 662 bp, Zea Mays
tttgtaatctttcttggcatcttgttccttcttgtttggacaatctgcaatgaagtgaccggtctggccacattcatagcatgccctcttctttccttttctctgatatttgtcatttttccgtacaaacttcttgaacgtcttgataaacatagacgtgtcctcatcacttgagctatcttcatcgcttgatgtttcaatcaccttctttgacttgtggtctttgcttttcttggaagagtcttgctcatttgacaacaaggcatgtgagtctcttgttttgattggagcttcttcagactcatgttgttgaatcttggcaaatagttgatgagaagtcatctcctcataatcatcacgatctctaatcattctcgccaagctcttgtccttttctttataggctctcatgaatagcctagtgatctttgagtcaccccaatcttcactacccaacacccttattttattgaccaataccattaacaggtcaaagagtgattgaagagattcacccttagaccagtcatatcttgcaagttcgctttccaaagcttcaattctttgtcttttagctttgggatctccttcatgtgacatcttcaaaatatttcaaatgtcacgtgcatcttctctaccttgaactttccggtactcttccg

SEQ ID NO: 121795 - DNA, 650 bp, Zea Mays
tgcttgctagacaaggattccgtcatgcatgtactaattttcagcagttaataattccaaagtgatgtggtggtggtttctggttggatgcatcatcagttgagacccgaccagatgagcacgccactcatctgacggacaaatctctgtcaataacacagcacgcacgcatagtgatacgcatgcctgtagccaattagcacacaaaacacttacagagtttgttgaaactaaaaggatggaataggatacaatacaatacaaaacaattgagacgatccaacacagctagcttacggacctgaaatcgcgggcacatgcatgcatggaaattagtgttgacggacagtacgtacgcatgctaatacgcatgcatgttgccagtagaagtattagagttagttagcgccaaaagtccgggcagctacgagaaggcaggactcaggagtatctccaaaaaaaaaaccagattattctagtgcagtttgttgaacccagccggagtcatgcatcagctagcggcgtatgaaacgtcagatcggcgctgtattgtattgagaacgatggatacgcgcgcagatcacaagcacgacgaccctttctctccatttttggatcactcacagtcaagtccacgcgcccatcgtcgt

SEQ ID NO: 121796 - DNA, 430 bp, Zea Mays
gctttaggggactcattaccatggtcatgagcttctccctctccatcaactttcatgtaaaaccattcattagtccacccagtcggccatttagtgtggtagccaatcatgggaccttggtatccttccggtatgcaaaattatagcacccgaagttcttgtgcagaccatcggctctggccttcgtctgataatgaagtccgtgcacgcggcagaaccctttggcattgacactttttccttggcttcagagagcccatatgtaaatgctaagcctaacaatagcatttggggtcagctggtggagatatatctcaaatctcttcaaaacttcccctatcatatcgtatagggggaaccgaagcccagccctgaagaagctcttgaacacaacaacctcatcttactttggctttggaattacttcttc

SEQ ID NO: 121797 - DNA, 346 bp, Zea Mays
agcccaatcggtttgcacccgatcggtgggtctaccagctcccatgtcttgttttcctcgatcgacgccatttcctcctctatggcgtgccgccaccgcacatcagcctctgctgcttccagcgtaggtggctcctcgacacttgccaatgtttttgatgaagagtagagctgatatgaagtagaagctttattctcaagcttagcttataagagagggttacatccctatttatagaacatgcaaggggctggtacagcagggcgggttgctacagtaaggcgtctgctacagtagacggatgctacagtaggacagctgctgcagtacctgccagctctttgac

SEQ ID NO: 121798 - DNA, 438 bp, Zea Mays
atttgagggaactgctccatttcttctgtaagtagaacctcattgtaagaaatagaccagctagctgttgggaatagcagccggttgaagagaatcaaaaaaacatctgatagaaagatcatcatcctggcctagcctcaatctgtcctagagctttgtaataacaaattcatccttgctaatattcaaggaggcccgaagtgttgccgcagtgttcacttcatcaatattgagtggctttccaccacccaaatttggaagacccaatatctgatggacagtctgcttggtgattttgagttctttgtctggaccaatacgaagagtcatgtctctggggtctagcttctgcatgagccaacaaagaagtgttcgacatccaattgcatcaattgtcatgtcaagaatactagagaatccttttctgactatagcttg

SEQ ID NO: 121799 - DNA, 642 bp, Zea Mays
cccaacaccttccaactagctgattttctgcttttatttctctcaaactctaaccaccctagagttgctggccatctgccccttttgccacctaggtcggcggtgatactgagtgccagtcataacatctctcctggcctccaaaaacagcttgtcctcgagctggacaacaggataagatgttttgaactgctccagagattcccatgtagcttcgtctagcgaactccctggcccaatgaatgagaacatgccacacgccgcggcggagctgggcgcgcagcacctggtggggtactggaagaagtcgtctctgttccattggtggcaggggcgggggtccttgcggtggttcaccatggaattgctttaggagacccacatggaatacgtcgtgtagacgagcgccctcaggtagctgtaggcagtaggccaccgtcccgaccctttctagtacctgaaaagggctagcataccgaggacccaacttgatgttggggcgatgcaccagggtcgcaacctgtcggtgaggaaggcgcaaccagacccaatcacccactgcaaactccttgtcgcgatggtgactgtcatagtggcgtttggcgtaggcttgtgcttggagaagccggtcgcggacatccc

SEQ ID NO: 121800 - DNA, 899 bp, Zea Mays
taaactagcatccacaatctcttcactgcccagaactttttttaacccgttaaacatctgaaagatccagggtaatcaggactcttatggaaatagcaatgcagattcatctccaggagttttaagaagtgcatatgtcagaacttatgaagataatcacgatctaaagcgcaccaaagaaagtctctcagaaaatcaaaacaattctaatggacatccagtgagtagtacagtagaccaaaataataattctacaatggcgagagaaaaggtcgaccttagaagccatctgcgtccagacgatctcttgaaaactgatggaaagtcagaaaataatcaagaggttgtgatttcatcagcttcttctgcagcacaagcttccaaagaaataaatagtaacaaggtgtttctgcccatcaaacttcctgatcctcctaggtcacagaaagcaacatcatctaatacctctactgaagcacaggtgatgcagttcttataagctttggttattttttattctgcattacctagtccatagtgttactcttcccattctagtggatccaactattcatttatgtttactatagtatgtcaaaaatagatataaaaaatccagtaacccagactaaatgtttgaccacaagctagcaatagaaaacaatagaggtgtttcatggattataaccacattctactagtttatttagcatgcatttgctccgttgttgcatggttgcatcttcttaccttgctttatggatctgatttgatgaaatagtcttaggtgacacctaagaggtttccagcttatatatcttctttattactccctccattctacaatatttgtccttggtcttggtagaaaactttacacaatacttgttctgttgttt

SEQ ID NO: 121801 - DNA, 461 bp, Zea Mays
cttcacacagccacctatcgtttgaatcgccttcctaccaaaactatacaagccatctatccttatgttgctctctttggcaccattccttcctatgatcatcttcaggtctttggatgtgcttgctacaataacatcacttctacggcaccacacaaattagctccccgctcaaccaagtgtgtctttcttcgttattcttccaaccacaaaggttatcaccgtcttgatctctccacaaatagtattatcatttcccaccacgtcacctttgatgaggcagattttcccttctctgcctcgccccatctaactaacaacttggattttttggatactgagaatgcgcctttgtcccctcccattaggactttgccctttcctgcaggtaccatggcgtcccctttggtgtctggttcaggttgacccagtggctcatctaaccagacccatgctactca

SEQ ID NO: 121802 - DNA, 333 bp, Zea Mays
ctaaattagacaccttaaagcagggtgctaggactgtgaaagattattatcatgattttaaaatttgtaccatgtttgctggtttggatgaatgcatggaagatgtcatgactaggttcatgaaaggactcaattctgaaattcagactatagtcatgcatgaagcatacaaacacatttctcacttgtttttgcttgcatgtaaagctgaaaatgagattctattatataattatacaagcactgaacatgtgagccatagttcctcttttgcgtctgctctacatgctgatcaagaacacaaaatagtgaaaccagctgtagtttttccat

SEQ ID NO: 121803 - DNA, 319 bp, Zea Mays
tgtaggtcaaattcttgtttgatgttaggtgaggatagacagattatgcaattcatcatgactctactggttgggttagatctctagcatgtggcagagttggtctaaggcacaagtttaggttcaagcgcatgaggggagaacaaggttcataggatttggatccagattatttcacttgtgttaacttgttaagtgactcacaatagattgaataagatcttgattagtataagttgagtgtgttatgtcaaattctagttgggtggctttgtgttaggtcagacttggtaaaatgatgtgtatcattggaaacatg

SEQ ID NO: 121804 - DNA, 835 bp, Zea Mays
catggaggtagcacacaaggaaggacatggacactggccggcgcgaggtcaaggaggggctcaagcataggggtgcaatgaactaagggtgctggttgcaaggaagggagaatgatgtagctatgagacatacaacagttgtaggaggaatagcagcaacacggtcgcgtgtgggggtgcgtgggtgtgaggagtagaacagggcacatgagaactagtggcgcagacaacgcgaatgttagtaagcagtggcgccatgacggccaacaaccatgagggggtgtggctcggtgaggagccgatgatggatgcaagaatcacaacgacacaagggtttcgtggagaggacgacgtacgaagggaggagttgttaagagtgagggaaaaggagtggggcccatgatagagaagttttaaaaacgcggataaaagggtcactggacactccggaggagcacatgacaacacactagatatctgtatagtagaaactgtaaacaccgatcgtgtctggtgcattatatacggtgtatactggatgccaccatgacttcatgaagaagcacaacaagcagacatcattggacaatgtccggcaagacatccgacgcataaaaaaggtactgaaacaaattgtttttcactctagactttgcaccaaaccaattcccaaccattttcaagatataaatgaacactacctcggattagtattagcatcatctcccaaatccttgatttttcaaatattttgcactaggctagacaatttttagtgaaattagacaaaaagagaggttggcttgtgatttgtccactggcgattttaaaccgc

SEQ ID NO: 121805 - DNA, 476 bp, Zea Mays
ctttgccgccaccgcaaaggtgtcgtgcagcgtggaactgcctcaccaccgtggtaccctctatccaattcgcaagtggatgaatttcgttttgcgtgttttctttgggatggattgctcgtcgggcccactgtcagtgcgtctccgacgaggaatcgccgcgttcggggcacacctccgtgctctgccgtctgaggtaggagagggcctctgtgccatccgatcctagttcagcggtggagattagaagccaagtgaatggttcggcttgggcacagtgaccgtaaatctagccatcagcggataggattgaatctggggtatttaaatttggcccgttgctggtgaatccaacgacaactgtggcgtaccagttcgattgtgggttgatctaatctggcgcgtccggtgtcgatcggacagctcctatcgaccgacacctccttcggcagggcatttttgcatatgagtcctcg

SEQ ID NO: 121806 - DNA, 444 bp, Zea Mays
ccctacattggaccacattaggggggtctggcactttcgtccatacaatgcttcgaacggtgacatcttgatactggcctgatgactgttgttatatgagaattcagcatacggcaaactggactcccagtttctgtcaaacgtcaacacacaggctcttaataaatcctcgaggaccttgttgaccctttccgtttgaccatctgactaggggtgataggcggtgctgaaatctaacttggtgcccatagcttgctgaaggctcttccaaaattttgaagtgaactgcgttcctctatctgatactatcttccgaggaataccatggagcctgactatctctttaagatatatccgggcaagggtggctcctccaaaagtggttttcactggaatgaagtgggccaccttggtgagacggtctattattacccagatagagtc

SEQ ID NO: 121807 - DNA, 492 bp, Zea Mays
cccactacatttccatatatttctctagaaaatgacaacactggcggatgtcttggacctacatgtggacaattcggtcctagcaatattggtgggggtgtccgatggacatatgatagtgggagaacgtccctgatatggacataggttgggaacctgtccttgtgataattaaggagctcttgggcaatggttttttgacaaccacactcctttcacattttttgtaccataggatcaccccctcaaaggcataaggacacaatatggctatataggggcccctcgcccctcaggatgagatgtgggttatgcgtagccgtgaaggaaaatttgtcccttcaacccatagcacccttgtctgtctctaggtgcatatagcgatgagatgcttatgcctccaacaggggttttcatggtctttcaaagtgccaaggtgcatgactaggttgtgagcacaatgccaaattgcggcgcacatggcctttccgc

SEQ ID NO: 121808 - DNA, 534 bp, Zea Mays
aaaagtttggatcaattggccttatatattcctcacacatacccaccacacaatgcaatacctcctcaaattttcggctaatggtctctccagaatgcttaaaaacatgttgtgcaccactattagaccaaccatgaccacatgtaactaagaaaatggcaagagactccattgaattgatatgaagagaagatttgagcccatagttactcactagcaagtcatgcaagctatagaaaagagatgcatccatccggaacatcttgtggcttcctcctggattactcaatgtttccctcacccaagcatatccactgtcttgtggtccttgcctcattcttgtcaatataagtgaaataatattttccaagaacaagagttgtgcacaatgtatttttctaaacagaccgcgctagtccaataaccttccttctcaattcttcatcaccagatccactctcatcatcagatgcactcgcatcatcagttccacttctatcatcagagccactgtcatcaccagataataaatag

SEQ ID NO: 121809 - DNA, 641 bp, Zea Mays
gatgaccaagctgacgatgtcgaatgttggatatggtggaagtaatcaatgtgtgtggttgtagcaaggacaagggcgatgatggagcgaaaacggtaggtggagaagtaaatgaaggcagacgtaggatgtacatgggcctagagctatcacaacgggcgaacaggaggatgttcatgttgtccacaatgtcagaggtgaacgtgaggatggtcatgttgtccataacgacagacgaaggatgagacatgagatggattggatgaggatagtataccagcatccgaagtgatatggtagaaggcaccaaaattagcaacctagtcaatgacgataagagtcaggtcatcattctaaacgagctagcaagtgactgttggtcccactcactgtgccacatgttccaggacagcaccgagtggggtgggcgactggggcccgtcggtcagcgagcacgtccggagaaagacaccggcaattgggggcatgtcgataagttggaggagaaaggtagcgtctaccctagagaaacccgccctcggacgagcccaccgagcccaaggtcaagcgtggcgaagtctaacagggggtcgggcgtaccgaagggaagccactcaagtggatcccttgcctgccctgag

SEQ ID NO: 121810 - DNA, 305 bp, Zea Mays
cctgggaggaaatcaccaattcttttaccgaatcttgccttacagaagagttcaaacccctcacattccagatcaaaatttttgaaggatccataaaaacacacagcagccagaccgccaaagaagagagacagggctctaatgagtctctatcgctgctgggaaggaccagccaaacagagccgccagggcctccacatggatttgtgggagaggggatgtttgaaaagcttagcatattcatcaatggcttgtgggctaatatcaccagaatcattgatgattagcagggtcttcatggcgtt

SEQ ID NO: 121811 - DNA, 523 bp, Zea Mays
gggcagggctggcaagcgggaattgttgtcctcgccggttggggcgagtgtaggtgagggggagttgcaaagtctttttgagggtgaggaacttagaataatgctatttaactatagggagataggaatcattccgaaggttgaaccaatgtaaggtgtgatgccctcgctgtacatatgtaactatagtttgtatgatgaggctgtgcgccttcgtgcatccggctatgtccataggggcgttgcgcacttggtctagcacgtttattatgtcagtccagctgtgcctgtgattggtctttgcgcggacagtttcttggtatagacttttgcacggatagtcttttgaggaagacttcggttttgcgcatttgttgtggtagtccggctgcacccttaggcgacttttgcacggatagtcttttgaggaagacttcgattttgcgcacttgttgtgctagtccggctgcacccttaggcggcttttgcacggatagtcttttgaggaagacttcgattatgc

SEQ ID NO: 121812 - DNA, 369 bp, Zea Mays
gtgtgtagattcccattacgacatattatgcatggtatgattggatgtctagatgaggcatggcaggcctgccatatacatgttttatttgattggtatcctgtacatggagttgggcttggctcgtgggacgcacgaggaggtggctccaggtcaagctctagggaatacaaagaaaacaggtgtttctatggagtcagactttgttaacaggggcggacccagccaaaagtttgagtgggggtttaaaacctaagtgtaggcttagatagaagcctacctactaatggatctttatagctatagtgaataagataaaaacttcactaaaaccagaaaattgagtgaggcccgtgcccccactcagcc

SEQ ID NO: 121813 - DNA, 404 bp, Zea Mays
gttatctgtgaaagtatgcacattttggacctaagtgcaaaaaccatgaaattagggtaccttaactcatatggttcacatatttggagatttgcaaatgaaaccctaagttttgggcctatttgcaaaaagccacatttgggctccatgggctaagtctgaattgcagtggtataaggccaactttgaagccctatattttccaaattatgagggttttgccctaggtccacacatcaaaagtctagagctattgtaggagagtaactttggtatagatatcttctttggttgttccccatggctccctgcataaggagagtaactttgtaggagagtaactttggtatagatatcaaaagtctagagctattgtaggattttagagacggatctacatctcg

SEQ ID NO: 121814 - DNA, 309 bp, Zea Mays
aggaccccgagaacttccatcgtgcgccatgggcgtgactcccggtgacctaatcctcggtaaggtccccaccattatgcccaccacctttccctctttgttttgtaccggattgcgttagagttaaggccttcctgacactagctcgggagttcgccgtcaccggcgcctcggcaatggtgttcgtaccgccagcagggctcgagatggggaagaccgcgctaaggcgtagatctgggaacggactgctctgattagattgggcgtaccggttgggtagattagatcagcgccgatgatcaaacatcg

SEQ ID NO: 121815 - DNA, 363 bp, Zea Mays
ctaacctcactccacgaaatcatctgggatattgttgagtttggagcgcaggcaccacaggtgggtgacgaggattatgactccgatgaggctgcccaaattaggcattttaattcccaagcaacttccatactcctcgcttccttgtgtctagaggagtataataaggtgcaaggtttgaaaaaatgtcaaagagatttgggacgtcctcaaaacggcgcacaaagagaatgaggtgaccaagaacaccaaacatgaaacgatcgagggagaactcggtcgattcgtcctcaacaaaggagaagagccgcaagcgatgtacaaccggctcaaaacaatggtgaatcaagtgcgcaacctcgg

SEQ ID NO: 121816 - DNA, 613 bp, Zea Mays
aagaacttccaatgtttcaagcgcagctattttgacagaatgtggagttgatagtgtaacatctcctgtactttcaggggccactccctttgatgtaattggtatggaagaaccttttcttttccttgggctgattgctactttctctgaacctgagatggttgagttttgcatctgtggttcttgcttcctcttcttcgaataaacttttgatgatgattcattggtcaattgcgatgaatttgtgttgatcatagtcatgttaatttcaccatcatcattcagatcagcaactgcattgcggactgttgcctcaagcaggtgcagagacgtccctgataaaaacagaccatttgtccagaaagtgtgcaacaggagtttgactaaaaaacgaaaccaagaatatgtgccaaacatgcatatggtatctcaagcatgaacagaagtgaaccgatctaatgcaatatcaatgtaaagttaaccaaaaggaatctcaattccgaattgaaaatcataaatttggatgtgaaatattgggaaaatactacagttctgcataatactttggttttccaaaccattagtttttaaaaccatgaaatagtcagaatta

SEQ ID NO: 121817 - DNA, 895 bp, Zea Mays
gtgccacatgtgtgctcgtgctccaccttgaacttgttttctctaggtttgttgcgtaaactctctttgactgcatcaagcagcataacatcatcagctccactcgctctagacactacacgcggttgtagatgttgttgaatagggtgatattttggttgttcatcaactactgatgctttagttgcttggcgtacattggcaaggagcttctatggtgcagttgtatgtgttggctatttgcccctagaacatcgattcctttttaccattgccatcaatggaatccgctgagtgcaatagccacacttgcacctaaaaatattgtgtttgtgcaataggcaatggtcatcgagcgtgatggctttgtggctgctgttagaggccatggtggtaggacaactgatgaagatagggttatggtgatggtgcacataatggtggtgatggtgcacataatggtgggctgggagatcatcctcaaacacataattgttggctccgagtaccaagatattatggctagagatggtaatgaatgacctgaagagaatatagtagatggaaggtaagaaaaagcacttgtgcttctttaaggctagaggtttcttctatgcacatacaaagtgatgtccctaattttatagtcctatggcatgagactaaaccgttaacagatttggattaagtatatataacccctaaactttagagggtggtctatttcacccctcaccatcaaaaccggttgtttaaccctctcagctttataaaaccagagaaataacccactagatagttttagttagcagttttaatttaagtggcactaattttatctttttcagttctgtcatcttatagtttccaaaatttatataattttgcataaaaa

SEQ ID NO: 121818 - DNA, 341 bp, Zea Mays
cgaccaagtaatatattcatgcattaccaaaacaagttcattagcaatgctattcaaatttataacatttgtgacaattatttttgttcgcccaaaacattaccttcaggtggatggggaaagatgttgtcgtggtaatgagagtctcttgtagtacctacagatcatgaactgagcccaaccaaccagtcacggcaaaggtaaaccacatatcgaagtcgcatactgccatgacattttgcgacgcgtatacatgccgcctaggtacgattacaggaaagtggcttccatcgatagcttctatacaatccctacaatgttgccaaaaacgcacctccaat

SEQ ID NO: 121819 - DNA, 406 bp, Zea Mays
agataatattgtgaagtacaacaactgctactggtatcttcacttgattccttattttgtgaaatgtggcagcttttaggatgggaaagcgcttcttcacagtcctttcaacatgattccacggtatggcatggcgatggttaaataactccttgtagttctgaggtctacggtgaccttgcccatattcctttagatggtatctaactccacgataaggtgcgaggaatgacatggtgttagcatacccaccatcaaccaaatagaactttcctagaggtacatggaatccattgttcattgcagatcgaagaactctagcatccgtagctgatccctcccacccagtagacatgaaagtgatatttaggtcgaaatcacaagctaccatcacgttttggctgag

SEQ ID NO: 121820 - DNA, 591 bp, Zea Mays
gtgaaaaccaacgttgtattgaattcaagttttatatcaatacacgatataaattcaaagaaaaaataaatgaacaaaagaagtaaatatactgttaagttcttactagcctaataaaaattgggtgtaccttgtcgaatattgatctctttgatgggcaggtgtgtcgagaaaggggtgggtcaagggacgtctctagttgagagatagggctcgttggttcgacaagctcgctgacctccaaggacgggtcacatcatcgcgacgaacgagatcagacctgtcgagcaagctagcgtcatgaggatgacgagcgaggcgggggcaccgggaaggggtggggttgtgtagtgtcgcgacataaggaacgagacatcgaagtggattggatcaggcggtgtcgataagaatgggactgggccatagtcaaaatgttcctagatcgatggattgagaagcggggtcatgggtcgtgggtcgacactttaaaaaggaagtatacatctacgggacgggaatattatgaatttgatatattgagtctaatgggccgatgatcttgggtcgattctatgggtcaaggctcgtgtt

SEQ ID NO: 121821 - DNA, 507 bp, Zea Mays
gacgaaaggccttagggatagtgggagaaataggtggctaagtaagtaggccctgtgggccagtatttagatttttaaaaggatgccctaggagcaccctttatttcagagaggagccgttatatatctttttttcagcatgcatgcattataaaatttgaaggattaagaattaaagaagtaaaaattcgagctaacccacttcttttcaaaccatccagactctttatttttcttccttccaccataatctttacatctgatacccttctacagatgaattcacccacccccgccagcgaaggagatactcgtttcagctctgacttcctctctcatgatggctttccttccatcttatgggaagtgcttaactccgccagttaccctacgccccctttgtacatggtgcagttgtatgaggagcatcgggtacctcgttgccgagtctggctgactttggaggctcatccccttcagccgggttggcgttctcttgactccgag

SEQ ID NO: 121822 - DNA, 369 bp, Zea Mays
gtccggtgtgatcgcttgcgacgagcacctttaggtttctgaatttcttcgtcttcaccaaggttctgtccaatcccaacaaccatcaactcagtgcgggcagagtcggatgattccctagccaacatgttgagatcatcgttcatctcagcctcgtcagtactagtcggcatctcgaagtgggtttgcctttcaacctcgggaagaccccgaaatggagcgatgaaagcctcgatgtcatctaatgagggttgcactctatgaccgggactgctatctcgaacaggagggttggaaatggaatcagaaatggactctgtggaggtagattctaggcagaataagacaagggggcatttgaaaccttgc

SEQ ID NO: 121823 - DNA, 379 bp, Zea Mays
acggtgttcagatctgagcgagctgagtgccattaactgccttttctatccagatctattctcttcccccttcaagcctcctctgtgaattgaccttgcccatgcacgcatccctttttaggcatcaaaaggaccgaggcaagaggacgccctttggaagctctgtcaggctcctttcctctcccgggcacggcagcagggctccactgctccagctatcacctacaaattcttccttgctttgttgctccctagtctctctctatcccacactcacgcacctagagagactaatggtgtctttggtttggtttgattttggttttcccccctaaaagccaaaaggcaaaccaaaagcctagattcaggaagcactttt

SEQ ID NO: 121824 - DNA, 715 bp, Zea Mays
tagtttataatataccataaaaatatgatttagctttctccatcattcatctgcatttaacaaaactgtaacccacattaatcgatggggttctatttgtagccggccagagtgaggttagctgcgagcgtcttgtgtgcatgcagtttgatgtgatatcctatttttattgttcttataagatcacaagcttatttgcagaaccggttgttaaacgagaagcgggggaaaggacgatggaatggtagaaacgatagaccctggtggtgtataggagtagagatgacatatggctcttgatgactataattgtgcgcacttgggtgttgaagagagcgtcctacacttattctcaacttgtccatttgtaatcagatgttggagccgtatatatctgcaggttggacgaatgattgcttgacccttttcatattctggtcagtgtcaagaatcaacgggtagcccctttcttctatgatgagattataatttccgtgtcctgggcaatgtgaatggttccaaaatgattttatggaagagtttgcaggagatattctccgaccaaaactccagtttagaagcctttgtatagttttcttgattttctttgtcacttttttgtttcttaaattccgctcttgtaaccaatttcacattctcgaaaatcctagtttgtaaccattttcgctttctcataaatcctagtaggtggcct

SEQ ID NO: 121825 - DNA, 977 bp, Zea Mays
ggattccaggagacccattcaataacacttgcgtagaagatgaagccagcagatttgaaatcaaattgcgccaaataggaccgaaacccaggtgagataaaacttcaagaagaaaagcccacgaaaccgaatcgaaggccttggataggtctagcttcagaaacaggttatcaacctttctcttgtgaagggatttgatcgattgttggaccaacataaaattatcatgaatcgatcttcctctgataaaagcactttgattagattctaccaattcatgcagacgagggcccaaacggttagcgagtaattttgtgaccaacttagcaacactatgaattaggctaattggcctgaaatcaccagccgacgaagcgtccatctttttaggaatcaaaataatgtaggaggaattcagttgtcccaatctctgaacattgccctggtggatgatagacagagccgccagcagatctaccttaatgatattccaacaagttttatagaacctcccagtaaacccatcaggccctggagccttatcagacggaaggcacacaatagtgtctaacacttctctctctgagaaggggcactcaagatcgctgagatccacggcctctctgagacaactcgacagattaatagtgctttgcctctgaaaatcagcacccaaaagaccgggaaaaaaccatctagcacctcctgcatatcctcatggttagagaccactcttccctcttcctctagatatgaaatgaaatttcttttcttcctgaaacgagcctgcatatgaaagaatttagtatttgcatccccttcttttaggtacttaatcctggacctcaaacgtgcaattgttctttccatagaagcataaacaaaacaatgttgcttcaactttcctagcagccaaaactcatctcctgacaaaactctattgtcctgtgctgattctaacctatgcatcacctctc

SEQ ID NO: 121826 - DNA, 282 bp, Zea Mays
agtgggagacttggtccttcgccgaattctaatgggggaaggacggcacaagttgtcaccactatgggaagggccatttattgtatcagaagtcactcggccaggatcataccggcttactcaaatggatggtacagaagtggggaactcatggaacatagagcatgttagaaggttttatccctagtagggcctcaaaaattcccgaagcaacattgtactctgtaatcaggggacttcatcatcaataaagtttcattttcaaagccattcagactcctg

SEQ ID NO: 121827 - DNA, 427 bp, Zea Mays
gtgcagcttacctgccaaaccttgggatttgagagaatagattactacattagtggagataaccatatatatagagcgtcatgggccatatacgactattgtagatgggctgtcatacgcttagaaattaaaattacctatgtcaacgctcctccgatactataacatttttgttgtttgtatagacttgaacagttgtcaagagttaacatgaagtttgaattttattgtaaaaaaggtgcagcgcttaaaaacagtaatgtgcgaagatgacatagttaatattaaaggttccaaaacatctctttattctctactaatctataaaccatataatgtagacaatgcatcgtggttctgccttctgtcaatctgcatctttggttctacctctcatcaatctgcaccatctgtgatgtccatcggc

SEQ ID NO: 121828 - DNA, 659 bp, Zea Mays
ctcttcaaaaggagcaggaatttttttatatagaacaaaatcccctagactaaaccatccaggaatctcggtagtttcccaacagatttcattttcattttcaaaaacagctattggacttcccatccaccatagctcacagctcaaccatcggaacttttgaaaccaattttcaaaagcatttttggaaaacaaaatactaattgtcaaaccaagtcataactcatccatatccatggacgcaaactattcgaataggttttggaactctgtgaagaggtgtacagttcacccaatagtccgatttctgcaatctcaccgtcgtgagatcggattaccgaaactctctcctcccctacacgtctttaccttaacagttataccaaaaggaacatggccacctccatgcccaaactaggacaaaactttccccctccttgtcctcccggtgctccctagccaacataaccctagggtgccgaccgtgcaagttcggatcaagcgactacccatatggtctagagtggttgtacttgataagagtataggcagtgaagaatggcataccggtccttatacaggaggggtaattcttcattctcacacctaacccggctgagccatcaccttaaggccctcccaacaccgaggagtccttg

SEQ ID NO: 121829 - DNA, 613 bp, Zea Mays
gtttgatttggtaggcattcccagaatcagataatttttaaccagatatttgtaccccgaacgtttgaatctaggcgagatagaatcggagtgaactgggacgatgtcaacagtgctattttacactgcgttcgatttgatttgaaatcaaataatttcatatgtggtctgaacacctgattgcacggctatagataatttactggagaaacaaatctcatttatatatccttggacgtgatgatttctctgttggcaaacaaggactaaattattttgcaccgaaaactttagtcattgagttctatttattttgtttgcaacaaaatcggaggactaaactaaatttccaaattcgtatgcgcatgatcaacaaatttttaaataatctccatactcgcctatttccataacaaatacgttctgacttcaagaaggaattagaacaggccggatagacagagatgaaaaagatatcaaaattttgataggtgaatattagaacatagagaccgttattattgccgatattccgtgcttgagtccataagcacagtttaacaggaggtaaacaccagggatgttatacctgttggcttctttctagccgtcg

SEQ ID NO: 121830 - DNA, 442 bp, Zea Mays
aagatatatgcccataccactaacaacttcagaacaacaacaaactactcaaacttcactgcttgctcgaaagagccagtttggttgaaatgcgacccaatcaacgtaccaaaagttttatgtgtatatatacatataatttctttcaaatgagcaatgcacaataactgtctggtgaaaacgagctatgaaacaaccatagcacgttgaggttgacttcagatcctcgaaagtagcgcaccttgaatgagattttgtatattacttgccaggtagtagcccacagttaacatcaattatcatacttgttatttttcttcggagttcctatcattgaatatgtgctttcttgcttgtactatatgagttccaacctcagtttcatggccttaactttatgaaattattctgtattgagtgattattatctatagctaatctg

SEQ ID NO: 121831 - DNA, 398 bp, Zea Mays
tagcactaagatgtatcaggacttgaagcagaagtactggtggtacaggctaaagagagatgtggctgcacatgtggctatgtgtgatgtgtgtcaaagagtcaaggccgaacaccaaagaccagctggactattgcacccattaaagatacccgaatggaagtgggaagagattggtatgggtttcattactggattgcctcgcacctcgaaaggatatgattccatatggctgattgtggatagactgaccaaagtggcacatttcattctgatcaagactacttataaaggttcttagctggtagagttatatatggctcagattgtgtgtttacacggagtaccaaagaagatcatatatgatcgaggttcatagtttacctccaagttttgta

SEQ ID NO: 121832 - DNA, 395 bp, Zea Mays
aaatagggaggggagggtttggtgccgtcttcctaggatacttggagaatggaaatccagttgccgtcaagatgcgttcaaagacatcctctcaaggggataaagagtttctagctgaggtaggctgttctcttgtgcctaatcttccatatgtgcacttgaaaactgaaagaagatgttgttgttacgtattcaggttcagcatttgactagagttcatcacaaaaatctggtctccttgattggatattgcaaggacaagaaacatctggcccttgtctatgaatacatgcagggaggaagcctagaggactgtctaagaggtagcttaccattttacacaaatgtaactgtgttaagtttgttctgactatcaatcgcaggagaagcctctg

SEQ ID NO: 121833 - DNA, 371 bp, Zea Mays
cactgccggtacaacgaactacacatctgaaacaacaatataacacacacagctggagcatcgccatgcataggtagctttgccttttgagaaatgtgatctactccagattttgttttccgaaaggtcctgacatgatggcatgcgcatccatgcatgcatgtcatcaagccagagggcggccagagaaagttggagctgaaaaccgctgcatccacacgcacacgtacggctggcaagcttaatgatgcgcgcaaatgaggctgccccagctagctaggatcgtcgtgtttagagatatctaagggtacagtaatagtaagagcaatgactgacgacaacctgttgacacatcagtcactgagtgagtg

SEQ ID NO: 121834 - DNA, 526 bp, Zea Mays
gatggattggagccgttgtggaacgaaaacagcatataaaaatgctaagcatctaggcgcgacaaatttgctgagagagcggagcagcatggttgttgagggattggattgatagaacaaggggtatctcagtgcaaagggcctcgtagggaagattaggcaatcagcctgaaagtttcagacatatgcttgtcatgtttctcagtaaccataggcccattagtatgaacagaacaggcagtacacagtttcgaatgtgtaacggcaatttggaagttacaacaaaacatgttttaaggggaaagcatagaagagacatcaacagagaacatctcaacaaccaggaacaccaaagggaataatcgtgtcccaacatttcataataacctgtactacatgaaaaaacaattccctgtcggtatgtagctgaaatcactgtcagttattgaagtaggagcaacaaaccagcaaaccaaccagtagggatacttggtgcattttacatattcgtgttatgaactgggat

SEQ ID NO: 121835 - DNA, 517 bp, Zea Mays
aataaatatctcatttttgaaatgatgatagtaagtcactaattgacctccacgcccccttgagcgacctcggacagtaattgtatcatccatctttggtacaatagtgttatgttggttacaaaaggtctttacctcctcaaacaattcttcccatccactatcacgtacttcactaatattccgcaatgtggctccaatcaatccaacagcaaggacaatattctgatcttttctttgcaaacattatgacaaatcattagtcttacctaataacctcatcatgagatggagaataagcacaaattcaaagctcttcatttgtttcaacaaaccagaagccatatatttcttatccccattagagccatcattggccacaatctctagtacctctaaaatagcatcccacatgagaacaatacgatataaagttttatgatgtaaacctaatcgagtatccccaggtcatgctaggttggttttttgatttttccctctacctgaaaaaatttcc

SEQ ID NO: 121836 - DNA, 468 bp, Zea Mays
gaagaagttgactcataatgagtcggcttcgagtttgtgttacccctccaatatgaatcaaagacgcagttgctccaaataataattgttgtgttgattttcatttgcgcatttgaaagtttgtctatgcgcttgacagtgctggtattttagaggtaatgttcgagtgacgactgaggcttttacttttccgagtggtgatctgacactttagagataatgcccaacccaagaaacccatttatacttgcgccgatgtgtatttttgatttccgagccctaacttcactttttcctcagccgcttctctgctttcctgaatttctgagtccactcgtttggcccgagtgattgcaatggcttccaagcagaagaggcagagcaccgttgctgcaatcatcccgcccatcgatcccaacagtcaccttctgtttgctggtaatcacatgtctattatctctgaatctg

SEQ ID NO: 121837 - DNA, 338 bp, Zea Mays
cacgcacacattccaaatctcagtccatctattataagctgtggttcagatgtccatgagcttgagccatccttttaaagaccaaagaaataatgtgtgagcaaagtttgtgacaactgctgctcctcagatgcagtgagttgcaaacttgttggaacttggtcccggttgacactagtgatctccttaggcgttacaacttacgagtccgctttactaatgcttattctagtttccattcgtccttgtcatggtaaagaacatcttaagctccaggaagtggcgtgacttgtccatcatggtcctttctttctttagatcactctgtgctagctgac

SEQ ID NO: 121838 - DNA, 996 bp, Zea Mays
ccaggccaccaccacgtatgagtacgcgtagcattagcaacgaatgattgggatcgattagtgctaccattagcagtaagataatggtagctccatgtgcatgcccaccacctgcccggccgggcccaatcaaccgaagtggacttgcattgtcctccccgtacacacatctcaccagctagccagagagcttcacccgaacgcagatggtttttctcgtcggtcccatcggcatcactcacggacacacatacagctgagctgcaccgcttaccgccggatcgaatgcgcgtgcacgtttggaagggtctcactctcaccgcctgggggatgattccattccattccgtcgccagcaggccaggcacccgccattatccggacaggtaggcggatacgtctcgacgcgaccgccaactaactgccgcaccgacctcacttgtatgtactgtttggcgtctggacacgagtcatgactcatgaggtggagctgtgggtactcggagattgttgagctggtttctgcctatgaataagcggtggcctgcaggctgcagtggtgcgcggacagtgcgtacgtcggccaggacaggcaaatatctctccggatacacccgctgtaatgtgcccgcgcccgaaaacgatggatctcgtccccaatatgtgtactcctcctacacgggcagatcaatcatgccggctccggactagaggcactgcgaactgcgatagatgccggcaaccacgtacgtgtgcgtaacgttgcctccctggccagtgaccacccaggcacccaccacttgtatgctgccacctgccatgaatgaaagactagactgggggatccaatcgagccggtgctagtgtcggtcacggactcgttggtgtcgccctgggtgcgcgagggaatttcgccactatagcttacagtacgcggttgtgctgtgcaggtgcactcgggctcccgcccatgtcgtgggcccgcgttgcctcgcc

SEQ ID NO: 121839 - DNA, 413 bp, Zea Mays
gaccagacgtataccaacggttggaggactacgactcatggtgaaggccaagcttaacccacaccctccgtctggaattgaaaaaaaatcgccgagcagaggcattgcaggtgtagcgaacaggaccggccatatttcagtccgtcgtccatgactaccattgcagaaaaattgaaggggacaatttcattaccagtcgcctggaaatccatggatggagagagatggtcactgcatctgaacgtcgaagctgctagtggatccgaatcgtccctggaacgagctgacatcggtggccgtggtggacctccacctcgcggttcaactccgccgccgggaactccaaccccgaccatctgcaattgggggaaacgtgtgccgctgaacaccatatcccgaccgtccgaaacaac

SEQ ID NO: 121840 - DNA, 296 bp, Zea Mays
aacatacacgtcggcttgcctattattatcgcaatccgagacacaatatacactacaacatttttataaacacacatagttacaagtattttcgcacactaaccaactcatacgaatcgtaaaccactaatatacaaatcgcaatccccatgcatttacttcctgaattatgaacgcatacatgtttatcatacgaatcgagtatttcaataattatcctaaaacaactaactccattacacacttgtatcacaaacctacttgacttacttgaagtgtctactcgaaatcgtgag

SEQ ID NO: 121841 - DNA, 650 bp, Zea Mays
agtagacctaggtgcaaatgtatcggcgagctttttagaccggtgagccttttagacctttagattatgatctaattgtgggtagatgtaaccgtagagggctttttgatgctacatgagctggtggcgagggtttaaatgttaattgtgatctataattgaatcatgatctaaaggtctagaagatatgtttgtatctcaattttgcttgcacaacaatcatttccctatctaattccgaattggattcttagagcaatagagatggttttgtttatttgtctgagctagatgcctagagcaactctaagaagatcctacttagtctccacaacaaaatattagaggggacacatccaggccataaaccaatgttctaacaaagcctctaatagggtattcaaatttagatgtcttcaaatttggatgggcatctaaatccttctggtcctcatttttgagggcttagcttcatgataaccattctgttgttgcatatgttttctccacgcttacatataaccattaggtgtttgttcacccttgctccattgtcctcccttgacacatgcctcctttcactctcccttgctcaacgtcagtgacttagtcatttgcctcccttgctcctgcaacgccctcctccacac

SEQ ID NO: 121842 - DNA, 362 bp, Zea Mays
cgagcagaaaggctgaaagcgggatataacctggacgaccagccgactaaaggtaacaatgtttcctttattagtttacctgataattatattcttgattcttttaaaaatattggcattttagcgggttctaatcctagttcagttgcttcctctattggtcagttgaaaaaaattagagattaatagagttcaggatcagctagtgggtaagaacaaggctgatttatctgattttatgggaaagggagtagtagaggacgaagagtttgatcatttcattttaaatcatttgtgtggggatattatgcatgaagagatggatggcactgatgggctgattaagtcagtctgtacaaaac

SEQ ID NO: 121843 - DNA, 333 bp, Zea Mays
cgacgtctaccattacctcccataccttgtcgattacgtgcgaggcgttgccgcagtgatgcataaacatcgtcgtcatcatcgtcgtcatccacaggagagtgagctggggttggagttggtgggggggacgagcctccagtacgtccatgcgtgtaacaagttcaacaactcgtcgatcaagctgctcataggatgtcgccgcagagtcctggtattttttaaaagcttcagtcatcgcgcgcatcatctccttcaattccagctgaaagacacactcatcgtcgttaagcttaagcccattatccttgtccatttgattctttggtcctg

SEQ ID NO: 121844 - DNA, 357 bp, Zea Mays
ttcgtggggtgcgagctcggacgcctccctggggcttgaagatgtccctggcaaaaacgtccagggggaccgtggttatagctcttggtgccatcaccttcccgtgcatgcctaggcaatctccctcattagggatctctgagtcaaggtagaggcattctcgagttggaccgtagccttcttcgccggagctataaccctccgagcttttggagagcatcttgtcacatacatacagaaactgcagcatggactcgggatctctcagcccagagaagtctagggcgaagcttggaccgtcctgttcctcggagtccagacaccccgagggaaaaggaagtctggcatacgtctttg

SEQ ID NO: 121845 - DNA, 429 bp, Zea Mays
tagactttgctgaacaaggcaattggccttgaaaacaaaaggaaagaactgtccgaccacaagaggaagtaccaagggcagaccagcagaaacacctagcaaaacaactcccaaggttctcagttccgctcaggaaaccatagtgggaacaacaactatcaagcacagcgctctggacaacaaggtcagaggagcaaccaataccagaaccagcagagaagcaacactcagaccggccaaaggtctagtgggcaacaatagaatcatcagggaagcacagtgaacacaccggccaagaacaacaatgcaactaccccagttcaacccaatggttgtttcaagtgtggtgaacttggccactatgccaacaactgccctaggcgtaacccatagacaccccagaagaacaacaaccagaggaatgactag

SEQ ID NO: 121846 - DNA, 524 bp, Zea Mays
ttcagagttcttcgatatttgcgagcaaaaaagcattcagatcaaatatgcctcagtagcacacccaagagccaacgggcaggttgaacgagctaacaggatgatattggaggcactcaggaaaaaggtcttcgataagaatgaaaagttcgcaggaaagtggataagggaattgccctacgtcgtttggagcctaagaacccaacctagccgagctctgcatggaaacactcctttcttcatggtctatgggtcagaggcggtattacccgctgatctcaagtttggggcgccgaggttgatcttcgaaagcatagcagaagccgaagctactaggctggaggacattgatgtactcgaggaagaacggctgaatgcagtaattcaatcagcatgataccagcagactctaagacgctatcacgataaggccgtgcgacaacgatctttttcagtgggagatctcgtcctccgccgaattctaacgggggagggatggcacaagttgtcgccctcatgggaag

SEQ ID NO: 121847 - DNA, 315 bp, Zea Mays
tgtgaacaagaaagatggttcgagaagaatgtgtgtcgattatagaagtttgaacgaagtaacaattaagaacaaatacctgttacctcggattgaagatttgtttgatcagatgagaggagctaaggtattctcaaaatagatctaagatcacggtatcatcagttgaagattcggagtgaagacttacttaagacaaccttcactacaagatatggactatatgagtttttggttatgtcatttggattaaccaatgcaccagcatactttatgaacttgatgaataaagtattcatggaatatcttgaccag

SEQ ID NO: 121848 - DNA, 727 bp, Zea Mays
ggcggtttgggataatatcaacagatgagcggcgcttggagataggaacgactgagcgtggactgatatccacgtacggtaaagaagaaagtatcaatggccttcggtggctgataggagatattttctatttctttctttctttttcttctacaaaagaatatatatatatgtttagtgactcggatctgagcaagatgcaaatagataggatcaaaatgctgtccgaatacgttactattctctcggattctggaataagaaattgattcggctaatcgttgttttggtttcatttaattcgggttcattttatttaaacaacgtgcccttattagtgtctaccgaattcgtagagaccgcgcataagagcgaaatatttagggacgtttctaatttgccttaatcgattaattttaattttgcattcgtttgagttaaatttagatgaattttgcccgccatccgaacattcgactaataactctacgcacgatttctcgggtagcgagtgtggtccagtttataaacgtcgagggcgtactatttcgtactcgtataatcaattattatttttttagcagacacaagactcgacatatcgcgaaataacgcgcgatatcgatgcaacatcgagattgcgatccaaattattttgcaccgagtattttagtcattaagttataaataatttatttgggacacggatcgcaacggtggatcgagc

SEQ ID NO: 121849 - DNA, 350 bp, Zea Mays
gttgttgaagaagaaaatgttgatgaagttgaggaagattacagtattttgattcccacaaaacccagccatctagattttgagaaatctactgtgtccgaagacgacatgcccatgatgatgaagcttggctactttggggaagctgaaagaaaacttgtccaatttgccggagaagagactacccctgtactgaagaattatgaagtagtggtttttaagagcttcttcagagcaggactgtgatttcctctgaactagatgataggggaggtgctaaagaattttaaaatatatcttcatcagctgactcctaaggctatcgttaggctcagcgtcttcatttgggc

SEQ ID NO: 121850 - DNA, 599 bp, Zea Mays
cggagattggggaactacgtgctgagcgcgcagcatgccactattaggatggtggttcccccgctctcgtcgggattcagcacccttaccgctcgccgccccgtggtcgctttgcttatggcacccctgactgcaggacccagatagaattcgagccatagatcgatgaagttggagtctgtaataatgcttaattaagtgtcttagtcttagttttcttatcatatgttttaatgcttgtcgtgatgaacttgtgatgaagttggatctttgtaataattgtcaccaaggtgtgggcattccctgcaacttggtgtagttattgataaagtcagttatttagttgggcaatccagttgtttccactttcctcttttatctgagaagctatgtttggctgttttgtgagtcagtgaagatgatcaattgctcagtgctatgaagacttctatatatcttttcttatgctgaaagactgcagagtcagatctgatgtgtgcgtgctttctacagatgtctaaaaataggcacagaggtggaaggcgtgctcagtaggagcagcaggcaccccaggaggaggcacctcagcagcagttgcc

SEQ ID NO: 121851 - DNA, 348 bp, Zea Mays
atatttttagtgcactgtaccattggatcctcattcagttagcctgacagagtaacttgcagggagatttgctcccaatttcatgtagtgactcgacctgctctctgtgtcaaaattgtagccctatgatccggctataaccttgctatagcaaccatagccaaacaattactggatcatagtcaaatcccagctcaaaggttgcccaacttcactattatacaacattcagtctctgcattatctgatagccagacttcagacccatttaactcctaattttgtacaataccaaggcttaagcacttaatcaaatttgtactcctatagtagctatacaagtttgat

SEQ ID NO: 121852 - DNA, 683 bp, Zea Mays
agcagcgccgtagagggtggcacacaacagcgcacttgcggagggggtgtcagtgaatgcaccatggtgataaagatcggagcttcgccgacgtcgtgagcccctgttcggtgagagctcgtgggggcgagaggggggaatggatcttctgggggtgcaggcgatctagccatggaaggagagccatcagaggccggcgatctgctgccacttggcccctcggcagagaggtgatttggtggcaaagaggaagaagtcgacacccagcggcagttactagggagggacatgttgggtggagtggggtgacgatcggtggctagaggaggccgacgaccagttagggttggagttggctctgtgataccatgttggacaggataaaatgagatatcaattgattagattgtgttagacagctgattccctaccatatacaggacttgcgccaggctctatagccggtcaaccctagtaggcatcgtagagtgttatggttagtgagatcttgattgagggcttgctttgtataggatcctgactaggagtttccttagtgtaggatcttgattgggggtttccatctttgaggagatcttgtctatgggtttccttttgcccaagatctccttacccctatatattgtaacctttgtgtctctcattaatcaatctactattgc

SEQ ID NO: 121853 - DNA, 370 bp, Zea Mays
gacttgacctataaatatagagaaagcgatgactactctggcatatcaccacctctctatttaagccaagacaatttctaccatcgactaagagttctaagtattaaataccttactactttacacgcacaataaacctcaacttaacacaagtgacaccgatggtttttactaaactcatcatgcgcataaccttgtctcgcatacaatcatatggtggcgtgcacttgagacacttcaatcaagggggtgcgaccactaatttatgaactccgatactcatgttttaataattcatcctctacacaactagcattttctaaactactcgtcacatcaataaatatactccctatataatcatgaatcc

SEQ ID NO: 121854 - DNA, 472 bp, Zea Mays
ccaaaaggtcgaaacccttactgggatcgatggggtcagaaggatgcgcctcaaggatcccaatcgtggaacaagaatcggaacctaagctggcgattgaagccaaatcttggcaaatcggatgtcaaggaggacatcgtgacttcatcttctggcgatgggggccaatcaggtattctcaaaacccccctgctgctttgaaaaaagagattgagaatgtgcgtcgtcctttatgtcaaaagtgtggggtggagggtcatcatgctaaagattgttttcgatctctatggtgcgatatttgtcacaaagaaactcatatgactgctcgttgtgtcttgcccaaacaaaacaagccatgcatgcctattgttggtatggcggctgatggattagggttttattcttctcatttcgcgaaacccttgtccagaaaaccaaaaagaagcttcatcgggttggtaaaggttgtcga

SEQ ID NO: 121855 - DNA, 278 bp, Zea Mays
tcgacggttgagggccaactttcccctagatctaatctaagccatcgagtacgcgatcaatggtcacgatctcacaagcgaaaaggggtatgcaggggtgatcctggcccctgatccgtgaatccatggctcaaaaccccacacgcctgcatctaatcccaaccgcatgatggatatccaacggccccacgcatcatcttcttctcccctgacgggccggccacggcggcacccgagtgcccaaggcggaggttcgccggcgtgggctctgctcgtac

SEQ ID NO: 121856 - DNA, 386 bp, Zea Mays
aaatcttcacagctgtcaaaaagatgctcctcgacgaaaaaagggcaagtgggccgatttgttacccgaggcggtctgggcactaaacacgactgagtgcagggcgaccgggttcactcctttccgccttctatacggatcagaggccatgaccccataagaaataaaacatgggtccccgcgaacagttccttcagccgtccccgacatggacgagcccacgtcaaaggatctcatcgatggagaccgagtcttcgccctacaagctctaaacaaataccaagcccagacaaaagcatggcgcgaccatgcagtcatcccaagggaattcagcgaaggggacctcgtactcgtccgaacagctcggacagagtccaggggcaagc

SEQ ID NO: 121857 - DNA, 276 bp, Zea Mays
gtataattagaacaagtttggaataatgtaaaggaggttgtgtacttatggtatgtaataatcaagtatgttttcttcttcagatgccgtccagaactcatgctcatgatggggctagaacttctcgtggtggggaggaaactctgatcccaccgcatgtacctcccacgctggtagaagctattactgctttgattaatgtcactgctaataatactcgctttcttcgagaaatggctagaaatcaaattcatcagcatggaggcagaggccaac

SEQ ID NO: 121858 - DNA, 353 bp, Zea Mays
aaatttttttgttgcactatacattgcgtctatgtccaaggctgcgactggcgaggggtcttcaggtggtgctccgcctgctaagggtaaacaaaaaaagacacgtgctaggattccgaagcgaagggttcctagctccggagtatttgcttgtgatcgtggtggcggctgtaggcgaaggtgtatgggtatgcaaggtcctacctcgaggattttgctctcggaggtactagggatggtcccttcacatattaatgaaggtgagtcggtcgaactgagcatgggtccttgtcatgctgtcttgacaaggagttgagtggaattcacgacttttctcgtgatgaggagttaga

SEQ ID NO: 121859 - DNA, 370 bp, Zea Mays
ttaagagacaatttatacaattgattgaataattaagagacaatgtagtgtaacaaagaaaggtgcaatatttttgcacaaacacgtcaatctgcagacagcttcagacaggtggcactgtgcaccaataacactccgtttgacgtgaatatgttatatacctagcagcaacaaatcaaaggtcaaccatgatatccctaagttggcataatttgaacacaagaacataaagtcttacggtttgcgccttgatccctcacccccacatgagcttcagattctgatgggctaacatgaatattctgcataaaaaatattgactattttataaaaggtatgatgaacctgaagaaacaaattaaatgagaga

SEQ ID NO: 121860 - DNA, 364 bp, Zea Mays
ttcaccgagtgtcaatcttggatcaggatgttggtccttctgctcctgctgctgagtgtcaatgggtgtgacccgactgatactgaccccaatgggtgtaacccgactgaggctgaccccaatgggtgtgacttagatgatgctgaccccaatgggtgtgatccggtcaaagctgaccccaatgggtgtaccgtccgcattgttgatgaagatgaggaagaggaggatgaaatccctctagttcggaagaacagtcgacgctacatagccagcggggaaagcagtggtgttccttctccagctttgtctgccctcattggtctgcaagaattgtctctggcaaactttgatcagactcttgaag

SEQ ID NO: 121861 - DNA, 989 bp, Zea Mays
cttgttcatcgattgcatcgcttctcttttgatgttagggtatgggttttgtctgcgctatttaccaataaaaattttcttacccaaaattctcacgcatctaaccttgtaacagatggcccaccgcaggctcatcgcccgtaagtctacgggaggatgtgttccttgtcactagcatgttgtgcgtgtttcttgccgctgcagctcttctctttcggagtacggtgtgcccaccctgctgtggtgcattcttttctatttgggtttcccagagggagaggaactgcgttacttctgggaagggaggccatgctctggaggaggaggtatctgggtgatagttgtggtcaagcctcgggcagataatccactgatgggtggatggcactttggatcgttagaccgtatacccagagaagggtcaggcagagccgcttataagatacttcaagatttgctggaccattttcctggggagattgctaccgccatgcctggagtctttcctaggggtgatattttcaaccctaagtgggactagccagaaggtagagctctaacaagaggtgatagtgagcaacagcacagcgacaccgcaccgtctagtgctatgtttgcagtgatgcaactgtataacaacacataagtagtttgggtatggtcaacagttctcttgccatggtgtagaaccagttgtaccaggctcgagaagcacatgctacagagctaacccaagtgcaagagaagctggcccaagttacgcttgagaaagatgaagccgtccaggtcagagatgtggctattttggacaatgtgttgtggattggcgaatgccaggactaccagaccttgctggtggaaatcatcagagaaaggaatgcaactttgactgaggtagcacaactcagggcaacatgggtcaacctaatgcagcagccgaacaatgcagaagcttggaactctagtctacataaggaggttcaccaact

SEQ ID NO: 121862 - DNA, 512 bp, Zea Mays
ggcgtcttcagtctaatctgctcacgaagatctgcgtggaacaaatcaagtggcttgtcagccctataatttgccacttgtgggaacagatctcgacgttgttttctgagtgcacatccgccatagaattcttcctcttgattcattagtgacagcccttagaccatccctttcacaccgagttgttggagtgaccaaaaattgagatgtccatagcaagcatttcatagccaagcctcatcatccgcctttgccaccgatagacaggagccgcaagctgcatcttcaacaaatacaaataattcttgatatgaggtgctcgagtcggtagtgagcgcttgacatcaaacaaactgtagaattcatcctcaattacgatcttgcagctagaagtggttggaaggtgcatcacatggatgtcaaatcagcatttctcaatggagactttgttgaggaggtatatgtcgaacaacctcctggatttttttgtagaaaaagggaatgaaaaggtg

SEQ ID NO: 121863 - DNA, 471 bp, Zea Mays
atccaccaccatcgcggaggagtgggagaagtggatgtcgccaccacggtcaaatcccgagtacgccgcatccagtccttcgatgggtggaccggggatattcgttgcatctctgggggagctcccatggccacatcgaggggaatctgctatcagggtgacccgattgctcgtcggagcgatccctcttccgctgtgtcacgccatgccgtgggtaggcccccaaacgccataagccgaggtaagaaaatctcctatgcgttcggcatatcgccacaagggctgggaccatttcgggtcaagtattggacactggaggggccgtttcggctggcgccggtatggtcgccgccgtgacgggcttggtggcgccgctagtgccagctggggtaggaagaacgtctcctgaccatcgattctgggatggacgacgcatattaaatgtagggatgcacggttcggattttgatc

SEQ ID NO: 121864 - DNA, 1026 bp, Zea Mays
aggtctgaattttcagactaacagtgcactacaggaactttgaacacaaatttgaacatgatttagtaggaatttggctatagttgttatggcaacattatagctggaacattggtctacaactttggtacagagggatgaggaagttgtcaagagaaatatagaaagaaattgccctgaagttgctctgtcagggtaactgaaacgagctcgccatggtacagtaccagaactggatcagatcgccagcgcgacagaccctcaccaccggcaacctctctgcgccaaaattcgtgccgccgctgtcctgattcgtgtgcggtatggagtggataacgtcggggagggataacccgtacgtggcgccatctcccaagcccagccggagtcttcaccggcggccaccgtgaccagtaaattttgtcgcggtgtcgcccatgcctcaatctccctcactgtatctctttccgacgtggtaggcatgcgcttgcgatgctatccgtggccggaggtcgtttgttgggtcgccgtgactataaatcgcacggtggtccacggcgaggtgtttacctcttcaccagtgaaccgatcgcaaagccaaattcgcgctgcctctaccccctcctcccaaattgattgtgcaggataaaactagagtcccttgccaccgtatagtcccaagctccatcctcaatttcacccgagcacaccacgacgccgttttcccccaaattggtccgccgcactgcgaagaacagcccgcccgtggctagcccactatggtgagttcctatccaattcaagtgttgtttccatgcctctgcatgcttgcgaagctcacggtggcatccgtttgctctagtcgaccatggtgtggcgagaacgtgtgctcccaagctcggtgtccgccgtgatcatgggcagacggctcccagtgggtttcatatcaaattaatggttgttcctaggtctccttaggtcagggaagtctccccgctagttaacccgtgcagccatcgccggcca

SEQ ID NO: 121865 - DNA, 1207 bp, Zea Mays
gttaatttttaccggtttccttttttacatctgatctatctacatgattatgtattgcttaacttatggatggttggacaatgaatatcatcggatgaactacccgacaattatccggtacctacccgagtagtatccgttatccgtttcttacccgtccggattattacccggtcccgtcctgtatccgtcccgaatcttaactacccgtatccggtctcgtatccgagagaaatacattagggtaggatacgggatgaccctgtatccggctgtatccgtcccgttttcatccctaccggctgccgttgtggactcccctgaaccaacccattcgacactatttaggcattggggagggcctcgttttcttccttttccatcttcacgaccgcctccaagagtgattttgcgtgtgcgatggcgcgggtgacgagagtagcactaccgcgaaccctgggattgggtcctgagtgctctgctcgattctgaggaccgtgtttctgtaagcagccttactcgagggcctcctaggcggcgataatttctcaccggagatcagaggcagcggcgaatcggccattggcacgggcgggactctcggagccatccgtgcttgtatgttacccctgcctagactcgcccggatcttggcttggtgaaacactagtcgacatggggagtgcgcacctgtgtgcgggggccggtgttccctggtgtggtgcaccgccgtatgggtgcgtgccgtcgtcccgagtcgtcgggggaagaagatgcgcgaccgccgtagatcttgggttcgactgctgcgattagaagtcgcgtaacgattcagtggtttaatccgcgccgttagatgaacatcgggcgcgtacacataagcctcgtctattttaaatccgtgccgtagatggaaaatcgcaggtcagcgatgagattggttcgatggtttaatcccgaccgttgatcgtcgatcgggcgtgccctgttgaataccgattcgggatgggggttgatctaatcaggggcgcacatttctgatttgacggtcaaattcttgcaatacctcttcagccgggccgcttcgcataagagaccttggcatctcttgaatttaacccgccgtccgcggtagactaataaagtataacagctaggtcctctggtttatgaataagaccctgccctttcacaatttagtgcccgc

SEQ ID NO: 121866 - DNA, 582 bp, Zea Mays
gcagttcccacccgtggcggcgacacgccggagcagagcagtgctagagccacgacacacaggtcctaatgtggagttgtgctagtcgatgaagagataaaggagaaactagtgggaaggttcttactggtgaacacgacgtagacattgcagaccacgccgcaaagaagtcctacggccaacatcagagtcgacatcctgcggctgcaggtttgatccgcggcggcgtcttgagttcgtatcgaccgggcctcgattgatttggtactttgaggggaaggtcacagataggttatataggaagaggcgagaggaggcatgcacgaccggcacaacagagtcgttaaaatctgcgcacaaatcgtaacaacctacgacaggggcggatttggtggtcctagagattttgtgcgatttgaatccgggttacggctgatgaggcggatccatagtttagtagtgtagggccgcggcgtattcaagtctagcgctagatcccgtcgatcccgtgttctactccatgggcgaactggaggtagatgagatacctgacaatagagttcactagtcactgaaactccc

SEQ ID NO: 121867 - DNA, 967 bp, Zea Mays
cttatgcatcgcgcctactcaagcctcatgagcagaattatccacccatgatttggaattggcggccatagtacatgccctgaagatatagaggcactacctaattgggaacaaatgccacatcttcaccgatcacaagaatctgaagtatatcttcactcagccagatctcaacctccgtcagagaagatggctggaactgatcaaagattatgacctcgagattcattatcaccccggaaacgccaacgtggtagcagacgccctcagccgaaaacctttcgggataaagggaaccaactttttagaagattggaagaaggaatcagctcaactgaatgcatgtttgggaaacaacggcagcctcgaagtcaaaccaatgttagaagacctcatatgcaaagctcaacacctggactcagagacaacaagacttgtggaaaaagctcgcaaagaacaacttccggacctcaggacagatgaacaaggagccctttggttcaagaatcgtctgtgtgtgccaaaaggggaggcaagaatagtcctgctcggggaagctcacaactcagcctactccatccacccagggactaccaagatgtacctatacctcaaaaccatattctggtggagagggatgaagaaagagataacgcaatatgtggcccggtgcgacacctgccaacgaacgaaggccgagcaccataagcatgcgggcctattgcaacccctcccagtgcctgaatggaagtgggaagaaataggcatggattttgtaaccggactaccccggacgcaaaaagggaaggactccatctgggtagtaatagaccgccttaccaaggtagcccatttcatcccagtaaaaactacctttggaggagccacccttgcccgaatttatctcaaagagatagtcagactccatggcattccaagaaagatagtgtcagacagaggaacccag

SEQ ID NO: 121868 - DNA, 967 bp, Zea Mays
gccacactctccttcctggattgttactcaggatatcaccagtttagtctagcaaaggaggacctggagaaaacgacattcattacgccttttgaggccttctgttgtacgtctatgtcgtttggccacaaaaacactagagcgatttacgggctatccaaacgtgcttagccaaccattggggcaagcgggtggaagcctatgttgatgatatagtgatcagaagcacagacccggataacttcattgacagcctctagcaggtcttcatcagcctgaggcgctaccactagaaacttaacccagataagtgtgtgtttgggggtaccagcagggaagctactcgggttcatcgttagtcaccgaggaatcgaggccaaccaggagaaaattaaagccatcttaaggatggaaccaccacgattgcagaagaaggtccaaaagcttactaactgcatggtagcgctatgtcgcttcatctcacggcttggcaagagaggcatgccattctacaaattgctcaagaaggtggatagattccagtggactctcgaggctcaagaagcattagaagcactaaaaaattcctgactgtgccaccgtcctgaaaccacccaaccgagctagcctaccgaccagctgaagatttgttgctatacatctcgtgcacgacacacgttgtaagcaccgcattagtagtcgagcggatagaataagggcacgcacatctagtccagcactctgtatacttcatcagtgaagtcctcgggccctccaagatcagataccctcaagtgtagaagttgctatacgtagtactcctcaccgcgcaaaagttgtgccactatttcgatgatcacaaagtcatagtggttacaggcttctcgataggagacatactctgcaacacagaagtagtgggaaggacggccaagtggtcatgcgaacttggagctcacgacgtaga

SEQ ID NO: 121869 - DNA, 759 bp, Zea Mays
cgccctccttctaatttgtccggatgtccgactgtctctggtctggtgctcccactatctgctcggctgctcctcgactctgttctgtcgtctctggtgctccagtttgaaaaggtgtgtttaatctctcgccctttaattcatgtaatcgtctggagcagttagatgtacgtttaattccatttttgttgccttgaaccttgtagtcgttgaggtagttggaggcgactgtccgttgtagccgtcgggctcgtggttgcagtcaaggtcatggaccttgacgtggttgtagaggaggaggagcgtcggctcgagaaccacaatgaggcggaggatgctaggttctttatttgttttgatgagacccatggagatcctattgagattgatactgtcgctggctctggaatagggactggcacatgctccacgagcccggtagagtcagtccctgatcttgatgctggtgatagcaacttgaactcgaagaaaaggtctaagtattggaatgactttgatgaattgactaagattatgaatggtaagaaagtcaagaatgttgctcgttgcaagcaccgtaagcaaacgcttactacccgatctacttctggtagtggacatttgtttcaacataattgctttggtaagaatcacagtatcatgctcaggaaaatttctaatatccttcaacatcaaatttatggtataagacacacacgacttcgtgactaccatatgccatgtctttttttagttcgc

SEQ ID NO: 121870 - DNA, 684 bp, Zea Mays
ggtttaactagttgaaggagaatttttttaaggtaacattgaacactaggatcaattgttgtgcgtatctggaactgaaaattcagaacaaccgacgccacgtttcatagaattaatatgatctggttactcaattttcatcgtgtttgtcagatacatggaaccaaaaccttaacaactacaactattgcctttcgaaaaagctgttgcttgaaatgatacccctcagattgaccattttttttttaaaaaaaaagaggacgacaagataataaaattactcttccgacgacgaactctagcggtaaggcgtttcgtgtacgcaatgtaacaagagtacatgttaaactggtaaaactgacggataaaatacagggttgtgttgaacacacaaagcacgatggaccttgagctccctgaaagggggtgaacttgtgattgtgcacaaatttagtcgtcgtcttccgtctttgtgtccgcttccgttaaacctgaattctgtttgcgatgctcgtactacgatatctactgaccccatgtacgcaggcacacagcaaggcccgaccggatgctgtgatgcgctgatttcagctcacacagaaaagcaagccagtcatgaaaatttgtcatgctttgttaaaatgaatctaggttcagactaatctgttacttttacggttttac

SEQ ID NO: 121871 - DNA, 462 bp, Zea Mays
gacaggcgtctgcaggagacctggactcctcctcgctcaggctttccatcatcagcacagggtagtaggacacctgacactggcagcttgttcgtgaggccgtcttcttctccgcgacatggcagtggcgtggtagaagtagaagcagaggagcctggattgtccggtgccaaagatgccgctgacgaccactcggagtcggagagcggttccgaggaggaaccgccgcttccgcttggcagcaatggcaggctattcggctcgctggaaccgcgtattggcgacgagatcagaattctgggcgcggcggtctcagacgtgtgcgtgctagaactagaagcaaatctgggaagaagtaatggaggcagcgctggttccatcgacgccgcagattcctctcatgtccaaaagcccgtgtcgagcagcgggtcggatgatgcggacgattcagcttccgcaggt

SEQ ID NO: 121872 - DNA, 613 bp, Zea Mays
gttaatacttcaggtatcaaggacatcgagggaggagtcggacacctcgaccttggagttgtcatgcgctcttgtctcgatgccatcgaggaagcgcccaagcgctcccacctcagaactgttgtatgaggatcatatatctattgcgcctgggccgctgaggtttccctcttttctgcatgctagggggcttgagcaggagaagggatagccatccttaatttctcctatcatgacgaggaccatcgacctatataggatggagcaagtcctattcaatcacttcatcattgttggagtcactgatattctttggctcatcgtcgtcgttgtcatcatccaccgacccccatcggtgggtcttgagaatgaattgcttccatagcttcttgtccctcttccttcttcttctcgtccttattattcttctttgccttagcgacatcacgatttgttgtgtgcatggccatgtcttttagtagcggtgtgtgggagaggtgaaaatgggagcatgactgcaaatcatagtccatgagaaattgatacatcaaaacatgaaaagaagagagggaaataactcactagatatgaacgaagctaggctcaggctaca

SEQ ID NO: 121873 - DNA, 324 bp, Zea Mays
ataggaaagttcatcattgctagtcgacaatggtatcaggatgtaagtaatgccatcattgcaactgagcacatcacataaaggaactcaaacaaagaaagtgagttaaaaattgtagatagttcatcattgctaatagacaatgttctcagccagcaacttagcacaatacataacaaccattatcccctatgtgaggccctattctgccacatttgttgagcccaattgtccctggtagcagaccaggcagcattgtccatgacaaggtcatggggagcttcctcatgaacttgatttgcaacccatgtttcttccagtgga

SEQ ID NO: 121874 - DNA, 1341 bp, Zea Mays
atttgttgtggagttcacgtttctttgtatttttccgatgggagctctatcttttgatttttgctttgcagggcgttttgaatcaggtggccgttcagctgaaagtacaggcagcttaggtgcccgaacagatatcttctttgtcgtagtgggatcctactgttcttcagaagcaaatagatgacctgaaggttgctaatgttggtaagtcattaataccgtcccttgctaattcttctcttgctcgttcgtattctttataattgtgtgctgcttcctcagctacgactcggtagtgctttgatgctgagtagaggtgcgcccgaagctaggcagagcttaaccaagttactgggttccttgatggcgcccgtgcaatgagctcctccttgcagtcgaagttagacatggaaaataaaactcacgaggtaactcatcgagagcttcaggttgcttattccatgctgtcaacctattatcaagaattctcccatatgcaggaggatatccagaggctaaaggatgaaaatcgagcgttgctctcttctcaaaatattttgcacaagctatgcagggatgccaccaactcccttaccactttggagaggagccaccgatttaccatggaggagctagagcgtaagagagatgaactgagggattcctaggatgaagtgtcagcgcttagcagttcgttgtcctccaaacattctatcatcaatgaccttcgtgcttcgaagaaaattttgtcccaagagttggataccgccaaacggaacattaaggtcttagagggtgaccatgaagttctgaaggcggggtatgataaagcgatggataaggcggttcacgtgggttgtcttctaatgaagaaacccagtgttgtggcccctgatgacattgttgcagatgttctagctgcatcggggattgcggctaaagctcttgccccggtgaacccaaggttgattccactcctggaggtgcttctacctaagtgcatgatgtattgtaaataattgttgcttgtgtgggaggtgcccctcccctctatgaatgtattgataattagtttaaatctaatctttaaggttgcttccccctttctttgaatcgtgcattgagattagttgcgtaggtgggacttaatgggtgtccctaccttttttctgcgagcgtgatatgtcgtcttaagttaatccccaagttttatactgagcattcttcttgatggggtttggagtgcacccttttatctgtatgtctgagattgtgacaccggcttaaggcacgtcctgacttaagtcgattgctttgttagtagggtatggtgtgcaccct

SEQ ID NO: 121875 - DNA, 543 bp, Zea Mays
tgccgggagatggcaagaaacatagggtttccgaagctcgaggctggcccctctgcaatgtcgaaggatgaccttgcagatagcctcgcttacaacagtcttaaggtaaagatgttctgacttataaacaatttacttttggcatcttttattattgtgctgatcccccttttttgtagggcttaatcttgagtaatgctttaagggcacaaaagaatgttgaagacgaaagcttccaaatagcccttgggaaccttcggacagaggttatcagactgaggaatgaagccctagaaaaggataaaattctgctttccttggtagacaaggtaaaggctagcgaagcaaagcttactgcacagtccgaagctcataaggacgaagttgaagacttaaagaaaaaatttgccgaaaagaatgaggatttgaagtggcgaaagccaaacaagaaataagcgaatggactagttcaagattacaaaagaatgtggatgagcttcgtgaatcgaaggagagatattatgaaaaatccttgagttgtgc

SEQ ID NO: 121876 - DNA, 947 bp, Zea Mays
gccagcgatgcaaaaacgttcgtatcagcttggcaactgatggtttcacgcctttcaatatgaccgatgcgttgtattcatgtgagcctgtcattgtcataccgtacaaccttctgcctgctctttgcataaaatatgagtttatgttcctatgtcttgttatacctgggcctgagcatcctgtcgtacgcctcaatgtgatgcttcaaccactgattgaagagttaaagaagctatggcaaggagtggaagcctatgattgcttcaagaagcagaaattcaatgttcatgttgcgtatctgttctcggttcatgattttatggcgtatggtattttctctggatggagcgtgcatggtagattgatgtgtccttattgtgctaaagatacatattgttttcgtcttagtgctggtggcaggatatgttactttgattgccatagatgttttctacccttcaatcaccccttcagaaggcaaagaaaggagtttaggaagggtaccatcgtcacgaagggaccacccaagcgacatagtgggatagaaattatagaagagcataggaaacttgtcctagatgagagtgggaaaaggtatcaaggttttggtgaggagcataactggactcacatatgtggcttgtgggagcttccttatgccaagtcattgattttgatgcacaacatcgacgtcatgcatcaagagagtaacttttgccaagccctcataaatacatgcatggatttccctgataaaatgaaagacaatgacaaggcacgcatggacttagtcgtgatatgtgatcgtccaacccaagtgcttagagaaaacggaggcaaaccaaaagttgactattgtctgaaacctaagcaacggaaagaagtgatgaagtggataaaggatctgaaattcctcaatggttatgctgctggttttagaagatct

SEQ ID NO: 121877 - DNA, 550 bp, Zea Mays
cggtctgagagcctgcctcgatgggtgtcattgacgttgggcttcctcaaccatggggcttgccacgggaggccatccctccattagacttcctcccgggggcaccatccttcctgcatcagtcgtcggtcatggtggagttgcagcctcctcgtcgtcggggaggatcgtgattggaggacggggatggtccacacacagcgtccgaggagcatgggcaccctatggtggccaggggagtgtattattttccctgagcctaggcatcggtaattagataatgacttggtcgtttgaggaggcatgggactcatacttttgtttgaagtcctactgctaggggcgtcaggccgacagggtctgagtccagccaaccggtggagcttgagcatcccacgattgagacaaataatggcctcctaatggcctagtcaggtcttagggagacacgatcgccaagcggtcttgtcgatggatccacgtcggggtccttgaccaaaggtgagtatcgtactcccccatccctaacttttggtccttttagttttag

SEQ ID NO: 121878 - DNA, 349 bp, Zea Mays
gtggccagacctacatcctacattgctttaatttacactgatgaaagttgaggataaaaagaatacatgtttcggccaaatgcacgcgtgaatgatgtacccgcacgaaatctaaatagaccactgtcaatgatatcaccaagattaacagatggccacaagttcttagaacaaaagacacaagagagggaccaaataaatgaaaaaagataagaacacggtggtagtagcggagaagctgaggttggctttcttggtttcttcaagtggccgcatgttggtagtagcggatggttggttcgctgggattgtgaggtcatcccctgacgatgtgccggcgttcgtcgtt

SEQ ID NO: 121879 - DNA, 602 bp, Zea Mays
cggaggtcagggaaagaaaagactgaacaaagttttgacgccatcggcttcgtataccccgattaccgctacccgctgcggggtcaagggaaaaagaggaaaactgctgcttcggccaccccagttgagcctgtgccgaagggcaaaaaggtgaaggttcttacccaccggtcgcgttactttgaaccggccgtggtgcctgagtttggcgcagggacctcttctgctaccgaaataaaagaaactgtcccgactacgcagggcactgaagagccggttgtaatgccgaaggtgcttaaagtcaagctagttgaaatgaaggttgataaggttgaagagccaaaaattgaagaaataatgaagatgccagagattttgagccctccaacagaggcaatagtaccgaaggtacaaatgggtcctgccgtaactcctaagaggagaaggatggcaaatgtgctggatgttgtgttaaaaacaacaaaaaccttgagtcctgttcctacaaggaaagttgccgaagcttccaaggcgcaacccgaagctgatactaagcaggctgaagtcgaagctgcaacaattcaggctgaaaccgaagctgg

SEQ ID NO: 121880 - DNA, 739 bp, Zea Mays
aaagcatgcaaagtactgaacacaagctaaacatgtacaacgaaatatgtcatacatacaaaccctaataaatggggaaacgatgaacatgaaccaaaaacatggggtcatttgtgactacaacgtctgaataatattgtaaagaactaagtactgacgccacgttcaatctcaaacatcaacactatcttgggggagtagatcgatgcatccacaacgctaaaccctagatccaggtccgaaaccaatcacacatgcgtcgtgcattaggggagcagaaggatcagtgcatatcgtccaagacgaaggtgcttcacttgtcggtgaccggtggagtaaggagatctacgatggcgccgtgcgaatcagtgaatgtttcttctacgccccactgtatcagttgtcgatgcagctcgagcacatccacatcatcgacgtcgaggatctggtgttgtagaatcacgtgaaccgatggactccgtgtgatccatgcttccgttgatcgccacggctcgatccagcagcgataggggagggtccctagccaacaactcggctacaagatgcacctcagatgacccttctcatcgttgatcctaatcctcaccgacgcccaacgctagctctggctcccgtcgcttgcgtcgtggatcctcgccgcccaggcgcaccaacggccaagtgacgaggatgagagagacttcaccgggcataggggagaagtgttggtctcttgttt

SEQ ID NO: 121881 - DNA, 513 bp, Zea Mays
agcccacagggttttggctaattgtacatgggttcggtcactgttgcactgagccgctgactgtttgcagaaaagacccccggtttctatttcttctcaggggaaggtccccgacgacggtgaacgcggccgagctccggtgagctagcagaccggccaaatggggcaacgactggcgttcccgagcggcggacatcaaatcagacctaccccgagtatttcccctaagttaattgcacagttggtgagctatcaagctctgtccacgtgaaccgagggggtggcggacagatgagtgcgttcccggtgatccctggcggtccagttcaattagaggggtcgaggggcatcaccagcatgcaaagatgctagaacaggggcggggagggtatgaacagacctgtggagggctggccacggcgagcttggttctatggtggcagaaacttgatttgggggaaacaagaaattcgggcacactggtgatcgattgctagcaattcttggtggctg

SEQ ID NO: 121882 - DNA, 556 bp, Zea Mays
ccgaaagagcatattcgttctgaaaaataacgttgcccaccaattttgagctattccaaacagtaatggatccacccgaatttcccaccgaggggacaaaagcaaaagaatcaaaggaattggggcaaaaaaaatttaggtcagccacatcaaagcattccttcttggtttcctgcaagcagataacatcacatctagactcctgaatcgtacaacgaatatcattccatttaacactggaattgatcccacagacattatggcttaaaatagaccactcaaagtaaataaccgcgttgtgattattcatgaaggaaacttccaggttcgttggcgatagtaaacccaagcccaattactgggtgggttataaagtatcggtcaataaaggacatagtaatacggccaataaacataaagttcaaaaccacgacagttaaacatattcgccagagcagaaccgaccaaaaagcccaaccaatcaaaggcatgcaaaatctcccaacccagtgcatcaccatcacattacttgtcttcatcttcattgtccttttcc

SEQ ID NO: 121883 - DNA, 875 bp, Zea Mays
gactgctccagaaaccctagagcaagtgtttattatgagatgggcatcgtagtggctagtaccatagcacacgagcgccaagggtatttctaaatcgtgtttgagtcctagggaacgtctgactcatggtatatcgtggggagaggcaatgagccgtcgaacccgatcgaatgaggttggcaactatatgagtcggaacctgggagtatgagtatgatcaacaacggaccccgcacctaaatcctgctaaagaaaccagggcctcactcggattatccgtttgtagctcaccgagcgctatgatctcgaccaccgagggaagcatggtatagctcaacatttcccttctagcgaacaaaatgcgcgtgaagagtattaaaaagacaggacatgtcccagacggatccttcgtaacgaacgggaggctcgggggcttgctccacaaaaagaagggcccatttggatcagttggctgaggcccactgagcgccatgatctcaaccaccgaggggagcaaggtatgcctcacccttcccctcccagcagacgagatgtgtgggaaggaataagagaaaagacggaacgtgccccccagacggatcctccgcaacaagcaaggaactcgagggctcgccctgcaaaaagggaggcatgccatgacctccatcgccaaggggagcatgagacgactcgccctaacccttccgacggacgattgcatggaaaggaacgatagtccccctagacaaacccatcatcatcaatggaaagtacgagcaacaacatggcgggccacatacggaaacatgcccaaggagtcgcacggtcggaccttgctacccacgatacaatactctcgattcctccgaagacgc

SEQ ID NO: 121884 - DNA, 345 bp, Zea Mays
aaaatctaatgcatagtctttggagtatcattttcgttgtttcttagtggttccttcaatattgctaggcctgcttgtgtacttgctatgcattgtttctgtaccttcaccttaaaaaacaaaacaccatgtattgccaggctgatagggttgaaatgcaaatgataaggttgcggtcgggtcagtagacatatatagtactttgttcatctattgccaaactggaaagtttgaacatttttatccatgtacccagactctgaccgggataggtgacctgttcactgattcgtcccaagtgtgcttgaaactctggtggattttgcccatcaaattgaaacaacg

SEQ ID NO: 121885 - DNA, 539 bp, Zea Mays
aacatcatcacagatctaggttcaaacttcaccagtgctgaattcttcgacttttgcgaacaaaaatgcatccagctcaagtatgcttcggtagcacacccccggaccaacgggcaggtagaaagggaaaatggaatgatactataagaactcagaaagagggtcttcgataaaaatgagaagtttgcaggaaaatggatcagggaactgccctatgtggtttggagcctacgaacccaacccaaccgaggtttccatggaaatgctcccttcttcatggtgtatgggtcagaagcagtattgccagtagacttacttttggggcaccaaggctaaactttaaaagcattgcggaagcggaagcaacctgactcaaagaaattgatgtactagaagaggaacggttgaacgttgttattcagttggccagatactagcagaccataagccgctaccacgacaaggcaatacgtcaccgacgtttgcggtaggagatctggtgctccgtcgcatacaatcaggagaaggacatcacagac

SEQ ID NO: 121886 - DNA, 576 bp, Zea Mays
gatggtctcactcgtggctacaacgttttgtgtaattagacctagacctgcactatttcacaattaccctattgtgtagtataattcgagaatgtagcaggtaactaggataaaaatgtactttaccctcatcaagctctcggttaacatataaatacccttagttacaataaaaatatccttggttacaattgacaagacattgaacaccccttcttgttttgttgagtgttgttgccttaccttctcccgagtgcttaggtccatgagttagaacccaacatttggcgcccaccatgtttgctctcacaactaatcccacgacgcctcctaagaagatgaacaatcaatcgcactccacccttccccccgtccgagacaacgaaggcacccaccgccatcgctggtcttccaccaaaggaaaaacacattccccctcatcactaagaactaatcactcaccctaccctgaaggaagtgtccacacatgcagttcgtagactctcaacacaaccattttaacccttagagtcacccctactaccccaaatttggcatgacttataaagaaaccag

SEQ ID NO: 121887 - DNA, 447 bp, Zea Mays
cggaggtgcaggacgctgcgagaaacaggcaactaaaacgtcggtggaaaaagcacagcagcaaaaagaggactctgacaagaacaagcgtgaatacttgatgctgctaggtgtccttgcagcgagcgtcacctaccagactggcctcaagccaccaggtggcctgtggcaggacaacagcggtggtcactcagctggcagctccatcctccaccacatcgacaaacgccggtaccatgctttcttctactgcaactccacttccttcatggcctccgtcgtcgtcgtcatcttgctcctgccatggactctccacggatacccattgccactatggacaatgcagacggctatttggtttgacatgctcggcctcctgggggcctatgcagccggcagtaccagggactgggagacatctaggaatgtcatctacttggtcatccc

SEQ ID NO: 121888 - DNA, 273 bp, Zea Mays
tttcgtgaaaacgtgaaaaaatttggacagctctgctatgtaacatgagttgattcttgcagttctgatatgtaacacgagttgatatgtaaaggacagctctgctatgtaacatgctatgcaagaattctgatatgtaacatgagttgttaactttgcacaaagtgctacctgatattgacaatgtgaaaaaatttggaccatatttattaaaaagctgtgcaagtgttaaacactagctcatattgtttgaagtagggtactcatttattt

SEQ ID NO: 121889 - DNA, 286 bp, Zea Mays
tacattggttcctcggtaaggtatagatatccacttgttataccaatcaatcttcattgggctatacacttgcaaccaatcaatacccaccaccaaatcaaccgtaggtagaggtaaaaattccagctcagaaataaactaataaccatctgtataccattcaaccttgggtaaataatggctacaagatatcacctgaccatcagctaacttagctgacatctgtcgtggaaactattgcacacccgacaataaggattttcagtaatcactgataaacgtacgg

SEQ ID NO: 121890 - DNA, 356 bp, Zea Mays
ctccagtgatgatgggtatcttctatatcttaaatcaacccgcagttatattgtttgattctggtgcctcccattgttttatcagtaccaagtttagcgttaaatgtcatttgagcttttgccacaccaagggggcctatatggtttccacaatgggtggcaaggttgagtcaaataagcttactgaacaagtaactatccaacttggtaatcgatcgttaaaaccagccttattgttttgggattggaaggtgtagatgtcatttgaggaatagataggatgactaggcattaggctaaactagatatatcagctcgcactatggaggcaaggacacctatgtgcaatgttttca

SEQ ID NO: 121891 - DNA, 553 bp, Zea Mays
aatccaatagttccaagaaagaaaagaaggggtcatgttcctgaagatgaagtcattcctctgcttccaaatgcaccagactaccactgccagaatatccatgaagttgtgcccaaaggcaccccttgcagcttcgatcatagggaaaataatccaggttgtggcaccaatgaattccaatgtaattcgagcattctgtactgaaggggaaccaaaaaggtgatatgttgtttcttcatagccttgatcacagaaaacacagttgagatcgctgccctcattcagaaagcatttttttcttaagatgtttttcgagttgattctatcacagaaaaccaaccaaacgaaaacttttgctttcttacagaccttggaccgccagatccagatgaaaggagctgggggttggatggatctgaaagttagcttgtaaaacttggaggagctaaaacactcattacctcacggataaatccaaatgtccttgccagctctggtagcttgcatctgataaaaaatcccgcaaaacaagtggtattcctgagtagcctga

SEQ ID NO: 121892 - DNA, 419 bp, Zea Mays
attttgctcgtgaggcctgagttctcttgatgcataagcaatgactcggttgtcttgcatcaagacacaacctagtccagtgccagatgcatcccagtacacatcaaatggcttgctgctgtcgggttgcgctaacactggtgtcgtggtcagatgttgcctcaatgcatggaaggcatcttcgcacttctgaccccaaacaaacttggcttctttcttcaacagctcagttatggtcttcgtgatttgagagaaattcggaatgaatcttcggtaataaccaactaatcccagaaaactctgaatctgacgaacagtcgtgggtggcttccagttcatcacctcttgcactttatcaggatcaacagctatacctgcctgagagatagtgtgacccaagaatttgatctactttagcc

SEQ ID NO: 121893 - DNA, 394 bp, Zea Mays
gactgttgtaagcgagtctgtctgcaatgtcatccttcgacattgcagagaggccaacttcgagctttggaaaccctatgttccttgccatcccctggcaaacagatatttccttgttgtccggaaggcagtacagaaagtcatcttcatcagtgccatgatacaccaaggatccttttgggttctttaattccctggcatagtgtttagctttggcaatctcctcttctgacaactgtttacccgaagcatgtcgtacaataaaatctagctcttcagtagatgcatcgggggcaggaaattaaaccttcttgggtatgccatcttgttccaagttcagagtagcatccgaaggtcattgttcagtttcaataggccctgtttctgtggaaac

SEQ ID NO: 121894 - DNA, 491 bp, Zea Mays
gtcgggaaagcctcggtcgtcgactgaatttctcaccggagtggatcttggactcgaacccgctgttcctcgtcgctcggacttgccaccgctccaaacctcggtaagtctttacccgtgtgactcaccaagtaatactctcctagtagcaccaatcggggtagcgaataggtctctggtgcaccggattggcagtctccggcgagggcatccgtcgtggattcacacacgccaccgcgcgttcccatcggacttagggagggggttctgcaccgtcggatcacgtaggcacgactctgatctaatctggagaatacctcctcggttgggttttgcgccatccgattcttcacggagggataggatttgggcgtggataccgcttcgatcaattgaagcgtagccgttcgatcaggattggatgggggttactcatattgggcatcattaaatcgtggacgttggaactggatccaaggggcgacgtagcg

SEQ ID NO: 121895 - DNA, 369 bp, Zea Mays
taaatatgtcccacgaccacgagtcctcgtcaggtctaggaggatggccacacagctttcttaggcgataatttaggaggcgggagatcgcaacaacatgaggaggaagaacctaaaagaaggggtcccacgagccagctacactgcgcatagtccctggggcgaatgccatagacagcctgggcccatggtggaagggagggaaggttgggactcacccacatggtactgggctggttgatggcccctgcagtcgaggcaggctgggccaacaagagggacatggcccgagagtgagatccttttattttttcgtttttttcacattcaagcaagattcaaattttaagatttaaacttaaacatgca

SEQ ID NO: 121896 - DNA, 335 bp, Zea Mays
tattcaccccccctctaggcgactatcacagaccatctgtcattgccttggtctggtagtggagttcatggactctacagaatccttcggtattggcactcattccttgactcagcaaagcccaaatgtacacgctgagtctaactatagaatttggagtcaactgatgaaggtaaatttcaaacttcttcaaaacttcaccaatcatatcgtacaaagggaaccgaaaccctgtctggaagaagcttttgaaaactattacttcatcatcctttggctctagaattacttcgtccccagcaaatcttatcagtccatcatcattcttccaaaaa

SEQ ID NO: 121897 - DNA, 470 bp, Zea Mays
agcgcatgtggataacgcagaggagtaaaaatcttagcgctcggattagctcgagctcgctcaccgttgtgcccgtcgtacccacttggaccgcgactggtcgggatcatcctcaccggcgttagccgtgcaacgattgtgcgccacgtgccttggtgtcttaccacgtcgcagtagctcatattacacatgtccggtgatcgccggtgagcccgccatggtgaaagccaccaatctcttgcgatagtgctcttttcattctccgactgccaccgtgccatctcaaattcatgggccaccgctcgaggatcctataaattgagcatgccatcggttccgcaaggtagtcaagcacccaatccatcaactcgtgccttcaattgttcaccagagcccccgaattgctcacttcccccaaatcggttttccgccgccgtgagaaggctctcaccgtcgctagtgcgcttcag

SEQ ID NO: 121898 - DNA, 546 bp, Zea Mays
cccacagtagggtcccaaggttccaggcgggggtccaaagctgacacatgtctagacctggtctgatgtgatccggacctatccgcatacactcatgctccctgctcaggcggagacccgatgatgccacgtggcatactgcgcgcggcataagccaacgggcggaacctggcatgacgcctttgggctactcgcgccttcgcattcattacagataagacatgcggttgtccactccactgacaggcggcgtgctcagtccacgatacgtgggtcgtgcagttactcaccattactcgtacggtaactgcccatcaatgcaacatggattgcggacatcatgacttccgctaattactgatgtgttactctgtcagcattagttattttcccataatgtatttcttccattattctcctgggcccgcatgtcggggctcagcatccttgtatttgcctcccttaaactataaaagggaaggcacacagcgttacagggacggactcaatcacaccgtcaatatagcttacacacagtggaggtag

SEQ ID NO: 121899 - DNA, 307 bp, Zea Mays
ctttggcaacttatgattcttcgggagaacctcgcccatcagttggacgatgtcgttgtaagcactgtttgaaatgttgtgcttcgactttatcgccattagtcttgtgagagtcccaataactgacatctgagtgtgctcgtgcagtctctcttctcccacggtgagtagccagaagaattcctgagcatcacgtggaagttgccccggctcctcagcgttcatttcaacctccctaccaagatcatgcaacatgtcgtccatcctatcatgatcgtcatcaagctccacctccgcgtcaacgtgt

SEQ ID NO: 121900 - DNA, 388 bp, Zea Mays
gggaaccagttcgatttcttaagcctacaaacactgaacttggccttgagcctcatggccatggtttgttcccaagtgtatgaaaaatgttccttggatcaataaaccaccatgtgcttataaggtgaagttcataggaatgcaaaagctattaacgacgtgtttattagtagctccagacttcatatatataacaaaaggaagagagaaacattgttttatcaagtgaaagcagattatatgaatttagtgatgccactatttagattttaataagagctttgctacagtgattgctgtgtacccgtggtgcttttaggtacttttccctcggagttttgctggccattgatctgaaaaggacatttccaaaattgaatttatgtaa

SEQ ID NO: 121901 - DNA, 483 bp, Zea Mays
ccagggtcttttcctttaaagtatttgggcatacctgtacattttaggaggctatcgaatacaggctggaaacgggttgaggaatgctttgaaaaaagactcagtagttggaaaggtaagcacctttgtgttggtgggcgtcttactttgatcaactcagttttgagtagcctacctatgtacatgatgtctttctttgcgattcctataggagtactcaagagacttgactacttcgctctaggttcttttggcatagtgatggtcaaaaacggaagtatcgtctagccaaatggaacagtttgtgccaacccagggatcaagggggtttagggatccaacctaaacattaaaaatacagctttgctaagcaaatggctcttcaagctccttacaacagatggtacctggcaacaaattttacgaaataagtatatgtactccaaacccctttctcaaatcctttggaaaaatggagattca

SEQ ID NO: 121902 - DNA, 362 bp, Zea Mays
gttttatgaggggccttaatgaccggctacagcggaaaatggccacctgccttgacctctcttacagcagggctatcagcacggcgctggcagttgaagccaagtatgcaggcctaggaaagtcaaagggctatggaggtgacaggtccaactaggggcctgagaagcgacaaaggttggtgatccgaccttttaaccaaaattgttcttcaccacgtccaccctcctacccctttaaacaacctgtctttattcgtcctgccactgcctccacctcaacaaatcagtcgagtgcccctggtactcgtttccctgcactcccgagttcatcttctggttgctttaattgtgggaagtccgga

SEQ ID NO: 121903 - DNA, 698 bp, Zea Mays
cgaagaggctcataatgtatgtgttgcactggccacagatgggttcaatccatatggaatgatcactgccccatacactgttggctcgtgttcgttatccccccatcaactcccccgacatatgctttcaaagacataatatatttgtgtcgttgataattcatggacacccagggaataaaatgggcgcgtacatagaacctttgattaatgaattggttcgtgcttgggaggaaggggtatgaacatacgaccgagctacgaagaaaaacttcaaaatgcatgtttggtactagtactccatgcatgacttaccagcatatgggctattctacgcccgatgtgttcatggtaagttcccatgcctagtttgcaaggaagctcttagattcatttggttgtagaagggtggcaaataattatcgttcgataaacatcaacaatttcttccttcagaccatgcattccgactagacatcaagaactttacgaaaggtgtcgtagtgatagactacccacaacaataatggctggtgccaaagttcgtcatcagatatatggtctcgtggttaatccaaaaggtggttttgtgggatatggtgagcagcatatgtggacccataagttgggcttgactcggctcccctattatgatgaccttctccttccacacaacattgatatgacgcacactgaaa

SEQ ID NO: 121904 - DNA, 362 bp, Zea Mays
agggccaccctgcagacgacgcacctgtccagtctgttgccgaaacagtacacccgtgttgcgcagtgcactgcactcatcccttatgcgagaagctttcccctgcacgccgagactatgtagatctcgggtgtcagggcgcaagaagattgctctagcagaagatattagtagctacatccgctatgttcctgggcccacatgtcggggctcagtactcttgtacatgtccccctttagctataaaaggggaggcatgcaacgttacaacacagactcaacttagactctcaattctcaagcttccacagcaatccaacatacagtggagtagggtgttacgctccggcggcctgaaccac

SEQ ID NO: 121905 - DNA, 572 bp, Zea Mays
aaaacaaaagattcattgttccgtattcctagcacaatgatattgcgcgcattactaggaatttcatcatcaagatgaacctcttcgtgaggcaaatcaccagcagggcgagttcatcggaggagagttattacagaccacgtgaatctgcaatcagaacatatgctttgactaaggccgatggatcatatccgcaggcgtccccgcagaatagatcaaataccaataagtcaaatgtggatatgatattaatcctgggtatatccacatctacatcaggtagaagcattcagaccaatatggttactcctcaacgatttctggcaaactccatatacataggagtacacactaaacgacaagtttagtttggcttttgtgcgttttatagaatattgaggcattacattatatgggcattcctccccctaatgtcgagatgttttaaaagcatacatataaaatccccaaccacaatcatctagttgtggccaatgtatgctattgtggtgatttatttgggaaatattacgcacattacggatcggggttttatgcagtgagctttggac

SEQ ID NO: 121906 - DNA, 366 bp, Zea Mays
ggtaaaatactcaacagcgacgaaggtgaacttgaggttcccctgggccgtgggtaggggcccgacaatgtccaggccccagcgctgaagaggccatgtatgggcgattagcttcgtgaattgcgaagggcttcccgagcgtggagaaaatttctgacaggcttcgcaggaccttgtgacccgatttacggcgcagatcatggcgggccagtagaaaccttgacggattacctttgcggctagtgccctaggccctgcgtgagagccgcaagtcccgctgtggacttcgcgcagaatttggacgccttcggtctcggtgacacatttaagcatgggttgactgacccccttcttgtaaagttgtcc

SEQ ID NO: 121907 - DNA, 273 bp, Zea Mays
cacaaagagaagctagggatagcattggcaaaatggttccatgctaatgacattcctggaaggaaggcaaactgcccatacttccgttcagcccttaagttagctcaacaatttggtgatgaaataccatttccatgtgggagagaaatagatggtccattattggatacgaattatgcaaactggagactcacatggctaaattcaaatagtatgggaaggattgtggagttacagtcatgtgtgattcatggaaaggtaaacacttgttca

SEQ ID NO: 121908 - DNA, 510 bp, Zea Mays
ccgagccagaacttattattcccaccagcgttgaacgactcgatgaacttaacgttagccttgaacaccttgaaccgccgagccttctcggaggcgtctttgtagacacggctgtactgcgccatccactgctcatgcctcgccaccatggcagagtcgtcgctcaggtcgcgagcagccaaggcagcaccgcagaagaaggcgaaaccaaggatggccaagatcgatgccttcagggtggccatggtcgcgcgctgatgctagcctgctactgctgtgcactatgcctaatgatttcatgattggagctcggtggtgctggtatgtatatgtaccttgagacgtgcattgttctttgtaattaagttgtaaaagcatgaagccatccggtacgctgctgtattgtgtggaaagggactggtacgtggccgtgaagtacggccacttgccagatggtataaattactgtattttgcttttgctccagattatatataagcaccacatttg

SEQ ID NO: 121909 - DNA, 425 bp, Zea Mays
aaaaagggcatctcaaaagaaagttccaagttctccgggctcagcagcaagaccgacaccagaagactcgatcatttggatttccacccaagggaccaaacttcagtagactagctggacccaccccgtcacggttcagccagcagagtcagagaaccttccatgccccctcagttgcaagcaaccaacccccggcgaatgcatgttggcactgcggtgatcccagtcacttcaaaaacaactgtccgcagctgaagccaccaggacccgcctactccaactcagtgaatggccccaagaatacctcggcatccgcccccaaggcgccctcctccgtcagccagcagaacaagacccagtatcaaggaagggcacgagtgaatcacgtcgatgcctaggaggctcaacaagctccgggagtagtg

SEQ ID NO: 121910 - DNA, 339 bp, Zea Mays
gcagtctggatctgtcatcctcgtcgtcttcgattcaatcgacgcttctagatccaagccagcgaaggtgattgcctcctcttccatgcgattgggttcctttctacatttccccaaccatgctacatatgtgaaccctaactgttggggaacgtatagaatcataccattttttccatgtaacggcttcaaatgtaggattatttcagttttatttggttttgaacctaccaaacttgtgtacccaaggttttagtggcatgcagtgcgaccagattcaatatggcatccattcttgaatttttgtggtacttccaactcgtttatgtgctctttctg

SEQ ID NO: 121911 - DNA, 971 bp, Zea Mays
gggagatcatgtgcaaatttgagttggttaattacttaatcaatatctttttaattttttactttcatcctgcctagtttcacgcacaggaacagcaaaccatttctattagaaacacattagcttgagataacctatatgccgcctcacatgataaatcagagcactatgcatttgtgggcattttgcatctatgcttcaaggagacaagcacatctacattaagaaccatacactacgaccttgattgattagaaaggtgttcatcggttcgcagtaaattttattattattagcacagaaaggggaccaacagcaaaatgtggtggtcttcagtttacgtggtacaggccacttgcgtaagcaggaaagccagctgaagcgtctcagagcagttgaaggctctcattatgtgttggaaccaccacccccactgtaccagatattatactcactgactgcatcttcatttcctttccatttgtgatacacaacacatgagcctgttcgtggagaataattccttggaaatgcttattctgtccacctcaataaatcgatgcctcgtcacaaatggccctgaatgatgtatagctagcacttgcttttgccgccccagttctgtagaggcatgaaacatgcacgggcatttccttttgtcttggcttcctcgtgagaaactatagcgatggaatccaaaaaacaaaacaaaaaaactccatggatgctaatttgtttttgttggagcaggcaggcaggcaggggagctgagtgagactatgtttctttgactggtagtgggactgcagggtggcctttaggtacggtgtcctcttaaagcggagctttgcataggagctagctactaccactaccagtagtactgtactgcatgcatgctttgataccccccttgcaactaaaatcaacactacactacactagtctctctcatatagtttacccttgtg

SEQ ID NO: 121912 - DNA, 367 bp, Zea Mays
ttttggttgtggagagaagtacgagctaggacatcaagctaaatgcccaaaaagaggtggagctcaattacataatctgactatagaggatatggggttggtattgtcagatgaggcgttgcagcagctggatcaggaagataaggaagtggaggaagcatataagttgtctataaatgctatcagtggaactgaccgtgaggattgtatgagagttcgggctctgatccaaaatcaagtactggtgatgttggtagactcgggcaactcctcaagttttgtcagtcagagaatcgtagatcagttggccttatcaactgaagtggtttcaccagtaagagtgaaggtggctaatggtgagtctatg

SEQ ID NO: 121913 - DNA, 388 bp, Zea Mays
ccagtccgcagttgcatgggcagtagttgggcaacacgatcgagcgagccaaaccagctcaccttatctatgtgcgtgtcagtgtgtcgacgccgacacgtagctgctgatctctagcgcccaataaagcaggaagcaaccaggcaaatgcgcgctagcagctgcctgccgttccatcggcagctgggaaattaaacgcggggtcggtcgcgattgttaataggttctaggaaacgtacgatacataggagtgcaagtgcaacatgagcgcgcgcgcatcgtaaacagccggctgctagctagtagctagcacacacgcggcaaaaacacacacaaaattatgtttgctagaacaaaaacgtaacttcgtgacgccgtcttgcttgta

SEQ ID NO: 121914 - DNA, 470 bp, Zea Mays
ttcaagaggcagaagaacaagttcgtataattcgagagaatttgagggtagatcagaccagacaaaagagctacgctgataatagaagaagaccactagagtttgaggaaggtgatcatgtgtacctcaaggtgtcaccacatcgtggaatgagtagattcaaagttaagggcaaattgtcccctcgctttattggacccttttgagtttttaggcaagttggagagatggcctatcaactcgagctacctgatcatttatctgatgtgcgtaatgtatttcacgtatctcaacttaagaagtgtctccgtgtccctgaggaacagttaccaatggaagagctcagtgttcagggcgatttgacttacacggagtatcctattaagattcttgatacaatgactcgagttataagaaataaggtgataaagatttgtaaagtgcaatggagctatcatggagaagatgaa

SEQ ID NO: 121915 - DNA, 324 bp, Zea Mays
tttccatgcagagctcgactaggttgagttctcaagctccaaaccacatatggcagctctctgatccactttcctgcaagcttttcattcttgtcaaacactttcttcctgagcgcttccagtatcattccgttggccctttccacttggccattggctcttggatgcgctactgatgtgtacttaatttggatgctccgttgttcgcaaaaatcaaagaatttagagctggtgaagttggatcccaggtcagttatgatgctatttggtatcccaaacctgaatattatgtcttgtatgaactccactgccttggctgaggtt

SEQ ID NO: 121916 - DNA, 813 bp, Zea Mays
atttggaattacagttgatttaagtatgaacttcacacttataaatacaaatttggggtttaaattcgaaatttgaaagaaaagaatataggagataaaagaaaaaaagggggaaaataggaatgcctcacttgggcgaatttggcctagccggcccatttggctatccctccgcgcggcctagttctcatctacacactggggcgccgacaacctgggcccgcttgccattcactaacagacacgtctaaccagtgttgtcctctatgccatgtggacccgagaagtcagccaaaacacctcaacaaccatggccacgcatggcggttgcgctggtgtagctgggagcggactcagtgtcaaatccttctccacctcgcctctataagatgcgccgcaaaccctagacgactcctcttccacctctgtgatagccatcgaccgatagcgccgtgagcgagagtgctgcacagagaacgtgaagggaggctcgccattggtgattcgtggccccgggggagtttggctacgattgtggcctggaggaagaccacggagtgtggcgggtgcatacgcgaggaagtttcgggctgatcacctgcgctgtggggcggattgctcaccgacaatcgattcgcaccgctgggccgcaagtcctcgtcgatagagcacgatacttcgaaatcggaggtatgatggcggggtatgtattggggatgtgcaccacatcacgtagcaagttgtagattgaactgcggggcaccaagcgccgagaatcgaccgcaccggcggtagctccgccgtggggtggga

SEQ ID NO: 121917 - DNA, 494 bp, Zea Mays
ccggattcttcacaatagtcgatatattagaagtgacaggacagggtgccatactgaataggcgaatccatgcacacggagggacgatgtagggcccacaacgacatgagaaagtcgcgtcgtataagtcaagccctgaggctgacacataagtcaagccctgatgctaaaccgttggacttgtcgcatgttatcatagggacattagccatgaacccgccacagtaacaggtgtaatgggcggcgtcatactggaagcacaactttgcacgaccagaggagggcccaccaggacaaccaaaggactttctctctctctaagacaaaaaacgatgtaaggcctgcccttgggatataaaagggaaggcccctcttcctctcacacataagcacactaattgtaacacgctcagagtaatactatgatcagcactacactggagtagcatgcgaacccaaaccaatatataaccctgtttctcagatttctcgta

SEQ ID NO: 121918 - DNA, 486 bp, Zea Mays
gtcgatgagcgtgcgtgcacgtggttctaaatgctgttctggaacctcctaggaccaggggtttcagtacacttagccacgtttctagcctaatagcacaatttgtcgactagttctgcaaagtgcagtcacggcggcgtcgtattcttgttctgtgcgcatgcgtcgttatcttgtgctcggcttcggtgtgtgtgtgcattgttgttagggatattctaggggctgtgtttccacaaggtcgtctgaggaccagccgaggtttagtacatttccatcttttcaatggctcgactgtttttgcctgataccccagagttgccaacaagtagtacaaagtgcagtgaaggtggcatcattttttggttctgtatatatgtctgcgatggtatctgctgctcatgctctaactaggacatcatactgcatatgtacattgtgcaaaatgcgctaccatgttgtcctaaaagattgttattacaccac

SEQ ID NO: 121919 - DNA, 584 bp, Zea Mays
gcaaacgacatcacattatagaaactgctcacactttgttaatatcttcttttgtcccttcacatttctggggtgaagcagtttctactgcaggttacctcatcaatagacaaccatcatccaaactctctagcaaaacacctggtgaagtcctttttggaactcctccacgatatgaccaccttggagtttttggatgtacgtgttatgtactattatcacctcgtgaacgtactaaattgactactcaatctgttgagtgtgtttttcttggatacagccctgaacataaaggctatcggtgttatgattcatcttctcgtcgcatgcgtatttctcgagatgtgagctttaatgaaacccgacccttcttttacaactcttccactcattcttcttttaattccacagagtctacctccttcatgagccttcctcccatttctgaaatttcatcagtattaccacctactgtttctaccccagatgttcttattcccatcacaccaccttccacttccacaccatctcagtcttattcttccaaaccacctgttactcagacttacattcgtcgtcctcgc

SEQ ID NO: 121920 - DNA, 507 bp, Zea Mays
cacttcaactacaaacttactcaaaggaaaccgaagcccagccttgaagaagcttcggaaaatcacaactttgttctcctcaggggcaggaactttgttgtctccgccagccctcacaatagacatatcccaaaagtattttcccctcatgtttttgaggtgactctgtttgatggtcgattttccaaagattgaatgacttggcctccagagctgatccttagaatcttcgtcctcactttccacatccagctatcgctgtctccagtatcttcggacaagccctccagtatctctttagtaatcttctctgtatttgtttttgccattgactcgacaaatccagcaatataaggatctacagtcttctcctcaaaaagcttctcctcctcagttggcttcgtctcggcaacaacctattcttgccttcagatattttttcttcagacacggtgaaaacacgtcttttaaaccgaagttcagagaacttgaaaaactatcaagcgc

SEQ ID NO: 121921 - DNA, 650 bp, Zea Mays
ttctgggatgcaacactcctttcggtcatcaaataaaatatctcctttgttgtccccattaccccacacttggcatacattgtcagcgtagcagtaagaagtagtacattaggaagaagtctctcccacctctcacgaaccaagcaatgcacccccaccttcccctctcgagatcactcaggtttccacaggataccaaaaccctcacaaatgtcttgtcatttgtttttctttccccccacagccatcattgcatcaaacagattcaaacactcaagctagtctttcaccttcgcgtatagcgcaagaagccaagaacaacattctatgacaccgtgatccttgttaacatgctatcgaaaaccattcttgccatctcattgtccccagtctaggcatagccatccagcatcgagttcgaagacacaatatccctcacatgcattacatcaaacagcttcttggcactctccatgtccccagtatacttagcaatcattgaggtgagacctagccaacgatgcctgccaccaaatgtcctacgccatgaccacttcccccgccgcccaatccggcaaatctggcggccacgttcgccatggcagtgttacgtaagtgaacctagtggaaggatttcggaagaacatagg

SEQ ID NO: 121922 - DNA, 566 bp, Zea Mays
ctcatcagtagtttcaggcatagatgtggatgaggaaccaatatcagaaacccctccagatgaagaaaatgtactttcatcaaaagtaacatcatgactgacaatcaccttcttaaaattagcacacaataaataatatcctttaacaccagaaccatagccaataaaagtgcatttttgagctctaggcactagcttcccattgttcacatgagcataagcaggataaccaaagattctaagattagaataatcaactggtttacttgtccatacctcttctggaattttaaaatcaatacctgaattgggagagcgattaatcaaatagcaagcagcattagcagctttcgcccacaaaccatgcttatcccataaaccagcattagaaagcatgcaacgaacgtgttccagaatagtacgattcattctttcagcaacaccattctgcgggggagtacctggaacagtcttttgtctagcaataccatgatcagcacaaagataattaaactcgctattgcaaaattctaatccattgtcggttctcagtttcttgatttttc

SEQ ID NO: 121923 - DNA, 664 bp, Zea Mays
aaatttgccaggctacttcaaactttagtgaacaaaacaaaattggtttaggtaattttggcacggtgtataaggcgaaactcagggatggatccatcatagttgtaaagagggctactaaggtttgtaggtgaatattccttcaacagaagaaatgttgtacatatttactccaccgagttacttgcagcaatcaaatcaagaaaaagttttgatgcaacatctggatttggcagatgcatggtgggcatctatctgaagagttcagaagtgaagtccagatgctgtcaaaggtcgagcatttgaacttggtaaagtttcttgggtatgtggaatacgaggatgaacgcctaattctggttgagtacgtcaataatggaacactccgtcaacacttggatggtacgtcaaacatgtgcaatggacaagcttaaacacatactacttcattttttgtggtagtgtagcaatattgtcaagatggtaaaagttataattttgtaagtcaccgctcaccaagagtccaagatagtagaactggatgaagttaaatgcattgaagtattgtttataaatagagtatgacaggtcacttgtggtatactaaatgttaatctactgaaagagatgtaaaaacatgtgtatgctattcagcttgagcctg

SEQ ID NO: 121924 - DNA, 343 bp, Zea Mays
tcgacacacataagatacaccggtcataacatctcaccccatctcttcaaacagctcatcatcgagttgaacatctgggtaacggtccttgaagtcgtgcaatggctcccaagtagtgtcatctttggtcagaccctgccactgtacgagaacttgttggacaccatggtgtaactgggcgcgcaacgctttctttggagcacgcaacaaccaaccatcctaaacaagtggcacgtgtggcgaagtggttggagggttcccgtagaacggcttcagcagtccaatgtggaacacatcatggagacgggtgccggtcgggaggtgggaggtggtaggccacctg

SEQ ID NO: 121925 - DNA, 353 bp, Zea Mays
catgcttggtcttagcgattaaaaaaatcagacggtgacataaagcgaaggcgggttggggaatggagtgaaacagtgcagcgtagcgaggaatataagattgacatttttttgtattggagcggggcccatctaaagactggtgccggccttaaacgcaacagcgtttgcttttgactatatggggcccatgttaaggtcatgttgatcataatgttcgtgatgccctgatgttgtatctttccttcctgtgatatagcatcaccaaccatccaagtgtttgtcatctcatagaattggacatctcaatttgtgctgaaaataacttgtaccttatacacaccagacacata

SEQ ID NO: 121926 - DNA, 394 bp, Zea Mays
tcaacagctagggttactcgcgacggagaagaagccgaaggtgccgaaaccgctccattctccgaggtgatgcaacggtcaggggctggtagtatcggaggatgcacctgccgctgaagctgagcaggttgatgctgaggaaattgaatctgaagatgaatacaacgccgtgccaactaaacccagccacctggagtttggaaaatccaccatttccgaaggtgatatgtctaagctgatgaatttgggatattttagtgaagcaaagaaggagctggttcgtttcggcggggaggagattaccccgaagccaggaaaggatgaagtagtggtcttcaaaagcttctttaaagctggattaagatttcctttaaatggtatgattgctgatgtt

SEQ ID NO: 121927 - DNA, 384 bp, Zea Mays
cggcgggttgatatatgtaaagagtagggtctcttttgaagttttaccccaccgaaggggtaccacgaatctagggccattggatccatactgaacggctcggattagaccaaacgccatccagaatccacgcgcaatgcagttcctcagatctcgcatcaacggtgtatactcttaagtacttagattgtttgccacccgtttgattcgcagcgaacgacggggatgaacccaggccaaatcggtatctgtgttctaatcaagaccgtgcattcagatctaacggcagagacttcctctcccctcccaacgccgacgacgaggacctccctggactcacacggcggcgctctcgccggattttcgggtttcgacgccctgccg

SEQ ID NO: 121928 - DNA, 382 bp, Zea Mays
aaataaggcctacgtggggaggcaagagcgtgcatgagcttgggcacgtggccgtgaaaccagggcaccacgcaggcccaagttacagagaagcactgggaacttcgtggtgtgctgatagcaaaacatcagcaaccaagtcactagtttggataggtgtccagctcactcgatccaaacatttcggcggtgaaacctccttgagttatcccctcccctggtacacctttgcactcgaccgtatccccaaaatccgagctggaacactgagtatagaggtagtgcgtggatatccattttcagaattctgaaccaacttggaatccacacaaccaggaccctcttcactcgcctgcacccctccagttcatccccatttttc

SEQ ID NO: 121929 - DNA, 564 bp, Zea Mays
tgccttttgagcatctctttggtcgaccatcttagtatagtcaccttcatgcttttggctatgttacctttgtccttcttcaacctcgtgagaggaccaagctcactacgcaatctattcattgtgttttccttggatatgactctgagcgtaagggatatcattgttgggaccctatcgctcaccgcatttgtgtgtctttggatgtgacctttgatcagtcatgtcctttctttactactgatttgtcctcttcttcctcttcctctgagtctgttgatttcctccgcttggttccacctcttccgaccaccttgtcttcaccaccctcccctgttactatttcatcacctccaccactatcaccttctccacctccaccatcgtctccaccacctccaccatcccctgtgtcacgtcctccaattcttttccactgcactcgacatccacgtccatgtcctctaccatcccctccgacatcatctagctcgtctccttttgtgcttggtgtgcttccttcgtggtatgaccttcgtgatcgacgtacgctttattgtctga

SEQ ID NO: 121930 - DNA, 481 bp, Zea Mays
aaccatccaaagagttccattaggccaggctattaatagaaggtgtgctacaacttcccactgtgtgttcccatttattttatctaaactgaaaacaccactagtgctatatgtatccatgtaatagatgacgagtggatctttttggctgccaatttagaaatacaaactctttgagttctcaacatgagtcttgagagacttgcggacttggtctttcgattcccgagggagttgtagaacgccgaactgcggttcacccagtttgtgccttcacgtcaaaatggcgtgattgcgtgggctggcttcatcggtacgtggaagggcgattgtctcggttgttcgtcgcgtgtgcaagatctcgcggtgcacagcctcttcgtcaggtcacgcggcgatatttatcaagttttgaaaatccttcgagaagatcgggccacaaacaattgctcccgcgtaatctgtacgcgtgcgcccaaca

SEQ ID NO: 121931 - DNA, 468 bp, Zea Mays
catcccccagcgcatacaggctcgcaacgccaaacggcgaagacttggagcattcctagaacatcgataatctccgcaaattttttgtttgactcatcagggccagctcgcccttgtaattcgtaaaaacaattttattctggcccgcactcttttcctcccgggtggtgacgtttttaacgaggcggagtcatgtaatatacaagtgaaaaatcccccgcaaaaatttgcatcgaaaaaagaccgcgccgacggtcttcgacattcgaccaatacaaagtcaccgcgaggcccagcgctagctaccctcgcgtgcgacactccgcgcaaaagtcgcctaagggtgcagccggtttagcacaacaagtgcgaaaaatcgaagtcttcctcaaaaaagactatccgtgcaaaagtcgcctaagggtgcagccggattagcacaacaagtgcgaaaaatcgaagtctccg

SEQ ID NO: 121932 - DNA, 345 bp, Zea Mays
ggaggagttggggagatgagcgcttggacgtggcttcggtaacagaggtgagaggcgtgcggtgtccatcggaagatagtgggataagactgaaggcagagggcagtggaaataggctagaatgtaaaagagatttattttcatgttttctttttttaaaacaaagcaatagtagaaatctaagttttagggttaggattttagcgatgtgtgaatggatagtaccaagataatatttgcgatggtattagacactgtgtttgatttggttgaaatcagacaaaaaattatatgctatcttaacatttgattctccaccaaaggtaatgttttccaaaatcaccc

SEQ ID NO: 121933 - DNA, 289 bp, Zea Mays
aaggaaatttcttctaccaagaaacagtttgaagaacaatcttgcattattgcccagtctcaagctgaacagaaacaacaatatgaggttataacaaaattgcatgcaagaattgagggcaactgcagaatgggttgcttggtagttataggtcccttgagcatttgttgatactgctaaactgaatatgaacatcattgtgaagaagttgagaaggaaattttttctaccaagaaactgttagacgaacaatcttgcattattgccgagtctcaagctgaacagaaac

SEQ ID NO: 121934 - DNA, 638 bp, Zea Mays
ctatgatttaatactgttatggactgggcctcaatttcgaagaaggtcaggggttctggtgtaagtttaccgagactcagagaatagggtccatggactgcgggttctattctctaaaactgtaagggttctttaataaaaatgtgtcgcgaatggggtatccgtagatgtgggccgttggattagaacccaagggctaggattagatctcccataaaatgaatcggtatgcaactagggccattggatctaacttcaatagtctggattttatttgaccgagatcggcacgaatccatctgatctcacttcaacggctgggattcaaacatgaagggggtagctaccacttaatcagagccatccgtttacgatcctatggccaacgatcctttccctgcttttccccctcccagcttggccagacggcggcgccgcccaccaaatcacgacggccatcgccggagtagtgcccgcactaatcccgtcgccatccagcaattcacttgcgctacactgacataagaccatgggaaacacgatggaggtgaagaataccgggaatcgggcgcgcagacgggttgttctcgcgttggggcggctcggcggtgttgaagacactccgacgagcaattgtc

SEQ ID NO: 121935 - DNA, 606 bp, Zea Mays
gaatccggcccggagtttgtctgcccacgacaatggcgaacaccgaggacaacccagggcgttcccggtgatctagcgcggtctagttcaattggttgggacgacaagcatccctagtgtgcaaggatgttgaaacgagggtaagtaggatgtgagcggacctagagacggcgatccacggcgcggtgactcgcggcagcgcggagaaccgaattggggggaatctcaaattgaggcgctacggtggatgatcggagacgaggtttggtgtactgagttcgcaacaagtaggcggaacagggggagctttcaatttatagactccggccaagcttagcacgaattttggattgagatcaagggtactatgcccgggatattttaccgtggccgactcaccgtggcgcgctagtatgaattggtccagggatgataatcgctggcctgccacgacccttacaacgtggaggagtggtcattacatgtcacggcaggagaatggtgacctccggtaataccagcgcgactgaccgtggtgggacacgacggtcggtccggccagcgactggattcacccctccccgaatatttccacattgggccaac

SEQ ID NO: 121936 - DNA, 1099 bp, Zea Mays
ttcgtctcagaggtcctaagcagctccaaatgcaacatgacagaaatggagaaaatgtcatatgttgtgctcatggcatcacgaaagttgtgtcattactttgaagcacacaagataagagtggcaacagaccgaagccttaacgatctgttcagcaacccagaagctatagccaggataggcaagtggcagcagagctctcagggtaccacatagtcttctagtcgagaaattcaatcaagtcacaagtcatcgctgactttatagtggactgaacagcgccttcaccatctagactcaaaaacacactagacaatccactatgacggcacctggtgtcatgtgggggtcggtgcagcaacagtaatcatagccccattaggcaccaagtatagatatgccacccgactaagttttgctcttgagatagacaaatctaccaacaacatagcagagaatgaagcagtcatcctcgaactccgcaagctcaaggcactcagcattaagacatgcatagttaagaccgattccaaagtcattgccaactagatagaaaaagattatacagcccgagagcgagtcctcctcctgattttgttaggtgtgcgaagtctggagaaacaattcaagggtttttcaatccaacatgtggacagaagcaaaaacgaggaggtcgatgcacttgtgaaggttgctgcaagaggagaccttatgccattggacgttttctttcaaataatcgaagcccctatcgtaagggaccacgatgggcatagaattataagcctcatcatgaccgaagacttgagggccacatcgccctttacatacaaggacactatcaccctacagaccaagtcgaggccaaaagactcaagtaccgaagtcatggcttcaccctaatagaagggcaattgtacaagaaaagaatttgtcaacctttgctcaaatgcatcatggtcgtcaaaggcgtagacctcctctgctaagcagacaaaggaacatgcggctgccacatgggccctagagccctcgtagccaaagtcatgcgccaaggatttcactggccagatattctttgcgtggtgaaccgcttttt

SEQ ID NO: 121937 - DNA, 377 bp, Zea Mays
ggactcacggaagctttgcgcgatcaacacagcgtgtgattgttcagagtttgatggtatgtatgagcaaatcatcatcgtccaacgcacagcagagggctccacagaatgaaacaagagtaggaaaagaaaatcagagtagagagagaaatctaaactagccggagaaccaatgcggcggcggcgggggcacggtggatcggggtggagatcgcgttatatatagagagcgcctcaggaggcgccgagggggcattcaagcccaagcaactgtggaacttcgtgctgttgtgtatacataggccctccctgccttgtgggccatgcgcccctttcctttgaagtttagacggcccacgacaataattatggtccgg

SEQ ID NO: 121938 - DNA, 567 bp, Zea Mays
aaactatgcccgaagcagaggtagccaaagctacacaaaccaccaggagaatgaggagttgggcttcttcacaagacatattagtggagaagagctgaatgaagaagaagtttcgaagctacgggaaaaggcaaagggtccatggcctaaggagatatcatataccccaccaaaggacatcttaatggtgggtaacttgacatcaacaaaccttgaagagatatctaaatcactaagtattaaaagagagccacaaagagatctagggcccatcagatcttagggctcttgttggaacttgctaactcgtggtcaacccagctcaaccggtgggagaataggaaacggtttgatgtcagtaaatgcaaggtattagggcaacagtgcttttctccatcccccgcaatggtacagtacgagggtatttataggtaaccgagggtcggccctgcctcgccaaatgcaactacaccctcagttacatacgttatccccagaatattcccccttaggggtttatggcgggtcattatagcgtgatcaattacaaacatgggccaacactcg

SEQ ID NO: 121939 - DNA, 1104 bp, Zea Mays
cacatcggatcagaccgccagcgcggcagtccatcaccgccggcgacctctctgcgccacgattcgtgccgccgccatctcaattcgtactcgggatgactagataaacgctcggagcacgccgccgtggataagcccggccattaaagtattccggccaccgtacaaagctcgccgcggtggaacccgataagcacgccggtgaccgccgccttccggccttgtgccgcgtgtctaagcatttccaccgcatcgccgtaacctgctctcgctctccgttgatcatcggagtgactgccacgacgtaggacacgatttcattgcgctagtaactctccccctctccggccgccgcgcgtcttccttcaaattcgcggccaccacccactagttctataaattgaagcctcagcatgttccgctaggtaattgtgcgtccagtaaaccaactctcagctccgatcgttccccacagctccctaatttgggattacccccaaatcggtcgaagaacgccgcaaaaccaagctcgccgtggtcagccacttctaggttcattcatgccctctgttaccttgtttcagtattagtaggcttccctgatgctcatccatccacccaattgagctaaaccgccaccaatcgccgggaacgcgattgattacccgtggtgcccgctgtcaccgtggacagagcagggtagatcgtcgttcgtgaaattggttgaggggaaaggtacggtaggcatctagtttggtccctgtctctttggagctccagccatggcgttggccggccggaattggctcgccggggtgcggcgagggctgttcctcgtcgtggaccttggtctgcgaaggaatagaagtttaaggacctttctgcaatctgtcagtgacgcaaagaaatagtaaccgagcttgttcccagttagttaaaagcccgagggcccttctgcaagatttccacgcgggcgtgagcgcacttctgctgtggttgggccgtcctggattagattgggcccagtactattcacagatttcccttttctttttcttccagagccaaataaattctagaaaatggtagaaaaatcctaaaaat

SEQ ID NO: 121940 - DNA, 348 bp, Zea Mays
gactctatttgggtgattgtggacagattgacaaaagtggctcatttcataccggtgaggactaattacacgggagccaagctagcagaattgtatatgactcggatagtttgtctgcatggagttcctaagaagatcgtgtcagatcgaggttcacagtttacttctcggttttggaagaagttgcatgagaacttggatacaaagttgaattttagttcaacctaccatccttagactgatgggcagacagagaggactaatcaagtgttggaatatatgttaagagcttgtgctcttaagcatggtggaagttgggataaaagcttaccatatgcagagttctct

SEQ ID NO: 121941 - DNA, 454 bp, Zea Mays
gtgcttataacaacagctaccaggctagcatcaagatggcaccatttgaggctttatatggcatgcggtgtatttcccctctgtgctgggagattttgggagagagatccctggttggtcctgattgggtttagcagacttctgagaaggttcaggaaattcgtcagaatattttggccgctcagagccgtcagaagagttatgctgatgtgaggaggcgggatttggaatttgtagtgggtgaccaagtccttctcagggtatcacctactaaaggagttgttcggttcggtgtctccggaaagcttagcccgagatacattggaccgttcactatcttggcccgggtaggcaacttggcttatcgcttgcaattgccggattccatggcaagggtacacccggtatttcatgtctctatgttgaggaagttcttgcgggatctggatcatca

SEQ ID NO: 121942 - DNA, 473 bp, Zea Mays
cctgtttctactcattctgcccattctccttcagaacgtgagatgctacactgcactgcggctctcctgaactcagaatcggatttgcacatctcaaaccaccactctgcctgcattacgagaggagagttaaggtacaagagtttccagaacgcgttgcattgattgatctagagaaccaactactacgtgtttaacaatgaacaataaaacattgagcagcctactgccacttaaaaaccacactcaccgcagcattgacccagcaatccacacatgcccgcccaggacacagaacaacagtccaaaactttcacctggtgccaaaaaacacctgcaccatccactaaccccagacaccttttgattttcttcgacactaattgagctggcatctatgatctatgtatcatgtggtatgtcaggtactttaccttggcattgtaagattgcaggcctatgactggcaaaac

SEQ ID NO: 121943 - DNA, 850 bp, Zea Mays
atttattcggatgtcaattttttggtcttctttcttcgattgtgaacaaataacatatagaatttgctatgtaaatttatattcttattcttagcattgaggttattaatcttcacaaaaaataaacattaaattcgttctagatatttttaaataattgatataaaattcggatgtctatccgaatacggattcggatgttttttcaccttttttgttgtagggagaaaataatgtacataaaaaagtatacaaaaatttatttaaatacttcataatattcttcataacattgccaaaaattagctttaaattatatgtatatctatgctaaaatattagatttgtgatacaattcggatgttttaggaacatccctagtctagagcgtaatcaatgtttatatatgagggcatagggagaaacagtgaaaaccccgaagagttatgcagtcaagctgcctcggagcgactagttagtagttgtaaagattaatgttttcttgtcatataactgtacattatacagttaggaagctggtgaagactatgaatgaagtggagcgtctaccatcgatgctgaagttgtgcattctattggatggaagacctacgtataatagtttcgtcaataagattgaaattttgattaaatagctaattttcttgttttccaaggtactttatgttcaccgatgtgatcgatttgacagagtttcgctctcacagggatctttgtcgtagcctggttgtggtagcaaccgtggtcggcgctcgagcatggaacacctggctatgagggatcgcgaagaaaggtttcgtaaagagatccggtagcagcaactggcatt

SEQ ID NO: 121944 - DNA, 497 bp, Zea Mays
catagacgcattgcctacctattttgcttaaattggtacgtgccaagtagcatatatttttgggtaagtagtactttcagtgtagagatgcttgggtgccagttacctaaggtcgctacaagttatggaaccttccactagatggttgttgtatcaagagatactaggaaaaggcaattgggtgaatgaaataaataaaaaggacaaactgttttgttgtagtatgagtgtgatccttggctcctaatgttgggaattgatttgatgttgcccttgagcactgatctcaattgttattccataagcgaagtgaatgcattgatgtcactgaacttccctgattgactattcttctggaaatatttaggtttgaattttatattgtattgattgtttgaagcattctgcattgaacagatcaacaatcctggtcattagctgtctgattttttagtggtatctgaataaatagatgactactcatgtatatctttctt

SEQ ID NO: 121945 - DNA, 305 bp, Zea Mays
gcgcttctaacatctcttcttgggatagtacctttcccgaagcatgacgaataatgtagtcaatacttttgttcgacgcttcaggaccaggagcttcgattttttcaattgcaatccgctctgttgatttttccttagggtcagcacgctccatctcggtgggcattgaaggcccaacttcggtttcagcttgaattgttgcagcttcgatttctgccttcttagaatcagcttcgggttgcgccttggaagcttcggcaactttccttgtaggagcagggctcaatgtttttgttgtctctaac

SEQ ID NO: 121946 - DNA, 298 bp, Zea Mays
gagtgaagggttgattcaaccaaagcaagaaacaaccctatcttctgagtgaagggacaacccaatcattcctaagtaccagagccatggcgcggagtaccattacattaccggcacttttctttgaatcacttctttgatcattaagatcctgttccccaagcaacccgatccgatattccttaactattatcttaccttgcttttaaataaacaactacttcatttcaattcatttgcaagactaggcttgctctccgaggtggcatcccctcctaagcgaaatactagagtagag

SEQ ID NO: 121947 - DNA, 448 bp, Zea Mays
aaaaaacgggtagcttctggacatgcttcaacgctgcctctgcgatacgtcgcgttctggaatctccatgttggaaagcatgaacaagtgccgatcccagactgcgatcagttgaagcggcttgggcgatatcctctgcccttagaatcctctccacagcccacgtcaccctgtgctgaagactgcctgtcgggttctccttcaagatgtcgaatataggtgcaactccattagacctatggagcaccaagacgccctctgcagcctccactccatcttcaagcagggtgcaaatagcagccagagcagcctcgacgaccttcttgttagaatggttcaagcaatggatcagtcgttccacagctctcccttctaggatgcagaagttgtccctgatcgaacagactccagaatgaacacgacagagctgaatgtttgtcggtttcct

SEQ ID NO: 121948 - DNA, 546 bp, Zea Mays
ataaagacgctgagcctaacgatagcgttaggagtcagctgatgaagataaacttcgaaattttccaaaacatctgcaatcatcccatgtagaggaaaccttaatcctactttaaagaagcttctgaagactaccacctcatcgttttctagcttcggagtggtttcttccccaccaaagcgaattatcttcttctcggcttccccgaagtagcctggttttgtcatcatcggcatatcagcttcggagacagttgacttcccaaaatccaagtggatgggcttagatagcacggcagaatagtccatatcttcctcgtcagcctcaccttcttcaatatctgcctgctcggcttctgcaataggtgcaccttcgtcagttgtaccctctggcataaccagtcccgtctgcctcattacttcggagatcggggcagtttcagcagcttcgccctcctcttcgtcgcgtgtaaccctagctgttgaacggaccctggccatttgatgctgaatttcttgcgttttgacgaagttgaatactttttta

SEQ ID NO: 121949 - DNA, 449 bp, Zea Mays
tgtctagtctatgttgaaatcggccaggacctgtgacttgattgttgttctgggtcaaaggtgatgttgtacccggagagttccgtcacccattttgctattctagcggacacctccggatttatgagcaattccccgagacccctatcagaagtgactcatactttgtgtgcctcaaagtagtgtcttagcttgcgcgaagccatgatgaccgcgtatgctattttttctagctctgtcatgttgcactttgagctcgtgaggactttggagacaaaatatattgggcattggtgagtcttgtcgtctttggtattttcatggactaatgtcgcgctgactgcgctgggtgaggccacgatgtatagtagtaggggtagctctaagtctggacttgttaatgttgccaggttggacatatatttcttcagagactcgaaggcagcgac

SEQ ID NO: 121950 - DNA, 371 bp, Zea Mays
ggtagagctcatggtattcaagttcccaggtcacggactagctggtcagggtcgacaggccacctgtgtcttgcttttctgacagctataacacacttttcaaacaaaagtagctgttaaagtgaagggcgaaccatctggccctagagcacggactgtccgcgaatgcgtagaaagtggacagtttgcccataacgtctagttgtgtttggagggctataaatagaagtggtgttcctagttgtgtttggagggctataaatagaagtggtgttcgtgtgtggtagctctcttggccattctttgcacacattaagcacacttgaatcttccaaacactctcactcacaactgttgattgggattgcatt

SEQ ID NO: 121951 - DNA, 547 bp, Zea Mays
acaaaccaagctcaagcttcgaaaaccccatgttttttatcatctcgcagcaaacatcaacctccttactgccgggcagacagtagaggaagtcatcttcgtcatttcctccgtataccaaggactctcgggggtatttcaagtccttggcatagtgttgtactttggcaatttgttctaatgacagctgctttcccaaagcgtgtcgaacaatgtattccaaatcaccatgaagaggtgcttcgggagcaggagatgtagattttttaggaatactctcctccatcagtcttactggcgcaactttcaaaggttcggcttcggtaagagcagtagtcgagcttgcaacagtcacttcttttgcatcttcagatttttcgtcggatgcttcaacagaagcgggagttggcgctttcacggattctagaacaacatctaaaacgctaaccattcttctcttccttggagtcgttgttgtagcagtcgatagcttcgacaaccctgttacagctagagggctcaacacctttgactgttctgttgtctt

SEQ ID NO: 121952 - DNA, 751 bp, Zea Mays
aaaatatagagtagagactagaattatgaaaattgaccagcatggcagcagtatgaattttgaaaatggaaaacagagatcatcagcaatagcaagtctatatgaaattttgaaattgcaagtctacaacttacaggaccataaccaacaactatatgagatcatcgtccagcttgaaatgatcaccagcagctccagcttcttcttctgcaacatcgttctaaagtaacacatagtaagtatcacttactgctgaaaaaatggtccagtttctccggcccctgggtagccgccgatgagacaggtcacaggagtgtccgagtccgagggaaagataggtgacagaggggggagagcagagaagagtgaagaagagaatggaaatggagctggagccgccgtcctggcctcagggaatctgaagagactgggcggctaattaatattggcttcagggccttaaacagctgttggactaccctgagcagatttaagttgatcgtctgattgcccactaggacgattaatcactctatatcgcgattaggctgacgataaggccgatcagttcctctgatcgaatcgacacctctgatcgagtactggtagccgatcagaccgactaatcgcggttagttggaggatatgtaatcactgctccctccaatactatttcttaggccggtgcagtttgagaaatttccctcttgttaggcgtcttctaggaaccaaagcaggcattaatggccac

SEQ ID NO: 121953 - DNA, 361 bp, Zea Mays
gtcgcctctagccctctcacagaggatccacgttgtctgtgttagcggtgaaggagaaggtgatggtcaacaacgcgatcgatggagagggtggcggaaaccgacactccctcaaggtgtttgatgtcaagaacaagagttggaccacggtacacccacacgtcggagttctcgggccgagcttcatcttctccatatcatttgtccggatatgaggatctggaccatcttcgccaccagaacatgcaccatgtacaatgaatctacacatctacttgccctactatcgattcatcgaaggaagcaaatgcagtagttgtgcctgcatgggagacgacgtcacgtagaaggtacccgcacc

SEQ ID NO: 121954 - DNA, 691 bp, Zea Mays
tatagagataaaataccgtagaaataataaaatgggtatggattaaagccaagtgaataggcacacgctagcaacactatatgcttctacagactctgcgtatgcagcacgtacacacgcgacacatgggactctagtacaccattttcagtctatatctatcataatgttctagtacatagggctcatttggttgacgcctggcctagagcggataggcagctcaatctagcccaagaatccaaaatcggacgtcttagattgttgtctgggccaaataggtttttcagtctgtgaactgctcatagtctttattgtaagtcttacgcacaccaaaacatgtagattgtttggtatggctttggcttctcttcaaaagcagcttctctaatattttttaacaaattgtttggtaaaacggctcctcttagcgcaagagaagagcaagttggggaatgaggagaggagccgctagaagccactgagctagtttttttactccgacttctctctataaaattagctccgacttatagtgttctttgttagaagctcatttttaagaccgtttggaagaacttctacagaagccgaagcctgtttgagatccatctcaaactaggcccgtaggtcacaaagaataattgctacatgttattacatcatttcatcggcacgtggaactaaacac

SEQ ID NO: 121955 - DNA, 478 bp, Zea Mays
cgggcatattatacttctcattgtgatggccttagggttggtccataggggatgccccattgatagggaatagcatgcaccctatcgactcccttagtttaatagtgttgcagcacaacatattccttattgtatgttggcacatgtatttgtccttgaacaacatgaagattcccaacaacatcgataccatgatatcatcaaaggagtcgatgtaggccttcatgatgcctgccatgaccctaggtgatagttccaagtcagtgccttaatgaaccacatgtgattctaggccttcatgatacctccgcaacaaggcgctagcatgttgacatgatcctagcgttggttagttaggttatccttcctagggctggctcccatgcaacatccatctctagtcgctcccctaactaggccctctcaccattctaatctcctcccggcatttgcatgtgggctttggggcaatgatgac

SEQ ID NO: 121956 - DNA, 577 bp, Zea Mays
aaccattttcatgaacttcagcttactaaactaatccttcttcaatatgtatctaccatatctactaagaaaaatcttcaactttagtgaagttttacagtaacagtataatatacttgctgcattcaactcctccgccaatggaaataaggtcaagtgcaaaatacaattgatgacaggaagatatcatgccgcttgataccttcaagataatgtaagaatcacccatgaagaactttccatacgaagatgcaggggcagggatcggcttgaaattctcaatacgccatatttccaagccgctgcaaggtattaaggataacaatagccattcatggacctagaccaaaagcatagtggagttgtagagtaattttcaacaataaatttgagatcaagtgcgtgctccataagaccataaatactcgatgaactcaattttgacaagctttagttattataatatcatccttcgatgtaattgctcaatatttaaattagcttattaatattgctatttactatttagttatccaaaaatgcagacaccttttccaggaaatgagtaccaatttct

SEQ ID NO: 121957 - DNA, 517 bp, Zea Mays
gaccgggccctcgtgtcatgggatggataccccggtgtacatcgggggaggcttctcgcgacgcttcgaggcgggagcaggggagtctgcctttaaagaggggttcatccctcgagtagtagccatgccttgcttctctcccactcgcggtgtcctttcgcctccgagctctctgcgcccctttgccttcaaggtctctgcttcgcgttgtcgtagtttgccatggccttgtgacttcatcccgagcgtgcccagactgagtgagtgctcgaaatggtataccgcctgcttggatggaatgcgccgacgctcggcgaaaggatttgcaccggtgttatccaccccgatgagcttgccgctagagagtttgtgccttttgtcctccccagcatgccgattctaccggtcttgtttttcctctgctggaggtgcgcggccttgtgggagcagcgctcttccaccggtgcttggcttcaaggatgttcatcagcctcgcggtggtggggagcgagctgag

SEQ ID NO: 121958 - DNA, 409 bp, Zea Mays
gtcctttccgtatgcgggccactgtagagacaacagtgccaaggccccccatgaccggggttgactagtcccacaaggcagtgcatatacacttaggaccgttcgcggggcatacagtcgtgtcgacggcaacctcttgacatgttttttgtatgccgcacaacgtccgaacgtagtttggggatgtcgcgtcttttcgtagctaacatgggtcaatagtactagattgggacgtccacctagccaagttgctcgatcaggagttggtcggctgctccgcctcatagggttgctcggcagggacctggttggtcgcttcgtctcgtagggttgctcgacaaaaacttggttgacgggtggcccgtttttaaagaggtcatgggctattttcgagtgctcggtttccgag

SEQ ID NO: 121959 - DNA, 847 bp, Zea Mays
atctctgcatcgctcagatttataggcatctcaaagtgaacttgcctctcatcattagggagatcaccaagtgaagcaaccagagcctcaacttcttcgggagagggtcgccctcgaagacccaaaccactatcactagtaggaggattggacacaaaattgaaaaaagtcttggaaagaggcaaattctaggcagaatatgcaataggagcaccaatattcaatactttgcctctaagaatcatctccagtcggcttaccaaatccatagcaggaatccttcagtggctgaatattcttaaaaacaaagtctccaactacagcttcagcagtcagacctctctccttcaacaagccaattttagcaagcagaaccctggcctctgttatctccatgtctgtgggggattcagtccaacttggagcgtgaacatccggctgtctccctgaccgaggggggagggacttgccatgattttctacaataaaccactccaagcgccatcctttgatgctgtccttgagtgggatgtcgaggtattctgtcttcctcccacggtgcatttccaaactcgcaccacccacgagctggtgctgccccccggccattctaggccgacaatgatataagtatttccacaagccaaaatgaggcagaattccaaggtaggcttcgcacaagtgaacaaaaacggaaacttgcagaatagagttgggattaagatgagttagattcagatggtagaaatcaaggagaccacgaaagaaaggagaaatatgaagagcaagcccgcggatgagaaaaggaatgtaaataatggactcgtgggtatcttctatggggaca

SEQ ID NO: 121960 - DNA, 1083 bp, Zea Mays
tctttatggatttctaaactttctcaaaaaaagaaaaagaaaaactttcaatggtattgggccaaatcttgcccaaccggcccagctttaagcagacgacaggagcgcgcccgcagcagcgcagccggttttgcacaaaagcccctgccagagtaaaaattaggaacaaaagccccaaccagattctatcggccactaacactttacatcgggccccttctatgtttctagtctttacaaattgaatccccaacatcgccgcggcgcggacgcgttctccccgcgacacgacgacggaggagagtccgggcagtcatgggatagtgaccagagcaaaccctaacctatcccgagcaattacggccatggatttggctcaacagctcatagagtgacctgactgtgcccatgacgggagcccagtaccgcggcgctcacccaactggtttaagcacgagatgtttcaaattgagggcacagggagcacgagtgagacacgggcagcacgatgcgcacaacaattgacactggataaacaaggttctggtgggtcgacatcatggcagtccctgcggtgtcgagcccgcgtttaggtcaagctaaaacaataaggatcaaacggacccctgggtgagcttcacccgcctataaagatgctagaacataagcttgtgggggttaagacataccacaatcgtctggccacgtgaacacccagtttggaggaaattagtaccagcgtcagaacaaccaggcagctcatcttcctaccccagcaaccaaccagaatggccaagcagccccagcataagtaggaggtcatgcatgcttctactgtggagaacaaaatcactgggcgaagaactgtccaaagaaagcagtccagcaaccgccagcagtcaatgccccagcaagacaaggagcaccccagcaagcaccaggagtccgtggtcaggcctacaaccgtggaaaggtgaatcacctagaggccgaagcaatccaggatgctcaggacgtggcagtaggtatgtttctagtggaatcctacccagcaaaagtattatttgatactggtgtcacgca

SEQ ID NO: 121961 - DNA, 354 bp, Zea Mays
cccagggtgaatggaatatcgactaagatgagcttcatccaagatcttttggcggacctcagcatctttgggcacaactatgcgatcattaaaccatattattccttggtcatcctttctaaagcaatttgctttaccggtttccattttctcacgaatgcacttcatacccttgtcggttctttgggcatcaataattctctgtagaagaactgactcaagcttcaattgtgtcaaagttccatgttgtatcatacccaggttacacttttctatttcttgacatagggtggtgtcaggtgtccttattgtaagacaatgactggaagctttgcgactcaatgcatctgccac

SEQ ID NO: 121962 - DNA, 1053 bp, Zea Mays
gcacaataaaatcccacatcctcaccggcttcatagtagattggacagagccttcctcttccaaccacctagatgcagaaacattctagacaattcactgtgatggcgcctagtgccatgcaggggtcgatgccacaacaataataacagctctgtcaggcgccaagtacaagtatgccacacgcctcggttttgctctcgaaacagacaagtgtaccaataatatagcagagtacggagcagtcatcttaggactccacaagctaagagcactcgatgtcagaacatgcatagtgaaaactgactccaaactcgtcactggaaaaatcgagaaagacttcgtagctcgagaaccagtcctcttgcagtaccgatgaacagtgtgcagtctagaaaaacagttctagggcttcacgcttcagcacacagacaaacaaaaatgaggacgctgacgcgctagcgaaggcttctgccagaggatatcccatgccctcatatgtattcttccacatgatcgaaacctcttcgttaagagacaccgaaggcctaagaatcacaaaagacccaaccgaccaaagaatcgtaaatctcattatgaccgaagattggagggccccataaccctatacctgcaagggaaccatcacccctcagatcaagttgaggccaaaagaaagtcgtaggttcacaataatagaaggctagctttacaaaaaaggactcaaccaaccttagctcaaatacatcacagaaatggaaggcatcgagcgcctccgcgagatctacaaaggagtctgcggttgtcactcagaccccaaggccctcgccgccaaattcatgcgccaaggtttctactagccaacaatgtattgtgttcatgtgaggcatgctagaagttttcaccacgaatcgtggaactgccgcaccttacaagactaattactcacacatggcctctataaagttggggccttgatatagtcgaaccgcttaccaccacacaaggcaaccttaaaaacacaatgactccataggagctcaagcatggctcac

SEQ ID NO: 121963 - DNA, 502 bp, Zea Mays
gcggttgaaaacactatggatgctgcttcaggcagctccctgtctttccatacgctcttttcgtccctcggctcgcgctatacggttgcttcctgtcgacacaaggcttcttggattccatcagcatcccttcaattatgacttcaacctacttctcaccttgaagtacgattgctctctgtgtgcaggggatcaagactggggagttctctcgtgatgcttcctagaacacctcgacaccctctctggatcgcatgataaaatagttaccatgcatgccccaatcatgtactacaattccactgatatcatataaaaagatgtgcaggtaatacttccattttcaatttttgttctagaaccaagtaatgaatctatgcagttgttcaatcttttgtatatacatatacaatctaaaatacatatgaatagtttgtcaaaaaaaatactatcggtgtcacttaaatcataaatgttttctaagcgcgtgaggcgcgcatca

SEQ ID NO: 121964 - DNA, 435 bp, Zea Mays
ccacctcgcggtcttacgccacgtgcccaggcatcttaccacgtcgcggttagtcgtgttaggcatatcaggtgatcgccggagggaccgccacggtgaaagccatttagcgcttgcgccagtggcttcctctccggccgccgcacgtctcaatccaaattcatcggccaccgctctttcctgctataaattgagcctgccgtgagcttcgtagggtagtcaagcaccaagccaccaaactgtgccctcaatcgatcaccagagctcgctaatttctcattccccccaaatctgttctccgccaccgtaaaagagcctcaccgtggttagcgtgttccaggtctgttcgtactccatactttcttgttctaacatccttaagtcctcctgaagctgctcgaccaattcaattgggttaggttgcctggatcgccg

SEQ ID NO: 121965 - DNA, 526 bp, Zea Mays
ttcatcgttgcattttggggatggttaggcaggataagcggccgaggcgttgcggctattgttgaagttggagtggttcagtgttcttgtttgtgacatatgttgtgtagatgttagttggtgtaggggatatatagagggaacggttggatacaccctatatattaaaggagaaccttttgagggaggtagtaaaagagattagaaattacatataagggaagaagtataggggatatttttggacagagcttaagatgggcatgtattacatgacgagtaatcctgcgcgatgtgcgagctagtagtgttttggccagaccctatgattggtctccttgatttactttggtgatgtttgtggagacctaaagatgacttagaaatagggatgacaacgggtcgtgtattgtgcgaatataagtgaatacccgaccggcaacacattagctatcatgtaaaattttgtatcgatacccgtactcgtgggtaaaagattatatccatacccgcatctatcaggtaa

SEQ ID NO: 121966 - DNA, 305 bp, Zea Mays
ctccacaaaaatagccaacaccaagctcgaaaggaactaatccatacttagcttcaataccacatttgcagagtactggatcaaacttcaactcttccgcccactcattttttcttttcctttgcctctgcctctagccattaggacatacgatcatacaatcactctctgaaatgatacttacgccactcatatggctgcaggagaataatttagtaaatttgtgcaaaaaaataacaaaagtttagacatttgttatgggctcacataatcaatgttcggacacacgaagtgcttcgcagtgt

SEQ ID NO: 121967 - DNA, 306 bp, Zea Mays
ccctaagactcgcatagtagataagttcacccccctactctggttagctgcatacccatcaagcaacatcaacatcttgattcactaaagtacttccttcctctgggccctgcttaggacgaaatcggccttaggccttctccacgtctttccgccacttggcggcttcatctctaggtttggtctatcacataacgctgccagatccactcttgcctttacgttatcctttgacttatcaggaatgtccataattgttgcccatagtgcctcggcaacattcttttcagtgtgcatcacgtcaat

SEQ ID NO: 121968 - DNA, 657 bp, Zea Mays
cgttgagttgcagtccaccgcgtaccgcactgctctggagccagggcacgactcgacataaacctaggtataaacgcttatcccatgctcgcgttgtccttctgctctcgttgcgcgcttcggcagggtggttgggggattgttatcgggttgggtttgctcaccggcgtggtctccgccgtgaacggaggtgagcgccgccgtgcccaatgtcagattaggggaaggaatgtgcaccgttagatctcaatggacagcccagattagatgtctgcgtaccctttcacgctgttgtatgcaggtcgtggatctgtgatcgtgcggttaggctgctggggctagtcataatagatctggaccgtcggatccgtatccgacgactgtgattatgttctggttcgcgcggagataagatttaatcgtggccgttcgctcaatccgatggcccaaatcgtgcgataccccttcggctagcgcaattgcaaaagagaccctaacctctctggaaatcaacccgccgtcccccgccggatacgcctgagtctgggaaatatttcgagttagcccctgcgttactttgtttttgatgcccagcccagagaacaatggaaatagaaaattaattatagaaaatgatttttaatacaaaaataattc

SEQ ID NO: 121969 - DNA, 392 bp, Zea Mays
aattaccgtacacatttaacaaacacatctaccacaataatcgaacccggtatatgtgtgtatatcgatgcgcacttcacacaataatttgcattttaacttagacaccacatgatcactactacttttcatccgcgaccataaccatgtgcatttaggccataacaagcaaatcaccgtgattacgagcttaaacaaagccatctaacaagtcggctaaccagaggaacgtcatatcccgctatacaacatacacgtcggcttgcctattattatcgtaatctgatacacaacatacactacaacatttttataaacatacatattcacacgtatattcacacatcaaccaattcatatgaaccgtaaaccaccaatctccaactcgcaac

SEQ ID NO: 121970 - DNA, 673 bp, Zea Mays
gatccagaactcgcacttgctaagcttggcatacagctaacaatctcgtagcctctgaagtaccttcctcaaatgctcctcatgctcttgctcattctaggaatatataagaatgtcgtcaatgaacaccaccacgaacttgtcgaggtaatctatgaacacactattcatctagtacatgaagtaggctggtgcattcgtcaaaccgaatgacatgaccgtgaactcatacagtccatacttggtgatgaatgccgtcttcggtatattaaagggtcggattctgaggtgatggtaacctgacctcagatctatcttcgagaacacactgggtcctctccactgatcgaataaatcttcaattttgggcaggggtacttgttcttgatggtaacctcattcaaagatctgtaatcgatgcacatcctcttcatgccatccttcttttccacaaatagcactggggctgcccaaggcgaggtactcggtctgatgtagcctttctccgacaactcatcaatctgcttcttgagttccaccaactctggtccggacactcgataggctctcttcgaaataggggcggtgcctggtataagctctatggcaaattcaaccttcctttcaggtggcatacctggtaactcctcgggaaacacatctgggaattctg

SEQ ID NO: 121971 - DNA, 756 bp, Zea Mays
ttttcaccgttagccggagctttgactgcaacatttttgtcattgcactcgaaggtgccagatcattattacattgatttgcatgatatagaaaaagtctgtgaaagtaaacatagacatatagtaatgacttcttgttagcttcgggcttacttacctagccccttggggtctttaatatatatgcttcatctctaggaccatattgttgacagtacgggtttcgaatccctcccttatgaccctttgttgcaaatctttccttgggaacttgggttgaccagtaggcaattggtcataaggaggtggtcataggacgaaggaagcagatggtgaccacacactcattactaggttacttgagacatttgaggtcgaaggtaaacttaaccttggctcatgtaactgaggttggacatattgtgggatatagggtgaacagtatgaagacgtactgaacacttcttttgactgggaggtttgaatggctaacgaagcaagttccttctttgttgatagtatgatggcatgttcttggtgtggcctttgtccttgccataaaacaagcagaatggtttccttggaggtgcattgaatctgccatcaaaacttcggcctccccttccgcctctcagagcaggtggatgaaatgtgttgtgcaaaggttgctgctgagaacttatttgctactagcccaactgaccctgagaccaggccatcttttcctcacactgcaccgtgttgtggatagttcgg

SEQ ID NO: 121972 - DNA, 509 bp, Zea Mays
gggaggtggaacaatggaagctagagtggtggaggtggtgggtatggtgaaagtggtggatgtctctggagcgacaggagctggtgcagtgggaggtggagtagtagttgtggtggaaggtgtagagggagtggaggagcgatgccgagacgcgaggcgacgaaccctgtaggcaatctggtctgaggagatctgcaactagccacctcgctctgcctgctctgtcgctgccgctgctgcaagtgctgctcgggcggctctgtccatatgccgcttcttccagccttcctactgctctagatataatgtcttgcccttgacctgcctgaaggggcgaggagggtcctcgtcgtctcctccccctggcgctgacacattcttcgtgcgcaccatcctgacctaagtgctgcataagtgagtgaaaggctaagcacgagtagataggagctgataagatcataaccgaagcgataagtacctggaaacctcacgagagagagagagaatcc

SEQ ID NO: 121973 - DNA, 492 bp, Zea Mays
gattttctgaggctcaagcctcccacattcgctggatccaacaatcccctcgatgctgatgactggctacgcacgataaaaaggaagttagaagccatcggatgcccagagaatcagcgtgttcaattggctgctcatcaactttccgggatggccctagcatggtgggatacctttagcgctgccgtcagagatgctacttggacagagtttgaaactgctttccgagagcaccatgttccctaagggatcgttcagcttaaggaagatgaatttcgggaactaactcaaggtggaagatctgtcagtgagtacgtgcacaaattcacagaattggctcgctatgcgcctgatgacgtcaacacagaagccaagaagatggcctggtttttgaaagggctcagaccagaactcaagaccatcctagccagccaagatttcttcagcttctcacacctctcaaacaaagccatacaagtggaaagggcaagg

SEQ ID NO: 121974 - DNA, 549 bp, Zea Mays
tggtgatcgccagagagccgccatggtagatgccaccaatcacttgcactagtgatctcctctttctccagctgccaccgtgcgagaccaaattcactagccaccgcttagcacccttataaattgacggcacggtctgctgcactaagttatcaccaagccaaagcacccatccctgccctcgattagccaccataaccggagaatttccttcttcccccaaattggtcgactgcgccgccatgaatcacctcatcgctgctagctgcttctaggtccgccctcgctcattttgtccgtgttttagcacccacacgtgcttgtgattgtcgtctgctcgacccattgagcttgacctcacttaatcaatcgaaacatcttgatcggtgtacggtgtttgccatcaccgtggtcaggcaaatcttgggccagattaatccaattagaacctgttctagggtcgcctcaagtcagtaatgcttgcccagtagctaatttgggcagccgccgttgttcttggccggtccgagccactgggtggtcggcggt

SEQ ID NO: 121975 - DNA, 281 bp, Zea Mays
gatgaagtacattttcttgggtatatcatctccaaaggaggaattgctgttgatccggctaaagtaacaacaataatggattagaagacaccaagtacagtttaagagatccagagtttcttgggactcgcaggttattaccggcgattcattgaagggttctccaagattgctaagcctatgacctcattgttggagaagggcaaggagtttaagtggactgaggaatgccaagagagtttcgatcagttgagatatatgttgatggctgctccagtact

SEQ ID NO: 121976 - DNA, 1146 bp, Zea Mays
gcgggaaagagcatctgcggctccattttcaagcccttttttgtagacaactttgtactggagccccaaaagtctagtgaagaccttctgctgccaaggggtgtgcaatttctgctcggacagatgggataggctatgatggtctgtataaatgaggaactcagcatgctggaggtatgaccgccactggtccacaaccatcaggatagcgaggtattccttttcatatgttgaaagacctttgttcttgatgcccaatgctttaatgataaagccgagtgggtgaccttgttggctgagtaccgcaccgattcctgagctggatgcatctgtctcgatggcaaagggcaatgaaaagttaggtagttgcaagacgggcgatgaggccaatgccttcttcagggtctgaaaggaattctcatggtctactgtccaaacaaaaagtgtgtgtttctttaaaagattagtgagtggtttggctatcactgcaaaatgtttcacgaacttacggtaataacctgccagccctagaaatccccttagctctttgcaattagttggtgtcggccaggaagacacttctgtaactttgttgggatcggttgcaactccttgtgctgaaatgacatgccctaggtaggcgatcttctgttgtgcaaaagaacatttgctcagcttaatttgccacttgtctgcgcggaggagatcgaaaaccaatgtcagatggtggatatgttcctcccatgatgcactgtaaaccaatatgtcatcaaaaaacaccagggcacatcggcgaaggagaggagcaagcgtgcgattcatcgctccctggaaggtggctggcgctccggacaacccaaaagccataacattgaactcgaagggccgtggtgggtttgaaaggctgttttgtggcgatctttcggtgccatgcggatctgatgaaatccagcgcgaaggtccaatgaggaaaaccatgctgctccgtgaagctcatccaggaattcatcgataattggtacatggaacttggtcgtcgcagtgagtgcattaagatgccggtaatcgacacaaaatcgataggtattgtccttcttcttaacaagaataactgatgatgagaaagcacttttgctacgctggata

SEQ ID NO: 121977 - DNA, 363 bp, Zea Mays
gcaaaagtaattgagtgccatccacaattcggtgagtgagtgctacaagccaaattcaagagataaaaggaaagaagagggagaacatctagttatgctagccacaaaatctgaactgagagaagtgaggaacaaccccttatcaagtgctatttgtacctgtgaacaaagatgttttgatttatcctaacgacataacatctcttcctagtgttgtggctgatcttttgcaggactttgaagacgtgtttccacaagaaacatcggcgggactacctccaattcgtgggattgagcatcaaattgatctcattccaggggctgcacttcctaaccgtccaccatatcgaaccaatcctgaag

SEQ ID NO: 121978 - DNA, 653 bp, Zea Mays
cacaaggtatattcatgaagttcaattgcttgtcaacaatctatgtcctcgttgtggcgagtccaagctagatggttcatgcagtaattgcaacatcacacatcaaccccacaatgaaggtgccataagaatcattttagagaggcactttaataagccatgattccactatagttactcttcgtgaatctcctacaaagaataagtacaagacccctcacaatgatgagctaagccgaaaacaatttcccgcgaactttgagtcatttaggtgacgacgatcatcaagagtaataggagtgtcactagcccaattcacccaactagtgctacaagatgttgtaatgcactaggatcacaccaatatttactcagatgatggactaaaaattcgcaaatgagtggagtgtgtttctctagccttaagaggtgtaagcaagttttagtgatcgagagttattgccaaaaggtctatttataacactgcaaaggaatctaactgttaactcttgaaacatagaaaataggggcatgcgacatgtctggtgcattgtcggtccctacaccgaacacgtcaatgcattcccaacgactataaatccgttgtttactctgtcatgtatccaatgtattcaccaaacacaccatcgaac

SEQ ID NO: 121979 - DNA, 1286 bp, Zea Mays
gcgatggtgaagcgtagggtgagtgaggttgagggtggtcgtcttcgtgtggacagggctggcaaatgagaattgttggcctcgccggctggggtaagcgtaggtgagggggagttgcgaaatttgtttgagggtgaagagctgaggataatgttgtttaactatagggagatgggtatcatcccgaatgttgaaccaatgtaatgtgtggtgccctcgctgcacgtatgtaactgtaatttgtatgatgagtctgtgtgccttcgctgatccagacgtgcccgtgggggacttgtgcatttgatctagcgcgtttattatgccggtccggctgcgcctgtattcggtctttgcgcgaatagtttttcgacgaagattttcgcacggatgtgcctgcgattttgtgcgcttgttgtgctagtccggctgcacccttgggcgacttttgcacggatagtcttttgaggaagacttcgattttaagcacttgtcgtgctagtccggctgcacccttaggcgacttttgcacggatagtcttttgaggaagacttcgattttgcgcacttgttggtgctagtccggctgcacccttaggcgacttttgcgcggagtgtcgcacatgagggtagccggcgctgcccctcgcggtgactttgtattggtcgaatgccgaagatcgtcgatgcggtcttttttcgacgtagatttttgtggggtatttttcgcgtgtatattacatggctctgcctcgttaaaaacctcaccccccgggaggaaaagagtgcggtccggaataaaattgttttgcgagttacaagggcgagctggccctggggagtcaaacaataaatttgcggagattgtcaatgttccaagaatgctctaagtcttcgtcggatggcgttgtgagcctgtacgcgctgggggacgccttcgtcttgatgatgaaagggccctcccacttgggctctagcttgccccgggactctgtccgtgctgtccagacgagtacgagatctccttcgctgaattccctcgggatgactgtgtggtcgcgccatgcttttgtttgagcttggtatttgtttagagcatgtagggcgaagacgcggtctccgtcgatgaggtccttcgaagtaggctcgtccacatcggggacggctgacggaactatccgtggtgacccatgttttatttcttgcggggtcatggcctccgatccatatagaaggcggaaaggagtgaacccggtcgccctgcactcggttgtgtttagtgcccagac

SEQ ID NO: 121980 - DNA, 378 bp, Zea Mays
gtaaaatcggtgatcatatggttttcgttatgacgaccccgaggagcccgacatattgattcataggctgtcttggattaattggctatctcttctcgaatcgtatccatggtggctggtggtataggaccgaaccccgatatgtgaagcttagatgggtggccattgttatgttaattgtttgtatgagaaaaatctaatatgtgtggtagtgtgaacccttctacttccctatgtgttgggcggtactcgtcctaggttcaggaataatttagctttgatgggtcgaaggtggaggagggtagtgctgctatggcatagagtgtgcctgtgcgttgtgcatattgtaccaatctgtgtgctgcacactgaacggtc

SEQ ID NO: 121981 - DNA, 432 bp, Zea Mays
tttgacgctattggatttgtgtaccctgactatcggtacccgccccaggggctgaaaagaaagggcgcaacttctgagaaggctgctgcttcagctgctccaagcgagcctgcgccgaagaggaaaaaactgaaggtccttactcaccgtccgcgctacattgaaccggccacagtgcctgaatttggtggtgagacttcttcaactattgaagtcaaaggacatgctcttatgcagaagattgaagagccggccgcaatgccgaagactgacaaaattgaagaaccgagaaccgaagggacgaaaacattagaagttctaagcccttcggcaggaatagaggtgccgaagacacaaaaaggtctaacagcaacccccaagagaaaaaggatggctagtatattagatgtgctagagacgataaaagcttca

SEQ ID NO: 121982 - DNA, 1171 bp, Zea Mays
tgaaaactgaactatttggatcgcgcgtttattccatggtttcccagggtctcttttagcaaattcacacgacgaaggggtatttgtgatccttggtcgtccgatcacgatcccatggaccatattacaacccgagatataccgaaccggtacacaataatggccaatggatcgagatccgatgacccagaccataagcagcgaaggggtatccgctacttccccccaactgttcgatcagaatcggacgctcgggattttataatgttgggatataatccccaccgctccctacgatccaacggtccgagcgttcttctacccttcttcctatctctctctctctggtgccagcccgggcagcgcaacgaggaggcacggcgacaccattggtgaagctccgaccctactaattactaggtccaacctcggaatcaaacggtgatacactatgcggaggctactgtgaatcgatttaggtagttcttacccgggttggtgacgaaggtggcgttgcccgcacgccctgagttttccgcggcggagtccacatcagcgagcaattatggcttccgtaatcgatccaatcagtcgggaagctcatccccatgtgcggcgcccctagatgctcccaaaccgaggcctagatcgtgaggcagctcagtgttgataacaattgagacgagctctcccctttctcttgaactggccggtggtggcatagcacccagtggcggcgacaacctggtggtcaggggaaaatcgggagcgtgcatcagcgtgcctccccaactccccaccaatgtctatctaggccctaagcagcagtatagacgcaccgagctcacggtggccaccgcggcatcgacccacctcgacatcttcatggtgggggcatgccatgcttatatacctaacgttgagggggagaaatccaatcccaggcccgaaacgaccgacgagagaaatctggccagctcccagaatctgcatcaatcgcgccagcccggggttctctcggtctattacagtggaggggaaagtgctaacgtgggtggcccaccagtcagtgccctaggcgcgaggatgggctggcttgcaacgtggggcctaagcgtcagtgtaacaagcgagaaggtgttatgggccgcgcgaatagccatggaaggag

SEQ ID NO: 121983 - DNA, 441 bp, Zea Mays
gattacagcagccacgggttggatgacactactgggtggtccctgccgccgcgcgggtccacgtgcagccgctgtagggagaggagcggatgggcgcgtagccgtcgtccacacgctgtcattcgtctccatcgttcctatgcgtcagcagttccaggcatggccgaaacagcgccacgctctgtgcggtacgacggtgagtactttcatcactttaatatttcctctccctggctcctggccatcttatttagccctgcactgagagtttgtcgacttcgtcttcctcgctgctcatcacttcggttttgccacccaccgtcgccatgggagcatttggtgtgctgctgttgcccgccacgacctacgcattgtgagcggcttcgtaaacccaggtctgcagtaccatcacttgcctttgcagactccccgttgttctcg

SEQ ID NO: 121984 - DNA, 756 bp, Zea Mays
gactcgctgtgcagtgcttccttcctcaacgttccttctcccttcaccatcccactccacctaacaattgggagaagttttagcccagctaagcggctgtggatgggaggatcctaagagcaccctggaaatccaaaaccatctcgtctccgcagcgggagcccaggcttcgtatgacagcggccattgccgatggccactacgcgcgcctacaagcttcgtatcccgtgaattgctggtttggggattttgaatttgaacttgaagtcggattgctcttgactgctttgtttgaactggtgcagttaagttgggctgggttggggttgattcacccgcgatgatcgaattcgattccagggctttgcgattgagtgtagtgcagcgcaggagttgcgttcccaccaaggaacgtattcaggaccatccgaattgtcttgctacttgggttggtgggcatagaatgaaattttagtgctgcaaagtttcagacctgaaatattacagcttcctgcctcaaatcaacctaatctggtggtctggattaacttgagacaggagactactgttgttttccaggaatcgtgacttctgttctctgtagcttatcatttgcttggtaggttgtatcaattgctgttaatagggccacactgtagttagggagatctatacaagttgctcaatcctcaattacatacgtgtcgattcttttgtctgagaacttctacttcacgctaggtagtttgtttcata

SEQ ID NO: 121985 - DNA, 425 bp, Zea Mays
gggctttctaatcctatgtgtcgatgacgcgattgtgggatgcgggttggtttgctggatttggagggctgctatttcgcaacaacgtgcctattttgttgggagcgcctcaatgatgtggttagtggcctggtgggacgatgctgtagcggaagctgaatgtccgtgcggcagatgtgtttatggcgtgttgtcgtgttgatgctaacttcatgaattgcagctttgaagagaccaataggattataggaaacgaacgggttagaaacgttggaggttggaccattcgtacatgcgttcagctaggttacgtcaagagcgaaaacgtgtgcacagttcaacctgagattccatgtgcatgtgcatgctgaaatgaaaggtgggggtgtaccatgttacaaataggaatttctcctgtggtcctt

SEQ ID NO: 121986 - DNA, 1027 bp, Zea Mays
attagtggatgaggttcagatttgagcgcggggatgttaccttgcatgctactcagatcagggagttgtttggatttcctgagtcgtcgacgagactccacaccttgtgctatggcacgtcagatcctcctcgtcgccctcacgaaagagttgcccctgccactgctcatgtcattgcctagtttcgacctccgttcacagatgggtcgcgacgttctctagcagacttcactctagcagccaagttcctatatgagctcatgaggcgcaccttgctacccaggatggaatacagagaggccaccactcatatccagctctggctactcggtgccttgatctcacactctgagtttgacgtggtcgatttcctgatttgttagattgaggacacagttttggatggtcttcgggctcggcgtcagctgccttacgctcactatctgtgtcacatatttgctcagctgatccggcctcctcagttctaggccacccttgaggcctccagactgcagtttggtttctattgcctagctcttgaggacacatttccagctctagctccatcatcagatattagggttgaggatgaggccatcagacaatttgaggatcagggtgcagttgcagatacttcttccgatgatgatgaagatctggggattccgccaccacctcctgtgccatctcattcatgatcacgcggctggtagctccagtgctgctcctccgtctgctcctccagcgattgaccccgctctggctgccattctctagtcactcactcagcagtaggctcatttgaccgcagagcagactaggcaggcagctattcagcaacaaatgtctgagcggatgctatcgatgtttcagactattcgcagacagggcagagcacatggcgttcatgactcacattctccagcacaccggtgttctgatccctccagtgcagtctgctcctcctctagctcttcaggttggtgttgtgtcagctattcagttaggaccccagctccactctttt

SEQ ID NO: 121987 - DNA, 474 bp, Zea Mays
taaataggttagttaatctggtgttacgggttagacaccgctcccacaaacatatcttaatctaaattaatgtcttagaccaactcgtccgtaaccaacgacctaacctacaccccaggttgcctagttcttctatcctaaaagcaaagtaaaactatgtttaacctacctaccccgtgcaaccacatttgttatcccaacaacttaacctagatagaggattgcataaactatctggtccaacctaacacgaagcaaccaaaccagatctttcaataatacactcagcctatgctacttatctactatctacctacaatatatcttaactagatctccctaactacaagattgaagactgaagataaccaacctcatcaaggaaggataagcaccaactcaagtcttcaaagatcaagctggatcgccagatgaatcaagatccactgtccatgatggagtctttccatacca

SEQ ID NO: 121988 - DNA, 491 bp, Zea Mays
gtaaagtgcaagcagatagaatatgctcaaatataagggtggaaataagggggatagggttccccagtgatctaatagtaatagacacccttggggtggatgtcatcctagggatgaattggttaatgaaatatgaagcgaatgttagctgtgacaagaggaccgtaacattgaagtccccatccggagaggaggtagtggctgagctaaggatgcctaaatcagcggagggagattgtcaccagatttcagttgatagtaaggaggccaacccgctcgaggctatcaaggttgtgtcggactttccggacgtgtttcctgaggagctaacgggcatgccacccaagagaaaagtcgaatttgtcatagagcttatccctggtaccgcccccatttccaaaagagcctatcgagtgtctggaccagaattggtggaactcaagaagcagattgatgagctattagaaaagggttacatcagaccaagtacc

SEQ ID NO: 121989 - DNA, 376 bp, Zea Mays
ttagggataacctttactgtttgttcctgttttggtgtttccaatggcaggatccgatgacgagattgaggtagtcattcccacacaattttctgattgtgtcagccgtgaagacttcgatgttatttgcaagcgtatggaggaaaatatggaggaaacggtccacaagtctatccatgacaattattgcaatggatcttggcaaagtgctaaatagggtggagagacggataaccgagcttgtcgatcgggttgccacattggagacacgtccactacatcagcagcctcctccaccaccacaaccccagcagcatccaccacggcatcagcaacctccaccacaggctcaagatgatgccattttcgatgcacg

SEQ ID NO: 121990 - DNA, 278 bp, Zea Mays
tcaaactctggctttttggccaccccatcttcggcttccactggctcaactataggcaccttcggcactatagtcgattcttcagcgctccgagcggtgggagcagcttgttccgcttcgacaacggaagatgtctcttcaccaaattttggcactatggtcgtttcaatatatcttggccggtgggtcaaaaccttgattttcttgcccttcggcacagcagagatggccgaagtggcagttttcctcttttttccctgctttcgcgagggatagca

SEQ ID NO: 121991 - DNA, 272 bp, Zea Mays
atcacgacaaggccgtgcgactacgatccttctcagtaggagacctcgtcctccaccgaattctaacgggggagggacggcacaagttatctcccttatgggagggaccattcatagtagcagaagtcactcggccgggatcatatcgtctcactcagatggacgacacagaaattgggaactcctagaatatagaacacctcaggaagttttatccctagctgtatttcaaaagctatcgggacgacgatgtactctgtaaaatgggaaat

SEQ ID NO: 121992 - DNA, 427 bp, Zea Mays
cgtggcgggcgcaaccctgtgtgtgacaacgcacaacttctcacttacgtgaaagacacgtatcgtctccatggaggtccccgtgtgcaccttatctcagtaccgttatccctttcgtttatccgaatccgccaccgattcaactcttcactacgtgtcgcgccttccgtcactccgatgtcgcgtgttcgacgtgctagcgagtgtaaaattgggaatcgactgattttataaacctggattgtgcgtgctgtttgaggaaaacacacggaaagtcaataaccgagattggtttcatcctgcacgctatttatggtagagaaatccaagtatttggttgcgggcgaatttatttgatctcagataaatcaatggaacaatatcatcttgtccctgataaattaagcggatctcgacgactaaagtt

SEQ ID NO: 121993 - DNA, 663 bp, Zea Mays
ggattatataagtcatttgttgtaccatgtagtaatttctaaaattaattaggtacctaacatttcagagcagaggggagtactcacttcctatgtgtcgataaagtttgagtacccgtttttacgtttttctaagtccggacgctaagtgacacaatgtgtcaagttcgtgaactcctagtatactttactcttttaattacatggaaaaatgataatgactaaacaactcggaagagactagcgttcgtggggatacttgagcaccctcaacatggaaaagtataatttgatagaacctactaaccatacggatcggagggcaagctaaagatgatgcaaggatattctctttagtctgtcttttgctttttatccattattttttgttttttctttttgccagaaagaatgtctggttgtgatggaccacgcagatcatttcttctttttggaaggaaaaggctgtaaagcgaagctaccgatccatagaaagaatcctacaatttgtcctactacactacacgtcgcaagccaggggatccatacccttccttgtatcacaagttaacgtccttaccggtatagggatctctgaaaagagaaaagctgctctagccaataggtggtccagaagattcctttaattaatttcatttgtgc

SEQ ID NO: 121994 - DNA, 1077 bp, Zea Mays
ttatgaaaaaattcttactgaaaagccaacggatacctgcacgaaaagaaaccattaaagaatagtgacgaagcaggcagctccatctaatcagtttttggcagaaaacactgatgaggccattccgacctcatgccctcctggcctcatttcaattgctaatgcccccagactcaccagcctattagtccttacatccctccttctattcccttcactaaggacagggacacggaggatcgtcaccatgtcatctagtgacgaagcagcctgtatcatctactggggaaaatagtcttgtaattttaatgtttgtactaaacatctgcgcactttgtaagcaagtatatttagacattgcttatctctctcgttttcccccaaaaacataacaatggtggtaataaagtattgactcaagtttaagtgaaactggagaaagaataactgaaagcggactcaagttttttctctgaccaaaatctcttgcatgctttgactacaattccgcagctgcccgtctatctatatctacagcttgcatgctttgctgtgcatggtgttttttggctttttagacatattacctgactattcgttttattcaaaaaaatgcggaaaataaatagttaaacaaaaaaacatcgtctgttttaggagaccgagacaacaatacccctagacaagcatggagaggagtgaagatcctgacgtccatggctcgtcctcatctatgctgaatccgacgcaaaagccccagggcaaacgacaaaacagaatcagcataagaacattggattaggcacacggcatcggcaatggcagacacaactttctaaaatcaacatgttgatgcaagggagaatctatggatgaaatgtactggcacatgtacaatgaaatgtactggcacatgtacagagcagtaactatattgttcaggaccttcatccccagtgaccctggctatctcatagaagccatcgctagctcacatatggtttccatgtaacaaacgcgtaaaaatgcgacccccaaaaaagaacagcaaagccaacaaataatcaaagaaccgac

SEQ ID NO: 121995 - DNA, 279 bp, Zea Mays
gttggaagtcagtgaagatgtttgtttgcttagtattgtggaagaactctatacccttttcttatgttgcaagatttgcaagatcagttctgatgtgtgattgccttccgcagatgtcagacaacaggcgcagaggagggaggcgtgtttagaaggagcagcaggcaccgcaagatgaggcacctcagcagcagttgccaccaccaccccagatgacaatagagaatatgtttctgatgcagactcaggcagtccaggcgattggttagactctggcca

SEQ ID NO: 121996 - DNA, 704 bp, Zea Mays
atcgacatctctacaaatatggcataactcagataagggtaatcttcatgtaaagatagagaaaactatccttacatttagaaatatactcagttggacctatccatatccttctgaccttatctggcgatcggctagataaccttcctataaccactgcctctccttggactataaagggggcaaaagggcagatcatctgatcatattgcataggcaatagacactgacacatacaaaacgtagggtattatttcaaattgagagttcgaacatgtgtaaatccttgaggcccctatgcatttaccttcagttctcaattttaagatccacccccataaattcactgtcaaatattactcaagaattgacgtgccaagtaggggttattgcgcggactattttagattttatggcaaccatgggtattgcacaaggagatgaggtcttctttggggccttcagattcatcaccgacgtgctcgagaatcttgggcttgccctagataccttgataattctgatatctctcacccatgctctagtagattcaacctgtacttcgactgaaactccacctcgataccaatccagactcacatctcgctctgacttagatactgacctcgactcaaactcaaactcctacttctcaaaagattggtttgtgtttatcgcaaactttgcgcaccagaccagtcaat

SEQ ID NO: 121997 - DNA, 426 bp, Zea Mays
ggcgacaacaggtgagaagcaacggcgtatggcagaggcagcagatggtgggggcagtgatggatcggggaatgcctcctcctcggtctccactcttgtggtacattggcggcaagggcaggggtggaacatggaaccgtcgaatgacaccgtcggggtaggttttataagtgccccatgcctaggctcgcccctgcttgaggtggtgtggctaaactgaaacgtataattgaagtcttaaggcaaagtgattagtggagaaacgtgcgagcataacgttgtggattcgagccctatgtgactcgtgacttgcgatgacacgtgtgattgtctggttgatttctatgggggtcgtttgtatcccttaattttgaaagaatcagaatctagtcaatagagtgggttatttggtttgaaatttaacat

SEQ ID NO: 121998 - DNA, 668 bp, Zea Mays
gttttcaacccactgttcatgaagactgaggcattgttcgtgtacaacctttacctgatcaagctctaaactttgatgatattgctgaccttgttcgagattacctagtggggcttcttagattaagtgttagagatattcagcgctagcatttgggccaggcattggtcaggttcagaaatgtttttgacagggataatctggtcaacttggggccacaagaagctatgtggtttactttctcgcttattcgacacaacgaagcctagaattgtagggcgctcaatttcaatagagactgttggcttatgttattggggtttccatttgattactagatgcaagaacatatttagaatgactttggatcctttggtagagttataacgtgggacgctgatagagcaaatctcacaaggcttttagtaagagcccgtgtcacttccctagaagaaatcccgtaatttattgttttcagtgttgcagaaggctttcaatgtgtttcctggacggttcaatgcgaaaccattcaacagaatatgttaggtggaatgcctgaagatgaagaagaagttcctccataaccttaaaatggtcatcaactaccagttgaatacatgggtttgggtcaacctgttgctcctcctgggttggatctcaacatcccg

SEQ ID NO: 121999 - DNA, 594 bp, Zea Mays
atagaccctatctggggcctacagatcctttgtgtcgtgtgagggggacttcacacactcggcatagtctccggccttgaggtttgtctacattagaacatgagcggtcacaaatcacagtgaagtgacaaactccctcacttctcggttgtgttgacagagagcattcctgtcccaattatgcatgcatagagtggttgggagagcggagtaggcctctagaaccatagaccatgggagacaccttcttggttttgtgaatgatcaaggttttaggaagcatttttatgattgctcactgaagattagaaagtgttcttgtgattgctcaatgaagaactcaatatttttggatgttcaaggtacaacaatataaacatccacatgtatcagttgtctttgatgactttaacacacgatgtcaactcatggcaatagagccattggggccttcaatatttatatctccatatagtacaaccttatctttgaatttgtgaaattcagttttttctactgtcatgagaataatatattgtatgtttgttactatttagagtagtacacatgcacatatatgtcatcacatatttt

SEQ ID NO: 122000 - DNA, 488 bp, Zea Mays
tgaatttggcttctagtaagtggtgcacctcgtcctttgctgcttctattttttcatcggacattttccttaaccgttgattttttgggcgcaccgaggggtcgatgcccaagctgtgtttgatgatggtgtggctaacccccactaggtctagagcggaccaggcaaaggcaaagacgtccttgttgcggttgagacaggagagatgtctttccttgtcatgcggtgacaggtcttcgttgattatgacagtttgttttggggttgcagggtcgaggggtaccgtcttcattccgtcgttcctccgcaactgggcattgattttttttgtttttggttgggcgatgactgttgttgtcctcgcgctctgctgttaggcaatgaacgttgtgctgccctaaaacaaaatctctttcaatattccgtgctacttgctggtctccatacactgtgatcatgccttgagggcctggtatcgctgcctcaaa

SEQ ID NO: 122001 - DNA, 400 bp, Zea Mays
gtaattatacctttaagattgcttgttgtataatgtcattcatttggtgttctagcaatccatgtttttcaatataataatcatgcttgcttgatcatggttgtgtgctttataatgtatatctattgaatcttccaaattggtagcttttcatttgatatatctaccatgattaactctcttggtgtatgtggctaaacatgtatccttttgtaaatcatgttgtgtggtttttaatgattatgtattaacctatgtgcaagcatgatagtcatgtttagtccatgttcacatgattgctttgtcttggtactctatgtataccaaaacaagaaatccatgttgtgtctctaatgcaccctctcgagctatgaggtgcatgatcaaaaggagccctcag

SEQ ID NO: 122002 - DNA, 1481 bp, Zea Mays
ggtagtccacacatagacgccaatccccatcctttttcttgactaggagtattggagaggcgacaggactagtactgtgttgaatcacaccactgtctagcatctctttgacttgtttctctatctcatccttctgctgaggggtgtaccgataaggtcgaagcctaaatggttgtgctccaggtaacaattcaatggcgtggtcaacctgtattttcggtggtaggctgtctggccggagaaacaagtgctgatattgttcaagtaattgctgcacagcttctggggtatttttaacagtcaattcagttacagtctacaattccaaccaatgctgcactgcttcttgctttatcatgaaacccaactgttccccgttcaggccgtaacaggtctgaacctttggtaacacaccctgcaggtgaactctcttcttatcataatcaaactccatccattttgcagcccagtgaactgacataggacagtggcgttctagctagtccatgccaagaatcatgtcgtaaccccctagagcaatgaatttgaaatctgttgtaaaagtggtgcctccacacaaccatttgcagtttggcaaccagtgttggctccaaagaattcccccatctgctactttaacttgcattggcttggtcaacagttcaatccctggtaagacattcatcaagtgactttccagaaaactagcagagctgcctgaatctactagcaccagcaattgttgacaataaactgaagcccaaagtcggatagtcctgctgccctcaccaccctcagtagcagcagcagacaatgctagcacactgtcttcattagtttccttactgtccccgatacagtcctccagcttctcctcttcattgacagccaattcccacatttcttccaccaagtacagaggaacattagttgagcagcggtgttcatagccccatttgttcccacacttgaaacacagtcctttagcctttctgtacgccttcagagctaatagcttgccctcatctcttctgccttgttgtggtccatggcctcgacgttcttcagtgttgctcaccgccctgttgccccccaatggtggtaagggtagtggcataggcgttggcttaactgaatgtcggctggaataagcaccaaatttagttcttcgaccatctcttcgccccgagtgcagcagcacatcctcctgcaataaagccaaggatccagcagtatcccaatcggatggacgctgaataattacagcacttttaatctcgtctttcaacccatctacaaaccgaccagtgatcatagtcgaagtgaggtggttctcatgggctaataattgatgcataagctggtcaaattgttctacatattcagctactgagttggtttggtggatgtgatagaagtgtctaataagcaggttatgctgatctctaccaaacctagtgttcagcgtagcacagagcgct

SEQ ID NO: 122003 - DNA, 389 bp, Zea Mays
ccaaacttggtctgtcaggttaactgaagaacaatccgatggtacagtaaccggataggatcaggttcaagtccctcgccgctgacgagccacttgcggattcatgctttcgccgtcgtgattcgcgctcagatcagttggatagcgccaggggtcagtaaatatcacgccgtggaaacactccagccattattttactctgaccaccgtacccgagcagaccatggctaattcagatgagttcgctggagatagccgcttcacagccttgcgccacgtgcctgggcatcttaccatgtcacagtcgatcgtgctaagcctatccggtgatcgctggggtgcttgccacggtaaatgccaccgatcccgagcgctagtaaccctcttct

SEQ ID NO: 122004 - DNA, 480 bp, Zea Mays
ccgggtagatgaagtggatagcgtcaaaaaccaaatttagtcttcttttgcctcgggctccaaaggcaaccgttaaggctttgtcttccttctttgtatagttacgtaaaatttcattgcgtttcaatttgacgacctctagccaatcgtcatctagctcaccaaactggctccagtatcggcatgtatattttaggtgcaccaggccaccttcttctgcctctggcctagataagctaccttctatttccttcagcatttcccattgatttgcaagtggccacaccatgaaggttaaatgctcttggactaggtccctcgtgccgatatagctccacacgacgttgaaggccaccagacatgcttgaggttcgttagccgtcacaatcgatggtctcttcaagccgaagtgtggtttcaggggcctctcgataatatccctgatgtcttccctattctccaagtaattttcacttaaaa

SEQ ID NO: 122005 - DNA, 571 bp, Zea Mays
caaacctgaatattatgtcttgtatgaattccactgccttagctggagttagagaggcaatgggtttgaactctatccatttagtgaatttgtcgatagcaaccagtacatgagtgtatcctccttgagctttcttgaaaggtccaatcatatccaatccccagcatgcgaacgaccaagttacaggtatggtttgcagttgctgcgctggtaaatgttgctgttttgacaagtactggcaggcttcgcacctctggactaactcggctgcatcattctttgctgttggccagtagaaacctgacctgaagaccttcccaaccagggtcctggatgctgcgtgtatcccgcattgcccagcatgaacctcttctagcaattgctttccggtggctgagagaatgcatttcatgaggactcctgatgcgccccttctgtacagcgtttccccaatgagagtataatgagctgactgccttgaaattcattctgctgcatttttgtcatctggttcctcctcatttttatgtacttgatgatcggctccctccagtcatcagaatttgactct

SEQ ID NO: 122006 - DNA, 378 bp, Zea Mays
ttctttcattcgttggagctggccaatccttgattggtttcacccacttctattccctttcctgaaacaacaaagccaagaaacacaacatggtctgtgcaaaaactacacttctcaagattagcaaataatttctcctttctaagctcatctaagacttgccaaatgtgtttcacatgttcatcaaaagatttgttgtaaattagaatatcatcaaagtagacaataataaattttccaatgaaagttcttaagacatggttcattaatctcataaaagtactaggagcatttgtcaaaccaaatggcatcactaaccattcatacaacccaaattttgttcgaaatgcagttttccattcatctctagttttaatc

SEQ ID NO: 122007 - DNA, 451 bp, Zea Mays
ttcctatactatggcaatctacatgttttaaattattaagtaactcatggcatgttttacacttattatcttattgttgccatgattctagatatagagagatattccaagttcctaaaagaatagggtgtcatgaaaggaattcaaatccctacaacacctacaaaaggaagattctctctataactagaatagtgagactaatgcttttatcttagtaacccatgtagtctcactagtagagaatatgtttctctttggagatgcgtaatttaacataaaaggaaaagtcaatccaatgatttatgttgttttgcttcttgcttatattggatatgattcttcttcatctatcgctctccatgttatgaattagatttattcccataatcttaaaagaactaactatgcttgttccataaaataaaactgagcatacttcaaggaataa

SEQ ID NO: 122008 - DNA, 492 bp, Zea Mays
gattgttaaagtgttgcgttccgagtttacagaaagacgagctccactgtgtccaaaaatggagtatctatctaacacccccggtagtaattacagtatcctgtagcaaatgggggaaaagggtacaagtcgagaaggcttgccttggtagtactagctatttatactgatagcggttcgtccagatatttgcagaaaatggattcacttgtgagctgtgacaggaaaaggggaaagcacaacatgaaccttatccgccgcatccagcatatctcgccgagatccagtttcggttcaggaaccaaacacgtctcccagtgactagcctatggtcagaaaaaagaatctcgaacgaagtgcctgctcttgaatcggaccagctttccatccgcgtgtgtgaagtgtgagaggatatgggcagcagccccaaaaacgttcggcctattaatcccttctacggctgaagaaggcccaataatacctttcgggtga

SEQ ID NO: 122009 - DNA, 277 bp, Zea Mays
ttacaaagctactatttgaccaactcacaccgttgctgcccaaggacaatgtgcaagcccatgatgacctaaattagattaacaacatgttagattatgtagttatgtgcactgaagctccaactgcacaagcatctagtattgatcaatctgaaccattaaaagaatgaacttgggaagaactagaacacacatagaaaagccagagtcatttacagactattctatatcccacacgcaatcatcatgataggactcggctaggggcttggccttc

SEQ ID NO: 122010 - DNA, 394 bp, Zea Mays
gttaaaaatgtgtctcataatgctcatcatgatatttgtaatgatagttttacttttccaaagcgtcctgatggtgtctttactcctcgcactatgtttgattcatctagtgattctaatatgagtagaactaactaggcgccatgaatctcatgttgtctctcatgcgtctaaggataggagtgcatctcatggaatttctattctattctgtacttttgatgcatcctatgtaatttattacaagaatgatagaattgttgctacaaatgtgggaccgaaatgtaagaaaggtaaggcttgaatttgggttccaaaatcttatgtaactatctgacgggacccaacaaaagttggggacctaaaccctaagcctaaattccttgcaggttta

SEQ ID NO: 122011 - DNA, 943 bp, Zea Mays
catgcagacttatcagctaaatcagtggcacatgggctccctttaccttcagaagtaatttttgaaacaataaaagcacctttggtcgagctcatggaaagagcagtgctcacaatttcacttgtacatagtgaagattggaggactgaaattttatccttcctctagggaaactgtttttcagatgatgaagcttataacaaaagaatggaagtgtgacaccccagtgtcacctagggtttctctcaagtgctaacccaagaaccatcattttatgtgaaccaaattaagcatgaagcatcaaattaacttaagataaaatatctactaagtgtatatctaaagaatcatgttccaaacaaataatattttcaaaaacagcaaaatgttgaaaccctaataccaaccctaattgagctctttaagtagtattgaagaaaaggggcaaaagactatgaaaaatataaaatcaaggcttaggacaaatataaacattgaagtatactaaataagcaacaataaagattatgaaagcctgtccaaaatagtttaataaaaactctaaaacaagcttctcaagtaagggttcaatggggatttctgaaattcagaattctgaatttcagcccttgagctaaagaccaagtgtgttcaccttgatccctagctcaaatcctaatgacccattgacaaaattgtgcctaactaatccctctgtcacatgccagaagatggcattgggacgtgagccctagacacgacaaaacccaggatttgcctcgggctcgggcaggaagacataccagatttcagggctccaaatctttgaaaccagtaggcaaaatcctatgaccccacacaagattggtagcttatagggaggagaagaggttttgtgcactgaccaaggcaagagcaggctcggatgaatgaccacacgcgc

SEQ ID NO: 122012 - DNA, 379 bp, Zea Mays
gtcttgagcaaatagcatccgggcgatcgatctcagatccaacgttcagtattgagtcgggttttagggttggagttgggtctcagatttaatttgggccatgggaatcaaatcggatggttcatgttggctcgtacccgttcgcgctcgctgttttgtaaaagaacccctcaccttttagcgaatcaacctgccgtccaccgcgggtaggtgttgagtcttgggtactttttgcgctagcccctggttttctgtgtattgacgcgcgcagtccgaggactaggcaaatcagagaaaactatttataaattgatttatgaatatataaataattgcagaaacttatttaattcatagaaaattcattctaactccaaat

SEQ ID NO: 122013 - DNA, 376 bp, Zea Mays
aagccattttatagctataagcttttctatggctccagttgtataacctcgattcctactacagagggtctaaagtggtctctttcctcctactttttactggaaaggatcatgcttgcaatgcttagaacaatagaacaccaactatcacaaggatgctctcttgaatgactaacatagtagaaaccttatgtgaccaactatcacaaggatgctacataatggaagaccaaacatgatatttatgtctgctaggaaccataatatatacatcatttgtagaagatgcattaattctacatcatgagtctgcccaaactacaacaccaacaacgaatgataaaatgatcatgtccatcttaatgttgaccaagtc

SEQ ID NO: 122014 - DNA, 376 bp, Zea Mays
ggggcatcgtagtgtttaccctactccacttgtgagttgtattgatgagagcttaagaaagcctaagactggttggagatgcccctacggggattcaagtaagtttgtccgtcctcgagtccctagatgagctcgagggttggtccgtgcctgtcttctccttgctacgcaagtgccctcccttttatagactaaagggagcacgtacaatagagctagaccctaagaggtggacctaggaatactaaaatatgaagtgtgaagtgacagatagaactggtgggccaaggtcttctcctgcgttagacaggaatcttctcttggtcgccatgcaggctcctcaggctagactcaccttcgccacgtcttgtcagcg

SEQ ID NO: 122015 - DNA, 552 bp, Zea Mays
gtagaacatcatatggccaataagcagaggggagaacctccaagaacaagacttccgaccccgaactcatccgctgaaacaatggcggccaggccagaatagaacagagggaagcagccaagaacaggagataatccgtcccctcaactgctcaccatgtcacgggggggcgaagcccaccggccgcattggaactgccatgatccaacaaaagattccgcctctccccacttcctcaaacaaggagacaaggccaaccaaccaaacagcaacacctataaacaagtactaatttatcgccatccacatggacagagatacaatcctccgtcactaggccatggacgggagcagacccagatgcagacgacggagattagattggccagcagatgacggtgagagggatcttctcctcctcggctccctctctctcccctttctctatctagtggagaagaagagagaaaatgggcttctcgaagaacaggaaaagtttgtcaacttctggtcttcttattctctgccggctcctcttctcttgtaggacgc

SEQ ID NO: 122016 - DNA, 553 bp, Zea Mays
ttgtgaaccaattgttccaagaatatttaagtattacaaatcaaggctcttgtgctcaaccaaaccttactgcaggtaaagataaagataaagatattccaattggtctaaatactgacattgatgagtttctatatgaagatgaagctgcaaccagtaggggtgaagtaagtgaattggatgtttacatgaaatagaaaccaattaggtgggttgatcctagtggtaaaggtctgcagtttgacatattatcatggtggaaggctaaccgagtgacatatcctgttttgtcacgccttgctcgtgatgtattggccattcaagtctctactgtagcctcggaatctgccttcaactctagtgggcgtattgttagtaaagttcgcagtcgtctagagcctcatattgttgaggcactagtttgtaccaaggactggtatattgcatctaatagaggtaaaattgatatgttattttctctactatagcctactaatactaattttcaattcaagttatgttagtgttactaattattaaatttgtgcacttt

SEQ ID NO: 122017 - DNA, 498 bp, Zea Mays
ttgggagcaaagaagtattcaactttgcacactcttcgctatgcaatgttatagagcgatcgtttggggtgcttaaaatgaagtggagaattctcctaagtctcccttctttttcgcttaagaaacaatcgaagataattattgcttgtatggcattgcataacttcattagagacagtgctctataggatagagactttgatcaacttggacctaatagccttggtcatgatgtacccgtaggtgagagtagtagtagcacatctgatgagttagacatgagtgcatttcgagatgcaattgctaatgcattagtgtcgtagtttaatatgtaaatgtaaccctggttatgttgtaatgaactctactaattataatgtaatgaccttttgttggttcgatgtttatgtgtatcgtttgttcaaacagaatctgcaatctgagaatctgcgtatccaaacacctagattctaaccaacaacttttctccacaatagg

SEQ ID NO: 122018 - DNA, 1121 bp, Zea Mays
tcggtcgcatgctttctttccggggatcagaagccccgagtgtgcataagcgcatcaaaatgatgtagcctccgagcccccgagtaatccgtgaggattgcatggggatttacttagttcttggcgaagccatgggcctgccttttgccgacctcttctgaccttctggccatactggatacgcttccattttgtgtcgtggctattgagctggccctttgggttggtcgccggagcggagcgttgcctcggtcctgcacagagttgcccaggagcagcgatcgtcgaagtgggcgtagtctctagggacagacccgtatggagttcctcagaggtggtgcccgctggagcgtggcttgaatgtgcgccagtgcatcagtatgatgtagccctcaagcccccagtaatccgtgaggattgcataggggtttacttagttcctagcaaagccatgggtcaaccctttgttgacctatcctgtctcagtcccccaagtcggttgttgacgcctattggttctttgttatgcatgcatctccattcggaagggcctttgggcccctttgggagagggtcgtcttttccgacctagtcggcgtgagggaaggggtcattgagcagcaaggggttatccaagtgagatttgtccagtccttcatagggtgtggtctcggcgagtactccactagggggactcgacccgttgggggcatctcatttagtccttccttattctatcccgtattggccctctggtcagtctgatcaatcgaatggggccccgtagccacccgtcaaccgggtttccatacgagaatgtgaggtacgaccttggacgtgggacctagcaaatgacctatgggccagtcatctggcttgcaactcgctgggagcttgctcggcccacctatcactctacgtggggaggttatagtggatttcagtatttacctagtgcgaggcggttgtgatggtagtgcggtaaaaacagaatcatcattcagcgtgggcggctttgatgggacgtgaaatagcatacttactttatcgtgtgcgggtggcgtgacagtgtggtcaaccgctctgatcaccggtgacaccttttctcccctcgcgctccc

SEQ ID NO: 122019 - DNA, 300 bp, Zea Mays
tagcctcatggtctttaatcttcttctctaggccctcaattataacttcgttctttttgtcctcgaggtcttgttgcatcctcaggactttgcttagcagtaagctctgataacattagcttcatcagaaaacaatcttcatatcaaaacaatgaaaagttaagaattttaccttaaagttagcataaaatagactaccggcgatatgttgtcgccgatacctgctgaggtctgcctcaaccttcgcaaagccaacactttttgatatagtgccgacaacctttgccctagtgtggtccc

SEQ ID NO: 122020 - DNA, 604 bp, Zea Mays
ctctaaattatgttgtgtttagcgcccatatgacttcgggaagttggtctgcccatttgcccttcttgtcgtcaagtagtctcttctttatggcgctgaaaatcttgtcgttggtgcgttctactactccattggattgtgggtggtagactgatgcgaacactgcctttgtgccaatatagtcgcaaaattacctgaaatcttgattgtcaaattgctttccattgtcgactgttagtcttgatgggactccaaactgacaaacaatattctgccagaagaatttttgcgttgtctttgatgttattgtcgacacagctctggcttggatccacttggtgtaatattcaacggcaacgaaggtgaattttaacttgccttgcgctgttggcagtggtccaatgatgtctagtccccaacgatgtagtggccaggtatgtgcaatgagctttgtgagctacgaaggggcacccgttcgaggtgagaatttttagcatgcttcgcacgaacgggtcacccggttggccgcacacacaattgctggccaatagaaacattggcatatgaccttggcagcgagggctcttggtcccaaatgtgatct

SEQ ID NO: 122021 - DNA, 308 bp, Zea Mays
gttgagctttcatatttgcatggtgttgtacatctgttgtagcggctggatctaggcagcgaaaaagacctcggacccagcagacggagggttcggtggattcatcttcggttttaggttagctattgccctcttttggtgaatgcgggcagctagatcgacacctcctccctacctggtattgaccgtctcggttagagacatagggtaagatagatttgcaggtaagacaaatgagtaagtacgaaacactgaacttttaggtcacgatcttttgggtcataatagctcagtagattagagtgtca

SEQ ID NO: 122022 - DNA, 274 bp, Zea Mays
gccgatcccaatgtgggtgctgcttgtgttgccaatgtggatgatgaggaggaagaaaatgagattcctttgactcggaaaaacagtcagcagttcatcgccagtggtgaaagtagtggagttccctctcctgctttgtctgccctcattggtctgcaagaactgtctctggtcaactttgatcagactctggaggatatggtcccagaggacttgttatcgaagccagtggatgatggtgcaatggaggcttgcgctgacgtgcccgatgctg

SEQ ID NO: 122023 - DNA, 446 bp, Zea Mays
atgggactataattttgatacagagagttgaaccggttgatgtatgaaatctggaagaaaccgagcttcaagttgctctgtcagacccactgaataggcgcaacgatggtacactaactggatagagccgccaggtcagagatctcgccgccgacgatccctccgccgcgattcgtgccatcaccgtctcgattcgtgctctgggtaagtggataacgctcggagtacgtcgccgtggataagctacggctagtaaaatattccagccaccgtacagagctcgccgcggtggattctgataagcacgccggtgaccgccacctctcggccttgtgccgcgtgtctatacctttccactgcaacgccgtgacctgctctcgctctccgttgatcaccggagtaactgccacggcgtgggacacgaattcgttgcgccagtactcttc

SEQ ID NO: 122024 - DNA, 624 bp, Zea Mays
tacgccgagaggtggatccattggatggattactggcggtcatgcgtctgctattgctgccttctgatttgaagtactggagtttgtgatttcgtcgctcccgttgctactcaactccatttttatcctcctatatagagctttcttttttcttgtaatctgtcgtttggaaaatgaaaccgtctttgaatctggattgcccttggatcacagtttgccagaacttatctgcagttcttttactccttttcttgagcgggctgtgtagaattctgatcaaaattttgatccattttaaatttaattatgacagttggcatcattgagcctttccattccatcatgttagcgtcgctattggcagtttagtaataatatgctattattaggtgcccttcattattggggtttgagagatggtgagggctgagccaactcccatttatttgacaggtgcaccaacaatacggtgcctgcactgaaggattcctgtatattggttaggttagcgtcgcacatttcagccctcaaatctagttcagttggagttccttgaccgcttttgcatttgtgaaacagaaactaactttttggtactttaatcaaatggcctatgtgtttttt

SEQ ID NO: 122025 - DNA, 365 bp, Zea Mays
agttcatatgtcgtccatccaccgatccatggctcagatcgcttttcgtcgaaccggtacgagaaaccagatctccaccgcaactttctaatctaatggctagagacccccacattctcgtttctctctcaccaatggccaacacaggcaatgatttgcctgttgtcgcgtcgatgcccatcggtgcacacatggccagcgtcgcagaaccgcaaatacctccccgaagaagtgttatacgctacacagtcgaaggtgaaggggttggcgtgtttcttacctgcgattagatcacgcagacactccacccacattgcatgtggttttacggggaggagtgtacttcgacaagcaattcttctttc

SEQ ID NO: 122026 - DNA, 307 bp, Zea Mays
ccagcctcggctctctaccccatcaagagaaaaagctacagggatcgggcgtccttctcctgaccaaaagacgatacaaggacaagagccatcccgccggtcatgccgctacatggctcgaacacatctcctctgatcacaacaacaacataaccacccctgtactcctgggcctcctccttgtgactataaaaggaggagcccaaggccttctattgggggacggtaggacttcacggctcacaactcacctcacttctgatattggcactcacctcaatcatactcagagacttgggactcactc

SEQ ID NO: 122027 - DNA, 455 bp, Zea Mays
gtacagtgtacggcgcggaccggaagcccaacgtcgcgcatggcatggatgggtttcaggccgctaagaatgcgctgcatggtcgatgggtgacgtgcgagctgcgagcagcttctcttctagatctgtgactgagtgtgtgactccgtgagcagtagctatcttgagttccataacagcattgaccgccatatatataatagggtgtgttcgtaaacaatgaagagccgcggtacttctttattgggtggacctttcagttgtacaaatgattatagatattttctctcaagatggcagttaaacaatggttgatggacctcaatgatttggaggacgtacgttccaagtccacaagcaagcgctaaggcacataacatgcacaactgtacacgattcacatataaatacaatatatactccctccctgcaagcaataatgcaaaagagccaag

SEQ ID NO: 122028 - DNA, 411 bp, Zea Mays
tagtggcaccgcaggatttcaactgggcggatattccatcaacaaaatcctatgatcatagacagatgagaagaagaaggataattcgctaacatgtacaacatagatcaagagaccgactcacctgaagtttggaaaggaacagcggtaaacccagggaaggaggagctgaggcatggcttgacgagggagggtcagcaggaacaatctgaagagcactatccggagtgacctcagcctcaccagcagacagcaggctccttgcatctagctcgccgacctctaaggcgacttgtccagttaaagctgtggaagcacgtgctaccgtcgctccatcagaccgaggcggggatgacccaacatgaatatccattgaggcattggaaagagagcacacctgaacaccctcgg

SEQ ID NO: 122029 - DNA, 687 bp, Zea Mays
gcgattgacaaaaaagcgctcgatttcactcagctttacttggatcgaaacgtaacgtcttaaccgctacttcgcgtcgtttcagcccacgctctcagcaaaacgcgaaaggctgagttggaggacgacgaaaacatctctctgcaggaagccactgatgaaactgaaatctgatgagcagatgcatggatccaccaagggggtgagtgaccgtgaccgtgacctgctggcgaccctgtccccagttgccagtggatgtctgtgtgagggcaacagatctgatgagccctgacgggtaggcgctcattagcctgacaagccagagcaggcaagctgagctgagctccccgctgctgctacaggatccatatccatcatgcaggagtatgcgctgcatgatgggctgatggagtaggcactgaagtgggtcactctcactagctctcatgcctcaacacattcacaagtttcctcctctcccctccaaaaaaaaaaaacacacaaagaaaaaaaatcccagctttgcctcaaaagctgctagcttttgctccgattcatatctattttctcaacaacaaaaaaataatactgccccagtgcgaatggtggagctcaccactccaccaccggaacagcattgtctttctactccttttgatcactcccatattccactccctccccttc

SEQ ID NO: 122030 - DNA, 583 bp, Zea Mays
ggcgatttgaagggttcagaaaaaccatcaaccctgacaggtccggccttttctttttttgttttctttctttcccagaaatagtttggaatgcagtttttttttggtggcgtgaagatagtacgatccccacaccacaatctcgcgaaatttagacgcttcagagacgacgtcagatcttggttctagagcctgacgaaacatttttttcttttgtctgtaggctgaagtttgtggagcttattgacaagctggatgaaggttctatgtcctggactgagttccagactgtggtgaggaagcaacatgagaatagactcggaggtccgtacgagagattgcgtggggcaagcccaaggcaggaggaatacttctactcaaacccgatccctgggtgcctctgcaaaagggttcagaggagtagatgatatggatttttctgggttccattgaaattgttcagtcttagaaacataccgtaccgacagcttcagcggctggagcgtggatggagatgaaccttcctccgcgtagcagagatcatcaccccgaagcgaagagcgagagctagcaaactgacttt

SEQ ID NO: 122031 - DNA, 364 bp, Zea Mays
ccaactgaactagctcagcttccttagacagtccttaatcaatatattaggactttgattatgatatgttcctgacttcccataatcccatatgagcaaacttacatttgttagaatagtggaaagaggtagaatctgtacatcaatattgagacagatgaaccattacatatatagggtggaaacccttggaggccaaggcatctagggccggcacacactgtgtgacaaggcaggccactctactagggaaagtaatatctctactatggaaggtatcaatcacacacaggtgaaaggagagatatactgatactcaatcatcctaatatagaaagggagatattcattctaacaccccctg

SEQ ID NO: 122032 - DNA, 301 bp, Zea Mays
gggtgtatacctacacatgctggaaggtgacgcgaggtccatgacaagagacgaagctgcaccaagcatgaccctgaaccctactgtaagtctaccctgtgggacacgcaaggaaccactacatcaacatcgaactcgctacagggactcgtatgccggatggaagaagcggtacaccttacgtggagtacgatagcccacaaccctacatacgacgtcaagaggattacaccacccaagggcaacaggacgagctccctctagtagaatacaagtccccactgtaaagtccgacccttga

SEQ ID NO: 122033 - DNA, 327 bp, Zea Mays
gtggactcatcaataagaacctgacaataaagtttactgttgcatcagaatattacacaacaggaatcatagctaaccggagacagcatgaggcgacaataattacttgtcggaaacggaagtttgaaagacgaggatctccagcaccgacacaggtgcaacaaatgacatcagcactctgcagtatctctctttcagtggcacgctttagtgccttgtacttcttctcatcactgctggacaattcacctgtaacagtagaatatgcttgtcggaatactcatcaataatctttgcacatcacatccctcgacaatgcttgattgt

SEQ ID NO: 122034 - DNA, 453 bp, Zea Mays
agcaagcagaacgctagcctccgttacctccaaggaagtcggagactcaacccagctcggagtacgtatatctggctgcctcctcgaccgagggggagagacttgcagtggttttccacaataaaccactcaaggcggcaccctttaatgctatcctttagagaaatatcgaggtattttgtcttcctcccgtggcgcatctccaaacttgcaccaccaacaagctggtgctgccccccagccatctcaggccgataatgatacaaatacttccaaagtctgaaatgaggaagaattccgaggtaggcctcgcacagatgcacaaagatagaaatttgcaagatagaattgggattcagatgggtcaagtttagattgtaaaaatcaaggagaccgcggaagaagggagaaacgggaagagcaaggccgcggatgagaaaaggaacatagatg

SEQ ID NO: 122035 - DNA, 884 bp, Zea Mays
gtttgggcaagcttctggcttacaatgtaatttatctaagagttctgtggcccctattcaatgttcagaagctgaaagacttttaacaatggaagttctgtcccgcagtgaattttttcccatgtacgtatcttgggctgcctctatccatccataaaccccctaaggaggctctacaactgttggtggataaagcttcagactacttaccgggatggaaagcttctctaatgaaccgggctgatcgattaattatggtacgagcagtcttgacagcctccccaatatactctatgttagcaattgatctgccaaaatgggtcattaaggctgtggacaaaataaggagagggtttctctggaaagggccaatggagggaattgcctagtgtcatgggaaaaggttcaacggcccttaagctatggaggattagggattttaaatctggaaaaattaggttgggcactgaaaataagatggctatgggctcaaaaagtggatcgaccacgtccttgggatggttttcaagtggaggtcccacgaaatgtcaaagctctcttcaacatggctatgattcccatcattggtaatggtgaaaaacttctattttggaaggacaggtggttagaagggaaatgcattgctgaactagcaccccatctgatcacaactattggcaaaagaaccgtaaacaagagaacagttgctgaggcactgaacaacaggagatggatatcagatataaaaggggccttaactgtccaagtcttacaagagtatattatgatatgggaccagatggaaggagttattttacagcctgaaaaccctgacactttcaggtggaaactaacacaatcaggggattatagcagcaagtcag

SEQ ID NO: 122036 - DNA, 583 bp, Zea Mays
agaggttagatgtgaggatctggaacaggattttagtttccactttccctggggaagaacttggaaagccaccaaatgtccatctggatttttaatgcagttcccctcacaggaaagattggaggaggttgttaagtttcctgaactaaaaatgaaaatatctggggtcaaaattagtgttataccttggtcctctcaagctaaagctaaatctagactccatactacttgggtggtagctgaaaatgttcctgaagaacttttaaactaccaggctatttgtgagcttggctcaactattggggctgtggaggaaattgatttgaattctcttgaatccaaagatatggtcaggtttaaggttcatgtcaaaagtattgatatgattccagaagtcatagaagtgggtgtgaaaccttatctgtatgacatattctttaaagtagagaatattgctgcagaggggtggaatgatgattctgtgagtctgggaaaaagggcatctgttgatgttcatagatctggaaaatctgtgatggaaaaaagtggaaaaaaggcaaaaaatgaggagtttgggacagaa

SEQ ID NO: 122037 - DNA, 712 bp, Zea Mays
caagaagacagttacatagagtctccatttatgcagatgatgtagccctcttcttacaccatacggttgatgaaatctccattactttggatatcttgcagctctttggcagtgcttctggtctaaagaatattgtgcaaaaatctaatgtctaccccatacagtgctcagaggaaactctattggaagtccaaagtctgctaccatgtgaaatcacagcttttccttgcaaatacttggcttcctctatccttgcacaagttgtccaagcatcatttccagccgtatgttgatagatttgctgaccaacttcctaattggaaagctgatttgatgaccagagcaggcaggagaatcctagtgcaacatgttcttacaggtatgactgtgtatcttgcaatggcaattgatataccccattgggccgttgatgctattgataaaataagaaagggctttctttggagaggaagaaaggaagctaaagggggcattgtttggtggcttggggcaaggtgtgtcgtccactttagcttggaggtctgggaatttctagcctcccagagcttggatgggccctccggatgcgatggctgtggcttcaaaaatccgactctagaagaccttggacagggcttcctattcaggttccaagtaaagccagagtgttcttcagtaaggtccttgtctcggaggtgggaaatgagtatag

SEQ ID NO: 122038 - DNA, 401 bp, Zea Mays
gggtgggtgaattcatctgcggaagggtatcaaaggtaaagattgtggtggaaggaaaaaaagagcccggatggtttttttaaaggaagtgggttagctcaagttttaattcccttttgtgttcataatgcatgcatgctggaagtaacgtctcctctccaaataatagggtgctcttagggcatccttaaaagtctaagtactggcccacggggcctacttaattagccacctatttctccctctatgcttaaggcctttcaccctaggtctagcggtctagtcctgacgatccgtagcagtttctaggcaagttttaaattttgaaaatgggattcatggtttattgtccttttctgtggtggaatttgctccgataccagctatggcggaaccgcccg

SEQ ID NO: 122039 - DNA, 498 bp, Zea Mays
tttgtgcatgtcttctgtaagattttgttaggaattccaatagcattacgcttcttcgtaggtgtcataaaatcatcgtcgtcatcaccagatccagttttgtcagtggtttcatgaataacagatggtctctcaacgggtgcaggacgatgaaccgcatgctttgtgttgggagggtctccagttgacgccaaacgcggtatctcaacactaaagaattcttggcttgactcgatggttatgcgtttaggattagccggaggacgatccgcaaacttcatgttgtgatagaacacccttcgtaaaataaaaaatacttcaggtaagaataatatagcataaaaaggcatatatacatatactcttatgacactgctagggtatgtatagtgtgcataatgtgcaaaacaacaaatgtaggctacaaaacatttataagccgtaaactgtatctaaaaaaggaatgcataacaagagagatgtgaaaaacacatttat

SEQ ID NO: 122040 - DNA, 414 bp, Zea Mays
cgcggctctctgcctcacccgaaggaatagactgatggatacccatagaacacaccctccctctctctactatatatgacgtccctctctcccgcccctctcccgtccctctcccgccgttgccccacggcccacacaaccgacgcgctacctctgtctctctcttccttactgccatcacaggcaaattgttgtatctgcactggcaagggagaattggattgcctgaccgcgtctaggttggcctgatgtcatccgaaccgtcctagcggcacaatctgggaaggtcccgtagagggataacagattttggactcaggcggtggagtttctccgctccaaattgagcctgggatatgacgtgttgtggccctgcctcctcagcggtcgacacacgtcacctcctgactcacg

SEQ ID NO: 122041 - DNA, 300 bp, Zea Mays
aaaatatgtaagtactaaagacaaacataggtcaataaaataaaaaatcaagttataaccttttctttgttccatttaaagggcacttataactggattttcgatgacctagttgaccacagtttgggcaagtgtactgtctttttatctttgatgttccttgagcattttctatgacctttcgttttttcccactgccaccctctagacagctcttcattctgtttttcctttgttgcccaacccctcttttagccattggtgcacatacttcatttgcaaaatccaccttcggccaaa

SEQ ID NO: 122042 - DNA, 521 bp, Zea Mays
ctccgctggtacttcttcacaaacaggagcagaagggctagcatcctggttcaagcatgacagtcgtcgaagccgcctctttttcttcttcttctcctcaacaggcgcagttgggcggctaacttggcaaggacgctttgggcgaataccctcaggctttcgggtgtccactgatttgttaagctcttgtacaaccgtaatagccattggttcagcatgggccaagtcagaagattctccagccaacatattgagtacatcatctatttctgcatcatctggactcgtcgacatctcaaaatgaacttgcctctcatcattgggaagatcacaaagaggagcaaccagagtcttaatgtcttcaggagagggtcacactctaagacccagaccactatcaccagcaggagggttggacacaaaattgaaaaaggacttaggaggtggcagattccaagcagagtaggcaacaagagcaccaacatttgatactttgcccctcaatatcatgtctagtcgag

SEQ ID NO: 122043 - DNA, 443 bp, Zea Mays
gccggtggcttggccaacttttcgtcccttcggttctccgaggtcctgcgtcagttgcattgacaaggggaaaaagaaagagatccgtcagtgtggtcgtattcgtaagaaaaatgttgaaggtgctgaaaagaaggtgtggagaagctagcgacacccttcttccataattttgcttgttggtttgccccacaaactttcctaagataggagtatagaacatatttagggcgccgaagcttcgtatcaaatcgagccgtcctcactcgtgttgttcgagttgttggcactccttcgaggaacagtaaccgtgccccaaagatcagcaagaaaccagtctcggtgaggtgagcaatcctctttcccctggccttttgtctttctggggttcgggttcccttctaagagatgccgctttgcttaggaattctctgagtaaccca

SEQ ID NO: 122044 - DNA, 580 bp, Zea Mays
gggtacgatataaccccaagctgagcagctttgttgacaatgtattacagcagctcggtcgcaagcacaaagagtagaggtgatagaaggccccttatcagacaccccttttgcataattttttttacctagggactccatttaagaggatagtagactaaccagatttaaggatgaggttgacccacataatccatttgttagggaagcccagctcggtcagcatggcaagaatggcaaaatgctccacagtattgaatgctttctcaaaatcaagcttgaaaaccactatttactttttggaatgacgacatgttctacggtggctctctccaccaggttgcaaaggttctggtacattgtccttgcctctggctcgactggctcgaggatggaccagagcatcatgactggtgtggacatgttctacccggggttgaggaagtattgggctccatcactcccctgggcaagctggtcgcataacttctatgcccgaggcttttcagccctaaagtagcattgccgatccatgtcgttataaactctgtcgagtctacgcacgagggcatcaagttcc

SEQ ID NO: 122045 - DNA, 577 bp, Zea Mays
ctgggcacttgtggcatctggacttgcaatggaggctgaggtgggggtggctgctgctgaacctgctgcatcgctgctaatatctgaccaattgcctgaactgcttgggtctgcatcaagaacatctactcgatggtcatcgggggtggcggtggcaaaatgctgctatggggctgcctcctcctagggtgcctactgttctggccaagcacacctcgcacctctgcgcctgttctcagacatctgtagaaaccatacacatatcagatctgactttgcagtctttcagcataagaaaagatatatggaaatcttcacggcactgaacaaatgaccatcttcactaacagcttctcagataaagaggaaagtggaaataaatggattacccaactaaataactgaccttattaataactacaccaagttgcaggggatacccacaccttggtgacaatcactacaaagatccaacttcattacatgaccatcataacaagcatccaacataagataaaaaaactaactctaactagactgactggactaagacactgaactaagcattattacagac

SEQ ID NO: 122046 - DNA, 605 bp, Zea Mays
ctataaaagggagggaaggatctcgatctagggcagtaaaaccatgcgcacaagtatccgacacacttgtattcacacagagcactcgccacctcgcttgcttactttttagagatttaggagctcctccctctctcgattgtttctaaccctcctattgcaaacttagtgcatggtaacatagattactcgactggatgtatggatattcggtttgaaccaatataaaatccttgtgtccacttcgcacaccatccgcaccaagacgcaaagcactagaattattagctggtggttatgaaacatcgacagttggcgctccatgtaggggatattttgcgtgtcatgacacttttttcacccccgtagttgcgaatggctaaccacatcacaagctaggtcctaggggtaggcgtgcattttggtagtttcaactttgtcatcggcatagagggagcactgccgcggatcacggcgcccgtacaacctctcgtcaatactgtcgtcaacaagagtttgcattctctactactcttaaacttctgcatttatattgctttctttagttgtgctcttttaccatatgtagcttacttacaagctag

SEQ ID NO: 122047 - DNA, 359 bp, Zea Mays
cggaaatgggagcgggaggaggaacagtggaagctggagtggtggaggtggtaggtatggttgaagtggtggatggctcgggagcgactggagctggtgaagtgggaggatgagtggtagctgtggcgggtgtagagggagcggaggagcgaggccaatacgcgagtcgacgaactctgtatgcaatctgatctgacgatatctgcaactgtccacctcgcctgctctgcagctgctgccgctgcaagagctgctcaggctactctatccaaacgtcgcttcttgcggccttcctgctgctcgaggtaaactgtcttgcccttgacctgcctgaaggggcgaggagggtcctcgtcgtc

SEQ ID NO: 122048 - DNA, 424 bp, Zea Mays
taaactatatcataaattgattagtacacatcatatgagagattattccataaataattatctcaactttaatccaagtcattatttgattaaagatcatctaatcaaattatacccatgaggagactaaatgatagactccagcgtaagatggcaacgtgtctgaacctcacatacaacagggctgtcagtacaacactggcagttgaagccaaaaatgcaggacacggaaagtcaaagggatatgcgagtgaaagatcaactcatggacctgaaaagagaacaaggttggtaatccgacctttcaatccaaaccgttcttcacctcgcccacctacatatccattcagacaacccgtatttattcgtcccactcctggccccgctccgaccaatcagctgagtgcccctagtactcgtttcc

SEQ ID NO: 122049 - DNA, 391 bp, Zea Mays
gtcggatgtagctgcggcggagacttcgccacgtgtggagggtgctggggatgttcctggtgcgagtactgggtgtaggcggcgaagggtggtgggaaaacatagtgtgggtgaattttcacgaagtggcaggcgccgtcgtatggggatggagcgtgaccgtctccgagtagaccgggttggaaaacgagaattgttgtcttcgccggttgggcgggcataggcgaggggaatctgcggaagctttttgagggaggggagctgaggataatgatgtttaattacagggagatgggtattatccctaaggtcgagccgatgtaatgtgtgatgccctcgccgtgtgtatgtaattgtaatttgtatggtgatgtggcctgttggccgtatt

SEQ ID NO: 122050 - DNA, 392 bp, Zea Mays
aaaatgtctaaaccctagaataaccttaattaggccatttaagtaaaaaggggggaattggtaaaaagtccatgaaaaacatggaatcaaggcttaggccaattataaaagttgaaatacactaattaagctacaataactattagaaaagtttggccaaaataattgtttaaaatccccaaaaaggccatgcaagtgggagctctctagggaaatctgaaaattcagatttctgaatttcagccctcacctagaactcaagcacgttcaccttgatccctagatcaaatccttaagcccctattgacaaagttgtgctaaattaacccctttgaaatgtgtgtgaagatggcatcgaaattcgtgccctagacacgtcaagtcagggattt

SEQ ID NO: 122051 - DNA, 301 bp, Zea Mays
ctccgatgataaattaggggtggccccactatcgagtccgcccaagattgccttggatgaccgcccagtgactcgatggaggccccaggcctgatttcggacgtcgggtgacgccgtggtgtaagatccgcggcggcgctgcttctcgcctctccgctccgacgcacacacacccctgtcctcacggtggggatcacgaaggtggggaggaagacaactgaaccccggccttcgattatatagcttcaggtagtcggtttgaatcgtagggagggcaccgagctccaagggattcgatcca

SEQ ID NO: 122052 - DNA, 665 bp, Zea Mays
acagatctcatacatctagattgtaaagggaaaatgcactctcatccatctgtttattttcctttttacaactactatttctctatacaccttagtgggtctaagcttctattgtaatcatgataactaaattacataactatccttgcacatggtttggggccccacttgatgatgaatgaggaatgggtcgctagggacttggtctaagagaaaagtccacgttctccggggtggtccaaagctgggtagccgcttagcctagtcctgtaccataagcctacaccttccaccaacctagaatagttgatttagtaccttctaggctaagttcctaggggtacaggcttcgttcagatttaggggtcagccccaaagataggtttgacaggactcgggtgcatgattcagagaattgaatacaacaaaagtaagggccctaagggactgctcccaggcgttgaccctggaccacgcctaggatcgacctctagttcaatggtagcctcgaacaaccaaagctaccatagccctagggagaagacgtcggttacctcaattggatgcacttacatgagaaacaatctggtaggggtccggactcataaacccagtctgctagtatacaaccacaatccagtaaggtcactcgcataaacccagtt

SEQ ID NO: 122053 - DNA, 847 bp, Zea Mays
ggcttatacgaaggctgaagacgaggctatgaacactgcgtttggtgcccgaggaaaaagaagattaaatagggtgtttgatgctattggttttatttaccctgactactgcttccctgtctgaggcaaaggacaaaagaggaaaagtgctataaaatctccttcggccactccgaagcagaaaagggtgaaaattttggtgaaccggcccaaaatcgtattatgttgaaagagcggcagtgatacctgctctgacgactgcggtggcgtcggagacgaaggttccatctccgaaaaaagactgatcagttattttgaaggtaatggcccttgattttcattttttgactggtttagtttgtagcatggtgtttgtttttattttaaaactttaatataggagaaggaaaaagccgaggagggagggattactaatgttccgaatcgggacgaagtacccctgggtaccatggagccgaagatgtcaaccagcgcgcaggatcagccgaaggcgagaactggcgcaacaaggacccctcgaaagggtaaaagaatagccaacgttctgaaggctgtccttaagcctgcaaagatggcttcgcccacagcggcaaagattaccgaaggtcctctcagcgcacctgtcgctgaaaatgtgactactgagttgaaggtggttgcctgcgcagaggcctttattaacgaggacaaggctagttcttcaaaagtctattcaacgacaaatgttggcccagaaaaagaacaagagaaaaccgaagcttctgcagctgatggtttgacagaggaaaagatttcattagcaaccaaaagagcaccgcctgcgctc

SEQ ID NO: 122054 - DNA, 436 bp, Zea Mays
caagacgaagctacaaacttcagaccgcggcgcatgcacgtgatgaggtaggtggcaagagaagggccaaatcccagagacttgtttatcaagattactaaggcaaaagacgacaatacccttaatcatctttgtagctcatgcgtataggcttgagggcatgaatgtaatttttatgaagctatacatcttgattataagcaattgaataggttgcaaaaactgatttctagttaccacatcataaataatggaatgtaaactctatgtacattgtttgccagtacttgttggactaacaaatatagaaagtgaaatgtccaacataatgtcacatggtttatacctttctgctccaattatattatgctcagcttaatgtgcggacttttccatgtgtatccaccatggataagaatggacgatttgctcagcc

SEQ ID NO: 122055 - DNA, 279 bp, Zea Mays
gcgccaccagtgatcttcttcctctccgaccgccagcgtgccattccaaaattgaagggcaccgctcttgaacactataaattaagcacaccgctagctccgttaggtaatcacgaagccagagcacccgctcctgcatccgattagccaccatagctctctaatttctctttctccccaaatctgttttccgcaaccgtgaaagaaccctcgccgtggctagcttgttccaggtctgttcgtgctctctattctcccgtttcagtgttcctttggttc

SEQ ID NO: 122056 - DNA, 495 bp, Zea Mays
gtagaggagcaggttgccatgtttgtacatgtggtaggtcataaccaaaggtttagagttatacacatgacctttcgaaggtctattaagaccatcagcagatacttcaaggaagtattgtatgttgttggtgaactgaggaatgaaatgatcttgccaccttcaactgctacaccaaccaaaattagagatagccacagatggttcccatatttcaaggtcagccaaatccaaacacaccactacttttcatgttgggtttgtagcaacaaatgtttgccctaatgtgtaggactgtattgatgccattgatggcactcatgtgctagcaagagttcctagaaatcagagggctgccttccttggtaggaaacacaccacatcacagaacatcttagctactgtagactttgatctaaggtttacatatgttcttgctggctgggagggatcaacacatgatgcccttatccttgctgatgcccttgagagaga

SEQ ID NO: 122057 - DNA, 311 bp, Zea Mays
gttttgttcgtgcggcttgagtaggcgggatgcataagcaatgactttctcattttgcattaagacacaccctaagccttgcttggaagcatcacagaagatgacaaaatcttggtgtatgtctgggagagttaagactggtgcggttgtaagtttctctttgatgatttggaaactttcttcacatttgggagtccacacaaacttattgtcctttttgagaagttcagtcaagggctttgctatgctggagaatcccttgataaagcggcgataataccctgccattcccagaaagcttcgtacttcac

SEQ ID NO: 122058 - DNA, 640 bp, Zea Mays
attagatcgagcagagaactttattgtgaaaatctagactctagtacttagaatgaagaaatgagcgagacctagaataggcaacgactaatatgcaagcagccattaggtgcaagcgtgcaagcagctctctaggtctgttagatctagacttaactgtatgacatatttagcatttaaattttcaaaccaccaccttgtgtagctttataaaaaggatcctaacaaaatacgattacgcatatggttggtgttagcattctgttgtatagcgtagccaaggttgttagcatctatattatgctagattaactcctagattagctcctagacggttttagttttgtatctatcatgtgcacgtgctatctatataaagaaacaaagcaagcaccgaggtgctgtgccaccaattatattcttcctattgcattgttcaacttggtaatcagagcattcgatccattttttcccccacccggcccatcgtccatcgttgctccagtatttatggctctcaccaattccaccttcccaggcaccattgcctcctcctccccgagcctatctctttcttcccttggtcacgccatcaccgtgcgtttgactcgggagaattttttcctttggaaagcccaag

SEQ ID NO: 122059 - DNA, 865 bp, Zea Mays
gtgctccgtgccattgggttttggagttttaggaggcacataccttagttgaacggtagtttttcgggcattatttgctagggtcgggagtccagtggggagcaggggttgtgagtcgtcgatccgcatctagtggttgggagtccctcctagttttcccccctccctactccccttgcaaccgccgccccgcccttcccacctattcttgcaaccgactcctccctctccccctctcttccccattgttgcagccgccccccatctcaccaaaccctagccgcctctcaccatttcctcatccccaaggtgcagccacctcttcccctttggatctccttcgagttggtacaagcctctaattggagaattggtgagaggaagaagaaaggggtgaaggaagaactcaaggtgatcttgtgttttattttgtatttgtgctgcaattacatttggttatctgttcaactaggcgaattggtagtagtgttgtcctaatttttggtggcgagcggacagcagtagtgttggtagtttctgggatttttgtgggggcaattagctgtaatcactgtaaaaatcatgtagagcattgtcatatctttccatagagtactcatgggttcgattcggtggaatattctaggagatatcgcattttgaactcagctaggttgctgtccaaaaaaaaacagaacacagggtgtactttgtcggctatttggggccatcgagatttggaatttaattatcttttaaatatgaaacttgtagggaattttatgtagatgtttctggagtttttgtttgatatcattgcagttataattttaaagttaagaaattaacaagcagcgctgctgca

SEQ ID NO: 122060 - DNA, 395 bp, Zea Mays
cgtatgaccgagctatgaagacaaacttcaaaatgcatgtttggtactagtactcaatgcctgacttaccagcgtatgggctattctgtgtctggtgtgttcacggtatgttcccatgcctagtttgcaaggaagctcttaggttcatttggttgaaaaagggtggcaaatatccatcgttcgataaacattgacaatttctccctcctaaccatccattccgcctagacatcaagaactttacgaaaggtgtcatagtgacagaccacccacctgcaatgatgactggtgccaaaattcgtcaaaagatagatgggctcgtggcaatccataaggtggttttgtgggatatggtgagcaacatatgttgacacataagtcaggcttgacttggc

SEQ ID NO: 122061 - DNA, 379 bp, Zea Mays
ctggtcgatggaacaggcgcacctgtgttttaacgtggggctgagaggcggcatgcaggttagacgacggcgccgtgacgcggttgtttgaatggtaagggggttgcgtggaattaaagggaatagataccacatgcaaacgtgattactgcgatacgtgggcgcgtaaattatggatcttgcatggtaagtaatgtgcggaaggttaacaaaaatgaagcataagatgttaaaagatatggcataaaaccgaaacggcataatagatgcataaacagtatataccgattggcgtaaaacgttgtgtcattgtgcgtaaattttatattatgaattatagtttgacaaagacgtcgccataatatcgggacggtttcgg

SEQ ID NO: 122062 - DNA, 715 bp, Zea Mays
gactttttgtggatgcacactgtaacaaagttaaagctggtctattaggctacaactttgctgcagagcattgatctagtcaccctacaaaatcgggaggaaatttgccctaaacatgacctgtcagactgactaaagaagatcctgatggtacagtgaccagaaaaatctgttggtttagtgaaccggccgccggtgaccccgcgcgtggattcacgccggtgagttgattcgtgctcaccggtgcccagataacatctcgcggtgaaaagatcttccccgcggatgagcttaaggcactgtttcgtccggccgccgtgtccgctctaccccgatcaccttgaatcaaccctcgctggagttagacacctcgcggtcttgtgccacgtgccttagcactttaaccacgctaccgtgactcgtattgacctatccagagatcgccggtgaggttgccacggttgcggccaccaatcgtgtgcgccagtgcccctcttcctctccggccgccaccacgccaaaccaaattcactggccactgcttagcacccctataaattgacgacacggtctgctacgctaagttatcaccaagccagagcacccgctcttgcctccgattagcccccacagctctccaatttctctttctccccaattctgttttccaccaccgtggtagagccctcaccgtggtcagcgtattccaggtctg

SEQ ID NO: 122063 - DNA, 377 bp, Zea Mays
ttgatatctctgatccactgaccattaataagggcttgggccatagttctagaggaggttaacttcttgtctacctttgagaataccaatggagctaaatctttgatggaattcccaatcaaccacgtatcaatccaaaagagagtatcattaccgtttcccacatgggagatcactgaaatggcaaccaacgccttgacttgtggctgaggagggatatcaagaccaatccaggacctgttagggtcggttttctatagccacaaccacctggcttgcagcgcccagcttctgtaaagcagatttgggaggccaagaccaccaagatgcagcggcctagtaaccttctcccaagccacaaggcagcaaccaccatt

SEQ ID NO: 122064 - DNA, 475 bp, Zea Mays
cgcggtcatcaattgatcttctttcttagtatagttgcccaaaatttcattgcacatagattcaatcatttctaaccattcttggcaaggctctttgaaatgtttcttgaacttgaagtgatagggcagtcgaacaagttcattcgttttcttttctcctttaagattcggcatattccattcctttaacgtcggaaatactctattggctaagtattcctgcaccaaatctctagtacctatatgctcagacacaactcggaattcacccacaacttctcggcatggtgacccttgcagcatgtcgcacaggggcctagttaacccgaaggttaggtccagtgggctccgaactatcttcttctcatcaaccttaacataaaaccactcattcttccagccggttggccatttggtgcgatagctgaccatcggggtcttcatatctttgcgataagcaaagttgtagcagtcg

SEQ ID NO: 122065 - DNA, 374 bp, Zea Mays
ccattgcagtacttccttcctctaggccctgctgaggacaaaatcggcctttggccttctccatgtctttccaccactaggcaacttcatctcttggtttggtctatcacataacgctgccagatccactcttgcctttacattatcctttgacttatcaggaacgtccataattgttgcccaaagtgcctcagcgacattcttttcagtgtgcatcacatcaatgttgtgtggaaggagcaggtcatcataataggggagccgagtcaagcccgacttatgtgtccacatatgatgctcaccatatcccacaaaaccaccttctgagttggccacgaggccatctatctattgacgaactccgacacaattca

SEQ ID NO: 122066 - DNA, 291 bp, Zea Mays
ggagttcgtactgatgtaggtgagttggtccaacttttcgattttatatgggtgttcaactgagcctcttatagccctcgttttatccgcccgccgctctggaatgtaatacactccgaatttgatgtgaacacaaactctgtgaattccgacatgtatttatgatccgctgtgctggggctgccttgtgcaccgaatcagtgatcgggcaacgtaatacaaagagggagcgcttgatcatctgagctggttttgtacagaatgtcaggtatagccaggtgctcgttgtcg

SEQ ID NO: 122067 - DNA, 1284 bp, Zea Mays
gttaacttacctatgagcaaccttatattccaactacctaaacggattctagttggctcgactagcttccttacccttcacacccatcgatgatgatctgaaaatccttgcacattttttactacacctggacactgatgtagcgtgccactaaggaagtagtgtcctgatccttgctcgcttgacatcgtgcccagatcatgacatggcacatcactagtggggtgtcaatccgacccttgcccatttaacaccatatccggattccgatatggtgctagctaagagggttacgctccaacagatttctttcgaatttcatctccattagaatggctagctttagcgttgacttgcccgagacctattatgctcaaattgatctaaatgtcaattttaagtgaacaggaccagaaaatgttcaataatctaagccatcagttattcaagctcttcaacatatataggaaagtgtgtcctcgatatgtgagaaaggaggatagcacataatactattatatctatttatctaattagataatccaattgacgttaggaattagggacacagaagatggatttccatacatagttctgtgacagaacagacgaaaaacaaagaataggctacaagcaaacgacctttctttgccccaggtctatctaattggtatggccatacatttgaatgaaaacaacactaaagtttgaagccaaaatacactttccaatttgcaataacctcacaaagcaagccagcaagcagaacaaatcaatactttcgctgacaaaagacatcctagttgttcaatacatcagacatcatttttcattacacaaacaaaaaattccagatgcaacaggagactttgagcaaaccatctcataacaaaaaatcgagaatagcagcaagataccaatgtaggccatccgatatatggatggccgcaatccccaaccatgtcgggggatttttttggtccacacataaaaaataaatgttataaagcgaacgcgaacacggattgattagtcaaaatcgatggcatgcggctcctcagatcgctggggcaccgcccctcaaacttgtctttcccaccacgcatttatatcaagttgccattttcgcgcattgaattgaagaaattaaggtaaaggcaacaaggatagtaacaactgtaacggctcgcatcagattcaaaagaaaaggcgaagggaattaaaaatgcggcaacaggatcggcaccggcggcgaggattggaagtcgaaaaatgcttacttga

SEQ ID NO: 122068 - DNA, 314 bp, Zea Mays
tggtttctatcatttctaaccattcttgacatggccctttgaactgtttctcgaatttgaacttataaggtagtcgcacaagttctttcttctcctttgtcccctttagcttcggcatgctccattcactcagcgtcgagaacaccttataggccagattttcttggactagatctcttgtgctgatctgctcggctactacccggaattctgccatagcttgttggcatggtgaccccggctccatacggcacaacggcctagtcagcccgaagcttaagctcagagggctcagtactggcatcttgagcttc

SEQ ID NO: 122069 - DNA, 390 bp, Zea Mays
agagaaggggaaatttgttttgtcgaagacgacgtggcgggagactcgccgcctggtcatgtaggttgatgatgatgggagcctcggatgccgagggagtctcaaccactggggaagttggggatggatcaagacgggaagggctgccaagatggccctcagcctctacaagctgacgagcgagagcatccacaacgatacatttctgttgccaaatgagggtcgtgacgcgcatgcgctcttgagtggctgctacaatagccttggtagccgcaagggcgagaacaagtgtagaatgggcagcaattgcgtcatgtggaagaggttcaaccgtcgcggaaccgtagagatggacatcggtggatccatgaccgagaggctagatgggag

SEQ ID NO: 122070 - DNA, 345 bp, Zea Mays
gggtatttgatgcaattagctttttataccctgattatcattacccgctgcgaaggtaaggaaagaagagaaaaactatcgcttcagccaccactgatgtgccgaagggcaagaaaataaaagttctgacccaccacccgcgatatattgaaccggccgtagtgcctaaatttggcgaagggacctcttcaattgccgaaggaaaacaagctgctcccatcgtgcagagcgctgaagagtcgaatgtagtgccaaaggtgtctacagtcgggccagccgaagctaaggatgatacggccgaagagccaaaggtggaaaaacagtaaaaatgccagaaattctgag

SEQ ID NO: 122071 - DNA, 946 bp, Zea Mays
ttctggccaaccaaacctgactcatcaaggtcctcaccagaagtcttgagaaccagcgcccgaatggtggaaggcctcaggacaggatgggagattttctaaggctcaagcctcccacattcgctggatccagcaatccgctcgacgctgatgattggctgcacacaataaaaagaaagttagaagccatcggatgccccgagaaccagcgtgttcatctggctgctcatcaactttctgggatggccctatcctggtgggataccttcagcgttgtcgtcacagatgctacctaggcagaatttgaagccgcattccgagaacatcatgtgccccaagggatcgttcaactcaaggaagatgaatttcgggaattaactcaaggaggaagatctgtcaatgagtacgtacacaaattcacagaattggctcgttatgcacctgacgatgtcagcacagaagccaagaagatggcccgtttcttgaaagggctaagaccagaactcaagactatccttgccagccaagatttcctcagcttctcgcacctttcaaacaaggccatacaagtggaaagggcaagggaagaagaaaaaggtcatctcaagaggaagttccaagtcctccaagctcagcagcaggacaggcaccagagaattcgatcattagggtttccacccaagggaccaagcttcaacaagctagctggacccactccgtcatgtttcaggcagcagggtcaaagctcctttcaggccccctccgttgcaagcaaccaacctccagctaatgcatgttggcactgcggagaccacagtcactacaagaataattacccccagttgagggcattcgggcctacttactccaactcggtgaatggccccaagaatgccccagcaaccgccactaaggcaccctcctccaacagccagcacagcaagag

SEQ ID NO: 122072 - DNA, 436 bp, Zea Mays
cagatcacgaggggggatggagcgaaagggagggaggagggaggacagggcgtgcctctctctacgtacggtatcgacctgctgggtgtggcagcacactactcgtgagtacagtcgtcactgtcacactgttgcctttatatattcctagccggtagctcatcacgcttgaaagacgcatgcatgcatgcatggcacagttagtttgctctctgtgttcgtaattaatttgcatttgctcttgcctgatcaaatcaaaagcgatcgataacctatacacatcaaatggttccgaatgtacgtacgtgctatgcccaaagtattttacgatgatatacggtgcatgcatcgcatactgtatgcattatacggatggatggcaatggcatcgaccacacaatagcatatccatggatcttttatagctaggtacccg

SEQ ID NO: 122073 - DNA, 442 bp, Zea Mays
ctgaaaacagtttcatatagctatttttggacccttataacttttgatctatggacttttggtaaaaagttgctataacaaacttgtaaagtgactgttggagaacaatccttattaagtgtaccagccctaaaactatatgcaactagttgaaaaagtggtccaaattaaagctgtcagatttcagacttagtgtaaatgcaaatcctgaatttcagtgttttggtgtaactttggagctctctattgctctatccatagggttataggttatgataattataacacaattatagatctaaatgaggagtataagtttgattaagacacttagccctaaagttatttggaacctagagaaaagctggtctaaagtagagctgtctgaaagtgtggatttcagactaattaatttcagtctgaatttcagtaatttaggcaa

SEQ ID NO: 122074 - DNA, 408 bp, Zea Mays
tgcgcttttcttcctcctcaatttccttggttgacagtgtggcatggatttgtgcctcattgatgtcgcaactcaaactaaactagcactaggtcggctcatgtcgtagctagatgttgggattgccttgttgagcttctcaattttgtttggtcattgttgtctccaaaaaatagttgatgatttggttttctcccatttgttatatgattttttactgagattctgggaatgtatgctctagaacggctggtcaggttaagtgcctcctatccaattgaccttgctcagagttaaggccaagactcttaagttttatgactatactggtgcattattatacttcgattgagtgtcattacattacatctcagaaaagtttcatcctcagttttattcagtgagcta

SEQ ID NO: 122075 - DNA, 372 bp, Zea Mays
agagcatatagcgttcagagtatggccgcttgtagaaagctgggaaatgccgaaggagaccatcaccaagtctagcgaaggtgatctggtccggctgaagtatacattcaggtatggagataagttcgatgaaccaaatgatgactagctgaaatgcatcgaagctacaagtgatgagctgcttggagcatattccaaggcagaagataatgcactatccgcaaccttcggaggtcggggaaagaaaagattgaatagagtttttgatgctattggcttcgtttacctcgactaccgctacccgctgcggggacaaggaaaaaagaggaaagctgctacttcggccaccccagacgaacctgtgccgaaggg

SEQ ID NO: 122076 - DNA, 538 bp, Zea Mays
caatttgctaatgacaggttggaccaaaatgcatactcagcaagtaaacaattgggaagcttcaactctacttatgttgccccttgccctgtttcttgcatgtaaggagtagtagaatgcagaatcagagagtagaggcgattcagtcctgaattttggttgccttcagctcactagctgttctgaacagaggaaggaagtagcggcgcatcagaaactctctccgtctcaaaggagtgtccctctggtatttgtgagagtcaaactttcaaaagtgtatctctagataagtttattataaatatagattcaacaatatatctgatgataataatcatacactataaatatcgatactttcttatatattcaacttggactcctcgcttccccaggaattttgatatgaagggagtacgttctgggaacagggattgtttactaaccgtattactacttactattatatgcaaatcctctgctgatagcagattaggctatcttaagcagcttaatcatctcattttaaactccactt

SEQ ID NO: 122077 - DNA, 777 bp, Zea Mays
agatggatccgaagaatcgcaaccctaactgggaccggtgggggccgaaggatgctccgcagggttcccagtcgtggggaaaaaaccggagtctcagctggcggttgaagactagatctggaaagcctgatggcaaggatgacatccctatctctgcttccggcgatggcagccagccaggtatcctcaaaacccctccccctaccattctgaaagttgagaatgaattggtgcgtaggttttttttgccaaaaatgtggtatggatggccatcatgctagggagtgcttcaaatctttgtggtgtgagatctgtcgcaaggaaacacacaacaccgctcggtgcgttctccccaaacagaacaaacctagcatgcctattgttgggatggcggcagatgggctagggttttactcttctcatttctccaagccgttatcaaacaaaccgaagcacaattttattggtctggttaaaatcgttgagggtttgatctcggccgaggatcttgagaaggatttcagtttccatttcccatggggccgtacttggaaagctaccaagtgtcactctggttttctaatgcaatttccctctcaagagaggttggatgagatgattaatttccaagaaatgaaaatgaagttgtcgggtgcaaaaatctctgtatcttcttggagctcccaggctaagcctaagtccaaactgcattcggtatggattgtggctaagaatgtgcctgaagaacttcagaattaccaggctatctgtgaattg

SEQ ID NO: 122078 - DNA, 493 bp, Zea Mays
gaagaagtctccccgccaaactcaggcaccacgaccagctcaatataacgtggccagtgggtaaggaccttcaacttctttctcttcggcgcaggctcatctggagtggccgaagcagcagtcttggtcgaagcagcagttttccttttctttccccgtccccgtagcgggtagcagtagtcggggtaaacaaaaccaatggcatcaaaaactctatttaatttctttttcctcggccaccaaaggatgcagataatgcattatcttctgctttggaatacggcccaagcagttcatcacttgtagcttcgatacattttagccagtcatcattcggttcatcaaatttatcttcgtacctaaaggtgtatttcaatcgaaccagctcaccttcgccagacttggtgacagtttccttcggcatttcccagttctctacaagtggccatactctgaaggctatatgctcctggattaaatctcttgtaccaat

SEQ ID NO: 122079 - DNA, 681 bp, Zea Mays
actagatcggtaaagacgacgttatattgtggttgttttctaactcataatattgctatataacccttgatttcttccactcttgttttcttgccattgtattgtcatccttggacaatatctaccttgatatattgaaccctttgcctctctacttttctccttgataatgctttccccctattgaattcttatacttttgctttcgtgccattgtattgccactcttgcgcaatatctatcttgatatattaaacctatgcctctctattttgtctccttgataaagttttctctctaacccacttcatatccttggttgcatcatttatcctcactttaatagttcatgattatcttatttcactattgaccaccgacaaatatgtcttgtctaactccttgataattcttacctgactccttgactttataatatatttcttattccaaaccttgtctcaccttttgttttggttgaatgagtagaatcgagttatgttgtgctgatatgtttgagttcatattagttatctttgtgactatgattgatttgtttctttgaaataattgttggtgtattgtgtgacttttgtccacaatgacatcagttagctaggtaaaaccttagatagatgggttttctttgctctctaaagtctgtctttgctcaaccctttt

SEQ ID NO: 122080 - DNA, 744 bp, Zea Mays
ctcttctgccgaggatgggatacagggaggctaccacacatattcagctctggctccttggtgccctggtctctcactctgagtttgacgtcgtggatttccttatttgtgagatcgaggacaccgttttggatgggattcgtgctcgtcgacaggtgccatatgctcactacttgtgccacatctttgcgcggctgattcagcctcctcggtttcagggcacacttgaggcctcacgcctcgtttttggatcctaccgtcctgcgcctgaggctcctgtgccagcttttgctcctgttttttactctcaggccgaggacgctgctcttcatcagttcgacactcaggatacagcagctgatgatgatgatgattttggggttccgcctccgcctcatatgcctccacgctcacatgatcatgaggctgggagttctagtgctgcccctgctgctcctccggctatggaccctgctcttgcttcgattctccagtctatcactcagcagcaggctcacctggcagccgagcaggcccggttatccgagaggatgctctcgatgtttcagaacatacaggacaggcaggattcgcttcagcaacagctactccaggatcgggctgagagcagggcattcatggctcttatgctacagcagtctggtgtctcagttcctccggttcagtctgctccacctcctccgcttcacactccagttgtgccatcgattctgtcaggacccc

SEQ ID NO: 122081 - DNA, 284 bp, Zea Mays
cttggaattgtttcagttcaccatttcgagagaaccgaacgccccctaagtacattatgtaatttgccggacaacaattggtttttgcggagaaagtctactttattggtttcttgtaaactgggaatccagtttctacaaggtctaagtataaactaatctgttcaaaagcaccctagtttctatagatcagttttttgaaaactgggtgcttccaaaacagtctctaaacatgtccaaattatctgcgcattcttttggtgtctatacgaaagaatatgcaa

SEQ ID NO: 122082 - DNA, 461 bp, Zea Mays
ctctgtcttatccccactccgcaagaagttttgttatggatcccctggatctattatttgacttcttgcttagattgataggattgctctttagtattaagatgttcgactagatcggtaatggcgatattatattatattatagtggttttctaatccctaatattgctatataacccttgacttcttatacttttgttgtcttgccacccttgcgcaatatctaccttgatatactaaacctttgcctctctatttttctccttgataatgctttctccctaactcacttcatatccttggttatatcatttatcctcactttaatagttcatggttatcttatttcactcttggccaccaacaaatatgtcttgtctaactccttgataattcttacccaactccttgactttataatatctttcttattccaaaccttgtctcaccttttgttttgg

SEQ ID NO: 122083 - DNA, 504 bp, Zea Mays
caatttttatcagagtttgtgtccattctagtttcctcccctctcctttggattttggaagaatccttgatttctttagctagggattgccttaggtggagagcctcgtggatgaggagctgccgcttgtgtctagtcggttcacgcggttccacaacaacgcttgagccgatggcatggcgggtccaaggatggatgctacaactacggcgaccctcatcacttcatcgccagttgacccaaaaaggtcaagcaggaggctgacccgcgagaccatcactctagtcagcacaagagcaagcgggagcacacctctggcaagcataagtccaggagaggttctacaaggaggggctcaagaacaagtacctccaaaaggcgaagatcaaggagcatgccttcctcgcctccctaagcgaccccaaccacgacttcaatgagtcgacctcttcttcgagcgacaaggagcccatccttagaaacaagtgtggtgtcataaaccta

SEQ ID NO: 122084 - DNA, 752 bp, Zea Mays
catccatagaggtatgagaaggggagcccgctcggacaccctcgggggctgggttgcagcccgtactgcccatcggagccggatcacaaccgacaacaccctcaggggctaggttgcagcttgcgctacccacccaagccgaatcattaccggcaacaccctcgggggctgggcaaccgccgacaccacccttgaggactgggttctttgtaacagccacctctaaggctgaaggattctcagtcacctccatgggaactgaacgaccttgaccaatctcttggctctgaagaccgccttccaaggtcgacgatgcacgagacgctgcccgagatacctctaatcccacatctggaatgtcagagcagatgtccatcatatcaccatcagttggctcggacaacagatcttcaggaacaacatcctcaagagcctgatcaaaattcgctagggataattcttgcagaccaataagagcagacagagctggagaaggaatatcgctactccccccactgactctgtaacgtcgactgttcttccgaattaatgggacttcctcttcttcttcgtcctcgtcaacaatacagacaataaacagcacagggtcacacccattggggtcagctccagtaaagagttccactagtacttcttcagcagcaggagcagaagggccagcatcctggtccaaacacgacactcgccgaagccgtctctttttctttttctttccctcggaaggtgcagtt

SEQ ID NO: 122085 - DNA, 396 bp, Zea Mays
cccctctatagaggaggattttcttctctttccctgttgaggtggccgtgaagggggaacgattggagggactcaatatacaactatacacgcaatagtgggaagcatatggggggaacgattggaggccgagaacagttggagggcgtctgatacatcgcgcatgtgctccaaaacttgactcccactagacttagccctcgacacatggacaagctgtcacctttacccaacgatcattgatctgataggcacagccagacctggaacatttaaaggtccgatgcgactagatttagatagattttgggagtgggtttccaacggctctaaggtttttaggggcatataaatatgacttcatccactgtgttgagcattcaagagcagaaaaat

SEQ ID NO: 122086 - DNA, 441 bp, Zea Mays
tgcatctataaattcactgcgtccccacccccttcgttcaaatcaactgagctctgtccttcgtctctaaattgcaaagctgtagcacccgctcccaccctcgattagccaccctagccggagaatcaccaatttcccctaattcggtcagccgcgtcaccaagaacaacccgcccatggccagcctgctctggtaagacactgtccaaatcgagtattgttttcatgactctgcatgcttgtgaagctcactgtggcacccatttactcaattcggccatggtttggcgggaacgcgtgttcatgaactcgatttccgccatgatcatggacggatagttctcagtagggtttatgtcaaataaatggatgttcctagatcgtcctaggtcggttatgccttctcgatagttggccttagcagtcaacgccagccatggc

SEQ ID NO: 122087 - DNA, 418 bp, Zea Mays
cttccatatttttttcaatctcatctaatccacatgaaataggaataaaaggcctagagtggttgttccgctatagatcccgaaggtttcatgtgccgagatccttgaatgtgtctttaagtcactcttaacagcagtcgagagcatgttctttatcggtagggtgcacgttaagaaagcacaagtaatcataactgacaaaatcatcgtagaaaaaagtgcatgagatgggacatgggtcttttcgggtcatcgcttgagaggtgggcttccacagaaaaaagtgcatgggatggtaacgcatcagctgccctgagcctgagagcaagataataatataaggttgagtgttccagatatcttggtgtgtcgcgtggtgtagtgggtgccggaccccactcgtcagcgtacatgtctg

SEQ ID NO: 122088 - DNA, 490 bp, Zea Mays
caatctgcagagcatcattggggaccaattcagcatcaccagcagaaatcaaaactctagcatcaggtgcgccagcctctaaggcgacttcctgacctgaggctcatgctgtagccatgcaaccagagtttggaggagaagacccgacgtggacatccatggaagtatgagaaggggaacccgctcggacaccctcgggggctgggtcatagctcgcgctgcccacccgagccggatcatcaccggcaacaccctcgggggctgggtaaacgccagcgccatcctcagggaccgggttctctgtagcagccacctctaaggctgaagaattttcaatcacttccatgggaacagagtaatctagatcagcctcttgactcttaagaccgcgctctaaggtcgatgaggcacgagatgctgctcgggataactctaacccgacatcaggcatatcagcgcaaacttccatcattccaccatctatcggctc

SEQ ID NO: 122089 - DNA, 559 bp, Zea Mays
gatctctttggccctgcaagtattcacaagttaaaagacgctaaattgagttcatagacggatctctttgacaaactaagcatgtacctgaaatttgaacttggaaatgaaatcgagcaatccatttcccgcaccctttctaagaagggtatcatattcctgcggagttaggtcccttgatcgatgccagaattcatgaagaaattgttccatatatggcgtcacctcttcaaggttggtcaatacatacaacatgatatggcgccactcttcatgtgtcagggtcttagtggttgaaccacttgcgcttctgagttagccttgaaatatgctgaggttcgattcattgtcgccatcgttgtaacgagggggtggataatgcacgttcggcagcttgtcaccatagtatgttgttgtgaagtttgacacctcctctagaatgtatgcctatgcaacgaaagcctcgattttgcatttatttctacatttctttcgaatagtatttagacatctctcgattggatatcaccaacgtccctgcatgggccccccattcgtg

SEQ ID NO: 122090 - DNA, 393 bp, Zea Mays
caactttataccaactactatatattacattatttttttcaattctttttctacacacgctgttgttgtaaggttacggatgcagtgaatataattgctttcgtactaccctagatgtatcgtcccttcgctactacgctaaaatggagtagcccactcactgagtcaaatttgagcttgagatagggagtatgttgtagatagtcttacaaccacctagctcctcctcttacctattggttttggtgggagtcctatcttgttggtcttgatccaactctatgcctatcctttgtgtagagtgaatatcttaactctaagagagatgtcctagatcgaaccgctaaattgagcttctagattggacctctgaaccctctcaaaatgttactc

SEQ ID NO: 122091 - DNA, 381 bp, Zea Mays
aatagcaaagtgccaacatctggttcagcaatgtataactaagatttatagcctttattcatttggtaaggtcttttgcttactaatataatcccaatgtgtgatatcttctatgccaaaaaggctttcatgcattatatatattcggattactccaggtaaaacttttatgcatgaggagagagagcaaagaattaacttatctgtgtttcatttatattttaatttaatttcccagattttcaagcaccatacagcttgatatagttgttatggccacttggcaatataaataattatatgatgccacacaacacaatcaaataaaatatagagctaaacaaaattatttacgaaggttgcgttatgatgtgacttcag

SEQ ID NO: 122092 - DNA, 381 bp, Zea Mays
catcatcactgttttttccaattctggctctctggccgcatcatctttggctggcccgactataggcaccttcggcactacaatagatccttcagcgctccgagcggcgggagcagcttgttttgcttcggcagcgaaggaggtcccttcaccaaattcaggcactacggtcgtttcaatatatcgtggccggtgggtcaaaacctttattttcttgcccttcagcacaacagtggtggccgaagaggcagtttttctctttttccttgccttcgcaaggggtagcagtaatcagggtatatgaagccaattgcatcaaaaaccctgttcaatcttttcttgccccaaccaccgaaggctgaggacaaggcatcatcttcg

SEQ ID NO: 122093 - DNA, 526 bp, Zea Mays
aaataccatcactcctgcatcccgtgatctagagaaatggattttgttcacgtttcccatgagtatgttgagcgcttttacaccccgctggactggcccaaaccacgcttgtgtctggtaagggctttgccggagattattgttggccagttgtgcagtgagcaattggctgccaatagttttgccgggactctgtattgctactgctaggaaggcttaacttgtgattggttgggtgcatatgggtttatccaggctttggtgttcaattcctcttccagtctttctcatttcatttgtctctctcggttcctctcatcgtcgcagcttcctctcccagctgccccaccttggatctagggcatcatggctacctgtgttcaccagagttggtgcccattatgtttaagctagggatgcctaggctgccggtgtttatcttgatgttctacaatggcacaataaattgatctattccctcaagaatctctcatactacttgttaggatctgattgttcataactg

SEQ ID NO: 122094 - DNA, 286 bp, Zea Mays
gccatggtgcacttgagagaggatagactgcattttagtttcctgaagacagaccacatccaccctagaggagtccaccatttcacacacataatcttggcacaccagcgtgttcaacccccttacattccatatcaagatctttgaagtatccattaacaagacagacaacaaaacaaccaaggagggagacaaggcactaatttgtccctaactctggcagggggctccagccaaacaaggctgagagggcctccacatggcactgagaaagggggtgcttgaa

SEQ ID NO: 122095 - DNA, 388 bp, Zea Mays
caaatatctgatgaggcaataagaacaggggcactgttgaaatggatgaacttgcacgatctagtgctggggattgatccggggtggatagcttcgaacgtggcatgatttcgcgaacccggtcgaccgtggccggagatagtcaccggcggccaccgtgactcagccagttttgctgcggtgtcatccatgccccgattctacctcactgtatctcttctttacgtgtaagcttgcgctaacaaggttatccgtggccgtgaagtgatcgccggaccgccgcggctataaatagccttgtggtccacgacgaggtatgaacatcacacacattgagttgaatcgaagccaaattcgcgctgcctatgccccgtcctctcaaattgat

SEQ ID NO: 122096 - DNA, 423 bp, Zea Mays
gactaattcttcatattagtaatctcacatagtctcaagtatgagaataagtttctcatgaagtatgcttctacatttcaatccatcttggtaaagtaatatcacctttatcaaggattgtaactttcaatgttaaagtagcatatttactggattctcctgttttaagcttgtttgataatataatgcctatgttgttcttttgatcgcatctgttgtttgtttgatcattgaataacttcaattaacacttatgtttcttagtgcctcatataatttcaatcgatatctctcttgatgtgcactaagttaaaaggagaattcatgatacatttatgcaatttgtgatctacttgatatataataacaatgacttagaaaaggatcactagttgtagaactctctcttgtgcaaaatatttc

SEQ ID NO: 122097 - DNA, 409 bp, Zea Mays
cgccgcccaatgaaaagaatgcatttgatttcatttctgtggaatctttgctttattcgtacggtgtgtatgtataataacttaattgctccacctatagtataaactatatatctttcgttaaacatatggaccatgcatgcaccattatattctcattattttagaactaataatgaaacactgggctgtagtagacgcctagacggagagaagtttgaatattttcttctgagtcaccatgtcgtctatctgatgtagtctagttaattcaatggttgtatgtgtatatatattatatcatatctaaactagcgtaaggaaacaacagatcgtgaagtcaagcagtgatcgagcaatgaggtatcgtatctagagaatgagatcatgacactaatgaaagcttcag

SEQ ID NO: 122098 - DNA, 326 bp, Zea Mays
ctttggaccaaattcccatgagagtactttagctcctcatgttctttggtcatcttctctaggctgttgttggttttgatgagtgtttcctctagcctgagaagcgtctcgccttgttccttgtttcttctcaacaacttaaccaagagagctttgtctgctttgttgagatggttgtagaaacggcgaatttcctcttcttccatatcaacggtctcattttccctgtcattaatgtcagtggaagccaaacgggaaaatgtaccttgaggtgatgaagattcatcctcgctatcatcctcatattcctcctcatcatggctttt

SEQ ID NO: 122099 - DNA, 388 bp, Zea Mays
ttttgtacactggttggcgattattttgttggttaacggttggagttggcgcgcatgtggcgctctttgcattttgtgaaactaactctggtggaatcgaggtttatttcctatttgatacaattaactctgatggagtcgatgactctttgttgcttgaaatggttaattttgatgtctggagcttctgttattttttatgtgggctctctttgcaaatttcttgttgggcccatttgaagccttattcccctcacgtcatgctgatcatgtggccctttgaattctcctgtttatggacttatactggaggaaggatctattggtgtatgctatgcatactggaattccttaattttaagactgatagtttaccatgacttccggc

SEQ ID NO: 122100 - DNA, 293 bp, Zea Mays
actagttttgtggaaaagcatggcattccctctactcctctagagattcccttggtcacccgaaccccagggtcagaccttctatgccagctcaaatgctcccaagtcagaatccttttaagtggggtagtattcttggcagacttaaccgtcttgccatccaaaggaattgatgtgatcttagggatggattggttaactaaacacaaaggcatcatcagttgcgcagacaagacagtcctcctctccgaccagcaaggaaagtcagtctcttgtcaggcacagccacccgc

SEQ ID NO: 122101 - DNA, 475 bp, Zea Mays
attaaaaactattttctaaataatcttcctggttttatcaattatctggactgggcctcaaatacagagaagtacaggggctagcgggtaaattatcctagactcagtcgacggtgtcactagaccgcgggttcatttctgtaaagctcagggttccttttgcaaagctgtcggccgaaggggtaagatctaattggaaccgtccggtcgacaatgagtggcgcagattagatctaacttaaaccgaaacggtacgcaacaggatccacacgatccaagatcaacggaccacagcgccccaaccctagatcgaatctgcgcccttagatcctaaatccacgattcacgtttaaccgaaccctagtttcttatatgggtcatctatttcccatccaacgaccggtaacgttttccccaactccgctcaacccgcagcggcgcacgaggacaccagcagcggcgccatcgccggtga

SEQ ID NO: 122102 - DNA, 366 bp, Zea Mays
caaagaaagttgttgaaactacaaaaacgcaggccgaagccaaaactgggcaagcagaaaccgaagctgcgaaaactcaaactgaagccgaagctgggccttcagtgcccacgaagatggagcctgctgagcctaaggaaaaaacgacagagcggattgcatctgaaaagatcgaagctcctgctcccgaagcttcgaacaaaagcactgactacatcattcgtcatgcttcgggaaaagaactatcccaagaagaaatgctagaagcacgacactacgtccaaaaattgaaatatccgaagggggcgttagtgttcaatggtagtgacgaagaagattttctgtactgtctcccagataacaaag

SEQ ID NO: 122103 - DNA, 338 bp, Zea Mays
gtgcgagcacgtgaatcataagaaaaggtgcccatctccatgggcatagtatccctatttataggagcagggtgatgcacaactttgtatgaaattatatttgtgcccttaaactttatgcgcttgatctactgaatgcaatgggggtattgttgtactttccttcacaaataatgttgtgcaagtctcctcaatcttccttcgcccaaggtggcatttgacccttctggaacactttgtccgagctctagtgatgaagttgttacttccttcttagtgacaaagctgctacttcccttttaggccaccaagatctcatagacaaagctgacataatt

SEQ ID NO: 122104 - DNA, 898 bp, Zea Mays
acatcccactcaaggacagcatcaaaggatggcgcttggagtggtttattgtagagaatcatggcaagtccctccccctcggtcagggagacagtcagatgtttgtgctccaagttggactgaatcccccacagacttggagataacataggccagggttctgcttgccgaaattggtttgttgaaggagagaggtctgactgctgaagctgtagttgcagactttgtttttaagaacattcagtcactgaaggacagagcgtacccggcttatttgtatagtggtgtcactgactcaacccgagttaccaacaagaggattcctgttgtggatttggtaagccggctggagatgatcctcagaggcaaagtgtcgaatattggtgctcctgttgcatattctgcctggaatctgccaccttccaagacttttttcaattttgtgtccaatcctcctgctagtgacaatggcttgggtcttagagtgcgaccctctcccgaagaagttgaggctctggttgcttcacttggtgatctccccaatgatgagagacaagttcactttgagatgcctataaacccaagcgatgcagagataagtgctatgctggacatgttggctgaggattcttctgactctgtccctactgaaaccatagctattgcgattatcccagagcccgaaaaaaccttgaatgctcaaaaatctgatggtgctcacccaaagcgccttcgcccggccagtcactcaactgctcctgtcgaggggaagaagaagaaaaagaggaggcttcggcgagtgtcatgtttgaatcaggatgtcggcccttctgttcctgctgctgaagaagtaccagtggaactttttactggagctgatcccaatgggtgtgaccct

SEQ ID NO: 122105 - DNA, 353 bp, Zea Mays
atactgagatagatggttgaatttattgagatactacattatagtatctcccccttgctttaaccggatgaactcttcttgtttcatatggagcactccctctggaacataatgctcctggaacgctagcttgaattcctccgaggtgatctgatgtccagtcggttgaattgctacaaaatttgcccaccaagtactggcaggccctctcaactgttgtgcagcaaacagtggcttctgcatctctgtgcaacgaatcaaccaaaatttctgttccataactcttactcactcatcagcttctagaggttcttctgctttaataaagagcgagggtcgagtctcagaaaatt

SEQ ID NO: 122106 - DNA, 1105 bp, Zea Mays
gggtgaatttcgagatcaattcagttttatatctcattctttagttgagctcgttcaaaccggttgcaccggtttttgacaccggacggttttacatagtttgtttctagtttttgttgaaaattttttaacttgtctattcaccccctctaggcaactttcaaatggtcagaagtccagataaaaagggcacccttctttagcagagcatggaggggttggcaaataataccgaagtggtgaacgaatttcctataatacccggccagacctagaaaactgtggagatcctttacacaggaaggagttggccaatcctcaatagcacaaattttagtgggatctgtggcgacaccggcagcgctgacaatgtgacccaagtatgaaacctgacgttgagcaaaatggcatttagacattttcaccttccattggtcttggtccaagagagtgaagacttgttccaaatggcaaaggtgatcctcctatgaagaactatagaccaatatgtcatcgaagaaaaccaggacacacttccacaataatggagaaagggtgtgattcatggcacgttgaaatgccccgggagcacccgtgaggccaaaggctatgacgctgaactcataatgccccaaatgagtctagaatgcggttttatgttcttcaccatccttgagtaatatctgatgaaaatcgactcttaagtccaaaatagaaaaccatgaagcgccaaataattcatccaaaagctcatcaattaccggcacaagatattttcccttgactgtcaaagcattcaagtggcggtaatcgacgcaaaaaggccatgaatggtctttctttctgaccaagattactggtgacgaaaaagcactagagctgggatgaattaacccgatgtgtaacatttctgccacttgtgcttcgatctcatccttcatggctggtgaaaatctaaaaggtcgaacattaaccggtcgagccccatcaataagaggaatggcatggtcacaaaatcgactcggtggcagtgtagatggggtatcaaacagggacttgaacttcatgagtaactgttgaattggggctggaacatatgtttcgg

SEQ ID NO: 122107 - DNA, 328 bp, Zea Mays
cttttcgggcaacactttggcaagtgtctgggaagcggtgcccgatgaaggtgacttggaagggagggtggtttgggtaacttcggctttctcccagttagactgccatagagcacttctcaactccgttttcgcggtattctttccagacatattctggcttcttgcggatccccatgtgtagcgcgcaactccgtaagaggtgagggaatccttcctcctctgagcagtaggatgtcctaatgacccaagagccttccatctggtaggagaaaagaagggtctgttaatatcggggaaaggagagaaggtttttcttaggggtaag

SEQ ID NO: 122108 - DNA, 651 bp, Zea Mays
ggaagaggtaatggaagccctgggcttcccctactaatggaagccccagtcaggacgcggtcgacccagcacctgcgtgcttgcgtcagtcatgcagtcaacagccaagaatccaggacgataagtgtaagacaatatacaaatgcatatatatatatggataaagatgcgtaaaccatgcataaaagaatcttttgacgcccgaatcacgtggaacgaatatgacactgtggacaacgtttacgaccgcataatgacatgtacttgacagcataaatcatgcagtatgtggttctggttctggctcgggtggattccagcgtaaactgtgagctaaaacagcgtaaatgagtacgaaatttagcgtaaatcctatatctgttttgtaacagcaaacagggcctaaaattacggcgtgaaaatcgcgtgcagccgatcgtgcgcgggtcctggctcgggccgattccagcgtaaaccgtgagataaaacaacgtaaatgagtacgaaatttagcgtaaatccaatatctgttttgtaacagcaaacagagcctaaaattacagcgtgaaaatcgcgtgcagccgatcgtgcacgagttctggctcgggcggattccagcgtaaaacgtgagctaaaacaacgtaaatgaat

SEQ ID NO: 122109 - DNA, 520 bp, Zea Mays
gcctccttcccatgttttcttcttctacgatctgacactagtggtgaggctgtccggctgtcacacgacaaccgtgacgaggggcaggtgtcacacaacaagataaagtctcgggaaggcatgcacagagcatgtatggggtgcggggttgtagacccggcccacagggtgggatatggtttacctccttgtgtcacaggactggtcttttgactgttctccagctggccttgtccagaggtggaccactatgtagttatccacgaactcgtttgtgctggtggcctgctacttcattatctcacttttcacatctctcgtcttgggatccggacttaaactactttgtcgtgtacatagtagacacaatgttgctgctgctagtgcatggtacaactgggatctcctgtgtctccattttggtttaagataacttccctcttagcatggtgtaatgaagtgtcagattagcccaatggctcccatttgtgtagaaagaggtgctttgttttttctcaac

SEQ ID NO: 122110 - DNA, 671 bp, Zea Mays
tcgagggggcaaggctgcgaaagggaagcaagtctcatcaaagacaacatgacgagatgttaagacccgatttgtggatagatctagacagcgataacctttatgctcagtagaataccctagaaaaacacacctagtagaacggggagcaagcttatgcggcgcggtggcagagaggttcggatagcaagcacatccaaagactcgaagctgcgcatatgtgggaggtgtgttgtatagggcagcaaagggacaagaggcgtggacagttttagtgggaaggcaattgagaagataagtggttgtatgaagagcatctacccaatagcgaggaggcatggacgcctagagcagcaaggtgcggatcatattgttggtggtgcggagcatgcgttcggctttaccgttctgcgacgatgtataggggcaagacatacgaagtttcacaccattggtgagaaataaggtccgggtagaggagttgtcaaactcccgaccattatcacattggacttacttgatcgtgcgcccaaactgagtatgggcataagagaaaaaatgagagatggttgaaaaggtgtcagatttgaggcacagaggaaaagtccaagaataatgtgaaaaatcaccaaggataaccaaatagtatttaaacccggagacactgatga

SEQ ID NO: 122111 - DNA, 607 bp, Zea Mays
cacaagcctcgccataaaggtaatgcctccacgactttagagcaaaaaccaccgccgccaattcaagatcatgagttggataattcccctcatgcttcctcaactgccttgagccataagcaatcactctgccttcctgcatcaacacacagccaagaccaatacgcaaagcatccgtataaactgtgaaacgcttaccgctcttaggcaaagctaggataggggcgtccaccaacttgctcttcaatgtctgataactgacctcacaatcgccggaccagacgaagggaacacccttctcgaagagcctagtcaaaggcttagcaatgctagaaaaatttggtacgaagcactgataataactagcgagccccaagaaacttcggatttcagagacactagagggtctcttccactccaccacagccgcaacattcttgggatcaaccgcaataccctgctgattaatcacgtgccccaggaaagccacttcggatagccaaaaggcacacttcttcaacttgccatagaattgattcttccttagggcacccagaacgagacggagatgctgctcatgctcggcctcggtctttgaataaatcag

SEQ ID NO: 122112 - DNA, 369 bp, Zea Mays
caatcaaggacttattttcatctttaagcttgtcacattttgccttagattttctaatgacttgagtatattccttaagcaattcggctagctcatcataggtaggggaagcatactcgtaatcactatcactaccacaatcaacatcactaggatcatcattttgtaccttccgttcacctttagccataaggtataggtgtgtaggggatgatggtgatggtggtggtgatgagaaatcaacggcgatggcggcgaacttttcatcatattcttcgcttgaggaagagtcgcttgtagatttaatatcagtgagccaatcaccaacaatgtacactttcccacctcttcccttgtggaacctctttt

SEQ ID NO: 122113 - DNA, 500 bp, Zea Mays
ggattcgtgattatataggagttataatggttgatgtgatgagtagtttagcaaatgctagtttgcgtggaggatgtatcgttaagacatgagtgtcggagttcatttatattagtggtcgcgccacattgcttgaagtgtctcgagtgcataccgcaatatggttgtattcgtgccaaggatgtataggttttactcaattagaagtctggttgatatggttaggaaattgtttcggcttgggtagtgaggtggtaacatgccaaagtagtcatcgcttcctctacggttaaatgggaatcatgtgtgatgatgttacttatggggtgaatacgtattgaaatcttttatgttgtgcaatatgactagaaatgtgaaggatagatagggtgtttcagaaatgttagcaaataggtcggacaagcatgatagaggttgagtcacttatgttataaaattgatgctcgacatgttaggtaccctaaaaggtgatgttttag

SEQ ID NO: 122114 - DNA, 631 bp, Zea Mays
cttacggttaagcagcacacccatcagaaacaagtctaccacctcttagggttaagccgcatacctgcacggagattgaagagcctccaaacaagtgtcaaaacacttccttggagggctcgggggatactgtcgggtatcgtaattaggggtacctagattacgcttcctaaacacgcttaaccccaagaccaccatggggcccgttcctcgaggacaagggagtgcaaatcgcgcttcgccagaggtcccctctcaggggtcaccgtagctccgcctcacccgagcttgccctcaaacaaggtatgctctagggagaatcctcatcccgatcgacgtcccctctcctcggaaacactgtctctgcctcgcctgagcccatctcgggtaaggaagacaaccccaaagcaggacttaaccaaagtccgtaggggacaggagcattcaatgcacatacctaccccacatagaattgcaggtgaataggtgcaacaagaccacagtcctgttaagattcaccaactacgatgcacatgcgaccactgttcccgcacgccgcctgccaattcccgatgggacatacaatacgacaagagtgcaggatggagcttgggcgcaaactctaccttac

SEQ ID NO: 122115 - DNA, 777 bp, Zea Mays
catgaaatacatcgatagcgcatggccaccacgtaaggaaggagcacagtgaggtagggtggtagcgtgattgacacgtcgataaaagtaccgcgccacggtgagcaccggcgaaatatccccggccgggccttagcctaatccgggagaccgtgaattggctcaaagttatcttgccgtggtcgttcctatctccaattcatttgaacccatccaaatccacagtaccactgatattttcttcagatatttcctgaaccactgatcttcatcgttccactgaaccgacctcctttctccccctctttctcttgattcttgttaagaacaagttaagctctagtaataagaagtatccgccagacaatggtattcaactttactatacgattcatggatcaaaaccgcataggttctcatatttggtgctctcaattcggctgcatctccctaagaccatactgctctgaatctagttttcagcatcgcccacattgcttgacttgtttctgacagagcaacttcataccgctagttctttgatttttgtacaacaacctagtatgacgactgtaccaaagttcctcccctacaaaccagctttagccttgttacaaaggtttcagtcaaacacccatcaaattgagctccacatggtcccaaaatcggccctatgcaactgatattctgaatattacagggccttagtctgatagctcaagtttgaggggtttgttaaactcctctaggttttagggttgagtctttcaatcaatc

SEQ ID NO: 122116 - DNA, 621 bp, Zea Mays
cttatgcattacgatcgtgaagaaaatttaaccttcgatggattcgcaactctccaaatctccttggtgtcaatcatggaggtctagagaaatgggtttacaacaggctagcataaataccacgttcaaccaagatgacatgcaagtacaagatcattggttgttaccactagacatgcaacatagtggaagaagagcacggcgacatagtggaagtaattgtacatcattgcataccagcaacaacaacatgtaagtgtgctcctcatgtttgttgttgatcaacatcttagcaatagttgcaatatctccatggaatccatatcattcgaatgaaacgttgtgacgccacatgcgcagtgagagtaaaggcagtgatatcttgggcacctgtaactacagggagagaggtaatggctagaatgtttctctcttcaatcacgtcaactcctttatatatagaccccctagtaaagtgcttttaccctaaaagcctagcgatgttctcatatatcatacttacttattgggtatatcaataatctgtcacttgtagttgttaatcgtttgttcaactgttccaaccccttaaatgtgtacgtgtttggttcatgtgtagat

SEQ ID NO: 122117 - DNA, 559 bp, Zea Mays
ctcgccgggtattattgacgcttcgtaccaaatttttccaccattgctaagcctttgactagactcatagagaagggtgttcttttcgtctggtccagcgattgcgaggtcagctatcagacattgaataacaagttggtgaacgcccctatcctagctttgcctgagagtggtaaacgtttcacagtcttcatggatgcttctcatattggtcttggctgtgtgttgatgcaagaagacagagtgatcgcttatgtctcaaggcagttgaggaagcatgaggggaattatccaactcatgatcttgaattggtcgcagtggtctttgctctaaaatcgtggaggcattatctttatggcgagtcttgtgacatttacaccgatcataaaattctcaagtatattttcactcagaaggagctgaatttgaggcagcgatggtggctcgaattgattaaagattatgatttgtccattcattatcacccggggaaggcaaatgtggtggccgatgcccttagcaggtccggggttccaaaagtggccttgcctttgatcg

SEQ ID NO: 122118 - DNA, 978 bp, Zea Mays
cacaagcccagatcccccagcatccacctaatgattatcttgttgatcctcatcagaagaatcgtcagttttctcatctgtcaggtccttcctgtcaaccttccgcggcccaacaggtcccacagacgattttttttgcttcagcctctgctcagacagttcctcctcagacaggttgcaaagcctggttcccagattcctcagcaccttggaggacagcgggggtggcccatcgaagttatgctggcacatgaggcagttcctttttggacatgccccatgcctgaacccgtcacttgattccttcaatcttttgcttcttctgagccctgtctctgcaatgattggggtcagcctaccagaaccagtggaatccttggaggccccagaggtgacatcccccagggagggttcaactgggcaatccttaggaaccacaaaaggaatggaattcactccttgctccagcaactttaaagggatacctgacagaagaaaagtctttgaccagttgaaagattccggctgaagaagattcgaaaggaaaaaaggtgcccacttctcagggacacccaccgagtgatcagtcggtccagccggagcaaagaatttggcccagagcctagagaactggacagctctattcctctcctcaatcatctgaaaggctgggtcaggctgccagtcctgatgcagcatgagattcatctccagattctgatggtgaatgttgttaggcccatcaaccgggacctgagggagctcaacctccaaatcctgggcctgatccacctgaggtggtggtccatcaacctcctgtggcccattgaagggggcagcattgatttccattccgttcccaatcagagcatgaccattcactgcaggatgaccattcgcggggggtgcaagctgaccagcaccaatggagctatcagacgacaagccagaatgctgattgctgtgttgcagctcttc

SEQ ID NO: 122119 - DNA, 386 bp, Zea Mays
tgacatagtacatggtaaaaggaaagcaagagtagtggaagaggcacaaaagttgcaactggcaggttcgcatcgtggttctgatgatgatgatgttgttgttacaggccgcaatgcatgcatcgagagaggaggagcttaggaggcatgcttgcgcgagcggtggcacgtatgagacaattggtggctcgtcccaaggtggtgtccgtgccacgtttgggagaacaccttctaggaaggagaagccacatatggtgcaaacaaggattgatataggtctgttctctaaggcaggaaaaaatgtggtccattttgttggtcataagtgggctaagtggttccatgtagaggtgattctaggcataaatctaacactccatacttca

SEQ ID NO: 122120 - DNA, 368 bp, Zea Mays
caaaaatgtgaatctccctacctccattccacttggtataatgggtttgatccaaagtatttattctggagcaattgttgccatatcccattcgagttcagaagattgaagagccatttaccaagtagaggagtgtttttaatactcgaatcgtggatacctaaaccttcttggtttttagattgactgagtacctttcacttcgctagtcggtattttttctcgagatcgtctacttgccgaaagaagcgggatcagaagtaatctaatttttcataatgctttcggcttcgggaacgtcgaagaaagacatcatatgtattggcagacaagcgagcaccgagttgataggtgtcaatctacccaca

SEQ ID NO: 122121 - DNA, 697 bp, Zea Mays
tattgggtaccatggttatgagggtttactttctaggttagttatttgtcgtcgcgtgatagacagaataccaaaatagtaccccctcccattttaggctcaacatgggccttagcgaatcaacctaacccctaccataaccatttgggcccagtccggctaaccgaagagtaagcacaacaaacaccgtgagaatcgtgagggagacaataacttagacaggttcggatcgctggagcgtaataccctacatcctctttgagtggattgggttgcttagaaacaactaagtgtcgagcacaaaggtggccaacaaagtttgagtttgcaatgtgtgagcatgggaaagagtcctcgcgcaggaggtcatcctctcccttttatagaccaagggagaggggattacaactaacaaatggggccaggttggcacctgtcccaccatacattaatgaaagtcttgttgacgtcaatcgaggtcttatagacacatgctctacatgtcgcagatgatcggggtgtgtttagggtgtgcgcatgtcgcagatgctcgggggaggtagtacaccatggcatacattgtgggagactgggaatatggaaagttgaggcgcacatcgtctacgctgttataggggatgtggcagggcgtggcgcatgtcgtccatgtcgccatagtgtcatatcagggccatgc

SEQ ID NO: 122122 - DNA, 414 bp, Zea Mays
cgcaacttgagatccccgaccacggcggtggagcagtggctccggcgagccaagaccgcccggaaaacgcaacgactatgcctctccattgctcaacacctaattctaccctgggagacactaatcctcactcaattgtcgagttctagcccacaatctctctgtccacggtgatggtgtgaactacggatgaaccgaggcgttcctggcgatctaaggtggtttagttcaattggctaggtcgatgagcatcctgagcacaccagggtgtactaacgagagtgaggagaacatgaattggaggtgagggctggttcactgggtgcacaattacttagtgaagcaggctggggcaccaatttatagtgtccaagggcggtggcttccaattttggaatgtcacgctggcggctg

SEQ ID NO: 122123 - DNA, 382 bp, Zea Mays
ctcgtggcacccctttcgttgcctcaacgatatgcttgtggcctgctcccggtgcctgtctcgtgcagcggtatctcgtatccggagtcccgagccgccggtgggcttggtcctctagctatccgtttcgggcatggtttcttagttcgtgtgatcaagtcgcctcgtaaacgcatcgatcgccgagctgacatgtataatgatcgatgcatcgtatgcgttcgagctaggcaggcatgccctggcctatctatatggtatccatggtccatgcttccgtagttccgtcgtgatgcaaaccaccaccagtgatggagattgccggcctgctggggactagacagtgtcttcgttttgtgcgcttgtgttgttgtacttgaac

SEQ ID NO: 122124 - DNA, 441 bp, Zea Mays
atctttatgtggtgggttacgggggattctctagtatgaaggatgctagagaatagagtagacggttgatgaatgacctgcctttgatggggtgccccctgggccttatatatccgaccgtggggcatttacatatgtgtacgataacgttgcatgcctaagtaatagtgaactgaccgaacttatcttcctgtgatcttgccgacttatcctcacttagttccggtgtctagggtggtcgcgcgggagaatcagatcagagctgcagataacgctcaaaacctcgcaaaccgccttggcccgcgcttgttcatttcttgcgtcggcccattccgccagcagttctcccctggcccacgaagggatggccttgcaaggtagtaagcccaaaaccgtttgtgaggccttctaaccttctagtggacccgggggatatctgtc

SEQ ID NO: 122125 - DNA, 537 bp, Zea Mays
ttaggtgtcattagatacttaatcactttgaatgtggttgttcacatgtcctaatatatggagggcacaacatataagggaaatcatctcctttattatacttttacaaattgggtattacagaggtataatttcgcccaaaacccacccgtgcgccaaaggttacactctgcaagcgacgaactcttccaccaaatcatggctactgctcagacgggctgcgtagtgaagggcctgctcgtcctgatcccctttcatcaccttaaactatggaaacgccatataacaatgagagcacaagatagcaggggggaaattaggcaacccttcgacgtcgctaggcgccacataaaaccaaaactcccaccagttaccccatttattcttcgcacacggaacaatcttgatcacttcagccaaagtctttccagtcctcggtgtgaaggtgcaggacccgaattgagcaatcaagccacctatcttccttttctaccagtgcagacaacaattttttgcgaagacctcaatagacggttc

SEQ ID NO: 122126 - DNA, 339 bp, Zea Mays
gccaaattgacgatcattattgagttccagtggcatcccgagattttttgctgacagcatggaaatactttaggctcggtttgctcgctggctgcctggttctagtatttggtaattgcaggtagaatccgtggcgaaagcatgccacattgccacttgcaaacatagatgcccccctgtaggttgtgcggtgcagcaggagaaaagaaatcagtgggtggctgggtatcattacgtttagaaatgaacatgtaggatcaggacttgaagttcatatattaccataataatcaggtcgtctcccatttagatgcaccgtggaagaagcttttgttgaag

SEQ ID NO: 122127 - DNA, 311 bp, Zea Mays
atcgatgatatcttggtgtactctaagaacgaagaagaacatgtcgggcatttgcatgtagtacttcaacgtctgcgagagcaccacctttatgccaagttgtcaaagtgtgatttttggctaaaggaaatcaaattcttgggtcacactatctctcaggcaggaatagctgttgatcctgataaggtgcaagaggtgatgaactggaagccaccaacgactgtccgtcagattcggagttttctgggattagctggttattatcgaatatttattctggatttctctcgaattgcgaagcctataactaa

SEQ ID NO: 122128 - DNA, 397 bp, Zea Mays
tgagaactcaacccagtcgagctctgcatgaaaatacactgtttttcatggtttatgggtcagaggcagtgttgcctgccgatctaatctttggggtgctgagggtaactttcgaaagcatagccgaagcagaagcaaccaggatggaagacattgatgtgctggaggaagaacaattgaacacaataattcagtcggctaggtaccagcagaccttgaggcgctaccgcgataaagacgttcagattcttggctcacagctgacttcgattgggcttgacttgaaatcggcacgtttacttgacttagggtgaccactataccctgctaacggagcaatcggcttaagtcggcgacgacttaagtcattgcgacatgctcatgcttacttgactta

SEQ ID NO: 122129 - DNA, 844 bp, Zea Mays
ggagaaggcgtcgcccaggcgcctacctcgccaaggcggacgacatgctcatagttacctgggtggcacggacgcctagcaaaaactgccgcctggacgcctaggcgtcgcctttttaaaccatgaccattagaattttctatcaatctgtattctatttttttaagatatgcatctatttatcatgatcgaaacacttagcaaatattggcaagtctactgcaattttggtagctgtccacatcctgttgtagttttctttttgcatataaatgttcaatctcactaaagaaaaatgtttagtgagaagaaatcaaaattcttttgaaatctaacggttagaagagcaacataaggatccacacaaaagagttgcatagattagtaacatcatactgacatgcatcatttttctcgaaagcgcaggagaactgcatatcattacattaagaagagaaaaagtccttagatggccaaaacagtacaaaaaatgaccttatggcggccaagaacaagcatacacataactgtccatgaggaaaccacactactacaagccagcagaaaacaagcactcccagtactaaggccagagcctcctaatgtctgttgccccagtgacattccccacatgaacattttgatggatatgttgcaggacaatggctgtttggataggcaccatcgaacacatgcattcctatgtttccacaaccaccaggccacaaggatcactattgagttgaacccttttttctggagctttggcaccctgctttcagcctccctccattcctggaaaacaagaacagcagccccagacgaaagggactgcagccccacc

SEQ ID NO: 122130 - DNA, 501 bp, Zea Mays
gtagaatttgatagtctttctacgggtaaccctttcctgttgatctacaatctttatagggtgctcggagtaagtcaaatccggttctagatcaacatcagaaatttctaccactttgtcaggcacttgaaggcatttcttaagttgggatacatgaaatacattatgtatagccgaaagatgttcaggtaatttcactttataagccacaactccacaccgtgctagtatttcaaaagggacaacataacgtggtgccaattttcccttaatgccaaaacgatttactcctttcataggtgaaaccttcagatacacaaaatcgcccacttggaaaataagggtcgtcttcgctggtccgcataatgtttgtgacggtgttgtgcaacctttaaacggtgttgaataagtttcactttttcttccgcctcttttactaaatctggcccaaagaaaaaccgttcaccgggccctgaccagttgattggagttctacaccgc

SEQ ID NO: 122131 - DNA, 782 bp, Zea Mays
aatgtggacaccaattttggtagaggaaatttagatttctttgattgtcgtgaatcccttgatgactgtggcggagacggtggattagaaagaggatgaggagcaacatgggaacattgtggaggtgatgatggatgtaaaggtactaaagtttgaggaggcagagatggttggggatgagatgacgacggcgttggtggatcaaccaatttgacatcccttcgaggccaaaggatgaaatttttgatggcttgtccaagtgtctcgattccttcgggcccagggatgtctagcatgtcgtcctcagatccttggacgaccatcgtcacttctaccctgcaataatcatctggtatgtcgcttacatgaaacttacgtcctgggatcgcaatgcctgttcctattttcttcgtgtgattattgttaataccatatcttataaccagtgtgtacgtcactggccttgttatgtcatcaactggataacggaccttatttcccgttgacgcgacagagcttgggacggttgtacaatcggttcaagccggcggttgagctgctggaattatttgcagctgtggagtggtcatctattgaacagacatcgcacttaccaactgctgcatcaattctggtggaggatttgatagtatttgagacatcagtgtatatgatatttccactggcggtgtactttatacagccgccagtgtatatacatcttttacactgacggtgtactttatacagtcgccagtgtatatacatcctttacactgacg

SEQ ID NO: 122132 - DNA, 485 bp, Zea Mays
ctaagtgcttatttcgggaacaaggcaatttgtgaaatatattgtataaaaaacactggtagtacatgtgcttttggttcacttagcttccccgaaggcaggggcatgtgttgagcaccaaatttggctcttgagtatgaccgggtggtttggccatgtgatcggatggtccacgggtgtatcccggatggtccatgattagattaattcaggcgatagtcctatcccactaatgcttatctaactaatcacatagtattttgttgagaagcgcctaggaatgggtccatacctcgacccttatatatgaggggtatggccgattgagaacacacacatccaatcgaatcaatccaattaccttattttaatttaccttatgcattagatctagatgtagtgtagcactagttgtagctccccaactcctatcttcaccactctttggctctatgtcgtatagaggcactttgggtagcctaccg

SEQ ID NO: 122133 - DNA, 350 bp, Zea Mays
gccggttaaggaaatagattcactctattcgaataaatatttaggctttattcgtttgtttagaatttatactcgaaatcgtttcaacaaatcaaagtttatatgaactagagaagcgatccgactaggaatatatctagcatatcattccgtacaaaccgaacaggaccttacaaggatacaagtgagttgggttatctacgacgaacctgtaaacaaactaattggccacacaaaatagtctattgacgggcacctagacaaaccgctttgcatccatgaatatttatccaggaacagtctaccatgctagacaagggagacgaattattgttaggcttagaatttct

SEQ ID NO: 122134 - DNA, 466 bp, Zea Mays
caagattgcaaagcgacaaagggaaaggaaacgaacaagagcgggatagggaaaacaacactctcggattgaaatggaataagtgaggctaagaaaaaataggtaaacatcatggtaatatggagagaggtcaagggtcaaaggtgataataggcaaggatataaaggaagaggtaaatgtgcataaaaaaccaggaatctaggtacaatcaagaatagagataagataagtcttacaagaggtaaagtataggatataaccacgggtgagataagtaagagaccacgcttgaactaaggtgggagattggaggttttagataacgaacatagcgtaatcaccaaggtaagattgagagatgagaagggtacatgcaataagaaataaaagcatatcaaaggatgaggttacaaacttgtgggccaaagaagaggatacgaccaagagagagaagatatgagacgg

SEQ ID NO: 122135 - DNA, 308 bp, Zea Mays
ggaatacaacctggcgagtcttcgtcctgctacaatcgtacccgttgtaagtaaacccgaagacatccaagatcttcgatcttacgtagaggaacaacgggaatagatgcaccaaatcttaagggtgtacaagaggattataggaggttagcacctgcttttgatagatctgttattaccaattttccatcacatgatgcccaaactaaagaagacctacatgacccatcggttgccaatgggcatgcccaatcctagcccctttatgggataccgatgaactcctataacggccaactacatcctcc

SEQ ID NO: 122136 - DNA, 346 bp, Zea Mays
aaaagatatccctgtgcatgggcactgtactcctacttatagggacaacatcacgtacaactgcgtatgaaattacatttatggccttgagccctatacatgtaaactacaaagcttgataagggtatcaccttcttttttccatcggggtttgtgttgcgtacgcttccagagtcttcctttgtctgcctagttaaatacttcgtgccttgttcaaattacgacgctgaagctcttagctgcatcttatatttatggatgtcaccgagacaaagattatcttatcattctaaaatacactcagagataattattattgtattgctttgagaaccttcagcaattg

SEQ ID NO: 122137 - DNA, 479 bp, Zea Mays
gattagccaccgtagcgccccaatttcgttcttcccccaaattggttctccgctccgccgttagcatcgcgccgtggccagccgcccacatgttgattcatgcttctctgcttggtgttctagcatcccttaagtctcctgttgctcgtagactcgattgattgaactagaccgcgctgaatcacctagaacacctcagttttccttcgggtctcgccgtcgtcgtaggcagaagaattcagggccggattcgtgcaattggtggagggattagggtcgccacgggtggaattaggtgtcaaccaagttagaaccctagtcgttgcgtattccagccggtataggttcgccggagcacacacgccgccgttcatcgtcggggacctaggtctgtgaagaaacagaagtacaggggcttaagtgtgaacgtcagtgagacagatgaatatttcgtatggattcttaaccagttattcgaa
